United States Patent Application Publication US 2013/0332133 A1 - sequence listing, part 10

SEQ ID NO: 124387 - protein, 297 aa, Unknown
  Bacterial polypetide isolated from the Sargasso Sea
AENQFLYNAFVAPLNKGDEVIIPAPFGVSYPDMVLLAGGKPKFIKCGEEDGFKLTPSKLKKAITKKTKWIILNSPSNPTGAAYSKKEIINLGKVLLKNKNILILSDDIYEHVKFDNFKFFTIAQIKKLKDRTLTMNGVSKAYAMTGWRIGYAAGPKNIIAAIRKIQSQSTSNPSSISQAAAVEALNGTQSFIKKRAKSFSDRRNFVVNYLNSIPGITCLMPKGAFYVFPSCKGLIGKKTKIKNDTDFVQKLLEKQNVAVVQGSAFGLDGYFRISYATSMKKLKIAMERIKLFCESLG

SEQ ID NO: 124388 - protein, 267 aa, Unknown
  Bacterial polypetide isolated from the Sargasso Sea
MAFVATLNKGDEVIIPAPFWVSYPDMVLLAGGKPKFIKCGEEDGFKLTPTKLKKAITKKTKWIILNSPSNPTGAAYTKKEIINLGKILLKNKNILILSDDIYEHVKFDNFKFFTIAQLKKLKDRTLTMNGVSKAYAMTGWRIGYAAGPKNIIAAIRKIQSQSTSNPSSISQAAAVEALNGTQSFIKKRAKSFSDRRNFVVNYLNGIPGITCLMPKGAFYVFPSCKGLIGKKTKIKNDTDFVQKLLEKQNVAVVQGSAFGLDGYFRIS

SEQ ID NO: 124389 - protein, 257 aa, Unknown
  Bacterial polypetide isolated from the Sargasso Sea
KYTAVDGTPALKKAILKKFKRENKLNYKLDEITVGTGGKQVLYNTFMATLNKGDEVIIPAPFWVSYPDMVLLAGGKPKIVKCDEKDGFKITPAKLKAAITKRTKWIILNSPSNPTGSGYSKSEIQKLAKVLIKNKKVHILSDDIYEHVKYDNFKFFTIAQISKLKSRTLTMNGVSKSYAMTGWRIGYAAGPKEIISAIRKIQSQSTSNPSSISQAAAVEALNGKQDFIKKRAKSFKERRDFVVKSLNNIDGISCLKP

SEQ ID NO: 124390 - protein, 297 aa, Unknown
  Bacterial polypetide isolated from the Sargasso Sea
RKHAVYNCMQVLLDAGDEVLLPSPYWTTYPEPIALAGAVTKVILTSSESGFRVSVDQLEAAKTDRTKALIFCSPSNPTGAVYPKDEIEEIGRWAADNGIWVITDEIYEHLVYGDSEHFSMPTLVPDIQDRCVVLNGVAKTYAMTGWRVGWIIAPSDIAKAASTLQSHQTSNVSNVSQRAALAAVSGPLDDVGRMREAFDRRRQVVFSMLSETEGVSLLEPQGAFYAFPSFEGVLGRSLRGRTPKTTLDLAEILLEEVHVALVPGEAFGAPGYARISFALGDEELEEGIQRVMDLFQS

SEQ ID NO: 124391 - protein, 252 aa, Unknown
  Bacterial polypetide isolated from the Sargasso Sea
SLHYTPDQVQVGCGGKQNIFNAIVATIEEGDEVIVPAPYWVSYPDIVLLAGGNPVVLPCSIENNFKINPEQLDAVITPKTKWLILNSPSNPTGAAYTKEEIKGLAKVLVQHPHVWIMTDDIYEHILYDGFEFSTIAEVEPQLYDRTLTLNGLSKAFSMTGWRVGYAAGPVGLIKAMNKIQSQSTSHTSSISQAASIAALNGPMEFLVERNQVFMERRDLVVEALSSIKGFKCLKPEGAFYVYPDCSGVIGKK

SEQ ID NO: 124392 - protein, 255 aa, Unknown
  Bacterial polypetide isolated from the Sargasso Sea
SIYESMINYTGSKSVPYDLTEDKDLKFNPDKILSLITDKTRLLILINPNNPTGSFVEKRDIDFLADGLKKYPHVTILSDEIYSRQIFDNKEMPSFFYYPELRERLIVLEGWSKAYSMTGWRLGWSFWPQHLVEHVNKLLINSVSCVNAAAQFAGIAALDGPDDSIDEMMEKFTQRRDIIYKGLNDLPGVECSLPGGAFYAFPKVIGTGMNGAEFARKAMHEAGVAIVPGSAFGETCQNYVRFSFAASRDNISQAL

SEQ ID NO: 124393 - protein, 283 aa, Unknown
  Bacterial polypetide isolated from the Sargasso Sea
NKGDEVIIPAPYWVSYLDIILLAGGNPKIVKCDEKDSFKITPIKLKKAISKKTKWIIINSPSNPTGSAYTKEEIIELSKILIKYKNIYILSDDIYEHITYDNFNFFTIAQIESLKERTLTMNGVSKSYSMTGWRIGYAAGPKEIIKAMAKIQSQSTSNPTSISQAAAVEALNGTQDFIKERANSFKERRDFVVDSLNKIKGINCLKPEGAFYVFPSCKKLLGNKTKLKTDKDFVEKLLEKSEVAVVQGSAFGLNGYFRISYATSKENLKNAMQRIKIFCENLT

SEQ ID NO: 124394 - protein, 176 aa, Unknown
  Bacterial polypetide isolated from the Sargasso Sea
MSIISDSLKRIKPSPTIAVSQKARELKAAGRDVIGLGAGEPDFDTPENIKEAAIKAINAGDTKYTAVDGTAELKEAIINKFKRENNLNYTNEEITVGVGGKHVIYNLMMATLNKGDEVLIPAPYWVSYPDIVLLAGANPIVIECPEEQGFKLTAKDLESKITNNTKWLILNSPSNP

SEQ ID NO: 124395 - protein, 297 aa, Unknown
  Bacterial polypetide isolated from the Sargasso Sea
TPDHIKRICNLRLLKIGFTKYTQVDGTDELKNAIARKFKSENNLNYKNDNITVGVGGKHVIYNLFMSSINEGDEVLIPSPYWVSYPDIVNLCNGKPVIIETKFENGFKVKPEDLEKSITNKTKWFIINSPGNPTGSVYSENELKKLAEIIRKHKNIFILSDDIYEHILYKNVKFNNILNTSPDLFDRTFIVNGVSKVFSMTGWRIGYGAGNKELVKSISKIQSQCTTNPCSISQMAAMFALENEKTFLKDWLVKFEDRKNFLVDFFSSVEGFKPFIPEGAFYLYVSCEGFIGKKYND

SEQ ID NO: 124396 - protein, 222 aa, Unknown
  Bacterial polypetide isolated from the Sargasso Sea
MSIISDSLKRIKPSPTLAVTQKARELKAAGKDVIGLGAGEPDFDTPDNIKEAAIEAIKKGDTKYTAVDGTPALKEAIINKFKRENNLNYKSDEITVGAGGKHVIYNLMMATLNKGDEVLIPAPYWVSYPDIVLLAGGSPIVIECSEEQGFKLTAKDLESKINNNTKWLILNSPSNPTGACYSEQELKNLSQVLKRKPHVNILSDDIYEHVTYDGLKFFTLAQ

SEQ ID NO: 124397 - protein, 202 aa, Unknown
  Bacterial polypetide isolated from the Sargasso Sea
FLADGLKKHPHVTILSDEIYSRQIFDGKEMPSFFHYPELRERLIVLEGWSKAYSMTGWRLGWSFWPQHLIEHVNKLLINSVSCVNAAAQFAGIAALDGPDDSINEMMEKFTQRRDLIYKGLNDLPGVECSLPGGAFYAFPKVIGTGMNGSEFARKAMHNAGVAIVPGSAFGETCQNYVRFSFAASRDNISKALENIKKMLSK

SEQ ID NO: 124398 - protein, 279 aa, Unknown
  Bacterial polypetide isolated from the Sargasso Sea
MKSNYDLASRNYNLGTETAFTVLAKANKLVSEGKNIINLGIGQPDFKTPENIVEAGIKALKDGYHGYTQSTGIPSLRQAVSDDLKKRHNAQVSPDNILIVPGGKVIIFFSAMLMGETNKEILYPNPGFPIYESAINYSGARSVPYQLSEEKGFSFSAEDIISKINKNTSLIIINSPANPTGGVVPKSELEKLVVGLEKYPDIVLMSDEIYDQFCFGENKFTSMLQFPELRDRLIILNGWSKTYAMTGWRLGYGIFPKKLYEKAEKHAVNIHSCVNASAQ

SEQ ID NO: 124399 - protein, 228 aa, Unknown
  Bacterial polypetide isolated from the Sargasso Sea
MSIISDSLKKIKPSPTIAVTQKARELKAAGKDVIGLGAGEPDFDTPDNIKQAAIKAINDGDTKYTAVDGTPALKKAIVEKFKKENNLNYSTDQITVGAGGKHVIYNAMMATLNEGDEVIVPAPYWVSYPDMVLLAGGKPVIMKCNEKQGFKINPNDLEKYITPKTKWIILNSPSNPTGACYSEQDIKAIAVILEKHNHVHILSDDIYEHVTYEGFKFFTIAQIESLKD

SEQ ID NO: 124400 - protein, 295 aa, Unknown
  Bacterial polypetide isolated from the Sargasso Sea
MNLLGTETAFEVLSRARNLEAQGKQIVHLEIGEPDFDTPSHIVDAGVQALKDGYTHYGPTPGLPQLREAISENSRQVRGLNTDPNSIVVTPGAKPIMFYVILALSEPGMEVIYPNPGFPIYESMIKFSGAKPVPMQLLEESGYHPDLNDLKNKVNDKTSLIILNSPENPCGSALSAEELNTIADIVKQHPNLYVMADEIYKDILYQGEHSSIAAIEGMQDRTIILDGFSKSYAMTGWRLGYGIMPLELVPHIVKLAVNSVSCAASFSQIAAIAALEGSQEEVLGMAQEFSERKTL

SEQ ID NO: 124401 - protein, 300 aa, Unknown
  Bacterial polypetide isolated from the Sargasso Sea
INFSDRINQLSTSQTLAMAALARELKAQGKDIISLSLGEPDFNTPDFIKEAAKKAIDENYSTYSPVDGYADLKEAICRKFKRDNDLEYKPANIVVSTGAKQSLYNIAQVMINEGDEVILPAPYWVSYFEIVKMAGGIPVEVPTTIESDFKITPEQLEKAVTPKTKMIWYSSPCNPSGSVYNREELTALAKVLEKHPNIYVVSDEIYEHINFSGTFCSIASIPGMFEKTITVNGVAKAFAMTGWRIGYIGAPEFIAKACTKMQGQVTSGANSIAQRATIAAVDADPKVLNEMVSAFKTEEI

SEQ ID NO: 124402 - protein, 296 aa, Unknown
  Bacterial polypetide isolated from the Sargasso Sea
IKKAAIKAIKRGDTKYTAFDGTPELKKAIIKKFKRENKLNYSLDQITVGTGGKQVLYNAFMATLNKGDEVIIPAPFWVSYPDMVLLAGGKPKIIKCTEQEGFKLTPKKLKKAISKKTKWIILNSPSNPTGAGYSKKEINDLAKILIRNKKIFILSDDIYEHVRYDNFNFFTIAQISKLKDRTLTMNGVSKSYAMTGWRIGYAAGPKEIIKAIGKIQSQSTSNPSSISQAAAVEALNGKQGFIKTRAKAFKDRRNFVVKSLNSIKGISCLIPNGAFYVFPSCKGLLNKKTKLKTDTN

SEQ ID NO: 124403 - protein, 237 aa, Unknown
  Bacterial polypetide isolated from the Sargasso Sea
MSPPSPDVIRFTVGQPDFATPDAVVESAKSALDRGETAYTRTQGSPELCQAVSDHLKGHEIDIDAENIVVAPGCKQAVLYAMMATLDPGDEVLLLAPAWPSYDGMLKLIGAVPIHVPVRRDNYHPDFAALEKAVTSNTKAIMINSPNNPTGAVYTPEEIEKLVKLAVKHDLWIIDDMIYATLVWADYGYTSPASIEGGKERTITIGGWSKGWAMTGWRLGWAGGSKQVADAIKKINA

SEQ ID NO: 124404 - protein, 185 aa, Unknown
  Bacterial polypetide isolated from the Sargasso Sea
MSIISDSLKRIKPSPTIAVTQKARELRLAGKDVIGLGAGEPDFDTPKNIKNAAIKAIKRGDTKYTAVDGTPELKKAIIKKFKRENKLNYSLNQITVGTGGKQVLYNAFMATLNKGDEVIIPAPFWVSYPDMVLLAGGKPKIVKCTEQEGFKLTPKKLKKAISKKTKWIILNSPSNPTGAGYSKKR

SEQ ID NO: 124405 - protein, 232 aa, Unknown
  Bacterial polypetide isolated from the Sargasso Sea
MSIISDSLKKIKPSPTIAVTQKARELKAAGKDVIGLGAGEPDFDTPDNIKQAAIKAINDGDTKYTAVDGTPALKKAIVEKFKKENNLNYSTDQITVGAGGKHVIYNAMMATLNEGDEVIVPAPYWVSYPDMVLLAGGKPVIMECNEKQGFKINPNDLEKYITPKTKWIILNSPSNPTGACYSEQDIKAIADILEKHNHVYILSDDIYEHVTYEGFKFFTIAQIEKLKDRVLT

SEQ ID NO: 124406 - protein, 195 aa, Unknown
  Bacterial polypetide isolated from the Sargasso Sea
MKLSNRIKLIQPSSTMALTSKANELKSQGEDIIVLTVGEPDFDTPEYIKEDAKKAIDTGKTKYTAVDGTVDLKKAIIRKFQIENNLDYSLDEIIVSAGCKQSIFNFLQVIIDDGDEVIIPQPYWVSYADMVKYSGGKPIMLSTNYEDNFSIDIHKFESLITERTKLFMINSPNNPSGKYYDSEMLKNYRKFLKSI

SEQ ID NO: 124407 - protein, 218 aa, Unknown
  Bacterial polypetide isolated from the Sargasso Sea
EEITVGTGGKQVLYNAFMATLNKGDEVIIPAPFWVSYPDMVLLAGGKPKIVKCSEADNFKLTPTKLRKAITKKTKWIIFNSPSNPTGASYTKSEIKKLSKVLEKNKKIYILSDDIYEHITYDKAKYFTIAQIASLKNRTLTMNGVSKSYAMTGWRIGYAGGPKEIIKAIRKVQSQSTSNPSSVSQAAAVEALNGTQNFIKVRSKEFKKRRDFVVRSLK

SEQ ID NO: 124408 - protein, 196 aa, Unknown
  Bacterial polypetide isolated from the Sargasso Sea
MSIISDSLKKIKPSPTIAVTQKARELKAAGKDVIGLGAGEPDFDTPDNIKQAAIKAINDGDTKYTAVDGTPALKKAIVEKFKKENNLNYSTDQITVGAGGKHVIYNAMMATLNEGDEVIVPAPYWVSYPDMVLLAGGKPVIMECNEKQGFKINPNDLEKYITPKTKWIILNSPSNPTGACYSEQDIKAIADILEKH

SEQ ID NO: 124409 - protein, 295 aa, Unknown
  Bacterial polypetide isolated from the Sargasso Sea
YNAFMATLNKGDEVIIPAPFWVSYPDMVLLAGGKPKIVKCDEKDGFKLTAKKLKKVISKKTKWLILNSPSNPTGAGYTKEEIEDLARVLVKNKKIYILSDDIYEHIKYDNFNFFTIAQISKLKNRTLTMNGVSKSYAMTGWRIGYAAGPKDIIKAIGKIQSQSTSNPSSVSQAAAVEALNGSQDFIQERARAFKERRDFVVRSLNEIKGISCLTPNGAFYVFPSCKGLLNKKTKLKTDTDFVQKLLEKKNVAVVQGSAFGLNGYFRISYATSMENLKKAMERIKSFCESLNFSLI

SEQ ID NO: 124410 - protein, 311 aa, Unknown
  Bacterial polypetide isolated from the Sargasso Sea
NIKNAAIKAIKRGDTKYTAVDGTPELKKAIIKKFKRENKLNYSLDQITVGTGGKQVLYNAFMATLNKGDEVIIPAPFWVSYPDMVLLAGGKPKIIKCTEQEGFKLTPKKLKKAISKKTKWIILNSPSNPTGAGYSKKEINDLAKILIRNKKIFILSDDIYEHVMYDNFNFFTIAQISKLKDRTLTMNGVSKSYAMTGWRIGYAAGPKEIIKAIGKIQSQSTSNPSSISQAAAVEALNGKQGFIKTRAKAFKDRRNFVVKSLNSIKGISCLNPNGAFYVFPSCKGLLNKKTKLKTDTNFVQRLLEKENVAVV

SEQ ID NO: 124411 - protein, 133 aa, Unknown
  Bacterial polypetide isolated from the Sargasso Sea
NTPEYIKEAAIEALKAGDTKYTPVPGSMKLRQAICDKFQRENGLSFTSDQITVGCGGKQIIFNAFMASLNSGDEVIIPAPYWVSYPDIVALADGTPVFVTGQEECGFKITASQLDAAITPRTRWVMLNSPSNP

SEQ ID NO: 124412 - protein, 143 aa, Unknown
  Bacterial polypetide isolated from the Sargasso Sea
MSIISNSLKRIKPSPTIAVTQKARELKAAGKDVIALGAGEPDFDTPNNIKKAAVKAIRIGDTKYTPVDGTPAIKNAVIKKFKRENNLTYTSDQITVGTGGKQVLYNAFVATLNKGDEVIIPAPFWVSYPEYGFARLGGNQKFI

SEQ ID NO: 124413 - protein, 252 aa, Unknown
  Bacterial polypetide isolated from the Sargasso Sea
MEINVEISKLNKNITPSGTMAISNKARQLKEQGKPVIGFGAGEPDFPTPAHVIEDVKIASENPTYHKYSAVGGLKILRDEISRTTAEYSNFEVDADNVVVTNGGKQAILTTFMSLLDPGDEVLIPSPYWTTYPEAVKISGGQPVIVDTSFENDFKVTVDELENKLTKKTKVLVWVSPSNPTGVVYSKEEALEIYNWAFEKDIWILSDELYEHLVYEGITSPSPATIDKDFEKTVIVNGVAKAYSMTGWRVGW

SEQ ID NO: 124414 - protein, 242 aa, Unknown
  Bacterial polypetide isolated from the Sargasso Sea
TKYVPGKGTPELQKAIQKKFKEDNNIDYSLDEIICGVGGKHIIYNAMMATINSGDEVIITAPYWVSYPDIVLLAEGKPVIVECPENQNFKIKPEQLEKYITPKTKWLMLNSPSNPTGAVYSKEELKDLAKVLINHPHVLIMCDDIYEKIIYDGLKFNTLASVEPSLKNRCLTLNGVSKSYCMTGWRLGYCGAPKEIIAAMNKIQSQSTTSTSSITMAASVEAISGPQDFILDHNKKFIKRRD

SEQ ID NO: 124415 - protein, 203 aa, Unknown
  Bacterial polypetide isolated from the Sargasso Sea
MALISKRLSRFKPSLTVKISQKAREMSKGGEKVISLSSGEPDFDTPDHIKNYAIKAINDGFTKYTQVDGIDELKKAIVNKFLVENNISYDCENITVGVGGKHVIYNLFMSSLDLNDEVIIPAPYWVSYPDIVSLCGGKPIIVDTQIENDFKITPNELEKKITKNTKWFIINSPGNPTGTVYNEQDLKELSEVLIKFPDGKYSL

SEQ ID NO: 124416 - protein, 151 aa, Unknown
  Bacterial polypetide isolated from the Sargasso Sea
MSIISDSLKRIKPSPTIAVTQKARELKAAGKDVIGLGAGEPDFDTPDNIKEAAIKAIKDGDTKYTAVDGTPALKDAIVQKFKRENNLNYKTDEITVGAGGKHVIFNLMMATLNKGDEVLIPAPYWVSYPDIVLLAGANPIVMNVQKNKVQV

SEQ ID NO: 124417 - protein, 278 aa, Unknown
  Bacterial polypetide isolated from the Sargasso Sea
QLSAEGVDICNLSAGEPDFNAPKEVIKATSKAIFDGFTKYGPAAGNLDLRKAIASKLQIKNNLNVEYENVMVTNGAKQAIYNLFQVLLNAGDEVIIPSPYWLSYPQMVRLAGGKPIFTNSSAEDGFKINIKDLKSKISSKTKFIIINSPNNPTGRVMSKEELLQIADLARENPNINILSDEIYELILKKEFKHYSLSTLANDLKDRIFIINGFAKGWAMTGWRVGYLVGPKNVIRASSALQSQSTSNVCSFVQKGALEALKINNDFFSMINSHYDQRR

SEQ ID NO: 124418 - protein, 295 aa, Unknown
  Bacterial polypetide isolated from the Sargasso Sea
WIKKRYSVDVDSERILIMPGGKPTMHYAIQCFGEPGAEIIHPTPAFPIYESMINYTGSKPVPYDLTEDKDLKFNPDKILSLITDKTRLLILINPNNPTGSFVEKRDIDFLADGLKKHPHVTILSDEIYSRQIFDGKEMPSFFHYPELRERLIVLEGWSKAYSMTGWRLGWSFWPQHLIEHVNKLLINSVSCVNAAAQFAGIAALDGPDDSINEMMEKFTQRRDLIHKGLNDLPGVECSLPGGAFYAFPKVIGTGMNGAEFARKAMHEAGVAIVPGSAFGETCQNYVRFSFAASRD

SEQ ID NO: 124419 - protein, 249 aa, Unknown
  Bacterial polypetide isolated from the Sargasso Sea
TPYWVSYPDMTLLAGGIPKFLNCDIEKDFKIDAHNLNSFITNNTKWLILNSPSNPSGSCYKKSELEDIAKVLRNHPHVNVITDDIYEYITYDDFKFFTLAQVAPDLKDRILTVNGVSKSYCMTGWRIGYAAGREDLIKAMIKIQGQSTSNASSISQYAALAGIEGSRDFLRPCLEAFDKRRNLVVNKLNDIDGIKCLMPKGAFYAYPNVEGLLGKKTQNGKILNNDTDVTEWLLENAKVAAVPGVAFGL

SEQ ID NO: 124420 - protein, 282 aa, Unknown
  Bacterial polypetide isolated from the Sargasso Sea
MTFSKRINLIKPSSTMSLTSKANEMRALGEDIIVLTVGEPDFDTPQYIKDAGRKAIESGKTKYTSVDGVAELKDAIINKFKKENDLTFNSDEVIVSAGCKQSIFNLLQVIIDNDDEVLIPEPYWVSYADMVMYAGGRPILIESSYENNFDLNFELIEKNINNKTKLFMLNSPNNPSGKYFNSAMLTKLAEILRKHNHIYISSDDIYEHIFWHQEKFQNILNVAPDLKDRTIIFNGVSKAYSMTGWRIGYAAGNKEIIKKMKTLQSQSTSCASSVSQYAAISA

SEQ ID NO: 124421 - protein, 155 aa, Unknown
  Bacterial polypetide isolated from the Sargasso Sea
MSIISDSLKRIKPSPTIAVTQKARELRAAGNDVIGLGAGEPDFDTPNNIKNAAIKAIKKGDTKYTAVDGTPALKKAVVGKFKRENNLNYSTDQITVGTGGKQVLYNAFMATLNKGDEVIIPAPFWVSYPDMVLLAGGKPKIIKCTEQEGFKLTAK

SEQ ID NO: 124422 - protein, 288 aa, Unknown
  Bacterial polypetide isolated from the Sargasso Sea
VKANALRAEGKDILVLAAGEPDFDTPSNIRKAAFDAIESGQTRYVPGKGTPALQKAIQSKFLKDNNLKYALDEIIVGVGGKHIIYNAMMATLNHDDEVIIPAPFWVSYPDIVLLAEGKPVIVECPESQNFKITAKQLEKNITKKTKWLMLNSPSNPTGEVYSKSELKELAEVLLKYPQVLIMSDDIYEKIIYDNLEFSTLASIEPKLKDRCLTLNGVSKAYCMTGWRLGYCGASKEIIAAMNKIQSQSNTSTSSISMAAAVEALVGSQEFIKDHNNAFVRRRDMVVSL

SEQ ID NO: 124423 - protein, 275 aa, Unknown
  Bacterial polypetide isolated from the Sargasso Sea
YSNFEIDPDNVVVTNGGKQAILTTFMSLLDPGDEVLIPSPYWTTYPEAVKISGGNPVVVNTDFENDFKVTVEQLEEKFTEKTKVLVWVSPSNPTGVVYSKEEAEEIYNWAFDKNIWILSDELYEHLVYEGATSPSPATIDKNLEKTIVVNGVAKAYSMTGWRVGWIMGNNDVIGLSKKIQSHATSNVANISQVAAYSALKNGLDSTNEMKKAFDKRRNYALNLFQTIENIRVPNATGAFYVFPDVSHYTDGLIEGVSTSIELCDWLLEKFYIAFV

SEQ ID NO: 124424 - protein, 155 aa, Unknown
  Bacterial polypetide isolated from the Sargasso Sea
MSIISDSLKRIKPSPTIAVSQKARELRAAGKDVIGLGAGEPDFDTPNNIKNAAIKAIRGGDTKYTAVDGTPALKNAIIKKFKKENNLKYSAEEITVGTGGKQVLYNAFMATLNKGDEVIIPAPFWVSYPDMVLLAGGKPKIVKCSETENFKLTPA

SEQ ID NO: 124425 - protein, 281 aa, Unknown
  Bacterial polypetide isolated from the Sargasso Sea
RYNVDIDFERIIIMPGGKPTMSYAIQCFGEPGAEIIHPTPAFPIYESMINYTGSTSVPYDLTENKDLKFDPDKILSLITDKTRLLVLINPNNPTGSFVEKKDIDVLADGLKKHPHVTILSDEIYSRQIFDGKEMPTFFNYPELRERLIVLEGWSKAYSMTGWRLGWSFWPQHLVEHVNKLLINSVSCVNAAAQYAGIAALDGPDDSIDTMMEKFTQRRDIIYKGLNDLPGVECSLPGGAFYAFPKVIGTGMNGAEFARKAMHEAGVAIVPGSAFGETCQNY

SEQ ID NO: 124426 - protein, 310 aa, Unknown
  Bacterial polypetide isolated from the Sargasso Sea
KAIANKLQNQNDLNYEFENVMVTNGAKQAIYNLFQVLLNTGDEVIIPSPYWLSYPQMVRLAGGKPIFTNSSAEDGFKINIEDLKSKVSSKTKFIIINSPNNPTGRVMSKEELLQIADLARENPNINILSDEIYELILKKEFEHYSLSSLANDLKDRIFIINGFAKGWAMTGWRIGYLVGPKDVIKASSALQSQSTSNVCSFVQKGALEALKINNDFFSMINSHYDQRRSLLYEGLKRINGIYIKEPNGAFYAFPKLPNSSITSVDFCSKALQDYGLVVVPGKAFGADECIRMSCAASEIKIKDGLQRLKK

SEQ ID NO: 124427 - protein, 279 aa, Unknown
  Bacterial polypetide isolated from the Sargasso Sea
MATLNKGDEVIIPAPFWVSYPDMVLLAGGKPKIVKCNEAENFKITPNKLRKAITKKTKWLILNSPSNPTGASYTKAEIKKLSQILIKHKKIHILSDDIYEHITYDKAKFFTTAQISNLKNRTLTMNGVSKSYAMTGWRIGYAGGPKEIIKAIRKVQSQSTSNPSSVSQAAAVEALNGTQNFIKVRSKEFKKRRDFVVSSLNKIKGINCLTPNGAFYVFPSCKKLLGKKTKLKTDSEFVEKLLEKANVAVVQGSAFGLPGYFRISYATSMQKLKIAMERI

SEQ ID NO: 124428 - protein, 268 aa, Unknown
  Bacterial polypetide isolated from the Sargasso Sea
ENNLDYTADQITVGAGGKHVIYNAMMATLNEGDEVIVPAPYWVSYPDIVLLAGGKPVVMECDEKQSFKINPSDLEKFITPKTKWIILNSPSNPTGACYSEKDIREIAKVLEKHSHVYILSDDIYEHVTYEGFKFFTIAQIEGLKERVLTMNGVSKAYSMTGWRIGYAAGPKEIIKAIAKIQSQSTTNPSSISQAASVEALSGTQDFIKIRADSFQERRDFVVKALNDIDGIECLNPDGAFYVFPSCKGLMGKKDTNRKEIKSDTDFVQ

SEQ ID NO: 124429 - protein, 278 aa, Unknown
  Bacterial polypetide isolated from the Sargasso Sea
LNKGDEVIIPAPFWVSYPDMVLLAGGKPKIIKCDEKDGFKISAKKLEKAISKKTKWIILNSPSNPTGAGYTKKEIEDLSKVLLKNKKIFILSDDIYEHIRYDNFDFFTIAQISKLKDRTLTMNGVSKSYAMTGWRIGYAAGPKEIITAIRKIQSQSTSNPSSISQAAAVEALNGTQNFMKERAEAFKQRRDFVVNSLNSIKGISCLNPNGAFYVFPSCKGLLNNKTKLKTDTEFVQKLLEKSMVAVVQGSAFGLHGYFRISYATSMENLKTAISRIKN

SEQ ID NO: 124430 - protein, 242 aa, Unknown
  Bacterial polypetide isolated from the Sargasso Sea
MSIISDSLKRIKPSPTIAVTQKARELKASGKDVIGLGAGEPDFDTPNNIKEAAIKAIKDGDTKYTAVDGTQILKEAIVNKFKRENNLDYTTDQITVGAGGKHVIYNLMMATLNKGDEVLIPAPYWVSYPDIVLLAGATPVAVECSEEQDFKITAKDLESKITNNTKWLIINSPSNPTGSTYSEQEIKNLSQVLKRNPHVNILSDDIYEHITYGGFKFFTIAQIPELKNRVVTMNGVSKSYAM

SEQ ID NO: 124431 - protein, 152 aa, Unknown
  Bacterial polypetide isolated from the Sargasso Sea
MSIISDSLKKIKPSPTIAVTQKARELKAAGKDVIGLGAGEPDFDTPENIKQAAIKAINDGDTKYTAVDGTVALKKAIVEKFKKENNLDYTIDQITVGAGGKHVIYNAMMATLNEGDEVIVPAPYWVSYPDIVLLAGGKPVVMECNEKQGFKI

SEQ ID NO: 124432 - protein, 301 aa, Unknown
  Bacterial polypetide isolated from the Sargasso Sea
MDLKKAICKKFKRDNNLDYNIDQIVVSTGAKQSIANVCMSLINKGDEVVIPTPYWVSYSAMVSLADGIPVFVHPDENANYKVTAAQLESAITDKTKMVMLNSPNNPSGSVFTKEEYLEFSKVLMKYPKVIVVSDEIYEHINYGVESVSFASLPGMYERTVTVNGISKAFAMTGWRIGYLGAPKILAKACNKMQGQITSGANCIAQRAAITALEESPERIKYMVDEFKIRRDLIIDLVNQINGFNVKQPPSGAFYIFPEVSQLFGKTFDGHLVNNANDLSMLILEKAHVATVPGDAFGYPIV

SEQ ID NO: 124433 - protein, 319 aa, Unknown
  Bacterial polypetide isolated from the Sargasso Sea
FDTPKHIKEQAIRSINKGFTKYTAVDGIIELKEAIKEKFINENKINYAIDQITVGAGGKHVIYNLFMSTLNNLDEVIIPSPYWVSYPDIVSLCGGFPRIVKTNIKNNFKLTPDKLEENINEKTKWLIINSPSNPTGAVYSKDELLELSKILLKYKHVWILTDDIYEHLIYDKYEFLNILNIEPKLFDRTFIVNGVSKVFSMTGWRIGYGAGPEIIVKSISKIQSQSTTNPCSISQMAALTALNSKKLFLNEWLSEFIQRRNFVVDYLNKIDGLNCLMPQGAFYVFVSCSGLINKKTPNGKKIMNDIDFADYSYRICWCA

SEQ ID NO: 124434 - protein, 127 aa, Unknown
  Bacterial polypetide isolated from the Sargasso Sea
MSIISNNLKRIKPSPTIAVTTKAREMRASGKDVIGLGAGEPDFDTPDNVKEAAIEAIKKGDTKYTAVDGTPGLKKAIVEKFKRENNLNYTIDQITVGTGGKQVIYNTFMATLNKGDEVIIPAPFWVS

SEQ ID NO: 124435 - protein, 254 aa, Unknown
  Bacterial polypetide isolated from the Sargasso Sea
LDYDLDEVVVSAGCKQSIFNFLQVIIDDGDEVIIPQPYWVSYADMVKYSGGIPVMLETEYENNFTIDIDKFKSLINDKTKLFMINSPNNPSGKYYDSKLLNELASVLIDHENIFISSDDIYEHIHWSNEKFHNILNVSPRLKERTVILNGVSKAYSMTGWRIGYAAGNKEIIKKMKTLQSQSTSCASSISQAAAEAALSNACLELPEMNRQYKERHDFVVSELNQIKGVECKPTDGTFYVFPSFKDFINKSEIV

SEQ ID NO: 124436 - protein, 122 aa, Unknown
  Bacterial polypetide isolated from the Sargasso Sea
MSIISDSLKRIKPSPTIAVTQKAKELKAAGKDVIGLGAGEPDFDTPNNIKKAAIDAIQNGDTKYTAVDGTKALKEAIVKKFKRENNLNYTTDQITVGAGGKHVIYNLMMATLNKGDEVIIPA

SEQ ID NO: 124437 - protein, 193 aa, Unknown
  Bacterial polypetide isolated from the Sargasso Sea
PHVTILSDEIYSRQIFDGKEMPTFFNYPELRERLIVLEGWSKAYSMTGWRLGWSFWPQHLVEHVNKLLINSVSCVNAAAQFAGIAALDGPDDSIDVMMEKFTQRRDIIYKGLNDLPGVECSLPGGAFYAFPKVIGTGMNGAEFARKAMHEAGVAIVPGSAFGETCQNYVRFSFAASRDNISQALENIKKMLAK

SEQ ID NO: 124438 - protein, 164 aa, Unknown
  Bacterial polypetide isolated from the Sargasso Sea
MSIISDSLKRIKPSPTIAVTQKARELRAAGKDVIGLGAGEPDFDTPNNIKNAAIKAIRIGDTKYTAVDGTPALKKAIIKKFKKENNLKYSHEEITVGTGGKQVLYNAFMATLNRGDEVIIPAPFWVSYPDMVLLAGGKPKIVKCSEANNFKITPAKLKKAIQKK

SEQ ID NO: 124439 - protein, 232 aa, Unknown
  Bacterial polypetide isolated from the Sargasso Sea
MSIVSNNLKRIKPSPTIAVSTKAREMRAAGMDVIGLGAGEPDFDTPDNIKEAAMEAIKNGDTKYTAVDGTPALKKAIVDKFKRENNLSYTTDQITVGTGGKQVIYNTFMATLNKGDEVIIPAPFWVSYPDMVLLAGGTPKIVKCDEKDSFKLSAKKLEKAISKKTKWLILNSPSNPTGAGYTKKEIEDLSKVLLKNKKIFILSDDIYEHIRYDNFNFFTIAQISQLIERTLT

SEQ ID NO: 124440 - protein, 280 aa, Unknown
  Bacterial polypetide isolated from the Sargasso Sea
DEVLIPAPYWVSYPDMVLLAGGKPKIVKCSEKNEFKITPEELKNAIGKKTKWLIINSPSNPTGSCYTKKEIEDLSKILIKNKNVYILSDDIYEHITYDDFKFFTIAQIKALKNRTLTMNGVSKSYSMTGWRIGYGAGPKEIIKAVAKIQSQSTTNPSSISQAAAVEALNGTQDFIQTRANSFKDRRDYVVETLNSINGLSCLKPSGAFYVFPNCKKLLGKKTKLKTDKEFVEKLLEKAEVAVVQGSAFGLEGYFRISYATSMDNLKKALDRIKLFCESLG

SEQ ID NO: 124441 - protein, 297 aa, Unknown
  Bacterial polypetide isolated from the Sargasso Sea
LGAGEPDFDTPDNIKKAAVKAIRKGDTKYTSVDGTPAIKNAVIKKFKRENKLNYTSEQITVGTGGKQVLYNAFVATLNKGDEVLIPAPFWVSYPDMVLLAGGKPKFIKCGEEDGFKLTPTKLKNAITKKTKWIILNSPSNPTGAAYSKKEIISLGKVLLKNKNVFILSDDIYEHVKFDNFKFFTIAQIKKLKDRTLTMNGVSKAYAMTGWRIGYAAGPKNIIAAIRKIQSQSTSNPSSISQAAAVEALNGTQSFIKKRAKSFSDRRKFVVNYLNSITGITCLMPKGAFYVFPSCKGL

SEQ ID NO: 124442 - protein, 293 aa, Unknown
  Bacterial polypetide isolated from the Sargasso Sea
SIISNSLKRIKPSPTIAVTQKARELKAAGKDVIALGAGEPDFDTPDNIKKAAVNAIRKGDTKYTPVDGTPAIKDAVIKKFKRENKLNYTSEQITVGTGGKQVLYNAFVATLNKGDEVLIPAPFWVSYPDMVLLAGGKPKFIKCGEEDGFKLTPTKLKKAITKKTKWIILNSPSNPTGAAYTKKEIVSLGKVLLKNKNVLILSDDIYEHVKFDNFKFFSIAQIKKLKDRTLTMNGVSKAYAMTGWRIGYAAGPKNIIAAIRKIQSQSTSNPSSISQAAAVEALNGTQSFIKKKS

SEQ ID NO: 124443 - protein, 209 aa, Unknown
  Bacterial polypetide isolated from the Sargasso Sea
MSDRVQLIKPSPTLAVTNRAAELRAEGKDIIGLGAGEPDFDTPDHIKAAAAEAIDKGFTKYTAVDGTPGLKSAIIDKLKADNGLSYEPNQILVSCGGKQSFFNMALALINPGDEVVIPAPYWVSYPDMVKIAEGEPVIIETDESTRFKITPEQLDAAITDKTRLVVLNSPSNPSGVAYTKDEFIALGDVLRKYPDVLIATDDMYEYIWW

SEQ ID NO: 124444 - protein, 121 aa, Unknown
  Bacterial polypetide isolated from the Sargasso Sea
MSILSATLSRVKPSPTIAVTNKARELKAAGRDVIGLGAGEPDFDTPQSIKDAAVRAIAEGKTKYTAVDGIPELKQAICEKFKRDNGLEYHPEQVTVNSGGKQTLYNALMATLNPGDEVIIP

SEQ ID NO: 124445 - protein, 214 aa, Unknown
  Bacterial polypetide isolated from the Sargasso Sea
MKNPISERVRKVKPSATIAISSKAMEMRSAGVDVISMSAGEPDFDTPEYIKDAAKMAMDNGMTKYTQVDGVPDLKQAIINKFSEDNDLVYDPESILVSTGAKQTLYNLFQAILGPGDEVIIISPYWVSYPDMVLLADAKPVIVDTFQENDFALDISAFADAINDKTKLVIINSPSNPTGITFSRDDYESIGAVLQNHPDIYVATDDMYEYIYWG

SEQ ID NO: 124446 - protein, 304 aa, Unknown
  Bacterial polypetide isolated from the Sargasso Sea
MTFSKRINLIKPSSTMSLTSKANEMRAAGEDIIVLTVGEPDFDTPKYIKDAGREAIESGKTKYTSVDGVSELKEAIVNKFKKENGLVFDTDEVIVSAGCKQSIFNLLQVIIDDGDEVLIPEPYWVSYADMVIYAGGKPILIKSSYENNFDLDLKLIEKNITDRTKLFMLNSPNNPSGKYFDSDILKKLSDLLRKHDKIYISSDDIYEHIFWHQEKFHNILNVAPDLKERTIIFNGVSKAYSMTGWRIGYAAGNRDIIKKMKTLQSQSTSCASSVSQYAAITALTQQCDELPQMNNEYKKRHDYV

SEQ ID NO: 124447 - protein, 132 aa, Unknown
  Bacterial polypetide isolated from the Sargasso Sea
MALISDRLSRFKPSLTVKISQIAREMTLSGQKVISLSSGEPDFDTPIHIKESAIEAINSGFTKYTQVDGMPDLKKAIISKFKNENRINYNADQITVGVGGKHVIYNLLMSTLNKHDEVIIPAPYWVSYPDMN

SEQ ID NO: 124448 - protein, 251 aa, Unknown
  Bacterial polypetide isolated from the Sargasso Sea
LAERVHAIKPSATLTIAAKAKAMSLAGENVLNLSAGEPDFNTPSHIIQAATIAMQEGHTRYTPVGGSAALKEAIIHKFQTDNQLSYQADEIIISTGAKQSLSHAMLALLNPGDEVLIPAPYWVSYPDMARLAGATPTIMPTTESQGFKITPEQLQAAITPKTRMLLINSPSNPSGSVYSHQELQALGTVLEQHPQVLVVSDDIYEHILFDDQKFYNLVNTCPNLKDQCVVVNGMSKSFAMTGWRIGFAAAP

SEQ ID NO: 124449 - protein, 217 aa, Unknown
  Bacterial polypetide isolated from the Sargasso Sea
MSIISDSLKRIKPSPTIAVSQKARELRAAGKDVIGLGAGEPDFDTPNNIKNAAIKAIKGGDTKYTAVDGTPALKNAIIKKFKKENSLKYSTEEITVGTGGKQVLYNAFMATLNKGDEVIIPAPFWVSYPDMVLLAGGKPKIIKCGEADNFKITPTKLKKAITKKTKWLILNSPSNPTGVSYTKTEIFKLSKVLAKYKRIHILSDDIYEHITYDKAKY

SEQ ID NO: 124450 - protein, 291 aa, Unknown
  Bacterial polypetide isolated from the Sargasso Sea
ERILIMPGGKPTMHYAIQCFGEPGAEIIHPTPAFPIYESMIHFTGSTSVPYDLTEDKDLKFNPDKILSLITDKTRLLILINPNNPTGSFVEKSDIDVLADGLKKHPHVTILSDEIYSRQIFDGKEMPTFFNYPELRERLIVLEGWSKAYSMTGWRLGWSFWPQHLVEHVNKLLINSVSCVNAAAQFAGIAALDGPDDSINEMMEKFTQRRDLIYKGLNELPGVECSLPGGAFYAFPKVIGTGMNGAEFARKAMHEAGVAIVPGSAFGETCQNYVRFSFAASRDNISQALEN

SEQ ID NO: 124451 - protein, 398 aa, Unknown
  Bacterial polypetide isolated from the Sargasso Sea
METNVEISKLNNNITPSGTMAISNKARILKEQGKPVIGFGAGEPDFPTPSHVIEEVKIASENPAYHKYTAVGGLPILRDEISRTTKEYSNFEIDPDNVVVTNGGKQAILTTFMSLLDPGDEVLIPSPYWTTYPEAVKISGGEPVIVDTDFENDFKVTVEQLDEKFTEKTKVLVWVSPSNPTGVVYSKEEAEEIYNWAFDKNIWILSDELYEHLVYEGVTSPSPATIDKNLEKTIVVNGVAKAYSMTGWRVGWIMGNNDVIGLSKKIQSHATSNVANISQVAAYSALKNGLDSTNEMKKAFDKRRNYALNLFQTIENIRVPNATGAFYVFPDVSHYTNSLIEGVSTSIELCDWLLEKFYIAFVPGEVFGKEGFLRCSYALSDQDLEEGLTRFKDALESI

SEQ ID NO: 124452 - protein, 342 aa, Unknown
  Bacterial polypetide isolated from the Sargasso Sea
SAGEPDFDAPNEILKATSEAIFDGYTKYGPASGDLELRKAIAEKLQTQNNLNVEYENVMVTNGAKQAIYNLFQVLLNDGDEVIIPAPYWLSYPQMVRLAGGKPVFLNSSAEDGFKINIQDLKSKISPKTKFIIINSPNNPTGRVMPKEDLLQIAELVRENKNINILSDEIYELILKKEFKHLSLASLATDLKERIFIINGFAKGWAMTGWRVGYLVGQKDVIKASSALQSQSTSNVCSFVQRGALEALKINREFFLEINSHYDLRREVLYKGLKNIEGLFIYPPNGAFYAFPRLPNKSMTSVEFCKRILNDYGLVVVPGKPFGDDQCIRISCASQKKRFLMA

SEQ ID NO: 124453 - protein, 344 aa, Unknown
  Bacterial polypetide isolated from the Sargasso Sea
AIKAIKRGDTKYTAVDGTPELKKAIIKKFKRENKLNYSLDQITVGTGGKQVLYNAFMATLNKGDEVIIPAPFWVSYPDMVLLAGGKPKIVKCTAAEGFKLTPKKLKKAISKKTKWIILNSPSNPTGAGYSKKEIYDLAKILIRNKKIFILSDDIYEHVRYDNFNFFTIAQVSKLKDRTLTMNGVSKSYAMTGWRIGYAAGPKEIIKAIGKIQSQSTSNPSSISQAAAVEALNGKQGFIKTRAKAFKERRNFVVKSLNNIKGINCLTPNGAFYVFPSCKGLLNKKTKLKTDSHFVQKLLEKENVAVVQGSAFGLDGYFRISYATSMNNLKKAMLRIKSFCEGLNK

SEQ ID NO: 124454 - protein, 241 aa, Unknown
  Bacterial polypetide isolated from the Sargasso Sea
MSIISDSLKRIKPSPTIAVSQKARELKASGKDIIGLGAGEPDFDTPDNIKEAAIKAIKDGETKYTAVDGTPNLKKAIVEKFKRENNLNYSIDQITVGTGGKQVLYNAFMATLNKGDEVIIPAPFWVSYPDMVLLAGGKPKIIKCEEKDSFKLTPKKLKKAISKKTKWLILNSPSNPTGAGYSKDEIEGLARVLTKNKKIHILSDDIYEHIKYDNFNFFTIAQIPKLKDRTLTMNGVSKSYA

SEQ ID NO: 124455 - protein, 337 aa, Unknown
  Bacterial polypetide isolated from the Sargasso Sea
MKVSKKIINLETESAFAILAKATKLASEGKNIINLGIGQPDFPTPTNIQEAAIKAIKDGHHGYTPSNGILPLREAVSEQIYNDYKVNINPDQILITPGGKPTIFYSSLILGGEKNEIIYPDPGFPIYRSMIKFSGAKGIPLELSEEDNFEINIKKLEKLITKKTSLIIINNPNNPTGSFMNKKKIDKIVKMLEKYPDVFIMSDEIYSKIIFNHQSMPSFINYETIRDRLIVLEGWSKTFCMTGWRLGWSMWPKKLYEHANKLCVNDHSCPNIISQYAGLEALKGPKDEIKKIKQEFQNRKNFVHKKLNKLKNISCFEPGWSILCISKIFLYLVIVGK

SEQ ID NO: 124456 - protein, 253 aa, Unknown
  Bacterial polypetide isolated from the Sargasso Sea
MNLLADRLGRIKPSMTVSINIKANALRAQGKDVLVLAAGEPDFDTPLNIREAAKKAMDEGETRYVPGRGTPNLQTAIINKFKKDNNISYSKEEIMVGVGGKHIIYNAMMATLNPKDEVIIPSPFWVSYPDIVLLADGIPVIVKCGSEKNFKITPSQLEENITNKTKWLMLNSPSNPTGAVYSKDELKNLSKVLLKYPEIYILTDDIYEKIIYENIEFHTLASVEPKLKNRILTLNGVSKTYCMTGWRLGYCGG

SEQ ID NO: 124457 - protein, 331 aa, Unknown
  Bacterial polypetide isolated from the Sargasso Sea
FKTPEHIVEAAVKALHDGHHGYTPANGIPRLREAVSADLHKRYAINIPEQQILIVPGGKVTMFLAMMIYGEPGCEILYPNPGFPIYESTIRFSGATPIPIALREENGFAFSAEEVLSQINDNTRLIILNSPANPTGGAVPKKEFDTLVQGLSNWPNVAVMSDEIYGQMLYDGREHVSLLQYPELHDRLILLDGWSKTYAMTGWRLGYSIWPKTVVNQAEKLCVNIHSCVNAPAQFAGIAALEGNQDPVKFMVSEFDARRKIIVDELNQIPGFSCIEPGGAFYAFPNITKNGYEFSKASGKDFGRSGSSRYSWNKLWCSRRGFFAVFIRQFD

SEQ ID NO: 124458 - protein, 284 aa, Unknown
  Bacterial polypetide isolated from the Sargasso Sea
MNFLAKRVLNIKPSPTIAATAKAAELKASGLDVIGLGAGEPDFDTPVHIKNAAINAINSGKTKYTSVDGISELKSEIINKFKKDNNIDYNLKEISVGTGGKQILYNALMATINKNDEVIIPAPFWVSYPDMVVLADGIPVIAKCEERDNFKITPEILESNISDKTKWLILNSPSNPTGIGYEENELIEISRTLEKYPNILIMVDDMYEYLTYDGFDFKTLVEVNKNLKDRVLTCNGVSKSFCMTGWRIGYAGGPEWLIKAMAKIQSQSTSNPNSIAQWASTEAC

SEQ ID NO: 124459 - protein, 280 aa, Unknown
  Bacterial polypetide isolated from the Sargasso Sea
VLLNPGDEVLLPAPYWLSYPEMAALACAKVKLIPTQAEEGFRLDLTDVKAAITPRSRLLVLNSPGNPTGRVMKRQELEDVAELVRRHPQLLVMSDEIYEFLLAEGEQHHSFAAIAPDLADRCFTVNGFAKGWAMTGWRLGYLAGHQDVIKAAAALQSQSTSNVCSFAQRGALAAIQGPRGCVSAMAESYNRRRQLLTEGLQVIEGITLVEPRGAFYAFPQLPESAGGSMDFCSRALKQAGLAVVPGLAFGNDRCIRLSCAVSRETIRDGLSRLTQLLDET

SEQ ID NO: 124460 - protein, 282 aa, Unknown
  Bacterial polypetide isolated from the Sargasso Sea
KGDEVIIPAPFWVSYPDMVLLAGGKPKIIKCGEADDFKITPTKLRKAITKKTKWLILNSPSNPTGVSYTKTEIFKLSKVLAKYKRIHILSDDIYEHITYDKAKYFTIAQIPNLKNRTLTMNGVSKSYAMTGWRIGYAGGPKEIIKAIRKVQSQSTSNPSSVSQAAAVEALNGTQNFIKTRSKEFKKRRDFVVKSLNMIKGINCLTPNGAFYVFPSCKDLLNKKTKLKTDSDFVQKLLEKSNVAVVQGSAFGLEGYFRISYATSMKNLKKAMERIKTFCESLN

SEQ ID NO: 124461 - protein, 130 aa, Unknown
  Bacterial polypetide isolated from the Sargasso Sea
MSIISDSLKRIKPSPTIAVTQKARELRAAGKDVIGLGAGEPDFDTPENIKDAAIKAIKDGDTKYTAVDGTPALKKAIVEKFKRENNLDYTTDQITVGTGGKQVLYNTFMATLNKGDEVIIPAPFWVSYPD

SEQ ID NO: 124462 - protein, 181 aa, Unknown
  Bacterial polypetide isolated from the Sargasso Sea
MSIISNSLKRIKPSPTIAVTQKARELKAAGKDVIALGAGEPDFDTPNNIKKAAVKAIRIGDTKYTPVDGTPAIKNAVIKKFKRENNLTYTSDQITVGTGGKQVLYNAFVATLNKGDEVIIPAPFWVSYPDMVLLAGGKPKFIKCGEEHGFKLTPTKLKKAITKKTKWIIFNSPSNPTGCSI

SEQ ID NO: 124463 - protein, 125 aa, Unknown
  Bacterial polypetide isolated from the Sargasso Sea
MSIISDSLKRIKPSPTIAVTQKARELRAAGKDVIGLGAGEPDFDTPVNIKNAAIKAIKRGDTKYTAVDGTPELKKAIIKKFKRENKLNYSLDQITVGTGGKQVLYNAFMATLNKGDEVIIPAPFW

SEQ ID NO: 124464 - protein, 199 aa, Unknown
  Bacterial polypetide isolated from the Sargasso Sea
MSIISDSLKRIKPSPTIAVTQKARELRAAGNDVIGLGAGEPDFDTPNNIKNAAIKAIKKGDTKYTAVDGTPALKKAVIGKFKRENNLNYSTDQITVGTGGKQVLYNTFMATLNKGDEVIIPAPFWVSYPDMVLLAGGKPKIVKCTEQEGFKLTAKKLKKAISKKTKWVILNSPSNPTGAGYTKKEIQSLAKVLIRNKKV

SEQ ID NO: 124465 - protein, 222 aa, Unknown
  Bacterial polypetide isolated from the Sargasso Sea
MSIISDSLKRIKPSPTIAVTQKARELKAVGKDVIGLGAGEPDFDTPDNIKKAAIKAIRNGDTKYTAVDGTPALKKAIVNKFKRENKLNYSTDQITVGTGGKQVIYNAFMATLNKGDEVIIPAPFWVSYPDMVLLAGGKPKIVKCTEQEGFKLTSKKLKKAITKKTKWVILNSPSNPTGAGYTKREIKDLAKVLIRNKKVHILSDDIYEHIKYDNFNFFTIAQ

SEQ ID NO: 124466 - protein, 395 aa, Unknown
  Bacterial polypetide isolated from the Sargasso Sea
MSIISNSLKRIKPSPTIAVTQKARELKAAGKDVIALGAGEPDFDTPDNIKKAAVKAIRNGDTKYTPVDGTLAIKNAVIKKFKRENKLNYTSDQITVGTGGKQVLYNAFVATLNKGDEVLIPAPFWVSYPDMVLLAGGKPKFIKCGEEDGFKLTPAKLKKAITKKTKWIILNSPSNPTGAAYTKKEIISLGKVLLKNKNVFILSDDIYEHVKFDNFKFFTIAQIKKLKDRTLTMNGVSKAYAMTGWRIGYAAGPKNIIAAIRKIQSQSTSNPSSISQAAAVEALNGSQSFIKKRAKSFSNRRNFVVNYLNSIPGITCLLPKGAFYVFPSCKGLIGKKTKIKDDTDFVQKLLEKQNVAVVQGSAFGLDGYFRISYATSMQKLKVAMTRIKLFCESLG

SEQ ID NO: 124467 - protein, 187 aa, Unknown
  Bacterial polypetide isolated from the Sargasso Sea
MQLSKKMLKISPSGTVILAQKARQLKAEGKDIIELGEGEPDFNTPEFIIKYAYQSAKNGATKYTSVSGTPELKNKITEKLRKENNINYNDNQIVVGAGAKQLIFNALYCSINTGDEVIIPSPYWVSYPEMVKIADGIPIILNCDLKNNFKISLEKLVEVINPKTKWLILNSPGNPSGAVYTWDELLA

SEQ ID NO: 124468 - protein, 166 aa, Unknown
  Bacterial polypetide isolated from the Sargasso Sea
MSIISDTLKRIKPSATIAVSQKARELKAAGVDVIGLGQGEPDFDTPDNIKDAGIKAIKDGDTKYTAVDGTPALKKAIVDKFKRENNLVYSTEQVTVGTGAKQVLFNAFVATLNKGDEVIIPAPFWVSYPDMVLLAGGKPKIIKCNESDGFKITPKKLKKAISKKTK

SEQ ID NO: 124469 - protein, 193 aa, Unknown
  Bacterial polypetide isolated from the Sargasso Sea
MSIISDSLKRIKPSPTIAVTQKARELKAAGKDVIGLGAGEPDFDTPDNIKDAAIQAIKDGDTKYTAVDGTPALKKAIVEKFKRENNLDFNVDQITVGTGGKQVLYNTFMATLNKGDEVIIPAPFWVSYPDMVLLAGGKPKIVKCDEKDGFKLTAKKLQKAISKKTKWLILNSPSNPTGAGYTREEIEDLARVI

SEQ ID NO: 124470 - protein, 393 aa, Unknown
  Bacterial polypetide isolated from the Sargasso Sea
MLSDKINSLPISQTVAMTAKAHDLKNQGIDVITLSAGEPDFDIPDYIKDAAVDAINENYHKYSPVDGFLDLKKAICKKFKRDNNLDYDTDQIVVSTGAKQSIANVCMSLINKGDEVVIPTPYWVSYSAMVSLADGIPVFVNPNKNSNYKVTAKQLESVITDKTKMIMLNSPNNPSGSVFTKEEYLELSKVLIKYPKVIVVSDEIYEHINYGVESVSFASLPGMYDRTVTVNGISKAFAMTGWRIGYLGAPKILAKACNKMQGQITSGANCIAQRAAITALEESPERIKYMVDEFKIRRDLIIDLVSQINGFKVSQPPSGAFYIFPEVSELFGKTFGGQLINNANDLSMLILEKAHVATVPGDAFGYPECIRISYSASREQIKEAIIRIKDLLS

SEQ ID NO: 124471 - protein, 210 aa, Unknown
  Bacterial polypetide isolated from the Sargasso Sea
MVEKKDIDFLADGLKKYPHVTILSDEIYSRQIFDGKEMPSFFYYPELRERLIVLEGWSKAYSMTGWRLGWSFWPQHLIEHVNKLLINSVSCVNAAAQFAGIAALDGPDDSINEMMEKFTQRRDLIHKGLNDLPGVECSLPGGAFYAFPKVIGTGMNGAEFARKAMHEAGVAIVPGSAFGETCQNYVRFSFAASRDNISQALENIKKMLTK

SEQ ID NO: 124472 - protein, 398 aa, Unknown
  Bacterial polypetide isolated from the Sargasso Sea
MKLNKKLNQLGTETAFAVSAEAKSWSEKGHKVFPFHLGDINIMTPENIREATIKYLNDKKNGYCDSKGVPELRDVLSHDVGSKRGVRYDIDNVVIQPGGKPTIWKFLATTMNEGDEVLYPNPGYPIYESQIRYQGGIPIPYSYDETETGFAIDIEKLRSSITNRTTAFIYNNYQNPLSASSSIDEMEALAELAIENDLWVLSDDAYYEIRYNDESPLSIVNIPGMKERTIILYTFSKRFAMTGWRIGASIGPKKIIEQIARFNVNDESCTNHFIQHALAETLEDSSPYSEKILSELKDRRDSCIASLNSIEGINVPKPDSTFYLFPNITSVMESKDCNDLDAFRIKALKATGVSFCTRNHFGKPKNNETDQYIRLAYSGINNSDIKEGLALLKAWIEE

SEQ ID NO: 124473 - protein, 304 aa, Unknown
  Bacterial polypetide isolated from the Sargasso Sea
VLATCGPGDEVIVPAPYWVSYPEMVRLSGADSVVVRTTADEGFLMTPEKLRAVITERSRLLILCSPSNPSGAVYPKETLEELAKIVVEHPRLMVLSDEIYEHIIYAPAEHHSIAAMEGMWERTMVVNGFSKSFAMTGWRLGYVAAPKHFARAMNMLQSQITSGPNSISQEAALAALELGFKGGEDVAEMVKAFRQRRDFVSERLNAIPGVKLPSVDGAFYVFPDVSAFFGGDASAEGFGPVTDVDELCRYILEKGQVALVPGSAFGVPECLRISYAASEATLEDALTRIEACLDPKVFTQNSSA

SEQ ID NO: 124474 - protein, 376 aa, Unknown
  Bacterial polypetide isolated from the Sargasso Sea
MSQVNLSDRALSIEPSLTLQISAKANQLSAEGVDICNLSAGEPDFDAPKEVIEATSKAIFDGFTKYGPAAGNLDLRKAIANKLQIQNDLNYEFENVMVTNGAKQAIYNLFQVLLNTGDEVIIPSPYWLSYPQMVRLAGGKPIFTNSSAEDGFKINIKDLKSKISSKTKFIIINSPNNPTGRVMSKEELLQIADLARENPNINILSDEIYELILKKEFKHYSLSSLANDLKDRIFIINGFAKGWAMTGWRIGYLVGPKDVIKASSALQSQSTSNVCSFVQKGALEALKINNEFFSIINSHYDQRRRLLYEGLNNINGIYIEEPNGAFYAFPRLPNSSITSVDFCNKALQDFGLVVVPGKAFGLINALEYLARLQKLK

SEQ ID NO: 124475 - protein, 319 aa, Unknown
  Bacterial polypetide isolated from the Sargasso Sea
IPECRQAVTRWIKRRYNVDIDFNRILIMPGGKPTMSYAIQCFGEPGAEIIHPTPAFPIYESMINYTGSTSVPYDLTEDKDLKFNPDKILSLITDKTRLLVLINPNNPTGSFVEKKDIDFLADGLKKYPHVTILSDEIYSRQIFDNKEMPSFFHYPELRERLIVLEGWSKAYSMTGWRLGWSFWPQHLIEHVNKLLINSVSCVNAAAQFAGIAALDGPDDSINAMMEKFTQRRDLIYKGLNDLPGVECSLPGGAFYAFPKVIGTGMNGAEFARKAMHEAGVAIVPGSAFGETCQNYVRFSFAASRDNISQALENIKKMLK

SEQ ID NO: 124476 - protein, 388 aa, Unknown
  Bacterial polypetide isolated from the Sargasso Sea
MKLAKSLERLGTESAFTVLAEAKKLEAQGKPMIHLGLGQPDFKTPKHVVEAAKKALDDGHHGYVMSNGIPECRQSVTRWIKKRYNVDIDFERIIIMPGGKPTMSYAIQCFGEPGAEIIHPTPAFPIYESMINYTGSTSVPYDLTENKDLKFDPDKILSLITDKTRLLILINPNNPTGSFVDKKDVDVLADGLKKHPHVTILSDEIYSRQIFDGKEMPTFFNYPELRERLIVLEGWSKAYSMTGWRLGWSFWPEHLVEHVNKLLINSVSCVNAAAQFAGIAALDGPDDSIDAMMEKFTQRRDLIYKGLNDLPGVECSLPGGAFYAFPKVIGTGMNGAEFARKAMHEAGVAIVPGSAFGETCQNYVRFSFAASRDNISEALENIKKMLSK

SEQ ID NO: 124477 - protein, 332 aa, Unknown
  Bacterial polypetide isolated from the Sargasso Sea
DDGHHGYVMSNGIPECRQAVTRWIKKRYNVDINFERILIMPGGKPTMSYAIQCFGEPGAEIIHPTPAFPIYESMINYTGSTSVPYDLTENKDLKFDPDKILSMITDKTRLLILINPNNPTGSFVEKKDVDVLADGLKKHPHVTILSDEIYSRQIFDGKEMPTFFNYPELRERLIVLEGWSKAYSMTGWRLGWSFWPEHLVEHVNKLLINSVSCVNAAAQFAGIAALDGPDDSIDAMMEKFTQRRDLIYKGLNDLPGVECSLPGGAFYAFPKVIGTGMNGAEFARKAMHEAGVAIVPGSAFGETCQNYVRFSFAASRDNISQALENIKKMLSK

SEQ ID NO: 124478 - protein, 166 aa, Unknown
  Bacterial polypetide isolated from the Sargasso Sea
MSIISDSLKRIKPSPTIAVTQKARELRAAGKDVIGLGAGEPDFDTPDNVKNAAIKAIKSGDTKYTAVDGTPALKKAIIAKFKRENKLSYSTDQITVGTGGKQVLYNAFMATLNKGDEVIIPAPFWVSYPDMVLLAGGKPKIIKCTEQEGFKLTASKLKKAITKKTK

SEQ ID NO: 124479 - protein, 388 aa, Unknown
  Bacterial polypetide isolated from the Sargasso Sea
MKLAKSLERLGTESAFTVLAEAKKLEAQGKPMIHLGLGQPDFKTPKHVVDAAKKALDDGHHGYVMSNGIPECRQAVTRWVKKRYKVDIDFERILIMPGGKPTMHYAIQCFGEPGAEIIHPTPAFPIYESMINYTGSTSVPYDLTEDKDLKFNPDKILSLITDKTRLLILINPNNPTGSFVEKSEIDVLADGLKKYPHVTILSDEIYSRQIFDGKEMPSFFNYPELRERLIVLEGWSKAYSMTGWRLGWSYWPQHLVGHVNKLLINSVSCVNAAAQFAGIAALDGPDDSINEMMVKFTQRRDLIYKGLNDLPGVECSLPGGAFYAFPKVIGTGMNGAEFARKAMHEAGVAIVPGSAFGETCQNYVRFSFAASRDNISQALENIKKMLTK

SEQ ID NO: 124480 - protein, 123 aa, Unknown
  Bacterial polypetide isolated from the Sargasso Sea
MSIVSNNLKRIKPSPTIAVTSKAREMRAAGKDVIGLGAGEPDFDTPDNIKDAAIEAIKRGETKYTAVDGTPKLKKAIQGKFTRENNLSYELDQISVGTGGKQVLYNVYMATLNPGDEVIIPAP

SEQ ID NO: 124481 - protein, 387 aa, Unknown
  Bacterial polypetide isolated from the Sargasso Sea
MKLAHSLSRLGTETAFSVLAEAKKLEAQGKPMIHLGLGQPDFKTPKHVVEAAKKALDDGHHGYVMSNGIPECRQAVTRWIKKRYNVDVSHERILIMPGGKPTMTYAIQCFGEPGAEIIHPTPAFPIYESMINYTGSTSVPYDLTEDKDLKFNPDRILSLITDKTRLLILINPNNPTGSFVDRSDIDYLADGLKRHPHVTILSDEIYSRQIFDNKEMPTFFNYPELRERLIVLEGWSKAYSMTGWRLGWSFWPEHLVEHVNKLLINSVSCVNAAAQYAGIAALDGPDDSINEMMEKFTARRKLIHDGLNSLPGVECSLPGGAFYAFPKVIGTGMNGAEFSRKAMHEAGVAIVPGSAFGETCQNYVRFSFAASRDNISQALENIKKMLG

SEQ ID NO: 124482 - protein, 261 aa, Unknown
  Bacterial polypetide isolated from the Sargasso Sea
ESMINYTGSTAVPYDLTEDKDLKFNPDKILSLITDKTRLLILINPNNPTGSFVEKSDIDVLADGLKKHPHVTILSDEIYSRQIFDGKEMPSFFNYPELRERLIVLEGWSKAYSMTGWRLGWSFWPQHLIEHVNKLLINSVSCVNAAAQFAGIAALDGPDDSINAMMEKFTQRRDLIHKGLNELDGVECSLPGGAFYAFPKVIGTGMNGAEFARKAMHEAGVAIVPGSAFGETCQNYVRFSFAASRDNISQALENIKKMLTK

SEQ ID NO: 124483 - protein, 290 aa, Unknown
  Bacterial polypetide isolated from the Sargasso Sea
GKPTMSYAIQCFGEPGAEIIHPTPAFPIYESMINYTGSTSVPYDLTENKDLKFDPDKILSLITDKTRLLILINPNNPTGSFVERKDIDVLADGLKKHPHVTILSDEIYSRQIFDGKEMPTFFNYPELRERLIVLEGWSKAYSMTGWRLGWSFWPQHLVEHVNKLLINSVSCVNAAAQFAGIAALDGPDDSIDAMMEKFTQRRDIIYKGLNDLPGVECSLPGGAFYAFPKVIGTGMNGAEFARKAMHEAGVAIVPGSAFGETCQNYVRFSFAASRDNISQALENIKKMLTK

SEQ ID NO: 124484 - protein, 340 aa, Unknown
  Bacterial polypetide isolated from the Sargasso Sea
MSIISNSLKRIKPSPTIAATQKARELKAAGKDVIALGAGEPDFDTPDNIKKAAVKAIRKGDTKYTPVDGTPAIKNAVIKKFKRENKLNYTTDQITVGTGGKQVLYNAFVATLNKGDEVLIPAPFWVSYPDMVLLAGGKPKFIKCGEEDGFKLTPAKLKKAITKKTKWIILNSPSNPTGAAYTKKEIISLGNVLLKNKNIFILSDDIYEHVKFDNFKFFTIAQIKKLKDRTLTMNGVSKAYAMTGWRIGYAAGPKNIIAAIRKIQSQSTSNPSSISQAAAVEALNGTQSFIKKRAKSFSDRRNFVVNYLNSIPGITCLMPKGAFYVFPSCKGLIGKKTKIK

SEQ ID NO: 124485 - protein, 365 aa, Unknown
  Bacterial polypetide isolated from the Sargasso Sea
MLSEKIKSLPISQTVAMTAKAHDLKNQGIDVITLSAGEPDFNIPDYIKEAAVEAINDNYHKYSPVDGYLDLKKSICKKFKRDNNLDYDVDQIVVSTGAKQSIANVCMSLINKGDEVLIPTPYWVSYSAMVALAEGVPVFINPDEDSNYKITAQQLESAITDKTKMLMLNSPNNPSGSVFTEQEYLEFSKVLEKYPNIIIVSDEIYEHINYGVKSVSFASLPGMYDRTVTVNGISKAYAMTGWRIGYLGAPKVIAKACNKMQGQITSGANCIAQRATIKALEESPEKIQYMVDEFKIRRDFIIDLVTQINGFIIKEPPMGAFYIFPDISELFGKTFKGVTVNDANDLSMLILEKAHVATVPGDAFG

SEQ ID NO: 124486 - protein, 400 aa, Unknown
  Bacterial polypetide isolated from the Sargasso Sea
MVTLSKSIKRIKPSATMTVTQKARELKAEGKDIIGLGAGEPDFDTPDNIKKAAIDAIKEGDTKYTAVDGTPALKEAIQSKFKRENNLDYGLNEISVGTGGKQIIFNAMAVTLDSLDEVIIPAPYWVTYPDVVNYFDAKPIIITCGEETGFKITPDQLEKAINKSTKWFILNSPSNPTGSCYTGDELIALSKVLENHPHVNIMTDDLYEHLIYDDVQFHTLVSVAPFLKDRTLTLNGVSKAYAMTGWRIGYAGGNQDLIKAMGKLQSQSTSNPTSISQAAAVEALNGDNSFIAERSQVFKKRRDNLISELNSMNGISCRKPEGAFYVFPSCQGVIGKTDDSGKIISNDQEFTTSLLEQAGVAVVQGSAFGLEGYFRISYATSDENLEEACSRMRVYLENLK

SEQ ID NO: 124487 - protein, 130 aa, Unknown
  Bacterial polypetide isolated from the Sargasso Sea
MSIISDSLKRIKPSPTLAVTQKARELKAAGKDVIALGAGEPDFDTPDNVKDAAIKAIKDGDTKYTAVDGTPALKKAISEKFKRENNINYNTDEITVGAGGKHVIYNLMMATLNKDDEVIIPAPYWVSYPD

SEQ ID NO: 124488 - protein, 158 aa, Unknown
  Bacterial polypetide isolated from the Sargasso Sea
MSIISNSLNRIKPSPTIAVSQKARELKAAGKDVIGLGAGEPDFDTPNNIKNAAIKAIRAGDTKYTAVDGTPALKNAIIKKYKKENNLKYSLEEITVGTGGKQVLYNAFMATLNKGDEVIIPAPFWVSYPDMVLLAGGKPKIIKCSEGDNFKLTPSKLK

SEQ ID NO: 124489 - protein, 298 aa, Unknown
  Bacterial polypetide isolated from the Sargasso Sea
MTFIADRLKRIKPSMTVGINVKANALRAEGKDILVLAAGEPDFDTPHNIRKAASDAMDAGKTRYVPGKGTPELQKAIQSKFLKDNNINYDLDEIIVGVGGKHIIYNAMMATINPNDEVIIPAPFWVSYPDIVLLAEGKPVIVQCPENQSFKITSDQLEKNITDKTKWLMLNSPSNPTGSLYSKKELKELAEVLLKYPQVLIMSDDIYEKVIYDNLEFTTIASVEPKLKDRCLTLNGVSKAYCMTGWRLGYCGASKEIIAAMNKIQSQSTTSTSSISMAAAVEALNGPQEFIKDHNEAL

SEQ ID NO: 124490 - protein, 400 aa, Unknown
  Bacterial polypetide isolated from the Sargasso Sea
MNFVADRINRIKPSMTVGINIKAKAMKEEGKDVIVLAAGEPDFNTPKNIRDAANKAMDEGKTKYVPGKGTPELQKAIQKKFKEDNNIDYSLDEIICGVGGKHIIYNAMMATINSGDEVIITAPYWVSYPDIVLLAEGKPVIVECPESQNFKIKPEQLEKCITPKTKWLMLNSPSNPTGTVYSKEELKDLAKVLINHPHVLIMCDDIYEKIIYDGLEFHTLASVEPSLKNRCLTLNGVSKSYCMTGWRLGYCGAPKEIIGAMNKIQSQSTTSTSSITMAASVEAISGPQDFILDHNKKFIKRRDLVVSKLNEIDGITCSKPDGAFYVYPNCQDILGKITPNGKKISSDEDFMTYLLEDQGVAGVHGSAFGLSPYFRLSYATSDHILEDACNRIQFACSKLK

SEQ ID NO: 124491 - protein, 357 aa, Unknown
  Bacterial polypetide isolated from the Sargasso Sea
MTFIADRLKRIKPSMTVGINVKANALRAEGKDVLVLAAGEPDFDTPHNIRKAASDAMDAGKTRYVPGKGTPELQKAIQSKFLKDNNLNYDLDEIIVGVGGKHIIYNAMMATINPNDEVIIPAPFWVSYPDIVLLAEGKPIIVQCPENQNFKLTADKLEKSITDKTKWLMLNSPSNPTGSLYSKQELKELAKVLLKYPQVLIMSDDIYEKVIYDNLEFTTIASVEPKLKDRCMTLNGVSKAYCMTGWRLGYCGASKEIISAMNKIQSQSTTSTSSISMAAAVEALNGPQEFIKDHNEAFVRRRDLVVNLLNNIDGLSCLKPEGAFYVYPSCKGVIGKETPEGMKISNDEDFMTYLLES

SEQ ID NO: 124492 - protein, 325 aa, Unknown
  Bacterial polypetide isolated from the Sargasso Sea
MKLQANRLQRIKPSMTVAINVKANALRAQGKDVLVLAAGEPDFNTPTNIINAAKKAMDDGKTRYVPGKGTPELQQAIINKFASDNNIKYLPEEIMVGVGGKHIIFNALMATLNPNDEVIIPAPYWVSYPDIVMLAEGKPIFVKCDISQDFKLTASQLEKYITKKTKWLILNSPSNPTGSVYTYDELKSLSQVLLKYPNVLVLTDDIYEKIIYDEIKFNTIASVEPKLKNRVLTLNGVSKAYCMTGWRLGYCAGPKDIIAGMNKIQSQSTTSTSSITMAASVEALNGSQEFLKKHNMEFRKRRNLVVEKINNIHGLSCNMPSRGIL

SEQ ID NO: 124493 - protein, 196 aa, Unknown
  Bacterial polypetide isolated from the Sargasso Sea
MSIISDSLKKIKPSPTIAVTQKARELKAAGKDVIGLGAGEPDFDTPDNIKQAAIKAIKDGDTKYTAVDGTPALKKAIVEKFKKENNLDYTTDQITVGAGGKHVIYNAMMATLNEGDEVIVPAPYWVSYPDMVLLAGGKPVIMECDEKQGFKINPNDLEKFITPKTKWIILNSPSKPNWSMLFRAKYKSNCRYFRKI

SEQ ID NO: 124494 - protein, 388 aa, Unknown
  Bacterial polypetide isolated from the Sargasso Sea
MKLAKSLERLGTESAFTVLAEAKKLEAQGKPMIHLGLGQPDFKTPKHVVEAAKKALDDGHHGYVMSNGIPECRQAVTRWIKKRYNVDINFERILIMPGGKPTMSYAIQCFGEPGAEIIHPTPAFPIYESMINYTGSTSVPYDLTENKDLKFDPDKILSMITDKTRLLILINPNNPTGSFVEKKDVDVLADGLKKHPHVTILSDEIYSRQIFDGKEMPTFFNYPELRERLIVLEGWSKAYSMTGWRLGWSFWPEHLVEHVNKLLINSVSCVNAAAQFAGIAALDGPDDSIDAMMEKFTQRRDLIYKGLNDLPGVECSLPGGAFYAFPKVIGTGMNGAEFARKAMHEAGVAIVPGSAFGETCQNYVRFSFAASRDNISQALENIKKMLSK

SEQ ID NO: 124495 - protein, 390 aa, Unknown
  Bacterial polypetide isolated from the Sargasso Sea
MNLVSSIGIRQDIEELPFSPIREIVRSAEDLKDVIPFWFGEPDVSTPEFIRNIAKKSLDRGETFYAPNSGQRLLRQTIADYMNGLYGSKISTEQITVTLSGMNAVMLCAQALVPKGAKVVVLLPSWPNIPAVQRIMGAKVQGVPINMKDGKWNLDIEQVFDACDSNTSAIVINSPNNPSGWTMSNQEQKTLLEFAREKGLWIVSDEVYARISFKNNHAPSFCEVMEKDDRVIIVNSFSKSWAMTGWRLGWITAPAQLGVQFEKLNEYNVAGPPPFIQQAGIAALKEGEAFIHESNNRYLHALSYFTEWAKAQKRIEFDPPTAAFYAFFKIRDANDSLEMAKDLLKKGVGLAPGRAFGPQFDSYLRLCFASSIPKLEKGLNRLEDWLKDFV

SEQ ID NO: 124496 - protein, 210 aa, Unknown
  Bacterial polypetide isolated from the Sargasso Sea
LFVEKKDIDFLADGLKKYPHVTILSDEIYSRQIFDNKEMPSFFHYPELRERLIVLEGWSKAYSMTGWRLGWSFWPQHLIEHVNKLLINSVSCVNAAAQFAGIAALDGPDDSINAMMEKFAQRRDLIYKGLNDLPGVECSLPGGAFYAFPKVIGTGMNGAEFARKAMHEAGVAIVPGSAFGETCQNYVRFSFAASRDNISQALENIKKMLK

SEQ ID NO: 124497 - protein, 358 aa, Unknown
  Bacterial polypetide isolated from the Sargasso Sea
AGEPDFDTPDNIKKAAVKAIRNGDTKYTPVDGTLAIKNAVIKKFKRENKLNYTSEQITVGTGGKQVLYNTFVATLNKGDEVLIPAPFWVSYPDMVLLAGGKPKFIKCGEEDGFKLTPAKLKKAITKKTKWIILNSPSNPTGAAYTKKEIISLGKVLIKNKNVFILSDDIYEHVKFDNFKFFTIAQIKKLKDRTLTMNGVSKAYAMTGWRIGYAAGPKNIIAAIRKIQSQSTSNPSSISQAAAVEALNGSQSFIKKRAKSFSDRRNFVVNYLNSIQGITCLMPKGAFYVFPSCKGLIGKKTKIKDDTDFVKKLLEKQNVAVVQGSAFGLDGYFRISYATSMQKLKVAMARIKLFCDSLG

SEQ ID NO: 124498 - protein, 313 aa, Unknown
  Bacterial polypetide isolated from the Sargasso Sea
ENKLNYSLDQITVGTGGKQVLYNTFMATLNKGDEVIIPAPFWVSYPDMVLLAGGKPKIIKCTEQEGFKLTPKKLKKAISKKTKWIILNSPSNPTGAGYSKKEINDLAKILTRNKKIFILSDDIYEHVRYDNFNFFTIAQIPKLKDRTLTMNGVSKSYAMTGWRIGYAAGPKEIIKAIGKIQSQSTSNPSSISQAAAVEALNGKQGFIKTRAKAFKDRRNFVVKSLNSIKGISCLTPNGAFYVFPSCKGLLNKKTKLKTDTNFVQRLLEKENVAVVQGSAFGLDGYFRISYATSMKNLKKAMSRIKSFCEALNK

SEQ ID NO: 124499 - protein, 273 aa, Unknown
  Bacterial polypetide isolated from the Sargasso Sea
PYWVSYPDIILLAGGKPKIIKCSEKNNFKLTPKELKKAISKKTKWIILNSPSNPTGSAYTKDEIIALSKILLKYKKTYILSDDIYEHITYDNFKFYTIAQVEKLKSRTLTMNGVSKSYSMTGWRIGYAAGPKEIIKAMAKIQSQSTSNPTSISQAAAVEALNGTQDFIKVRSDSFKSRRDFVVQSLNNIKGLSCLKPEGAFYVFPNCKKLLGNKSKLRTDRDFVEKLLEKAEVAVVQGSAFGLEGYFRISYATSMENLEKAMKRIKIFCESLY

SEQ ID NO: 124500 - protein, 173 aa, Unknown
  Bacterial polypetide isolated from the Sargasso Sea
MNILASRLNRIQPSPTIAMSIKARELKAEGKDIIELAAGEPDFPTPSHIIEAAEEAMSRGETKYTDPDGTPALKQAVCDKFKRDNNLEYVTSQVTIGTGGKQVLYNALMATLNEGDEVIIPAPYWVSYPDMVLLAEGIPKIVECPLDKNFILQPEDLERAITPKTKWISLTAP

SEQ ID NO: 124501 - protein, 398 aa, Unknown
  Bacterial polypetide isolated from the Sargasso Sea
MKYANQLQNLGTETAFAVSAQAKEWADKGNKVYPFHLGDINLPTPENIVQATIKSINDGLTGYCPSEGILPLREALAHDVGSKRGVNYNPDNVAIQPGGKPTIGKFISSIMDPGDEILYPNPGYPIYESQIEYQGGKAVPYSFVQTDMGFDIDIQKLNDSITDRTVALIYNNYQNPISAESSKKEMEAIAKIAIENDLWVLSDEAYFEIVYDGDATSIVSLPGMKERTVILYTFSKKFAMTGWRVGGSIGPREIIKRIAKLNVNAESCTTHFIQNAMVEALNGDQTGSQKILEKLKVRRDATVKGLNAIDGIDIVAPRTTFYLFPNVTKVMERKGLHKIEDLQNGALTNANVSFCTREHFGRAQADESDYYIRLAYSGISVEDINEGLIKLKDFFESQ

SEQ ID NO: 124502 - protein, 335 aa, Unknown
  Bacterial polypetide isolated from the Sargasso Sea
TAASGIDELKNAIISRIKEDYNVEYEKKEIFVGSGAKHVLYNLFQVLLDLNDEVIIPAPYWVSYPEQVRIAGGKPVILTTEQSNGFKVKPSEIQNIITDKTKILVLNYPSNPTGVTFTKEELVEIADLAEKNDLIIISDEIYDKTLYSETKHTSFVQINDSIKNRTILVNGVSKTYSMTGWRIGYAAGNKKVLAAMNNLAGQSTSNPTSIAQKASVEAFSGPQDKVNEMVVEFKKRRDFICKELNNINGISCLIPDGAFYVFPDISYYFGKEYKNGKIENSVDFAAFLLNEAKVAVVPGIEFGSDKNIRISYATSMHDIKEGVKRIKEKLEEFFS

SEQ ID NO: 124503 - protein, 247 aa, Unknown
  Bacterial polypetide isolated from the Sargasso Sea
SSAEDGFKINIGDLKSKISSKTKFIIINSPNNPTGRVMSKEELLQIADLARENPNINILSDEIYELILKKEFKHYSLSSLANDLKDRIFIINGFAKGWAMTGWRIGYLVGPKDVIKASSALQSQSTSNVCSFVQKGALEALKINNEFFSMINSHYDQRRSLLYEGLNNINGIYIEEPNGAFYAFPKLPNSSITSVDFCNKALQDYGLVVVPGKAFGADQCIRISCAASEIKIKDGLQRIEKAISEYY

SEQ ID NO: 124504 - protein, 193 aa, Unknown
  Bacterial polypetide isolated from the Sargasso Sea
PHVTILSDEIYSRQIFDGKEMPTFFNYPELRERLIVLEGWSKAYSMTGWRLGWSFWPEHLVEHVNKLLINSVSCVNAAAQFAGIAALDGPDDSIDAMMEKFTQRRDLIHKGLNDLPGVECSLPGGAFYAFPKVIGTGMNGAEFARKAMHEAGVAIVPGSAFGETCQNYVRFSFAASRDNISQALENIKKMLSK

SEQ ID NO: 124505 - protein, 287 aa, Unknown
  Bacterial polypetide isolated from the Sargasso Sea
DVIGLGAGEPDFDTPDNIKEAAIQAIKRGETKYTAVDGTPKLKKAIQEKFSRENNLSYELDQISVGTGGKQVLYNVFMATINPGDEVVIPAPYWVSYPDMVLLAGGKPKIVKCSEKNQFKITPKELIKAIGKKTKWLIINSPSNPTGSCYTKKEIEELSKVLIKNKNVFILSDDIYEHITYDDFKFFTIAQIKALKERTLTMNGVSKSYSMTGWRIGYGAGPKDIIKAVAKIQSQSTTNPSSISQAAAVEALNGTQDFIQTRANSFKKRRDFVVEKINNINGLSCLK

SEQ ID NO: 124506 - protein, 254 aa, Unknown
  Bacterial polypetide isolated from the Sargasso Sea
MSIISNNLKRIKPSPTIAVTQKARELRAAGKDVVGLGAGEPDFDTPINVKNAAIKAIRDGDTKYTAVDGTPALKKAILKKFKRENKLNYKLDEITVGTGGKQVLYNTFMATLNKGDEVIIPAPFWVSYPDMVLLAGGKPKIVKCDEKDGFKITPAKLKAAITKRTKWIILNSPSNPTGSGYSKSEIQKLAKVLIKNKKVHILSDDIYEHVKYDNFKFFTIAQISKLKSRTLTMNGVSKSYAMTGWRIGYAAGPK

SEQ ID NO: 124507 - protein, 297 aa, Unknown
  Bacterial polypetide isolated from the Sargasso Sea
KLKKAIQGKFTRENNLSYELDQISVGTGGKQVLYNVFMATLNPGDEVIIPAPYWVSYPDMVLLAGGKPKIVKCSEKNEFKITPDELKKAIGKKTKWLIINSPSNPTGSCYTRNEIEELSKILIKNKNVYILSDDIYEHITYDDFKFFTIAQIKALKDRTLTMNGVSKSYSMTGWRIGYGAGPKDIIKAVAKIQSQSTTNPSSISQAAAVEALNGTQDFIKTRSDSFKERRDYVVDTLNSINGLSCLKPSGAFYVFPNCKKLLGKKTKLKTDKEFVEKLLEKAEVAVVQGSAFGLDGY

SEQ ID NO: 124508 - protein, 282 aa, Unknown
  Bacterial polypetide isolated from the Sargasso Sea
MSIVSNNLKRIKPSPTIAVTQKAKELKASGKDIIGLGAGEPDFDTPDNIKEAAIKAIKNGDTKYTAVDGTPALKEAIVKKFKRENNLVYQIDQITVGTGGKQVIYNAMMATINEGDEVIIPAPYWVSYPDIVLLAGGTPVILKCDEKQGFKINPRELEKSITKKTKWIILNSPSNPTGACYSEEEVREIGKILENHPNVFILSDDIYEHVIYGNFKFFTIAQIDSLKDRVLTMNGVSKAYSMTGWRIGYAAGPEEIIKAIAKIQSQSTTNPSSISQAAAVEA

SEQ ID NO: 124509 - protein, 246 aa, Unknown
  Bacterial polypetide isolated from the Sargasso Sea
KIKPSPTIAVTQKARELKAAGKDVIGLGAGEPDFDTPENIKQAAIKAINDGDTKYTAVDGTQALKKAIVEKFKKENNLDYTTDQITVGAGGKHVIYNAMMATLNDGDEVIIPAPYWVSYPDIVLLAGGKPVVMECNEKQGFKINSADLEKFITPKTKWIILNSPSNPTGACYTEKEIREIAKVLEKHTQVYILSDDIYEHVTYEGFKFFTVAQIQNLKERVLTMNGVSKAYSMTGWRIGYAAGPKE

SEQ ID NO: 124510 - protein, 155 aa, Unknown
  Bacterial polypetide isolated from the Sargasso Sea
MSIISDSLKRIKPSPTIAVTQKARELRAAGRDVIGLGAGEPDFDTPDNIKEAAIKAIKDGDTKYTAVDGTPTLKQAIVDKFKRENNLNYTTDQITVGAGGKHVIYNLMMATLNKGDEVIIPAPYWVSYPDIVLLTGATPVVIECSEEQGFKLTAK

SEQ ID NO: 124511 - protein, 174 aa, Unknown
  Bacterial polypetide isolated from the Sargasso Sea
MSIISDSLKRIKPSPTIAVTQKARELRAAGKDVIGLGAGEPDFDTPDNIKEAAIKAIRDGDTKYTAVDGTSDLKKAIVDKFKRENNLNYTTDQITVGAGGKHVIYNLMMATLNKGDEVIIPAPYWVSYPDIVLLAGANPIVIECSEEQGFKLTAKDLENSITNNTKWIILNSPS

SEQ ID NO: 124512 - protein, 304 aa, Unknown
  Bacterial polypetide isolated from the Sargasso Sea
RELKAAGKDVIGLGAGEPDFDTPQNIKEAAIEAINKGHTKYTAVDGTPELKKAIVNKFKRENNLEYSTNEITVGTGGKQVIYNALMATLNKGDEVIIPAPYWVSYPDMVLLAGGNPKIVKCNESDGFKLTPKNLKKAITKKTKWLILNSPSNPTGVSYSKSEIESLSEVLIKNKNVHILSDDIYEHITYDNFNFFTIAQISKLKNRTLTMNGVSKSYAMTGWRIGYAAGSREIIKAISKIQSQSTSNPSSISQAAAVEALNGTQDFIKERSDAFRERRDFVVNSLNNIKDISCLKPNGAFYVFP

SEQ ID NO: 124513 - protein, 296 aa, Unknown
  Bacterial polypetide isolated from the Sargasso Sea
IVNKFKRENNLDYLPEEISVGSGGKQIIFNAILATVNPGDEVIIPAPYWVSYPDIVLLAGGTPRIIKCLEKNNFKLTPNELEKNINKKTKWIIINSPSNPTGSGYTQKELEALGEVLKKNKNVFILSDDIYEHITYDDFKFFTIAQIKELKERTLTMNGVSKSYAMTGWRIGYGAGPKDIIKAIAKLQSQSTTNPSSISQAAAVEALNGTQDFIKTRSDSFKERRDFVVKYLNSIKGLSCLKPNGAFYVFPNCKEFLGKKSKLKTDKDFVEKLLEESLVAVVQGSAFGLDGYFRIS

SEQ ID NO: 124514 - protein, 272 aa, Unknown
  Bacterial polypetide isolated from the Sargasso Sea
IGLGAGEPDFDTPDNIKDAAIKAIKDGDTKYTAVDGTKALKEAIVKKFKRENNLSYTIDQVTVGAGGKHVIYNLMMATLNKGDEVIIPAPYWVSYPDIVLLAGANPVVIECSEQQSFKLSAKDLESKINTNTKWLILNSPSNPTGACYSEQEIRNLSQVLKRNPHVNILSDDIYEHITYEGFKFFSIAQIPEIKSKVFTMNGVSKSYAMTGWRIGYAAGDREIIKAIAKIQSQSTTNPSSISQAAAVEALNGKQDFIQIRSKAFQERRDFVV

SEQ ID NO: 124515 - protein, 168 aa, Unknown
  Bacterial polypetide isolated from the Sargasso Sea
MTYIAERLKRIKPSMTVGINVKANALRAAGKDVLVLAAGEPDFDTPENIRKAANKAIESGETRYVPGKGTPLLQNAIQKKFFRDNDLHYELDEIMVGVGGKHIIYNAMMATLNPGDEVIIPAPYWVSYPDIVLLAEGKPIIVECSELQGFKLTPSLLEENITSNTKWL

SEQ ID NO: 124516 - protein, 292 aa, Unknown
  Bacterial polypetide isolated from the Sargasso Sea
NRLFRFHLSLTVKISQKAREMTRDEKKVISLSSGEPDFDTPDHIKLFAIEAIKNGFTKYTQVDGTDQLKDSIVKKFKYENNLNYKNENITVGVGGKHVIYNLFMSSIDEGDEVLIPSPYWVSYPDIVNLCNGKPIIVETKFENGFKVKPEDLEKNITNKTKWVIINSPGNPTGSVYSEEELRKIADVIRKYKNVFILSDDIYEHILYKNTKFTNILNISPDLYDRTFIVNGVSKVFSMTGWRIGYGAGHKELIKSISKIQSQSTTNPCSISQMAAMFALENEKTFLKDWLVK

SEQ ID NO: 124517 - protein, 284 aa, Unknown
  Bacterial polypetide isolated from the Sargasso Sea
NLKRIKPSPTIAVTTKAREMRAAGKDVIGLGAGEPDFDTPDNIKTAAIEAIKKGDTKYTAVDGTPALKKAIVEKFQRENNLSYTTDQITVGTGGKQVLYNTFMATLNKGDEVIIPAPFWVSYPDMVLLAGGTPKIVKCDEKDGFKISAKKLKKVISKKTKWLILNSPSNPTGAGYTKKEIEELGEVLLKNKNVFILSDDIYEHIRYDNFNFYTIAQIPKLKERTLTMNGVSKSYAMTGWRIGYAAGPKEIITAIRKIQSQSTSNPSSISQAAAVEALNGQQDFI

SEQ ID NO: 124518 - protein, 246 aa, Unknown
  Bacterial polypetide isolated from the Sargasso Sea
MSIISDSLKRIKPSPTIAVTQKARELRAAGKDVIGLGAGEPDFDTPNNIKNAAIKAIRGGDTKYTAVDGTPALKKAIIKKFKKENNLKYSNEEITVGTGGKQVLYNTFIATLNKGDEVIIPAPFWVSYPDMVLLAGGKPKIIKCSEIDNFKLTPKKLRRAISKKTKWLILNSPSNPTGVSYTKAEIKKLSQILIKHKRIHILSDDIYEHITYDKEKFFTIAQVTSLKNRTITMNGVSKSYAMTGWR

SEQ ID NO: 124519 - protein, 261 aa, Unknown
  Bacterial polypetide isolated from the Sargasso Sea
MSIISDSLKRIKPSPTIAVTQKARELRAAGKDVIGLGAGEPDFDTPDNIKEAAIKAIKKGDTKYTAVDGTPILKQAIVDKFKRENNLNYTPDQITVGAGGKHVIYNLMMATLNKGDEVIIPAPYWVSYPDIVLLAGATPIVVECSEEQGFKLTAKDLEAAITNNTKWVILNSPSNPTGACYSEQEIKNLAHVLKRKPHVNVLSDDIYEHIIYEGFKFFTIAQIPELKNKVVTMNGVSKSYAMTGWRIGYAAGDKEVIKAMR

SEQ ID NO: 124520 - protein, 249 aa, Unknown
  Bacterial polypetide isolated from the Sargasso Sea
QEDPDFDTPDNIKDAAIKAIRDGDTKYTAVDGTPALKKAIVDKFKRENNLNYSTEQITVGTGGKQVLYNAFMATLNKGDEVIIPAPYWVSYPDMVLLAGGKPKIVKCKQEDGFKLTPKKLNKAISKKTKWLILNSPSNPTGAGYSKDEIEGLAKVLIKNKKIHILSDDIYEHIKYDNFNFFTIAQISKLKDRTLTMNGVSKSYAMTGWRIGYAAGPKDIIKSIGKIQSQSTSNPSSVSQAAAVEALNGT

SEQ ID NO: 124521 - protein, 255 aa, Unknown
  Bacterial polypetide isolated from the Sargasso Sea
MSIISDSLKRIKPSPTLAVTQKARELKAAGKDVIGLGAGEPDFDTPDNIKEAAIEAIKKGDTKYTAVDGTPALKNAIVNKFKRENNLNYKVDEITVGAGGKHVIYNLMMATLNKGDEVIIPAPYWVSYPDIVLLAGGTPIVIECSEEQEFKLTAKDLESKINNNTKWVILNSPSNPTGACYSEQELKNLSQVLKRKPHVNILSDDIYEHVTYDGIKFFTMAQVPELKSRVVTMNGVSKSYAMTGWRIGYAGGPKD

SEQ ID NO: 124522 - protein, 297 aa, Unknown
  Bacterial polypetide isolated from the Sargasso Sea
RENNLDYTQDQVTVGTGGKQVLYNTFMATLNKGDEVIIPAPYWVSYPDMVLLAGGKPKIVKCEEKDGFKLTASKLKKVISKKTKWLILNSPSNPTGAGYSKDEIENLAKILVKNKKVYILSDDIYEHIKYDNFNFFTIAQISKLKDRTLTMNGVSKSYAMTGWRIGYAAGPKDIIKAIGKIQSQSTSNPSSVSQAAAVEALNGAQDFIQERSNAFKERRDFVVKSLNNIKGITCLTPNGAFYVFPSCKGLLNKKTKLKTDTDFVQKLLEKSNVAVVQGSAFGLDGYFRISYATSMEN

SEQ ID NO: 124523 - protein, 205 aa, Unknown
  Bacterial polypetide isolated from the Sargasso Sea
MSIISDSLKKIKPSPTIAVTQKARELKAAGKDVIGLGAGEPDFDTPDNIKEAAIKAINEGDTKYTAVDGTPALKKAIVEKFKKENNLDYTTDQITVGAGGKHVIYNAMMATLNEGDEVIIPAPYWVSYPDIVLLAGGKPVVMECDEKQGFKINPSDLEKFITPKTKWIILNSPSNPTGACYSEKDIKAIAAVLENHKHIYILSDD

SEQ ID NO: 124524 - protein, 280 aa, Unknown
  Bacterial polypetide isolated from the Sargasso Sea
GAGEPDFDTPENIKQAGIDAINRGDTKYTAVDGTPDLKKAIVNKFKRENNLEYSTNEITVGTGGKQVIYNALMATLNKGDEVIIPAPYWVSYPDMVLLAGGNPKIIKCKENDGFKLTPKNLKKAITKKTKWLILNSPSNPTGASYTKEEIVALSEVLIKNKNVHILSDDIYEHITYDNFNFFTIAQVSKLKNRTLTMNGVSKSYAMTGWRIGYAAGPKEIIKAINKIQSQSTSNPSSISQAAAVEALNGTQDFIQERSNAFKERRDFVVNSLNNIKGISC

SEQ ID NO: 124525 - protein, 257 aa, Unknown
  Bacterial polypetide isolated from the Sargasso Sea
MSIISNNLKRIKPSPTIAVTQKARELRAAGKDVVGLGAGEPDFDTPVNVKKAAIKAIRDGDTKYTAVDGTPALKKAILKKFKRENKLNYKLDEITVGTGGKQVLYNTFMATLNKGDEVIIPAPFWVSYPDMVLLAGGKPKIVKCDEKDGFKITPAKLKTAITKRTKWIILNSPSNPTGSGYSKSEIQKLAKVLIKNKKVHILSDDIYEHVKYDNFKFFTIAQISKLKSRTLTMNGVSKSYAMTGWRIGYAAGPKEII

SEQ ID NO: 124526 - protein, 294 aa, Unknown
  Bacterial polypetide isolated from the Sargasso Sea
AFSATINSGDEVIIPAPYWVSYPDIVILNDGKPVIVECGEQNGFKITPEDLEKHINPKTKWLMLNSPSNPTGSMYSKDELTALGDVLKKHENIFILSDDIYEKIVYDTNEFKTIAEVCPFLKERTLTMNGLSKSYCMTGWRVGYAAGPTNLINAMNKVQSQNVSSTASISMAASVEALNGDQSFILSNNESFLRRRNLVVKHLNETPGLSCRTPEGAFYVFASCKGVLGKTTQSGKKLSKDGDFMDYLLEEVGVAGVQGSAFGLEGFFRISYATSDSILEDACQRIKEACAKLS

SEQ ID NO: 124527 - protein, 293 aa, Unknown
  Bacterial polypetide isolated from the Sargasso Sea
VLYNVFMATLNPGDEVIIPAPYWVSYPDMVLLAGGTPKIVKCSEENEFKITPDELKKAIGKKTKWLVINSPSNPTGSCYTKKEIEDLSKILIDNKQVFILSDDIYEHITYDNFKFFTTAQIDSLKDRTLTMNGVSKSYSMTGWRIGYGAGPKEIIKAVAKIQSQSTTNPSSISQAAAVEALNGTQDFIKIRADSFKERRDYVVKTLNSINGLSCLKPSGAFYVFPNCKKLIGEKTKLKTDKEFVEKLLEKAEVAVVQGSAFGLDGYFRISYATSMDNLKKALERIKSFCESLN

SEQ ID NO: 124528 - protein, 292 aa, Unknown
  Bacterial polypetide isolated from the Sargasso Sea
MGYTKYTNVEGIPELKQAIVNKFKNDNEIDYNIDQVIVGVGGKQILFNALFASLNSGDEVIIPTPYWVSYPDMTILAGGTPKFLNCNEENDFKINPSELDNIISKKTKWIILNSPSNPSGSCYTKQELNNIADVLRQHKDVNVITDDIYEYIIYDDFKFYTLAQIAPDLKDRILTVNGVSKSYCMTGWRIGYAAGRKDLILAMMKIQGQSTSNPTSISQYAALAGLNGDRKFLEPCLKAFNERKNLVVEGLNSIDGISCLMPKGAFYAYPNVSGLIGKKTKNGKFLSNDKRS

SEQ ID NO: 124529 - protein, 302 aa, Unknown
  Bacterial polypetide isolated from the Sargasso Sea
LKRIKPSPTIAVTQKARELRAAGKDVIGLGAGEPDFDTPNNIKNAAIKAIRGGDTKYTAVDGTPALKKAIIKKFKKENNLKYSNEEITVGTGGKQVLYNAFMATLNRGDEVIIPAPFWVSYPDMVLLAGGKPKIIKCNESDNFKLTPQKLRKAISKKTKWLILNSPSNPTGASYTKAEIKKLSQVLIKYKKIQILSDDIYEHITYDKVKFFTIAQISSLKNRTLTMNGVSKSYAMTGWRIGYAGGPKEIIKAIRKVQSQSTSNPSSVSQAAAVEALNGTQNFIKIRSKEFKKRRDFVVKSLN

SEQ ID NO: 124530 - protein, 254 aa, Unknown
  Bacterial polypetide isolated from the Sargasso Sea
IGLGAGEPDFDTPDNIKAAGKQAIDEGLTKYTPIPGTQALREAICAKFKRDNDLEYKPDQVIVSCGGKQVIYNAFMATLDPGDEVIVPAPYWVSYPDMVLLAEGTPVFVDGVEANNFKITAEGLEAAITPKTKWVLLNSPSNPTGAAYSRDELKALTDVLMRHDHVWVMTDDMYEHVVYDGFEFSTPAQIEPGLFDRTLTLNGVSKAYSMTGWRLGYGAGPVDLIKAMIVVQSQSSTHTSSISQVAAVEALNGT

SEQ ID NO: 124531 - protein, 227 aa, Unknown
  Bacterial polypetide isolated from the Sargasso Sea
HLSYEIDQISVGTGGKQVLYNAFMATINKGDEVIIPAPYWVSYPDIVLLAGGKPKIIKCDEKNNFKLTPEKLKKAVSKKTKWIIINSPSNPTGSGYTKDEIIALSKILMKYKNLYILSDDIYEHITYDSFKFFTIAQIEKLKSRTLTMNGVSKSYSMTGWRIGYAAGPKEIIKAMAKIQSQSTSNPTSISQAAAVEALNGTQDFISERSNSFKERRNFVVDSLNNIK

SEQ ID NO: 124532 - protein, 148 aa, Unknown
  Bacterial polypetide isolated from the Sargasso Sea
MNIVADRLSRIKPSMTVGINTKANALRAEGKDILVLAAGEPDFDTPVNIREAAIKAMNEGLTRYVPGKGTPALQNAIINKFKKENNLEYSNDEIMVGVGGKHIIYNAMMATLNPGDEVIIPAPYWVSYPDIVLLAEGKPVIVKCSEKN

SEQ ID NO: 124533 - protein, 181 aa, Unknown
  Bacterial polypetide isolated from the Sargasso Sea
MPIKLSHNIENIPPSATMLMTQLARDLKAEGKNIISMSAGEPDFDTPQNIKEAAINAINKGETKYTAVDGIDDLKQAIIDKFKNDNNLDYEKSNISVAPGGKSIIFNAILSSINPGDEVIIPAPYWVSYPDIVKLAGGNPVIIETSPDNNFKKSPDNLEKNITEKTKGLFINSPSNPTGQV

SEQ ID NO: 124534 - protein, 268 aa, Unknown
  Bacterial polypetide isolated from the Sargasso Sea
TSKAREMRAAGKDIIGLGAGEPDFDTPDNIKEAAIEAIKKGDTKYTAVDGTPALKKAVQNKFSRENGLSYDLDQITVGTGGKQVLYNAFMATVNKGDEVIIPAPYWVSYPDIILLAGGKPKIVKCEEKDNFKLTPKKLEKAISKKTKWVILNSPSNPTGSAYTKKEIEGLSKILIKYKKIYILSDDIYEHIIYDNFKFFTIAQIKTLKDRTLTMNGVSKSYSMTGWRIGYAAGPKEIIKAIAKIQSQSTSNPTSISQAAAVEALNENK

SEQ ID NO: 124535 - protein, 237 aa, Unknown
  Bacterial polypetide isolated from the Sargasso Sea
MSIVSNSLKRIKPSPTIAVTSKAREMKAAGKDVIGLGAGEPDFDTPENIKQAAIAAINNGETKYTAVDGTPKLKKAIQGKFLRENNLQYDLDQITVGTGGKQVLYNAFMATINKGDEVIIPAPYWVSYPDIILLAGGKPKIVKCEEKDGFKLTAKNLKKAINKKTKWLILNSPSNPTGVGYSKEEIIQLSKILEKNKKIFILSDDIYEHITYDNFKFFTIAQIDKLKKRTLTMNGVS

SEQ ID NO: 124536 - protein, 174 aa, Unknown
  Bacterial polypetide isolated from the Sargasso Sea
MSIVSNSLKRIKPSPTIAVTSKAREMRAAGKDVIGLGAGEPDFDTPDNIKEAAIEAIRKGDTKYTAVDGTPALKKAIQAKFSRENDLSYELDQISVGTGGKQVLYNAFMATINKGDEVIIPAPYWVSYPDIVLLAGGKPKIIKCDEKNNFKLTPEKLIKAVSKKTKWIIINSPS

SEQ ID NO: 124537 - protein, 218 aa, Unknown
  Bacterial polypetide isolated from the Sargasso Sea
IKAIKDGDTKYTAVDGTPSLKKAIIKKFKRENNLDYQIDQITVGTGGKQVIYNAMMATLNDGDEVIIPAPYWVSYPDIVLLAGGTPIILECNEKQGFKVDPAALEKSITKKTKWIILNSPSNPTGACYSEKDIKEIGKILEKHPHVFILSDDIYEHVIYGNFKFFTIAQIDNLKDRVLTMNGVSKAYSMTGWRIGYAAGPKDIIKAIAKIQSQSTTNQ

SEQ ID NO: 124538 - protein, 300 aa, Unknown
  Bacterial polypetide isolated from the Sargasso Sea
MSYELDQISVGTGGKQVLYNAFMATINKGDEVIIPAPYWVSYPDIVLLAGGKPKIIKCNEKNNFKLTPEKLTKAVSNKTKWIIINSPSNPTGSGYTKDEIIALSKILTKYKNLYILSDDIYEHITYDGFKFFTIAQIEKLKSRTLTMNGVSKSYSMTGWRIGYAAGPKEIIKAMAKIQSQSTSNPTSISQAAAVEALNGTQDFISERSNSFKERRNFVVDSLNDIKGISCLSPEGAFYVFPNCKKLLNKKTKLKTDKDFVEKMLEKAEVAVVQGSAFGLDGYFRISYATSMENLKKARKE

SEQ ID NO: 124539 - protein, 165 aa, Unknown
  Bacterial polypetide isolated from the Sargasso Sea
MSIVSNSLKRIKPSPTIAVTSKAREMRAAGKDVIGLGAGEPDFDTPDNIKEAAIEAIKRGDTKYTAVDGTPTLKKAIQGKFKRENNLSYELDQISVGTGGKQVLYNVFMATLNPGDEVIIPAPYWVSYPDMVLLAGGKPKIVKCSEKNEFKITPDELKKAIGKKN

SEQ ID NO: 124540 - protein, 263 aa, Unknown
  Bacterial polypetide isolated from the Sargasso Sea
KAIQAKFSRENDLSYELDQISVGTGGKQVLYNAFMATINKGDEVIIPAPYWVSYPDIVLLAGGKPKIIKCDEKNNFKLTPEKLKKAVSKKTKWIIINSPSNPTGSGYTKDEIIALSKILIKYKNLYILSDDIYEHITYDGFKFFTIAQIEKLKSRTLTMNGVSKSYSMTGWRIGYAAGPKEIIQAMAKIQSQSTSNPTSISQAAAVEALNGTQDFILERSNSFKERRNFVVDSLNNIKGISCLSPEGAFYVFPNCKKLLNNKT

SEQ ID NO: 124541 - protein, 192 aa, Unknown
  Bacterial polypetide isolated from the Sargasso Sea
MSIISDILKRIKPSPTIAVTQKARELKAAGKDVIGLGAGEPDFDTPDNVKDAAIKAIKEGDTKYTAVDGTPELKKAISEKFKRENNLVYSTDQITVGAGGKHVIYNLMMATLNKGDEVIIPAPYWVSYPDIVMLAGANPIVVECSEEQGFKLTAKDLESVITNNTKWVILNSPSNPTGACYTEQEIRNLAQV

SEQ ID NO: 124542 - protein, 179 aa, Unknown
  Bacterial polypetide isolated from the Sargasso Sea
MSIISDSLKRIKPSPTIAVTQKARELRAAGKDVIGLGAGEPDFDTPDNIKEAAIKAIKDGDTKYTAIDGTPVLKQAIVDKFKRENNLTYSPDQITVGAGGKHVIYNLMMATLNKGDEVIIPAPYWVSYPDIVLLAGANPIVVECSEEQGFKLSAKDLESVITNNTKWGNIKFTIKSNRS

SEQ ID NO: 124543 - protein, 292 aa, Unknown
  Bacterial polypetide isolated from the Sargasso Sea
MSIVSNSLKRIKPSPTIAVTSKAREMRAAGKDVIGLGAGEPDFDTPDNIKEAAIKAIRKGDTKYTAVDGTPALKKAIQAKFVRENNLSYELDQISVGTGGKQVLYNAFMATINKGDEVIIPAPYWVSYPDIVLLAGGKPKIIKCDEKNNFKLTPETLTKAVSKKTKWIIINSPSNPTGSSYTKDEIVALSKILIKYKNLYILSDDIYEHITYDGFKFFTIAQIEKLKSRTLTMNGVSKSYSMTGWRIGYAAGPKEIIKAMAKIQSQSTSNPTSISQAAAVEALNGTQDFILE

SEQ ID NO: 124544 - protein, 283 aa, Unknown
  Bacterial polypetide isolated from the Sargasso Sea
PSLTIATNMKAQELKRAGKDVIVLAAGEPDFDTPDHIKSAAIDAINKGFTKYVPGKGTPDLQVAIQKKFQRDNNLDYELGNITVGVGGKHIIYNAFSATINQGDEVIIPAPYWVSYPDIVILNDGKPIIVECGEQNGFKITPEDLEKNISSKTKWLMLNSPSNPTGSMYTKEELVAIGDVLKSYENIFILSDDIYEKIVYDTNEFKTIAEVCPFLKERTLTMNGLSKSYCMTGWRVGYAAGPISLINAMNKVQSQNVSSTASISMAASVEALNGDQSFILSNQ

SEQ ID NO: 124545 - protein, 153 aa, Unknown
  Bacterial polypetide isolated from the Sargasso Sea
GAGEPDFDTPDNIKEAAIQAIKRGDTKYTAVDGTPALKKAIKEKFSRENNLTYELDQISVGTGGKQVLYNAFMATLNPGDEVIIPAPYWVSYPDMVLLAGGKPKVVKCSEKNEFKITPVELKKAISKKTKWLIINSPSNPTGSCYTKKEIEEL

SEQ ID NO: 124546 - protein, 145 aa, Unknown
  Bacterial polypetide isolated from the Sargasso Sea
MSIVSNSLKRIKPSPTIAVTSKAREMRAAGKDVIGLGAGEPDFDTPDNIKEAAIQAIKKGDTKYTAVDGTPILKKAIQGKFKRENNISYEVDQISVGTGGKQVLYNVFMATLNPGDEVIIPAPYWVSYPDMVLLAGGTPKIVKCS

SEQ ID NO: 124547 - protein, 292 aa, Unknown
  Bacterial polypetide isolated from the Sargasso Sea
MSLFSAVEMAPRDPILGLNEAFNADTRTTKVNLGVGVYYNEEGRIPLLRAVAEAEKARIEAHAPRGYLPIEGIAAYDKAVQELLFGKGAALIEDGRVITTQALGGTGALKIGADFLKRLLPDATVAISDPSWENHRALFESAGFPVQNYRYYDPFSNGVNRGGMLEDLRNLPARSIVVLHACCHNPTGVDLQLEDWKAVLDVLREREHVPFLDIAYQGFGDGIEQDAEAVRLFAESGLEFFVSSSFSKSFSLYGERVGALSLVTSSREESTRVLSQLKRVIRTNYSNPPTHG

SEQ ID NO: 124548 - protein, 145 aa, Unknown
  Bacterial polypetide isolated from the Sargasso Sea
MSIISDSLKKIKPSPTIAVTQKARELKAAGKDIIGLGAGEPDFDTPDNIKDAAIKAINEGDTKYTAVDGTPALKKAIVEKFKKENNLDYTTDQITVGAGGKHVIYNAMMATLNSGDEVIIPAPYWVSYPDIVLLAGGKPVIMECG

SEQ ID NO: 124549 - protein, 267 aa, Unknown
  Bacterial polypetide isolated from the Sargasso Sea
MISNRVNNIKPSLTIATNMKAQELKRAGKDVIVLAAGEPDFDTPEHIKSAAIKAINNGFTKYVPGKGTPDLQLAIQKKFQRDNNLDYELGNITVGVGGKHIIYNAFSATINSGDEVIIPAPYWVSYPDIVILNDGKPVIVECGEQNDFKITPEDLEKHINPKTKWLMLNSPSNPTGSMYSKEELIALGDVLQKHENVFILSDDIYEKIVYDTNEFKTIAEVCPFLKERTLTMNGLSKSYCMTGWRVGYAAGPTNLINAMNKVQSQNV

SEQ ID NO: 124550 - protein, 191 aa, Unknown
  Bacterial polypetide isolated from the Sargasso Sea
MSIISDSLKRIKPSPTIAVSQKARELKAAGKDIIGLGAGEPDFDTPDNIKQAAIKAIKDGDTKYTAVDGTLQLKKAIVEKFKRENNLNFSIDEITVGVGGKHVIYNLMMTTLNKGDEVIIPAPYWVSYPDIVLLAGANPVVVECPEEQGFKLSAKDLEAKINNNTKWVILNSPSNPTGACYTEQEIKNLSH

SEQ ID NO: 124551 - protein, 308 aa, Unknown
  Bacterial polypetide isolated from the Sargasso Sea
RQDVIGLGAGEPDFDTPNNIKEAAIEAIKRGETKYTAVDGTPVLKKAIQQKFLRENNLSYDLDQITVGTGGKQVLYNAFMATVNNGDEVIIPAPYWVSYPDIILLAGGKPKIVKCDEADQFKLTPKKLSKAISKKTKWVIINSPSNPTGSAYTKKEIEALSKILLKHKKIFILSDDIYEHITYDNFNFFTIAQIKDLKHRTLTMNGVSKSYSMTGWRIGYAAGPKEIIKAIAKIQSQSTSNPTSISQAAAVEALNGTQDFIETRASSFKERRNFVVDSLNNINGISCLKPQGAFYVFPNCKKLLGKKT

SEQ ID NO: 124552 - protein, 295 aa, Unknown
  Bacterial polypetide isolated from the Sargasso Sea
FKRENNLNYTTDQITVGVGGKHVIYNLMMATLNKGDEVIIPAPYWVSYPDIVLLAGANPIVIECSEDQGFKLSAKDLEAKITNNTKWLILNSPSNPTGACYSEQEIKNLSQVLKRNPHVNILSDDIYEHISYDDFKFFTIAQIPEIKNKVITMNGVSKSYAMTGWRIGYAAGDKDIIKAIAKIQSQSTTNPSSISQAAAVEALNGKQDFIPVRAKAFQERRDFVVNSLNAIEGISCLKPEGAFYVFPNCKRLIGKKDKSGKKITNDSDFVQSLLENNDVAVVQGSAFGLEGFFRI

SEQ ID NO: 124553 - protein, 187 aa, Unknown
  Bacterial polypetide isolated from the Sargasso Sea
MSIVSNSLKRIKPSPTIAVTSKAREMKAAGRDVIGLGAGEPDFDTPDNIKEAAIEAIKRGDTKYTAVDGTPKLKKAIQGKFSRENNLSYDLDQISVGTGGKQVLYNVFMATINPGDEVIIPAPYWVSYPDMVLLAGGKPKIVKCSEKNEFKITPEELKKAIGNKTKWLVINSPSNQTGSCYTKKDIE

SEQ ID NO: 124554 - protein, 249 aa, Unknown
  Bacterial polypetide isolated from the Sargasso Sea
MSIISDSLKRIKPSPTLAVTQKARELKAAGKDVIGLGAGEPDFDTPDNIKEAAIEAIKKGDTKYTAVDGTPALKDAIVNKFKRENNLNYKVDEITVGAGGKHVIYNLMMATLNKGDEVIIPAPYWVSYPDIVLLAGGTPIVIECSEEQEFKLTAKDLESKINNNTKWVILNSPSNPTGACYSEQELKNLSQVLKRKPHVNILSDDIYEHVTYDGLKFFTMAQVPELKSRVVTMNGVSKSYAMTGWRIGY

SEQ ID NO: 124555 - protein, 311 aa, Unknown
  Bacterial polypetide isolated from the Sargasso Sea
PKYTAVDGTPTLKKAIVNKFKKENNLEYSIDEITVGTGGKQVIYNAFMATLNKGDEVIIPAPYWVSYPDMVLLAGGNPKIVKCNEEDRFKLTTKNLKKAITKKTKWLILNSPSNPTGATYSKEEIEALSEILIKNKNVYILSDDIYEHITYDNFNFFTIAQISKLKKRTLTMNGVSKSYAMTGWRIGYAGGPKEIIKAISKIQSQSTSNPSSISQAAAVEALNGTQDFIQERAEAFKERRDFVVDSLNNIKGISCLKPSGAFYVFPSCKKLLGKKTKLKTDTEFVEKLLEKANVAVVQGSAFGLDGYFRIS

SEQ ID NO: 124556 - protein, 175 aa, Unknown
  Bacterial polypetide isolated from the Sargasso Sea
MLRVLEYFSKNLDDLFICSSYSKNFGLYSERVGCLIYTNRRNRNTDNLLSQLKKTARTIYSNPPAHGSDIVREILQDDNLRVMWESELKILRERIQTMRISLDSNLKELKCSKDFSYIVNQKGMFSFTGLSEKDVEKLKKDYSIYIVNSGRVNIAGITTNNVKYIAESINKVTSY

SEQ ID NO: 124557 - protein, 253 aa, Unknown
  Bacterial polypetide isolated from the Sargasso Sea
MSIISNSLKRIKPSPTIAVTQKARELRATGKDVIGLGAGEPDFDTPDNIKKAAIKAIKSGDTKYTAVDGTPALKKAIVDKFKRENKLNYSIDQITVGTGGKQVLYNTFMATLNKGDEVIIPAPFWVSYPDMVLLAGGKPKIVKCTEQEGFKLTAEKLKKAITKKTKWLILNSPSNPTGAGYSKKEIQDLAKVLVRKKKIFILSDDIYEHVRYDNFKFFTIAQLPKLKKRTLTMNGVSKSYAMTGWRIGYAAGP

SEQ ID NO: 124558 - protein, 304 aa, Unknown
  Bacterial polypetide isolated from the Sargasso Sea
SDSLKRIKPSPTIAVTQKARELRTAGKDVIGLGAGEPDFDTPENIKKAAIKAIKRGDTKYTAVDGTPELKKAIIKKFKRENKLNYSLDQITVGTGGKQVLYNAFMATLNKGDEVIIPAPFWVSYPDMVLLAGGKPKIIKCTEKEGFKLTPKKLKKAISKKTKWIILNSPSNPTGAGYSKKEINDLAKILIRNKKIFILSDDIYEHVRYDNFNFFTIAQISKLKDRTLTMNGVSKSYAMTGWRIGYAAGPKEIIKAIGKIQSQSTSNPSSISQAAAVEALNGKQGFIKTRAKAFKDRRNFVCKSS

SEQ ID NO: 124559 - protein, 269 aa, Unknown
  Bacterial polypetide isolated from the Sargasso Sea
NKGDEVIIPAPYWVSYPDIVLLAGGTPIVIECSEEQAFKLTAKDLESKINNNTKWVVLNSPSNPTGACYSEQELKNLSQVLKRKPHVNILSDDIYEHVTYDGLKFFTMAQVPELKSRVVTMNGVSKSYAMTGWRIGYAGGPKDIIKAIAKIQSQSTTNPSSISQAAAVEALTGKQDFISIRSKAFQERRDFVVNSLNSMNGINCLKPEGAFYVFPNCKELIGKKDKSGKKIENDTDFVQSLLENYGIAVVQGSAFGLEGFFRISYATSM

SEQ ID NO: 124560 - protein, 153 aa, Unknown
  Bacterial polypetide isolated from the Sargasso Sea
MSIVSNNLKRIKPSPTMAVTQKAKELKASGKDIIGLGAGEPDFDTPDNIKQAAIKAIKDGDTKYTTVDGTPTLKKAIINKFKRENNLDYLTDQITVGTGGKQVIYNAMMATLNEGDEVIIPAPYWVSYPDIVLLAGGLPIILECNEKQGFKIN

SEQ ID NO: 124561 - protein, 281 aa, Unknown
  Bacterial polypetide isolated from the Sargasso Sea
INVKANALRAEGKDVLVLAAGEPDFNTPENIRKAAYKAIENGQTRYVPGKGTPDLQKAIQKKFIRDNNLHYELDEIMVGVGGKHIIYNAMMATINSGDEVIIPAPYWVSYPDIVLLAEGKPIIVQCPESQDFKITAAQLEENITSKTKWLMLNSPSNPTGAVYSSEELESIANVLLKYPHVLIMLDDIYEKIIYEDTKFTTLGSLEPKLKERCLTLNGVSKSYCMTGWRLGYCGAPKNIISAMNKIQSQSNSSTSSISMAAAVEALNGPQDFIKEHNIKFL

SEQ ID NO: 124562 - protein, 304 aa, Unknown
  Bacterial polypetide isolated from the Sargasso Sea
SMSIISDSLKRIKPSPTIAVTQKARELRAAGKDVIGLGAGEPDFDTPDNIKEAAIKAIKKGDTKYTAVDGTPILKQAIVDKFKRENNLNYTPDQITVGAGGKHVIYNLMMATLNKGDEVIIPAPYWVSYPDIVLLAGATPIVVECSEEQGFKLTAKDLEAAITNNTKWVILNSPSNPTGACYSEQEIKNLAHVLKRKPHVNVLSDDIYEHIIYEGFKFFTIAQIPELKNKVVTMNGVSKSYAMTGWRIGYAAGDKEVIKAIAKIQSQSTTNPSSISQAAAVEALNGKQEFIPIRSLAFQERRDF

SEQ ID NO: 124563 - protein, 300 aa, Unknown
  Bacterial polypetide isolated from the Sargasso Sea
NIKNAAIKAIKRGDTKYTAVDGTPDLKKAIIKKFKRENKLNFTSDQITVGTGGKQVLYNAFMATLNKGDEVIIPAPYWVSYPDMVLLAGGKPKIVKCTAAEGFKLTPKKLKKAISKKTKWIILNSPSNPTGAGYSKKEIYDLAKILIRNKKIFILSDDIYEHVRYDNFNFFTIAQVSKLKDRTLTMNGVSKSYAMTGWRIGYAAGPKEIIKAIGKIQSQSTSNPSSISQAAAVEALNGKQGFIKTRAKAFKERRDFVVKSLNNIKGINCLTPNGAFYVFPSCKGLLNKKTKLKTDSHFVQ

SEQ ID NO: 124564 - protein, 256 aa, Unknown
  Bacterial polypetide isolated from the Sargasso Sea
MSIISVNLKRIKPSPTIAVTQKARELRAAGKDVIGLGAGEPDFDTPDNIKHAAIQAIKDGDTKYTAVDGTPALKKAIVEKFKRENNLIFSTDQITVGTGGKQVLYNAFMATLNKGDEVIIPAPYWVSYPDMVLLAGGKPKIVKCDEKDSFKLTPQKLKKVITKKTKWLILNSPSNPTGAGYTKKEIEDLSKILIKNKRVHILSDDIYEHIRYDNFDFFTIAQISKLKDRTLTMNGVSKSYAMTGWRIGYAAGPKDI

SEQ ID NO: 124565 - protein, 290 aa, Unknown
  Bacterial polypetide isolated from the Sargasso Sea
MPIKLSHNIENIPPSATMLMTQLARDLKAEGKNIISMSAGEPDFDTPKTIKEAAVDAINRGETKYTAVDGIDELKQAVIDKFKNDNNLDYEKGNISVAPGGKSIIFNAILSTINPGDEVIIPAPYWVSYPDIVKLAGGNPVIIETSPDNNFKISPDDLEKNITEKTKWLFINSPSNPTGQVYSKAELINLTEVIKKHKNLYILSDDIYEYIRYQNNERFYTIAELDEEIFSRTLTMNGVSKAYSMTGWRIGYCGGPIEIINAMRKLMGQSTSNPSSISQWATVEALNGSK

SEQ ID NO: 124566 - protein, 304 aa, Unknown
  Bacterial polypetide isolated from the Sargasso Sea
TSKAREMKAAGKDVIGLGAGEPDFDTPDNIKEAAIEAIRKGDTKYTAVDGTPALKKAIQAKFSRENDLSYELDQISVGTGGKQVLYNAFMATINKGDEVIIPAPYWVSYPDIVLLAGGKPKIIKCYEKNNFKLTPEKLAKAVSKKTKWIIINSPSNPTGSGYTKDEIIALSKILIKYKNLYILSDDIYEHITYDGFKFFTIAQIEKLKSRTLTMNGVSKSYSMTGWRIGYAAGPKEIIKAMAKIQSQSTSNPTSISQAAAVEALNGTQDFILERSNSFKERRNFVVDSLNNIKGVSCLSPEGAF

SEQ ID NO: 124567 - protein, 228 aa, Unknown
  Bacterial polypetide isolated from the Sargasso Sea
MSIISDSLNKIKPSPTIAVTQKARELKAAGKDVIGLGAGEPDFDTPDNIKQAAIKAINDGDTKYTAVDGTPALKKAIVEKFKKENNLDYTTDQITVGAGGKHVIYNAMMATLNDGDEVIIPAPYWVSYPDIVLLAGGKPVVMECDEKQGFKINPSDLEKFITPKTKWIILNSPSNPTGACYSENDIKAIAAVLEKHNHVYILSDDIYEHVTYEKFKFFTIAQIESLKD

SEQ ID NO: 124568 - protein, 250 aa, Unknown
  Bacterial polypetide isolated from the Sargasso Sea
SNNLARVKPSPTITISSLATHMKSEGRDIISLSAGEPDFDTPDHIKNAAIEAIKSGQTKYTDPDGMRTLKEAVCEKFELENDLTYNPNQISIGTGGKQILYNALMATLNPGDEVIIPAPYWVSYPDMVLLAGGQPVFIEASAKNNYKISPAQLEGVITDKTKWFIFNSPSNPTGAGYSKNELKKLTEVLMKFPNVLIMTDDMYEHLAYDDFVFNTPAQVEPRLFDRTLTCNGVSKAYAMTGWRIGFAGGP

SEQ ID NO: 124569 - protein, 272 aa, Unknown
  Bacterial polypetide isolated from the Sargasso Sea
MPIKLSHNIENIPPSATMLMTQLARDLKAEGKNIISMSAGEPDFDTPKTIKEAAIDAINRGETKYTAVDGIDDLKQAVIDKFKNDNNLDYEKGNISVAPGGKSIIFNAILSTINPGDEVIIPAPYWVSYPDIVKLAGGNPVIIETSPDNNFKISPDDLEKNITEKTKWLFINSPSNPTGQVYSKAELINLTEVIKKHKNLYILSDDIYEYIRYQNNERFYTIAELDEEIFSRTLTMNGVSKAYSMTGWRIGYCGGPIEIINAMRKLMGQSTS

SEQ ID NO: 124570 - protein, 169 aa, Unknown
  Bacterial polypetide isolated from the Sargasso Sea
MSIISDSLKRIKPSPTIAVTQKARELRAAGKDVIGLGAGEPDFDTPENIKDAAIQAIKDGDTKYTAVDGTPALKKAIVEKFKRENNLDFTEDQITVGTGGKQVLYNAFMATLNKGDEVIIPAPYWVSYPDMVLLAGGKPKIVKCDEKEGFKLTAKKLQKVISKRTKWLI

SEQ ID NO: 124571 - protein, 279 aa, Unknown
  Bacterial polypetide isolated from the Sargasso Sea
MSIISDSLKRIKPSPTIAVTQKARELRAAGKDVIGLGAGEPDFDTPVNIKNAAIKAIKRGDTKYTAVDGTPELKKAIIKKFKRENKLNFTLDQITVGTGGKQVLYNAFMATLNKGDEVIIPAPFWVSYPDMVLLAGGKPKIVKCTAAEGFKLTPKKLKKAISKKTKWIILNSPSNPTGAGYSKKEIYDLAKILIRNKKIFILSDDIYEHVRYDNFNFFTIAQVSKLKDRTLTMNGVSKSYAMTGWRIGYAAGPKEIIKAIGKIQSQSTSNPSSISQAAA

SEQ ID NO: 124572 - protein, 273 aa, Unknown
  Bacterial polypetide isolated from the Sargasso Sea
MSIVSNSLKRIKPSPTIAVTSKAREMRAVGKDVIGLGAGEPDFDTPDNIKEAAIQAIKRGDTKYTAVDGTPTLKKAIKEKFSRENNLTYGLDQISVGTGGKQILYNAFMATLNPGDEVIIPAPYWVSYPDMVLLAGGKPKIVKCSEKNEFKITSAELKKAINKKTKWLIINSPSNPTGSCYTKKEIEDLSKILIKNKKIFILSDDIYEHITYDGFNFFTIAQIKALKDRILTMNGVSKSYSMTGWRIGYGAGPKELIKAMAKIQSQSTSNPSS

SEQ ID NO: 124573 - protein, 302 aa, Unknown
  Bacterial polypetide isolated from the Sargasso Sea
KGETKYTAVDGTPVLKEAIVNKFKRENNLIYKADEITVGAGGKHVIYNLMMATLNKGDEVIIPAPYWVSYPDIVLLAGGTPVVIECSEEQEFKLTAKDLESKINNNTKWVILNSPSNPTGSCYSEQELKNLSQVLKRKPHVNILSDDIYEHVTYDGLKFFTMAQVPDLKSRVVTMNGVSKSYAMTGWRIGYAGGPKDIIKAISKIQSQSTTNPSSISQAAAVEALNGKQDFISIRSKAFQERRDFVVNSLNSINGINCLKPEGAFYVFPNCKELIGKKDKSGKKIENDTDFVQSLLENIWYC

SEQ ID NO: 124574 - protein, 158 aa, Unknown
  Bacterial polypetide isolated from the Sargasso Sea
MSIISNSLKRIIPSPTIAVTQKARELRAAGKDVIGLGAGEPDFDTPVNIKSAAIKAIKSGDTKYTAVDGTPALKKAIIKKFKKENNLSYNTNQITVGTGGKQVLYNAFMATLNKGDEVIIPAPYWVSYPDMVLLAGGKPKFVKCDERDSFKLTPQKLK

SEQ ID NO: 124575 - protein, 240 aa, Unknown
  Bacterial polypetide isolated from the Sargasso Sea
HNFISERVNSIKPSPTIAVTSKARELKALGKDVIGLGAGEPDFDTPIHIKNAAIEAIKEGKTKYTAVDGIPELKQAICKKFLRDNNVGYDIDEITVGTGGKQVLFNALLATIDKGDEVIIPAPYWVSYPDMVVIAEGNPIILETSKESNFKVTYAQLNKKITSKTKWIVINSPSNPTGSCYSINELREIGKILDEHPHIGIISDDIYEKIVYDNFQFSTIASIFPKHKNRIITVNGVSKA

SEQ ID NO: 124576 - protein, 152 aa, Unknown
  Bacterial polypetide isolated from the Sargasso Sea
MSIVSNSLKRIKPSPTIAVTSKAREMRAAGKDVIGLGAGEPDFDTPDNIKEAAIQAIKKGETKYTAVDGTPKLKKAIQVKFKRENNLSYELDQISVGTGGKQVLYNVFMATLNPGDEVIIPAPYWVSYPDMVLLAGGTPKIVECSEKDEFKI

SEQ ID NO: 124577 - protein, 155 aa, Unknown
  Bacterial polypetide isolated from the Sargasso Sea
MNIVADRLSRIKPSMTVGINTKANALRAEGKDILVLAAGEPDFDTPVNIREAAIKAMNGGLTRYVPGKGTPALQNAIINKFKKENNLEYSNDEIMVGVGGKHIIYNAMMATLNPGDEVIIPAPYWVSYPDIVLLAEGKPVIVKCSEKNYFKLTPL

SEQ ID NO: 124578 - protein, 268 aa, Unknown
  Bacterial polypetide isolated from the Sargasso Sea
DYVVDAAIKAAADPKNHKYSAAAGLESLRQIIAKTTKNYSGFEINSDNVIVSNGGKQSILTAFLSTLDPGDEVIIPAPYWTTYPEAVKIAGGTPVFIETEKSNNFKVTVEQLEKSKTEKTKMLVWCSPSNPTGVVYTKGEAEEIYEWIFKNDLWILSDELYEHLVYEGETSPSPAIYDPELKNTIIVNGVSKSYSMTGWRVGWLIGNKSVIGLGKKIQSQATSNVSNVSQLAAEAALLNGLEVTNEMKKAFNRRRLFATEKIKSIPNL

SEQ ID NO: 124579 - protein, 156 aa, Unknown
  Bacterial polypetide isolated from the Sargasso Sea
MSIVSNSLKRIKPSPTMAVTSKAREMRAAGKDIIGLGAGEPDFDTPDNIKEAAIEAIRAGDTKYTAVDGTPALKKAIQNKFSRENGLSYELDQITVGTGGKQVLYNTFMATVNKGDEVIIPAPYWVSYPDIILLAGGNPKIVKCDEKDNFKLTPKK

SEQ ID NO: 124580 - protein, 189 aa, Unknown
  Bacterial polypetide isolated from the Sargasso Sea
MSIVSNTLKRIKPSPTIAVTSKAREMRAAGRDVIGLGAGEPDFDTPENIKEAAIQAIKKGDTKYTAVDGTPALKKAIQEKFQRENNLSYNLDQISVGTGGKQVLYNAFMATINKGDEVIIPAPYWVSYPDIILLAGGKPKIIKCEEKENFKLTPKKLQKALSKKTKWIILNSPSNPTGAAYTKKEIEDL

SEQ ID NO: 124581 - protein, 200 aa, Unknown
  Bacterial polypetide isolated from the Sargasso Sea
MSIVSNSLKRIKPSPTIAVTSKAREMRAAGKDVIGLGAGEPDFDTPDNIKDAAIEAIKRGETKYTAVDGTPKLKKAIQGKFTRENNLSYELDQISVGTGGKQVLYNVFMATLNPGDEVIIPAPYWVSYPDMVLLAGGKPKIVKCSEKNEFKITPDELKKAIGKKTKWLIINSPSNPTGSCYTRSEIEELSKILIKNKNVH

SEQ ID NO: 124582 - protein, 307 aa, Unknown
  Bacterial polypetide isolated from the Sargasso Sea
PLKNKTFPQPWAVTQKARELKAAGKDVIGLGAGEPDFDTPDNIKEAAIEAIKKGDTKYTAVDGTPALKDAIVNKFKRENNLNYKVDEITVGAGGKHVIYNLMMATLNKGDEVIIPAPYWVSYPDIVLLAGGTPIVIECSEEQEFKLTAKDLEGKINNNTKWVILNSPSNPTGACYSEQELKNLSQVLKRKPHVNILSDDIYEHVTYDGLKFFTMAQVPELKSRVVTMNGVSKSYAMTGWRIGYAGGPKDIIKAIAKIQSQSTTNPSSISQAAAVEALNGKQDFISIRSKAFQERRDFVVNSFNSING

SEQ ID NO: 124583 - protein, 210 aa, Unknown
  Bacterial polypetide isolated from the Sargasso Sea
MSIISDSLKRIKPSPTIAVTQKARELKASGKDVIGLGAGEPDFDTPNNIKEAAIKAIKDGDTKYTAVDGTPALKKAISEKFKRENNLDYSTDEITVGAGGKHVIYNLMMATLNKGDEVIIPAPYWVSYPDIVLLAGATPIVVECSEDQGFKLTAKDLESNITNNTKWIILNSPSNPTGVCYSEQEIKNLAQVLKRNPHVNILSDDIYEHI

SEQ ID NO: 124584 - protein, 236 aa, Unknown
  Bacterial polypetide isolated from the Sargasso Sea
MSIISDSLKRIKPSPTLAVTQKARELKAAGKDVIGLGAGEPDFDTPDNIKEAAIEAIKKGDTKYTAVDGTPALKDAIVSKFKRENNLNYKVDEITVGAGGKHVIYNLMMATLNKGDEVIIPAPYWVSYPDIVLLAGGTPIVIECSEEQEFKLTAKDLEGKINNNTKWVILNSPSNPTGACYSEQELKNLSQVLKRKPHVNILSDDIYEHVTYDGLKFFTMAQVPELKSRVVTMNGV

SEQ ID NO: 124585 - protein, 195 aa, Unknown
  Bacterial polypetide isolated from the Sargasso Sea
MSIISNSLKRIKPSPTIAVTQKARELRAAGKDVIGLGAGEPDFDTPDNIKSAAIKAIKSGDTKYTAVDGTPALKKAIIKKFKKENNLSYNTNQITVGTGGKQVLYNAFMATLNKGDEVIIPAPYWVSYPDMVLLAGGKPKFVKCDEKDGFKLTPQKLKKAISKKTKWLIINSPSNPTGSGYTKNEILKLSKILLR

SEQ ID NO: 124586 - protein, 255 aa, Unknown
  Bacterial polypetide isolated from the Sargasso Sea
IKPSPTIAVTQKARELKAAGKDVIALGAGEPDFDTPNNIKKAAVKAIRIGDTKYTPVDGTPAIKNAVIKKFKRENNLTYTSDQITVGTGGKQVLYNAFVATLNKGDEVIIPAPFWVSYPDMVLLAGGKPKFIKCGEEDGFKLTPTKLKKAITKKTKWIILNSPSNPTGAAYTKKEIINLGKILLKNKNILILSDDIYEHVKFDNFKFFTIAQLKKLKDRTLTMNGVSKAYAMTGWRIGYAAGPKNIIAAIRKIQS

SEQ ID NO: 124587 - protein, 395 aa, Unknown
  Bacterial polypetide isolated from the Sargasso Sea
MSIISDSLKRIKPSPTIAVTQKARELRAAGKDVIGLGAGEPDFDTPDNIKNAAIKAIKSGDTKYTAVDGTPALKKAIVDKFKRENKISYSTDQITVGTGGKQVLYNAFMATLNKGDEVIIPAPFWVSYPDMVLLAGGKPKIVKCTEEEGFKLTAKKLKKVITKKTKWVILNSPSNPTGAGYSKKEIEDLAKVLIRNKKVHILSDDIYEHIKYDNFNFYTIAQNSKLKDRTLTMNGVSKSYAMTGWRIGYAAGPKDIIKAIGKIQSQSTSNPSSISQAAAVEALNGNQGFIKKRSKAFKERRDFVVKSLNDIKGINCLTPNGAFYVFPSCKGLLNKKTKLKTDTEFVQKLLEQSNVAVVQGSAFGLDGYFRISYATSMQNLKKAMARIKSFCESLS

SEQ ID NO: 124588 - protein, 363 aa, Unknown
  Bacterial polypetide isolated from the Sargasso Sea
MSIISDSLKKIKPSPTIAVTQKARELKAAGKDVIGLGAGEPDFDTPDNIKQAAIKAINDGDTKYTAVDGTPALKKAIVEKFKKENNLDYATDQITVGAGGKHVIYNAMMATLNEDDEVIVPAPYWVSYPDIVLLAGGKPVVMECNEKQGFKINPSDLEKFITLKTKWIILNSPSNPTGACYTEKDIREIAKVLENHPHVYILSDDIYEHVTYEGFKFFTIAQIESLKERVLTMNGVSKAYSMTGWRIGYAAGPKEIIKAIAKIQSQSTTNPSSISQAASVEALNGTQDFIKKRADSFQERRDFVVKALNDIDGIDCLNPDGAFYVFPSCKGLMGKKDTNGKEIKSDTDFVQSLLENSGIAVVQ

SEQ ID NO: 124589 - protein, 399 aa, Unknown
  Bacterial polypetide isolated from the Sargasso Sea
MSIISDSLKRIKPSPTIAVTQKARELKAAGKDVIGLGAGEPDFDTPDNIKAAAIKAINNGDTKYTAVDGTVELKKAIVEKFKRENNLSYKTDEITVGAGGKHVIYNLMMATLNKGDEVLIPAPYWVSYPDIVLLAGAYPIVIECSEEQNFKLTAKDLESKITNNTKWLILNSPSNPTGACYSEQEIKNLSQVLKRNPHVNILSDDIYEHVTYNNFKFFTIAQVPELKSRVVTMNGVSKSYAMTGWRIGYAAGPKEIIKAIAKIQSQSTTNPSSISQAAAVEALNGVQDFISIRSKAFEERRDFVVNSLNSINGINCLKPDGAFYVFPNCKGLIGKKDKNGKKIENDTDFVQSLLENNGIAVVQGSAFGLEGFFRISYATSMNNLEKAMKRIKDFCESLS

SEQ ID NO: 124590 - protein, 399 aa, Unknown
  Bacterial polypetide isolated from the Sargasso Sea
MSIISDSLKKIKPSPTIAVTQKARELKAAGKDVIGLGAGEPDFDTPDNIKEAAIKAINEGDTKYTAVDGTPALKKAIVEKFKKENNLDYTTDQITVGAGGKHVIYNAMMATLNDGDEVIIPAPYWVSYPDIVLLAGGKPVIMECGEKQGFKINPSDLEKFITPKTKWIILNSPSNPTGACYSEKDIKAIANVLEKHNHVYILSDDIYEHVTYEGFKFFTIAQIESLKDRVLTMNGVSKAYSMTGWRIGYAAGPKDIVKAIAKIQSQSTTNPSSISQAASVEALSGTQDFIKKRADSFQERRDFVVKALNDIDGINCLNPDGAFYVFPSCKELMGKKDSSGKEIKSDTDFVQSLLENSGVAVVQGSAFGLEGFFRISYATSMENLKKALEKISSFCKNLS

SEQ ID NO: 124591 - protein, 399 aa, Unknown
  Bacterial polypetide isolated from the Sargasso Sea
MSIISDSLKRIKPSPTIAVTQKAKELKAAGKDVIGLGAGEPDFDTPDNIKKAAIDAIQSGDTKYTAVDGTKDLKEAIVKKFKRENNLNYTIDQITVGAGGKHVIYNLMMATLNKGDEVIIPAPYWVSYPDIVLLAGANPIVIECSEDQGFKLSAKDLEAKITNNTKWLILNSPSNPTGACYSEREIKNLSQVLKRNPHVNILSDDIYEHITYDDFKFFTIAQIPEIKNKVITMNGVSKSYAMTGWRIGYAAGDKDIIKAIAKIQSQSTTNPSSISQAAAVEALNGKQDFISVRAKAFQERRDFVVNSLNAIKGISCLKPEGAFYVFPNCKGLMGKKDKSGKKITNDTDFVQSLLENNDVAVVQGSAFGLEGFFRISYATSMEKLEIAMKRIKSFCESLK

SEQ ID NO: 124592 - protein, 273 aa, Unknown
  Bacterial polypetide isolated from the Sargasso Sea
MSIISDSLKRIKPSPTIAVTQKARELRAAGKDVIGLGAGEPDFDTPDNIKNAAIRAIKGGDTKYTAVDGTPALKKAIAKKFKRENKLNYSTAQITVGTGGKQVLYNTFMATLNKGDEVIIPAPFWVSYPDMVLLAGGKPKIVKCTEQEGFKLTAKKLKKAITKKTKWVIFNSPSNPTGAGYTKKEIQDLAKILIRNKKVHILSDDIYEHIKYDNFKFFTIAQISKLKDRTLTMNGVSKSYAMTGWRIGYAAGPKDIIKAIGKIQSQSTSNPSS

SEQ ID NO: 124593 - protein, 404 aa, Unknown
  Bacterial polypetide isolated from the Sargasso Sea
MSKQNTLIAKRMSLIKPSPTMAVTKMAAEMKAAGQDIIGLGAGEPDFDTPDHIKNAAIEAIKNGETKYTAVDGTPALKKAIAKKFYKDNSIKYNIDEIIVSVGGKQVLYNALMSSINPGDEVIIPSPFWVSYPDMVSLAGGVPIIVEGKEKNNFKIQPEDIRDKISTKTKWIIINSPSNPTGSSYSEEELRDIGNLLLEYENIFVMSDDIYEKIIYDDFKFFSLAEVVPELKDRILTVNGVSKAYAMTGWRIGYAGGPKHLITAMSKLQSQSTSNPCSISQAAALAALEGPEEFLLERNNRFKTRRDMVVKMLNECNGLSCIKPSGAFYVYPSCSGIIGKSTKEGKLIENSIDFSSYLLESVGVAVVPGSAFGADPFFRISYATSDSILEEACNRIKKACEQLS

SEQ ID NO: 124594 - protein, 320 aa, Unknown
  Bacterial polypetide isolated from the Sargasso Sea
MTFISDSLNRIKPSATMVITAKAVQLKREGKKVIGLSSGEPDFDTPNHVKVAAIDAIHKGYTKYTNVEGIPELRQAIIDKFKRDNDLNYSINDVIVGAGGKQILYNALVSSINKDDEVIIPAPYWVSYPDMTLLAGGKPVIVCCSQETDFKLTAKELEQVITKRSKWLILNSPSNPTGSCYSRKELEEIADVVRKHKNLYVMTDDIYEYIVYDNFEFFTFAQVAPDLKDRVLTVNGVSKSHCMTGWRIGYAAGPEILIKAMIKIQGQSTSNASSISQYAALAGISGSNDFLKPCLKAFDDRRCYVVSKLNNIQGISCLLP

SEQ ID NO: 124595 - protein, 399 aa, Unknown
  Bacterial polypetide isolated from the Sargasso Sea
MSIISDSLKRIKPSPTLAVTQKARELKAAGKDVIGLGAGEPDFDTPDNIKEAAIEAIKKGDTKYTAVDGTPALKEAIVNKFKRENNLNYKVDEITVGAGGKHVIYNLMMATLNKGDEVIIPAPYWVSYPDIVLLAGGTPIVIECSEEQEFKLTAKDLESKINNNTKWVILNSPSNPTGACYSEQELKNLSQVLKRKPHVNILSDDIYEHVTYDGLKFFTMAQVPELKSRVVTMNGVSKSYAMTGWRIGYAGGPKDIIKAIAKIQSQSTTNPSSISQAAAVEALNGKQDFISIRSKAFQERRDFVVNSLNSINGINCLKPEGAFYVFPNCKELIGKKDKSGKKIENDTDFVQSLLENYGIAVVQGSAFGLEGFFRISYATSMENLEKAMKKIKEFCESLN

SEQ ID NO: 124596 - protein, 292 aa, Unknown
  Bacterial polypetide isolated from the Sargasso Sea
MSIISNSLKRIKPSPTIAVTQKARELKAAGKDVIALGAGEPDFDTPNNIKKAAVKAIRIGDTKYTPVDGTPTIKNAVIKKFKRENNLTYTSDQITVGTGGKQVLYNAFVATLNKGDEVIIPAPFWVSYPDMVLLAGGKPKFIKCGEEDGFKLTPSKLKKAITKKTKWIILNSPSNPTGAAYTKKEIINLGKILLKNKNMFILSDDIYEHVKFDNFKFFTIAQIKKLKDRTLTMNGVSKAYAMTGWRIGYAAGPKNIIAAIRKIQSQSTSNPSSISQAAAVEALNGTQSFIKK

SEQ ID NO: 124597 - protein, 395 aa, Unknown
  Bacterial polypetide isolated from the Sargasso Sea
MSIVSNSLKRIKPSPTMAVTSKAREMRAAGKDIIGLGAGEPDFDTPDNIKEAAIEAIRKGDTKYTAVDGTPALKKAIKNKFSRENGLSYELDQITVGTGGKQVLYNTFMATVNKGDEVIIPAPYWVSYPDIILLAGGKPKIVKCEEKDNFKLTPKKLEKAISKKTKWIILNSPSNPTGSAYTKKEIEELSKVLIKNKKIYILSDDIYEHITYDNFKFFTIAQIKDLKDRTLTMNGVSKSYSMTGWRIGYAAGPKEIIKAIAKIQSQSTSNPTSISQAAAVEALNGTQDFIEDRANSFKERRDFVVNSLNNINGISCLKPEGAFYVFPNCKKLLGKKTKLKTDKDFVQKLLEKSEVAVVQGSAFGLDGYFRISYATSMENLKKAMERIRSFCNSLT

SEQ ID NO: 124598 - protein, 259 aa, Unknown
  Bacterial polypetide isolated from the Sargasso Sea
MSIISDSLKRIKPSPTIAVTQKARELRAAGKDVIGLGAGEPDFDTPDNIKEAAIKAIRDGDTKYTAVDGTPKLKKAIVEKFKRENNLNYSVDQITVGTGGKQVLYNTFMATLNKGDEVIIPAPFWVSYPDMVLLAGGKPKIVKCTEKDNFKLTAKKLKKAISKKTKWLILNSPSNPTGAGYSENEIKELSKVLVKNKKVNILSDDIYEHVRYDNFSFFTIAQIPKLKDRTLTMNGVSKSYAMTGWRIGYAAGPKDIIKA

SEQ ID NO: 124599 - protein, 393 aa, Unknown
  Bacterial polypetide isolated from the Sargasso Sea
MKNPLSERVIKVKPSATIAISSKAMEMRSAGVDVISMSAGEPDFDTPEYIKDAAKMAMDSGMTKYTQVDGVPDLKQAIINKFSEDNDLIYDPENILVSTGAKQTLYNLFQAILGPGDEVIIISPYWVSYPDMVLLADAKPVIVDTFQENDFALDISAFADAINDKTKLVIINSPSNPTGITFSRSDYESIGAILQNHPDVFVATDDMYEYIYWGDEPFISFAQACPSLFDRTITINGVSKSYAMTGWRIGYCGGPSDVIGGMKKVQSQSTSNASSISQAAAIAALNGSKDEIDSMVKQYKLRHDYLCSALNDIDGFKTTPGTGAFYLFPDVTNVIEQKGFSDDVELSQYLIEKANVAVVPGSAFGSPGYIRLSYATSLELIKEAVNRISNSLD

SEQ ID NO: 124600 - protein, 399 aa, Unknown
  Bacterial polypetide isolated from the Sargasso Sea
MSIISDSLKKIKPSPTIAVTQKARELKAAGKDVIGLGAGEPDFDTPENIKQAAIKAINDGDTKYTAVDGTPALKKAIVEKFKKENNLDYTADQITVGAGGKHVIYNAMMATLNEGDEVIVPAPYWVSYPDIVLLAGGKPVVMECDEKQSFKINPSDLEKFITPKTKWIILNSPSNPTGACYSEKDIREIAKVLEKHPHVYILSDDIYEHVTYEGFKFFTIAQIEGLKERVLTMNGVSKAYSMTGWRIGYAAGPKEIIKAIAKIQSQSTTNPSSISQAASVEALSGTQDFIKKRADSFQERRDFVVKALNDIEGIECLNPDGAFYVFPSCKGLMGKKDTNGKEIKSDTDFVQSLLENSGIAVVQGSAFGLEGFFRISYATSMDNLKKALEKISSFCKSLS

SEQ ID NO: 124601 - protein, 294 aa, Unknown
  Bacterial polypetide isolated from the Sargasso Sea
MSIVSNSLKRIKPSPTMAVTSKAREMKAAGRDVIGLGAGEPDFDTPDNIKDAAIQAIKRGDTKYTAVDGTPALKKAIQAKFLRENNLSYDLDQITVGTGGKQVLYNAFMATINKGDEVIIPAPYWVSYPDIILLAGGKPKIIKCEEKDNFKLTPQKLKKAISKKTKWIILNSPSNPTGSAYTKKEIENLSKVLLKFKKIYILSDDIYEHITYDDFNFFTIAQIKSLKERTLTMNGVSKSYSMTGWRIGYAAGPKEIIKAIAKIQSQSTSNPTSISQAAAVEALNGVQDFIKNTC

SEQ ID NO: 124602 - protein, 224 aa, Unknown
  Bacterial polypetide isolated from the Sargasso Sea
MPIKLSHNIENIPPSATMLMTQLARDLKAEGKNIISMSAGEPDFDTPKTIKEAAIDAINRGETKYTAVDGIDDLKQAVIDKFKNDNNLDYEKGNISIAPGGKSIIFNAILSTINPGDEVIIPAPYWVSYPDIVKLAGGNPVIIETSPDNNFKISPDDLEKNITEKTKWLFINSPSNPTGQVYSKAELINLAEIIKKHKNLYILSDDIYEYIRYQNNERFYTIAE

SEQ ID NO: 124603 - protein, 398 aa, Unknown
  Bacterial polypetide isolated from the Sargasso Sea
MFEKLSLISPDPILKIISEYNEDVRSNKIDLGVGVYRDSFGETPIMSVVKSAESHILSTQKSKAYIGLAGDTIYNKNIQKLILGDIKIAEDRIFTIQTAGGTTSLRVASELLKETSKNINIWVSNPTWSNHIPVLESTNINFREYPYYDMETNTLLFDRMIACLETIPKGDAVLLHACCHNPTGMDPTLEQWKKIIQVMKSRELLPFIDNAYQGLANGLDEDASALRLMASEFNELIISSSCSKNFGLYRDRVGALTVITKNEDSNKKTKSNVLKIVRTMGSVPPDHGAACVGYILSDESLTKKWKSELDDVKVRLKNMRIELAGSLKNKTNSHDFSHIVRANGMFSFLGITTEQVQALKSQYGIYMEESGRINVAGITMENVSYLTDSITKVLESHQ

SEQ ID NO: 124604 - protein, 214 aa, Unknown
  Bacterial polypetide isolated from the Sargasso Sea
MLSNNLTRVKPSPTIAMSSLATQMKLEGRDVISLSAGEPDFDTPDHIKNAAIEAIKSGQTKYTDPDGMKTLKEAVCEKFELENGLTYNPNQISIGTGGKQILYNALMATLNPGDEVIIPAPYWVSYPDMVLLAGGQPVFIEASAKNNYKISPAQLERAVNDKTKWFIFNSPSNPTGAGYSKNELKKLTEVLMKFPDVLIMTDDMYEHLAYDDFV

SEQ ID NO: 124605 - protein, 132 aa, Unknown
  Bacterial polypetide isolated from the Sargasso Sea
MELSKLAKELKPSATLAITAKAKEMKAEGIDVIGFGAGEPDFDTPENIKNYAKRFIDNGFTKYTAAGGILELKESIIKRISEDYGVIYNSKEIFVGSGAKHVLYNLFQVLIDEGDEVIIPSPYWVSYPEQGE

SEQ ID NO: 124606 - protein, 398 aa, Unknown
  Bacterial polypetide isolated from the Sargasso Sea
MISNRVNNIKPSLTIATNMKAQELKRAGKDVIVLAAGEPDFDTPEHIKSAAIEAINNGFTKYVPGKGTPDLQLAIQKKFQRDNNLDYELGNITVGVGGKHIIYNAFSATINSGDEVIIPAPYWVSYPDIVILNDGKPVIVECGEQNDFKITPEDLEKHINPKTKWLMLNSPSNPTGSMYSKEELIALGDVLQKHENVYILSDDIYEKIVYDTNEFKTIAEVCPFLKERTLTMNGLSKSYCMTGWRVGYAAGPTNLINAMNKVQSQNISSTASISMAASVEALNGDQSFIISNNESFLRRRNLVVKHLNETPGLSCRTPEGAFYVFASCKGVLGKTTQSGKKLSKDGDFMDYLLEKVGVAGVQGSAFGLEGFFRISYATSDSILEDACQRIKEACAKLS

SEQ ID NO: 124607 - protein, 395 aa, Unknown
  Bacterial polypetide isolated from the Sargasso Sea
MSIISDSLKRIKPSPTIAVTQKARELRAAGKDVIGLGAGEPDFDTPDNIKDAAIKAIKDGDTKYTAVDGTPDLKKAIVDKFKRENNLDFNTDQITVGTGGKQVLYNTFMATLNKGDEVIIPAPFWVSYPDMVLLAGGKPKIVKCDEKDGFKLTAKKLQKAISKKTKWLILNSPSNPTGAGYTKDEIQNLADVLIKNKRVHILSDDIYEHIKYDNFNFFTIAQISKLKDRTLTMNGVSKSYAMTGWRIGYAAGPKDIIKAIGKIQSQSTSNPSSVSQAAAVEALNGIQNFIQERSDAFKKRRDFVVKSLNDIKGISCLRPNGAFYVFPSCKGLLNKKTKLKTDTDFVQKLLEKENVAVVQGSAFGLEGYFRISYATSMENLRKAMDRIRSFCENFN

SEQ ID NO: 124608 - protein, 398 aa, Unknown
  Bacterial polypetide isolated from the Sargasso Sea
MISNRFNNIKPSLTIATNMKAQELKRAGKDVIVLAAGEPDFDTPDHIKSAAIDAINRGFTKYVPGKGTPDLQLAIQKKFQRDNNLDYELGNITVGVGGKHIIYNAFSATINEGDEVIIPAPYWVSYPDIVILNDGKPIIVECGEQNGFKITPEDLEKNISSKTKWLMLNSPSNPTGSMYTKDELMAIGDVLKSYENIFILSDDIYEKIVYDTNDFKTIAEVCPYLKERTLTMNGLSKSYCMTGWRVGYAAGPVSLINAMNKVQSQNVSSTASISMAASVEALNGDQSFILSNNESFLRRRNLVVKHLNETPGLSCRTPEGAFYVFASCKGVLGMTTESGKKLLTDGDFMDYLLEEVGVAGVQGSAFGLEGFFRISYATSDSILEDACQRIKTACSKLS

SEQ ID NO: 124609 - protein, 395 aa, Unknown
  Bacterial polypetide isolated from the Sargasso Sea
MSIVSNSLKRIKPSPTIAVTSKAREMRAAGKDVIGLGAGEPDFDTPDNIKEAAIEAIRKGDTKYTAVDGTPALKKAIQAKFSRENDLSYGLDQISVGTGGKQVLYNAFMATINKGDEVIIPAPYWVSYPDIVLLAGGKPKIIKCDEKNNFKLTPEKLTKAVSKKTKWIIINSPSNPTGSGYTKDEIIALSKILIKYKNLYILSDDIYEHITYDGFKFFTIAQIEKLKSRTLTMNGVSKSYSMTGWRIGYAAGPKEIIKAMAKIQSQSTSNPTSISQAAAVEALNGTQDFILERSNSFRERRNFVVESLNNIKGLSCLSPEGAFYVFPNCKKLLNKKTKLKTDKDFVEKLLEKAEVAVVQGSAFGLDGYFRISYATSMENLKKAMDRIKAFCESLS

SEQ ID NO: 124610 - protein, 300 aa, Unknown
  Bacterial polypetide isolated from the Sargasso Sea
MSIISESLKRIKPSPTIAVSQKARELRAAGKDVIGLGAGEPDFDTPNNIKNAAIKAIKGGDTKYTAVDGTPALKNAIIKKFKKENNLKYSADEITVGTGGKQVLYNAFMATLNKGDEVIIPAPFWVSYPDMVLLAGGKPKIVKCNEYENFKLTPAKLKKVISKKTKWLILNSPSNPTGASYTKAEIVKLSKVLTNYKRIHILSDDIYEHISYEKSKYFTIAQISNLKNRTLTMNGVSKSYAMTGWRIGYAGGPKEIIKAIRKIQSQSTSNPSSVSQAAAVEALNGTQKFIKTRSKELKKE

SEQ ID NO: 124611 - protein, 316 aa, Unknown
  Bacterial polypetide isolated from the Sargasso Sea
MPIKLSHNIENIPPSATMLMTQLARDLKSEGKSIISMSAGEPDFDTPQNIKEAAINAIKRGETKYTAVDGIDDLKEAVINKFKLDNNLDYTRDNISVAPGGKSIIFNAILSTINPGDEVLIPAPYWVSYPDIVKLAGGTPVIIKTSSDNNFKISPDDLEKNITNKTKWLFLNSPSNPTGQVYSEDELKDLAVIIKKHKNLYVLSDDIYEYIRYQSDERFYTIAELDEEIFSRTITMNGVSKAYSMTGWRIGYCGGPIEIINSMRKLMGQSTSNPSSISQWATVEALNGSKKFLDEWINSFKERRDFIVNYLNNCKG

SEQ ID NO: 124612 - protein, 389 aa, Unknown
  Bacterial polypetide isolated from the Sargasso Sea
MSIISDSLKRIKPSPTIAVTQKAKELKAAGKDVIGLGAGEPDFDTPDNIKKAAIDAIQAGDTKYTAVDGTKDLKEAIVKKFKRENNLNYTIDQITVGAGGKHVIYNLMMATLNKGDEVIIPAPYWVSYPDIVLLAGANPIVIECSEEQGFKLSAKDLEAKINNNTKWLILNSPSNPTGACYSEQEIKNLSQVLKRNPHVNILSDDIYEHITYDNFKFFTIAQIPEIKNKVITMNGVSKSYAMTGWRIGYAAGDKDIIKAIAKIQSQSTTNPSSISQAAAVEALNGKQDFIPVRAKAFQERRDFVVNSLNAIEGISCLKPEGAFYVFPNCKGLIGKKDKSGKKITNDTDFVQSLLENNDVAVVQGSAFGLEGFFRISYATSMEKLEIARK

SEQ ID NO: 124613 - protein, 396 aa, Unknown
  Bacterial polypetide isolated from the Sargasso Sea
MSIISNNLKRIKPSPTIAVTTKAREMRASGKDVIGLGAGEPDFDTPDNIKEAAIEAIKNGETKYTAVDGTLDLKKAIVEKFKRENNLDYTTDQVTVGTGGKQVIYNTFMATLNKGDEVIIPAPYWVSYPDMVLLAGGTPKIIKCEEKDGFKLSAKKLEKAISKKTKWLILNSPSNPTGAGYTKKEIEDLSKVLLKHKKIFILSDDIYEHIRYEGFNFFTIAQISKLKERTLTMNGVSKSYAMTGWRIGYAAGPKEIINAIRKIQSQSTSNPSSISQAAAVEALNGQQNFIKERAEAFKERRDFVVSSLNNIKGINCLTPNGAFYVFPSCKGLLNKKTKLKTDTEFVQKLLEKSMVAVVQGSAFGLDGYFRISYATSMENLKKAITRIEDFCNSLNN

SEQ ID NO: 124614 - protein, 395 aa, Unknown
  Bacterial polypetide isolated from the Sargasso Sea
MSIISNSLKRIKPSPTIAVTQKARELRAAGKDVIGLGAGEPDFDTPNNIKSAAIKAIKSGDTKYTAVDGTPALKKAIIKKFKKENNLSYNTNQITVGTGGKQVLYNAFMATLNKGDEVIIPAPYWVSYPDMVLLAGGKPKFVKCDEKDGFKLTPQKLKKAISKKTKWLILNSPSNPTGSGYTKNEILKLSKILLRNKKIFILSDDIYEHVRYDNFKFFTIAQIPKLKNRVLTMNGVSKSYAMTGWRIGYAAGPVEIINAIRKIQSQSTSNPSSISQAASVEALNGTQKFIRTRAKSFKERRDFVVKSLNSIKGINCLKPNGAFYVFPNCKKLLGKKNNLKKDSDFVKKLLEKANVAVVQGSAFGLDGYFRISYATSMKNLKVALKRIKDFCEKLN

SEQ ID NO: 124615 - protein, 380 aa, Unknown
  Bacterial polypetide isolated from the Sargasso Sea
MNNPISERVRKVKPSATIAISSKAMEMRSAGINVISMSAGEPDFDTPQHIKDAAKAAMDNGMTKYTQVDGVPDLKEAIIKKFSNDNELSYKPENILVSSGAKQTLYNLFQAILGDGDEVIIISPYWVSYPDMVLLADAKPVFVDTFQENNFSLDLNAFSNAINEKTKLVIINSPSNPTGITFTRSDYESIGAILENYPNVYVATDDMYEYIYWGDEPFVSFAQACPALFDRTITINGVSKSYAMTGWRIGYCGGPTDVIGAMKKVQSQSTSNPSSVSQAAAIAALNGPKDEVFEMVEQYKIRHDYFCSALNAIEGFKTTPGTGAFYLFPDVKNVIEKKGFSGDVELSEYLIETANVAVVPGSAFGSIGYIRLSYATGLSR

SEQ ID NO: 124616 - protein, 395 aa, Unknown
  Bacterial polypetide isolated from the Sargasso Sea
MSIISDSLKRIKPSPTIAVTQKARELRAAGKDVIGLGAGEPDFDTPNNIKNAAIKAISRGDTKYTAVDGTPALKKAIIKKFKKENNLKYSNEEITVGTGGKQVLYNAFMATLNRGDEVIIPAPFWVSYPDMVLLAGGKPKIVKCNESENFKLTPQKLKKAISKKTKWLILNSPSNPTGVSYTKAEIKKLSQVLIKYKKIQILSDDIYEHITYDKAKFFTIAQISNLKNRTLTMNGVSKSYAMTGWRIGYAGGPKDIIKAIRKVQSQSTSNPSSVSQAAAVEALNGTQKFIKTRSKEFKKRRDFVVNSLNKIKGINCLTPNGAFYVFPSCKGLLNKKTKLKKDTDFVQKLLEKANVAVVQGSAFGLEGYFRISYATSMKNLKKAMERIKSFCESLS

SEQ ID NO: 124617 - protein, 395 aa, Unknown
  Bacterial polypetide isolated from the Sargasso Sea
MSIVSNSLKRIKPSPTIAVTSKAREMRAAGKDVIGLGAGEPDFDTPDNIKEAAIEAIKKGDTKYTAVDGTPALKKAIQAKFSRENHLSYELDQISVGTGGKQVLYNAFMATINKGDEVIIPAPYWVSYPDIVLLAGGKPKIIKCDEKSNFKLTPEKLKKVVSKKTKWIIINSPSNPTGSGYTKDEIIALSKILMKYKNLYILSDDIYEHITYDGFKFFTIAQIEKLKSRTLTMNGVSKSYSMTGWRIGYAAGPKEIIKAMAKIQSQSTSNPTSISQAAAVEALNGTQDFISERSNSFKERRNFVVDSLNNIKGISCLSPEGAFYVFPNCKKLLNKKTKLKTDKDFVEKLLEKAEVAVVQGSAFGLDGYFRISYATSMENLKKAMKRIKTFCDSLN

SEQ ID NO: 124618 - protein, 393 aa, Unknown
  Bacterial polypetide isolated from the Sargasso Sea
MNNPISERVRKVKPSATIAISSKAMEMRSAGINVISMSAGEPDFDTPQHIKDAAKAAMDNGMTKYTQVDGTPELKKAIIKKFSDDNDLSYQPENILVSTGAKQTLYNLFQAILGDGDEVIIISPYWVSYPDMVLLADAKPVFVDTFQENNFSLDLNAFSNAINEKTKLVIINSPSNPTGITFTRSDYESIGAVLDNYPNAYVATDDMYEYIYWGEEPFVSFAQACPALFDRTITINGVSKSYAMTGWRIGYCGGPTDVIGAMKKVQSQSTSNPSSISQAATIAALNGSKDEIYTMVEQYKIRHDYLCSALNAIEGFKTSPGTGAFYLFPDVKNVIEKKGFSDDVELSEYLIESANVAVVPGSAFGSKGYIRLSYATSLDNIKEAVERISKSLS

SEQ ID NO: 124619 - protein, 356 aa, Unknown
  Bacterial polypetide isolated from the Sargasso Sea
MKNPISERVRKVKPSATIAISSKAMEMRSAGVDVISMSAGEPDFDTPEYIKDAAKMAMDSGMTKYTQVDGLPDLKQAIINKFSEDNQLIYDPENILVSTGAKQTLYNLFQAILGPGDEVIIISPYWVSYPDMVLLADAKPVIVDTFQENNFAMDIGAFADAINDKTKLVIINSPSNPTGITFSRADYESIGAILENHPNVYVATDDMYEYIYWGDEPFVSFAQACPSLFDRTITINGVSKSYAMTGWRIGYCGGPADVIGGMKKVQSQSTSNASSISQVATIAALSGPRDEINAMVEQYKLRHDYLCKALNNINGFKTSPGTGAFYLFPDVKDVIEKKGFSDDVDLSQYLIEEANV

SEQ ID NO: 124620 - protein, 380 aa, Unknown
  Bacterial polypetide isolated from the Sargasso Sea
MSIISDNLKRIKPSPTLAVTQKARELRAAGKDVIGLGAGEPDFDTPNNIKNAAIKAIRAGDTKYTAVDGTPALKKAIIRKFKKENNLRYSNEEITVGTGGKQVLYNAFMATLNRGDEVIIPAPFWVSYPDMVLLAGGKPKIVKCNESDNFKLTPQKLRRAISKKTKWLILNSPSNPTGASYTKTEIKKLSQVLIKYKKIQILSDDIYEHITYDKDKFFTIAQIPSLKNRTLTMNGVSKSYAMTGWRIGYAGGPKEIIKAIRKVQSQSTSNPSSVSQAAAVEALNGTQNFIKVRSKEFKKRRDFVVSSLNKIKGINCLTPNGAFYVFPSCKKLLGKKTKIKTDSEFVEKLLEKANVAVVQGSAFGLTGYFRISYATSMQKV

SEQ ID NO: 124621 - protein, 400 aa, Unknown
  Bacterial polypetide isolated from the Sargasso Sea
MKYQADRLKRINPSMTVAINVKANALRSAGKDVLVLAAGEPDFDTPENIRNAAKKSLDDGKTRYVPGKGTKDLQEAIINKFKRDNNISYSSEEIMVGVGGKHIIYNAMMASLNPGDEVIIPAPFWVSYPDIVLLAEGKPVIVECNIDQNFKITPSQLENNITNKTKWLMLNSPSNPTGSIYSRQELKLLSEVLLRFPNVLVLTDDIYEKIIYEKDSFSTLAEIEPKLKNRILTLNGVSKAYCMTGWRLGYCGGPKEIISGMNKIQSQSTTSTSSITMAASVEALNGNQDFIEKNNIEFKKRRDLVIEKLNNIDGISCEIPAGAFYVYPSCKGIIGKKNPNGGLINTDEDLMNYLLEKEGVAGVHGAAFGLSPFFRLSYATDEKTLIDACERIKRACLELK

SEQ ID NO: 124622 - protein, 373 aa, Unknown
  Bacterial polypetide isolated from the Sargasso Sea
ARELRAAGKDVIGLGAGEPDFDTPNNIKNAAIKAIRGGDTKYTAVDGTPALKKAIIEKFKKENNLKYSNEEITVGTGGKQVLYNAFMATLNRGDEVIIPAPFWVSYPDMVLLAGGKPKIVKCNEMDNFKLTPEKLRKAISKKTKWLILNSPSNPTGASYTKVEIKKLSQVLIKHKKIQILSDDIYEHITYDKAKFFTIAQISSLKNRTLTMNGVSKSYAMTGWRIGYAGGPKEIIKAIRKVQSQSTSNPSSVSQAAAVEALNGNQKFIKTRSKEFKKRRDFVVKSLNKIKGISCLTPNGAFYVFPSCKDLLNKKTKLKKDTDFVQKLLEKANVAVVQGSAFGLEGYFRISYATSMKNLKKAMERIKSFCESLN

SEQ ID NO: 124623 - protein, 391 aa, Unknown
  Bacterial polypetide isolated from the Sargasso Sea
MELSKRISNTKLSATIAMSMKARELKAKGAPIITLTAGEPDFDTPEHIKNAAIIAMKEGNTKYTPVDGMPALKDAIISKLKNDNNLEYSRDQIIVSTGCKQSIYNLCQSVLNESDEVIVPAPYWVSYPEIIKLAGGVPVILETDKTKNFKLDSDKLEESINNRTKMIIINSPSNPSGVVYEKSDLESIGNILKKYPNILVASDDIYEHIILENKKFINILEVHPDLYERTVILNGVSKAYAMTGWRIGYTAGSREITNAMKKIQSQSTSCTCSISQSAAIAALSHKTDDLANMVKEYKKRSNFLIDAFKDINGFEFNSCEGSFYAFVDVSKAIEKTDNIKNDIDLCNFLLDRCNVAVVPGSAFGIENYIRISFATSMSNLEKAVENIKKEF

SEQ ID NO: 124624 - protein, 192 aa, Unknown
  Bacterial polypetide isolated from the Sargasso Sea
MSIVSNSLKRIKPSPTIAVTSKAREMRAAGKDVIGLGAGEPDFDTPDNIKEAAIEAIKKGDTKYTAVDGTPKLKKAIQGKFKRENNLSYELDQISVGTGGKQVLYNVFMATLNPGDEVIIPAPYWVSYPDMVLLAGGTPKIVKCSEENEFKITPTELKKAIGKKTKWLIINSPSNPTGSCYTKKEIEELSKI

SEQ ID NO: 124625 - protein, 295 aa, Unknown
  Bacterial polypetide isolated from the Sargasso Sea
MSIVSNSLKRIKPSPTIAVSQKARELKAAGKDVIGLGAGEPDFDTPENIKQAAVGAINRGDTKYTAVDGTPDLKKAIVNKFKRENSLEYSTKEITVGTGGKQVIYNAFMATLNKGDEVIIPAPYWVSYPDMVLLAGGNPKIVKCNENDGFKLNPKNLKKAITKKTKWLILNSPSNPTGASYTKEEIEALSEVLIKNKNVHILSDDIYEHITYDNFNFFTIAQVSKLKNRTLTMNGVSKSYAMTGWRIGYAAGPKEIIKAISKIQSQSTSNPSSISQAAAVEALNGTQDFIKERAN

SEQ ID NO: 124626 - protein, 395 aa, Unknown
  Bacterial polypetide isolated from the Sargasso Sea
MSIVSNSLKRIKPSPTIAVSQKARELKAAGKDVIGLGAGEPDFDTPENIKQAAIDAINRGDTKYTAVDGTPDLKKAIVNKFKRENNLEYSTNEITVGTGGKQVIYNALMATLNKGDEVIIPAPYWVSYPDMVLLAGGNPKIVKCNENDGFKLTPKNLKKAITKKTKWLILNSPSNPTGASYTKEEIEALSEVLIKNKNVHILSDDIYEHITYDNFNFFTIAQVSKLKNRTLTMNGVSKSYAMTGWRIGYAAGPKEIIKAISKIQSQSTSNPSSISQAAAVEALNGTQDFIQERSNAFKERRDFVVNSLNNIKGISCLKPSGAFYVFPSCKKLLGKKTKLKTDKDFVEKLLEEALVAVVQGSAFGLNGYFRISYATSMDNLKKALERIKSFCESLN

SEQ ID NO: 124627 - protein, 247 aa, Unknown
  Bacterial polypetide isolated from the Sargasso Sea
MSIVSNSLKRIKPSPTIAVTSKAREMRAAGKDVIGLGAGEPDFDTPDNIKDAAIEAIKRGETKYTAVDGTPKLKKAIQGKFTRENNLSYELDQISVGTGGKQVLYNVFMATLNPGDEVIIPAPYWVSYPDMVLLAGGKPKIVKCSEKNEFKITPDELKKAIGKKTKWLIINSPSNPTGSCYTRNEIEELSKILIKNKNVYILSDDIYEHITYDDFKFFTIAQIKALKDRTLTMNGVSKSYSMTGWRI

SEQ ID NO: 124628 - protein, 336 aa, Unknown
  Bacterial polypetide isolated from the Sargasso Sea
VPGKGTPALQNAIINKFKKENNLEYSNDEIMVGVGGKHIIYNAMMATLNLGDEVIIPAPYWVSYPDIVLLAEGKPVIVKCSEKNDFKLTPYDLEKYITPKTKWLFLNSPSNPTGSVYSKEELMNLGQVLLKHPHIYILTDDIYEKIIYDKQKFNTIAETVPELKNRTLTLNGVSKAYCMTGWRLGYCGAPKEIISGMNKIQSQSNSSTSSISMAASVEALQGNQDFIEKHNIAFKKRRDLVVEKLNSIDGISCGIPPGAFYVYPNCEGIIGRKTPDGIILDSDEKFMNYLLESRGVAGVQGEAFGLSPYFRLSYATSEKILIEACHRIDEACKLLK

SEQ ID NO: 124629 - protein, 353 aa, Unknown
  Bacterial polypetide isolated from the Sargasso Sea
IGLGAGEPDFDTPDNIKEAAIEAIKKGDTKYTAVDGTPELKKAIVEKFKRENNLIYTTDQITVGTGGKQVIYNTFMATLNKGDEVIIPAPFWVSYPDMVLLAGGTPKIIKCEEKDGFKLSAKKLEKAISKKTKWLILNSPSNPTGAGYTKKEIEDLSKVLLKHKKIFILSDDIYEHIRYEGFNFFTIAQISKLKERTLTMNGVSKSYAMTGWRIGYAAGPKEIINAIRKIQSQSTSNPSSISQAAAVEALNGQQNFIKERAEAFKERRDFVVSSLNNIKGINCLIPNGAFYVFPSCKALLNKKTKLKTDTEFVQKLLEKSMVAVVQGSAFGLDGYFRISYATSMENLKKAITR

SEQ ID NO: 124630 - protein, 395 aa, Unknown
  Bacterial polypetide isolated from the Sargasso Sea
MSIISNNLKRIKPSPTIAVTQKARELRAAGKDVVGLGAGEPDFDTPINVKNAAIRAIRDGDTKYTAVDGTPALKKAILKKFKRENKLNYKLDEITVGTGGKQVLYNTFMATLNKGDEVIIPAPFWVSYPDMVLLSGGKPKIVKCDEKDGFKITPAKLKAAITKRTKWIILNSPSNPTGSGYSKSEIQKLAKVLIKNKKVHILSDDIYEHVKYDNFKFFTIAQISKLKSRTLTMNGVSKSYAMTGWRIGYAAGPKEIISAIRKIQSQSTSNPSSISQAAAVEALNGKQDFIKKRAKSFKERRDFVVKSLNNIDGISCLKPNGAFYVFPNCKKLLNKRTKLKKDTDFVQKLLEKQNVAAVQGSAFGLDGYFRISYATSMAKLKIAMSRIKKFCEDLG

SEQ ID NO: 124631 - protein, 395 aa, Unknown
  Bacterial polypetide isolated from the Sargasso Sea
MSIISDSLKRIKPSPTIAVSQKARELKAAGKDVIGLGAGEPDFDTPNNIKNAAIKAIRGGDTKYTAVDGTPALKKAIIKKFKKENNLKYSVEEITVGTGGKQVLYNAFMATLNKGDEVIIPAPFWVSYPDMVLLAGGKPKIVKCSEGENFKLTPAKLKKAISKKTKWLILNSPSNPTGASYTKKEIVKLSKILAKHKRIHILSDDIYEHISYEKSKYFTIAQVSNLKNRTLTMNGVSKSYAMTGWRIGYAGGPKEIIKAIRKVQSQSTSNPSSISQAAAVEALNGTQSFIKTRSKEFKKRRDFVVKSLNNIKGVNCLTPDGAFYVFPSCKKLLNKKTKLKTDSEFVEKLLEKANVAVVQGSAFGLPGYFRISYATSMQKLKVAMERIKSFCNNLN

SEQ ID NO: 124632 - protein, 395 aa, Unknown
  Bacterial polypetide isolated from the Sargasso Sea
MSIISDSLKRIKPSPTIAVTQKARELRAAGKDVIGLGAGEPDFDTPNNIKNAAIKAIRGGDTKYTTVDGTPALKKAIIKKFKKENNLKYSNEEITVGTGGKQVLYNAFMATLNRGDEVIIPAPFWVSYPDMVLLAGGKPKIVKCSESDNFKLTPKKLKKAISKKTKWLILNSPSNPTGASYTKAEIKKLSQVLIKNKKIQILSDDIYEHITYDKDKFFTIAQISSLKNRTLTMNGVSKSYAMTGWRIGYAGGPKEVIKAIRKVQSQSTSNPSSVSQAAAVEALNGTQKFIKIRSKEFKKRRDFVVKSLNKIKGIKCLIPNGAFYVFPSCKGLLNKKTKLKKDTDFVQKLLEKANVAVVQGSAFGLEGYFRISYATSMKNLKKAMERIKSFCESLS

SEQ ID NO: 124633 - protein, 257 aa, Unknown
  Bacterial polypetide isolated from the Sargasso Sea
MSIVSNNLKRIKPSPTIAVTSKAREMRAAGKDVIGLGAGEPDFDTPDNIKDAAIEAIKRGETKYTAVDGTPKLKKAIQGKFTRENNLSYELDQISVGTGGKQVLYNVFMATLNPGDEVIIPAPYWVSYPDMVLLAGGKPKIVKCSEKNEFKITPDELKKAIGKKTKWLIINSPSNPTGSCYTKNEIEELSKILIKNKNVYILSDDIYEHITYDDFKFFTIAQIKALKDRTLTMNGVSKSYSMTGWRIGYGAGPKDII

SEQ ID NO: 124634 - protein, 283 aa, Unknown
  Bacterial polypetide isolated from the Sargasso Sea
MSIISDSLKKIKPSPTIAVTQKARELKAAGKDVIGLGAGEPDFDTPDNIKQAAIKAINDGDTKYTAVDGTPALKKAIVEKFKKENNLNYSTDQITVGAGGKHVIYNAMMATLNEGDEVIVPAPYWVSYPDMVLLAGGKPVIMECNEKQGFKINPNDLEKYITPKTKWIILNSPSNPTGACYSEQDIKAIADILEKHNDVYILSDDIYEHVTYEGFKFFTIAQIESLKDRVLTMNGVSKAYSMTGWRIGYAAGPKDIVKAIAKIQSQSTTNPSSISQAAAVEAL

SEQ ID NO: 124635 - protein, 395 aa, Unknown
  Bacterial polypetide isolated from the Sargasso Sea
MSIISNSLNKIKPSPTIAVSQKARELRAAGKDVIGLGAGEPDFDTPNNIKNAAVRAIRAGETKYTAVDGTLALKKAIVKKFKKENNLKYSIDQITVGAGGKQVLYNAFMATLNKGDEVIIPAPFWVSYPDMVLLAGGKPKIVKCDEKDGFKINAKNLRKAITKKTKWLILNSPSNPTGAGYTKNEIKKLSKVLIKHKKIHILSDDIYEHVKYDNFKFYTIAQIPKLKNRTLTMNGVSKSYAMTGWRIGYAAGPENIIKAIRKIQSQSTSNPSSISQAAAVEALNGTQKFIKKRANSFKVRRNFVVNSLNSIEGISCLKPNGAFYVFPNCKKLLGNKTKLKTDTDFVKKLLEKSNVAVVQGSAFGLDGYFRISYATSMQKLKIAMSRIKSFCESLN

SEQ ID NO: 124636 - protein, 395 aa, Unknown
  Bacterial polypetide isolated from the Sargasso Sea
MSIISDSLKRIKPSPTIAVTQKARELKAAGKDVIGLGAGEPDFDTPDNIKNAAIKAIKKGDTKYTAVDGTPALKKAVIKKFKRENKLNFSTDQITVGTGGKQVLYNAFMATLNKGDEVIIPAPFWVSYPDMVLLAGGKPKIIKCTEQEGFKLTAKKLKKAISKKTKWVILNSPSNPTGAGYTKKEIQDLAKVLIRYKKVYILSDDIYEHVRYDNFNFFTIAQLSKLKDRTLTMNGVSKSYAMTGWRIGYAAGPKDIIKAIGKIQSQSTSNPSSISQAAAVEALNGKQDFIKKRSDAFKQRRDFVVKSLNNIKGISCLKPNGAFYVFPSCKGLLNKKTKLKTDTDFVQKLLEKSNVAVVQGSAFGLDGYFRISYATSMKNLKKAMNRIKLFCESLE

SEQ ID NO: 124637 - protein, 333 aa, Unknown
  Bacterial polypetide isolated from the Sargasso Sea
MSIISDSLKRIKPSPTIAVTQKARELRAAGKDVIGLGAGEPDFDTPDNIKDAAIQAIKNGDTKYTAVDGTPALKKAIVEKFKRENQLDFNTDQITVGTGGKQVLYNALMATLNKGDEVIIPAPFWVSYPDMVLLAGGKPKIVKCDEKDSFKLTAKKLQKAISKKTKWLILNSPSNPTGAGYTKNEIEDLAKVLMKNKKVYILSDDIYEHIKYDNFNFFTIAQISKLKDRTLTMNGVSKSYAMTGWRIGYAAGPKDIIKAIGKIQSQSTSNPSSVSQAAAVEALNGSQDFIQERSDAFKRRRDFVVKSLNNIKGINCLMPQWSFLCIPKLQRLV

SEQ ID NO: 124638 - protein, 395 aa, Unknown
  Bacterial polypetide isolated from the Sargasso Sea
MSIVSNSLKRIKPSPTIAVSQKARELKAAGKDVIGLGAGEPDFDTPDNIKKAAIEAINRGETKYTAVDGTPALKKAIVNKFKRENNLEYSAEEITVGTGGKQVIYNAFMATLNKGDEVIIPAPFWVSYPDMVLLAGGNPKIVKCNENDGFKLTPKNLKKAITKKTKWLILNSPSNPTGAAYTKEEIEALSEVLIKNKNVHILSDDIYEHITYDNFNFFTIAQVSKLKNRTLTMNGVSKSYAMTGWRIGYAAGPKEIIKAISKIQSQSTSNPSSISQAAAVEALNGTQDFIKERANAFKERRDFVVNSLNNIKGISCLKPSGAFYVFPSCKKLLGKKTKLKTDKDFVEKLLEEALVAVVQGSAFGLDGYFRISYATSMDNLKKALERIKSFCESLN

SEQ ID NO: 124639 - protein, 370 aa, Unknown
  Bacterial polypetide isolated from the Sargasso Sea
KSCRKRCICLGAGEPDFDTPDNIKSAAIKAIKKGDTKYTAVDGTPALKKAIVAKFKRENKLNYSVDQITVGTGGKQVLYNAFMATLNKGDEVIIPAPFWVSYPDMVLLAGGKPKIVKCTEQEGFKLTAKKLKKAISKKTKWVIINSPSNPTGAGYSKKEIQDLAKVLINNKKIHILSDDIYEHVRYDNFNFFTIAQISKLKDRTLTMNGVSKSYAMTGWRIGYAAGPKDIIKAIGKIQSQSTSNPSSISQAAAVEALNGKQGFIKTRANAFKARRDFVVKSLNSIKGVNCLTPNGAFYVFPSCKGLLNKKTRLKTDSNFVQKLLEKENVAVVQGSAFGLDGYFRISYATSMQNLKKAMTRIKSFCESITR

SEQ ID NO: 124640 - protein, 161 aa, Unknown
  Bacterial polypetide isolated from the Sargasso Sea
MSIVSNSLKRIKPSPTIAVTSKAREMKAAGKNVIGLGAGEPDFDTPDNIKEAAIQAIKNGETKYTAVDGTPKLKQAIKEKFLRENNLNYDLDQISVGTGGKQVLYNAFMATLNPGDEVIIPAPYWVSYPDMVLLAGGKPRIIKCSEKMNLKLLQKSLKSNK

SEQ ID NO: 124641 - protein, 390 aa, Unknown
  Bacterial polypetide isolated from the Sargasso Sea
RIKPSPTIAVTQKARELRAAGKDVIGLGAGEPDFDTPDHIKEAAIKAIKDGDTKYTAVDGTPVLKKAIVEKFKRENNLNYTTDQITVGAGGKHVIYNLMMATLNKGDEVIIPAPYWVSYPDIVLLAGANPIVIECSEEQGFKLTAKDLESAITNNTKWIILNSPSNPTGACYTEQEIKNLAQVLRRKPHVNVLSDDIYEHVTYEGFKFFTIAQIPELKNKVVTMNGVSKSYAMTGWRIGYAAGDKEVIKAIAKIQSQSTTNPSSISQAAAVEALNGTQDFIPIRSLAFQERRDFVVNSLNAINGINCLKPDGAFYVFPSCKGLIGKKDKNGKKLENDTDFVQSLLENNNVAVVQGSAFGLEGFFRISYATSMENLEKAMSRIKEFCESLS

SEQ ID NO: 124642 - protein, 395 aa, Unknown
  Bacterial polypetide isolated from the Sargasso Sea
NIENIPPSATMLMTQLARDLKAEGKNIISMSAGEPDFDTPKTIKEAAIDAINRGETKYTAVDGIDDLKQAVIDKFKNDNNLDYEKGNISVAPGGKSIIFNAILSTINPGDEVIIPAPYWVSYPDIVKLAGGNPVIIETSPDNNFKISPDDLEKNITEKTKWLFINSPSNPTGQVYSKAELINLTEVIKKNKNLYILSDDIYEHIRYQNNERFYTIAELDEEIFSRTLTMNGVSKAYSMTGWRIGYCGGPIEIINAMRKLMGQSTSNPSSISQWATVEALNGSKDFLNLWIESFKERRDFIVNYLNQCNGISCLIPEGAFYVYPSCEGLIGKEYKGKLISNDKDFAMILLKEKLVSVVHGEAFGLSPFFRISYATSMDNIKLACDRIGELCDEATS

SEQ ID NO: 124643 - protein, 361 aa, Unknown
  Bacterial polypetide isolated from the Sargasso Sea
KIKPSPTIAVTQKARELKAAGKDVIGLGAGEPDFDTPDNIKQAAIKAINDGDTKYTAVDGTPALKKAIVEKFKKENNLDYTTDQITVGAGGKHVIYNAMMATLNDGDEVIVPAPYWVSYPDMVLLAGGKPVIMECNEKQGFKINPNDLEKYITPKTKWIILNSPSNPTGACYSEQDLKAIAAILEKHNHVYILSDDIYEHVTYEGFKFFTIAQIESLKDRVLTMNGVSKAYSMTGWRIGYAAGPKDIVKAIAKIQSQSTTNPSSISQAAAVEALSGTQDFIKERANSFQERRDFVVNALNAIDGIECLNPDGAFYVFPSCKGLMGKKDSNGNEIKSDTDFVQSLLENSGIAVVPGFCIWFR

SEQ ID NO: 124644 - protein, 327 aa, Unknown
  Bacterial polypetide isolated from the Sargasso Sea
MISIFHILNKVIEYKQFSMSIISNSLKRIKPSPTIAVTQKARELKAAGKDVIALGAGEPDFDTPNNIKKAAVKAIRIGDTKYTPVDGTPAIKNAVIKKFKRENNLTYTSDQITVGTGGKQVLYNAFVATLNKGDEVIIPAPFWVSYPDMVLLAGGKPKFIKCGEEDGFKLTPTKLKKAITKKTKWIILNSPSNPTGAAYTKEEIINLGKVLLKNKNILILSDDIYEHVKFDNFKFFTIAQIKKLKDRTLTMNGVSKAYAMTGWRIGYAAGPKNIIAAIRKIQSQSTSNPSSISQAAAVEALNGTQSFIKKRAKSFSDRRKFCCELFK

SEQ ID NO: 124645 - protein, 361 aa, Unknown
  Bacterial polypetide isolated from the Sargasso Sea
MISIFHILNNVVEFIFISMSIISDSLKRIKPSPTIAVTQKARELRAAGKDVIGLGAGEPDFDTPENIKQAAIKAIENGDTKYTAVDGTPALKNAIVEKFKRENNLDYSTDQITVGTGGKQVLYNAFMATLNKGDEVIIPAPFWVSYPDMVLLAGGKPKIVKCTEEEGFKITPKKLKKAIGKKTKWLILNSPSNPTGAGYSKNEIEGLAKVLIKNKKVQILSDDIYEHIKYDDFNFYTIAQNSKLKDRTLTMNGVSKSYAMTGWRIGYAAGPKEIIKAIGKIQSQSTSNPSSVSQAAAVEALNGKQDFIQERSDAFKERRDFVVNSLNSIKGINCLTPNGAFYVFPSCKKLLGKKNKIKNRH

SEQ ID NO: 124646 - protein, 205 aa, Unknown
  Bacterial polypetide isolated from the Sargasso Sea
RGATNHNIWRDAGCEQDTFRYYKESTRGLDFEGLMEDVEKAPNGSMFLLHACAHNPTGVDPTAEQWKEISKLMKSKGHFAFFDMAYQGFASGDCEFDAQAIRIFVEDGHKVAVAQSFAKNMGLYGQRVGAVSIMCDDKAEAVRVESQLKVIARAMYSNPPLHGALIASTILGDPELKKQWYAEVKGMADRIIGMRTMLRKHLEES

SEQ ID NO: 124647 - protein, 396 aa, Unknown
  Bacterial polypetide isolated from the Sargasso Sea
MFEKVVAAPADPILGLTEAFRADSRSHKINLGVGIYKDETGATPILHCVKKAEQKLLTDEKTKNYLGIEGNIEYGRIVQQLLFGQDSALVASGRAKTAQAPGGTGALRIAAEFVVRNGLAKTVWISDPTWANHVSVFQAAGLTVKWYKYYDAASKGLDFAAMQASLAEVQAGDLVLLHGCCHNPTGIDPTADQWRALAKQSAAAGWLPLFDFAYQGFARGIEEDAEGLRIFAECHDELLVASSFSKNFGLYNERVGAFTLVSATKEIADVAFTQVKTVIRANYSNPPSHGAAVVTAVVSDPALYAEWVEEVAAMRVRIREMRELLVEKLAARGVNQDFSFIREQNGMFSFSGLSKDQVERLKSEFAIYIVGSGRISVAGITRANIDPLCDAIAKVL

SEQ ID NO: 124648 - protein, 244 aa, Unknown
  Bacterial polypetide isolated from the Sargasso Sea
MNTSEDFLSKQAQTNPYPFLIDIERAEGVYIYDKNGKSYFDMTAGVAVNNIGHRHKNVIKAIQSQIDKHLHVMVYGEYIQDAQINFSKELTSVLPKELNCVYPVNSGTEANEAAIKLAKRATGRNNIVSLTGSYHGSTIGSLSISGNEIKKQAFRPLMPGVDFISLNDLDGLQKINEHTAAVIIETIQGDAGVRIPKHDYLNALKKRCKKTGALLIFDEIQCGMGRTGRFFAFEHFNIVPDILT

SEQ ID NO: 124649 - protein, 223 aa, Unknown
  Bacterial polypetide isolated from the Sargasso Sea
MLQRNISSHLYGFTDLKSLNERGPLVISYGKGIYVYDTKGNKYLDGNSGLWNQCAGFDHPGLIEVAKKQYEKFAGYHSLFGRLSEETLQLSEKIIEVSPFDQGRVFFCNSGSEANDTMVKMLWMLNARIGKPKRRKIITRINGYHGVTLGASSMTAKPYNKEFGLPSEEFIHIECPHYWKYGLENETEEEFSLRMAKKLEEKIIKEDPETIAGFVAEPVQGAG

SEQ ID NO: 124650 - protein, 207 aa, Unknown
  Bacterial polypetide isolated from the Sargasso Sea
MNNLLKTYKFSNFRVVKGNGCYLYTSDKRKLLDFSAGVAVNSLGYNHPVVRKSLQDQIKTGITHLSGSQMHEFKTKLSKLLSKNSNKGDVFFSNSGAESIEAALKIARNYGSKIGRDEIIAMTSSFHGRTIGALSVGSNKKYKSNIGPVPGKVKFCKFNDVSHLKKLVNKKTVAIIIEFVQGDGGINICSKNFAKAIKGICKNKKIF

SEQ ID NO: 124651 - protein, 206 aa, Unknown
  Bacterial polypetide isolated from the Sargasso Sea
PFNSGKVFFCNSGSEANDTAIKMLWMFNKRIGKPNKRKIISRINAYHGVTLGGSSLTGKPYINEFGMPLSEFLHTDCPHFWKYGKKNETEEFFSKRIGNNLEKMILKEGPENIAAFFAEPVMGAGGVIPPSKNYFQIIQPILKKYDIPFVADEVICGFGRTGNLWGSETYNIKPDIIISSKCLTAGFFPMGAVIVDKKFAEKFIEI

SEQ ID NO: 124652 - protein, 207 aa, Unknown
  Bacterial polypetide isolated from the Sargasso Sea
MSKILNTYNRKKISFSKGKGSFLYTTNGKKYLDFVQGIAVNCLGHANDYLIKSINKQSKKLWHVSNVFTIPEQERLAKRLAQKTFADYVTFQNSGAEATEAAIKFARRYFYSKGQPRKNRVLCINNSFHGRTIAAIFASNSKKAIEGFKPKVDGFDHFNFGDHKGLEKAITSRTAAIMVETIMGEGGIKVIPDFCLKGLRKLCNKKK

SEQ ID NO: 124653 - protein, 216 aa, Unknown
  Bacterial polypetide isolated from the Sargasso Sea
QKMLLKKKYIINEGYNKLDSLFSSGNGSNIFVNKKKFLDLSLCAGSLILGHNSKIFKDSMKNALRNNISNFAAKNKFAVNFSSTLKKIYPKYSDFIFCNSGTEAVFKSLRIARAISNKNLIISVTGSWHGSVSELLFTSDKNYKNIPLSDGLGQYNKKNIKFIPYNNIEISKKILKKYEKKIMCIIIEPIQGCLPINTKKYLKFLSDYAKKKKIIL

SEQ ID NO: 124654 - protein, 164 aa, Unknown
  Bacterial polypetide isolated from the Sargasso Sea
MLHTNTSNHLYGFTDLKSLNERGPLVISYGKGIHVYDTKGNKYLDANSGLWNACAGFDHPGLIEVAKKQYEKFAGYHSLFGRLSEETLELSEKLIEVSPFNQGRVFFCNSGSEANDTMIKMLWMLNARIGKPKKRKIITRINGYHGVTIGAASMTGKPYNKEFG

SEQ ID NO: 124655 - protein, 163 aa, Unknown
  Bacterial polypetide isolated from the Sargasso Sea
MLKPNTSSHLYGFTDLKSLNDRGPLVISYGKGIYVYDNKNNKYLDANSGLWNACAGFDHPGLIEVAKKQYEKFAGYHSLFGRLSEETLELSEKLIEVSPFDQGRVFFCNSGSEANDTMIKMLWMYNSRIGKPKKRKIITRINGYHGVTLGSASMTGKPYNKEF

SEQ ID NO: 124656 - protein, 109 aa, Unknown
  Bacterial polypetide isolated from the Sargasso Sea
AAIMVETIMGEGGIKVIPDWCLKELRALCNKKKILLILDEVQCGIGRSGDFFAFEKSKVKPDIVPIAKGIGGGFPIGAVLMNKKDCFRDDTRYPWINIWGKSISDGCWK

SEQ ID NO: 124657 - protein, 165 aa, Unknown
  Bacterial polypetide isolated from the Sargasso Sea
MVTRTDFNRYMMPTYKPADFVPSKAKGSIVWDKKNKKYIDFASGIAVSSLGHCHPTLNKALTDQSKKIWHLSNLLTNEPALRLAKIFCKHTFAEKVFFANSGAEAVEGAVKTARKHAYLNISKKKNEIVSFSDAFHGRTMMAIALNGSDRFIEGFGPMPGGIKNH

SEQ ID NO: 124658 - protein, 62 aa, Unknown
  Bacterial polypetide isolated from the Sargasso Sea
LILDEVQCGIGRSGDFFAFEKSKVKPDIVPIAKGIGGGFPIGAVLMNKKVASGMVPGTHGSS

SEQ ID NO: 124659 - protein, 177 aa, Unknown
  Bacterial polypetide isolated from the Sargasso Sea
MLQRNTASHLYGFTDLKSLNERGPLVISYGKGIYVYDTKGSKYLDGNSGLWNQCAGFDHPGLIEVAKKQYEKFAGYHSLFGRLSEETLQLSEKIIEVSPFDQGRVFFCNSGSEANDTMVKMLWMLNARIGKPNRRKIITRINGYHGVTLGASSMTAKPYNKEFGLPSKEFIHIECPH

SEQ ID NO: 124660 - protein, 121 aa, Unknown
  Bacterial polypetide isolated from the Sargasso Sea
MRQNSKNNELRGVYDNVMLPNYSPANFVPKKAEGSLVWDQDDKEYIDFGGGIAVNSLGHSHPSLIKALTDQSKKIWHLSNYLTNEPAIKLANKLTELTFAENIFFSNSGSEANEAAIKIAR

SEQ ID NO: 124661 - protein, 254 aa, Unknown
  Bacterial polypetide isolated from the Sargasso Sea
MQEINILNEGYNYGKLASISKGSIIKINNKSYIDLSYSAGSIILGHSNKIFKKILNEISKKNISNYAFPNIYAKKFSTSLKKIFPNHKKFIFCNSGSEAIIKGIRICRAISKKKIIINTSGSWHGSVNETLYTSNKNHKPIKLSDGLPKHTKNELRFIPYGDKKKSKKILDAYKNKISCILIEPIQGALPSSVNLDYIKFLYTYAKKNNIIIFFDEIITGLRDSKNSFQSRFKFKPNLSVFGKSFAGGLPIGII

SEQ ID NO: 124662 - protein, 270 aa, Unknown
  Bacterial polypetide isolated from the Sargasso Sea
MNNLLKTYKFSNFKVVKGDGCYLYTSDKRKLLDFSAGVAVNSLGYNHPVIKNSLRAQLKTGITHLSGSQIHEFKTKLSKLLSDNSNKGDVFFSNSGAESIEAALKIARNYGSKNGKDEIIAMTSSFHGRTIGALSVGSNKNYKSNIGPVPGKVKFCKFNDVSHLKKLVNKKTVAIIIEFVQGDGGINICSKNFAKAIKEICKYKKILLIGDEIQGGIGRTGKIFAYKHYGVNPDIITSAKGLGSGIPIGATIVKKYISKIISTGFQAQHL

SEQ ID NO: 124663 - protein, 234 aa, Unknown
  Bacterial polypetide isolated from the Sargasso Sea
MTFDEKFMQDAIQLAKRGRFSTHPNPSVGSVVVKDGKIVGKGFHLRAGLKHAEINALEQAGDKSKGSTLYVTLEPCSFHGRTPACAKAIINAGINRVVVGTVDPDPRNSGRGIEILREAGIQVVTNCLKAETSQLVEGHIKRFRFGRPFVRLKLAMSLDGKTALSGGQSKWITSENARFDVQKLRAWSSAIVTGVGTIIHDDPALSVRLQESDLPNSREIMSVERAIYVLDSQL

SEQ ID NO: 124664 - protein, 125 aa, Unknown
  Bacterial polypetide isolated from the Sargasso Sea
MSILNVYNPLSIEVDHGDGVYLYSKEGTRYLDFTSGIGVTSLGHSHPSLISALKDQAEKIWHCSNLFKIKNQQIVADKITKNSFADSVFFCNSGTEAVEAGVKAIRKYYNYKKEKKFKIICARNS

SEQ ID NO: 124665 - protein, 273 aa, Unknown
  Bacterial polypetide isolated from the Sargasso Sea
DLKTLNERGPVVITHGKGIYVYDIYKKKYLDANSGLWNACAGFDHPGLIEVAQKQYAKFAGYHSLFGRLSEETLELSDKIIEVSPFDDGKVFFCNSGSEANDTMVKILWMLNNMKGSPQKRKIITRINGYHGVTLGATSMTGKPYNEVFQLPLDGFIHADCPHYWKFAKENETEEDFTNRMAKNLEDLILKEDPDTIAGFVAEPVQGAGGVIPPSKGYFDLIQPILKKYKIPLIADEVICGFGRTGNLWGCETYDIKPDIIISSKCFTAGYFP

SEQ ID NO: 124666 - protein, 238 aa, Unknown
  Bacterial polypetide isolated from the Sargasso Sea
MLQTNISSHLYGFTDLKSLNERGPLVISYGKGIHVFDTKGNKYLDANSGLWNACAGFDHPGLIEVAKKQYEKFAGYHSLFGRLSEETLELSEKLIEVSPFNQGRVFFCNSGSEANDTMVKILWMLNARTGKPNKRKIITRINGYHGVTLGASSMTAKPYNKEFGLPLKEFIHTDCPHFWKFGLENENEDEFSKRIATNLENLILKEDPETIAGFVAEPVQGAGGVIPPSKNYFDLIQQ

SEQ ID NO: 124667 - protein, 62 aa, Unknown
  Bacterial polypetide isolated from the Sargasso Sea
MKKNSKNNELRGIYDNVMLPNYSPANFIPKEARGSRIWDQDNKEYIDFGGGIAVNSLGHSHP

SEQ ID NO: 124668 - protein, 184 aa, Unknown
  Bacterial polypetide isolated from the Sargasso Sea
EKRILLICDEIQSGVARSANFFAFESSKIKPDIVPIAKGIGGGFPIGAVLMTNKVAKAMQPGSHGSTFGGNPNACAVGIEVMKQIFKPGFLNNVKKKSDYFFLRLHNLKNNYPKIIKEIRGKGLLIGVQLHFNQAKFIKSLEKNNLLTIRAAENVIRILPPLNVKKSEIDQAIRIIDKVCDKYN

SEQ ID NO: 124669 - protein, 179 aa, Unknown
  Bacterial polypetide isolated from the Sargasso Sea
ILDEVQSGVGRTGKMWGYENLGIEPDGFTLAKGLGGGHAIGALLVKEKANIFSPGDHASTFGGNPFACKAALTVLEEMNRRNLINNVYLRGEQLSAGFEELSKKFPNIISGKRGLGLIQGLLINDDYADAKKITLKAFDKGLLVVPAGGNVVRIVPPLVISRREINILLDKLNSIFEEL

SEQ ID NO: 124670 - protein, 212 aa, Unknown
  Bacterial polypetide isolated from the Sargasso Sea
MLKSNHSHHLYGFTDLKTLNERGPLVISYGKGIYVYDTYDKKYLDANSGLWNACAGFDHPGLIEVAKKQYSKFAGYHSLFGRLPEEVLELSDKIIEVSPFDDGRVFFCNSGSEANDTMIKMLWMLNARKGNPEKRKIITRINGYHGVTLGAASMTGKPYNGEFKLPLDGFIHAECPHYWKFGKDNETEEEFSKRMAHNLEKLIVNEGADTIA

SEQ ID NO: 124671 - protein, 126 aa, Unknown
  Bacterial polypetide isolated from the Sargasso Sea
MRQNTKNNELRGVYDNVMLPNYSPANFVPKKAEGSLVWDQDDKEYIDFGGGIPVNSLCHSHPSLIKALTDQSKKIWHLNNYLTNEPAIKLANKLTELTFAQNIFFSNSGSEANEAAIKIARKYHSS

SEQ ID NO: 124672 - protein, 170 aa, Unknown
  Bacterial polypetide isolated from the Sargasso Sea
MSKILNTYNRKKISFSKGKGSFLFATNGKKYLDFVQGIAVNCLGHANDYLIRSINKQSKKLWHVSNVFTIPEQERLAKRLAQKTFADYVTFQNSGAEATEAAIKFARRYFYSKGQPRKNRVLCINNSFHGRTIAAIFASNSKKAIEGFKPKVDGFDHFNFGDHKGLEKAI

SEQ ID NO: 124673 - protein, 173 aa, Unknown
  Bacterial polypetide isolated from the Sargasso Sea
MPTYGRIDIAFENGEGSYLFDTNGEKYLDFATGIATNSLGHCHPHLVAAVQEQAAKLWHVSNLYNIPQQQRFADRLVENSFADTVFFCNSGAEAMEGCLKVARKYHFENGEPKREEIVCATGAFHGRTLTTLSAGDSEKYREGFGPRPDGFHHVAFGNLNEMRAAMSDKTAAI

SEQ ID NO: 124674 - protein, 280 aa, Unknown
  Bacterial polypetide isolated from the Sargasso Sea
FTNPAMEALADRLIAAAPGDLERVFFVSGGSEAVEAALKLARQYFLEIGQPQRRRIITRRQSYHGNTLGALAVGGNEWRRRPFQPLLIETSQIAPCFAYRDQGHNETAEKYGQRVADELEETLQRHGPDTVAAFICEPVVGATAGAVPPVAGYLARVREICDRHGVLLIFDEVMCGMGRTGYRFACDEDGVAPDLLVVAKGLGAGFQPIGATLVARRVFQAIHDGSGSFQHSHTYMGHPAACAGALAVQEVIDAEDLLANVQRRGEQLRAALDTAFGDHP

SEQ ID NO: 124675 - protein, 280 aa, Unknown
  Bacterial polypetide isolated from the Sargasso Sea
MSSVLHRSLNSTLPIIKSVDANYLIDEDGKRYLDACGGAAVSCLGHDNAKVRAALKDQIDKLAFAHSGSFTNEPTEELAEFLINRAPAGLGAGRVMFLGSGSEAMEAALKLARQFHLERKDTKRVNIIARTPSYHGNTLGALATGGHAGRRAPFQPMLMQVHHIDATYRYRMKLEDESEDEYALRMANQLEIKICDLGPETVMAFVAEPVVGASLGSQPAPIGYFKRIRDICNKYGVLYIADEVMCGMGRTGSLFALEQEGIFADITTWQKDWGRLSANS

SEQ ID NO: 124676 - protein, 100 aa, Unknown
  Bacterial polypetide isolated from the Sargasso Sea
MPVTFSRGEGAILYDTDNMPYLDGVSGIAVTNLGHQHPQVTAAVIEQAQRLVHTSNLFRIDLQELVAEQLRGMTGMENMFFCNSGAEANEAAIKLARRYG

SEQ ID NO: 124677 - protein, 268 aa, Unknown
  Bacterial polypetide isolated from the Sargasso Sea
MNRIVNSIEAKDIENHFHPYTNPQTLKENGPHVICRGEGVYVYDNSNMKFIEGMSGLWCASLGFNNKDLVEAATKQMEKLPFYHSFAGKVPEVAANLADKLVGIAPEGLDKVFFCNSGSEANDTAIKVVWYYQNALGRPEKRKIISRKRGYHGVTMVAGSLTGLPYAQDGFGLPLDFVRHTSCPHYFIEKVEGESEKNFVDRMLNNLEELILEEGPDTIGAFIAEPVMGAGGVIIPPKNYFSKVQALLKKYDVLFIADEVICGFGRTG

SEQ ID NO: 124678 - protein, 138 aa, Unknown
  Bacterial polypetide isolated from the Sargasso Sea
MSSVLGTYARKDISFKEGKGSYLFSENGEKYLDFVQGIATNILGHCHDHLISAIRNQSEKLWHVSNAFVIPEQERLAKRLTDNTFADFVCFQNSGTEATEASIKIARKYFHKIGKPEKNRIITFEGSFHGRTLAALLP

SEQ ID NO: 124679 - protein, 142 aa, Unknown
  Bacterial polypetide isolated from the Sargasso Sea
MSSILGTYARKAISFQEGKGSYLFAENGDKYLDFVQGIATNILGHCHDHLIKAIQEQSKKLWHVSNAFVIPEQEKLAKRLTDSTFADFVCFQNSGTEATEASIKIARKYFHKIGKPEKNRIITMKGSFHGRTLAALFAANNP

SEQ ID NO: 124680 - protein, 290 aa, Unknown
  Bacterial polypetide isolated from the Sargasso Sea
SPFEQGRVFFCNSGSEANDTMVKMLWMLNARIGKPNRRKIITRINGYHGVTLGASSMTAKPYNKEFGLPSEEFIHIECPHYWKYGLENETEEDFSIRMAKNLEEKIIKEDPETIAGFVAEPVQGAGGCIPPSKSYFDLVQPILKKYDIPFIADEVICGFGRTGNLWGCDTYNIKPDIIISSKCLTAGYFPMGAVIVNKEFSEKFIEVSEEAEEFPHGFTAGGHPVGCAIALKAIDVIMNEGLLENVKLMEPYFFERLNEFNDYEHIGETRGIGFMAALEMVKNKDTKEPL

SEQ ID NO: 124681 - protein, 174 aa, Unknown
  Bacterial polypetide isolated from the Sargasso Sea
MNTYAPSDLTFERGLGSWLFDDKGDKYLDFASGIAVNSVGHSHPHVVSAIQKQAAKLIHTSNLYNISQQEKLAKRLCELSFADCVFFSNSGAEANEGAVKVARRYMFEKGKPERNVILCVDGCFHGRTISMLSATSKKENRTGFGPLPGGFRHIAFNDLNSLAEQFAAKTWLQS

SEQ ID NO: 124682 - protein, 280 aa, Unknown
  Bacterial polypetide isolated from the Sargasso Sea
SNIIARAPSYHGNTLGALATGGHAGRRRPFQPLLMNVSHIDAAYEYRMRREGEAEVDFALRMANLLEEEIQRLGTETVMAFVAEPVVGASLGTQPAPSGYFKRIREICDTYGVLCIADEVMCGMGRTGSLFALEQESIVADITTLAKGLGAGYQPIAAVMAAENVIRIMKDGSGTLWNGHTYMSHAIATAGALAVQQVIEEENLLSNVRRRGEQLREGLQTRLGQNPHVGNIRGRGLFWTAELVQDRATKQPFDTTLGLAPKIQTTALDIGLMCYPSQGV

SEQ ID NO: 124683 - protein, 208 aa, Unknown
  Bacterial polypetide isolated from the Sargasso Sea
MPKSNISSHLYGFTDLKSLNERGPLVISYGKGIYVYDIKNNKYLDANSGLWNACAGFDHPGLIEVAKKQYEKFAGYHSLFGRLSEETLELSNKLIEVSPFKEGRVFFCNSGSEANDTMIKILWMLNSRTGRPKKRKIISRINGYHGVTLGATSMTGKPYNKEFGLPLSDFIYADCPHFWKYGKLNETEEDFSIRMADNLEKLILKEDP

SEQ ID NO: 124684 - protein, 268 aa, Unknown
  Bacterial polypetide isolated from the Sargasso Sea
EVSHISPCYAYRGRSEDESEEEYGCRVADELDAEIQRLGPENVAAFIAETVGGATAGVIPPVAGYFKRVREICDRHGVLLILDEVMCGMGRTGTLFACEQDGISPDVICVAKGLGAGYQPIGATLVNSKVLRAFQRGSNLFQHGHTYMGHPAACAGSLAVQRKVKDQNLLVNVRERGEQLVSKLSERFGNYPHVGDIRGRGLFQGIEFVADRASKKAFDPAKKLHAKIKAAAMRQGLICYPGGGTVDGAEGDHVLLAPPFIVTLDELD

SEQ ID NO: 124685 - protein, 270 aa, Unknown
  Bacterial polypetide isolated from the Sargasso Sea
MALSPDIMKTYGRIDIAFTHGKGSFLFSEDGSKYLDYATGIAVNAFGHSHPDLIDALQDQASKLWHVSNLYKIPEQDKVANLLVKNSCANQAFFCNSGAEATEGAVKVARRYAWSKKDIERDEILCVTGAFHGRTLAMLAANDRPLFREGFGPKVPGFSHAEWGNVEDLKKKLNNKVAAVLIEPVQGEGGARKAPINYLKEVEELTKQNGSLLISDEVQIGMGRSGKLFAYQNENIEPDIIALAKGLGGGFPVGAVLATSEVGDAMVPGT

SEQ ID NO: 124686 - protein, 197 aa, Unknown
  Bacterial polypetide isolated from the Sargasso Sea
AGGNALRRQIYDPILFETSRIAPCYAYRGMRDGESEAAFALRVADELETEILRLGAGNVMAFVAEPVVGATLGAVPALDGYFTRIREICDRHGVLLILDEVMCGMGRTGHMFACEADGVRPDILTIAKGLGAGYQPIGAMMCSNNIYRAIEAGSGFFQHGHTYLGHPAACAGAHAVVTTLLDEQLIGRVKGQGRKLM

SEQ ID NO: 124687 - protein, 227 aa, Unknown
  Bacterial polypetide isolated from the Sargasso Sea
MEFKSIDYQLQPYTNPELISEKGPQVFNSGSGVNVEDIDGNSYIEGMSGLWCASLGFGENELIEAAVKQMRKLPYYHSFTGKTCETTIKLSEKLIEIAPNNLKKVFFCNSGSEANDTAIKIVWYYHSSLGNPNKRKIISRKGSYHGVTLAAASLTALDYAQKGFGLPLDFALHTTWPHYFQNSYENESEKEFCSRLIKDLEKLIEMEGAENIGAFIAEPLMGAGGVI

SEQ ID NO: 124688 - protein, 383 aa, Unknown
  Bacterial polypetide isolated from the Sargasso Sea
AQTTNYPLGIDVVKAEGSYIFDSEKKYLDLVAGVSVQNLGHCNSEINESIINQLKKYSHVMVYGEFIQRPSLNLCELLNNILPENLNSTYLTNSGTEAIEAALKLAKRSTGRSRIISALNSYHGSTHGSMSVSGFEQRKRAYRPLLPNIDFIKFNSESDISKINQSTSCVILETIQGGAGFIEPNQNYLKKISKRCQEMGALLILDELQTGLGRTGKMFAFEHYGVSPDILVLGKSLGGGFPIGAMISDLSLMNKLKSKPILGHITTFGGHPVISQAGLTTLKIILRDKLFEKAKISEQKFKQRLKHPAIIEIRGKGLMLALILESNELAKKLVIKSLEKGLILFWLLYESRAVRITPPLNITDKEIKISTDIILKTLDEIYN

SEQ ID NO: 124689 - protein, 387 aa, Unknown
  Bacterial polypetide isolated from the Sargasso Sea
MKQLPYYHSFGGKASDPSINLAEKLVSIAPEGLEKVFFCNSGSEANDTAVKLVWYYHASQGYPERKKIISRKRGYHGVTVASASLTGLPYAQDGFALPLDFAKHTSSPHYFMEKLENETEYEFSKRLVNDLENLIEKEGAGTIGAFIAEPVMGAGGVIIPPKGYFEGVQKVLRRHSILFIADEVICGFGRTGNMWGSETFSLKPDILTCAKALSSAYMPISAVLVASQVVEGVEKQAAKLGVFGHGYTYSAHPVPAAVALRTLELMEERNIVQHVQNVSEQFSERINELNKFACVGDTRAIGLLGGMEFVGVPDSRVKLDPSLKFAAQVQKLIQDSGVILRALPGDTVGFCPPLIISREEIDEMFDKVERAMPEADELLTKTYRPIL

SEQ ID NO: 124690 - protein, 429 aa, Unknown
  Bacterial polypetide isolated from the Sargasso Sea
LKSLNERGPLVISYGKGIYVYDTKGNKYLDGNSGLWNQCAGFDHPGLIEVAKKQYEKFAGYHSLFGRLSEETLQLSEKIIEVSPFDQGRVFFCNSGSEANDTMVKMLWMLNARIGKPNRRKIITRINGYHGVTLGASSMTAKPYNKEFGLPSEEFIHIECPHYWKYGLENETEEEFSLRMAKNLEEKIIKEDPETIAGFVAEPVQGAGGCIPPSKSYFDLVQPILKKFNIPFIADEVICGFGRTGNLWGCETYNIKPDIIISSKCLTAGYFPMGAVIVNKKFSDKFVEVSEEAEEFPHGFTAGGHPVGCAIALKAIDVIMNEGLLDNVKLMEPYFFERLNEFNDYEHIGETRGIGLMAALEMVKNKDTKEPFEGHLNMGDKVANLSIDNGLICRPLGPGIVLCPQFIITKNQIDEIFDSLHKTIKQVFN

SEQ ID NO: 124691 - protein, 442 aa, Unknown
  Bacterial polypetide isolated from the Sargasso Sea
MSTVFHRSPKQSLPVAIAGDGIEIIDSTGKRYIDASGGAAVSCLGHSNQRVIDAIKRQAQQLPYAHTSFFTTQAAEELAERLVASAPQGLEHVYFVSGGSEAIEAALKLARQYFVEKGELQRRHFIARRQSYHGNTLGALAIGGNAWRREPFLPILIEAHHVSPCYAYREQRADETEEQFAQRLADELEQKILELGADTVAAFVAETVVGATAGAVPPVREYFRKIRAVCDRYGVLLILDEIMSGMGRTGYLYACEEDGVAPDLLTIAKGLGAGYQPIGATLVSERIYQTIVGGSGFFQHGHTYIGHATACAAALEVQRVIADDRLLPNVQARGEQLRGRLREHYAQHPHIGDVRGRGLFVGVELVRERATKAPFDASLKLHAAIRREAFARGLMVYPMGGTVDGKIGDHVLLAPPFICTARDIDEIVNRLTDAIEGALAAI

SEQ ID NO: 124692 - protein, 216 aa, Unknown
  Bacterial polypetide isolated from the Sargasso Sea
AAVMVETIMGEGGIKVIPNWCLRDLRKICNKKKTLLILDEVQCGIGRSGKFFAFEHAKVKPDIVPIAKGIGGGFPIGAVLMTKKVASGIVPGSHGSTYAGSPLATSVANEVLNQIFKKGFLKKVEKISKYFNNELNKIKDDHKKLIKEVRGVGLLIGIKLHNDQSKFIKKLEDNNLLVIRAAENVVRVLPPLNVKKSEIDLAIKIIRKVCNEFNEK

SEQ ID NO: 124693 - protein, 147 aa, Unknown
  Bacterial polypetide isolated from the Sargasso Sea
MSSVLGTYARKAISFKEGKGSYLYAENGDKYLDFVQGIATNILGHCHEHLVKTIQDQSKKLWHVSNAFIIPEQERLAKRLTDNTFADFVCFQSSGTEATEASIKIARKYFHKIGKPEKNRIITTKGSFHGRTLAALFAANNPKHVEG

SEQ ID NO: 124694 - protein, 105 aa, Unknown
  Bacterial polypetide isolated from the Sargasso Sea
MPTYGQPPVQFVRGSGTELFDRDGNRYLDFLCGLAVTSLGHAHPAVAEAIAEQARTLLHVSNLYETVPGLEVAATIDRLQGGNGQVFFCNSGAESLEGAIKLARR

SEQ ID NO: 124695 - protein, 421 aa, Unknown
  Bacterial polypetide isolated from the Sargasso Sea
MLQRNTSSHLYGFTDLKSLNERGPLVISYGKGIYVYDTKGNKYLDGNSGLWNQCAGFDHPGLIEVAKKQYEKFAGYHSLFGRLSEETLQLSEKIIEVSPFDQGRVFFCNSGSEANDTMVKMLWMLNARIGKPNRRKIITRINGYHGVTLGASSMTAKPYNKEFGLPSEEFIHIECPHYWKYGLENETEEEFSLRMAKNLEEKIIKEDPETIAGFVAEPVQGAGGCIPPSKSYFDLVQPILKKYNIPFIADEVICGFGRTGNLWGCDTYNIKPDIIISSKCLTAGYFPMGAVIVNKEFSDKFVEVSEEAEEFPHGFTAGGHPVGCAIALKAIDVIMNEGLLDNVKLMEPYFFERLNEFNNYEHIGETRGIGLMAALEMVKNKDTKEPFEGHLNMGDKVANLSIDNGLICRPLGPAIVLCPQF

SEQ ID NO: 124696 - protein, 165 aa, Unknown
  Bacterial polypetide isolated from the Sargasso Sea
MSKILNTYNRKKISFSKGKGSFLYTTNGKKYLDFVQGIAVNCLGHANNHLIKSINKQSKKLWHVSNVFTIPEQEKLAKRLAQKTFADYVTFQNSGAEATEAAIKFARRYFYSKGQPKKNRVLCINNSFHGRTIAAIFASNSKKAIEGFKPKVDGFDHFNLVITKV

SEQ ID NO: 124697 - protein, 167 aa, Unknown
  Bacterial polypetide isolated from the Sargasso Sea
MLQRNTSSHLYGFTDLKSLNERGPLVISYGKGIYVYDTKGNKYLDGNSGLWNQCAGFDHPGLIEVAKKQYEKFAGYHSLFGRLSEETLQLSEKIIEVSPFDQGRVFFCNSGSEANDTMVKMLWMLNARIGKPNRRKIITRINGYHGVTLGASSMTAKPYNKEFGFNI

SEQ ID NO: 124698 - protein, 112 aa, Unknown
  Bacterial polypetide isolated from the Sargasso Sea
MSQYLIPTYARQPVAFVRGEGVWLYDENDHKYMDAISGIGVCNLGHCHPAVTRTLAEQARQLVHTSNLYRIPAQESLAQRLCELSGMANVFFSNSGAEANEAAIKIARLYGS

SEQ ID NO: 124699 - protein, 185 aa, Unknown
  Bacterial polypetide isolated from the Sargasso Sea
MATEQPVITRATFDEVILPIYAPAEFIPVKGKGSRVWDQQGKEYVDFAGGIAVTALGHCHPALVAALHEQGETLWHTSNVFTNEPALRLGRKLVDATFAERVVFMNSGTEANETAFKLARHYTITRHSPYKTKIIAFHNAFHGRSLFTVSVGGQPKYSDGFGPKPADIIHVPFNDLHAVKAVMDD

SEQ ID NO: 124700 - protein, 444 aa, Unknown
  Bacterial polypetide isolated from the Sargasso Sea
MTTVFHRAPRATLPVAVAGDGIEIIDSTGKRYIDACGGAAVSCLGHSNQRVIDAIKRQAQQLAYAHTSFFTTDVAEELADRLVAAAPAGLEHVYFVSGGSEAVEAALKLARQYFVEKGEPQRRHFIARRQSYHGNTLGALAIGGNAWRREPFLPLLIEAHHVSPCYAYRDQQAGETDEAYAQRLADELEQKIVELGADNVAAFVAETVVGATAGAVPPVRTYLKKIRAVCDKYGVLLILDEIMSGMGRTGYLYACDEDGVAPDLLTIAKGLGAGYQPIGATLVSDRIYRTIVDGSGFFQHGHTYLGHATACAAALEVQRVIAEEKLLDNVKARGEQLRASLREHYGAHPHVGDVRGRGLFVGVELVRDRDSKATFDPALKLHAAVKREAMQRGLMVYPMGGTIDGVHGDHILVAPPFICTAQQIDTIVERLSGAIGAALASAGA

SEQ ID NO: 124701 - protein, 131 aa, Unknown
  Bacterial polypetide isolated from the Sargasso Sea
MSNLAKNYNRKKISFKYGKGSHLYSTNGKKYLDFVMGIAVNSLGHAHPSLIKTINNQSKKLWHVSNAFQIPEGEILAKKLCKKTFADYVMFQNSGAEATEAAIKVARRYFFSIGKQNKNRILCIKNSFHGR

SEQ ID NO: 124702 - protein, 417 aa, Unknown
  Bacterial polypetide isolated from the Sargasso Sea
MFGGGKTSVDADEVRKNERECVLQTYGRGETEVMVRGKGCALFDAEGREFLDFTAGIAVNCLGHADEGVSRVIAEQAKTLTHTSNLYHTEPGATLARKLTATSFADKVFYCNSGTEANEGALKFARKYAQTRAVAAGKTANKAATGTVSFENGFHGRTFGALSLTWKEGYRAPFAPLVPGNSFAPYGDLEQARRLIVKGKTCAVFVEPVQGEGGIYPADADFLRGLRKICDDADALLVYDEVQCGLGRTGKLWGHQLVEDAEPDLMTVAKPLANGLPIGAVLMKQKVADVMAPGDHGSTFAGGPLVCAAANEVFDRITAPGFLAKVTARGEELKSAIATALADHPRLREVRGAGLLVGAQFDVPVGALVQACREDGLLVITAGAGDVLRLVPPLIVTSAEIQKAATIVAKRAREVVV

SEQ ID NO: 124703 - protein, 213 aa, Unknown
  Bacterial polypetide isolated from the Sargasso Sea
MSSLAKNYKRRNLSFKKGKGSFLYTYNGVKFLDFVQGIAVNSLGHTNPVLVKAIKKQSQKLWHVSNSFKIPEGEELAKKLTNKTFADAVIFQNSGAEATEAAIKVARRYFYSIGKPKKNRILCIKNSFHGRTIAAINASGSKKMIEGFGPKVGGFDHFKFGNHKELKKKITNKTAAIMIEPIMGEGGIKVIPTWCLKEIRKICNKKKILLILD

SEQ ID NO: 124704 - protein, 164 aa, Unknown
  Bacterial polypetide isolated from the Sargasso Sea
MTYLAKNYNRKKISFKYGKGSYLYSNNNKKYLDFVQGIAVNSLGHAHPKLVKTIRDQSKKLWHVSNAFEIPEGEKLARKLCQKTFADYVMFQNSGAEATEAAIKVARRYFYSVGKPHKNRILCIKNSFHGRTLAAIFVSGSKKMIEGFGPKVTGFDHFKFGDHN

SEQ ID NO: 124705 - protein, 271 aa, Unknown
  Bacterial polypetide isolated from the Sargasso Sea
MQSTDAQKPGPETQTVIKTFDQYVVPNYRRFNVCLVRGEGSRVWDADGQSYLDLFPGWGCNLLGHCPGPVVQAVQKQMEKLVHVPNTWYMEPQGTWAKLLSERSFGGQAFFCNSGTEANESAIKLVRLRSEGKRYKIITFQGGFHGRTMGSVSATAQPKYHEGLGPMVAGFQFAPHGDLDAVARLIDEQTGGILIEPILGEGGIVPASQEFLKGLRKLADDNDLLLVFDEVQSGCGRTGKWFGYQHTDVVPDVMTLAKSLCAGIAGGACSR

SEQ ID NO: 124706 - protein, 127 aa, Unknown
  Bacterial polypetide isolated from the Sargasso Sea
METYGTKTLEFVKGKGCFLYNNRNEKYLDFASGIAVNSLGHCHPRLIKALNKQSKQLWHISNLYTIPKQEMFAKYLCKKTFADKVFFTNSGAESIECGIKIIRSYHSFYKTGKSEIITFDGAFHGRT

SEQ ID NO: 124707 - protein, 180 aa, Unknown
  Bacterial polypetide isolated from the Sargasso Sea
MSALAKNYNRRKIAFTRGKGSFLYSTSGKKYLDFVQGIAVNSLGHANPYLIKAINRQAKKVWHVSNAFIIPEGEKLAKRLSKKTFADYVIFQNSGTEATEAAIKVARRYFYSKGKPNKNRILCIKNSFHGRTIAAIFASGSKKMTEGFGPKVPGFDHIEIRNFKPKISKILEIKLRGIQQ

SEQ ID NO: 124708 - protein, 169 aa, Unknown
  Bacterial polypetide isolated from the Sargasso Sea
MNSKTKSYVMPTYGTKNLEFVKGKGCYLYDKKNQKYLDFAGGIAVNSLGHCHPKLISALNKQTKKLWHISNLYTINTQEEFAKLLCKKSFADKVFFTNSGTESIECGLKIIRSYHSFNNTGKNEIISFDGAFHGRTYGALSAQKNKKYSNGFGRLLPGFKKVEFYNINK

SEQ ID NO: 124709 - protein, 157 aa, Unknown
  Bacterial polypetide isolated from the Sargasso Sea
MENVMPTYGRIDLSFERGEGPWLFTESGEKYLDFATGIAVNTLGHSNNALNDILIKQSKKVWHTSNLYNIKPQGDLAKLICENSFGESVFFCNSGAESLEGTIKLCRKYHFNNGDENKKDILVCSSAFHGRTLGTLAAGDNEKHREGFGVNTNGFIR

SEQ ID NO: 124710 - protein, 136 aa, Unknown
  Bacterial polypetide isolated from the Sargasso Sea
MLKSNQSHHLYGFTDLKTLNERGPVVITHGKGIYVYDIHEKKYLDANSGLWNACAGFDHPGLIEVAQKQYAKFAGYHSLFGRLSEETLELSDKIIEVSPFDDGRVFFCNSGSEANDTMVKMLWMLNKMKGILKKEK

SEQ ID NO: 124711 - protein, 175 aa, Unknown
  Bacterial polypetide isolated from the Sargasso Sea
MISEEHSQYLIGNYAAPAIDIVRGEGTKLWDSAGREYLDFASGIAVTNIGHGHPEWVKQVTEQSSVLCHASNLYSIPEQVRLAKRLVERIGPGKVLFCNSGAEANEAMIKLSRLVAHQSEQPERLEILVAENAFHGRTMGALSATASSKYRKGFEPKLPGFRFASFNHSESFRET

SEQ ID NO: 124712 - protein, 154 aa, Unknown
  Bacterial polypetide isolated from the Sargasso Sea
PDIVPIAKGIGGGFPIGAVLMNKKVAAGMTPGTHGSTFGGNPLAMAIGNTVMDIVSSKKFLDNVKNVSKYFLSNLNKIKDEYPNIIKEIRGRGLLIGIQLHSDQTMFIKKLMDNKLLTIRAAENVVRVLPPLNVKKSEIDYALKIIKKVCSEMN

SEQ ID NO: 124713 - protein, 168 aa, Unknown
  Bacterial polypetide isolated from the Sargasso Sea
MSSLANNYKRRKLSFKKGKGSFLFSTDGKKYLDFVQGIAVNSLGHANSNLINAINNQSRKLWHVSNAFIIPEGEKLAKKLTNKTFADSVIFQNSGAEATEAAIKVARRYFYSIGKPKKNRIICIKNSFHGRTIAAINASGSKKMTEGFGPKVSGFDHFEFGDHKKLKK

SEQ ID NO: 124714 - protein, 163 aa, Unknown
  Bacterial polypetide isolated from the Sargasso Sea
MSSLAKNYNRRKIAFNKGKGSFLYSNKGQKYLDFVQGIAVNSLGHANSYLTKAINKQSKKVWHVSNAFIIPEGEKLAKRLTQKTFADYVIFQNSGAEATELAIKAARRYFYKIGKPQKNRILCIKNSFHGRTLATIFASGSKKMTEGFEPKVPGFDILNSVIT

SEQ ID NO: 124715 - protein, 178 aa, Unknown
  Bacterial polypetide isolated from the Sargasso Sea
MHYEVQTGISRSAEFLAFESSKIKPDIVPIAKGIGGGFPIGAVLMSKKVASGMTPGTHGSTFGGNPLAMAVGNSVIDIVSSKKFLKNVKELSKYFFINLNLLKKKYPKIIKEIRGKGLLIGVQLYTDQSKFIKKLMDKRLLTIRAAENVVRILPPLNVKKTEINHALKIIDNVCSKMR

SEQ ID NO: 124716 - protein, 137 aa, Unknown
  Bacterial polypetide isolated from the Sargasso Sea
MSALAKNYNRRKIAFNRGKGSFLYSTNGKKYLDFVQGIAVNSLGHANPYLTKAINKQAKKVWHVSNAFIIPEGERLAKRLSKKTFADYVIFQNSGVEATEAAIKAARKYFHSIGKPQKNRILCIKNSFHGRTLAAIL

SEQ ID NO: 124717 - protein, 224 aa, Unknown
  Bacterial polypetide isolated from the Sargasso Sea
KGSFLYSKRGVKFLDFVQGIAVNSLGHANPNLIKAINKQSKKLWHVSNSFIIPEGEELAKKLTNRTFADAVIFQNSGAEATEAAIKVARRYFYSIGKPKKNRILCIKNSFHGRTIAAINASGSKKMTEGFGPKVGGFDHFKFGNHKELKRKITSKTAAIMIEPIMGEGGIKVIPSWCLKELRKICNQKKILLILDEVQCGIGRSGKFFSYEYANIKPDIVPIAK

SEQ ID NO: 124718 - protein, 258 aa, Unknown
  Bacterial polypetide isolated from the Sargasso Sea
YLDFAGGIAVNSLGHCHPELIEVLKNQLDKLWHASNLYYYSEQESYAKLICINSFAEKVFFTNSGTESIECGIKIVRSYHQHHNNYSKKNIITFEGAFHGRSFGALSAQKNSKLFEPLLPGFVQIPFDDIEVLKKTVNEETAAIMIEPVQGEGGIKPASLSFLKSIETICREREILFFLDEVQCGFGRSGKLFSYEWAKIKPDIVAVAKGIGSGFPLGACLATADACIGMTKGVHGSTYGGNPLAICVGKKGIRNYLK

SEQ ID NO: 124719 - protein, 134 aa, Unknown
  Bacterial polypetide isolated from the Sargasso Sea
MTFLANNYNRKKISFKKGVGSYLVATNGKKYLDFCSGIAVNSLGHANPRLVKALYKQAKRVWHVSNAFTIPEGEMLAKKLVKKTFADSVIFQNSGTEATEVAIKVARRYFYSIGKPKKNRILCVKNSFHGRTIA

SEQ ID NO: 124720 - protein, 257 aa, Unknown
  Bacterial polypetide isolated from the Sargasso Sea
MSSLAKNYNRRKISFRKGKGTFLYGENGKKYLDFVQGIAVNSLGHSNPYLVKAINKQSKKLWHVSNSFIIPEGEKLAKRLTQKTFADCVLFQNSGAEATEAAIKIARRYFYSIGQPQKNRILCIKNSFHGRTIATIFASGSKKMTEGFGPKVPGFDHIEFRDFKPRFPNINNKIKNNTAAIMVETVMGEGGIKTIPVKCLKYLRKICNKKKILLILDEVQCGIGRSGKFFAFEYSGVKPDIVPIAKGIGGGFPGRCS

SEQ ID NO: 124721 - protein, 170 aa, Unknown
  Bacterial polypetide isolated from the Sargasso Sea
RSGKFFAFEHAKIKPDIVPIAKGIGGGFPIGAVLMNKKVASAMIPGSHGSTFGGNPLAMSVGNAVLDQILKKGFLKNVQKSSKHFISELNKIKEDYPEIIKEVRGIGLLLGLQLYNDQSKFIKKLEDNKLLTMRAGENVVRILPPLNVKKQEIDLAIKTIRKVCDKLNYE

SEQ ID NO: 124722 - protein, 211 aa, Unknown
  Bacterial polypetide isolated from the Sargasso Sea
MSSLAKNYNRRKISFKKGKGSFLYSTTGKKYLDFVQGIAVNSLGHSNPYLIKAINKQSKKVWHVSNAFKIPEGEKLARRLTKKTFAGAVIFQNSGAEATEAAIKVARRYFYSIGMKKKNRILCIKNSFHGRTIATINASGSKKMTEGFGPRVNGFDHFKFGDHEKLKKMITKKTAAVMIETIMGEGGIKVIPKWCLKDLRRICNKKNTLLI

SEQ ID NO: 124723 - protein, 154 aa, Unknown
  Bacterial polypetide isolated from the Sargasso Sea
DIVPIAKGIGGGFPIGAVLMSKKVASSMIPGSHGSTFGGNPLAMSVGNAVLDQIFKKGFLNNLKKLSKYFYKKLDKLKKDYPNIIKEIRGEGLLIGVQLHFDQSKFIKSLEKNYLLTIRAAENVIRILPPLNVKKNEIDLALKILKKVCSEYKK

SEQ ID NO: 124724 - protein, 213 aa, Unknown
  Bacterial polypetide isolated from the Sargasso Sea
AIMVETILGEGGIKPIPDKCLRYLRKICNEKKILLILDEVQSGIGRSGDFLAFERSKISPDICPIAKGIGGGFPIGAVLMTNKVAKAMQPGSHGSTFGGNQLAMKVGSKVMDIISRKSFLKNVKKNSNYFHNELNKLKNKFPKIIKEIRGRGFLIGLQLYQDQSKFIKKLMDNKLLTIKAAENTVRILPPLNVKKNEIDQALKIIDKVCADFK

SEQ ID NO: 124725 - protein, 331 aa, Unknown
  Bacterial polypetide isolated from the Sargasso Sea
KKVFRFCSRYSCKFFRTFYHTFNKAINNQSKKVWHVSNAFNIPEGERLAKKLTQKTFADAVIFQNSGAEATEAAIKVARRYFYSIGKPKKNRILCIKNSFHGRTIAAINASGSKKMTEGFGPKVNGFDHFKFGDHKALKKMITNKTAAVMVETIMGEGGIKVIPDWCLRDLRKICNKKKTLLILDEVQCGIGRSGKFFAFEHAKVKPDIVPIAKGIGGGFPIGAVLMTKKVASGIVPGSHGSTYAGSPLATTVANEVLNQIFKRGFLKNVEKISKYFHNELNKIKNDYKELIKEVRGVGLLIGIKLNNDQSKCIKKLENNKLLVIRAAENV

SEQ ID NO: 124726 - protein, 147 aa, Unknown
  Bacterial polypetide isolated from the Sargasso Sea
MSALAKNYNRKKISFKKGKGSFLYANNGKKYLDFVQGIAVNSLGHANPHLINAVNKQAKKLWHVSNAFIIPEGEKLAKRLTKKTFADFVIFQNSGTEATEAAIKIARRYFYSIGKPKKNRILCVKNSFHGRTLAAIFASGSKKRQKG

SEQ ID NO: 124727 - protein, 256 aa, Unknown
  Bacterial polypetide isolated from the Sargasso Sea
MTISPSIMTTYGRIDIAFTHGEGSYLFSEDGKKYLDYASGIAVNAFGHCHPKLVEALKDQASKLWHTSNLYRIPEQETVAEKLVENSCADRVFFCNSGAEATEGAVKVARRYAWANGEKDRTEIICATGAFHGRTLAMLAANDRPLFREGFGPSAQGFTHVEWGDIKSLKNKIGEHVAAILVEPVQGEGGARKAPEGYLKLLKEIAADNGSLLISDEVQIGMGRSGTLFAYQQENIEPDIIALAKGLGGGFPVGAV

SEQ ID NO: 124728 - protein, 215 aa, Unknown
  Bacterial polypetide isolated from the Sargasso Sea
MSFLVKNYNRSNLSFTRGKGSYLYTKNGKKYLDFVQGIAVNSLGHSNPKLIKTINYQAKKLWHVSNAFRIPEGEKLAKKIKEKTFADYVMFQNSGAEATEAAIKVARRYFFSIGKKKKYKILCVKNSFHGRTIATINASGSKKMMEGFGPKLIGFSHFKFGDHKSLEKSISTDTAAIMIETIMGEGGIKVIPDWCLKSLRKICDRKKILLILDEV

SEQ ID NO: 124729 - protein, 283 aa, Unknown
  Bacterial polypetide isolated from the Sargasso Sea
SEGNRFLDYVGGYAVLNTGHLHPRVVDRVKNQLDNFSHSCFAFAPHENAVKLSEELNNRYPIDSETKTFMVNSGAEAVENAVKIARYYTNKKAILSFKGGFHGRTYLAMGLTGKDKPYKEGFGPFPEFVKHAVYPYSYRDISDEDALMSVKDVLNNQLDPNDTAAIVIEVELGEGGYIPASSNFLSQLRDICDKNNILLIFDEVQTGYGRTGNMFGAETVGVNPDIVTLAKGIAGGFPLAAVLGKSEIMDSIHEAGIGSTFGASPVSCAAALGVLDAFDNEDI

SEQ ID NO: 124730 - protein, 135 aa, Unknown
  Bacterial polypetide isolated from the Sargasso Sea
MLSKKVSKGMTPGSHGTTFGGNPLAMSVGNAVLDIIFKKGFLKQVSKKGNYFDKHLHKLQKKYPQIIEEVRGIGLIKGLKLLVNNSKFMEKLMKNKMLTVKAEENVIRLFPPLTINNNEIDEAIKKLDKTCKDMI

SEQ ID NO: 124731 - protein, 149 aa, Unknown
  Bacterial polypetide isolated from the Sargasso Sea
MNSKYVMNTYSPSDLIFESGQGSWLFEKNGDRYLDFASGIAVNSVGHCHPHLVAEIQRQAAKLIHTSNLYNIIQQEKLAKRLCDLSFADEVFFANSGAEANEGAVKVARRYMHEIGRPERNVILCIEGCFHGRTLSMLSATSKVKIELV

SEQ ID NO: 124732 - protein, 148 aa, Unknown
  Bacterial polypetide isolated from the Sargasso Sea
MIRSNYSHHLYGFTDLKSLNERGPLVITSGKNIYVYDIHKKKYLDANSGLWNACAGFDHPGLIEVAKKQYEKFAGYHSLFGRLSEETLKLSDKIIEVSPFEDGRVFFCNSGSEANDSMIKMLWMMNLRKGNPEKRKIISRINGYHGVT

SEQ ID NO: 124733 - protein, 146 aa, Unknown
  Bacterial polypetide isolated from the Sargasso Sea
MSKVERDWYDRYMMPNYAPAEMIPVRGSGSRMWDQEGREYIDFGGGIAVNALGHAHPQLVAALTEQANRLWHTSNVLATEPALQLARRLVELTFADRVFFSNSGAEANEAALKLARRYAFDHHGEEKDRILAFENAFHGRTLFTVT

SEQ ID NO: 124734 - protein, 151 aa, Unknown
  Bacterial polypetide isolated from the Sargasso Sea
MSYLVKNYNRKKLSFSKGKGSYLYGMNGVKYLDFIQGIAVNSLGHANPDLVKIISQQSKKLWHVSNAFIIPEGELLARKLAKKTFADYVMFQNSGAEATEAAIKVARRYFFSVGKPYKNRILCIKNSFHGRTLAAIYASGSKKMTEGFGPK

SEQ ID NO: 124735 - protein, 137 aa, Unknown
  Bacterial polypetide isolated from the Sargasso Sea
MSYLAKNYNRKKISFKHGKGSYLYSTDNKKYLDFVQGIAVNSLGHAHPKLVKTIRDQSKKLWHVSNAFQIPEGEKLAKKLCTKTFADFVMFQNSGAEATEAAIKVARRYFYSIGKPNKNRILCIKNSFHGRTLAAIF

SEQ ID NO: 124736 - protein, 209 aa, Unknown
  Bacterial polypetide isolated from the Sargasso Sea
MTYLANNYNRKKISFKYGKGSYLFSTDNKKYLDFVQGIAVNSLGHAHPRLTKTISTQAKKLWHVSNAFQIPEGEKLAKKLCKKTFADYVMFQNSGAEATEAAIKVARRYFYSIGKTNKNKILCVRNSFHGRTLAAIYASGSKKMIEGFGPKVSGFDHFDFGDHKSLKKKITKNTAAIMVETIMGEGGIKVIPDWCLVELRKLCNQKKIL

SEQ ID NO: 124737 - protein, 160 aa, Unknown
  Bacterial polypetide isolated from the Sargasso Sea
MSYLAKNYNRRKLSFVRGKGSYLYTKNGNKYLDFVQGIAVNSLGHAHPQLVKAINKQSKKLWHVSNAFIIPEGEELAKKLAKKTFADYIIFQNSGTEATEAAIKVARRYFYSIGKPNKNRIICIKNSFHGRTIAAIHASGSKKMTEGFGPKVGGFDHFNF

SEQ ID NO: 124738 - protein, 250 aa, Unknown
  Bacterial polypetide isolated from the Sargasso Sea
MSALAKNYNRRKIAFKRGKGSFLYSTNGKKYLDFVQGIAVNSLGHANPYLIKAMNKQAKKVWHVSNAFIIPEGEKLAKRLTQKTFADHVIFQNSGAEATEAAIKVARRYFYSIGKPNKNRILCVKNSFHGRTIAAIFASGSKKMTEGFGPKIAGFDHFVFGNHKSLKKKITKNTAAIMVEPIMGEGGIKVIPDWCLKELRKLCNKKKILLILDEVQCGIGRSGNFFAFEKSKVKPDIVPIAKGIGGGFPN

SEQ ID NO: 124739 - protein, 257 aa, Unknown
  Bacterial polypetide isolated from the Sargasso Sea
MSKILNTYNRKKISFSKGKGSFLYTPNGKKYLDFVQGIAVNCLGHADDYLIRSINKQSKKLWHVSNVFTIPEQERLAKRLAQKTFADYVTFQNSGAEATEAAIKFARRYFYSKGQPKKNRVLCINNSFHGRTIAAIFASNSKKAIEGFKPKVDGFDHFNFGDHKGLEKAITSRTAAIMVETIMGEGGIKVIPDFCLKGLRKLCNKKKILLILDEVQCGIGRSGKFFAFEYAKIKPDIVPIAKGIGGGFPIGAVLVNK

SEQ ID NO: 124740 - protein, 166 aa, Unknown
  Bacterial polypetide isolated from the Sargasso Sea
MSSLAKNYKRRNLSFTKGKGSYLYTKKGIKFLDFVQGIAVNSLGHTNPNLVKAINKQSKKLWHVSNSFIIPEGEELAKKLTKRTFADAVIFQNSGAEATEAAIKVARRYFYSMGKKKKNRILCIKNSFHGRTIAAINASGSKKMIEGFGPKVGGFDHFKFWEPQRT

SEQ ID NO: 124741 - protein, 200 aa, Unknown
  Bacterial polypetide isolated from the Sargasso Sea
MSYLAKNYKRRNLSFNIGRGSYLYTKSGIKFLDFVQGIAVNSLGHANPNLVRAINKQSKKLWHVSNSFIIPEGEELARKLTKRTFADAVIFQNSGAEATEAAIKVARRYFYSIGQKKKNRILCIKNSFHGRTIAAINASGSKKMVEGFGPKVGGFDHFKFGNHKELKRKITSKTAAIMIEPIMGERGIKVIPSWCLRELR

SEQ ID NO: 124742 - protein, 235 aa, Unknown
  Bacterial polypetide isolated from the Sargasso Sea
MTYLAKNYKRRKIAFKYGKGSYLFSKDNKKYLDFVQGIAVNSLGHAHPKLVKTINQQSKKLWHVSNAFQIPEGEKLAKRICQKTFADYVMFQNSGAEATEAAIKVARRYFYSIGKPNKNRILCVKNSFHGRTLAAIYASGSKKMTEGFGPKVGGFDHFRFGDHKSLKKKITKKTAAIMIEPIMGEGGIKVIPDWCLKELRKLCNKKKILLILDEVQCGISRTGTFFSFEKSKIKP

SEQ ID NO: 124743 - protein, 153 aa, Unknown
  Bacterial polypetide isolated from the Sargasso Sea
DIMTVAKALGGGFPIGACMAIEEVASAFIPGTHGSTFGGNPMATTIANAVLDEIQNVHFLENVVANGDFLKERLNLIRSSGSVITEVRGKGLMIGIQCNIPALDMMAALRRKNLLTVIAECNTIRLLPPLTVDRIEIDEACEAIESVVKELGS

SEQ ID NO: 124744 - protein, 288 aa, Unknown
  Bacterial polypetide isolated from the Sargasso Sea
EASMKVARRYFYSIGKPKKNKILCIKNSFHGRTIAAIFASGSKKMTEGFGPKVPGFNHFKFGDFKSLKKSITQDTAAIMIETIMGEGGIKVHSNSFLKNLRRICNQKKILLILDEVQCGVGRSGKFFAFEYAKIKPDIVPIAKGIGGGFPLGAVLMTKKVASAMVPGTHGTTNGGNPLAMSVGNVILDQIFKKGFLKHVKKISKYFHNELNKIKKNHSQLIKEVRGVGLLIGLQLFKDPTKFIEKLQDNKLLTIRSGENTVRILPPLNVKKSEIDIAIKIIQKVCKEF

SEQ ID NO: 124745 - protein, 206 aa, Unknown
  Bacterial polypetide isolated from the Sargasso Sea
MGEGGIKVIPDFCLRELRKLCDKKKILLMLDEVQCGIGRSGDFFAFEKSKVKPDIVPIAKGIGGGFPIGAVLMNKKVAAGMVPGTHGSTFGGNPLAMSVGNKVMDIVSKKKFLNNVKKLSKYFLSNLNKVKEKYPNIIKQIRGRGFLIGIQLHQDQTNFIKKLMENKLLTIRAAENVVRILPPLNVKKSEIDEALKIINKVCSQYK

SEQ ID NO: 124746 - protein, 211 aa, Unknown
  Bacterial polypetide isolated from the Sargasso Sea
MTFLANNYNRKKISFKKGVGSYLVATNGKKYLDFCSGIAVNSLGHANPRLVKALYNQAKKVWHVSNAFTIPEGEILAKKLVKKTFADSVIFQNSGTEATEVAVKVARRYFYSIGKPKKNRILCVKNSFHGRTIAAIFASGSKKMTEGFGPKVSGFDHFIFGDHDSLKRKITKNTAAIMVETIMGEGGIKVIPDWCLRDLRKLCNKKKILLI

SEQ ID NO: 124747 - protein, 271 aa, Unknown
  Bacterial polypetide isolated from the Sargasso Sea
MFRRPAPSLDDLIVNARHDGFSKSLMPTVARPAQVFVRGQGSWLWGSDERAYLDFSQGSAANSLGHSPQVLIKALADQTHMLINPGNGLHNRAQLNLVDRLCDHTGSDQGYLLNSGSEACEAAIKLARKWGQLYRGGAYHIISASSGCHGRSFAALAASANAGGNRFEPQLSGFSHVPFNDLPALHAAVDAQTVAIMLEPIQSEAGVIPATEHYLKGVERLCRELGILLILDEVQTGIGRCGSLLAEQQYGVRADIITLGKGLGGGVPLAA

SEQ ID NO: 124748 - protein, 209 aa, Unknown
  Bacterial polypetide isolated from the Sargasso Sea
MSSLAKNYKRRNLSFNKGKGSFLYTKRGIKYLDFVQGIAVNSLGHANPNLVKAINKQSKKLWHVSNSFIIPEGETLAKKLTKNTFADAVIFQNSGAEATEAAIKVARRYFYSIGQPKKNRILCIKNSFHGRTIAAINASGSKKMVEGFGPKVGGFDHFKFGNHKELKRKITSKTAAIMIEPIMGEGGIKVIPPWCLRELRKICNKKKIL

SEQ ID NO: 124749 - protein, 237 aa, Unknown
  Bacterial polypetide isolated from the Sargasso Sea
MNSKYIMKTYSPSDLSFDKGLGSWLFDDKGYKYLDFASGIAVNSVGHSHPHVVSAIQKQAAKLIHTSNLYNIPQQQKLAKRLCDLSFADCVFFSNSGAEANEGAVKVARRYMFEKGKPDRNVILCVDGCFHGRTISMLSATSKKENRTGFGPLPGGFRHIAFNDLNSLAEQFAAKDVAAIMIEPVLGEGGVKSISKEFFKKAQELANNNNCLVISDEVQTGIGRLGTKIGYEKTDLK

SEQ ID NO: 124750 - protein, 62 aa, Unknown
  Bacterial polypetide isolated from the Sargasso Sea
CHPKLVKTLKKQSELLWHTSNLYKNRNQELFAKELCSKTFADKVFFTNSGAEAIECGLKIVT

SEQ ID NO: 124751 - protein, 243 aa, Unknown
  Bacterial polypetide isolated from the Sargasso Sea
MSYLAKNYNRKKLSFVRGKGSFLYTKNGAKYLDFVQGIAVNSLGHAHPQLVKAINKQSKKLWHVSNAFVIPEGEELAKKLAQKTFADYIMFQNSGAEATEAAIKVARRYFFSIGKPNKNRIICIKNSFHGRTIAAIHASGSKKMTEGFGPKVGGFDHFNFGDHKKLKKLITKKTAAIMVETIMGEGGIKKIPDWCLRGLRKLCDKKRILLILDEVQCGIGRTGDFFAFESSKVKPDIVPMQKG

SEQ ID NO: 124752 - protein, 274 aa, Unknown
  Bacterial polypetide isolated from the Sargasso Sea
MLEERAVIYILHLGKKYLDFAGGIAVNSLGHCHPQLVKILNKQSKILWHTSNLYKNNNQELFAKELCNKTFADRVFFTNSGAEAIECGLKVIKSYWNLKNKNKKTIITFKGAFHGRTFAALSAQKNKKYSEGFTPLLSGFKNITFNDEKVLLKNITKETAAIMIEPVQGEGGIIPASLKFLKYIKKICLKHDIILFLDEVQSGFGRSGQLYAHEWAKIKPDILATAKGIGSGFPLGACLATSKVSVGMTKGKHGSTYGGNPLAVAVGREVLKII

SEQ ID NO: 124753 - protein, 189 aa, Unknown
  Bacterial polypetide isolated from the Sargasso Sea
MSAILNTYNRQKISFKRGKGSFLYAENGKKYLDFVQGIAVNCLGHSNDYLNKAIQKQSKRLWHVSNVFTIPEQEKLARRLKQKTFADYVFFQNSGAEATEAAIKFARRYFYSKGQPKKNRILCINNSFHGRTLATIFATNNKKLTEGFYPKVDGFDHFNFGDHKGLEKAITKRTAAVMVETILGEGGIK

SEQ ID NO: 124754 - protein, 183 aa, Unknown
  Bacterial polypetide isolated from the Sargasso Sea
MLKSNQSHHLYGFTDLKTLNERGPVIITHGKGIYVYDIHEKKYLDANSGLWNACAGFDHPGLIEIAQKQYAKFAGYHSLFGRLSEETLELSDKIIEVSPFDDGRVFFCNSGSEANDTMVKMLWMLNKMKGNPQKRKIITRINGYHGVTLGATSMTGKPYNQVFQLPLDGFIHADCPPLLEIAK

SEQ ID NO: 124755 - protein, 161 aa, Unknown
  Bacterial polypetide isolated from the Sargasso Sea
MSALAKNYNRRKIAFKRGKGSFLYSTNGKKYLDFVQGIAVNSLGHANPYLTRAMNKQAKKVWHVSNAFVIPESERLAKRLTQKTFADYVIFQNSGVEATEAAIKAARRYFYSIGKPQKNRILCIKNSFHGRTLAAIFASGSKKMTEGFGPKVPGFDHFNFG

SEQ ID NO: 124756 - protein, 258 aa, Unknown
  Bacterial polypetide isolated from the Sargasso Sea
MSKILNTYNRKKISFSKGKGSFLYTTNGKKYLDFVQGIAVNCLGHANNHLIKSINKQSKKLWHISNVFTIPEQEKLAKRLAQKTFADYVTFQNSGAEATEAAIKFARRYFYSKGQPKKNRVLCINNSFHGRTIAAIFASNSKKATEGFKPKVDGFDHFNFGDHKGLEKAITSRTAAIMVETIMGEGGIKVIPDFCLKGLRELCNKKKILLILDEVQCGIGRSGKFFAFEYAKIKPDIVPIAKGIGGGFPIGAVLVNKK

SEQ ID NO: 124757 - protein, 213 aa, Unknown
  Bacterial polypetide isolated from the Sargasso Sea
MSYLAKNYNRKKISFKYGKGSYLYTNGNKKYLDFVQGIAVNSLGHAHPKLVKTIKDQSKKLWHVSNAFQIPEGEKLAKKLCAQTFADYVMFQNSGAEATEAAIKVARRYFYSIGKPNKNRILCIKNSFHGRTLAAIFASGSKKMTEGFAPKVTGFDHFSFGDHHSLKKKINKNTAAIMVETIMGEGGIKVIPDRCLKELRALCNKKKILLILT

SEQ ID NO: 124758 - protein, 148 aa, Unknown
  Bacterial polypetide isolated from the Sargasso Sea
GFPIGAMLTTTAIAAHLKAGTHGSTYGGNPLACAVAEKAFDIVNQPEVLEGVVKKEALFRELLGAINEKYNVFEEVRGQGMLLGCALNEKYQGRARDFMMAATKEHLMCLVAGVNVIRFAPSLIIPDEDIKAGLARFERAVAAVVNAE

SEQ ID NO: 124759 - protein, 172 aa, Unknown
  Bacterial polypetide isolated from the Sargasso Sea
MSSLASNYNRRKISFKYGRGAFLYSTKGKKYLDFVQGIAVNSLGHANPKLIKALNKQAKHVWHVSNAFQIPEAEKLAKMLTKNTFADKVIFQNSGAEATELAIKAARRYFFSIGKPHKNRILCIKNSFHGRTIAAIYASGSKKMTEGFGPKVPGFDHIEFRDFEPRFSNIRN

SEQ ID NO: 124760 - protein, 232 aa, Unknown
  Bacterial polypetide isolated from the Sargasso Sea
MSNLAKNYNRKKISFKYGKGSYLYSTNGKKYLDFVQGIAVNSLGHAHPKLVNTINKQSKKLWHVSNAFQIPEGEMLAKKLAKKTFADFVMFQNSGTEATEAAIKAARRYFYSIGKPKKNRILCIKNSFHGRTLAAIFASGSKKMTEGFGPKVTGFDHFTFGDHHSLKKKINKNTAAIMVETIMGEGGIKVIPDWCLKELRTLCNKKKILLILDEVQCGIGRSGDFFAFENLK

SEQ ID NO: 124761 - protein, 150 aa, Unknown
  Bacterial polypetide isolated from the Sargasso Sea
PIAKGIGGGFPIGAVLMNKKVASAMTVGSHGSTFGGNPLAMKIGNEVMDIVSNKNFLNNIKKNSKFFLKELNNLKKKFPKIIKNIRGRGFLIGIQLHNDQTKFIDDLMKNELLTIKAAENVVRILPPLNVKKSEISSALKIINKVCQNYN

SEQ ID NO: 124762 - protein, 231 aa, Unknown
  Bacterial polypetide isolated from the Sargasso Sea
MTYLAKNYNRKKISFKYGKGSYLFSTDNKKYLDFVQGIAVNSLGHAHPKLTKTISAQAKKLWHVSNAFQIPEGEKLARKLCKKTFANYVMFQNSGAEATEAAIKVARRYFYSIGKTKKNKILCVRNSFHGRTLAAIYASGSKKMTEGFGPKVSGFDHFVFGDHKSLKKKITKNTAAIMVETIMGEGGIKVIPDWCLVELRKLCNQKKILLILDEVQCGIARSGDFFAFEKS

SEQ ID NO: 124763 - protein, 250 aa, Unknown
  Bacterial polypetide isolated from the Sargasso Sea
RRNIAFKRGKGSFLYSTNGKKYLDFVQGIAVNSLGHSNPYLIKEMNKQAKKLWHVSNAFVIPEGERLARRLTKKTFANSIIFQNSGVEATEAAIKAARRYFYSIGKPYKNRILCINNSFHGRTLAAIFASGSKKMTEGFGPKVPGFDHFNFGDHEKLEKAITKKTAAIMCETIMGESGIKVIPEWCLKGLRKLCNKKKILLILDEVQCGIGRSGRFLAFEYAKIKPDIVPIAKGIGGGFPLGAVLLSKKV

SEQ ID NO: 124764 - protein, 146 aa, Unknown
  Bacterial polypetide isolated from the Sargasso Sea
MSSLAKNYKRRNLSFNKGKGSYLYTKKGIKFLDFVQGIAVNSLGHANPNLVKAINKQSKKLWHVSNSFIIPEGEELAKKLTKRTFADAVIFQNSGAEATEAAIKVARRYFYSIGQKKKNRILCIKNSFHGRTIAAINASGSKKMSK

SEQ ID NO: 124765 - protein, 177 aa, Unknown
  Bacterial polypetide isolated from the Sargasso Sea
MSSLAKNYKRRNLSFNKGKGSFLYSHGGKKFLDFVQGIAVNSLGHANPNLVKAINKQSKKLWHVSNSFIIPEGEELAKKLTKRSFADAVIFQNSGAEATETAIKVARRYFFSIGKPKKNRILCIKNSFHGRTIAAINASGSKKMVEGFGPKVGGFDHFKFGNHKELKRKITSKTAAI

SEQ ID NO: 124766 - protein, 188 aa, Unknown
  Bacterial polypetide isolated from the Sargasso Sea
MSFLAKNYNRKKIAFTKGKGSYLFSTNGKKYLDFVQGIAVNSLGHAHPKLIKTIKDQSKKLWHVSNAFQIPEGEKLAKKLCQKTFADYVMFQNSGTEATEAAIKAARRYYYSIGKPNKNRILCIKNSFHGRTIAAIYASGSKKMTQGFGPKVPGFDHINFRDSNPRFPNLRKKIKKNTAAIMVETIMG

SEQ ID NO: 124767 - protein, 192 aa, Unknown
  Bacterial polypetide isolated from the Sargasso Sea
MSALAPNYKRKNLSFVKGKGSFLVTSDGKIYLDFVQGIAVNSLGHANKKLINAINKQSKKLWHVSNAFKIPEGERLAKRLVEKTFADSVIFQNSGAEATEAAIKVARRYFYSKGKKHKNRIICIKNSFHGRTIAAIHASGSKKMTEGFGPKVPGFDHFEFGDHKKLKKLINKNTAAIMIETVMGEGGIKVIP

SEQ ID NO: 124768 - protein, 232 aa, Unknown
  Bacterial polypetide isolated from the Sargasso Sea
MSSLANNYNRRKLSFKYGKGSFLISTKGKKYLDFVQGIAVNSLGHSNPSLIKALNKQSKKLWHLSNAFQIPEAEKLAKMLTQKTFADKVIFQNSGAEATEAAIKIARRYFFYKGKPNKNRVLCIKNSFHGRTIAAIFASGSNKMTEGYGPKVPGFDHIEFRKFKPRFPNIRNKIKKDTAAIMVETVMGEGGIKTIPDKCLKYLRKICNEKKILLILDEVQSGVGRSGNFFAF

SEQ ID NO: 124769 - protein, 124 aa, Unknown
  Bacterial polypetide isolated from the Sargasso Sea
MNTYGRAEIAFVRGHGCWLESESRERYLDCASGIAVNTLGHSHPRLVTALQDQASKLWHTSNLYRIPGQEQVAKRLASLSGLDQVFFCNSGAEATEAAVKIARRAAYEKGMPDRTTILCASGSS

SEQ ID NO: 124770 - protein, 155 aa, Unknown
  Bacterial polypetide isolated from the Sargasso Sea
MTFLANNYNRKKISFKKGSGSYLVATNGKRYLDFCSGIAVNSLGHANPRLIKALYKQAKKVWHVSNAFTIPEGEMLAKKLVKKTFAESIIFQNSGTEATEVAIKVARRYFYSIGKPKKNRILCVKNSFHGRTIAAIFASGSKKMTEGFGPKVSGI

SEQ ID NO: 124771 - protein, 243 aa, Unknown
  Bacterial polypetide isolated from the Sargasso Sea
MSSLANNYNRRNISFKRGKGSFLYSTKGVKYLDFIQGIAVNSLGHSNTYLNKALANQSKQLWHVSNAFQIPEGEKLARRLTKKTFANYVIFQNSGAEATEAAIKAARRFFYLKNKPYKNRILCIKNSFHGRTLAAIHASGSKKMTEGFGPKIPGFDHFTFGDHESLKKSITKKTAAIMIEPVLGEGGIKVIPKWCLKGLRKICDQKKILLICDEVQCGIGRSGKFFAFEYSGIKPDIVPIAKG

SEQ ID NO: 124772 - protein, 160 aa, Unknown
  Bacterial polypetide isolated from the Sargasso Sea
MPTYGERNLVFKKGKGCYLYTPSGKKYLDFAGGIAVNSLGHCHPKLVSVLKKQSEILWHTSNLYKNNSQELFAKELCKNTFADKVFFTNSGVEAIECGLKVVKSYWNLKNKNKKNIITFKGAFHGRTFAALSAQKNKKYSEGFTPLLGGFKNIPFNDEKA

SEQ ID NO: 124773 - protein, 221 aa, Unknown
  Bacterial polypetide isolated from the Sargasso Sea
MSALAKNYNRRKIAFKRGNGSFLYAGNGKKYLDFVQGIAVNSLGHANPYLIKAINNQAKKVWHVSNAFIIPEGERLAKRLTQKTFADYVLFQNSGTEATEAAIKVARRYFYSIGKPNKNRILCIKNSFHGRTIAAIFASGSKKMTEGFGPKVGGFDHFKFGDHQSLKKAISNKTAAIMVEPIMGEGGIKVIPDWCLKELRKICNKKKILLILDEVQCGIGR

SEQ ID NO: 124774 - protein, 220 aa, Unknown
  Bacterial polypetide isolated from the Sargasso Sea
MSSLAKNYNRRKIAFKRGKGSFLYSTNGKKYLDFVQGIAVNSLGHANPYLIKAMNKQAKKVWHVSNAFIIPEGEKLAKRITQKTFADYIIFQNSGTEATEAAIKVARRYFYSIGKPNKNRILCVKNSFHGRTIAAIFASGSKKMTEGFGPKVPGFDHIEFRKFKPRFPNIRSKIKKNTAAIMVETIMGEGGIKPIPDKCLKYLRKICNEKKILLILDEVQ

SEQ ID NO: 124775 - protein, 219 aa, Unknown
  Bacterial polypetide isolated from the Sargasso Sea
KKTAAIMCETVMGESGIKVIPDWCLRGLRKICNQKKILLILDEVQCGVGRSGKFFAFEYAKIKPDIVPIAKGIGGGFPIGAVLMNRKVASAMSPGSHGSTFGGSPLAMSVGNAVLDQIFKKGFLKNVQKLSKYFIFKLNEIKKDYPNVVKEVRGIGLLIGIQLVVNQSKFIKKLEMNKLLTIKAGENVVRILPPLNIKKQELDLALKIIRKVCKQFNLS

SEQ ID NO: 124776 - protein, 162 aa, Unknown
  Bacterial polypetide isolated from the Sargasso Sea
MPTYGDKTLEFVKGKGCYLYSSQNKKYLDFASGIAVNSLGHCHPKLIDALNKQSKQLWHVSNLYKIKKQEQFAKLLCKNSFADKVFFTNSGTESIECGIKIIRGYHSYHKTKKTDIITFDGAFHGRTYGALSAQKNKKYSNGFGPMLKGFKQIEFNNEKKLI

SEQ ID NO: 124777 - protein, 243 aa, Unknown
  Bacterial polypetide isolated from the Sargasso Sea
MSSLAKNYKRRNLSFRKGKGSFLYTYNGVKFLDFVQGIAVNSLGHTNPVLVKAIKKQSQKLWHVSNSFKIPEGEELAKKLTNKTFADAVIFQNSGAEATEAAIKVARRYFYSIGKPKKNRILCIKNSFHGRTIAAINASGSKKMTEGFGPRVGGFDHFKFGNHKELKKKITNKTAAIMIEPIMGEGGIKVIPTWCLKEIRKICNKKKILLILDEVQCGIGRTGRFFSYEYANIKPDIVPIAKG

SEQ ID NO: 124778 - protein, 229 aa, Unknown
  Bacterial polypetide isolated from the Sargasso Sea
MSALAKNYNRKKISFKKGKGSFLYGNNGKKYLDFVQGIAVNSLGHSNPHLINAINKQAKKLWHVSNAFTIPEGEKLAKKLTRKTFADFVIFQNSGTEATEAAVKVARRYFYSIGKPNKNRILCIKNSFHGRTLAAIFASGSKKMTEGFGPRVDGFDHFEFGNHRSLRKAITKRTAAIMVEPVMGEGGIKVIPDWCLRELRKICNKRKILLILDEVQCGIGRSGKFFAFE

SEQ ID NO: 124779 - protein, 152 aa, Unknown
  Bacterial polypetide isolated from the Sargasso Sea
MSYLAKNYNRKKISFKYGKGSYLYSTDKKKYLDFVQGIAVNSLGHAHPKLVKTIKDQSKKLWHVSNAFQIPEGEKLAKKLCAKTFADFVMFQNSGAEATEAAIKVARRYFYSIGEPNKNRILCIKNSFHGRTIAAIFASGSKKMTEGFGPKV

SEQ ID NO: 124780 - protein, 200 aa, Unknown
  Bacterial polypetide isolated from the Sargasso Sea
MSYLAKNYNRKKISFVRGKGTYLYTANGTKYLDFVQGIAVNSLGHTNPKLVKCIKDQSKKLWHVSNAFQIPEGEKLAKKLCQKTFADYVMFQNSGAEATEAAIKVARRYFYSIGKPKKNRILCIKNSFHGRTIAAIFASGSKKMTQGFGPKVPGFDHIDFREVKPRFPDIRKKIKKNTAAIMVETILGEGGIKQIPDKCL

SEQ ID NO: 124781 - protein, 176 aa, Unknown
  Bacterial polypetide isolated from the Sargasso Sea
MSALAPNYKRKNLSFVRGKGSFLITAKGRKYLDFVQGIAVNSLGHSNKKLINAINKQSKKLWHVSNAFKIPEGEKLASRLVKKTFADSVIFQNSGAEATEAAIKVARRYFYSIGKENKNRIICIKNSFHGRTIAAIHASGSKKMTQGFGPKIPGFDHFDFGDHKKLKKLINKNTAA

SEQ ID NO: 124782 - protein, 211 aa, Unknown
  Bacterial polypetide isolated from the Sargasso Sea
QGEGGIITPTKEFIQGVAALCKKHNALMIFDEVQSGVGRTGELYAYMGLGVVPDILTTAKALGGGFPIGAMLTTTAIAKHLVVGTHGSTYGGNPLACAVGIAAFDTVNTPEVLNGVKQREQLFREGLTAINAKYDVFSEIRGQGLLIGAALNDKYQGKARDFMLAAADEGLMMLVAGYSVIRMTPSLIIPEADIAEGFKRLEKAVAKMVQA

SEQ ID NO: 124783 - protein, 200 aa, Unknown
  Bacterial polypetide isolated from the Sargasso Sea
EFLKGLRELCDEHQALLVFDEVQCGMGRTGSLFAYMHYGVTPDILTSAKALGGGFPISAVLTTSDIASAFHAGSHGSTYGGNPLACAVAGAAFDLINTPEVLEGVKAKRELFVQHLQQIDAQFDLFSDIRGMGLLIGAELKPQYKGRARDFLYAAADAGVMVLNAGPDVMRFVPSLVIDEKDIAEGMARFAQAIKQVLNA

SEQ ID NO: 124784 - protein, 195 aa, Unknown
  Bacterial polypetide isolated from the Sargasso Sea
MSFLAKNYNRKKISFVRGKGSFLFTKSGVKYLDFVQGIAVNSLGHAHPKLVKTINEQSKKLWHVSNAFVIPEGEKLAKKLAEKTFADYVMFQNSGAEATEAAVKVARKYFYSIGKPHKNRILCIKNSFHGRTIAAIFASGSKKMTEGFGPKVSGFDHVKFGDHKSLKKKITKNTAAIMVETILGEGGIKVIPDWC

SEQ ID NO: 124785 - protein, 231 aa, Unknown
  Bacterial polypetide isolated from the Sargasso Sea
MSAILKTYNRKKISFKRGKGSFLYSTKGTKYLDFVQGIAVNCLGHSNDYLNKAIQKQSKKLWHVSNVFTIPEQEKLAKRLKQKTFADYVLFQNSGAEATEAAIKFARRYFYSKGKSKKNRILCINNSFHGRTLATIFASNSKKMTEGFYPKVEGFDHFNFGDHKKLERAITSKTAAIMIETIMGEGGIKVIPDYCLKGLRKLCNKKKILLILDEVQCGIGRSGKFMAYEYA

SEQ ID NO: 124786 - protein, 168 aa, Unknown
  Bacterial polypetide isolated from the Sargasso Sea
VRLQHYGVTPDILTSAKSLGGGFPIAAMLTTEALAKHLVVGTHGTTYGGNPLACAVAEAVIDVINTPEVLAGVTAKHALFKARLEQIGKQYGIFTEVRGMGLLIGCVLSDAFKGKAKDVFNAAEKENLMILQAGPDVVRFAPSLVVDEADINEGLDRFERAVKTLTQA

SEQ ID NO: 124787 - protein, 193 aa, Unknown
  Bacterial polypetide isolated from the Sargasso Sea
MSSLAKNYNRRKISFKKGKGSFLFGNNGKKYLDFVQGIAVNSLGHSNPKLIRAINKQAKKVWHVSNAFVIPEGEKLAKRLTKKTFADYVIFQNSGTEATEAAIKIARRYFYSKGNKNKNRILCIKNSFHGRTLAAIFASGSKKMTEGFGPKVPGFDHFKFGDHKSLKKAITKKTAAIMVEPIMGEGGIKVIPG

SEQ ID NO: 124788 - protein, 144 aa, Unknown
  Bacterial polypetide isolated from the Sargasso Sea
MSALAKNYNRRKISFKRGKGSFLYSTNGKKYLDFVQGIAVNSLGHANSYLTRAMNKQAKNVWHVSNAFTIPEQERLAKRLTQKSFADYVIFQNSGVEATEAAIKVARRYFYSIGKPQKNRILCIKNSFHGRTLAAIFASGSKKM

SEQ ID NO: 124789 - protein, 231 aa, Unknown
  Bacterial polypetide isolated from the Sargasso Sea
MSYLAKNYNRKKISFVRGKGSYLYTATGTKYLDFVQGIAVNCLGHAHPKLIETINKQSKKLWHVSNAFLIPEGEKLAKKLCKKTFADYVIFQNSGAEATEAAIKVARRYFYSIGKPNKTRILCVKNSFHGRTLATIFASGSKKMTEGFGYVGGFDHFIFGDHKSLKKKITKNTAAIMIEPIMGEGGIKVVPDWCLKELRKLCNEKKILLILDEVQCGISRSGSFFAFEKSK

SEQ ID NO: 124790 - protein, 191 aa, Unknown
  Bacterial polypetide isolated from the Sargasso Sea
MRQICNKKKILLILDEVHCGIGRSGKFFSYEYANIKPDIVPVAKGIGGGFPIGAVLMTKKVSKAMVPGTHGSTFGGNPLAMSVGNAVMDEIFKKDFLSKVKSNSKYFISELNKIKNKFPNIIKEIRGIGLILGIQLHHDQTKFIQSLLKNKLLTIRAAENVIRILPPLNVSKNEINIALKIINKVCEGYKK

SEQ ID NO: 124791 - protein, 374 aa, Unknown
  Bacterial polypetide isolated from the Sargasso Sea
MKTFDVYNQFDVVPVKGKDVYIYDDFNNKYLDLYGGHAVISIGHSEKKYVKNITNQLKSIGFYSNAVRNPLQDELSKEINSQADLDNYKLFMCNSGAEAVENALKLSSFNTGKKRIIAFKNSFHGRTSAAVAVTDNKYINSELNKQHNVSFIEFNDNKKLEIEIDKGDVSAIIFESIQGVGGLDQPDEDFINGLDYYQKKYQVSIIADEVQSGFCRSGQFFAFQKFNIQPDIITIAKGMGNGFPVGGILVNPNIHPQKGILGTTYGGNHLACVASLSVLEFLKKNNICKKAIELESYFKNIASKFNSIKKVKGRGLMLGIEFDFDVSELRSKLVYEHKIFTGSSSNKNLIRILPPLSIKKNHFDIFFNALNKSL

SEQ ID NO: 124792 - protein, 168 aa, Unknown
  Bacterial polypetide isolated from the Sargasso Sea
CLLMNNFGVKPDIMCCAKGIGGGIPIAAVLTTTKIAKSMEIGSHGTTFGGNPLACAVAEKVMTLLAKKMLLNGVKKKEKIFLRELQSINKDHKCFSAIRSSGLWIGCKLNVTENFNLDTVMKACYENGLMILKANDNTIRIAPSLIIADGLILKGLKILRAVIQEQHP

SEQ ID NO: 124793 - protein, 306 aa, Unknown
  Bacterial polypetide isolated from the Sargasso Sea
MNNLLKTYKFSNFKVVKGNGCYLYTSDKRKLLDFSAGVAVNSLGYNHQVVRKSLQDQIKTGITHLSGSQMHEFKTKLSKLLSENSNKGDVFFSNSGAESIEAALKIARNYGSKKGKDEIIAMTSSFHGRTIGALSVGSNKKYKSDIGPVPGKVKFCKFNDVSHLKKLVNKKTVAIIIEFVQGDGGINICSKNFAKTIKEICKNKKILLIGDEIQGGIGRTGKIFAYKHYGVNPDIITSAKGLGSGIPIGATIVKKEISKNISIGFHGSTFGGGMLQTRVAYNVFKTINKKSFLNKVINNGNLLSKL

SEQ ID NO: 124794 - protein, 127 aa, Unknown
  Bacterial polypetide isolated from the Sargasso Sea
MTSKIMPTYNRKPVTFTSGEGIYLYDSEGKQYLDALCGLAVTSLGHSHPLIAETVSKQSAKLIHTSNAFHIESQEKLAKRLCQLTGMENVFFCNSGAESVEAAIKIARKYGHDKDYNNPKIIVMSNS

SEQ ID NO: 124795 - protein, 117 aa, Unknown
  Bacterial polypetide isolated from the Sargasso Sea
MTNVLPTYPRSNLEFTHGVGSYLYTKSGEKFLDFGTGIAVNSLGYSNPYLNDKLKKQIDKLWHLSNVYQIPEQEKLAQRLCDNSFADYVFFCNSGTEAIEASIKIARRYFHSSENWS

SEQ ID NO: 124796 - protein, 188 aa, Unknown
  Bacterial polypetide isolated from the Sargasso Sea
MVFTHGVGSELFSESGEAYLDFLSGIAVTSFGHSHPHLNEALKQQADKLWHVSNLFRIPEAEVLATRLVQESFADNVFFANSGAEAVEAGLKAIRGYHAARGDNKRTRIIGFSDSFHGRTMATVAAAGNKSHMQNFVPGDQGFDHVEWGNLEALENVISDSTAGIILEPVQGEGGIRPVTQKFLASIA

SEQ ID NO: 124797 - protein, 232 aa, Unknown
  Bacterial polypetide isolated from the Sargasso Sea
MSKVERDWYDRYMMPNYAPAAMIPVRGSGSRMWDQEGREYIDFGGGIAVNALGHAHPELVAALTEQANRLWHTSNVLATEPALQLARRLVELTFADRVFFSNSGAEANEAALKLARRYAFDHHGEGKDRILAFENAFHGRTLFTVTAGGQANYRQGFGPLPGAIEHLPFNDTQALTEAFGDDVCAVIVEPVQGEGGVIAADKEFLETIRRLCDQHNALLIIDEVQTGVGRIG

SEQ ID NO: 124798 - protein, 129 aa, Unknown
  Bacterial polypetide isolated from the Sargasso Sea
MVDAADSKSAGHWSWGFKSPGSHPESVMNTYNRFPLTLVRGRGCWVWDDKGQRHLDAVAGIATDTLGHSDRALRRSLGRQLRRLQHVSNLYRIPEQDALATWLVRHSCADSVFFCNSGAEANEAAIKLG

SEQ ID NO: 124799 - protein, 164 aa, Unknown
  Bacterial polypetide isolated from the Sargasso Sea
KFFAFEYANVKPDIVPIAKGIGGGFPIGAVLMTKKVSKAMKPGTHGSTFGGNPLAMAVGNAVMDQINKNLLKNVNKMSKYFIHGLNEMKIKYPNIIKEVRGVGLLIGLQLFNDQTKFIKKLMENKLLTIRAAENVIRILPPLNVTKREIDIALKIISKVCNQIK

SEQ ID NO: 124800 - protein, 160 aa, Unknown
  Bacterial polypetide isolated from the Sargasso Sea
EKSKVKPDIVPIAKGIGGGFPIGAVLMNKKVASGMVAGSHGSTFGGNPLAMSVGNTVMDIVTKKSFLSNIKSLSKYFLESLNNIKSKHPKTIKEIRGKGLLIGIQLYKDPTKFIQKLMDNRLLTIRAAENVIRILPPLNVKKSEIDNALKIISKVCNDFK

SEQ ID NO: 124801 - protein, 172 aa, Unknown
  Bacterial polypetide isolated from the Sargasso Sea
MTSLAKNYSRRKISFKKGKGSFLYSSKGKKYLDFVQGIAVNSLGHSNPNLNRVLAKQSKNLWHVSNAFEIPEAEKLARKLTKKTFADKVIFQNSGLEATEAAIKVAKRYFYSIGQPQKNRILCIKGSFHGRSLATIFASSAKKMIEGFGPKIDGFDHFNFGDHKSLRKAIQK

SEQ ID NO: 124802 - protein, 359 aa, Unknown
  Bacterial polypetide isolated from the Sargasso Sea
MSSILHRTLELTPPTAVRGEGNYLIDDAGKRYLDACGGAAVSCLGHDNAKVREALKAELDNIAFAHSGFFTNQPAEELAQFLIDRAPKGTGLGRIMYLGSGSEAMEAALKLARQYHLERGEPKRSNIIARAPSYHGNTLGALATGGHAGRREPFQPLLMNVSHIDAAYEYRMRREGEAGADFALRMANLLEEEIQRLGTETVMAFVAEPVVGASLGTQPAPMGYFKRIREICDTYGILFIADEVMCGMGRTGSLFALEQEGIAADITTLAKGLGAGYQPIAAVMAAENVIRIIKDGSGTLWNGHTYMSHAIATAGALAVQQVIEEENLLSNVQMRGEQLREGLQTQMAKTLMLEIFEDV

SEQ ID NO: 124803 - protein, 389 aa, Unknown
  Bacterial polypetide isolated from the Sargasso Sea
MIDKFKNFQAQIVPNPLSIEIVKAEGSYIYGKNKKYLDFVAGVSVCNIGHSNKKVFRAVSNQLKKYSHVMVYGEFVQEPSVNLCELLVKNLPYNLNSVYLTNSGTEAVEAALKISKRITGRSKIVSAKNSYHGSTHGSLSVSGYESRKRAYRPLLPNIEYLEFNCDDLSVIDENTACVILETIQGGAGFITPENNFLIKVKKRCEKVGALMILDELQTGLGRTGKLFAFEHYEISPDILLLGKALGGGFPIGAMITKKSNMDLLQKNPILGHITTFGGHPVIAAAGLETLSIIIKNKLSKKAIEKENLFKELLVHPLINEVRSKGLMIALIMKNNEIANQLVINSLNNGLILFWLLYEKRAVRITPPLTISNSEIKKGCKIILSVLDSI

SEQ ID NO: 124804 - protein, 184 aa, Unknown
  Bacterial polypetide isolated from the Sargasso Sea
LLMLDEIQSGNGRTGDYFACLGANVTPDVLTTAKGLGNGFPIGACLVAGKAEGVFGPGNHGSTYGGNPLGCATALTVVNALTDDVIDGVADKGAWLKDAFTQAFSDLPMVTEIRQRGLMLGIQLDRPCPELVNRARDAGLLINVTAGSVVRLLPPLVINQTEMQHLVDTLSALIHRFADEQEVA

SEQ ID NO: 124805 - protein, 256 aa, Unknown
  Bacterial polypetide isolated from the Sargasso Sea
MGTIAAASNSSHLEGFGEPLRGFVSVERNDINQLKKACNEKTAAILIEPVQGEGGINVFDREFINSLQVIAKEKDLLILFDEVQCGVGRTGKIFAYQWFDVKPDVMALAKGLGGGFPIGACLMRDDIAEALIPGSHGSTFGGNPLAMAVGNCVMDIVNKVDFLSKVEKNGLFFKNQLNKLCEKYPNVITEIRGLGLMIGIKCTIANNLLANKLYENGILTVNAADNVIRILPPLNITIPEIKKVISLFEKSIKEIL

SEQ ID NO: 124806 - protein, 170 aa, Unknown
  Bacterial polypetide isolated from the Sargasso Sea
MTNLAKNYNRKKISFKHGKGSYLFSTDNKKYLDFVQGIAVNSLGHAHPKLTKTISAQAKKLWHVSNAFQIPEGEKLAKKLCKKTFADYVMFQNSGAEATEAAIKVARRYFYSIGKTNKNKILCVRNSFHGRTLAAIYASGSKKMTEGFGPKVSGFDHFDFGDHKSLKKKI

SEQ ID NO: 124807 - protein, 152 aa, Unknown
  Bacterial polypetide isolated from the Sargasso Sea
DIVPIAKGIGGGFPIGAVLMTKKVAKAMIPGTHGSTFGGNPLAMAVGNAVLDQINKNLLINVNKMSKYFIHELNEIKIKYPKVIKEVRGVGLLIGLQLFKDQTEFIKKLMENKLLTIRAAENVIRILPPLNVKKREIDIALKIINKVCNEIK

SEQ ID NO: 124808 - protein, 244 aa, Unknown
  Bacterial polypetide isolated from the Sargasso Sea
MTFLANNYNRKKISFKKGVGSYLVATNGKKYLDFCSGIAVNSLGHANPRLVKALYKQAKKVWHVSNAFTIPEGEMLAKKLVKKTFADSVIFQNSGTEATEVAIKVARRYFYSIGKPKKNRILCVKNSFHGRTIAAIFASGSKKMTEGFGPKVSGFDHFTFGDHNSLKKRISKNTAAIMVETIMGEGGIKVIPDWCLRDLRKLCNKKKILLILDEVQCGIGRSGDFFAFESSKVKPDIVPIAKGI

SEQ ID NO: 124809 - protein, 165 aa, Unknown
  Bacterial polypetide isolated from the Sargasso Sea
KFFAFEYAKVRPDIVPIAKGIGGGFPIGAVLMNKKVSKCMTPGSHGSTFGGNPLAMSIGNAVLDQIFKKGFLNNVRKNSLLFINGLKKIQKDYPSVIKEVRGLGFLLGLQLFKDQSKFIDKLLENRMLTIRASENVVRILPPLNVSKKEIYIALKKIRKVCKNIK

SEQ ID NO: 124810 - protein, 162 aa, Unknown
  Bacterial polypetide isolated from the Sargasso Sea
MMPNYAPADFIPDRALGSRVWDKNNKEYIDLGGGIAVNSLGHSHPILIKELNEQANKLWHTSNYLANEPAINLAKKLTDLTFAEKVYFSNSGSEANEAAIKIARKFHHDRGENRDELISFENSFHGRSLLNISLGGSDNHKIGFGPLVSGVKHAKYNDISSV

SEQ ID NO: 124811 - protein, 255 aa, Unknown
  Bacterial polypetide isolated from the Sargasso Sea
RYHQGFEPMVEGFDYFPYNDIQAFEALLERHEENGPAVAAVLLEPLQGEGGVHPGDAGFFQRLRHLCSERNILLILDEVQVGMGRSGRLWGYEQLGIEPDAFTLAKGLGGGHAIGALLVNAIADVFEPGDHASTFGGNPFACTAGLTVAQEIQRRGLLRNVEERGQQLQQGIQDLVARYPQMLQGVRGWGLLQGLVLHQDCGVTAPQLAKAAIEQRLLLVAAGATVLRMVPPLVISANEVRQLLRRLDATLAELV

SEQ ID NO: 124812 - protein, 347 aa, Unknown
  Bacterial polypetide isolated from the Sargasso Sea
MYLGSGSESMEAALKLARQYYLERGEPQRSNIIARAPSYHGNTLGALATGGHAGRREPFQPLLMNVSHIDAAYEYRMRREGEAEADFALRMANLLEEEIQRLGNETVMAFVAEPVVGASLGTQPAPLGYFKRVREICDTYGVLFIADEVMCGMGRTGSLFALEQEGIAADITTLAKGLGAGYQPIAAVMAAENVICTIKDGSGTLWNGHTYMSHAIATAGALAVQQVIEEENLLSNVRKRGEHLREGLQTRLGQNPHVGDIRGRGLFWTAELVQDRATKQPFDVTLGLATKIQKTALDLGLMCYPSQGCADGTQGDHVLLAPAYNSTSEEIETICNLITQAIETALS

SEQ ID NO: 124813 - protein, 339 aa, Unknown
  Bacterial polypetide isolated from the Sargasso Sea
GHAVISIGHSHPDYVKNISRQLNKIGFYSNSVKNNLQEELANSIVNYSGCKEYSLFMCNSGAEANENALKLASMHTRKSRIIAFRNSFHGRSNAAIAATDFKKYHSKLEKKLDVTFINLNDSKTFENEIKKGDVCAVLLESIQGYGGLDEPNKDFVLLINSLCQKYNSCLIADEVQSGFGRTGEFFAFQKYNIKPHLICMAKGMGNGFPVGGLLVNSIIKSEHGMLGTTFGGNHLACVASLTVLNVIEKDDLQQNAREIGNYFIENAKQIPEIINIKGRGLMLGIEFNNEVKEIRKKLIYDKKIFTGSSGNKNLLRILPPLTIKKKHIDIFFKSLKEVI

SEQ ID NO: 124814 - protein, 254 aa, Unknown
  Bacterial polypetide isolated from the Sargasso Sea
ISTSNSDKMKEGFGPLIPGCKSLSFNDRDALYQNITDKTAAVIVEPIQGEGGIRSFSSEILKLIRSLCDDTGALLIIDEIQCGLGRSGKLFAHEWFDLKPDIMTIAKGIGGGFPLGACLSTDNASIGMLKGKHGSTYGGNPLACAVGCEVMNNVLEKGFLDNVMIISGYFSQKMLGLVSEFPSVFEELRGSGLMLGLKTKIENISFTNEAFNQNLLLAPASDNVVRILPPLNITKQEVDYVIELLSKTAQRFKN

SEQ ID NO: 124815 - protein, 254 aa, Unknown
  Bacterial polypetide isolated from the Sargasso Sea
MSKNSTYIMPTYGDRNLEFIEGQGCYLTSTDNNKYLDFGSGIAVNSLGHCHPRLVKALQFQSSKLWHVSNLYHNSTQEEYAKFLCLNSFAEKIFFTNSGVESIEAGIKVIKSYHHYHNNVDQKNIITFEGAFHGRTFAALSAQQNEKYSKGFEPLLSGFIKIPFNDIEAVKKNVNKNTAAIMIEPIQGEGGIRPANLKFLQDIKKICEKNNLLFFLDEVQSGFGRSGKLFAHEWANFEPDIVATAKGIGSGFPM

SEQ ID NO: 124816 - protein, 319 aa, Unknown
  Bacterial polypetide isolated from the Sargasso Sea
NKAINKQSKKLWHVSNVFIIPEQEKLAKRLTQKTFADYVVFQNSGAEATEAAIKIARRYFYSKGQPKKNRILCINKSFHGRTLATIFASNSKKMMEGFYPKVDGFDHFNFGDHKGLEKKITKKTAAIMVETIMGEGGIKVIPDFCLRHLRKLCNKKKILLILDEVQCGIGRTGKFFAYEHAKIKPDIVPIAKGIGGGFPIGACLMTKKVASGMTPGSHGTTFGGNPLAMSVGNAVLDVIFKKGFLRNVQQTSKYFHNELQNLKKKYPKVILEVRGMGLLLGLKISKDQNKFINKLLENKLLAVRAAENVIRLLPPLMLK

SEQ ID NO: 124817 - protein, 189 aa, Unknown
  Bacterial polypetide isolated from the Sargasso Sea
RRALSRQLGRLQHVSNLYNIPEQEELASWIVQHSCGDSVFFCNSGAEANEAAIKLARKHGHLRRGIERPVILTAAASFHGRTLAAVTATGQPKYHRGFEPVVDGFDYFPYNDLDAFQSLLEQHEANGPAVAAVLVEPLQGEGGVNPGDKTFFRELRRLCDAKGILLILDEVQVGMGRTGSWWGYQQLDI

SEQ ID NO: 124818 - protein, 244 aa, Unknown
  Bacterial polypetide isolated from the Sargasso Sea
TEGFLPKVGGFDHFKFGDHKSLKKKITRNTAAIMVETIMGEGGIKVIPDWCLKELRKICDKKNILLILDEVQCGISRTGDFFAFEKSKVKPDIVPIAKGIGGGFPIGAVLMNKKVAIGMTPGTHGSTFGGNPLAMAVGNTVIDIVSSKKFLKNVKNVSKYFLFNLNKIKDEYPNLIKEIRGRGLLIGIQLHIDQTKFIKKLMDNKLLTIRAAENVVRILPPLNVKKNEIDQALRIIKKVCSEMI

SEQ ID NO: 124819 - protein, 282 aa, Unknown
  Bacterial polypetide isolated from the Sargasso Sea
AKRYFYSIGQPQKNRILCIKNSFHGRTLATIFASSSKKMIEGFGPKVNGFDHFEFGNHIQLKKKITKKTAAIMIEPIMGEGGIKVIPHWCLKEIRKICNKKKILLILDEVQCGVGRTGNFFAFENSKIKPDIVPIAKGIGGGFPIGAVLMTKKVEKAMVAGSHGSTFGGNPNACSVGIEVMNQLFKKGFLQSVKKLSKYFHKELRKLQNEYPKIIKEVRGAGLLIGLKLFCNQTKFIKKLEDNKLLTIRAAENVVRILPPLNVKKKEIDLSIKIIKKVCKEI

SEQ ID NO: 124820 - protein, 167 aa, Unknown
  Bacterial polypetide isolated from the Sargasso Sea
MVDAPHSKCGTFGYVGSSPTAPTLMNTYTRFNISFKKGNGCWLWDEKGKKYLDAVAGIATCSLGHSNRILRKKLSGQLKKVQHISNLYKIEEQEELSKYLTKQSCAESVFFCNSGAEANESAIKLIKKYGNTVHKGKESFILAAESSFHGRTLATLSATGQPKYQKG

SEQ ID NO: 124821 - protein, 282 aa, Unknown
  Bacterial polypetide isolated from the Sargasso Sea
NAIKKQSKKLWHVSNAFIIPEGERLAKRLTKKTFADFVIFQNSGAEATEAAVKVARRYFYSIGKPNKNRILCIKNSFHGRTTSMIYASGSKKMTEGFGPRVNGFDHFKFGDHNGLKKSITSKTAAIMVEPIMGEGGIKMIPDWCLRDLRKICNKKKILLILDEVQCGIGRSGRFFAFEHAKVKPDIVPIAKGIGGGFPIGAVLMTKKAASGINHPGTHGSTFGGNPLAMSVGNAVLDQIFKKGFLKNVQVVSKYFHFKLKEIQKKYPYIIKEIRGVGLLIGI

SEQ ID NO: 124822 - protein, 306 aa, Unknown
  Bacterial polypetide isolated from the Sargasso Sea
YLYTRQNKKYLDFASGIAVNSLGHCHPKLIEALNKQSKQIWHVSNLYKIKKQEEFANLLCKNSFADKVFFTNSGTESIECGIKIIRGYHSYHKTKKTEIITFEGAFHGRTYGALSAQKNKKYSNGFGPMLKGFKQIEFNNEKKLISAINRKTAGIIIEPIQGEGGIRPAHLSFLKLLRKICNENNILLFLDEVQCGFGRSGKLFSHEWAKIKPDIMSVAKGIGSGFPLGACMSTNKACVAMTKGSHGSTYGGNPLAMSVGLEVLKVISNKTFLSKIDKTARYFWKNLKKLEDTFNIISEVRGARLF

SEQ ID NO: 124823 - protein, 262 aa, Unknown
  Bacterial polypetide isolated from the Sargasso Sea
HGRTLAAIFASGSKKMTEGFGPKVPGFDHFNFGDHKGLKRAITKKTAAIMIETAMGESGIKVIPNWCLKDLRKICNKKKILLILDEVQCGIGRSGKFFAFEHAKIKPDIVPIAKGIGGGFPIGAVLMNKKVASAMTPGSHGSTFGGNPLAMSVGNAVLDQIFNRGFLKNVEKSSKHFITELNKIKEDYPEVIKEVRGIGLLLGIQLYNDQTKFIKKLEDNKLLTMRAGENVVRILPPLNVRRQEIDLAIKIIRKVCDKLSYE

SEQ ID NO: 124824 - protein, 323 aa, Unknown
  Bacterial polypetide isolated from the Sargasso Sea
CVNVMPTYGIKNLEFVKGKGCYLYSSQNKRYLDFASGIAVNSLGHCHPKLIEALNKQSKQVWHVSNLYKIKKQEQFAKLLCKNSFADKVFFTNSGTESIECGIKIIRGYHSYHKTKKTEIITFDGAFHGRTYGALSAQKNKKYSNGFGPMLKGFKQIEFNNEKKLISAINKKTAGIIIEPIQGEGGIRPANLNFLKLLRKICNEKKILLFFDEVQCGFGRSGKLFSYEWAKIKPDIMSVAKGIGSGFPLGACLSTNKACIAMTKGSHGSTYGGNPLAMSVGLEVLKIISNKTFLKKVDKTARYFWKNLKKLENTSNIISEVRG

SEQ ID NO: 124825 - protein, 290 aa, Unknown
  Bacterial polypetide isolated from the Sargasso Sea
MSSLAKNYNRRKISFKKGKGSFLYSTDGKKYLDFLSGIAVNSLGHSNPHLIRALGKQSKKVWHVSNAFLIPEGERLAKRLTQRTFADYVLFQNSGTEAIEAAIKIARRYFYSIGKPKKNRILCIKNSFHGRTLAAIFASGSKKMTEGFGHVGGFDHFKFGDHNSLKKAITSKTAAIMVEPIMGESGIKVIPDWCLRELRKICNKKKILLILDEVQCGVGRTGKFFAFEHAKVKPDIVPVAKGIGGGFPIGAVLMTKKAASGINFPGTHGSTFGGNPLAMSVGNAVLDQIF

SEQ ID NO: 124826 - protein, 289 aa, Unknown
  Bacterial polypetide isolated from the Sargasso Sea
QLFVSKSGDKFLDFGTGIAVNSLGYSNPYLNDKLKEQIDKLWHLSNVYQIPEQEKLAKRLCDNSFADYVFFCNSGTEAIEASIKIARRYFHSSENWSHKKEILSFSGSFHGRTIGALAAGGPDKLSSFNTTVNDFKFLEFGDHEQLQNSINEKTAAVIIEPIQGEGGIREVPKQCLEGLKKICDENNCLLIFDEVQCGMGRTGKLFAYEWSEVNPDIMTIAKAIGNGFPLGACLTSKKVGEKMNFGSHGSTFGGNPLACTVGNAVLDIMLKDKFFSEINVVAKKLYEGL

SEQ ID NO: 124827 - protein, 195 aa, Unknown
  Bacterial polypetide isolated from the Sargasso Sea
WCLKELRKLCNKKKILLILDEVQCGISRTGSFFSFEKSNIKPDIVPIAKGIGGGFPIGAVLMNKKVASGMIPGTHGSTFGGNPLAMAVGNAVMDIVSRKKFLRNIENLSKYFLSQLKNIKETYPHLIKSIRGRGFLIGIQLYKDQTIFIKKLMENRLLTIRASENVIRILPPLNVKKSELDLSLKIINQVCKELN

SEQ ID NO: 124828 - protein, 261 aa, Unknown
  Bacterial polypetide isolated from the Sargasso Sea
MSKNSTYIMPTYGDRNLEFKEGKGCYLTAVDNNKYLDFGSGIAVNSLGHCHPRLVKALQHQASKLWHISNLYHNSLQEEYAKLLCLNSFAEKVFFTNSGVESIEAGIKVIKSYHHYHNNTDQKNIITFEGAFHGRTFAALSAQQNEKYSKGFEPLLSGFIKIPFNDIDAVKKNVNKNTAAIMIEPIQGEGGIRPANLKFLQDIKKICEKNNLLLFLDEVQSGFGRSGKLFSHEWANIEPDIVATAKGIGSGFPMGACLATK

SEQ ID NO: 124829 - protein, 213 aa, Unknown
  Bacterial polypetide isolated from the Sargasso Sea
AIMVETILGEGGIKVIPDYCLKGLRKLCNKKKILLILDEVQCGIGRTGKFFAFEHAKIKPDIVPIAKGIGGGFPIGAVLVNKKVASCMKPGTHGSTFGGNPLAMSAGNAVIDVLFRKGFLKNVTKNGKYFQQELNKLKEKYPKVIKEVRGLGLLLGVALYRNQADFINKLLQQKLLTVRASENVVRLLPPLNVTRKEINLAIKILNNVCENYK

SEQ ID NO: 124830 - protein, 276 aa, Unknown
  Bacterial polypetide isolated from the Sargasso Sea
AARSIFYSIGKPQKNRILCIRNSFHGRTLAAIFASGSKKMTEGFGPKVPGFDHFNFADHKGLKKAITRKTAAIMIETVMGESGIKVIPDWCLRDLRKICNKKKILLILDEVQCGIGRSGKFFAFEYAKIKPDIVPIAKGIGGGFPIGAVLMNKKVASAMTPGSHGSTFGGNPLAMSVGNAVLDQIFKKGFLKNVKKSSSYFISELNKIQSDYPEIIKEVRGVGLLIGLQLYNDQTNFIKKLQDNKLLTMRAGENVVRILPPLNVKKQEIDLAIKII

SEQ ID NO: 124831 - protein, 196 aa, Unknown
  Bacterial polypetide isolated from the Sargasso Sea
FSRCAQLGDERQLLLISDEVQVGMARSGTLWGYQQLGIEPDAFTTAKGLGGGFPIGALAVKNHAAVFEPGDHASTFGGNPLACRAALTVARELQQRRLLENVQQRGEQLQQGLQQRVEQWPQLLAGERGWGLIRGLLLRDDSISAIDLVKAAMAEGLLLVPAGSQVVRFVPPLVINRRQIHQALQRLDQALSKLAA

SEQ ID NO: 124832 - protein, 258 aa, Unknown
  Bacterial polypetide isolated from the Sargasso Sea
VTATSQPKYQEGFGPLPGGFRYAAYNDFEEAEKAIGPQTCAVLVEPLQGEGGVNPARPGFLRHLRELCNHHQALLIFDEIQCGMGRTGKLFAHEWEEGVVPDVLTLAKALGCGLPIGAMLCSEKVSQAFKPGDHGTTFGGNPIVASVARAALKKINTPQMMAHVIKQGEAIRGRLHSLNDELNNFGEIRGKGLMLGGVLHGAWKGRAGEIVSTALNHGVLILVAGPDVVRLVPPLTITGDEVQTGLERLTKALKELAS

SEQ ID NO: 124833 - protein, 240 aa, Unknown
  Bacterial polypetide isolated from the Sargasso Sea
GPKVSGFDHFDFGDHKSLKKKITKNTAAIMVETIMGEGGIKVIPDWCLVELRKLCNQKKILLILDEVQCGIARSGDFFAFEKSKVKPDIVPIAKGIGGGFPIGAVLMNKKVAAGMTPGTHGSTFGGNPLAMAVGNTVIDIVSNKSFLKNVKNISKYFLLKLNNLKNVYPNIIKNIRGKGLLIGIQLHADQTKFIKKLMDNKLLTIRAAENVVRILPPLNVKKNEVDQALKIINKVCKELN

SEQ ID NO: 124834 - protein, 191 aa, Unknown
  Bacterial polypetide isolated from the Sargasso Sea
ELRALCNKKKILLILDEVQCGIGRSGDFFAFEKSKVKPDIVPIAKGIGGGFPIGAVLMNKKVASGMTPGTHGSTFGGNPLAMSVGNAVMDIISNKKFLNNVKGLSKYFLFKLNKIKEKYPNVIKQIRGKGFLIGIQLYKDQTEFIKKLMNNQLLTIRAAENVVRILPPLNVKKNELDLALKIIEKVCSQIK

SEQ ID NO: 124835 - protein, 235 aa, Unknown
  Bacterial polypetide isolated from the Sargasso Sea
MKTSKALIENNKYIIQNYQRYPIEIIRGDGSFIWDSKGKKYLDFISGIAVNNLGHNNSKINKAISSQLQKILHISNLFVIKEQVNYAKELYKKKLGYQTFFCNSGTEANEAAFKLSRRWGMLNGKRSTIVSFSGAFHGRTFGSLSATSPKKYRFGFYPLTPGFKSIEFNNFIELEKLLNKNKKIVAIIVEPIQGEAGVKFSDKGFLNKIQELCRKNNILFIVDEVQVGIGRTGKT

SEQ ID NO: 124836 - protein, 278 aa, Unknown
  Bacterial polypetide isolated from the Sargasso Sea
FQNSGTEATEAAIKVARRYFYSKGKPHKNRILCIKNSFHGRTIAAIFASGSKKMTEGFGPKVPGFDHIEFRKFKPRFPNIRSKIKQNTAAIMVETIMGEAGIKPIPDKCLKYLRKICNEKKILLILDEVQCGIGRSGDFFAFERSKIKPDIVPIAKGIGGGFPLGAVLMTKKVAKSMSPGSHGSTFGGNPLAMSVGNAVLDQIFKKGFLKSVKKISKYFFNELNKVKNDYPKLIKEVRGLGLLIGLQLFNDQKKFIQKLENNNLLTIRAAENVVRILP

SEQ ID NO: 124837 - protein, 286 aa, Unknown
  Bacterial polypetide isolated from the Sargasso Sea
TNPTLVNAINKQSKKLWHVSNSFIIPEGEELARKLTNKTFANAVIFQNSGAEATEAAIKIARRYFYSIGKPEKNRILCIKNSFHGRTIAAINASGSPKMTEGFGPKVGGFDHFKFGNHNELKKKISSKTAAIMIEPIMGEGGIKVIPDWCLKELRKICDKNKILLILDEVQCGIGRTGKFFSFEYAKIKPDIVPIAKGIGGGFPIGAVLMTKQVSAAMVPGTHGSTFGGNPLAMAVGNAVMNEIFKKGFLSKVKINSKYFISELNKIKNKFPKIIKQIRGKGLIIG

SEQ ID NO: 124838 - protein, 193 aa, Unknown
  Bacterial polypetide isolated from the Sargasso Sea
LKYLRKICNQKKILLILDEVQCGIGRSGDFFAFERSKVKPDIVPIAKGIGGGFPIGAVLMNKKVASGMSPGTHGSTFGGNPLAMKIGSTVMDIVANKVFLDNVKNNSEYFHKKLDNLRKTFPKIIKEIRGRGLLIGLKLHNDQTNFIKNLMENKLLTIRAAENVVRILPPLNVKKREIDQAIKIINKVCKEYN

SEQ ID NO: 124839 - protein, 243 aa, Unknown
  Bacterial polypetide isolated from the Sargasso Sea
FILTGKPNKNRILCIKNSFHGRTIAAIFASGSKKMTKGFGPKVPGFDHIEFRKFKPRFPNIRNKIRKNTAAIMVETIMGEGGIKSIPDKCLKYLRKICNEKKILLILDEVQCGIGRTGDFFAFERSKVKPDIVPIAKGIGGGFPLGAVLMKKKVGSSMIPGSHGSTFGGNPLAMNVGNAVLDQIFKRGFLKNVRKISKYFHIELNKLKNDYPNIIKEIRGKGLLIGIQLHFDQSKFIKSLEKN

SEQ ID NO: 124840 - protein, 243 aa, Unknown
  Bacterial polypetide isolated from the Sargasso Sea
RGSGPKVPGFDHFDFADHKGLEKAITKKTAAIMCETAMGESGIKVIPDWCLKGLRKLCNKKKILLILDEVQCGIGRSGKFFAFEHAKIKPDIVPIAKGIGGGFPIGAVLMNKKVASAMTPGSHGSTFGGNPLAMSVGNAVMDQMFKKGFFQNVQKLSKYFISELNLIKEDYPDIIKEVRGIGLLIGLQLFEDQSNFIKKLELNKLLTIRAGENVVRILPPLNVKKQEIDLAVKIIRKVCENYN

SEQ ID NO: 124841 - protein, 252 aa, Unknown
  Bacterial polypetide isolated from the Sargasso Sea
SLGHANQNLIRAINKQAKKVWHVSNAFIIPEGEKLAKRLTQKTFADYVIFQNSGTEATEAAIKVARRYFYSIGKSYKNRILCVKNSFHGRTIAAIFASGSKKMTEGFGPKVAGFDHFRFGDHKSLKKSITNKTAAIMVEPIMGEGGIKVIPDWCLRELRKICNKKKILLILDEVQCGIGRTGNFFAFENSKVKPDIVPIAKGIGGGFPMGAVLMTKKVALSMSPGTHGSTFGGNPLAMSVGNVVLDQILKKG

SEQ ID NO: 124842 - protein, 253 aa, Unknown
  Bacterial polypetide isolated from the Sargasso Sea
KKNRILCIKNSFHGRTIAAINASGSKKMVEGFGPKVAGFDHFKFGNHNELKRKITKKTAAIMIEPIMGEGGIKVIPTWCLKELRQICNKRKILLILDEVQCGIGRSGKFFSYEYAKIKPDIVPIAKGIGGGFPIGAVLMTKKVSKAMVPGTHGSTFGGNPLAMSVGNTVMDEIFKKGFLTKVNINSKYFISELNKIKNKFPNIIKEIRGIGLILGIQLHHDQTKFIQSLMKNKLLTIRAAENVIRILPPIKCN

SEQ ID NO: 124843 - protein, 245 aa, Unknown
  Bacterial polypetide isolated from the Sargasso Sea
MTEGFGPKVPGFDHFNFADHKGLKNAINKKTAAIMIETALGESGIKVIPNWCLKGLRKICNKKKILLILDEVQCGIGRSGRFFAFEDASIKPDIVPIAKGIGGGFPIGAVLMNKKVASAMTPGSHGSTFGGNPLAMSIGNAVLDQIFKKGFLKNVQQSSKYFMSKLNKIREDYPEIIKEIRGIGLLIGLQLYDNQSKFIKKLEDNGLLTIRAGENVVRILPPLNVKKQEIDLAIKIIRKVCDKLN

SEQ ID NO: 124844 - protein, 264 aa, Unknown
  Bacterial polypetide isolated from the Sargasso Sea
KNSFHGRTLAAIFASGSKKMTEGFGPKIPGFDHFRFGNHDSLKKKINKNTAAIMVETVMGEGGIKVIPDWCLRELRHLCNKKKILLILDEVQCGVARSGDFFAFEKSKVKPDIVPIAKGIGGGFPIGAVLMNKKVASGMTVGSHGSTFGGNPLAMTIGNTVMDIVSKKSFLNNIKKLSKYFFEKLNIIKSKHPDIIKEIRGRGLLIGIQLHNNPTLFIKKLMEYRLLTIRAAENVIRILPPLNVKKKEIDIAVKIISKVCNDLK

SEQ ID NO: 124845 - protein, 195 aa, Unknown
  Bacterial polypetide isolated from the Sargasso Sea
WCLKELRKLCDKKKILLILDEVQCGISRSGDFFAFEKSKVKPDIVPIAKGIGGGFPIGAVLMNKKVAAGMIPGTHGSTFGGNPLAMAVGNTVMDIVSSKKFLYNVKKSSKYFFSNLNKLKEKYPKIIKEIRGRGLLIGVQLHTNQTKFIKNLMDNRLLTIRAAENVVRILPPLNVKKKEIDLAIKIIEKVCSQIK

SEQ ID NO: 124846 - protein, 220 aa, Unknown
  Bacterial polypetide isolated from the Sargasso Sea
AITKKTAAIMVETIMGEGGIKVIPDYCLRGLRKLCNKKKILLILDEVQCGVGRTGKFFAFEHAKIKPDIVPIAKGIGGGFPIGACLVTKKVASCMTYGSHGSTFGGNPLAMSVGNAVLDQIFKKNFLRNVQRISKYFRSKLTNLHAEYPKVIEEIRGKGLLLGIKVLKDQNKFIKKLYDNKLLTIRASENVIRLLPPLNVKKQNIDEALAILKKVCKTYK

SEQ ID NO: 124847 - protein, 272 aa, Unknown
  Bacterial polypetide isolated from the Sargasso Sea
MSALAKNYNRRKISFNRGKGSFLYSTNGKKYLDFVQGIAVNSLGHANPYLIRAMNRQAKKVWHVSNAFLIPEGEKLASKLKEKTFADYIMFQNSGAEATEAAIKVARRYFYSIGKPHKNRILCIKNSFHGRTLATIFASGSKKMTEGYGPKVDGFDHFEFGDHQSLKKKINNKTAAIMVEPIMGEGGIKVVPDWCLRELRKICNKKKILLILDEVQCGVGRSGKFFAFEYSKIKPDIVPIAKGIGGGFPIGAVLMTKKVAFCMVPRSSPGVR

SEQ ID NO: 124848 - protein, 211 aa, Unknown
  Bacterial polypetide isolated from the Sargasso Sea
MVETILGEGGIKVIPNFCLEGLRKLCNKKKILLILDEVQCGIGRSGKFFAFEHAKIKPDIVPIAKGIGGGFPIGAVLVNKKVASAMKPGTHGSTFGGNPLAMSAGNAVLDVMFKKGFLNNVTKNGEYFIKKLNKVREKYPKIIKEVRGKGLLIGLCLYKDQTNFIKKLQDNNLLSVRASENVVRLLPPLNVKKRELNLALKILSKVCKDYR

SEQ ID NO: 124849 - protein, 248 aa, Unknown
  Bacterial polypetide isolated from the Sargasso Sea
KGKGSYLYSTNGKKYLDFVQGIAVNSLGHANPDLIKAISKQSKKVWHVSNAFVIPEGEKLAKKLTQKTFADSVIFQNSGTEATEAAIKIARRYFYSIGKPNKNRIICIKNSFHGRTIAAINASGSKKMTEGFGPKVPGFDHFEFGNHKKMKKLINKNTAAIMVETVMGEGGIKVIPSWCIKELRKICNKKGILLILDEVQCGIGRSGKFFAFENAKVKPDIVPIAKGIGGGFPIGAVLMSKKVAKAMT

SEQ ID NO: 124850 - protein, 268 aa, Unknown
  Bacterial polypetide isolated from the Sargasso Sea
LCVKNSFHGRTLAAIFASGSKKMTEGFGPKVGGFDHFEFGNHKSLKKKISNKTAAIMVEPIMGEGGIKVIPGWCLRELRKICNKKKILLILDEVQCGVGRSGKFFAFEHAKVKPDIVPIAKGIGGGFPIGAVLMTKKVASCMVPGTHGSTFGGNPLAMSIGDAVLDQIFKKGFLKNVKKISLYFHKELNKIKNDYPKIIEEVRGIGLLIGLKLFNNQIKFIKKLENNKLLTIKAAENVVRILPALNVSKSEVDLAIQIIRKVCKELEV

SEQ ID NO: 124851 - protein, 240 aa, Unknown
  Bacterial polypetide isolated from the Sargasso Sea
CAVLIEPIQGEGGVNPVKPGFLSHLRKLCDQHDVLLIFDEIQCGMGRTGKLFGYQWENSEDSEQPDNSVTNLKPDIVTMAKALGGGLPIGAMLCTEKVAQTFKPGDHGTTFGGNPIVTAVAGAAFRKVNTPEMMEQVLKKGLVIKNHLKALNDELSLFETIRGRGMMLGAVLSKAWKGKASKMVTACQEEGVLVLVAGPDVLRFLPPLNISTADLQTALDRVGKALKNLHADELSSSTKT

SEQ ID NO: 124852 - protein, 319 aa, Unknown
  Bacterial polypetide isolated from the Sargasso Sea
MAKNYNRKKIAFSYGKGSYLFSTDGKKYLDFVQGIAVNSLGHAHPKLVKTIRDQSKKLWHVSNAFQIPEGEKLAKKLCQKTFADYVMFQNSGAEATEAAIKVARRYFYSIGKPNKNRILCIKNSFHGRTLAAIFASGSKKMTEGFGPKVTGFDHFRFGDHNSLKKKINKNTAAIMVETIMGEGGIKVIPDWCLRELRALCNKKKILLILDEVQCGIGRSGDFFAFEKSKVKPDIVPIAKGIGGGFPIGAVLMNKKVALGMTPGTHGSTFGGNPLAMSVGNTVMDIVSNKKFLNNVKSLSKYFLLKLNKVQAKYPNIIKQ

SEQ ID NO: 124853 - protein, 233 aa, Unknown
  Bacterial polypetide isolated from the Sargasso Sea
IKKLSLDSVEKKISERTCAILVEPIMGEGGIVTLSCSFMKGLKDLCKKYKLLLIFDEVQSGIGRSGHFLAHEKCEITPDVVALAKGLGNGFPIGACLATKKVADCMVPGTHGSTYGGNPLGCAVALETIKHILKPKFLSTIRAKGEFFKHKLNVLKDIFPEQILEVRGRGLMLGLKCVSKNTDLIDMCRKEMLLLVPGASNTLRILPPLTITYKEIEEGTTRLEQALLQMRKL

SEQ ID NO: 124854 - protein, 312 aa, Unknown
  Bacterial polypetide isolated from the Sargasso Sea
MSYLAKNYNRKNISFKYGKGSYLYSIDNKKYLDFVQGIAVNSLGHAHPQLVKTIKKQSKKLWHVSNAFLIPEGEELAKKLCQKTFADYVMFQNSGAEATEAAIKVARRYFYSIGKKNKNVILCIKNSFHGRTLAAIYASGSKKMTEGFGPKVSGFSHFTFGDHKSLRKKITNRTAAIMVEPIMGEGGIKEIPDWCLKELRKLCNKKKILLILDEVQCGISRTGNFFSFEKSKVKPDIVPIAKGIGGGFPIGAVLMNKKVASSMTPGTHGSTFGGNPLAMAVGNTVMDIVSNKKYLKNIRNLSEYFLSKFKYY

SEQ ID NO: 124855 - protein, 275 aa, Unknown
  Bacterial polypetide isolated from the Sargasso Sea
KPNKNRILCVKNSFHGRTIAAIFASGSKKMTEGFGPKVEGFDHFKFGDHKSLKKAISNKTAAIMVEPIMGEGGIKVIPDWCLKELRKICNKKKILLILDEVQCGIGRTGNFFAFEKSKVKPDIVPIAKGIGGGFPIGAVLMSKKVASSMIPGSHGSTFGGNPLAMSVGNAVLDQIFKKGFFNNLKKISKYFYKELDKLKNDYPNIIKEIRGEGLLIGVQLHFDQSKFIKSLEKNYLLTIRAAENVIRILPPLNVKKNEIDLALKILKKVLENTNN

SEQ ID NO: 124856 - protein, 283 aa, Unknown
  Bacterial polypetide isolated from the Sargasso Sea
EKLWHVSNIYQISEQEKLAKRLCIASFADYVFFCNSGTEAVEASIKIARKYFYETLKSKTKNQIITFDGSFHGRTLGALAAGGPSKLEPFNTEVNGFKFLDFGDLNKVKEAISEDTAAILIEPIQGEGGVIEAPVEFIKGLRKLCDENNILLIFDEVQCGVGRTGKMFAHQWLGIVPDIMTVAKAIGNGFPLGACLTTEKVGSTMNFGSHGSTFGGNPLASAVGNAVLDIMLEKDFFLNVKEVSQNLFSGLQEINKEFPGVIELVRGRGLMIGIKCKIKNTDL

SEQ ID NO: 124857 - protein, 300 aa, Unknown
  Bacterial polypetide isolated from the Sargasso Sea
SGIAVNSLGHAHPKLIKTIRDQSKKLWHVSNAFQIPEGEKLAKKLCKKTFADYVIFQNSGAEATEAAIKVARRYFYSIGKPNKTRILCIKNSFHGRTLATIFASGSKKMIEGFGHVGGFDHFAFGDHKSLRKKITKNTAAIMVETIMGEGGIKVIPDWCLKELRKLCDKKKILLILDEVQCGVSRSGDFFAFEKSKVKPDIVPIAKGIGGGFPIGAVLMNKKVAAGMTPGTHGSTFGGNPLAMAVGNTVMDIVSTKKFLNIVKKSSKYFLSNLNKLKKKYPNIIKEIRGRGFIIGIQLHI

SEQ ID NO: 124858 - protein, 272 aa, Unknown
  Bacterial polypetide isolated from the Sargasso Sea
MGNYSPLSVEFKEGAGPWLIDNEGDRYLDALSGIAVCGLGHSHPSLSKVIAEQSAKLIHTSNVYRISFQEKLAEKLTALSGMDNAFFCNSGAEANEAAIKLARLHAHNQKIHEPIIVVMQNSFHGRTMATISASGERVQDGFKPLLGGFKHMPYNNVEALEDYVKVSENIVAIMIEPIQGEGGIVVPNDSYLNSIRNICDQSNLLMIVDEVQTGMCRTGKWFAYQHEGVLPDVVTIAKALGNGVPIGACLAKGKASGYFIAGSHGSTFGGNP

SEQ ID NO: 124859 - protein, 284 aa, Unknown
  Bacterial polypetide isolated from the Sargasso Sea
GIAVNSLGHANPTLVKAINIQSKKLWHVSNSFIIPEGEELAKKLTNKTFADAVIFQNSGAEATEAAIKVARRYFYSIGQPQKNRVLCIKNSFHGRTIAAINASGSKKMVEGFGPKVGGFDHFNFGNHKELKKKITSKTAAIMVEPIMGEGGIKVIPAWCLKELRKICTKKKILLILDEVQCGIGRSGKFFSYEYANIKPDIVPIAKGIGGGFPIGAVLMTKKVSKAMVPGTHGSTFGGNPLAMSVGNAVMDEIFKRGFLSKVKSNSKYFISELNKIKNKFHKYY

SEQ ID NO: 124860 - protein, 250 aa, Unknown
  Bacterial polypetide isolated from the Sargasso Sea
MTEGFGPKVPGFDHIQFKNSKPRFPNIKNKIKKNTAAIMVETIMGEGGIKTIPDKCLKYLRKICNQKKILLILDEVQCGIGRSGDFFAFEKSKVKPDIVPIAKGIGGGFPIGAVLMNKKVASGMVPGTHGSTFGGNPLAMKIGSTVMDIVAQKSFLNNVKKNSQYFHKELNIIKEKFPKIIKEIRGKGFLIGLQLHNDQTNFIKKLMENKLLTIRAAENVIRILPPLNVKKSEIDQAIKIINKVCKTYKS

SEQ ID NO: 124861 - protein, 270 aa, Unknown
  Bacterial polypetide isolated from the Sargasso Sea
TKNEIISFEGSFHGRTIGSLAAGGPDKLESFNTIVNGFTHIKFGNHEQLKKEINENTAAIIIEPLQGEGGIREVPQECLKGLRKICDENDILLIFDEVQCGLARTGKMFAYEWSGVVPDIMTIAKAIGNGFPLGACLTSRKVGSVMDFGSHGSTFGGNPLASAVGNAVLDIMLGEGFLNNVEVISKTLFSGMQSIQKDFPDIIELVRGKGLMIGIKCKVKNTDFVENARKNKLLSVKASDNIVRLMPPLVLSLKECNEGLEKIRSTCERF

SEQ ID NO: 124862 - protein, 220 aa, Unknown
  Bacterial polypetide isolated from the Sargasso Sea
ISDSTAGIILEPVQGEGGIRPVTQKFLASIRELCDEHGVLLMFDEVQCGIGRTGHLFAHQHYGINPDVMALAKGLGGGFPIGACLSTEEVGSSMVVGTHGSTFGGNPLATAVGNAVMDLLLEDETLKKVIEKGKYLNGELERLKIEHNDLLDSVHGLGLMIGVKCKMPCADLALSLRDNYLLVGQSGSNMVRLLPPLNVSQSELEKAISIFEQTLKKISH

SEQ ID NO: 124863 - protein, 289 aa, Unknown
  Bacterial polypetide isolated from the Sargasso Sea
MTYLSKNYNRKNISFKHGKGSYLYSTDKKKYLDFVQGIAVNSLGHAHPKLVKTINDQSKKLWHVSNAFKIPEGEKLAKKLCTKTFADYVMFQNSGAEATEAAIKVARRYFYSIGKPNKNRILCIKNSFHGRTLAAIFASGSKKMTEGFGPKVTGFDHFSFGDHYSLKKKINKNTAAIMVETIMGEGGIKVIPDWCLKELRVLCNKKKILLILDEVQCGIGRSGDFFAFEKSKVKPDIVPIAKGIGGGFPIGAVLMNKKVASGMTPGTHGSTFGGNPLAMSVGNTVMDII

SEQ ID NO: 124864 - protein, 175 aa, Unknown
  Bacterial polypetide isolated from the Sargasso Sea
MVDAPHSKCGTFGYVGSSPTAPTLMNTYSRFDISFKKGKGCWLWDKTGKKYLDAVAGIATCSLGHSDRVLGRRLSSQLKKIQHISNLYNIEEQEQLSRTLTNMSCAKSVFFCNSGAEANESAIKLIKKYGNTTNKGKESIILAAESSFHGRTLAALSATGQPKYQKGFEPMIQGS

SEQ ID NO: 124865 - protein, 275 aa, Unknown
  Bacterial polypetide isolated from the Sargasso Sea
ATCSLGHSDRVLRRSLSTQLKKIQHISNLYNIEEQEQLSRTLTNMSCAESVFFCNSGAEANESAIKLIKKYGNTTNKSKESIILAAESSFHGRTLAALSATGQPKYQKGFEPMIQGFKFFKFNNFDSVKKLFEECENNDQKISGVLVEPIQGEGGVIPGSKIFFKNLREICDKYNSLLILDEVQSGVGRTGKMWGYENLEIEPDGFTLAKGLGGGHAIGALLVKEKANIFSPGDHASTFGGNPFACKAALTVLEEINRRNLVNNVYLRGEPLSAG

SEQ ID NO: 124866 - protein, 207 aa, Unknown
  Bacterial polypetide isolated from the Sargasso Sea
MGEGGIKVVPDWCLRELRKICNKKKILLILDEVQCGIGRTGKFFAFEHAKVKPDIVPIAKGIGGGFPIGAVLMTKKASSGMIPGTHGSTFGGNPLAMSVGNAVLDQIFKKGFLSNVQKISKYFHLELKKIHKEYSNIIKEVRGKGLLIGLQLHKDQSKFIQKLMDNNLLTIRASENVIRILPPLTVKKKEINLAIKIIKKVCKEYKV

SEQ ID NO: 124867 - protein, 263 aa, Unknown
  Bacterial polypetide isolated from the Sargasso Sea
KYYMQVVNRMPPVLISGKGTEVFDNEGNSYLDFTAGWAVLNVGHNHPKVTKAIQDQASKILQMSNLFYTTPQLPLAKILIENSDLDRVFFCNSGAEANEGACKVARKWGKKKLNGAFEIITTLNSFHGRTQAMMAATGQPHYQNNWKPLMPGFVNVEYNNLEAIKSAYDKDKTCAVLLEPVQGEGGVNIPSENYLLDVMNFCHEKNILFMLDEVQTGMGRLGTFFGYQKYSNVEPDVMSLAKALGAGTPLGAFLTKEILFGFR

SEQ ID NO: 124868 - protein, 272 aa, Unknown
  Bacterial polypetide isolated from the Sargasso Sea
LWDQEGREYVDLAGGIAVNALGHAHPALVEALTEQAGKLWHVSNIMTNEPALRLADKLVQATFAERVFFANSGAEANEAAFKLARRWGHNTGGAAKHQIIACTNSFHGRSLFTVSVGGQPKYSEGFGPAMGGISHVPYQDLAALEAAMSDATCAVVLEPVQGEGGVIPASSDYLQAVRALCDKHQALLVFDEVQSGMGRTGRLFAYMHSGVVPDILTSAKSLGGGFPISAMLTTTAIAEHFAVGTHGSTYGGNPLACAVAERVLDIVNTPAV

SEQ ID NO: 124869 - protein, 276 aa, Unknown
  Bacterial polypetide isolated from the Sargasso Sea
PKLIKVMNKQAKKLWHVSNAFTIPEGEELARKLAKKTFADYVIFQNSGAEATEAAIKAARRYFYSIGKPNKNRIICIKNSFHGRTLATINASGSKKMCEGFGPKVSGFDHFNFGDHKKLKKLINKKTAAIMVETIMGEGGIKTIPNWCLKGLRKLCSKKKILLILDEVQCGIGRTGDFFAFEQSKIKPDIVPIAKGIGGGFPIGAVLMNKKVASGMTPGTHGSTFGGNPLAMKVGNAVFDIISTKKFLNNVKNNSQYFHSELDKIKQKFPKIIKEI

SEQ ID NO: 124870 - protein, 325 aa, Unknown
  Bacterial polypetide isolated from the Sargasso Sea
NFVPKKAEGSLVWDQDDKEYIDFGGGIAVNSLGHSHPSLIKALTDQSKKIWHLSNYLTNEPAIKLANKLTELTFAENIFFSNSGSEANEAAIKIARKYHSSRNENRNEIVSFQNSFHGRSLLNISLGSSEMHRNGFEPLMPGIKHGVFNDLSCLEDLITDQTAAVILEPVQGEAGVFKATNDFMAKLNEVTSEKGALLIIDEVQSGVGRMGSLYGYMNYDIQPDIVTSAKGLGGGIPIGATLTTKVIGESMQPGTHGSTFGGNPIACAVAHEVLNIVSDEKFLSDVSEKEKLFLNLLSDLESQGIFSDIRSAGLWIGCDLVDKSA

SEQ ID NO: 124871 - protein, 141 aa, Unknown
  Bacterial polypetide isolated from the Sargasso Sea
MPPQDQSTAVMATYGRFPVKLERGQGVWVHDSQGRRYLDCVAGIATCTLGHSDRALRRALTQQLRKLQHVSNLYAIGEQEQLASWIAGNSCCDQVFFCNSGAEANEAAIKLARKYGHSRRGINQPLILTARASFHGRTLAA

SEQ ID NO: 124872 - protein, 314 aa, Unknown
  Bacterial polypetide isolated from the Sargasso Sea
LFFRSTHPSLVKTINQQSKMLWHVSNAFQIPEGEKLAKKLCKKTFADYVMFQNSGAEATEAAIKVARRYFFSIGKSNKNRILCIKNSFHGRTLAAIYASGSKKMTEGFLPKVGGFDHFNFGDHKALEKKITKNTAAIMVETIMGEGGIKVIPDFCLRQLRKLCDKKKILLILDEVQCGIGRSGDFFAFEKSKVKPDIVPIAKGIGGGFPIGAVLMNKKVATGMIPGTHGSTFGGNPLAMSVGNKVMDIISNKKFLNNVKKLSKYFLSNLNKIKEKYPNIIKQIRGRGFLIGIQLHQDQTNFIKKLMDNNLLQYV

SEQ ID NO: 124873 - protein, 199 aa, Unknown
  Bacterial polypetide isolated from the Sargasso Sea
VIPDWCLKELRKLCNKKKILLILDEVQCGIGRSGDFFAFEKSKVKPDIVPIAKGIGGGFPIGAVLMNKKVASGMVPGTHGSTFGGNPLAMSVGNTVMDIISNKKFLNNVKNLSNYFLLKLNKIKEKYPNIIKQIRGKGFLIGIQLYKDQTEFIKKLMNNQLLTIRAAENVVRILPPLNVKKNELDLALKIIEKVCSQIK

SEQ ID NO: 124874 - protein, 229 aa, Unknown
  Bacterial polypetide isolated from the Sargasso Sea
GAKVWDKDENEYIDLGSGITVNSSGHIDSELLAVLTEQAGKLWHTTNLYLTEPSIRLADELVKETFADRIFFCNSGAEANEAAIKIARKFSSLNNTTKKREILTFEGSFHGRTLTTISATAQPKYQKGFEPLTEGFRYCPFNDFEEAKKMIGPQTCAVLIEPVQGEGGINPSKYGFLQHLRKLCDHHQALLIFDEIQCGMGRTGKLFGYQWDNSSDSEQPVEMSHNENI

SEQ ID NO: 124875 - protein, 267 aa, Unknown
  Bacterial polypetide isolated from the Sargasso Sea
YFCIKNSFHGRTLATIFASGSKKMTEGFGPKVGGFDHFKFGDHKSLKKAITKKTAAIMVEPVLGEGGIKVIPDWCLRELRKICNKKKILLILDEVQCGIGRSGKFFAFEYSKVKPDIVPIAKGIGGGFPIGAVLMNKKVASAMTPGTHGSTFGGNPLAMSVGNAVLDQIFKKNFLKNVQINSKYFHKELKKIKIKYPEIIKEVRGIGLLIGLQVYKDQIKFIKKLEDNKLLTIRAAENVIRILPPLNVKKSEINLAIRIIKKVCREI

SEQ ID NO: 124876 - protein, 240 aa, Unknown
  Bacterial polypetide isolated from the Sargasso Sea
MVDAPHSKCGTFGYVGSSPTAPTLMNTYNRFDISFKKGKGCWLWDKKGKKYLDAVAGIATCSLGHSDRVLRKRLSTQLRKIQHISNLYNIEEQEQLSRTLTNMSCAKSVFFCNSGAEANESAIKLIKKYGNTVNKGKESIILAAESSFHGRTLAALSATGQAKYQKGFEPLIQGFKFFKFNDFDSVKKLFEECENNDQKISGVLVEPIQGEGGVIPGDKIFFKKLRKICDRYNSLLILDE

SEQ ID NO: 124877 - protein, 230 aa, Unknown
  Bacterial polypetide isolated from the Sargasso Sea
YFGDHKKLKKLINKKTAAIMVETIMGEGGIKTIPNWCLKGLRKLCSEKKILLILDEVQCGIGRTGDFFAFEQSKVKPDIVPIAKGIGGGFPIGAVLMNKKVASGMTPGTHGSTFGGNPLAMKIGNAVFDIISSKKFLNNVKSNSQYFHSELNKIKQRFPKIIKEIRGRGFLIGLQLFKDQTNFINALMKEKLLTIKAAENVIRILPPLNVKKDEINQALKIINKVCLTYK

SEQ ID NO: 124878 - protein, 231 aa, Unknown
  Bacterial polypetide isolated from the Sargasso Sea
MQTYNRKPVSFVKGEGVYLWDDNGKKYIDALCGLAVTSLGHSNQLISNVLSLQSKTLIHTSNAFHIDAQKILASRLCKLSGMTNAFFCNSGAESVETAIKIARKYGNDQNISMPKILVMENSFHGRTLAALSATSSKKSHEGFTPLVEGFIRVAFDAPEKIESVLHNQKDIVAILTEPIQGEGGIKIPKSGYLKKLRDICNDKNLLFMVDEVQSGFLQNREMVWVSARSHH

SEQ ID NO: 124879 - protein, 281 aa, Unknown
  Bacterial polypetide isolated from the Sargasso Sea
MSSLAKNYKRRKIAFKRGKGSFLYSTNGKKYLDFVQGIAVNSLGHANPYLNRAMSKQAKKVWHVSNAFIIPEGEKLAKKLTQKTFADYVLFQNSGTEATEAAVKIARRYFFSIGKTKKNRILCVKNSFHGRTLAAIFASGSKKMTEGFGPKVDGFDHFEFGNHKSLKKAITNKTAAIMVEPIMGEGGIKVIPDWCLRELRKICNKRKILLILDEIQCGIGRSGKFFAFEHAKIKPDIVPIAKGIGGGFPIGAVLMTKKVASGMTPGTHGSTFGGNPLAMSV

SEQ ID NO: 124880 - protein, 248 aa, Unknown
  Bacterial polypetide isolated from the Sargasso Sea
KKMTEGFGPKVDGFDHFEFGNHKSLKKAITNKTAAIMVEPIMGEGGIKVIPDWCLRAIRKICNKKKILLILDEVQCGIGRSGKFFTFEHAKVKPDIVPIAKGLGGGFPIGAVLMNKKVASGMTPGTHGSTFGGNPLAMSVGNAVLDQIFKKGFLKNVKKISDYFHSELKKIQKKYSNIIKEVRGMGLLIGLQLHKDQTKFIQKLMDNNLLTIRAGENVIRILPPLTVKKKEIDLAIKIIKKVCKEYKT

SEQ ID NO: 124881 - protein, 281 aa, Unknown
  Bacterial polypetide isolated from the Sargasso Sea
TKYLDFVQGIAVNSLGHAHPKLVKVINKQSKKLWHVSNAFIIPEGEELAKKLAKKTFADFTLFQNSGAEATEAAIKVARRYFYSIGKPNKNRIICIKNSFHGRTIAAIHASGSKKMIEGFGPKVGGFDHFNFGDHKKLKKLITKNTAAIMLETIMGEGGIKEIPDWCLRELRKLCNKKKILLILDEVQCGIGRTGDFFAFEKSKVKPDIVPIAKGIGGGFPIGAVLMNKKVASGMTAGTHGSTFGGNPLAMKIGVAVLDIISKKSFLKKVKSQSSYFHANL

SEQ ID NO: 124882 - protein, 308 aa, Unknown
  Bacterial polypetide isolated from the Sargasso Sea
AVCGLGHAHPELAHVLSDQAKNLWHTSNLYRVELQESLASSLSEITKQKRVFFCNSGAEANEAAIKLAKKYGNDNGIKAPIIVTMNGSFHGRTMATLSATGNPKVHSGFSPLLQGFKHIDYDSAEEAARAIQARDVVAILVEPIQGEGGIVVPEKGYLSKLRKLCNETDTLLMLDEVQTGIGRTGEWFAFQEEGIEPDVLTIAKGLGNGIPIGACLAKGVAGNVLTPGTHGSTFGGNPLVARVALKVLEIIEREGLLERARHLGDWIRYQFKEKLESLVGVIEIRGRGLMIGIELDRPCAEIVEVALK

SEQ ID NO: 124883 - protein, 249 aa, Unknown
  Bacterial polypetide isolated from the Sargasso Sea
SNSKKAIEGFKPKVDGFDHFNFGDHKGLEKAITSRTAAIMVETIMGEGGIKVIPDFCLKGLRKLCNKKKILLILDEVQCGIGRSGKFFAFEYAKIKPDIVPIAKGIGGGFPIGAVLVNKKVASGMKPGTHGSTFGGNPLAMSAGNAVMDIMFKKGFLNNVSKNGKYFINQLDKIKNKYPKVIKEIRGKGLLIGLCLHVNQAKFIQKLLDNNLLTVRAAENVVRLLPPLNVTKSEINLGLKIIEKVCKKF

SEQ ID NO: 124884 - protein, 254 aa, Unknown
  Bacterial polypetide isolated from the Sargasso Sea
KQSKKLWHVSNSFMIPEGEELAKKLTNRTFADAVIFQNSGAEATEAAIKVARRYYYSIGQPKKNRILCIKNSFHGRTIAAINASGSKKMVEGFGPKVGGFDHFKFGNHKELKRKITSKTAAIMIEPIMGEGGIKVIPSWCLKELRKICNQKKILLILDEVQCGIGRSGKFFSFEYANIKPDIVPIAKGIGGGFPIGAVLMKKKVSKAMVPGTHGSTFGGNPLAMSVGNAVMDEIFKKRLLFKVKSNFKYFISEL

SEQ ID NO: 124885 - protein, 208 aa, Unknown
  Bacterial polypetide isolated from the Sargasso Sea
TIIGEGGIKVIPEFCLKGLRKLCNKKKILLILDEVQCGIGRSGKFFAFEYANIKPDIVPIAKGIGGGFPLGACLMTKKVASCMTPGSHGTTFGGNPLAMSVGNAVLDLIFKKGFLKNVQKISKYFHNELYKLQNDYPELIQEIRGKGLLVGIKISKNQTEFIKKLLGKGLLTIRAGENVVRLLPPLTVTKKNIDEAVTIIKKVCKTYR

SEQ ID NO: 124886 - protein, 187 aa, Unknown
  Bacterial polypetide isolated from the Sargasso Sea
LCNKKKILLILDEVQCGIGRTGDFFAFDKSKVKPDIVPIAKGIGGGFPIGAVLMNKKVASVMSPGTHGSTFGGNPLAMKIGSTVMDIISKKKFLNNVKKNSKYFHIKLNKLKEDFPNIIKEIRGRGFLIGIKLHKDQTDFIKKLMDNKLLTIRAAENVVRVLPPLNVKKKEIDQALKIIKKVCKEYN

SEQ ID NO: 124887 - protein, 203 aa, Unknown
  Bacterial polypetide isolated from the Sargasso Sea
GGIKVVPDWCLKELRKLCNKKKILLILDEVQCGISRSGNFFAFEKSKCIPDIVPIAKGIGGGFPIGAVLMNKKVAAGMTPGTHGSTFGGNPLAMAVGNAVMDIVSSKKFLKNIKELSKYFFSNLNLLKKKYPKVIKEIRGKGYLIGIQLYKDQTKFIQKLMNKKLLTIRAAENVVRILPPLNVKKNELDQAIKIIDKVCAKLK

SEQ ID NO: 124888 - protein, 258 aa, Unknown
  Bacterial polypetide isolated from the Sargasso Sea
MVDAPHSKCGTFGYVGSSPTAPTLMNTYSRFDISFKKGKGCWLWDKTGKKYLDAVAGIATCSLGHSDRVLRRRLSTQLKKIQHISNLYNIEEQEQLSRTLTNMSCAESVFFCNSGAEANESAIKLIKKYGNTKNKGKESIILAAESSFHGRTLAALSATGQPKYQKGFEPMIQGFKFFKFNNFDSVKKLFEECENNDQKISGVLVEPIQGEGGVIPGSRIFFKSLREICDKYNSLLILDEVQSGVGRTGKMWGYENLG

SEQ ID NO: 124889 - protein, 312 aa, Unknown
  Bacterial polypetide isolated from the Sargasso Sea
SLGHSHPKLIKALTLQSKKVWHVSNAFKIPEGEKLAKKLTKNTFADYVMFQNSGAEATEAAIKVARKYFYSIGKPKKNRILCIKNSFHGRTIAAIFASGSKKMTEGFGPSIEGFDHFDFGDHKSLTNSINNQTAAIMIEPILGEGGIKVIPSWCLRELRKICNKKKILLILDEVQCGIGRSGKFFAFEHSKIKPDIVPIAKGIGGGFPIGAVLMTKKVAKFMTPGSHGSTFGGNPLAMAVGNAVIDEILKKDFLYNVRRISKYFHSELNNIKNEFPNIIKEIRGVGLLIGIQLFNNQNLFIKNLMKKKIINH

SEQ ID NO: 124890 - protein, 282 aa, Unknown
  Bacterial polypetide isolated from the Sargasso Sea
KISFRYGKGSYLYSKDNKKYLDFVQGIAVNSLGHAHPKLVKAINSQSKKLWHVSNAFQIPEGEKLAKKICQKTFADYVMFQNSGAEATEAAIKVARRYFYSIGKPNKNRILCVKNSFHGRTLAAIYASGSKKMTDGFGPKIAGFDHFKFGDHKSLKKKITKKTAAIMIEPIMGEGGIKVIPDWCLKELRKLCNKKKILLILDEVQCGISRTGSFFSFEKSKIKPDIVPIAKGIGGGFPLGAVLMNKRVASAMVPGTHGSTFGGNPLAMAVGNTVMDIVSNKK

SEQ ID NO: 124891 - protein, 180 aa, Unknown
  Bacterial polypetide isolated from the Sargasso Sea
LILDEVQCGIGRSGKFFSYEYAKIKPDIVPIAKGIGGGFPIGAVLMTEKVSKAMVPGTHGSTFGGNPLAMSVGNAVMNEIFKRGFLSKVKSNSKYFISELNKIKNKFPNIIKEIRGLGLILGIQLHHDQTKFIQSLLKNKLLTIRAAENVIRILPPLNVNKKEINIAIKIINKVCEGYKK

SEQ ID NO: 124892 - protein, 311 aa, Unknown
  Bacterial polypetide isolated from the Sargasso Sea
MIERKFRLNMEKGAYLFSTNKKKYLDFVQGIAVNSLGHAHPKLVSTIRNQSQKLWHVSNAFQIPEGEKLAQKLCKKTFADYVIFQNSGAEATEASVKVARRYFYSIGKPNKNRILCIKNSFHGRTLAAIFASGSKKMTEGFGPKIAGFDHFKFGDHESLKNKINKNTAAIMIETIMGEGGIKVIPDWCLRELRKLCDKKKILLILDEVQCGVARSGDFFAFEKSKVKPDIVPIAKGIGGGFPIGAVLMNKKVATGIIPGSHGSTFGGNPLAMSVGNTVMDIVSNKKFLKNVKNLSRYFFLNLNKIKHKYPN

SEQ ID NO: 124893 - protein, 260 aa, Unknown
  Bacterial polypetide isolated from the Sargasso Sea
ATEAAIKVARRYFFSIGKPNKNRILCIKNSFHGRTIAAIFASGSKKMTEGFGPKVPGFDHFTFGDHKSLKKKINKNTAAIMIETIGGESGIKVIPDFCLKELRKLCNKKKILLILDEVQCGISRSGDFLAFERSKIKPDIVPIAKGIGGGFPIGAVLMNKKVASGMTPGTHGSTFGGNPLAMAVGNTVMDIVSKKNFLNNVKKLSKYFILKLNRIKDKYPNLIKEIRGRGFLIGIQLYKDQTVFINKLINNKLLTIRAAE

SEQ ID NO: 124894 - protein, 213 aa, Unknown
  Bacterial polypetide isolated from the Sargasso Sea
MGILEVYNPLDIEIDHGDGVYLYSTDGTRYLDFTSGIGVTSLGHSHPSLVNALKDQGDKLWHCSNLFRINGQELVAKRIVKNSFASKVFFCNSGAESVEAGIKVVRKYFNSKGSDKYKIICAKNSFHGRTYAAISTSGKSKLTDGFFPILEGFEQVEFNDIKDLKKKVDKKTAAIMIETVQGEGGIIPANKQYLKEVQKIAKDNELLLFFDEV

SEQ ID NO: 124895 - protein, 270 aa, Unknown
  Bacterial polypetide isolated from the Sargasso Sea
TTNEGKESIILAAESSFHGRTLAALSATGQPKYQKGFEPLIKGFKFFEFNNFDSVKKLFIECENNDQKVSGVLVEPIQGEGGVIPGSKIFFKSLRDICDKYNSLLILDEVQSGVGRTGKMWGYENLGIEPDGFTLAKGLGGGHAIGALLVKEKANIFSPGDHASTFGGNPFACKAALTVIDEINRRNLINNVYLRGEQLSAGFEELSKKFPNIIRGKRGLGLIQGLVINDDYADAKKITLKAFDKGLLVVPAGGNVVRIVPPLVISRKEI

SEQ ID NO: 124896 - protein, 248 aa, Unknown
  Bacterial polypetide isolated from the Sargasso Sea
MSYLAKNYNRKKIAFKYGKGSYLYSTDGKKYLDLISGIAVNSLGHAHPKLVKTIRDQSKKLWHVSNAFQIPEGEKLAKKLCQKTFADYVIFQNSGAEATEASIKVARRYFYSIGKPNKTRILCIKNSFHGRTLATIFASGSKKMTEGFGYVGGFDHFIFGDHKSLKKKITKNTAAIMVETVLGEGGIKVIPDWCLKELRKLCDKKKILLILDEVQCGIGRSGNFFAFEKSKVKPDIVPIAKGIGGGFP

SEQ ID NO: 124897 - protein, 219 aa, Unknown
  Bacterial polypetide isolated from the Sargasso Sea
MSKNLTYIMPTYGDRNLEFIEGQGCYLTSLDNNKYLDFGSGIAVNSLGHCHPRLVKALQLQSSKLWHTSNLYHHSTQEKYAKLLCLNSFAEKIFFTNSGVESIEAGLKVIKSYHHYHNNIDQKNIITFEGAFHGRTFAALSAQQNEKYSKGFEPLLSGFIKIPFNDIEAVKKNVDKNTAAIMIEPIQGEGGIRPANLKFLQDIKKICEKNNLLLFLDEV

SEQ ID NO: 124898 - protein, 198 aa, Unknown
  Bacterial polypetide isolated from the Sargasso Sea
IPDWCLKELRELCNKKKILLILMKVQCGIGRSGDFFAFEKSKVKPDIVPIAKGIGGGFPIGAVLMNKKVASSMTPGTHGSTFGGNPLAMSVGNAVMDIISKKKFLNNIKSLSKYFLFKLNKIQQRYPSVIKQIRGKGFLIGIQLYKDQTEFIKKLMDNHLLTIRAAENVVRLLPPLNVKKNEIDIAIKIIEKVCSQIK

SEQ ID NO: 124899 - protein, 246 aa, Unknown
  Bacterial polypetide isolated from the Sargasso Sea
MNISEKVSEKYSKAEDKSKNIYQEKNSEESELNTNNLPNSSELLETASQVFVPTYSPNLILSKGLGAKVWDKDENEYIDLGSGISVNNSGHIDKELLAVLTEQAGKLWHTTNLYLNEPSIRLAEELVKATFADRVFFCNSGAEANEAAIKIARKFSSLNNSTEKREILTFEGSFHGRTLTTISATAQPKYQQGFEPLTEGFRYCPFNDFNAAEKMIGPQTCAVLIEPIQGEGGVKPAESGFLYHCE

SEQ ID NO: 124900 - protein, 259 aa, Unknown
  Bacterial polypetide isolated from the Sargasso Sea
MSALAKNYSRRKISFKKGKGSFLYSTNGKKYLDFVQGIAVNSLGHANPYLIKAINKQSKKVWHVSNAFNIPEGERLAKRLTQKTFADAVIFQNSGAEATEVAIKVARRYFYSIGKPKKNRILCIKNSFHGRTIAAINASGSKKMTEGFGPKVNGFDHFKFGDHKGLKKMITNKTAAVMVETIMGEGGIKVIPDWCLRELRKICNKKKILLILDEVQCGIGRSGKFFAFEHAKVKPDIVPIAKGIGGGFPIGAVLMTKKV

SEQ ID NO: 124901 - protein, 317 aa, Unknown
  Bacterial polypetide isolated from the Sargasso Sea
KQSKKLWHVSNAFTIPEGERLAKRLTKKTFADFVIFQNSGAEATEAAVKVARRYFYSIGKPNKNRILCIKNSFHGRTTSMIYASGSKKMTEGFGPRVNGFDHFKFGDHNGLKKSITRKTAAIMVEPIMGEGGIKTIPDWCLRDLRKICNKKKILLILDEVQCGIGRSGRFFAFEHAKVKPDIVPIAKGIGGGFPIGAVLMTKKAASGINHPGTHGSTFGGNPLAMSVGNAVLDQIFKKGFLKNVQAVSKYFHLELKKIQKKYPNIIKEIRGVGLLIGIQLFKDQTKFIQKLMDKKLLTIKAAENVIRVLPPINGKKK

SEQ ID NO: 124902 - protein, 252 aa, Unknown
  Bacterial polypetide isolated from the Sargasso Sea
MSKLVKNYNRRKISFKYGKGSFLYSTDGKKYLDFVQGIAVNSLGHAHPQLVKTINQQSKKLWHVSNAFVIPEGEKLAQKLTKKTFADFVMFQNSGTEATEGAIKVARKYFHSIGKPKKNRILCVKNSFHGRTIAAIYASGSKKMTEGFGPKVSGFDHFLFGNHKSLKKKINKNTAAIMVETIMGEGGIKVIPDWCLRELRKICNKKNILLILDEVQCGIGRSGDFFAFEKSKVKPDIVPIAKGIGGGFPIGA

SEQ ID NO: 124903 - protein, 280 aa, Unknown
  Bacterial polypetide isolated from the Sargasso Sea
STKGKKYLDFVQGIAVNSLGHANPYLGKAIKKQAKKIWHVSNAFIIPEGEKLAKRLTKKTFADYVMFQNSGVEATEAAIKAARRYFYSIGKPQKNRILCIKNSFHGRTLAAIFASGSKKMTEGFGPKVPGFDHFNFGDHKGLKKAITKKTAAIMVETVMGESGIKVIPDWCLKGLRKICNQRKILLILDEVQCGIGRSGKFFAFEYAKIKPDIVPIAKGIGGGFPVGAVLMSKKVASSMVPGSHGSTFGGNPLAMSVGNAVLDQIFKKGFLKNVQNSSKY

SEQ ID NO: 124904 - protein, 209 aa, Unknown
  Bacterial polypetide isolated from the Sargasso Sea
MHSSILSTYKRSNFSFVKGKGSYLTAKNGKKYLDFASGIAVNSLGHCNAELIKALYKQSKKIWHVSNAFQISEQEELAKKLVKLTFADKVFFCNSGAESVETAIKTARAYHQIKKKTKKFKIITIKGSFHGRTLAAISASGQKKLIEGFDPLVDGFVQVEFGDHKLIEKVIDKQTAAIMVEPILGEGGIKVIPNVCLEGLRKLCNKKKI

SEQ ID NO: 124905 - protein, 297 aa, Unknown
  Bacterial polypetide isolated from the Sargasso Sea
AGELDCGHSCCDQVFFCNSGAEANEAAIKLARKYGHSRRGINQPLILTARASFHGRTLAAVTATGQPKYHRGFEPLPDGFAYFDYNDISSLETALQQHSDRAVAVLLEPLQGEGGILPGDRDFFARLRQLCDERQLLLISDEVQVGMGRSGSLWGYEQLGIEPDAFTTAKGLGGGFPIGALAVTNEAAVFEPGDHASTFGGNPLACRAALTVATELQRRHLLENVQQRGEQLQQGLQQRVEQWPQLLAGQRGWGLIRGLLLRDGSISAVDLVKAAMAEGLLLVPAGSQVVRFVPPLV

SEQ ID NO: 124906 - protein, 269 aa, Unknown
  Bacterial polypetide isolated from the Sargasso Sea
RRYFFSIGKPYKNRILCIKNSFHGRTIAAIYASGSKKMTEGFLPKVPGFDHIEFKNSKPRFPNIRKKIKKNTAAIMIETVMGEGGIKVIPDKCLKYLRKICNEKKILLILDEVQCGIGRTGKFFAFEHAKIKPDITPIAKGIGGGFPIGAVLMTNKVAKCMIPGTHGSTFGGNPLAMSVGNSVLDQILKKNFLTNVTKLSKYFLNGLNKIKNKYPNVIKEIRGKGFLIGIQLQSDQTKFIKSLEKNYLLTIRAAENVIRILPPIKCQKN

SEQ ID NO: 124907 - protein, 262 aa, Unknown
  Bacterial polypetide isolated from the Sargasso Sea
MSFLAKNYNRKNISFKYGKGSYLFSTNGKKYLDFVQGIAVNSLGHAHPKLVKTIRDQSKKLWHVSNAFQIPEGEKLAKKLCQKTFADYVMFQNSGAEATEAAIKAARRYFYSIGKPKKNRILCIRNSFHGRTLAAIFASGSKKMTQGFGPKVPGFDHFVFGNHISLKKKITKNTAAIMVEPIMGEGGIRVIPDFCLRELRKLCNQKKILLILDEVQCGISRSGEFFAFEKSKIFADIVPIAKGLAGGFPIGAVLMNKKVAGR

SEQ ID NO: 124908 - protein, 268 aa, Unknown
  Bacterial polypetide isolated from the Sargasso Sea
ILCVKNSFHGRTLAAIYASGSKKMTEGFGPKIAGFDHFRFGDHESLKKKITKKTAAIMIEPIMGEGGIKVIPDWCLKELRKLCNRKKILLILDEVQCGISRTGSFLSFEKAKIKPDIVPIAKGIGGGFPLGAVLMNKKAASGMIPGTHGSTFGGNPLAMAVGNTVMDIVSSKKFLKNIENLSKYFLFELKNIQELYPRLIKSIRGRGFLIGIQLHRDQTNFIKKLTENRLLTIRASENVIRVLPPLNVKKNELDLCLKIINKVCKELN

SEQ ID NO: 124909 - protein, 209 aa, Unknown
  Bacterial polypetide isolated from the Sargasso Sea
ETILGEGGIKVIPDFCLKHLRRLCNKKKILLILDEVQCGIGRTGKFFAFDHAKIKPDIVPIAKGIGGGFPIGACLVNKKVASGMTPGSHGTTFGGNPLAMSVGNAVLDVILKKGFLKNVRKNSKYFHNKLNNLKKDYPKIIKEVRGLGFLIGLQLHFDQTKFIQKLMDNKMLTIKASENVVRILPPLNVKKQEIDLAIAILKKVCQNYK

SEQ ID NO: 124910 - protein, 214 aa, Unknown
  Bacterial polypetide isolated from the Sargasso Sea
DEIQCGMGRTGKLFCYQWENYPEPEISVNTLQYEKINKTNITESNLVPDIVTMAKALGGGLPLGAMLCSEEVALSFKPGDHGTTFGGNPIVTAVAEASFRKINTPELMQQVQNNGTLIRKKLDLLNDEIHMFEKIRGRGLMLGAVLSKAWKGKAPTIVNACQKFGVLVLTAGPDVLRLLPPLNISDEELETGMHRICKALKNLHEVELSSTSQR

SEQ ID NO: 124911 - protein, 258 aa, Unknown
  Bacterial polypetide isolated from the Sargasso Sea
MSYLAKNYNRKKISFKYGKGSYLYSIDKKKYLDFVQGIAVNSLGHAHPKLVKTINYQSKKLWHVSNAFQIPEGEKLAKKLCKKTFADYVMFQNSGAEATEAAIKVARRYFYSIGKPNKTRILCVKNSFHGRTLATIFASGSKKMTEGFGYVGGFDHFVFGDHKSLKKKINKNTAAIMLETIKGEGGIKTIPDYCLKELRKLCDKKKILLILDEVQCGIGRTGDFFAFEKSKVKPDIVPIAKGIGGGFPIGAVLMNKKS

SEQ ID NO: 124912 - protein, 249 aa, Unknown
  Bacterial polypetide isolated from the Sargasso Sea
ASGSKKMTEGFGPKVTGFDHFEFGNHKSLKEKIFKNTAAIMIETIMGEGGIKEIPDWCLKELRKICDKKNILLILDEVQCGIGRSGDFFAFEKSKIKPDIVPIAKGIGGGFPIGAVLMNKKVASGMTAGTHGSTFGGNPLAMSVGNSVIDIISNKKFLNKVKKISKYFLLNLNKIKNEYPNIIKEIRGRGLLIGIQLKTDQTKFINKLMDNNLLTIRAAENVVRVLPPLNVKKNEINLSLKKIKKVFQN

SEQ ID NO: 124913 - protein, 245 aa, Unknown
  Bacterial polypetide isolated from the Sargasso Sea
MSKNLTYIMPTYGDRNLEFKEGQGCYLTSIDNNKYLDFGSGIAVNSLGHCHPRLVKALQFQSSKLWHISNLYYNSTQEEYAKLLCLNSFAEKIFFTNSGVESIEAGIKVIKSYHHYHNNVDQKNIITFEGAFHGRTFAALSAQQNEKYSKGFEPLLSGFIKIPFNDIEAVKKNVNKNTAAIMIEPIQGEGGIRPANLKFLQGIKKICESNNLLLFLDEVQSGFGRSGKLFAHEWADLEPRCCSYR

SEQ ID NO: 124914 - protein, 258 aa, Unknown
  Bacterial polypetide isolated from the Sargasso Sea
MAEHIQVTRALFDEVMVPNYAPAPVIPVRGQGSRVWDQAGREYVDFAGGIAVNALGHCHPALVSALKEQADKLWHLSNVMTNEPALRLAQKLVDSTFAEKVYFANSGAEANEAALKLARRWALDKFGAQKQQIISFGKSFHGRTFFTVTVGGQAAYSDGFGPKPGGIDHAEYNNLESLKALMSDNTCAVILEPLQGEGGIIPGDLAFLQGVRDLCNQFNALMIYDEVQSGVGRTGKLYAYMHSNVVPDILTTAKSLGG

SEQ ID NO: 124915 - protein, 188 aa, Unknown
  Bacterial polypetide isolated from the Sargasso Sea
FRRLWTKPADIIHVPFNDLHAVKAVMDDHTCAVVIEPIQGEGGVTAATPAFLQGLRELCDQHQALLVFDEVQSGMGRTGSLFAYMHYGVTPDILTSAKALGGGFPVSAVLTTQEIASAFHVGSHGSTYGGNPLACAVAGAAFDIINTPEVLEGIQAKRQAFVQHLQKIDQQFDIFSDIRGMGLLIGAE

SEQ ID NO: 124916 - protein, 267 aa, Unknown
  Bacterial polypetide isolated from the Sargasso Sea
HANDHLIRSINKQSKKLWHVSNVFTIPEQERLAKRLAQKTFADYVTFQNSGAEATEAAIKFARRYFYSKGKPKKNRVLCINNSFHGRTIAAIFASNSKKAIEGFKPKVDGFDHFNFGDHKGLEKAITSRTAAIMVETIMGEGGIKVIPDFCLKGLRKLCNKKKILLILDEVQCGVGRSGKFFAFEYAKIKPDIVPIAKGIGGGFPIGAVLVNKKVASGMKPGTHGSTFGGNPLAMSAGNAVMDIMFKKGFLNNVSKNGKYFISQLDK

SEQ ID NO: 124917 - protein, 263 aa, Unknown
  Bacterial polypetide isolated from the Sargasso Sea
KKYLDFVSGIAVNSLGHAHPKLAKKIRDQSKKLWHVSNAFQIPEGEKLAKKLCQKTFADYVIFQNSGAEATEAAIKVARRYFYSIGKPNKTRILCIRNSFHGRTLATIFASGSNKMTEGFGYVGGFDHFIFGDHKSLKKKITKKTAAIMVETVLGEGGIKVIPDYCLKELRKLCDKKKILLILDEVQCGVGRSGDFFAFEKSKVKPDIVPIAKGIGGGFPIGAVLMNKKVASGMTPGTHGSTFGGNPLAMAVGNTVMDIVSTK

SEQ ID NO: 124918 - protein, 238 aa, Unknown
  Bacterial polypetide isolated from the Sargasso Sea
LVEQTFADKVFFTNSGAESIECAIKMARRYFFSRGEKSKNQIITFRGSFHGRTIGTISAAGSRKMLEGFGPKASGFNSVKIGKLKDLEQRITQRTCAILIEPILGEGGIIPIPCKFLKEMGAICKKNDILLIFDEVQTGIGRTGYFLAHEKCYIKPDIVALAKGLGGGFPIGACLTTNKIAKGMTPGTHGSTYGGNPLACAVATAIVKEIIKPEFLENVRRKGNFFEMGLKKLVKKYS

SEQ ID NO: 124919 - protein, 272 aa, Unknown
  Bacterial polypetide isolated from the Sargasso Sea
IPEGEKLAKRLTQKTFADYVIFQNSGVEATEAAIKAARRYFYSIGKPQKNRILCIRNSFHGRTLAAIFASGSKKMTEGFGPKVPGFDHFNFADHKGLKKAITKRTAAIMIETVMGESGIKVIPDWCLKDLRKICNKKKVLLILDEVQCGIGRSGKFFAFEYAKIKPDIVPIAKGIGGGFPIGAVLMNKKVASSMTPGSHGSTFGGNPLAMSVGNAVLDQIFKKGFLKNVQKSSEHFLSELYKIKEDYPEIIKEVRGIGLLLGLQLYTDQSKF

SEQ ID NO: 124920 - protein, 192 aa, Unknown
  Bacterial polypetide isolated from the Sargasso Sea
ELAIKIARKYFHSKGKPTKNRILCINNSFHGRTLATIFASNSKKMTEGFGPKVSGFDHFTFGNHKDLEKKITKKTAAIMIETIMGEGGIKVIPDFCLKGLRKLCNKKKILLILDEVQCGIGRSGKFFAFEYANIKPDIVPIAKGIGGGFPIGACLVNKKVASTMKPGSHGTTFGGNPLAMSVGNAVLDVIFK

SEQ ID NO: 124921 - protein, 291 aa, Unknown
  Bacterial polypetide isolated from the Sargasso Sea
YATNGKRYLDFVQGIAVNSLGHANPNLIRAINKQAKKVWHVSNAFIIPEGEKLAKRLTQKTFAEYVIFQNSGTEATEAAIKVARRYFYSKGKPHKNRILCVKNSFHGRTIAAIFASGSKKMTEGFGPKVSGFDHFRFGDHKSLKKSITNKTAAIMVEPIMGEGGIKVIPDWCLRELRKICNKKKILLILDEVQCGIGRTGDFFAFENSKVKPDIVPIAKGIGGGFPIGAVLMKKNVALSMSPGSHGSTFGGNPLAMSVGNAVLDQILKKGFINNLKKISKYFYQELNKIKK

SEQ ID NO: 124922 - protein, 210 aa, Unknown
  Bacterial polypetide isolated from the Sargasso Sea
MTNVLPTYPRSNLEFTHGLGSYLYTKSGEKFLDFGTGIAVNSLGYSNPYLNDKLKEQIDKLWHLSNVYQIPEQEKLAKRLCDNSFADYVFFCNSGTEAIEASIKIARRYFHDTKNSSNKTEILSFSGSFHGRTIGALAAGGPDKLSSFNTTVNDFKFLEFGDHEQLQNSISEKTAAVIIEPIQGEGGVREVPKQCLEGLRKICDENKCLL

SEQ ID NO: 124923 - protein, 241 aa, Unknown
  Bacterial polypetide isolated from the Sargasso Sea
AAIKVARRYFYSIGKPKKNRIICIKNSFHGRTIAAISASGSRKMTEGFGPKVAGFDHFKFGDHKKLKKLITNRTAAILVETILGEGGIKVIPNWCLKELRKICDQRKILLILDEIQCGIGRSGKFFAFEHAKIKPDIVPIAKGIGGGFPIGAVLMTKKVSKGMIPGTHGSTFGGNPLAMSVGNAVLDQMYKKNFLKNVNKLSKYFLIELNKIKNEYPKLIKEIRGLGLLIGIQLYEDQTRL

SEQ ID NO: 124924 - protein, 306 aa, Unknown
  Bacterial polypetide isolated from the Sargasso Sea
EGEKLAKRLSKYTFAEKIFFQNSGAEATEAAIKVARKYFFSIGKKEKNRIICIKNSFHGRTIAAISASGSKKMTNGFGPNAPGFDHFEFGDHKKLKKLINKRTAAIMVEPIMGEGGIKVIPEWCLKELRNICNKKKILLILDEVQCGIGRTGKFFAFEHANVKPDIVPIAKGIGGGFPIGAVLMTNKVAKYISPGTHGSTFGGNPLAMSVGNAVLDQLLKKDFLKNVEKLSKYFLNELNKIKNEYPKIIKEIRGKGFLIGIQLNFDQTKFIKSLEKNYLLTIRAAENVIRVLPPLNVKKNEIDLAL

SEQ ID NO: 124925 - protein, 296 aa, Unknown
  Bacterial polypetide isolated from the Sargasso Sea
MLIAWGHSNPKLIQTINNQSKKLWHVSNAFQIPEGEKLAKKLCRKTFADYVMFQNSGAEATEAAIKVARRYFYSIGKPHKNRILCVKNSFHGRTIAAIFASGSKKMTEGFGPKVSGFDHFVFGNHESLRKKITKNTAAIMIESIMGEGGIKVIPDFCLRELRKLCNKKKILLIADSVQDGVGRSGDFFAFEKSKIKPDIVPIAKGIGGGFPIGAVLMTKKVAKAMTPGTHGSTFGGNPLAMAVGNTIMDIVSNKKFLNNVKKVSKYFFSKLNQLKDKHPNIIKDIRGRGLLIGIQL

SEQ ID NO: 124926 - protein, 265 aa, Unknown
  Bacterial polypetide isolated from the Sargasso Sea
IKNSFHGRTLAAIHASGSKKMIEGFGPRTPGFDHFKFGNHESLKKFITKKTAAIMIEPVLGEGGIKVIPKWCLKGLRKICDQKKILLICDEVQCGIGRSGKFFAFEYSGIKPDIVPIAKGIGGGFPLGAVLMNKKVAIGMTPGTHGSTFGGNPLAMEIGNAVLDKIMNKKFLKNVQKTSKYFLNELNKIKIEYPGIIKEIRGIGLLIGLQLHKDQNKFIKKLEKNKLLTIRAAENVIRILPPLNVKKLEIDMSIKIIKKVCKEYK

SEQ ID NO: 124927 - protein, 307 aa, Unknown
  Bacterial polypetide isolated from the Sargasso Sea
SKIPFADHVIFMNSGAEATEASIKIARKYFYEKGQINKNRIITFKGAFHGRTLASLFAANNPDHIKGFEPKVDGFDQVDFGDHDSLKKAINKNTAAIMVETILGEGGIKVIPPECLIGLRKICDENDLLLILDEVQCGIGRTGKFFAFEWSGIEPDIVPIAKGIGGGFPIGACLVNKKAGSCMKPGSHGSTFGGNPLAMSIGNAVLDIIFEKNFLDNVISQGNYFEEQLLKIKKKFPHVVEGVRGKGLLKGIKLKVENTKFINQLFEQKLLVVKASENVVRLLPPLIVNKNEIDEAISIIDKVCEIF

SEQ ID NO: 124928 - protein, 297 aa, Unknown
  Bacterial polypetide isolated from the Sargasso Sea
LAKKLTKRTFADAVIFQNSGAEATEAAIKVARRYFYSIGQSKKNRILCVKNSFHGRTIAAINASGSKKMVEGFGPKVGGFDHFKFGNHKELKRKITSKTAAIMIEPIMGEGGIKVIPAWCLKELRKICNKKKILLILDEVQCGIGRSGKFFSYEYAKIKPDIVPIAKGIGGGFPIGAVLMTKKVSKAMVPGTHGSTFGGNPLAMSVGNAVMDEVFKRGFLSKVKSNSKYFISELNKIKNKFPNIIKEIRGIGLILGIQLHQDQTIFIQSLTKNKLLTIRAAENVIRILPPLNVNKKE

SEQ ID NO: 124929 - protein, 201 aa, Unknown
  Bacterial polypetide isolated from the Sargasso Sea
GIKVIPDFCLKGLRKLCNKKKILLILDEVQCGIGRSGKFFAFEYAKIKPDIVPIAKGIGGGFPIGAVLVNKKVASGMKPGTHGSTFGGNPLAMSAGNAVMDVMFKKGFLNNVSKNGKYFLNQLDKIKNKYPKVVKEVRGKGLLIGLCLHVNQAKFIQKLLDNNLLTVRAAENVVRLLPPLNVTKSEINLGLKIIEKVCKKF

SEQ ID NO: 124930 - protein, 284 aa, Unknown
  Bacterial polypetide isolated from the Sargasso Sea
MPTYGTKKLKFLKGKGCYLYNNNNEKYLDFASGIAVNSLGHCHPRLVSALYNQSKQLWHVSNLYIIKKQEQFAKLLCKSSFADKVFFTNSGTESIECGIKIIRGYHSYHNTGRTNIITFDGSFHGRTFGALSAQKNKKYSKGFGPLLSGFKKVEFNNIKKLKAVIDNKTAGILIEPVQGEGGIRPADLQFLKFIKKICDENDILLFLDEVQCGFGRSGKLFSHEWAKIKPDIMAVAKGIGSGFPLGACLSTSKACVSMTKGSHGSTYGGNPLAMSVGLEVLKIV

SEQ ID NO: 124931 - protein, 213 aa, Unknown
  Bacterial polypetide isolated from the Sargasso Sea
MIEPIMGEGGIKVIPAWCLKELRQICNKKKILLILDEVQCGIGRSGKFFSYEYANIKPDIVPIAKGIGGGFPIGAVLMTKKVSKAMVPGTHGSTFGGNPLAMSVGNAVMDEIFKKGFLSKVKSNSKYFISELNKIKNKFPNIIKEIRGTGLILGIQLHHDQTKFIESLMKNKLLTIRAAENVIRILPPLNVNKNEINIALKIINKVCDKYKKK

SEQ ID NO: 124932 - protein, 253 aa, Unknown
  Bacterial polypetide isolated from the Sargasso Sea
NASGSKKMVEGFGPKVGGFDHFKFGNHKELKRKITSKTAAIMIEPIMGEGGIKVIPSWCLRELRKICNHKKILLILDEVQCGIGRSGKFFSYEYANIKPDIVPIAKGIGGGFPIGAVLMTKKVSKAMVPGTHGSTFGGNPLAMSVGNAVMDEIFKKGFLSKVKSNSKYFISELNKIKNKFPNIIKEIRGTGLILGIQLHHDQTKFIQNLMKNKLLTIRAAENVIRILPPLNVNKKEINIALKIINKVCDGYKK

SEQ ID NO: 124933 - protein, 265 aa, Unknown
  Bacterial polypetide isolated from the Sargasso Sea
KIAKKLCKKTFADYVMFQNSGAEATEAAVKVARRYFYSNGKPNKNRILCIKNSFHGRTLAAIFASGSKKMTEGFGPKVAGFDHFIFGDHNSLKKKITKNTAAIMVETIMGEGGIKVIPDWCLKELRAICDKKKILLILDEVQCGIGRSGDFFAFEKSKVKPDIVPIAKGIGGGFPIGAVLMNKKVASSMTPGTHGSTFGGNPLAMSVGNVVMDIISNKKFLINVKNLSKYFLFKLKKIQEKYPNVIKQIRGKGYLIGIQLYKDQN

SEQ ID NO: 124934 - protein, 211 aa, Unknown
  Bacterial polypetide isolated from the Sargasso Sea
MLETIMGEGGIKVVPDWCLRELRKLCNRKGILLILDEVQCGIGRTGNFFAYEKSKVKPDIVPIAKGIGGGFPIGAVLMNKKVASGMTPGSHGSTFGGNPLAMKIGSTVLDIISKKKFLANVRKNSEYFHQKLKIIKAKYPEIIKDIRGRGFLIGLQLFTDQTYFIEKLMQNKLLTIKAAENVIRILPPLNVKKKEIDQALKIINKVCLEHR

SEQ ID NO: 124935 - protein, 231 aa, Unknown
  Bacterial polypetide isolated from the Sargasso Sea
DYIFFQNSGTEATEAAIKVARRYFYSIGKPNKNRILCVKNSFHGRTIAAIFASGSKKMTEGFGPKVGGFDHFKFGDHQSLKKAITNKTAAIMVEPIMGEGGIKVIPNWCLKELRKICNKKKILLILDEVQCGIGRTGNFFAFENSKVKPDIVPIAKGIGGGFPIGAVLMTKKVASSMTPGSHGSTFGGNPLAMSVGNAVLDQIFKKGFLNNLKKVSKYFFKELDKIKKDYP

SEQ ID NO: 124936 - protein, 274 aa, Unknown
  Bacterial polypetide isolated from the Sargasso Sea
FRFRSGIAVNCLGHANDYLIRSINRQSKKLWHVSNVFTIPEQERLAKRLAQKTFADYVTFQNSGAEATEAAIKFARRYFYSKGQPRKNRVLCINNSFHGRTIAAIFASNSKKAIEGFKPKVDGFDHFNFGDHKGLEKAITSRTAAIMVETIMGEGGIKVIPDFCLKGLRKLCNKKKILLILDEVQCGIGRCGKFFAFEYAKIKPDIVPIAKGIGGGFPIGAVLVNKKVASGMKPGTHGSTFGGNPLAMSAGNAVMDIMFKKGFLNNVSKNGKYF

SEQ ID NO: 124937 - protein, 206 aa, Unknown
  Bacterial polypetide isolated from the Sargasso Sea
MGESGIKVIPEWCLKELRKLCNKKKILLILDEVQCGIGRSGKFFAFEHAKIKPDIVPIAKGIGGGFPIGAVLMNKKVASAMTPGSHGSTFGGNPLAMSVGNAVLDQIFKKGFLKNVQKSSKYFINELNNIKEDYPNIIKEVRGIGLLLGIQLYGDQNKFIKKLEENKLLTMKAGENVVRILPPLNVKKKEIDIAIKIIRKVCDYLN

SEQ ID NO: 124938 - protein, 184 aa, Unknown
  Bacterial polypetide isolated from the Sargasso Sea
MSTYGVRKLEFIKGKGVYLFSSDNKRYLDFGSGIAVNSLGHCHPLLVKTLRKQSLKLWHTSNLYFNKSQEEYAKLLCKYSFAEKVFFTNSGSESIECGIKLIRSYNHYFKKFWKKNIITFKGSFHGRTMSAISAQKNKKYSNDFKPLLPGFVQVPFDNINALEKKIDEKTAAIMVETIQGEGGI

SEQ ID NO: 124939 - protein, 288 aa, Unknown
  Bacterial polypetide isolated from the Sargasso Sea
EATDGVIKIIRKYHYENGNKKKNKIIVFNNAFHGRTLTGILAGSNESHREGFLPHAKSTGGFVRVNYGSIKAIDKAIDDNIAGIFFEPIQGEGGINVADVNYLKEVRRICNKYNILLALDEVQCGIGRTGKLFAYQWSNIKPDLLTSAKGLGGGFPIGAVLMTNKVAKKMNFGSHGSTFGGNQLACSVASAVIREITKKNFLKKVQEYGFFLKEKLEVFKVNYPMIISSIKGKGLLSGIELKIPTDTFCKLAREKKLLLVPAANNVVRILPPLNVKKNEIKMAISVIE

SEQ ID NO: 124940 - protein, 265 aa, Unknown
  Bacterial polypetide isolated from the Sargasso Sea
MPTYGNKTLEFVKGSGCYLYTSQNKKYLDFASGIAVNSLGHCHPKLIEALNKQSKQLWHVSNLYKIKKQEQFAKLLCKNSFADKVFFTNSGTESIECGIKIIRGYHSYHKTKKTEIITFDGAFHGRTYGALSAQKNKKYSSGFGPMLKGFKQIEFNNEKKLISAINKKTAGIMIEPIQGEGGIRPANLNFLKLLRKICLENNILLFFDEVQCGFGRSGKLFSHEWAKIKPDIMSVAKGIGSGFPLGACMSTNKACVAMTKGSHGS

SEQ ID NO: 124941 - protein, 274 aa, Unknown
  Bacterial polypetide isolated from the Sargasso Sea
MWHVSNAFKIPEGEKLAKKLVDRTFADSVIFQNSGAEATETAIKIARRYFYSIGKPYKTRIVCIKNSFHGRTLAAIHASGSKKMVEGFGPKFPGFDHFRFGDHKKLKSLINKNTAAIMIETVMGEGGIKVIPSWCIKELRELCDKKNILLILDEVQCGIGRSGKFFAFEYAKVKPDIVPIAKGIGGGFPIGAVLMTNKISKAMTPGTHGSTFGGNPLAMTVGNAVIDQINNKLLNNVNNMSKYFIKNLENLKRKYPNIIKEVRGLGLLIGFTTF

SEQ ID NO: 124942 - protein, 255 aa, Unknown
  Bacterial polypetide isolated from the Sargasso Sea
LLTKNTFAEKVFFTNSGAESVECSIKIARRFFFSKGQSNRNRIISFEGSFHGRTTGTISAAGSRKLLEGFGPRLPGFDLVKRFSLESVEKKISKRTCAILVEPILGEGGIVTLSCSFLKGLKDLCEKYNLLLIFDEVQSGIGRSGHFLAHESCEVTPDIVALAKGLGNGFPIGACLATKRVADCMVPGTHGSTYGGNPLGCAVALETTKHILKPRFLSEIRKKGDFFKEKLNSLIDIFPDQILEVRGRGLMLGLK

SEQ ID NO: 124943 - protein, 254 aa, Unknown
  Bacterial polypetide isolated from the Sargasso Sea
INASGSKKMVEGFGPKVDGFDHFKFGDHKELKRKITSKTAAIMIEPIMGEGGIKVIPSWCLKELRKICNQKKILLILDEVQCGIGRSGKFFSYEYANIKPDIVPIAKGIGGGFPIGAVLMTKKVSKAMVPGTHGSTFGGNPLAMSVGNAVMDEIFKKGFLSKVKINSKYFISELNKIKSKFPNIIKEIRGIGLILGIQLHHDQAKFIQSLMKNKLLTIRAAENVIRILPPLNVNKNEINIALKIINKVCERYKN

SEQ ID NO: 124944 - protein, 183 aa, Unknown
  Bacterial polypetide isolated from the Sargasso Sea
MTSKIMPTYNRKPVTFTRGEGIYLYDSEGKQYLDALCGLAVTSLGHSHPLIAETVSKQSAKLIHTSNAFHIESQEKLAKRLCQLTGMENVFFCNSGAESVEAAIKIARKYGHDKDYKNPKIIVMSNSFHGRTMGAMSATSSTLSHDAFGPILDGLIRVEFNKIEAIKNVLSNHDDVSAILLEP

SEQ ID NO: 124945 - protein, 291 aa, Unknown
  Bacterial polypetide isolated from the Sargasso Sea
LGNRGRKAVIPEIMPSYGRADIAFERGEGAHLFSTDGKRYLDFATGIAVNVLGHNHPRLVETLTEQGGKLWHVSNLYRVPEQEELARKLVGASFADNAFFCNSGAEAVEASIKIVRKYQSETGHPERYRIISFDSSFHGRTLSTIAAAKNAAHVAGFGPMPDGFDQVPFDNLNELRSAITEETAGIIVEPIQGEGGIRPSNAEFLRGLREACDEFGLLLIFDEVQTGIGRAGKLFAYENFGVEPDVMSLAKGLGGGFPVGACLASGKAAVGITPGTHGSTFGGNPLAMAVA

SEQ ID NO: 124946 - protein, 266 aa, Unknown
  Bacterial polypetide isolated from the Sargasso Sea
RRYFYSIGKPQKNRILCIKNSFHGRTIAAIYASGSKKMTEGFYPKVPGFDHIEFKNTKPRFPNIRKKIKKNTAAIMIETVMGEGGIKVIPDKCLKYLRKLCNEKKILLILDEVQCGIGRTGKFFAFEHANIKPDITPIAKGIGGGFPIGAVLMTNKVAKCMIPGTHGSTFGGNPLAMSVGNAVLDQILKKNFLKNVSKLSKYFLNELNKIRNEFPKIIKDIRGKGFLIGIQLQFDQSKFIKSLEKNKLLTIRAAENVIRVLPPTKR

SEQ ID NO: 124947 - protein, 277 aa, Unknown
  Bacterial polypetide isolated from the Sargasso Sea
KTFADYVMFQNSGAEATEAAIKVARRYFYSIGKPKKNRILCVKNSFHGRTIAAIYASGSKKMTEGFGPKVSGFDHFEFGNHSSLKKKISKNTAAIMIETIMGEGGIKVVPDWCLIELRKICDKKNILLILDEVQCGIGRSGDFFAFEKSKVKPDIVPIAKGIGGGFPIGAVLMNKKVASGMIGGTHGSTFGGNPLAMSVGNKVLDIIHNKEFLDNVKKISKYFLLNLNFIKEKYPNVINEIRGKGLLIGIQLKADQTKFIKKLMDNRLLTIRAAENV

SEQ ID NO: 124948 - protein, 279 aa, Unknown
  Bacterial polypetide isolated from the Sargasso Sea
LRISIPEGEKLAKKLCNKTFADYVMFQNSGTEATEAAVKVARRYFYSIGKPNKNRILCVKNSFHGRTLAAIFASGSKKMTEGFGPKIPGFDHFNFGNHSSLKKKINKNTAAIMVETIMGEGGIKVIPDWCLKELRHLCNKKNILLILDEVQCGIARSGDFFAFEKSKVKPDIVPIAKGIGGGFPIGAVLMNKKVASGMIAGSHGSTFGGNPLAMSVGNTVMDIVTKKSFLNNVKSLSKYFLESLNNIKSKHPKTIKEIRGKGLLIGIQLYKDPTKFIQK

SEQ ID NO: 124949 - protein, 214 aa, Unknown
  Bacterial polypetide isolated from the Sargasso Sea
DEIQCGMGRTGKFLCYQWENSPDSEQPAETPQNGNKKPLNINESNLMPDILTMAKALGGGLPFGAMLCTEEVAHSFKPGDHGTTFGGNPLVTAVAEASLRKINSPELMHLVQKKGKFIRIKLDLLNHEVSMFKTIRGRGMMLGAVLSKAWEGKANAIVQACQEYGVLVLTAGPDVLRLLPPLNILDEELETGLNRIGKALKKLHEVELSSSTQK

SEQ ID NO: 124950 - protein, 144 aa, Unknown
  Bacterial polypetide isolated from the Sargasso Sea
MAAGLDQITGLEDPIGRELARWSKTVAVMLEPIQGEGGVIPATREFMQALRALTKHHNLMLIVDEVQSGCGRAGTLFAYELSGIQPDVRTLAKGIGGGAPLGALLSKAEFAVFEAGDQGGTYNGNPLMTAVGYSVISQLVAPGF

SEQ ID NO: 124951 - protein, 206 aa, Unknown
  Bacterial polypetide isolated from the Sargasso Sea
RVPDGYLLGVRAAADEFGALVIADEVQAGIGRTGRLFSYEDSEIKPDIVALAKGLAGGFPIGAVITSKVVGDAMTPGTHGSTFGGNPLAMAAAQVVLEVLSEEGFLADVRARAVHLDDALQGLQGQFPTAIAECRGRGFLRGIRLDETIDLAAFVKTLRDDHLLCVPAAENTLRLLPPLTISKDEIDLAVAKIAKVLNDIPKHDSQ

SEQ ID NO: 124952 - protein, 307 aa, Unknown
  Bacterial polypetide isolated from the Sargasso Sea
DFNQYMMPTYKPAEFIPSKAKGSLLWDKENKKYIDFASGIAVSSLGHCHPTLNKALADQSKKIWHLSNLLTNEPALRLAKIFCKHTFAEKVFFANSGAEAVEGAIKTARKYAYLNHSKRKNEIVSFSDAFHGRTMMAIALNGSDRFIEGFGPMPKGIKHHPFNDENKLEKAITKKTAAVILELVQGEAGIIKAKRGFVQKIKRLCKQNKALLIIDEVQSGAGRTGTLFAYEQFDIKPDILCCAKGIGGGIPIGAILTSTQIAECMQLGSHGSTFGGNPLACAVAEQVMMMLSKKSLLNGVRKRKNYF

SEQ ID NO: 124953 - protein, 204 aa, Unknown
  Bacterial polypetide isolated from the Sargasso Sea
GGGIKKIPDWCLRGLKKLCNKKKILLILDEVQCGIGRTGDFFAFESSKVKPDIVPIAKGLGGGFPIGAVLMNKKVASGMTAGTHGSTFGGNPLAMKVGITALDIISKKSFLNKVKSNSKYFHIHLIKIKEKFPNIIKEVRGQGFLIGLQLYKDQTKFIKQLMDNKLLTIKAAENVVRILPPLNVKKTEIDKAIKIIKKVCSKYN

SEQ ID NO: 124954 - protein, 192 aa, Unknown
  Bacterial polypetide isolated from the Sargasso Sea
KELRALCNKKKILLILDEVQCGIGRSGDFFAFEKSKVKPDIVPIAKGIGGGFPIGAVLMNKKVASGMTPGTHGSTFGGNPLAMAVGNKVMDIISNKKFLNNVKSLSKYFLFRLNKVQEKYPNLIKQIRGRGFLIGIQLYKDQTVFIKKLMDNKLLTIRAAENVVRILPPLNVKKNEIDLAIKIIEKVCSQIK

SEQ ID NO: 124955 - protein, 271 aa, Unknown
  Bacterial polypetide isolated from the Sargasso Sea
RKNRVLCINNSFHGRTIAAIFASNSKKAIEGFKPKVDGFDHFNFGDHKGLEKAITSRTAAIMVETIMGEGGIKVIPDFCLKGLRKLCNKKKILLILDEVQCGIGRSGKFFAFEYAKIKPDIVPIAKGIGGGFPIGAVLVNKKVASGMKPGTHGSTFGGNPLAMSAGNAVMDVMFKKGFLNNVSKNGKYFINQLDKIKNKYPKVIKEVRGKGLLIGLCLKVNQAKFIQKLLDNNLLTVRAAENVVRLLPPLNVTKSEINLGLKIIEKVAKNF

SEQ ID NO: 124956 - protein, 288 aa, Unknown
  Bacterial polypetide isolated from the Sargasso Sea
DFVQGIAVNSLGHANPNLVKAINKQSKKLWHVSNSFIIPEGEELAKKLTNRTFADAVIFQNSGAEATEAAIKVARRYFYSIGKPKKNRILCIKNSFHGRTIAAINASGSKKMIEGFGPKVDGFDHFKFGNHKELKRKITSKTAAIMIEPIMGEGGIKVIPAWCLKELRQICNKKKILLILDEVQCGIGRSGKFFSYEYANIKPDIVPIAKGIGGGFPIGAVLMTKKVSKAMVPGTHGSTFGGNPLAMSVGNAVMDEVFKRGFLSKVKSNSKYFISELNKIKNKFPKYY

SEQ ID NO: 124957 - protein, 260 aa, Unknown
  Bacterial polypetide isolated from the Sargasso Sea
MSFLAKNYKRRNLSFNKGKGSFLYTNRGVKFLDFVQGIAVNSLGHTNPNLVKAINKQSKKLWHVSNSFIIPEGEELAKKLTKKTFADAVIFQNSGAEATEAAIKVARRYFYSIGKPEKNRILCIRNSFHGRTIATINASGSKKMIEGFGPKVAGFDHFKFGNHKELKRKISNKTAAIMIEPIMGEGGIKVIPTWCLKELRQICNKNKILLILDEVQCGIGRSGKFFSYEYANIKPDIVPIAKGIGGGFPIGAVLMTKKVL

SEQ ID NO: 124958 - protein, 267 aa, Unknown
  Bacterial polypetide isolated from the Sargasso Sea
MNKQAKKVWHVSNAFIIPEGERLAKRLTQKTFAGNILFQNSGTEATEAAIKVARRYFYSIGKPNKNRILCVKNSFHGRTIAAIFASGSKKMTEGFGPKVGGFDHFRFGDHQSLKKAITNKTAAIMVEPIMGEGGIKVIPDWCLKELRKICNKKKILLILDEVQCGIGRTGNFFAFENSKVKPDIVPIAKGIGGGFPIGAVLMTKKVASSMTPGSHGSTFGGNPLAMSVGNAVLDQIFKKGFLNNLKKVSKYFFKELEKLKINYPKYY

SEQ ID NO: 124959 - protein, 228 aa, Unknown
  Bacterial polypetide isolated from the Sargasso Sea
MSALAKNYNRRKIAFSRGKGSFLYSSKGQKYLDFVQGIAVNSLGHANSYLTKAINKQSKKVWHVSNAFIIPEGEKLAQRLKQKTFADYVIFQNSGAEATELAIKAARRYFYKIGKPQKNRILCIKNSFHGRTLATIFASGSKKMTEGFEPKVPGFDHFNFGDHKALKKSITKKTAAIMVETAMGESGIKVIPDWCLRELRKLCNKKKILLILDEVQCGIGRSGKIFCL

SEQ ID NO: 124960 - protein, 268 aa, Unknown
  Bacterial polypetide isolated from the Sargasso Sea
DFVQGIAVNSLGHSNKKLIKSINKQSKKLWHVSNAFIIPEGEKLANRLVKKTFADSVIFQNSGAEATEAAIKVARRYFFSIGKPNKNRIICIKNSFHGRTLAAIYASGSKKMTQGFGPKVPGFDHFEFGDHKKLKKLINKNTAAIMIETIMGEGGIKVIPNWCIKEIRKLCNKHQILLILDEVQCGIGRTGKFFAFEHAGVKPDIVPIAKGIGGGFPIGAVLMTKKIAKAMVPGTHGSTFGGNPLAMSVGNAVLDHINNNLLKNVNLM

SEQ ID NO: 124961 - protein, 227 aa, Unknown
  Bacterial polypetide isolated from the Sargasso Sea
VIPVKGKGSRVWDQQGREYVDFAGGIAVSSLGHCHPALVGALTSQAGKLWHLSNVMTNEPALRLAKKLVDATFAEKVYFANSGAEANEAAFKLARRWALEQYSAEKDQIISFGKSFHGRTFFTVTVGGQAAYSDGFGPKPGAVLHAEFNNLDSVKALISDKTCAVVLEPIQGEGGIIPATKEFIEGVRALCDQYKALLIMDEVQTGVGRTGKLYAYMHYGVTPDILT

SEQ ID NO: 124962 - protein, 188 aa, Unknown
  Bacterial polypetide isolated from the Sargasso Sea
KLCNKKKILLILDEVQSGVGRTGKFLAFEYAKIKPDIVPIAKGIGGGFPIGAVLVNKKVASGMKPGTHGSTFGGNPLAMCVGNAVIDVLFKKGFLNNVRKNGKYFQQKLIKLKERYPKIIKEVRGQGLLIGLALYKNQTDFINKLLKQKLLTVKASENVVRLLPPLNVTKKEINLALKILNNVCENYK

SEQ ID NO: 124963 - protein, 136 aa, Unknown
  Bacterial polypetide isolated from the Sargasso Sea
MPTYSPTIVLEKGVGLKVWDKDGKEYLDFTSGIAVTNLGHSHPNITKSISKQADKIIHSSNLFFNEIQPFLAEALVECSELDNGKCFFCNSGAEANEGMIKLARMWGHNQNRYEIITMKKSFHGRTLATLTATGQD

SEQ ID NO: 124964 - protein, 280 aa, Unknown
  Bacterial polypetide isolated from the Sargasso Sea
MKNYNPLPVSFVKGEGSWLIDDRGERYLDALGGIAVCALGHSHPSLSEVISEQSASLMHTSNIYRIASQEELAKKLVIHSGMSNVFFCNSGAEANEAAIKLARLYASKRKISNPHIVVMENSFHGRTMATLSATGSKRVHQGFAPLVPGFKHIPYNNIEVLKSTVDAEKNIVAVMIEPIQGEGGIIVPDKNYLKKIRTICDENNLLMIVDEVQTGMCRTGKWFAFQHENILPDIITIAKALGNGVPIGACLARGESSKLFQPGSHGSTLGGGPFVSSIAL

SEQ ID NO: 124965 - protein, 202 aa, Unknown
  Bacterial polypetide isolated from the Sargasso Sea
IKVIPDWCLKDLRKLCDKKKILLILDEVQCGISRSGNFLAFEKSKIKPDIVPIAKGIGGGFPIGAVLMNKKVAKSMIPGTHGSTFGGNPLAMACGNTVMDIVTSKKFLKNVNTLSKYFLSNLNQIKEKFPKIIKEIRGRGLLIGIQLHNDQAKFIKKVMDKKLLTIRAAENVVRILPPLNVKKSEINYAIKIINQVCKELEK

SEQ ID NO: 124966 - protein, 225 aa, Unknown
  Bacterial polypetide isolated from the Sargasso Sea
MSSTLNTYNRKKISFKKGKGCYLYSTNGKKYLDFVQGIAVNSLGHANDHLIRAINKQSKKVWHVSNAFIIPEQEKLAKRLTQKTFADYVAFQNSGAEATEVAIKVARRYFYSKGQPKKNRILCLNNSFHGRTLATIFASNNKKSTEGFFPKVEGFDHFNFGNHKELEKKITSKTAAIMVETIMGEGGIKVIPDFCLRGLRKICNRKKILLILDEVQCGIGRTGKF

SEQ ID NO: 124967 - protein, 214 aa, Unknown
  Bacterial polypetide isolated from the Sargasso Sea
AAIMVETIMGEGGIKVIPDWCLKELRKLCNKKKILLILDEVQCGIARSGDFFAFEKSEVKPDIVPIAKGIGGGFPIGAVLMNKKVAKVMTPGTHGSTFGGNPLAMAVGNTVMDIVSNKKFLNNVKKSSKYFFTNLNKLKEKYPSIIKEIRGKGLLIGVQLHTNQTKFIKKLMDNRLLTIRAAENVVRILPPLNVKKNEIDLAIKIIEKVCSQIK

SEQ ID NO: 124968 - protein, 252 aa, Unknown
  Bacterial polypetide isolated from the Sargasso Sea
MQVGSKKMTEGFGPKVNGFDHFEFGNHTSLKKKISKNTAAIMIETIMGEGGIKVVPDWCLIELRKICDQKNILLILDEVQCGIGRSGDFFAFEKSKVKPDIVPIAKGIGGGFPIGAVLMNKKVASGMIAGTHGSTFGGNPLAMSVGNTVLDIIHNKKFLGNVKRISKYFLLNLNFIKKKYPNVINEIRGKGLLIGIQLKVDQTKFIKKLMDNRLLTIRAAENVVRVLPPLNVKKSEINQALKIINKVCWEMN

SEQ ID NO: 124969 - protein, 325 aa, Unknown
  Bacterial polypetide isolated from the Sargasso Sea
ENFFQRGKGSFLYSNNGKKYLDFVQGIAVNSLGHANPYLIKAMHKQANKVWHVSNAFIIPEGERLAKRLTQKTFADYVLFQNSGTEATEAAIKVARRYFYSIGKPNKNRILCVKNSFHGRTIAAIFASGSKKMTEGFGPKVEGFDHFKFGDHKSLKKAISNKTAAIMVEPIMGEGGIKVIPDWCLKELRKICNKKKILLILDEVQCGIGRTGNFFAFEKSKVKPDIVPIAKGIGGGFPIGAVLMSKKVASSMIPGSHGSTFGGNPLAMSVGNAVLDQIFKKGFFNNLKKISKYFYKELDKLKNDYPNIIKEIRGEGLLIGVQLHF

SEQ ID NO: 124970 - protein, 195 aa, Unknown
  Bacterial polypetide isolated from the Sargasso Sea
MTVNRELFDHVMVPNYAPSSVIPVRGEGSRVWDQQGKEFIDFAGGIAVNCLGHCHPALVGALKEQGEKIWHLSNVMTNEPALRLAKKMVDATFGEKVYFANSGAEANEAALKLARRFALDKFGPEKSQIIAFNKGFHGRTFFTVTVGGQAAYSDGFGPKPGDIVHCDYNDLAAFEALISDQTCAVMMEPLQGEGG

SEQ ID NO: 124971 - protein, 306 aa, Unknown
  Bacterial polypetide isolated from the Sargasso Sea
KTLIHTSNAFQIDTQKNLATRLCKLSGMTNAFFCNSGAESVETAIKIARKYGNDHNISTPKILVMENSFHGRTLAALSATSSKKSHEGFTPLVEGFVRAPFDSVEKIELALHNHEDIVALLTEPIQGEGGIKIPKPGYLKKLRDICNDKNLLFMVDEVQSGFCRTGKWFGYQHDHITPDVVMVAKALGNGVPIGACLASGKASNLLKPGSHGSTFGGNYLSTSVGLQVLDIMRDMNLCRNAREMGDYFSKKLNERLANKKRVKEIRSKGLMIGIELDEECTDIVIMALDNGLVLNVTKDRIIRMCR

SEQ ID NO: 124972 - protein, 289 aa, Unknown
  Bacterial polypetide isolated from the Sargasso Sea
MKELSKLARKWGKKKLNGAFEIITTLNSFHGRTQAMMAATGQPHYQDNWRPLMPGFINVDYNDIDKIKEAYNENVCAVMIEPLQGEGGVNVPNDGYLKEVQDFCKSKNILFILDEVQTGMGRLGTLFGYQRFEGVEPDVMTLAKALGSGAPLGAFCSKEFCSVLEPGDHGSTFGGNALTTAAGAAAAKYMVENNIPELALSSGDYMKEKLSLLKEDFSFITEVRGMGLLIGLEMNEDYSSQIVGESLEKGLLINAVRPNMIRFMPPLNVSKDEIDQAIEIIRSILEGIK

SEQ ID NO: 124973 - protein, 279 aa, Unknown
  Bacterial polypetide isolated from the Sargasso Sea
AEATEAAIKVARKYFYTIGKPNKNRILCIKNSFHGRTIAAIFASGSKKMTEGYGPKVSGFDHINFKDTKPRFPNLRSKIKKNTAAIMVETILGEGGIKQIPDKCLKYLRKICDKKKILLILDEVQCGVGRSGNFFAFEKSKVKPDIVPIAKGIGGGFPIGAVLMNKKVAVGMTPGSHGSTFGGNPLAMAIGNTVIDIVSNKKFLNNVQKSSKYFFFKLNYLKKKYPTIIKEIRGKGLLIGIKLYKDQGKFIQKLMDKKLLTIRAAENVVRILPPLNVKK

SEQ ID NO: 124974 - protein, 276 aa, Unknown
  Bacterial polypetide isolated from the Sargasso Sea
NKTFADYTMFQNSGTEATEAAIKVARRYFFSIGKPKKNRILCIKNSFHGRTLAAIYASGSKKMTEGFLPKVGGFDHFKFGDHKSLKKKITRNTAAIMVETIMGEGGIKVIPDWCLRELRKICNKKNILLILDEVQCGISRTGDFFAFEKSKVKPDIVPIAKGIGGGFPIGAVLMNKKVASGMTPGTHGSTFGGNPLAMAVGNTVIDIVSSKKFLKNVKNVSKYFLLKLNKIKDEYPNLIKAIRGRGLLIGIQLHTDQAKFIKKLMDNKLLTIRAAE

SEQ ID NO: 124975 - protein, 270 aa, Unknown
  Bacterial polypetide isolated from the Sargasso Sea
NGKKYLDFVQGIAVNCLGHANNHLIKSINKQSKKLWHVSNVFTIPEQERLAKRLAQKTFADYVTFQNSGAEATEAAIKFARRYFYSKGQPRKNRVLCINNSFHGRTIAAIFASNSKKAIEGFKPKVDGFDHFNFGDHKGLEKAITSRTAAIMVETIMGEGGIKVIPDFCLKGLRKLCNKKKILLILDEVQCGIGRSGKFFAFEYAKIKPDIVPIAKGIGGGFPIGAVLVNKKVASGMKPGTHGSTFGGNPLAMSAGNAVMDVMFKKRFLK

SEQ ID NO: 124976 - protein, 321 aa, Unknown
  Bacterial polypetide isolated from the Sargasso Sea
MSAILQTYNRKKISFKRGKGSYLYSNNGKKYLDFVQGIAVNSLGHSHPHLIKAINSQSKKLWHVSNAFNIPEQEKLAKRLTQKTFANFVAFQNSGAEATELAIKIARKYFHSKGKPNKNRILCINNSFHGRTLATIFASNSKKMTEGFGPKVSGFDHFAFGNHRDLEKKITKKTAAVLVETIMGEGGIKVIPDFCLKGLRKLCNKKKILLILDEVQCGIGRTGKFFAFEYAKIKPDIVPIAKGIGGGFPIGACLVNKKVASTMKPGSHGTTFGGNPLAMSVGNAVLDVIFKKNFLKNVRNVSNYFKTKLNIIHYENQKIIK

SEQ ID NO: 124977 - protein, 405 aa, Unknown
  Bacterial polypetide isolated from the Sargasso Sea
MSELLAVTREVFDEVMVPNYAPAKIIPVRGEGSRVWDQEGREYVDFAGGIAVNGLGHCHPKLVEALKTQGEKLWHLSNVMTNEPALRLAKKLVAATFADKVYFCNSGAEANEAALKLARRYAIEKFGAHKTQIIAFHQGFHGRTFFTVSVGGQAAYSDGFGPKPADITHVAYNDLAELAAVISDNTCAVVMEPLQGEGGIIRPTDEFAKGVRELCDQHNALLIYDEVQSGVGRTGDLFAYMGLGVTPDILTSAKALGGGFPIGAMLTTTEIASHLKVGTHGSTYGGNPLACAVAEAVIDVVNTPEVLNGIKQREQLFREGIEAINAKYHCFSEVRGKGLLLGAVLNDDYKGRSRDFLLASIDQGLMALVAGTNVVRFAPSLVIPEADIKEGLVRFEKAVAQVVNA

SEQ ID NO: 124978 - protein, 260 aa, Unknown
  Bacterial polypetide isolated from the Sargasso Sea
MSYLTNNYNRKKISFVRGKGSYLFTSSGTKYLDFVQGIAVNSLGHAHPKLIKIINNQSKKLWHVSNAFEIPEGELLAKKLVKKTFADYVMFQNSGTEATEAAIKVARRYFYSIGKPTKNRILCVKNSFHGRTLAAIFASGSKKMTEGFGPKISGFDHFNFGDHRSLKKKINKNTAAIMIETILGEGGIKVIPNWCIRELRKLCNQKKILLILDEVQCGVGRSGDFFAFDSSNVKPDIVPIAKGLGGGFPIGAVLMNKKGC

SEQ ID NO: 124979 - protein, 347 aa, Unknown
  Bacterial polypetide isolated from the Sargasso Sea
ALGHSHPKLVKTINTQSKKLWHVSNAFQIPEGEKLAKKLCQKTFADYVMFQNSGAEATEAAIKVARRYFYSIGKPNKNRVLCIKNSFHGRTIAAIFASGSKKMTEGFGPKVPGFDHFVFGNHKSLKKKITKNTAAIMVEPIMGEGGIRVIPDFCLKELRKLCNKKKILLIVDEVQTGVSRSGDFFAFEKSKILPDIVPIAKGLAGGFPVGAVLMNKKVAAGMTPGTHGSTFGGNPLVCSVANSVMDIVSTKQFLNNVKKSSKYFLSNLNKLKEKYPKIIKEIRGRGLLIGIQLYKDQPKFITKLMDNKLLTIRAADKVVRILPPLNVKKKEIDQALKIINKVCSELK

SEQ ID NO: 124980 - protein, 316 aa, Unknown
  Bacterial polypetide isolated from the Sargasso Sea
GEKLAKKLCQKTFADYVLFQNSGAEATEASIKVARRYFYSIGKPHKNRILCVKNSFHGRTIAAIFASGSKKMVEGFGPKVPGFDHFIFGNHKSLKKKITKNTAAIMIEPIMGEGGIKVIPDWCLKELRKLCTKKKILLIADEVQTGISRSADFLAFESSKIKPDIVPIAKGIGGGFPIGAVLMNKKVASGMTPGTHGSTFGGNPLAMAVGNSVIDIVSNRKFLNNVKKLSKYFFINLNLLKKKYPMIIREIRGKGLLIGVQLYKDQSKFITKLMENKLLTIRAAENVVRILPPLNVKKTEINQALKIIDNVCSKMN

SEQ ID NO: 124981 - protein, 393 aa, Unknown
  Bacterial polypetide isolated from the Sargasso Sea
MGALAKNYNRRKIAFKKGKGSFLYSTNGKKYLDFVQGIAVNSLGHANPRLIRAIQKQSRKIWHVSNAFLIPEGERLAKRLTNKTFAENVIFQNSGTEATEAAIKVARRYFYVKGKPKKNKILCIKNSFHGRTIAAIYASGSKKMTEGFGPKVTGFDHIEFKDFKPRFPNLKNKIKKNTAAIMVETVMGEGGIKPIPVKCLKYLRKICNKKKILLILDEVQCGIGRSGKFFAYEYANIKPDIVPIAKGLGGGFPIGALLMTKKVASSMIPGTHGSTFGGNPLAMSVGNAVLDEIFKIGFLKNVQKISKYFHLELNKIKNDYPHVIKEVRGLGLLIGLKLFNNQNKFINKLEYNKLLTIKAADNVVRILPPLNVKKSEINLALKIIKKVCKDFNT

SEQ ID NO: 124982 - protein, 373 aa, Unknown
  Bacterial polypetide isolated from the Sargasso Sea
MSSLTNNYNRRKISFVKGRGSFLYDKNGKKYLDFVQGIAVNSLGHSNPYLTKEMIKQAKKVWHVSNSFLIPEGEKLAKRLTKKTFADRVMFQNSGAEATEAAIKVARRYFFSKGQKRKNRILCIQNSFHGRTLATIFASGSKKMTYGFGPKVDGFDHFKFGDHKSLKKAISRKTAAIMIEPVMGESGIKVIPSWCLKELRKICNKNKILLILDEVQCGVGRSGKFFAFEYSEIKPDIVPIAKGIGGGFPLGAVLMTKKVASCMKPGSHGSTFGGNPLAMSVGNAVLDKIFKKGFLENVQKLSNYFFIELQKLKKDFPGVIKEVRGLGLLIGLQLHKNQSKFIKQLMNEKLLTIRAAENVVRILPPLTVKIEEI

SEQ ID NO: 124983 - protein, 254 aa, Unknown
  Bacterial polypetide isolated from the Sargasso Sea
ALSAQNNPTYSNGFEPLLPGFIQAPFEDIESLIKMIDSTTAAILIEPIQGEGGIRPANLNFLRKIYKICKDNDILLFFDEVQSGFGRSGKLFSYEWANIEPDIIAVAKGMGSGFPIGACLATSKASIAMTKGTHGSTFGGNPLAISVGKVVLETILKQNFLNSVDLVARHLWNRLKQLEKKHEEILEIRGAGLLLGIKTKQKNSKVALEFKKNKLLSVTAADNIIRLAPPLVVTIEEVNTAIKIIDKTLDNIND

SEQ ID NO: 124984 - protein, 388 aa, Unknown
  Bacterial polypetide isolated from the Sargasso Sea
MSSLAKNYNRRKIAFKKGKGSFLYSTNGKKYLDFVQGIAVNSLGHSNPYLIKAINKQAKKVWHVSNAFIIPEGEKLAKRLTQKTFADYILFQNSGTEATEAAIKVARRYFYSIGKPNKNRILCVKNSFHGRTIAAIFASGSKKMTEGFGPKVGGFDHFKFGDHQSLKKAITNKTAAIMVEPIMGEGGIKVIPDWCLKELRKICNKKKILLILDEVQCGIGRTGNFFAFENSKVKPDIVPIAKGIGGGFPIGAVLMTKKVASSMTPGSHGSTFGGNPLAMSVGNAVLDQIFKKGFLNNLKKVSKYFYKELDKIKKDYPNIIKEIRGKGLLIGIQLHFDQTKFIKSLEKNYLLTIRAADYVIRVLPPLNVKKNEIDLALKIIKKVCREYK

SEQ ID NO: 124985 - protein, 225 aa, Unknown
  Bacterial polypetide isolated from the Sargasso Sea
HKGLEKAITSRTAAIMVETIMGEGGIKVIPDFCLQGLRKLCNKKKILLILDEVQCGIGRSGKFFAFEYAKIKPDIVPIAKGIGGGFPIGAVLVNKKVASGMKPGTHGSTFGGNPLAMSAGNAVMDVMFKKGFLNNVSKNGKYFISQLDKIKNKYPKVIKEVRGKGLLIGLSLHVNQARFIQKLLDNNLLTVRAAENVVRLLPPLNVTKTEINLCLKIIEKVCKKF

SEQ ID NO: 124986 - protein, 388 aa, Unknown
  Bacterial polypetide isolated from the Sargasso Sea
MSAILNTYNRKKISFSKGKGAFLYGTNGKKYLDFVQGIAVNCLGHANNYLINSVTKQAKKLWHVSNAFIIPEQEKLAKRLKQKTFADYVFFQNSGAEATEAAIKFARRYFYSKGQKRKNRILCINNSFHGRTLATIFASNSKKATEGFGPKVDGFDHFNFGDHKGLEKAITSRTAAIMVETIMGEGGIKVIPDYCLKGLRKLCNKKNILLILDEVQCGIGRSGKFFAFEHAKIKPDIVPIAKGIGGGFPIGAVLVNKKVASGMKPGTHGSTFGGNPLAMSAGNAVMDIMFKKGFLSNVTKNGKYFLKELNKLREKYPKIIKEVRGKGLLVGLCLHKDQTKFIKKLLENNLLSVRAAENVVRLLPPLNVTKAEINLGLKIIDKVCKNYR

SEQ ID NO: 124987 - protein, 314 aa, Unknown
  Bacterial polypetide isolated from the Sargasso Sea
MIDATFAERVFFCNSGAEANEAAFKLARRVAFDRFGSEKYEIIAALNSFHGRTLFTVNVGGQSKYSDGFGPKITGITHVPYNDLAALKAAVTDKTCAVVLEPIQGEGGVLPAELAYLQGARELCDANDALLVFDEVQTGMGRSGHLFAYQHYGVTPDILTSAKSLGGGFPIAAMLTREDLAKHLVVGTHGTTYGGNPLACAVAEAVIDVINTPEVLAGVNAKHDLFKARLEQIGKQYGIFTQVRGMGLLIGCVLSDAFKGKAKDVFNAAEKENLMILQAGPDVVRFAPSLVVEEADINEGLDRFERAVKTLTQA

SEQ ID NO: 124988 - protein, 390 aa, Unknown
  Bacterial polypetide isolated from the Sargasso Sea
MSALAKNYNRRKIAFSRGKGSFLYSSKGQKYLDFVQGIAVNSLGHANSYLTKAINKQSKKVWHVSNAFIIPEGEKLAKRLRQKTFADYVIFQNSGAEATELAIKAARRYFYKIGKPQKNRILCIKNSFHGRTLATIFASGSKKMTEGFEPKVPGFDHFNFGDHKALKKSITKKTAAIMVETAMGESGIKVIPDWCLRELRKLCNKKKILLILDEVQCGIGRSGKFFAFEYAKIKPDIVPIAKGIGGGFPIGAVLMNKKVAKGMTPGSHGSTFGGNPLAMSVGNAVLDQIFKKGFLTNVQKSSKYFMEELNDIKNEYPNIIKEVRGIGLLIGLQLHEDQNKFIKKLEDNKLLTMRAGENVVRILPPLNVKKNEIDIAIKIIRKVCNEMDSI

SEQ ID NO: 124989 - protein, 388 aa, Unknown
  Bacterial polypetide isolated from the Sargasso Sea
MTYLAKNYNRKKISFKYGKGSYLFSTDNKKYLDFVQGIAVNSLGHAHPKLAKTISTQAKKLWHVSNAFQIPEGEKLARKLCKKTFADYVMFQNSGAEATEAAIKVARRYFYSIGKTNKNKILCVRNSFHGRTLAAIYASGSKKMTEGFGPKVSGFDHFVFGDHKSLKKKITKNTAAIMVETIMGEGGIKVIPDWCLVELRKLCNQKKILLILDEVQCGIARSGDFFAFEKSKVKPDIVPIAKGIGGGFPIGAVLMNKKVAAGMTPGTHGSTFGGNPLAMAVGNSVMDIVSNKRFLKNVKSISKYFLLKLNNLKNVYPNIIKNIRGKGLLIGIQLHTDQTKFIKKLMDNKLLTIRAAENVVRILPPLNVKKNEVNQALKIINKVCKELN

SEQ ID NO: 124990 - protein, 206 aa, Unknown
  Bacterial polypetide isolated from the Sargasso Sea
MGESGIKVIPDWCIRDLKKICNKRKILLILDEVQCGIGRSGKFFAFEHAKIKPDIVPIAKGIGGGFPIGAVLMNKKVAYAMKPGSHGSTFGGNPLAMSVGNAVLDQIFKKGFLKNVQKSSKYFISELRKIKEDYPETIKEVRGIGLLIGLQLYNDQTKFIKKLEDNKLLTIRAGENVVRILPPLNVKKQEIDLAIKIIRKVCSQLN

SEQ ID NO: 124991 - protein, 384 aa, Unknown
  Bacterial polypetide isolated from the Sargasso Sea
MDTYKRYPISFSKGEGSWLYDNDGGKYLDFAAGIAVNVLGHGHPEIKKVMHEAIDNVWHVSNLYHIPEQQKLAKKLCDISFADKVFFCNSGAEAVEGAIKTSRKYHFEKGDKDRTDIITFKNAFHGRTLATLAAGANPKHTEGFGPLPSGFENIELSQQQLEEKISNKTAAVLIEPIQGEGGIRLTPKEDLQMIRDLTSKHGVLMILDQVQCGLGRTGDFFSHEWAGVEPDIITLAKGLGAGFPIGAILASTDASSGMVHGSHGSTFGGNPLACSVALKVLEIIDEEKILSNVKSLSEFLLAGINDIIENHKDKITSVRGRGFMLGIKCEVENTLIAETALNNGLLLVPAADNIIRLLPPLNTEKNDIEEFFNLLNITLENLPR

SEQ ID NO: 124992 - protein, 305 aa, Unknown
  Bacterial polypetide isolated from the Sargasso Sea
VYFANSGAEANEAALKLARRWAKNEVGEHKTQIIAFKQGFHGRTFFTVTVGGQPAYSDGFGPKPADIVHAEYNNLASLEALISDNTCAVMLEPLQGEGGIITPTSEFIQGVAALCKKHNALMIFDEVQSGVGRTGQLYAYMGLGVVPDILTTAKALGGGFPIGAMLTTTAIAKHLVVGTHGSTYGGNPLACAVGIAAFDTVNTPEVLNGVKQREQLFREGLAAINAKYDVFSEIRGQGLLLGAALNDKYQGKARDFMLAAADEGLMMLVAGYSVIRMTPSLIIPEADIAEGFKRLEKAVAKMVQA

SEQ ID NO: 124993 - protein, 405 aa, Unknown
  Bacterial polypetide isolated from the Sargasso Sea
MSVDMKLNRAQFDAVMVPNYAPAAVIPVRGEGSRVWDQEGNEFIDFAGGIAVNCLGHCHPALVNALKTQGEKLWHLSNVMTNEPALELATKLVNSTFAERVYFANSGAEANEAALKLARRYALEKFGAEKDEIIAFDKAFHGRTFFTVSVGGQAAYSDGFGPKPQSITHLPYNDVAALEAAVSDKTCAIMLEPLQGEGGIIDADPAFLKAVRELANKHNALVIFDEVQTGVGRTGELYAYMGTDIVPDILTTAKALGGGFPIAAMLTTAEIAEHLKVGTHGSTYGGNPLACAIGNAVLDVVNTPEVLNGVKHREQLLRDGLNKINEKYHVFSEIRGKGLLLGAVLNEQYQGRSRDFLVASVAEGLMSLMAGANVVRFAPSLVIPEADIAEGLARFERAVASIAAA

SEQ ID NO: 124994 - protein, 380 aa, Unknown
  Bacterial polypetide isolated from the Sargasso Sea
MTFLANNYNRKKISFKKGIGSYLVATNGKKYLDFCSGIAVNSLGHANPRLVKALYKQAKKVWHVSNAFTIPEGEMLAKKLVKKTFADSVIFQNSGTEATEVAIKVARRYFYSIGKPKKNRILCVKNSFHGRTIAAIFASGSKKMTEGFGPKVSGFDHFTFGDHNSLKKRISKNTAAIMVETIMGEGGIKVIPDWCLRDLRKLCNKKKILLILDEVQCGIGRSGDFFAFESSKVKPDIVPIAKGIGGGFPIGAVLMNKKVSKAMVPGTHGSTFGGNPLAMSVGNEVMDIISNKKFLNNVKNLSKYFLEKLNDIKDKYPNIIKQIRGKGLLIGIQLHKDQTLFIKNLMENKLLTIKAAENVIRILPPLNVKKSGNRYCIKSY

SEQ ID NO: 124995 - protein, 169 aa, Unknown
  Bacterial polypetide isolated from the Sargasso Sea
MDTYKRYPISFSKGEGSWLYDNDGGKYLDFAAGIAVNVLGHGHPEIKKVMHEAIDNVWHVSNLYHIPEQQKLAKKLCDISFADKVFFCNSGAEAVEGAIKTSRKYHFEKGDKDRTEIITFKNAFHGRTLATLAAGANPKHTEGFGPLPSGFVNIELSQKQWKKRSLIKQ

SEQ ID NO: 124996 - protein, 384 aa, Unknown
  Bacterial polypetide isolated from the Sargasso Sea
MDTYKRYPISFSKGEGSWLYDSDGRKYLDFAAGIAVNVLGHGHPKIKKVMHEAIDNVWHVSNLYHIPEQQKLAKKLCDISFADKVFFCNSGAEAVEGAIKTSRKYHFEKGDKDRTDIITFKNAFHGRTLATLAAGANPKHTEGFGPLPSGFENIELSQQQLKEKISNKTAAVLIEPIQGEGGIRLTPKEDLQMIRDLTSKHGVLMILDQVQCGLGRTGDFFSHEWAGVEPDIITLAKGLGAGFPIGAILASTDASSGMIHGSHGSTFGGNPLACSVALSVLEIIDEEKILSNVKSLSEFLLTGINDIIENHKDKITSVRGRGFMLGIKCEVENTLIAETALNNGLLLVPAADNIIRLLPPLNTEKNDIEEFFNLLNITLENLPR

SEQ ID NO: 124997 - protein, 388 aa, Unknown
  Bacterial polypetide isolated from the Sargasso Sea
MSYLAKNYNRKKISFKYGKGSYLYSINKKKYLDFVQGIAVNSLGHANPKLIKTIKDQSKKLWHVSNAFQIPEGEKLAKKLCKKTFAEYVMFQNSGTEATEAAIKVARRYFYSIGKPNKNRILCIKNSFHGRTLAAIFASGSKKMTEGFGPKVTGFDHFSFGDHNSLKKKINKNTAAIMVETIMGEGGIKVIPDWCLKELRALCNKKKILLILDEVQCGIGRSGDFFAFEKSKVKPDIVPIAKGIGGGFPIGAVLMNKKVASSMTPGTHGSTFGGNPLAMSVGNTVMDIISNKKFLNNIKSLSKYFLLKLNKIKEKYPNVIKQIRGKGFLIGIQLYKDQTVFIKKLMDNKLLTIRAAENVVRILPPLNVKKNELDLALKIIEKVCSQIK

SEQ ID NO: 124998 - protein, 394 aa, Unknown
  Bacterial polypetide isolated from the Sargasso Sea
MPLNDYPIDSLMYITNRPDIVFTHGKGSWLYDHTGKRYLDFIQGWAVNSLGHCNEGIVDALKTQAEKLLNPSPAFYNEPMAKLAGLLTQHSVFDKVFFTNSGAEANEGAIKLARKWGRKFKNGAYEIITFDHSFHGRTLATMSASGKPGWDTIYAPQVPGFPKAELNDINSVEKLITDKTVAVMLEPIQGEGGVIPATREFMQALRALTKQHNLMLIVDEVQSGCGRAGTLFAYELSGIEPDVMTLAKGIGGGAPLGALLSKAEFAVFEAGDQGGTYNGNPLMTAVGYSVISQLVAPGFLEGVRARSEYLKRKLLELSEERGFEGERGEGLLRALLLGKDIGPQIVEKARDMQPDGLLLNAARPNLLRFMPALNVTTEEIDQMMAMLRSVLDTL

SEQ ID NO: 124999 - protein, 296 aa, Unknown
  Bacterial polypetide isolated from the Sargasso Sea
IKNQAKKVWHVSNAFIIPEGEKLAKRLTQKTFADYVIFQNSGAEATEAAIKAARRYFYSIGKPKKNRILCIKNSFHGRTLATIYASGSKKMTEGFGPKVPGFDHFNFGDHKGLKKAIKKNTAAIMCETAMGESGIKVIPDWCLRELRKICNKRKILLILDEVQCGIGRSGKFFAFEYSKIKPDIVPIAKGIGGGFPIGAVLMSKKVASAMTPGSHGSTFGGNPLAMSVGNAVLDQIFKKGFLKNVQKSSKYFISELNKIMQDYPNIIKEVRGVGLLIGLQLYTDQTKFIKKLEDNK

SEQ ID NO: 125000 - protein, 274 aa, Unknown
  Bacterial polypetide isolated from the Sargasso Sea
MPTYGNKTLEFAKGKGSYLYSSQNKKYLDFASGIAVNSLGHCHPKLIEVLNKQSKQLWHVSNLYKIKKQEQFAKLLCKNSFADKVFFTNSGAESIECGIKIIRGYHSHHKTNKTEIITFEGAFHGRTYGALSAQKNNKYSRGFGPMLKGFKKIEFNNEKKLISAINKKTAGIIIEPIQGEGGIRPANLSFLKFLRKICNEKKILLFFDEVQCGFGRSGKLFSYEWAKIKPDIISVAKGIGSGFPLGACMSTNKACIAMTKGSHGSTYGGNPLAM

SEQ ID NO: 125001 - protein, 389 aa, Unknown
  Bacterial polypetide isolated from the Sargasso Sea
MSALVKNYNRRRIAFKKGKGSFLYSTTGKKYLDFVQGIAVNSLGHSNSKLIKAIQKQSKKVWHVSNAFVIPEGERLAYRLKSKTFADNVIFQNSGAEATEAAIKIARRYFYSLGKPNKNRILCVKNSFHGRTLATIFASGSKKMTEGFGPRVNGFDHFDFGNHKSLKKKISKNTAAIMVEPVMGEGGIKVIPHWCLKELRKICNKKKILLILDEVQCGVGRSGKFFAFEYANVKPDIVPIAKGIGGGFPIGAVLMTKKVASCMVPGSHGSTFGGNPLAMSVGNAVLDQIFKKGFLKNIQKISKYFHKELIKIKNDYPKIIKDVRGLGLLIGLKLFNNQTNFIKKLENNKLLTIKAAENVVRILPPLNVSKIEVDLAIKIIRRVCKQTKV

SEQ ID NO: 125002 - protein, 192 aa, Unknown
  Bacterial polypetide isolated from the Sargasso Sea
RELRKLCDKKKILLILDEVQCGIGRSGDFFAFEKSKVKPDIVPIAKGIGGGFPIGAVLMNKKVAAGMVPGTHGSTFGGNPLAMSVGNKVMDIVSNKKFLNNVKKLSKYFLSNLNKIKEKYPNIIKQIRGRGFLIGIQLHQDQTNFVKKLMENKLLTIRAAENVVRILPPLNVKKNEIDEALKIINKVCSKFK

SEQ ID NO: 125003 - protein, 359 aa, Unknown
  Bacterial polypetide isolated from the Sargasso Sea
MPTYGNKTLEFIKGKGCYLYTSQNKKYLDFASGIAVNSLGHCHPKLIEVLYKQSKQIWHVSNLYKIKKQEQFAKLLCKNSFADKVFFTNSGTESIECGIKIIRGYHSYHKTKKTEIITFEGAFHGRTYGALSAQKNKKYSSGFGPMLKGFKQIEFNNEKKLISAINKKTAGIMIEPIQGEGGIRPANLYFLKLLRKICNENDILLFFDEVQCGFGRSGKLFSHEWAKIKPDIMSVAKGIGSGFPLGACMSTNKACVAMTKGSHGSTYGGNPLAMSVGLEVLKIISNKKFLSKVDKTARYFWKNLKILENSSNIISEVRGAGFLLGIKTNISNIDFSEQLKKNKLLNVPAADNTVRLAPP

SEQ ID NO: 125004 - protein, 382 aa, Unknown
  Bacterial polypetide isolated from the Sargasso Sea
MPTYGERDLIFAKGKGCYLYTHSGKKYLDFAAGIAVNSLGHCHPKLVSILKKQSEILWHTSNLYKNNNQELFAKELCKKTFADKVFFTNSGAEAIECGLKVIKTYWNLKNKDKKNIITFKGAFHGRTFAALSAQKNKTYSEGFKPLLSGFKNIPFNDKQALVKSINEKTAAILIEPIQGEGGIRPASIQFLKFIKEICRKNDILLFLDEVQSGFGRSGKLYAHEWAKIKPDILATAKGIGSGFPLGACLATTKASFGMSRGKHGSTYGGNPLAVSVGREVLKIISNKKFLKNVDTISRYLWKNLKKLESHYNEIIDVRGAGLLLGIKTKQNNIMISNRLKKNKLLSVPAGDNVIRLAPPLIINKKHVDEAINIIDETLKNLS

SEQ ID NO: 125005 - protein, 402 aa, Unknown
  Bacterial polypetide isolated from the Sargasso Sea
MNVTRATFDDVMVPNYNPAGMVPVRGEGSRVWDQDGAEYIDFAGGIAVNVLGHCHPELVKALNEQGSKLWHLSNVFTNEPALRLAKKLNDATFSDRVYFANSGAEANEAALKLARRWALDKHGEDKNQIIAFNKGFHGRTFFTVTVGGQAAYSDGFGPKPGAVDHCDYNDLAAFEALISDKTCAVMMEPLQGEGGIIPPDVDFVKGVRELCDKHNALLIFDEVQSGVGRTGHLYAYMGLGVTPDILTTAKSLGGGFPIGAMLTTADIAAHLKPGTHGSTYGGNPLACAVAEKALDIVNQPEVLEGVLKKEALFRELLGAINEKYNVFEEVRGQGMLLGCALNEKYQGRARDFMMAATKENLMCLVAGMNVIRFAPSLVIPDEDIKEGLARFERAVAAVVNAE

SEQ ID NO: 125006 - protein, 195 aa, Unknown
  Bacterial polypetide isolated from the Sargasso Sea
FCLKGLRKLCNKKKILLILDEVQCGVGRSGKFFAFEYANIKPDIVPIAKGIGGGFPIGACLVNKKVASTMKPGSHGTTFGGNPLAMSVGNAVLDVIFKKNFLKNVRSISKYFKTKLNIIHIQNQKVIKEVRGTGLLLGLQLKVNQAKFIEKLMKEKLLTIRAAENVVRILPPLNVSKKEIDQAVTIINKVCKSYK

SEQ ID NO: 125007 - protein, 338 aa, Unknown
  Bacterial polypetide isolated from the Sargasso Sea
LIATINKQSKKLWHVSNAFQIPEGEKLAKKLCQKTFADCVIFQNSGAEATEAAIKVARRYFFSIGKPNKTRILCVKNSFHGRTLATIFASGSKKMTEGFGHVGGFDHFIFGDHKSLKKKITKNTAAIMIEPIMGEGGIKVVPDWCLKELRKLCNKKKILLILDEVQCGISRSGSFFAFENSKCIPDIVPIAKGIGGGFPIGAVLMNKKVAAGMSPGTHGSTFGGNPLAMAIGNTVMDIVSSKKFLNNINKLSKYFFSNLNIIQKKYPKVIKDIRGRGYLIGIQLYKDQSKFIQKLMDKKLLTIRAAENVIRILPPLNVKKNELDQALKIIDKVCAELK

SEQ ID NO: 125008 - protein, 319 aa, Unknown
  Bacterial polypetide isolated from the Sargasso Sea
MPTYGNKTLEFVKGKGCYLYTSQNKKYLDFASGIAVNSLGHCHPKLIGALNKQSKQLWHISNLYLIKKQEQFAKLLCKKSFADKVFFTNSGTESIECGIKIIRSYHSYHNTKKTEIITFDGAFHGRTYGALSAQKNKKYSHGFGPLLKGFKQIKFNDEKKLKLAINKKTAGIIIEPIQGEGGIRPANLSFLKSLRKICNENGILLFFDEVQCGFGRSGKLFSHEWAKIKPDIMSVAKGIGSGFPLGACMSTNKACIAMTKGSHGSTYGGNPLAMSVGLEVLKLISNKTFLSKVDKTARYFWKNLKKLENTSNIISEVRG

SEQ ID NO: 125009 - protein, 388 aa, Unknown
  Bacterial polypetide isolated from the Sargasso Sea
MTYLAKNYNRKKIAFKYGKGSYLYSIDNKKYLDFVQGIAVNSLGHAHPKLVKTINEQSKKLWHVSNAFQIPEGEKLAKKICQKTFAAFVMFQNSGAEATEAAIKVARRYFFSIGKPNKNRILCIKNSFHGRTLAAIYASGSRKMTEGFGPKVGGFDHFRFGDHKSLKKKITKKTAAIMIEPIMGEGGIKVIPDWCLKELRKLCNKKKILLILDEVQSGISRTGAFFSFEKSKIKPDIVPIAKGIGGGFPLGAVLMNKKVASGMIPGTHGSTFGGNPLAMAVGNAVMDIVSSKKFLKNIENLSKYFLFELRNIQEAYPNIIKSIRGKGFLIGVQLYKDQTIFIRKLMENKLLTIRASENVVRILPPLNVKKSELDLSLKIINKVCKELN

SEQ ID NO: 125010 - protein, 360 aa, Unknown
  Bacterial polypetide isolated from the Sargasso Sea
MTTTDWKKLESTYYMQVVNRLPLVLVKGKGTIVWDEEGKKYLDFTSGWAVVNLGHSHPAVSNAIKYQVDNIMQMTNLYYTIPQLKLAKLLIDNSCFDRVFFSNSGAEANEGACKLARKWGKEKLDGAYEIITMDNSFHGRTLAMMAATGQKEYQDKWQPLPDGFVNVEYNNFEALKKATKKNTCAVLLEVVQGEGGVNVPDHSYLIDVQEWCHQNNILFMVDEVQTGMGRLGTLFGYQKFGLDPDVMVLGKALGAGTPLGAFLCKERFSVLEPGDHGSTFGGNALTTAAGWAALKYIIDTDIPSQCSDAGKYLKSMLDGLASRHSNVLEIRGYGLLIGLEISKNKAPEVMKLCLERRTTN

SEQ ID NO: 125011 - protein, 351 aa, Unknown
  Bacterial polypetide isolated from the Sargasso Sea
MSYLAKNYNRKKISFIYGKGSYLYSTDNKKYLDFVQGIAVNSLGHAHPKLVKAIRNQSKKIWHVSNAFQIPEGEKLAKKLCQKTFADYVMFQNSGAEATEAAIKVARRYFYSIGKPHKNRILCVKNSFHGRTLAAIFASGSKKMTEGFGPKVPGFDHFVFGDHKSLKKKITKNTAAIMVEPIMGEGGIRVIPDFCLRELRKLCNKKKILLILDEVQCGISRTGDFFAFEQSKIKPDIVPIAKGIGGGFPIGAVLMNKKVAEGMTPGTHGSTFGGAPLACSVANAVMDIVSTKKFLNNVKKSSKYFFSKLNKLKEKYPRTIKEIRGRGLLIGIQLYADQTKFIKKLMDNKLL

SEQ ID NO: 125012 - protein, 388 aa, Unknown
  Bacterial polypetide isolated from the Sargasso Sea
MSAILGTYNRKKISFKKGKGAYLYAHNGKKYLDFVSGIAVNSLGHCHSHMVRAIQKQSKKLIHVSNAFEIPEQEKLAKRLTKNSFADFVVFVNSGAEATEASIKIARKYFFEKGMPEKNRIITFKGAFHGRTLAALFAANNKDHTKGFGPRVEGFDQVPFGDHEALNKAITNKTAAIMVETILGEGGIKVIPNECLVGLRKICDEKKILLILDEVQCGIGRSGKLFAFDYAKIKPDIVPIAKGIGGGFPLGACLVNKKASEGMKPGTHGSTFGGNPLAMSVGNAVLDIILKKGFLKNVERNGQFFKDELVKLKHKYKNKILDVRGKGLLVGVKLSINNNKFLEHMFKNKLLAVKAADNVIRLLPPLIVKKEEIKKAINIIDKSLKEFK

SEQ ID NO: 125013 - protein, 272 aa, Unknown
  Bacterial polypetide isolated from the Sargasso Sea
MPNYSFPDLVPEKASGSKLWDENGKEYIDFGGGIAVTSLGHCHPILMKSMEEQSKKLWHVSNYLLSKPAKELGQKIASKSFADKVLFSNSGNEANEAAIKLARKYFFEKGDEEKYEILSFTNSFHGRSLANITLGDSEFHQTGFGPLPKGFIKAEFNNIDDVKKKISNKTAAIIVELIQGEAGVISAQNDFIEALRNICNENNILLIFDEVQSGIGRTGTLFAYQGYGVIPDIVTLAKGLGGGLPIAATITTTDIANCMQPGTHGSTFGGNP

SEQ ID NO: 125014 - protein, 405 aa, Unknown
  Bacterial polypetide isolated from the Sargasso Sea
MSVDMKLNRAQFDAVMVPNYAPAAVIPVRGEGSRVWDQEGNEFIDFAGGIAVNCLGHCHPALVNALKTQGEKLWHLSNVMTNEPALELATKLVNSTFAERVYFANSGAEANEAALKLARRYALEKYGVEKDEIIAFDKAFHGRTFFTVSVGGQAAYSDGFGPKPQSITHLPYNDVAALEAAVSDKTCAIMLEPLQGEGGIINADPAFLKAVRELANKHNALVIFDEVQTGVGRTGELYAYMGTDIVPDILTTAKALGGGFPIAAMLTTAEIAEHLKVGTHGSTYGGNPLACAIGNAVLDVVNTPEVLNGVKHREQLLRDGLNKINEKYHVFSEVRGKGLLLGAVLNEQYQGRSRDFLVASVAEGLMSLMAGANVVRFAPSLVIPEADIAEGLARFERAVASIAAA

SEQ ID NO: 125015 - protein, 260 aa, Unknown
  Bacterial polypetide isolated from the Sargasso Sea
MSATGQPKYQKGFEPMIQGFKFFKFNNFDSVKKLFEECENNNQKISGVLVEPIQGEGGVIPGNKIFFRSLRDICDKYNSLLILDEVQSGVGRTGKMWGYENLGIEPDGFTLAKGLGGGHAIGALLVKEKANIFSPGDHASTFGGNPFACKAAITVLEEINRRNLINNVYLRGEQLSAGFEELSKKFPNIITGKRGLGLIQGLVINDEYADAKTITLKAFDKGLLVVPAGGNVVRIVPPLVISRREINILLNKLNSIFEEL

SEQ ID NO: 125016 - protein, 388 aa, Unknown
  Bacterial polypetide isolated from the Sargasso Sea
MSALARNYNRRKIAFKKGKGSFLYATNGKRYLDFVQGIAVNSLGHANPNLIRAINKQAKKVWHVSNAFIIPEGEKLAKRLTQKTFADYVIFQNSGTEATEAAIKVARRYFYSKGKPHKNRILCVKNSFHGRTIAAIFASGSKKMTEGFGPKVSGFDHFKFGDHKSLKKSITKKTAAIMVEPIMGEGGIKVIPDWCLRELRKICNKKKILLILDEVQCGIGRTGDFFAFENSKVKPDIVPIAKGIGGGFPIGAVLMTKKVALSMSPGTHGSTFGGNPLAMSVGNAVLDQILKKGFLNNLKKTSKYFYQELNKIKKDYPNIIKEIRGKGLLIGIQLNFDQSKFIKFLEKNYLLTIRAAENVIRILPPLNVKKNEIDLALKIIDKVCKEYK

SEQ ID NO: 125017 - protein, 286 aa, Unknown
  Bacterial polypetide isolated from the Sargasso Sea
MVQNSTYIMPTYGERELEFKEGKGCFLTSINDKKYLDFGSGISVNSLGHCHPRLVKALQQQASKLWHTSNLYRNSIQDEYAKLLCMNSFAEKIFFTNSGVESIEAGIKVIKSFHYYHNNLDQKNIITFEGAFHGRTFAALSAQQNEKYSKGFEPLLPGFIKIPFNDIESVKKNINKNTAAIMIEPIQGEGGIRPADLKFLEEIKKICEKNNLLLFLDEVQSGFGRSGKLFAHQWANLEPDIVATAKGIGSGFPMGACLATNKACIGMSKGVHGSTFAGNPLAMSVG

SEQ ID NO: 125018 - protein, 198 aa, Unknown
  Bacterial polypetide isolated from the Sargasso Sea
LQGVRDLCNQFNALMIYDEVQSGVGRTGKLYAYMHTNVVPDILTTAKSLGGGFPIGAMLTTTEIASHLKVGTHGSTYGGNPLACAVAEAALDTINQPEVLNGVLEREKLFRRELAAINEKHNVFSTVRGQGMLLGAVLNDEFKGRSRDFFLASADQGLFALVAGPDVIRFAPSLVIPEADIIEGMKRFEKAVAQVKQG

SEQ ID NO: 125019 - protein, 257 aa, Unknown
  Bacterial polypetide isolated from the Sargasso Sea
MGQPKYQKGFEPMIQGFKFFKFNNFDSVKKLFEECENNDQKISGVLVEPIQGEGGVIPGSKIFFKSLREICDKYNSLLILDEVQSGVGRTGKMWGYENLGIEPDGFTLAKGLGGGHAIGALLVKEKANIFSPGDHASTFGGNPFACKAALTVLEEINRRNIINNVYLRGEQLSNGFEELSKKFPNIIIGKRGLGLIQGLVINDDYADAKKITLKAFDKGLLVVPAGGNVVRIVPPLVISRREINILLNKLNSIFEEL

SEQ ID NO: 125020 - protein, 395 aa, Unknown
  Bacterial polypetide isolated from the Sargasso Sea
MIPSVLPTYNRAPLTFVKGEGSWLIEDDGRRFLDLGAGIAVNALGHANPALVEALTEQAGKLWHTSNLYDIPQQQALADKLVDATFADTVFFTNSGTEACELAVKMARKYFYEKGQPERIEIIAFEGSFHGRSHAAIAAAGSEKMTKGFGPLLPGFKHVAWGDHDGLHAAINENTAAILIEPVQGEGGIRPLSDQDLKALRDLCDEHGILLILDEVQCGMGRTGKLFAHEWAGIEPDIMMVAKGIGGGFPLGAVLATEEAASGMTAGTHGSTYGGNPLACAVGSKVMDIVADPAFLQDVNRKAGQLRQGLEGLVSSHPEVFEAVRGQGLMLGIKCKAPNTDVVSAGYDAQVTTVPAADNVVRLLPALNISDDDINEALKRLDAAATQVEKAMQKA

SEQ ID NO: 125021 - protein, 304 aa, Unknown
  Bacterial polypetide isolated from the Sargasso Sea
MSYLAKNYKRRKISFNKGKGSFLYSSKGVRYLDFVQGIAVNSLGHSNPNLNKALLKQSKKVWHVSNAFEIPEGERLAKRLTKNTFADYVLFQNSGAEATEAAVKAARKFFYVRNKPFKNRILCIKNSFHGRTLAAIYASGSKKMTEGFGPKVPGFDHFEFGDHEALKKAITKKTAAIMVEPVLGEGGIKVIPKWCLKALRKICNQKKILLIIDEVQSGIGRSGKFFAFEYSGIKPDIVPIAKGIGGGFPIGAVLMNKKVAKGMTPGSHGSTFGGNPLAMEIGNAVLDQILKKYFLKNVQKNSKY

SEQ ID NO: 125022 - protein, 232 aa, Unknown
  Bacterial polypetide isolated from the Sargasso Sea
HFSFGDHNSLKKKINKNTAAIMVETIMGEGGIKVIPDWCLKELRALCNKKKILLILDEVQCGIGRSGDFFAFEKSKVKPDIVPIAKGIGGGFPIGAVLMNKKVASGMTPGTHGSTFGGNPLAMAVGNTVMDILSNKKFLNKVKNLSKYFLLKLNEIKEKYPNVIKQIRGRGFLIGIQLYKDQNEFIKKLMNNQLLTIRAAENVVRILPPLNVKKNEIDLAIKIIEKVSSQIK

SEQ ID NO: 125023 - protein, 392 aa, Unknown
  Bacterial polypetide isolated from the Sargasso Sea
MTSKYIMNTYAPSDLTFDRGLGSWLFDDKGHKYLDFASGIAVNSVGHSHPNVVSAIQKQAAKLIHTSNLYNISQQEKLAKRLCDLSFADCVFFSNSGAEANEGAVKVARRYMFEKGKPERNVILCVDGCFHGRTISMLSATSKKENRTGFGPLPGGFRHIAFNDLNSLAEQFAAKDVAAIMIEPVLGEGGAKSISKEFFKKAQKLANNNNCLVISDEVQTGIGRLGTLFGYEKTDLKPDIMAIAKGLGGGVPIGAVLASKKVASAMKPGSHGSTFGGNPLVTASANAVLDIVAEKDFLKILGHKIDYLSKELNKLMNQYPKFVAEVRGQGFLRGLRLFDPVNEIQNELKKNKVLFVAAAENVLRLLPPLTVSIEEIDIAISALRKVACKGIK

SEQ ID NO: 125024 - protein, 213 aa, Unknown
  Bacterial polypetide isolated from the Sargasso Sea
MLSWSRQSWEKGALKLFQDFCLKGLRKLCNKKKILLILDEVQCGIGRSGKFFAFEYAKIKPDIVPIAKGIGGGFPIGAVLVNKKVASGMKPGTHGSTFGGNPLAMSAGNAVMDIMFKKGFLNNVSKNGKYFINQLDKIKDKYPKIIKEVRGKGLLIGLCLHVNQAKFIQKLLDNNLLSVRAAENVVRLLPPLNVTKSEINLGLKIIEKVCKKF

SEQ ID NO: 125025 - protein, 329 aa, Unknown
  Bacterial polypetide isolated from the Sargasso Sea
MNNSEWIAIENKYYAQTVRRQPVVIEKGLGAKVWDAEGKEYLDFVAGWAVDNLGHSNPVISQAIRDQADTLLQTSNQFYTIPQLKLAELLIENSAMDKVFFGNSGAEANEGAIKLARRYGMLNKDGAYEIITALNSFHGRTLGTVAATGQPHYQENFAPLLPGFVHVDYNDVDAIINATTDRTAAIMLEPVQGEGGVIVPSDDYLPRVREWCDKNNILLILDEVQTGIGRLGSLFGYQEYGIEPDVMTLAKGLGFGLPIGAFLSKEYCMALVPGDHGSTFGGNALTTAVAFAGTDHLLSSGVLQNVKDMEIYFMNALNQLKEKYGFINE

SEQ ID NO: 125026 - protein, 187 aa, Unknown
  Bacterial polypetide isolated from the Sargasso Sea
RICNEKKILLILDEVQCGIGRSGKFFAFEYSKIKPDIVPIAKGIGGGFPIGAVLMNRKVASSMTPGSHGSTFGGNPLAMSVGNAVLDQIFKKNFLKDIVKNSKFFHKQLKDIQMEYPSIIKEVRGIGLLIGLQLYKDQSRFIKKLEDNKLLTIRAAENVVRILPPLNVKKSEINLALKIIRKVCKAF

SEQ ID NO: 125027 - protein, 387 aa, Unknown
  Bacterial polypetide isolated from the Sargasso Sea
MSALAPNYKRKNLSFIRGKGSFLITADGDKYLDFVQGIAVNSLGHANKKLISAINKQSKKLWHVSNAFRIPEGEKLAKKLVKKTFADAIIFQNSGAEATETAIKVARRYFYSINKEHKNRIICIKNSFHGRTIAAIHASGSKKMTEGFGPKVPGFDHFEFGDHKKLKKLIKKNTAAIMIETVMGEGGIKVIPNWCIKAIRKICNQKKILLILDEVQCGIGRSGKFFAFEYSKVKPDIVPIAKGIGGGFPIGAVLMTKKVAKAMVPGTHGSTFGGNPLAMAVGNAVLDQINKNLLLNVNKMSKYFINELNKIKIKYPKVIKEVRGVGLLIGLQLFKDQTEFIKKLMENKLLTIRAAENVIRILPPLNVTKREIDIALKIISKVCNQIK

SEQ ID NO: 125028 - protein, 303 aa, Unknown
  Bacterial polypetide isolated from the Sargasso Sea
MKEEKKLLETYQKVMVPNYLPADFIPKSAKGSRVWDSNDKEYIDLGGGIAVNSLGHANDELIEVLSAQSKKLWHLSNFVASEEAIKLGEKLTDNTFADKVFFCNSGSEANEAAIKIVRKFHSSINQDKTEIISFNNSFHGRSILNITLGGSEESGKEFSPLIERIKHAIFNDINSVKNLISDRTAAIIIEPIQGETGIVEANKEFLKEIKSLCDSNSISLIFDEVQSGVGRTGHLYAYMKYEIEPDILTTAKGLGGGFPIGATLVSDNLAQTLQPGTHGSTFGGNHLACAVANKVLDIINCPD

SEQ ID NO: 125029 - protein, 337 aa, Unknown
  Bacterial polypetide isolated from the Sargasso Sea
MNFNEYPIESLMYITNRPEIVFTHGKGSWLYDNNGKRYLDFIQGWAVNSLGHCNEGMIEALNKQAQLLLNPSPAFYNEPMAKLAGLLTQHSCFDKVFFANSGAEANEGAIKLARKWGKKFKDGAFEIITFDHSFHGRTLATMSASGKPGWDTIYAPQVPGFPKADLNDIASVEKLINAKTVAVMLEPIQGEGGVIPATREFMQQLRALTKQHNLLLIVDEVQSGCGRAGTLFAYELSGIEPDIMTLGKGIGGGVPLAALLSKAEIAVFEAGDQGGTYNGNPLMTAVGYSVISQLTAPGFLEGVRARGEYLRAKLLELSKERGFQSERGEGLLRALLL

SEQ ID NO: 125030 - protein, 411 aa, Unknown
  Bacterial polypetide isolated from the Sargasso Sea
MNDLTVTRQTFDEVMVPVFSPAGFVPDRGLGSRVWDTQGRDYIDFAGGIAVTALGHAHPELLKVLHEQGGKLWHIGNGYTNEPVLRLAKRLEALTFADRAFFANSGAEANEAALKLARRVAFDRHGADKAEIISFTQSFHGRTFFTVSVGGQPKYSEGFGPVPAGITHLPYNDIEAAKKAIGAQTCAVIVEPIQGEGGVIPADPAFLKALREACDQHGALLIFDEVQTGVGRSGYFYAYQETGVTPDILTTAKALGNGFPIGAMLTTNELAAYFKVGVHGTTYGGNPLGSAIAEKVVELISDPKLLEGVHARSEALKGQLAKLNDRFGIFKEVRGKGLLIGAELTEAFKGRAKDFVTAAGKHGVIMLMAGPDVLRFVPSLIIPLDDMYEGFARLAKAIDEVVGATAEAAAR

SEQ ID NO: 125031 - protein, 410 aa, Unknown
  Bacterial polypetide isolated from the Sargasso Sea
MTTSTVTRQTFDEVMVPVFSPAPFVPDRAEGSRVWDTAGREYIDFACGIAVTSLGHGHPELLKVLDEQGRKLWHIGNGYTNEPVLRLAKRLESLTFADRAFFANSGAEANEAALKLARRVAFDRHGADKYEIVSFVQSFHGRTFFTVSVGGQPKYSEGFGPVPEGIKHLPFNDIEAAKAAIGPQTCAVIVEPVQGEGGVIPADPAFLKALREACDANGALLIFDEVQTGVGRTGQFYAYMDTGVTPDILTTAKALGNGFPIGAMLTTNELAAHFKVGVHGTTYGGNPLASAIADKVVELISDPALLEGVRERSVRLKGALERINARFGIFKDVRGKGLLVGAELTAAFDGRAKDFVTAAAENGLIMLIAGPNVLRFVPSLVIPFDQLDEGMKRFEKAVEQVLAAQEATAR

SEQ ID NO: 125032 - protein, 291 aa, Unknown
  Bacterial polypetide isolated from the Sargasso Sea
MKNYKPYPISFEKGKGIYLYTKKNEEYIDAISGIGVCCLGHGDKKITKVISNQANKLLHTSNIYEINKQKELAKNLCKISSMKSVFFCNSGSEANETAMKLARLHANKNNLKNPKMIVFKNGWHGRSFMTLAATSSESAKKGFSPLPGGFITLPLNDINEIHKVIKLKQVSAIMIEVIQGEGGINISEKNFLKKLRDITKKKDILLIIDEVQTGIGRTGKWFAYQNFGIIPDIVTSAKGLGNGVPIGACMGNQKVSKLFEPGSHGSTFGGNPFVSTISLEVLKIIKERNLL

SEQ ID NO: 125033 - protein, 284 aa, Unknown
  Bacterial polypetide isolated from the Sargasso Sea
MLEDTFYSKGKPEKNRILCIKNSFHGRTLAAIFASGSKKMTEGFGPKVPGFDHFDFADHKGLEKAITKKTAAIMCETAMGESGIKVIPDWCLKGLRKLCNKKKILLILDEVQCGVGRSGKFFAFEHAKIKPDIVPIAKGIGGGFPIGAVLMNKKVAPAMTAGSHGSTFGGNPLAMSVGNAVMDQMFKKGFLQNVQKLSKYFINELNLIKEDYPDIIKEVRGIGLLIGLQLFEDQSKFIKKLELNKLLTIRAGENVVRILPPLNVKKQEIDLAVKIIRKVCENYN

SEQ ID NO: 125034 - protein, 159 aa, Unknown
  Bacterial polypetide isolated from the Sargasso Sea
MPDIMAIAKGLGGGFPIGACLATNKAASGMTKGTHGSTFGGNPLACAVARAVLDEIISPGFLEEVQRKSKIFMQELSRILDQYSDIFEELRGEGLMLGLKCKVDNMELIETGYDQKLLLIPAADNVIRILPALNITDKEIREGINRIETIAASFQEKIK

SEQ ID NO: 125035 - protein, 188 aa, Unknown
  Bacterial polypetide isolated from the Sargasso Sea
KLCNQKKILLILDEVQCGIGRSGNFFAFEQSNVKPDIVPIAKGIGGGFPIGAVLMNKKVAAGMTPGTHGSTFGGNPLAMAIGNTVIDIVSDKKFLNNVKNLSNYFLIKLNHLKKKYPNIIKEIRGKGLLIGIQLHIDQTNFIKKLMDNKLLTIRAAENVVRVLPPLNVKKNELDKAIKIIDKVCVEII

SEQ ID NO: 125036 - protein, 380 aa, Unknown
  Bacterial polypetide isolated from the Sargasso Sea
MQTYNRKPVSFVKGEGVYLWDNNGKKYIDALCGLAVTSLGHSNELISNVLSKQSKTLIHTSNAFQIDTQKNLATRLCKLSGMTNAFFCNSGAESVETAIKIARKYGNDHNISTPKILVMENSFHGRTLAALSATSSKKSHEGFTPLVEGFVRAPFDSVEKIELALHNHEDIVALLTEPIQGEGGIKIPKPGYLKKLRDICNDKNLLFMVDEVSSGFCRTGKWFGYQHDHITPDVVMVAKALGNGVPIGACLASGKASNLLKPGSHGSTFGGNYLSTSVGLQVLDIMRDMNLCRNAREMGDYFSKKLNERLANKKRVKEIRSKGLMIGIELDEECTDIVIMALDNGLVLNVTKDRIIRMLPPLIINKSQIDEIVGILDKII

SEQ ID NO: 125037 - protein, 390 aa, Unknown
  Bacterial polypetide isolated from the Sargasso Sea
MSHLVKNYNRRKIAFKRGKGSYLYSTNGKKYLDFVQGIAVNSFGHSNPYLSKAINKQTKKVWHVSNAFIIPEGEKLAKRLTQKTFADYVLFQNSGAEATEAAIKAARRYFYAIGKPHKNRILCIKNSFHGRTLGAIFASGSKKMTEGFGPKVPGFDHFKFGDHNGLKKAITKNTAAIMCETAMGESGIKVIPEWCLKELRKICNKRKILLILDEVQCGVGRSGKFFAFDYAKIKPDIVPIAKGIGGGFPLGAVLMNKKVASTLTAGSHGSTFGGNPLAMSVGNAVMDLIFKKGFLKNVQKISKYFMVELKKIKEDYPEIIKEVRGIGLLLGLQLHGDQTKFIKELEKNKLLTIKAGENVIRILPPLNVRKQEIDLAIKIIRNTCNQESNL

SEQ ID NO: 125038 - protein, 389 aa, Unknown
  Bacterial polypetide isolated from the Sargasso Sea
MNNILPTYPRSELTFTHGEGSYLYEKSGEKYLDFGTGIAVNSLGYSHPYLNQKLREQSEKLWHLSNVYQIPEQELLASRLCDLCFADYAFFCNSGTEAVEASIKVARRYFHKTKNSKVKKEIISFSGSFHGRTIGALAAQGPEKMETFNTAVNDFKFLEFGDHELLKSSINENTAAVIIEPIQGEGGVREVPTFCLEAIRKLCDENEVLLIFDEVQCGMGRTGKMFAYQWSNIEPDIMTIAKAIGNGFPIGACLTSKKVGDAMEFGSHGSTFGGNPLACSVGNAVLDLMTSPKFFSEVVTVSEKLLLDLNKVANDYPDIIEGIRGKGFILGLKCNINNEDFVKQARKNFILTVKASDNVVRLLPPINLSNSECDEAIDKIRSTCKELTS

SEQ ID NO: 125039 - protein, 395 aa, Unknown
  Bacterial polypetide isolated from the Sargasso Sea
MSHKVYLPTYPPKPMVLERSRGAVIWDLEGKDYIDFGAGIAVSSLGHQDPELLLAISEQASKLWHTSNLFLTEPPVRLAAELVDASFADRVFFCNSGAEANEAAIKLVRKYAYLEHPEDKREILSFDGSFHGRTLATVTATSQPKYQEGFGPLPGGFRYAAYNDFEEAEKAIGPQTCAVLVEPLQGEGGVNPARPGFLKHLRELCDRHQALLIFDEIQCGMGRTGKLFAHEWEEGVVPDVLTLAKALGCGLPIGAMLCSEKVSQAFKPGDHGTTFGGNPIVASVARAALKKINTPQMMAHVIKQGEAIRGRLHSLNDELNLFGEIRGKGLMLGGVLHEAWKGRAGEIVSSALNHGVLILVAGPDVVRLVPPLTITGDEVQTGLERLTKALKELAP

SEQ ID NO: 125040 - protein, 391 aa, Unknown
  Bacterial polypetide isolated from the Sargasso Sea
MKNYLMNTYNRKNISFVKGKGSYLWDQNGKKYLDALCGLAVTSLGHSNAKISEVISSQSNTLIHTSNAFVIDQQEELAKKLCQLSGMSSAFFCNSGAEAVEASIKIARKYGNDNNIDNPKIIVMENSFHGRTMAALSATGSGKAHKGFYPLLDGLLRVPFDNVEQIKLLAEKHSDIVAILLEPIQGEGGIIIPSNDYLNQLRKICDDNKWLLMIDEVQSGFCRTGKWFAYQHNEIIPDVVTVAKALGNGVPIGACLAASKASKILIPGSHGSTFGGNFLSASVGLKVIEVMRDMNLCLNARTCGNYIKSELINALEGLPIVKEIRCKGLMIGIELKVKCIDLVEKALDNGLVINVTKEKIIRMLPPLIITREESDEIVKIIKKIVGEVEYE

SEQ ID NO: 125041 - protein, 140 aa, Unknown
  Bacterial polypetide isolated from the Sargasso Sea
MNSVANNYNRKKIVFSHGKGIYLFTNKGEKYIDLAAGIAVNLLGHSNKDLINALNVQSRKLWHVSNLYEIEEQVTLANKLTSCSFAHKVFFCNSGAEAVECTIKAARRYHFSKGKPEKTEIITFKGSFHGRTLGNNRSCK

SEQ ID NO: 125042 - protein, 349 aa, Unknown
  Bacterial polypetide isolated from the Sargasso Sea
MSVQHDAVQRADFDQFMVPNYAPAAFVPVRGLGSRVWDQSGRELIDFAGGIAVNVLGHCHPALVAALTEQANTLWHISNVFTNEPALRLGKKLVEATFAERVFFCNSGAEANEAAFKLARRVAHDRFGPEKHEIIAATSSFHGRTLFTVSVGGQPKYSDGFGPKIQGITHVPYNDLEALKAAISDKTCAVVLEPVQGEGGVLPAEKAYLQGARELCNAHNALLVFDEVQSGMGRTGELFAYMNYGVVPDILSSAKSLGGGFPIAAMLTTTDLAKHFSPGTHGTTYGGNPLACAVGEAVLDIVNTRQTLDGVKTKSEQFKTRLLALGKQYGLFEQVRGMGLLLGCVLNEA

SEQ ID NO: 125043 - protein, 252 aa, Unknown
  Bacterial polypetide isolated from the Sargasso Sea
PNSKDDFGPHTPGFVSVEFGSSQAVEEAINKNTAAVLFEPIQGEGGIIEPPDNWLPDVREICDKNNVLMILDEVQSGLGRTGKLFAYEHSNIRPDGLILGKALGGGFMPVSVFLSSEEVLQWMNPGSHGSTFGGNPLGSAIAKRSLELLEEENLIENSRIMGEYFKNSLLDLNSGIIKEIRGKGLWLGVEIDPEYIEGKALSKLLLSKGILCKETRETTIRFAPPLIITKEEIDWAVEIIGDTLKTIERKEK

SEQ ID NO: 125044 - protein, 383 aa, Unknown
  Bacterial polypetide isolated from the Sargasso Sea
MPTYGNKTLEFVKGKGCYLYTSQNKKYLDFASGIAVNSLGHCHPKLIEALNKQSKQLWHVSNLYKIKKQEQFAKLLCKNSFADKVFFTNSGTESIECGIKIIRAYHSYYKTKKTEIITFDGAFHGRTYGALSAQKNKKYSNGFGPMLRGFKQIEFNNKKKLISAVNKKTAGIIIEPIQGEGGIRPANLSFLKLLRDICNENKILLFFDEVQCGFGRSGKLFSHEWAKIKPDIMSVAKGIGSGFPLGACMSTNKACVAMTKGSHGSTYGGNPLAMCVGLEVLKVVSNKKFLSKIDKTARYFWKNLKELENTSKIISEVRGAGLLLGIKTNISNIEFSEQLKKNKLLNVPAADNTVRLAPPLIVSYKEIDKSISIIKKSMKELSK

SEQ ID NO: 125045 - protein, 245 aa, Unknown
  Bacterial polypetide isolated from the Sargasso Sea
MIQGFKFFKFNNFDSVKKLFEECENNDQKISGILVEPIQGEGGVIPGSKIFFKSLRDICDKYNSLLILDEVQSGVGRTGKMWGYENLGIEPDGFTLAKGLGGGHAIGALLVKEKANIFSPGDHASTFGGNPFACKAALTVLEEINRRNLINNVYLRGEQLSAGFQELSKKFPNIITGKRGLGLIQGLVINDEYADAKKITLKAFDKGLLVVPAGGNVVRIVPPLVISRREINILLDKLNSIFEEL

SEQ ID NO: 125046 - protein, 281 aa, Unknown
  Bacterial polypetide isolated from the Sargasso Sea
MSAILNTYNRKKISFKRGKGSFLYATNGKKYLDFVQGIAVNCLGHSNDYLNKAIQKQSKKVWHVSNVFTIPEQEKLAKRLKQKTFADYVAFQNSGAEATEAAIKFARRYFYSKGKPKKNRIICINNSFHGRTLATIFASNSKKATEGFYPKVDGFDHFNFGDHKGLERAITSRTAAIMVETIMGEGGIKVIPDYCLKGLRKLCNKKKILLILDEVQCGIGRTGKFLAFEHAKIKPDIVPIAKGIGGGFPVGAVLVNKKVASGMKPGTHGSTFGGNPLAMSV

SEQ ID NO: 125047 - protein, 373 aa, Unknown
  Bacterial polypetide isolated from the Sargasso Sea
LRGKGSFLYASNGKKYLDFVQGIAVNSLGHANPHLVKAIHKQSKKLWHVSNAFKIPEGERLAKRLTQNTFAESVIFQNSGAEATEAAIKVAKRYFYSIGNSRKNRILCIKNSFHGRTIATINASGSKKMMEGFGPKVKGFDHFEFGNHKKLKKMITKKTAAVMVEPIMGEGGIKVIPDWCLRDLRKICNKTKTLLILDEVQCGIGRSGKFFAFEHAKVKPDIVPIAKGIGGGFPIGAVLMTKKVASGMTPGTHGSTFGGNPLAMSVGNAVLDQIFKKEFLKNVKKLSRYFHFELNKLKEEFPKIIKEVRGIGFLIGLQLFNNQSKFIQKLMDNNLLTIRASENVVRILPPLNVKKKEIDLALKIIKKVCLTYK

SEQ ID NO: 125048 - protein, 398 aa, Unknown
  Bacterial polypetide isolated from the Sargasso Sea
MTSTKEYKDLEKKYYMQVVNRMAPVLVSGKGTVVTDNDGNDYLDFTAGWAVLNLGHSHDSVTEAIKDQAGKILQMSNLYYTTPQLSLAKTIVDNSDVDRVFFCNSGAEANEGAAKLARKWGKMKLNGAFEIITTLNSFHGRTQAMMAATGQPHYQDNWRPLMPGFVNVEYNNLQQIKDAYNDNTCAVLIEPVQGEGGVNVPDSDYLRSVQEFCKSKNILFMLDEVQTGMGRLGTLFGYQRFQGVEPDVMTLAKALGSGAPLGAFCSKEFCSVLEPGDHGSTFGGNALTTSAGAAAAEFMVKNNIPNMALESGKYMFEKLSELMKKFNFITEVRGMGLLIGLEMNKDLSGEIVGKALEKGLLINAVRPNMIRFMPPLNVSKDEIDQAVKVIDEILEESK

SEQ ID NO: 125049 - protein, 249 aa, Unknown
  Bacterial polypetide isolated from the Sargasso Sea
KKMTEGFGPKVGGFDHFKFGNHADFKKKITNRTAAVMIEPIMGEGGIKVIPTWCLREIRKICKKKKILLILDEVQCGIGRSGKFFSYEYANIKPDIVPIAKGIGGGFPIGAVLMTKKVSKAMVPGTHGSTFGGNPLAMSVGNAVMDEIFKKGFLSRVKSNSRYFISELNKIKTKFPKIIKEIRGVGLILGIQLHHDQTKFIDDLLKNKLLTIRAGENVIRILPPLNVNKKEIDMALKIINKVCNSYKNK

SEQ ID NO: 125050 - protein, 382 aa, Unknown
  Bacterial polypetide isolated from the Sargasso Sea
MPTYGERDLIFAKGKGCYLYTNSGKKYLDFAGGIAVNSLGHCHPKLVNILKKQSEILWHTSNLYKNNNQELFAKELCKKTFADKVFFTNSGVEAIECGLKVIKTYWNLNNKDKKNIITFKGAFHGRTFAALSAQKNKTYSEGFKPLLSGFKNISFNDEKALMENINEKTAAILIEPIQGEGGIRPASIKFLKFIKEICKKNDILLFLDEVQSGFGRSGKLYSHEWAKIKPDILATAKGIGSGFPLGACLATTKASVGMSKGKHGSTYGGNPLAVSVGREVLKIVSNKKFLKNVDAISRYLWKNLKKLESQYDEIVDVRGAGLLLGIKTKQNNIMISNRLKKNKLLSVPAGDNVIRLAPPLIINKKHVDDAINIINETLKNLS

SEQ ID NO: 125051 - protein, 387 aa, Unknown
  Bacterial polypetide isolated from the Sargasso Sea
MSSVLKTYNRKKIAFKKGKGSYLYSTKGKKYLDFVQGIAVNSLGHSNKALIKAVNNQSKKLWHVSNAFVIPEQEKLAKRLTQKTFADYVLFQNSGAEATEAAIKIARKYFYSIGKPQKNRIICVNNSFHGRTLATIFASGNKKFTDGFYPKVEGFDHFNFGDHDALEKKITKRTAAIMIETILGEGGIKVVPDFCLKHLRKLCNKKNILLILDEVQCGIGRTGKFFAFEHANIKPDIVPIAKGIGGGFPVGACLMTKKVAKCMSYGSHGSTFGGNPLAMSVGNAVLDEIFKNGFLKKVEEISKYFLAELYKIQFEYPKIINEIRGKGLLLGIQLNVNQANFIKKLMNNNMLVVKASENVVRLLPPLNVTKKDIDLAVTILKKVCKSY

SEQ ID NO: 125052 - protein, 346 aa, Unknown
  Bacterial polypetide isolated from the Sargasso Sea
IGHSNQVVADAIEHKSKTLLQTSNVFYTIPQLKLAEILIENSVLDKIFICNSGAEANEGAIKLARKWGKINKNRASKILTAYNSFHGRTISTLAATGQPKYHETFMPVTEGFDYFELNNIDSLKDKIDDDTVGIMIEVVQGEGGVNICSQDFIKSIRKICDEKNIIMIIDEVQTGIGRLGSFYGYEKFGIEPDVITLAKGLGAGVPIGAILAKDEYSVFVPGDHGSTFGGNALTSAAAYASSKFILENDISNNVNKLNSYFTSKLNELMSKFEIISEVRGMGLLIALEFSMDIAADMITECNKNGLLVNAVRPNALRFMPPLTVTEDEIDQAISKLQKSLENVLSK

SEQ ID NO: 125053 - protein, 380 aa, Unknown
  Bacterial polypetide isolated from the Sargasso Sea
MLPNYSPANFIPKEARGSRIWDQDNKEYIDFGGGIAVNSLGHSHPDLIKALSEQSKKFWHLSNYLSNEPAINLAKKLTDLTFAENVFLSNSGTEANEAAIKIARKFHSSKNNQRNEIVSFQNSFHGRSLLNISLGSSEMHRSGFEPLMPGIKHGEFNNVSNLGSLITKKTAAVIVEPVQGEAGVYTASKEFLKKLREECTKQGALLIIDEVQSGIGRMGSLYGYMQYDIKPDIVTSAKGLGGGIPIGATLTSKVIGECMQPGTHGSTFGGNPMSCAVANEVVSIVSEKDFLNDVLEKEQLFLDLLSEFKTKGIFSEVRSAGLWIGCDLIDKTANEVLDQAYDAGLIMVSAGSSCLRLAPALNITNEEIEQGINLLKEVLL

SEQ ID NO: 125054 - protein, 335 aa, Unknown
  Bacterial polypetide isolated from the Sargasso Sea
SNFGTPATFFLTEPPVRLAAELVDASFADRVFFCNSGAEANEAAIKLVRKYAFLEHPEDKREILSFDGSFHGRTLATVTATSQPKYQKGFGPLPGGFRYAPYNDFEEAEKAIGPQTCAVLLEPLQGEGGVNPARPGFLKHLRELCDRHQALLIFDEIQCGMGRTGKLFAHEWEEGVVPDVLTLAKALGCGLPIGAMLCSEKVSQAFKPGDHGTTFGGNPIVASVARAALKKINTPQMMAHILKQGEAIRGRLHSLNDELNLFGEIRGKGLMLGGVLHGAWKGRAGEIVSTALNHGVLILVAGPDVVRLVPPLTITGDEVQTGLERLTKALKELAE

SEQ ID NO: 125055 - protein, 340 aa, Unknown
  Bacterial polypetide isolated from the Sargasso Sea
ITEAIKKQSQELIHTSNAFQIDSQEKLAKRLCQLTGMENAFFCNSGAEAVEAAIKIARKHGHDRGYENPKIIVMSNSFHGRTMGAMSVTSNEASHLAFGPILEGLVRVKFNDINEIKDVLTAHKDIAAILLEPIQGEGGIISCSDDYMKELSDMCIANKILLMADEVQSGFCRTGKWFSYQHFNVLPDVVMVAKALGNGVPIGACLARGDAAKVLSAGMHGSTFGGNYLSTSVGLCILDIMRDEHICNHVRAITSTMKNAIHSKIKDLKAVSDIRIHGMMIGIELDCNCTELVVKALEKGLVLNVTKDRIIRLLPPLICEDKHILNIVDIIEQLIKENYE

SEQ ID NO: 125056 - protein, 331 aa, Unknown
  Bacterial polypetide isolated from the Sargasso Sea
KQSEKLWHTSNLYKNNNQELFAKELCKNTFADKVFFANSGAEAIECGLKVVKSYWNLKNKNKKNIITFKGAFHGRTFAALSAQKNKKYSNGFTPLMSGFKNIPFNDEKALKKNINQETAAILIEPIQGEGGIRPASLKYLRYIRNICNKNNILLFLDEVQSGFGRSGKLYSYEWAKIKPDILATAKGIGSGFPLGACLATKQASIGMTQGKHGSTYGGNPLAVSVGREVLKIISEKNFLKKVDSISRYLWKNLKKLESHYNEIVEIRGAGLLLGIKTRQNNIMISNKLKKNKLLSVPAGDNVIRLAPPLIINKKHADEAISIINQTFKKII

SEQ ID NO: 125057 - protein, 60 aa, Unknown
  Bacterial polypetide isolated from the Sargasso Sea
NTDEDSDLAWEICLKFRDNGLLAKPTHGNKIRLAPPLVMTEDQINECLEIIEKSLNEFRN

SEQ ID NO: 125058 - protein, 160 aa, Unknown
  Bacterial polypetide isolated from the Sargasso Sea
PDILILAKALSGGTYPISAVLCDSEIMEVIQPGQHGSTYGGNPFAASIAKKSLEILIEEKLPENAKKLGEIFRSKINDYIKTSNIVKLVRGKGLLNAIVIDDHSESQTAWNICLKLRDNGLLAKPTQGNIIRFAPPLVMTEDQLNECIEIITSTLVDFEK

SEQ ID NO: 125059 - protein, 72 aa, Unknown
  Bacterial polypetide isolated from the Sargasso Sea
IVRGKGLLNAIVIDSSVESDMAWNICLKLKDNGLLAKPTHGNIIRFAPPLVIKREELEECCDIIETTIKSFE

SEQ ID NO: 125060 - protein, 135 aa, Unknown
  Bacterial polypetide isolated from the Sargasso Sea
DDIMLCIKPGEHGSTYGGNPLACQVAMAALQVILDEKLAENSFKLGNLFRDEINHFIDSNNLVSKVRGKGLLNAILINDSPESSTAWDICMKLKENGLLAKPTHGNIIRLAPPLIINEHQLLECVSIIKSTISNF

SEQ ID NO: 125061 - protein, 87 aa, Unknown
  Bacterial polypetide isolated from the Sargasso Sea
RSEMNKYIKSSKIVKLVRGKGLLNAIVINDSQDSQTAWNICLKLRDNGLLAKPTHGNVIRFAPPLVMTEDQLYDCVNIIISTIKEFE

SEQ ID NO: 125062 - protein, 220 aa, Unknown
  Bacterial polypetide isolated from the Sargasso Sea
GVYVPSEGYLKAAKELCEEHNVLFIADEVQTGIARTGRLLATCGNCSCSDKHCSGTPEVKPDILILGKALSGGVYPVSGVLANDDIMEVITPGSHGSTFGGNPVAAAVGMAALQVIKDEELAQNAYELGELFREELGKFIETSDLVVKVRGKGLLNAIVINDTEESSTAWDICMALKENGLLAKPTHGNIIRFAPPLVMTKEELLDCVSIIIKTLTEFKK

SEQ ID NO: 125063 - protein, 289 aa, Unknown
  Bacterial polypetide isolated from the Sargasso Sea
MKIIIGAHNYKPIPVVLSKGKSVYLWDVDGKKYFDFLSAYSAVNQGHCHPKIIEVLNFQANKLTLTSRAFYNDILGVYEKFITNIFKYDKVLPMNTGVEAGETAIKLARKWGYLKKKIPNNKARIIFANGNFWGRTLAAISSSDDPLSFKGFGPYMPGYDIIPYNDLQSLENKLKNHETAAFMIEPIQGEAGVIVPDQGYLSNVRNLCTKYNVLLIVDEVQTGLGRTGKMLASDYEEVRPDILILGKALSGGVIPASAVLANNDIMLCIKPGEHGSTFGGNPLASSICL

SEQ ID NO: 125064 - protein, 260 aa, Unknown
  Bacterial polypetide isolated from the Sargasso Sea
CSSSTDPDCFEDYGPFMPGFEIIPYNDLSSLKNALKDENVAGFMVEPIQGEAGVIVPDEGYLNEAYNLCKENNVLFIADEVQTGLGRTGKMLCSDYANIKPDILILGKALSGGILPISAVLSSDEIMLTIKPGQHGSTYGGNPLACRVAQVALEVIIEEGLPENAFQLGKLFREEMNKIIQKSDLLNIVRGKGLLNALVVNDSPLSSTALDICHALKDNGLLAKPTHGNIIRFAPPLTINQSELLECCKIIEKTILSFKN

SEQ ID NO: 125065 - protein, 135 aa, Unknown
  Bacterial polypetide isolated from the Sargasso Sea
MTRSEELIEMEHRYGAHNYHPLPAVLERGEGVYLWDCEGKKYFDFLSAYSAVNQGHCHPKIIKALNDQASTLTLTSRAFHNDILGEYEKFMTDLFGYDKVLPMNTGVEGGETANKLARKWGYLKKGIAENKARII

SEQ ID NO: 125066 - protein, 163 aa, Unknown
  Bacterial polypetide isolated from the Sargasso Sea
TYVRPDILILGKALSGGTYPISAVLCDSEIMEVIQPGQHGSTFGGNPLASSIAKKALEIIIDEKLSQNARVLGKIFRSEMNKYIKTSKIVKLIRGKGLLNAIVINDTKDSKTAWNICLKLKHNGLLAKPTHGNIIRFAPPLVITEEQIYDCISIIISTLKEFE

SEQ ID NO: 125067 - protein, 388 aa, Unknown
  Bacterial polypetide isolated from the Sargasso Sea
MAQEILNDLSHYHLDLEKKYGAHDYHPLPVVLAKGEGVYLWDVNGKKYYDFLSSYSAVNQGHCHPKLVELIKEQAEILTLTSRAFHNNKLGEYMEYTTKLFGYDQLLPMNTGAEGVETSIKISRKWGYLKKKIDDNKAKIIVCDNNFHGRTTTVISFSSDSGSKDYFGPHTPGFIHVPHNDLDALENILKNEKDVVSFLFEPIQGEAGVNVPDDNYIKGVRDLCSRYNVLMIADEIQTGLGRTGSLLASCGHCSCSSSCEKQDSYVRADILILAKALSGGTYPISAVLCDSEIMEVIQPGQHGSTYGGNPFAASIAKKSLEIIIDEKLSQNARHLGKIFRDRMNDYIKKSKIVKSVRGKGLLNAIVINDNPESKTAWNICLKLRDNGL

SEQ ID NO: 125068 - protein, 295 aa, Unknown
  Bacterial polypetide isolated from the Sargasso Sea
KVDENQQKIVVCNNNFHGRTTTVISFSTDPGSKDFFGPHTPGFIHIPHGEISALENEFKKDKNIVAFLVEPIQGEAGVNVPEPEYLKKVRSLCSEYNVLMIADEIQTGLGRTGSLLASCGNCSCESSCQQQSTYVRPDILILAKALSGGTYPISAVLCDSEIMEVIQPGQHGSTFGGNPFAASIAKKALEIIIDEKLAQNARVLGEIFRSEMNKYIKSSKIVKLVRGKGLLNAIVINDSEDSQTAWNICLSLRDNGLLAKPTHGNVIRFAPPLVMTEDQLYDCITIITSTIKEFE

SEQ ID NO: 125069 - protein, 203 aa, Unknown
  Bacterial polypetide isolated from the Sargasso Sea
MMKALVCKNFGPVDDLVWEEVTDPIPKNGDVVVDIKAAALNYPDNLIVQGLYQFKPNFPFSPGSEGAGIISALGENVHDFKIGDKVSFLSQWGSFAERISINQKQLIKMPENMNFELASAIQLTYGTSYHALIQRGRLKDEDEVLILGCSGGVGLAALDIAKAYNIRVVAAVSSEEKADLCKQYGADEVVIYGSNKLDTEDQK

SEQ ID NO: 125070 - protein, 229 aa, Unknown
  Bacterial polypetide isolated from the Sargasso Sea
EVRKNTGGVEEVRSREKLDMMTGNLGIAHTRWATHGGVTTENAHPHLSQNGEFAIVHNGIISNYQKLRERLIGEGLQFRSTTDTEVFVNLVEEAFAQKNDVLGAFLKALKQIQGTYSIVLLSSHDPENLYCVKQDSPLIIGLGEGCNYIGSDINAFLEHTRKAVVLDDGEFAVISRERYEISDVGKREEREKSILQIDWDTETTKKGGFSHYMIKEIFDEPQTARQALD

SEQ ID NO: 125071 - protein, 68 aa, Unknown
  Bacterial polypetide isolated from the Sargasso Sea
AALGPYQHFMQKEIFEQPKAIASTLDGIDTISPALFDAADGTRALLSRVRNVLLLGCGTSYYAGEIVS

SEQ ID NO: 125072 - protein, 285 aa, Unknown
  Bacterial polypetide isolated from the Sargasso Sea
MKILHCNEYGPIENLEWVDIDSPTPNVDEVLITVKAAALNYPDYLIVQGLYQFKPSLPFAPGNEGAGIIKKIGKNVKNFKQGDRVYFMAPYGAFAEEICVNAFGVSHIPTDISFEIAASYQMAYGTSYHALIQRGQIKEGDELLVLGASGGVGLAALDIAKAKGARVVAAVSTDEKAKICLEYKADDTVVYGRGPKDKKESKAFSTELKSKSLKGGYDLIYDPIGDCYAEPAFRSIGWKGRYLVVGFAAGEIPRLPINLALLKGASIVGVFWGSFTGREMNVNHE

SEQ ID NO: 125073 - protein, 93 aa, Unknown
  Bacterial polypetide isolated from the Sargasso Sea
MCGISGIIDQKPVTRNLVTSIANLEYRGYDSCGMAMLNGKGIEVRKNIGGVEEVRIREKLDMMTGNLGIAHTRWATHGGVTKENAHPHLSQNG

SEQ ID NO: 125074 - protein, 87 aa, Unknown
  Bacterial polypetide isolated from the Sargasso Sea
MCGIVGYIGNKDPVPILLKGLKRLEYRGYDSSGIALLEEDNLTHIKKAGKVSDLQQLVDDSSIKGNCGIAHTRWATHGAPNDINAHP

SEQ ID NO: 125075 - protein, 96 aa, Unknown
  Bacterial polypetide isolated from the Sargasso Sea
MCGIVGYIGNKDPVPILLKGLKRLEYRGYDSSGIALLEQDNLTHIKKAGKVSDLQQLVDDSSIKGNCGIAHTRWATHGAPNDINAHPHLDHTGSIA

SEQ ID NO: 125076 - protein, 316 aa, Unknown
  Bacterial polypetide isolated from the Sargasso Sea
LYFGGTYEEQDAGIFEDLMLKEIFDQPVSLTNVLSGRVSSDGLRVELGGLDLNPEEIQSLERINLVACGTAFFAAKIGATIIRKHSDVTVEAFRGSEFPARKVCGPNTLTVGISQSGETKDTLDALQEARIAGSKITSFCNVIGSTIPRLTGNGAYLYAGPEYAVASTKVFTNMVAITLLFSLSFSKMSSLERTSIAQDLRELPNKIALYLRESEGSLDEAVSLLENASSAIFIGRGISAPLVEEGALKMMEVAYLPCLAYPGGELKHGPIALIEEGTPVIAVAPSCDELGFMESSIREWQARGAKVILITDNEGA

SEQ ID NO: 125077 - protein, 252 aa, Unknown
  Bacterial polypetide isolated from the Sargasso Sea
MAMLNGKGIEVRKNTGGVEEVRSREKLDMMTGNLGIAHTRWATHGGVTTENAHPHLSQNGEFAIVHNGIISNYQKLRERLIGEGLEFRSTTDTEVFVNLIEEAFAQKNDVLGAFLEALKQIQGTYSIVLLSSHDPEHLYCVKQDSPLIIGLGEGCNYIGSDINAFLEHTRKAVVLDDGEFAVISRERYEISDVGKREEREKSILQIDWDTETTKKGGFSHYMIKEIFDEPQTARQALDVPQEQIKQLAEMFQ

SEQ ID NO: 125078 - protein, 93 aa, Unknown
  Bacterial polypetide isolated from the Sargasso Sea
MCGIVGASGLNNQVPQLVNALSRLEYRGYDSCGIAVQDDGRLRSERTLRRVTDLQARVLTLGLEAQTCIAHTRWATHGAPSEMNAHPIMSGDT

SEQ ID NO: 125079 - protein, 224 aa, Unknown
  Bacterial polypetide isolated from the Sargasso Sea
IDWGATALTYNAEEVSAEEASSLYVFADPKFQGRVSIIDNVDDAYALGYLAVGVMDWTKSTDADFKNASDFLRKVHKNVRQYHADGAEGAALMKSGEILLEWTWNEVAFTLGWEEDAPETVFKRDTKEGSSTWVCGYTMMKDAPGSEQKAYDFLDAWLSDASAEYIVTEWGYGHTNKEVMATVGKENGWEPLASYTEGSLFQKPSDPALRERMIKEWELIKSGL

SEQ ID NO: 125080 - protein, 296 aa, Unknown
  Bacterial polypetide isolated from the Sargasso Sea
IQRRDKMKKIICKEFGPVDNLVWEDTEDHEPLPNEVVVDIKAAALNFPDYLIVQGLYQFQPPLPFTPGNEGAGIIKKIGSEVTKHKVGDRVSFMSAIGAFAEEIVLDQNLVFKMQDDMSFEVAASYQLAYGTSYHALVQRGNLSKDDEVLVLGGSGGVGLAAIDIAKAVGARVVAAVSSQEKAQICSDYGADDVVLYGSSKLEKEQQKTFTSELKAKSIKGGFDLIYDPIGDCFAEPSFRSIGWGGRYLVIGFAAGEIPKLPLNLTLLKGASIVGVFWGTFTALNQKQIKTISRNS

SEQ ID NO: 125081 - protein, 227 aa, Unknown
  Bacterial polypetide isolated from the Sargasso Sea
MIAISAENNLSETAFVDLTTDPFFIRWFTPKVEVNLCGHATLAAARILFDEYLPGEVDRVEFNSKSGRLSATREENLIYLNFPIDEPKKINENTLIEQALGHRPVDLLKGKDDILAVFDDEAIIKKITPDFEKLTQLESRGLIISSKSTSFDFVSRFFAPQSGINEDPVTGSAHTVLTPYWAKRLGKDKMIGFQCSARGGELQCWLKKDRVMIGGSTARYMDGTIRL

SEQ ID NO: 125082 - protein, 297 aa, Unknown
  Bacterial polypetide isolated from the Sargasso Sea
VHNGIVENYDELFQHFSLNKKNIKSETDSEVVAEIYNKLLNKFNNPIEAIKDLNKKIVGTFSFVFLVRGTNSIYATRRGSPLVLGISENFNAVSSDVLGLPDETKEIIFLEEDDLVSINESKVTIFNKKNDKIEREKHKFVAKKDFKIKGNFKHFMEKEIFHQSTSIEDTILNFADKKNQKVLLPKTNINFNKFSNLILIACGTAYHSCMIGKYWLETLSNFNVSIDIASEFRYKKININKNSIGIVVSQSGETMDTLKCISKFKEYGIPTISIVNVLNSSIARLSDFILPTIAGPE

SEQ ID NO: 125083 - protein, 141 aa, Unknown
  Bacterial polypetide isolated from the Sargasso Sea
PFSWKRFMYPVAMEGALKMKEVCYIHAEAYPAGEMKHGVNALIGEKMPSLVMAPTGISFNKMLSTINEIKARDGEVIGLTDNDSNEFTSLLSNYLIIDSYNYNLDVILYSINLQLLSFYTSLLLKINPDRPRNLAKTVTVE

SEQ ID NO: 125084 - protein, 82 aa, Unknown
  Bacterial polypetide isolated from the Sargasso Sea
MCGIVAYIGKEEAFPIILKGLKRLEYRGYDSSGVALLNGDIKLYKKQGKVSVLEEYTAAKSREAKVGIGHTRWATHGAPNDI

SEQ ID NO: 125085 - protein, 269 aa, Unknown
  Bacterial polypetide isolated from the Sargasso Sea
MAYDGTELPVRTDEITTADITTRDIDRGDAPHFLLKEIQEAPESVHKTLRGRIIETDGKLLVHLGTETIPAAIQNAFANKQIKRIIAIGQGTAAVAARTIPQFLSPLIEDQELTVEAQLATELSGFSMAADMSDTLVVAVSQSGTTTDTNRTVDLIRQRGGHVIAIVNRRGSDLTDKSHGVLYTSDGRDVEMSVASTKAFYAQVVAGVLLSSALANLIDTARNQTEILSALRQLPKSMEQVLTTRPSIAIAAQRHAHPKTILGSSRKRS

SEQ ID NO: 125086 - protein, 164 aa, Unknown
  Bacterial polypetide isolated from the Sargasso Sea
MFSGAAFAEDSELVVFDWGGYEDPGFFQAYIDKYGDAPTYSFFSDEEEAFQKVRAGFRADLGHPCSQSVVKWRNAGIIVPIDTSRLSNWDKVMPEFANMEGWNVDGKQWAVPIDWGATALTYNTEEVSAEEASSLYVFADPKFQDRVSLVDNVDDAYALGFLAV

SEQ ID NO: 125087 - protein, 110 aa, Unknown
  Bacterial polypetide isolated from the Sargasso Sea
SIAVIDTEEKGKIFAAKQKSPLLVGKGIEENFIASDPLAIAGLAESFYLLEEGDFAEITKEEIKIVGSNGEALSREETIIDTSGKEASKEGYKHFREKEIYEQPKAITKA

SEQ ID NO: 125088 - protein, 218 aa, Unknown
  Bacterial polypetide isolated from the Sargasso Sea
MHCKEFGPVENLVWENIDSPEPGDDEVLISVKAAALNFPDYLIVQGLYQFKPEFPFAPGNEGAGVIKKIGKNVTKFKEGDRVYFMSAYGAFAEEICMHELGTFAIEEDTSFEMAASYQMAYGTSYHALMQRGELKKDDELLVLGASGGVGLAAVDIAVAKGARVVAGVSNEEKAQICRDYGAADVVIYGEGPKDKDESKKLSLELKSKSLKGGFDIIY

SEQ ID NO: 125089 - protein, 46 aa, Unknown
  Bacterial polypetide isolated from the Sargasso Sea
MVNPSTVNAHPHSSETVSVVHNGIIENSTILKKVLEKKGYNFKSQT

SEQ ID NO: 125090 - protein, 162 aa, Unknown
  Bacterial polypetide isolated from the Sargasso Sea
MHCKEFGPVENLVWENIDSPEPGDDEVLISVKAAALNFPDYLIVQGLYQFKPEFPFAPGNEGAGVIKKIGKNVTKFKEGDRVYFMSAYGAFAEEICMHELGTFAIEEDTSFEMAASYQMAYGTSYHALMQRGELKKDDELLVLGASGGVGLAAVDIAVAKRA

SEQ ID NO: 125091 - protein, 299 aa, Unknown
  Bacterial polypetide isolated from the Sargasso Sea
RIYNYRELRSELEPLGYCFRSETDTEVVLCALDHWGIDALIRFNGMFALALWDRKGKILLIARDRYGIKPLYYAKQGEQFLFGSEQKAIKAFPDFQRKLNAPALLEYMTFQNIFTDQTLLQDIKLLSPGFYGVVSFKDRTFRQTRYWDYCFRESKGAYPPREEYAEELDRLFLQAVNRQLVGDVEIGSYLSGGMDSGSITAIASQNFPNLKTFTCGFDLSSASGIELGFDERFEAEAMSAKFKTEHYEIVLKSGDMERCLPKLAWHLEEPRVGQSYPNYYVAQLTSKFVKVVLSGSGGD

SEQ ID NO: 125092 - protein, 57 aa, Unknown
  Bacterial polypetide isolated from the Sargasso Sea
KKNGMKTCAVVNVIESSIARVSEFVSPIHCGTEIGVASTKAFLGQILILYILSLKLG

SEQ ID NO: 125093 - protein, 66 aa, Unknown
  Bacterial polypetide isolated from the Sargasso Sea
YYFTDKLGYKKIKKFSHSTFILPDTKSYSAPIIYSIPVQLIAYHLAVFLGTDVDQPRNLAKAVTVE

SEQ ID NO: 125094 - protein, 81 aa, Unknown
  Bacterial polypetide isolated from the Sargasso Sea
MCSIIGYSGSEIAAPIIVKGLKRMEYRGYDSVGVATESENQIELKKGTGKVTEVNSKFQLDTLPGRIGIGHTRWATHGKVT

SEQ ID NO: 125095 - protein, 183 aa, Unknown
  Bacterial polypetide isolated from the Sargasso Sea
MENYLIKNLENGQYQINYPFDTKFFESIERVEIIACGTSKHAAMVGSFLLEQFSGIPTNVFYASEFRYSPPPLLPNTLTIGVTQSGETADTIAAIDMEIKRRSSIKDKKFKPNVIAITNRKESSIGRQVSNIIDICAGIEVGVAATKTFFAQLLSFYGLAIKFAQIKGSQSADEIDKLIAELI

SEQ ID NO: 125096 - protein, 217 aa, Unknown
  Bacterial polypetide isolated from the Sargasso Sea
LTYNAEEVSAEEASSLYVFADPKFQGRVSIIDNVDDAYALGYLAVGVMDWTKSTDEDFKKASDFLRKVHKNVRQYHADGAEGAALMKSGEILLEWTWNEVAFTLSWEDDAPETVFKRDTKEGSSTWVCGYTMMKDAPGSEQKAYDFLDAWLSDASAEYIVTEWGYGHTNKEVMATVGKENGWEPLASYTEGSLFQKPSDPALRERMIKEWELIKSGF

SEQ ID NO: 125097 - protein, 333 aa, Unknown
  Bacterial polypetide isolated from the Sargasso Sea
MKAIICKKFAPVSDLVWEEVADPVAGPGEVVVDIKAAGLNYPDNLIVQGLYQFQPERPFSPGHEGAGVVSSVGEGVDVHSVGDSVAFFKGFGAFAEKIVLPAQMAFPIPESFPFHIAAGVFMVYGTSYHALVQRADINKDDEVLILGAAGGVGLAAVDIAKSFGARVVAAVSTKEKAEVCAGYGVDDVVVYGEEKLNKEGQKAFTKELKSKSVRGGFSIIYDPIGDCFAEPALRSIGWGGTYLVVGFAAGKIPSFPTNLMLLKGCAVSGVFIGRFQQEEPKQNAQNLKEIGELLGAGKLTPFISETIPMSDSVAAIERIARRGVVGKVVFVNS

SEQ ID NO: 125098 - protein, 283 aa, Unknown
  Bacterial polypetide isolated from the Sargasso Sea
MKILHCKEYGPVENLVWEDIDSPEPGDNEVIVTIKAAALNFPDYLIVQGLYQFKPEVPFAPGNEGAGVIKKVGKNVTRVKEGDRVSFMLPYGAFAEEACTHEFGVFPISDDITFEMAASYQMAYGTSYHALMQRGQLTEHDEVLVLGASGGVGLAAVDIAKAKGARVVAGVSTEEKAKICRDYGVDDVVIYGDGPKDKDESKAFAAELKSKSTHGGYSIIYDPIGDCYTEPAFRSIGWKGRYLVVGFAAGQIPKLPINLTLLKGASLVGVFWGSFTALEAETN

SEQ ID NO: 125099 - protein, 333 aa, Unknown
  Bacterial polypetide isolated from the Sargasso Sea
MKILHCKEYGPVENLVWEDIDSPEPGDNEVIVTIKAAALNFPDYLIVQGLYQFKPEVPFAPGNEGAGVIKKVGKNVTRVKEGDRVSFMLPYGAFAEEACTHEFGVFPISDDITFEMAASYQMAYGTSYHALMQRGQLTEHDEVLVLGASGGVGLAAVDIAKAKGARVVAGVSTEEKAKICRDYGVDDVVIYGDGPKDKDESKAFAAELKSKSTHGGYNIIYDPIGDCYTEPAFRSIGWKGRYLVVGFAAGQIPKLPINLTLLKGASLVGVFWGSFTGLEAETNQQNIADINKMLAEGKIKPLISETFPMEKAVDAIQMIGNRKVMGKVVLVNS

SEQ ID NO: 125100 - protein, 290 aa, Unknown
  Bacterial polypetide isolated from the Sargasso Sea
MRKILSYLVAATAFSFGASAFAADSELVVFDWGGYEDEMFFQDYMKKYGDAPTYSFFSDEEEAFQKVRAGFRADLGHPCSQSVVKWRNAGIIKPIDTSRLSNFDKVDPGFAGMEGFQVDGVQWALPIDWGATALTYNAEEVSAEEASSLYVFADPKFQGRVSIIDNVDDAYALGYLAVGVMDWTKSTDEDFKKASDFLRKVHKNVRQYHADGAEGAALMKSGEILLEWTWNEVAFTLGWEEDAPETVFKRDTKEGSSTWVCGYTMMKDAPGSEQKAYDFLDAWLSDASAE

SEQ ID NO: 125101 - protein, 333 aa, Unknown
  Bacterial polypetide isolated from the Sargasso Sea
MKILHCKEYGPVENLVWEDIDSPEPGDNEVIVTIKAAALNFPDYLIVQGLYQFKPEVPFAPGNEGAGVIKKVGKNVTRVKEGDRVSFMLPYGAFAEEACTHEFGVFPISDDITFEMAASYQMAYGTSYHALMQRGQLTEHDEVLVLGASGGVGLAAVDIAKAKGARVVAGVSTEEKAKICRDYGVDDVVIYGDGPKDKDESKAFAAELKSKSTHGGYSIIYDPIGDCYTEPAFRSIGWKGRYLVVGFAAGQIPKLPINLTLLKGASLVGVFWGSFTALEAETNQQNIADINKMLAEGKIKPLISETFPMEKAVDAIQMIGNRKVMGKVVLINS

SEQ ID NO: 125102 - protein, 450 aa, Unknown
  Bacterial polypetide isolated from the Sargasso Sea
KEIPKTIFGFTTNSSGGLVVGEKDNYRFLSSDSYALENFCDSVSFTSKDDLVIISNNTLKIIDQNNLPTSPKNINLIKDTKDNNHEIKDLQTNFIIEKEISEQDIALKKLITKRILDKPQEAFPEINRHRLLSSRKIIFTGMGSSYHAAQYGSLLFEDLLEIDSKVEFSSELKNKKIISPDQTTVFAITQSGETADTIEAIRNAKQQGAYVVSIVEESNSKAAINSDSYLLLETGKEISVAATKTFSSTLLMCNSICIYIASLLDKNNQLITKLKEDFMNVDSNIKKVLDCCDYDYLKVSKFISDSEKVFFIGKNLSFPIVNEGSLKIQEISKINSNSFIEGELKHGPNALLDKNSTVISIIGPDENIKKSISSLREIASRNANIITISFVENSEIQELSNYNFVIENNNKYIFPILSVIPLQKLAFMSALNLGLDPDRPQNLAKTVTVE

SEQ ID NO: 125103 - protein, 125 aa, Unknown
  Bacterial polypetide isolated from the Sargasso Sea
MCGIVGYIGNKDPVPILLKGLKRLEYRGYDSSGIALLEEDNLTHIKKAGKVSDLQQLVDDSSIKGNCGIAHTRWATHGAPNDINAHPHLDHTGSIALVHNGIFENYEAIKQLLMNRNIQFTSDTD

SEQ ID NO: 125104 - protein, 333 aa, Unknown
  Bacterial polypetide isolated from the Sargasso Sea
MKAVVCKKFAPVSDLVWEEVADPVAGPGEIVIDVKAAGLNYPDNLIVQGLYQFRPERPFSPGHEGAGIVSSVGEGVKTHKVGDNVAFFKGFGAFAEKIVLSEAFAFSIPDNFPHPVAAGVFMVYGTSYHALVQRAKITKDDEVLVLGASGGVGLAAVDIAKSFGARVVVAVSTKEKADVCKRYGVDDVVVYGKEKLDQEGQKIFTKELKSKSTRGGFSIIYDPIGDCFAEPALRSIGWGGTYLVVGFAAGKIPSFPTNLMLLKGCAVSGVFIGRFQQEEPKQSAQNIKEIGDLLSSGKLTPFISETIPMAKSIDAIERIAKRGVVGKVVFVNN

SEQ ID NO: 125105 - protein, 347 aa, Unknown
  Bacterial polypetide isolated from the Sargasso Sea
NHTLKNLINKRMSDKSQDAFPEINRHRLLSSKKIIFTGMGSSYNAAQYGSLLFEDLLEIDTKVEFSSELKNKKIIDPHQTTVFAITQSGETADTIEAIRNTKEQGAYVVSIVEEPNSKAAINSDSYLLLETGKEISVAATKTFSSTLLMINSICMYVASLLEKDNLTINKVKEDFTNIDNNVQKVLDCCDYDYLRVSKFISESEKVFFIGKKLSFPIVKEGSLKIQEISKINSNSFIEGELKHGPNALLDKNTTVVSIIGPGDNIKKSISCLREISSRNANIITISFTENEELNELSKYNFVIENNNKYIFPILAVIPLQKLAFMSALNLGLDPDRPQNLAKTVTVE

SEQ ID NO: 125106 - protein, 333 aa, Unknown
  Bacterial polypetide isolated from the Sargasso Sea
MKILHCKEYGPVENLVWEDIDSPEPGDNEVIVTIKAAALNFPDYLIVQGLYQFKPEVPFAPGNEGAGVIKKIGKNVTRVKEGDRVSFMLPYGAFAEEACTHEFGVFPISDDITFEMAASYQMAYGTSYHALMQRGQLTDHDEVLVLGASGGVGLAAVDIAKAKGARVVAGVSTEEKAKICRDYGVDDVVIYGEGPKDKDESKAFAAELKSKSTHGGYSIIYDPIGDCYTEPAFRSIGWKGRYLVVGFAAGQIPKLPINLTLLKGASLVGVFWGSFTALEAETNQQNIADINKMLAEGKIKPLISETFPMEKAVDAIQMIGNRKVMGKVVLINS

SEQ ID NO: 125107 - protein, 330 aa, Unknown
  Bacterial polypetide isolated from the Sargasso Sea
MHCKEFGPVENLVWENIDSPEPGDDEVLISVKAAALNFPDYLIVQGLYQFKPEFPFAPGNEGAGVIKKIGKNVTKFKEGDRVYFMSAYGAFAEEICMHELGTFAIEENTSFEIAASYQMAYGTSYHALMQRGELKKDDELLVLGASGGVGLAAVDIAVAKGARVVAGVSNEEKAQICRDYGAADVVIYGEGPNDKEESKALSLNLKSKSLKGGFDIIYDPIGDCYMEPAFRSIGWKGRYLVVGFAAGQIPKLPINLSLLKGASLVGVFWGSFTGREPDLNTKNLSEINQMLKDGEIKPLVSKTFPMERAVEAINLIGNRGVIGKVVLTNE

SEQ ID NO: 125108 - protein, 229 aa, Unknown
  Bacterial polypetide isolated from the Sargasso Sea
SVFPIPEDITFQLAASYQMAYGTSYHALVQRGALSSDVEVLILGASGGVGLAALDIAKAKGARVVVGVSTEEKAQICRDYGADDVVIYGSGPTDKEEAKAFSAELKAKSAKGGYDIIYDPIGDCYAEPAFRAIGWKGKYLVVGFAAGQIPKLPINLTLLKGASVVGVFWGAFTGREFEENQKNISDINEMLGKGQIKPLISKEIPMENAVEAIKLIGSRGVVGKVVLVN

SEQ ID NO: 125109 - protein, 320 aa, Unknown
  Bacterial polypetide isolated from the Sargasso Sea
CGCGDDPRLRRFLDLQLKLYSQEPADRTAALYGATVLQMAQAPLGLWHLHGSMQVLSDQLVQAIENQGGRVLMRHRVTGLEPTDEGWRVVVDSPSGRDQIHTAADLICSLPPQCLLDLIPEAVMPRGYRQRLSQLPEPSGALVLYGAVRREALPSSCPGHLQRGADDPGSLFVSISREGDGRAPKGQATVIASVFTPTADWCSLEEEPYQARKSKRLDAMRRELNHWLDLKPQDWLHVELATPRGFAGWTGRPRGIVGGLGQHPSRFGPFGLAGRTPMPGLWLCGDSLHPGEGTAGVSLSALNACRQLVAARGGELQLRG

SEQ ID NO: 125110 - protein, 101 aa, Unknown
  Bacterial polypetide isolated from the Sargasso Sea
HGPLALMDTDVFVIVINPNDSTYTDTLTSAREIKARGAKIIGVSDIESDVYDYWIKIPKINEILYPISEIIPIQLLTYYSALEKDADPDYPRNLAKSVTVK

SEQ ID NO: 125111 - protein, 65 aa, Unknown
  Bacterial polypetide isolated from the Sargasso Sea
MCGIVGIISTQSVTKRILTSLKRLEYRGYDSAGISAIKNRKIERCRAAGKLSNLERALVKQPISG

SEQ ID NO: 125112 - protein, 82 aa, Unknown
  Bacterial polypetide isolated from the Sargasso Sea
MCGIVGIVSNKSVSSSIINALKKLEYRGYDSAGISTLNNGFIDEKKCSGRVENLEKILFQNPSIGDLGIGHVRWATHGVPNQ

SEQ ID NO: 125113 - protein, 54 aa, Unknown
  Bacterial polypetide isolated from the Sargasso Sea
MLNLGKLVHMPECDFFMTPIVYNIPLQILSYEVALLRGTDIDQPRNLAKSVTVE

SEQ ID NO: 125114 - protein, 44 aa, Unknown
  Bacterial polypetide isolated from the Sargasso Sea
MCGIVAVTGYKKALPLLLNGLEKLEYRGYDSAGIAVINSETKNI

SEQ ID NO: 125115 - protein, 75 aa, Unknown
  Bacterial polypetide isolated from the Sargasso Sea
MCGIIGVVGKNKAEGLLLEGLRRLEYRGYDSAGIATLVDNKIEKRRASGKISNLTKLLKENPLPGSTGIAHTRWA

SEQ ID NO: 125116 - protein, 75 aa, Unknown
  Bacterial polypetide isolated from the Sargasso Sea
MCGIVGITSSKPVSSLILNSLRKLEYRGYDSAGIATLNEGFINEIKCEGRVDSLEKNIEKNNLFGNVGIGHVRWA

SEQ ID NO: 125117 - protein, 148 aa, Unknown
  Bacterial polypetide isolated from the Sargasso Sea
MAGDLVEALNKTLSEIEGIFTIAVIHENHPDEIVAVRNETPLIIGVGNSENFIASDIYAVLKYTQQIIYPEDSQVVRVTSESIEIFDSKLKPISYEIETVEKYTEVAEKGGYEHFMLKEIFEQPKVLQDSLTELLVDSPLEHLGLNWK

SEQ ID NO: 125118 - protein, 117 aa, Unknown
  Bacterial polypetide isolated from the Sargasso Sea
KLEYRGYDSSGIATKEDKLVICKKEGPISNMEEILPESKSTLGIAHTRWATHGVPSDSNAHPHGDDDNSVAVVHNGTIDNYLDLKENLEKEGYKFKSESDSEVLPILISKYYGRRFS

SEQ ID NO: 125119 - protein, 49 aa, Unknown
  Bacterial polypetide isolated from the Sargasso Sea
MCGIIGIISSKEVSSRIVNSLKKLEYRGYDSAGIATLVDGNINEVKCEG

SEQ ID NO: 125120 - protein, 90 aa, Unknown
  Bacterial polypetide isolated from the Sargasso Sea
MCGIVGITSNKEVTTRIVNSLKKLEYRGYDSAGIATLNDGFIKEVKCEGRVEILEKNITTLNLQGEIGIGHVRWATHGRPSTINAHPHSS

SEQ ID NO: 125121 - protein, 233 aa, Unknown
  Bacterial polypetide isolated from the Sargasso Sea
MCGISGIVHTENFGRNLLNSIRNLEYRGYDSCGVAVIQNGKIDLRKNIGGIDDVNLKERLDQMQGKIGIAHTRWATHGSVTQENAHPHLSENRKFAVVHNGIISNYQQLRDVMLSEGVCFESLTDTEVFVNLLEKSYNERNDLEQAFLAALQQIEGSFSIVMLSSHDPEHLYCVKKESPLLLGLGEECNFVGSDINAFLEYTRKAIVLDEGEYVILGPNDYQVRSLKNGKKLK

SEQ ID NO: 125122 - protein, 83 aa, Unknown
  Bacterial polypetide isolated from the Sargasso Sea
MCGIVGIASNSNCINALIEGLKKLAYRGYDSAGLATLINQEIVKRVALGKIGNLEITIKERPIEGNIGIAHTRWATHGSPNEL

SEQ ID NO: 125123 - protein, 83 aa, Unknown
  Bacterial polypetide isolated from the Sargasso Sea
MCGIIGINSNKPVSATIINSLKKLEYRGYDSAGIATLSSGLINEIKSEGRVDNLEKNSLVQNMEGTIGIGHVRWATHGSPNSI

SEQ ID NO: 125124 - protein, 69 aa, Unknown
  Bacterial polypetide isolated from the Sargasso Sea
RGGTLYVFSDPSISMDLKSGRLINMPKCDFLLTPIIYTIPLQILSYEVALLRGTDIDQPRNLAKSVTVE

SEQ ID NO: 125125 - protein, 48 aa, Unknown
  Bacterial polypetide isolated from the Sargasso Sea
MCGIIGIASNKPVSINIINSLKKLEYRGYDSAGLATLSGNKIDEKKCS

SEQ ID NO: 125126 - protein, 41 aa, Unknown
  Bacterial polypetide isolated from the Sargasso Sea
MCGIIGINSNKPVSSTIINSLKKLEYRGYDSAGIATLYSGS

SEQ ID NO: 125127 - protein, 87 aa, Unknown
  Bacterial polypetide isolated from the Sargasso Sea
MCGIIGIASNKSVTSNIILSLKKLEYRGYDSAGIATIVDGEIDEKKCTGRVDNLEKILFKSPSKGSLGIGHVRWATHGIPSQVNAHP

SEQ ID NO: 125128 - protein, 59 aa, Unknown
  Bacterial polypetide isolated from the Sargasso Sea
GDPQAKSFLDYAVELPQVPSLIAPFVQMILAQMFAYYTALDLKRNIDKPRNLAKSVTVG

SEQ ID NO: 125129 - protein, 112 aa, Unknown
  Bacterial polypetide isolated from the Sargasso Sea
MCGIVGITSTKSVTSMIINSLKKLEYRGYDSSGIATLHNGNINEVKCEGRVDILEKNLNKSNLSGNVGIGHVRWATHGIPSTINAHPHSSENVSVVHNGIIENSTILKKIFS

SEQ ID NO: 125130 - protein, 114 aa, Unknown
  Bacterial polypetide isolated from the Sargasso Sea
MCGIVALVGSQPAAPQLLEGLRQLEYRGYDSAGLATVTSEGRLTCLRAKGKLVNLSQRVASLGAPGQCGIGHTRWATHGKPEEHNAHPHRSVDGGVAVVQNGIIENHRQLRDGL

SEQ ID NO: 125131 - protein, 305 aa, Unknown
  Bacterial polypetide isolated from the Sargasso Sea
VTSIANLEYRGYDSCGMAMLNGKGIEVRKNTGGVEEVRSREKLDMMTGNLGIAHTRWATHGGVTTENAHPHLSQNGDFAIVHNGIISNYQKLRERLIGEGLQFRSTTDTEVFVNLVEEAFAQKNDVLGAFLEALKQIQGTYSIVLLSSHDPEHLYCVKQDSPLIIGLGEGCNYIGSDINAFLEHTRKAVVLDDGEFAVISRERYEISDVGKREEREKSILQIDWDTETTKKGGFSHYMIKEIFDEPQTARQALDVPQEQIKQLAEMFQNAPRAYLMGVGTTFFICQMAQYLFSSLSKRYFSCHQF

SEQ ID NO: 125132 - protein, 106 aa, Unknown
  Bacterial polypetide isolated from the Sargasso Sea
MCGIIGIVSNKSVSASIIGALKKLEYRGYDSAGISTISNGQINEQKCTGRVDNLEKILFQNPSNGDLGIGHVRWATHGMPNQINAHPHSSEVVSVVHNGIMKTQIN

SEQ ID NO: 125133 - protein, 287 aa, Unknown
  Bacterial polypetide isolated from the Sargasso Sea
MEYRGYDSCGMAMLNGKGIEVRKNTGGVEEVRSREKLDMMTGNLGIAHTRWATHGGVTTENAHPHLSQNGEFAIVHNGIISNYQKLRERLIGEGLQFRSTTDTEVFVNLVEEAFAQKNDVLGAFMEALKQIQGTYSIVLLSSHDPENLYCVKQDSPLIIGLGEGFNYIGSDINAFLEHTRKAVVLDDGEFAVISRERYEISDVGKREEREKSILQIDWDTETTKKGGFSHYMIKEIFDQPQTALQALDVPQEQIKQLAEMFQNAPRAYLMGVGTTFFICQMAQYLFS

SEQ ID NO: 125134 - protein, 243 aa, Unknown
  Bacterial polypetide isolated from the Sargasso Sea
NIFTPSEFNYFHKPNSKTLYIFISQSGETADTCDLLESNKRYFINSLSLVNNSDSRLVNNTKYSLNLDLGIEKGVAATKTFTAELIYLYFLSIIFSQKSQKFKYTNFKKNFPKVFQLEKEIKKIARSLYRSDNIFVLGRNYNYPVALEAALKIKEISYIHAEASLSSEMKHGPIALLDSNFPIIYLISNNKDSILKEITNMYEASTRTNKIILLATPQTLAKIEKKFIDKIQVIKIPDVEENF

SEQ ID NO: 125135 - protein, 166 aa, Unknown
  Bacterial polypetide isolated from the Sargasso Sea
MTNKITYLDDGEFCIIKKDQVLFFNEDGKKINKKILELSSNEASYEKGDFKHFMAKEIEEQPTSVKTGIKEYVDKTNSEINIYNFPWKISEINSITLIGCGTAYHSCLMAKYWFEELTQLDVSIDIASEFRYRKNRFKKDTLYIFVSQCGETADTYAALDLLTKII

SEQ ID NO: 125136 - protein, 262 aa, Unknown
  Bacterial polypetide isolated from the Sargasso Sea
NQLVTIKATGPIKNLKSKLYKLQGITTGISHTRWATHGQPTLKNTHPHLSGNICTVHNGIIENYIDLRSYLKKKSFIFKSDTDSEVICHLINYYFSKSANMQSAIISTANSLEGSYALAAINTQTPHTIYSACKGSPIILGKDIASNYISSDMTPIVDHTKNYIPMDDNEFAEISSSDIKIFNKNKRVLSKPTKISKINKNQASLMGHKHFMHKEIYEQKAIIEDMINRYVGKDKILPNIFGHSTDKLLENIKHIHFIACGK

SEQ ID NO: 125137 - protein, 54 aa, Unknown
  Bacterial polypetide isolated from the Sargasso Sea
SENIRFKFQIPKTNSSINSFLLTIPIQFLAYHVALLKNCDIDKPRNLAKSVTVE

SEQ ID NO: 125138 - protein, 64 aa, Unknown
  Bacterial polypetide isolated from the Sargasso Sea
SITDKINNSLKKLSDFVLIAPQTHKYVFPITCSIILQMLAYELAVCRKCEIDQPRNLAKSVTVE

SEQ ID NO: 125139 - protein, 288 aa, Unknown
  Bacterial polypetide isolated from the Sargasso Sea
INAAKKINQRKVKGKLDNLIYALQKDQFDGNTGIGHTRWATHGEPSDKNAHPHSSTSVSLVHNGIIENAAELKKLKEVKDYHFESDTDSEVITALLTFYLKEGLSHLESVQKTISSLEGSYALAIIFSDSEDTIYGAKNGSPLVAGTNGVGNSIGSDSIALSSVANKVCYLEDGDITVLNKESIEIYNLEGERANREFVEIGINESEVSKGPYKHFMEKEIHEHPHAVGETFRQFIDYDKGTIAISNINLNFDKISKIYLIACGTAYYSCLVGKYYFEQYARTPVECD

SEQ ID NO: 125140 - protein, 41 aa, Unknown
  Bacterial polypetide isolated from the Sargasso Sea
MCGIVGAIAERNITAVLVEGLKRLEYRGYDSAGVALLTEQG

SEQ ID NO: 125141 - protein, 80 aa, Unknown
  Bacterial polypetide isolated from the Sargasso Sea
ISNIQEVIARGGKILMITDDETLESNSENIWEVFRLPKCPKSIEAIVYSVPIHMLAYYTAVELGNDVDQPRNLAKSVTVE

SEQ ID NO: 125142 - protein, 239 aa, Unknown
  Bacterial polypetide isolated from the Sargasso Sea
MCGIVGVVGLEACSETILDSLKRLEYRGYDSSGIVTQSSGAFQMNRAVGKLRNLSEVMREAPLDGQSGLGHTRWATHGGVSERNAHPHMVGDKVVIVHNGIIENHVALRAELEAKGHSFSSETDSEVLAHLFLEAFNNGLSPQQAGKQVMARIEGTFALAAMHADHPDMMIVARNASPLAVGLGEGASFIGSDAVALSHLTRDVIYLKDNDYAVIRPEGAEVFDAEGTPVNREVVIVAA

SEQ ID NO: 125143 - protein, 275 aa, Unknown
  Bacterial polypetide isolated from the Sargasso Sea
LLTPLGIEIYDSNNERQYRNPVSLKVSEQIIDKMNFKHFMLKEIYDQPDTAKNWLKNYVIKNLENGQYQIKYPFDTKFFDSIERIEIIACGTSKHAAMVGCFLLEQFSGIPTNVYYASEFRYSPPPLLPNTLTIGVSQSGETADTIAAIDMEIKRRSSIKDERFKPNLIAITNRRESSIGRQVPNIIDICAGIEVGVAATKTFFAQLLSFYGLAIHFAQIKSSQSPDEIEKLITELIKLPPLLEDLLHKHDQSSEKLAHDFFNIKDVIFLGRGIN

SEQ ID NO: 125144 - protein, 33 aa, Unknown
  Bacterial polypetide isolated from the Sargasso Sea
MAIPLQKLAFYSALEKGYDIDKPRNLAKSVTVE

SEQ ID NO: 125145 - protein, 48 aa, Unknown
  Bacterial polypetide isolated from the Sargasso Sea
RIANKQVLDTAFGDNAGEFLKDIKHVQIIACGTSYHAGMAARYWLEDW

SEQ ID NO: 125146 - protein, 60 aa, Unknown
  Bacterial polypetide isolated from the Sargasso Sea
MCGIVSYIGDQDPVPILIKGLRRLEYRGYDSAGLALLDGGDLSSIKKAGKVSELSDPDIF

SEQ ID NO: 125147 - protein, 69 aa, Unknown; identical to SEQ ID NO: 125124
  Bacterial polypetide isolated from the Sargasso Sea

SEQ ID NO: 125148 - protein, 57 aa, Unknown
  Bacterial polypetide isolated from the Sargasso Sea
MCGIIAAASNRNVGKLLVQGLHKMEYRGYDSAGIALHQKDQIAHLRTLGKVKLLEEK

SEQ ID NO: 125149 - protein, 47 aa, Unknown
  Bacterial polypetide isolated from the Sargasso Sea
MCGIIGINSNKPVSSAIINSLKKLEYRGYDSAGIATLSSGQINEVKS

SEQ ID NO: 125150 - protein, 30 aa, Unknown
  Bacterial polypetide isolated from the Sargasso Sea
PLQKLAYFTALKKGFDIDKPRNLAKSVTVE

SEQ ID NO: 125151 - protein, 43 aa, Unknown
  Bacterial polypetide isolated from the Sargasso Sea
EIDPLLSPVVTVVPLQLLAYHMHKKRGLDIDQPRNLAKTVTVE

SEQ ID NO: 125152 - protein, 33 aa, Unknown
  Bacterial polypetide isolated from the Sargasso Sea
MCGIVAVTGYKKALPLLINGLEKLEYRGYDSAG

SEQ ID NO: 125153 - protein, 77 aa, Unknown
  Bacterial polypetide isolated from the Sargasso Sea
MQEVIARGAKVLLITNKSKDEIISENIWEQIEVDNLDEELTPFLTSLPLQKLAFYSALEKGYDIDKPRNLAKSVTVE

SEQ ID NO: 125154 - protein, 76 aa, Unknown
  Bacterial polypetide isolated from the Sargasso Sea
QEVIARGAKVLLITNKNKDEIISENIWEVIEVDQLDDELIPFLMTIPLQKLAFYSALEKGYDIDKPRNLAKSVTVE

SEQ ID NO: 125155 - protein, 54 aa, Unknown
  Bacterial polypetide isolated from the Sargasso Sea
MCGIIGIASNKSVTSNIINSLKKLEYRGYDSAGIATIVNGNIDEKKCTGRVDNL

SEQ ID NO: 125156 - protein, 33 aa, Unknown
  Bacterial polypetide isolated from the Sargasso Sea
YAIPSQLIAYYTALLKGTDIDQPRNLAKSVTVE

SEQ ID NO: 125157 - protein, 89 aa, Unknown
  Bacterial polypetide isolated from the Sargasso Sea
MCGIVGYLGKKDSVPIILDGLHRLEYRGYDSAGIAVMEEGEIQFIKNAGKVSDLSRLIDDSVLKGSIGIGHTRWATHGEPNTVNSHPHF

SEQ ID NO: 125158 - protein, 84 aa, Unknown
  Bacterial polypetide isolated from the Sargasso Sea
ELVEKLLSNLEEVKSRGGTLYVFGNATSKIKIEKGKFMNMPKCGYYNAPIVYTIPLQILAYEVACSIGTDLDQPRNLAKSVTVE

SEQ ID NO: 125159 - protein, 28 aa, Unknown
  Bacterial polypetide isolated from the Sargasso Sea
QMLAYHVALLKNCDIDKPRNLAKSVTVE

SEQ ID NO: 125160 - protein, 94 aa, Unknown
  Bacterial polypetide isolated from the Sargasso Sea
MCGIIGINSNKSVSASIINSLKKLEYRGYDSAGIATLHAGSINEVKSEGRVDNLEKNSVVQNMVGTIGIGHVRWATHGLPNSINAHPHSSQNVS

SEQ ID NO: 125161 - protein, 47 aa, Unknown
  Bacterial polypetide isolated from the Sargasso Sea
MCGIVGIVSNKSVSASIIGALKKLEYRGYDSAGISTLSNNQINEQKC

SEQ ID NO: 125162 - protein, 35 aa, Unknown
  Bacterial polypetide isolated from the Sargasso Sea
FLTTIPLQKLAYYSALDKGYDIDKPRNLAKSVTVE

SEQ ID NO: 125163 - protein, 70 aa, Unknown
  Bacterial polypetide isolated from the Sargasso Sea
MCGIIGIASNKPVSINIINSLKKLEYRGYDSAGIATLDKNRISEKKCSGRVEELEKILFKTPSDGNLGIG

SEQ ID NO: 125164 - protein, 111 aa, Unknown
  Bacterial polypetide isolated from the Sargasso Sea
AAEMKHGPIALIDEKMPVVFIASNDETYAKVLSNIQEVKARNGIVITLTDHVSNEIKKISDFIIEVPKSRHPRIFPILASISLQLLAYELAVLRECNIDRPRNLAKSVTVE

SEQ ID NO: 125165 - protein, 74 aa, Unknown
  Bacterial polypetide isolated from the Sargasso Sea
EEVKARGGTLYVFSDPSISMDLKSGRLINMPKCDFLLTPIIYTIPLQILSYEVALLRGTDIDQPRNLAKSVTVE

SEQ ID NO: 125166 - protein, 199 aa, Unknown
  Bacterial polypetide isolated from the Sargasso Sea
GYDSAGMVTVKSNNLKLIKKEGKLKSLAPELGELPKETSCGMGHTRWATHGEATSYNAHPHSYKGLSLVHNGIIENYLDLKNELPHMGEELLSETDSEVLLHLISSSYEKTKDIFISLQEVQKKIKGSYAFCLLVSSEDETLYLCKKSSPLVLACGKKNTFFSSDPIALLHHSKQFIYLEDNDIAKLTKTSFEIYNQSG

SEQ ID NO: 125167 - protein, 254 aa, Unknown
  Bacterial polypetide isolated from the Sargasso Sea
LVYAKESGAKTAAIVNVMGSAISMMADQVIMQGSGPEICVVSTKAALAQTFIMVRVALELGLIRKKIKQKDYKKFQMEMQEFSEIIEIVLNEQSGFVRNIARDTSHVKHWLFLGCGVYYPVAMESALKMKEVTYQHAEGMPAGFLKHGTLSMVEPSLHTLFFVPPPEQKELHKRTLIAMEQVKSRGGTVIAIVFQGDELAQKLASQSIKLPIVSSLFAPFLQMIIAQMFAYYAALDLGRNIDKPRNLAKSVTVG

SEQ ID NO: 125168 - protein, 97 aa, Unknown
  Bacterial polypetide isolated from the Sargasso Sea
MCGIIGITSTKQVSSAIINSLKKLEYRGYDSAGIATLNDGFINEIKCEGRVDGLEKNVTKINLLGNVGIGHVRWATHGIPSTINAHPHSSETVSVVH

SEQ ID NO: 125169 - protein, 107 aa, Unknown
  Bacterial polypetide isolated from the Sargasso Sea
MCGVVAVIGKQNASELVIEGLKKLEYRGYDSAGIASVSNGTLHTIKSEGKLVNLIDKLTDASHSNLQSITALAMGHTRWATHGNVSVENAHPLTSQNKIAVVHKELS

SEQ ID NO: 125170 - protein, 69 aa, Unknown; identical to SEQ ID NO: 125124
  Bacterial polypetide isolated from the Sargasso Sea

SEQ ID NO: 125171 - protein, 78 aa, Unknown
  Bacterial polypetide isolated from the Sargasso Sea
MCGIIGIISSKEVPSRIVNSLKKLEYRGYDSAGIATLVNGNINEVKCEGRVDVLEKDISKLNLKGDIGIGHVRWATHG

SEQ ID NO: 125172 - protein, 38 aa, Unknown
  Bacterial polypetide isolated from the Sargasso Sea
MCGIIGISSNKPVSANIISSLKKLEYRGYDSAGIATLF

SEQ ID NO: 125173 - protein, 63 aa, Unknown
  Bacterial polypetide isolated from the Sargasso Sea
MCGIIGIASNKSVTSNIINSLKRLEYRGYDSAGIATISKKNLNEKKCSGRVEELEKILFNSPA

SEQ ID NO: 125174 - protein, 34 aa, Unknown
  Bacterial polypetide isolated from the Sargasso Sea
MCGIIGITSNKPVSVSIINSLRKLEYRGYDSAGI

SEQ ID NO: 125175 - protein, 50 aa, Unknown
  Bacterial polypetide isolated from the Sargasso Sea
MCGIVGITSSKEVTPRIISSLKKLEYRGYDSAGLATLSNGNINEVKCEGR

SEQ ID NO: 125176 - protein, 160 aa, Unknown
  Bacterial polypetide isolated from the Sargasso Sea
MCGIVGYIGKENASKILIDLTRSLEYRGYDSAGIAIYDSKENKFLIKKTTGTIDRIKQEILNEIDGTTGISHTRWATHGKINEKNAHPQISSNSKILIVHNGIVENYQEIKNNLIKSGYNFTSETDSEIIANLIEFNLAESEIKNALEKTMDSITGSSSI

SEQ ID NO: 125177 - protein, 30 aa, Unknown
  Bacterial polypetide isolated from the Sargasso Sea
SSPLLAYHCAVLRGCDVDKPRNLAKSVTVE

SEQ ID NO: 125178 - protein, 69 aa, Unknown
  Bacterial polypetide isolated from the Sargasso Sea
GKILMITDDETLESNSENIWEVFRLPKCPKSIEAIVYSVPIHMLAYYTAVELGNDVDQPRNLAKSVTVE

SEQ ID NO: 125179 - protein, 48 aa, Unknown
  Bacterial polypetide isolated from the Sargasso Sea
MCGIVGAVAKKDICPVLLEGLQRLEYRGYDSAGFAVIDSDKKLQRIRI

SEQ ID NO: 125180 - protein, 57 aa, Unknown
  Bacterial polypetide isolated from the Sargasso Sea
KKLKDISNNYIALPETSEMLSTIISIIPLQFIAYHVANLNGESIDQPRNLAKSVTVE

SEQ ID NO: 125181 - protein, 34 aa, Unknown
  Bacterial polypetide isolated from the Sargasso Sea
MCGIVAVTGYKKALPLLMNGLEKLEYRGYDSAGI

SEQ ID NO: 125182 - protein, 72 aa, Unknown
  Bacterial polypetide isolated from the Sargasso Sea
MCGIIGIASNKSVSSNIIQSLKKLEYRGYDSAGIATIVDGSIDEKKCAGRVDSLEKILFKNPSKGILGIGHV

SEQ ID NO: 125183 - protein, 45 aa, Unknown
  Bacterial polypetide isolated from the Sargasso Sea
MPKCDFLLTPIIYTIPLQILSYEVALLRGTDIDQPRNLAKSVTVE

SEQ ID NO: 125184 - protein, 94 aa, Unknown
  Bacterial polypetide isolated from the Sargasso Sea
MPVIALAPESEIAEKLISNLEEVKARGGTLYVCADPSVNMDVKSGKLIHMPECDFFMSPIVYNIPLQILSYEVALLRGTDIDQPRNLAKSVTVE

SEQ ID NO: 125185 - protein, 104 aa, Unknown
  Bacterial polypetide isolated from the Sargasso Sea
PLALIENNIPVILLAPFDENYSKLLSNIQEVKARGGRIIMITDRDGAKKVKKYCDQIVIIPKTNFLTSPILYSIPVQLIAYYLAVFLGTDVDQPRNLAKSVTVE

SEQ ID NO: 125186 - protein, 56 aa, Unknown
  Bacterial polypetide isolated from the Sargasso Sea
MCGIIGVASNQPSVDKLVIGLLRQEYRGYDSAGLAIFDESEEIKVYKSTGKVSELQ

SEQ ID NO: 125187 - protein, 45 aa, Unknown
  Bacterial polypetide isolated from the Sargasso Sea
MCGIIGISSNKPVSANIINSLKKLEYRGYDSAGIATLSDGEINEV

SEQ ID NO: 125188 - protein, 150 aa, Unknown
  Bacterial polypetide isolated from the Sargasso Sea
IGVASTKAFIGQMLVLYLLCLKLAKDKEDIKKDIFLKKIKSLNTLSELIKKTLSTENDIQLVCNSFVEAKGSMFLGRGYSFPIALEGALKLKELAYVHAEGYPAGEMKHGPLALIEEGMPVVVLAPRDNYYKKTISNMQEVIARGAKVLL

SEQ ID NO: 125189 - protein, 56 aa, Unknown
  Bacterial polypetide isolated from the Sargasso Sea
MCGIIGINSNKPVSGTIINSLKKLEYRGYDSAGIATLSSGQINEVKSEGRVDNLEK

SEQ ID NO: 125190 - protein, 312 aa, Unknown
  Bacterial polypetide isolated from the Sargasso Sea
VIADLEGSYALAVLWSGAPTSLVVARKQAPLIVGLGEGEFICASDTPAIANFTNTVLPLEDEDIALLTPLGIEIYDSNNEKQYRNPISLKVSEQIIDKMHFKHFMLKEIYDQPETTKNWLENYLIKNTENGQFHINYPFDTKFFESIERIEIIACGTSKHAAMVGSFLLEQFSDIPTSVYYASEFRYSPPPLLPNTLTIGVTQSGETADTIAAIDMEIKRRSIIEDKKFQPNLIAITNRKESSIGRQVSNIIDICAGIEVGVAATKTFFAQLLSFYGLAIKFAQVRGSQDQQEINKLITELTKLPSLLEDLL

SEQ ID NO: 125191 - protein, 29 aa, Unknown
  Bacterial polypetide isolated from the Sargasso Sea
LQKLAYYSALQKGYDIDKPRNLAKSVTVE

SEQ ID NO: 125192 - protein, 293 aa, Unknown
  Bacterial polypetide isolated from the Sargasso Sea
LWAGAPTSLVVARRQAPLIIGLGEGEFICASDTPAIANFTNIILPMEDEEIALLTPLGIEIYDSSNERQFRNPISLKVSEQIIDKMNFKHFMLKEIYDQPGTAKNWLDNYLIKNLENGQYQINYPFDTRFFESIERIEIIACGTSKHAAMVGSFLLEQFSGIPTNVFYASEFRYSPPPLLPNTLTIGVTQSGETADTIAAIDMEIKRRSLIEDKKFKPNLIAITNRKESSIGRQVSNIIDICAGIEVGVAATKTFFAQLLSFYGLAIKFAQIKGSQCPEEIGKLITELIKLPP

SEQ ID NO: 125193 - protein, 269 aa, Unknown
  Bacterial polypetide isolated from the Sargasso Sea
LNNESEAIQLKTLGKVANLEDLMIEKKPRAQSGIAHTRWATHGEPSQKNAHPHTSNGTIYIVHNGIIENHDELRERLSNNGYKIESETDSELIAHLVHSNKENGKSTLEALIETTKELDGAYSIAVVDTEQKGKIFAAKQKSPLLVGRGIEENFVASDPLAIAGLTESFYLLEDGDFAVITQDEIKIVGSDNEPVLREETIIDTSAKEASKDGYKHFMEKEIYEQPKAIANAIEGRTTDGDVLDNIFGLGSSKSFKGVKRIQFVACGTR

SEQ ID NO: 125194 - protein, 100 aa, Unknown
  Bacterial polypetide isolated from the Sargasso Sea
MKKDFPVVCIVPSGPLFHKTISNIQEVIARGGKILMITDDSSLQSESENIWKIFRLPDVDPILETLIYTIPIQMLAYYTAVELGNDVDQPRNLAKSVTVE

SEQ ID NO: 125195 - protein, 315 aa, Unknown
  Bacterial polypetide isolated from the Sargasso Sea
KKISDLQIKVPKTEKSKIIIGHTRWQTHGKPSIKNSHPHIMKDLAIVHNGVIENFDDLKKDKHLSSYEFKTETDTELILLLIHHFCKKLSLKDSVLKTSKLIKGSNAFICSKVNSDKKEMIAYKNNTPLYFGIKLNGERVFSSDLNSIKKNLKGYYYLENNEIFHLEENRESLFTKDSKKKKIHLNNVEVKKRTSKKKIKDSITYSEIKEQKSYILGFEKIILKIQKKINAITKPSEIVIIGCGSSYNVGNLGKIFIEKNSKIPVSVFRPSEYFPVSDNKNRLFIFISQSGETADVCSLLESDQLHFKNSLSIVN

SEQ ID NO: 125196 - protein, 257 aa, Unknown
  Bacterial polypetide isolated from the Sargasso Sea
KEKGKSTLEALIDSTKELNGAYSIAVIDIDQKGKIFAAKQKSPLLVGKGIEENFVASDPLAIAGLAESFYLLEDGDFAEITQDEIKIVGIDNEPVVREETLIDTTVKEASKEGYKHFMEKEIYEQPKAIANAIEGRTTDGDVLDNIFGLGSSESFKGVKRIQFVACGTSLHAAKTARKWFEELSETPCYIDFASEYRYRNPLVEDDTLFVCISQSGETADTMAALNYAKEEKYLGIVTICNVPTSTMARESDWKIFT

SEQ ID NO: 125197 - protein, 147 aa, Unknown
  Bacterial polypetide isolated from the Sargasso Sea
MCGIFGCVGESDVTNFLIDGLKRLEYRGYDSAGLCIQTEDRNIEVIKSSDSTYPVDVLRKSLEKSKIKSNVGIGHTRWATHGPINNINAHPHFSYSNNISIVHNGIVENYDFLKKFLIRKGVIINSQTDSELIAHMIDFMLCSMGNL

SEQ ID NO: 125198 - protein, 286 aa, Unknown
  Bacterial polypetide isolated from the Sargasso Sea
EIKKQLLKENRSFLSSTDSEVIAHLFDKELKNTSDLKIAILNVLKKLEGAFAFVVLLLDFPDTLVAARQASPLAVGKGNNVCAVGSDAIALAGVTNELMFLEDGDFAIINRKDLTIYNNLGLEINRKIIPNIIEASSIGKGNYRHFMQKEIFEQPETIAHSISGMYSSSGKLSKELIELVSTPPKSITILAAGTSHYAGLVGKYWIESLANIPVNVETAAEYRYRSPYQDPNSLALVISQSGESLDTLMAMRHAAEAGMKTVSIVNNIGSTIDRESKYSLYTRRWC

SEQ ID NO: 125199 - protein, 64 aa, Unknown
  Bacterial polypetide isolated from the Sargasso Sea
MCGIFGCISEEAATMTLEGLKKLEYRGYDSAGLAAIFPGHSGPIETERTAGFVSDLVTKANERF

SEQ ID NO: 125200 - protein, 50 aa, Unknown
  Bacterial polypetide isolated from the Sargasso Sea
INEISSVILIGCGTAYHSCIVAKYWFEQNTSLDVSVDIASEFRYRNSEAI

SEQ ID NO: 125201 - protein, 80 aa, Unknown
  Bacterial polypetide isolated from the Sargasso Sea
MCGIIGIASNKSVSMNIINSLKKLEYRGYDSAGIATLTNNTINEKKCSGRVEELEKILFKNQSEGNVGIGHVRWATPWNT

SEQ ID NO: 125202 - protein, 262 aa, Unknown
  Bacterial polypetide isolated from the Sargasso Sea
RAALQRVDGAYGIVVLNRKEPDMMIAARKGSPLVLGIKDNEFFVGSDISPIIKHTQQIIYLEDSQMAIIKDNEYKITSIDKDVSLPKKVEKIDIKIDDYDKGKFKYFMHKEIHEQIDTIRNTITGRAKKDRVYLNGLLDYWAQIKEADKIFITACGTSWHAGLIGKNLIERFAKIPVHVEYASEFRYNKTLVDNNSVVIAISQSGETADTLAAIKKANENGAITVGICNVPGSSVSRETNCGVFTRCGHEVGVASTKALLHK

SEQ ID NO: 125203 - protein, 60 aa, Unknown
  Bacterial polypetide isolated from the Sargasso Sea
NKDEITSENIWEKIEVDKLEEELIPFLMTIPLQKLAFYSALEKGYDIDKPRNLAKSVTVE

SEQ ID NO: 125204 - protein, 45 aa, Unknown
  Bacterial polypetide isolated from the Sargasso Sea
MCGIIGIISNQEVSSRILNSLKKLEYRGYDSAGIATLVDGNINEV

SEQ ID NO: 125205 - protein, 262 aa, Unknown
  Bacterial polypetide isolated from the Sargasso Sea
SSSHEGYNCFMEKEIMQQPKSIRGAMLGRINEELSSIRFGGINLERDLLKDVKRILFLGCGTAYHAGLVGKYMIENIANIPASAELASEYKYKNNPTEDGTLVIAITQSGETIDTLAALKEAQNKGLDCIGITNVVSSSIARQAGKGIYQHAGTEVSVASTKAFTSQVTILLMLAVLLGRRKGLSVLDAKKHIEQLKNLPSLAEECLSVPYLRQFELAAAKYRDKKKFIFLGRQTMYPIALEAALKLKEISYLDAPRLCCWR

SEQ ID NO: 125206 - protein, 39 aa, Unknown
  Bacterial polypetide isolated from the Sargasso Sea
FNAPIVYTIPLQILAYEVACLRGTDLDQPRNLAKSVTVE

SEQ ID NO: 125207 - protein, 86 aa, Unknown
  Bacterial polypetide isolated from the Sargasso Sea
MCGIIGISSNKPVSANIINSLKKLEYRGYDSAGIATLSDGEINEVKSEGRVDNLENNFDLKNLRGNIGIGHVRWATHGIPNSINAH

SEQ ID NO: 125208 - protein, 42 aa, Unknown
  Bacterial polypetide isolated from the Sargasso Sea
TENDLFPFLITIPLQKLAYYSALKKGYDIDKPRNLAKSVTVE

SEQ ID NO: 125209 - protein, 279 aa, Unknown
  Bacterial polypetide isolated from the Sargasso Sea
FESKFKELILNKKVIFVGCGTAYHACLVGEYYFNKYTNLDTSSELASELRYKKINQDEKILFIFISQSGETMDTLMALKYIRENKHSSIVITNSLQSSMVREADVTIPTYALKEVGVASTKAFSCQILSLANLSIEIGKMTNSISKKDYNKNLKILKLLPIKIKKLIKNFTPEAKKIAKKLSQSDTCYFIGRNIVYPIALEGSLKLKEISYMHSEGFPGGEMKHGPIALIDKKSLTICLSPNNKLYEKSISNAEEIAARNGKVIILSSAKIHRKSPKYI

SEQ ID NO: 125210 - protein, 142 aa, Unknown
  Bacterial polypetide isolated from the Sargasso Sea
MCGIVGYIGNKDPVPILVKGLKRLEYRGYDSSGIALLEEDNLNHIKKAGKVSDLQQLVDDSSIKGNCGIAHTRWATHGAPNDINAHPHLDHTGSIALVHNGIFENYEAIKQLLINRNIQFTSDTDTEVIVQLISELYYNNNE

SEQ ID NO: 125211 - protein, 52 aa, Unknown
  Bacterial polypetide isolated from the Sargasso Sea
MCGIIGINSNKSVSSSIINSLKKLEYRGYDSAGIATLSDGLINEVKSEGRVD

SEQ ID NO: 125212 - protein, 52 aa, Unknown
  Bacterial polypetide isolated from the Sargasso Sea
MCGIVGITSNKEVTNRIVNSLKKLEYRGYDSAGIATLKDGLINEVKSEGRVE

SEQ ID NO: 125213 - protein, 181 aa, Unknown
  Bacterial polypetide isolated from the Sargasso Sea
MCSIIGYSGNEIAAPIIVKGLKRMEYRGYDSVGVATESQNQIELKKGTGKVTEVNSKFQLDTLPGKIGIGHTRWATHGKVTDLNAHPHPSNSGKIAIVHNGIIENFEELKKQLKDDGYSFKSETDSEIIANLLQKNYESTKNVRDTIMKTVSEIKGHYAFVAMFENGQLAAARFHEPLIIG

SEQ ID NO: 125214 - protein, 60 aa, Unknown
  Bacterial polypetide isolated from the Sargasso Sea
MCGIFSIYSNEIIKPSYFVNSLKELEYRGYDSAGVAFFQKGNLNILKTTSKIKDLELKLK

SEQ ID NO: 125215 - protein, 32 aa, Unknown
  Bacterial polypetide isolated from the Sargasso Sea
TIPLQKLAYYSALKKGLDIDKPRNLAKSVTVE

SEQ ID NO: 125216 - protein, 188 aa, Unknown
  Bacterial polypetide isolated from the Sargasso Sea
SKGHKFKSQTDTEVIVHLITELLKDNDLKNSILKMLKQLSGSFALAIIFKDQPDLIVGARRGSPLAVGYGPNENYLGSDSYALKSMTNKISYLNDGEFCIVKKNQVEFFDESGIKLNKKILKLSSNEENYDKGDYKYFMAKEIDEQPTTIKNCIKEYIDNINNDINIYNFPWKTNDISSICLIGCGTA

SEQ ID NO: 125217 - protein, 97 aa, Unknown
  Bacterial polypetide isolated from the Sargasso Sea
DEMTPVVALAPEDELVEKLLSNLEEVKSRGGTLYVFGNATSKIKIEKGKFMNMPECGYYNAPIVYTIPLQILAYEVACSIGTDLDQPRNLAKSVTVE

SEQ ID NO: 125218 - protein, 266 aa, Unknown
  Bacterial polypetide isolated from the Sargasso Sea
ISGLQALEYRGYDSSGIACSINNNLNYKKSVGKISNLIHELNLDKLQGNTSIAHTRWATHGKPSKVNAHPFVKENCALVHNGIVENYDDLIKLFSLDANKLESDTDTEVVAAIYSKLLTQYEPLDALINLTNKIQGTYAFAFLVKGSDSIYAVRKGSPLVIGISDESKSISSDILGLPNSVTQTIFLEENDFVEINSSSCSIYNKQGRQVDRRIHPHVSTNDFNTKGKFKHFMQKEIYHQPSSIEDTVLNYCDKKTNKVLLPRYDV

SEQ ID NO: 125219 - protein, 315 aa, Unknown
  Bacterial polypetide isolated from the Sargasso Sea
GSYALAVLWSGAPTSLVVARRQAPLIIGLGEGEFICASDTPAIANFTNIILPMEDEEIALLTPLGIEIYDSSNERQYRNPVSLKVSEQIMDKMNFKHYMLKEIYDQPQTAKDWLENYLIQNLDNGQYQINYAFDTEFFESIERIEIIACGTSKHAAMVGSFLLEQFSGIPTNVFYASEFRYSPPPLLPNTLTIGVTQSGETADTIAAIDMEIKRRSSIENKKFQPNLIAITNRKESSIGRQVSNIIDICAGIEVGVAATKTFFAQLLSFYGLAIKFAQIKGNQSPDEIDKLINELIKLPPLLEDLLEKHNKSQKS

SEQ ID NO: 125220 - protein, 300 aa, Unknown
  Bacterial polypetide isolated from the Sargasso Sea
KQNAFSCNKAEGKLKNLKSNLSDHNIPGTVGIGHTRWATHGKPEVKNAHPHTDSSGNIAVVQNGIIENFQDLKNKLEQEGIIFNSDTDTEVIPHLIQRELNTLGKLNLENNGSTLLVAVRNVISDLEGSYALAVLWSGAPTSLVVARKQAPLIIGLGEGEFICASDTPAIANFTNIILPMEDEEIALLTPLGIEIYDSSNERQYRNPVSLKISEQIMDKMNFKHYMLKEIYDQPQTAKNWLENYLIKNLDNGQYQINYPFDTEFFESIERIEIIACGTSKHAAMVGSFLLEQFSGIPTNV

SEQ ID NO: 125221 - protein, 89 aa, Unknown
  Bacterial polypetide isolated from the Sargasso Sea
MCGIVAYKGHKNCHPILLNGLKRLEYRGYDSAGIACINSNDKLVVTKRKGKVSKLESALSKSEIYNLGIAHTRWATHGKPNQPNAHPHL

SEQ ID NO: 125222 - protein, 289 aa, Unknown
  Bacterial polypetide isolated from the Sargasso Sea
QIDLRKNIGGIDDVNLKERLDQMQGKIGIAHTRWATHGGVTQENAHPHLSANRKFAVVHNGIISNYQQLRDVMLSEGVCFESLTDTEVFVNLLEKSYTERNDLEQAFLAALQQIEGSFSIVMLSSHDPEHLYCVKKESPLLLGLGEECNYVGSDINAFLEYTRKAIVLDEGEYVILGPNDYQVRSLKTGKKLKKNILHIDWDLETSKKGGFSHYMLKEIFDEPETVRQAMQIPRQQIVSMAEMFADSSRSFMMGVGTTYYVASISQYYFSYLADCYYSALSSDEFSVVD

SEQ ID NO: 125223 - protein, 50 aa, Unknown
  Bacterial polypetide isolated from the Sargasso Sea
MCGIVGILGDHEVGPLLVNALKRLEYRGYDSAGIATLNNGNLGRRRSLGN

SEQ ID NO: 125224 - protein, 34 aa, Unknown
  Bacterial polypetide isolated from the Sargasso Sea
LLSIPLQMLAYHVALMKNCDVDKPRNLAKSVTVE

SEQ ID NO: 125225 - protein, 88 aa, Unknown
  Bacterial polypetide isolated from the Sargasso Sea
NAHPHSSQNVSVVHNGIIENSTLLKKFLVGKVHKFKSQTDTEVIVHLITENLKTKNIVNSIKKTLKSLHGSFALGIIFKDQPDLIVGA

SEQ ID NO: 125226 - protein, 45 aa, Unknown
  Bacterial polypetide isolated from the Sargasso Sea
VENTNDDLLPFLLTIPLQKLAYYSALKKGYDIDKPRNLAKSVTVE

SEQ ID NO: 125227 - protein, 34 aa, Unknown
  Bacterial polypetide isolated from the Sargasso Sea
VYTIPLQILAYEVACSIGTDLDQPRNLAKSVTVE

SEQ ID NO: 125228 - protein, 315 aa, Unknown
  Bacterial polypetide isolated from the Sargasso Sea
NGIIENFQDLKTKLQEEGIVFNSDTDTEVIPHLIQRELNTLSKLNLENNGSTFLVAVRNVISDLEGSYALAVLWAGAPTSLVVARRQAPLIIGLGEGEFICASDTPAIANFTNIILPLEDEEIALLTPLGIEIYDSNNERQYRNPVSLKVAEQIIDKMHFKHFMLKEIYDQPETAKNWLENYLIKNLEKDQYQINYPFDTKFFESIERIEIIACGTSKHAAMVGSFLLEQFSGIPTNVYYASEFRYSPPPLLPNTLTIGVTQSGETADTIAAIEMEIKRRSSTEDKKFNPNLIAITNRKESSIGRQVSNIIDICA

SEQ ID NO: 125229 - protein, 211 aa, Unknown
  Bacterial polypetide isolated from the Sargasso Sea
DYCKDAKVRTLSIVNVMNSSIARESDYCLYTKAGAEIGVASTKAFTAQLSVLLSMALHCGTKNNNITIEQNREICKEIMQAPQILEKTIKRSYELKETAKAIIDSKGVMYLGRGTAFPLALEGALKFKEISYIHAEGYPAGEMKHGPLALIEKDLPVVCIVPPGPLFHKTVSNIQEVIARGGRILMITDDESLESGSENIWKIFRLPKTRK

SEQ ID NO: 125230 - protein, 95 aa, Unknown
  Bacterial polypetide isolated from the Sargasso Sea
MCGIVALVGSREAAPQLLEGLRQLEYRGYDSAGIATVDAKAEGLHCLRASGKLANLAKRFEELGSPGQCGIGHTRWATHGKPEERNAHPHRSMDG

SEQ ID NO: 125231 - protein, 63 aa, Unknown
  Bacterial polypetide isolated from the Sargasso Sea
MCGIVGIISSKEVTGRIINSLKKLEYRGYDSAGIATLVDGNINEVKCEGRVEALEKDITKFNL

SEQ ID NO: 125232 - protein, 32 aa, Unknown
  Bacterial polypetide isolated from the Sargasso Sea
MFLASILNSLRKLEYRGYDSAGIATLESGIIK

SEQ ID NO: 125233 - protein, 264 aa, Unknown
  Bacterial polypetide isolated from the Sargasso Sea
IENYAEIKKDLTNDGFKFNSDTDTEVVAVELSRKWNGNLLKTVVNVAKTLEGTYALVVTTTKEEGTIVAGRLMSPLVLGVGDNEVFLASDSAAILEHTKKMIFLENGDFVEIKNGKYKLFDSELNEIQREIQEIDWEVSEAEKSGYDHFMYKEILEQSEVIERTLSGRLEASSDEIPIKLNEASKFEKIWIVACGTAYHAGLFGKDLFEKVLGVPVSVELASEFRYREPIVGKNDLGIVISQSGETMDTIAATELLKENGSHVL

SEQ ID NO: 125234 - protein, 68 aa, Unknown
  Bacterial polypetide isolated from the Sargasso Sea
KVILITDNLGAKKAQKYCDEVIILPETNSITSAIIYSLPIQLIAYHLGLALGTDIDQPRNLAKSVTVE

SEQ ID NO: 125235 - protein, 47 aa, Unknown
  Bacterial polypetide isolated from the Sargasso Sea
MNMPDCGYYNAPIVYTIPLQILAYEVACSIGTDLDQPRNLAKSVTVE

SEQ ID NO: 125236 - protein, 58 aa, Unknown
  Bacterial polypetide isolated from the Sargasso Sea
MKLCQKIFWETIEVENTNDDLLPFLLTIPLQKLAYYSALKKGYDIDKPRNLAKSVTVE

SEQ ID NO: 125237 - protein, 38 aa, Unknown
  Bacterial polypetide isolated from the Sargasso Sea
MTPIIYTIPLQIFSYEVALLRGTDIDQPRNLAKSVTVE

SEQ ID NO: 125238 - protein, 166 aa, Unknown
  Bacterial polypetide isolated from the Sargasso Sea
MCGISGIVHSENFGRSLLNSIKNLEYRGYDSCGVAVIQNGKIDLRKNIGGIDDVNLKESLDKMEGKIGIAHTRWATHGGVTQENAHPHLSANRKFAVVHNGIISNYQQLRERLLSEGFCFDSLTDTEVFVNLLEKSYSERKDLEQAFLAALQQIEGSFSIVMLSSH

SEQ ID NO: 125239 - protein, 183 aa, Unknown
  Bacterial polypetide isolated from the Sargasso Sea
STKAFTSQLVALSLFTMFMGRRRSMSASRGHEIAQHLQMLPAQIQEVFKLEEEIRELARGYKDAQNFLYLGRGYQFPVALEGALKLKEVSYIHAEGYPAAEMKHGPIALIDEDMPVVVLAPRDPIYSKVVSNIEEVKARSGKIIAVVSDDAPELQGKVDHMIKVPHTLPHLLPVLTTIPLQLL

SEQ ID NO: 125240 - protein, 256 aa, Unknown
  Bacterial polypetide isolated from the Sargasso Sea
MKNTIIKVLKKLHGSFALGIIFKDRNDLMIGARRGSPLAVGYGPNENYLGSDSYALKSMTNKISYLDDGEFCIIKKDQIEFFQSNGKKINKKVMNLSKEDIQYDKGEYKYFMEKEIDEQPSTINDCINEYVDKFNKQINIYNFPWNINSFQSIVLIGCGTAYHSCLVAKYWLEQNTNLDVGIDIASEFRYRKVRFKKDCLYVFVSQSGETADTYAALELCKKNKMKTCAVVNVVESSIARDADLVLPIYCGQEIGV

SEQ ID NO: 125241 - protein, 102 aa, Unknown
  Bacterial polypetide isolated from the Sargasso Sea
PLALIDEEIPVIALAPESEIAEKLVSNLEEVKARGGTLYVFSDPSISMDLKSGRLINMPKCDFLLTPIIYTIPLQILSYEVALLRGTDIDQPRNLAKSVTVE

SEQ ID NO: 125242 - protein, 91 aa, Unknown
  Bacterial polypetide isolated from the Sargasso Sea
MCGIVGAVSTRNIVPVLIEGLRRLEYRGYDSCGVAIQRDGQLERARTVSRVADLDAQAQTSHLDGAIGIAHTRWATHGRPDTVNTHPHFSG

SEQ ID NO: 125243 - protein, 50 aa, Unknown
  Bacterial polypetide isolated from the Sargasso Sea
MAKIEVENTSEDLIPFLIFIPLQKLAYYSAFKKGYDIDKPRNLAKSVTVE

SEQ ID NO: 125244 - protein, 87 aa, Unknown
  Bacterial polypetide isolated from the Sargasso Sea
PEDELVEKLLSNLEEVKSRGGTLYVFGNATSKIKIEKGKFMNMPQCGYYNAPIVYTIPLQILAYEVACSIGTDLDQPRNLAKSVTVE

SEQ ID NO: 125245 - protein, 150 aa, Unknown
  Bacterial polypetide isolated from the Sargasso Sea
MCGISGIIDQKPVTRNLVTSIANLEYRGYDSCGMAMLNGKGIEVRKNTGGVEEVRSREKLDMMTGNLGIAHTRWATHGGVTTENAHPHLSQNGEFAIVHNGIISNYQKLRKRLIGEGLQFRSTTDTEVFVNLVEEAFAQKNDVLGAFLEA

SEQ ID NO: 125246 - protein, 81 aa, Unknown
  Bacterial polypetide isolated from the Sargasso Sea
STYNDTLTSAREIKARGAKIIGISDIESDVYDYWMEIPKINEILYPISEIIPIQLLTYYSALEKDTDPDYPRNLAKSVTVK

SEQ ID NO: 125247 - protein, 127 aa, Unknown
  Bacterial polypetide isolated from the Sargasso Sea
MCSIIGYSGNEIAAPIIVKGLKRMEYRGYDSVGVATESQNQIELKKGTGKVTEVNSKFQLDTLPGKIGIGHTRWATHGKVTDLNAHPHPSNSGKIAIVHNGIIENFEELKKQLEDDGYSFKSETDSE

SEQ ID NO: 125248 - protein, 56 aa, Unknown
  Bacterial polypetide isolated from the Sargasso Sea
KIKIEKGKFMNMPDCGYYNAPIVYTIPLQILAYEVACSIGTDLDQPRNLAKSVTVE

SEQ ID NO: 125249 - protein, 179 aa, Unknown
  Bacterial polypetide isolated from the Sargasso Sea
IIENSTILKKILEKKGYKFKSQTDTEVIAHLVTDYLKKNNLKNTIIKVLKKLHGSFALGIIFKDYPDLIIGARRGSPLAVGYGPNENYLGSDSYALKSMTNKISYLNDGEFCLIKENQVEFFDPNGKKINKEILNLSQDDHNYDKGDYKHFMAKEIDEQPTTIENCVNEYVDKLNIQIN

SEQ ID NO: 125250 - protein, 35 aa, Unknown
  Bacterial polypetide isolated from the Sargasso Sea
FLLTIPLQKLAYYSALKKGFDIDKPRNLAKSVTVE

SEQ ID NO: 125251 - protein, 58 aa, Unknown
  Bacterial polypetide isolated from the Sargasso Sea
MKFIQKIFWEQIEVDAISDELIPFLTTIPLQKLAYYSALDKGYDIDKPRNLAKSVTVE

SEQ ID NO: 125252 - protein, 93 aa, Unknown
  Bacterial polypetide isolated from the Sargasso Sea
MCGIIGAASSRSVGKILVNGLKKMEYRGYDSAGLVLNKENKAVQLKTLGKVSNLEELMIQKKPRAKSGIAHTRWATHGQPSQKNAHPHESNGS

SEQ ID NO: 125253 - protein, 272 aa, Unknown
  Bacterial polypetide isolated from the Sargasso Sea
ELVVAVSQSGETFDTKFSLNVAQEMGAKTAAIVNVMGSSISRMVDHVIMQGSGPEICVVSTKAALAQALLLLRTALELGYKEGCLDSKSFQSHQKELESFPELISILLNEKSGFMRNLARITSSVQNWIFLGCGIYYPVAMESALKMKEVTYLHAEGMPAGFLKHGTLSMIEESVHSLFFVPPPAEVDLHNRTIIAIEEIKTRGGTLVGLYFEGDSQAKSLLDHAVELPPVPSLIAPFVQMILAQMFAYYTALDLKRNIDKPRNLAKSVTVG

SEQ ID NO: 125254 - protein, 150 aa, Unknown
  Bacterial polypetide isolated from the Sargasso Sea
MISTILPTYARADLEFVRGQGAWLTEADGSHFLDLASGIAVNSLGHAHPDLVKIIKSQAEKLWHVSNLYKIPQQRALADVLVANSFADTVFFTNSGTESCELAVKMSRKYWFEKGYPDKSEIITFEGSFHGRSSAGIAATASEKMTKGFG

SEQ ID NO: 125255 - protein, 170 aa, Unknown
  Bacterial polypetide isolated from the Sargasso Sea
MISKLLNEKSGFLRNLARNTSSVQNWIFLGCGIYYPVAMESALKMKEVTYLHAEGMPAGFLKHGTLSMVERSVYSLFFIPPPAEVELYNRTIIAIEEIKTRGGTLVGFHFEGDSQAASLLDYALELPEVPTLLAPYVEMILAQMFSYYTALDLKRNIDKPRNLAKSVTVG

SEQ ID NO: 125256 - protein, 154 aa, Unknown
  Bacterial polypetide isolated from the Sargasso Sea
MNLSREDINYDKGDYKYFMEKEIDEQPSTINDCINEYVDKYNNKINIYNFPWKTNSFQSIVLIGCGTAYHSCLVAKYWFEQNTNLDVSIDIASEFRYRKVRFKKDCLYVFVSQSGETADTYAALELCKKNKMKTCAVVNVVESSIARDADLVLP

SEQ ID NO: 125257 - protein, 44 aa, Unknown
  Bacterial polypetide isolated from the Sargasso Sea
EVNGKLNIPIIMSIPLQLLAYHVAKLRGTDIDQPRNLAKAVTVE

SEQ ID NO: 125258 - protein, 83 aa, Unknown
  Bacterial polypetide isolated from the Sargasso Sea
MCGIIGAASSRNVGKLLVQGLHKMEYRGYDSAGIALHQKDSIFNLRTLGKVSLLEEGMIEQRPKSKLGIAHTRWATHGQPSEQ

SEQ ID NO: 125259 - protein, 89 aa, Unknown
  Bacterial polypetide isolated from the Sargasso Sea
MHPEDELVEKLVSNLEEVKSRGGTLYVFGNATSKIKIEKGKFMNMPECGYYNAPIVYTIPLQILAYEVACSIGTDLDQPRNLAKSVTVE

SEQ ID NO: 125260 - protein, 72 aa, Unknown
  Bacterial polypetide isolated from the Sargasso Sea
LQRSQVLLITNKSDEEIYSENIWQKIEIENTEEDLFPFLTTIPLQKLAYYSALKKGYDIDKPRNLAKSVTVE

SEQ ID NO: 125261 - protein, 66 aa, Unknown
  Bacterial polypetide isolated from the Sargasso Sea
MCGIVSYLGKSDSVPILLKGLQRLEYRGYDSAGLALIDTDNLSCIKQSGKVSELNSKIEKISIKGS

SEQ ID NO: 125262 - protein, 71 aa, Unknown
  Bacterial polypetide isolated from the Sargasso Sea
ARGGIVISITDKINNSLKKISDFVLIAPQTHKYVFPITCSIILQMLAYELAVCRKCEIDQPRNLAKSVTVE

SEQ ID NO: 125263 - protein, 53 aa, Unknown
  Bacterial polypetide isolated from the Sargasso Sea
MCGIIGITSNKLVSSPIINSLKKLEYRGYDSAGIATIDSGFIKEVNVKEELRV

SEQ ID NO: 125264 - protein, 170 aa, Unknown
  Bacterial polypetide isolated from the Sargasso Sea
MCGIFGCVGEKDVSNLIIKGLKRLEYRGYDSAGLCLETDDRNFEILKSSSSNYPVDVLTKSLEKSKISSNAGIGHTRWATHGPINNINTHPHFSYSKNISIVHNGIVENYDFLSKFLIRKGVEIYSQTDSELIAHLVDLMLCSNGNLKSAIFSVSNMLEGNNTVALMSKE

SEQ ID NO: 125265 - protein, 26 aa, Unknown
  Bacterial polypetide isolated from the Sargasso Sea
MTYYSALEKDTDPDYPRNLAKSVTVK

SEQ ID NO: 125266 - protein, 78 aa, Unknown
  Bacterial polypetide isolated from the Sargasso Sea
MCGIIGAASSRNVGKLLVQGLHKMEYRGYDSAGIALHQKDSIFNLRTLGKVSLLEDGMIEHRPKSKTWNCAYSLGNSW

SEQ ID NO: 125267 - protein, 163 aa, Unknown
  Bacterial polypetide isolated from the Sargasso Sea
MCGIVGYIGNKDPVPVLLKGLKRLEYRGYDSSGIALLEEDNLTHIKKAGKVSDLQQLVDDSSIKGSCGIAHTRWATHGAPNDINSHPHLDHTGRIALVHNGIFENYETIKQLLINRNIKFTSDTDTEVIVQLISELYYNNNDKLSFEDAVRAALQEVVGAYGI

SEQ ID NO: 125268 - protein, 133 aa, Unknown
  Bacterial polypetide isolated from the Sargasso Sea
MRILKKLSHELALARDVLYLGRGISYPIALEGALKLKEITYIHAEGYAAGEMKHGPIALINDGVPVIVIAPSGPLFEKTASNAQEVIARGGRVILLTDKKGSEEFGNNAQHIIALPKVDQFVAPILYAIPSAT

SEQ ID NO: 125269 - protein, 235 aa, Unknown
  Bacterial polypetide isolated from the Sargasso Sea
MCSIIGYSGSEIAAPIIVKGLKRMEYRGYDSVGVATESENQIELKKGTGKVTEVNSKFQLDTLPGRIGIGHTRWATHGKVTDLNAHPHPSNSGKIAIVHNGIIENFEELKKQLEDEGYSFKSETDSEIIANLLQKNYESTKNVKDTIMKTVSVIKGHYAFVAMFENGQLAAARFHEPLIIGVGQENIFLSSDVLGFIEYTDNAIYMKSGNFVILENKEFEILDFNGEKVQTRNNK

SEQ ID NO: 125270 - protein, 47 aa, Unknown
  Bacterial polypetide isolated from the Sargasso Sea
IEVDQLDDDLIPFLMTIPLQKLAFYSALEKGYDIDKPRNLAKSVTVE

SEQ ID NO: 125271 - protein, 54 aa, Unknown
  Bacterial polypetide isolated from the Sargasso Sea
MCGIIGINSNRPVSSSIISSLKKLEYRGYDSAGIATLSNNGINEVKSEGRVDKS

SEQ ID NO: 125272 - protein, 432 aa, Unknown
  Bacterial polypetide isolated from the Sargasso Sea
KQDSPLIIGLGEGCNYIGSDINAFLEHTRKAVVLDDGEFAVISRERYEISDVGKREEREKSILQIDWDTETTKKGGFSHYMIKEIFDEPQTARQALDVPQEQIKQLAEMFQNAPHAYLMGVGTTFFICQMAQYLFSSLSKRYFPAISSDEFNGVVPVSSEELVVAVSQSGETFDTKFSLNVAHEMGAKTAAIVNVMGSSISRMVDHVIMQGSGPEICVVSTKAALAQALLLLRTALELGYKEGCLDSKSFQSHQKELESFPELISILLNEKSGFMRNLARITSSVQNWIFLGCGIYYPVAMESALKMKEVTYLHAEGMPAGFLKHGTLSMIEESVHSLFFVPPPAEVDLHNRTIIAIEEIKTRGGTLVGLYFEGDSQAKSLLDHAVELPPVPSLIAPFVQMILAQMFAYYTALDLKRNIDKPRNLAKSVTVG

SEQ ID NO: 125273 - protein, 40 aa, Unknown
  Bacterial polypetide isolated from the Sargasso Sea
MIFYLFLITVPLQKLAYYSALKKGYDIDKPRNLAKSVTVE

SEQ ID NO: 125274 - protein, 101 aa, Unknown
  Bacterial polypetide isolated from the Sargasso Sea
LALVDEEIPVIALAPEDSLVEKLLSNLEEVKARGGTLYVFGNANSTIEVMKGKFINMPNCGDYNAPIIYTIPLQILAYEVACLRGTDLDQPRNLAKSVTVE

SEQ ID NO: 125275 - protein, 255 aa, Unknown
  Bacterial polypetide isolated from the Sargasso Sea
MNIYFAGTPNSAAEILKSIALNDLFSIKGVITQPDKKGKRGNQRIESPVSLMAKSLNLQTFKPRNLAKEEIQNDFDITNADVLVVVAYGNLIPTWILESNIKAINIHYSLLPSYRGASPIQSSLLNNDKKTGVTFMQMSEDLDAGKVIKCFEVPINNNDNKSSLEKKLTKLSILNLEKVITDFCSNRIIPVDQDHEKASYCKKILKEDSIINFKESAEKIFAKFRAYNEWPGTCFMHKNKVIKIHGLKIIFKYKS

SEQ ID NO: 125276 - protein, 62 aa, Unknown
  Bacterial polypetide isolated from the Sargasso Sea
MCGIIGISSNKPVSANIINSLKKLEYRGYDSAGIATLSDGEINEVKSEGRVDILENNFDLKN

SEQ ID NO: 125277 - protein, 78 aa, Unknown
  Bacterial polypetide isolated from the Sargasso Sea
SNVQEVKARGAHVIAIGNSSSEKLENISDKYITLPDSNEILSTVISIIPLQFIAYHVANNRGESIDQPRNLAKSVTVE

SEQ ID NO: 125278 - protein, 67 aa, Unknown
  Bacterial polypetide isolated from the Sargasso Sea
MCGIIAAASNRNVGKLLVQGLHKMEYRGYDSAGIALHQIDKIAHLRTLGKVNLLEEKMIAEKPKSKL

SEQ ID NO: 125279 - protein, 65 aa, Unknown
  Bacterial polypetide isolated from the Sargasso Sea
LYVFSDPSISMDLKSGRLINMPKCDFLLTPIIYTIPLQILSYEVALLRGTDIDQPRNLAKSVTVE

SEQ ID NO: 125280 - protein, 71 aa, Unknown
  Bacterial polypetide isolated from the Sargasso Sea
MCGIIGINSNRPVSSTIINSLKKLEYRGYDSAGIATLSKNEINEVKSEGRVDNLENNLLVQKMEGTIGIGH

SEQ ID NO: 125281 - protein, 299 aa, Unknown
  Bacterial polypetide isolated from the Sargasso Sea
PNIGFEEITSLEVEADISSEFRYRKIRFDKNALYIFVSQSGETADTYAALDICKKEKVKTCSIVNVVESSIARASDCVLPIHAGPEIGVASTKAFLGQMLVLYLLTLKIGFLRNDLDQINYKKKIKELKKMPELISETLKKEEKIQLIAKDIYNSKGSMFLGRGLSFPIALEGALKLKELSYLHAEGYPAGEMKHGPLALIEDGLPVVVIAPKDKYFEKTLSNMQEVIARGGKVLIITNSVGKVISENIRFQIDLPDTDFALTPFLFTVPLQLLSYHVALFRKCDIDKPRNLAKSVTVE

SEQ ID NO: 125282 - protein, 92 aa, Unknown
  Bacterial polypetide isolated from the Sargasso Sea
MCGIVGGTSNRNILPILVEGLRRLEYRGYDSAGVAYKANGKISLVKNAGRVEDLAEKLNLEKSNAKIGIAHTRWATHGVPSEKNAHPHSSKN

SEQ ID NO: 125283 - protein, 256 aa, Unknown
  Bacterial polypetide isolated from the Sargasso Sea
ADTLAALEHVDPERVLARLAICNVDHSAIVRDSELVYLTQAGTEIGVASTKAFTTQLVALLNLTLCLARHHVEGALSGDEVAASLEEMADAAGAVLEYDARIKALSHHFTNKHHALFLGRGIYYPIAMEGALKLKEISYIHAEAYPAGELKHGPLALVDDDMPVVAVAPDDRLMEKLRSNLEEVRARGGQLFVFASANAGYESAPDCQVLEMPSCSALAGPVVFTIALQLLSYHVAVARGTDVDKPRNLAKSVTVE

SEQ ID NO: 125284 - protein, 267 aa, Unknown
  Bacterial polypetide isolated from the Sargasso Sea
MIVGARRGSPLAVGYGPNENYLGSDSYALKAMTNKITYLNDGEFCIIKKDHVEFFNEEGDKINKKVLELSLEDEKYDKGDYKHFMAKEIEEQPTTLKNGINEYIDTLNNDINIYNFPWKINEIYSVTLIGCGTAYHSCLLAKYWFEELTSLDVNVDIASEFRYRKNRFKKETLYIFVSQSGETADTYAALDLCNQNDMKTCAVVNVIESSIARDSKFVLPIHCGTEIGVASTKAFLGQILILYILALKIGLLRKDLKKELFNEKLKD

SEQ ID NO: 125285 - protein, 169 aa, Unknown
  Bacterial polypetide isolated from the Sargasso Sea
MCGIIGIASKENVSSNIINALRKLEYRGYDSAGIAINTANKINQRKVKGKLDNLIYALQKDQFDGNTGIGHTRWATHGEPSDKNAHPHSSTSVSLVHNGIIENAAELKKLKEVKDYHFESDTDSEVITALLTFYLKEGLSHLESVQKTISSLVGSYALAIIFSDSEDTI

SEQ ID NO: 125286 - protein, 159 aa, Unknown
  Bacterial polypetide isolated from the Sargasso Sea
MCGIIGIASKENVSSNIINALRKLEYRGYDSAGIAINTAKKINQRKVKGKLDNLIYALQKDQFDGNTGIGHTRWATHGEPSDKNAHPHSSTSVSLVHNGIIENAAELKKLKEVKDYHFESDTDSEVITALLTFYLKEGLSHLESVQKTISYLEGSYALA

SEQ ID NO: 125287 - protein, 118 aa, Unknown
  Bacterial polypetide isolated from the Sargasso Sea
MCGIVGGTSNRNILPILVEGLRRLEYRGYDSAGVAFKSNGKISLVKNAGRVEDLAEKLNLNKNSTKVGIAHTRWATHGIPTEKNAHPHNSKKNIYVCHNGIIENHLALKEMLKKEGAK

SEQ ID NO: 125288 - protein, 198 aa, Unknown
  Bacterial polypetide isolated from the Sargasso Sea
MCGIYGCISDDAASKVLEGLRKLEYRGYDSAGLAAIFSSTDIQVETERTIGYVSDLVTKVNGRFDGARISIGHTRWATHGGVTNDNAHPHSSADGSITIVHNGIIENSVELSSRISKLGYQLSSETDTEVIVHLLDHELKTQPEGFGFLEAFNAVISTLEGSWAIAVIATDLDGILVSRPGSTACNWKGGRKYIDFIR

SEQ ID NO: 125289 - protein, 369 aa, Unknown
  Bacterial polypetide isolated from the Sargasso Sea
DTEVITLLLTDELKNKTPLEAVHDTLFKLEGSFALGIIFKKYNDMIIGARRGSPLAVGYSKNENYIGSDSYALKSMTNKISYLDDGDICILTKDNVEFYDSRKNKINKKVLTLSDDKNVADKGDYKNFMIKEIFEQPITAKNCINEYIDKSRDDINFYNIPFDVKKINKIVLIGCGTAYHSCLVAKYWFEELTSIEVETDIASEFRYRKIKFNKNNLYVFVSQSGETADTSAALDLCKKNNVKTCSIINVVESTIARNSDWVLPIHAGPEIGVASTKAFIGQMLLLYMFSLKIGNLRGDIDKIDYQNKIRNLKKLPNLLEDCLKTEDKIQLVAKDFLDSKGSMFLGRGFSFPIALEGALKLKELSYLHA

SEQ ID NO: 125290 - protein, 311 aa, Unknown
  Bacterial polypetide isolated from the Sargasso Sea
MNFFVGSDISPIIKHTQQIVYLEDSQMAIIKDDEYKITSIDKDVSLPKKVEKIDFKIDDYDKGKFKYFMHKEIHEQIDTISNTITGRAKKDRVYLNGLLEYWTQIKEADKIFITACGTSWHAGLIGKNLIERFAKIPVHVEYASEFRYNKTLIDNNSVVIAISQSGETADTLAAIKKANEHGAITVGICNVPGSSVSRETNCGIFTRCGHEVGVASTKAFTAQISILYLLALKLAASNDAISKASLRSHLDFSENIKKIKNVLKKENEIKKIALKYKNANDFLYLGRGLNFPIALEGALKLKEISYIHAEG

SEQ ID NO: 125291 - protein, 322 aa, Unknown
  Bacterial polypetide isolated from the Sargasso Sea
EGKLDVLKEHLENKQILGNIGIGHTRWATHGVPNDVNAHPHSDNNDEFAIIHNGIIENYAEIKKELTNDGFKFNSDTDTEVVAVELSRKWNGNLLKTVVNVAKTLEGTYALVVTTTKEEGTIVAGRLMSPLVLGVGDNEVFLASDSAAILEHTKKMIFLENGDFVEIKNGKYKLFDSELNEIQREIQEIDWEVSEAEKSGYDHFMYKEILEQSEVIERTLSGRLEASSDEIPIKLNEASKFEKIWIVACGTAYHAGLFGKDLFEKVLGVPVSVELASEFRYREPIVGKNDLGIVISQSGETMDTIAATELLKENGSHVLALV

SEQ ID NO: 125292 - protein, 282 aa, Unknown
  Bacterial polypetide isolated from the Sargasso Sea
MCGIVGITSNKEVTTRIINSLKKLEYRGYDSAGIATLKDGFINEVKCEGRVEALEKNISKTNVQGEIGIGHVRWATHGKPSTINAHPHSSETVSVVHNGIIENSTILKKILEKKGYKFKSQTDTEVIAHLVTDYLKKNNLKNTIIKVLNKLHGSFALGIIFKDYPNLIVGARRGSPLAVGYGPNENYLGSDSYALKSMTNKVSYLNDGEFCLIKENQVEFFDTKGNKANKKILNLSQDNQNYDKGDYKHFMAKEIDEQPTTIKNCVNEYIDKISKQINIYNI

SEQ ID NO: 125293 - protein, 282 aa, Unknown
  Bacterial polypetide isolated from the Sargasso Sea
PITIKNCINEYIDKINKEINILNFPWKKNEISSVKLIGCGTAYHSCLIAKYWFEQLTLLDVEADIASEFRYRKNRFKKDCLYIFVSQSGETADTYAALDLCNKHKMKTCSIVNAVESSIARDSKLVLPIHCGPEIGVASTKAFLGQMLVLYILCLKISYLRKDLDKKKYHIKINSLFNLSKSVSKSLMTEDQIQSICNSFTKAKGAMFLGRGYSFPIALEGALKLKELAYIHAEGYPAGEMKHGPLALIEDGMPVVVIAPKDEYYKKTISNMQEVIARGAKV

SEQ ID NO: 125294 - protein, 290 aa, Unknown
  Bacterial polypetide isolated from the Sargasso Sea
LDVNIDIASEFRYRKNRFKKDTLYVFVSQSGETADTYAALDICNKNSMKTCAVVNVIESSIARDSNFVLPIHCGPEIGVASTKAFLGQILVLYILALKLGSMRNEIEKKEYQEKIKDLKALPGLIEKTLLHDNDIQAISSTFNEAKGSMFLGRGYSYPIALEGALKLKELSYVHAEGYPAGEMKHGPLALIEEGMPVVVLAPRDNYYKKTISNMQEVIARGAKVLLITNKSKDEVVSENIWETIEVENTNDDLLPFLLTIPLQKLAYYSALKKGYDIDKPRNLAKSVTVE

SEQ ID NO: 125295 - protein, 336 aa, Unknown
  Bacterial polypetide isolated from the Sargasso Sea
SYFLDKGMTSREAFSNSLSRLEGAYAIAVIFSSESEKIYGARSGSPLAVGWGDSEMFLGSDASALSNETLKISYMDEGDWVELSKNGAKFWDKDNNEVTRDVVETSFNPIQFAKGNFPHYMLKEIYEQPTVIGETLNTFFNPSDSEIRLPELGVNFNEIDKVTLVACGSSFFAGLVAKYWIEYYAKVPVEVDISSEFRYREPPLTKNGLTIFISQSGETADTLAALRYAKSQSQHIISLVNVRESSIARESDGLLLINAGPEIGVASTKAFTCQLVTLAAFSISLGVAKNTMSVTKSKKLSRAISEIPSKISDILSDNLSIKSIAENLSSMSNVLY

SEQ ID NO: 125296 - protein, 198 aa, Unknown
  Bacterial polypetide isolated from the Sargasso Sea
MCGIIAAASNRNVGKLLVQGLHKMEYRGYDSAGIALHQTDQIAHLRTLGKVKLLEEKMIAEKPKSKLGIAHTRWATHGEPSEENAHPHMSNERVYIVHNGIIENYLDLKDFLKKEGYSFSSQTDSELIAHLLEYFLNKGNSMLDSMYFTKEKLDGAYAIAAIDKEDDQNIIIARCKSPLLIGIGMDEFLAASDPLAIG

SEQ ID NO: 125297 - protein, 138 aa, Unknown
  Bacterial polypetide isolated from the Sargasso Sea
MCGIIGVASTKPSVDKLLIGLLRQEYRGYDSAGLAIFDEADQIQIFKSTGKVAELQNSIDQNPVNGNVGIAHTRWATHGLPTKNNAHPHHSNNNVFVIHNGIIENHKEIRTTLKALGYVFESETDTEVIAHLIHAKIL

SEQ ID NO: 125298 - protein, 305 aa, Unknown
  Bacterial polypetide isolated from the Sargasso Sea
ENLKTSELEEAITKTLKQLHGSFALGIVFKDMPDLIVGARRGSPLAVGYGPNENYLGSDSYALKSMTNKITYLDDGEFCIVKKDQVLFFNEEGKKVNKKILELSSDQANYDKGDFKHFMAKEIEEQPTTIKTGIKEYVDNLNKDINIFNFPWKIKDIKSITLVGCGTAYHSCLMAKYWFEELTTLDVNIDIASEFRYRKNRFKDDSLYIFVSQSGETADTYAALDLCNKNKMKTCAVVNVIESSIARDSNFVLPIHCGPEIGVASTKAFLGQILVLYILALKLGSLRKEIEKKEYQEKIKDLKAL

SEQ ID NO: 125299 - protein, 310 aa, Unknown
  Bacterial polypetide isolated from the Sargasso Sea
PKSKLGIAHTRWATHGQPSEENAHPHASSGEVHIVHNGIIENYLALTEKLKKAGYAFQSETDSEVIAHLLHQHIQSSGDLLSAMHDAIKELDGAYAIAAIHIKNKNRLVVARNKSPLLIGLGLEENFVASDPLALSQLTNEFLFLEDGDVAEITKQSYQVFDGKSSPVKRDVTEIDIAVNTVTKGGYSHFMEKEIYEQPDAVANTINGKLGDEDVLDNIFGLGSTELFSKIKRIQFVACGTSLHAGKVGRFWFERIAKIPCYVDFASEYRYREPLVEEGTLFVTISQSGETADTLAALKYAKEKDYLCTL

SEQ ID NO: 125300 - protein, 145 aa, Unknown
  Bacterial polypetide isolated from the Sargasso Sea
MCGIIAAASERNVGKLLVKGLHKMEYRGYDSAGIALHQKDQIAHLRTLGKVKLLEEKMISEKPKSKLGIAHTRWATHGEPSEENAHPHKSNERVYIVHNGIIENYIELKNFLKKKGYNFSSQTDSELIAHMIEYFLGQGNNMLDS

SEQ ID NO: 125301 - protein, 363 aa, Unknown
  Bacterial polypetide isolated from the Sargasso Sea
NDAFEIFDHQNEFINRKSQIIDKTVTLAEKGVFKHFMSKEIHEQPSVIQDSISHFINNEDLTVNLPKFPFNITNLKNITLVACGSSYYSGLVAREWFEKLARVKVDVEIASEFRYREAPMDSSGLTVFISQSGETADTLAALKHCKKLNQKTISIVNVPNSSMCRNSDTSLKIFAGPEIGVASTKAFTCQLVVLASLAIHIGRINGNLSDDDENNYVKSLLDIPRLISNVLDQEEDLIKIVKELNPIKNALYLGRGQMYPVALEGALKLKEISYIHAEGYPAGEMKHGPIALLEKGLPVIIGAPSFNLFDKTASNLYEVIARDGNVLLITDQEGLNHLGDTTKKIKSFIGDEANIITAPFIYT

SEQ ID NO: 125302 - protein, 165 aa, Unknown
  Bacterial polypetide isolated from the Sargasso Sea
KNTYYVENKINSIANIFSDAKGCMFLGRGSSFPIALEGALKLKELSYVHAEGYPAGEMKHGPLALIEDGMPVVVLAPKDSYYKKTISNMQEVIARGAKVLLVTNKSEDDVFSENIWETIEVELSNSDLIPILLTIPLQKLAYYSALKKGFDIDKPRNLAKSVTVE

SEQ ID NO: 125303 - protein, 108 aa, Unknown
  Bacterial polypetide isolated from the Sargasso Sea
ELKHGPLALIDADMPIIVVAPNNELLEKLQSNVEEVRARGGILYVFADVDAHFKSDATQRVISVPHVHPLIAPIIYTIPLQLLSYYVAIIKGTDVDQPRNLAKSVTVE

SEQ ID NO: 125304 - protein, 306 aa, Unknown
  Bacterial polypetide isolated from the Sargasso Sea
LAVFSDGNIMERKTQGKLYNLIQRLKNDPIDGHVGIGHTRWATHGIPSEKNAHPHSSSLVSVVHNGIIENAEEIKKDIKSDYNFLSDTDSEVITALLTQNLNKENDYYKAVSLTVQRLEGSYALAIMIKDLKDTIIGAKKGSPLVVGRGEKGSFVGSDTIALSSVATEVCYLEDGDIVIVDNHNIQIFDQQEKSVNREYVNLSISEDDTSKGTFNHFMEKEIHEQPRSVGDTLRQFIDYDNSIISNPDLKINWQKVNKVHLIACGTAYYSCMIAKYFFEKQSQVPSECDMASEFRYRDPIISKDTL

SEQ ID NO: 125305 - protein, 301 aa, Unknown
  Bacterial polypetide isolated from the Sargasso Sea
TVKELEGAFALAVISTHEPDKIIVARSGCPVVIGIGKNENFIASDIAALLPETNQFMFLEEGDIAVVGKHSIQIFDKEGVEVTRKISQSRLSSDAAEKGNFDHFMLKEIYEQSSAVGNTLDQRIADGRVLQNAFGPDAETVFDKARSVHIVACGTSYHAGLIAKYWIESICQIPCRVEIASEYRYRNPVVMEDTLFIAISQSGETADTLAALRAAKEAKYISTLVICNVPESTMVREAELVMLTKAGPEIGVASTKAFTTQLTALSLLTIVIARRSGLDQGSEKEMVNQLLELPTLIDQIL

SEQ ID NO: 125306 - protein, 80 aa, Unknown
  Bacterial polypetide isolated from the Sargasso Sea
MSNMQEVIARGAKVLLITNKNKDEVVSENIWEQIEVDKLHDELIPFLVTIPLQKLAFYSALEKGYDIDKPRNLAKSVTVE

SEQ ID NO: 125307 - protein, 268 aa, Unknown
  Bacterial polypetide isolated from the Sargasso Sea
TLKNGINEYVDTLNNDINIYNFPWKMNEISSVTLIGCGTAYHSCLLAKYWFEELTSLDVNVDIASEFRYRKNRFKKETLYIFVSQSGETADTYAALDLCNQNDMKTCAVVNVIESSIARDSEFVLPIHCGTEIGVASTKAFLGQILILYILALKLGLLRKDLKKELFNEKLKDLKSLPKLAEKTLLTDNKIQTISNTFNEAKGSMFLGRGFSFPIALEGALKLKELSYIHAEGYPAGEMKHGPLALIEEGMPVVVLAPRDNYYKKTIS

SEQ ID NO: 125308 - protein, 107 aa, Unknown
  Bacterial polypetide isolated from the Sargasso Sea
KHGPLALIEEGMPVVVLAPRDNYYKKTISNMQEVIARGAKVLLITNKSKDEVVSENIWETIEVENTNDDLLPFLLTIPLQKLAYYSALKKGYDIDKPRNLAKSVTVE

SEQ ID NO: 125309 - protein, 340 aa, Unknown
  Bacterial polypetide isolated from the Sargasso Sea
SMPVALPFDEAFYAGIERIEILACGTSRHAALVGAHLLEQFAGLPTAVHYASEFRYAPPPLAPNTLTIGVTQSGETADTLAALAMEAQRRCAHSDPAYASRQLGVTNRPESSLSRQVPHILDIGAGVEVGVAATKTFMGQLLAFYGLAMAFATRSGSRSAAEIQTLADELRTLPQQLQELVSLHDQRSEALAHRFAETQDVIFLGRGINYPIALEGALKLKEISYIHAEGYPAGEMKHGPIALLDAHVPVVSIAVPGTVFEKVLSNAQEAKARDARLIGVAPEGPDTALFDDLLPVPEVSECLSPLLTVVPMQLLSYHIAAHRGLDVDQPRNLAKSVTVE

SEQ ID NO: 125310 - protein, 284 aa, Unknown
  Bacterial polypetide isolated from the Sargasso Sea
LKKQLTLKGHNFKSQTDTEVIVHLITENLKTAELEEAITKTLKQLHGSFAIGIVFKDFPDLIVGARRGSPLAVGYGPNENYLGSDSYALKSMTNKITYLDDGEFCIVKKDYVNFFNEEGKKINKKILELSSNEANYEKGDFKHFMAKEIEEQPITLKTGIKEYIDNVNKDVNILNFPWKIDEISSIELIGCGTAYHSCMMAKYWFEELTSLDVNVDIASEFRYRKNRFKNDCLYIFVSQSGETADTYAALDICKKNKMKTCAIVNVIESSIARDSNYVLPIHCG

SEQ ID NO: 125311 - protein, 288 aa, Unknown
  Bacterial polypetide isolated from the Sargasso Sea
MCSIIGYSGSEIAAPIIVKGLKRMEYRGYDSVGVATESENQIELKKGTGKVTEVNSKFQLDTLPGRIGIGHTRWATHGKVTDLNAHPHPSNSGKIAIVHNGIIENFEELKKQLEDEGYSFKSETDSEIIANLLQKNYESTKNVKDTIMKTVSAIKGHYAFVAMFENGQLAAARFHEPLIMGVGQENIFLSSDVLGFIEYTDNAIYMKSGNFVILENREFEILDFNGEKIKHEITKVSKEFGDAYKGDYAHFTLKEIYEQPDLILKAGERTIEGLEEASRLHKKCKEYL

SEQ ID NO: 125312 - protein, 265 aa, Unknown
  Bacterial polypetide isolated from the Sargasso Sea
MCGIIGIASNKSVSTNIISALKKLEYRGYDSAGLATIANGQINEKKCQGRVEKLENILFQNPSKGNLGIGHVRWATHGIPNTVNAHPHSSEIVSVVHNGIIENSEELKKNLEKSGKKFKSQTDTEVITVLLTEKLEKYDPLNAVFETLEMLKGSFALGIIFKNYKNYVIGARRGSPLAVGYSNNENYLGSDSYALKTMTNKISYLDDGDVCVLTKDDIKFYNSKKNIINKEIFTLSEDKSAISKGNYKNFMIKEIFEQPVTTKTC

SEQ ID NO: 125313 - protein, 153 aa, Unknown
  Bacterial polypetide isolated from the Sargasso Sea
MCGIVGIASKNDCIDNIISGLYSLEYRGYDSSGLATIKNNHFEYNKNIGKISNLEKSVKNNKLSGDVVIAHTRWATHGKPSIKNCHPFIKDNCVLVHNGIIENYTDLINYYSIKQKNIKSETDSEIIAEIYNKLLNEFNNPMEAIKNLNKKII

SEQ ID NO: 125314 - protein, 301 aa, Unknown
  Bacterial polypetide isolated from the Sargasso Sea
LLLEALQRVLPKLQGAYALAVIWNQAPGALVVARKAAPLLIGLGEGEFLCASDTPALAGFTRTILPMEDGEVALLSPLGVELYDAAGVRQQRMPTQLSGVDHVADKREFRHFMLKEIHEQPETAELWVARHLPQGLATEQPVALPMDDAFYAGIERIQILACGTSRHAAMVGAYLLEQFAGIPTSVHYASEFRYAPPPLAPHTLTIGVTQSGETADTLAALAMEAERRLAHGDPAFAPRQLGVTNRPESSLSRQVPHILDIGAGIEVGVAATKTFLGQLLAFYGLAMAFAARRGARSAAEI

SEQ ID NO: 125315 - protein, 341 aa, Unknown
  Bacterial polypetide isolated from the Sargasso Sea
QDNQNYDKGDYKHYMAKEIDEQPITIKNCVNEYIDKINRQINIYNFPWKINQLSSVILIGCGTAYHSCLVAKYWFEEHTTLDVSIDIASEFRYRKLKFKTDCLYVFVSQSGETADTYAALDLCKKNKMKTCSIINVVESSIARETDLVLPIHCGPEIGVASTKAFLGQMLVLYMLCLKISFDQKVITKKNYQEKIKNLLSLSNLCKKTLLTDSKIQKTSRTFIEAKGSMFLGRGYSYPIALEGALKLKELAYVHAEGYPAGEMKHGPLALIEEGMPVVVLAPRDNHYKKTISNMQEVIARGAKVLLITNKSKDEIQSENIWETIEVEYLSEDLFPFLTTIP

SEQ ID NO: 125316 - protein, 140 aa, Unknown
  Bacterial polypetide isolated from the Sargasso Sea
MCGIIGIASNKSVSMNIINSLKKLEYRGYDSAGLATLNIDRIDEKKCSGRVEELEKILFKTPSNGNVGIGHVRWATHGIPSIVNAHPHSSEIVSVVHNGIIENSDEIKKSLENKGLRFKSQTDTEVITLLITEALKDNEP

SEQ ID NO: 125317 - protein, 150 aa, Unknown
  Bacterial polypetide isolated from the Sargasso Sea
MCGIVGGVSDRNVLPILIEGLKRLEYRGYDSAGVAFRENSKISLIKAKGRVLDLENKLPEMKVKSNQGIAHTRWATHGVPSEKNAHPQISENKIFVVHNGIIENHLNLKEKLQSEGVKFRSDTDTEVVAHLINLHMQRGMDFDSATLKSY

SEQ ID NO: 125318 - protein, 212 aa, Unknown
  Bacterial polypetide isolated from the Sargasso Sea
IGVASTKAFTTQLTAFLMLTLALGKENGMTDADSKAIVSALHSLPAKLEETLAITGGIEDLAEEFADKNHSLFLGRGDQYPIAMEGALKLKEISYIHAEAYASGELKHGPLALIDDEMPVIVVAPNNELLEKLKSNVEEVRARGGIMYVFADKDAAFEGDETMRVINVPHCDEPIAPIIYTLPLQLLSYYVALIKGTDVDQPRNLAKSVTVE

SEQ ID NO: 125319 - protein, 312 aa, Unknown
  Bacterial polypetide isolated from the Sargasso Sea
MFLEENFDLKNLKGNIGIGHVRWATHGAPNSINAHPHSSDNVSVVHNGIIENSTILKKYLTSKGHIFKSQTDTEVIVHLITENLKTDELDLAITKTLKQLHGSFALGIIFKDSPNLIVGARRGSPLAVGYGPNENYLGSDSYALKAMTNKITYLDDGEFCIIRNDQVLFFNEDGKKINKKIMELSSDESSYEKGEFKHFMAKEIEEQPTTIKTGIKEYIDKTNLEINIYNFPWKVDEINSITLIGCGTAYHSCLMAKYWFENLTQLDVNIDIASEFRYRKNRFKKDSLYIFVSQSGETADTYAALDLLTKIK

SEQ ID NO: 125320 - protein, 239 aa, Unknown
  Bacterial polypetide isolated from the Sargasso Sea
MCGIVSYYGKKNSVPFLLNGLRRLEYRGYDSAGIAIMKDGSIKTVKKAGKVDRLHKKIKESPINGSIGIGHTRWATHGEPNDTNAHPHQDKTGKIFIIHNGIIENFSTLKEVLIRKGFIFKSETDTEVLVNLISDIYYADGLNFEQAVEAALNQVIGTYGIVTFCSDEPNKIVAARHGSPLVLGVGNDEYFIASDASPIVEHTRNVIYLDEGEIVTIDDNGYSIRSMHDDTIVNRETTE

SEQ ID NO: 125321 - protein, 295 aa, Unknown
  Bacterial polypetide isolated from the Sargasso Sea
YRGYDSAGLAIFDESEEIKVYKSTGKVSELQNSIDQNPVNGNTGIAHTRWATHGLPTRENAHPHHSNKEIYVIHNGIIENHQEIRTTLKALGYVFESETDTEVIAHLIHAKMSENNTPLVESLRAAVKDLRGAYAIGAVSSKEPGLLAAARKGSPLVIGQGQGENFIASDQLALADFAENFVFLEEGDLAEITPTDTKFWNIDDEQVDRPVVVAKSLGETIDKGEYRHFMLKEIKEQPEKIKGLLEGQLTESGVQEEIFGPEAPEIFKKVESVQIVACGTSYHAGTVAKYWLEGL

SEQ ID NO: 125322 - protein, 172 aa, Unknown
  Bacterial polypetide isolated from the Sargasso Sea
MCGIVGITSTKSVTNSILNSLRKLEYRGYDSSGIATLYEGNINEVKCEGRVDSLEENLNKLKLLGNVGIGHVRWATHGVPSAINAHPHSSENVSVVHNGIIENSTLLKKLLIKKGHLFKSQTDTEVITHLITEYLKKNDLKTSIIKMLKRLHGSFALGIIFKNQPDVIVGAR

SEQ ID NO: 125323 - protein, 327 aa, Unknown
  Bacterial polypetide isolated from the Sargasso Sea
YAIFDENKKAVKEKITEIDISSQATSKGDFKHFMEKEIYEQPQAILNTIDGRVGGDDVLDNIFGLGSSDIFEKVKRIQVVACGTSLHAGRVAANWFSAISELPTQIDYASEYRYRNPHVDEDSLLVTISQSGETADTLAALRYAKEKDYLSTLTICNVPTSSLARESDYSIFTNAGPEIGVASTKAFTTQLAALMLLALSLAKSRGKNPKLRTRVITAMRSLADTVEETLKLKDAILEIAPEIANKDNALFLGRGIFYPIAKEGALKLKEISYIHAEAYPAGELKHGPLALIDEDMPVIALAPESEIAEKLVSNLEEVKARGGTLYV

SEQ ID NO: 125324 - protein, 326 aa, Unknown
  Bacterial polypetide isolated from the Sargasso Sea
DAHSIDHLTQRIIYLEDGDHALIKFDDVEIFNENEEKVNRKVINIKAEIGLITKGGYKHFMEKEIFEQPSVIPQTISTFINNNSDIKLDLNKFGFKNKNTLLIAAAGTSYYAAMVGKYWIEHIADLPVIIDLASEYRYRKPSVFGQSAMLVISQSGESLDTLMALRHGKELGLNTNAIVNVEGSTIDREADYSLYTRVGAEIGVASTKSFTSQLVILFIIAIALGKKFNNFKLSQIQKICNYMHALPSAIAQMLNMENEIKSVAQNIKNVKSIIFLGRGLLYPLALEGALKLKEISYIHAESFAAGEMKHGPIALIEDQVPVIMFL

SEQ ID NO: 125325 - protein, 212 aa, Unknown
  Bacterial polypetide isolated from the Sargasso Sea
MCGIVGAVAERNVVEILLEGLKRLEYRGYDSAGVALLKNDGTLTRIRRTGKVQELADAVAEGEALGTTGIAHTRWATHGGVTEANAHPHFSTERVAVVHNGIIENYVNLKGQLKEQGYTFTSDTDTETIAHTVHEELKSGKALLDAVQSAVKTFHGAYGTVIMDKEDPSRVVVARSGSPLVIGLGLGENFIASDQMALLPVTRRFIFLEEGE

SEQ ID NO: 125326 - protein, 123 aa, Unknown
  Bacterial polypetide isolated from the Sargasso Sea
MCGIVGITSSKEVIPRIISSLKKLEYRGYDSAGLATLSNGNINEVKCEGRVDALEKNIIQTKISGSIGIGHVRWATHGKPSSINAHPHSSEDVSVVHNGIIENSTILKKVLENKGYKFKSQTD

SEQ ID NO: 125327 - protein, 275 aa, Unknown
  Bacterial polypetide isolated from the Sargasso Sea
ELPTQIDYASEYRYRNPHVDEDSLLVTISQSGETADTLAALRYAEEKDYLSTLCICNVPTSSLARESEYSIFTNAGPEIGVASTKAFTTQLAALMLLALSLAKSRNRNPKLRKRIITALRSLPDTVQETLKLKDAILEIAPEIASKDNALFLGRGIFYPIAKEGALKLKEISYIHAEAYPAGELKHGPLALIDEEIPVIALAPESEIAEKLVSNLEEVKARGGTLYVFSDPSISMDLKSGRLINMPKCDFLLTPIIYTIPLQILSYEVALLRGTD

SEQ ID NO: 125328 - protein, 277 aa, Unknown
  Bacterial polypetide isolated from the Sargasso Sea
SSVVLIGCGTAYHSCLVAKYWFEQNTSLDVSVDIASEFRYRKIKFKKDCLYVFVSQSGETADTFAALDLCKKNYVRTCAVVNVVESSIARDSDLVLPIHCGPEVGVASTKAFLGQMLVLYLLCTKISYEQKSINKKDYQKKIKDLLSLSKSAKNTLNIEDKIQTLGKDFANSKGSMFLGRGYSYPIALEGALKLKELAYVHAEGYPAGEMKHGPLALIEEGMPVVVIAPRDEHYKKTISNMQEVISRGAKVLLITNKSTDEIYSENIWEQIEVDTIS

SEQ ID NO: 125329 - protein, 211 aa, Unknown
  Bacterial polypetide isolated from the Sargasso Sea
ASTKAFLGQMLVLYLLCTKISYEQRSILKKVYKKKIKDLLSLSKSTKETLNVDNKIYNLGKDFANSKGSMFLGRGYSYPIALEGALKLKELAYVHAEGYPAGEMKHGPLALIEDGMPVVVIAPRDEYYKKTISNMQEVISRGAKVLLITNKSTDEIFSENIWEKIEVENISDELLPFLTTIPLQKLAYYSALDRGFDIDKPRNLAKSVTVE

SEQ ID NO: 125330 - protein, 271 aa, Unknown
  Bacterial polypetide isolated from the Sargasso Sea
MCGIIGINSNKPVSGTIINSLKKLEYRGYDSAGIATLSNGQINEVKSEGRVDNLEKNSLVKNMDGTIGIGHVRWATHGLPNSINAHPHSSQNVSVVHNGIIENSTLLKKFLVGHGHKFKSQTDTEVIVHLITENLKTENIVNSIKKTLKALHGSFALGIIFKDQPDLIIGARRGSPLAVGYGPNENYLGSDSYALKSMTNKITYLNDGEFCVIKKDHVEFFDEEGVKVNKKVLELSSEEKKYDKGDYKHFMAKEIEEQPTTLKNGIKEYLD

SEQ ID NO: 125331 - protein, 279 aa, Unknown
  Bacterial polypetide isolated from the Sargasso Sea
VELYDGDGVRQQRMPTLLTGMNHVVDKREFRHFMLKEIHEQPETAALWVSRHLPAGLPASMPVALPFDEAFYAGIERIEILACGTSRHAALVGAHLLEQFAGLPTSVHYASEFRYAPPPLAPNTLTIGVTQSGETADTLAALAMEAQRRSAHPDPAYAPRQLGVTNRPESSLSRQVPHILDIGAGIEVGVAATKTFMGQLLAFYGLAISFAARRGSRSEAEIQALVDELRRLPQQLQKLVSLHDQRSEELAHRFAETQDVIFLGRGINNPIALEGALKL

SEQ ID NO: 125332 - protein, 225 aa, Unknown
  Bacterial polypetide isolated from the Sargasso Sea
RFCFPIHAGPEIGVASTKAFTGQMLVLYILAIKISEIRKEITEKDYNKKINDLKKLPDLIKKTINYCQDNTPIIAKDFLKAKGAMFLGRGLSFPMALEGALKLKELSYLHAEGYPAGEMKHGPLALIEEGLPVVILAPKDRFFEKTISNMQEVIARGGKVILITNENKNIISENIRFTLQIPKTNDHLTPFLMTVPLQLLAYHVASLKNCDIDKPRNLAKSVTVE

SEQ ID NO: 125333 - protein, 325 aa, Unknown
  Bacterial polypetide isolated from the Sargasso Sea
DGEFCIIKKDHVEFFSDEGTKINKKVLELSSTEEKYDKGDYKHFMAKEIEEQPNTIRNGINEYLDMSNKDINIYNFPWKSSEITSITLIGCGTAYHSCLMAKYWFEEITSLDVNIDIASEFRYRKNRFKKDTLYVFVSQSGETADTYAALDLCKQNSVKTCAVVNVVESSIARDSEFVLPIHCGTEIGVASTKAFLGQMLILYLLALKLALLRKDIGKAHFDKKIDDLKNLPKLIEHTLLIDNKIQTISNTFNEAKGSMFLGRGFSYPIALEGALKLKELSYIHAEGYPAGEMKHGPLALIEEGMPVVVLAPRDYLYKKTIFYMQ

SEQ ID NO: 125334 - protein, 289 aa, Unknown
  Bacterial polypetide isolated from the Sargasso Sea
QGLHKMEYRGYYSAGIALHQKDQVVHLRTLGKVKLLEEKMIQEKPKSKLGIAHTRWATHGEPSEENAHPHKSNERVYIVHNGIIENYLDLKDFLKKEGYSFASQTDSELIAHMLDYFLNQGNSMLDSMYLTKDRLDGAYAIAAIDLEDDQNIIIARSKSPLLIGIGIDELLAASDPLALGQLTNEFIFLEDGDVAELSSDSYLIYDINKQKVEREISKIDISSQATSKGEYKHFMEKEIYEQPEAILNTIDGRVGGDDILENIFGLGSSEMFERVKRIQNVACGTSLHA

SEQ ID NO: 125335 - protein, 28 aa, Unknown
  Bacterial polypetide isolated from the Sargasso Sea
QLLAYHLAVLRECDIDQPRNLAKSVTVE

SEQ ID NO: 125336 - protein, 300 aa, Unknown
  Bacterial polypetide isolated from the Sargasso Sea
MLKQLHGSFALGIIFKDEPDLIIGARRGSPLAVGYGPSENYLGSDSYALKSMTNKISYLNDGEFCMIKKENVEFFDKKGNKINKKVLTLSSNEQNYDKGDYKHFMAKEIEEQPTTIKNCINEYIDKINSSINIFNFPWKSNQISSIVLIGCGTAYHSCLMAKYWFEQLTTLNVSVDIASEFRYRKNRFSKDTLYVFVSQSGETADTFAALDLCNKNKMKTCSVVNVVESSIARESKFVLPIHCGPEVGVASTKAFLGQMLVLYILCLKLGNIRGDIVKNVYLKKIKSLFSLSKLASQTLE

SEQ ID NO: 125337 - protein, 318 aa, Unknown
  Bacterial polypetide isolated from the Sargasso Sea
MLTKDEVSFYDANLKKVNKKILTMSENEASADKGEYKHFMYKEIIEQPDTVKNCINEYVDSMKKNINIVNFPIEPKNIKKIILIGCGTAYNSCLTAKYWLEELTSIDIEIDIASEFRYRKLKFNSNNLYIFVSQSGETADTAAALDLCKKNNVKTCSIVNVIESSIARNSDWVLPIYAGVEIGVASTKAFLGQLTVLYILCLKLAFVRKDIDNNKYIKNINNLKKLPEAIVKCIKKENEVQLMAKEFIPAKGSMFLGRGSSYPVALEGALKLKELSYLHAEGYPAGEMKHGPLALIEEGLPVIVIAPKDKYFEKTIST

SEQ ID NO: 125338 - protein, 301 aa, Unknown
  Bacterial polypetide isolated from the Sargasso Sea
FPWEISSIKSVMLIGCGTAYHSCLISKYWIEQNTNLDVNVDIASEFRYRKVRFKKDCLYIFVSQSGETADTHAALNLCKQNKVKTCAVVNVIESSIARDAELVLPIYCGQEIGVASTKAFIGQMLVLYILITKISFDQKCINRKIYQSKIKNLFNLSNSIKKTLKVDQKIFNIGKIFAQAKGSMFLGRGFSFPIALEGALKLKELAYVHAEGYPAGEMKHGPLALIEEGMPVVVLAPRDEHYKKTISNMQEVIARGAKVLLITNKNKDEVISENIWEIIEVDQLSDELIPFLNDIPLQKLA

SEQ ID NO: 125339 - protein, 129 aa, Unknown
  Bacterial polypetide isolated from the Sargasso Sea
MCGIIGINSNKAVSSTIISSLKKLEYRGYDSAGIATLSNNKINEIKSEGRVDKLESNSLIKNMEGTIGIGHVRWATHGLPNSINAHPHSSQNVSVVHNGIIENSTQLKKFLVGKGHKFKSQTDTEVIVH

SEQ ID NO: 125340 - protein, 208 aa, Unknown
  Bacterial polypetide isolated from the Sargasso Sea
KAFLGQMLVLYLFSIKIAFVRRNIDKNKYQTKIKSLLGLADQVKNTLDTDNQIQLACSSFADAKGSMFLGRGSSFPIALEGALKLKELAYIHAEGYPAGEMKHGPLALIEDGMPVVVIAPRDYYYNKTISNMQEVIARGAKVLLITNKSTDEIFSENIWQKIEVENIDDDLLPFLITIPLQKLAYHSALKKGYDIDKPRNLAKSVTVE

SEQ ID NO: 125341 - protein, 289 aa, Unknown
  Bacterial polypetide isolated from the Sargasso Sea
DVSIDIASEFRYRKVKFKKDCLYVFVSQSGETADTYAALELCKKNKMKTCAVVNVVESSIARDADLVLPIYCGQEIGVASTKAFLGQMLVLYILSIKISFDQKFITNKEYRSKIKNLLLLSNSAKKTLKLDHKLLNIGKVFAHAKGCMFLGRGYSFPIALEGALKLKELAYVHAEGYPAGEMKHGPLALIEEGMPVVVIAPRDDHYKKTMSNMQEVIARGAKVLLITNKNKDEVASENIWEQIEVDKLDDELIPFLVTIPLQKLAFYSALEKGYDIDKPRNLAKSVTVE

SEQ ID NO: 125342 - protein, 175 aa, Unknown
  Bacterial polypetide isolated from the Sargasso Sea
MCGIVGITSTKNVSASIVNSLRKLEYRGYDSAGIATLENGVIREVKCEGRVNALENNLSKQKIDGNVGIGHVRWATHGVPSTVNAHPHSSDKVSVVHNGIIENSTILKKLLIKKGYVFKSQTDTEVIVHLITDYLKKNNLKNSIIKMLKKVHGSFALGIIFQDQPDIIVEQDEAH

SEQ ID NO: 125343 - protein, 300 aa, Unknown
  Bacterial polypetide isolated from the Sargasso Sea
MLEKVKRVQIVACGTSLHAGRVAANWFSAISELPTQTDYASEYRYRNPHVDDDSLLVTISQSGETADTLAALRFAKEKDYLSTLCICNVPTSSLARESEHSIFTNAGPEIGVASTKAFTTQLAALMLLALSLAKSRGKNPKLRTRVITALRSLSETVEETLKLKDTILEIAPEIANKNNALFLGRGIFYPIAKEGALKLKEISYIHAEAYPAGELKHGPLALIDEEIPVIALAPESEIAQKLVSNLEEVKARGGTLYVFSDPSISMDLKSGRLINMPKCDFLLTPIIYTIPLQILSYEVA

SEQ ID NO: 125344 - protein, 116 aa, Unknown
  Bacterial polypetide isolated from the Sargasso Sea
MCGIIGISSNKSVSANIINSLKKLEYRGYDSAGIATLSDGKINELKTEGRVDNLENNFDLKSLKGNIGIGHVRWATHGIPNSINAHPHSSHNVSVVHNGIIENSTILKKHLTNKGH

SEQ ID NO: 125345 - protein, 285 aa, Unknown
  Bacterial polypetide isolated from the Sargasso Sea
MTNKVSYLNDGEFCIIKENQVEFFDTTGNKVNKKILNLSRDNQDYDKGDYKHFMLKEIDEQPIIIKNCINEYIDKISKQINIYNFPWKINQINSVVLIGCGTAYHSCLVAKYWFEEYTSLDVSVDIASEFRYRKLKFKTDCLYVFVSQSGETADTYAALDICKKNRMKTCSIVNVVESSIARDSNLVLPIHCGPEIGVASTKAFLGQMLVLYMLCLKLSYDQKITSKKKYQEKIKNLLSLSNLCKKTLLTDVKIQKTSKAFIESKGSMFLGRGYSFPIALEGALN

SEQ ID NO: 125346 - protein, 293 aa, Unknown
  Bacterial polypetide isolated from the Sargasso Sea
MCGIIGINSNKPVSVSIINSLKKLEYRGYDSAGIATLSNGLINEIKSEGRVDKLEKNTLLQNMEGTIGIGHVRWATHGLPNSINAHPHSSQNVSVVHNGIIENSTILKKFLVGKGHKFKSQTDTEVIVHLITENLKTDDIVNSIKKTLKSLHGSFALGIIFKDQPDLIVGARRGSPLAVGYGPNENYLGSDSYALKAMTNKITYLDDGEFCVIKRDHVEFFNEEGIKINKKVLELSSDEEKYEKGDYKHFMAKEIEEQPSTLKNGINEYLDNSNNNINIINFPWKINEINSIT

SEQ ID NO: 125347 - protein, 216 aa, Unknown
  Bacterial polypetide isolated from the Sargasso Sea
PEISVASTKAFTTQLVTLLTMAVHWGELRGVLSDSEVKKITDNLANLPSLLARMLSDELDWIGASSELALSQDVIYLGRGVNFPIALEGALKLKEISYIHAEGYAAGEMKHGPIALLERGVPVVMVAPHDEWFEKTSSNLKEALARGARVVLLSDDKGIEKLHEAATWIFRMPRVHPMLTPILYSLPVQLLAYHTAKEKGTEIDQPRNLAKSVTVE

SEQ ID NO: 125348 - protein, 55 aa, Unknown
  Bacterial polypetide isolated from the Sargasso Sea
DTTKKIKSFIVDEANIITAPFIYTIPYQLFAYHTALLKGTDVDQPRNLAKSVTVE

SEQ ID NO: 125349 - protein, 290 aa, Unknown
  Bacterial polypetide isolated from the Sargasso Sea
INSITLIGCGTAYHSCLMAKYWFDELTQLDVNIDIASEFRYRKNRFKENSLYIFVSQSGETADTYAALDLCNKNKMKTCAVVNVIESSIARDSKFVLPIHCGPEIGVASTKAFLGQILILYILALKLSSLRKEITKENYQEKIKDLQDLPKLIEKSLLIDNDIQAISSTFNEAKGSMFLGRGFSYPIALEGALKLKELSYVHAEGYPAGEMKHGPLALIEDGMPVVVLAPRDSYYLKTISNMQEVIARGAKVLLITNKSKDEVVSENIWETIEVENTNNDLLPFLLTIPL

SEQ ID NO: 125350 - protein, 132 aa, Unknown
  Bacterial polypetide isolated from the Sargasso Sea
MCGIIAAASNRNVGKLLVQGLHKMEYRGYDSAGIALHQTDQIAHLRTLGKVKLLEEKMIAEKPKSKLGIAHTRWATHGEPSEENAHPHMSNERVYIVHNGIIENYLDLKDFFKKEGYFFSSQTDSELIAHLL

SEQ ID NO: 125351 - protein, 296 aa, Unknown
  Bacterial polypetide isolated from the Sargasso Sea
NTLESRLGSNDVLDNIFGLGSSEIFAKTKRIQFVACGTSLHAGKVGRFWFEEIAGIPCYVDFASEYRYRNPLVEDGTLFVTISQSGETADTLAALRYARDKDYLSTLSICNVPTSSLARESDHVLFTNAGPEIGVASTKAFTTQLVSLLLLAMSIAKSQDKNPIMREAITKELKDLPAAIDESLDTKTAIQKITPAIAEKNNALFLGRGIFFPIVQEGALKLKEISYIHAEAYPAGELKHGPLALVDDSIPIVALSPENDLTEKLISNLEEVKARGGTLYVFGEGQDQFTIDSGSY

SEQ ID NO: 125352 - protein, 216 aa, Unknown
  Bacterial polypetide isolated from the Sargasso Sea
MCGIIGIVGKSSVQPSIIEALEKLEYRGYDSSGIATVSDNSIIRRRAVGKLSSLKELINKKPVKGEIGIGHTRWATHGVPSLENAHPHKVGKVALVHNGIIENFHELRSQLISEGQTFVSDTDTEVIAAFCSKLLESGMSPDEAVVSTLNNLEGAFALCFIFEEYDNILIAARKGSPLVVGWGSGEMFVGSDAIALASLTNQLTYVEEANYVIFVK

SEQ ID NO: 125353 - protein, 275 aa, Unknown
  Bacterial polypetide isolated from the Sargasso Sea
VHNGIITNHQALRETLTRKGYVFESDTDTEVIPKLTKYLYDKFHEKCTFRQLVMEVCRQLQGAYALAFKSKHYPGELVAAKRGSPLILGIAEGPHPGEQHALVTSEGFVPPSKRAKRTSIEFYFASDASAMVEHTKRVLHLEDDDVAHIRNGAYGIYRMEKIHSEGDDSPSLAYAPTVKSAEVERTIETLTMEVEQIMKGNYDHFMKKEIHEQPDAIKQTMRGRVVFDPDGTTVQRVFLGGMVDYLGTIRRSRRIILCGCGTSYHSAIAVRQLME

SEQ ID NO: 125354 - protein, 242 aa, Unknown
  Bacterial polypetide isolated from the Sargasso Sea
VTLVACGTSYYAALVASYWLEELAKIPCQVEIASEFRYRTVVCRPNSLFVTISQSGETADTLAALRLAKELGFASTLTICNVATSSLVRESNLALMINAGVEIGVASTKAYTAMLVDLLLLTLALAKCNGLSGGKESEIVSKLHELPKLIEDCLGLDEEVKDLSNNFIDRDHALFLGRGSMYPVALEGALKLKEISYIHAEGYAAGELKHGPLALVDEEMPVVAVAPNDELLEKLQSNLHEV

SEQ ID NO: 125355 - protein, 256 aa, Unknown
  Bacterial polypetide isolated from the Sargasso Sea
TADTLAALRYAKEKDYLSSLCICNVPTSSLARESDYSIFTNAGPEIGVASTKAFTTQLAALMLLALSLAKSRKKNPKLRTRVVTALRSLPDTVEETLKLKESITDLAPEVASKDNALFLGRGIFYPIAKEGALKLKEISYIHAEAYPAGELKHGPLALIDENMPVIALAPESEIAEKLISNLEEVKARGGTLYVFSDPSISMDLKSGKLINMPKCDFLLTPIIYTIPLQILSYEVALLRGTDIDQPRNLAKSVTVE

SEQ ID NO: 125356 - protein, 140 aa, Unknown
  Bacterial polypetide isolated from the Sargasso Sea
MCGIVGITSTKSVTSMIVNSLKKLEYRGYDSSGIATLHNGNINEVKCEGRVDTLEKNLNKSNLSGNVGIGHVRWATHGIPSTINAHPHSSENVSVVHNGIIENSTILKKYLVKKGHIFKSQTDTEVITHLITEYLKKNDL

SEQ ID NO: 125357 - protein, 314 aa, Unknown
  Bacterial polypetide isolated from the Sargasso Sea
GDVAKVAPDLVEVFDAKNQLVNREQLTIDIKAEAASKGDFKHHMEKEIFEQPQAVLNTLDGRIGGEDVLENIFGEGSSELLAKVKRVQVVACGTSLHAGRVAANWFSAIAGLPTQMDYASEYRYKNPYIDEDTLLVTISQSGETADTLAALRYANDKGYLGSLAICNVPTSSLARESDFLLLTNAGPEIGVASTKAFTTQLTALMLLTLSLAKATGKNPRLRGRIIKALRFLPEKISEALALKPEILEIAPEIANKNNALFLGRGIFYPIAKEGALKLKEISYIHAEAYPAGELKHGPLALIDGEMPVIAIAPE

SEQ ID NO: 125358 - protein, 262 aa, Unknown
  Bacterial polypetide isolated from the Sargasso Sea
GYGPNENYLGSDSYALKSMTNKITYLNDGEFCVIKKDQVEFFNEEGIKINKKVLEVSSEDEKYEKGDYKHFMAKEIEEQPTTLMNGINEYLDNFNNDINIYNFPWKIKDISSITLIGCGTAYHSCLMAKYWFEELTTMDVNVDIASEFRYRKNRFKKETLYIFVSQSGETADTYAALDLCKKNGMKTCAVVNVVESSIARDSEFVLPIHCGTEIGVASTKAFLGQILILYIFSLKLGLLRNDLKKDVFIQKIKDLKELPKLV

SEQ ID NO: 125359 - protein, 290 aa, Unknown
  Bacterial polypetide isolated from the Sargasso Sea
PDILIVARNASPLALGIGDDACYIGSDAIALSHLTRKVIYLKDHDFALVRADGVAVYQDGGVPVNREPVFVAASPGLIDKGGYRHFMEKEIHEQPDAIAHSLAAMTDEHGQLTAHMSDSALRAINGIVMLAAGTSHYATQIARYWIESLAAVPVACEVASEYHYRQPATSPYNTAIAVSQSGESLDTLMAMRHAANCNLSTIGLVNVPSSTIAREASAVLPTRAGPEIGVASTKSFTAQLTVLLCFAVEIARAKRQIDDARAAAIHMEIQALPGLVGKTLALFDKIRPIA

SEQ ID NO: 125360 - protein, 190 aa, Unknown
  Bacterial polypetide isolated from the Sargasso Sea
MCGIVGIASKKSVSNSIIQALKKLEYRGYDSAGLSTIDNGEINEKKCSGRVDNLEKILFLNPSIGTLGVGHVRWATHGVPNKINAHPHSSDLVSVVHNGIIENSNVLKNELIKKKYFFKSQTDTEVITILLTDFLKNNNLIDAIQKTLERLEGSFALGIIFKKYNNLIVGARRGSPLAVGYGHQENYIGS

SEQ ID NO: 125361 - protein, 245 aa, Unknown
  Bacterial polypetide isolated from the Sargasso Sea
MCGIIGIVSKNEVVDRLLDGLERLEYRGYDSAGIATINSSEIVYSKSTGKLKSLRNKIKENPLDGHVGIGHTRWATHGEPIEINAHPHVTKNVAVVHNGIIENFAEFKDELLEKGIIFNSQTDTEVIARLIEEKISKEKCGPLEAVRLTIEKLRGSFALCFIFQGLDDLIIVTRRGSPLALGFGDGENFVSSDALSLSIFSKKVCYLEEGDLATLTSDEVKIYDSFGNSVFRDIQILYTDPNKSQ

SEQ ID NO: 125362 - protein, 52 aa, Unknown
  Bacterial polypetide isolated from the Sargasso Sea
NLRFKLEIPFINYLLTPFIITVPLQLLAYHVASLKKCDIDKPRNLAKSVTVE

SEQ ID NO: 125363 - protein, 173 aa, Unknown
  Bacterial polypetide isolated from the Sargasso Sea
MCGIVGITSSKPVTSMILNSLRKLEYRGYDSSGIATLHDGNIHEVKSEGRVDALEKNLNRSTLQGNIGIGHVRWATHGVPSTINAHPHSSDNVSVVHNGIIENSTLLKKMLLKKGHVFKSQTDTEVITHLITEYLKKNDLKTSIIKMLKRLHGSFALGIIFKDQPEYNCWCKK

SEQ ID NO: 125364 - protein, 252 aa, Unknown
  Bacterial polypetide isolated from the Sargasso Sea
PNENYLGSDSYSLKSMTNKITYLDDSEFCIVKKDEVNFFNEEGKKINKKILELSSDEASYEKGDFKHFMAKEIEEQPTTVKTGIKEYLDNVNNDVNLFNFPWKIDEIKSIKLIGCGTAYHSCLIAKYWFEELTSLDVNIDIASEFRYRNNRFKNDSLYIFVSQSGETADTYAALDLCNKNKMKTCSIVNVIESSIARNSNYVLPIHCGPEIGVASTKAFLGQILVLYILALKFGFLKNELEKIKYQEKIKDL

SEQ ID NO: 125365 - protein, 294 aa, Unknown
  Bacterial polypetide isolated from the Sargasso Sea
AVKKTLAGRLGKNKVLVDCFGVGAESIFQKVKSIQIIGCGSSYYSGLVAKYWFEQLVGVSCQVDIASEFRYRKNVVHENTILVAISQSGETADTLAAVRNIEDEDYLATLSLCNTPNSSLVRETDFTLMMEAGVEICVASTKAFTNQLVNLLMLASAIGQSRGCSSGVVQEIFDALNSLPSQIEEILNLDIDIERISERFVEKNNALFLGRGSHYPIALEGALKLKEISYIHAEAYPAGELKHGPLALVDDSMPVVAVAPSNELIGKLKSNLEEVRARGAQLLIFADESISLNE

SEQ ID NO: 125366 - protein, 242 aa, Unknown
  Bacterial polypetide isolated from the Sargasso Sea
MCGIVGYIGNKKAKEIIVKGLKRLEYRGYDSAGIATMEKNKLLITKEVGKVKDLVKSISEKDHNGKIGIGHTRWATHGEPNKLNAHPHSDYRKKFTLVHNGIIENYNSLKQLLKDNNINCETDTDTEVLVQFISFIYHEKKLSFSESVRVALNEVIGAYGIVVMCEDEPDTIISARLGSPLLLGIGDSEVFIASDSSPIIEYTRNIIFLDEGELAKITPAGYEVRNIKENEIISKDIEQIQY

SEQ ID NO: 125367 - protein, 255 aa, Unknown
  Bacterial polypetide isolated from the Sargasso Sea
SSNIINSLKKLEYRGYDSAGIATLSDGEINEVKSEGRVDNLENNFDLKNLRGNIGIGHVRWATHGIPNSLNAHPHSSHNVSVVHNGIIENSTILKKHLINKGYKFKSQTDTEVIVHLITEHLKTSELEAAITKTLKQLHGSFALGIVFKDMPDLIVGARRGSPLAVGYGPNENYLGSDSYALKSMTNKITYLDDGEFCVVKKDQVLFFNEEGKKVNKKILELSSDEANYDKGDFKHFMAKEIEEQPTTIKTGIKE

SEQ ID NO: 125368 - protein, 171 aa, Unknown
  Bacterial polypetide isolated from the Sargasso Sea
MRDLPKLINKTLKMTGEYKKVARLLFKRNSALFLGRGLYFPIAREGALKLKEISYIHAEAYPGGELKHGPLALIDKNMPVIALAPDNEHLDKITSNIEEVAARKGKVITIGPLGRTKIDKNGGHIKIPKTLDLLNPIVSVVPMQLIAYYTAVFKGTDVDKPRNLAKSVTVE

SEQ ID NO: 125369 - protein, 174 aa, Unknown
  Bacterial polypetide isolated from the Sargasso Sea
MCGIVAVTGYKKALPLLINGLEKLEYRGYDSAGVAIINSENNSIFCNKAEGKLENLISNLNDHNIPGTVGIGHTRWATHGKPEVKNAHPHTDSSGNIAVVQNGIIENFQGLKKKLEEEGIIFNSDTDTEVIPHLIQRELNTLSKLNLENNGSTLLVAVRNVLSDLEGSYALASY

SEQ ID NO: 125370 - protein, 263 aa, Unknown
  Bacterial polypetide isolated from the Sargasso Sea
MCGIIAAASNRNVGKLLVQGLHKMEYRGYDSAGIALHQTDQIAHLRTLGKVKLLEEKMIAEKPKSKLGIAHTRWATHGEPSEENAHPHMSNERVYIVHNGIIENYLDLKDFLKKEGYSFSSQTDSELIAHLLEYFLNKGNNMLDSMYLTKEKLDGAYAIAAIDKEDDQNIIIARSKSPLLIGIGMDEFLAASDPLAIGQLTNEFIFLEDGDVAELSSESYTIFDESKKKVEREISQIDISSQATSKGEYRHFMEKEIYEQPEA

SEQ ID NO: 125371 - protein, 109 aa, Unknown
  Bacterial polypetide isolated from the Sargasso Sea
PAGEMKHGPIALLDAHVPVVSIAVPGAVFEKVLSNAQEAKARDAQLIGVAPQGPDTDLFDELLPVPEVSEWISPLLTVVPMQLLSYHIAAHRGLDVDQPRNLAKSVTVE

SEQ ID NO: 125372 - protein, 103 aa, Unknown
  Bacterial polypetide isolated from the Sargasso Sea
MCGIIGIASKENVSSNIINALRKLEYRGYDSAGIAINTAKKINQRKVKGKLDNLIYALQKDQFDGNTGIGHTRWATHGGTSDKNAHPHFSTLVSLVHNGIIEN

SEQ ID NO: 125373 - protein, 280 aa, Unknown
  Bacterial polypetide isolated from the Sargasso Sea
NFIASDIMALAPVTNKFTYLDDGQVALLTNDKAVVKNTSHKIVRTKTHEVDSNAYTNDMAGYNHFMEKEIFEQPEAVKKSIEGRLSKHDTQEGIFGAGFEKAVNDITNIQIVACGTSYHSARIFEFWSHKFLGINCRVDYGSEYQYQKPVNSDKTLLVTISQSGETADTLSSLKFAKKTGKPLSLTICNVANSSICRESDFTLLTNAGPEIGVASTKAFVTQLSALNLLLLTLMKVHNRLPGSRKKITKALLELPGHLEKTLKQADVYKKVAKQLSKRTA

SEQ ID NO: 125374 - protein, 262 aa, Unknown
  Bacterial polypetide isolated from the Sargasso Sea
FRYRKNRFKSDNLYVFVSQSGETADTYAALDLCNKNNMKTCSVVNVVESSIARDSKFVLPIHCGPEIGVASTKAFLGQMLVLYLLCLKMGKLNDDIKKKNYISKIKSLLNLSKNIELSLKSENDIQTISNSFTDIKGSMFLGRGYSYPIALEGALKLKELSYIHAEGYPAGEMKHGPLALIEDGMPVVVIAPRDEYYKKTMSNMQEVIARGAKVLLITNKSKDEIFSENIWQKIEVENTDDDLLPFLITIPLQKLAYFTALK

SEQ ID NO: 125375 - protein, 77 aa, Unknown
  Bacterial polypetide isolated from the Sargasso Sea
MQEGIARGGRVIFLSDAAGIEKLGDMAAATIELPAVDAFVAPILYTIPIQLLAYHVAVLKCTDVDQPRNLAKSVTVE

SEQ ID NO: 125376 - protein, 289 aa, Unknown
  Bacterial polypetide isolated from the Sargasso Sea
DTEVIVHLITELLKENNLKNSILRMLKQLQGSFAIAIIFKDQPDLIVGARRGSPLAVGYGPNENYLGSDSYALKSMTNKISYLNDGEFCIVKRNQVEFFDEDGVKLNKKVLKLSSNEENYEKGDYKHFMAKEIDEQPITIKNCIKEYIDSINNDINIYNFPWNINEISSINLIGCGTAYHSCLMAKYWIEEFSSLDVNIDIASEFRYRKNRFKKDSLYIFVSQSGETADTYAALDLCNKNNMKTASIVNVIESSIARNSKFVLPIHCGPEIGVASTKAFLGQNVSFIPK

SEQ ID NO: 125377 - protein, 292 aa, Unknown
  Bacterial polypetide isolated from the Sargasso Sea
KTARKWFEDICEIPCYIDFASEYRYRNPIVEDNTLFVTISQSGETADTLAALEYARAEKYVGIVTICNVPTSTMSREADWKMFTNAGPEIGVASTKAFTTQLAALLMLALSISKSQDKNADKRKQATQELRETPALVDQSFNLKENISQITQNISTKHNALFLGRGMYFSIAQEGALKLKEISYIHAEAYPAGELKHGPLALVDEQIPVIALAPEDSLVEKLLSNLEEVKARGGTLYVFGNANSTIEIIKGRFINMPNCGDYNAPIIYTIPLQILAYEVACLRGTDVDQPRN

SEQ ID NO: 125378 - protein, 230 aa, Unknown
  Bacterial polypetide isolated from the Sargasso Sea
MCGIVGITSNKEVTTRIINSLKKLEYRGYDSAGIATLKDGFINEVKSEGRVEVLEKNISNTNIQGEIGIGHVRWATHGKPSTINAHPHSSESVSVVHNGIIENSTILKKILEKKGYSFKSQTDTEVIVHLVTDYLKKNNLKNAIVKVLKKLHGSFALGIIFKDYPDLIVGARRGSPLAVGYGPNENYLGSDSYALKSMTNKISYLNDGEFCLIKENHVEFFDTKGNKVNK

SEQ ID NO: 125379 - protein, 242 aa, Unknown
  Bacterial polypetide isolated from the Sargasso Sea
GEPVTLTICNVANSFLCRESDYTLLTKAGPEIGVASTKTFVTQLACLNLLLLTLMRVHNKLPTARKKITAALRDLPKLINKTLKMTGEYKKVAKLLFKRNSALFLGRGLYFPIAREGALKLKEISYIHAEAYPGGELKHGPLALIDKNMPVIALAPDNEHLDKIMSNIEEVAARKGKVITIGPLGRTKIDKNGGHIKIPKTLDLLNPIVSVVPMQLIAYYTAVFKGTDVDKPRNLAKSVTVE

SEQ ID NO: 125380 - protein, 285 aa, Unknown
  Bacterial polypetide isolated from the Sargasso Sea
NGSPLVAGTNGVGNSIGSDSIALSSVANKVCYLEDGDITVLTKESIEIYNLEGERANREFVEIGINESEVSKGPYKHFMEKEIHEHPHAVGETFRQFVDYDKGTIAISNINLNFDKISKICLIACGTAYYSCLVGKYYFEQYARTPVECDMASEFRYRDPVIDPNALCIFVSQSGETADTKAALDYCRKQKIQTLSIVNVKNSSIARDSDHCIYTKAGAEIGVASTKAFTAQLSALLSLSIHLASEKKFMSIEENTKLCKEIMQAPLLLEQAIERSYSLKDTAKA

SEQ ID NO: 125381 - protein, 289 aa, Unknown
  Bacterial polypetide isolated from the Sargasso Sea
LKKHLINKGHKFKSQTDTEVIVHLITEHLKTSELEKAITKTLKQLHGSFALGIVFKDMPDLIVGARRGSPLAVGYGPNENYLGSDSYALKSMTNKITYLDDGEFCIVKKDQVLFFNEEGKKVNKKILELSSNEANYDKGDFKHFMAKEIEEQPTTIKTGIKEYVDNVNKEINIFNFPWKIEEINSIILIGCGTAYHSCLMAKYWFEELTNLDVNIDIASEFRYRKNRFKKNTLYVFVSQSGETADTYAALDLCNKNHMKTCAVVNVIESSIARDSNFVLPIHCGPEIGV

SEQ ID NO: 125382 - protein, 247 aa, Unknown
  Bacterial polypetide isolated from the Sargasso Sea
MCGIIGIVSKNQVVDRLIEGLECLEYRGYDSAGIATINNSEIICSKSTGKLVSLKNKLKKKPIDGFIGIGHTRWATHGEPTEINAHPHATINVAVVHNGIIENFAELKDGLLEKGINFESQTDTEVIAKLVEEKISKEKRGPLEAVRLTVEKLRGSFALCFIFKGHENFMVATRMGSPLALGFGNGENFVSSDALSLSIFSKKVCYLEEGDFAKLTSDEVRMYDSYGNSISRDLNILYTDPVNLSKG

SEQ ID NO: 125383 - protein, 180 aa, Unknown
  Bacterial polypetide isolated from the Sargasso Sea
MCGIIGVTSLSDIQDHILSSLKRLEYRGYDSSGIATISNNKLYFCKSEGKIQNLSKKLINHPVGGKIGIGHTRWATHGIVSEVNAHPHVSGNVAIVHNGIIENFQEIRNRLEAKGRKFLSQTDSEVIAHLFDQYLSDGKISLEQITMNVLQQLEGAYAFVVLLLNHPDTLIAARNASPLA

SEQ ID NO: 125384 - protein, 269 aa, Unknown
  Bacterial polypetide isolated from the Sargasso Sea
DGTLFVTISQSRETADTLAALKYAKEKDYLSTLSICNVPTSSLARESEHVLFTNAGPEIGVASTKAFTTQLAGLMLLAMSIAKSLNKDKKLRKNLVKELRNLPEVIDKTLKLSNEIMRIVPNIADKHNALFLGRGMFFPIVQEGALKLKEISYIHAEAYPAGELKHGPLALVDDQIPVVALSPENTLTEKLVSNLEEVKARGGTLYVFGGENSKIKIERGEYIQMPECSELLAPIIYTIPLQILAYQVACQRGTDLDQPRNLAKSVTVE

SEQ ID NO: 125385 - protein, 292 aa, Unknown
  Bacterial polypetide isolated from the Sargasso Sea
MHKEIHEQPTAIGETLKSFIDLDTKSLKINSDLFSKKISRITMIACGTSSYACKVARFWFEKLAAVPVHIDIASEYRYRRIIYSENELVIFISQSGETRDTIACLEEAKKLGVNTFAIVNVSESSIARLADETILTLAGPEIGVASTKAFTTQLFTLLILAIKLGIEKNKISSELEFSLVDELMEIPSLMKKTLDNEDKIRSIASEVYTAQDVLYLGRGECHAIALEGALKLKEISYIHAEGYAAGELKHGPIALVDENVPIIGILPTNTLFNKTASNLAEVYARGGKIISI

SEQ ID NO: 125386 - protein, 184 aa, Unknown
  Bacterial polypetide isolated from the Sargasso Sea
VSSPDEIGKLISELIKLPPLLEDLLEKHNKSSEKLAHDFFNIKDVIFLGRGINYPIALEGALKLKEISYIHAAGYPAGEMKHGPIALLDKKVPVISIASPGEVFDKVISNAQEAKARDSYLIGIAPECNGTEIFDYLMKVPSSNEWISPLLNILPLQLLSYHIAAHRGLDVDQPRNLAKSVTVE

SEQ ID NO: 125387 - protein, 91 aa, Unknown
  Bacterial polypetide isolated from the Sargasso Sea
LAPRDNYYKKTISNMQEVIARGAKVLLITNKRKDEIVSENIWEKIEVENTIDDLIPFLLTVPLQKLAYYSALKKSYDIDKPRNLAKSVTVE

SEQ ID NO: 125388 - protein, 259 aa, Unknown
  Bacterial polypetide isolated from the Sargasso Sea
GETADTYAALEKCKSNKVKTCGIVNVVESSIARSADFVLPIHAGPEIGVASTKAFIGQMIVLYLLTLKIAKERSDIKQDEYSKLILDLIKLPEFIEQTLNKQKDIQIIARDFINAKGTMYLGRGYSYPIAMEGALKLKELSYIHAEGYAAGEMKHGPLALIENGMPVVVLAPKDRYFEKTVSNMQEVIARGGKVLMITDDTSETMNENIRFKFQIPKTNSTVNSFLLTIPIQFLAYHVALLKNCDIDKPRNLAKSVTVE

SEQ ID NO: 125389 - protein, 137 aa, Unknown
  Bacterial polypetide isolated from the Sargasso Sea
GRGVYFSIAQEGALKFKEITYIHAEAYPAGELKHGPLALVDEMTPVVALAPEDELVEKLLSNLEEVKSRGGTLYVFGNATSKIKIEKGKFMNMPECGYYNAPIVYTIPLQILAYEVACSIGTDLDQPRNLAKSVTVE

SEQ ID NO: 125390 - protein, 277 aa, Unknown
  Bacterial polypetide isolated from the Sargasso Sea
RYRNPHVDENSILITISQSGETADTLAALNYAKEKNYLATVGICNVPTSTLARESDFVLFTNAGPEIGVASTKAFTTQLAALMLLTLSLAKARNLNPKLRQRVVTALRALPEIITQTLELKDSIIEMAPAIANKDNALFLGRGIFYPVAKEGALKLKEISYIHAEAYPAGELKHGPLALIDENMPVIALAPESEIAEKLVSNLEEVKARGGTLYVFSDPSVSIDVKSGSLVPMPKCDFLLTPIIYTIPLQILSYEVALLRGTDIDQPRNLAKSVTVE

SEQ ID NO: 125391 - protein, 291 aa, Unknown
  Bacterial polypetide isolated from the Sargasso Sea
TSIDVEIDIASEFRYRKLKFNSNNLYIFVSQSGETADTAAALDICKKNNVKTCSIVNVIESTIARNSDWILPIHAGIEIGVASTKAFLGQLTVLYILCLKIAIIRKDIDENIYKKNVSNLNKLPEAIKKCIKSESDVQLMAKEFNSAKGSMFLGRGSSFPIALEGALKLKELSYLHAEGYPAGEMKHGPLALIEEGLPVIIIAPKNRYFEKTISNMQEVIARGGKILFITDNKKESLNENIRFGFRVPYLDNFLSPILLTLPLQMLAYHVALLKNCDVDKPRNLAKSVTVE

SEQ ID NO: 125392 - protein, 143 aa, Unknown
  Bacterial polypetide isolated from the Sargasso Sea
NWLFLGRGLNYPVALQGALKLKEISYIHAEGMPAAEMKHGPIALIDEGMPVVFIATRGSQYEKVIGNIEEVKSRGGHVIAVATEGDTNIASHCDDVFYVPDVPEALQPLITVIPLQLLAYHAAVLRGKDVDKPRNLAKSVTVE

SEQ ID NO: 125393 - protein, 252 aa, Unknown
  Bacterial polypetide isolated from the Sargasso Sea
MIKTLLVTISQSGETADTLSSLKFAKKSGDPVTLTICNVANSSLCRESDYALLTKAGPEIGVASTKAFVTQLACLNLLLLTLMRVHNKLPTARKKITAALRDLPKLINKTLKMTGEYKKVAKLLFKRNSALFLGRGLYFPIAREGALKLKEISYIHAEAYPGGELKHGPLALIDKNMPVIALAPDNEHLDKITSNIEEVAARKGKVITIGPLGRTKIDKNGGHIKIPKTLDLLNPIVSVVPMQIIAYYTASL

SEQ ID NO: 125394 - protein, 171 aa, Unknown
  Bacterial polypetide isolated from the Sargasso Sea
TTFPDAIKKSLKVENSIQVMAKEFLDAKGSMFLGRGLSFPIALEGALKLKELSYLHAEGYPAGEMKHGPLALIEEGLPVIVIAPKDRYFEKTLSNMQEVIARGGKILFITDNKKELMNENIRFGIRVPSLDSLLSPILLTIPIQLLAYHVALLKGCDIDKPRNLAKSVTVE

SEQ ID NO: 125395 - protein, 226 aa, Unknown
  Bacterial polypetide isolated from the Sargasso Sea
MCGIIGVASTKPSVDKLLIGLLRQEYRGYDSAGLAIFDEADEIQIFKRTGKVAELQSSIDQNPVNGNVGIAHTRWATHGLPTENNAHPHHSNNNVFVIHNGIIENHQEIRTTLKALGYVFESETDTEVIAHLIHAKMVQEEASLIEALQLAVKDLRGAYAIGAVCETEPGIIAAARKGSPLVVGMGHGENFIASDQLALADFAENFVFLEEGDLAEITSSGTKFGT

SEQ ID NO: 125396 - protein, 149 aa, Unknown
  Bacterial polypetide isolated from the Sargasso Sea
EFLDAKGSMFLGRGNSFPIALEGALKLKELSYLHAEGYPAGEMKHGPLALIEEGLPVIVIAPKDKYYEKTLSNTQEVISRGGKIFFITDNNKRLLSTNIRFRLRVPHVDNLLSPLLLTIPLQLLAYHVALLKNCDIDKPRNLAKSVTVE

SEQ ID NO: 125397 - protein, 184 aa, Unknown
  Bacterial polypetide isolated from the Sargasso Sea
MCGIIGISSNKPVSANIINSLKKLEYRGYDSAGIATLSNGEINEVKSEGRVDNLESNFDLKNLKGNIGIGHVRWATHGIPNSLNAHPHSSDNVSVVHNGIIENSTILKKHLINKGHNFKSQTDTEVIVHLITEHLKTSELEEAITKTLKQLHGSFALGIVFKDMPDLIVGARRGSPLAVGYGPE

SEQ ID NO: 125398 - protein, 135 aa, Unknown
  Bacterial polypetide isolated from the Sargasso Sea
SYPIALEGALKLKELAYVHAEGYPAGEMKHGPLALIEEGMPVVVIAPRDEHYKKTISNMQEVISRGAKVLLITNKSTDEIYSENIWEQIEVDAISDELIPFLTTIPLQKLAYYSALDKGYDIDKPRNLAKSVTVE

SEQ ID NO: 125399 - protein, 211 aa, Unknown
  Bacterial polypetide isolated from the Sargasso Sea
MIKNPSNGNIGIGHVRWATHGIPNIINAHPHSSEKVSVVHNGIIENSDELKKDLEEKGFKFKSQTDTEVITVLVTQFLENSKPLESVFKTLKKLKGSFALGIIFKNFPDIIIGARRGSPLAVGYSNDENYLGSDSYALKSMTNKISYLDDGELCMLSKNKVDFYDLNQKKINKKIYTVSDDENTTDKGDYKNFMSKEIFEQSNTIKKCLSE

SEQ ID NO: 125400 - protein, 269 aa, Unknown
  Bacterial polypetide isolated from the Sargasso Sea
QEGIFGAGFEAAVNNITNIQIVACGTSYHSARIFEFWSHKFLGINCRVDYGSEYQYQEPVKSDKTLLVTISQSGETADTLSSLKFAKKTGNPLSLAICNVANSSICRESDFTLLTNAGPEIGVASTKAFVTQLSALNLLLLTLMKAHNRLPGSRKIITKALLELPGHLEKTLKQADVYKKVAKQLFKKNSTLFLGRGLYFPIAREGALKLKEISYIHAEAYPGGELKHGPLALIDKDMPVIALVPDNEHLDKITSNIAEVAARKGKVFT

SEQ ID NO: 125401 - protein, 228 aa, Unknown
  Bacterial polypetide isolated from the Sargasso Sea
MINAIEESKFSKLESSKVAIGHTRWATHGKVNIKNAHPIIYDKKVAVVHNGIIENYEKIKEKSFLKSYDFETTTDTEVIPVLIDNFVKKGKSFFESAKSTLKIIDGAYAFAAIHQDFPNEIFVSRNTSPLVIGIGSDFKVVGSDSHSITQLVNQVIYLEDGDYAIIRNKEIEIFDKKDEKTHRKIVNVNTDIGFVSKDGFRHFMEKEIFEQPNVLINTISSLLQENDK

SEQ ID NO: 125402 - protein, 266 aa, Unknown
  Bacterial polypetide isolated from the Sargasso Sea
MCGIVGITSSKKVSSSILNSLRKLEYRGYDSAGIATLESGVIKEVKCEGRVDALEKNLSKQKIDGSIGIGHVRWATHGVPSTINAHPHSSDKVSVVHNGIIENSTILKKLLIKKGYVFKSQTDTEVIVHLITDYLKKNNLKNSIIKMLKKVHGSFALGIIFQDQPDLIVGARRGSPLAVGYGPNENYLGSDSYALKSMTNKVTYLDDSEFCIIKKDGVEFFDEIGNKVNKKVLELSKDEQEYEKGDYKHFMAKEIDEQPNNIKKLV

SEQ ID NO: 125403 - protein, 142 aa, Unknown
  Bacterial polypetide isolated from the Sargasso Sea
MYLGRGTAFPLALEGALKFKEISYIHAEGYPAGEMKHGPLALIEKDLPVVCIVPPGPLFHKTISNIQEVIARGGKILMITDDETLESNSENIWEVFRLPKCPKSIEAIVYSVPIHMLAYYTAVELGNDVDQPRNLAKSVTVE

SEQ ID NO: 125404 - protein, 288 aa, Unknown
  Bacterial polypetide isolated from the Sargasso Sea
LEVDVDIASEFRYRKLRFHPDNLYIFVSQSGETADTAAALDICKKNKVKTCSIVNVVESTIARNSDWVLPIHAGPEIGVASTKAFVGQMIVLFILSLKLAKARNDIDDKEYYNNIKNLSGLPKAIEKSLKVENNIQAMAKEFLDAKGTMFLGRGLSFPIALEGALKLKELSYLHAEGYPAGEMKHGPLALIEEGLPVIVIAPKDKYYEKTLSNMQEVMARGGKILFITDHKKELMNENIRLGIRVPSIDNLLSPILLTIPIQLLAYHVALLKGCDIDKPRNLAKSVTV

SEQ ID NO: 125405 - protein, 231 aa, Unknown
  Bacterial polypetide isolated from the Sargasso Sea
SEYRYRNPHVDEDSLLVTISQSGETADTIAALRYAKEKDYLSTITICNVPTSSLARESDFFLYTNAGPEVGVASTKAFSTQLTGLMLLVLSLAKSRKMNPKLRQRVITALRRLPEKIEEALELKEEIIKIAPEIASKENALFLGRGIFYPISKEGALKLKEISYIHAEAYPAGELKHGPLALIDENMPVIALAPESEIVEKLVSNLEEVKARGGMLYVFSDSSVTMDTSSG

SEQ ID NO: 125406 - protein, 213 aa, Unknown
  Bacterial polypetide isolated from the Sargasso Sea
MCGIIGITSTKQVSSAIINSLKKLEYRGYDSAGIATLNDGFINEIKCEGRVDGLEKNVTKINLLGNVGIGHVRWATHGIPSIINAHPHSSETVSVVHNGIIENSTILKKFLVDKGHKFKSQTDTEVIVHLVTEYLKKNSLKESILKMLKKLEGSFALGIIFKDQPDLIVGARRGSPLAVGYGPNENYLGSDSYALKSMTNKISYLNDGEFCIL

SEQ ID NO: 125407 - protein, 216 aa, Unknown
  Bacterial polypetide isolated from the Sargasso Sea
MKTCAVVNVIESSIARDADLVLPIYCGQEVGVASTKAFLGQMLVLYILSIKISFDQKFITKREYQAKIKSLLSLSNSAKKTLKLDHKLLNIGKVFAHAKGCMFLGRGYSFPIALEGALKLKELAYVHAEGYPAGEMKHGPLALIEEGMPVVVIAPRDDHYKKTMSNMQEVIARGAKVLLITSKSKDEVISENVWEQIEVDKLNDELIPFLVTIPLQ

SEQ ID NO: 125408 - protein, 201 aa, Unknown
  Bacterial polypetide isolated from the Sargasso Sea
MCGIVGYSGPKEPLPILIAGLSRLEYRGYDSAGIAISDGSEITIEKKEGKLEALKKHLADKKIKGNIGIGHTRWATHGVPNDVNAHPHSDNDQDFAIIHNGIIENYAEIKEELLNDSYKFESDTDTEVVAVELSKQWNGNLLETVVNVSKNLEGTYALVVTTTKQENTIVAGRMMSPLVLGVGEGEVFLASDSAAILEHTD

SEQ ID NO: 125409 - protein, 283 aa, Unknown
  Bacterial polypetide isolated from the Sargasso Sea
MCGIIGIASKENVSSNIINALKKLEYRGYDSAGIAINANNKINQRKVKGKLDNLIYALQKDQFDGNTGIGHTRWATHGEPSDKNAHPHSSTSVSLVHNGIIENAAELKKLKELKEYHFESDTDSEVITALLTFYLKEGLSHLESVQKTISSLEGSYALAIIFSDSEDTIYGAKNGSPLVAGTNGVGNSIGSDSIALSSVANKVCYLEDGDITVLNKESIEIYNLEGERANREFVEIGINESEVSKGAYKHFMEKEIHEHPHAVGETFRQFIDYDKGTIAISDI

SEQ ID NO: 125410 - protein, 307 aa, Unknown
  Bacterial polypetide isolated from the Sargasso Sea
TIKDTMRGRIDPIDGTAHLGGIEDYMNRIQDAHRIYITACGTSWHAGLIGKYLIEEYAGIPVHVEYASEFRYRKPIIDSNTVVIGISQSGETADTLAAIRKAKDLGALTVGICNVVGSSVARETDCGIYTHAGPEIGVASTKAFTSQVSVLFLLSLCFGKNRNLSSQTGKKYANALTNIGEQVKIILDGSSSILEVAKSTVHADNFLYLGRGLNFPVALEGALKLKEISYIHAEGYPAAEMKHGPIALIDEKMPVVCLAPDDRTYDKVLSNIQEVKARKGVIITVTNNRTPELEKVSDYIIEFLQRT

SEQ ID NO: 125411 - protein, 289 aa, Unknown
  Bacterial polypetide isolated from the Sargasso Sea
LAVSQKLQGTYALAVLDKNNPKEIVFAKKGSPLIIGIGENENFLASDTHALIEHTKDFIYLEDGDHGKIFESGYFICDPSGKELSREVMQSKLSLQSTEIGEYSHFMQKEIYEQPDAILEAFQGRIVEGKVPIEMLGPNALAILKSVKFVQIVACGTSYHAALIMKHWLDKLAGIPSHAEVASEFRYRQHAVQDDTLFITISQSGETADTLAALKEIKKDPRYISTLSVCNVPESSLSRESDVTVFTNAGAEIGVASTKAFTSQLTTLMLIVITLGKNFLIDEKLEKEL

SEQ ID NO: 125412 - protein, 99 aa, Unknown
  Bacterial polypetide isolated from the Sargasso Sea
VDEDMPVVAVAPNNNLLEKLKSNLEEVKARGGKLYIFADEISEVESTNGMFVLNINNVYDYMSPIIHTIPLQLLAYYVAVIKGADIDQPRNLAKSVTVE

SEQ ID NO: 125413 - protein, 246 aa, Unknown
  Bacterial polypetide isolated from the Sargasso Sea
MCGIIGISSNKPVSGNIINSLKKLEYRGYDSAGIATLSGGEINEIKSEGRVDNLENNFDLKNLRGNIGIGHVRWATHGIPNSLNAHPHSSDNVSVVHNGIIENSTILKKYLINKGHNFKSQTDTEVIVHLITEHLKTLELEEAITKTLKQLHGSFALGIVFKEMPDLLVGARRGSPLAVGYGPNENYLGSDSYALKSMTNKITYLDDGEFCIVKKDQVLFFNEDGKKVNKKILELSSNGANYDKGD

SEQ ID NO: 125414 - protein, 275 aa, Unknown
  Bacterial polypetide isolated from the Sargasso Sea
IYNFPWNTNSFKSVLLIGCGTAFHSCLVAKYWLEQNTNLDVSVDIASEFRYRKVRFKTDCLYIFVSQSGETADTYAALDLCKKNKMKTCAVVNVVESSIARDADLVLPIHCGQEVGVASTKAFIGQMLVLYILCTKISFDQKCITKKEYQTKIKNLLTLSSSTKKTLKIDQKILNIGKVFANAKGSMFLGRGYSFPIALEGALKLKELAYVHAEGYPAGEMKHGPLALIEEGMPVVILAPRDDHYKKTISNMQEVIARGAKVLLITNKSKDEIIS

SEQ ID NO: 125415 - protein, 153 aa, Unknown
  Bacterial polypetide isolated from the Sargasso Sea
LGKDFANSKGSMFLGIGYSYPIALEGALKLKELAYVHAEGYPAGEMKHGPLALIEEGMPVVVIAPRDEHYKKTISNMQEVISRGAKVLLITNKSTDEIYSENIWEQIEVEHISDELIPFLTTIPLQKLAYYSALDKGYDIDKPRNLAKSVTVE

SEQ ID NO: 125416 - protein, 238 aa, Unknown
  Bacterial polypetide isolated from the Sargasso Sea
KYWFEQLTSFDVHIDIASEFRYRKNRFKNETLYVFVSQSGETADTYAALDLCNKNNMKTCSVVNVVESSIARDSKFVLPIHCGPEIGVASTKAFLGQMLVLYLLCLKMGKLNDDIKKKEYISKIKSLLNLSKNIELSLKSENDIQTISNSFTNIKGSMFLGRGYSYPIALEGALKLKELSYIHAEGYPAGEMKHGPLALIEDGMPVVVIAPRDEYYKKTMSNMQEVIARGAKVLLITN

SEQ ID NO: 125417 - protein, 247 aa, Unknown
  Bacterial polypetide isolated from the Sargasso Sea
NKNKLKTCSIINVVESSIARDSQFVLPIHVGPEIGVASTKAFLGQMLVLYILCLKLSYERKEIDKKTFSYKVKSLLELSKNVKKTLSTENQIQTVCKSFVDAKGSMFLGRGFSYPIALEGALKLKELAYVHAEGYPAGEMKHGPLALIEDGMPVVVLAPRDEYFKKTISNMQEVIARGAKVLLITNKSKDEVLHENIWQSIKVENTNDDLLPFLITIPLQKLAYHSALNKGYDIDKPRNLAKSVTVE

SEQ ID NO: 125418 - protein, 120 aa, Unknown
  Bacterial polypetide isolated from the Sargasso Sea
MCGIVGIVSNKSVSASIIGALKKLEYRGYDSAGISTLSNNEINEQKCSGRVDNLEKILFQNPSDGDLGIGHVRWATHGIPNQINAHPHSSEVVSVVHNGIIENSDKLRDEYIKKGYSFKS

SEQ ID NO: 125419 - protein, 154 aa, Unknown
  Bacterial polypetide isolated from the Sargasso Sea
MCGIIGIASNKSVTSNIINSLKRLEYRGYDSAGIATIFKKNLNEKKCSGRVEELEKILFNSPAHGNIGIGHVRWATHGIPNEVNAHPHSSEIVSVVHNGIIENSNSLKKKLEKEGYKFKSQTDTEVITLLITKYLKDSNPVDAVLKSLKYLEGS

SEQ ID NO: 125420 - protein, 213 aa, Unknown
  Bacterial polypetide isolated from the Sargasso Sea
ARRGSPLAVGYGPNEHYLGSDSYALKSMTNKISYLNDGEFCILKKDQVEFFDSGGTKVNKKILNLSKDDQNYEKGDYKYYMAKEIDEQPTTLKNCVNEYIDKHNKEINIYNFPWKINKISSVILIGCGTAYHSCLVAKYWFEQNTSLDVSVDIASEFRYRKIKFKKDCLYVFVSQSGETADTFAALDLCKKNNVKTCAVVNVVESSIARDADL

SEQ ID NO: 125421 - protein, 295 aa, Unknown
  Bacterial polypetide isolated from the Sargasso Sea
LLGIASNKPVSINIINSLKKLEYRGYDSAGIATLDNNLIEEKKCSGRVEELEKILFKNPSTGNIGIGHVRWATHGIPNIINAHPHSSDEVSVVHNGIIENSDELKKNLEDKGFKFKSQTDTEVITILITQYLNDSKPLDSVFKTLKKLKGSFALGIIFRNHSDIIIGARKGSPLAVGYSNEENYLGSDSYALKSMTNKISYLDDGEVCMLTKSDVTFYDSKKTKINKKVYTLSDDENTSDKGDYKNFMSKEIFEQSSTIKKCISEYTDSIKKDINIYNFPINPKKINKIILIWMW

SEQ ID NO: 125422 - protein, 230 aa, Unknown
  Bacterial polypetide isolated from the Sargasso Sea
MCGIIGINSNKEVSSTILNSLRKLEYRGYDSAGIATLNSGYIQEVKCEGRVENLEKNIIKNKLLGNVGIGHVRWATHGIPSALNAHPHSSDNVSVVHNGIIENSTLLKKFLVKKGHRFKSQTDTEVIVHLITEYLKKNNLIDTLTKVLKKLHGSFALGIIFKDEPDLIVGARRGSPLAVGYGPGENYLGSDSYALKSMTNKITYLDDGEFCILKKTEVSFFNEQGKKINK

SEQ ID NO: 125423 - protein, 31 aa, Unknown
  Bacterial polypetide isolated from the Sargasso Sea
VAVQLIAYYTAVAKGTDVDQPRNLAKSVTVE

SEQ ID NO: 125424 - protein, 307 aa, Unknown
  Bacterial polypetide isolated from the Sargasso Sea
VSELESALSKTDIYNSGIAHTRWATHGKPNQLNAHPHLDQSKKIALVHNGIIENYDPIKKFLLSKKISFKSETDTEVLVQLIGYFYNNGKMSFEKSVRAALQRVDGAYGIVILNTDYPDMMIAARKGSPLVLGIKEKEFFIASDISPIVKHTQDIIYLKDSEMAVINNKSFEVKSVDKDISLPKNIEKIDFKIDDFDKGNFDYFMHKEIHEQISTIPNTIKGRVKDGSVLLQGISDYWDKIESAEKIYITACGTSWHAGLIGKNFIERFANVPVHVEYASEFRYNHTVIDSKTVVIAISQSGETADT

SEQ ID NO: 125425 - protein, 244 aa, Unknown
  Bacterial polypetide isolated from the Sargasso Sea
LNLTKDDQNYDKGDYKYFMAKEIDEQPTTIKNCVNEYIDKFNKQINIYNFPWKLKDISSISLIGCGTAYHSCLLAKYWFEENTNLDVSIDIASEFRYRRIKFKKDCLYVFVSQSGETADTYAALNMCKTNKMKTCSIVNVVESSIARDSDFVLPIHCGPEVGVASTKAFLGQMLVLYIFCLKISFDQKRISKKDFQKKIKNLLSLSSLAKKTLLIDNKIQKTSKAFIEAKGSMFLGRGYSFPIA

SEQ ID NO: 125426 - protein, 239 aa, Unknown
  Bacterial polypetide isolated from the Sargasso Sea
DYLKTENLIDSIYKTLNKLIGSFALGVIFKDFEDVVVGARRGSPLAVGYGHNENFLGSDSYALKTMTNKISYLDDGDFCLLYKEKIEFYNSDKKKINKKIFELSNEENIAEKGDYKDFMSKEIDEQSYTTNKCIHEYLDQSRNEINIYNIPINPLKINKIRLVACGTAYHSCLMAKYWIEEFTSIDVEADIASEFRYRNVKLNKDDLYIFVSQSGETADTYAALEKCKNNGLKTCGIVN

SEQ ID NO: 125427 - protein, 296 aa, Unknown
  Bacterial polypetide isolated from the Sargasso Sea
VRQQSPLVIGEGFEEQFIASDIMALSNITNKFKFMDDGQIAILNKDHITVTSSSGVAAKLKTQEVDSNAYTNDLKGYSHFMEKEIFEQSDVTKDALEGRLTKNESQEGIFGVGFEKEMKNITNIQIIACGTSFHAGRIFEFWSHKFLGINCRVDYGSEYQYQKPIKTDKTLLITISQSGETADTLSSLKFAKKSGDPVTLTICNVANSSLCRESDYTLLTKAGPEIGVASTKAFVTQLACLNLLLLTLMRVHNKLPTARKKITAALRDLPKLINRTLKMTGEYRKVAKLLLKETAH

SEQ ID NO: 125428 - protein, 144 aa, Unknown
  Bacterial polypetide isolated from the Sargasso Sea
MCGIVGITSNKPVSSAIINSLRKLEYRGYDSAGLATLSDGFINEVKTEGRVDKLEKNNDIKKMLGHVGIGHVRWATHGIPNTINAHPHSSETVSIVHNGIIENSTTLKKSLVVKGHKFKSQTDTEVIVHLITELQKENDLKNSI

SEQ ID NO: 125429 - protein, 51 aa, Unknown
  Bacterial polypetide isolated from the Sargasso Sea
FDYLMKVPSSNEWISPLINILPLQLLSYHIAAHRGLDVDQPRNLAKSVTVE

SEQ ID NO: 125430 - protein, 110 aa, Unknown
  Bacterial polypetide isolated from the Sargasso Sea
AGELKHGPLALVDKNMPVVGLMPDNNLVNQVLSNLAEVKARQGLVYIFTNKKMKLKRNDKTNIIPMPACGHYIAPLVYVIPMQLLSYHVALNKKTNIDQPRNLAKSVTVE

SEQ ID NO: 125431 - protein, 229 aa, Unknown
  Bacterial polypetide isolated from the Sargasso Sea
MCGIIGIASNKPVSINIINSLKKLEYRGYDSAGLATLTNNFINEKKCSGRVEELEKILFKTPSNGNIGIGHVRWATHGVANVINAHPHSSEQVSVVHNGIIENSDEIKKELEAKGLKFKSQTDTEVITLLITEALKNSNPLDSVFKTLNKLHGSFALGILFKNFSDIIIGARRGSPLAVGYSNGENYLGSDSYALKSMTNKISYLDDGEVCVLSKDNVNFYDANQKKIN

SEQ ID NO: 125432 - protein, 277 aa, Unknown
  Bacterial polypetide isolated from the Sargasso Sea
IGARRGSPLAVGYGPNENYLGSDSYALKSMTNKVSYLNDGEFCLIKENIVEFFDTKGHKVNKKILNLSKDSQNYDKGDYKHFMAKEIDEQPITIKNCVNEYIDKINRQINIYNFPWKKNDISSIVLVGCGTAYHSCLVAKYWFEQHTSLEVSVDIASEFRYRKLNFKKNCLYVFVSQSGETADTYAALDICKKNKMKTCSIVNVVESSIARDSDLVLPIHCGPEIGVASTKAFLGQMLVLYLLCLKISHDQKMINNKNYKEKIKNLLLLSNACKKTL

SEQ ID NO: 125433 - protein, 290 aa, Unknown
  Bacterial polypetide isolated from the Sargasso Sea
PLGIEIYDSSNERQYRNPVSLKVSEQIMDKSNFKHYMWKEIYDQPQTAKNWLENYLIKNSDNGQYQINYPFDTDFFESIERIEIIACGTSKHAAMVGSFLLEQFSGIPTNVFYASEFRYSPPPLLPNTLTIGVTQSGETADTIAAIDMEIKRRSSIENEKFKPNLIAITNRKESSIGRQVSNIIDICAGIEVGVAATKTFFAQLLSFYGLAIKFAQIKSNQSPDEINKLINELIKLPPLLEDLLEKHNKSSEKLAHDFFNIKDVIFLGRGINYPIALEGALKLKEISYIH

SEQ ID NO: 125434 - protein, 211 aa, Unknown
  Bacterial polypetide isolated from the Sargasso Sea
ASTKAFLGQILILYILALKLALLRKDIEKTHFEKKIDDLKNLPKLIEQTLLIDNKIQTISNTFNEAKGSMFLGRGFSYPIALEGALKLKELSYIHAEGYPAGEMKHGPLALIEEGMPVVVLAPRDNYYKKTISNMQEVIARGAKVLLITNKSKDEVISENIWEKIEVESTNEDLLPFLLTIPLQKLAYYSALKKGYDIDKPRNLAKSVTVE

SEQ ID NO: 125435 - protein, 239 aa, Unknown
  Bacterial polypetide isolated from the Sargasso Sea
EDGTKINKKILELSSDDASYEKGDFKHFMAKEIEEQPITVKTGIKEYVDKSNSEINIYNFPWKIDEINSITLIGCGTAYHSCLMAKYWFEELTQLDVSIDIASEFRYRKNRFKKDNLYIFVSQSGETADTYAALDLCKKNNMKTCAVVNVIESSIARDANFVLPIHCGPEIGVASTKAFLGQILILYILSLKLGSLRNEINKEICKEKIKDLQNLPGLIEKSLLIDNDIQAISSTFNDA

SEQ ID NO: 125436 - protein, 271 aa, Unknown
  Bacterial polypetide isolated from the Sargasso Sea
FVEIKNGKYKLFDSDLNEIEREIQEIDWEVSEAEKSGYDHFMYKEILEQFEVIERTISGRLDTNSDDIPIKSDHASKFEKIWIVACGTAYHAGLFGKDLFEKVLGVPVSVELASEFRYREPIVGKNDLGIVISQSGETMDTIAATELLKENGSHVLALVNVVGSSLARMADSVFYLHVGPEIGVASTKAYLGMLVSQLVLAKHWDSKNRLDVSFDEIAELPNLIEKTMACEDQIKEISEKIYKKNDIYFIGRGLDYALAAEGAFKLKEISY

SEQ ID NO: 125437 - protein, 259 aa, Unknown
  Bacterial polypetide isolated from the Sargasso Sea
INKKVLELSSEEEKYDKGDYKHFMAKEIEEQPTTLKNGIKEYIDTSNNDINIFNFPWKIDEISSITLIGCGTAYHSCLMAKYWFEELTTLDVNVDIASEFRYRKNRFKKDTLYVFVSQSGETADTYAALDLCKSNNMKTCSVVNVIESSIARDSEFVLPIHCGIEIGVASTKAFLGQILILYIFALKLGLLRNDLKKELFNEKLKDLKDLPKLVQQTLQIDNKIQTISKTFNEAKGSMFLGRGFSFPIALEGALKLKEL

SEQ ID NO: 125438 - protein, 181 aa, Unknown
  Bacterial polypetide isolated from the Sargasso Sea
MYNEKIKDLLSLSNLSKKTLLTDSKIQKASKEFVKAKGSMFLGRGYSFPIALEGALKLKELAYVHAEGYPAGEMKHGPLALIEEGMPVVVLAPRDMHYKKTVSNMQEVIARGAKVLLITNKSKDEIQSENIWETIKVENLTEDLLPILTTIPLQKLAYYSALLKGYDIDKPRNLAKSVTVE

SEQ ID NO: 125439 - protein, 114 aa, Unknown
  Bacterial polypetide isolated from the Sargasso Sea
MCGIIGIASNKSVTSNIIQSLKKLEYRGYDSAGIATIVNGYIDEKKCTGRVDNLEKILFKNPSNGILGIGHVRWATHGVPSQINAHPHSSDEVSVVHNGIIENSTELKLALEKK

SEQ ID NO: 125440 - protein, 228 aa, Unknown
  Bacterial polypetide isolated from the Sargasso Sea
MCGIVGIVSNKSVSSSIIGALKKLEYRGYDSAGISTISRGEINEKKCSGRVDKLEKILFQNPSDGDLGIGHVRWATHGIPNKINAHPHSSEVVSVVHNGIIENSDKLRQEYINKGYKFKSQTDTEVITVILSDFLKSDDLINCIHKTLEKLEGSFALGVIFKDFKNVVVGARRGSPLAVGYGHNENFIGSDSYALKTMTNKISYLDDGDFCLLYKEKVEFYNSEKKKN

SEQ ID NO: 125441 - protein, 265 aa, Unknown
  Bacterial polypetide isolated from the Sargasso Sea
KFLINKGHKFKSQTDTEVIVHLITENLKTHDLEEAITNTLKQLHGSFALGIIFKDIPDLIVGARRGSPLAVGYGPNENYLGSDSYALKSMTNKITYLDDGEFCIIKKDHVNFFNVEGKKINKKILELSSGEASYDKGDFKHFMAKEIEEQPTTIKMGIKEYIDKTNSEINIMNFPWKIKEINKITLIGCGTAYHSCLMAKYWFEELTMLDVNIDIASEFRYRKNRFKQDTLYVFVSQSGETADTYAALDLCNKNKMKTCSVVNVM

SEQ ID NO: 125442 - protein, 263 aa, Unknown
  Bacterial polypetide isolated from the Sargasso Sea
FPWKITSIKSVMLIGCGTAFHSCLIAKYWIEQNTQLDVNIDIASEFRYRKVRFKEDCLYIFVSQSGETADTFAALDLCKKNKVKTCAVVNVIESSIARDADLVLPIYCGQEIGVASTKAFIGQMLVLYILSTKIAFDQKCITREEYQSKIKNLLKLSDSAKKTLKLDQKIFKIGKVFANAKGSMFLGRGYSYPIALEGALKLKELAYVHAEGYPAGEMKHGPLALIEEGMPVVVLAPRDEHYKKTISNMQEVIARGAKVLLIT

SEQ ID NO: 125443 - protein, 301 aa, Unknown
  Bacterial polypetide isolated from the Sargasso Sea
GKLKNLIKSVANSQIPGTVGIGHTRWATHGKPQVKNAHPHIDSSGKVAVVQNGIIENYQELKTKLENEGIVFNSDTDTEVIPHLIQKELNTLNQLKLENNGSTLLVAVRNVISDLEGSYALAVLWAGAPDSLVVARKQAPLIIGLGEGEFICASDTPAIANFTKIILPMEDEEIALLTPLGIEIYDSNNERQYRNPISLQISEQVTDKMNFKHYMLKEIYDQPETAKHWLDKYLIKNDKTGQLQINFSFDTTFFESIERIEIIACGTSKHAAMVGSFLLEQFSGIPTNVFYASEFRYSPPP

SEQ ID NO: 125444 - protein, 125 aa, Unknown
  Bacterial polypetide isolated from the Sargasso Sea
LKLKELSYLHAEGYPAGEMKHGPLALIEDGLPVIVIAPKDKYFEKTISNMQEVIARGGKVLLITDKKNEVINENIRFKLEMPYVESLLNPFLTTIPLQLLAYHVALLKKCDIDKPRNLAKSVTVE

SEQ ID NO: 125445 - protein, 282 aa, Unknown
  Bacterial polypetide isolated from the Sargasso Sea
NFQEIKDFLANEGYEFQSETDSEVIPHLIHYHFEAVKDLLEAVRQSVKQLRGAYAVGVIHKDHHDKLIAARSGSPLVVGKGIGENFIASDILALKPVTDKFIYLEEGDLIELSSEDISIWNIDDESVVRSSVQVLLGPDSTDKGNYRHYMQKEIFEQPKSITDTLEGRIGLNGLLIESFGVGAASIFETIENVTLVACGTSYYAALVASYWLEELAKIPCQVEIASEFRYRTVVCRPNSLFVTISQSGETADTLAALRLAKELGFASTLTICNVATSSLVRE

SEQ ID NO: 125446 - protein, 271 aa, Unknown
  Bacterial polypetide isolated from the Sargasso Sea
KDALYVFVSQSGETADTYGALDLCNKNNMKTCSVVNVVESSIARDSKFVLPIHCGPEIGVASTKAFIGQMLVLYLLCIKIAKSRKDISKDIFSEKIKSLKSLSGLIKESLKTENEIQSICNSFIEAKGSMFLGRGYSFPIALEGALKLKELAYVHAEGYPAGEMKHGPLALIEDGMPVVVLAPRDKYYKKTISNMQEVIARGAKVLLITNKSKDEVYSENIWQTIEVENTSEDLFPFLVTVPLQKLAYYSALKKGYDIDKPRNLAKSVTVE

SEQ ID NO: 125447 - protein, 223 aa, Unknown
  Bacterial polypetide isolated from the Sargasso Sea
VLPIHCGTEIGVASTKAFLGQILILYILAWKLGLSRKDLKRELFNEKLKDLKSLPKLVEKTLLTDNKIQTISNTFNVAKGSMFLGRGFSFPIALEGALKLKELSYIHAEGYPAGEMKHGPLALIEEGMPVVVLAPRDNYYKKTISNMQEVIARGAKVLLVTNKSSDEVVSENIWEKIEVESANEDLLPFLLTIPLQKLAYYSALKKGFDIDKPRNLAKSVTVE

SEQ ID NO: 125448 - protein, 208 aa, Unknown
  Bacterial polypetide isolated from the Sargasso Sea
MCGIIGIASNKPVSINILNSLKKLEYRGYDSAGLATLSNNLIDEKKCSGRVEELEKILFKNPSKGNIGIGHVRWATHGVPNITNAHPHSSEEVSIVHNGIIENSDELKKDLEAQGFKFKSQTDTEVITLLVTQLLEKLEPLEAVFQTLKKLKGSFALGIMFKNFSDIIIGARRGSPLAVGYSNEENYLGSDSYALKSMTNKISYLDDG

SEQ ID NO: 125449 - protein, 259 aa, Unknown
  Bacterial polypetide isolated from the Sargasso Sea
MGETADTLAALRYAQEKDYLSTLCICNVPTSSLARESEYSIFTNAGPEIGVASTKAFTTQLAALMLLALSLAKSREKNPRLRTRVITALRSLPETVEETLKLKEIILEIAPEIANKDNALFLGRGIFYPIAKEGALKLKEISYIHAEAYPAGELKHGPLALIDEEMPVIALAPESEIAEKLVSNLEEVKARGGTLYVFSDPSISMDLKSGRLINMPKCDFLLTPIIYTIPLQILSYEVALLRGTDIDQPRNLAKSVTVE

SEQ ID NO: 125450 - protein, 332 aa, Unknown
  Bacterial polypetide isolated from the Sargasso Sea
ALSQLTSEFVFLEDGDIAVITKESYQVFDKKNSPVTRDVTEIDIAVNAVTKGEYSHFMEKEIYEQPTALANTIDGKLGNDDVLDNIFGLGSSEVFSKIKRIQFVACGTSLHAGKVGRFWFEKIAQIPCYVDFASEYRYRDPLVEEGTLFVTISQSGETADTLAALRYAQEKDYLSTLSICNVPTSSLARESEHVLFTNAGPEIGVASTKAFTTQLAGLMLLAMSIAKSLNKDKEQRKNLAHELRNLPKVIQETLKLSNEILNIVPNIADKHNALFLGRGMFFPIVQEGALKLKEISYIHAEAYPAGELKHGPLALVDDQIPVVALSPENTLT

SEQ ID NO: 125451 - protein, 273 aa, Unknown
  Bacterial polypetide isolated from the Sargasso Sea
VLEKDISKFNLLGDIGIGHVRWATHGKPSKINAHPHSSEQVSVVHNGIIENSTILKKVLEKKGYIFKSQTDTEVIAHLVTDYLKKNSLKDTIIKVLKKLHGSYALGIIFKDSNDLMIGARRGSPLAVGYGPNENYLGSDSYALKSMTNKISYLDDEEFCIIKKDQVEFFESNGKKINKKVMNLSKEDIQYDKGDYKYFMEKEIDEQPSTISDCINEYVDKYNKQINIYNFPWNINSFQSVVLIGCGTAYHSCLVAKYWLEQNTNLDVSIDIAS

SEQ ID NO: 125452 - protein, 271 aa, Unknown
  Bacterial polypetide isolated from the Sargasso Sea
MEKEIHEHPQAVGETFRLFIDHDKRIISIDSIDLDFSNISKIHLIACGTAYYSCLVAKYYFEQYARIPVESDMASEFRYRDPVLDPKALCIFVSQSGETADTKAALDYCKSAKIRTLSIVNVTNSSIARESDYCLYTKAGVEIGVASTKAFTAQLSVLLSMAIHCATINKKISLDENKNICQEIMQAPQLIENAIKRSYGLKETAKSIIGAKGVMYLGRGTAFPLALEGALKFKEISYIHAEGYPAGEMKHGPLALIEKDLPVVCIVPPGP

SEQ ID NO: 125453 - protein, 259 aa, Unknown
  Bacterial polypetide isolated from the Sargasso Sea
MAKEIEEQPVTIKTGIKEYLDSVNNEINIFNFPWKINEIKSVTLIGCGTAYHSCLMAKYWFEELTSLDVNIDIASEFRYRKNRFKKDSLYIFVSQSGETADTYAALDLCNKNNMKTCAVVNVIESSIARGSNFVLPIHCGPEIGVASTKAFLGQILVLYILALKIGSLSGLIEKKNYKEKIKDLKNLPNLIEKTLLVDNDIQAISSTFNEAKGSMFLGRGYSFPIALEGALKLKELSYVHAEGYPAGEMKHGPLALIEE

SEQ ID NO: 125454 - protein, 240 aa, Unknown
  Bacterial polypetide isolated from the Sargasso Sea
CAVVNVIESSIARDANFVLPIHCGPEIGVASTKAFLGQILILYILALKLGSLRNEINKENYKDKIKDLQKLPSLIEKSLLVDNDIQAISSTFNEAKGSMFLGRGFSYPIALEGALKLKELSYIHAEGYPAGEMKHGPLALIEDGMPVVVLAPRDSYYKKTISNMQEVIARGAKVLLITNKSKDEIASENIWETIEVENTNDDLLPFLLTIPLQKLAYYSALKKGYDIDKPRNLAKSVTVE

SEQ ID NO: 125455 - protein, 235 aa, Unknown
  Bacterial polypetide isolated from the Sargasso Sea
ACGTSLHAGKVGRFWFEHIAQIPCYVDFASEYRYRDPLVEKGTLFVTISQSGETADTLAALRYAQEKDYLSTLSICNVPTSSLARESEHVLFTNAGPEIGVASTKAFTTQLAGLMLLAMSIAKSLNKDKEQRKNLAYELRNLPKVIEETLKLSNEILNIVPNIADKHNALFLGRGMFFPIVQEGALKLKEISYIHAEAYPAGELKHGPLALVDDQIPVVALSPENTLTEKLVSNL

SEQ ID NO: 125456 - protein, 155 aa, Unknown
  Bacterial polypetide isolated from the Sargasso Sea
EIIKMAEDFDDKEHALFLGRGIHYPIAMEGALKLKEISYIHAEAYPAGELKHGPLALVDDSMPVVAVAPNDDLLEKLHSNLEEVKARGGKLYVFGHTDAYHQGFAEKFIELPEIPELIAPLIYTIPLQMLSYHVAILKGTDIDQPRNLAKSVTVE

SEQ ID NO: 125457 - protein, 130 aa, Unknown
  Bacterial polypetide isolated from the Sargasso Sea
MCGIIGINSNRPVSVSIINSLKKLEYRGYDSAGIATLSDGLINEVKSEGRVDNLEKNSLIQNMNGTIGIGHVRWATHGAPNSINAHPHSSQNVSVVHNGIIENSTLLKKYLIGKGHKFKSQTDTEVIVHL

SEQ ID NO: 125458 - protein, 168 aa, Unknown
  Bacterial polypetide isolated from the Sargasso Sea
PKSLDAVMELEDQIIEMAKDFDQKEHALFLGRGIHYPVAMEGALKLKEISYIHAEAYPAGELKHGPLALVDSEMPVVAVAPNDDLLEKLQSNLEEVRARGGKLYVFGHSDAHHDDESITRFIELPEVPELIAPLIYSIPLQLLAYHVAILKGTDIDQPRNLAKSVTVE

SEQ ID NO: 125459 - protein, 162 aa, Unknown
  Bacterial polypetide isolated from the Sargasso Sea
MCGIIGIASNKPVSINIINSLKKLEYRGYDSAGLATLDNNLIDEKKCSGRVDELEKILFKNPSNGNIGIGHVRWATHGIPNIINAHPHSSEEVSVVHNGIIENSDELKKDLEEKGFKFKSQTDTEVITILITQYLKNLEPLESVFKTLKKLKGSFALGIIFR

SEQ ID NO: 125460 - protein, 309 aa, Unknown
  Bacterial polypetide isolated from the Sargasso Sea
IQEVKCEGRVDNLEKSIIKNKLLGNVGIGHVRWATHGIPSTLNAHPHSSDNVSVVHNGIIENSTLLKKFLVKKGHRFKSQTDTEVIVHLITEYLKKNNLIDTLTKVLKKLHGSFALGIIFKDEPDLIVGARRGSPLAVGYGPGENYLGSDSYALKSMTNKITYLDDGEFCIIKKTEVSFFNEQGKKINKKILSLTTDEQNYDKGDYKHFMAKEIDEQPLTIKNCINEYIDKKNNEISIFNFPWKIEDISSITLVGCGTAYHSCLIAKYWFEQLTSFDVHIDIASEFRYRKNGFKKDTLYIFVSQSEKQL

SEQ ID NO: 125461 - protein, 250 aa, Unknown
  Bacterial polypetide isolated from the Sargasso Sea
MCGIIGIASNKSVTSNIINSLKRLEYRGYDSAGIATISDESLNEKKCSGRVEELEKILFNSPAQGNIGIGHVRWATHGIPNQINAHPHSSEIVSVVHNGIIENSNSLKKNLEKEGFKFKSQTDTEVITLLITKYLKNSNPTDAVLKSLEHLEGSFALGILFKDQSNIIIGARRGSPLAVGYSNNENYLGSDSYALKAMTNKISYLDDGEICILTKNSVEFFDSLKNKINKKILVLSEDKNEAKLGDYKNF

SEQ ID NO: 125462 - protein, 280 aa, Unknown
  Bacterial polypetide isolated from the Sargasso Sea
IGQDPLPQSTTGIGHTRWATHGGPTDHNAHPHVSDDGRIAVIHNGIIENFAPLRDELIAAGVMLSSETDSEIVAHLLARALPEVDQDLAAAMQSVCARLEGAFTLVAMDPNDPSLVVGARRNSPLVVGLGEGENFLASDVAAFVDHTRNALELGQDQIVVVRADGVEVRDFAGTQVEAKPYVVDWDASAAEKGGYDLFMLKEIAEQPKAVADALRGRIDAEQRIQLDETALDDAVLRDITKVVVVACGTAAHAGMVAKYAIEHWTRLPVDVELASEFRYR

SEQ ID NO: 125463 - protein, 247 aa, Unknown
  Bacterial polypetide isolated from the Sargasso Sea
AVIDIDQKGKIFAAKQKSPLLVGKGIEENFVASDPLAIAGLAESFYLLEDGDFAEITQDEIKIVGIDNEPVVREETLIDTTVKEASKEGYKHFMEKEIYEQPKAIANAIEGRTTDGDVLDNIFGLGSSESFKGVKRIQFVACGTSLHAAKTARKWFEELSETPCYIDFASEYRYRNPLVEDDTLFVCISQSGETADTMAALNYAKEEKYLGIVTICNVPTSTMARESDWKIFTNAGPEIGVASTKAF

SEQ ID NO: 125464 - protein, 272 aa, Unknown
  Bacterial polypetide isolated from the Sargasso Sea
PNSVNAHPHSSHNVSVVHNGIIENSTILKKYLTTKGHVFKSQTDTEVIVHLITDNLKTNELEEAMTKTLKQLHGSFALGIVFKDIPDLIIGARRGSPLAVGYGPNENYLGSDSYALKSMTNKITYLDDGEFCIIKKDHVLFFNEQGKKINKKILELSSNQASYEKGDFKHFMAKEIEDQPTTVKTGIKEYVDKTNSEINIYNFPWKISEINSITLIGCGTAYHSCMMAKYWFEELTQLDVSIDIASEFRYRKNRFKKDTLYIFVSQSGETAD

SEQ ID NO: 125465 - protein, 186 aa, Unknown
  Bacterial polypetide isolated from the Sargasso Sea
SDDDENNYVKSLLDVPRLISNVLDQEEDLIKIVKELNPIKNALYLGRGQMYPVALEGALKLKEISYIHAEGYPAGEMKHGPIALLEKGLPVIIGAPSFNLFDKTASNLYEVIARDGNVLLITDQEGLNHLGDTTKKIKSFIVDEANIITAPFIYTIPYQLFAYHTALLKGTDVDQPRNLAKSVTVE

SEQ ID NO: 125466 - protein, 119 aa, Unknown
  Bacterial polypetide isolated from the Sargasso Sea
YIHAEGYAAGELKHGPIALIDEKVPVIGIIPTNNLFDKTYSNLAEVKARGGKIICITDEAGKNNLEDLSDLIFSIKNCSDYLQTIVSALPAQLLAYHVACFKGTDVDQPRNLAKSVTVE

SEQ ID NO: 125467 - protein, 277 aa, Unknown
  Bacterial polypetide isolated from the Sargasso Sea
TSLDVSIDIASEFRYRKNRFKKDALYIFVSQSGETADTYGALDLCNKNNMKTCSVVNVVESSIARDSKFVLPIHCGPEIGVASTKAFIGQMLVLYLLCIKIAKSRKDISKDIFFEKIKSLKSLSGLIKESLKTENEIQSICSSFIEAKGSMFLGRGYSFPIALEGALKLKELAYVHAEGYPAGEMKHGPLALIEDGMPVVVLAPRDQYYKKTISNMQEVIARGAKVLLITNKSKDEVYSENIWQTIEVENTSEDLFPFLVTIPLQKLAYYSALKKGY

SEQ ID NO: 125468 - protein, 234 aa, Unknown
  Bacterial polypetide isolated from the Sargasso Sea
MCGVVAIVGKQNASQLVLEGLKKLEYRGYDSAGIALVSGGKLQTFKSEGKLINLIDNLNQLSNTNLYSDHSIAIGHTRWATHGNISVENAHPLTSKNKVAVVHNGIIENYDSIKNKLISEGYVFKSETDTEVLPHLFMKYINLGNNFLEAGRLVLKDIKGAFAFVAMSLDFPNQLFASRNSSPLAIGLGNKSNFVGSDAHSIDHLTQRIIYLEDGDHALIKLDNVEIYNNKEAK

SEQ ID NO: 125469 - protein, 293 aa, Unknown
  Bacterial polypetide isolated from the Sargasso Sea
LNAHPHSSEEVSVVHNGIIENSNQLKQDLEKKGYKFKSQTDTEVITFLLTDFLKNLDLVDAINKTLDKLHGSFALGILFKKHKDIVAGARRGSPLAVGYGPKENYLGSDSYALKSMTNKITYLDDGDICLLTNNRIEFYNSKNKKINKEILTLSNDKHTAEKGDYKDFMSKEINEQNITVKTCIKEYIDQIRKGINIYNFPINPKEIQKIILIGCGTAFHSCLTAKYWLEELTSISTEIDIASEFRYRKIKFNKKYLYIFVSQSGETADTFAALDLCKKNNVKTCSIVNVVES

SEQ ID NO: 125470 - protein, 108 aa, Unknown
  Bacterial polypetide isolated from the Sargasso Sea
MKHGPLALIEEGMPVVVLAPRDDYYKKTISNMQEVIARGAKVLLITNKSKDEVYSENIWQTIEVENTSEDLLPFLITVPLQKLAYYSALKKGYDIDKPRNLAKSVTVE

SEQ ID NO: 125471 - protein, 184 aa, Unknown
  Bacterial polypetide isolated from the Sargasso Sea
MCGIVGYIGKNDALINLKSKIKLLEYRGYDSSGLCVIDSKTNNFYIKKTVGTIDKIKGFKKINSSVGISHTRWATHGKINEKNAHPQLSQNSMISIVHNGIVENYQDIKILLIENGYKFKSETDTEVISNLIEFFLKKYDIEESLKKTLNKIEGSSSIVGINIKQPEKIFIMKKGNSGGLVISE

SEQ ID NO: 125472 - protein, 323 aa, Unknown
  Bacterial polypetide isolated from the Sargasso Sea
EGRVDNLEKNSLVQSMEGTIGIGHVRWATHGSPNSINAHPHSSQNVSVVHNGIIENSTLLKKFLVSKGHVFKSQTDTEVIVHLITENLKTENIINSIKKTLKALHGSFALGIIFKDEPNLIVGARRGSPLAVGYGPNENYLGSDSYALKSMTNKITYLNDGEFCVIKKDHVEFFSEDGTKINKKVLELSSEEEKYDKGDYKHFMAKEIEEQPITLKNGIKEYVDNANNNINIYNIPWKKDEISSITLIGCGTAYHSCLMAKYWFEELTSLDVSVDIASEFRYRKNRFKKDNLYVFVSQSGETADTYAALDLCKKNNMKTCAVV

SEQ ID NO: 125473 - protein, 228 aa, Unknown
  Bacterial polypetide isolated from the Sargasso Sea
MCGIVGAVAERNVTAILIEGLKRLEYRGYDSAGVAVFTNAGKLERMRRPGKVSELDQALAGEPLAGRLGIAHTRWATHGAPCERNAHPHFSGDLAVVHNGIIENHEVLREQLKGLGYVFTSDTDTEVIAHLLNHKLKDHSDLTTALKATVKELHGAYGLAVISASQPDRLVAARSGSPLVIGLGLGENFLASDQLALRQVTDRFMYLEEGDIADIRRESVQIWDVNGQ

SEQ ID NO: 125474 - protein, 196 aa, Unknown
  Bacterial polypetide isolated from the Sargasso Sea
MCGIIGVASTKPSVDKLLIGLLRQEYRGYDSAGLAIFDEADQIQIFKSTGKVAELQNSIDQNPVNGNVGIAHTRWATHGLPTENNAHPHHSNNNVYVIHNGIIENHQEIRTTLKALGYVFESETDTEVIAHLIHAKMSQEEAPLIEALQLAVKDLRGAYAIGAVCETEPGIIAAARKGSPLVVGIGHGENFIASDN

SEQ ID NO: 125475 - protein, 252 aa, Unknown
  Bacterial polypetide isolated from the Sargasso Sea
MAALRYAKDQNYLASLAICNVPTSSLARESDFLLLTNAGPEIGVASTKAFTTQLIALMLLTLSLAKASGMNPKLRARVIQALRQMPDIVEKCLELKDYIVDIASEIAQQDNALFLGRGMFYPIAKEGALKLKEISYIHAEAYPAGELKHGPLALIDERMPVVAIAPEHELAEKLVSNLEEVKARGGALYVFGNAKEKLSLERGKYISMPECDFLLTPILYTIPLQILSYEVALIRGTDIDQPRNLAKSVTVE

SEQ ID NO: 125476 - protein, 108 aa, Unknown
  Bacterial polypetide isolated from the Sargasso Sea
MKHGPLALIEEGMPVVVLAPRDDYYKKTISNMQEVIARGAKVLLITNKSTDDVVSENIWETIEVETTNQDLLPFLLTIPLQKLAYYSALKKGYDIDKPRNLAKSVTVE

SEQ ID NO: 125477 - protein, 89 aa, Unknown
  Bacterial polypetide isolated from the Sargasso Sea
LAPDNEHLDKITSNIEEVAARKGKVITIGPLGRTKIDKNGGHIKIPKTLDLLNPIVSVVPMQLIAYYTAVFKGTDVDKPRNLAKSVTVE

SEQ ID NO: 125478 - protein, 241 aa, Unknown
  Bacterial polypetide isolated from the Sargasso Sea
MCGIIGISSNKSVSANIINSLKKLEYRGYDSAGIATLSDGEINELKSEGRVDSLEQNFDLKNLKGNIGIGHVRWATHGIPNSVNAHPHSSHNVSVVHNGIIENSTILKKHLTSKGHNFKSQTDTEVIVHLITENLKTAELEEAITKTLKQLHGSFAIGIVFKDFPDLIVGARRGSPLAVGYGPNENYLGSDSYALKSMTNKITYLNDGEFCIVKKDHVNFFNEEGKKINEKILELSSNEAN

SEQ ID NO: 125479 - protein, 313 aa, Unknown
  Bacterial polypetide isolated from the Sargasso Sea
KGIGENFIASDVMALKPVTDKFIYLEEGDLIELSPEDISIWNIDDESVVRSSVQVLLGPDSMDKGNYRHYMQKEIFEQPKSITDTLEGRIGLNGLLIESFGVGSASIFETIENVTLVACGTSYYAALVASYWLEELAKIPCQVEIASEFRYRTVVCRPNSLFVTISQSGETADTLAALRLAKELGFASTLTICNVATSSLVRESDLALMINAGVEIGVASTKAYTAQLVDLLLLTIALAQYNGLSGAKELEIVSELHKLPNLIEDCLGLDEEVKDLSNDFIDRDHALFLGRGSMYPVALEGALKLKEISYIHA

SEQ ID NO: 125480 - protein, 212 aa, Unknown
  Bacterial polypetide isolated from the Sargasso Sea
HTRWATHGAPNEPNAHLHTSMDGDIAIVHNGIIENAGIIRQQLVSEGYTFRSETDTEVVVHLIDYLWEDGAPLEKAVQAALRNVDGAYGIAAVSSRDPEKIVVARHGSPILIGVGKNGEILAGSDAAAVIEVTRDVVYLDDGDCAVLTAEGYRTYQIEGHEVQRGVHEVTWALDSIEKSGYPHFMLKEIYEQPSSVADVMRGRILRGSSDAR

SEQ ID NO: 125481 - protein, 111 aa, Unknown
  Bacterial polypetide isolated from the Sargasso Sea
MCGIIGAASSRNVGTILVNALKKMEYRGYDSAGLVLNQDEVAFQLRTLGKVSNLEELMIKQRPKADSGIAHTRWATHGIPSETNAHPHGSNGNIYIVHNGIIENHDDLRER

SEQ ID NO: 125482 - protein, 141 aa, Unknown
  Bacterial polypetide isolated from the Sargasso Sea
MCGIIGINSHKPVSASIINSLKKLEYRGYDSAGIATLSSGLINEVKSEGRVDKLEKNSLVQNMEGTIGIGHVRWATHGLPNSINAHPHSSQNVSVVHNGIIENSTLLKKFLVGKGHKFKSQTDTEVIVHLITENLKTDDIV

SEQ ID NO: 125483 - protein, 249 aa, Unknown
  Bacterial polypetide isolated from the Sargasso Sea
MCGIIGINSNKPVSVTIINSLKKLEYRGYDSAGIATLSRGSINEIKSEGRVDNLEKNSLIQNMEGTIGIGHVRWATHGLPNSINAHPHSSQNVSVVHNGIIENSTLLKKYLVGKGHKFKSQTDTEVIVHLITENLKTENIVNSIQKTLKSLHGSFALGIIFKDQPDLIVGARRGSPLAVGYGPNENYLGSDSYALKSMTNKITYLNDGEFCVIKKDHVEFFNEEGAKINKKVLELSSSEEKYEKGDYKH

SEQ ID NO: 125484 - protein, 132 aa, Unknown
  Bacterial polypetide isolated from the Sargasso Sea
IALEGALKLKELAYMHAEGYPAGEMKHGPLALIEEGMPVVVIAPRDELYKKTVSNMQEVISRGAKVLLVTNKSKDEIYSENIWETITVENVSTDLLPFLTAVPLQKLAYYSALEKGYDIDKPRNLAKSVTVE

SEQ ID NO: 125485 - protein, 243 aa, Unknown
  Bacterial polypetide isolated from the Sargasso Sea
IAKIPCYVDFASEYRYRDPLVEEGTLFVTISQSGETADTLAALRYAQEKDYLSTLSICNVPTSSLARESEHVLFTNAGPEIGVASTKAFTTQLAGLMLLAMSIAKSLNIDKEQRKNLVHELRNLPKVIEETLNLSDEILSIVPNIADKHNALFLGRGMFFPIVQEGALKLKEISYIHAEAYPAGELKHGPLALVDDQIPVVALSPENTLTEKLVSNLEEVKARGGTLYVFGGENAKIKIERGE

SEQ ID NO: 125486 - protein, 269 aa, Unknown
  Bacterial polypetide isolated from the Sargasso Sea
DLLVFVSQSGETADTIGALRFAKEYSKNILAIVNVEQSSIAREANWVFPTKAGPEIGVASTKAFVSQLIILKILNIKFASDLSKISIEQRSKFLSGLLELPRLYSEILSKNESIKKLCKNIIRSNSVLYLGRDILYPIALEGALKLKEISYLHAEGYASGELKHGPIALIDESMPIVALNPSTKVFQKTLSNLEEVKARRGKMILFTDEKGKELSKDLTKSIFQLPSCSDFLVPILYSLPLQLIAYYTALEKGTDVDQPRNLAKSVTVE

SEQ ID NO: 125487 - protein, 330 aa, Unknown
  Bacterial polypetide isolated from the Sargasso Sea
MILAGIATLTNNEINEVKSEGRVNKLESNPLIKNMEGTIGIGHVRWATHGLPNSVNAHPHSSQNVSVVHNGIIENSTQLKKFLVSIGHKFKSQTDTEVIVHLITENLKSDNIVKSIQKTLKSLHGSFALGIIFRDQPDIIVGARRGSPLAVGYGPNENYLGSDSYALKAMTNKITYLNDGEFCIVKKDHVEFFSENGNKINKKVLELSSEDNKYEKGDYKYFMAKEIEEQPSTLKNGINEYIDTLNNDINIYNFPWKSNEISSVTLIGCGTAYHSCLLAKYWFEELTTLDVNVDIASEFRYRNNRFKKRHLYVFVSQSGETADTYAALDL

SEQ ID NO: 125488 - protein, 138 aa, Unknown
  Bacterial polypetide isolated from the Sargasso Sea
FLGRGINYPIALEGALKLKEISYIHAAGYPAGEMKHGPIALLDKKVPVISIASPGEVFDKVISNAQEAKARDSYLIGIAPECNGTEIFDYLMTVPSSNEWISPLLNILPLQLLSYHIAAHRGLDVDQPRNLAKSVTVE

SEQ ID NO: 125489 - protein, 266 aa, Unknown
  Bacterial polypetide isolated from the Sargasso Sea
IFFVSQSGETADTYAALEKCKKNNIKTCGIVNVVESSIARSADFVLPIYAGPEIGVASTKAFIGQMLVLYLLTIKISKEREDIDNETYKKLVVEIKKIPELIKKTLSKQNDIQVIARDFIDAKGIMYLGRGYSYPIAMEGALKLKELSYIHAEGYAAGEMKHGPLALIEDGMPVIVLAPKDRYFDKTISNMQEVIARGGKVLMITDDTSETMNENIRFKFQLPKTSESANPFLLSIPIQFLAYHVALLKNCDIDKPRNLAKSVTVE

SEQ ID NO: 125490 - protein, 165 aa, Unknown
  Bacterial polypetide isolated from the Sargasso Sea
FSKSISEILENPVKIQEIAKELKDVSDIYILGRGINYPIAIESALKLKELTYIHAEGIPGGELKHGPLALMDTDVFVIVINPNDSTYTDTLTSAREIKARGAKIIGVSDIESDVYDYWIKIPKINEILYPISEIIPIQLLTYYSSLEKDADPDYPRNLAKSVTVK

SEQ ID NO: 125491 - protein, 165 aa, Unknown
  Bacterial polypetide isolated from the Sargasso Sea
MCGIIGIASNKPVSMNIVNSLKKLEYRGYDSAGLATIDKDEISEKKCSGRVEELEKILFKTPSQGHLGIGHVRWATHGIPNIVNAHPHSSEIVSVVHNGIIENSDELKKNLESKGLKFKSQTDTEVITLLITEFLKDNKPLESVSNTLKKLKGSFALGIIFKNYK

SEQ ID NO: 125492 - protein, 190 aa, Unknown
  Bacterial polypetide isolated from the Sargasso Sea
AGPEIGVASTKAFTAQLTVLIMLALKIGRKKGVSKNRGKELIRALRNIDKDVNIILQNIEEIKKVANATSSVNNYLYLGRGVNFPVALEGALKLKEISYIHAEGYPAAEMKHGPIALIDKDMPVVFIAPQDDTFLKILANIEEVKARGGVIITITDKVNSSLEKLSDFILITPKTHKYIFPISCSVILQI

SEQ ID NO: 125493 - protein, 204 aa, Unknown
  Bacterial polypetide isolated from the Sargasso Sea
AFVTQLACLNLLLLTLMRVHNKLPTARKKITAALRDLPKLINKTLKMTGEYKKVAKLLFKRNSALFLGRGLYFPIAREGALKLKEISYIHAEAYPGGELKHGPLALIDKNMPVIALAPDNEHLDKITSNIEEVAARKGKVITIGPLGRTKIDKNGGHIKIPKTLDLLNPIVSVVPMQLIAYYTAVFKGTDVDKPRNLAKSVTVE

SEQ ID NO: 125494 - protein, 267 aa, Unknown
  Bacterial polypetide isolated from the Sargasso Sea
SLLVTISQSGETADTLAALRYAKEKDYLSTLTICNVPTSSLARESDYSIFTNAGPEIGVASTKAFTTQLAALMLLALSLAKSRGKNPKLRTRVITAMRSLADTVEETLKLKDAILEIAPEIANKDNALFLGRGIFYPIAKEGALKLKEISYIHAEAYPAGELKHGPLALIDEDMPVIALAPESEIAEKLVSNLEEVKARGGTLYVFSDPSISMDLTSGRLVNMPKCDFLLTPIIYTIPLQILSYEVALLRGTDIDQPRNLAKSVTVE

SEQ ID NO: 125495 - protein, 306 aa, Unknown
  Bacterial polypetide isolated from the Sargasso Sea
DSELIAHLIHHHYKNNDLLCAMQSAIKELEGAYAIAAVDLNHKDQLVIARYKSPLLIGVGIEENFAASDPLALAQLTSNFVFLEDGDTAVVKKDSYEIFDAKSKSVNRDVTHLDIETSSVTKGEFSHFMEKEIFEQPQSASNTLESRLGSNDVLDNIFGLGSSEIFAKTKRIQFVACGTSLHAGKVGRFWFEEIAGIPCYVDFASEYRYRNPLVENGTLFVTISQSGETADTLAALRYARDKDYLSTLSICNVPTSSLARESDHVLFTNAGPEIGVASTKAFTTQLVSLLLLAMSIAKSQDKNPIM

SEQ ID NO: 125496 - protein, 290 aa, Unknown
  Bacterial polypetide isolated from the Sargasso Sea
MGVPNEVNAHPHSSEIVSVVHNGIIENSLELKKNLEKSGKVFKSQTDTEVITVLLTEKLKKLEPLKAVFETLDLLKGSFALGIIFKNFKDIVIGARRGSPLAVGYSNNENYLGSDSYALKSMTNKISYLDDGDVCVLSKDQVKFYNYKKDKINKEVFTLSDDKNSASKGNYKNFMIKEIFEQPLTTKTCLKEYIDKIREEINFYNLPIDPKKINKIVLIGCGTAYHSCLVAKYWLEDLTSLNVETDIASEFRYRRIKFEQNNLYIFVSQSGETADTYAALDTCKKENVKT

SEQ ID NO: 125497 - protein, 289 aa, Unknown
  Bacterial polypetide isolated from the Sargasso Sea
ARVPALAHVSSEFRHNNPVIESDAIHFAVSQSGETADTLAAVKEIQLKGGEVRGVINVVGSTIARQCGRGCYIHSGPEQSVASTKAFSNMVAALSLFGIQIGRARSISREKGKQLVKSLQGIPKLVDKYLQNQGPIDEVVEVVKHAKSVLFLGRGISAPVAREGALKLMEIAYIPCLAYPAGEMKHGPIALLEEGSPVVVIAPNDSLKDKTVSSIQECRARGAKIILIHEEGDAIAEEADISIPIPATDPMFTPMLTVLPLQLIAYKTALELGCDVDRPRNLAKSVTVE

SEQ ID NO: 125498 - protein, 307 aa, Unknown
  Bacterial polypetide isolated from the Sargasso Sea
VRWQTHGKPSSINAHPHSSEEVSVVHNGIIENSTILKKLLENKGYKFKSQTDTEVIVHLVTDYLKKNNLKNTIIKVLKKLHGSFALGIIFKDQPDLIVGARRGSPLAVGYGPNEHYLGSDSYALKSMTNKISYLNDGEFCILKKDQVEFFDADGTKVNKNILNLSKDDQNYEKGDYKYYMAKEIDEQPITLKNCVNEYIDKHNKEINIYNFPWKINEISSVVLIGCGTAYHSCLVAKYWFEQNTSLDVSVDIASEFRYRKIKFKKDCLYVFVSQSGETADTFAALDLCKKNKAKTCAVVNVVKVNAR

SEQ ID NO: 125499 - protein, 304 aa, Unknown
  Bacterial polypetide isolated from the Sargasso Sea
SFFHEEGKKVNKKILELSSDKANYDKGDFKHFMAKEIEEQPLTIKTGIKEYVDNVNKDINIFNFPWKIEEINSITLIGCGTAYHSCLMAKYWFEELTNLDVSIDIASEFRYRKNRFKKDTLYVFVSQSGETADTYAALDLCNKNNMKTCAVVNVIESSIARDSNFVLPIHCGPEIGVASTKAFLGQILVLYILALKLGSMRNEIKKKEYQEKIKALKALPGLIEKTLLYDNDIQAISSTFNEAKGSMFLGRGYSYPIALEGALKLKELSYVHAEGYPAGEMKHGPLALIEEGMPVVVLAPRDNY

SEQ ID NO: 125500 - protein, 313 aa, Unknown
  Bacterial polypetide isolated from the Sargasso Sea
KRSMAGRDQPKRKTSNVWNYGAASSRSVGKILVRGLKKMEYRGYDSAGLVLNQDEAAFQLRTLGKVSNLEDAMIEQRPKAHSGIAHTRWATHGIPSETNAHPHGSNGNIYIVHNGIIENHDELRERLSNEGYEIQSETDSELIAHLIHFNKEKGKTTLGALIETIKELDGAYSVAVIDTEEKGKIFAAKQKSPLLVGKGIEENFIASDPLAIAGLAESFYLLEDGDFAEITKDEIKIFGSNGEALSREETIIDTSVKEASKDGYKHFMEKEIYEQPQAITNAIEGRTSDGEVLDNIFGLGSSEAFKGVKRIQL

SEQ ID NO: 125501 - protein, 252 aa, Unknown
  Bacterial polypetide isolated from the Sargasso Sea
YDSAGLVLNQDEVVFQLRTLGKVSNLEDAMIEQRPKADSGIAHTRWATHGIPSEKNAHPHGSNGNIYIVHNGIIENHDELRERLANEGYEIQSETDSELIAHLIHSNKGKDKTTLAALIETTKELDGAYSIAVIDREEKGKIFAAKQKSPLLVGKGIEENFIASDPLAIAGLAESFYLLEDGDFAEITKDEIKIVGTNGEPVSREETIIDTSVKEASKDGYKHFMEKEIYEQPQAITNAIEGRTADGEVLDN

SEQ ID NO: 125502 - protein, 267 aa, Unknown
  Bacterial polypetide isolated from the Sargasso Sea
MCGISGIVHSENFGRNLLNSIRNLEYRGYDSCGVAVIQNGKIDLRKNIGGIDDVNLKERLDQMQGKIGIAHTRWATHGGVTQENAHPHLSANRKFAVVHNGIISNYQQLRDVMLSEGVCFESLTDTEVFVNLLEKSYTERNDLEQAFLAALQQIEGSFSIVMLSSHDPEHLYCVKNESPLLLGLGEECNYVGSDINAFLEYTRKAIVLDEGEYVILGPNDYQVRSLKTGKKLKKNVLHIDWDLETSKKGGFSHYMLKEIFDEPRNCP

SEQ ID NO: 125503 - protein, 310 aa, Unknown
  Bacterial polypetide isolated from the Sargasso Sea
PIIIKNCVNEYVDKINKQINIYNFPWKTKQISSIVLIGCGTAYHSCLVAKYWFEEYTSLDVSIDIASEFRYRKLKFKTDCLYVFVSQSGETADTYAALDICKKNKMKTCSIVNVIESSIARDSDLVLPIHCGPEIGVASTKAFLGQMLVLYMLCIKLSYDQKIVSKKNYQEKIKNLLSLSNLCKKTLLTDGKIQKSSKAFIEAKGSMFLGRGYSFPIALEGALKLKELAYVHAEGYPAGEMKHGPLALIEEGMPVVVLAPRDDYYKKTISNMQEVIARGAKVLLITNKSKDEIQSENIWETIEVENLSDD

SEQ ID NO: 125504 - protein, 297 aa, Unknown
  Bacterial polypetide isolated from the Sargasso Sea
MCGIVGAVRTSEASGFLLEGLRRLEYRGYDSAGVVVINPEGKLERARVVGKVGELEQALRQTPLAGATGIAHTRWATHGGVTEPNAHPHICNGTLALVCNGIVENHETLRDAQRAAGLSFTSETDTEVVVHQVYLHLQQGLDLVDAVRATMAELHGSFALAVVHAGEPDRLVAARQGPPLLLGRSGEETFVASDINALLPVTRNYQVLENGDVVDIRGSDCLIRDQAGEIVERTVHSSTQSGESAELGEYRHFMQKEIQEQPRAVADTLKGRLLGDHVLEESFGSRAQEIFDATRQV

SEQ ID NO: 125505 - protein, 209 aa, Unknown
  Bacterial polypetide isolated from the Sargasso Sea
VASTKAFTTQLVALMLLALSLAKSRGRNPKLRTRVITALRSLSETVEETLKLKDTILEIAPEIANKDNALFLGRGIFYPIAKEGALKLKEISYIHAEAYPAGELKHGPLALIDEEIPVIALAPESEIAEKLVSNLEEVKARGGTLYVFSDPSISMDLKSGRLINMPKCDFLLTPIIYTIPLQILSYEVALLRGTDIDQPRNLAKSVTVE

SEQ ID NO: 125506 - protein, 289 aa, Unknown
  Bacterial polypetide isolated from the Sargasso Sea
SQTDTEVITVMLTDFLKSEDLINCIHKTLEKLEGSFALGVIFKDFKNLVVGARRGSPLAVGYGHNENFIGSDSYALKSMTNKISYLDDGDFCLLYREKVEFYNSEKKKINKEILELSNEDNIAEKGDYKDFMSKEIDEQSFTTKKCINEYLDKSRNEINIYNLPIDPKKINKIRLIACGTAYHSCLMAKYWIEENTSIDVEADIASEFRYRNVKLNKDDLYIFVSQSGETADTYAALEKCKKNNVKTCGIVNVVESSIARLADFVLPIHAGHEIGVASTKAFLGQSACA

SEQ ID NO: 125507 - protein, 70 aa, Unknown
  Bacterial polypetide isolated from the Sargasso Sea
RGGQLFVFASENAGYESGPGCEVLALPACSALAGPVMFTIALQLLAYHVAVARGTDVDKPRNLAKSVTVE

SEQ ID NO: 125508 - protein, 290 aa, Unknown
  Bacterial polypetide isolated from the Sargasso Sea
IGIASKENVSSNIINALRKLEYRGYDSAGIAINTANKINQRKVKGKLDNLIYALQKDQFDGNTGIGHTRWATHGEPSDKNAHPHSSTSVSLVHNGIIENAAELKKSEEVKDYHFESDTDSEVITALLTFYLKEGLSHLESVQKTISSLEGSYALAIIFNDSEDTIYGAKNGSPLVAGTNGVGNSIGSDSIALSSVANKVCYLEDGDITVLNKESIEIYNLEGERANREFVEIGINESEVSKGPYKHFMEKEIHEHPHAVGETFRQFVDYDKGTIAISNINLILIKFQRFI

SEQ ID NO: 125509 - protein, 243 aa, Unknown
  Bacterial polypetide isolated from the Sargasso Sea
MKTCAVVNVIESSIARDSNFILPIHCGPEIGVASTKAFLGQILVLYILALKLGSMRNEIEKKEYQEKIKDLKALPSLIEKTLLHDNDIQAISSTFNEAKGSMFLGRGYSYPIALEGALKLKELSYVHAEGYPAGEMKHGPLALIEEGMPVVVLAPRDNYYKKTISNMQEVIARGAKVLLITNKSKDEVVSENIWETIEVENTNDDLLPFLLTIPLQKLAYYSALKKGYDIDKPRNLAKSVTVE

SEQ ID NO: 125510 - protein, 215 aa, Unknown
  Bacterial polypetide isolated from the Sargasso Sea
QKLGVASTKAFLGQLIVLYILILKLSSIRNEINQTNYNQKIENLKKIPKFLKKTLDLETNIQILAKEFLDAKGSMFLGRGSSFPIALEGALKLKELSYLHAEGYPAGEMKHGPLALIEEGLPVIVIAPKDKYFEKTLSNMQEVIARGGKIVFITDNKKKSISENIRFGLRVPHIDNLLSPILLTIPLQLLAYHVALLKNCDIDKPRNLAKSVTVE

SEQ ID NO: 125511 - protein, 273 aa, Unknown
  Bacterial polypetide isolated from the Sargasso Sea
GYDSAGIATLSDGMINEVKSEGRVDRLEKNSLIQNMNGTIGIGHVRWATHGLPNSINAHPHSSQNVSVVHNGIIENSTLLKKYLVGKGHKFKSQTDTEVIVHLITENLKTDNIVNSIKKTLNSLHGSFALGIIFKDQPDLIVGARRGSPLAVGYGPNENYLGSDSYALKSMTNKITYLNDGEFCIIKKDHVEFFNNEGIKINKKVLELSSDEEKYDKGDYKHFMAKEIEEQPNTLKNGINEYIDNLNNDINIYNFPWKINEISSITLIGCGTA

SEQ ID NO: 125512 - protein, 235 aa, Unknown
  Bacterial polypetide isolated from the Sargasso Sea
LGEGEFLCASDTPALAGFTKTILSMEDGEVALLSPLGVELYDADGRRQQRMPSVLSGADHVADKRHFRHFMLKEIHEQPETAALWAARHLPAGLSAEMPVALPMDEAFYAGLERIEILACGTSRHAALVGGHLLEQFAGVPTAVHYASEFRYAPPPLAPHTLTIGVTQSGETADTLAALAMEAERRRLHADPAYASRQLGVTNRPESSLSRQVLDILDIGAGIEVGVAATKTFMG

SEQ ID NO: 125513 - protein, 210 aa, Unknown
  Bacterial polypetide isolated from the Sargasso Sea
EQSITTKKCINEYIDKSRNEINIYNLPIDPKKINKIRLIACGTAYHSCLMSKYWFEEFTSIDVEADIASEFRYRNVKLNSNDLYVFVSQSGETADTYAALEKCKKSKVKTCGIVNVVESSIARTADFVLPIHAGPEIGVASTKAFMGQMLVLYLLSLKIAKERKDINEEVYKRLVLDLKKIPDLIKETLTKQKDIQVIARDFINAKGTMY

SEQ ID NO: 125514 - protein, 217 aa, Unknown
  Bacterial polypetide isolated from the Sargasso Sea
MISTILPTYARADLEFVKGQGAWLTEADGSHFLDLASGIAVNSLGHAHPDLVKIIKSQAETLWHVSNLYEIPQQRALADILVASSFADTVFFTNSGTESCELAVKMARKYWFEKGYPNKFEIITFEGSFHGRSSAGIAATASEKMTKGFGPLLPGFININLNDHEAIKTTVSEKTAAILIEPIQGEGGIRVLPEPFLKEIRAICDEKNILLILDEVQ

SEQ ID NO: 125515 - protein, 46 aa, Unknown
  Bacterial polypetide isolated from the Sargasso Sea
RVPRVDNFLSPLLLTIPLQLLAYHVASLKNCDIDKPRNLAKSVTVE

SEQ ID NO: 125516 - protein, 281 aa, Unknown
  Bacterial polypetide isolated from the Sargasso Sea
MCGIVAVTGYKKALPVLLDGLKKLEYRGYDSAGIAIINSETKDISCNKAKGKLKNLINELKDKNISGTVGIGHTRWATHGKPEVKNAHPHIDSTGTIAVVQNGIIENFQDLKNKLEQEGIIFNSDTDTEVIPHLIKRELNTLSQLNLESNGSTLLVAVRNVISDLEGSYALAVLWSGAPTSLVVARKQAPLIIGLGEGEFICASDTPAIANFTNIILPMEDEEIALLTPLGIEIYDSNNERQYRNPISLKVSEQIIDKMNFKHYMLKEIYDQPGTAKNWLE

SEQ ID NO: 125517 - protein, 45 aa, Unknown
  Bacterial polypetide isolated from the Sargasso Sea
VPSSNEWISPLLNIVPLQLLSYHIAAHRGLDVDQPRNLAKSVTVE

SEQ ID NO: 125518 - protein, 212 aa, Unknown
  Bacterial polypetide isolated from the Sargasso Sea
WATHGIPNTLNAHPHSSEKVSVVHNGIIENSDELKKTLEEKGFKFKSETDTEVITLLVTESLKKSDPLESVFKTLKKLKGSFALGIIFKNHTDIIIGARRGSPLAVGYSKEENYLGSDSYALKSMTNKISYLDDGEICVLSKSEISFFDANQNKINKKIHIVSDDENTADKGDYKNFMSKEIFEQPNTAKKCVSEYIDSLKKDINIYNFANT

SEQ ID NO: 125519 - protein, 102 aa, Unknown
  Bacterial polypetide isolated from the Sargasso Sea
MCGIVGITSSKEVTPRIISSLKKLEYRGYDSAGIATLSEGNINEVKCEGRVDALEKNIIQTKISGSIGIGHVRWATHGKPSSINAHPHSSEDVSVVHNGIIE

SEQ ID NO: 125520 - protein, 188 aa, Unknown
  Bacterial polypetide isolated from the Sargasso Sea
MCGIVGAVGERNVVEILLEGLKRLEYRGYDSSGVALLQQDGTLNRIRSTGKVQELVDIIANDEALGTTGIAHTRWATHGGVTVANAHPHFSSDRVAVVHNGIIENYQTLREQLSAKGYVFSSDTDTETIAHTVHEALDAGKDLLEAVQTSVKTFHGAYGTVVIDKEDVGRMVVARSGSPLVIGLGLGE

SEQ ID NO: 125521 - protein, 238 aa, Unknown
  Bacterial polypetide isolated from the Sargasso Sea
IVTICNVPTSTMARESDWKIFTNAGPEIGVASTKAFTTQLATLLLLACSISKSKNINKDKRAEAIKDLVNTPTLVKEAFGLKKHIDDIVEKIADKKNALYLGRGMYFSVAQEGALKLKEITYIHAEAYPAGELKHGPLALVDEMTPVIALAPEDELAEKLISNLEEVKSRGGTLYVFGNANSKIKIEKGKLMNMPDCGYYNAPIVYTIPLQILAYEVACSIGTDLDQPRNLAKSVTVE

SEQ ID NO: 125522 - protein, 213 aa, Unknown
  Bacterial polypetide isolated from the Sargasso Sea
GVASTKAFLGQMLVLYLLCLKMGNLNDDIKKKDYISKIKSLLNLSKNIELSLKSQNDIQIISNSFTNIKGSMFLGRGYSYPIALEGALKLKELSYIHAEGYPAGEMKHGPLALIEDGMPVVVIAPRDEYYKKTMSNMQEVIARGAKVLLITNKSTDEIFSENIWQKIEVENTDDDLLPFLITIPLQKLAYYTALKKGYDIDKPRNLAKSVTVE

SEQ ID NO: 125523 - protein, 131 aa, Unknown
  Bacterial polypetide isolated from the Sargasso Sea
VALEGALKLKEISYIHAEGYPAAEMKHGPIALIDKDMPVVFIAPQDDTFSKIMANIEEVKARGGIIITITDKVNSGIEKLSDFVLITPQTHKYVFPITCSVILQILAYELAVKRGCEIDQPRNLAKSVTVE

SEQ ID NO: 125524 - protein, 150 aa, Unknown
  Bacterial polypetide isolated from the Sargasso Sea
MCGIVGIVSNKSVSASIISALKKLEYRGYDSAGISTLINGQIKEQKCSGRVDNLEKILFQNPSSGDLGIGHVRWATHGVPNQVNAHPHSSEAVSVVHNGIIENSDTLRNEYKDKGYSFKSQTDTEVITIMLTDFLKQNDLINCIHKTLKK

SEQ ID NO: 125525 - protein, 183 aa, Unknown
  Bacterial polypetide isolated from the Sargasso Sea
MCGIIGIASNKSVTSNIINSLKRLEYRGYDSAGIATISKENLNEKKCSGRVEELEKILFNSPAQGNIGIGHVRWATHGIPNEVNAHPHSSEIVSVVHNGIIENSNYLKKKLEKEGYKFKSQTDTEVITLLITKYLKDSNPIDAVLKSLEHLEGSFALGILFKDKSDIIIGARRGSPLAVGYSN

SEQ ID NO: 125526 - protein, 320 aa, Unknown
  Bacterial polypetide isolated from the Sargasso Sea
GRRIICASDTPAIANFTKIILPLEDEEIALLTPLGIEIYDSNNERQYRNPISLQTADQVSDKKNFKHYMLKEIYDQPDIAKYWLEKYLIKDLKTDQFQINYSFDTDFLNSVERIDIVACGTSKHSAMVGKFLLEQFSGIPTNVFFASEFRYSPPPLLPNTLTIGVTQSGETADTIAAISMEIKRRSSIEDRNFKPNLIAITNRVESSIGRQIPNVIDISAGIEIGVAATKTFFAQLLSFYGLAIKFAQIKGSQSNENINQLVSELTKLPVLVEELLEKHKESSEKLAHDFFNIKDVIFLGRGINYPIALEGALKLKEISY

SEQ ID NO: 125527 - protein, 262 aa, Unknown
  Bacterial polypetide isolated from the Sargasso Sea
SISDTLRGRLNLDDGTSMLGGINDHIPSILSASRIYITACGTSWHAGLIGKHLIEEYARVPVHVEYASEFRYRNAIIDANTILIAISQSGETADTLAAIKKSKEAGALTLGICNVVGSTISRETDAGIFTHAGPEIGVASTKAFTAQVTVLIMLALKIGRKKGVSLYRGKDLIKSLKNIDLNVSDILKGINKIKEVAKSTFKADNYLYLGRGVNFPVALEGALKLKEISYIHAEGYPAAEMKHGPIALIDKDMPVVFIAPRG

SEQ ID NO: 125528 - protein, 289 aa, Unknown
  Bacterial polypetide isolated from the Sargasso Sea
SSGISVLDNSNSIITIRAKGKLENLNKKIKTNELFGNIGIGHTRWATHGVPSTDNAHPHVSENVSIVHNGIIENYSQLKKMLKNKGFIFKSQTDSEVIAHLLSYELRVNTPRNAIKNTLKYLEGAFAIAILFKNFNILAGARRGSPLALGLSNKTTYLGSDSLALAPFTQKIIFMDEGDSVVIEQDKFEIYNKDFKKVKRNITLSSFTGSNLDKGNFDHYMQKEIFEQPPIIGDSLSRFLDPIKKKINILDLKINWKKISKIDFIACGTSYFACLTATYWFEKYLNLNA

SEQ ID NO: 125529 - protein, 297 aa, Unknown
  Bacterial polypetide isolated from the Sargasso Sea
WFEDICEIPCYIDFASEYRYRNPIVEDNTLFVTISQSGETADTLAALEYARGEKYVGIVTICNVPTSTMAREADWKIFTNAGPEIGVASTKAFTTQLAALLMLALSISKSQDKNADKRKQATQELRETPALVDQSFNLKENISQITQNISTKHNALFLGRGMYFSIAQEGALKLKEISYIHAEAYPAGELKHGPLALVDEQIPVIALAPEDSLVEKLLSNLEEVKARGGTLYVFGNANSTIEISKGKFINMPDCGDYNAPIIYTIPLQILAYEVACLRGTDVDQPRNLAKSVTVEIS

SEQ ID NO: 125530 - protein, 257 aa, Unknown
  Bacterial polypetide isolated from the Sargasso Sea
MCGIIGISSNKAVSSSILNSLKKLEYRGYDSAGIATINEGLINEVKCQGRVDVLEKNISQINLLGNVGIGHVRWATHGIPSTINAHPHSNESISVVHNGIIENSAVLKKQLINKGHKFKSQTDTEVIVHLLTEYLKTDQLNEAIIKTLNDLDGSFALGMIFKDMPDLIIGARRGSPLAVGYGPNENYLGSDSYALKSMTNKITYLNDGEFCIIKKKQVDFFDSQGKKVNKKILQLSSSDQNYEKGEYKHFMAKEIDE

SEQ ID NO: 125531 - protein, 115 aa, Unknown
  Bacterial polypetide isolated from the Sargasso Sea
YPAGEMKHGPIALLEKGLPVIIGAPSFNLFDKTSSNLYEVIARDGNVLLITDQKGLNHLGDTAKKIKAFIVDEANIITAPFIYTIPYQLFAYHTALLKGTDVDQPRNLAKSVTVE

SEQ ID NO: 125532 - protein, 62 aa, Unknown
  Bacterial polypetide isolated from the Sargasso Sea
GVAPNCNGTEIFDFLMTIPSTNEWISPLFSIIPLQLLSYHIAAHRGLDVDQPRNLAKSVTVE

SEQ ID NO: 125533 - protein, 250 aa, Unknown
  Bacterial polypetide isolated from the Sargasso Sea
CFKKAKELGAITLGICNVVGSSISRETDGGIFTHAGPEIGVASTKAFTSQVTVLIMFALNIGRKKGVSKHRGKELISALKTIDQDVASVLRQIRNIKEVAKHTAAADNYLYLGRGINFPVALEGALKLKEISYIHAEGYPAAEMKHGPIALIDENMPVVFIAPHDDTFTKVLSNIEEVKSRGGIVISITDKINNSLKKISDFVLIAPQTHKYVFPITCSIILQMLAYELAVCRKCEIDQPRNLAKSVTVE

SEQ ID NO: 125534 - protein, 199 aa, Unknown
  Bacterial polypetide isolated from the Sargasso Sea
LYILALKLGSLRKEIEKKEYKEKITELKDLPGLIEKTLLHDNDIQAISSTFNDAKGSMFLGRGYSYPIALEGALKLKELSYVHAEGYPAGEMKHGPLALIEEGMPVVVLAPRDSYYKKTISNMQEVIARGAKVLLITNKSKDEVVSENIWETIEVENTNDDLLPFLLTIPLQKLAYYSALKKGYDIDKPRNLAKSVTVE

SEQ ID NO: 125535 - protein, 321 aa, Unknown
  Bacterial polypetide isolated from the Sargasso Sea
RGVSFTSSTDSEVLVQLISELYYNNSEKLSFEDAVRAALQEVVGAYGIVVICEDEPGKIIAARMGSPLVLGVGEGEFLIASDASPIVEYTRNVIYLDDNELVLIEDEKFSISKIDSKKIINKTLLKIDLTIEEIEKGEFPHFMLKEIYDQRHSISDTMRGRFNLNDGTTQLGGIIDYLPNILSASRIYITACGTSWHAGLIGKHLIEEYSRIPVHVEYASEFRYRNVIIDSSTIIIAISQSGETADTLAAIRKAKELGAITLGICNVVGSTISRETDAGIFTHTGPEIGVASTKAFTAQLTILIMLAIKLGRKKGISKERG

SEQ ID NO: 125536 - protein, 115 aa, Unknown
  Bacterial polypetide isolated from the Sargasso Sea
MCGIIGIASNKAVSINIINSLKKLEYRGYDSAGLATLTDNIINEKKCIGRVEELEKILFKTPSNGNIGIGHVRWATHGVPNIVNAHPHSTDQVSVVHNGIIENSDEIKKELENKG

SEQ ID NO: 125537 - protein, 184 aa, Unknown
  Bacterial polypetide isolated from the Sargasso Sea
MCGIIGINSNKPVSGTIINSLKKLEYRGYDSAGIATLSSGLINEIKSEGRVDNLEKNSLVKNMEGTIGIGHVRWATHGLPNSVNAHPHSSQNVSVVHNGIIENSTLLKKFLVSKGHKFKSQTDTEVIVHLITENLKTENIVNSIKKSLKALHGSFALGIIFKDEPDLIVGARRGSPLAVGYGPN

SEQ ID NO: 125538 - protein, 149 aa, Unknown
  Bacterial polypetide isolated from the Sargasso Sea
AHDFFNIKDVIFLGRGINFPIALEGALKLKEISYIHAAGYPAGEMKHGPIALLDKKVPVISIASPGEVFDKVISNAQEAKARDAYLIGIAPECNGTEIFDYLMKVPSSNEWISPLINIVPLQLLSYHIAAHRGLDVDQPRNLAKSVTVE

SEQ ID NO: 125539 - protein, 113 aa, Unknown
  Bacterial polypetide isolated from the Sargasso Sea
YPAGEMKHGPLALIEEGMPVVVLAPRDNYYKKTISNMQEVIARGAKVLLITNKSKDEVVSENIWETIEVEDTNNDLFPFLLTIPLQKLAYYSALKKGYDIDKPRNLAKSVTVE

SEQ ID NO: 125540 - protein, 292 aa, Unknown
  Bacterial polypetide isolated from the Sargasso Sea
MCGIIGIASNKSVSVNIIHALKKLEYRGYDSAGLATINKGRIDEKKCPGRVEKLEKILFQNPSEGNLGIGHVRWATHGVPNEANAHPHSTEIVSVVHNGIIENSSELKKVLENEGKTFKSQTDTEVITVLLTEKLKNTEPLDAVFKTLSLLKGSFALGIIFKNYKDFVIGARRGSPLAVGYSNEENYLGSDSYALKSMTNKISYLDDGDVCILSKDEVKFYNSNKEKINKEIFTLSENKSEVSKGNYKNFMIKEIFEQPITLKTCLKEYIDKIREEINFYSLPIEPKKIKKL

SEQ ID NO: 125541 - protein, 245 aa, Unknown
  Bacterial polypetide isolated from the Sargasso Sea
FFNEDGTKINKIVLELSSEEEKYDKGDYKHFMAKEIEEQPTTLKNGIKEYIDTANNDINIYNIPWKNNEISSITLIGCGTAYHSCLMAKYWFEELTSLDVVIDIASEFRYRKNRFKKDSLYVFVSQSGETADTYAALDLCKKNGMKTCAVVNVIESSIARDSEFVLPIHCGTEIGVASTKAFLGQILILYILALKLGLLRGDLEKKELSEKLKDLKELPKLVEQTLMTDNKIQNVSNTFNEAKGS

SEQ ID NO: 125542 - protein, 278 aa, Unknown
  Bacterial polypetide isolated from the Sargasso Sea
LCETPCYIDFASEYRYRNPLVEDDTLFVCISQSGETADTMAALNYAKEERYLGIVTICNVPTSTMARESDWKIFTNAGPEIGVASTKAFTTQLAALMLLACSISKSKDINRDKRTEAINDLINTPALVKEAFGLKKYIEEIVERIADKKNALYLGRGVYFSIAQEGALKFKEITYIHAEAYPAGELKHGPLALVDERTPVVALAPEDELVEKLVSNLEEVKSRGGTLYVFGNANSKIKIEKGKFMNMPECGYYNAPIVYTIPLQILAYEGACSIGTDL

SEQ ID NO: 125543 - protein, 185 aa, Unknown
  Bacterial polypetide isolated from the Sargasso Sea
MPKESIIKLVEDLVELPALTAEVLAIDKSLNKIAQQLKNVKDVLYVGRGISFPIALEGALKLKEISYIHAEAYAAGELKHGPIALVDEGVPVVALAPSDDLFSKTASNIEEVSARGANIILISDKEGINKLSKTAHITLEVPHSNTFILPILYSIPVQMLAYHTAVAKGTDVDQPRNLAKSVTVE

SEQ ID NO: 125544 - protein, 263 aa, Unknown
  Bacterial polypetide isolated from the Sargasso Sea
PKKINKIVLIGCGTAYHSCLVARYWLEELTTIDAEVDIASEFRYRKLKFNPNNLYIFVSQSGETADTAAALDICKKNKVKTCSIVNVVESTIARNSDWVLPIHAGPEIGVASTKAFLGQLIVLYIMTLKLSKARDDIDKDKYDENLRNLLKLSDSIKNTLKLENEIQLMAKEFLNAKGSMFLGRGNSFPIALEGALKLKELSYLHAEGYPAGEMKHGPLALIEEGLPVIVIAPKDKYYEKTLSNTQEVIARGGKIFFITDNNK

SEQ ID NO: 125545 - protein, 273 aa, Unknown
  Bacterial polypetide isolated from the Sargasso Sea
HLLDYFLNQGNNILDSIYLTKEKLEGAYAIAILDIEDENNIYVARCKSPLLVGQGENENFAASDPLAIGKLANEFIFLEDEDVAVISKNRIQIYDEQKQPIHREVTEIDSEYQTISKGEYTHFMEKEIYEQPQAILNTLDGRVGGDDVRDDIFGIGSSKLFEKVKRIQIVACGTSLHAGRVAANWLSAIAGIPTQVDYASEYRYRNPHVDEDSLLVTISQSGETADTIAALRYAKEKDYLSNITICNVPTSSLARKWDFFLYTNAGPEVECST

SEQ ID NO: 125546 - protein, 196 aa, Unknown
  Bacterial polypetide isolated from the Sargasso Sea
FVMLALSIAKSHDKNADKRKQATQELRETPALVDQAFNLKENITQITQNISTKHNALFLGRGMYFSIAQEGALKLKEISYIHAEAYPAGELKHGPLALVDEQIPVIALAPEDSLVEKLLSNLEEVKARGGTLYVFGNANSTIEVKKGKFINMPDCGDYNAPIIYTIPLQILAYEVACLRGTDLDQPRNLAKSVTVE

SEQ ID NO: 125547 - protein, 257 aa, Unknown
  Bacterial polypetide isolated from the Sargasso Sea
GSFALGIIFKDEPDLIVGARRGSPLAVGYGPGENYLGSDSYALKSMTNKITYLDDGEFCIIKKTEVSFYNEQGKKINKKILSLTTDEQNYDKGDYKHFMAKEIDEQPLTVKNCINEYVDKKNNEISIFNFPWKIKDISSITLVGCGTAYHSCLIAKYWFEQLTSFDVHIDIASEFRYRKNRFKKETLYVFVSQSGETADTYAALDLCNKNNMKTCSVVNVVESSIARDSKFVLPIHCGPEIGVASTKAFLGQMLVLY

SEQ ID NO: 125548 - protein, 144 aa, Unknown
  Bacterial polypetide isolated from the Sargasso Sea
QTLIDRLDLRCAELAHAFADTRTVIYLGRGINYPIALEGALKLKEISYIHAEGYPAGEMKHGPIALLDADVPVVSVAMPGPVFDKVLSNAQEAKARDARLIGVAPECPDTEIFDELLPVPAVDELLSPLLTLIPMQLLSYHIAA

SEQ ID NO: 125549 - protein, 310 aa, Unknown
  Bacterial polypetide isolated from the Sargasso Sea
AIACDPVFRVLEEGDVAEVTRRTVSIFDVNGNKVEREVKESEITHDAGDKGEYRHYMLKEIYEQPLALTRTIEGRIANKQVLDTAFGDNAAEFLKDIKHVQIIACGTSYHAGMAARYWLEDWAGVSCNVEIASEFRYRKSHLFPNSLLVTISQSGETADTLAAMRLAKEMGYKATLTICNAPGSSLVRESDMAYMMKAGAEIGVASTKAFTVQLAGLLMLTAVIGRHNGMSEQMQAEITQSLQSMPAKVEQALGLDDAIAELAEDFADKHHALFLGRGDQYPIAMEGALKLKEISYIHAEAYASGELKHG

SEQ ID NO: 125550 - protein, 265 aa, Unknown
  Bacterial polypetide isolated from the Sargasso Sea
VISQSGETIDTLAALRYARSQDQKILSIVNVPESAIARESDAVLQTYAGPEIGVASTKAFTTQLTVLACLAIAMAHAQGAIDDPERGRLVGALTEVPARAAEILNHDEQINEIAHDMAEARDILYLGRGTSYPLALEGALKLKEISYMHAEGYAAGEMKHGPIALIDEAVPVVVVAPTDNLIDKTVSNVQEVMARGGRVIFLSDMAGVSRLGGAADATVTLPSVDPFVTPLLYAIPVQLLAYHIAVIKGTDVDQPRNLAKSVTVE

SEQ ID NO: 125551 - protein, 228 aa, Unknown
  Bacterial polypetide isolated from the Sargasso Sea
REMLISFYLFIVSRNWCASTKAFLGQMLVLYILSIKISFDQKFITKKEYQSKIKNLLSLSNSAKKTLKLDDKLLNIGKVFAHAKGCMFLGRGYSFPIALEGALKLKELAYVHAEGYPAGEMKHGPLALIEEGMPVVVIAPRDDYYKKTMSNMQEVIARGAKVLLITNKNKDEVVSENIWEQIEVDKLHDELIPFLVTIPLQKLAFYSALEKGYDIDKPRNLAKSVTVE

SEQ ID NO: 125552 - protein, 155 aa, Unknown
  Bacterial polypetide isolated from the Sargasso Sea
MCGIIGIISSKEVSNRIVNSLKKLEYRGYDSAGIATLVDGNINEVKCEGRVDALEKDISKLNLKGEIGIGHVRWATHGKPSKVNAHPHSSEQVSVVHNGIIENSTILKKLLEKKGYIFKSQTDTEVIAHLVTDYLKKNSLKDTIIKVLKKLHGSF

SEQ ID NO: 125553 - protein, 135 aa, Unknown
  Bacterial polypetide isolated from the Sargasso Sea
MCGIVGAISNRNVDGILMEGLRRLEYRGYDSAGLAVITKNNIERLRRAGKVVKLQEALDSSKLEGQVGISHTRWATHGVPSEKNAHPHISDPDFAIVHNGIIENYLQIKDKLLVQGYTFSSDTDTEVVIHRIHSH

SEQ ID NO: 125554 - protein, 271 aa, Unknown
  Bacterial polypetide isolated from the Sargasso Sea
DEFFIASDATPIIEYTKNVVYLDDEEIATIELGEDVKINTIKNQSITPYIQELEMNLEAIEKGGYDHFMLKEIYEQPQSIKNSMLGRLKMKSGKITLSGIEEFESKFLNAKRIVFVACGTSWHSALVGEYMIEEVARIPVEVEYASEFRYRNPIINEDDIVIAISQSGETADTLAALEIAKKKGATIYGICNVVGSSIARATDAGSYTHAGPEIGVASTKAFTAQITILALMALTLAKKKGTVNKTYYQSLINQLIEIPKLVEKALKTDDQ

SEQ ID NO: 125555 - protein, 155 aa, Unknown
  Bacterial polypetide isolated from the Sargasso Sea
QSSEKLAHDFFNIKDVIFLGRGINYPIALEGALKLKEISYIHAAGYPAGEMKHGPIALLDKKVPVISIASPGQVFDKVISNAQEAKARDSYLIGIAPECKGTEIFDYLMQIPSSNEWVTPLLNIVPLQLLSYHIAAHRGLDVDQPRNLAKSVTVE

SEQ ID NO: 125556 - protein, 292 aa, Unknown
  Bacterial polypetide isolated from the Sargasso Sea
RVDNLEKNSLVQNMEGTIGIGHVRWATHGLPNSINAHPHSSQNVSVVHNGIIENSTLLKKFLISKGHKFKSQTDTEVIVHLITENLKTENIVNSIKKTLKSLHGSFALGIIFKDEPDLIVGARRGSPLAVGYGPNENYLGSDSYALKSMTNKITYLNDGEFCILKKDHVEFFNEDGTKINKKVLELSTDEEQYDKGDYKHFMAKEIEEQPITLKNGINEYIDNANNDINIYNFPWKTNEISSITLIGCGTAYHSCLMAKYWFEELTSLDVNVDIASEFRYRKNRFKKETLYI

SEQ ID NO: 125557 - protein, 275 aa, Unknown
  Bacterial polypetide isolated from the Sargasso Sea
STKNVSATILNSLRKLEYRGYDSAGIATLETGIIKEVKCEGRVDVLEQNLSKQKLEGNIGIGHVRWATHGVPSTVNAHPHSSDKVSVVHNGIIENSTILKKLLIKKGYVFKSQTDTEVIVYLITEYLKKNDLKNSMIKMLKRVHGSFALGIIFQDQPDLIVGARRGSPLAVGYGPNENYLGSDSYALKSMTNKVTYLDDSEFCIIKKDNVEFFDEKGNKVNKKVLELSKNEEDYAKGDYKHFMAKEIDEQPSTIKNCVNEYINKISNSINIYNFP

SEQ ID NO: 125558 - protein, 267 aa, Unknown
  Bacterial polypetide isolated from the Sargasso Sea
MSLFLNLGETADTYAALDLCNKNNMKTCSIVNVVESSIARDSKFVLPIHCGPEIGVASTKAFLGQMLVLYLLCLKMGKLNDDIKKKDYISKIKSLLNLSKNIELSLKSENDIQTISNSFTDIKGSMFLGRGYSYPIALEGALKLKELSYIHAEGYPAGEMKHGPLALIEDGMPVVVIAPRDEYYKKTMSNMQEVIARGAKVLLITNKSTDEIFSENIWQKIEVENTDDDLLPFLITIPLQKLAYYTALKKGYDIDKPRNLAKSVTVE

SEQ ID NO: 125559 - protein, 308 aa, Unknown
  Bacterial polypetide isolated from the Sargasso Sea
SVTKNLGRVNELTKKLNLKTNQSNLGIAHTRWATHGIPSEKNAHPHHSKNIFVVHNGIIENHNDLRAYLKAEGIRFSTQTDTEVIGHLIRTFTEKGQSFEKAVFNTIKKLKGAYALGIIDKNNPEQIIGVRNQSPLVLGKGFEENFIASDIMALAPVTNKFTYLDDGQVALLSSHKTVVKNISTKIIRTKTHEVDSNAYTNDMAGFSHFMEKEIFEQPEAVKNSIEGRLSKNETQEGIFGAGFEEAVNNITNIQIVACGTSYHSARIFEFWSHKFLGINCRVDYGSEYQYQEPVKTDKTLLITISQSG

SEQ ID NO: 125560 - protein, 284 aa, Unknown
  Bacterial polypetide isolated from the Sargasso Sea
AMAGPDGKLSTPLSREDLAAIDGIVMLAAGTSHYAAMVARYWIESLARVPVSCEIASEYRYRKPVTGAFSCAVAISQSGESLDTLMAMRHAGEAGLRTIGLVNVSGSTIAREADMVMPTRAGPEIGVASTKAFTAQLTALVSFAVALAEAKGQISVERRDEIHAAIQGLPSMVGRTLGLFDDIRPLAHSLTAARSALYLGRDVLFPVALEGALKLKELSYIHAEGFASGEMKHGPIALIEEGLPVVALLAADEVMGKAASNLQEAAARGGRIILITEERAASTV

SEQ ID NO: 125561 - protein, 28 aa, Unknown
  Bacterial polypetide isolated from the Sargasso Sea
QLLAYHVALLKNCDIDKPRNLAKSVTVE

SEQ ID NO: 125562 - protein, 111 aa, Unknown
  Bacterial polypetide isolated from the Sargasso Sea
MLVIKHGPLALIEKDLPVIALAPFDKNFSKLLSNIQEIKARDGKIIMITDKLGSRKAKKFCDELIILPETNIITAAIIYSLPIQMIAYELGVLLKKNIDQPRNLAKSVTVE

SEQ ID NO: 125563 - protein, 71 aa, Unknown
  Bacterial polypetide isolated from the Sargasso Sea
AARKGKVVTIGPLGKTKITKDGGHIKIPKTLDLLNPIISVVPMQLISYYTALLKGTDVDKPRNLAKSVTVE

SEQ ID NO: 125564 - protein, 267 aa, Unknown
  Bacterial polypetide isolated from the Sargasso Sea
AAIAISQSGESLDTLKAMRYAATEKLSTIALVNVLTSSLGREADFVLPTMAGPEIGVASTKAFTAQLTVLITFAVLLAKARGKLSEKDADNLQYQIQLLPGLIGKALQSFDIIRPIAKKLSSRRSALFLGRGVLFPIALEGALKLKELSYIHAEGFASGEMKHGPIALIEEGLPVISLLAADNLMEKSINNLKEASARGGRIILVAEEKVARLVDFADEVIPVPDVNSLLSPILFTIPVQLLAYLTALEKGTDIDQPRNLAKSVTVE

SEQ ID NO: 125565 - protein, 152 aa, Unknown
  Bacterial polypetide isolated from the Sargasso Sea
YFVEKIADKKNALYLGRGVYFSIAQEGALKFKEITYIHAEAYPAGELKHGPLALVDEMTPVVALAPEDELVEKLVSNLEEVKSRGGTLYVFGNATSKIKIEKGKFMNMPDCGYYNAPIVYTIPLQILAYEVACSIGTDLDQPRNLAKSVTVE

SEQ ID NO: 125566 - protein, 231 aa, Unknown
  Bacterial polypetide isolated from the Sargasso Sea
SIARDSSFVLPIHCGPEVGVASTKAFLGQMLVLYILCLKLANERKEIDKKNFTSKVKSLLDLSKDVKKTLLTEDQIQLICKSFVDAKGSMFLGRGYSYPIALEGALKLKELAYVHAEGYPAGEMKHGPLALIEDGMPVVVLAPRDEYFKKTISNMQEVIARGAKVLLITNKSKDEVVHENIWQSIEVENTNDDLLPFLITIPLQKLAYHSALNKGYDIDKPRNLAKSVTVE

SEQ ID NO: 125567 - protein, 175 aa, Unknown
  Bacterial polypetide isolated from the Sargasso Sea
MCGIFGIFSNNPVINPILTGLSKLEYRGYDSSGISVLDNSNSIITVRAKGKLENLNKKIKTNELFGNIGIGHTRWATHGIPSTINAHPHVSENVSIVHNGIIENYSQLKKMLKNKGFIFKSQTDSEVIAHLLSYELRVNTPRNAIKNTLQYLEGAFAIAILFKNFNLLAGGRRGK

SEQ ID NO: 125568 - protein, 256 aa, Unknown
  Bacterial polypetide isolated from the Sargasso Sea
NKVNKKILKLSSNETSYDKGDFKHFMAKEIEEQPNTIKTGIKEYVDKTNSEINIYNFPWKISEINSIKLIGCGTAYHSCLMAKYWFEELTKLDVTIDIASEFRYRKNIFKKDTLYVFVSQSGETADTYAALDLCIKNNMKTCAVVNVIESSIARDANFVLPIHCGPEIGVASTKAFLGQILILYILALKLGSLRNEINPKMYKKKIKDLQNLPSLIEKSLLIDNDIQAISSTFNEAKGSMFLGRRFFVPDWHLKEL

SEQ ID NO: 125569 - protein, 296 aa, Unknown
  Bacterial polypetide isolated from the Sargasso Sea
FEEHTDLDVTIDIASEFRYRKLKFKNDCLYVFVSQSGETADTYAALDLCKKNKMKTCSIINVVESSIARDSDLVLPIHCGPEIGVASTKAFIGQMLVLYMLCIKISFDQKKINKKKYQEKIKNLLSLSNLCKKTLLIDSKIQKTSKAFIEAKGSMFLGRGYSFPIALEGALKLKELAYVHAEGYPAGEMKHGPLALIEEGMPVVVLAPRDEYYKKTVSNMQEVISRGAKVLLITNKSKNEVQSENIWETIEVENLSEDLLPFLTTIPLQKLAYYSALQKGYDIDKPRNLAKSVTVE

SEQ ID NO: 125570 - protein, 310 aa, Unknown
  Bacterial polypetide isolated from the Sargasso Sea
MCGVVAVIGKRNANQLVIEGLKKLEYRGYDSAGIVSEVNGTFETVKSEGKLIRLIEKINQKSSSKLYSENSVALGHTRWATHGNISVENAHPLTSEDKVAVVHNGIIENYEKLKKNLISEGYVFKSQTDTEVLPHLFMKYIKLGNDFLQAGRFVLQDIKGAFAFVAISLDFPNQLFVSRNSSPLAIGLGEKSNFVGSDAHSIDHLTQKIIYLEDGDHALIKLDELEIYNKNEKKVNRKVINIKAEIGLVTKGGYKHFMEKEIFEQPSVIPQASSSLIKSNSEINIDLNKLGFKDKNTLLIAAAGTSYYAA

SEQ ID NO: 125571 - protein, 311 aa, Unknown
  Bacterial polypetide isolated from the Sargasso Sea
DKPTTIKNCINEYIDSVKKNINIINFPITPKNINKIILIGCGTAYNSCLTAKYWFEELTTIDVEIDIASEFRYRKLKFNSNNLYIFVSQSGETADTAAALDICKKNDVKTCSIVNVIESTIARNSDWVLPIHAGTEIGVASTKAFLGQLTVLYILCLKLAILRKDIGQKIYERHINNLKKLPEAIKDSLDAENNLQLMAKEFLSAKGSMFLGRGSSFPIALEGALKLKELSYLHAEGYPAGEMKHGPLALIEEGLPVIVIAPKDKYFEKTISNMQEVIARGGKILFITDNKKESLNENIRFGLRVPYIDNL

SEQ ID NO: 125572 - protein, 278 aa, Unknown
  Bacterial polypetide isolated from the Sargasso Sea
YRKNRFKKDTLYVFVSQSGETADTYAALDICIKNRMKTCAVVNVIESSIARDSEFVLPIHCGTEIGVASTKAFLGQILILYILALKLGLLKQDIEKKVFTKKIKDLQNLPKLVEKTLSIDNKIQSICGTFNEAKGSMFLGRGFSFPIALEGALKLKELSYVHAEGYPAGEMKHGPLALIEEGMPVVVLAPRDNYYKKTISNMQEVIARGAKVLLVTNKSSDEVVSENIWEKIEVESANEDLLPFLLTIPLQKLAYYSALKKGFDIDKPRNLAKSVTVE

SEQ ID NO: 125573 - protein, 159 aa, Unknown
  Bacterial polypetide isolated from the Sargasso Sea
MCGIVGAVAERPVNKILVEGLKRLEYRGYDSAGVALLEGNTLNTVKAVGKVVNLESALEQAGVSGHTGIAHTRWATHGGVTEANAHPHVSSNQLALVHNGIIENHASLRAALKGDGYEFLSDTDTEVMVHLIHQLRQQHTTLLASVQAAVKQFEGAFGT

SEQ ID NO: 125574 - protein, 42 aa, Unknown
  Bacterial polypetide isolated from the Sargasso Sea
LDNLLSPILLTIPIQLLAYHVALLKGCDIDKPRNLAKSVTVE

SEQ ID NO: 125575 - protein, 210 aa, Unknown
  Bacterial polypetide isolated from the Sargasso Sea
STKAFLGQILVLYILALKIGSISGQIDKKNYQEKIKNLKNLPSLIEKTLLLDNDIQAISSTFNEAKGSMFLGRGFSFPIALEGALKLKELSYVHAEGYPAGEMKHGPLALIEEGMPVVVLAPRDSYYKKTISNMQEVIARGAKVLLITNKSKDEIVSENIWETIEVENTNDDLLPFLLTVPLQKLAYYSALKKGYDIDKPRNLAKSVTVE

SEQ ID NO: 125576 - protein, 294 aa, Unknown
  Bacterial polypetide isolated from the Sargasso Sea
VWWQNIGFENLARIPTEVDIASEFRYRNPVLIKNGAALFISQSGESLDTLMAQRYAKENGQNIISLVNVPESTIARESDTVLKTQAGPEISVASTKAFTTQLITLLTTAVHWGELRGVLSDKEAKEIIDNLSNLPSLLAKVLSDELDWIGASSELALSQDVIYLGRGVNFPIALEGALKLKEISYIHAEGYAAGEMKHGPIALLEKGVPVVMVAPHDEWFEKTSSNLKEALARGARVVLLSDDKGIEKLHEAATWIFRMPRVHPMLTPILYSLPVQLLAYHTAKKKGTEIDQPR

SEQ ID NO: 125577 - protein, 267 aa, Unknown
  Bacterial polypetide isolated from the Sargasso Sea
THGLPNNINAHPHCSGNEEIALVHNGIIENYAILKEELSSRGHVFKSETDTEVLVHLIEDIKKENNCNLFDAVRIALNEVVGAYAIVVIDNNNPEELIAARKSSPLVIGLGEDEYFLASDATPIVEYTKNVVYLDDGEIARISLAKGLSLKTIQNKNKTPYIQELEMHLEALEKGGYEHFMLKEIYEQPQSIKDSMRGRLKANKSLVGLGGIKDFDDKILAANRLIFVACGTSWHAGLVGEYLFEEIARIPVEVEYASEFRYRNPII

SEQ ID NO: 125578 - protein, 250 aa, Unknown
  Bacterial polypetide isolated from the Sargasso Sea
MCGIIGLVSKKEVSSTLVEGLKRLEYRGYDSSGIATISNEKIERVRSKGNLKFLEEKLLSTSLPGNIGIGHTRWATHGTPEEKNAHPHITDKVAVVHNGIIENNNQLRNQLIEAGTKFASDTDTEVVCHIITSYINSGLSAYDSIRASINDIRGTYAFGVLIASEPNKLFAVRGGSPIAIGSADEENYIGSDTYSLSAYSDNITYLKDGDIAIIENKSYEIFDQSNSLVEREKQSIIESVTLSEKGIFKH

SEQ ID NO: 125579 - protein, 153 aa, Unknown
  Bacterial polypetide isolated from the Sargasso Sea
ASKAFIKAKGSMFLGRGYSFPIALEGALKLKELAYVHAEGYPAGEMKHGPLALIEEGMPVVVLAPRDNHYKKTISNMQEVIARGAKVLLVTNKSKDEIQSENIWETIEVENLIEDLLPFLTAIPLQKLAYYSALQNGYDIDKPRNLAKSVTVE

SEQ ID NO: 125580 - protein, 302 aa, Unknown
  Bacterial polypetide isolated from the Sargasso Sea
NGIKEYLDNSNNNINIYNFPWKTNEISAITLIGCGTAYHSCLMAKYWFEELTSLDVNIDIASEFRYRKNRFKKETLYVFVSQSGETADTYAALDLCNQNNMKTCSVVNVIESSIARESKFVLPIHCGTEIGVASTKAFIGQMLILYILTLKLGLMRKDIKKEIFLEKIIDLKKLPELVKQTLLTDNKIQTISSTFNEAKGSMFLGRGFSYPIALEGALKLKELSYVHAEGYPAGEMKHGPLALIEEGMPVVVLAPRDNYYKKTISNMQEVIARGAKVLLITNKSKDEVISEKYLGNYRSRNY

SEQ ID NO: 125581 - protein, 236 aa, Unknown
  Bacterial polypetide isolated from the Sargasso Sea
MGGVTEPNAHPHICNGTLALVCNGIVENHETLRDAQRAAGLSFTSETDTEVVVHQVYLHLQQGLDLADAVRATMAELHGSFALAVVHAGEPGRLVAARQGPPLLLGQSGEENFVASDINALLPVTREYQVLENGDVADIRGPDCLIRDQAGQIVERTVHSSTQSGESADLGEYRHFMQKEIHEQPRAVADTLEGRLLGDHVLEESFGSRAQEIFDATRQVQIIACGTSYHAGLVAQ

SEQ ID NO: 125582 - protein, 299 aa, Unknown
  Bacterial polypetide isolated from the Sargasso Sea
MQLTGFSAISELPTQIDYASEYRYRNPHVDDDSLLVTISQSGETADTLAALRYAQEKDYLSTLCICNVPTSSLARESEYSIFTNAGPEIGVASTKAFTTQLTALMLLALSLAKSRGKNPKLRTRVITALRSLPETVEETLKLKDIILEIAPQIANKDNALFLGRGIFYPIAKEGALKLKEISYIHAEAYPAGELKHGPLALIDEEIPVIALAPESEIAEKLVSNLEEVKARGGTLYVFSDPSISMDLKSGRLINMPKCDFLLTPIIYTIPLQILSYEVALLRGTDIDQPRNLAKSVTVE

SEQ ID NO: 125583 - protein, 284 aa, Unknown
  Bacterial polypetide isolated from the Sargasso Sea
RWATHGVASTSNAHPHSTDLVALVHNGIIENFLELRAKLERQKYRFESETDTEVILALIDGYLRKGMSPAEATRAMLKQVEGAFALAIIFTGHENLMIGARRGCPLVVGYGNDQLFLGSDALALVPLTKRISYLEEGDWVELQDNIVTVHARTGEVVNRPIREIDVANSAVEKGNHAHFMLKEIYEQPVVIGDCLQSLFNPVKRSINLPQLNIDFSDYERVSVVACGTSYYAGLVARYWFESLSGLPVDIDVASEYRYRAVPRQERTLGLFISQSGETADTLAA

SEQ ID NO: 125584 - protein, 294 aa, Unknown
  Bacterial polypetide isolated from the Sargasso Sea
LNSLRKLEYRGYDSAGVATLNSGHIQEVKCEGRVDNLEKNIIKNKLLGNVGIGHVRWATHGIPSTLNAHPHSSENVSVVHNGIIENSTLLKKFLVKKGHRFKSQTDTEVIVHLITEYLKKNNLIDTLTKVLKKLHGSYALGIIFKDEPDLIVGARRGSPLAVGYGPGENYLGSDSYALKSMTNKITYLDDGEFCIIKKTEVSFFNEQGKKINKKILSLTTNEQNYDKGDYKHFMAKEIDEQPLTIKNCINEYIDKKNNEISIFNFPWKIKDISSITLIGCGTAYHSCLIAKILV

SEQ ID NO: 125585 - protein, 272 aa, Unknown
  Bacterial polypetide isolated from the Sargasso Sea
KISYLDDGDVCILSKDEIKFYNSKKEKINKEIFTLSEDKSSVSKGNFKNFMIKEIFEQPTTAKTCLKEYIDKIREEINFYNLPIDPKKINKIVLIGCGTAYHSCLIAKYWLEEFTSLNVETDIASEFRYRRVRFNRENLYIFISQSGETADTFAALDLCKKENVKTCSIVNVVESTIARYSDCVMPIHAGPEIGVASTKAFLGQMLVLYLLSLKISEIRKDIETKEYKRKINELKKIPELISDSLKQEEKIQLIAKDIYKSKGSMFLGRRFV

SEQ ID NO: 125586 - protein, 129 aa, Unknown
  Bacterial polypetide isolated from the Sargasso Sea
MCGIIGITGNTEVQDHIIDSLKRLEYRGYDSSGIATVFEDKLVVEKAEGKLKNLNEKLKRKSTKGNIGIGHTRWATHGNVSEVNAHPHVSGRVAIVHNGIIENYIEIKDQLIKNGREFISSTDSEVIAH

SEQ ID NO: 125587 - protein, 78 aa, Unknown
  Bacterial polypetide isolated from the Sargasso Sea
MCGIVSYIGPKDPVPILLKGLRRLEYRGYDSAGVALLNKNNLQYLKKAGKVSYLESVIDDSVINGFCGIAHTRWATHG

SEQ ID NO: 125588 - protein, 152 aa, Unknown
  Bacterial polypetide isolated from the Sargasso Sea
AKNFSNKHHALFLGRGIQNPVAMEGALKLKEISYIHAEAYAAGELKHGPLALVDEDMPVVAVAPDDRLLEKLKSNLQEVKARGGELYVFTDPRVTFVDDEVTHNSVMPVAIKEFQGPILYSIPLQLLAYHVAVIKGTDIDQPRNLAKSVTVE

SEQ ID NO: 125589 - protein, 105 aa, Unknown
  Bacterial polypetide isolated from the Sargasso Sea
MCGIIGIASNKPVSTNIINSLKKLEYRGYDSAGLATLDNNLIDEKKCSGRVDELEKILFKNPSKGNIGIGHVRWATHGVPNIINAHPHSSEEVSVVHNGIIENSD

SEQ ID NO: 125590 - protein, 320 aa, Unknown
  Bacterial polypetide isolated from the Sargasso Sea
KPKAKSGIAHTRWATHGAPSEENAHPHGSHNEIYIVHNGIIENHDEIREKLKEKGYKIASETDSELIAHLIHLNKIDASSTLEALIKATKELKGAFSIAAISSQEKGKIYAAKQKSPLLIGKGIEENLVASDPLAIANITEKFYLLEDGDFAEITKNDIKIFNSNGEPVQREETKIDATPTSTSKGNYTHFMEKEIYEQPDALGNTINGRLGENDVLDNIFGLGSSDAFKKVKRIQFVACGTSLHAAKTARKWFEEICQIPCYIDFASEYRYRNPIVEDHTLFVTISPSGETADTLAALEYARAEKYVGIVTICNVQTST

SEQ ID NO: 125591 - protein, 304 aa, Unknown
  Bacterial polypetide isolated from the Sargasso Sea
LINQNDLPGKIGIGHTRWATHGIPSEDNAHPHHIGSVVGVHNGIIENFREIKEELSQKGYQFYSDTDTEVIIQLCSYYIEQGFSNKDAFLRTINRLKGAFAICLMFKDDDKRLYVTKRSAPLVIGYGKSDIYVGSDAVSLSNLINKVIFLDEDDVAVISKQETEIFDKTGQKIERKKKSVELNSEAINKGNYQHFMLKEIYEQPEVFTYATSSFINFKQQKIEMLHEFNEFVNIDRIIFVACGTAFYACAVAKYWFEKYVKVPVEIDVASEFRYRDNSFGKNEYAIFVSQSGETADTLAALRKV

SEQ ID NO: 125592 - protein, 307 aa, Unknown
  Bacterial polypetide isolated from the Sargasso Sea
ENYLSLKDFLAKEGYSFSSETDSELIAHLLDYFLTTNISMLDAMYLMIEKLEGAYAIAAIDRNDESNIVIARNKSPLLIGLGEDELLAASDPLAIGQLTNQFIFLEDGDVANISADSYQIYDSLKNKIKREISEIDISSEASSKGEYKHFMEKEIFEQPVAVLNTIDGRVGGDDVLENIFGIGSSDVFSKVKRIQIVACGTSLHAARVAANWFSAISELPTQTDYASEYRYRNPHVDEDTLFVTISQSGETADTLAALKYAKEKDFLSTVTICNVPTSTIARESEFSIFTNAGPEIGVASTKAFTTQ

SEQ ID NO: 125593 - protein, 117 aa, Unknown
  Bacterial polypetide isolated from the Sargasso Sea
HAEAYASGELKHGPIALIDKTMPVVVMAPCDALFDKTVSNMQEVMARGGKVMLISDRAGAEAANDGVWTQITLPDVDPVLSPILYALPAQLLAYHTAVAKGTDADQPRNLAKSVTVE

SEQ ID NO: 125594 - protein, 236 aa, Unknown
  Bacterial polypetide isolated from the Sargasso Sea
EDTLFVTISQSGETADTLAALKYAKEKGFLATLTICNVPTSTIARESEFSIFTNAGPEIGVASTKAFTTQLVALMLLALSLAKSRSRNPKLRGRVISALRQLPDIVSETLKLKDSIVKIAPEIASKDNALFLGRGIFYPIAKEGALKLKEISYIHAEAYPAGELKHGPLALIDENMPVIALCPESEIAEKLVSNLEEVKARGGTIYVFSDPSITLELKSGKLINMPKCDFLLTPII

SEQ ID NO: 125595 - protein, 210 aa, Unknown
  Bacterial polypetide isolated from the Sargasso Sea
CFTKAFLGQMLVLYLLSLKISEIRKDIDHKQYKSKINELKKLPKLILDSLKEEEKIQLIAKDIYKSKGSMFLGRGSSFPIALEGALKLKELSYLHAEGYPAGEMKHGPLALIEDGLPVVVIAPKDKYFEKTLSNMQEVIARGGKVLLLTNSTSKVISENIRFQINLPDSHISLTPFLFTIPLQLLSYHVALFKKCDIDKPRNLAKSVTVE

SEQ ID NO: 125596 - protein, 210 aa, Unknown
  Bacterial polypetide isolated from the Sargasso Sea
MCGIIGINSNKPVSATIINSLKKLEYRGYDSAGVATLFNGLINEVKSEGRVENLEKNSLVQSMEGTIGIGHVRWATHGLPNSINAHPHSSQNVSVVHNGIIENSTILKKFLIGKGHKFKSQTDTEVIVHLITENLKTENIVNSIQKTLKSLHGSFALGIIFKDQPDLIVGARRGSPLAVGYGPNENYLGSDSYALKSMTNKITYLNDGEF

SEQ ID NO: 125597 - protein, 199 aa, Unknown
  Bacterial polypetide isolated from the Sargasso Sea
MCGIVAVTGYKKALPLLMNGLEKLEYRGYDSAGIAIVNPETKNIICNKAEGKLKNLIKNLNDKNMPGTVGIGHTRWATHGKPEIKNAHPHTNSSGTIAVVQNGIIENFQDLKNKLQKEGVIFNSDTDTEVIPHLIQRELNTLSKLNLDKNGSTLLVAVRNVISDLEGSYALAVLWADAPTALVVARRQAPLIIGLGKGE

SEQ ID NO: 125598 - protein, 63 aa, Unknown
  Bacterial polypetide isolated from the Sargasso Sea
ITNNNDSVISENVRFTINLPSIEKSLSPFLSTIPLQLLAYHVALLKKCDIDKPRNLAKSVTVE

SEQ ID NO: 125599 - protein, 192 aa, Unknown
  Bacterial polypetide isolated from the Sargasso Sea
KFNNITTYQIKKICLNIQALPSAIAKMLNMENEIKLVAQNIKNAKSIIFLGRGLLYPLALEGALKLKEISYIHAEGFAAGEMKHGPIALIEDQVPVIMFLVSDGNEDKAISNLQEAYSRGAKIILIADKHCIQKASFAHYKIEIPNFETDFKSLLSPFLMAIPAQLLAYHVANERGTDVDQPRNLAKSVTVE

SEQ ID NO: 125600 - protein, 271 aa, Unknown
  Bacterial polypetide isolated from the Sargasso Sea
GLKINKKILYLSSNEQIYDKGDYKHFMAKEIEEQPTTIKNCINEYIDRINSSINIFNFPWKTNEISSITLIGCGTAYHSCLMAKYWFEQLTSINVSVDIASEFRYRKNRFNNETLYIFVSQSGETADTYAALDLCNKNKMKTCSVVNVVESSIARESKFVLPIHCGPEIGVASTKAFLGQMLVLYIFCLKIGKMRNDINKRVYLEKIKSLFNLSKLTKKSLETESKIESICNSFVNIKGSMFLGRGYSFPIALEGALKLKELAYVHAEGYP

SEQ ID NO: 125601 - protein, 199 aa, Unknown
  Bacterial polypetide isolated from the Sargasso Sea
TALMLLVFILGKKFEITDDLENSLCTQLKSLPEKIKSTLALDDQIAKLAKVFSDKEHALFLGRGSHFPIAREGALKLKEISYIHAEAYPAGELKHGPLAIVDENMPVVAVAPNNVVLEKLKSNLEEVKARGGKLYIFADKKAGFKSDEISQVFEIDAPMNPVAPILFTIPLQLLAYHCALIKGTNVDMPRNLAKSVTVE

SEQ ID NO: 125602 - protein, 50 aa, Unknown
  Bacterial polypetide isolated from the Sargasso Sea
TQVISMPACGQFIAPLVYVIPMQLLSYYVAIHKKTNIDQPRNLAKSVTVE

SEQ ID NO: 125603 - protein, 120 aa, Unknown
  Bacterial polypetide isolated from the Sargasso Sea
FPTYIAEAYPAGELKHGPLALVDSEMPVVAVAPNDDLLAKLQSNLEEVRARGGKLYVFGHSAAHQEDESITKFIELPEVPELIAPLIYSIPLQLLAYHVAILKGTDIDQPRNLAKSVTVE

SEQ ID NO: 125604 - protein, 245 aa, Unknown
  Bacterial polypetide isolated from the Sargasso Sea
MCGIVGYTGHNAASEIIIDSLKKLEYRGYDSAGLTLHGKKLVTTKKEGPIANLEEVLEKSSATMGIGHTRWATHGIPSDANAHPHMDESEKIAVVHNGTIDNYLTIREQLEAEGHKFLSDSDTEVLPILLSNNYNGNLVEAMSKILDQIEGIFTIAAIHLDNPDEIVSVRYETPLVIGLGNDENYVASDVYAILKYTQQIIYPKDYEIVRVTSESIEVFDRSLSKLDYEIETVEEYTEVAEKGGS

SEQ ID NO: 125605 - protein, 308 aa, Unknown
  Bacterial polypetide isolated from the Sargasso Sea
KDINIFNFPFKEKEINSITLIGCGTAYHSCLITKYWFEQLTSIDVNIDIASEFRYRKNKFKKDCLYVFVSQSGETADTYAALDLCNKNKMKTCSVVNVIESSIARDSKFVLPIHCGPEIGVASTKAFLGQMLVLYILCLKLAQKRKDINKKDYLIKIKNLLNLAELVKHSLATEDKIQSICNSFVDAKGSMFLGRGYSFPIALEGALKLKELAYVHAEGYPAGEMKHGPLALIEDGMPVVVIAPRDQHYKKTISNMQEVIARGAKVLLITNKSKDEVYSENIWETIEVENTADDLFPFLITIPLQKLA

SEQ ID NO: 125606 - protein, 273 aa, Unknown
  Bacterial polypetide isolated from the Sargasso Sea
YFDSIYLTKEKLEGAYAIAILDIEDENNIYVARCKSPLLVGQGENENFAASDPLAIGKLANEFIFLEDEDVAVISKNRIQIYDEQKQPIHREVTEIDSEYQTISKGEYTHFMEKEIYEQPQAILNTLDGRVGGDDVRDDIFGIGSSELFKKVKRIQIVACGTSLHAGRVAANWLSAIAGIPTQVDYASEYRYRNPHVDEDSLLVTISQSGETADTIAALRYAKEKDYLSTITICNVPTSSLARESDFFLYTNAGPEVGVASTKAFSTQLTGLM

SEQ ID NO: 125607 - protein, 251 aa, Unknown
  Bacterial polypetide isolated from the Sargasso Sea
ENYLGSDSYALKSMTNKISYLDDGEFCFVKKDHIEFFDSEGTKINKKVMNLSKDELNYDKGDYKYFMEKEIDEQPSTINNCINEYVDKFNNQINIYNFPWKLSCIKSVMLIGCGTAFHSCLIAKYWMEQNTNLDVNVDIASEFRYRKVKFKKDCLYIFVSQSGETADTFAALDLCKKNKMKTCAVVNVIESSIAREADLVLPIYCGQEIGVASTKAFMGQMLVLYILSTKISFDQKCIDKKEYKLKVKNIL

SEQ ID NO: 125608 - protein, 288 aa, Unknown
  Bacterial polypetide isolated from the Sargasso Sea
MCGIVAYKGHKNCYPILLNGLHKLEYRGYDSAGVACLTEDGKIVVTKRSGKVKQLEDRLKKSNLIESCNGSGIAHTRWATHGKPNQLNAHPHKDQSGNIVLVHNGIIENYDPIKKFLKSKNVKFKSETDTEVLVQLIGYFFNKGKMNFEQSVRAALQRVDGAYAIVVLNRKEPDTMIAARKGSPLVLGLKDKEFFIGSDISPIIKHTQQIIYLEDAQMAIVQGDKYKITSINKDVSLPTKVEKIDYKIDDYDKGKFKYFMHKEIHEQVDTIRNTVTGRTNRDGILLHG

SEQ ID NO: 125609 - protein, 285 aa, Unknown
  Bacterial polypetide isolated from the Sargasso Sea
AVGYSNNENYLGSDSYALKAMTNKISYLDDGEICKITKDSVEFFDVSKNKINKKILVLSEDKNEAKLGDYKNFMSKEIFEQPTTIKNCLNEYIDKIRNDINLYDFPIDPKKINKIFLVGCGTAYHSCQVAKYWIEELTDLNVETEVASEFRYRKIRFNPNTLYIFVSQSGETADTAAALEIAKKNKMKTCSVINVVESSIARNSDWVVPIHAGPEIGVASTKAFIGQMLVLYIMSLKISKIRGNIDNKNYIEKIKNLKNLPQGIENSLKTEELIQIFAKDFLSAK

SEQ ID NO: 125610 - protein, 101 aa, Unknown
  Bacterial polypetide isolated from the Sargasso Sea
PIALLDKKVPVISIASPGEVFDKVISNAQEAKARDSYLIGIAPECNGTEIFDYLMKVPSSNELISPLLNILPLQLLSYHIAAHRGLDVDQPRNLAKSVTVE

SEQ ID NO: 125611 - protein, 316 aa, Unknown
  Bacterial polypetide isolated from the Sargasso Sea
YSLGNYCNEVTYLKDGDIAIIKNDTFEIFDNQNEFINRKSQIIDKTVTLAEKGVFKHFMSKEIHEQPSVIQDSISHYINNEDLTVNLPKFPFNITNLKNITLVACGSSYYSGLVAREWFEKLARVKVDVEIASEFRYREAPMDSSGLTVFISQSGETADTLAALRHCKKLNQKTISIVNVPNSSMCRNSDSSLKIFAGPEIGVASTKAFTCQLVVLASLAIHIGRTNGNLSDDDENNYVKSLLDVPRLISNVLDQEEDLIKIVKELNPIKNALYLGRGQMYPVALEGALKLKEISYIHAEGYPAGEMKHGPIALLE

SEQ ID NO: 125612 - protein, 312 aa, Unknown
  Bacterial polypetide isolated from the Sargasso Sea
KTNIKFNEFYNIILVACGTAYHSCMVAKYWLEEMTDFNVSIDIASEYRYRRSKVDKNSLAIVVSQSGETMDTLKCLNKFKKNNIPTISVVNVINSSIARLSDFILPTLAGPEIGVASTKAFTSQLSVLALFVLNLQQEYRNINKIFFNSIFNIHSSVKEILRKEKEFKKIAEKLVNTKSIFYIGRGVMYPIALEGALKLKEITYKHCEGYAAGELKHGPLALIENNVPVIVLAPCDENYSKLLSNIQEIKARGGRIIMITDKEGAKKGKKYCDQVTIIPKTNFLTSPIIYTLPIQLIAYYLAVSLGTDVDQP

SEQ ID NO: 125613 - protein, 157 aa, Unknown
  Bacterial polypetide isolated from the Sargasso Sea
TYAALEKCKKRGLKTCGIVNVVESSIARLSDFVLPIHAGPEIGVASTKAFIGQMMVLLLLTLKISKERNDLNENNYKKLISEIKILPSLIKKTLSKQKEIQEIARDFINAKGTMYLGRGYSYPIAMEGALKLKELSYIHAEGYAAGEMKHGPLALIE

SEQ ID NO: 125614 - protein, 130 aa, Unknown
  Bacterial polypetide isolated from the Sargasso Sea
MCGIIGITSAKPVSSSIINSLKKLEYRGYDSAGIATLLDGKINEVKCEGRVKALETNISKIKMLGTVGIGHVRWATHGVPSTLNAHPHSSESVSVVHNGIIENSTLLKKFLVEKGHKFKSQTDTEVIVHL

SEQ ID NO: 125615 - protein, 277 aa, Unknown
  Bacterial polypetide isolated from the Sargasso Sea
LEQAFGIESKQVFDQADAITIVACGTSFYAASVARYWIEDLVGIPCNVEIASEFRYRKSVVLPNSLFVTISQSGETADTLAALRLSKAIGFFATLTICNVSTSSMVRESDLCLLLQIGSEIGVASTKAFSAQLVNLLLLAILLGRRKGLKQEREKELVESIHSLPLLLTKVLGLNEDIASVARRFVEKTNALFLGRGVMYPVALEGALKLKEISYVHAEGYAAGELKHGPLALVDKNMPIVAIAPRDELIEKLKSNLKEVEARGGELIVFAEDEKSF

SEQ ID NO: 125616 - protein, 108 aa, Unknown
  Bacterial polypetide isolated from the Sargasso Sea
MKHGPLALIEEGMPVVVLAPRDSYYKKTISNMQEVVARGAKVLLITNKSTDEVLSENIWETIEVESTNDDLLPFLLTIPLQKLAYYSALKKGYDIDKPRNLAKSVTVE

SEQ ID NO: 125617 - protein, 212 aa, Unknown
  Bacterial polypetide isolated from the Sargasso Sea
MLEKLLVQGLHKMEYRGYDSAGIALHQTDQIAHLRTLGKVKLLEEKMIAEKPKSKLGIAHTRWATHGEPSEENAHPHMSNERVYIVHNGIIENYLDLRDFLKKEGYSFSSQTDSELIAHLLEYFLNKGNSMLDSMYLTKEKLNGAYAIAAIDKEDDQNIIIARSKSPLLIGIGMDEFLAASDPLAIGQLTNEFIFLEDRDVAELSSERYTIF

SEQ ID NO: 125618 - protein, 309 aa, Unknown
  Bacterial polypetide isolated from the Sargasso Sea
SVYCYYSVVNSILEGLTKLEYRGYDSSGISILDKNKKLKTIRSKGKLINLKNKLKKINVNGKIGIGHTRWATHGVPSTLNAHPHTSDKVSIVHNGIIENYSILKKELQKKGYKFKSQTDSEVIAHLLDSELTFEEPVIAIRKTLAKLEGAFAIAIIFKDLKLLAGARKGSPLAIGISDEATFIGSDSVALAPFTKKIIFLEEGDSVIIKDNSFDIFNENFRKIKRTISYSSYSKNNFDKGNFKHFMEKEIFEQPHIIGDSLSRFLDPINKTINIPQLKVDWAKISKINFIACGTSYFACQVACYWFEKM

SEQ ID NO: 125619 - protein, 316 aa, Unknown
  Bacterial polypetide isolated from the Sargasso Sea
LDSEPVQREKTIIDTSVKEASKDGYKHFMEKEIYEQPKAIANAIEGRTTDGEVLDNIFGLGSSESFKGVKRIQFVACGTSLHAAKTARKWFEELCETPCYIDFASEYRYRNPLVEEDTLFVCISQSGETADTMAALNYAKEEKYLGIVTICNVPTSTMARESDWKIFTNAGPEIGVASTKAFTTQLAALMLLACSISKSKGINGDKRAEAIKDLVNTPALVKEAFGLKKHIDDIVEKIADKKNALYLGRGVYFSIAQEGALKFKEITYIHAEAYPAGELKHGPLALVDEMTPVVALAPEDELVEKLVSNLEEVKSR

SEQ ID NO: 125620 - protein, 179 aa, Unknown
  Bacterial polypetide isolated from the Sargasso Sea
MCGIIGVASSKPSVDKLLIGLLRQEYRGYDSAGLAIFDETEQIQVFKSTGKVAELQNSIQENPVNGNTGIAHTRWATHGLPTKTNAHPHHSNNNIFVIHNGIIENHQEIRTTLKALGYVFESETDTEVIAHLIHAKMNENKLSLIEALRAAVKDLKGAYAIGAVCESEPGILASARKGS

SEQ ID NO: 125621 - protein, 40 aa, Unknown
  Bacterial polypetide isolated from the Sargasso Sea
LAFTPFIFTVPLQLLSYHVALFKKCDIDKPRNLAKSVTVE

SEQ ID NO: 125622 - protein, 294 aa, Unknown
  Bacterial polypetide isolated from the Sargasso Sea
GPNENYLGSDSYALKSMTNKITYLDDNEFCIIKKDQVFFFNEYGKKINKKILELSSNEASYEKGDFKHFMAKEIEEQPTTVKTGIKEYVDKTNSEINIYNFPWKISEINSITLIGCGTAYHSCLMAKYWFEELTQLNVSIDIASEFRYRKNRFKKDTLYIFVSQSGETADTYAALDLCNKNNMKTCAVVNVIESSIARDANFVLPIHCGPEIGVASTKAFLGQILILYILALRLGSLRNEINKENYKEKIKDLQKLPSLIEKSLLIDNDIQAISSTFNEAKGSMFLGRRFFIPP

SEQ ID NO: 125623 - protein, 283 aa, Unknown
  Bacterial polypetide isolated from the Sargasso Sea
MNLFKSIVLIGCGTAYHSCLVAKYWIEQNTSLDVSIDIASEFRYRKVRFKNDCLYVFVSQSGETADTYAALELCKKNKMKTCAVVNVVESSIAREADLVLPIYCGQEIGVASTKAFLGQMLVLYILSIKISFDQKFINKHEYQSKIKNLLLLSNSAKKTLKLDHKILNIGKVFAHAKGCMFLGRGYSFPIALEGALKLKELAYVHAEGYPAGEMKHGPLALIEEGMPVVVIAPRDDHYKKTMSNMQEVIARGAKVLLITTKSKDEITSENIWEIIEVDQLNNE

SEQ ID NO: 125624 - protein, 168 aa, Unknown
  Bacterial polypetide isolated from the Sargasso Sea
MCGIIAAASTRNVGKLLVQGLHRMEYRGYDSAGIALHQLNGVAHLRTLGKVQLLEDKMIEEKPRSKLGIAHTRWATHGEPSETNAHPHKSNDEVFIVHNGIIENHLELKAELEKEGYSFASQTDSEIIAHLLDFNLKQGMTMIEAMFASKEKLDGAYAIAAMHRDEKA

SEQ ID NO: 125625 - protein, 267 aa, Unknown
  Bacterial polypetide isolated from the Sargasso Sea
MCGIIAAASNRNVGKLLVQGLHKMEYRGYDSAGIALHQTDQIAHLRTLGKVKLLEEKMIAEKPKSKLGIAHTRWATHGEPSEENAHPHMSNERVYIVHNGIIENYLDLKDFLKKEGYSFSSQTDSELIAHLLEYFLNKGNNMLDSMYLTKEKLDGAYAIAAIDKEDDQNIIIARSKSPLLIGIGMDEFLAASDPLAIGQLTNEFIFLEDGDVAELSSESYTIFDESKKKVEREISQIDISSQATSKGEYRHFMEKEIYEQPEAILRL

SEQ ID NO: 125626 - protein, 157 aa, Unknown
  Bacterial polypetide isolated from the Sargasso Sea
MCGIVGIVSNKSVSSSIINALKKLEYRGYDSAGISTINNKGQINEQKCSGRVENLEKILFQNPSNGELGIGHVRWATHGIPNKINAHPHSSDVVSVVHNGIIENSDKLRKDYENKGYTFKSQTDTEVITVILTDFLKTHNLIDCIHKTLEKLEGSFA

SEQ ID NO: 125627 - protein, 293 aa, Unknown
  Bacterial polypetide isolated from the Sargasso Sea
CLVAKYYFEQHARLPVECDMASEFRYRDPVLDNKALYIFVSQSGETADTKAALDYCKDAKVRTLSIVNVMNSSIARESDYCLYTKAGAEIGVASTKAFTAQISVLLSMALHCGTKNNNVTIEQNREICKEIMQAPQILEKAIKRSYELKETAKAIIDSKGVMYLGRGTAFPLALEGALKFKEISYIHAEGYPAGEMKHGPLALIEKDLPVVCIVPPGPLFHKTVSNIQEVIARGGRILMITDDESLESSSENIWKIFRLPKTPKSIEAIVYSVPIHMLAYYTAVELGNDVDQP

SEQ ID NO: 125628 - protein, 93 aa, Unknown
  Bacterial polypetide isolated from the Sargasso Sea
MDPVSVVHNGIIENSTILKKILEKKGYKFKSQTDTEVIAHLVTDYLKKDNLKNTIIKVLKKLHGSFALGIIFKDHPDLIVGARRGSPLAVGYG

SEQ ID NO: 125629 - protein, 126 aa, Unknown
  Bacterial polypetide isolated from the Sargasso Sea
MCGIIGINSSRPVSSTIISSLKKLEYRGYDSAGIATLSNNEINEVKSEGRVDNLENNLLVQKMEGTIGIGHVRWATHGLPNSINAHPHSSQNVSVVHNGIIENSTLLKKFLVSKGHKFKSQTDTEV

SEQ ID NO: 125630 - protein, 78 aa, Unknown
  Bacterial polypetide isolated from the Sargasso Sea
SNVEEVRARGGLMYVFADKDAEFESDDTMKVIPVPHCDEFMAPLIYTIPLQLLSYHVALIKGTDVDQPRNLAKSVTVE

SEQ ID NO: 125631 - protein, 284 aa, Unknown
  Bacterial polypetide isolated from the Sargasso Sea
MTNKISYLDDGDFCILFKEKVEFYNSDKKKINKEILELPYEDNTAEKGDYRDFMSKEINEQSYTTKKCINEYLNTSKNEINIFNLPLEAMKIRKIRLIGCGTAYHSCLMAKYWIEEFTSLDVDADIASEFRYRKIKLDPNDLYIFVSQSGETADTLAALEKCKKNNLKTCGIVNVLESSIARNSDLVLPIHAGPEIGVASTKAFIGQLTVLYLLTLKISNDRSDISYKEYSKLILDLRNIPDLIEETLNKQKDIQEIARDFIKAKGTMYLGRGLSFPIAMEGAL

SEQ ID NO: 125632 - protein, 287 aa, Unknown
  Bacterial polypetide isolated from the Sargasso Sea
IIENYQQLKEEFANDGVTMQTETDTEVVAHLANAYLQAGMQPKDMMQALLSKIQGAFALLIMMAQHPDTLLAARKYSPLAIAYGDDEMFLGSDALALAHLSRKISYLEDGDWAIITKDEAKIFNLKNEIVERPSKITDASNKTPDKGKYAHYMEKEINEQPEVIGYTFASYCSPTTGKITLPKFKFCPSELPKLTIVAAGTSFYAGMVAKYWFENLARIPTEVDIASEFRYRNPVLIKNGAALFISQSGESLDTLMAQRYAKDNGQNIISLVNVPESTIARESDTVL

SEQ ID NO: 125633 - protein, 325 aa, Unknown
  Bacterial polypetide isolated from the Sargasso Sea
DIDEIEFSLEQIEKGNYKYFMLKEIFEQPNSVKDSIRGRILEDNTVKLGGIYEKTQDVLNAKDIYITACGTSWHAAQIGSYILETVLSKPIKVEYASEFRYRNKHLNSDSLVISISQSGETADTLSAIRKAKEHGALTLGIVNVVGSSIARETDCGIYMHAGPEIGVASTKAFTSQVVILSLLGNYLAQQKGIEDSYKIISDIQKIPILMEELLKLSDPIYEISKQYSNASNFLYLGRGYQFPVALEGALKLKEISYIHAEGYPAAEMKHGPIALIDNKMPVVVIVTKKGYDKILSNIQEVKSRGGKIITISTEATNDLKELSEH

SEQ ID NO: 125634 - protein, 107 aa, Unknown
  Bacterial polypetide isolated from the Sargasso Sea
KHGPLALIEDGIPVVVLAPRDSYYKKTISNMQEVIARGAKVLLITNKSKDEIVSENIWEKIEVENTSYDLMPFLLTIPLQKLAYHSALKKGYDIDKPRNLAKSVTVE

SEQ ID NO: 125635 - protein, 154 aa, Unknown
  Bacterial polypetide isolated from the Sargasso Sea
IDEIVEKIADKKNALYLGRGVYFSIAQEGALKFKEITYIHAEAYPAGELKHGPLALVDEMTPVVALAPEDELVEKLLSNLEEVKSRGGTLYVFGNATSKIKIEKGKFMNMPDCGYYNAPIVYTIPLQILAYEVACSIGTDLDQPRNLAKSVTVE

SEQ ID NO: 125636 - protein, 203 aa, Unknown
  Bacterial polypetide isolated from the Sargasso Sea
MCGIVGVASNKPSVDKLVVGLLRQEYRGYDSAGLAIFDESEEIKVYKSTGKVSELQSSIDQNPVNGNTGIAHTRWATHGLPTTENAHPHHSNKEIFVIHNGIIENHQEIRTTLKALGYSFESETDTEVIAHLIHAKMYQNNTSLVESLKAAVKDLRGAYAIGAMSSKEPGLVAAARKGSPLVVGHGHGENFIASDQLALADFA

SEQ ID NO: 125637 - protein, 212 aa, Unknown
  Bacterial polypetide isolated from the Sargasso Sea
IGVASTKAFTSQVAVLFLLSLCFGRKNKLSALTGQNFAQALMNIGNQVKIILDDSESILEVAKSTVHNENFLYLGRGLNFPVALEGALKLKEISYIHAEGYPAAEMKHGPIALIDENMPVVCLAPHDDTFDKVLSNIQEVKARKGVIITVTDKRTKELEKVSDYLIDVPSTHPKIFPMLASISLQLLAYHLAVLRGCDIDQPRNLAKSVTVE

SEQ ID NO: 125638 - protein, 262 aa, Unknown
  Bacterial polypetide isolated from the Sargasso Sea
LTPLGIEIYDSNNERQYRNPISLQTAEQVSDKKNFKHYMLKEIYDQPNIAKYWLEKYLIKDSKTDQFQINYSFDTEFLNSIERIEIVACGTSKHAAMVGKYLLEQFSGIPTNVYYASEFRYSPPPLLPNTLTIGVTQSGETADTIAAINMEIKRRSSIEDRNFKPNLIAITNRIESSIGRLIPNIINISAGIEIGVAATKTFFAQLLSFYGLAIKFSQIKGSQSNESINQLISELTKLPLLVEELLEKHNESSEKLAHDFFN

SEQ ID NO: 125639 - protein, 174 aa, Unknown
  Bacterial polypetide isolated from the Sargasso Sea
LDLIKLPDLIKETLSKQNDIQVIARDFITAKGTMYLGRGYSYPIAMEGALKLKELSYIHAEGYAAGEMKHGPLALIEDGMPVIVLAPKDRFFEKTVSNMQEVIARGGKVIMITDDASETTNENIRFKFKIPKTNSTINSFLLSIPIQFLAYHVALLKNCDIDKPRNLAKSVTVE

SEQ ID NO: 125640 - protein, 282 aa, Unknown
  Bacterial polypetide isolated from the Sargasso Sea
IGHGQNGQHTGVPNTVNAHPHSSDKVSVVHNGIIENSTILKKLLIKKGYVFKSQTDTEVIVHLITDYLKKNNLKNSIIKMLKRVHGSFALGIIFQDEPDLIVGARRGSPLAVGYGPNENYLGSDSYALKSMTNKVTYLDDSEFCIIRKDGVDFFDEKGNKVNKKILELSKSEQEYEKGEYKHFMAKEIDEQPITIKNCVNEYINKISNSINIYNFPWKYKDISSILLIGCGTAYHSCLMAKYWFEQMTSLDVNVDIASEFRYRKNRFKKDCLYIFVSQSGET

SEQ ID NO: 125641 - protein, 151 aa, Unknown
  Bacterial polypetide isolated from the Sargasso Sea
MCGIVGGVSHKNIGDDLIDCLKFLEYRGYDSAGVATLSHDSINCTKCEGKINQLTKKYKKSQHKDGLIGIAHTRWATHGKPSERNAHPLCSQNSVAVVHNGIIENSSELKKTILKDYQFHSETDSEVIAHLFHCTYANSQCPLSALKQTID

SEQ ID NO: 125642 - protein, 213 aa, Unknown
  Bacterial polypetide isolated from the Sargasso Sea
GVASTKAFLGQILVLYILALKFGSLRNEIKKEKYQQKIKDLIDLPRLIEETLIGDNNIQAICSTFNEAKGSMFLGRGFSYPIALEGALKLKELCYVHAEGYPAGEMKHGPLALIEEGMPVVVLAPKDNYYKKTISNMQEVIARGAKVLLITNKSADDVVSENIWETIEVENTNDDLLPFLLTLPLQKLAYFSALKKGYDIDKPRNLAKSVTVE

SEQ ID NO: 125643 - protein, 319 aa, Unknown
  Bacterial polypetide isolated from the Sargasso Sea
ENNLGSDSYALKSMTNKITYLDDGEFCIIKKDQVLFFNEDGKKINKKILELSSNEASYEKGDFKHFMAKEIEEQPTTVKTGIKEYVDKTNSEINIYNFPWKISEINSITLIGCGTAYHSCLMAKYWFEELTQLDVSTDIASEFRYRKNRFKKDTLYIFVSQSGETADTYAALDLCNKNNMKTCAVVNVIESSIARDANFVLPIHCGPEIGVASTKAFLGQILILYILALKLGSLRNEINKENYKEKIKDLQKLPSLIEKSLLTDNDIQAISSTFNEAKGSMFLGRGFSYPIALEGALKLKELSYVHAEGYPAGEMKHGP

SEQ ID NO: 125644 - protein, 326 aa, Unknown
  Bacterial polypetide isolated from the Sargasso Sea
SLLEGSYALAIIFSDLKDKIIGARNGSPLVAGTDGNSSSLGSDSIALSSIAKQVCYLEDGDIVVLSRENVEIYNSSGDRANREFVDIGIMDTEVSKGSYNHFMEKEIHEHPKAVGETFRQFIDHDQGIISVDDIGLNFNDISKVHLIACGTAYYSCLVAKYYFEQYARLPVECDMASEFRYRDPVLDNRALYIFVSQSGETADTKAALDYCKDAKVRTLSIVNVMNSSIARESDYCLYTKAGAEIGVASTKAFTAQLSVLLSMALHCGTKNNNVTIEQNREICKEIMQAPQILDKAIKRSYELKETAKAIIDSKGVMYLGRGTSLP

SEQ ID NO: 125645 - protein, 299 aa, Unknown
  Bacterial polypetide isolated from the Sargasso Sea
KSVSSSIISALKKLEYRGYDSAGISTISNGHINEKKCSGRVDNLEKILFRNPSSGDLGIGHVRWATHGIPNQINAHPHSSDVVSVVHNGIIENSDILRNEYKKKGYLFKSQTDTEVITIMLTDFLKTDNLIDCIHKTLEKLEGSFALGVIFKDYNNVVVGARRGSPLAVGYGHNENFIGSDSYALKAMTNKISYLDDGDFCLLYKEKIEFYNSDKKKINKEIFELSNDDNIADKGDYKDFMSKEIDEQSITTKKCINEYLDKNRDEINIYNLPIKPTEINKIRLIACGTAYHSCLMAKY

SEQ ID NO: 125646 - protein, 126 aa, Unknown
  Bacterial polypetide isolated from the Sargasso Sea
MCGIVGYIGSNPAKDFLINGLKKLEYRGYDSSGIILFNQKAYLKKCKGKIATLEKTLIEPELDFATTGIGHTRWATHGIPSKINSHPHSSNSGELFIVHNGIIENYEAIKEVLKKKGYIFKSETDT

SEQ ID NO: 125647 - protein, 95 aa, Unknown
  Bacterial polypetide isolated from the Sargasso Sea
LPVIVISPHDKYFHKTVSNMQEVIARGGKILLITDSNDNVISENVRFTINLPYLEKSLSPFLSTLPLQLLAYHVALLKKRDIDKPRNLAKSVTVE

SEQ ID NO: 125648 - protein, 211 aa, Unknown
  Bacterial polypetide isolated from the Sargasso Sea
ASTKAFTCQLVTLAAFSISLGVAKNNINKNQAKKLSRAISEIPSKISDILSDGLNIKLIAESLSKVSNVLYIGRGSEYPIALEGALKLKEISYIHSEGFAAGELKHGPIALIEKGVPVIVIAPKGDLYEKTISNMQEVIARGAKVILLTDSKNDKNIDEKVWKVISMPTVENFVNPILYSIPVQLIAYHVAVAKGTDVDQPRNLAKSVTVE

SEQ ID NO: 125649 - protein, 322 aa, Unknown
  Bacterial polypetide isolated from the Sargasso Sea
IIDTSVKEASKDGYKHFMEKEIYEQPQAITNAIEGRTADGEVLDNIFGLGSSEAFKGVKRIQFVACGTSLHAAKTARKWFEELCETPCYIDFASEYRYRNPLVEDDTLFVCISQSGETADTMAALNYAKDEKYLGIVTICNVPTSTMARESDWKIFTNAGPEIGVASTKAFTTQLAALLLLACSISKSKNINKDKRADAINDLLNTPSLVKESFGLKMHIDEIVEKIADKKNALYLGRGVYFSIAQEGALKFKEITYIHAEAYPAGELKHGPLALVDEMTPVVALAPEDELVEKLLSNLEEVKSRGGTLYVFGNATSKIKIE

SEQ ID NO: 125650 - protein, 293 aa, Unknown
  Bacterial polypetide isolated from the Sargasso Sea
HGSFALGIIFKDQNNLMVGARRGSPLAVGYGPNENYLGSDSYALKSMTNKISYLDDGEFCFVKKDLIEFFDSEGVKINKEVMNLSKEDLNYDKGDYKYFMEKEIDEQPTTINACINEYIDKYNKQINIYNFPWKISSIKSVMLIGCGTAYHSCLIAKYWMEQNTNLDVNVDIASEFRYRNVRFKKDCLYIFVSQSGETADTYAALDLCKKNKMKTCAVVNVIESSIARDADLVLPIYCGQEIGVASTKAFIGQMLVLYILSTKISFDQKIINKLEYKSKVKNILNLSNSAKKT

SEQ ID NO: 125651 - protein, 61 aa, Unknown
  Bacterial polypetide isolated from the Sargasso Sea
MCGIVGVVGQEPAAPVLMEGLKRLEYRGYDSAGVATLVNGSIDRRRAEGKLLNLQALLDQA

SEQ ID NO: 125652 - protein, 254 aa, Unknown
  Bacterial polypetide isolated from the Sargasso Sea
AVGYGPNENYLGSDSYALKTMTNKISYLNDGEFCILKNNTVDFFDKKGTKVNKKILKLSENNENYEKGDFKHFMAKEIEEQPVTIKNCVNEYIDKINSDINIFNFPWKIKDISSVVLIGCGTAYHSCLMAKYWFEQLTSLDVSVDIASEFRYRKNRFKKDALYVFVSQSGETADTYASLDLCNKNKMKTCSIVNVVESSIARDSKFVLPIHCGPEIGVASTKAFLGQMLVLYILSLKISYMRKDINKSSYAKKI

SEQ ID NO: 125653 - protein, 280 aa, Unknown
  Bacterial polypetide isolated from the Sargasso Sea
MCGIIGYCGKDDAGETILRGLEALEYRGYDSSGIALADQNGSMSVTRSVGKISALIEKTKPNLISSSCGIGHTRWATHGAVNEANTHPHTDQLNKVAIVHNGIIENFEELKENFPPEIFTSETDTEVIAHMVALEMDNGENILHALQNTLEKATGSFSIVVLSELNPNKIVAARKGNASGLVVGFAKDAICVVSDITALTDIVEHITFLDANEYVEFSSKEAIFYNDTGEKIDKKELRLPFEHNVQSLGQFKHYMLKEINEQPETILDTIRGRYQSDTGS

SEQ ID NO: 125654 - protein, 292 aa, Unknown
  Bacterial polypetide isolated from the Sargasso Sea
KDMPDLIVGARRGSPLAVGYGPNENYLGSDSYALKSMTNKITYLDDGEFCIVKKDQVVFFNEEGKKVNKKILELSSDEANYDKGDFKHFMAKEIEEQPKTIKTGIKEYIDNVNKDINILNFPWKIEDIKSITLIGCGTAYHSCLMAKYWFEELTTLDVSIDIASEFRYRKNRFKKDTLYVFVSQSGETADTFAALDLCNKNNMKTCAVVNVIESSIARDSNFVLPIHCGPEIGVASTKAFLGQILVLYILALKLGSLRKEIEKKEYHEKIKDLKDLPNLIEKTLLHDNDIQA

SEQ ID NO: 125655 - protein, 243 aa, Unknown
  Bacterial polypetide isolated from the Sargasso Sea
KVKTCSVVNVVESSIARHSDCVLPIHAGPEIGVASTKAFLGQMLVLYLFSLKIAEVRGDIDKKDYKKKITELKKIPELITDSLKEEEKIQLIAKDIYKSKGSMFLGRGSSYPIALEGALKLKELSYLHAEGYPAGEMKHGPLALIEDGLPVVVIAPKDKYFEKTLSNMQEVIARGGKVLLLTNSGGKVISENIRFQIDLPDSDLTLTPFLFTIPLQLLSYHVALFKKCDIDKPRNLAKSVTVE

SEQ ID NO: 125656 - protein, 237 aa, Unknown
  Bacterial polypetide isolated from the Sargasso Sea
GIVGITSNKEVTARIINSLKKLEYRGYDSAGMATLEDGIIKEVKCEGRVDILEKNISKININGEIGIGHVRWATHGKPSTLNAHPHSSEVVSVVHNGIIENSTILKKLLEKKGHKFKSQTDTEVIAHLVTDYLKKNNLKNTIVKVLKKLHGSFALGIIFKDQPDLIVGARRGSPLAVGYGPNENYLGSDSYALKSMTNKVSYLNDGEFCLIKKDNIDFFDTKGNKINKKILNLSKDD

SEQ ID NO: 125657 - protein, 269 aa, Unknown
  Bacterial polypetide isolated from the Sargasso Sea
INIENIEKGNFDHFMLKEIFEQPSAIVNAIRGRVDYNNNSIKLGGINDYALDIINSDMIYITACGTSWHAALIGSYILENLLDIPVKVEYASEFRYRKTAITANSTVIVISQSGETADTLAALEKAKSIGARTLGVVNVVGSSIARKADCGVYIHAGPEIGVASTKAFTSQVVTLNLISLFLSQIKNPDELKINKLIAEISSIPDKIETILSYSDDIKKIAKDYQDANNFLYLGRGFQFPVALEGALKLKEIYYIHAEGYPAAEMKHGP

SEQ ID NO: 125658 - protein, 136 aa, Unknown
  Bacterial polypetide isolated from the Sargasso Sea
YERNINRSNIKGVIGIGHVRWATHGKPSKINAHPHSSEEVSVVHNGIIENSTLLKKYLEKKGYVFKSQTDTEVIAHLFTDYLKKNSLKDTIIKVLKKLHGSFALGIIFKNQNDLMIGARRGSPLAVGYGPNENYLG

SEQ ID NO: 125659 - protein, 236 aa, Unknown
  Bacterial polypetide isolated from the Sargasso Sea
INVVESTIARNSDWVIPIHAGPEIGVASTKAFIGQMLVLYIMSLKISKIRGNIDEKKYIQKIKNLKNLPEGIENSLKTEEFIEIFAKDFLQAKGSMFLGRGSSFPIALEGALKLKELSYLHAEGYPAGEMKHGPLALIEDGLPVIILGPKDKYFEKTISNMQEVIARGGKVLLITDQHDDVINENIRFKIEMPHIDELLNPFLLTIPLQLLAYHVALLKKCDIDKPRNLAKSVTVE

SEQ ID NO: 125660 - protein, 219 aa, Unknown
  Bacterial polypetide isolated from the Sargasso Sea
FVTKAGPEIGVASTKAFVTQLACLNLLLLTLMRVHNKLPAARKKITAALRDLPKLIDKTLKMTGEYKKVAKLLFKRNSALFLGRGLYFPIAREGALKLKEISYIHAEAYPGGELKHGPLALIDKNMPVIALAPDNEHLDKITSNIEEVAARKGKVITIGPLGRTKIDKNGGHIKIPKTLDLLNPIVSVVPMQLIAYYTAVFKGTDVDKPRNLAKSVTVE

SEQ ID NO: 125661 - protein, 117 aa, Unknown
  Bacterial polypetide isolated from the Sargasso Sea
MCGIIGAASTRNVGKILVNGLKKMEYRGYDSAGLVLNKEKKAIQLRTLGKVSKLEELMAQKKPRAKSGIAHTRWATHGEPSQTNAHPHSSNGSIYIVHNGIIENHDELRERFVKWRL

SEQ ID NO: 125662 - protein, 101 aa, Unknown
  Bacterial polypetide isolated from the Sargasso Sea
ALIDENIPVVFIAPHDETFNKVLSNIEEVKARGGIVISITDKINNSLKKLSDFVLIAPQTHKYVFPITCSIILQMLAYELAVCRKCEIDQPRNLAKSVTVE

SEQ ID NO: 125663 - protein, 293 aa, Unknown
  Bacterial polypetide isolated from the Sargasso Sea
MKSMTNKITYLEDGEFCVVKKDQVLFFNEDGKKVNKKILELSSDEANYDKGDFKHFMAKEIEEQPTTIKTGIKEYVDNVNKDINIFNFPWKIEEINSITLIGCGTAYHSCLMAKYWFEELTTLDVNIDIASEFRYRKNRFKNDSLYVFVSQSGETADTYAALDLCNKNNMKTCSVVNVIESSIARDSNFVLPIHCGPEIGVASTKAFLGQILVLYILALKLGSLRKEIEKQEYQEKIKDLKALPGLIEKTLLHDNDIQAISSTFNEARGSMFLGRGYSYPIALEGALKLKELS

SEQ ID NO: 125664 - protein, 210 aa, Unknown
  Bacterial polypetide isolated from the Sargasso Sea
GVASTKAFTTQLAALMLLALSLAKSRNLNPKLRGRVVQALRSLPETIAEALNSKDMMIEIAPDIANKDNALFLGRGIFYPIAKEGALKLKEISYIHAEAYPAGELKHGPLALIDENMPVIALAPESEIAEKLISNLEEVKARGGTLYVCADPSVNMDVKSGKLIHMPECDFFMSPIVYNIPLQILSYEVALLRGTDIDQPRNLAKSVTVE

SEQ ID NO: 125665 - protein, 298 aa, Unknown
  Bacterial polypetide isolated from the Sargasso Sea
LDPTTVTSLTLIACGTSYYACLTAKYWFETIARIPVEVDIASEFRYREAPLPAGSATLVISQSGETIDTLAALRYAQSQDQKILSIVNVPESTIARESDAILQTYAGPEIGVASTKAFTTQLTVLACLAIAMAHVRGTIDDSERGRLVGALTEVPARAAEILNHDEQISMIANDMAEARDVLYLGRGTSYPLALEGALKLKEISYIHAEGYAAGEMKHGPIALIDENVPVVVVAPTDNLIDKTVSNVQEVMARGGRVVLLSDMVGVSRLGAAVEATVTLPSVDPFVTPLLYAIPVQLL

SEQ ID NO: 125666 - protein, 82 aa, Unknown
  Bacterial polypetide isolated from the Sargasso Sea
YEKSISNAEEIAARNGKVIILSSVKIHRKSLNTHNVSLPKENFIDTPFIYTIPLQLISYYFALHKGTDIDQPRNLAKSVTVE

SEQ ID NO: 125667 - protein, 182 aa, Unknown
  Bacterial polypetide isolated from the Sargasso Sea
MCGIIGAASSRNVGKLLVQGLHKMEYRGYDSAGIALHQKDSIFSLRTLGKVSLLEDGMIEQRPKSKLGIAHTRWATHGKPSEKNAHPHASSGEVHIVHNGIIENYLELTKKLTKDGYTFHSETDSEVIAHLLHQHLQSSGDLLAAMHDVIKELDGAYAIAAIHIADKSRLIVARNKSPLLIG

SEQ ID NO: 125668 - protein, 105 aa, Unknown
  Bacterial polypetide isolated from the Sargasso Sea
MCGIIGIISTKEVSNRIINSLKKLEYRGYDSAGIATLVDGNINEIKCEGRVDVLEKDISKFNLKGALGIGHVRWATHGKPSKINAHPHSSEQVSVVHNGIIENST

SEQ ID NO: 125669 - protein, 221 aa, Unknown
  Bacterial polypetide isolated from the Sargasso Sea
MCGIVGITANESVSSNIIGALKKLEYRGYDSAGIAINTESQIHQKKAKGKLDNLILSLKKDGFDGKVGIGHTRWATHGEPSERNAHPHSSRKVSLVHNGIIENASELKSRAELKNYNFESDTDSEVITALITHYLNEGHDHMESVKQTISLLEGSYALAIIFSDLKDKIIGARNGSPLVVGTDGNSSSLGSDSIALSSIAKKVCYLEDGDIVVLSRENVEI

SEQ ID NO: 125670 - protein, 200 aa, Unknown
  Bacterial polypetide isolated from the Sargasso Sea
MDSRDPSTLLAARSGSPMVIGLGMGENFIASDQLALLPVTRRFIFLEEGDIAEVTRRSVTVFDTKGEQVKRQEIESNLQYDAGDKGAYRHYMQKEIYEQPNAIKNTLTGRISHGEVDLSELGVNANELLSKVEHIQIVACGTSYNSGMVSRYWFESLAGVPCDVEIASEFRYRKSAVRRNSLMITLSQSGETADTLAALR

SEQ ID NO: 125671 - protein, 199 aa, Unknown
  Bacterial polypetide isolated from the Sargasso Sea
FYDLNQNRINKKIHTVSEDENISDKGDFKNFMSKEIFEQPVTIKKCLSEYIDSLKKDINIYNFPIDPKKINKIILIGCGTAYHSCLVAKYWFEELTSIDVEIDIASEFRYRKLKFNSNNLYIFVSQSGETADTAAALDICKKNKVKTCSIVNVVESTIARNSDWVLPIHAGPEIGVASTKAFLGQLIVLYILNLKLALN

SEQ ID NO: 125672 - protein, 80 aa, Unknown
  Bacterial polypetide isolated from the Sargasso Sea
HSQIHREVIARGGKIFFITDIKKRLLSTNIRLRLRVPHLDNFLSPILLTIPLQLLAYHVALLKSCDIDKPRNLAKSVTVE

SEQ ID NO: 125673 - protein, 151 aa, Unknown
  Bacterial polypetide isolated from the Sargasso Sea
MAPAIANKDNALFLGRGIFYPVAKEGALKLKEISYIHAEAYPAGELKHGPLALIDENMPVIALAPESEIAEKLVSNLEEVKARGGTLYVFSDPSVSIDVKSGSLVPMPKCDFLLTPIIYTIPLQILSYEVALLRGTDIDQPRNLAKSVTVE

SEQ ID NO: 125674 - protein, 179 aa, Unknown
  Bacterial polypetide isolated from the Sargasso Sea
MCGILGIISKKDIITPMIEGLKKLAYRGYDSSGIATINDHTIIKRRASGKIENLEKLLECDPIKGNLGIAHTRWATHGAPNEMNAHPHATKKVAIVHNGIIENYKDLIAGLKNKSLLNSETDSEVIAHLLTNYLEDGLNIHNAITKLLDKLQGAFALGILISNENKLIAVKKRKSISNR

SEQ ID NO: 125675 - protein, 248 aa, Unknown
  Bacterial polypetide isolated from the Sargasso Sea
MCGIIGIASNKPVSINIINSLKKLEYRGYDSAGLATIQNNEINEKKCSGRVVELEKILFKSPSDGNLGIGHVRWATHGIPNIINAHPHSTDIVSVVHNGIIENSNELKKKLELKGLKFKSQTDTEVITLLITEALKKNEAIDSVFKTLKQLKGSFALGIIFKNHQNIIIGARRGSPLAVGYSKNENYLGSDSYALKSMTNKISYLDDGDLCVLSKDKVDFYDVNQKKINKKVYTLSNDENLSDKGDYK

SEQ ID NO: 125676 - protein, 38 aa, Unknown
  Bacterial polypetide isolated from the Sargasso Sea
TAPFIYTIPYQLFAYHTALLKGTDVDQPRNLAKSVTVE

SEQ ID NO: 125677 - protein, 197 aa, Unknown
  Bacterial polypetide isolated from the Sargasso Sea
MISTILPTYARADLEFVKGEGSWLTEADGRHFLDLASGIAVNSLGHAHPDLVNIIKSQAEKLWHVSNLYEIPQQQALADILVANSFADTVFFTNSGTESCELAIKMARKYWFEKGYPDKFEIITFEGSFHGRSSAGIAATASEKMTKGFGPLLPGFVNINLNDHEAIKTAISDKTAAILIEPIQGEGGIRVLPRILF

SEQ ID NO: 125678 - protein, 83 aa, Unknown
  Bacterial polypetide isolated from the Sargasso Sea
FEKTISNMQEVIARGGKVLLISNENNKIISENIRFTLQIPKTDDYLNPILMTIPLQLLAYHVASLKNCDIDKPRNLAKSVTVE

SEQ ID NO: 125679 - protein, 235 aa, Unknown
  Bacterial polypetide isolated from the Sargasso Sea
NVVESSIARNSDWVIPIHAGPEIGVASTKAFIGQMLVLYIMSLKISKVRGNIDDKKYIEKIKNLQNLPQSIETSLQTEELIQIFAKDFLSAKGSMFLGRGLSFPIALEGALKLKELSYLHAEGYPAGEMKHGPLALIEDGLPVIILAPKDKYFEKTISNMQEVIARGGKVLLISDKHDEVINENIRFKIEMPFIDELLNPFLLTIPLQLLAYHVALLKKCDIDKPRNLAKSVTVE

SEQ ID NO: 125680 - protein, 209 aa, Unknown
  Bacterial polypetide isolated from the Sargasso Sea
VVSEYRGYDSAGLAVFDAEGNMTRLRRLGKVQMLTAAAEEHPLHGGTGIAHTRWATHGEPSEANAHPHVSEHIVVVHNGIIENHEPLRELLKTRGYTFVSETDTEVIAHLVHWELEQGGTLREAVLRTIPQLRGAYGTVIMDTRNPETLLAARSGSPLVIGLGMGENFIASDQLALLHVTRRFIFLEEGDIAEVTRRSVSIFDKSGAEV

SEQ ID NO: 125681 - protein, 258 aa, Unknown
  Bacterial polypetide isolated from the Sargasso Sea
DSYALKSMTNKISYLDDGNFCILYKEKVEFYNSDKKKINKEIFELSYEDNTAEKGDYRDFMSKEINEQSYTTKKCINEYLNTSKNEIDILNLPLEAKKIRKIRLIGCGTAYHSCLMAKYWIEEFTSLDVDADIASEFRYRKIKLDPNDLYIFVSQSGETADTLAALEKCKKNNLKTCGIVNVLESSIARNSDLVLPIHAGPEIGVASTKAFIGQLTVLYLLTLKIAIDRKDISPEEYSKLILDLRNIPDLIEETLNKQ

SEQ ID NO: 125682 - protein, 264 aa, Unknown
  Bacterial polypetide isolated from the Sargasso Sea
SKFNLKGDIGIGHVRWATHGKPSKINAHPHSSEQVSVVHNGIIENSTILKKLLEKKGYVFKSQTDTEVIAHLVTEYLKKNSLKDSIIKVLKKLHGSFALGIIFKDRNDLMVGARRGSPLAVGYGPNENYLGSDSYALKSMTNKISYLDDGEFCIIKKDQIEFFESNGVKINKKVMNLSKEDIHYDKGDYKYFMEKEIDEQPSTINDCINEYVDKYNNQINIYNFPWKINSFQSIVLIGCGTAYHSCLVAKYWLEQNTNLDVSID

SEQ ID NO: 125683 - protein, 281 aa, Unknown
  Bacterial polypetide isolated from the Sargasso Sea
TYLDDGEFCFVKKDQVIFFNEEGKKVNKKILELSSDEASYDKGDFKHFMAKEIEEQPRTIKIGVKEYLDNVNNDINIFNFPWKISDISSVTLIGCGTAYHSCLMAKYWFEELTTLDVNIDIASEFRYRKNRFKENSLYVFVSQSGETADTYAALDLCNKKNMKTCAVVNVIESSIARDSNFVLPIHCGPEVGVASTKAFLGQLLVLYILALKLGSLRNEIEKNKYQEKIKDLKNLPSLIEKTLLYDNDIQAISSTFNEAKGSMFLGRGFSYPIALEGALKL

SEQ ID NO: 125684 - protein, 271 aa, Unknown
  Bacterial polypetide isolated from the Sargasso Sea
VDNKSVVIAISQSGETADTLAAIKKANDYGAITVGICNVPGSSVSRETNCGIFTRCGHEVGVASTKAFTAQCTILYLLALKLADSNDTLSKKAIRENLDFVSEFNKIRSILKKENEIKKIALKYKNANDFLYLGRGLNFPVALEGALKLKEISYIHAEGYPAAEMKHGPIALVDKDMPNVFIVPKDKTYEKIISNIEEIKSRKGKIIIVTDSKDKILKDLANDLIYVPKTNHYMFCVLATIVLQLFAYYIAVGKKLNVDRPRNLAKSVTVE

SEQ ID NO: 125685 - protein, 231 aa, Unknown
  Bacterial polypetide isolated from the Sargasso Sea
MCGIVAVTGYKKALPLLINGLEKLEYRGYDSAGIAIINAETNSITCNKAEGKLKNLVGNLNDFNIPGTVGIGHTRWATHGKPEVKNAHPHTDSSGNIAVVQNGIIENFQDLKNKLEEEGIIFNSDTDTEVIPHLIQKELNTLSKLNLENNGSTLLVAVRNVLSDLEGSYALAVLWSGAPTSLVVARRQAPLIIGLGEGEFICASDTPAIANFTNIILPMEDEEIALLTPLE

SEQ ID NO: 125686 - protein, 114 aa, Unknown
  Bacterial polypetide isolated from the Sargasso Sea
MCGIIGIASKNDCINDIISGLYSLEYRGYDSSGLATIKNNQFQCNKSIGKILNLEKSVKNRKLTGKIAIAHTRWATHGKPALKNSHPFIKDNTVLVHNGIIENYTDLLSQYSIN

SEQ ID NO: 125687 - protein, 105 aa, Unknown
  Bacterial polypetide isolated from the Sargasso Sea
MCGIVGITSGKPVTSSIINSLRKLEYRGYDSAGIATLDNGFINEVKCEGRVDNLEKNLSKKKMLGNVGIGHVRWATHGMPSFANAHPHSSENVSVVHNGIIENST

SEQ ID NO: 125688 - protein, 298 aa, Unknown
  Bacterial polypetide isolated from the Sargasso Sea
YDSAGIATLSSGLINEIKSEGRVDNLEKNSLVQKMEGTIGIGHVRWATHGIPSSLNAHPHSSQNVSVVHNGIIENSTILKKFLIGKGHKFKSQTDTEVIVHLITEHLKTENIINSIKKTLKLLHGSFALGIIFKDQPDLIIGARRGSPLAVGYGPNENYLGSDSYALKSMTNKITYLNDGEFCVIKKDLVEFFDEKGKKINKKVLELSSEEQKYDKGDYKHFMAKEIDEQPLSIKNGIKEYLDTANDDINIFNFPWKAEDISSIILIGCGTAYHSCLVAKYWFEELTSLDVSVDIASE

SEQ ID NO: 125689 - protein, 308 aa, Unknown
  Bacterial polypetide isolated from the Sargasso Sea
SLKINEIKSNTLIGCGTATHSCLMAKYWFEELTTLDVNIDIASEFRYRKNRFKEDSLYIFVSQSGETADTYAALDLCNKNNMKTCAVVNVIESSIARDSNFILPIHCGPEIGVASTKAFLGQILVLYILALKIASLSNQIDKKNYQEKIEDLKSLPSLIEKTLLVDNDIQTISSTFNEAKGSMFLGRGFSFPIALEGALKLKELSYVHAEGYPAGEMKHGPLALIEEGMPVVVLAPRDSYYKKTISNMQEVIARGAKVLLITNKSKDEIISENIWETIEVENTNDDLLPFLLTVPLQKLAYYSALKKG

SEQ ID NO: 125690 - protein, 265 aa, Unknown
  Bacterial polypetide isolated from the Sargasso Sea
INIYNFPIEPKKINKIVLIGCGTAYHSCLVAKYWLEELTTIDAEIDIASEFRYRKLKFNTNNLYIFVSQSGETADTAAALDICKKNKVKTCSIVNVVESTIARNADWVLPIHAGPEIGVASTKAFLGQLIVLYILSLKLSIIRGDINKDKYNENLRNLHKLPESIKNTFKLENEIQLMAKEFLDAKGSMFLGRGNSFPIALEGALKLKELSYLHAEGYPAGEMKHGPLALIEEGLPVIVIAPKDKYYEKTLSNTQEVIARGGKIF

SEQ ID NO: 125691 - protein, 243 aa, Unknown
  Bacterial polypetide isolated from the Sargasso Sea
MCGIIGIVSKTEVVNRLIKGLKQLEYRGYDSSGVVIANTNSLCRRRSSGKLLNLKRRIKEKPISGKIGIAHTRWATHGKPTEKNAHPHLTDNVGLVHNGIIENHLELKESLKLKGVKFSSETDTEVIVKLVEIELTDRGLTPEEAVKVTLKKLKGSFALCFVFRGFENLLIATKRGSPLALGYGKEEMFVGSDANALSLFTKNICYLEEGDFAIIKKEKISIYDYNDNEINRKIVYIRGDASV

SEQ ID NO: 125692 - protein, 47 aa, Unknown
  Bacterial polypetide isolated from the Sargasso Sea
IELPEVPELIAPLIYSIPLQLLAYHVAILKGTDIDQPRNLAKSVTVE

SEQ ID NO: 125693 - protein, 186 aa, Unknown
  Bacterial polypetide isolated from the Sargasso Sea
MCGIIGYLGKKDPVPILLKGLKRLEYRGYDSAGIALLNGNELTQIKKAGKVSDLQLMIDDSPMKGNCGIAHTRWATHGEPNDINAHPHLDQTGKISLVHNGIIENHDIIKQVLREQGVSFTSDTDTEVISQLISTLYFGSSKISFENAVRLALQEIVGAYGIVVLCADEPETLVAAKMGSPLSIWN

SEQ ID NO: 125694 - protein, 250 aa, Unknown
  Bacterial polypetide isolated from the Sargasso Sea
MCGIIGYSGPKEPLPILINGLSRLEYRGYDSAGIAISDGNKITVEKKEGKLEILKNHLKDNNIKGNIGIGHTRWATHGVPNDVNAHPHSDNNEEFAIIHNGIIENYAEIKKDLLEEGFEFKSDTDTEVVAVELSRKWNGQLLKTVTDVAKTLEGTYALVVTTTKEEGTIVAGRLMSPLVLGVGENEVFLASDSAAILEHTNKMIFLENGDFVEIKNGQYKLFDSELNEIEREIQEIDWEVSEAEKLGHDH

SEQ ID NO: 125695 - protein, 112 aa, Unknown
  Bacterial polypetide isolated from the Sargasso Sea
YPAAEMKHGPIALIDENMPVVFIAPHDETFNKVLSNIEEVKARGGIVISITDKINNSLKKLSDFVLIAPQTHKYVFPITCSIILQMLAYELAVCRKCEIDQPRNLAKSVTVE

SEQ ID NO: 125696 - protein, 305 aa, Unknown
  Bacterial polypetide isolated from the Sargasso Sea
TLVNGDINEVKCEGRVDILERDINKFNLRGDIGIGHVRWATHGKPSKINAHPHSSDQVSVVHNGIIENSTILKKFLEKKGYIFKSQTDTEVIAHLVTEYLKKNSLKDTIVKVLKKLHGSFALGIIFKDRSDFIVGARRGSPLAVGYGPKENYLGSDSYALKAMTNKISYLDDGEFCFVKKDQIEFFDSEGVKINKKVMNLSKDELNYDKGDYKYFMEKEIDEQPTTIRDCLNEYIDKYNNQINIYNFPWKIASFKSVMLIGCGTAFHSCLIAKYWMEQNTSLDVSVDIASEFRYRKVRFKKDCLY

SEQ ID NO: 125697 - protein, 297 aa, Unknown
  Bacterial polypetide isolated from the Sargasso Sea
VAKYWMEGLAGISCSVDVASEFRYRNVVVREGTLFVTISQSGETADTLACLRDISDSGYMSSLAICNVPTSSLVRESELVFLTRAGPEIGVASTKAFTTQLLSLLMLTLVLGREHGLSQAAENSINNSLRDLPELLEKVMALEPEIIKMAEDFDDKEHALFLGRGIHYPVAMEGALKLKEISYIHAEAYPAGELKHGPLALVDDSMPVVAVAPNDDLLEKLHSNLEEVKARGGKLYVFGHTDAYHQGFAEKFIELPEIPELIAPLIYTIPLQLLSYHVAVLKGTDIDQPRNLAKSVT

SEQ ID NO: 125698 - protein, 284 aa, Unknown
  Bacterial polypetide isolated from the Sargasso Sea
VASEFRYRKIRFNKKNLYVFVSQSGETADTFAALELCKKNKVKTCSIVNVVESSIARTSDFVLPIHAGPEIGVASTKAFIGQMLVLYILAIKISEVRNEISKSDFEKRINEIKKLPDLIKKTLNYCENHIPVIAKDFLKAKGVMFLGRGLSFPIALEGALKLKELSYLHAEGYPAGEMKHGPLALIEEGLPVVILAPKDKYFEKTISNMQEVIARGGKVILLTNENNKIISENVRFTLEMPKTNTDLTPFLLTVPLQLLAYHVASLKNCDIDKPRNLAKSVTVE

SEQ ID NO: 125699 - protein, 251 aa, Unknown
  Bacterial polypetide isolated from the Sargasso Sea
NYLGSDSYALKSMTNKISYLSDGEFCVIKRNDVEFFDGNGNKINKKILVLSSNEQNYDKGEYKHFMAKEIEEQPTTIMNCINEYIDKISNEINISNFPWKKEQISSIKFIGCGTAYHSCLLAKYWFEQLSNLDVEVDIASEFRYRKNRFKKDCLYVFVSQSGETADTYAALDLCNKNDMKTCSIINVVESSIARDSNFVLPIHCGPEIGVASTKAFLGQLLVLYILCLKISFLREDLRKIDYKNKIKDLLG

SEQ ID NO: 125700 - protein, 64 aa, Unknown
  Bacterial polypetide isolated from the Sargasso Sea
MIGVAPEGPDTDLFDELLPVPSVSEWLSPLLTVVPMQLLSYHIAAHRGLDVDQPRNLAKSVTVE

SEQ ID NO: 125701 - protein, 315 aa, Unknown
  Bacterial polypetide isolated from the Sargasso Sea
GITLIGCGTAYHSCLMAKYWFEELTNLDVNIDIASEFRYRKNRFKRDTLYVFVSQSGETADTYAALDLCNKNNMKTCAIVNVIESSIARDSNFVLPIHCGPEIGVASTKAFLGQILVLYILALKLGSMRNEIEKKEYQEKIKDLKALPGLIEKTLLHDNDIQAISSTFNEAKGSMFLGRGYSYPIALEGALKLKELSYVHAEGYPAGEMKHGPLALIEEGMPVVVLAPRDNYYKKTISNMQEVIARGAKVLLITNKSKDEVVSENIWETIEVENTNDDLLPFLLTIPLQKLAYYSALKKGYDIDKPRNLAKSVTV

SEQ ID NO: 125702 - protein, 288 aa, Unknown
  Bacterial polypetide isolated from the Sargasso Sea
LDPLKAVFETIGMLKGSFALGIIFKNHKEFVIGARRGSPLAVGYSNNENYLGSDSYALKSMTNKISYLDDGDVCVLSKDEVKFYNHNQHKINKEIFTLSEDKASVSKGNYKNFMIKEIFEQPVTTKTCLKEYIDKIREEINFYNLPLDPKEINKIVLIGCGTAYHSCLVAKYWFEEFTSINIEVDIASEFRYRKVRFDKKALYIFVSQSGETADTYAALDLCKKQNVKTCSVINVVESSIARNSDCVLPIHAGPEIGVASTKAFLGQMLVLYLLSLKISEVRNDMQKK

SEQ ID NO: 125703 - protein, 268 aa, Unknown
  Bacterial polypetide isolated from the Sargasso Sea
KTPSDGNLGIGHVRWATHGIPNLVNAHPHSSEIVSVVHNGIIENSDEIKKDLEAKGLKFKSQTDTEVITLLITEALKDNEPLDSVFSTLKKLKGSFALGIIFRDHKDFIIGTRRGSPLAVGYSNKENYLGSDSYALKSMTNKISYLDDGDLCVLSKDKVEFYDENETKINKKVYVLSDDENISDKGDYKNFMSKEIFEQPSTAKNCINEYIDNLKKDINIYNFPIRPEKINKIILIGCGTAYHSCLVAKYWFEELTSIDVEIDIASRV

SEQ ID NO: 125704 - protein, 201 aa, Unknown
  Bacterial polypetide isolated from the Sargasso Sea
MCGIVAYKGPKNCYPILIDGLHRLEYRGYDSAGVACLNDGKISITKRRGKVIQLEQGLKTDGKFQNCDGSGIAHTRWATHGKPNQINAHPHKDQSGNIVLVHNGIIENYNPIKKFLKSKKIKFKSETDTEVLVQLIGYFFNKGKLNFEQSVRAALQRVDGAYAIVVLNKKEPDVMIAARKGSPLVLGVKDNEFFVGSDILP

SEQ ID NO: 125705 - protein, 305 aa, Unknown
  Bacterial polypetide isolated from the Sargasso Sea
DWAVLQSTEVEIFNASGLPVKREVQISALSETSFGKGGYQHFMLKEIYEQPQVIGDTLNTLINPTKRTISLPPLEFDISKISKLTLVACGTSFYACMVAKYWFERISRIPVEVDIASEFRYRDNIMEDGGATLFISQSGETIDTLAALRHAKNQKQKIISIVNVLESAIARESDAVLQTQAGPEIGVASTKAFTTQLTILACFCIAVAVARKTISREENVRLISALTETPSRVSEILNHDSRLSKLAKSISNVTDALYLGRGTNFPIALEGALKLKEISYIHAEGYAAGEMKHGPIALVDEKMPV

SEQ ID NO: 125706 - protein, 329 aa, Unknown
  Bacterial polypetide isolated from the Sargasso Sea
MKIIFDLKNLKGNIGIGHVRWATHGVPNSVNAHPHSSHNVSVVHNGIIENSTILKKHLVSKGHNFKSQTDTEVIVHLITEHLKSSELEEAITNTLKKLHGSFALGIVFKDMPDLIVGARRGSPLAVGYGPNENYLGSDSYALKSMTNKITYLDDGEFCIVKKDQVLFFNEEGKKINKKILELSSDEASYNKGDFKHFMAKEIEEQPTTIKTGIKEYVDNVNKEINIFNFPWKISEIKSVTLIGCGTAYHSCLMAKYWFEELTTLDVNIDIASEFRYRKNRFKEDSLYVFVSQSGETADTYAALDLCNKNNMKTCAGVNVVESSIARDSN

SEQ ID NO: 125707 - protein, 133 aa, Unknown
  Bacterial polypetide isolated from the Sargasso Sea
YPIAMEGALKLKELSYIHAEGYPAGEMKHGPISLIDSNMPVFNIVTDGPYLNKMISNIREIQSRKGKIIVLTNCPEKLDPSWYNDIIIFDKTDDLLSPFLSTVCIQLFAMYLATQRKLDIDQPRNLAKSVTVE

SEQ ID NO: 125708 - protein, 84 aa, Unknown
  Bacterial polypetide isolated from the Sargasso Sea
YKKTISNMQEVIARGAKVLLITNKSKDEVVSENIWETLEVESTNDDLLPFLLTIPLQKLAYYSALKKGYDIDKPRNLAKSVTVE

SEQ ID NO: 125709 - protein, 296 aa, Unknown
  Bacterial polypetide isolated from the Sargasso Sea
FKNIHSIDLKSINRFVIQACGTSWHAGLIGKYLFEFYAKTLTEVDISSEFRYRRMISHSNDVLLAISQSGETADTLAGIREAKANFFPVISFVNVKNSSMDRESDGVVYSYSGQEVGVASTKNYLSQLTTLYLFSIHLALTKNELSQEKANMLIQELKKIPDYIESLLNQEKEIKKIADKYYKNDQFLFIGRGLNYPSALEGALKLKEISYIHATGYAAGELKHGPIALIDSKLPVVCIAPNTANYEKMQSNIEEVCARKGKTIIIASENNKTIKKFAEDILYIPNTTEELSPLLV

SEQ ID NO: 125710 - protein, 234 aa, Unknown
  Bacterial polypetide isolated from the Sargasso Sea
MCGIVGITSNKEVTTRIINSLKKLEYRGYDSAGIATLKNGYINEVKCEGRVEALEKNVSKTNLQGDIGIGHVRWATHGKPSHVNAHPHSSEKVSVVHNGIIENSTILKKILEKKGYKFKSQTDTEVIAHLVTDYLKKNNLKDTIIKVLKKLHGSFALGIIFKDYPDLIIGARRGSPLAVGYGPNENYLGSDSYALKSMTNKISYLNDGDFCLIKENQVQFFNHTGKKVNKEILN

SEQ ID NO: 125711 - protein, 300 aa, Unknown
  Bacterial polypetide isolated from the Sargasso Sea
LMAKYWFEELTTLDVNIDIASEFRYRKNRFKKDTLYIFVSQSGETADTYAALDLCNKNKMKTCAVVNVIESSIARDANFVLPIHCGPEIGVASTKAFLGQILVLYILALKLGSMKNEIEKKDYQEKIKDLKALPGLIEKTLLHDNDIQAISSTFNEAKGSMFLGRGYSYPIALEGALKLKELSYVHAEGYPAGEMKHGPLALIEEGMPVVVLAPRDNYYKKTISNMQEVIARGAKVLLITNKSKDEIVSENIWETIEVENTNDDLLPFLLTIPLQKLAYFSALKKGYDIDKPRNLAKSVT

SEQ ID NO: 125712 - protein, 310 aa, Unknown
  Bacterial polypetide isolated from the Sargasso Sea
YLGSDSYALKSMTNKVSYLNDGEFCIIKKDSIEFFDEDAKKINKKILELSSNENNYDKGEYKHYMAKEIDEQPVTIKNCINEYIDKINNDINIFNFPWKSKEISSIVLIGCGTAYHSCLMSKYWFEQLTSFDVSVDIASEFRYRKNRFKKDALYIFVSQSGETADTYAALDLCNKNDMKTCSIVNVVESSIARDSKFVLPIHCGPEIGVASTKAFIGQMLVLYLLCVKLAKNRKDISDENFIKKINSLKLLSGLIKESLKTENEIQSICNSFVEAKGSMFLGRGYSYPIALEGALKLKELAYVHAESYPA

SEQ ID NO: 125713 - protein, 274 aa, Unknown
  Bacterial polypetide isolated from the Sargasso Sea
FVEKKDFKIKGKFKHFMEKEIFHQPISLEDTILNFADKKTNSVFLPKNKIDFNDISNVILVACGTAYHSCMIAKYWLEQMTDKNVSIDIASEYRYKKNNIDKNSIAIVISQSGETMDTLECLKKFKQNDLITISIVNVLNSSIARMSDYVLPTLAGPEIGVASTKAFTAQLAVLALLGLHIQQQNNDIEKNVFNSLFSIHESIKKILNDFKRFEEIAHSLRDAKSIFYIGRGIMYPIALEGALKLKEITYKHCEGYAAGELKHGPLALIEDQIP

SEQ ID NO: 125714 - protein, 256 aa, Unknown
  Bacterial polypetide isolated from the Sargasso Sea
ADTAAALDICKKNKVKTCSLVNVVESTIARNSDWVLPIHAGPEIGVASTKAFLGQLIVLYILTLKLAIYRGDIDKKNYDNNLQNLQKLPDAIKNTLKLESEIQLMAKEFLDAKGSMFLGRGNSFPVALEGALKLKELSYLHAEGYPAGEMKHGPLALIEEGLPVIVIAPNDRYYEKTLSNTQEVIARGGKIFFITDNKKRLLSTNIRFRLRVPRVDNLLSPLLLTIPLQLLAYHVALLKNCDIDKPRNLAKSVTVE

SEQ ID NO: 125715 - protein, 301 aa, Unknown
  Bacterial polypetide isolated from the Sargasso Sea
MSKEIFEQSITAKNCINEYIDSLKKDINIYDFPVKPEKINKIVLIGCGTAYHSCLVAKYWFEELTTIDVEIDIASEFRYRKLKFNSDNLYIFVSQSGETADTAAALDLCKKNKVKTCSVVNSVESTIARNSDWVLPIHAGPEIGVASTKAFLGQMIVLYILCLKLAQRRKDINISSYQINIKNLKTLPEAIKKSLKVENSIQAMAKEFLDAKGSMFLGRGLSFPIALEGALKLKELSYLHAEGYPAGEMKHGPLALIEEGLPVIVIAPKDKYFEKTLSNMQEVIARGGKILFITDHKKEVI

SEQ ID NO: 125716 - protein, 263 aa, Unknown
  Bacterial polypetide isolated from the Sargasso Sea
GSLGIGHVRWATHGVPNQVNAHPHSSDEVSVVHNGIIENSNDLKKDLEKKGYKFKSQTDTEVITFLLTDFLKDFDLVDAINKTLKILNGSFAVGILFKKYKNIVVGARRGSPLAVGYGPEENYLGSDSYALKSMTNKITYLDDGDICILTNNKIDFYNSKNKKINKEILTLSNDKHTAEKGDYKDFMSKEINEQNVTTKTCIKEYVDQLRKDINLYNFPISPKDIKKIVLIGCGTAFHSCAIAKYWFEELTNIPVESDIASGI

SEQ ID NO: 125717 - protein, 267 aa, Unknown
  Bacterial polypetide isolated from the Sargasso Sea
NLQILDVNIDIASEFRYRKNRFKKDTVYVFVSQSGETADTYAALDLCNKNNMKTCAVVNVIESSIARDSNFVLPIHCGPEIGVASTKAFLGQILVLYILALKLGSMRNEIKKKEYQEKIKGLITLPSLIEKTLLHDNDIQAISSTFNEAKGSMFLGRGYSYPIALEGALKLKELSYVHAEGYPAGEMKHGPLALIEEGMPVVVLAPRDNYYKKTISNMQEVIARGAKVLLITNKSKDEVVSENIWETIEVENTNDDLLPFLLTIPLQ

SEQ ID NO: 125718 - protein, 98 aa, Unknown
  Bacterial polypetide isolated from the Sargasso Sea
EDGMPVIVLAPKDRYFEKTISNMQEVIARGGKVIMITDDTSTTMSENIRFKFQIPKTNSTLNPFLLSIPLQFLAYHVALLKNCDIDKPRNLAKSVTVE

SEQ ID NO: 125719 - protein, 266 aa, Unknown
  Bacterial polypetide isolated from the Sargasso Sea
LFVCISQSGETADTMAALNYAKEEKYLGIVTICNVPTSTMARESDWKIFTNAGPEIGVASTKAFTTQLAALMLLACSISKSKGINGDKRSEAIKDLANTPELVKEAFGLKKHIDDIVEKIADKKNALYLGRGVYFSIAQEGALKFKEITYIHAEAYPAGELKHGPLALVDEMTPVVALAPEDELVEKLVSNLEEVKSRGGTLYVFGNATSKIKIEKGKFMNMPDCGYYNAPIVYTIPLQILAYEVACSIGTDLDQPRNLAKSVTVE

SEQ ID NO: 125720 - protein, 268 aa, Unknown
  Bacterial polypetide isolated from the Sargasso Sea
ILKKFLEKKGYIFKSQTDTEVIAHLVTEYLKKNSLKDSIIKVLKKLHGSFALGIIFKDQNNLMVGAKRGSPLAVGYGPNENYLGSDSYALKSMTNKISYLDDGEFCIVKKDEIEFFDTEGTKVNKKVMNLSKDEIDYDKGDYKYFMEKEIDEQPSTITDCINEYVDKHNKQINIYNFPWKISSIDSIMLIGCGTAFHSCLMAKYWMEQNTNLDVSVDIASEFRYRKVRFKKNCLYIVVSQSGETADTHAALDLCKKNNMKTCAVINVI

SEQ ID NO: 125721 - protein, 187 aa, Unknown
  Bacterial polypetide isolated from the Sargasso Sea
MCGIIGVVGKNKAEGLLLEGLRRLEYRGYDSAGIATLVDNKIDKRRASGKISNLTKLLKENPLPGSTGIAHTRWATHGAPNENNAHPHANDKVAIVHNGIIENYIEIREELIAKGHKFHTETDSEVIVHLISNYIQNGMDNVSAVRKSIKRLDGAFALGILLAGKEDILIAARQDSPLAIGYGKDEM

SEQ ID NO: 125722 - protein, 281 aa, Unknown
  Bacterial polypetide isolated from the Sargasso Sea
MKGTIGIGHVRWATHGLPNSINAHPHSSQNVSVVHNGIIENSTLLKKFLVSKGHQFKSQTDTEVIVHLITENLKTENIVNSIKKTLKSLHGSFALGIIFKDQPDLIIGARRGSPLAVGYGPNENYLGSDSYALKSMTNKITYLNDGEFCVIKKDHVEFFNDDGIKINKKVLELSSSEEKYDKGDYKHFMAKEIEEQPNTLKNGINEYIDTSNNNINIYNFPWKIEEISSVTLIGCGTAYHSCLMAKYWFEELTSLDVNVDIASEFRYRKNRFKKDTLYVFV

SEQ ID NO: 125723 - protein, 155 aa, Unknown
  Bacterial polypetide isolated from the Sargasso Sea
MCGIIGINSKKPVSASIINSLKKLEYRGYDSAGIATLSDGFINEVKSEGRVDNLEKNSVVQNMVGTIGIGHVRWATHGLPNRINAHPHSSQNVSVVHNGIIENSTLLKKFLVSKGHKFKSQTDTEVIVHLITENLKTDNIVNSIKKTLKSLHGSF

SEQ ID NO: 125724 - protein, 224 aa, Unknown
  Bacterial polypetide isolated from the Sargasso Sea
FVLPIHCGPEIGVASTKAFLGQMLVLYILCLKLAYDRKDIDKKIVSSKVKSLLDLSKNVKKTLFTEDQIQLVCKSFVDAKGSMFLGRGFSYPIALEGALKLKELAYVHAEGYPAGEMKHGPLALIEDGMPVVVLAPRDEYFKKTISNMQEVIARGAKVLLITNKSKDEVVHENIWQSIEVENTNDDLLPFLITIPLQKLAYHSALNKGYDIDKPRNLAKSVTVE

SEQ ID NO: 125725 - protein, 288 aa, Unknown
  Bacterial polypetide isolated from the Sargasso Sea
NGLEKLEYRGYDSAGIAIINSETNCISCNKAEGKLKNLISNLNDHNIPGTVGIGHTRWATHGKPEVKNAHPHIDSSGNIAVVQNGIIENFQDLKNKLEEEGIIFNSDTDTEVIPHLIQRELNNLSKLNLENNGSTLLVAVRNVLSDLEGSYALAVLWSGAPTSLVVARRQAPLIIGLGEGEFICASDTPAIANFTNIILPMEDEEIALLTPLGIEIYDSGNERQYRNPVSLKVSEQIIDKMNFKHYMLKEIYDQPQTAKNWLENYLIKNSDNDQYQINYPFDTEFLNQ

SEQ ID NO: 125726 - protein, 262 aa, Unknown
  Bacterial polypetide isolated from the Sargasso Sea
SKEELNYNKGDYKYFMEKEIEEQPSTINDCINEYVDKYNNQINIYNFPWKISSLKAIVLIGCGTAYHSCLVAKYWLEQNTNLDVSIDIASEFRYRKVRFKKDCLYVFVSQSGETADTYAALELCKKNKMKTCSVVNVVESSIARNADLVLPIYCGQEIGVASTKAFLGQMLVLYILSLKISFEQKVITKKTYHSKIKNLLLLSNSAKKTLKLDHKLLKIGKVFAQAKGCMFLGRGYSFPIALEGALKLKELAYVHAEGYPAG

SEQ ID NO: 125727 - protein, 297 aa, Unknown
  Bacterial polypetide isolated from the Sargasso Sea
KSKLGIAHTRWATHGEPSEENAHPHKSNERVYIVHNGIIENYLDLKDFLKKEGYSFTSQTDSELIAHMLEHFLNQGNSMLNSMYLTKDKLDGAYAIAAIDLEDDQNIIIARSKSPLLIGIGIDELLAASDPLALGELTNEFIFLEDGDVAELSSDNYSIYDINKEKVEREISKIDISSQSTSKGEYKHFMEKEIYEQPEAILNTIDGRVGGDDVLDNIFGLGSSEMFEKIKRIQIVACGTSLHAGRVAANWLSSISELPTQIDYASEYRYRNPHVDEDSLLVTISQSGETADTLAAL

SEQ ID NO: 125728 - protein, 86 aa, Unknown
  Bacterial polypetide isolated from the Sargasso Sea
NYYKKTISNMQEVIARGAKVLLITNKSNDEIISENIWETIEVESTNQDLLPFLLTIPLQKLAYYSALKKGFDIDKPRNLAKSVTVE

SEQ ID NO: 125729 - protein, 129 aa, Unknown
  Bacterial polypetide isolated from the Sargasso Sea
REGALKLKEISYIHAEAYAAGELKHGPLAIVDENMPVVAVAPNNVVLEKLKSNLEEVKARGGKLYIFADKKAGFKSDEISQVFEIDAPMNPVAPILFTIPLQLLAYHCAIIKGTNVDMPRNLAKSVTVE

SEQ ID NO: 125730 - protein, 129 aa, Unknown
  Bacterial polypetide isolated from the Sargasso Sea
AKEGALKLKEISYIHAEAYPAGELKHGPLALIDEEIPVIALAPESEIAEKLVSNLEEVKARGGTLYVFSDPSISMDLKSGRLINMPKCDFLLTPIIYTIPLQILSYEVALLRGTDIDQPRNLAKSVTVE

SEQ ID NO: 125731 - protein, 82 aa, Unknown
  Bacterial polypetide isolated from the Sargasso Sea
KTISNMQEVISRGAKVLLITNKSTDEIYSENIWEQIEVDNISDELIPFLTTIPLQKLAYYSALDKGYDIDKPRNLAKSVTVE

SEQ ID NO: 125732 - protein, 274 aa, Unknown
  Bacterial polypetide isolated from the Sargasso Sea
LTDLDISVDIASEFRYRKNKFKSESLYIFVSQSGETADTYAALDLCNKNKMKTCSVVNVVESSIARDSKFVLPIHCGPEIGVASTKAFLGQMLVLYLFSIKIAFVRGSIDKDKYQTKIKSLLSLADLVKNTLDTDNQIQSACNSFVDAKGSMFLGRGSSFPIALEGALKLKELAYIHAEGYPAGEMKHGPLALIEDGMPVVVIAPRDYYYNKTISNMQEVIARGAKVLLITNKSTDEIFSENIWQKIEVENTDEDLLPFLITIPLQKLAYHSAL

SEQ ID NO: 125733 - protein, 156 aa, Unknown
  Bacterial polypetide isolated from the Sargasso Sea
MCGIIGIASTKNVSASILNSLRKLEYRGYDSAGIATLESGIIKEVKCEGRVDALENNLSKQKIDGNIGIGHVRWATHGVPSTVNAHPHSSDKVSVVHNGIIENSTILKKLLIKKGYIFKSQTDTEVIVHLITDYLKKNNLKNSIIKMLKRVHGSFA

SEQ ID NO: 125734 - protein, 245 aa, Unknown
  Bacterial polypetide isolated from the Sargasso Sea
MCGIIAAASNRNVGKLLVQGLHKMEYRGYDSAGIALHQKDQIAHLRTLGKVKLLEEKMIAEKPKSKLGIAHTRWATHGEPSEENAHPHKSNDRVYIVHNGIIENYLDLKEFLKREGYTFSSQTDSELIAHLLEHFLSMGNSMIDSMYLTKEKLDGAYAIAAIDREDEQNIVIARSKSPLLIGIGTDEYLAASDPLAIGQLTNKFIFLEDGDVAELTSKSYTIFDDDKQKVSREITNIDIFNQATS

SEQ ID NO: 125735 - protein, 101 aa, Unknown
  Bacterial polypetide isolated from the Sargasso Sea
MCGIVGAVAQRDVVDILVEGLRRLEYRGYDSAGVAVVTESGELTRLRRLGKVKELADAVAEKPVVGGTGIAHTRWATHGEPSERNAHPHVSSNITVVHNGI

SEQ ID NO: 125736 - protein, 257 aa, Unknown
  Bacterial polypetide isolated from the Sargasso Sea
HVERIYEQPQVIGDTLHSYVNPVTRAVSLPELGFDPASVTRLTLIACGTSYYACLTAKYWFETIARIPVEVDIASEFRYREAPLPAGGATLVISQSGETIDTLAALRYARSQDQKILSVVNVPESAIARESDAVLQTYAGPEIGVASTKAFTTQLTVLACLAIAMAHAREMIDDTERGRLVGALTEVPARAAEILNHDEQLAQIAHDIAEARDVLYLGRGTSYPLALEGALKLKEISYIHAEGYAAGEMKHGPIALI

SEQ ID NO: 125737 - protein, 90 aa, Unknown
  Bacterial polypetide isolated from the Sargasso Sea
LIPKDAVYEKVLLNLEETKARKGPIIAVVSEGDDRVQHLADEVIELPECPDFLNPIVASIPLQLLAYHIAVFRGCDVDKPRNLAKSVTVE

SEQ ID NO: 125738 - protein, 201 aa, Unknown
  Bacterial polypetide isolated from the Sargasso Sea
VACGTTYNASLVAKYWIEEVSDIMCTAEIASEYRYRTINVPKDTLFVAISQSGETADTIYSIKKAKQSNYSSVLSICNVPESTITRLSDYSYLMQAGPEISVASTKAFTSQLIALLLLATTLSRTSDVKLEAKIIGQIKSLPKILTKTFELEKSMQSMARLFKNKNHTLFLGRGASYPIALEAALKLKEISYIHAEGYAAG

SEQ ID NO: 125739 - protein, 120 aa, Unknown
  Bacterial polypetide isolated from the Sargasso Sea
MCGIIAAASNRNVGKLLVQGLHKMEYRGYDSAGIALHQTDQIAHLRTLGKVKLLEEKMIAEKPKSKLGIAHTRWATHGEPSEENAHPHMSNERVYIVHNGIIENYLDLKDLLKKERYSLS

SEQ ID NO: 125740 - protein, 102 aa, Unknown
  Bacterial polypetide isolated from the Sargasso Sea
MCGIVGITSNKEVTTRIINSLKRLEYRGYDSAGIATLKNGFINEVKCEGRVEALEKNIINSNLQGVIGIGHVRWATHGKPSTINAHPHSSETVSVVHNGIIE

SEQ ID NO: 125741 - protein, 203 aa, Unknown
  Bacterial polypetide isolated from the Sargasso Sea
TTQLVGLLMLTLILGRHHGLSSAAENTINNSLRALPDSLDSVMLLEDQIIEMAEDFDQKEHALFLGRGIHYPVAMEGALKLKEISYIHAEAYPAGELKHGPLALVDSEMPVVAVAPNDDLLAKLQSNLEEVRARGGKLYVFGHSAAHQEDESITKFIELPEVPELIAPLIYSIPLQLLAYHVAILKGTDIDQPRNLAKSVTVE

SEQ ID NO: 125742 - protein, 246 aa, Unknown
  Bacterial polypetide isolated from the Sargasso Sea
GLPNSINAHPHSSQNVSVVHNGIIENSTLLKKFLVGKGHKFKSQTDTEVIVHLITENLKSNDIVNSLKKTLKSLHGSFALGIIFKDQPDLIVGARRGSPLAVGYGPNENYLGSDSYALKSMTNKITYLDDGEFCIIKKDQVEFFNEDGIKINKKVLELSSKEEKYDKGDYKHFMAKEIEEQPVTLKNGIKEYLDNINNDINIYNFPWKVNEIETITLIGCGTAYHSCLMSKYWFEELTSLDVNVDI

SEQ ID NO: 125743 - protein, 268 aa, Unknown
  Bacterial polypetide isolated from the Sargasso Sea
SYALKSMTNKISYLNDGDFCIVKKDQVEFFDINGNKVNKKILKLSSNEQDYDKGDYKHFMAKEIEEQPITIKNCVNEYINKISREINIFNFPWKVNEISSVVLIGCGTAYHSCLMAKYWFEQLTNLDVSVDIASEFRYRKNRFKKDALYIFVSQSGETADTFAALDLCNKNRMKTCSVVNVVESSIARESKFVLPIHCGPEVGVASTKAFLGQMLVLYILCLKFALMRKEIKKNVYMEKIKSLISLSNLTKQTLETDSKIQSICSSFS

SEQ ID NO: 125744 - protein, 286 aa, Unknown
  Bacterial polypetide isolated from the Sargasso Sea
LSKNAHPHASNGTIYIVHNGIIENHDELRKRLSNDGYKIESETDSELIAHLIYSNKENGKSTLEALIEATKELHGAYSIAVIDTEQKGKIFAAKQKSPLLIGRGIEENFVASDPLAIAGLAESFYLLEDGDFALITQDEIKIVGSDSEPVQREETIIDTSVKEASKDGYKHFMEKEIYEQPKAIANAIEGRTTDGDVLDNIFGLGSSESFKGVKRIQFVACGTSLHAAKTARKWFEELCETPCYIDFASEYRYRNPLVEEDTLFVCISQSGETADTMAALNYAKEE

SEQ ID NO: 125745 - protein, 259 aa, Unknown
  Bacterial polypetide isolated from the Sargasso Sea
NYCNEVTYLKDGDIAIIKNDASEIFDNQNEFINRKSQIIDKTVTLAEKGVFKHFMSKEIHEQPSVIQDSISHYINNEDLTVNLPKFPFNITNLKNITLVACGSSYYSGLVAREWFEKLARVKVDVEIAFEFRYREAPMDSSGLTVFISQSGETADTLAALKHCKKLNQKTISIVNVPNSSMCRNSDSSLKIFAGPEIGVASTKAFTCQLVVLASLAIHIGRINGNLSDDDENNYVKSLLDVPRLISNVLDQEEVLIKIV

SEQ ID NO: 125746 - protein, 171 aa, Unknown
  Bacterial polypetide isolated from the Sargasso Sea
MRSLSDTINETLKLKDEILEIAPEIANKDNALFLGRGIFYPIAKEGALKLKEISYIHAEAYPAGELKHGPLALIDENMPVIALAPESEIAEKLVSNLEEVKARGGTLYVFSDPSVTMELKSGKVIKMPKCDFLLTPIIYTIPLQILSYEVALLRGTDIDQPRNLAKSVTVE

SEQ ID NO: 125747 - protein, 240 aa, Unknown
  Bacterial polypetide isolated from the Sargasso Sea
LSTTTICNVPTSSLARESDFFLYTNAGPEIGVASTKAFTTQLTGLMLLVLSLAKSRKMNPKLRKRIITALRKLPEKIEKALELKQQIIKIAPEIAKKENALFLGRGIFYPISKEGALKLKEISYIHAEAYPAGELKHGPLALIDENMPVIALAPESEIVEKLVSNLEEVKARGGMLYVFSDTSIKMDLSSGKFINMPECDFLLKPILYTIPLQILAYEVALLRGTEIDQPRNLAKSVTVE

SEQ ID NO: 125748 - protein, 302 aa, Unknown
  Bacterial polypetide isolated from the Sargasso Sea
KNEAKLGDYKNFMSKEIFEQPNTIKNCLNEYIDKIRNDINLYDFPINPKKIDKIFLVGCGTAYHSCQVAKYWIEELSDLNVETEVGSEFRYRKIKFNPNTLYIFVSQSGETADTAAALEIAKKNKMKTCSVINVVESSIARNSDWVVPIHAGPEIGVASTKAFIGQMLVLYIMSLKISKIRGNIDDKKYIEKIKNLKNLPDSIERSLKTEEHIQIFAKDFLSAKGSMFLGRGPSFPIALEGALKLKELSYLHAEGYPAGEMKHGPLALIEDGLPVIILAPKDKYFEKTISNMQEVIARGGKV

SEQ ID NO: 125749 - protein, 310 aa, Unknown
  Bacterial polypetide isolated from the Sargasso Sea
GDFKHFMAKEIEEQPITIKTGIKEYVDNVNKDINILNFPWKINDIKSITLVGCGTAYHSCLMAKYWFEELTTLDVNIDIASEFRYRKNRFKKDTLYIFVSQSGETADTYAALDLCNKNNMKTCAVVNVIESSIARDSNFVLPIHCGPEVGVASTKAFLGQILVLYILALKLGSLRNEIEKNQYQEKIKDLKDLPGLLEKTLLHDNDIQAISSTFNEAKGSMFLGRGYSYPIALEGALKLKELSYVHAEGYPAGEMKHGPLALIEEGMPVVVLAPRDNYYKKTISNMQEVIARGAKVLLITNKSKDEVISE

SEQ ID NO: 125750 - protein, 181 aa, Unknown
  Bacterial polypetide isolated from the Sargasso Sea
ETEQQQMMPALHLPVALGQALELSNQVEEIASRYHSFGDFLFLGRGLGFPIAIEGALKLKEISYINAIGYAAGEMKHGPIALIDSQMPTIAIAPRDTVFEKMVSNIQQIRARQGKVIALVSHGEKSLNDLADEIIELPEIDPLLSPIVTVVPLQLLAYHIAQKRGLDIDQPRNLAKTVTVE

SEQ ID NO: 125751 - protein, 278 aa, Unknown
  Bacterial polypetide isolated from the Sargasso Sea
GIIAAASNRNVGKLLVQGLHKMEYRGYDSAGIALHQKDQIAHLRTLGKVKLLEEKMIAEKPKSKLGIAHTRWATHGEPSEENAHPHKSNERVYIVHNGIIENYLDLKEFLKDEGYSFSSQTDSELIAHLLEYFLNKGNSIVDSMYLTKEKLDGAYAIAAIDREDDSNIVIARSKSPLLIGIGTDEFLAASDPLAIGQLTNEFIFLEDGDVAELTSESYTIFDNTKQKVTREITHIDISNQATSKGEYKHFMEKEIYEQPDAILNTIDGRVGGDDVLEN

SEQ ID NO: 125752 - protein, 148 aa, Unknown
  Bacterial polypetide isolated from the Sargasso Sea
MCGIIGAASSRGVGKILVNGLKKMEYRGYDSAGLVLNNESEAIQLKTLGKVAKLEDLMIEKKPRAQSGIAHTRWATHGEPSKKNAHPHASNETIYIVHNGIIENHDELRERLLNDDYKIESETDSELIAHLIYSKKKNGKSTLEALIE

SEQ ID NO: 125753 - protein, 281 aa, Unknown
  Bacterial polypetide isolated from the Sargasso Sea
SSQIINSLKKLEYRGYDSAGIATIDSGFIKEVKCEGRVESLEEAVSKSKLTGNVGIGHVRWATHGIPNTINAHPHSSENVSVVHNGIIENSTLLKKFLVNKGHKFKSQTDTEVIVHLITEYLKKDNLKDAIIKVLKKLHGSFALGIIFKDNPNLIIGARRGSPLAVGYGPGENYLGSDSYALKSMTNKISYLNDGEFCIIKKDNVEFFNQSGKKINKKILHLSSNEQNYEKGDYKHFMAKEIDEQPNTIKNCVNEYIDKINNDINIFNFPFKEKEINSITL

SEQ ID NO: 125754 - protein, 234 aa, Unknown
  Bacterial polypetide isolated from the Sargasso Sea
MCGIIGITSTKPVSSSIINSLKKLEYRGYDSAGIATLLDGKINEVKCEGRVKALENNISKIKMLGTVGIGHVRWATHGVPSTLNAHPHSSESVSVVHNGIIENSTLLKKFLVEKGHKFKSQTDTEVIVHLITEYLKENDLKNSILKMLKKLHGSFALGIIFKDQPDLIVGARRGSPLAVGYGPNENYLGSDSYALKSMTNKITYLDDGEFCILKKNSVEFFDDTGKKVNKSVLE

SEQ ID NO: 125755 - protein, 239 aa, Unknown
  Bacterial polypetide isolated from the Sargasso Sea
QLGVTNRPESSLSRQVPHILNIGAGIEVGVAATKTFIGQLLAFYGLAISFAARRGSRSEAEIQALVDELRRLPQQLQELVSLHDQRSEELAHRFAETQDVIFLGRGINYPIALEGALKLKEISYIHAEGYPAGEMKHGPIALLDAHVPVVSIAVPGPVFEKVLSNAQEAKARDARLIGVAPQGPDTTLFDDLLPVPEVSEWISPLLTVVPMQLLSYHIAAHRGLDVDQPRNLAKSVTVE

SEQ ID NO: 125756 - protein, 280 aa, Unknown
  Bacterial polypetide isolated from the Sargasso Sea
MCGIVGAVAQRDVVDILVEGLRRLEYRGYDSAGVAIISPTGELQRIRRLGKVKELSDAVKLTPVVGGTGIAHTRWATHGEPSERNAHPHVSGNISVVHNGIIENHGPLREMLKAKGYVFNSDTDTEVIAHLVAEEMKTAGSLLAAVQTAVKQFNGAYGTVLMDQNDPSHLVVARSGSPLVIGFGIGENFIASDQLALLPVTRRFMFLEEGDVAEITRTSVTVYDKNGKQVERTITESTASYDAGDKGQYRHFMLKEIYEQPHAINNTLEGRLGSDSVLTK

SEQ ID NO: 125757 - protein, 304 aa, Unknown
  Bacterial polypetide isolated from the Sargasso Sea
TQIQYFAACKGSPLIIGKGINENFIASDITPILSDTQQYITLDDDEFAKITPTKTLIYNANKKIISKKVNISKIKSKHSSLSGHKHFMHKEIYEQKSILKEMANRYVGTNKILPNIFGPGTDKILANIDHIHFVACGTSYHASLVAKDWIEEYTTITCTAEVASEYKYKKINVLPRTLFVSISQSGETADTISSLKKALKLSYSNTLAICNVAESTLTRLSKLVFLMNAGPEISVASTKAFTSQLFTLLLLTIVVSRKFGNIENRMVKDIGKINEIIDSLYKLEADIKKISTKFKNKEHTIFLG

SEQ ID NO: 125758 - protein, 194 aa, Unknown
  Bacterial polypetide isolated from the Sargasso Sea
IAIGRDRGNLTRAQEEEMSSALTEVPSRAAEVLNHDAALRNLAEQIYEERDVLYIGRGTSFAIALEGALKLKEISYIHAEGYAAGELKHGPIALIDDGVPVIVIAPNDNSFEKTAANMQEVLARGGRVILFSDEDGVNKVGLQAFASITLPKVSPLVAPILYAIPIQLLAYHVAALKGTDIDQPRNLAKSVTVE

SEQ ID NO: 125759 - protein, 152 aa, Unknown
  Bacterial polypetide isolated from the Sargasso Sea
YFVEKIADKKNALYFGRGVYFSIAQEGALKFKEITYIHAEAYPAGELKHGPLALVDEMTPVVALAPEDELVEKLVSNLEEVKSRGGTLYVFGNATSKIKIEKGKFMNMPDCGYYNAPIVYTIPLQILAYEVACSIGTDLDQPRNLAKSVTVE

SEQ ID NO: 125760 - protein, 228 aa, Unknown
  Bacterial polypetide isolated from the Sargasso Sea
LVLGLSKERQFFSSDPISLLKFTQDFIYLEDEDLACLRPSGVEIFDAQLNPVARKSSRLELDEESSGKAHFRHYMLKEIYEQEKVFCETMSRLLNEDKTGFDLSQWPLKNLDPKKFDRVHIIACGTAYYSGLMGQYVLEEAFSCPVTVELASEFRYKKTFLNEKTLLIAISQSGETADTLSGLEHAKKLGATTLCLCNSPRSAIDRQADLSLLMQAGPEIGVASTKAF

SEQ ID NO: 125761 - protein, 107 aa, Unknown
  Bacterial polypetide isolated from the Sargasso Sea
KHGPIALIEKDVPVIVIAPSGELYEKTLSNMQEVIARGAKVILLTDSQGKKEIGEEASDIIELPVIDSFVAPILYSVPVQLLAYHVAVAKGTDVDQPRNLAKSVTVE

SEQ ID NO: 125762 - protein, 295 aa, Unknown
  Bacterial polypetide isolated from the Sargasso Sea
SDIFEKVKRIQVVACGTSLHAGRVAANWFSAISELPTQIDYASEYRYRNPHVDEDSLLVTISQSGETADTLAALRYAKEKDYLSTLTICNVPTSSLARESDYSIFTNAGPEIGVASTKAFTTQLAALMLLALSLAKSRGKNPKLRTRVITAMRSLADTVEETLKLKDAILEIAPEIANKDNALFLGRGIFYPIAKEGALKLKEISYIHAEAYPAGELKHGPLALIDEDMPVIALAPESEIAEKLVSNLEEVKARGGTLYVFSDPSISMDLTSGRLINMPKCDFLLTPNYLYNSSS

SEQ ID NO: 125763 - protein, 212 aa, Unknown
  Bacterial polypetide isolated from the Sargasso Sea
MCGIIGIASNKPVSINIINSLKKLEYRGYDSAGLATLSSNLIDEKKCSGRVDELEKILFKNPSNGNIGIGHVRWATHGVPNIVNAHPHSSEVVSVVHNGIIENSDELKKDLEAQGLKFKSQTDTEVITLLVTQFLQNSKPLESVFKTLKKLKGSFALGIIFKDFSDIIIGARRGSPLAVGYSKEENYLGSDSYALKSMTNKISYLDDGELCM

SEQ ID NO: 125764 - protein, 301 aa, Unknown
  Bacterial polypetide isolated from the Sargasso Sea
PLAVGYSNNENYLGSDSYALKSMTNKISYLDDGELCVLTKSEVSFYNDKKNKINKKIHIVSDEENIADKGDYKNFMSKEIFEQPITAKKCVNEYIDSLKKDINIYNFPINPKDLKKIILIGCGTAYHSCLVAKYWLEELTKIDVEIDIASEFRYRNLKFNNKNLYIFISQSGETADTAAALDICKKNNVKTCAIVNVIESTIARNADWVLPIHAGPEIGVASTKAFLGQLIVLYILSLKLSSKRNEINQTTYNQNIENLKTLPKFLKKTLDLETNIQLLAKEFLDAKGSMFLGRGSSFPIA

SEQ ID NO: 125765 - protein, 130 aa, Unknown
  Bacterial polypetide isolated from the Sargasso Sea
LEGALKLKELSYIHAEGYPAGEMKHGPLALIEDGMPVVVLAPRDNYYKKTISNMQEVIARGAKVLLITNKSKDEIVSENIWKTIEVETTNEDLLPFLLTIPLQKLAYYSALKKGFDIDKPRNLAKSVTVE

SEQ ID NO: 125766 - protein, 202 aa, Unknown
  Bacterial polypetide isolated from the Sargasso Sea
MLVLYLLCTKISYEQKTIIKKTYQNKIKDLLLLSKCTKETLNIDDKIYNLGKDFANSKGSMFLGRGYSYPIALEGALKLKELAYVHAEGYPAGEMKHGPLALIEEGMPVVVIAPRDVHYKKTISNMQEVISRGAKVLLITNKSTDEIFSENIWEQIEVENISDELLPFLTTIPLQKLAYYSALDKGFDIDKPRNLAKSVTVE

SEQ ID NO: 125767 - protein, 210 aa, Unknown
  Bacterial polypetide isolated from the Sargasso Sea
ASTKAFLGQLTVLYILCLKLAFSRKDIDENTYVKNISNLKKIPEAIKKCIKSESDVQLMAKEFISAKGSMFLGRGSSFPIALEGALKLKELSYLHAEGYPAGEMKHGPLALIEEGLPVIVIAPKDKYFEKTISNMQEVIARGGKILFITDNKKESLNENIRFGLRVPHIDNFLSPILLSLPLQMLAYHVALLKNCDVDKPRNLAKSVTVE

SEQ ID NO: 125768 - protein, 300 aa, Unknown
  Bacterial polypetide isolated from the Sargasso Sea
LEGRLTKNESQEGIFGVGFEKEMKNITNIQVVACGTSFHAGRIFEFWSHKFLGINCRVDYGSEYQYQEPIKTDKTLLVTISQSGETADTLSSLKFAKKSGDPVTLTICNVANSSLCRESDYALLTKAGPEIGVASTKAFVTQLACLNLLLLTLMRVHNKLPTARKKITAALRDLPKLINKTLKMTGEYKKVARLLFKRNSALFLGRGLYFPIAREGALKLKEISYIHAEAYPGGELKHGPLALIDKNMPVIALAPDNEHLDKITSNIEEVAARKGKVITIGPLGRTKIDKNGGHIKIPKT

SEQ ID NO: 125769 - protein, 34 aa, Unknown
  Bacterial polypetide isolated from the Sargasso Sea
LFTIPLQLLSYHVALLKKCDIDKPRNLAKSVTVE

SEQ ID NO: 125770 - protein, 45 aa, Unknown
  Bacterial polypetide isolated from the Sargasso Sea
MPDCPDLIAPILYIIPAQLLSYHVALKKKTDVDKPRNLAKSVTVE

SEQ ID NO: 125771 - protein, 281 aa, Unknown
  Bacterial polypetide isolated from the Sargasso Sea
AIALIFSSDNNKIYGARSGSPLAVGWGKNEMFLGSDAAALSNETINISYLEEGDWVELSRDGANFWNKSGQAVKREIVETKFNPIQIAKGNFPHYMLKEIYEQPTVIGDTLNTFFNPAESEIKLPDLGVNLEEISKVTIVACGSSYFAGLVAKFWIERYARVSVEVDISSEFRYRETPLPKDGLTLFISQSGETADTLAALRYAKSQSQHILSLVNVRESTIARESDGLLLINAGPEIGVASTKAFTCQLVALAAFTISIGVSKKIIDENQAKKLSKAISE

SEQ ID NO: 125772 - protein, 157 aa, Unknown
  Bacterial polypetide isolated from the Sargasso Sea
KDEILEIAPEIASKDNALFLGRGIFYPIAKEGALKLKEISYIHAEAYPAGELKHGPLALIDEEMPVIALAPESEIAEKLVSNLEEVKARGGTLYVFSDPSISMDLKSGRLINMPKCDFLLTPIIYTIPLQILSYEVALLRGTDIDQPRNLAKSVTVE

SEQ ID NO: 125773 - protein, 284 aa, Unknown
  Bacterial polypetide isolated from the Sargasso Sea
ARISLRTLGKVSNLEDAMIEQKPKAHSGIAHTRWATHGIPSEKNAHPHGSNRNIYIVHNGIIENHDELRERLVNEGYEIQSQTDSELIAHLIHFNKEKGKTTLDALIETTKELDGAYSIAVIDTEEKGKIFAAKQKSPLLVGKGIEENFIASDPLAIAGLAESFYLLEDGDFAEITKDEIKIVGSNGEALSREETIIDTSVKEASKDGYKHFMEKEIYEQPKAITNAIEGRTADGEVLDNIFGLGSSDAFKNVKRIQFVACGTSLHAAKTARKWFEELCETPCY

SEQ ID NO: 125774 - protein, 204 aa, Unknown
  Bacterial polypetide isolated from the Sargasso Sea
IGQMLVLYIMSLKISKIRGNIDDKNYIEKIKNLKNLPQGIENSLKTEELIQIFAKDFLTAKGSMFLGRGSSFPIALEGALKLKELSYLHAEGYPAGEMKHGPLALIEDGLPVIILAPKDKYFEKTISNMQEVIARGGKVLLISDKHDEVINENIRFKIEMPFIDELLNPFLLTIPLQLLAYHVALLKKCDIDKPRNLAKSVTVE

SEQ ID NO: 125775 - protein, 74 aa, Unknown
  Bacterial polypetide isolated from the Sargasso Sea
MCGIVGGTSNRNILPILVEGLRRLEYRGYDSAGVAYKANGKISLVKNAGRVEDLAEKLNLEKNNAKIGIAHTRW

SEQ ID NO: 125776 - protein, 284 aa, Unknown
  Bacterial polypetide isolated from the Sargasso Sea
RGAFAITVMHVDYPRKLLAARVGSPLVVGIGIGENFVASDVQALRPVTNRFLFLEEGEIVELTSTDISIKGLNRAAIGSRTIELEDVQDTAISKGHFRHFMLKEIYDQPDALRQTLEGRLTSDSVLVPSFGVNAESIFQKVKAVQIVACGSSYYAGMVARYWFEEIARIPCNVEVASELRYRKITVLPNTLLVTISQSGETADTLAAQRAANDRNYLASLCICNVPNSTMVREADLSLMINAGIEVCVASTKAFTNQLTDLMMLVMALGHYNHMTPSTHKEIVQ

SEQ ID NO: 125777 - protein, 265 aa, Unknown
  Bacterial polypetide isolated from the Sargasso Sea
FVSQSGETADTYAALDLCNQNNMKTCSVVNIIESSIARDSKFVLPIHCGTEIGVASTKAFVGQMLILYILALKIGLMRQDIKKEVFVEKLIDLKKLPKLVEQTLLTDNKIQAISSTFNEAKGSMFLGRGFSYPIALEGALKLKELSYIHAEGYPAGEMKHGPLALIEEGMPVVVLAPRDNYYKKTISNMQEVIARGAKVLLITNKSKDEIISENIWETIEVETTNDDLLPFLLTIPLQKLAYYSALKKGHDIDKPRNLAKSVTVE

SEQ ID NO: 125778 - protein, 116 aa, Unknown
  Bacterial polypetide isolated from the Sargasso Sea
MQQGYHAAELKHGPIALLEKNTPVVSLLNDVPGKKKTRNNTEECIVRGAKIIAIVTEGDQDTNDDFKNKILIPKCPEMISTIPTVIALQLLAYHVAVFRGCDVDQPRNLAKSVTVE

SEQ ID NO: 125779 - protein, 293 aa, Unknown
  Bacterial polypetide isolated from the Sargasso Sea
MCGIVGYLGKKDSVPIILNGLHRLEYRGYDSAGIAVIGDDGVQYVKNAGNVSELSKLIDDSVLNGSIGIGHTRWATHGEPNNINAHPHFDKTGKIALIHNGIIENYNSIKEVLLKKDFEFKSETDTEVLVQLISEIYYSDGLNFEQAVQSALNQVIGAYGIVAFCLDEPNKLVAARHGSPLVIGIGDEEYFVASDASPIVEHTRNVIYLDEGEIVTITKSGHEIRSIVDDNIINKISTEIELSIDEIEKGEFSHHMLKEIHDQTHTITDTMRGRIDPLDGSAHLGGITEQMIE

SEQ ID NO: 125780 - protein, 164 aa, Unknown
  Bacterial polypetide isolated from the Sargasso Sea
TTLLTDNKIQAISNTFNEAKGSMFLGRGFSFPIALEGALKLKELSYIHAEGYPAGEMKHGPLALIEEGMPVVVLAPRDNYYKKTISNMQEVIARGAKVLLITDKSKDEIVSENIWEKIEVESANEDLLPFLLTIPLQKLAYYSALKKGYDIDKPRNLAKSVTVE

SEQ ID NO: 125781 - protein, 170 aa, Unknown
  Bacterial polypetide isolated from the Sargasso Sea
MCGIVGITSNKEVTTRIVNSLKKLEYRGYDSAGIATLKNGNLNEVKCEGRVEELEKNILKTNLQGEIGIGHVRWATHGKPSTINAHPHSSEKVSVVHNGIIENSTILKKILEKKGHNFKSQTDTEVIAHLVTEYLKKNNLKKAIVKVLKKLHGSFALGIIFKDYPDLIVG

SEQ ID NO: 125782 - protein, 195 aa, Unknown
  Bacterial polypetide isolated from the Sargasso Sea
SLKIAKMRKEIDKKIYQEKINSLFDLSKLTNNSLETDSKIQSVCSSFVNIKGSMFLGRGLSFPIALEGALKLKELAYVHAEGYPAGEMKHGPLALIEEGMPVVVLAPRDQYYKKTISNMQEVIARGAKVLLITNKSKDEIHSENIWKKIEVENTSEDLLPFLITIPLQKLAYYSAFKKGYDIDKPRNLAKSVTVE

SEQ ID NO: 125783 - protein, 229 aa, Unknown
  Bacterial polypetide isolated from the Sargasso Sea
MCGIVGITSTKSVSSLIINSLRKLEYRGYDSAGISTLEKGLIKEVKCEGRVDVLESNLLKKKLEGNVGIGHVRWATHGIPSSVNAHPHSSEKVSVVHNGIIENSTILKKFLTKKGYVFKSQTDTEVIVHLITDYLKKNDLKNSIIKMLKRVHGSFALGIIFKDQPDLIVGARRGSPLAVGYGPNENYLGSDSYALKSMTNKVTYLDDSEFCIVKKDSVEFFNEKGNRVN

SEQ ID NO: 125784 - protein, 171 aa, Unknown
  Bacterial polypetide isolated from the Sargasso Sea
MCGIVGIASKNDCIDNILSGLYSLEYRGYDSSGLATIKNNNFQYNKNIGKISNLEKSIKDNKITGNVVVAHTRWATHGKPSIKNCHPFIKNNCVLVHNGIIENYTDLIKYFSIKQKNIKSDTDSEIIAEIYNKLLNKFNNPIEAIKNLNKKIIGSFSFAFLVHGSKSIYVT

SEQ ID NO: 125785 - protein, 180 aa, Unknown
  Bacterial polypetide isolated from the Sargasso Sea
MCGIIGIVSKRQVVDRLINGLERLEYRGYDSSGVATIKNFNIYCTKSTGKLISLKEKLKNEDIDGCVGIGHTRWATHGEPTEINAHPHVTKNVALVHNGIIENFAEFKDDLLGKGISFNSQTDTEVIAKLVEEKISQDKCEPLEAVRLVVKQLSGSFALCFIFRGIENLIIATRRGSPLA

SEQ ID NO: 125786 - protein, 109 aa, Unknown
  Bacterial polypetide isolated from the Sargasso Sea
MCGIVGIVSNKSVSSSIVDALKKLEYRGYDSAGISTLNKGFIDEKKCSGRVENLEKILFENPSIGDLGIGHVRWATHGVPNQINAHPHSTEQVSVVHNGIIENSDKLKK

SEQ ID NO: 125787 - protein, 279 aa, Unknown
  Bacterial polypetide isolated from the Sargasso Sea
EQKGYKFKSQTDTEVIVYLITDYLKKYDLKETILKTLDNLKGSFALGVIFKDDPNTLVGARRGSPLAVGYGPDENYLGSDSYALKSMTNKISYLNDGEFCIVKKNNVEFFNNKSIKINKKILELSSNEKNYDKGDYKHFMAKEIEEQPITIKNCINEYINKISNEINISNFPWKKDEISSIKLIGCGTAYHSCLLAKYWFEQISNLDVEIDIASEFRYRKNRFKKDCLYIFVSQSGETADTYAALDLCNKNEMKTCSIINVVESSIARDSKFVLPNTTV

SEQ ID NO: 125788 - protein, 243 aa, Unknown
  Bacterial polypetide isolated from the Sargasso Sea
MKTCSIVNVVESSIARDSKFVLPIHCGPEIGVASTKAFLGQMLVLYILSLKISFMRKDIDKETYVNKIKSLFTLSDLIKKTLETDSKTQLVCNSFVDIKGSMFLGRGYSYPIALEGALKLKELSYVHAEGYPAGEMKHGPLALIEEGMPVVVIAPRDEYYTKTISNMQEVIARGAKVLLITNKSKDEIYSENIWEYIEVENTTDDLLPFLITIPLQKLAYYSALKKGYDIDKPRNLAKSVTVE

SEQ ID NO: 125789 - protein, 217 aa, Unknown
  Bacterial polypetide isolated from the Sargasso Sea
GLEIGVASTKAFLGQILVLYILALKFGSLRNEIEKKIYQEKIKDLKDLPRLIEKSLLHDNDIQSISSTFNEAKGSMFLGRGFSYPIALEGALKLKELSYVHAEGYPAGEMKHGPLALIEEGMPVVVLAPRDSYYKKTISNMQEVIARGAKVLLITNKSKDEVFSENIWQTIEVENTNDDLLPFLLTIPLQKLAYYSALKKGYDIDKPRNLAKSVTVE

SEQ ID NO: 125790 - protein, 247 aa, Unknown
  Bacterial polypetide isolated from the Sargasso Sea
MGARNGSPLIIGIGNKENFIASDIQALIKHTDKFVYLEDGDLVTITSEEVKIFDKNKKNIRRETKKSSLTSNSNSKGDFDHFMLKEIFEQPEAVKSTIQDRIINNFVPKEILGPNAEKFLKKFKVVQIIACGTSYHAALVAKHWLERLAGIPCHAEIASEFRYRRHAVQKDTLLVCISQSGETADTLSALREIKEEDYYVGTVAVCNVPESSLARECDSILITHAGPEIGVASTKAFTTQLTALMLL

SEQ ID NO: 125791 - protein, 197 aa, Unknown
  Bacterial polypetide isolated from the Sargasso Sea
MCGIIGIASNKPVSINIINSLKKLEYRGYDSAGIATLKDNSIDEKKCSGRVDELEKLLLKSPSNGNIGIGHVRWATHGIPNTVNAHPHSTENVSVVHNGIIENSDDLKKELETKGYIFKSQTDTEVITMLLTESLKNTDPLDSVFKTLSKLKGSFALGIIFKNFSDIIIGARRGSPLAVGYSNEENYLGSDSYALKS

SEQ ID NO: 125792 - protein, 270 aa, Unknown
  Bacterial polypetide isolated from the Sargasso Sea
MCGIIGIASNKSVSINIINALKKLEYRGYDSAGLATIANGEINEKKCPGRVEKLEKILFQNPSEGNLGIGHVRWATHGVPNEVNAHPHSSDMVSVVHNGIIENSDELKKKLELSGKTFKSQTDTEVITILLTEKLKTLDPLNAVFETLSVLKGSFALGIIFKNFKDIVIGARRGSPLAVGYSDNENYLGSDSYALKSMTNKISYLDDGDVCVLSKDEVKFYNTKKDKINKEIFTLSEDKSSASKGNYKNFMIKEIFEQPKTIKTCLKEYI

SEQ ID NO: 125793 - protein, 137 aa, Unknown
  Bacterial polypetide isolated from the Sargasso Sea
MCGIVGGISERNILPILVEGLRRLEYRGYDSAGVAFKKNGSISVTKNLGRVDQLTKKLNLKTNQSNLGIAHTRWATHGIPSEKNAHPHHSKNIFVVHNGIIENHDDLRAYLKAEGIRFSTQTDTEVIGHLIRTFTEI

SEQ ID NO: 125794 - protein, 260 aa, Unknown
  Bacterial polypetide isolated from the Sargasso Sea
QTDTEVIVHLITEHLKNSELEDAITKTLKQLHGSFALGIVFKNIPDLIVGARRGSPLAVGYGPNENYLGSDSYALKSMTNKITYLDDGEFCIVKKDHVLFFNEKGNKVNKKILELSSNEASYDKGDFKHFMAKEIEEQPTTIKTGIKEYVDNVNKEINILNFPWKAIDIKSITLIGCGTAYHSCLMAKYWFEELTYLDVNIDIASEFRYRKNRFKKDSLYVFVSQSGETADTYAALDLCNKNNMKTCAVVNVIESSIARD

SEQ ID NO: 125795 - protein, 280 aa, Unknown
  Bacterial polypetide isolated from the Sargasso Sea
MCGIIGISSNKPVSANIINSLKKLEYRGYDSAGIATLSDGEINEIKSEGRVDKLENNFDLKNLRGNIGIGHVRWATHGIPNSLNAHPHSSHNVSVVHNGIIENSTILKKHLVNKGHKFKSQTDTEVIVHLITENLKTSELEEAITKTLKQLHGSFALGIVFKDMPDLIVGARRGSPLAVGYGPNENYLGSDSYALKSMTNKITYLDDGEFCFVKKDQVIFFNEEGKKVNKKILELSSDEASYDKGDFKHFMAKEIEEQPTTIKTGIKEYVDNVNKEINIF

SEQ ID NO: 125796 - protein, 142 aa, Unknown
  Bacterial polypetide isolated from the Sargasso Sea
MFLGRGYSFPIALEGALKLKELAYVHAEGYPAGEMKHGPLALIEDGMPVVVIAPRDQHYKKTISNMQEVIARGAKVLLVTNKSKDEVYSENIWETIEVENTEDDLFPFLVTIPLQKLAYYSALKKGYDIDKPRNLAKSVTVE

SEQ ID NO: 125797 - protein, 299 aa, Unknown
  Bacterial polypetide isolated from the Sargasso Sea
YPSIAIGHTRWATHGNINSENAHPLTSENKVAVVHNGIIENYESIKNSLESEGYTFRSQTDTEVLPHLFMKYIKLGNNFLQAGRLVLKEIKGAFAFVAMSLDFPNELFVSRNSSPLAIGIGDKSNFVGSDAHSIDHLTQKIIYLEDGDHALINLENIEIFNINGEKVNRKIINIKAEIGLITKGGYKHFMEKEIFEQPSVIPQTISTFINNDTEIKIDLNKLGFKNKNTLLISAAGTSYYAAMVGKYWIEHIADLPVIIDLASEYRYRKPSVFGQSAMLVISQSGESLDTLMALRHGKE

SEQ ID NO: 125798 - protein, 304 aa, Unknown
  Bacterial polypetide isolated from the Sargasso Sea
QYQIKYPFDTNFFESIERIEIIACGTSKHAAMVGSFLLEQFSGIPTHVFYASEFRYSPPPLLPNTLTIGVTQSGETADTIAAIEMEIKRRSSIEDKNFKPNLIAITNRKESSIGRLVPNIIDICAGIEVGVAATKTFFAQLLSFYGLAIKFAQIKCSQSPDEIGKLITELTKLPPLLEDLLESHNKTSEKLAHDFFNIKDVIFLGRGINYPIALEGALKLKEISYIHAAGYPAGEMKHGPIALLDKKVPVISIASPGEVFDKVISNAQEAKARDAYLIGIAPECNRTQIFDYLMKIPSSNEWVS

SEQ ID NO: 125799 - protein, 202 aa, Unknown
  Bacterial polypetide isolated from the Sargasso Sea
MCGIVGGVSDRNVLPILIEGLKRLEYRGYDSAGVAFRENSKISLIKAKGRVLDLENKLPEMKVKSNQGIAHTRWATHGVPSEKNAHPQISENKIFVVHNGIIENHLNLKEKLQSEGVKFRSDTDTEVVAHLINLHMQKGMDFDSATLKAISQLKGAYALAVIDKDNPDLIIGARNQSPLVIGEGYDENFVASDIMALCSSDK

SEQ ID NO: 125800 - protein, 254 aa, Unknown
  Bacterial polypetide isolated from the Sargasso Sea
ASEFRYRNLKFNSSNLYIFVSQSGETADTAAALDICKKNKVKTCSIVNVVESTIARNCDWVLPIHAGPEVGVASTKAFLGQLIVLYILALKLAITREDIDKKDYNNNLKNLQKLPEAIKNTLKLESEIQLMAKEFLDAKGSMFLGRGNSFPVALEGALKLKELSYLHAEGYPAGEMKHGPLALIEEGLPVIVIAPNDRYYEKTLSNTQEVIARGGKIFFITDNKKRLLSTNIRFRLRVPRVDNLLSPLLLTIPY

SEQ ID NO: 125801 - protein, 263 aa, Unknown
  Bacterial polypetide isolated from the Sargasso Sea
MCGIIGIVSNKSVSASIVGALKKLEYRGYDSAGISTISNGQINEQKCSGRVDNLEKILFQNPSSGDLGIGHVRWATHGVPNQVNAHPHSSELVSVVHNGIIENSDKLRKEFEQKGYLFKSQTDTEVITVMLTDFLKKENLINCIHKTLEKLEGSFALGVIFKDFNNLVVGARRGSPLAVGYGHNENFIGSDSYALKSMTNKISYLDDGDFCILYKEKVEFYNSDKKKINKEIYELSNEENIADKGDYKDFMSKEINETSVTTK

SEQ ID NO: 125802 - protein, 306 aa, Unknown
  Bacterial polypetide isolated from the Sargasso Sea
VGYVGSKQIGTRLIEGLKRLEYRGYDSSGLSIIENKQLQHTKRVGRVKTLEASLPENYLKARTGICHTRWATHGDVTEKNAHPHISSDQCFALVHNGVIENYLQIKHYLESKEYTFASDTDSEAIVNLIAYHYEKEPDAPDSNRFLESVRKALLHLEGTFGIAVISKDYPDEMICARRGSPLIIGVGKNEHLIASDVNALTHCTQNVVYLNDNEIVLLTAEDFSISTISKVSVDAVIQTVDWDTSDTELGDFQHFMEKEIFEQPTALENGMRGRFSDDGSTALFGGLNIHPQELSQIDRIIFIACG

SEQ ID NO: 125803 - protein, 286 aa, Unknown
  Bacterial polypetide isolated from the Sargasso Sea
GIIENYAELKDDLIQNDYSFISETDTEVVAVELSRKWNGELLDTVLDVAKSLEGTYALVVTSTKQPGTIVAGRMMSPLVLGVGEGEVFLASDSAAILEYTNKMIFLENGDFVEINDGNFTLYDIEKNAITRDIQVIDWEVSEAEKAGHDHFMYKEILEQAEVIERTITGRIEKNSTEIPIHLDKAKKFEKIWIVACGTAYHAGLFGKDLFEKVLGVPVSVELASEFRYREPIIGKNDLAIVISQSGETMDTIAATELLKENGSHVLALVNVVGSSLARMADSVFYL

SEQ ID NO: 125804 - protein, 262 aa, Unknown
  Bacterial polypetide isolated from the Sargasso Sea
DEQPVIVKNSINEYIDKISRQINIYNFPWKINQISSIFLVGCGTAYHSCLVAKYWFEEYTNFDVTIDIASEFRYRKINFKNNCLYVFVSQSGETADTYAALDLCKKNKMKTCSIVNVVESSIARDSDFVLPIHCGPEIGVASTKAFLGQMLVLYMLCIKLSFDQKKINKKNYQEKIKNLLSLSNLCKKTLLIDSKIQKASKAFIKAKGSMFLGRGYSFPIALEGALKLKELAYVHAEGYPAGEMKHGPLALIEEGMPVVVLA

SEQ ID NO: 125805 - protein, 73 aa, Unknown
  Bacterial polypetide isolated from the Sargasso Sea
VKARKGVIITVTDKRTKELEKVSDYLIDVPSTHPKIFPMLASISLQLLAYHLAVLRECDIDQPRNLAKSVTVE

SEQ ID NO: 125806 - protein, 222 aa, Unknown
  Bacterial polypetide isolated from the Sargasso Sea
LPIYCGQEIGVASTKAFLGQMLVLYILSIKISFDQKFITKKDYQSKIKNLLSLSHSAKKTLKLDHKLLNISKVFAHAKGCMFLGRGYSFPIALEGALKLKELAYVHAEGYPAGEMKHGPLALIEEGMPVVVIAPRDDHYKKTMSNMQEVIARGAKVLLITNKNKDEVVSENIWEQIEVDKLNDELIPFLATIPLQKLAFYSALEKGYDIDKPRNLAKSVTVE

SEQ ID NO: 125807 - protein, 237 aa, Unknown
  Bacterial polypetide isolated from the Sargasso Sea
NIIKTKISGSIGIGHVRWATHGKPSSINAHPHSSEDVSVVHNGIIENSTILKKLLENKGYKFKSQTDTEVIVHLVTDYLKKNDLKNTIIKVLKKLHGSFALGIIFKDQPDLIVGARRGSPLAVGYGPNEHYLGSDSYALKSMTNKISYLNDGEFCILKKDQVEFFDADGTKVNKKILNLSKDDQNYEKGDYKYYMAKEIDEQPITLKNCVNEYIDKHNKEINIYNFPWKISEISSVV

SEQ ID NO: 125808 - protein, 120 aa, Unknown
  Bacterial polypetide isolated from the Sargasso Sea
MCGIVSYFGKKDSVPFLINGLRRLEYRGYDSAGIALMEGNSIKAVKKAGKVDELDKKIKEFPIKGSIGIAHTRWATHGEPNDINAHPHQDITSKIYLIHNGIIENYSTLKEVLIRKRVSI

SEQ ID NO: 125809 - protein, 303 aa, Unknown
  Bacterial polypetide isolated from the Sargasso Sea
GKKINKKILELSSNESNYDKGDFKHFMAKEIEEQPATIKTGIKEYLDSVNNEINIFNFPWKINEIKSITLIGCGTAYHSCLMAKYWFEELTTLDVNIDIASEFRYRKNRFKKDSLYIFVSQSGETADTYAALDLCNKNNMKTCAVVNVIESSIARDSNFVLPIHCGPEIGVASTKAFLGQILVLYILALKIGSLSGQIDKKNYQEKIKDLKNLPSLIEKTLLVDNDIQAISSTFNEAKGSMFLGRGFSFPIALEGALKLKELSYVHAEGYPAGEMKHGPLALIEEGMPVVVLAPRDSYYKKTI

SEQ ID NO: 125810 - protein, 128 aa, Unknown
  Bacterial polypetide isolated from the Sargasso Sea
GALKLKEITYKHCEGFAAGELKHGPLALIEKNIPVIVLAPYDENYFKLISNIQEIKARGGRIIMITDKMGAKIAKKYSDKLIIVPKTNFLTSPIIYSLPIQLIAYYLAVFLGTDVDQPRNLAKSVTVE

SEQ ID NO: 125811 - protein, 283 aa, Unknown
  Bacterial polypetide isolated from the Sargasso Sea
GLGSSDSFKGVKRIQFVACGTSLHAAKTARKWFEELSETPCYIDFASEYRYRNPLVEDDTLFVCISQSGETADTMAALNYAKEEKYLGIVTICNVPTSTMARESDWKIFTNAGPEIGVASTKAFTTQLAALMLLACSISKSKGINKDKRTDAINDLINTPSLVKEAFGLKKHIDDIVEKIADKKNALYLGRGVYFSIAQEGALKFKEITYIHAEAYPAGELKHGPLALVDEMTPVVALAPEDELVEKLVSNLEEVKSRGGTLYVFGNATSKIKIEKGKFMNMP

SEQ ID NO: 125812 - protein, 307 aa, Unknown
  Bacterial polypetide isolated from the Sargasso Sea
MCGIIGIASNKPVSVNIINSLKKLEYRGYDSAGIATLKSNFINEKKCSGRVEELEKILFKTPSDGNIGIGHVRWATHGIPNVINAHPHSSESVSVVHNGIIENSDELKRELESKGLKFKSQTDTEVITLLITEELKNNKPLESVFKTLQKLKGSFALGIIFKNFSDIIIGARRGSPLAVGYSNDENYLGSDSYALKSMTNKISYLDDGELCVLSSRSINFYDANKKKINKKVHIVSEDENISEKGDYKNFMSKEIFEQPMTMKKCISEYVDTLKKDINIFNFPIEPNQIKKIYLIGCGTAFHSCLVT

SEQ ID NO: 125813 - protein, 292 aa, Unknown
  Bacterial polypetide isolated from the Sargasso Sea
MEEAITKTLKLLHGSFALGIVFKDIPDLIIGARRGSPLAVGYGPNENYLGSDSYALKSMTNKITYLDDNEFCIIKKDQVLFFNEDGKKINKKILELSSNEASYEKGDFKHFMAKEIEEQPTTVKTGIKEYVDKTNSEINIYNFPWKISEINSITLIGCGTAYHSCLMAKYWFEELTQLDVSIDIASEFRYRKNRFKKDTLYIFVSQSGETADTYAALDLCNKNNMKTCAVVNVIESSIARDANFVLPIHCGPEIGVASTKAFLGQILILYILALKLGSLRNEINKRKFIKKR

SEQ ID NO: 125814 - protein, 229 aa, Unknown
  Bacterial polypetide isolated from the Sargasso Sea
TYAALDLCKKNEMKTCAVVNVIESSIARDSEFVLPIHCGTEIGVASTKAFLGQILILYILSLKLGLLRKDLKKDLFTQKLKDLKELPKLVEQTLLTDNKIQTISNTFNEAKGSMFLGRGFSYPIALEGALKLKELSYIHAEGYPAGEMKHGPLALIEEGMPVVVLAPRDNYYKKTISNMQEVIARGAKVLLITNKSKDEVVSENIWETLEVESTNEDLLPFLLTIPLQK

SEQ ID NO: 125815 - protein, 146 aa, Unknown
  Bacterial polypetide isolated from the Sargasso Sea
MCGIIGINSNKEVTSTILNSLRKLEYRGYDSAGIATLNSGYIQEVKCEGRVDNLEKNIIKNKLLGNVGIGHVRWATHGIPSTLNAHPHSSDNVSVVHNGIIENSTLLKKFLIKKGHVFKSQTDTEVIVHLITEYLKKNNLIDTLKK

SEQ ID NO: 125816 - protein, 224 aa, Unknown
  Bacterial polypetide isolated from the Sargasso Sea
FVLPIHCGPEICVASTKAFLGQILVLYILAIKLGSLRNEIENKVYQDKIKDLKNLPTLIEKTLLIDNDIQSIASTFNEAKGSMFLGRGFSYPIALEGALKLKELSYVHAEGYPAGEMKHGPLALIEEGMPVVVLAPRDSYYKKTISNMQEVVARGAKVLLITNKSRDEVLSENIWETIEVESTNDDLLPFLLTIPLQKLAYYSALKKGYDIDKPRNLAKSVTVE

SEQ ID NO: 125817 - protein, 256 aa, Unknown
  Bacterial polypetide isolated from the Sargasso Sea
MEAQRRTTHPDPAYAPRQLGVTNRPESSLSRQVPHVLDIGAGIEVGVAATKTFMGQLLAFYGLAMAFAARRGSRSAAEIQTLVDELRMLPQQLQELVSLHDQRSEALAHRFAETQDVIFLGRGINYPIALEGALKLKEISYIHAEGYPAGEMKHGPIALLDAHVPVVSIAVPGTVFEKVLSNAQEAKARDARLIGVAPEGPDTALFDDLLPVPEVSEWISPLLTLVPMQLLSYHIAAHRGLDVDQPRNLAKSVTVE

SEQ ID NO: 125818 - protein, 81 aa, Unknown
  Bacterial polypetide isolated from the Sargasso Sea
TISNMQEVIARGAKVLLVTNKSKDEVYSENIWQTIEVENTEDDLFPFLVTIPLQKLAYYSALKKGYDIDKPRNLAKSVTVE

SEQ ID NO: 125819 - protein, 218 aa, Unknown
  Bacterial polypetide isolated from the Sargasso Sea
FTNAGPEIGVASTKAFTTQLAALMLLALSLAKSRGKNPKLRTRVITALRSLPETVEETLKLKDIILEIAPQIANKDNALFLGRGIFYPIAKEGALKLKEISYIHAEAYPAGELKHGPLALIDEEIPVIALAPESEIAEKLVSNLEEVKARGGTLYVFSDPSISMDLKSGRLINMPKCDFLLTPIIYTIPLQILSYEVALLRGTDIDQPRNLAKSVTVE

SEQ ID NO: 125820 - protein, 210 aa, Unknown
  Bacterial polypetide isolated from the Sargasso Sea
CCFYKSFHYTTCWSINVTLILGRQHGLSTAAENTINNALRALPDSLDSVMLLEDQIIEMAEDFDQKEHALFLGRGIHYPIAMEGALKLKEISYIHAEAYPAGELKHGPLALVDSEMPVVAVAPNDDLLAKLQSNLEEVRARGGKLYVFGHSAAHQEDESITKFIELPEVPELIAPLIYSIPLQLLAYHVAILKGTDIDQPRNLAKSVTVE

SEQ ID NO: 125821 - protein, 148 aa, Unknown
  Bacterial polypetide isolated from the Sargasso Sea
MCGIVGITSNKEVTTRIINSLKKLEYRGYDSAGIATLKDGLINEVKCEGRVEALEKNISNTNIQGEIGIGHVRWATHGKPSTVNAHPHSSETVSVVHNGIIENSTILKKILEKKGYKFKSQTDTEVIAHLVTDYLKKNNLKNTIIKVL

SEQ ID NO: 125822 - protein, 278 aa, Unknown
  Bacterial polypetide isolated from the Sargasso Sea
LEELTSIDVEIDIASEFRYRNLKFNPNNLYIFVSQSGETADTAAALDICKKNKVKTCSIVNVVESTIARNSDCVLPIHAGPEIGVASTKAFLGQLIVLYILSLKLSIVRGDVDKKTYDTNVENLQKLPESIKNTLKLESEIQLMAKEFLEAKGSMFLGRGNSFPVALEGALKLKELSYLHAEGYPAGEMKHGPLALIEEGLPVIVIAPKDKYYEKTLSNMQEVIARGGKIFFITDNNKRLLSTNIRFRLRVPRVDSLLSPLLLTIPLQLLAYHVALLK

SEQ ID NO: 125823 - protein, 248 aa, Unknown
  Bacterial polypetide isolated from the Sargasso Sea
DKTVTLAEKGVFKHFMSKEIHEQPSVIQDSISHYINNEDLTVNLPKFPFNITNLKNITLVACGSSYYSGLVAREWFEKLARVKVDVEIASEFRYREAPMDSSGLTVFISQSGETADTLAALKHCKKLNQKTISIVNVPNSSMCRNSDSSLKIFAGPEIGVASTKAFTCQLIVLASLAIHIGRINGNLSDDDENNYVKSLLDVPRLISNVLDQEEDLIKIVKELNPIKNALYLGRGQMYPVALEGALKL

SEQ ID NO: 125824 - protein, 297 aa, Unknown
  Bacterial polypetide isolated from the Sargasso Sea
YDSAGIATLSDGEINEVKSEGRVNNLENNFDLKNLKGNIGIGHVRWATHGVPNSVNAHPHSSHNVSVVHNGIIENSTILKKHLINKGHKFKSQTDTEVIVHLITEHLKTLELEEAITKTLKQLHGSFALGIVFKDMPDLIIGARRGSPLAVGYGPNENYLGSDSYALKSMTNKITYLDDGEFCIVKKDQVLFFNEEGIKVNKKILELSSDKANYDKGDFKHFMAKEIEEQPTTIKTGIKEYVDTVNKDINIFNFPWKIKDIKSITLVGCGTAYHSCLMAKYWFEELTILDVNIDIAS

SEQ ID NO: 125825 - protein, 284 aa, Unknown
  Bacterial polypetide isolated from the Sargasso Sea
IASEFRYRKLKFKSDCLYVFVSQSGETADTYAALDICKKNKMKTCSIVNVVESSIARDSNLVLPIHCGPEIGVASTKAFLGQMLVLYMLCLKLSFDQKIISKKTYQEKIKNLLSLSNLCKKTLLTDNKIQKASKAFIKAKGSMFLGRGYSFPIALEGALKLKELAYVHAEGYPAGEMKHGPLALIEEGMPVVVLAPRDNHYKKTISNMQEVIARGAKVLLVTNKSKDEIQSENIWEKIEVENLTEDLFPFLITVPLQKLAYYSALQNGYDIDKPRNLAKSVTVE

SEQ ID NO: 125826 - protein, 107 aa, Unknown
  Bacterial polypetide isolated from the Sargasso Sea
MKHGPLALIEDGLPVVVIAPKDKYFEKTLSNMQEVIARGGKVLLLTNSDGKVISENIRFQINLPDSDLTLTPFVFTIPLQLLSYHVALFKKCDIDKPRNLAKSVTVE

SEQ ID NO: 125827 - protein, 191 aa, Unknown
  Bacterial polypetide isolated from the Sargasso Sea
MCGIVAVTGYKKALPLLINGLEKLEYRGYDSAGIAIINSENNSISCNKAEGKLKNLISNLNDHNISGTVGIGHTRWATHGKPEVKNAHPHTDSSGNIAVVQNGIIENFQHLKKKLEEEGIIFNSDTDTEVIPHLIQRELNTLNKLNLENNGSTLLVAVRNVLSDLEGSYALAVIWSGAPSSLVVARRQSSL

SEQ ID NO: 125828 - protein, 287 aa, Unknown
  Bacterial polypetide isolated from the Sargasso Sea
NLENNFDLKNLKGNIGIGHVRWATHGVPNSLNAHPHSSHNVSVVHNGIIENSTILKKHLINKGHNFKSQTDTEVIVHLITENLKTSELEEAITKTLKQLHGSFALGIVFKDMPDLIVGARRGSPLAVGYGPNENYLGSDSYALKSMTNKITYLDDGEFCVVRKDQVLFFNEEGKKINKKILELSSDEASYDKGDFKHFMAKEIEEQPTTIKTGIKEYVDNLNKDINIFNFPWKIKDIKSITLVGCGTAYHSCLMAKYWFEELTTLDVNIDIASEFRYRKNRLKMIVY

SEQ ID NO: 125829 - protein, 257 aa, Unknown
  Bacterial polypetide isolated from the Sargasso Sea
MEKEIYEQPNAILNTLDGRIGGEDVLDNIFGIGSSETLSQVKRIQIVACGTSLHAARVAANWFSAISELPTQTDYASEYRYRNPHVDEDALLVTISQSGETADTLAALNFAKEKDYLSTLTICNVPTSSIARESNYSLYTNAGPEIGVASTKAFTTQLVGLMLLALSLAKSRGKNPMLRKRIVTALRQLPEIINETLQLKNLIMEIAPEVASKDNALFLGRGIFYPIAKEGALKLKEISYIHAEAYPAGELKHGPLA

SEQ ID NO: 125830 - protein, 290 aa, Unknown
  Bacterial polypetide isolated from the Sargasso Sea
GNLGIGHVRWATHGVPNEANAHPHSTEIVSVVHNGIIENSSELKKILEKEGKTFKSQTDTEVITVLLTEKLKNTEPLEAVFKTLGLLKGSFALGIIFKNYKDFVIGARRGSPLAVGYSNDENYLGSDSYALKSMTNKISYLDDGDVCILSKDEVKFYNSNKEKINKEIFTLSENKSEVNKGNYKNFMIKEIFEQPITLKTCLKEYIDKIREEINFYNLPIEPKKIKKIVLIGCGTAYHSCLVTKYWLEEFTNLVIETDIASEFRYRNNRFDKNNLYIFVSQSGETADTFA

SEQ ID NO: 125831 - protein, 212 aa, Unknown
  Bacterial polypetide isolated from the Sargasso Sea
MCGIVAYKGPKNCYPILIDGLHRLEYRGYDSAGIACLSDGKISITKRSGKVIQLEQKLKVDGKFQNCDGPGIAHTRWATHGKPNQINAHPHKDQSGNIVLVHNGIIENYNPIKKFLKSKKVKFKSETDTEVLVQLIGYLFNQGKLSFEQSVRAALQRVDGAYGIVVLNKNEPDVMIAARKGSPLVLGLKNDEFFIGSDVSPDYKTYSANYIS

SEQ ID NO: 125832 - protein, 86 aa, Unknown
  Bacterial polypetide isolated from the Sargasso Sea
SPGEVFDKVISNAQEAKARDSYLIGIAPECSGTEIFDYLMKVPSSNEWISPLLNIVPLQLLSYHIAAHRGLDVDQPRNLAKSVTVE

SEQ ID NO: 125833 - protein, 112 aa, Unknown
  Bacterial polypetide isolated from the Sargasso Sea
MCGIIGIISSKEVSTRIVNSLKKLEYRGYDSAGIATLVDGNINEVKCEGRVEVLEKDISKFNLKGDIGIGHVRWATHGKPSKINAHPHSSEQVSIVHNGIIENSTILKKLLE

SEQ ID NO: 125834 - protein, 113 aa, Unknown
  Bacterial polypetide isolated from the Sargasso Sea
MCGIIGINSKKPVSASIINSLKKLEYRGYDSAGIATLHAGSINEVKSEGRVDNLEKNSVVQNMVGTIGIGHVRWATHGLPNSINAHPHSSQNVSVVHNGIIENFTLLKKFLGK

SEQ ID NO: 125835 - protein, 288 aa, Unknown
  Bacterial polypetide isolated from the Sargasso Sea
VKFYDVSKKKINKKTHILSEDENITDKGEYKNFMSKEIFEQPITAKTCINEYIDSLKKDINIYNFPIKPTKINKIVLIGCGTAYHSCLVAKYWLEELTSIDTEIDIASEFRYRKLKFNSNNLYIFVSQSGETADTAAALDICKKNKVKTCSIVNVVESTIARNSDWVLPIHAGPEIGVASTKAFLGQLLVLLILSLKLAKERNDINENIYNDIIKNLKQIPDAIKESLKSENEVQLMAKEFENAKGSMFLGRGSSFPIALEGALKLKELSYLHAEGYPAGEMKHGPLA

SEQ ID NO: 125836 - protein, 286 aa, Unknown
  Bacterial polypetide isolated from the Sargasso Sea
LEYRGYDSAGLATIFNGQINEKKCPGRVEKLEKILFQNPNEGNLGIGHVRWATHGVPNEVNAHPHSTEIVSVVHNGIIENSDELKKDLEKSGKIFKSQTDTEVITILLTEKLKKLDPLKAVFETLGMLKGSFALGIIFKNFKDYVIGARRGSPLAVGYSNNENYLGSDSYALKSMTNKISYLDDGDVCVLSKDDVKFYNSKKNKINKEILTLSEDKSTVSKGNYKNFMIKEIFEQPITTKTCLKEYIDKIREEINFYNLPIDPKKISKIILIGCGTAYHSCLVAKY

SEQ ID NO: 125837 - protein, 314 aa, Unknown
  Bacterial polypetide isolated from the Sargasso Sea
RRNFVASDPLAIAGLAESFYLLEDGDFAVITQDEIKIVGSDSEPVLREETIIDTSVKEASKDGYKHFMEKEIYEQPKAIANAIEGRTTDGDVLDNIFGLGSSESFKGVKRIQFVACGTSLHAAKTARKWFEELCETPCYIDFASEYRYRNPLVEDDTLFVCISQSGETADTMAALNYAKEEKYLGIVTICNVPTSTMARESDWKIFTNAGPEIGVASTKAFTTQLAALMLLACSISKSKDINGDKRAEAIKDLVDTPALVKEAFGLKKHIDDIVEKIADKKNALYLGRGVYFSIAQEGALKFKEITYIHAEAYP

SEQ ID NO: 125838 - protein, 106 aa, Unknown
  Bacterial polypetide isolated from the Sargasso Sea
MCGIIGAASSRSVGKILVNGLKKMEYRGYDSAGLVLNQDELAFQLRTLGKVSNLEDAMIEQRPKADSGIAHTRWATHGIPSEKNAHPHGSNRNIYIVHNGIIENPR

SEQ ID NO: 125839 - protein, 255 aa, Unknown
  Bacterial polypetide isolated from the Sargasso Sea
MCGIIGIVSNKSVSASIIEALKKLEYRGYDSAGISTISNGVINEQKCSGRVDNLEKILFQNPSSGDLGIGHVRWATHGIPNQVNAHPHSSEVVSVVHNGIIENSDILRKEYLKKGYTFKSQTDTEVITVMLTDFLKSDGLINCIYKTLKKLEGSFALGVIFKDFDNVVVGARRGSPLAVGYGHNENFIGSDSYALKKMTNKISYLDDGDFCILYKEKVEFYNHEKKKINKEIFELSNEDNLADRGDYKDFMSNRD

SEQ ID NO: 125840 - protein, 251 aa, Unknown
  Bacterial polypetide isolated from the Sargasso Sea
MCGIIGINSNKPVSATIINSLKKLEYRGYDSAGIATLSGGLINEVKSEGRVDNLEKNSLVKNMGGTIGIGHVRWATHGLPNTINAHPHSSQNVSVVHNGIIENSTLLKKFLVGKGHNFKSQTDTEVIVHLLTENLKTENIVNSIKKTLKSLHGSFALGIIFKDEPDLIVGARRGSPLAVGYGPNENYLGSDSYALKSMTNKITYLNDGEFCIIKKDHVEFFNEEGTKINKKVLELSSDEKNMTKVTINISW

SEQ ID NO: 125841 - protein, 98 aa, Unknown
  Bacterial polypetide isolated from the Sargasso Sea
IDEEMPVIALAPESEIAEKLVSNLEEVKARGGTLYVFADPSITMDLKSGLVINMPKCDFLLTPIIYTIPLQILSYEVALLRGTDIDQPRNLAKSVTVE

SEQ ID NO: 125842 - protein, 222 aa, Unknown
  Bacterial polypetide isolated from the Sargasso Sea
EHVLFTNAGPEIGVASTKAFTTQLAGLMLLAMSIAKSLNQNKELRKKLASELRNLPKVVDKTLKLSNEIMKIVPNIADKHNALFLGRGMFFPIVQEGALKLKEISYIHAEAYPAGELKHGPLALVDDQIPVVALSPENTLTEKLVSNLEEVKARGGTLYVFGGENSKIKIERGEYIQMPECSELLAPIIYTIPLQILAYQVACQRGTDLDQPRNLAKSVTVE

SEQ ID NO: 125843 - protein, 163 aa, Unknown
  Bacterial polypetide isolated from the Sargasso Sea
MCGIIGISSNKSVSASIISSLKKLEYRGYDSAGIATLFEGEIKEVKSEGRVDTLEQNFDLKNLKGNIGIGHVRWATHGVPNSVNAHPHSSHNVSVVHNGIIENSTILKKYLISKGHKFKSQTDTEVIVHLITENLKTTEIEEAITNTLKQLHGSFALGIVFKD

SEQ ID NO: 125844 - protein, 167 aa, Unknown
  Bacterial polypetide isolated from the Sargasso Sea
LIEKTLLLDNDIQAISSTFNEAKGSMFLGRGFSYPIALEGALKLKELCYVHAEGYPAGEMKHGPLALIEDGMPVVVLAPRDNYHKKTISNMQEVIARGAKVLLITNKSKDEIVSENIWETIEVENTNNDLLPFLLTIPLQKLAYYSALKKGYDIDKPRNLAKSVTVE

SEQ ID NO: 125845 - protein, 258 aa, Unknown
  Bacterial polypetide isolated from the Sargasso Sea
LEYYFDQKTGEVTLPNKLNLNFNDFDQISLVACGTAFYACHVAKYWFENIARIPVEIDIASEFRYREPPIKGNTLAIFVSQSGETADTLAALRYCSGKAKKILSITNVAESSISRESDHSLPILAGVEIGVASTKAFTCQLSVLFALSIKAATDTHKISKKEQKNIYSHFLKIPSMINQILGKKDMFIALANKLSEARDILFLGRGLSYPLALEGSLKLKEISYIHAEAYASGELKHGPIALIDKSVPVIILAPKDKL

SEQ ID NO: 125846 - protein, 288 aa, Unknown
  Bacterial polypetide isolated from the Sargasso Sea
QTDTEVITVLLTEKLKNTEPLEAVFKTLNLLKGSFALGIIFKNYKDFVIGARRGSPLAVGYSNDENYLGSDSYALKSMTNKISYLDDGDVCILSKDEVKFYNSNKEKINKEIFTLSENKSEVSKGNYKNFMIKEIFEQPITLKTCLKEYIDKIREEINFYNLPIEPKKIKKIVLIGCGTAYHSCLVTKYWLEEFTSLVIETDIASEFRYRNNRFDKNNLYIFVSQSGETADTFAALDLCKKENLKTCSVVNVVESSIARQSDCVLPIHAGPEIGVASTKAFLGQMLVL

SEQ ID NO: 125847 - protein, 278 aa, Unknown
  Bacterial polypetide isolated from the Sargasso Sea
MCGIVGITGKKQVTSEILNSLKRLEYRGYDSAGIATLNNDQINEVKCEGRVDVLEKNLLKLDINGNVGIGHVRWATHGAPSDINAHPHSSKEVSVVHNGIIENSMLLKKDLLKKGYNFKSQTDTEVIVHLMSEYLKRYKIKNAVMKMLNSLQGSYALGMIFKDHPNIIIGARRGSPLAVGYGPGENYLGSDSYALKSMTNKISYLNDGEFCIINNDQVEFFDEQGAKINKKILTLSSDEKKYDKGDYKHFMAKEIDEQPNVIKNCVNEYVDKINNEIN

SEQ ID NO: 125848 - protein, 243 aa, Unknown
  Bacterial polypetide isolated from the Sargasso Sea
MKTACIVNVVESSIARDSNFILPIHCGPEIGVASTKAFLGQMLVLYILILKISYLRKDINKSTYIEKIKFLKELPKLIEKTLLIESKIQSISGTFIEAKGSMFLGRGFSYAIALEGALKLKELSYVHAEGYPAGEMKHGPLALIEDGIPVVILAPKDNYYKKTISNMQEVIARGAKVLLITNKSNDEVVSENIWEKVEVENTNHDLMPFLLTIPLQKLAYYSALKKDYDIDKPRNLAKSVTVE

SEQ ID NO: 125849 - protein, 271 aa, Unknown
  Bacterial polypetide isolated from the Sargasso Sea
IVLTGCGTSWHSALVGEYLIEEFARLPVEVEYASELRYRNPPLDKGTLLFAITQSGETADTLAALREMKRKGHSTLAICNAIGSTIATEADGGIYLHAGPEIGVASTKAFTSQCIVLAMLALYFGRLRHMSYEQGLEFINALEQLPELIRKALAAESTIRDIAERYRNANTFLYLGRQYNFPLALEGALKLKEISYIHAEGYPAAEMKHGPIALVDPLTPSVFLIPKDAVYEKVLLNLEETKARKGPIIAVVSEGDDRVQHLADEIIELPE

SEQ ID NO: 125850 - protein, 209 aa, Unknown
  Bacterial polypetide isolated from the Sargasso Sea
SGIATINNNQINCVKSQGNLDQLQKKLINEELIGNVGIGHTRWATHGVPNESNAHPHFTDEVAVVHNGIIENYSLLKNQIVEAGISFKSETDTEAIAHLITLYLKSGMGSYEAIRATTEDIKGSYALAIIMRSEPNKLFAVRKGSPLAVGSSEKENYIGSDGYSLGNYCDEVTYLKDGDIAIIDNTSFEIFDNQNEFIKRKSQIIDKTV

SEQ ID NO: 125851 - protein, 258 aa, Unknown
  Bacterial polypetide isolated from the Sargasso Sea
EGDVQKYPPQRAHFDKTSQPVEREVHESNVSYDAGDKGQYRHFMLKEIYEQPHAINNTLEGRLSADSVLDETFGNGAAELFKQVKHVQIVACGTSYHSGMVARYWLESLGGISCNVEIASEFRYRKSFVQPNSLLVSISQSGETADTLAALRLAKEAGYLGSLTICNVAGSSLVRESDLAFMTRAGAEIGVASTKAFTTQLVGLAMLTMAIGKYNGLTAAQQRELTDALKSLPAKLEQTLTLAPQIEALAEEFADKHH

SEQ ID NO: 125852 - protein, 304 aa, Unknown
  Bacterial polypetide isolated from the Sargasso Sea
KSMEGTIGIGHVRWATHGLPNSINAHPHSSQNVSVVHNGIIENSTLLKKFLVSKGHKFKSQTDTEVIVHLITENLKTENIVNSIMKTLKSLHGSFALGIIFKDQPDLIVGARRGSPLAVGYGPNENYLGSDSYALKSMTNKITYLNDGEFCIVKKDHIEFFNEDGIKINKKVLELSSDEEKYDKGDYKHFMAKEIEEQPITLKNGIKEYVDHSNNNINIFNFPWKNKEFSSITLIGCGTAYHSCLMAKYWFEELTSLDVNVDIASEFRYRKNRFKKETLYIFVSQSGETADTYAALDLCKKNEE

SEQ ID NO: 125853 - protein, 281 aa, Unknown
  Bacterial polypetide isolated from the Sargasso Sea
LAVGYGPGENYLGSDSYALKSMTNKISYLNDGEFCIIKKDNVEFFNQSGKKINKKILLLSSGEQNYEKGDYKHFMAKEIDEQPNTIKNCVNEYIDKINKDINIFNFPFKEKEINSITLIGCGTAYHSCIIAKYWFEQLTSFDVSVDIASEFRYRKNKFKKDCLYVFVSQSGETADTYAALDLCNKNKMKTCSVVNVIESSIARDSKFVLPIHCGPEIGVASTKAFLGQMLVLYILCLKLAQKRKDISKKDYLNKIKNLFNLAKLVKHSLETENKIQSICSS

SEQ ID NO: 125854 - protein, 214 aa, Unknown
  Bacterial polypetide isolated from the Sargasso Sea
MCGIVGITSNEEVTSRIINSLKKLEYRGYDSAGIATLKDGNINEVKCEGRVEVLEKNISKTNLQGVIGIGHVRWATHGKPSMINAHPHSSEEVSVVHNGIIENSTILKKLLEKKGHKFKSQTDTEVIAHLVTDYLKKNNLKNTIVKVLKKLHGSFALGIIFKNQPDLIIGARRGSPLAVGYGPNENYLGSDSYALKSMTNKISYLNDGEFCIIK

SEQ ID NO: 125855 - protein, 153 aa, Unknown
  Bacterial polypetide isolated from the Sargasso Sea
FFSTFIEAKGSMFLGRGFSYPIALEGALKLKELSYVHAEGYPAGEMKHGPLALIEKGMPVVVLAPRDNYYKKTISNMQEVIARGAKVLLITNKSKDEVFSENIWETIEVESTNEDLLPFLLTIPLQKLAYYSALKKGYDIDKPRNLAKSVTVE

SEQ ID NO: 125856 - protein, 205 aa, Unknown
  Bacterial polypetide isolated from the Sargasso Sea
KAFVTQLACLNLLLLTLMRVHNKLPTARKKITAALRDLPKLINKTLKMTGEYKKVAKLLFKRNSALFLGRGLYFPIAREGALKLKEISYIHAEAYPGGELKHGPLALIDKNMPVIALAPDNEHLDKITSNIEEVAARKGKVITIGPLGRTKIDKNGGHIKIPKTLDLLNPIVSVVPMQLIAYYTAVFKGTDVDKPRNLAKSVTVE

SEQ ID NO: 125857 - protein, 300 aa, Unknown
  Bacterial polypetide isolated from the Sargasso Sea
ALAPVTNKFKFMEDGQVAFITKEKNHVITSNGNAAKLKTQEIDSNSYTNDLGGYNHFMEKEIFEQPDAISKSIEGRLGKNETQEGIFGSGFEEAVKDVTNIQIIACGTSFHSGRIFEYWSHKFLGINCRVDYGSEYQYQEPIKTKKTLLVTISQSGETADTLSSLKFAKKTGSPVTLTICNVANSSLCRESDYTLLTNAGPEIGVASTKAFVTQLACLNLLLLTLMRVHNQTPNARKKITAALRDLPKHIDKTLKMTDVYKSTAKLLFKRSSALFLGRGLYFPIAREGALKLKEISYIHA

SEQ ID NO: 125858 - protein, 245 aa, Unknown
  Bacterial polypetide isolated from the Sargasso Sea
MTQLVFATLFNGSINEIKSEGRVDNLEKSSLAKNMEGTVGIGHVRWATHGLPNSINAHPHSSQNVSVVHNGIIENSTLLKKFLVGKGHKFKSQTDTEVIVHLITENLKTENIVESIKKTLNSLHGSFALGIIFKDEPDLIVGARRGSPLAVGYGPNENYLGSDSYALKSMTNKITYLNDGEFCIIKKDHVEFFSEDGTKVNKKVLELSSQEEKYDKGDFQHFMAKEIEEQPITLKNGIKEYIDTS

SEQ ID NO: 125859 - protein, 315 aa, Unknown
  Bacterial polypetide isolated from the Sargasso Sea
NVWDSGIISSKEVSSRIINSLKKLEYRGYDSAGIATLVNGNINEVKCEGRVDLLEKDISKLNLKGDIGIGHVRWATHGKPSKINAHPHSSEKVSVVHNGIIENSTILKKFLEKKGYVFKSQTDTEVIAHLVTDYLKKNSLKDTIIKVLKKLHGSFALGLIFREQNDLMIGARRGSPLAVGYGPNENYLGSDSYALKSMTNKISYLDDGEFCFVKKDEINFFDSNGVKINKKILNLSKDDLNYDKGDYKYFMEKEIDEQPTTINACVNEYVDKINNQINIYNFPWKISSFKSAMLIGCGTAFHSCLLAKYWMEQNT

SEQ ID NO: 125860 - protein, 296 aa, Unknown
  Bacterial polypetide isolated from the Sargasso Sea
SAVISTIAKLKGAYALGILDKNNPDTLIGVRQQSPLVIGEGFEEQFIASDIMALSNITNKFKFMDDGQIAILDKGHVAVTSSSGVAAKLKTQEVDSNAYTNDLKGYNHFMEKEIFEQSDVIKDSLEGRLTKNESQEGIFGVGFEKEMKNITNIQVVACGTSFHAGRIFEFWSHKFLGINCRVDYGSEYQYQEPIKTDKTLLVTISQSGETADTLSSLKFAKKSGEPVTLTICNVANSSLCRESDYALLTKAGPEIGVASTKAFVTQLACLNLLLLTLMRVHNKLPTARKKITAALR

SEQ ID NO: 125861 - protein, 117 aa, Unknown
  Bacterial polypetide isolated from the Sargasso Sea
IHAEGYPAAEMKHGPIALIDENMPVVFIAPYDDTFNKVLSNIEEVKARGGIVISITDKINNSLKKLSDFVLIAPQTHKYVFPITCSIILQMLAYELAVCRKCEIDQPRNLAKSVTVE

SEQ ID NO: 125862 - protein, 284 aa, Unknown
  Bacterial polypetide isolated from the Sargasso Sea
IYIFPIQPMKINKIILIGCGTAYHSCLIAKYWFEELTTIEIEVDIASEFRYRKLKFNKDNLYIFVSQSGETADTAAALDICKKNKVKTCSIVNAVESTIPRNSDWVLPIHAGPEIGVASTKAFLGQMIVLYILCLKLAKNRKDIDEKVCQKNVQNLIKLPEAIKKSFEVENNIQAIAKEFLDAKGSMFLGRGLSYPIALEGALKLKELSYLHAEGYPAGEMKHGPLALIEEGLPVIVIAPKDRYFEKTISNMQEVIARGGKILFLTDHKKELIDENIRFGIKVP

SEQ ID NO: 125863 - protein, 245 aa, Unknown
  Bacterial polypetide isolated from the Sargasso Sea
DSAGIATIVDGEINEKKCTGRVDNLEKILLKNPSNGSLGIGHVRWATHGIPSQVNAHPHSSDEVSVVHNGIIENSNDLKKDLEKKGYKFKSQTDTEVITFLLTDFLKNYDLVDAINKTLKALSGSFALGIIFKKYNNIVVGARRGSPLAVGYGPEENYLGSDSYALKSMTNKITYLDDGDVCILTNNKIDFYNSKNNKINKEVLTLSKKKITAEKGDYKDFMSKEINEQNVTVKSCVKEYVDHLR

SEQ ID NO: 125864 - protein, 227 aa, Unknown
  Bacterial polypetide isolated from the Sargasso Sea
MCGIIGINSNKPVSATIINSLKKLEYRGYDSAGMATLCNGLINEIKSEGRVENLEKNSLVQSMEGTIGIGHVRWATHGLPNSVNAHPHSSQNVSIVHNGIIENSTILKKFLIGKGHKFKSQTDTEVIVHLITENLKTENIVNSIQKTLKSLHGSFALGIIFKDQPDLIVGARRGSPLAVGYGPNENYLGSDSYALKSMTNKITYLNDGEFCIIKRDHVEFFSEEGNK

SEQ ID NO: 125865 - protein, 285 aa, Unknown
  Bacterial polypetide isolated from the Sargasso Sea
DGTVHLGGIVDQLSRIQDAHRIYITACGTSWHAGLMGKYLIEEYAGIPVHVEYASEFRYRKPIINSKTVVIGISQSGETADTLAAIRKAKSFGALTVGICNVVGSSVARETDCGIYTHAGPEIGVASTKAFTSQVAVLFLLSLCFGRKNKLSALTGQKFAQALMNIGNQVKIILDDSGSILEVAKSTVHNENFLYLGRGLNFPVALEGALKLKEISYIHAEGYPAAEMKHGPIALIDEKMPVVCLAPHDDTFDKVLSNIQEVKARKGVIITVTDKRTKELEKVSD

SEQ ID NO: 125866 - protein, 258 aa, Unknown
  Bacterial polypetide isolated from the Sargasso Sea
MCGIIGAASTRNIGKILVNGLKKMEYRGYDSAGLALNKENKTIQLKTIGKVSKLEELMDQKKHRAKTGIAHTRWATHGEPSQANAHPHSSNGSIYIVHNGIIENHFELRERLLNDGYKIESETDSELIAHLIHFNKEKGKNTLEALIETSKELNGAYSIAVIDAEQKGKIFAAKQKSPLLVGKGIEENFVASDPLAIAGLAESFYLLEDGDFAEITQEDIKIVGIDNEFVTREETLIDASIKEASKDGHKHFMEKEIY

SEQ ID NO: 125867 - protein, 288 aa, Unknown
  Bacterial polypetide isolated from the Sargasso Sea
GINHVKNAGNVSELSKLVDDSVLNGSIGIGHTRWATHGEPNNINAHPHFDRTGKIALIHNGIIENYNSIKEVLSKKDFEFNSETDTEVLVQLISEIYYSDGLNFEQAVQSALNQVIGAYGIVAFCLDEPNKLVAARHGSPLVIGIGDEEYFVASDASPIVEYTRNVIYLDEGEIVTITKSGYEIRSIVDDNIINKIATEIELSIDEIEKGEFPHHMLKEIYDQIHTITDTMRGRIDPLDGSAHLGGITEQIDRIKNAHRIYITACGTSWHAGLMGKYLIEEYARIPVH

SEQ ID NO: 125868 - protein, 296 aa, Unknown
  Bacterial polypetide isolated from the Sargasso Sea
LIFKERIKTIKSVGKILDLKNKAQKVSDKNFYGVIGHTRWATHGVVSKNNAHPFANDDLTLVCNGIIENYRKIQNRFVEIPKNIQSDTEISFYFLTYLVNKYKNSDEAIRVFKSVIKGNYAFVIFIKKNNCFYLLKNGSPIALSHNKNSSYICSDSSILSDYSDKIYHLKDGDIIKIQQTKISSLNKSKIIFEKNEIKQNPYDKGKYQHYMLKEIHEQPEVIKTTQKNYIQEFFNDFEGKFRNLILNKKIIFVGCGTAYHACLVGEYYFNKYTNIDTSSELASELRYKKINKDEKI

SEQ ID NO: 125869 - protein, 129 aa, Unknown
  Bacterial polypetide isolated from the Sargasso Sea
MCGIIGISSNKSVSANIINSLKKLEYRGYDSAGVATLFDGVINEVKSEGRVDNLEQNFDLKALKGNIGIGHVRWATHGAPNSINAHPHSSDNVSVVHNGIIENSTILKKHLINKGHTFKSQTDTEVIVH

SEQ ID NO: 125870 - protein, 155 aa, Unknown
  Bacterial polypetide isolated from the Sargasso Sea
IQVIARDFLDAKGSMSFGRGMSFPIALEGALKLKELSYLHAEGYPAGEMKHGPLALIEDGLPVIILAPNDKYFKKTISNMQEVIARGGKILLITDEKNDVINENIRFNIKVPAVENSLSPFFLTVPLQLLAYHVALLKKCDIDKPRNLAKSVTVE

SEQ ID NO: 125871 - protein, 308 aa, Unknown
  Bacterial polypetide isolated from the Sargasso Sea
TISKKNLNEKKCSGRVEELEKILFNSPAQGNIGIGHVRWATHGVPNEINAHPHSSEIVSVVHNGIIENSNLLKKNLEKEGYEFKSQTDTEVVTLLITKHLKDYNPIDAVLKSLEYLEGSFALGILFKDKADIIIGARRGSPLAVGYSTNENYLGSDSYSLKAMTNKISYLDDGEICILTKDSVEFFDASKNKINKKILILSEDKNEAKLGDYKNFMSKEIFEQPNTVKNCLNEYIDKIRNDINLFDFPINPNKIDKIFLIGCGTAYHSCQVAKYWIEELTDLNVETEVASEFRYRKIKFNKNTLYIFV

SEQ ID NO: 125872 - protein, 298 aa, Unknown
  Bacterial polypetide isolated from the Sargasso Sea
ATHGEPNDTNAHPHKDQTGKIFLIHNGIIENYSTLKEVLIRKGFSFKSETDTEALVNLISDIYYADGLNFEQAVQAALKQVVGTYGIVAFCSDEPDKLIAARHGSPLVLGVGNDEYFIASDASPIVEHTRNVIFLDEGEIATVQQSGHTIRSMKDDAIVNRETTEIEFSIEEIEKGEFPHFMLKEIHDQIFSIQDTMRGRINPVDGTAHLGGISDQLSRIQGAHRIYITACGTSWHAGLMGKYLIEEYAGIPVHVEYASEFRYRKPIINSKTVVIGISQSGETADTLAAIRKAKSFGA

SEQ ID NO: 125873 - protein, 258 aa, Unknown
  Bacterial polypetide isolated from the Sargasso Sea
ENGLAIFISQSGETADTLAALRYARDQGNHTLAIVNVAESTMAREADALLQTHAGPEIGVASTKSFTCQLVTLACLVIAMARARGTIDHEMEAHLSAAIAEVPARAAEVLNHDEVLRELAHELAEARDILYIGRAAAFPIALEGALKLKEISYIHAEGFAAGELKHGPIALIDEDVPVIVIAPSDDVFDKTASNMEEVIARGARVIFLSDVEGISRLGDMAAASIQLPSVDPVVAPILYAIPVQLLAYHVAVIKGTDV

SEQ ID NO: 125874 - protein, 113 aa, Unknown
  Bacterial polypetide isolated from the Sargasso Sea
EAYPAGELKHGPLALVDDSMPVVAVAPNDDLLEKLHSNLEEVKARGGKLYVFGHTDAYHQGFAEKFIELPEIPELIAPLIYTIPLQMLSYHVAILKGTDIDQPRNLAKSVTVE

SEQ ID NO: 125875 - protein, 245 aa, Unknown
  Bacterial polypetide isolated from the Sargasso Sea
KEEKYLGIVSICNVPTSTMARESDWKVFTNAGPEIGVASTKAFTTQLAALLILALSIAKSQDKNPEKRKEAAQDLRETPALISEAFKLKEEINTITNNISSNDNALFLGRGMYFSIAQEGALKLKEISYIHAEAYPAGELKHGPLALVDETIPVIALAPEDSLVEKLLSNLEEVKARGGTLYVFGNASSTIEINKGKFINMPECGDYNAPIVYTIPLQILAYEVACLRGTDLDQPRNLAKSVTVE

SEQ ID NO: 125876 - protein, 248 aa, Unknown
  Bacterial polypetide isolated from the Sargasso Sea
REAKSKFFKILSFVNVKGSSIARESDSIVYTHSGPEIGVASTKNYIAQLLNIYLFSLYLAQIKWTLTEDELAEKINELKHLPEKIEQILNLNDHIKAIAEKYVDSKNYLFIGRQLNYPTALEGALKLKEISYIHATGYAAGELKHGPIALIDKNVPVVCICPQTSTYDKMISNIQEVKAREGNIIAIGTNGDDVESIADDYIPVPECSEDISPLLTVIPLQLLSYHTAILLGCNVDQPRNLAKSVTVE

SEQ ID NO: 125877 - protein, 243 aa, Unknown
  Bacterial polypetide isolated from the Sargasso Sea
MKTCAVVNVIESSIARDSKFVLPIHCGTEIGVASTKAFLGQILILYILALKLGLLRNDLKKELFNEKLKDLKSLPKLAEKTLLTDNKIQTISNTFNEVKGSMFLGRGFSFPIALEGALKLKELSYIHAEGYPAGEMKHGPLALIEEGMPVVVLAPRDNYYKKTISNMQEVIARGAKVLLITNKSSDEVVSENIWEKIEVESANDDLLPFLLTIPLQKLAYYSALKKGFDIDKPRNLAKSVTVE

SEQ ID NO: 125878 - protein, 156 aa, Unknown
  Bacterial polypetide isolated from the Sargasso Sea
MCGIVGITSNKQVTNSIINSLRKLEYRGYDSAGIATLNNGHINEVKSEGRVDVLEKNLSKSNLKGNVGIGHVRWATHGVPSTINAHPHSSEKVSVVHNGIIENSTILKKYLIKKGHQFKSQTDTEVIVHLITEYLKKNDLKNSILKMLKKLHGSLH

SEQ ID NO: 125879 - protein, 533 aa, Unknown
  Bacterial polypetide isolated from the Sargasso Sea
SLKKLEYRGYDSAGIATIVDNEIHEKKCAGRVDNLEKLLFKNPSKGSLGIGHVRWATHGIPSQLNAHPHSSDEVSVVHNGIIENSTLLKKNLEEKGYKFKSQTDTEVITFLLTDFLKSYDLVDAINKTLKALNGSFALGILFKKYSNIVVGARRGSPLAVGYGPEENYLGSDSYALKSMTNKITYLDDGDVCILTNNKIEFYNSENKKINKKILTLSEDKQFTDKGDYKDFMSKEINEQNITAKTCVKEYVDQLRKDINLYNFPINPKDIEKIVLIGCGTAYHSCITAKYWFEELTNIPIEIDIASEFRYRKINFNNKNLYVFVSQSGETADTYAALDLCKKNNVKTCSIVNVVESSIARSSDFVLPIHAGPEIGVASTKAFIGQMLVLFILAIKISEIRKEINKTDYENKIDDLQKLPDLIKDTINYCQDNTPIIAKDFIKAKGSMFLGRGLSFPIALEGALKLKELSYLHAEGYPAGEMKHGPLALIEEGLPVVILAPKDRYFEKTISNMQEVIARGGKVILITDEDNKII

SEQ ID NO: 125880 - protein, 464 aa, Unknown
  Bacterial polypetide isolated from the Sargasso Sea
GYDSAGLATLSDNLIDEKKCSGRVEELEKILFKNPSKGNVGIGHVRWATHGVPNIINAHPHSSEEVSVVHNGIIENSDELKKDLESQGFKFKSQTDTEVITLLVTQLLKKFEPLEAVFQTLKKLKGSFALGIIFKNFSDIIVGARRGSPLAVGYSNEENYLGSDSYALKSMTNKISYLDDGELCMLTKNNVVFYDVNLKKINKKIHIVSDDENISDKGDYKNFMSKEIFEQASTIKKCLNEYTDSLKKDINIYNFPIDPKKINKIVLIGCGTAYHSCLVAKYWLEELTTIDAEIDIASEFRYRKLKFNTNNLYIFVSQSGETADTAAALDICKKNKVKTCSIVNVVESTIARNADWVLPIHAGPEIGVASTKAFLGQLIVLYILSLKLSIIRNDIDKDKYNENLRNLHKLPESIKNTFKLENEIQLMAKEFLDAKGSMFLGRRDSFPIALEGALKLKSSPICMP

SEQ ID NO: 125881 - protein, 226 aa, Unknown
  Bacterial polypetide isolated from the Sargasso Sea
SKFVLPIHCGPEIGVASTKAFLGQMLVLYILCLKLAFERKEIDKKIFSSKIKSLLELSKNVKKTLLIDDQIQRVCKSFVDVKGSMFLGRGFSYPIALEGALKLKELAYLHAEGYPAGEMKHGPLALIEDGMPVVVLAPRDEYFKKTISNMQEVIARGAKVLLITNKNKDEIVHENIWQSIKVENTNDDLLPFLITIPLQKLAYHSALNKGYDIDKPRNLAKSVTVE

SEQ ID NO: 125882 - protein, 594 aa, Unknown
  Bacterial polypetide isolated from the Sargasso Sea
CLCNIINSLKKLEYRGFDSAGIATLSDGEINEVKSEGRVDNLENNFDLKNLRGNIGIGHVRWATHGIPNSLNAHPHSSHNVSVVHNGIIENSTILKKHLINKGHNFKSQTDTEVIVHLITEHLKSSELEEAITKTLKQLHGSFALGIVFKDMPDLIVGARRGSPLAVGYGPNENYLGSDSYALKSMTNKITYLDDGEFCIVKKDQVLFFNEEGKKVNKKILELSSDQANYDKGDFKHFMAKEIEEQPITIKTGIKEYVDNVNKDINIFNFPWKIEEINSITLIGCGTAYHSCLMAKYWFEELTNLDVNIDIASEFRYRKNRFKKDTLYVFVSQSGETADTYAALDICNKNSMKTCAVVNVIESSIARDSNFVLPIHCGPEIGVASTKAFLGQILVLYILALKLGSMRNEIEKKEYQEKIKDLKALPGLIEKTLLHDNDIQAISSTFNEAKGSMFLGRGYSYPIALEGALKLKELSYVHAEGYPAGEMKHGPLALIEEGMPVVVLAPRDNYYKKTISNMQEVIARGAKVLLITNKSKDEVVSENIWETIEVENTNDDLLPFLLTIPLQKLAYYSALKKGYDIDKPRNLAKSVTVE

SEQ ID NO: 125883 - protein, 161 aa, Unknown
  Bacterial polypetide isolated from the Sargasso Sea
LLDNHIQAISSTFNEAKGSMFLGRGFSYPIALEGALKLKELSYIHAEGYPAGEMKHGPLALIEEGMPVVVLAPRDNYYKKTISNMQEVIARGAKVLLITNKNKDEVVSENIWETIEVEDTNNDLFPFLLTIPLQKLAYYSALKKGYDIDKPRNLAKSVTVE

SEQ ID NO: 125884 - protein, 365 aa, Unknown
  Bacterial polypetide isolated from the Sargasso Sea
MCGIVGITSNKEVTTRIVNSLKKLEYRGYDSAGIATLNDGFIKEVKCEGRVEVLEKNISSSNLHGEIGIGHVRWATHGKPSTINAHPHSSETVSVVHNGIIENSTILKKILEKKGYKFKSQTDTEVIAHLVTDYLKKNNLKNTIIKVLKKLHGSFALGIIFKDYPDLIVGARRGSPLAVGYGPNENYLGSDSYALKSMTNKVSYLNDGEFCLIKESIVEFFDNNGNKVNKKILNLSQDNQNYDKGDYKHFMAKEIDEQPTTIKNCVNEYVDKINKQINIYNFPWKTDQIKSIVLIGCGTAYHSCLVAKYWFEEYTSLDVSVDIASEFRYRKLKFKSDCLYVFVSQSGETADTYAALDICKKNKMK

SEQ ID NO: 125885 - protein, 390 aa, Unknown
  Bacterial polypetide isolated from the Sargasso Sea
DDIKFYNSNKNKINKEIFTLSEDKSSVSKGNYKNFMIKEIFEQPVTTKTCLKEYIDKIREEINFYNLPIEPKQINKIVLIGCGTAYHSCLVAKYWLEEFTTLNIETDIASEFRYRKNRFDKNNLYIFVSQSGETADTYAALDLCKKEKVKTCSIVNVVESSIARHSDCVLPIHAGPEIGVASTKAFLGQMLVLYLFSLKIAEVRADIDKKDYKKKITELKKIPELITDSLKEEEKIQLIAKDIFKSKGSMFLGRGFSYPIALEGALKLKELSYLHAEGYPAGEMKHGPLALIEDGLPVVVIAPKDKYFEKTLSNMQEVIARGGKVLLITNSGGKVISENIRFQIDLPDSDLTLTPFLFTIPLQLLSYHVALFKKCDIDKPRNLAKSVTVE

SEQ ID NO: 125886 - protein, 402 aa, Unknown
  Bacterial polypetide isolated from the Sargasso Sea
DNEIIVARSGSPLVIGLGLGENFIASDQLALLPVTRSFIFLEEGDVARITRDTVEIFDENGDAVEREVIESNITQDASGKGDYRHYMLKEIYEQPLAVRNTLEGRLNDDRVAIDAFGDSAQQIFKDVKHVQIIACGTSYHSGMVARYWLEQFAGVSCNVEIASEFRYRQSYVHENSLLVTISQSGETADTLAALRLAKEQGYMASMTICNVPGSSLVRESDLAFMTKAGAEIGVASTKAFTTQLVGLLMLTASIAQEKQLDQSAIVNAIKVLPAKLEETLLLADGIADLAEEFADKHHSLFLGRGSQYPIAMEGALKLKEISYIHAEAYAAGELKHGPLALIDADMPIIVVAPNNELLEKLKSNVEEVRARGGIIYVFADKDSHFESNDTMRVINVNHTDDI

SEQ ID NO: 125887 - protein, 314 aa, Unknown
  Bacterial polypetide isolated from the Sargasso Sea
RIQFVACGTSLHAAKVARSWFERICETPCYVDFASEYRYRNPLVENNTLFVCISQSGETADTLAALEYAKQKEYLGTVTICNVPTSTMARESDWKIFTNAGPEIGVASTKAFTTQLAALLMLAVAIAKSQNKNTELRQQAVQDLRNTPALIQEAFELLEDINYITKNISEKENSLFLGRGMYFPIAQEGALKLKEISYIHAEAYPAGELKHGPLALVDEDIPVVAVAPEDSLVEKLLSNLEEVKARGGTLYVFGNNRSTIEIKKGKFINMPECGDFNAPIIYTIPLQILAYEVACLRGTDLDQPRNLAKSVTVE

SEQ ID NO: 125888 - protein, 406 aa, Unknown
  Bacterial polypetide isolated from the Sargasso Sea
KISYLDDGDFCIIKKDQVDFFDSKGKKINKKVLKLSSNEQNYEKGDYKHFMAKEIEEQPTTIKNCVNEYIDKINNEINILNFPWKKNEISSIKLIACGTAYHSCLIAKYWFEQLTLLDVEVDIASEFRYRRNRFKKDCLYIFVSQSGETADTYAALDFCNKNKMKTCSIVNVVESSIARDSKLVLPIHCGLEIGVASTKAFLGQMLVLYILCLKIGYLRKDLDKKKYNLKIKSLFSLSKLVSNSLSTENQIQSICNSFTKAKGAMFLGRGYSFPIALEGALKLKELAYIHAEGYPAGEMKHGPLALIEDGMPVVVIAPRDEYYKKTISNMQEVIARGAKVLLITNKSDEETYSENIWEKIEIENTEEDLFPFLTTIPLQKLAYYSALKKGYDIDKPRNLAKSVTVE

SEQ ID NO: 125889 - protein, 492 aa, Unknown
  Bacterial polypetide isolated from the Sargasso Sea
MCGIVGYLGKKDSVPIILNGLHRLEYRGYDSAGIAVIGDNGIQHVKNSGNVSELSKLIDDSVLNGSIGIGHTRWATHGEPNNINAHPHFDRTGKIALIHNGIIENYNSIKEVLSNKDFEFKSETDTEVLVQLISEIYYSDGLNFEQAVQSALNQVIGAYGIVAFCLDEPNKLVAARHGSPLVIGIGDEEYFVASDASPIVEHTRNVIYLDEGEIVTITKSGHEIRSIVDDNIINKISTEIELSIDEIEKGEFSHHMLKEIHDQTHTITDTMRGRIDPLDGSAHLGGITEQIDRIKNAHRIYITACGTSWHAGLMGKYLIEEYARIPVHVEYASEFRYRNPIINSKTVVIGISQSGETADTLAAIKKAKEFGALTVGICNVVGSTIARETDCGVYTHAGPEIGVASTKAFTSQVAVLFLLSLCFRKDNGPTGKNFSKALLNVGVQVKEILDNSNSITKVANATFNSDNFLYLGRGMNFPVALEGALKLKEISY

SEQ ID NO: 125890 - protein, 305 aa, Unknown
  Bacterial polypetide isolated from the Sargasso Sea
SFHAGRIFEFWSHKFLGINCRVDYGSEYQYQEPIKTDKTLLVTISQSGETADTLSSLKFAKKSGEPVTLTICNVANSSLCRESDYTLLTKAGPEIGVASTKAFVTQLACLNLLLLTLMRVHNKLPAARKKITAALRDLPKLINKTLKMTGEYKKVAKLLFKRNSALFLGRGLYFPIAREGALKLKEISYIHAEAYPGGELKHGPLALIDKNMPVIALAPDNEHLDKIMSNIEEVAARKGKVITIGPLGRTKIDKNGGHIKIPKTLDLLNPIVSVVPMQLIAYYTAVFKGTDVDKPRNLAKSVTVE

SEQ ID NO: 125891 - protein, 597 aa, Unknown
  Bacterial polypetide isolated from the Sargasso Sea
MCGIFGAVSSKNIQSNLIVGLQKLEYRGYDSSGLSIFNGRNKIQRLRRAGKIKELKKDLSRSKLSGLCGIAHTRWATHGEPILKNSHPHNSNCVSIVHNGIIENSEELKKTLVRKKYKFTSDTDSEVIAHLLSNDIKNSKNYIKSLLSSFKKLKGSFAIGALIEQIPNTIIAACSGSPLLIGLSEHGNFIASDLHALSKTATKYITLDDDEIAIIKRDSIQVYSSNGKIIQKELHATSGKSKSIAKNGYKHFMQKEIFEQHEIISKAIKYQLGDKGLLPNIFGPNSDKILSNIKHIHFVACGTSHNAALVAKYWIEELTDVICTAEIASEYRYRDIQVPDKTLFVAISQSGETADTIYSLKKAKGKRYKNYLSICNVPESTITRLSDLVYLTHAGPEISVASTKAFTSQLIALLFLTMILTRFSKNKAIEKTILKQIKTLPQILKKTLQLEKKLKDIAKNFKSKSHALFLGRGISYPIALEAALKLKEITYIHAEGYAAGELKHGPLALVDKNMPVVGLMPDNNLVTQVLSNLAEVKARQGSVYIFTNKKLKFSKKDKTQVISMPACGQFVAPLVYVIPMQLLSYYVAIHKKTNMIS

SEQ ID NO: 125892 - protein, 439 aa, Unknown
  Bacterial polypetide isolated from the Sargasso Sea
DPEHLYCVKNESPLLLGLGEDCNYVGSDINAFLEYTRKAIILDEGEYVILGPNEYQVRSLKNGKKIKKNILHIDWDLETSKKGGFSHYMLKEIFDEPQTVRQAMQIPKEKIVAMAGMFADSSRSYMMGVGTTYYVASISQYYFSSLADCYYSALSSDEFSVVDIKKGDMVLAISQSGETYDTKTALVYAKDSGAKTSAIVNVMGSAISMMADHVIMQGSGPEICVVSTKAALAQTFIMLRVALELGLIRRKIKQKDYKKFQNEMQGFSEIIEIVLNEQSGFVRNIARDTSHVKHWFFLGCGVYYPVAMESALKMKEVTYQHAEGMPAGFLKHGTLSMVEPSLHTLFFVPLPEQKELHKRTLIAMEQVKSRGGVVIAIIFQGDELAQKIAFQSIKLPVVSSLFAPLLQMIIAQMFAYYAALDLGRNIDKPRNLAKSVTVG

SEQ ID NO: 125893 - protein, 405 aa, Unknown
  Bacterial polypetide isolated from the Sargasso Sea
YALKSMTNKITYLYDGEFCVIKKDHVEFFNEDGIKINKKVLELSSDEEKYDKGDYKHFMAKEIEEQPITLKNGINEYVDKSNNDINIYNFPWKINEISSITLIGCGTAYHSCLMAKYWFEELTSLDVNVDIASEFRYRKNRFKNETLYIFVSQSGETADTYAALDICKKNFMKTCAVVNVIESSIARDSEFVLPIHCGTEIGVASTKAFLGQILILYILSLKMGLLRKDLKKDVFIEKLNDLKMLPKLVEKTLSTDNKIQTVANTFNEAKGSMFLGRGFSYPIALEGALKLKELSYVHAEGYPAGEMKHGPLALIEEGMPVVVLAPRDNHYKKTISNMQEVIARGAKVLLVTNKSKDEIVSENIWETLEVETTNEDLLPFLLTIPLQKLAYYSALKKGFDIDKPR

SEQ ID NO: 125894 - protein, 359 aa, Unknown
  Bacterial polypetide isolated from the Sargasso Sea
GHVRWATHGVPNKVNAHPHSSEIVSVVHNGIIENSDQLKKEFEKSGTTFKSQTDTEVITVLLTEKLEKLDPLKAVFETIDMLKGSFALGIIFRNHKEFVIGARRGSPLAVGYSNNENYLGSDSYALKSMTNKISYLDDGDVCVLSKDEVKFYNHNKDKINKEIFTLSEDKASVTKGNYKNFMIKEIFDQPVTTKTCLKEYIDKIREEINFYNLPLDPKEIKKIVLIGCGTAYHSCLVAKYWFEEFSSINIEVDIASEFRYRKVRFDKKALYIFVSQSGETADTYAALDLCKKQNVKTCSVINVVESSIARNSDCVLPIHAGPEIGVASTKAFLGQMLVLYLLSLKISEVRNDIQNIEYK

SEQ ID NO: 125895 - protein, 365 aa, Unknown
  Bacterial polypetide isolated from the Sargasso Sea
SMRKGGYKHFMHKEIYEQPTVIGETLKSFIDPEKKTVKINSEILKTDIKKITLIACGTSAFASRIARFWFEEFANISVNVDIASEYRYRKLLKTEGEVVIFISQSGETRDTLASLEEAKKQGLKTISIVNVLDSSISRLSDENIFTLAGPEIGVASTKAFTTQLLTLLIISILLGKNKNFINNDHENKIITELLDLPSLLNYVLEKENELRDIASKIYNAKDVLYIGRGMGHGLALEGALKLKEISYIHAEGYAAGELKHGPIALIDEKVPVIGIIPTNNLFEKTYSNLAEVKARGGKIICITDKEGKKKLEDLSDLIFSVKNCNDYLQPIVSALPVQLLAYHVACFKGTDIDQPRNLAKSVTVE

SEQ ID NO: 125896 - protein, 497 aa, Unknown
  Bacterial polypetide isolated from the Sargasso Sea
MCGIIGINSIKPVSATIINSLKKLEYRGYDSAGMATLYNGLINEVKSEGRVENLEKNSLVQSMEGTIGIGHVRWATHGLPNSINAHPHSSQNVSVVHNGIIENSTILKKFLIGKGHKFKSQTDTEVIVHLITENLKTENIVNSIQKTLKSLHGSFALGIIFKDQPDLIVGARRGSPLAVGYGPNENYLGSDSYALKSMTNKITYLNDGEFCIIKKDHVEFFSEEGTKINKKVLELSSKEEKYDKGDYKHFMAKEIEEQPITIRNGINEYIDMSNKDINIYNFPWKSNEITSITLIGCGTAYHSCLMAKYWFEEITSLDVNIDIASEFRYRKNRFKKDTLYVFVSQSGETADTYAALDLCKQSGVKTCAVVNVVESSIARDSEFVLPIHCGTEIGVASTKAFLGQILILYILALKLALLRKDIEKTHFDKKIDDLKNLPKLVEQTLLIDNKIQTISNTFNEAKGSMFLGRGFSYPIALEGALKLKELSYIHAEGYPAG

SEQ ID NO: 125897 - protein, 361 aa, Unknown
  Bacterial polypetide isolated from the Sargasso Sea
HTPHLDHTGSIALVHNGIFENYEAIKQLLINRNIQFTSDTDTEVIVQLISELYYNNNEKLSFEDAVRAALQEVVGAYGIVTMCADEPNKIIAARMGSPLVLGIGEGEYFLASDASPIIEHTRNVIYLDDDEFVIIDKAGYSISNIKSKKIISKSLTKIDLSIEEIEKGKFPHFMLKEIHDQKHSISDTMRGRLNLNDGTTNLGGIVNYIPNILSASRIYITACGTSWHAGLIGKHLIEEYARVPVHVEYASEFRYRNAIIDANTIVIAISQSGETADTLAALKKAKELGAITLGICNVVGSTISRETDGGIFTHAGPEIGVASTKAFTSQVTVLIMFALNIGRKKGVSKHRGKELISALKT

SEQ ID NO: 125898 - protein, 238 aa, Unknown
  Bacterial polypetide isolated from the Sargasso Sea
MCGIIGAASSRSVGKILIKGLQLMEYRGYDSAGVVLNKDEEILRLRSLGKVSKLEEIMISKKPKAYSGIAHTRWATHGAPSEENAHPHGSHDDIYIVHNGIIENHEEIRGFLRNEGYEITSETDSELIAHLVHFYKKDTKDTLQALIKATNELNGAYSIAVVCKNEKGKVYAARQKSPLLVGLGIEENFVASDPLAIVNITEKFHMLEDGDFAVVTKKEVVIYDQEGSPVERDELKID

SEQ ID NO: 125899 - protein, 608 aa, Unknown
  Bacterial polypetide isolated from the Sargasso Sea
MCGIFGAVSSKNIQSNLIAGLQKLEYRGYDSSGLSIFNGRNKIQRLRRAGKIKELKKDLSRSKLTGLCGIAHTRWATHGEPILKNSHPHNSSCVSIVHNGIIENSDELKKILVRKKYKFTSDTDSEVIAHLLSNDMKNSKNYIKSILSSFKKLRGSFAIGALFEQMPNTIIAACNGSPLLIGLSEYGNFISSDLHALSKTATKYITLDDDEIAIIKRDSIQVYSSNGKIIQKELHATSGKSKSTTKNGYKHFMQKEIYEQHEIISEVIKYQLGDKGLLPNIFGPNSDKILSNINHIHFVACGTSHNAALVAKYWIEELTDVICTAEIASEYRYRDIQVPDKTLFVAISQSGETADTIYSLKKAKGKRYKNYLSICNVPESTITRLSDLVYLTHAGPEISVASTKAFTSQLIALLFLTMILTRFSKNKATEKTILKQIKTLPQILKKTLQLEKKLKDIAKNFKTKSHALFLGRGISYPIALEAALKLKEITYIHAEGYAAGELKHGPLALVDKNMPVVGLMPDNNLVTQVLSNLAEVKARQGSVYIFTNKKLKFSKKDKTQVISMPACGQFVAPLVYVIPMQLLSYYVAIHKKTNIDQPRNLAKSVTVE

SEQ ID NO: 125900 - protein, 282 aa, Unknown
  Bacterial polypetide isolated from the Sargasso Sea
MCGIVGAIAERNITAVLVEGLKRLEYRGYDSAGVALLTEQGALDRRRRVGKVSELQAALQAEPLAGRLGIAHTRWATHGAPSERNAHPHFSGKEPGHELAVVHNGIIENHEELRERLKGLGYVFSSDTDTETIVHLLDHKLQQLGDLSAALKAAIPELHGAYGLAVISAKQPDRLLAARSGSPLVIGLGLGENFLASDQLALRQVTDRFMYLEEGDIAEIRRDGVQIWDAAGQPVQREAVQYHEGAEAADKGEYRHFMLKEIHEQPKVVQRTLEGRLGSDHV

SEQ ID NO: 125901 - protein, 291 aa, Unknown
  Bacterial polypetide isolated from the Sargasso Sea
LPVTLELASDVLDRQCPFFRDDSIIFISQSGETADTLRALEYAKSKGALCIGIVNVVGSAISRATDCGLHINAGAEIGVASTKAYTCQITSLILLALALSEDSRSRADRRMDIMRGVAKLPETMRRALELDDKMKKLAQSLVDENSLLLFGRGYNYATALEGALKVKEVALLHSEGILAGEMKHGPLALVDETLPLVVIATRDSSFTKQKSVIEQLRARDARCILIVGEDDDSLDKYAASDEMLIKVPEMCDCLQPLINIIPLQLLSYHLTVLRGHNVDQPRNLAKSVTVE

SEQ ID NO: 125902 - protein, 393 aa, Unknown
  Bacterial polypetide isolated from the Sargasso Sea
MCGIIGITSNKLVSSPIINSLKKLEYRGYDSAGIATIDSGFIKEVKCEGRVESLEEAVSKSKLTGNVGIGHVRWATHGIPNTINAHPHSSENVSVVHNGIIENSTLLKKFLVNKGHKFKSQTDTEVIVHLITEYLKKDNLKDAIIKVLKKLHGSFALGIIFKDNPNLIIGARRGSPLAVGYGPGENYLGSDSYALKSMTNKISYLNDGEFCIIKKDNVEFFNQSGKKINKKILHLSSNEQNYEKGDYKHFMAKEIDEQPNTIKNCVNEYIDKINNDINIFNFPFKEKEINSISLIGCGTAYHSCLIAKYWFEQLTSFDVSIDIASEFRYRKNKFKKDCLYIFVSQSGETADTYAALDLCNKNKMKTCSVVNVIESSIARDSKFVLPIHCGPEI

SEQ ID NO: 125903 - protein, 235 aa, Unknown
  Bacterial polypetide isolated from the Sargasso Sea
MCGIVAVTGYKKALPLLINGLEKLEYRGYDSAGIAIINPETNSITCNKAEGKLHNLMNNLNDENIPGTVGIGHTRWATHGKPEFKNAHPHIDGSGTIAVVQNGIIENFQDLKNKLEEEGIIFNSDTDTEVIPHLIKRELNTLSKLNLENNGSTLLVAVRNVISDLEGSYALAVLWADAPTSLVVARRQAPLIIGLGEGEFICASDTPAIANFTNIILPMEDEEIALLTPSWDRNL

SEQ ID NO: 125904 - protein, 221 aa, Unknown
  Bacterial polypetide isolated from the Sargasso Sea
MCGIIGIISTKEVSSRIINSLKKLEYRGYDSAGIATLVDGSINEVKCEGRVDVLEKDISTFNLKGDIGIGHVRWATHGKPSKVNAHPHSSEQVSVVHNGIIENSTILKKFLEKKGYIFKSQTDTEVIAHLVTDYLKKNSLKDTIIKVLKKLHGSFALGIIFKNRNDLMIGARRGSPLAVGYGPNENYLGSDSYALKSMTNKISYLEDGEFCIIKKRSNRVF

SEQ ID NO: 125905 - protein, 424 aa, Unknown
  Bacterial polypetide isolated from the Sargasso Sea
MCGIIGINSGKPVSATIINSLKKLEYRGYDSAGIATLFNGLINEVKSEGRVDNLEKNSLVQNMEGTIGIGHVRWATHGLPNSINAHPHSSQNVSVVHNGIIENSTLLKKFLVGKGHKFKSQTDTEVIVHLITENLKTEDIVNSIKKTLKSLHGSFALGILFKDKPDLIVGARRGSPLAVGYGPNENYLGSDSYALKSMTNKITYLNDGEFCIIKKDQVEFFNEDGIKINKKVLELSSEEEMYDKGDYKHFMAKEIEEQPTTLKNGIKEYLDNSNNDINIYNFPWKTSEISSVILIGCGTAYHSCLMGKYWFEELTSLDVSVDIASEFRYRKNRFKKDTLYVFVSQSGETADTYAALDLCKKNGMKTCAIVNVIESSIARDSEFVLPIHCGTEIGVASTKAFFGSNINIIYFISKARFFEKGFKT

SEQ ID NO: 125906 - protein, 162 aa, Unknown
  Bacterial polypetide isolated from the Sargasso Sea
MLTGNKVQNISNTFNEAKGSMFLGRGFSYPIALEGALKLKELSYIHAEGYPAGEMKHGPLALIEEGMPVVVLAPRDSYYKKTISNMQEVIARGAKVLLITNKSKDEVVSENIWETLEVESTNEDLLPFLLTIPLQKLAYYSALKKGLDIDKPRNLAKSVTVE

SEQ ID NO: 125907 - protein, 157 aa, Unknown
  Bacterial polypetide isolated from the Sargasso Sea
MCGIIGISSNKPVSANIINSLKKLEYRGYDSAGIATLSDGEINEVKSEGRVDNLENNFDLKNLRGNIGIGHVRWATHGIPNSLNAHPHSSHNVSVVHNGIIENSTLLKKHLINKGHKFKSQTDTEVIVHLITEHLKTSELEEAITKTLKQLHGSFAL

SEQ ID NO: 125908 - protein, 361 aa, Unknown
  Bacterial polypetide isolated from the Sargasso Sea
IKCEGRVDGLEKNVTKINLLGNVGIGHVRWATHGIPSTINAHPHSSETVSVVHNGIIENSTILKKFLVDKGHKFKSQTDTEVIVHLVTEYLKKNSLKESILKMLKKLEGSFALGIIFKDQPDLIVGARRGSPLAVGYGPNENYLGSDSYALKSMTNKISYLNDGEFCILKKDQVEFFDSKGNKINKKVLKLSSNQQNYEKGDYKHFMAKEIEEQPTTIKNCVNEYIDKINKEINILNFPWKKNEISSVKLIGCGTAYHSCLIAKYWFEQLTLLDVEIDIASEFRYRKNRFKTDCLYIFVSQSGETADTYAALDLCNKHKMKTCSIVNVVESSIARDSKFVLPIHCGPEIGVASTKAFLGQM

SEQ ID NO: 125909 - protein, 463 aa, Unknown
  Bacterial polypetide isolated from the Sargasso Sea
MCGIVGGTSNRNILPILVEGLRRLEYRGYDSAGVAYKANGKISLVKNAGRVEDLAEKLNLEKSNAKIGIAHTRWATHGVPSEKNAHPHSSKNNIYVVHNGIIENHLALKEMLKKEGFKFSSQTDTEVIAHLIQLYLEKGKDLDSAVISTIAKLQGAYALGILDKNNPDTLIGVRQQSPLVIGEGFEEQFIASDIMALSNITNKFKFMDDGQIAILDKDHITVTSSSGVAAKLKTQEVDSNAYTNDLKGYNHFMEKEIFEQSDVIKDSLEGRLTKNESQEGIFGVGFEKEMKNITNIQVVACGTSFHAGRIFEFWSHKFLGINCRVDYGSEYQYQEPIKTDKTLLVTISQSGETADTLSSLKFAKKSGDPVTLTICNVANSSLCRESDYTLLTKAGPEIGVASTKAFVTQLACLNLLLLTLMRAHNKLPTARKKITAALRDLPKLIDKTLKMTGEYKKVAKLLF

SEQ ID NO: 125910 - protein, 608 aa, Unknown
  Bacterial polypetide isolated from the Sargasso Sea
MCGIIGATSSRSVGKILIKGLHAMEYRGYDSAGVALNQDNEIFRLRSLGKVSSLEKLMIDNKPKAKSGIAHTRWATHGAPSEENAHPHGSHNEIYIVHNGIIENHDEIRDKLKGKGYEIASETDSELIAHLIHLNKTDSSSTLEALIKATQELKGAFSIAAISAKEKGKIYAAKQKSPLLIGKGIEENFVASDPLAIANITEKFYLLEDGDFAEITKKDIKIFNSNKEQIQREETKIDATPTSSSKGNYTHFMEKEIYEQPDALGNTINGRLGENDVLDNIFGLGSSDAFKNVKRIQFVACGTSLHAAKTARKWFEDICEIPCYIDFASEYRYRNPIVEDNTLFVTISQSGETADTLAALEYARSEKYVGIVTICNVPTSTMAREADWKIFTNAGPEIGVASTKAFTTQLAALLMLALSIAKSHDKNADKRKQATQDLRETPGLVDKAFILKENISQITQNISSKHNALFLGRGMYFSIAQEGALKLKEISYIHAEAYPAGELKHGPLALVDDQIPVIALAPEDSLVEKLLSNLEEVKARGGTLYVFGNANSTIEVNRGKFINMPECGDYNAPIIYTIPLQILAYEVACLRGTDLDQPRNLAKSVTVE

SEQ ID NO: 125911 - protein, 606 aa, Unknown
  Bacterial polypetide isolated from the Sargasso Sea
MCGIVGIASNKQVTPSIINSLRKLEYRGYDSAGIATLNDGFIKEVKCEGRVEALEKNLSKNKLVGNIGIGHVRWATHGIPSTLNAHPHSSENVSVVHNGIIENSTILKKFLVNKGHKFKSQTDTEVIVHLITEYLKKNDLKKSIIKMLKKLHGSFALGIIFKDQPDLIIGARRGSPLAVGYGPSENYLGSDSYALKSMTSKISYLNDGEFCIIKKDNVEFFDEIGKKINKKVLTLSSNEQNYDKGDYKHFMAKEIEEQPTTIKNCINEYIDKINSSINIFNFPWKSNQISSIVLIGCGTAYHSCLMAKYWFEQLTTLNVTVDIASEFRYRKNRFSKDTLYVFVSQSGETADTFAALDLCNKNKMKTCSVVNIVESSIARESKFVLPIHCGPEVGVASTKAFLGQMLVLYILCLKLANMRGDIVKNVYLKKIKSLFSLSKLANQTLETESKIQSICGSFVNIKGSMFLGRGYSFPIALEGALKLKELAYVHAEGYPAGEMKHGPLALIEEGMPVVVLAPRDEYYKKTISNMQEVIARGAKVLLITNKSKDEIYSENIWEKIEVENTSDDLLPFLITIPLQKLAYYSALKKGYDIDKPRNLAKSVTVE

SEQ ID NO: 125912 - protein, 344 aa, Unknown
  Bacterial polypetide isolated from the Sargasso Sea
MCGIVGISSNKPVSSIILSSLKKLEYRGYDSAGLATIDKGFINEIKCEGRVNNLEKSVLSSKLDGVTGIGHVRWATHGLPNTINAHPHSSKKVSVVHNGIIENATLLKKHLVKNGHKFKSQTDTEVIVHLITEYLKTNNIKNTITKVLNKLHGSFALGIIFTDYPDLLIGARRGSPLAVGYGPSENYLGSDSYALKSMTNKITYLDDGEFCIIKKDKVEFYNTDGLVINKKVLELSKEDLDINKGDFKHFMAKEIAEQPNTISACIKEYINKLNNELNIFNFPWKKEGFNKIILIGCGTAYHACVIAKYWLEKLTNLEVDVDIASEFRYRNNRFKKQNLYIFVS

SEQ ID NO: 125913 - protein, 443 aa, Unknown
  Bacterial polypetide isolated from the Sargasso Sea
MGIIFKEMPDLIIGARRGSPLAVGYGPNENYLGSDSYALKSMTNKITYLNDGEFCVIRKKEIDFFDSKGKKVNKKILHLSASDQNYEKGEYKHFMAKEIDEQPITIKNCINEYIDKINNEINLLNFPWKKDEIKSIKLIGCGTAFHSCLVGKYWFEQLTNLDVQVDIASEFRYRKNKFNNDCLYIFISQSGETADTYAALDLCNKNDMKTCSIVNVVESSIARDSKFVLPIHCGPEIGVASTKAFLGQMLVIYLLCVKISFFKGDINKHKYIEKIKNLKLLSDLVNKTISAENKIQLICNTFANAKGSMFLGRGYSYPIALEGALKLKELAYIHAEGYPAGEMKHGPLALIEDGMPVVVIAPKDEHYKKTISNMQEVIARGAKVLLITNKEDDQVVSENIWQKIEIENIENDLYPFLVTIPLQKLAYYTALKKGYDIDKPRNL

SEQ ID NO: 125914 - protein, 175 aa, Unknown
  Bacterial polypetide isolated from the Sargasso Sea
KDLLSLSKSAKNTLNIEDKIQTLGKDFANSKGSMFLGRGYSYPIALEGALKLKELAYVHAEGYPAGEMKHGPLALIEEGMPVVVIAPRDEHYKKTISNMQEVISRGAKVLLITNKSTDEIYSENIWEQIEVEHISDELIPFLTTIPLQKLAYYSALDKGYDIDKPRNLAKSVTVE

SEQ ID NO: 125915 - protein, 605 aa, Unknown
  Bacterial polypetide isolated from the Sargasso Sea
MCGIVGAVAQRNIVPVLIEGLRRLEYRGYDSCGVAVLEPGAPKRARSVARVADLDAQVRESHLEGTTGVAHTRWATHGAPVTHNAHPIFSSNALALVHNGIIENFESLRDALRAKGYEFVSQTDTEVIAHLVHSLYRGNLFDAVREAVGQLHGAYAIAVIHKDQPHTVVGARQGSPLVVGHGDGENFLASDALALAGSTDRFTFLEEGDVCELSLDGVKIVDRNGATAQREIRVVSAYGGAVELGPYRHFMQKEIFEQPRAISDTVPQTDAFDATLFGAAAPAAFADIDSLLILACGTSYYSGLTAKYWLESIAKIPTQVEIASEYRYRESVPNPRQLVLVISQSGETADTLAALKHAQSLGHTHTLAVCNVATSAMVRLTEMQFLTHAGTEIGVASTKAFTTQLVALFVLAATLGKLRGHVDAALEAQFLKQLRHLPAALNSVLALEPQIIAWSEEFARKENALFLGRGLHYPIALEGALKLKEISYIHAEAYPAGELKHGPLALVTEAMPVVTVAPNDTLLEKLKSNMQEVRARGGELYVFADADTQIVNDDGLHVIRMPEHYGQLSPILHVVPLQLLAYHTACARGTDVDKPRNLAKSVTVE

SEQ ID NO: 125916 - protein, 329 aa, Unknown
  Bacterial polypetide isolated from the Sargasso Sea
MELQALKRLLPRIISSLKKLEYRGYDSAGLATLSNGNINEVKCEGRVDALEKNIIKTKISGSIGIGHVRWATHGKPSSINAHPHSSEDVSVVHNGIIENSTILKKLLENKGYKFKSQTDTEVIVHLVTDYLKKNNLKNTIIKVLKKLHGSFALGIIFKDQPDLIVGARRGSPLAVGYGPNEHYLGSDSYALKSMTNKISYLNDGEFCILKKDQVEFFDADGTKVNKKILNLSKDDQNYEKGDYKYYMAKEIDEQPITLKNCINEYIDKYNKEINIYNFPWKISEISSVVLIGCGTAYHSCLVAKYWFEQNTSLDVSVDIASEFRYRKIK

SEQ ID NO: 125917 - protein, 608 aa, Unknown
  Bacterial polypetide isolated from the Sargasso Sea
MCGIIAAASNRNVGKLLVQGLHKMEYRGYDSAGIALHQNNQIAHLRTLGKVKLLEEKMISEKPKSKLGIAHTRWATHGEPSEENAHPHKSNERVYIVHNGIIENYLDLKEFLKKEGYSFSSQTDSELIAHMLEYFLAKGNSMIDSMYLTKEKLDGAYAIAVIDKEDEKNIIIARNKSPLLIGIGTDEFLAASDPLAIAQLTNEFIFLEDGDVAELSSEEFTIYDQSKNKVEREISQIDISSQATSKGEYKHFMEKEIYEQPDAILNTIDGRVGGDDVLDNIFGIGSSEIFEKVKRIQIVACGTSLHAGRVAANWFSAIAELPTQIDYASEYRYRNPHVDEDSLLVTISQSGETADTLAALRYAKEKDYLSTLTICNVPTSSLARESDYSIFTNAGPEIGVASTKAFTTQLAALMLLSLALAKSRGKNPKLRTRVITAMRSLSDTVNETLKLKDKILEIAPEIASKDNALFLGRGIFYPIAKEGALKLKEISYIHAEAYPAGELKHGPLALIDEEMPVIALAPESDIAEKLVSNLEEVKARGGTLYVFADPSITIDLKSGQVISMPKCDFLLTPIIYTIPLQILSYEVALLRGTDIDQPRNLAKSVTVE

SEQ ID NO: 125918 - protein, 606 aa, Unknown
  Bacterial polypetide isolated from the Sargasso Sea
MCGIVGIISSKEVTGRILNSLKKLEYRGYDSAGIATLVDGNKNEVKCEGRVEVLEKDITKFNLKGDIGIGHVRWATHGKPSKINAHPHSSEHVSVVHNGIIENSTILKKFLEKKGYEFKSQTDTEVIAHLVTEYLKKNSIKDTIIKVLKKLHGSFALGIIFKAQSNLIVGAKRGSPLAVGYGPNENYIGSDSYALKSMTNKISYLDDGEFCIVKKDQIEFFDTEGSKINKKVMNLSKDEIDYDKGDYKYFMEKEIDEQPSTITACINEYIDKHNKQINIYNFPWKISSIDSVMLIGCGTAFHSCLMAKYWMEQNTNLDVSVDIASEFRYRKVKFKKNCLYIVVSQSGETADTHAALDLCKRNKMKTCAVVNVIESSIARDADLVLPIYCGQEVGVASTKAFIGQMLVLYILSTKISFDQKCISRKEYQSKIDNLLTLSDAAKKTLKLDQKILNVGKTFADAKGSMFLGRGYSFPIALEGALKLKELAYVHAEGYPAGEMKHGPLALIEEGMPVVVLAPRDEHYKKTISNMQEVIARGAKVLLITNNNKDEVISENIWEKIEVDQLDDELIPFLMTIPLQKLAFYSALEKGYDIDKPRNLAKSVTVE

SEQ ID NO: 125919 - protein, 398 aa, Unknown
  Bacterial polypetide isolated from the Sargasso Sea
DIVVLNRENVEIYNSLGDRANREFVDIGIMDTEVSKGSYNHFMEKEIHEHPKAVGETFRQFIDHDQGIISVDDIKLNFSDISKVHLIACGTAYYSCLVAKYYFEQYARLPVECDMASEFRYRDPVLNNKALYIFVSQSGETADTKAALDYCKDAKVRTLSIVNVMNSSIARESDYCLYTKAGAEIGVASTKAFTAQLSVLLSMALHCGTKNNNVTIEQNREICKEIMQAPQILEKAIKRSYELKETAKAIIDSKGVMYLGRGTAFPLALEGALKFKEISYIHAEGYPAGEMKHGPLALIEKDLPVVCIVPPGPLFHKTVSNIQEVIARGGRILMITDDESLESSSENIWKIFRLPKTPKSIEAIVYSVPIHMLAYYTAVELGNDVDQPRNLAKSVTVE

SEQ ID NO: 125920 - protein, 608 aa, Unknown
  Bacterial polypetide isolated from the Sargasso Sea
MCGIIAAASNRNVGKLLVKGLHKMEYRGYDSAGIALHQDSQIAHLRTLGKVKLLEEKMISEKPKSKLGIAHTRWATHGEPSEENAHPHKSNERVYIVHNGIIENYLDLKDFLKKEGYSFSSQTDSELIAHMLEYFLGKGNSMLDSMYLTKEKLDGAYAIAAIDKEDSKNIIVARNKSPLLIGIGVDEFLAASDPLAISLWTNEFIFLEDGDVAELSSEEYKIYDESKKEVQREISQIDISTQATSKGDYKHFMEKEIYEQPDAILNTIDGRVGGDDVLDNIFGIGSSKIFEKVKRIQIVACGTSLHAGRVAANWLSAIAELPAQIDYASEYRYRNPHVDEDSLLVTISQSGETADTLAALRYAKEKDYLSTLTICNVPTSSLARESDYSIFTNAGPEIGVASTKAFTTQLAALMLLALALAKSRNKNPKLRTRVITGMRSLSDTVNETLKLKDEILKIAPEIASKDNALFLGRGIFYPIAKEGALKLKEISYIHAEAYPAGELKHGPLALIDEEMPVIALAPESEIAEKLVSNLEEVKARGGTIYVFADPSITMDLKSGKLIKMPKCDFLLTPIIYTIPLQILSYEVAILRGTDIDQPRNLAKSVTVE

SEQ ID NO: 125921 - protein, 598 aa, Unknown
  Bacterial polypetide isolated from the Sargasso Sea
MCGIVGYSGPKEPLPILINGLSRLEYRGYDSAGIAISDGSKITIEKKEGKLDVLKEHLENKQILGNIGIGHTRWATHGVPNDVNAHPHSDNNDEFAIIHNGIIENYAEIKKDLINDGFKFNSDTDTEVVAVELSRKWNGNLLKTVVNVAKTLEGTYALVVTTTKEEGTIVAGRLMSPLVLGVGDNEVFLASDSAAILEHTKKMIFLENGDFVEIKNGKYKLFDSELNEIQREIQEIDWEVSEAEKSGYDHFMYKEILEQSEVIERTLSGRLEASSDEIPIKLDEASKFEKIWIVACGTAYHAGLFGKDLFEKVLGVPVSVELASEFRYREPIVGKNDLGIVISQSGETMDTIAATELLKENGSHVLALVNVVGSSLARMADSVFYLHVGPEIGVASTKAYLGMLVSQLVIAKHWDAENKLDVSFDEIAELPKLIDHTMACEGQIKEISEKIYKKNDIYFIGRGLDYALAAEGALKLKEISYLHAEALAAGELKHGTLALIEKGTPVIVTASQNHLLDKTTSNVQEVIARGAYVIAIGDSESEKLENISDDYVTLPDSNEILTTVISIIPLQFIAYHVANKNGQSIDQPRNLAKSVTVE

SEQ ID NO: 125922 - protein, 174 aa, Unknown
  Bacterial polypetide isolated from the Sargasso Sea
ITGLRSLPDTIEETLKLKDSILEIAPEIANKDNALFLGRGIFYPIAKEGALKLKEISYIHAEAYPAGELKHGPLALIDEEMPVIALAPESEIAEKLVSNLEEVKARGGTIYVFADPSITMDLKSGKLINMPKCDFLLTPIIYTIPLQILSYEVALLRGTDIDQPRNLAKSVTVE

SEQ ID NO: 125923 - protein, 234 aa, Unknown
  Bacterial polypetide isolated from the Sargasso Sea
SSMCRNSDSSLKIFAGPEIGVASTKAFTCQLVVLASLAIHIGRINGNLSDDDENNYVKSLLDIPRLISNVLDQEEDLIKIVKELNPIKNALYLGRGQMYPVALEGALKLKEISYIHAEGYPAGEMKHGPIALLEKGLPVIIGAPSFNLFDKTASNLYEVIARDGNVLLITDQEGLNQLGDTTKKIKSFIVDEANIITAPFIYTIPYQLFAYHTALLKGTDVDQPRNLAKSVTVE

SEQ ID NO: 125924 - protein, 339 aa, Unknown
  Bacterial polypetide isolated from the Sargasso Sea
MRRLEYRGYDSSGIATINNDQINCIKSQGNLDQLQKKLINEDLLGNVGIGHTRWATHGVPNEANAHPHITDEVAVVHNGIIENFSLLKNQISETGINFKSETDTEAIAHLITLYLKSGMGSYEAIRATTEDIKGSYALAIIVRSEPNKLYAVRKGSPLAIGSSDSKNYIGSDGYSLGNYCNEVTYLKDGDIAIIKNDAFEIFDHQNEFINRKSQIIDKTVTLAEKGAFKHFMSKEIHEQPSVIQDSISHYINNEDLTVNLPKFPFNITNLKNITLVACGSSYYSGLVAREWFEKLARVKVDVEIASEFRYREAPMDSSGLTVFISQSGETADTLAALKH

SEQ ID NO: 125925 - protein, 362 aa, Unknown
  Bacterial polypetide isolated from the Sargasso Sea
MCGIFGVIANNDNVKDQIFDGLRRLEYRGYDSSGIATINNDQINCIKSQGNLDQLQKKLINEELLGNVGIGHTRWATHGVPNEANAHPHITDEVAVVHNGIIENFSILKNQISETGINFKSETDTEAIAHLITLYIKSGMGSYEAIRATTEDIKGSYALAIIVRSEPNKLYAVRKGSPLAIGSSDSKNYIGSDGYSLGNYCNEVTYLKDGDIAIIKNDTFEIFDNQNEFINRKSQIIDKTVTLAEKGVFKHFMSKEIHEQPSVIQDSISHYINNEDLTVNLPKFPFNITNLKNITLVACGSSYYSGLVAREWFEKLARVKVDVEIASEFRYREAPMDSSGLTVFISQSGETADTLAALKHCK

SEQ ID NO: 125926 - protein, 327 aa, Unknown
  Bacterial polypetide isolated from the Sargasso Sea
MCGIVGYSGPKEPLPILIGGLSRLEYRGYDSAGIAVSDGSDITIEKKEGKLDVLKEHLADKKIKGNIGIGHTRWATHGVPNDVNAHPHSDNSEDFAIIHNGIIENYAEMKDSLLKENYSFKSDTDTEVVAVELSKQWNGNLLETVVKVTKDLEGTYALVVTTTKQENTIVAGRMMSPLVLGVGEGEVFLASDSAAILEHTNKMIFLENGDFVEIHDGNYKLFDADLNDIEREVQIIDWEVSEAEKSGHDHFMYKEILEQGEVIERTITGRLEEGSPEIPITKEKAQKYEKIWIVACGTAYHAGLFGKDLFEKVLGVPVSVELASEFR

SEQ ID NO: 125927 - protein, 350 aa, Unknown
  Bacterial polypetide isolated from the Sargasso Sea
MCGIVSYLGKSDSVPILLKGLERLEYRGYDSAGLALIDGDNLSCIKQSGKVSELNSKIEKISIKGSYGIAHTRWATHGPPNDTNAHPHLDQTGKIALVHNGIIENYSSIKMTLEGRGIKFTSDTDTEVLVQLISELYYNNDKKVSFENAVKAALQEVVGAYGIVAICVDEPGKMVAARMGSPLVLGVGDGEYLLASDASPIINYTRNVIYLEDDEFVKIDHSGYEISNINSADVITKTLTKIDLTIEEIEKGEFPHFMLKEIHDQKHSISDTMRGRLNLDNGTSNLGGIAEFLPNILSASRIYITACGTSWHAGLIGKHLIEEYAKVPVHVEYASEFRYRNAIIDANTIL

SEQ ID NO: 125928 - protein, 279 aa, Unknown
  Bacterial polypetide isolated from the Sargasso Sea
MEYRGYDSAGIALHQNNQIAHLRTLGKVKLLEEKMISEKPKSKLGIAHTRWATHGEPSEENAHPHKSNERVYIVHNGIIENYLDLKEFLKKEGYNFSSQTDSELIAHMLEYFLAKGNSMIDSMYLTKEKLDGAYAIAAIDKEDYKNIIIARNKSPLLIGIGTDEFLAASDPLAIAQLTNEFIFLEDGDVAELSSEEFTIYDQSKNKVEREISQIDISSQATSKGEYKHFMEKEIYEQPDAILNTIDGRVGGDDVLDNIFGIGSSEIFEKVKRIQIVACG

SEQ ID NO: 125929 - protein, 448 aa, Unknown
  Bacterial polypetide isolated from the Sargasso Sea
MCGIIGIASNKPVSINIINSLKKLEYRGYDSAGLATLDNNLIDEKKCSGRVDELEKILFKNPSNGNIGIGHVRWATHGVPNIINAHPHSSEEVSVVHNGIIENSDELKKDLEAQGFKFKSQTDTEVITVLVTQFLENSKPVESVFKTLKKLKGSFALGIIFKNFSNIIIGARRGSPLAVGYSKEENYLGSDSYALKSMTNKISYLDDGELCILDKDNVEFYDVNQKKINKKIHTLSDDENISDKGDYKNFMSKEIFEQSTTIKKCLNEYTDSLKKDINIYNFPIDPKKINKIILIGCGTAYHSCLVAKYWFEELTSLDVEIDIASEFRYRNLKFNSSNLYIFVSQSGETADTAAALDICKKNNVKTCSIVNVVESTIARNCDWVLPIHAGPEIGVASTKAFLGQLIVLYILNLKLAFTRGDIDKKIYDSNLQNLQRLPEAIDSTLKLE

SEQ ID NO: 125930 - protein, 610 aa, Unknown
  Bacterial polypetide isolated from the Sargasso Sea
MCGIVGAISNRNVDGILMEGLRRLEYRGYDSAGLAVITKNNIERLRRAGKVLKLQEALDNSKIEGQVGISHTRWATHGVPSEKNAHPHISDPDFAIVHNGIIENYLQIKDKLLVQGYTFTSDTDTEVVVHRIHSHFDQQKNLLKSFRKTVKELEGAFALAVISTHEPDKIIVARSGCPVVIGIGKSENFIASDIAALLPETNQFMFLEEGDIAVVGKNTIQIFDKEDVEVTRKISQSRLSSDAAEKGSFDHFMLKEIYEQSSAVGNTLDQRIAEGRVLQNAFGPDAETVFDKARSVHIVACGTSYHAGLIAKYWIESICQIPCRVEIASEYRYRNPVVMEDTLFIAISQSGETADTLAALRAAKEAKYISTLVICNVPESTMVREAELVMLTKAGPEIGVASTKAFTTQLTALSLLTIVIARRSGLDQKSEKEMVNQLLELPTLIDQILALDEDIKELAKNFSNKHHALFLGRGIQNPVAMEGALKLKEISYIHAEAYAAGELKHGPLALVDEDMPVVAVAPDDRLLEKLKSNLQEVKARGGELYVFTDPRVTFVDDEVTHNSVMPVAIKEFQGPILYSIPLQLLAYHVAVIKGTDIDQPRNLAKSVTVE

SEQ ID NO: 125931 - protein, 406 aa, Unknown
  Bacterial polypetide isolated from the Sargasso Sea
FNTNLQGEIGIGHVRWATHGKPSTVNAHPHSSEAVSVVHNGIIENSTILKKVLEKKGYKFKSQTDTEVIAHLVTDYLKKNNLKNTITKVLKKLHGSFALGIIFKDYPDLIVGARRGSPLAVGYGPNENYLGSDSHALKSMTNKVSYLNDGEFCLIKENQVEFFDTKGKKVNKKILNLSQDNQSYEKGDYKHFMAKEIDEQPTTIKNCVNEYVDKINKQINIYNFPWKIDQIKSIILIGCGTAYHSCLVAKYWFEEYTSLDVTIDIASEFRYRKLKFKTDCLYVFVSQSGETADTYAALDICKKNKMKTCSIVNVVESSIARDSDLVLPIHCGPEIGVASTKAFLGQMLVLYMLCLKLSFDQKITIKKKYQEKIKNLLSLSNLCKKTLLTDSKIQKTSKAFIEAKGS

SEQ ID NO: 125932 - protein, 544 aa, Unknown
  Bacterial polypetide isolated from the Sargasso Sea
MTGNLGIAYTRWATHGGVTTENAHPHLSQNGEFAIVHNGIISNYQKLRERLIGEGLQFRSTTDTEVFVNLVEEAFAQKNDVLGAFLEALKQIQGTYSIVLLSSHDPEHLYCVKQDSPLIIGLGEGCNYIGSDINAFLEHTRKAVVLDDGEFAVISRERYEISDVGKREEREKSILQIDWDTETTKKGGFSHYMIKEIFDEPQTARQALDVPQEQIKQLAEMFQNAPRAYLMGVGTTFFICQMAQYLFSSLSKRYFPAISSDEFNGVVPVSSEELVVAVSQSGETFDTKFSLNIAHEMGAKTAAIVNVMGSSISRMVDHVIMQGSGPEICVVSTKAALAQALLLLRTALELGYSEGCLDSKSFQSHQKELESFPELISILLNEKSGFMRNLARITSSVQNWIFLGCGIYYPVAMESALKMKEVTYLHAEGMPAGFLKHGTLSMIEESVHSLFFVPPPAEVDLHNRTIIAIEEIKTRCGTLVGLYFEGDSQAKSLLDHAVELPPVPSLIAPLVQMILAQMFAYYTALDLKRNIDKPRNLAKSVTVG

SEQ ID NO: 125933 - protein, 289 aa, Unknown
  Bacterial polypetide isolated from the Sargasso Sea
DVYIDIASEFRYRKNRFKEDTLYIFVSQSGETADTYAALDLCNKNNMKTCAVVNVIESSIARDANFILPIHCGPEIGVASTKAFLGQILILYILALKLGSLRNEINKENYREKIKDLQKLPSLIEKSLIIDNDIQAISSTFNEAKGSMFLGRGLSYPIALEGALKLKELSYVHAEGYPAGEMKHGPLALIEDGMPVVVLAPRDRYYKKTISNMQEVIARGAKVLLITNKSKDEIVSENIWETIEVENTNDDLLPFLLTIPLQKLAYYSALKKGYDIDKPRNLAKSVTVE

SEQ ID NO: 125934 - protein, 341 aa, Unknown
  Bacterial polypetide isolated from the Sargasso Sea
INGRLGENDVLDNVFGLGSSDSFKNVKRIQFVACGTSLHAAKTARKWFEDICEIPCYIDFASEYRYRNPIVEDNTLFVTISQSGETADTLAALNYAKEEKYLGIVSICNVPTSSMARESDWKVFTNAGPEIGVASTKAFTTQLAALLILALSIAKSQDKNPEKRKQAAQDLRETPALISEAFKLKEEINSITNNISSNDNALFLGRGMYFSIAQEGALKLKEISYIHAEAYPAGELKHGPLALVDETIPVIALAPEDSLVEKLLSNLEEVKARGGTLYVFGNARSTIEIKKGKFINMPECGDYNAPIVYTIPLQILAYEVACLRGTDLDQPRNLAKSVTVE

SEQ ID NO: 125935 - protein, 501 aa, Unknown
  Bacterial polypetide isolated from the Sargasso Sea
MKRLEYRGYDSAGIACINSNDKFVVTKRKGKVSELKSALSNSEIYNLGIAHTRWATHGKPNQLNAHPHLDQSKKIALVHNGIIENYDPIKKFLLSKKIKFKSETDTEVLVQLIGYFYNNGKMNFEQSVRAALQRVDGAYGIVILNTDYPDMMIAARKGSPLVLGIKENEFFIASDISPIVKHTKDIIYLKDSEMAVINKKNFKIKSVNKDISLPKNIEKIDFKIDDYDKGEFKYFMHKEIHEQINTIPNTINGRIKNESVLLQGLSDNWNVIESAEKIYITACGTSWHAGLIGKNFIERFANIPVHVEYASEFRYNHALIDDKTVVIAISQSGETADTLAAIRKANNHGALTIGICNVAGSSVSRETKCGVYTRCGHEVGVASTKAFTSQIVVLYLLALKLAESRKTISKSSLKRHLDYKKSVNKIKSIFKQENDIKKIAMKYKKSNDFLYLGRGLNFPVALEGALKLKEISYIHAEGYPAAEMKHGPIALIDKDMPSVFI

SEQ ID NO: 125936 - protein, 386 aa, Unknown
  Bacterial polypetide isolated from the Sargasso Sea
MCGIIGAASSRSVGKILVNGLKKMEYRGYDSAGLILNQDEAAFQLRTLGKVSNLEDAMIEQRPKADSGIAHTRWATHGIPSEKNAHPHGSKGKIYIVHNGIIENHDELRERLVNEGYEIQSETDSELIAHLIHFNKEKGKNTLSALIETTKELDGAYSIAVIDTEQKGKIFAAKQKSPLLVGKGVEENFIASDPLAIAGLAESFYLLEDGDFAEISKEEIKIVGSNGESVSREETIIDTSVKEASKDGYKHFMEKEIYEQPQAIANAIEGRTADGEVLDNIFGLGSSDAFKDVKRIQFVACGTSLHAAKTARKWFEELCETPCYIDFASEYRYRNPLVEDDTLFVCISQSGETADTMAALNYAKDEKYLGIVTIYNVPTSTMAQRI

SEQ ID NO: 125937 - protein, 306 aa, Unknown
  Bacterial polypetide isolated from the Sargasso Sea
MCGIVAVTGYKKALPLLIDGLEKLEYRGYDSAGIAIINSETNCISCNKAEGKLKNLISNLNDHNIPGTVGIGHTRWATHGKPEVKNAHPHTDSSGNIAVVQNGIIENFQDLKNKLEEEGIIFNSDTDTEVIPHLIQRELNNLSKLNLENNGSTLLVAVRNVLSDLEGSYALAVLWSGAPTSLVVARRQAPLIIGLGEGEFICASDTPAIANFTNIILPMEDEEIALLTPLGIEIYDSGNERQYRNPVSLKVSEQKIDKMNFKHYMLKEIYDQPQTAKNWLENYLIKNSDNDQYQIKYPFDTKFFES

SEQ ID NO: 125938 - protein, 608 aa, Unknown
  Bacterial polypetide isolated from the Sargasso Sea
MCGIVGGTSNRNILPILVEGLRRLEYRGYDSAGVAYKANGKISLVKNAGRVEELAEKLNLKKNNTKIGIAHTRWATHGIPSKKNAHPHSSKNNIYVVHNGIIENHIALKETLKKEGFKFSSQTDTEVISHLIQFYMEKGKDLDSAVISTIAKLKGAYALGILDKNNPDTLIGVRQQSPLVIGEGFEEQFIASDIMALSNITNKFKFMDDGQIAVLDKGHVTVTSSSGMAAKLKTQEVDSNAYTNDLKGYNHFMEKEIFEQSDVIKDSLEGRLTKNESQEGIFGVGFEKEMKNITNIQVVACGTSFHAGRIFEFWSHKFLGINCRVDYGSEYQYQEPIKTDKTLLVTISQSGETADTLSSLKFAKKSGDPVTLTICNVANSSLCRESDYALLTKAGPEIGVASTKAFVTQLACLNLLLLTLMRVHNKLPTARKKITAALRDLPKLINKTLKMTGEYKKVAKLLFKRNSALFLGRGLYFPIAREGALKLKEISYIHAEAYPGGELKHGPLALIDKNMPVIALAPDNEHLDKITSNIEEVAARKGKVITIGPLGRTKIDKNGGHIKIPKTLDLLNPIVSVVPMQLIAYYTAVFKGTDVDKPRNLAKSVTVE

SEQ ID NO: 125939 - protein, 605 aa, Unknown
  Bacterial polypetide isolated from the Sargasso Sea
MCGIVGAVAQRNIVPVLIEGLRRLEYRGYDSCGVAVLGESGPRRARSVARVADLDAQVHESHLEGITGIAHTRWATHGAPVTDNAHPIFSRDALALVHNGIIENYESLREMLRGKGYEFVSQTDTEVIAHLIHSLYRGDLFASVREAVGQLHGAYAIAVLHKDQPHTVVGARQGSPLVVGLGNGENFLASDALALAGSTERFIFLEEGDVCELSLEGVRIADRDGYEAQREVRQVAAYGGAVELGPYRHFMQKEIFEQPRAITDTIPQADSFDASLFGEGADQVFAEIDNLLILACGTSYYSGLTAKYWLESVAKIPTQVEIASEYRYRESVPNPKSLVVVISQSGETADTLAALKHAQALGHKHTLSVCNVGTSAMVRQTALSFLTHAGREIGVASTKAFTTQLVALFVLAATLGKLRGQVSAEQETEYLKQLRHLPAALNSVLALEPQIIAWSEEFSRKEHALFLGRGLHYPIALEGALKLKEISYIHAEAYPAGELKHGPLALVTEAMPVVTVAPNDALLEKLKSNIQEVRARGGELYVFADADTKIVNDEGLHVIRMPEHYGLLSPILHVVPLQLLAYHTACARGTDVDKPRNLAKSVTVE

SEQ ID NO: 125940 - protein, 612 aa, Unknown
  Bacterial polypetide isolated from the Sargasso Sea
MCGIIGVASNKPSVDKLVIGLLRQEYRGYDSAGLAIFDESEEIKVYKSTGKVSELQNSIDQNPVNGTTGIAHTRWATHGLPTTENAHPHHSNKEIYVIHNGIIENHQEIRTTLRALGYVFESETDTEVIAHLIHAKMSEGNISLVESLKVAVKDLRGAYAIGAVSSKEPGLVAAARRGSPLVVGQGNGENFIASDQLALADFADNFVFLEEGDLAEITPTGTKFWNEDNEQVDRPVVVAKSLGETIDKGEYRHFMLKEIKEQPEKIKRLLEGQLTDSGVQAEIFGPEAPAIFKKVESVQIVACGTSFHAGTVAKYWIEGLAGLPCSVEVASEFRYRNKVVAPNTLFVSISQSGETADTLACLSAAQGAGYLARLGICNVATSTLTRNSDLVFLTKAGPEIGVASTKAFTTQLVGLLMLTLALGRLHGLSAAAENTISNALRALPESLDLVMQLENEIIEMAEDFDQKEHALFLGRGIHYPVAMEGALKLKEISYIHAEAYPAGELKHGPLALVDSEMPVVAVAPNDDLLEKLQSNLEEVKARGGKLYVFGHSAAHNKDSTIARFIELPWQIPELIAPLIYSIPLQLLAYHVAILKGTDIDQPRNLAKSVTVE

SEQ ID NO: 125941 - protein, 344 aa, Unknown
  Bacterial polypetide isolated from the Sargasso Sea
MCGIVGYIGNKDPVPILLKGLKRLEYRGYDSSGIALLEEDNLTHIKKAGKVSDLQQLVDDSSIKGNCGIAHTRWATHGAPNDINAHPHLDHTGSIALVHNGIFENYETIKQLLVNRDVQFTSDTDTEVIVQLISELYYNNDEKLTFEDAVRAALQELVGAYGIVTVCADEPNKIIAARMGSPLVLGIGEGEYFLASDASPIIEHTRNVIYLDDDEFIIIDKAGYSISNIKSKKIVSKSLTKIDLTIEKIEKGKFPHFMLKEIHDQKHSISDTMRGRLNLNDGTTNLGGIVNYIPNILSASRIYITACGTSWHAGLIGKHLIEEYARVPVHVEYASEFRYRNAII

SEQ ID NO: 125942 - protein, 118 aa, Unknown
  Bacterial polypetide isolated from the Sargasso Sea
FHAEGYPAGEMKHGPLALIEEGMPVVVLAPRDNYYKKTISNMQEVIARGAKVLLITNKSDDEVVSENIWETIEVESTNKDLLPFLLTIPLQKLAYYSALKKGYDIDKPRNLAKSVTVE

SEQ ID NO: 125943 - protein, 321 aa, Unknown
  Bacterial polypetide isolated from the Sargasso Sea
MCGIIGINSNKEVTSTILNSLRKLEYRGYDSAGIATLNSGYIQEVKCEGRVDNLEKNIIKNKLLGNVGIGHVRWATHGIPSTLNAHPHSSDNVSVVHNGIIENSTLLKKFLVKKGHKFKSQTDTEVIVHLITEYLKKNNLIDTLTKVLKKLHGSFALGIIFKDEPDLIVGARRGSPLAVGYGPGENYLGSDSYALKSMTNKVTYLDDGEFCIIKKTEVSFFNEQGKKINKKILSLTTDEQNYDKGDYKHFMAKEIDEQPLTIKNCINEYIDKKNNEISIFNFPWKIKDISSITLVGCGTAYHSCLIAKYWFEKLTSFDVHI

SEQ ID NO: 125944 - protein, 525 aa, Unknown
  Bacterial polypetide isolated from the Sargasso Sea
STNAHPHSSQNVSVVHNGIIENSTLLKKFLLGKGHKFKSQTDTEVIVHLITENLKTENITNSIKKTLKALHGSFALGIIFKDKPDLIVGARRGSPLAVGYGPNENYLGSDSYALKSMTNKITYLNDGEFCVIKKDHVEFFSEDGTKINKKVLELSSEEEKYDKGDYKHFMAKEIEEQPTTLKNGIKEYIDTANNDINIYNIPWKKNEISSITLIGCGTAYHSCLMAKYWFEELTSLDVNIDIASEFRYRKNRFKKDCLYVFVSQSGETADTYAALDLCNKNGMKTCAIVNVIESSIARDSKFVLPIHCGTEIGVASTKAFLGQILILYILALKLGLQRSDLKKKIFIDKLKDLRDLPKLVEQTLLLDNKIQNISSTFNEAKGSMFLGRGFSFPIALEGALKLKELSYIHAEGYPAGEMKHGPLALIEEGMPVVVLAPRDNYYKKTISNMQEVIARGAKVLLITNKSSDEIISENIWETIEVEKTNDDLLPFLLTIPLQKLAYYSALKKGYDIDKPRNLAKSVTVE

SEQ ID NO: 125945 - protein, 304 aa, Unknown
  Bacterial polypetide isolated from the Sargasso Sea
HSCQVAKYWIEELTDLNVETEVASEFRYRKIRFNPNTLYIFVSQSGETADTAAALEIAKKNKMKTCSVINVVESSIARNSDWVVPIHAGPEIGVASTKAFIGQMLVLYIMSLKISKIRGNIDDKNYIEKIKNLKNLPQEIENSLKTEELIQIFAKDFLSAKGSMFLGRGSSFPIALEGALKLKELSYLHAEGYPAGEMKHGPLALIEDGLPVIILAPKDKYFEKTISNMQEVIARGGKVLLISDKHDEVINENIRFKIEMPFIDELLNPFLLTIPLQLLAYHVALLKKCDIDKPRNLAKSVTVE

SEQ ID NO: 125946 - protein, 609 aa, Unknown
  Bacterial polypetide isolated from the Sargasso Sea
MCGIVGAVAQRDILPNLVDGLKRLEYRGYDSCGVVVYRDRALARARSVDRVANLQREIAEQALSGYTGIAHTRWATHGAPVTLNAHPHFSPSDANARIALSHNGIIENCDQLRAELQAHGYVFASQTDSEAIAHLIDHLYDGDLFDAVRRAVARLRGSYAIAVMCRDEPHRIVGARDGMPLVVGVGEGENFLASDAIALSGITDRIAHLENGDVADIQLHRYWIVDAAGQRVERAVQRVAAHSGAADLGSYRYYMQKEIFEQPQAVADTLLDVSSIMPELFGDGAWRVFNDVDSVLLLACGGSYHAALTAKYWIESIAKLPASVEIASEFRYRDSVPNPRTLVVAVSQSGETADVLGAVHVAKQSGMMHTLAICNVATSALMRECALQFVTRAGIEIGVASTKAFTTQLVALFLLTLSLAQVRGRLSDDEEKEHLRALRHLPDAMSKVLALEPQIMAWSELLARRDNMLFLGRGMHYPIALEGALKMKEISYIHAEAYPAGELKHGPLALVSNEMPVIAVAPNDMLLEKLRSNMHEVSARNGRLFVFADVDCGLVPSEGIEVIRLNEYYGPLSPILHTVPMQLLAYHAALARGTDIDKPRNLAKSVTVE

SEQ ID NO: 125947 - protein, 631 aa, Unknown
  Bacterial polypetide isolated from the Sargasso Sea
MCGIVAVTGYKKALPLLINGLEKLEYRGYDFAGIAIINSETNFISCSKAEGKLKNLISNLNDHNIPGTVGIGHTRWATHGKPEVKNAHPHTDSSGNIAVVQNGIIENFQDLKNKLEEEGIIFNSDTDTEVIPHLIKRELNTLSKLNLENNGSTLLVAVRNVLSDLEGSYALAVLWSGAPTSLVVARRQAPLIIGLGEGEFICASDTPAIANFTNIILPMEDEEIALLTPLGIEIYDSSNERQYRNPVSLKVSEQVMDKMNFKHYMLKEIYDQPQTAKNWLENYLIKNSDNGEYQINYPFNTEFFESIEKIEIIACGTSKHAAMVGSFLLEQFSGIPTNVFYASEFRYSPPPLLPNTLTIGVTQSGETADTIAAIDMEIKRRSSIENEKFKPNLIAITNRKESSIGRQISNVIDICAGIEVGVAATKTFFAQLLSFYGLAIKFAQIKGNQSPDEISKLINELIKLPPLLEDLLESHDKSSEKLAHDFFNIKDVIFLGRGINYPIALEGALKLKEISYIHAAGYPAGEMKHGPIALLDKKVPVISIASPGEVFDKVISNAQEAKARDSYLIGIAPECNGTEIFDYLMKVPSFNEWISPLINILPLQLLSYHIAAHRGLDVDQPRNLAKSVTVE

SEQ ID NO: 125948 - protein, 353 aa, Unknown
  Bacterial polypetide isolated from the Sargasso Sea
EIEEQPTTIKNCINEYLNKINDEINILNFPWSASQINSIKLIGCGTAYHSCLIAKYWFEQLTSLDVNVDIASEFRYRKNRFKKDCLYIFVSQSGETADTYAALDLCNKNKMKTCSIVNIVESSIARDSQFVLPIHCGPEIGVASTKAFTGQMLVLYILCLKIAKIRKDLKINEYKLKIKKLYLLSEFVKQSLLTGDKIQSICNTFSEAKGSMFLGRGYSFPIALEGALKLKELAYIHAEGYPAGEMKHGPLALIEDGMPVVVIAPKDNHYKKTISNMQEVIARGAKVLLITNKSEDEVFSENIWQTVEVENINNDLYPFLITIPLQKLAYYSALKKGYDIDKPRNLAKSVTVE

SEQ ID NO: 125949 - protein, 605 aa, Unknown
  Bacterial polypetide isolated from the Sargasso Sea
MCGIVGIVSNKSVSASIISALKKLEYRGYDSAGISTISNGQINEQKCSGRVDNLEKILFQNPSSGDLGIGHVRWATHGVPNQVNAHPHSSEVVSVVHNGIIENSDELRKEYKEKGYSFKSQTDTEVITIMLTDYLKKENLINCIHKTLEKLEGSFALGVIFKDFDNLVVGARRGSPLAVGYGHNENFIGSDSYALKSMTNKISYLDDGDFCILFKEKVEFYNSDKKKINKQIFELSNEDNTADKGDYRDFMSKEINEQSITTKKCINEYLDKSRNDINIYNLPIDPKKINKIRLIGCGTAYHSCLMAKYWIEEFTSLDVEADIASEFRYRKIKFNSNDLYIFVSQSGETADTYAALEKCKKNQVKTCGIVNVVESSIARIADFVLPIHAGPEIGVASTKAFIGQLIVLYLLTLKISKERNDIIDDEYLKLILDLKKLPELIEETLNKQKDIQLIARDFIEAKGTMYLGRGYSYPIAMEGALKLKELSYIHAEGYAAGEMKHGPLALIEDGMPVIVLAPKDRFFEKTISNMQEVIARGGKVLMITDDTSKTMNENIRFKFQIPKTNSTINSFLLTIPIQFLAYHVALLKNCDIDKPRNLAKSVTVE

SEQ ID NO: 125950 - protein, 232 aa, Unknown
  Bacterial polypetide isolated from the Sargasso Sea
MCGIIGAASSRSVGKILIKGLQLMEYRGYDSAGVVLNKDEEILRLRSLGKVSKLEEKMISQKPKAFSGIAHTRWATHGAPSEENAHPHGSHDDIYIVHNGIIENHEEIRGFLRKEGYEITSETDSELIAHLVHFYKKDTQDTLQALMRATHELNGAYSIAVVCKKEKGKVYAARQKSPLLVGLGIEENFVASDPLAIVNITEKFHMLEDGDFAVVTKEDVVIYDQEGAPVER

SEQ ID NO: 125951 - protein, 496 aa, Unknown
  Bacterial polypetide isolated from the Sargasso Sea
MGYVFSSDTDTEVIAHLVHHELKSAPSLLAAMQVAVKQLRGAYGTVVMDSRDDSRVVVARSGSPLVIGRGIGENFIASDQMALLPVTRRFIFLEEGDVAEVTRRDVHIFDTHGEAVVREELESELSHDAGDKGEYRHYMLKEIYEQPKAITNTLEGRLGSDHVVVESFGNGARTIFDQVEHVQIVACGTSYNSGMVARYWFEEIAGVSCDVEIASEFRYRKSVVRPNSLLVTLSQSGETADTLAALRLAKESGYMSSLAICNVPGSSLVRESDLAFMTRAGAEIGVASTKAFTTQLAGLLMLVASVGHCRGNLSAAAEAELVKALQALPLRIKESLALAKDIEALAEEFADKHHSLFLGRGSQYPIAMEGALKLKEISYIHAEAYAAGELKHGPLALIDAEMPIIVVAPNNDLLEKLKSNVEEVRARGGILYVFADADAGFKSDETMRVMSLNHVEEMIAPIVYTVPLQLLSYHVALIKGTDVDQPRNLAKSVTVE

SEQ ID NO: 125952 - protein, 448 aa, Unknown
  Bacterial polypetide isolated from the Sargasso Sea
MCGIIGAASSRSVGKILVNGLKKMEYRGYDSAGLVLNQDEVVFQLRTLGKVSNLEDAMIEQRPKADSGIAHTRWATHGIPSEKNAHPHGSNGNIYIVHNGIIENHDELRERLINEGYEIQSQTDSELIAHLIHFNKEKGKTTLGALIETTKELDGAYSIAVIDTEEKGKIFAAKQKSPLLVGKGIEENFIASDPLAIAGLAESFYLLEDGDFAEITKDEIKIVGSNSEALSREETIIDTSVKEASKDGYKHFMEKEIYEQPQAITNAIEGRTSDGEVLDNIFGLGSSEAFKGVKRIQFVACGTSLHAAKTARKWFEELCETPCYIDFASEYRYRNPLVEDDTLFVCISQSGETADTMAALNYAKDEKYLGIVTICNVPTSTMARESDWKIFTNAGPEIGVASTKAFTTQLAALLLLACSISKSKNLNKDKRADAINDLLNTPSLVKES

SEQ ID NO: 125953 - protein, 371 aa, Unknown
  Bacterial polypetide isolated from the Sargasso Sea
MCGIIGIASNKSVTSNIINSLKRLEYRGYDSSGVATIHNNIINEKKCPGRVEELEKILFNSPSNGNVGIGHVRWATHGLPNQINAHPHSSDLVAVVHNGIIENSENLKQNLERDGYKFKSQTDTEVITLLLTKFLKKFSLLDAVYKTLEKLTGSFALGILFKEHQNIIIGARRGSPLAVGYSNNENYLGSDSYALKSMTNKISYLDDGDVCVLTKDQIEFYDSKKNKKNKKVLILSEDKNENKLGDFKNFMSKEIFEQPFTSSNCINEYIDKIRNNINIIDFPLNPKKLNKIVLIGCGTAYHSCLVAKYWLEELTDLNVEADIASEFRYRNVKFNKSNLYIFISQSGETADTAAALELCKKNNVKTCSIIN

SEQ ID NO: 125954 - protein, 426 aa, Unknown
  Bacterial polypetide isolated from the Sargasso Sea
MCGIVGITSNKSVTSMIINSLRKLEYRGYDSSGIATLYNGNINEIKCEGRVDTLEKNLSKSKLLGNVGIGHVRWATHGIPSTLNAHPHSSENVSVVHNGIIENSTMLKKILVKKGHVFKSQTDTEVITHLITEYLKKNDLKNSIIKILEDLKGSFALGIIFKDQPDIIVGARRGSPLAVGYGPKENYLGSDSYALKSMTNKVSYLNDGEFCIIKKDYIDFFDQKGNKVNKKILELSSNENNYDKGEYKHFMAKEIDEQPVTIKNCINEYIDKINNDINIFNFPWKSKDISSIILIGCGTAYHSCLMAKYWFEQLTSLDVSVDIASEFRYRKNRFKKDALYVFVSQSGETADTYGALDLCNKNNVKTCSIVNVVESSIARDSKFVLPIHCGPEIGVASTKAFIGQMLVLYLLCIKIAKDRKDITKDI

SEQ ID NO: 125955 - protein, 331 aa, Unknown
  Bacterial polypetide isolated from the Sargasso Sea
MCGIIGISSNKPVSASIVNSLKKLEYRGYDSAGIATLFNGKVNEVKSEGRVDMLEQNFDLKNLKGDIGIGHVRWATHGVPNSINAHPHSSDNVSVVHNGIIENSTILKKDLVNKGHIFKSQTDTEVIVHLITENLKIYELEEAITKTLKQLHGSFALGIVFRDFPDLIVGARRGSPLAVGYGPNENYLGSDSYALKSMTNKISYLDDGEFCIVKKDQVLFFSEKGKKINKKILELSSDEASYDKGDFKHFMAKEIEEQPTTLKTGIKEYIDNFNSDINIFNFPWKIEEIKSITLIGCGTAYHSCLMAKYWFEELTFLDVNIDIASEFRYRK

SEQ ID NO: 125956 - protein, 139 aa, Unknown
  Bacterial polypetide isolated from the Sargasso Sea
GRGFSYPIALEGALKLKELSYVHAEGYPAGEMKHGPLALIEEGMPVVVLAPRDSYYKKTISNMQEVIARGAKVLLITNKSKDEIVSENIWETIEVESTNEDLLPFLLTIPLQKLAYYSALKKGFDIDKPRNLAKSVTVE

SEQ ID NO: 125957 - protein, 428 aa, Unknown
  Bacterial polypetide isolated from the Sargasso Sea
MCGIVGITSKEDSVSDILSGLQALEYRGYDSSGIACSNDNNLDFQKSVGKISNLIHGLNNKKLKGKTSIAHTRWATHGKPSIVNSHPFVKENCALVHNGIVENYEDLISSFLLDTNKLESETDTEIVAEIYSKLLTEFDPIEALMNLTKNIQGTYAFAFLVKGSNSIYAVRKGSPLVVGLSNKLKSISSDILGLPNSVTQTIFLEENDIVEINNSYFSIFNNNGKPVEREIHSHKSTNDFNTKGNFKHFMQKEIYHQPSSLEDTVLNYCDKKTNKVLLPRCGVDFNQVSHIHLVACGTAYHACKIAKYWLEEFANLPTSIDIGSEYRYRKDSINKESVGLVVSQSGETMDTFECLKKFKQKELFTISIINVLKSSIARESDYILPTIAGPEIGVASTKAFTSQLIVLALLSLHIRQKKNIYNAKDKLI

SEQ ID NO: 125958 - protein, 482 aa, Unknown
  Bacterial polypetide isolated from the Sargasso Sea
MIAHLLEYFLNKGNNMLDSMYLTKEKLDGAYAIAAIDKEDDQNIIIARSKSPLLIGIGMDEFLAASDPLAIGQLTNEFIFLEDGDVAELSSESYTIFDESKKKVEREISQIDISSQATSKGEYRHFMEKEIYEQPEAILKTIDGRVGGDDVLDNIFGLGSSEMFEKVKRVQIVACGTSLHAGRVAANWFSAISELPTQIDYASEYRYRNPHVDDDSLLVTISQSGETADTLAALRYAKEKDYLSTLCVCNVPTSSLARESNYSIFTNAGPEIGVASTKAFTTQLAALMLLALSLAKSRGKNPKLRTRVITALRSLPETVEETLKLKDTILEIAPEIANKDNALFLGRGIFYPIAKEGALKLKEISYIHAEAYPAGELKHGPLALIDEEMPVIALAPESEIAEKLVSNLEEVKARGGTLYVFSDPSISMDLKSGRLINMPKCDFLLTPIIYTIPLQILSYEVALLRGTDIDQPRNLAKSVTVE

SEQ ID NO: 125959 - protein, 102 aa, Unknown
  Bacterial polypetide isolated from the Sargasso Sea
LALVDNDMPVVAVAPDDRLMEKLRSNLEEVRARGGQLFVFASENAGYESGPGCEVLALPACSALAGPVMFTIALQLLAYHVAVARGTDVDKPRNLAKSVTVE

SEQ ID NO: 125960 - protein, 441 aa, Unknown
  Bacterial polypetide isolated from the Sargasso Sea
MCGIVGITSSKEVTPRIISSLKKLEYRGYDSAGLATLSNGNINEVKCEGRVDALEKNIIQTKISGSIGIGHVRWATHGKPSSINAHPHSSDDVSVVHNGIIENSTILKKLLENKGYKFKSQTDTEVIVHLVTDYLKKNNLKNTIIKVLKKLHGSFALGIIFKDQPDLIVGARRGSPLAVGYGPNEHYLGSDSYALKSMTNKISYLNDGEFCILKKDQVEFFDADGTKVNKKILNLSKDDQNYEKGDYKYYMAKEIDEQPITLKNCINEYIDKHNKDINIYNFPWKISEISSVVLIGCGTAYHSCLVAKYWFEQNTSLDVSVDIASEFRYRKIKFKKDCLYVFVSQSGETADTFAALDLCKKNNVKTCAVVNVVESSIARDADLVLPIHCGPEVGVASTKAFLGQMLVLYLLCTKLSYEQKSINKKDYQKKIKDLLSLSKSA

SEQ ID NO: 125961 - protein, 631 aa, Unknown
  Bacterial polypetide isolated from the Sargasso Sea
MCGIVAVTGFKKALPLLINGLEKLEYRGYDSAGIAIINSETNCISCNKAEGKLKNLKSNLNDQNIPGTVGIGHTRWATHGKPEVKNAHPHTDTSGNVAVVQNGIIENFQDLKNNLEEEGIVFNSDTDTEVIPHLIQRELNILSKLNLENNGSTLLVAVRNVLSDLEGSYALAVLWSGAPTSLVVARRQAPLIIGLGEGEFICASDTPAIANFTNTILPMEDEEIALLTPLGIEIYDSSNERQYRNPVSLQVSEQIMDKMNFKHYMLKEIYDQPQTAKNWLENYLIKNSDNGQYQIKYPFDTEFFGSIERIEIIACGTSKHAAMVGSYLLEQFSGIPTNVFYASEFRYSPPPLLPNTLTIGVTQSGETADTIAAIDMEIKRRSAIENKKFKPNLIAITNRKESSIGRQVSNIIDICAGIEVGVAATKTFFAQLLSFYGLAIKFAQIKGNQSSDEIGKLINELIKLPLLLEDLLEKHNKSSEKLAHDFFNIKDVIFLGRGINYPIALEGALKLKEISYIHAAGYPAGEMKHGPIALLDKKVPVISIASPGEVFDKVISNAQEAKARDSYLIGIAPECNGTEIFDYLMKVPSSNEWISPLINILPLQLLSYHIAAHRGLDVDQPRNLAKSVTVE

SEQ ID NO: 125962 - protein, 393 aa, Unknown
  Bacterial polypetide isolated from the Sargasso Sea
KKDNIDFFDEKGIKVNKKILELSSNENNYEKGEYKHFMAKEIDEQPTTIKNCINEYIDKKNNDINIFNFPWKSKEISSIVLIGCGTAYHSCLMAKYWFEQITTFDVSVDIASEFRYRKNRFKEKALYIFVSQSGETADTYAALDLCNKHNMKTCSIVNVVESSIARDSKFVLPIHCGPEIGVASTKAFIGQMLVLYLLCIKLAKIRKDISNDIFYNKMKSLESLSNLVKKTINTESDIQMVCNSFVEAKGSMFLGRGYSFPIALEGALKLKELAYVHAEGYPAGEMKHGPLALIEEGMPVVVIAPRDEYYKKTISNMQEVIARGAKVLLITNKNKDEIFSENIWQSIEVENTTEDLFPFLITIPLQKLAYYSALKKGYDIDKPRNLAKSVTVE

SEQ ID NO: 125963 - protein, 387 aa, Unknown
  Bacterial polypetide isolated from the Sargasso Sea
NPVSLKVSEQIMDKMHFKHYMLKEIYDQPQTAKNWLETYLIKNSDNGQYQINYPFDTEFFESIERIEIIACGTSKHAAMVGSFLFEQFSGIPTNVFYASEFRYSPPPLLPNTLTIGVTQSGETADTIAAIDMEIKRRSSIENKKFKPNLIAITNRKESSIGRQISNIIDICAGIEVGVAATKTFFAQLLSFYGLAIKFAQIKGNQSPDEIGKLIDELIKLPPLLEDLLEKHNKSSEKLAHDFFNIKDVIFLGRGINYPIALEGALKLKEISYIHAAGYPAGEMKHGPIALLDKKVPVISIASPGEVFDKVISNAQEAKARDSYLIGIAPECNGTEIFDYLMKVPSSNELISPLLNILPLQLLSYHIAAHRGLDVDQPRNLAKSVTVE

SEQ ID NO: 125964 - protein, 186 aa, Unknown
  Bacterial polypetide isolated from the Sargasso Sea
MCGIIGIISTKEVSNRIINSLKKLEYRGYDSAGIATLVDGNINEVKCEGRVDVLEKDILKFNLKGDVGIGHVRWATHGKPSKINAHPHSSEQVSVVHNGIIENSTILKKILEKKGYIFKSQTDTEVIAHLVTDYLKKNSLKDTIIKVLKKLHGSFALGIIFKDRNDLMIGARRGSPLAVGYGPKRK

SEQ ID NO: 125965 - protein, 81 aa, Unknown
  Bacterial polypetide isolated from the Sargasso Sea
TISNMQEVIARGAKVLLITNKSKDEVVHENIWQSIEVENTIDDLLPFLITIPLQKLAYYSALNKGYDIDKPRNLAKSVTVE

SEQ ID NO: 125966 - protein, 141 aa, Unknown
  Bacterial polypetide isolated from the Sargasso Sea
FLGRGLSYPIALEGALKLKELAYVHAEGYPAGEMKHGPLALIEEGMPVVVLAPRDEYFKKTISNMQEVIARGAKVLLITNKSKDEIVHENIWQSIKVENINDDLLPFLITIPLQKLAYHSALNKGYDIDKPRNLAKSVTVE

SEQ ID NO: 125967 - protein, 435 aa, Unknown
  Bacterial polypetide isolated from the Sargasso Sea
KIKFKSETDTEVLVQLIGYFYNNGKMNFEQSVRAALQRVDGAYGIVILNTDYPDMMIAARKGSPLVLGIKENEFFIASDISPIVKHTKDIIYLKDSEMAVVNKKSFKIKSVDKDISLPKNIEKIDFKIDDYDKGKYKYFMHKEIHEQINTIPNTINGRIKNESVLLQGLSDNWNVIESAEKIYITACGTSWHAGLIGKNFIERFANIPVHVEYASEFRYNHALLDDKTVVIAISQSGETADTLAAIKKANNHGALTIGICNIAGSSVSRETECGVFTRCGHEVGVASTKAFTSQIVVLYLLALKLAESRKTISKASLKRHLDYKKSVNKIKSIFKQENDIKKIAMKYKKANDFLYLGRGLNFPVALEGALKLKEISYIHAEGYPAAEMKHGPIALIDKDMPSVFIAPRDKTYEKIISNIQEIKSRKGKIIVITDS

SEQ ID NO: 125968 - protein, 393 aa, Unknown
  Bacterial polypetide isolated from the Sargasso Sea
TENDIKIFNSNGEPVQREETKIDATPTSTSKGNYSHFMEKEIYEQPDALGNTINGRLGENDVLDNIFGLGSSDAFKTIERIQFVACGTSLHAAKTARKWFEEICEIPCYIDFASEYRYRNPIVEDNTLFVTISQSGETADTLAALEYARAEKYVGIVTICNVPTSTMAREADWKIFTNAGPEIGVASTKAFTTQLAALLMLALSIAKSQDKNADKRKQATQELRETPALVDQSFKLKENISQITQNISTKHNALFLGRGMYFSIAQEGALKLKEISYIHAEAYPAGELKHGPLALVDEQIPVIALAPEDSLVEKLLSNLEEVKARGGTLYVFGNANSTIEISKGRFINMPNCGDYNAPIIYTIPLQILAYEVACLRGTDVDQPRNLAKSVTVE

SEQ ID NO: 125969 - protein, 474 aa, Unknown
  Bacterial polypetide isolated from the Sargasso Sea
MCGIVGILNSSSLKNNSIDILKKLEYRGYDSAGISLFSKERIKTIKSVGKISELKNKAQNVSDKNFYGVIGHTRWATHGVVSKNNAHPFANDDLTLVCNGIIENYRKIQNRFVEIPKNIQSDTEISFYFLTYLVNKYKNSDEAIRVFKSVIKGNYAFVIFIKKNNCFYLLKNGSPIALSHNKNSSYICSDSSILSDYSDKIYHLKDGDIIKIQQSKISSLNKAKILFEKNEIKQNPYDKGKYQHYMLKEIHEQPEVIKTTQKNYVKEFFNDFESKFKNLIVNKKIIFVGCGTAYHACLVGEYYFNKYTNIDTSSELASELRYKKINKDEKILFIFISQSGETMDTLMALKYIKKNKHSSVVITNSLQSSMVREADVTIPTYADKEVGVASTKAFTCQILSLANLSIEIGKMTNSISKKDYNKNLAILKLLPIKLKKLINDFTPEAKKIAKKLSQSDTCYFIGRNIVYPIALEGS

SEQ ID NO: 125970 - protein, 417 aa, Unknown
  Bacterial polypetide isolated from the Sargasso Sea
FDLKNLRGNIGIGHVRWATHGIPNSLNAHPHSSHNVSVVHNGIIENSTILKKHLINKGHNFKSQTDTEVIVHLITEHLKTSELEEAITKTLKQLHGSFALGIVFKDMPDLIVGARRGSPLAVGYGPNENYLGSDSYALKSMTNKITYLDDGEFCIVKKDQVLFFNDEGKKVNKKILELSLDQANYDKGDFKHFMAKEIEEQPLTIKTGIKEYVDNVNQDINIFNFPWKIEEINSITLIGCGTAYHSCLMAKYWFEELTNLDVNIDIASEFRYRKNRFKKDSLYIFVSQSGETADTYAALDICNKNSMKTCAVVNVIESSIARDSNFVLPIHCGPEIGVASTKAFLGQILVLYILALKLGSMRNEIEKKEYQEKIKDLKDLPGLIEKTLLHDNDIQAISSTFNEAKGSMFLGRGYSYP

SEQ ID NO: 125971 - protein, 117 aa, Unknown
  Bacterial polypetide isolated from the Sargasso Sea
ELTYIHAEGIPGGELKHGPLALMDTDVFVIVINPNDSTYTDTLTSAREIKARGAKIIGVSDIESDVYDYWIKIPKINEILYPISEIIPIQLLTYYSALEKDADPDYPRNLAKSVTVK

SEQ ID NO: 125972 - protein, 379 aa, Unknown
  Bacterial polypetide isolated from the Sargasso Sea
AGRMMSPLVLGVGEGEVFLASDSAAILEHTNKMIFLENGDFVEIHDGSFRLFDVNLKEVERQIQVIDWEVSEAEKSGYEHFMYKEILEQAEVIERTITGRLEEGSVEIPISREEAQKYDKIWIVACGTAYHAGLFGKDLFEKVLGVPVSVELASEFRYREPIVGKNDLGIVISQSGETMDTIAATELLKENGSHVLALVNVVGSSLARMADSVFYLHVGPEIGVASTKAYLGMLVGQLLLAKHWDSNNKLDVSFEEIKGLPLLIEETLKCEPEVKEIAESIHKQNDVYFIGRGLDYALAAEGALKLKEISYLHAEALAAGELKHGTLALIEEGTPIIVTASQYHLLDKTTSNVQEVKARGAHVIAIGNSSSEKLENIQI

SEQ ID NO: 125973 - protein, 370 aa, Unknown
  Bacterial polypetide isolated from the Sargasso Sea
KTSLIMIRGDYKYFMEKEIDEQPATIKACINEYIDKFNNQINIYNFPWEINSINSVMLIGCGTAFHSCLITKYWMEQNTNLDVSVDIASEFRYRKVRFKKDCLYIFVSQSGETADTYAALDLCKKNKVKTCAVVNVIESSIARDADLVLPIYCGQEIGVASTKAFIGQMLVLYILTTKISFDQKFINLDEYKAKIKNLLNLSTYAKKTLKIDQKILDIGKIFSEAKGSMFLGRGFSFPIALEGALKLKELAYVHAEGYPAGEMKHGPLALIEEGMPVVVLAPRDEHYKKTISNMQEVIARGAKVLLITNKNKDEVISENIWEIIEVDQLEDELIPFLMTIPLQKLAFYSALEKGYDIDKPRNLAKSVTVE

SEQ ID NO: 125974 - protein, 306 aa, Unknown
  Bacterial polypetide isolated from the Sargasso Sea
YHSCLVAKYWFEQNTNLDVSVDIASEFRYRRIKFKKDCLYVFVSQSGETADTFAALDLCKKNNVKTCAVVNVVESSIARDADLVLPIHCGPEVGVASTKAFLGQMLVLYLLCTKLSYEQKSINKKSYQKKIKDLLSLSKSAKNTLNIEDKIQTLGKDFANSKGSMFLGRGYSYPIALEGALKLKELAYVHAEGYPAGEMKHGPLALIEEGMPVVVIAPRDEHYKKTISNMQEVISRGAKVLLITNKSTDEIYSENIWEQIEVDAISDELIPFLTTIPLQKLAYYSALDKGYDIDKPRNLAKSVTVE

SEQ ID NO: 125975 - protein, 545 aa, Unknown
  Bacterial polypetide isolated from the Sargasso Sea
MCGIVGIVSNKSVSASIIGALKKLEYRGYDSAGISTISNGQINEQKCSGRVDNLEKILFQNPSTGDLGIGHVRWATHGIPNQVNAHPHSSEVVSVVHNGIIENSDSLRKEYKQKGYSFKSQTDTEVITVMLTDFLKKEELIDCIHKTLEKLEGSFALGVIFKDFNNLVVGARRGSPLAVGYGHGENFIGSDSYALKSMTNKISYLDDGDFCILYKEKVEFYNSNKKKINKEIFELSNEDNVADKGDYKDFMSKEINEQSATTKKCINEYLDKSRNEINIYNLPIDPKKINKIRLIACGTAYHSCLMAKYWIEEFTSLDVEADIASEFRYRKVKLNQNDLYIFVSQSGETADTYAALEKCKSNKVKTCGIVNVVESSIARSADFVLPIHAGPEIGVASTKAFIGQMIVLYLLTLKIAKERRDIKQDEYSKLILDLIKLPEFIEQTLNKQKDIQIIARDFINAKGTMYLGRGYSYPIAMEGALKLKELSYIHAEGYAAGEMKHGPLALIENGMPVVVLAPKDRYFEKTVSNMHEVIARGGKVLMITD

SEQ ID NO: 125976 - protein, 570 aa, Unknown
  Bacterial polypetide isolated from the Sargasso Sea
LVNGNINEVKCEGRVDVLEKDISKLNLKGDIGIGHVRWATHGKPSKINAHPHSSDQVSVVHNGIIENSTILKKFLEKKGYVFKSQTDTEVIAHLVTDYLKKNSIKNTIIKVLKKLHGSFALGIIFKDQNDLMVGAKRGSPLAVGYGPNENYIGSDSYALKSMTNKISYLEDGEFCIVKKDQIEFFDTDGSHINKKVMNLSKNEIDYNKGDYKYFMEKEIDEQPSTISDCINEYIDKYNNQVNIFNFPWKTSSIKSVMLIGCGTAFHSCLIAKYWMEQSTNLDVSVDIASEFRYRKVRFKKDCLYVFVSQSGETADTYAALDLCKQNKMKTCAVVNVVESSIARDTDLVLPIHCGQEIGVASTKAFIGQMLVLYILSLKISYDQNSITKEEYKYKLKNLLKLSNSAKKTLKLDQKILNIAKVFADAKGSMFLGRGYSFPIALEGALKLKELAYVHAEGYPAGEMKHGPLALIEEGMPVVVLAPRDKHYKKTISNMQEVIARGAKVLLITNKNKDEITSENIWEKIEVDSLDEDLMPFLMTIPLQKLAFYSALKKGYDIDKPRNLAKSVTVE

SEQ ID NO: 125977 - protein, 605 aa, Unknown
  Bacterial polypetide isolated from the Sargasso Sea
MCGIIGIASNKKVSTNIVNALKKLEYRGYDSAGLATIANGEINEKKCSGRVEKLEKILFQSPNEGNLGIGHVRWATHGVPNEINAHPHSSEIVSVVHNGIIENSDQLKKEFEKSGTIFKSQTDTEVITVLLTEKLKKLDPLKAVFETIDILKGSFALGIIFKNHKNFVIGARRGSPLAVGYSNNENYLGSDSYALKSMTNKISYLDDGDVCVLSKDEVKFYNHNKDKINKEIFTLSEDKASVSKGNYKNFMIKEIFEQPVTVKTCLKEYIDKIREEINFYNLPLAPKEINKIVLIGCGTAYHSCLVAKYWFEEFTSLNIEVDIASEFRYRKVRFDKKALYIFVSQSGETADTYAALDLCKRQNVKTCSVINVVESSITRNSDCVLPIHAGPEIGVASTKAFLGQMLVLYLLSLKISEARNEMQNVEYKKKISELKKLPSLISESLKEEEKIQLIAKDIYESKGSMFLGRGSSFPIALEGALKLKELSYLHAEGYPAGEMKHGPLALIEDGLPVVVIAPKDKYFEKTLSNMQEVIARGGKVLLLTNSDGKVISENIRFQINLPDSDLTLTPFMFTIPLQLLSYHVALFKKCDIDKPRNLAKSVTVE

SEQ ID NO: 125978 - protein, 168 aa, Unknown
  Bacterial polypetide isolated from the Sargasso Sea
MCGIIGIASNKSVSVNIINALKKLEYRGYDSAGLATIYKGRIDEKKCPGRVEKLEKILFQNPSEGNLGIGHVRWATHGVPNEANAHPHSTEIVSVVHNGIIENSSELKKTLEKDGKTFKSQTDTEVITVLLTEKLKNAEPLEAVFETLGILKGSFALGIIFKNYKDFV

SEQ ID NO: 125979 - protein, 608 aa, Unknown
  Bacterial polypetide isolated from the Sargasso Sea
MCGIIAAASNRNVGKLLVQGLHKMEYRGYDSAGIALHQTDQIAHLRTLGKVKLLEEKMIAEKPKSKLGIAHTRWATHGEPSEENAHPHMSNERVYIVHNGIIENYLDLKDFLKKEGYSFSSQTDSELIAHLLEYFLNKGNNMLDSMYLTKEKLDGAYAIAAIDKEDDQNIIIARSKSPLLIGIGMDEFLAASDPLAIGQLTNEFIFLEDGDVAELSSESYTIFDDSKKKVEREISQIDISSQATSKGEYRHFMEKEIYEQPEAILKTIDGRVGGDDVLDNIFGLGSSEMFEKVKRVQIVACGTSLHAGRVAANWFSAISELPTQIDYASEYRYRNPHVDDDSLLVTISQSGETADTLAALRYAQEKDYLSTLCICNVPTSSLARESEYSIFTNAGPEIGVASTKAFTTQLAALMLLALSLAKSRGKNPKLRTRVITALRSLPETVEETLKLKDTILEIAPEIANKDNALFLGRGIFYPIAKEGALKLKEISYIHAEAYPAGELKHGPLALIDEEIPVIALAPESEIAEKLVSNLEEVKARGGTLYVFSDPSISMDLKSGRLINMPKCDFLLTPIIYTIPLQILSYEVALLRGTDIDQPRNLAKSVTVE

SEQ ID NO: 125980 - protein, 606 aa, Unknown
  Bacterial polypetide isolated from the Sargasso Sea
MCGIVGIISTKEVTSRIINSLKKLEYRGYDSAGIATLTNGDISEVKCEGRVDALEKDIIKYNLKGEIGIGHVRWATHGKPSKINAHPHSSEKVSVVHNGIIENSTILKKFLEKKGYVFKSQTDTEVIAHLVTDYLKKNSLKETIVKVLKKLHGSFALGIIFKDKNDIMVGARRGSPLAVGYGPNENYLGSDSYALKSMTNKISYLDDGEFCIIKKDQIDFFNNDGSKINKKIMNLSNNEINYDKGDYKYFMEKEIAEQPSTIDDCINEYVDKHNKQINIYNFPWNTNSFKSVLLIGCGTAFHSCLVAKYWLEQNTNLDVSVDIASEFRYRKVRFKNDCLYIFVSQSGETADTYAALDLCKKNKMKTCAVVNVVESSIARDANLVLPIYCGQEVGVASTKAFIGQMLVLYILCTKISFDQKCISKKEYQSKIKNLLTLSNSAKKTLKIDQKILNIGKVFANAKGSMFLGRGYSFPIALEGALKLKELAYVHAEGYPAGEMKHGPLALIEEGMPVVILAPRDDHYKKTISNMQEVIARGAKVLLLTNKSKDEIISENIWEKIEVDKLDEELIPFLMTIPLQKLAFYSALEKGYDIDKPRNLAKSVTVE

SEQ ID NO: 125981 - protein, 339 aa, Unknown
  Bacterial polypetide isolated from the Sargasso Sea
MCGIIAAASNRNVSELLVEGLHKMEYRGYDSAGLALHQESNIAHIKTLGKVSLLEEKLKLEELDSTLGIAHTRWATHGEPSEKNAHPHKSNERIYIVHNGIIENHLELKNFLTEKSYQFSSETDSEVIGHLLDYFLNQGNNILDSIYLTKEKLEGAYAIAILDIEDENNIYVARCKSPLLVGQGENENFAASDPLAIGKLANEFIFLEDEDVAVISKNRIQIYDEQKQPIHREITEIDSEYQTISKGEYTHFMEKEIYEQPQAVLNTLDGRVGGDDVRDDIFGIRSSELFKKVKRIQIVACGTSLHAGRVAANWLSAIADIPTQVDYASEYRYRNPHVD

SEQ ID NO: 125982 - protein, 132 aa, Unknown
  Bacterial polypetide isolated from the Sargasso Sea
IALEGALKLKELSYVHAEGYPAGEMKHGPLALIEDGMPVVVLAPRDSYYKKTISNMQEVIARGAKVLLITNKSKDEIVSENIWETIEVENTNDDLLPFLLTIPLQKLAYYSALKKGYDIDKPRNLAKSVTVE

SEQ ID NO: 125983 - protein, 293 aa, Unknown
  Bacterial polypetide isolated from the Sargasso Sea
MCGIIGATSSRSVGKILIKGLHAMEYRGYDSAGVALNQDNEVLRLRSLGKVSSLEELMINNKPKANSGIAHTRWATHGVPSEENAHPHGSHDEIYIVHNGIIENHDEIRDKLKSKGYDIASETDSELIAHLIYLNKTDSLSTLEALINATKELKGAFSIAAISSKEKGKIYAAKQKSPLLIGKGIEENFIASDPLAIANITEKFYLLEDGDFAEITENDINIFNNDGERVQREETKIDATPTSTSKGNYSHFMEKEIYEQPDALRNTINGRLGENDVLDNIFCLGSSDAFKSL

SEQ ID NO: 125984 - protein, 606 aa, Unknown
  Bacterial polypetide isolated from the Sargasso Sea
MCGISGIIDQKPVTRNLLTSIANLEYRGYDSCGMAMLNGKGIEVRKNTGGVEEVRSREKLDTMTGNLGIAHTRWATHGGVTTENAHPHLSQNGEFAIVHNGIISNYQKLRERLIGEGLQFRSTTDTEVFVNLVEEAFAQKNDVLGAFLEALKQIQGTYSIVLLSSHDPEHLYCVKQDSPLIIGLGEGCNYIGSDINAFLEHTRKAVVLDDGEFAVISRERYEISDVGKREEREKSILQIDWDTETTKKGGFSHYMIKEIFDEPQTARQALDVPQEQIKQLAEMFQNAPRAYLMGVGTTFFICQMAQYLFSSLSKRYFPAISSDEFNGVVPVSSGELVVAVSQSGETFDTKFSLNVAHEMGAKTAAIVNVMGSSISRMVDHVIMQGSGPEICVVSTKAALAQALLLMRTALELGYREGCLDSKSFQCHQKDLESVPELISILLNEKSGFMRNLARITSSVQNWIFLGCGIYYPVAMESALKMKEVTYLHAEGMPAGFLKHGTLSMIEESVHSLFFVPPPAEVDLHNRTIIAIEEIKTRGGTLVGLYFEGDSQAKSLLDYAVELPQVPSLIAPFVQMILAQMFAYYTALDLKRNIDKPRNLAKSVTVG

SEQ ID NO: 125985 - protein, 523 aa, Unknown
  Bacterial polypetide isolated from the Sargasso Sea
NAHPHSSQNVSVVHNGIIENSTLLKKFLIGKGHKFKSQTDTEVIVHLITEYLKTENIVNSVQKTLKSLYGSFALGIIFKDQPDLIIGARRGSPLAVGYGPNENYLGSDSYALKAMTNKITYLNDGEFCLIKKDYVEFFNEDGDKINKKVLELSLQNEKYDKGDYKHFMAKEIEEQPTTLKNGINEYVDTLNNDINIYNFPWKMNEISSVTLVGCGTAYHSCLLAKYWIEELTSLDVNVDIASEFRYRKNRFKKETLYIFVSQSGETADTYAALDLCNQNDMKTCAVVNVIESSIARDSKFVLPIHCGTEIGVASTKAFLGQILILYILALKLGLLRKDLKKELFNEKLKDLKSLPKLAEKTLLTDNKIQTISNTFNVAKGSMFLGRGFSFPIALEGALKLKELSYIHAEGYPAGEMKHGPLALIEEGMPVVVLAPRDNYYKKTISNMQEVIARGAKVLLVTNKSSDEVVSENIWEKIEVESANEDLLPFLLTIPLQKLAYYSALKKGFDIDKPRNLAKSVTVE

SEQ ID NO: 125986 - protein, 67 aa, Unknown
  Bacterial polypetide isolated from the Sargasso Sea
VIFLSDVVGVSRLGGATEATVTLPTVDPFVAPLLYAIPVQLLAYYIAVIKGTDVDQPRNLAKSVTVE

SEQ ID NO: 125987 - protein, 631 aa, Unknown
  Bacterial polypetide isolated from the Sargasso Sea
MCGIVAVTGYKKALPLLINGLEKLEYRGYDSAGIAIINSENNCISCKKAEGKLNNLKSNLNDHNIPGTVGIGHTRWATHGKPEVKNAHPHTDSSGNIAVVQNGIIENFQDLKNKLEEEGIIFNSDTDTEVIPHLIQRELSNLSKLNLENNGSTLLVAVRNVLSDLEGSYALAVLWSGAPTSLVVARRQAPLIIGLGEGEFICASDTPAIANFTNIILPMEEDEIALLTPLGIEIYDSSNERQYRNPVSLTVSEQIMDKMNFKHYMLKEIYDQPQTAKNWLENYLIKSSDNGQYQINYPFDTEFFESIERIEIIACGTSKHAAMVGSFLLEQFSGIPTNVFFASEFRYSPPPLLPNTLTIGVTQSGETADTIAAIDMEIKRRSIIENEKFKPNLIAITNRKESSIGRQVSNIIDICAGIEVGVAATKTFFAQLLAFYGLAIKFAQIKGNQSPEEIGKLINELKNLPPLLEDLIEKHNKSSEKLAHDFFNIKDVIFLGRGINYPIALEGALKLKEISYIHAAGYPAGEMKHGPIALLDKKVPVISIASPGEVFDKVISNAQEAKARDSYLIGIAPECNGTEIFDYLMKVPSSNEWISPLLNILPLQLLSYHIASHRGLDVDQPRNLAKSVTVE

SEQ ID NO: 125988 - protein, 55 aa, Unknown
  Bacterial polypetide isolated from the Sargasso Sea
MCGIVGAVAQRDVAEILVEGLRRLEYRGYDSAGVAVFSASQPLQRVRRLGKVAEL

SEQ ID NO: 125989 - protein, 400 aa, Unknown
  Bacterial polypetide isolated from the Sargasso Sea
DDGDFCLLYREKVDFFNSKKNKINKEIFELSNEDNIADKGDYKDFMSKEIDEQSVTTKKCIKEYLDKSRNEINIYNLPIDPKKINKIRLIACGTAYHSCLMAKYWIEEFTTIDVDADIASEFRYRNVKLNPKDLYIFVSQSGETADTYAALEKCKKSNVKTCGIVNVVESSIARLSDFVLPIHAGPEIGVASTKAFLGQMLVLYLLTLKISKERNEIDVENYKNLVLDLMKLPDFIKETLLKQKDIQVIARDFISAKGTMYLGRGYSYPIAMEGALKLKELSYIHAEGYAAGEMKHGPLALIEDGMPVIVLSPKDRFFEKTISNIQEVIARGGKVIMITDDTSTTMNENIRFKFQIPKTNSTLNSFLLTIPIQFLAYHVALLKNCDIDKPRNLAKSVTVE

SEQ ID NO: 125990 - protein, 138 aa, Unknown
  Bacterial polypetide isolated from the Sargasso Sea
MCGIVGGNSERNILPILVEGLKRLEYRGYDSAGVAFKKNGSICVTKNLGRVNQLTKKLNLKTNHSNLGIAHTRWATHGIPSEKNAHPHHSKNIFVVHNGIIENHNDLKADLKAEGIRFSTQTDSEVIAHLIRTYTEKG

SEQ ID NO: 125991 - protein, 472 aa, Unknown
  Bacterial polypetide isolated from the Sargasso Sea
MCGIVGIIGKSDVSEKLLASLRRLEYRGYDSAGLAVIKDGIIKRRRAEGKLTRLAEKLEKKPLPGSIGIGHTRWATHGVPNEANAHPHATDKVALVHNGIIENYQELRTEIEKSGRSLASDTDTEVVVHLITQYLENGLSPEAATRKALGHLEGAFALAILFSEEENLIIATRRGSPLAIGMGDAEMFLGSDANALAGLTEEIIYLEEGDFALLSGSGVSISDENNKIVERKTHKIDIASKDVGKAGFDHFMLKEIFEQPQVIGDTLHSFINQADSKIVLPKMPIDLTSVNRITISACGTAYYAALIAKYWIESLARIPVDIDIASEFRYREALMLKGECAIFVSQSGETADTLAALRYCKNEGQKILSIVNVLESTIARESDVVLQTFAGPEIGVASTKAFTTQLTVLAVLAIDLARKRGKLTLEQEAHLVSALLEVPAKVSEVLNHDENLKKAIPRTRFSQGRIISWSGH

SEQ ID NO: 125992 - protein, 271 aa, Unknown
  Bacterial polypetide isolated from the Sargasso Sea
MCGIYTSISKKETLCSEFLASLKELEYRGYDSAGITILDRNKYKTYKTLQKISDLKSKIPKLNSSKLIMGHTRWATHGEPNLRNCHPHVLGNLSIVHNGVVENYEEIKNSKYLKKIKLKTETDTEVILQLIKFFNYSNSFLNSILKTFSIVKGSNAFICSKISDNSNEVIACKYNTPLYYGQKINGDNIFSSDINAMKKSLKGYRYIENDEFIYIENNKPKIFCINKKRKKLILKRIENTDQNINKKIKKNITYNEIKEQKKLISNHIFRV

SEQ ID NO: 125993 - protein, 190 aa, Unknown
  Bacterial polypetide isolated from the Sargasso Sea
SLRNEINKENYKEKIKDLQKLPSLIEKSLLTDNDIQAISSTFNEAKGSMFLGRGFSYPIALEGALKLKELSYVHAEGYPAGEMKHGPLALIEDGMPVVVLAPRDSYYKKTISNMQEVIARGAKVLLITNKSKDEIVSENIWETIEVENTNDDLLPFLLTIPLQKLAYYSALKKGYDIDKPRNLAKSVTVE

SEQ ID NO: 125994 - protein, 198 aa, Unknown
  Bacterial polypetide isolated from the Sargasso Sea
MCGIVAYKGHKNCYPILLDGLHKLEYRGYDSAGVACLTENGKIVVTKRSGKVKQLEEGLKKSNLIENCNGSGIAHTRWATHGKPNQVNAHPHKDQSGNIVLVHNGIIENYDPIKKFLRSKKVKFKSETDTEVLVQLIGYFFNQGKLNFEQSVRAALQRVDGAYGIVVLNKKEPDIMIAARKGSPLVLGIKDKEFFIGE

SEQ ID NO: 125995 - protein, 608 aa, Unknown
  Bacterial polypetide isolated from the Sargasso Sea
MCGIIGAASSRSVGKILVSGLKKMEYRGYDSAGLVLNQDEAAFQLRTLGKVSNLEDEMIEQRPKAHSGIAHTRWATHGIPSETNAHPHGSNGNIYIVHNGIIENHDELRERLSNEGYEIQSETDSELIAHLIHFNKEKGKTTLGALIETTKELDGAYSVAVIDTEEKGKIFAAKQKSPLLVGKGIEENFIASDPLAIAGLAESFYLLEDGDFAEITKDEIKIFGSNGEALSREETIIDTSVKEASKDGYKHFMEKEIYEQPQAITNAIEGRTSDGEVLDNIFGLGSSEAFKGVKRIQFVACGTSLHAAKTARKWFEELCETPCYIDFASEYRYRNPLVEDDTLFVCISQSGETADTMAALNYAKDEKYLGIVTICNVPTSTMARESDWKIFTNAGPEIGVASTKAFTTQLAALLLLACSISKSKNLNKDKRADAINDLLNTPSLVKESFGLKRHIDEIVEKIADKKNALYLGRGVYFSIAQEGALKFKEITYIHAEAYPAGELKHGPLALVDEMTPVVALAPEDELVEKLLSNLEEVKSRGGTLYVFGNATSKIKIEKGKFMNMPDCGYYNAPIVYTIPLQILAYEVACSIGTDLDQPRNLAKSVTVE

SEQ ID NO: 125996 - protein, 551 aa, Unknown
  Bacterial polypetide isolated from the Sargasso Sea
MCGIVGYIGKENASKILIDLTRSLEYRGYDSAGIAIYDNKKDKFLIKKTTGTIDKIKEEILDSIDGTTGISHTRWATHGKINNKNAHPQISSNNKILIVHNGIVENYQEIKNDLVNNGYDFISETDSEVIANLVDFNLKKLNLKDALEKTIDAITGSSSIVGIDIDNPNDIFLMKKGNSGGLVISENKSGEKIICSDPTIITEFSSSYRYLVDDEVAIISKDKNDFIREKKEPNKRIVEIKTNTILENDKAYQYKMEEEIFYQKKSIKRIIDNKNDLIIKNLNESNIEFKNIKRVLVIGMGSSFNAGLLGSYYFESISSLKSETINASEFIDSKRIIDNNDLVLGVTQSGETAETIKALEYAKSMGAKTISVTEKNISQASIISDVNVNIGCGPEYAVASTKTFTATVLTLYITAIYLSKNISNKKGLENNILGLDSRIESLLLDTKKTKQIAKILSSKDHILYLGRGIMYPIALEGALKMKEVCYIHSEGYAAGEMKHGVNALIGVNMPSVVISPLNETYSKMVSTINEIQARNGEVIGLVDAKDNDINS

SEQ ID NO: 125997 - protein, 289 aa, Unknown
  Bacterial polypetide isolated from the Sargasso Sea
VSCNVEIASEFRYRKSVVHPNSLLITISQSGETADTLAALRLAKELGYMSSLTICNVQGSSLVRESDLAFMTRAGAEIGVASTKAFTTQLTAFLMLTLALGKENGMTDADSKAIVSALHSLPAKLEETLAITGGIEDLAEEFADKNHSLFLGRGDQYPIAMEGALKLKEISYIHAEAYASGELKHGPLALIDDEMPVIVVAPNNELLEKLKSNVEEVRARGGIMYVFADKDAAFEGDETMRVIDVPHCDEPIAPIIYTLPLQLLSYYVALIKGTDVDQPRNLAKSVTVE

SEQ ID NO: 125998 - protein, 593 aa, Unknown
  Bacterial polypetide isolated from the Sargasso Sea
MCGIIAAASNRNVGKLLVQGLHKMEYRGYDSAGIALHQNDQIAHLRTLGKVKLLEEKMISEKPKSKLGIAHTRWATHGEPSEENAHPHKSNERVYIVHNGIIENYLDLKEFLKKEGYKFSSQTDSELIAHMLEHFLAKGNSTLDSMYLTKEKLDGAYAIAVIDKEDDKNIIIARNKSPLLIGIGTNEFLAASDPLAIAQLTNEFIFLEDGDVAELSSEEFTIYDQSKNKVEREISKIDISSQATSKGDYKHFMEKEIYEQPDAILNTIDGRVGGDDVLDNIFGIGSSDIFEKVKRIQIVACGTSLHAGRVAANWFSSIAELPTQIDYASEYRYRNPHVDEDSLLVTISQSGETADTLAALRYAKEKDYLSSLTICNVPTSSLARESDYSIFTNAGPEIGVASTKAFTTQLAALMLLALALAKSRDKNPKLRTRVITAMRSLSDTVNETLKLKDEILKIAPEIASKDNALFLGRGIFYPIAKEGALKLKEISYIHAEAYPAGELKHGPLALIDEEMPVIALAPESEIAEKLVSNLEEVKARGGTLYVFADPSITMDLKSGLVINMPKCDFLLTPIIYTIPLQILSYEVALLRGT

SEQ ID NO: 125999 - protein, 433 aa, Unknown
  Bacterial polypetide isolated from the Sargasso Sea
MCGIFGISSTKPISNQLIKGLSKLEYRGYDSAGISGHGTKNQLVTIKATGPIKNLKSKLYKLQGITTGISHTRWATHGQPTLKNTHPHLSGDICTVHNGIIENYMDLKSYLKKKSFVFKSDTDSEVICHLINYYFSKSADMQSAIISTANSLEGSYALAAINAQTPHTIYSACKGSPIILGKDVSSNYISSDMTPIVDHTKNYMPMDDNEFSEISSSDIKIFNKNKRVLSKPTKVSKINKNQASLMGHKHFMHKEIYEQKAIIEDMINRYVGKNKILPNIFGHSTDKLLEDIKHIHFVACGTSYHASLVAKDWIEQFTTVTCTAEVASEYKYKKINVLPDTLFVSISQSGETADTISSLKKALKLKYTNTLAICNVAESTLTRLSGMNFLMNAGPEISVASTKAFTSQLFTLLLLTAIISRSMAILKREWSKI

SEQ ID NO: 126000 - protein, 161 aa, Unknown
  Bacterial polypetide isolated from the Sargasso Sea
MYEMEPEIKKISTKFKNKEHTLFLGKGASYPIALEAALKLKEISYIHASAYHSGELKHGPLALVDRRMPVVCFLPDNHLARLVLSNLAEVEARQGQTFIFTNKKIAKNKKQVQVIKMPDCPDLIVPILYIIPAQLLSYHVAIKKKTDVDKPRNLAKSVTVE

SEQ ID NO: 126001 - protein, 517 aa, Unknown
  Bacterial polypetide isolated from the Sargasso Sea
DVNAHPHSDNSEDFAIIHNGIIENYAEMKDSLLKENYSFKSDTDTEVVAIELSKQWNGNLLETVVKVTKDLEGTYALVVTTTKQENTIVAGRMMSPLVLGVGEGEVFLASDSAAILEHTNKMIFLENGDFVEIHDGKYKLFDADLNDIEREVQIIDWEVSEAEKSGHDHFMYKEILEQAEVIERTITGRLEEGSPEIPITKEEAQKYEKIWIVACGTAYHAGLFGKDLFEKVLGVPVSVELASEFRYREPIIGENDLGIVISQSGETMDTIAATELLKENGSHVLALVNVVGSSLARMADSVFYLHVGPEIGVASTKAYLGMLVGQLVLAKHWDTQNKLDVSFEEIKGLPSLIEETLKCEKEIKEIAESIYKQNDVYFIGRGLDYALAAEGALKLKEISYLHAEALAAGELKHGTLALIEEGTPVIVTASQYHLLDKTTSNVQEVKARGAHVIAIGNSSSEKLENISDKYITLPDSNEILSTVISIIPLQFIAYHVANNRGESIDQPRNLAKSVTVE

SEQ ID NO: 126002 - protein, 605 aa, Unknown
  Bacterial polypetide isolated from the Sargasso Sea
MCGIVGIVSNKSVSASIIGALKKLEYRGYDSAGISTLSNNQINEQKCSGRVDNLEKILFQNPSDGDLGIGHVRWATHGIPNQINAHPHSSEVVSVVHNGIIENSDKLRDEYIKKGYSFKSQTDTEVITVMLTDYLKSEDLINCIHKTLEKLEGSFALGVIFKDFKNLVVGARRGSPLAVGYGHNENFIGSDSYALKSMTNKISYLDDGDFCLLYREKVEFYNSEKKKINKEILELSNEDNIAEKGDYKDFMSKEIDEQSFTTKKCINEYLDKSRNEINIYNLPIDPKKINKIRLIACGTAYHSCLMAKYWIEENTSIDVEADIASEFRYRNVKLNKDDLYIFVSQSGETADTYAALEKCKKNNVKTCGIVNVVESSIARLADFVLPIHAGPEIGVASTKAFLGQMLVLYLLILKISKERSEINQENYKKLILDLIKLPDFIKQTLSKQKDIQVVARDFVNAKGTMYLGRGYSYPIAMEGALKLKELSYIHAEGYAAGEMKHGPLALIEDGMPVIVLAPKDRYFEKTISNMQEVIARGGKVIMITDDTSITMSENIRFKFQIPKTNSTLNPFLLSIPLQFLAYHVALLKNCDIDKPRNLAKSVTVE

SEQ ID NO: 126003 - protein, 114 aa, Unknown
  Bacterial polypetide isolated from the Sargasso Sea
MCGIIAAASNRNVGKLLVQGLHKMEYRGYDSAGIALHQTDQIAHLRTLGKVKLLEEKMIAEKPKSKLGIAHTRWATHGEPSEENAHPHMSNERVYIVHNGIIENYLDLKDFLKK

SEQ ID NO: 126004 - protein, 156 aa, Unknown
  Bacterial polypetide isolated from the Sargasso Sea
EEIIKIAPEIASKENALFLGRGIFYPISKEGALKLKEISYIHAEAYPAGELKHGPLALIDENMPVIALAPESEIVEKLVSNLEEVKARGGMLYVFSDSSVTMDTSSGSFINMPECDFLLKPILYTIPLQILAYEVSILRGTEIDQPRNLAKSVTVE

SEQ ID NO: 126005 - protein, 240 aa, Unknown
  Bacterial polypetide isolated from the Sargasso Sea
MRCGNVIESSIARDANFVLPIHCGPEIGVASTKAFLGQILILYILALKLGSLRNEINKENYKEKIKDLQKLPSLIEKSLLIDNDIQAISSTFNEAKGSMFLGRGFSYPIALEGALKLKELSYVHAEGYPAGEMKHGPLALIEDGMPVVVLAPRDSYYKKTISNMQEVIARGAKVLLITNKSKDEIVSENIWETIEVENANDDLLPFLLTIPLQKLAYYSALKKGYDIDKPRNLAKSVTVE

SEQ ID NO: 126006 - protein, 277 aa, Unknown
  Bacterial polypetide isolated from the Sargasso Sea
RDPVIDPNALCIFVSQSGETADTKAALDYCRKQKIQTLSIVNVKNSSIARDSDHCIYTKAGAEIGVASTKAFTAQLSALLSLSIHLASEKKFMSVEENTKLCKEIMQAPLLLEQAIDRSYSLKDTAKAIINAKGVMYLGRGTAFPLALEGALKFKEISYIHAEGYPAGEMKHGPLALIEKDLPVVCIVPPGPLFHKTISNIQEVIARGGRILMITDDETLESNSENIWEVFRLPKCPKSIEAIVYSVPIHMLAYYTAVELGNDVDQPRNLAKSVTVE

SEQ ID NO: 126007 - protein, 385 aa, Unknown
  Bacterial polypetide isolated from the Sargasso Sea
MIIGLGEGEFICASDTPAIANFTNIILPMEDEEIALLTPLGIEIYDSNNERQYRNPVSLKVSEQIMDKMNFKHYMLKEIYDQPQTAKNWLDNYLIQNLEEGKYQINYPFDTKFFESIERIEIIACGTSKHAAMVGSFLLEQFSGVPTNVFYASEFRYSPPPLLPNTLTIGVTQSGETADTIAAIDMEIKRRSSIKDKNFKPNLIAITNRKESSVGRQVSNIIDICAGIEVGVAATKTFFAQLLSFYGLAIKFAEIKGSQSVDEISNLITELTKLPPLIEDLLEQHNKSSEKLAHDFFNIKDVIFLGRGINFPIALEGALKLKEISYIHAAGYPAGEMKHGPIALLDKKVPVISIATPGEVFDKVISKCSEAKARDSYLIGIAPEC

SEQ ID NO: 126008 - protein, 394 aa, Unknown
  Bacterial polypetide isolated from the Sargasso Sea
IEGDSYKITSINKDVSLPKKVEKIDFKIDDYDKGKFKYFMHKEIHEQVDTIQNTITGRTKRDSIMLHGLIDYWHEIKQADKIFITACGTSWHAGLIGKNLIERFSEVPVHVEYASEFRYNKTLVDNKSVVIAISQSGETADTLAAIKKANSLGAITVGICNVPGSSVSRETNCGIFTRCGHEVGVASTKSFTAQCTILYLLALKLADSNDTMSKKSIKQHLSFVSEFNKIKGVLKKENEIKKIALKYKNATDFLYLGRGLNFPVALEGALKLKEISYIHAEGYPAAEMKHGPIALVDKDMPNVFIVPKDMTYDKIISNIEEIKSRKGKIIIVTDSKDKILKDLANDLIYVPKTNNYMFCVLATIALQLFAYYIAVGKKLNVDRPRNLAKSVTVE

SEQ ID NO: 126009 - protein, 130 aa, Unknown
  Bacterial polypetide isolated from the Sargasso Sea
MCGIVASVSNKDVVNNLISGLHKLEYRGYDSSGIATLNNNKISLIKTSGKVETLEKSVNGNCEGQIGIAHTRWATHGEPSEKNAHPHQVDNIVIVHNGIIENYENLKKNFSDLKSDTDSEIIAHLIQNKL

SEQ ID NO: 126010 - protein, 438 aa, Unknown
  Bacterial polypetide isolated from the Sargasso Sea
MCGIIGITSNKPVSSSILHSLKKLEYRGYDSAGIATIDKGNINEVKSLGRVEVLEKNISQINLEGYVGIGHVRWATHGMPSTINAHPHSTENISVVHNGIIENSVNLKNLLIKKGHKFKSETDTEVIVHLLSEYMKSNELNKTIIKTLNDLEGSFALGIIFKDRPNVIVGARRGSPLAVGYGPNENYLGSDSYALKSMTNKITYLNDGDFCIIKKDEIDFFDHLGKKVNKKVLQLSSNELNYEKGEYKHYMAKEIDEQPSTIKNCVNEYVDKINNEINLLNFPWNKEQIKSVKLIGCGTAFHSCLIGKYWFEELTNLDVDVDIASEFRYRKNKFKEDCLYIFVSQSGETADTYAALNLCKKNKVKTCSIINVVESSIARDSDFVLPIHCGPEIGVASTKAFLGQMLVIYLLCLKISILMKDIKREDYDKKIRNLCLLS

SEQ ID NO: 126011 - protein, 158 aa, Unknown
  Bacterial polypetide isolated from the Sargasso Sea
NKIQTISSTFNEAKGSMFLGRGFSYPIALEGALKLKELSYIHAEGYPAGEMKHGPLALIEKGMPVVVLAPRDNYYKKTISNMQEVIARGAKVLLITNKSKDEIVSENIWETVEVETSNEDLLPFLLTIPLQKLAYYSALKKGYDIDKPRNLAKSVTVE

SEQ ID NO: 126012 - protein, 395 aa, Unknown
  Bacterial polypetide isolated from the Sargasso Sea
MIKEDQVEFFDNKGNKANKKILNLSQDNQSYDKGDYKHFMAKEIDEQPTTIKNCVNEYIDKISKQINIYNIPWKTNQISSIVLIGCGTAYHSCLIAKYWFEEHTNLDVTVDIASEFRYRKIKFKNDCLYVFVSQSGETADTYAALDICKKNKMKTCSIVNVVESSIARDSELVLPIHCGPEIGVASTKAFLGQMLVLYMLCLKLSFDQKIINKKNYQEKIKNLLSLSNLCKKTLLTDSKIQKTSRTFIEAKGSMFLGRGYSFPIALEGALKLKELAYVHAEGYPAGEMKHGPLALIEEGMPVVVLAPRDAHYKKTISNMQEVIARGAKVLLITNKSKDEIHSENIWETIEVENLSEDLFPFLTTIPLQKLAYYSAMHKGYDIDKPRNLAKSVTVE

SEQ ID NO: 126013 - protein, 244 aa, Unknown
  Bacterial polypetide isolated from the Sargasso Sea
EKDYLSTLCICNVPTSSLARESEYSIFTNAGPEIGVASTKAFTTQLAALMLLALSLAKSRNRNPKLRKRIITALRSLPDTVQETLKLKDAILEIAPEIASKDNALFLGRGIFYPIAKEGALKLKEISYIHAEAYPAGELKHGPLALIDEEMPVIALAPESEIAEKLVSNLEEVKARGGTLYVFSDPSISMDLKSGRLINMPKCDFLLTPIIYTIPLQILSYEVALLRGTDIDQPRNLAKSVTVE

SEQ ID NO: 126014 - protein, 598 aa, Unknown
  Bacterial polypetide isolated from the Sargasso Sea
MCGIVGYSGPKEPLPILINGLSRLEYRGYDSAGIAISDGNKITIEKKEGKLDVLKDHLKNNQMSGNVGIGHTRWATHGIPNDVNAHPHSDNNEEFAIIHNGIIENYAEIKKDLLKEGFEFKSDTDTEVVAVELSRKWSGELLKTVVDVANSLEGTYALLVTTTKEEGTIVAGRLMSPLVLGVGDDEVFLASDSAAILEHTKKMIFLENGDFVEIKNGKYKLFDSDLNEIEREIQEIDWEVSEAEKSGYDHFMYKEILEQSEVIERTISGRLDTNSDDIPIMSDHASKFEKIWIVACGTAYHAGLFGKDLFEKVLGVPVSVELASEFRYREPIVGKNDLGIVISQSGETMDTIAATELLKENGSHVLALVNVVGSSLARMADSVFYLHVGPEIGVASTKAYLGMLVSQLVLAKHWDTKNRLDVSFDEIAELPNLIDKTMACEDQIKEISEKIYKKNDIYFIGRGLDYALAAEGALKLKEISYLHAEALAAGELKHGTLALIEEGTPVVVTASQNHLLDKTTSNVQEVIARGAYVIAIGDSESEKLENISNDYVILPDSNEILTTVISIIPLQFIAYHVANKNGQSIDQPRNLAKSVTVE

SEQ ID NO: 126015 - protein, 292 aa, Unknown
  Bacterial polypetide isolated from the Sargasso Sea
MCGIVGYIGNKDPVPILVKGLKRLEYRGYDSSGIALLEEDNLTHIKKAGKVSDLQQLVDDSSIKGNCGIAHTRWATHGAPNDINAHPHLDHTGSIALVHNGIFENYEAIKQLLINRNIQFTSDTDTEVIVQLISELYYNNNEKLSFEDAVRAALQEVIGAYGIVTMCADEPNKIIAARMGSPLVLGIGEGEYFLASDASPIIEHTRNVIYLDDDEFVIIDKAGYSISNIKSKKIVSKSLTKIDLTIEEIEKGKFPHFMLKEIHDQKHSISDTMRGRLNLNDGTTNLGGIVNY

SEQ ID NO: 126016 - protein, 106 aa, Unknown
  Bacterial polypetide isolated from the Sargasso Sea
MCGIVGITSSKEVTTRIINSLKKLEYRGYDSAGIATINDGIINEVKCEGRVEALEKNISNTNIQGEIGIGHVRWATHGKPSTLNAHPHSSETVSVVHNGIIENSTI

SEQ ID NO: 126017 - protein, 108 aa, Unknown
  Bacterial polypetide isolated from the Sargasso Sea
MCGIVGITSYKEVTPRIISSLKKLEYRGYDSAGLATLSNGNINEVKCEGRVDALEKNIIQTKISGSIGIGHVRWATHGKPSSINAHPHSSEDVSVVHNGIIENSTILK

SEQ ID NO: 126018 - protein, 305 aa, Unknown
  Bacterial polypetide isolated from the Sargasso Sea
VACGTAYHAGLFGKDLFEKVLGVPVSVELASEFRYREPIVGKNDLGIVISQSGETMDTIAATELLKENGAHVLALVNVVGSSLARMADSVFYLHVGPEIGVASTKAYLGMLVGQLLLAKHWDSQNKLDVSFDEIAELPKLIEETMDCEKQIKDISEKIYKKNDIYFIGRGLDYALAAEGALKLKEISYLHAEALAAGELKHGTLALIEDGTPIIVTASQNHLLDKTTSNVQEVIARGAYVIAIGDNQSEKLENISDEYVTLPDSNEILTTVISIIPLQFIAYHVANLNGESIDQPRNLAKSVTVE

SEQ ID NO: 126019 - protein, 609 aa, Unknown
  Bacterial polypetide isolated from the Sargasso Sea
MCGIVGAVAQRDVAEILVEGLRRLEYRGYDSAGVAVIHNGELNRTRRVGKVQELSAALETDPLAGGTGIAHTRWATHGEPSERNAHPHLSEGDIAVVHNGIIENHHKLREMLKELGYHFSSDTDTEVICHLVHHELKSNDTLLAAVQATVKQLEGAYGTVVIDRRDSERMVVARSGSPLVIGFGLGENFVASDQLALLPVTRSFAFLEEGDVAEVTRRTVSIFDVHGNKVEREVKESEITHDAGDKGEYRHYMLKEIYEQPLALTRTIEGRIANKQVLDTAFGDNAAEFLKDIKHVQIIACGTSYHAGMAARYWLEDWAGVSCNVEIASEFRYRKSHLFPNSLLVTISQSGETADTLAAMRLAKEMGYKATLTICNAPGSSLVRESDMAYMMKAGAEIGVASTKAFTVQLAGLLMLTAVIGRHNGMSEQMQAEITQSLQSMPAKVEQALSLDDAIAELAEDFADKHHALFLGRGDQYPIAMEGALKLKEISYIHAEAYASGELKHGPLALIDADMPVIVVAPNNELLEKLKSNVEEVRARGGLMYVFADVDAEFESDETMKVIPVPHCDIFMAPLIYTIPLQLLSYHVALIKGTDVDQPRNLAKSVTVE

SEQ ID NO: 126020 - protein, 188 aa, Unknown
  Bacterial polypetide isolated from the Sargasso Sea
CQAKNINPKLRTRIVTALRALPEIIAESLKLKKEIQEISPKIAEKDNALFLGRGMFYPIAKEGALKLKEISYIHAEAYPAGELKHGPLALIDENMPVVALAPESELAEKLISNLEEVKARGGTLYVFGDASSNMQIDSGKLLTMPKCDFLLTPILYTIPLQILSYEVALIRGTDIDQPRNLAKSVTVE

SEQ ID NO: 126021 - protein, 326 aa, Unknown
  Bacterial polypetide isolated from the Sargasso Sea
MCGIVGAVAERNVVEILLEGLKRLEYRGYDSAGVALLQGDGTLTRIRRTGKVQELADAVAEGEALGTTGIAHTRWATHGGVTEANAHPHFSTERVAVVHNGIIENYVNLKAQLKEQGYTFTSDTDTETIAHTVHEELKSGKTLLDAVQSAVKTFHGAYGTVIMDKEDPSRVVVARSGSPLVIGLGLGENFIASDQMALLPVTRRFIFLEEGDVAEITRRDVKIFDKDGNAVEREVIESNIEHDAGDKAGYRHYMLKEIHEQPTVVRNALKDRIDENGLTADIFGKGADEIFKKVQHVQIIACGTSYHAGMTARYWLEQYANVSCNV

SEQ ID NO: 126022 - protein, 200 aa, Unknown
  Bacterial polypetide isolated from the Sargasso Sea
LVGLSMLTLAIGKYNGLTSQQQQDMVQALKSLPAKLEETLTLAPKIEALATEFADKHNSLFLGRGDQYPIAMEGALKLKEISYIHAEAYAAGELKHGPLALIDADMPIIVVAPNNELLEKLQSNVEEVRARGGIMYIFADIDAHFKSDATQRVISVPHVHPLIAPIIYTIPLQLLSYYVAIIKGTDVDQPRNLAKSVTVE

SEQ ID NO: 126023 - protein, 313 aa, Unknown
  Bacterial polypetide isolated from the Sargasso Sea
MCGIIGATSSRSVGKILVNGLRKMEYRGYDSAGLVLNQDEAAFQLRTLGKVSNLEELMKKERPKANSGIAHTRWATHGVPSETNAHPHGSNGNIYIVHNGIIENHDELRERLVNEGYEIQSQTDSELIAHLIHFNKEKGKTTLDALIETTKELDGAYSIAVIDTEEKGKIFAAKQKSPLLVGKGIEENFIASDPLAIAGLAESFYLLEDGDFAEITKDEIKIVGSNGEALSREETIIDTSVKEASKDGYKHFMEKEIYEQPKAITNAIEGRTADGEVLDNIFGLGSSDAFKNVKRIQFVACGTSLHAAKTARK

SEQ ID NO: 126024 - protein, 475 aa, Unknown
  Bacterial polypetide isolated from the Sargasso Sea
MCGIFGVITNNNNNVKDQIFDGLRRLEYRGYDSSGIATINNNQINCVKSQGNLDQLQKKLINEELIGNVGIGHTRWATHGVPNESNAHPHFTDEVAVVHNGIIENYSLLKNQIVEAGISFKSETDTEAIAHLITLYLKSGMGSYEAIRATTEDIKGSYALAIIMRSEPNKLFAVRKGSPLAVGSSEKENYIGSDGYSLGNYCDEVTYLKDGDIAIIDNSSFEIFDNQNEFIKRKSQIIDKTVTLAEKGVFKHFMSKEIHEQPSVIQDAISHYINNDDLTVNLPKFPFSISNLKNITLVACGSSYYSGLVAREWFEKFARIKVDVEIASEFRYRETPMDSSGLTIFISQSGETADTLAALKHCKKLNQKTISVVNVPNSSMCRNSDTSLKIFAGPEIGVASTKAFTCQLVVLAALAIHIGRINGNVSDHDENKYVKSLLDLPRLISNVLDQEEDLVKIVKDLNPIKNALYLGRGQM

SEQ ID NO: 126025 - protein, 601 aa, Unknown
  Bacterial polypetide isolated from the Sargasso Sea
MCGIVGIASKNNCIDNILSGLYSLEYRGYDSSGLATIKNNHFEYIKNIGKICNLQKSVKNNKLNGNVVIAHTRWATHGKPSIKNCHPFIKDNCVLVHNGIIQNYTDLINYYSIKQKNIKSDTDTEIIAEIYNKLLNEFNNPIEAIKNLNKKIVGSFSFAFLVHGSKSIYVTRRGSPLVLGSGEGFNAVSSDVLGLPDNTKEIIFLEENDIAEVNDTSILIYNNNKIIKREKHKFIPKKEFKVKGNYKHFMEKEIFHQPISIEDTILNFADKKRKIVYLPKTNIKFNEFSNIIIVACGTAYHSCMVAKYWIEEMTDFNVSIDIASEYRYRKNKVNKNSLGIVVSQSGETMDTLKCLSKFKKNNIFTISIVNVLNSSIARLSDFILPTLAGPEIGVASTKAFTSQLSVLALFVLNLQQGSKNINKIFFNSIFSIHKSVKEILKKENEFKKIAKKLVDTKSIFYIGRGAMYPIALEGALKLKEITYKHCEGYAAGELKHGPLALIENNIPVIVLAPFDENYSKLLSNIQEVKARGGRIIMITDRDGAKKIKKYCDQIVIIPKTNFLTSPILYSIPVQLIAYYLAVFLGTDVDQPRNLAKSVTVE

SEQ ID NO: 126026 - protein, 281 aa, Unknown
  Bacterial polypetide isolated from the Sargasso Sea
GSEYQYQEPIKTDKTLLVTISQSGETADTLSSLKFAKKSGDPVTLTICNVANSSLCRESDYALLTKAGPEIGVASTKAFVTQLACLNLLLLTLMRVHNKLPTARKKITAALRDLPKLINKTLKMTGEYKKVAKLLFKRNSALFLGRGLYFPIAREGALKLKEISYIHAEAYPGGELKHGPLALIDKNMPVIALAPDNEHLDKITSNIEEVAARKGKVITIGPLGRTKIDKNGGHIKIPKTLDLLNPIVSVVPMQLIAYYTAVFKGTDVDKPRNLAKSVTVE

SEQ ID NO: 126027 - protein, 328 aa, Unknown
  Bacterial polypetide isolated from the Sargasso Sea
MCGIVGILGDHEVGPLLVNALKRLEYRGYDSAGIATLNDGKLGRRRSLGKLAELSDLLVRDPIQGKSGIGHTRWATHGKPSVNNAHPHMTEQVAVVHNGIIENFQELRKYLEKKGIKHTTDTDTETIALLTQAMIEEGNEPIEAAQKTIEKLTGAFALCFLFQGQNDLMIAARKGSPLAIGYGKGEMFVGSDAIALSPMTNKISYLDEGDFAVLTRKTVDIWDQSKNSVKREIKEINTENAQVQKDGYQHFMEKEIHEQPRVISLALEYYFDQKTGKVTLPDNLNLNFNDFEQISLVACGTAFYACHVAKYWFEEIARIPVEIDIASE

SEQ ID NO: 126028 - protein, 453 aa, Unknown
  Bacterial polypetide isolated from the Sargasso Sea
AYSIAVIDTEEKRKIFAAKQKSPLLVGKGIEENFIASDPLAIAGLAESFYLLEDGDFAEITKDEIKIVGSNGEALSREETIIDTSVKEASKDGYKHFMEKEIYEQPKAITNAIEGRTADGEVLDNIFGLGSSDAFKNVKRIQFVACGTSLHAAKTARKWFEELCETPCYIDFASEYRYRNPLVEDDTLFVCISQSGETADTMAALNYAKDEKYLGIVTICNVPTSTMARESDWKIFTNAGPEIGVASTKAFTTQLAALLLLACSISKSKNINKDKRADAINDLLNTPSLVKESFELKSQIDEIVEKIADKKNALYLGRGVYFSIAQEGALKFKEITYIHAEAYPAGELKHGPLALVDEMTPVVALAPEDELVEKLLSNLEEVKSRGGTLYVFGNATSKIKIEKGKFMNMPDCGYYNAPIVYTIPLQILAYEVACSIGTDLDQPRNLAKSVTVE

SEQ ID NO: 126029 - protein, 65 aa, Unknown
  Bacterial polypetide isolated from the Sargasso Sea
FLFADPGSGFVESDDVRILQVAPVDSAIAPIIYTVPLQLLSYHVALIKGTDVDKPRNLAKSVTVE

SEQ ID NO: 126030 - protein, 145 aa, Unknown
  Bacterial polypetide isolated from the Sargasso Sea
MCGIIGATSSRSVDKILIKGLHAMEYRGYDSAGVALNQDNEVFRLRSLGKVSSLEELMVNNKPKANSGIAHTRWATHGAPSEENAHPHGSHDEIYIVHNGIIENHDEIRDKLKSKGYEIASETDSELIAHLIHLNKTDSLSTVEA

SEQ ID NO: 126031 - protein, 473 aa, Unknown
  Bacterial polypetide isolated from the Sargasso Sea
KEKGKSTLEALIDSSKELNGAYSIAVIDTDQKGKIFAAKQKSPLLVGKGIEENFVASDPLAIAGLAESFYLLEDGDFAEITQDEIKIVGIDNEPVVREETLIDTTVKEASKEGYKHFMEKEIYEQPKAIANAIDGRTTDGDVLDNIFGLGSSESFKGVKRIQFVACGTSLHAAKTARKWFEELSETPCYIDFASEYRYRNPLVEDDTLFVCISQSGETADTMAALNYAKEEKYLGIVTICNVPTSTMARESDWKIFTNAGPEIGVASTKAFTTQLAALMLLACSISKSKDINGDKRAEAIKDLVNTPALVKEAFGLKKHIDDIVEKIADKKNALYLGRGVYFSIAQEGALKFKEITYIHAEAYPAGELKHGPLALVDEMTPVVALAPEDELVEKLVSNLEEVKSRGGTLYVFGNATSKIKIEKGKFMNMPDCGYYNAPIVYTIPLQILAYEVACSIGTDLDQPRNLAKSVTVE

SEQ ID NO: 126032 - protein, 111 aa, Unknown
  Bacterial polypetide isolated from the Sargasso Sea
GYPAGEMKHGPIALLDKKVPVISIASPGKVFDKVISNAQEAKARDSYLIGIAPECNGTEIFDYLMKVPSSNEWISPLINILPIQLLSYHIAAHRGLDVDQPRNLAKSVTVE

SEQ ID NO: 126033 - protein, 608 aa, Unknown
  Bacterial polypetide isolated from the Sargasso Sea
MCGIIGAASSRSVGKILVNGLKKMEYRGYDSAGLVLNNESEAIQLKTLGKVAKLEDLMIEKKPRAQSGIAHTRWATHGEPSQKNAHPHASNGTIYIVHNGIIENHDELRERLSNDGYKIESETDSELIAHLIYSNKENGKSTLEALIEATKELHGAYSIAVIDTEQKGKIFAAKQKSPLLIGRGIEENFVASDPLAIAGLAESFYLLEDGDFAVITQDEIKIVGSDSEPVQREETIIDTSVKEASKDGYKHFMEKEIYEQPKAIANAIEGRTTDGDVLDNIFGLGSSKSFKGVKRIQFVACGTSLHAAKTARKWFEELCETPCYIDFASEYRYRNPLVEDDTLFVCISQSGETADTMAALSYAKEEKYLGIVTICNVPTSTMARESDWKIFTNAGPEIGVASTKAFTTQLAALMLLACSISKSKDINGDKRAEAIKDLVNTPALVKEAFGLKKHIDDIVEKIADKKNALYLGRGVYFSIAQEGALKFKEITYIHAEAYPAGELKHGPLALVDETTPVVALAPEDELVEKLVSNLEEVKSRGGTLYVFGNANSKIKIEKGKFMNMPDCGYYNAPIVYTIPLQILAYEVACSIGTDLDQPRNLAKSVTVE

SEQ ID NO: 126034 - protein, 377 aa, Unknown
  Bacterial polypetide isolated from the Sargasso Sea
TDTEALVNLISDIYYADGLNFEQAVQAALKQVVGTYGIVAFCSDEPDKLVAARHGSPLVLGVGNDEYFIASDASPIVEHTRNVIFLDEGEIATVQQSGYTIRSMEDDAIVNRETTEIEFSIEEIEKGEFPHFMLKEIHDQIFSIQDTMRGRIDPVDGTAHLGGISDQLSRIQGAHRIYITACGTSWHAGLIGKYLIEEYAGIPVHVEYASEFRYRKPIINSKTVVIGISQSGETADTLAAIRKAKSFGALTVGICNVVGSSVARETDCGIYTHAGPEIGVASTKAFTSQVAVLFLLSLCFGRKNKLSALTGQKFAQALMNIGNQVKIILDNSESILEVAKSTVHNENFLYLGRGLNFPVALEGALKLKEISYIHAEG

SEQ ID NO: 126035 - protein, 213 aa, Unknown
  Bacterial polypetide isolated from the Sargasso Sea
PEIGVASTKAFTTQLAALMLLACSISKSKDINGDKRAEAIKDLVDTPALVKEAFGLKKHIDDIVEKIADKKNALYLGRGVYFSIAQEGALKFKEITYIHAEAYPAGELKHGPLALVDETTPVVALAPEDELVEKLVSNLEEVKSRGGTLYVFGNANSKIKIEKGKFMNMPDCGYYNAPIVYTIPLQILAYEVACSIGTDLDQPRNLAKSVTVE

SEQ ID NO: 126036 - protein, 205 aa, Unknown
  Bacterial polypetide isolated from the Sargasso Sea
MCGIYGCISHDASARVLEGLRKLEYRGYDSAGLAAIFSDNEDPIETERTTGYVSDLVLKANGRFDGARISIGHTRWATHGGVTDYNAHPHSSEDGKLTIVHNGIIENSVELASKVSKLGYSLTSETDTEVIVHLLDHELKTQGEGKGHLDAFCSVISQLSGSWAIAAMASGLEGILISRKGAPLVIGRSRDSISVSSDVQPFYGA

SEQ ID NO: 126037 - protein, 101 aa, Unknown
  Bacterial polypetide isolated from the Sargasso Sea
MCGIIGISSNKSVSASIINSLKKLEYRGYDSAGIATLSEGKINEVKSEGRVDSLEKNFDLKNLKGNIGIGHVRWATHGVPNSVNAHPHSSYNVSVVHNGII

SEQ ID NO: 126038 - protein, 391 aa, Unknown
  Bacterial polypetide isolated from the Sargasso Sea
KEKVEFYNNDKKKINKEVFELSNEDNIVDKGDFKDFMSKEIDEQNLTTKKCLNEYLDKSRNEINIYNIPIDPNKINKIRLIGCGTAYHSCLMAKYWIEEFTSIDVEADIASEFRYRNVKLNKDDLYIFVSQSGETADTYAALEKCKKNNVKTCGIVNVVESSIARLSDFVLPIHAGPEIGVASTKAFIGQMLVLLLLTLKISKDRKDIDPDVFKKLIDDIINLPDLIKETLSKQKEIQEIARDFINAKGTMYLGRGYSYPIAMEGALKLKELSYIHAEGYAAGEMKHGPLALIEDGMPIVVLAPKDRYFEKTISNMQEVIARGGKVLMITNDKSKTLSENIRFKFELPDFQSHISAFLLTIPIQFLAYHVALLKNCDIDKPRNLAKSVTVE

SEQ ID NO: 126039 - protein, 608 aa, Unknown
  Bacterial polypetide isolated from the Sargasso Sea
MCGIIGAASSRSVGKILIKGLQLMEYRGYDSAGVVLNKDEEILRLRSLGKVSKLEEKMISKKPKAFSGIAHTRWATHGAPSEENAHPHGSHDDIYIVHNGIIENHEEIRGFLRNEGYEITSETDSELIAHLVHFYKKDTQDTLQALMKATHELNGAYSIAVVCKQEKGKVYAARQKSPLLVGLGIEENFVASDPLAIVNITERFHMLEDGDFAVVTREDVVIYDQEGVPVERDELKIDATATSTTKGEYKHFMEKEIYEQPDCIGNTINGRLGENDVLDNVFGLGSSDSFKDVKRIQFVACGTSLHAAKTARKWFEDICEIPCYIDFASEYRYRNPIVEDNTLFVTISQSGETADTLAALNYAKEEKYLGIVSICNVPTSTMARESDWKVFTNAGPEIGVASTKAFTTQLAALLILALSIAKSQDKNLEKRKQAAQELRETPGLISEAFKLKEEINSITNNISSNENALFLGRGMYFSIAQEGALKLKEISYIHAEAYPAGELKHGPLALVDETIPVIALAPEDSLVEKLLSNLEEVKARGGTLYVFGNARSTIEIKKGKFINMPECGDYNAPIVYTIPLQILAYEVACLRGTDLDQPRNLAKSVTVE

SEQ ID NO: 126040 - protein, 93 aa, Unknown
  Bacterial polypetide isolated from the Sargasso Sea
VIVIAPKDKYFEKTISNMQEVIARGGKILFITDYKKESLNENIRFGLRVPHIDNLLSPILLTLPLQMLAYHVALLKNCDVDKPRNLAKSVTVE

SEQ ID NO: 126041 - protein, 525 aa, Unknown
  Bacterial polypetide isolated from the Sargasso Sea
MCGIIGIASNKSVSINIINALKKLEYRGYDSAGLATISNGEIKEKKCPGRVEKLEKILFQNPSEGNLGIGHVRWATHGVPNEVNAHPHSSEIVSVVHNGIIENSNELKKDLEKSGKVFKSQTDTEVITVLLTEKLKKLDPLNAVFETLDILKGSFALGIIFKNYKDFVIGARRGSPLAVGYSNNENYLGSDSYALKAMTNKISYLDDGDVCVLSKDNIKFYNSNKNKINKEIFTLSEDKSSVSKGNYKNFMIKEIFEQPITTKTCLKEYIDKIREEINFYNLPIDPKKINKVVLIGCGTAYHSCLVAKHWLEELTTLNVEADIASEFRYRKVKFDVNNLYIFVSQSGETADTYAALDLCKKENVKTCSVVNVVESSIARHSDCVLPIHAGPEIGVASTKAFLGQMLVLYLLALKISEIRNDMDHKEYKKKIGELKKIPKLITESLKEEEKIQLIAKDIYKSKGSMFLGRGSSFPIALEGALKLKELSYLHAEGYPAGEMKHGPLALIEDGLPVVVIAPKDKYLKK

SEQ ID NO: 126042 - protein, 107 aa, Unknown
  Bacterial polypetide isolated from the Sargasso Sea
EMKHAPIALIDKKSLTICLSPNNELYEKSISNAEEIAARNGKVIILSSVKIQRKSLNTHNVSLPKENFIDTPFIYTIPLQLISYYFALNEGTDIDQPRNLAKSVTVE

SEQ ID NO: 126043 - protein, 598 aa, Unknown
  Bacterial polypetide isolated from the Sargasso Sea
MCGIIGAASSRSVETILVNGLKKMEYRGYDSAGLVLNREKSAFQLRTLGKVSNLEELMIKERPKANSGIAHTRWATHGVPSETNAHPHGSNGNIYIVHNGIIENHDELRERLANEGYEIQSETDSELIAHLIHFNKGKGKTTLAALIETTKELDGAYSIAVINTEEKGKIFAAKQKSPLLVGKGIEENFIASDPLAIAGLAESFYLLEDGDFAEITEDEIKIVGINGEPVSREETIIDTSVKEASKDGHKHFMEKEIYEQPQAITNAIEGRTANGEVLDNIFGLGSSNVFKDVKRIQFVACGTSLHAAKTARKWFEELCETPCYIDFASEYRYRNPLVEDDTLFVCISQSGETADTMAALNYAKDEKYLGIVTICNVPTSTMARESDWKIFTNAGPEIGVASTKAFTTQLAALLLLACSISKSKEINKDKRVDAINDLLNTPSLVKEAFGLKNHIVEIVEKIADKKNALYLGRGVYFSIAQEGALKFKEITYIHAEAYPAGELKHGPLALVDEMTPVVALAPEDELVEKLLSNLEEVKSRGGTLYVFGNATSKIKIEKGKFMNMPECGYYNAPNCLHNTPANFGIRSCMLNRNRSGSA

SEQ ID NO: 126044 - protein, 291 aa, Unknown
  Bacterial polypetide isolated from the Sargasso Sea
MCGIIAAASNRNVGKLLVQGLHKMEYRGYDSAGIALHQKDQIAHLRTLGKVKLLEEKMIAEKPKSKLGIAHTRWATHGEPSEENAHPHKSNERVYIVHNGIIENYLDLKEFLKDEGYSFSSQTDSELIAHLLEYFLSKGNSMVDSMYLTKEKLDGAYAIAAIDRENDQNIVIARSKSPLLIGIGTDEFLAASDPLAIGQLTNEFIFLEDGDVAELTSESYTIFDDTKQKVSREITHIDISNQATSKGEYKHFMEKEIYEQPDAILNTIDGRVGGDDVLENIFGLGSSDISK

SEQ ID NO: 126045 - protein, 546 aa, Unknown
  Bacterial polypetide isolated from the Sargasso Sea
PVPKSGIAHTRWATHGEPSQKNAHPHASNGTIFIVHNGIIENHDELRERLSNDGYKIESETDSELIAHLIYSNKENGKSTLEALIETTKELHGAYSIAVIDTEQKGKIFAAKQKSPLLIGRGIEENFVASDPLAIAGLAESFYLLEDGDFAVITQDEIKIVGSDSESVQREETIIDTSVKEASKDGYKHFMEKEIYEQPKAIANAIEGRTTDGDVLDNIFGLGSSESFKGVKRIQFVACGTSLHAAKTARKWFEELCETPCYIDFASEYRYRNPLVEEDTLFVCISQSGETADTMAALNYAKEEKYLGIVTICNVPTSTMARESDWKIFTNAGPEIGVASTKAFTTQLAALMLLACSISKSKGINGDKRSEAIKDLANTPELVKEAFGLKKHIDDIVEKIADKKNALYLGRGVYFSIAQEGALKFKEITYIHAEAYPAGELKHGPLALVDEMTPVVALAPEDELVEKLVSNLEEVKSRGGTLYVFGNATSKIKIEKGKFMNMPDCGYYNAPIVYTIPLQILAYEVACSIGTDLDQPRNLAKSVTVE

SEQ ID NO: 126046 - protein, 128 aa, Unknown
  Bacterial polypetide isolated from the Sargasso Sea
GALKLKEITYKHCEGYAAGELKHGPLALIENNIPVIVLAPFDENYSKLLSNIQEVKARGGRIIMITDKDGAKKAKKYCDQIAIIPQTNFITSPILYSLPIQLIAYYLAVFLGTDVDQPRNLAKSVTVE

SEQ ID NO: 126047 - protein, 396 aa, Unknown
  Bacterial polypetide isolated from the Sargasso Sea
VQLSGYTIRSMKDDAIVNRETTEIEFSIEEIEKGEFPHFMLKEIHDQIFSIQDTMRGRIDPVDGTAHLGGISDQLSRIQDAHRIYITACGTSWHAGLMGKYLIEEYAGIPVHVEYASEFRYRKPIINSKTVVIGISQSGETADTLAAIRKAKSFGALTVGICNVVGSSVARETDCGIYTHAGPEIGVASTKAFTSQVAVLFLLSLCFGRKNKLSALTGQNFAQALMNIGNQVKIILDDSESILEVAKSTVHNENFLYLGRGLNFPVALEGALKLKEISYIHAEGYPAAEMKHGPIALIDEKMPVVCLAPHDDTFDKVLSNIQEVKARKGVIITVTDKRTKELEKVSDYIIDVPSTHPKIFPMLASISLQLLAYHLAVLRGCDIDQPRNLAKSVTVE

SEQ ID NO: 126048 - protein, 524 aa, Unknown
  Bacterial polypetide isolated from the Sargasso Sea
MCGIIGAASSRNVGKLLIQGLHKMEYRGYDSAGIALHQKHHVTRLRALGKVQALEDLMIEHKPKSKLGIAHTRWATHGKPSEANAHPHASSEQIYIVHNGIIENYKELTKKLKDSGYQFASQTDSELIAHLIHHHYKNNDLLCAMQLATKELEGAYAIAAVDLNHKDQLVIARHKSPLLIGVGIEENFAASDPLALAQLTSDFVFLEDGDTAVVKKDSYEIFDANSKSVNREVTHLDIETSSVTKGEFSHFMEKEIFEQPQSASNTLESRLGSNDVLDNIFGLGSSEIFAKTKRIQFVACGTSLHAGKVGRFWFEEIAGIPCYVDFASEYRYRNPLVEDGTLFVTISQSGETADTLAALRYAKDKDYLSTLSICNVPTSSLARESDHVLFTNAGPEIGVASTKAFTTQLVSLLLLAMSIAKSQDKNPIMREAITKELKDLPAAIDASLNTKTAIQKITPAIAEKNNALFLGRGIFFPIVQEGALKLKEISYIHAEAYPAGELKHGPLALVDDSIPIVALSPEND

SEQ ID NO: 126049 - protein, 568 aa, Unknown
  Bacterial polypetide isolated from the Sargasso Sea
DNDEISEKKCSGRVEELEKILFKSPSNGHLGIGHVRWATHGVPNILNAHPHSSEIVSVVHNGIIENSDELKKKLESKGLKFKSQTDTEVITLLITEALKDNKPLESVFNTLKQLKGSFALGIIFKNYKNIIIGARRGSPLAVGYSNIENYLGSDSYALKSMTNKISYLDDGDLCVLSKDKVEFYDVKKKKINKKVHILSDDKNTSDKGDYKNFMSKEIFEQSITAKNCINEYTDSLKKDINIYNFPIKPEKINKIILIGCGTAYHSCLVAKYWFEELTTIDVETDIASEFRYRKLKFNSNNLYVFVSQSGETADTAAALDICKKNKVKTCSVVNSVESTIARSSDWVLPIHAGPEIGVASTKAFLGQMLVLYILCLKLAQIRKDISNSFYQTNIKNLKNLPEAIKKSLKVENSIQAMAKEFLDAKGSMFLGRGLSFPIALEGALKLKELSYLHAEGYPAGEMKHGPLALIEEGLPVIVLAPKDKYFEKTLSNMQEVIARGGKILFITDHKKELINENIRFGIRVPSLDNLLSPILLTIPIQLLAYHVALLKGCDIDKPRNLAKSVTVE

SEQ ID NO: 126050 - protein, 433 aa, Unknown
  Bacterial polypetide isolated from the Sargasso Sea
KSPLLIGIGKYGSLAASDPLAISGLTNKFIFLEDGDVAEISSKEYKIYDDSKNEVQRDISQIDISNEATSKGSYRHFMEKEIYEQPDAILNTIDGRVGGDDVLDNIFGLGSSEVFAKVKRIQIVACGTSLHAGRVAANWLSAISELPAQIDYASEYRYRNPHVDEDSLLVTISQSGETADTLAALRYGKEKNYLSTLTICNVPTSALARESDYSIFTNAGPEIGVASTKAFTTQLAALMLLALSLAKSRNKNPKLRTRVITAMRSLSDTINETLKLKDEILEIAPEIANKDNALFLGRGIFYPIAKEGALKLKEISYIHAEAYPAGELKHGPLALIDENMPVIALAPESEIAEKLVSNLEEVKARGGTLYVFSDPSVTMELKSGKIIKMPKCDFLLTPIIYTIPLQILSYEVALLRGTDIDQPRNLAKSVTVE

SEQ ID NO: 126051 - protein, 533 aa, Unknown
  Bacterial polypetide isolated from the Sargasso Sea
MCGIIGIASNKSVSTNIIDALKKLEYRGYDSAGLATITNGQINEKKCQGRVEKLEKILFQNPSEGNLGIGHVRWATHGVPNEVNAHPHSSEIVSVVHNGIIENSYELKKELEKSGKVFKSQTDTEVITVLLTERLKKSEPLKAVFETLEVLKGSFALGIIFKNFKDFVIGARRGSPLAVGYSNNENYLGSDSYALKSMTNKISYLDDGDVCILSKDEVKFYNHNRDKINKEIFTMSEDKSSVNKGNYKNFMIKEIFEQPVTTKTCLKEYIDKIRGEINFYNLPVDPKKISKIVLIGCGTAYHSCLVAKYWFEELTSLTIETDIASEFRYRKVRFDKNALYIFVSQSGETADTYAALDLCKKENVKTCSVVNVVESSIARNSDCVLPIHAGPEIGVASTKAFLGQMLVLYLLTLKISEIRNDIDKKEYKNKITELKKIPNLISESLKEEEKIQLIAKDIYMSKGSMFLGRGSSFPIALEGALKLKELSYLHAEGYPAGEMKHGPLALIEDGLPVVVIAPKDKYFEKTLSNMQEV

SEQ ID NO: 126052 - protein, 204 aa, Unknown; identical to SEQ ID NO: 125493
  Bacterial polypetide isolated from the Sargasso Sea

SEQ ID NO: 126053 - protein, 607 aa, Unknown
  Bacterial polypetide isolated from the Sargasso Sea
MCGIVGASGLNNQVPQLVNALSRLEYRGYDSCGIAVQDDGRLRSERTLRRVTDLQARVLTLGLEAQTCIAHTRWATHGAPSEMNAHPIMSGDTIAVVHNGIIENHDALRVELRERGYTFRGQTDTEVIAHLIHSLYRDDLFDAVVRAVKRLHGAYAIAVLSAKEPQRLVAARAGSPLVIGIGAEQNYLASDCAALGDLTDRFVYLEDGDVALITPDRIAVVDSGGHEAQRPLCQVKAREGDAALGPYQHFMQKEIFEQPKAIASTLDGIDTISPALFDAADGTRALLSRVRNVLLLGCGTSYYAGLTAKYWLEAIAGVPAQVEIASEFRYRETVADPRTLVVGISQSGETADTIGAIEQARDMGQTLSMAICNVATSTIARTAPLRFLTRAGIELGVASTKAFTTQLVALFVLTLTLAQLRGRLDAKQVALHLKQLHALPERIGHALALETQIMGWATKFAHTENALFLGRGIHFPIAMEGALKLKEVSYIHAEGYAAGELKHGPLALVTSAMPVVTIAPDDRLFQKLKSNMAEVRARGGRLYVLAGDQLGIDADRDTHLIRVRESGDLLSPIVNVIPLQLLAYHVGCARGADVDKPRNLAKSVTVE

SEQ ID NO: 126054 - protein, 213 aa, Unknown
  Bacterial polypetide isolated from the Sargasso Sea
MCGIIGAASSRNVGKLLVQGLHKMEYRGYDSAGIALHQKDNIFNLRTLGKVSLLEDEMIEQRPKSKLGIAHTRWATHGKPSEKNAHPHASSGEVNIVHNGIIENYLELKDKLIEAGYAFESETDSEVIAHLLHQHLQSNGDLLAAMHEAIKELDGAFAIAAIHIKDKNRLVVARNKSPLLIGIGLEENFAASDPLALSQLTSEFVFLEDGDMQ

SEQ ID NO: 126055 - protein, 248 aa, Unknown
  Bacterial polypetide isolated from the Sargasso Sea
CKKNEVKTCAIVNVVESSIARDADLVLPIHCGPEIGVASTKAFLGQMLVLYLLCTKISFEQKSISKKLYQSKIKDLLLLSKCAKGTLNIDNKIHNLGKDFANSKGSMFLGRGYSYPIALEGALKLKELAYVHAEGYPAGEMKHGPLALIEEGMPVVVVAPRDVHYKKTISNMQEVISRGAKVLLITNKSSDEIISENIWEQIEVENISDELLPFLTTIPLQKLAYYSALDKGFDIDKPRNLAKSVTVE

SEQ ID NO: 126056 - protein, 329 aa, Unknown
  Bacterial polypetide isolated from the Sargasso Sea
MCGIVGYSGPKEPLPILINGLSRLEYRGYDSAGIAISDGNKITVEKKEGKLDVLKNHLKDSNIKGNIGIGHTRWATHGVPNDVNAHPHSDNSEEFAIIHNGIIENYAEIKKDLLEEGYEFKSDTDTEVVAVELSRKWNGQLLKTVNDVAKTLEGTYALVVTTTKEEGTIVAGRLMSPLVLGVGEKEVFLASDSAAILEHTNKMIFLENGDFVEIKNGQYKLFDSDLNEIEREIQEIDWEVSEAEKLGHDHFMYKEILEQAEVIERTISGRLELTSEEIPIKLDEASKYEKIWIVACGTAYHAGLFGKDLFEKVLGVPVSVELASEFRYR

SEQ ID NO: 126057 - protein, 329 aa, Unknown
  Bacterial polypetide isolated from the Sargasso Sea
IYFGLGSSKAFKGVKRIQFVACGTSLHAAKTSRKWFEELCETPCYIDFASEYRYRNPLVEDDTLFVCISQSGETADTMAALNYAKDEKYLGIVTICNVPTSTMARESDWKIFTNAGPEIGVASTKAFTTQLAALLLLACSISKSKNINKDKRTDAINDLLNTPSLVKESFELKSHIDEIVEKIADKKNALYLGRGVYFSIAQEGALKFKEITYIHAEAYPAGELKHGPLALVDEMTPVVALAPEDELVEKLLSNLEEVKSRGGTLYVFGNATSKIKIEKGKFMNMPDCGYYNAPIVYTIPLQILAYEVACSIGTDLDQPRNLAKSVTVE

SEQ ID NO: 126058 - protein, 60 aa, Unknown
  Bacterial polypetide isolated from the Sargasso Sea
MCGIVGAVAQRDVVEILVEGLRRLEYRGYDSAGVAIISPTGELQRIRRLGKVKELSDAVN

SEQ ID NO: 126059 - protein, 168 aa, Unknown
  Bacterial polypetide isolated from the Sargasso Sea
PGKLKTVLKENDLIEKISKIYYKSSNALYLGRGINFPLALEGALKLKEISYIHAEGYPAAEMKHGPIALIDEEMPVFVIATKDSSYEKILSNIQEVKARKGKIIAIVSQGDIEVKKIADHFIEIPKCDELLVPLIATVPLQLLSYHIALMRGCNVDQPRNLAKSVTVE

SEQ ID NO: 126060 - protein, 338 aa, Unknown
  Bacterial polypetide isolated from the Sargasso Sea
SRPIVVAKSNDGLVDKGEYRHFMQKEIQEQPTKISELMMGHLTKEGVSANIFGPTAPEIFSKINHVQIVACGTSYHAGLVAKHWMEAIAGISCSVDVASEFRYRNVVVKEGTLFVTLSQSGETADTLACLRDIIDSGYISSLAICNVPTSSLVRESDLVFLTRAGPEIGVASTKAFTTQLLSLLMLTLVLGREHGLSQAAENSINNSLRDLPKLLEEVMALEPKIIKMAEDFDDKEHALFLGRGIHYPIAMEGALKLKEISYIHAEAYPAGELKHGPLALVDDSMPVVAVAPNDDLLEKLHSNLEEVKARGGKLYVFGHTDAYHQGFAEKFIELPEIP

SEQ ID NO: 126061 - protein, 266 aa, Unknown
  Bacterial polypetide isolated from the Sargasso Sea
MCGIVGYLGKGTAQESLVDGLRRLEYRGYDSAGVAFHEGGEFSLSRETGRVENLANALRESSSSSSLGIAHTRWATHGAVTVSNTHPHLSQDGKFVLVHNGVIENFGTLKRFLSSKGISFSSETDSEVLCNLIAYHYSELPEDEDRFIDAVRLALPKCRGAYGIAVLCLDYPEVMIGARRGSPLVVGLGDEANFIASDASAFVGRAKEAVFLNDGEIAVLDKGGFRITTLEGQDAQAVTHPLDQILEEVELGDFDSYRKRRFRATN

SEQ ID NO: 126062 - protein, 115 aa, Unknown
  Bacterial polypetide isolated from the Sargasso Sea
AEGYPAGEMKHVPLALIEEGLPVIVIAPNDRYYEKTLSNTQEVIARGGKIFFITDNKKRLLSTNIRFRLRVPRVDKLLSPLLLTIPLQLLAYHVALLKNCDIDKPRNLAKSVTVE

SEQ ID NO: 126063 - protein, 366 aa, Unknown
  Bacterial polypetide isolated from the Sargasso Sea
MCGIIGIASNKSVTSNIINSLKRLEYRGYDSAGIATISKKNLNEKKCSGRVEELEKILFNSPAQGNIGIGHVRWATHGIPNEINAHPHSSEIVSVVHNGIIENSNLLKNKLEKEGYKFKSQTDTEVITLLITKFLKDSNPIDAVLKSLEYLEGSFALGILFKDQADIIIGARRGSPLAVGYSKNENYLGSDSYALKAMTNKISYLDDGEICILSKDNVEFFDSSKNKINKKILVLSEDKNETKLGDYKNFMSKEIFEQPTTVKNCLNEYLDKIRNDINLYDFPINPKKIDKIFLVGCGTAYHSCQVAKYWIEELTDLNVETEVASEFRYRKIKFSPNTLYIFVSQSGETADTAAALEIAKKNKMKT

SEQ ID NO: 126064 - protein, 496 aa, Unknown
  Bacterial polypetide isolated from the Sargasso Sea
MCGIIGATSSRSVGKILIKGLHAMEYRGYDSAGVALNQDSEVFRLRSLGKVSSLEELMINHKPKAKSGIAHTRWATHGAPSEENAHPHGSHNEIYIVHNGIIENHDEIREKLKEKGYKIASETDSELIAHLIHLNKTDSSSTLEALIKATKELKGAFSIAAISSEEKDKIYAAKQKSPLLIGKGIEENFVASDPLAIANITEKFYLLEDGDFAEITKDDIKIFNSNSKPVQREETKIDATPTSTSKGNYTHFMEKEIYEQPDALGNTINGRLGENDVLDNIFGLGSSDAFKKVKRIQFVACGTSLHAAKTARKWFEEICEMPCYIDFASEYRYRNPIVEDHTLFVTISQSGETADTLAALEYARAEKYAGIVTICNVPTSTMAREADWKIFTNAGPEIGVASTKAFTTQLAALLMLALSIAKSQDKNTDKRKQATQELRETPALVDQAFSLKENISQITQNISTKHNALFLGRGMYFSIAQEGALKLKEISYIHAE

SEQ ID NO: 126065 - protein, 428 aa, Unknown
  Bacterial polypetide isolated from the Sargasso Sea
MCGIVGIVSNKSVSASIIGALKKLEYRGYDSAGISTLSNNRINEQKCSGRVDNLEKILFQNPSDGDLGIGHVRWATHGIPNQINAHPHSSEAVSVVHNGIIENSDKLRDEYIKKGYSFKSQTDTEVITVMLTDFLKSEDLINCIHKTLEKLEGSFALGVIFKDFKNLVVGARRGSPLAVGYGHNENFIGSDSYALKSMTNKISYLDDGDFCLLYREKVEFYNSGKKKINKEILELSNEENIAEKGDYKDFMSKEIDEQSFTTKKCINEYLDKSRNEINIYNLPIDPKKINKIRLIACGTAYHSCLMAKYWIEENTSIDVEADIASEFRYRNVKLNTDDLYIFVSQSGETADTYAALEKCKKNNVKTCGIVNVVESSIARLADFVLPIHAGPEIGVASTKAFLGQMLVLYLLILKISKERVEIDKEIIK

SEQ ID NO: 126066 - protein, 156 aa, Unknown
  Bacterial polypetide isolated from the Sargasso Sea
MCGIIGIASNKPVSINIINSLKKLEYRGYDSAGLATLKDNLIDEKKCSGRVEELEKILFKNPSNGNLGIGHVRWATHGVPNIINAHPHSSEKVSVVHNGIIENSDELKKDLEEKGFKFKSQTDTEVITLLVTQFLENLKPLESVFKTLKKLKGSFA

SEQ ID NO: 126067 - protein, 351 aa, Unknown
  Bacterial polypetide isolated from the Sargasso Sea
YEQPKAIANAIEGRTAGGDVLDNIFGMDSSESFKGVKRIQFVACGTSLHAAKTARKWFEELSETPCYIDFASEYRYRNPLVEDDTLFVCISQSGETADTMAALNYAKDEKYLGIVTICNVPTSTMARESDWKIFTNAGPEIGVASTKAFTTQLAALLLLACSISKSKGINKDKRTDAIKDLINTPALVKEAFGLKKHIDDIVEKIADKKNALYLGRGVYFSIAQEGALKFKEITYIHAEAYPAGELKHGPLALVDEMTPVVALAPEDELVEKLVSNLEEVKSRGGTLYVFGNATSKIKIEKGKFMNMPDCGYYNAPIVYTIPLQILAYEVACSIGTDLDQPRNLAKSVTVE

SEQ ID NO: 126068 - protein, 264 aa, Unknown
  Bacterial polypetide isolated from the Sargasso Sea
MCGIVGITSTKNVSSSILNSLRKLEYRGYDSAGIATLERGLIKEVKCEGRVDALESNLSKKKLEGHVGIGHVRWATHGVPSTINAHPHSSDKVSVVHNGIIENSTILKKLLIKKGYLFKSQTDTEVIVHLITDYLKKNDLKNSIIKMLKRLHGSFALGIIFQDQPDLIVGARRGSPLAVGYGPNENYLGSDSYALKSMTNKITYLNDSEFCIIKKDNVEFFDEKGNKINKKVLELSKDDQEYEKGDYKHFMAKEIDEQPTTIKN

SEQ ID NO: 126069 - protein, 629 aa, Unknown
  Bacterial polypetide isolated from the Sargasso Sea
MCGIVALVGSQPAAPQLLEGLRQLEYRGYDSAGVATVTREGRLTCLRAKGKLVNLRQRVKAIGAPGQCGIGHTRWATHGKPEEHNAHPHRSADGGVAVVQNGIIENHRQLRDGLEAGGVAFQSETDTEVIPHLVSAELHRRLQNGEPPSGSTLLQAVQAVLPQLQGAYALAVIWEQAPGALVVARRAAPLLIGLGEGEFLCASDTPALAGFTRTILPMEDDEVALLSPLGVELYDGDGARQQRMPTLLTGMDHVADKREFRHFMLKEIHEQPETAALWVSRHLPAGLPASMPVALPFDEAFYAGIERIEILACGTSRHAALVGAHLLEQFAGLPTSVHYASEFRYAPPPLAPNTLTIGVTQSGETADTLAALAMEAQRRSAHPDPAYAPRQLGVTNRPESSLSRQVPHILDIGAGIEVGVAATKTFMGQLLAFYGLALAFAARRGSRSAADIQALVAELRMLPQQLQELVSLHDQRSEALAHRFAETQDVIFLGRGINYPIALEGALKLKEISYIHAEGYPAGEMKHGPIALLDAHVPVVSIAVPGTVFEKVLSNAQEAKARDARLIGVAPEGPDTALFDDLLPVPEVSEWISPLLTLVPMQLLSYHIAAHRGLDVDQPRNLAKSVTVE

SEQ ID NO: 126070 - protein, 559 aa, Unknown
  Bacterial polypetide isolated from the Sargasso Sea
EGRVDALEKNIIQTKISGSIGIGHVRWATHGKPSSINAHPHSSEDVSVVHNGIIENSTILKKLLENKGYKFKSQTDTEVIVHLVTDYLKKNNLKNTIIKVLKKLHGSFALGIIFKDQPDLIVGARRGSPLAVGYGPNEHYLGSDSYALKSMTNKISYLNDGEFCILKKDQVEFFDSDGTKVNKKILNLSKDDQNYEKGDYKYYMAKEIDEQPITLKNCVNEYIDKHNKEINIYNFPWKINEISSVILIGCGTAYHSCLVAKYWFEQNTSLDVSVDIASEFRYRKIKFKKDCLYIFVSQSGETADTFAALDLCKKNNVKTCAVVNVVESSIARDADLVLPIHCGPEVGVASTKAFLGQMLVLYLLCTKLSYEQKSINKKDYQKKIKDLLSLSKSAKNTLNIEDKIQTLGKDFANSKGSMFLGRGYSYPIALEGALKLKELAYVHAEGYPAGEMKHGPLALIEEGMPVVVIAPRDEHYKKTISNMQEVISRGAKVLLITNKSTDEIYSENIWEQIEVDAISDELIPFLTTIPLQKLAYYSALDKGYDIDKPRNLAKSVTVE

SEQ ID NO: 126071 - protein, 125 aa, Unknown
  Bacterial polypetide isolated from the Sargasso Sea
LKLKEISYIHADSYPPAEMKHCPIALVDKNMPNFFIVPKDKTYDKIISNIEEIKSRKEKIIIITDSKDKILRDLANDLILVPKTNHFMFCHLATIVLQLFAYYIAVGKNLNVDQPRNLAKSVTVE

SEQ ID NO: 126072 - protein, 606 aa, Unknown
  Bacterial polypetide isolated from the Sargasso Sea
MCGIIGISSNKSVSANIINSLKKLEYRGYDSVGVATLFDGEINEVKSEGRVDNLEQNFDLKSLKGNIGIGHVRWATHGVPNSINAHPHSSDNVSVVHNGIIENSTILKKYLINKGHTFKSQTDTEVIVHLITENLKIMELEEAITKTLKQLHGSFALGIIFKDIPDLIVGARRGSPLAVGYGPNENYLGSDSYALKSMTNKITYLNDGEFCLVKKDQVNFYNEEGKKINKKILELSSNESNYDKGDFKHFMAKEIEEQPATIKTGIKEYLDSVNNEINIFNFPWKINEIKSITLIGCGTAYHSCLMAKYWFEELTTLDVNIDIASEFRYRKNRFKKDSLYIFVSQSGETADTYAALDLCNKNNMKTCAVVNVIESSIARDSNFVLPIHCGPEIGVASTKAFLGQILVLYILALKIGSISGQIDKKNYQEKIKDLKNLPSLIEKTLLVDNDIQAISSTFNEAKGSMFLGRGFSFPIALEGALKLKELSYVHAEGYPAGEMKHGPLALIEEGMPVVVLAPRDSYYKKTISNMQEVVARGAKVLLITNKSKDEIVSENIWETIEVENTNDDLLPFLLTVPLQKLAYYSALKKGYDIDKPRNLAKSVTVE

SEQ ID NO: 126073 - protein, 338 aa, Unknown
  Bacterial polypetide isolated from the Sargasso Sea
YVDNVNKEINIFNFPWKIDEIKTITLIGCGTAYHSCLMSKYWLEELTNLDVNIDIASEFRYRKNRFKKDSLYVFVSQSGETADTYAALDLCNKNKMKTCAVVNVIESSIARDSNFVLPIHCGPEIGVASTKAFLGQILVLYLLALKLGSLRNEIEKSKYQQKINDLKDLPGLIEKTLLHDNDIQKISSTFNDAKGSMFLGRGFSYPIALEGALKLKELSYVHAEGYPAGEMKHGPLALIEEGMPVVVLAPRDNYYKKTISNMQEVIARGAKVLLVTNKSKDEIVSENIWETIEVESSNEDLLPFLLTIPLQKLAYYSALKKGYDIDKPRNLAKSVTVE

SEQ ID NO: 126074 - protein, 177 aa, Unknown
  Bacterial polypetide isolated from the Sargasso Sea
MCGIIGAASSRSVETILVNGLKKMEYRGYDSAGLVLNREKNAFQLRTLGKVSNLEELMIKERPKANSGIAHTRWATHGVPSETNAHPHGSNESIYIVHNGIIENHDQLRDRLASDGYKINSETDSELIAHLIHSNKEKGKNTLEALIETTKELDGAYSIAVIDTEEKGKIFAAKQKS

SEQ ID NO: 126075 - protein, 126 aa, Unknown
  Bacterial polypetide isolated from the Sargasso Sea
MCGIIGIASNKPVSVNIINSLKKLEYRGYDSAGIATLKNKIIDEKKCSGRVDELEKILFKNPSDGNIGIGHVRWATHGIPNVVNAHPHSSENVSVVHNGIIENSDELKKELEIKGLKFKSQTDTEK

SEQ ID NO: 126076 - protein, 363 aa, Unknown
  Bacterial polypetide isolated from the Sargasso Sea
DKGEYKHFMYKEIVEQPETVKNCIDEYVDSLKKNINILNFPIDPQNINKIVLIGCGTAYNSCLTAKYWFEELTSIEVEIDIASEFRYRKLKFNSNNLYIFVSQSGETADTAAALNICKKNNVKTCSIVNVIESTIARDSDWVLPIHAGIEIGVASTKAFLGQLTVLYVLCLKLAFVRKDIDEDIYVKNISNLKKIPEAIKKCIKNESDIQLMAKEFISAKGSMFLGRGSSFPIALEGALKLKELSYLHAEGYPAGEMKHGPLALIEEGLPVIVIAPKDKYFEKTISNMQEVIARGGKILFITDNKKDSLNENIRFGLRVPYIDNLLSPILLTLPLQMLAYHVALLKNCDVDKPRNLAKSVTVE

SEQ ID NO: 126077 - protein, 608 aa, Unknown
  Bacterial polypetide isolated from the Sargasso Sea
MCGIIAAASNRNVGKLLVQGLHKMEYRGYDSAGIALHQNDQIAHLRTLGKVKLLEEKMIAEKPKSKLGIAHTRWATHGEPSEQNAHPHKSNDRVYIVHNGIIENYLELREYLKDQGYVFSSQTDSELIAHLLDFFLNQGNSMIDSMYKTKDKLDGAYAIAAIDREDDSNIVIARSKSPLLIGLGTDEYLAASDPLAIAQLTNQFIFLEDGDVAEISSEKYAIFDENKKAVDREITEIDISSQATSKGDFKHFMEKEIYEQPQAILNTIDGRVGGDDVLDNIFGLGSSDIFEKVKRIQVVACGTSLHAGRVAANWFSAISELPTQIDYASEYRYRNPHVDEDSLLVTISQSGETADTLAALRYAKEKDYLSTLTICNVPTSSLARESDYSIFTNAGPEIGVASTKAFTTQLAALMLLALSLAKSRGKNPKLRTRVITAMRSLADTVEETLKLKDAILEIAPEIANKDNALFLGRGIFYPIAKEGALKLKEISYIHAEAYPAGELKHGPLALIDEDMPVIALAPESEIAEKLVSNLEEVKARGGTLYVFSDPSISMDLTSGRLINMPKCDFLLTPIIYTIPLQILSYEVALLRGTDIDQPRNLAKSVTVE

SEQ ID NO: 126078 - protein, 356 aa, Unknown
  Bacterial polypetide isolated from the Sargasso Sea
MCGIIGAASSRSVGKILVNGLKRMEYRGYDSAGLVLNQDELAFKLRTLGKVSNLEDAMIEQRPKADSGIAHTRWATHGIPSETNAHPHESNGIIYIVHNGIIENHDELRERLANEGYEIQSETDSELIAHLIHSNKGKGKNTLSALIETTKELDGAYSIAVIDTEEKGKIFAAKQKSPLLAGKGIEENFITSDPLAIAGLAESFYLLEDGDFAEITKDEIKIVGTNGEPVSREETIIDTNMKEASKDGYKHFMEKEIYEQPQAIANAIEGRTADGEVLDNIFGLGSSEAFKGVKRIQFVACGTSLHAAKTARKWFEELCETPCYIDFASEYRYRNPLVEDDTLFVCISQSGETADT

SEQ ID NO: 126079 - protein, 609 aa, Unknown
  Bacterial polypetide isolated from the Sargasso Sea
MCGIVGAVAQRDIAEILLEGLRRLEYRGYDSAGLAVVDNAGHMSRVRRLGKVQMLAQAVEEHPLHGGTGIAHTRWATHGEPSEGNAHPHVSEHIVVVHNGIIENHEPLREELKARGYTFVSETDTEVIAHLMHWELEQGGTLREAVLRAIPQLRGAYGTVIMDSRDPSTLLAARSGSPMVIGLGMGENFIASDQLALLPVTRRFIFLEEGDIAEVTRRSVTVFDTKGVQVKRQEIESNLQYDAGDKGTYRHYMQKEIYEQPNAIKNTLTGRISHGEVDLSELGTHANEMLSQVEHIQIVACGTSYNSGMVSRYWFEALAGVPCDVEIASEFRYRKSAVRRNSLMITLSQSGETADTLAALRLSKELGYLGSLAICNVASSSLVRESDLSLMTKAGTEIGVASTKAFTTQLTVLLLLVAKLARLKGLDAAVEHDIVHGLQALPNRIEQMLSQDKRIEALAENFSDKHHALFLGRGDQYPIALEGALKLKEISYIHAEAYAAGELKHGPLALIDAEMPVIVVAPNNELLEKLKSNIEEVRARGGQLYVFADGEAGFNSSDNMHIIEMPHVEEVIAPIFYTVPLQLLAYHVALIKGTDVDQPRNLAKSVTVE

SEQ ID NO: 126080 - protein, 134 aa, Unknown
  Bacterial polypetide isolated from the Sargasso Sea
MCGIIGISSNKPVSASIISSLKKLEYRGYDSAGIVTLFEGEIKEVKSEGRVDSLEQNFDLKNLKGNIGIGHVRWATHGVPNSVNAHPHSSHNVSVVHNGIIENSTILKKYLTTKGHVFKSQTDTEVIVHLITEN

SEQ ID NO: 126081 - protein, 281 aa, Unknown
  Bacterial polypetide isolated from the Sargasso Sea
EFRYRKNRFKKDALYIFVSQSGETADTFAALDLCNKNNMKTCSVVNVVESSIARESKFVLPIHCGPEIGVASTKAFLGQMLVLYILCLKFAQMRKEIKKNIYMEKIKSLFLLSKLTKQSLETDSKIQSVCSSFSDIKGSMFLGRGYSFPIALEGALKLKELSYVHAEGYPAGEMKHGPLALIEDGLPVVVLAPRDEYYKKTISNMQEVIARGAKVLLITNKSKDEIHSENIWEKIEVENTSEDLLPFLITIPLQKLAYHSAFKKGYDIDKPRNLAKSVTVE

SEQ ID NO: 126082 - protein, 132 aa, Unknown
  Bacterial polypetide isolated from the Sargasso Sea
IALEGALKLKELSYVHAEGYPAGEMKHGPLALIEDGMPVVVLAPRDSYYKKTISNMQEVIARGAKVLLITNKSKDEIVSENIWETIEVENTNDDLLPFLLTIPLQKLAYYSALKKGHDIDKPRNLAKSVTVE

SEQ ID NO: 126083 - protein, 362 aa, Unknown
  Bacterial polypetide isolated from the Sargasso Sea
HSTESISVVHNGIIENSADLKKQLINKGHKFKSQTDTEVIVHLLVEYLKNNKLNEAIIKTLNDLDGSFALGIIFKDMPELIIGARRGSPLAVGYGPNENYLGSDSYALKSMTNKITYLNDGEFCIIKKKDIDFFDSKGKKVNKKILHLSSGDQNYEKGEYKHFMAKEIDEQPITIKNCVNEYIDKINNEINLHNFPWKKDEIKSIKLIGCGTAFHSCLVGKYWFEQLTNLDVQVDIASEFRYRKNKFSEDCLYIFISQSGETADTYAALDLCNKNNMKTCSIVNVVESSIARDSKFVLPIHCGPEIGVASTKAFLGQMLVIYLLCVKISFFKGDINKHKYIEKIKNLKLLSDLVNKTISAEN

SEQ ID NO: 126084 - protein, 422 aa, Unknown
  Bacterial polypetide isolated from the Sargasso Sea
FLASDASPIIEHTRNVIYLDDDEFVIIDKAGYSISNTKSKKIVSKSLTKIDLSIEEIEKGKFPHFMLKEIHDQKHSISDTMRGRLNLNDGTTNLGGIVNYIPNILSASRIYITACGTSWHAGLIGKHLIEEYARVPVHVEYASEFRYRNAIIDANTIVIAISQSGETADTLAALKKAKELGAITLGICNVVGSAISRETDGGIFTHAGPEIGVASTKAFTSQVTVLIMFALNIGRKKGVSKNRGKELISALKTIDQDVASVLRQIRNIKEVAKHTAAADNYLYLGRGINFPVALEGALKLKEISYIHAEGYPAAEMKHGPIALIDENMPVVFIAPYDDTFNKVLSNIEEVKARGGIVISITDKINNSLKKLSDFVLIAPQTHKYVFPITCSIILQMLAYELAVCRKCEIDQPRNLAKSVTVE

SEQ ID NO: 126085 - protein, 382 aa, Unknown
  Bacterial polypetide isolated from the Sargasso Sea
GNAAKLKHREIDSNSYTNDLGGYNHFMEKEIFEQPDAISKSIEGRLGKNETQEGIFGSGFEEAVKDVTNIQIIACGTSFHSGRIFEYWSHKFLGINCRVDYGSEYQYQEPIKTKKTLLVTISQSGETADTLSSLKFAKKTGSPLTLTICNVANSSLCRESDYTLLTNAGPEIGVASTKAFVTQLACLNLLLLTLMRVHNQTPNARKKITEALKDLPKHIDKTLKMTDVYKSTAKLLFKRSSALFLGRGLYFPIAREGALKLKEISYIHAEAYPAGELKHGPLALIDRDMPVIALVPDNEHLDKIQSNIQEVAARKGKVVTIGPLGKTKITKDGGHIKIPKTLDLLNPIISVVPMQLISYYTALLKGTDVDKPRNLAKSVTVE

SEQ ID NO: 126086 - protein, 201 aa, Unknown
  Bacterial polypetide isolated from the Sargasso Sea
MCGIIAASTERSVGKLLIQGLYKMEYRGYDSAGIAMHTEDRVAHLRALGKVKLLEDLMINEKPKGKVGIAHTRWATHGEPSEVNAHPHQSNERIFIVHNGIIENYLELKDELADKGYAFTSKTDSELIAHLLDSYLEAGSSLLEATKQLKDKLQGAYAIAALDHSDPNTLVLARHRSPLLIGLGEDENFAASDPIALADLT

SEQ ID NO: 126087 - protein, 603 aa, Unknown
  Bacterial polypetide isolated from the Sargasso Sea
EIVGIVSNKSVSASIIGALKKLEYRGYDSAGISTLNNDRINEQKCSGRVDNLEKILFQNPSDGDLGIGHVRWATHGIPNQINAHPHSSDVVSVVHNGIIENSDKLRDEYSKKGYSFKSQTDTEVITIMLTDFLKSEDLINCIHKTLEKLEGSFALGVIFKDFKNLVVGARRGSPLAVGYGHNENFIGSDSYALKSMTNKISYLDDGDFCLLYREKVEFYNSEKKKINKEILELSNEDNIAEKGDYKDFMSKEIDEQSFTTKKCINEYLDKSRNEINIYNLPIDPKKINKIRLIACGTAYHSCLMAKYWIEENTSIDVEADIASEFRYRNVKLNKDDLYIFVSQSGETADTYAALEKCKKNNVKTCGIVNVVESSIARLADFVLPIHAGPEIGVASTKAFLGQMLVLYLLILKISKERDEIDNENYKKLISDLIKLPDFVKQTLSKQKDIQIIARDFVTAKGTMYLGRGYSYPIAMEGALKLKELSYIHAEGYAAGEMKHGPLALIEDGMPVIVLAPKDRYFEKTISNMQEVVARGGKVIMITDDTSTTMNENIRFKFQIPKSNSTLNPFLLCIPIQFLAYHVALLKNCDIDKPRNLAKSVTVE

SEQ ID NO: 126088 - protein, 521 aa, Unknown
  Bacterial polypetide isolated from the Sargasso Sea
HGVVSKNNAHPFANDDLTLVCNGIIENYRKIQNRFVEIPKNLKSDTEISFYFLTYLVNKYKNPDEAIRVFRSVIKGNFAFVIFIKKNNCFYLLKNGSPIALSHNKGSSFICSDSSILTEYSNKIYHLKDGDIIKIQQSKISSLNKAKIIFEKNEIKQNPYDKGKYQHYMLKEIHEQPDVLKTTQKNYSEEFFHDFESKYKSLFLNKKVIFVGCGTAYHACLVGEYYFNKFTNLDTSSELASELRYKKINKEDKILFIFISQSGETMDTLMALKYVKKNKHSSIVITNSLQSSMVREADVTIPTYALKEVGVASTKAFTCQILSLANLSIEIGKMTNAITIRDYNKNIKILKLLPSKLKKLVKDFTSKAKKISKKLSQSDTCYFIGRNIVYPIALEGSLKLKEISYMHSEGFPGGEMKHGPIALIDKKSLTICLSPDNELYEKSISNAEEIVARNGKVIILSSVDNSDKSTNTHHMILPKENFIDTPFIYTIPLQLISYYFALSEGTDIDQPRNLAKSVTVE

SEQ ID NO: 126089 - protein, 517 aa, Unknown
  Bacterial polypetide isolated from the Sargasso Sea
SSEIVSVVHNGIIENSDQLKKELEKSGKVFKSQTDTEVITVLLTEKLKELDPLNAVFKTLDMLKGSFALGIIFKNFNDFVIGARRGSPLAVGYSNNENYIGSDSYALKSMTNKISYLDDGDVCVLSKDDVKFYNNNKDKINKEIFTLSEDKSSISKGNYKNFMIKEIFEQPFTTKACLKEYIDKIREEINFYNLPIDPNKINKIVLIGCGTAYHSCLVAKYWLEEFTSLSIETDIASEFRYRKVRFDKNAFYIFISQSGETADTYAALDLCRKKNVKTCSVVNVVESSIARHSDCVLPIHAGPEIGVASTKAFLGQMLVLYLLSLKIAETRKDIGQEEYKKKITELKQIPKLIKETLEGEEKIQLIAKDIFNSKGSMFLGRGLSFPIALEGALKLKELSYLHAEGYPAGEMKHGPLALIEDGLPVIVVAPKDKYFEKTLSNMQEVIARGGKVLLITNSGGKVISENIRFQIDLPVSSSTLTPFLFTIPLQLLSYHVALFKKCDIDKPRNLAKSVTVE

SEQ ID NO: 126090 - protein, 512 aa, Unknown
  Bacterial polypetide isolated from the Sargasso Sea
PHSDNSEDFAIIHNGIIENYAEMKDSLLKENYSFKSDTDTEVVAIELSKQWNGNLLETVVKVTKDLEGTYALVVTTTKQENTIVAGRMMSPLVLGVGEGEVFLASDSAAILEHTNKMIFLENGDFVEIHDGNYKLFDADLNDIEREVQIIDWEVSEAEKSGHDHFMYKEILEQGEVIERTITGRLEEGSPEIPITKEKAQKYEKIWIVACGTAYHAGLFGKDLFEKVLGVPVSVELASEFRYREPIIGENDLGIVISQSGETMDTIAATELLKENRSHVLALVNVVGSSLARMADSVFYLHVGPEIGVASTKAYLGMLVGQLLLAKHWDSNNKLDVSFEEIKGLPLLIEETLKCEPEVKEIAESIHKQNDVYFIGRGLDYALAAEGALKLKEISYLHAEALAAGELKHGTLALIEEGTPIIVTASQYHLLDKTTSNVQEVKARGAHVIAIGNSSSEKLENISDKYVTLPDSNEILSTIISIIPLQFIAYHVANKRGESIDQPRNLAKSVTVE

SEQ ID NO: 126091 - protein, 374 aa, Unknown
  Bacterial polypetide isolated from the Sargasso Sea
IYTVSDDENISDKGDYKNFMSKEIFEQSTTIKKCLNEYTDSLKKDINIYNFPIDPKKINKIVLIGCGTAYHSCLVAKYWFEELTSLDVEIDIASEFRYRNLKFNSSNLYIFVSQSGETADTAAALDICKKNKVKTCSIVNVVESTIARNCDWVLPIHAGPEIGVASTKAFLGQLIVLYILTLKLAFTRGDIDKKIYDSNLQNLQKLPEAIDSTLKLESEIQLMAKEFLDAKGSMFLGRGNSFPVALEGALKLKELSYLHAEGYPAGEMKHGPLALIEEGLPVIVIAPNDRYYEKTLSNTQEVIARGGKIFFITDNKKRLLSTNIRFRLRVPRVDNLLSPLLLTIPLQLLAYHVALLKNCDIDKPRNLAKSVTVE

SEQ ID NO: 126092 - protein, 475 aa, Unknown
  Bacterial polypetide isolated from the Sargasso Sea
MTHNIPVNQNLVDMEYAVRGPIPLRAMDLQKEGRTIYACNIGNPQALKQKPISFYRQVIALLESSNIQRERNLTKLAKNNSDLFKDSGISIISKEIIDYSEEFLHNSRTGMGAYTESKGPAFIREEIAAFIDSRDKNEIASDPDSIFLTDGASDAVRRILELLITGSNDGIMIPIPQYPLYSATIKRCGGVQVGYYPDEEKDWALTPDILEESYQKAISEGINVKSIVIINPGNPTGSILDKNSIDGIVNFVEKYDLSIIADEVYQENLYGGLFISMSRAIGSRDIPLFSLHSISKGFSGECGHRGGYMELRNMPIMNNSNVSLSELILKQASVSLCSNTVGQAIVYMMVKPPEIGSEAHDIYIEEKNTILSELEAKAALIKESFKQMEGMQCFGRTGAMYLFPRMNFLPNDITDFDYCMRLLEETGICTVNGGGFGQKNGTNHLRIAFLPPIDSITRFLPDWIRFHNRFIQSPY

SEQ ID NO: 126093 - protein, 276 aa, Unknown
  Bacterial polypetide isolated from the Sargasso Sea
FSAHAQAAVHVEDRGYQFGDGVYEVVSVLNKRPIDADGHLDRLEHSLRELRIDWPVTRSVLNVLIRQILRRNGIKNGIVYIQITRGVAPRDHKFPKNAAPSLVMTASKVNHLNAPRFQDGAKVVTIPDIRWTRCDIKSTSLLPNCLGKQTAAEAGAYEAWQVTDGGFITEGTSSNAWIVTDAGVLVTRAPTSKILNGITRISILKIAEEEGIDFVERPFSQSEALSAREAFTTSATSFVTPVVQIDDKIIGDGSPGRLTKELMKHYENYTDTLPEL

SEQ ID NO: 126094 - protein, 189 aa, Unknown
  Bacterial polypetide isolated from the Sargasso Sea
MLSSIEQKTSDLTSLSDKIWAAAEVAFREDKSAEYLIDYAEANGLIIEKGLAGMPTAFTATYGEGKPVIGIIGEFDALPGLSQTTVPYRDELIKGGAGHGCGHNLFGTASLGAAIAIKELIEKGHLSGTVKFFGTPAEEKFFGKLWMIREGVFDDVDICMDWHPADNTEANVQPSLALVDFMVEFTGQS

SEQ ID NO: 126095 - protein, 315 aa, Unknown
  Bacterial polypetide isolated from the Sargasso Sea
HAFKEFAKSSESSLRNLLNISEEYSVLFLQGGATHQFALIPMNFSKNGVLDYLVTGAWSKKASEYASKISDVNIVSDSSSNNFTDVADLNSWNISDNADYFFYCANETVHGLEIHDPIETNSPVICDMSSTIASRHIDVNKYDLIFAGAQKNLGIAGVTIVIVKNQLLSDVNTELLPIFDYSAHANEASMLNTSPVFSWYVSGLVFDWIHEQGGVEEMARINKLKSDLLYDYIDQSEFYNNPVSKPYRSWMNIPFTLSRDGLDDKFLSSAEELGLLNLKGHRTVGGMRASVYNAMPIEGIKRLISFMDEFAKLHE

SEQ ID NO: 126096 - protein, 232 aa, Unknown
  Bacterial polypetide isolated from the Sargasso Sea
MPRKFNFGAGPATMPESVLTEVQEELLDWNGLGLSVMEISHRSPEFIEIAKQAESDFRDLLSISEEYAVLFTHGGATMQNAMVPLNLASPEGNVDYVNSGHWAKRSIKEAERYTNVNIAATSEDEDFKYFPAQDSWKFSDNSSYVHYTPNETIGGLCLRTLQNCEIPVVADYSSGILSEPIDVSKFSLIYGGAQKNIGPSGLGFVIVKKDLLGKAQSFTPNLLNYTLINEGE

SEQ ID NO: 126097 - protein, 282 aa, Unknown
  Bacterial polypetide isolated from the Sargasso Sea
NRVFNFSAGPAALPEDILNEIKDELLDFNGIGSSIIEISHRDKIFIEVAQKAEQQVRNLLSVSDDYDVLFLQGGATLQFSMIPLNFKHLGATASYAEVGSWSAKAIKEASKICDLRICSSAKANNFTNIDDFSEWSVDQSDAYVHYCKNETIQGIRITQSPSFGKPAFVDMSSCLFSEKIDIDQYDFIYACAQKNFGPSGITLVIAKKELLAQSSTELPNILKYDAHAAQNSMLNTPNTFGWYVAGKMFDWYEANGGVDKMEERSISRTNSVYEVIDASDFY

SEQ ID NO: 126098 - protein, 200 aa, Unknown
  Bacterial polypetide isolated from the Sargasso Sea
HGLEIHDPIETKSPVICDMSSTIASRPIDVNKYDLIFAGAQKNLGIAGVTIVIVKNKLLSTVDTELLPMFNYSAHANEASMLNTSPVFSWYVSGLVFDWIHEQGGVEEMARINKLKSDLLYDYIDQSEFYNNPVSKPFRSWMNIPFTLPRDGLDDKFLSSAEELGLLNLKGHRTVGGMRASVYNAMPIEGIERLVSFMDE

SEQ ID NO: 126099 - protein, 259 aa, Unknown
  Bacterial polypetide isolated from the Sargasso Sea
AWSKKASEYANKVANVNIVSDSSSNNFTNVADPKKWNISDDPDYFFYCANETVHGLELHNPIESDSPVICDMSSTIASRPIDINKYDLVFAGAQKNLGIAGLTILIIKNKLLSDCNKELLPMFDYSAHAEEASMLNTSPVFSWYVSGFIFDWITEQGGVRMMGKVNMEKSSLLYNYIDESSFYSNPVSKPYRSWMNIPFILARDDLENDFIQSAEDEGLFNLKGHRTVGGMRASVYNAMPIEGIKKLIAFMDDFAKLHE

SEQ ID NO: 126100 - protein, 230 aa, Unknown
  Bacterial polypetide isolated from the Sargasso Sea
LEISHRSKEYKEIMEKLKINLTNLFNIPDNYFILLLQGGATYQNSILPYNYGFQNNIGCLVSGEWGKKTYEDFGLVKETEILNLDDSKIEDFLSKENSKYFKNLDYLHVTSNETINGIQIRDFKNINHPALLVDMSSDIGSYKFDWDNLTYIYAGAQKNMGIPGVTICIGDKANLPNIENPSYLNLKKLSENDSVLNTPSTFSVYILHLVSEWMIEAGGVDFFEKQSIKH

SEQ ID NO: 126101 - protein, 163 aa, Unknown
  Bacterial polypetide isolated from the Sargasso Sea
MVHKKFRKPGVTICIFKKDFIEENDLTSYMSAQNHLEKDSAYNTPPTFSIYVMLKVLEWIAEFGGLEKIQSNNKIKADSLYNILDQNSEKFVLNVPKEFRSLSNIVFDFKDKDKTSSFLSSSTKKGFVGLNGHRSIGGIRVSNYNSVTTTMMNDLITHLKGFI

SEQ ID NO: 126102 - protein, 283 aa, Unknown
  Bacterial polypetide isolated from the Sargasso Sea
CRHVPGLYEELEQLQGRQESCKKALVDFMDGKRRIFARFYFVSEADLLDILSNGSQPKKILKHVDKVLLATKQLKLDESKGGDRPTACGYVTGVGAEAMDYEPGVPLEGKVEIYFQDCLLAQKRTLRAHLGRAVPRFGEFIKKSKTGKGRAEWVVYSNNKDRDPFISEFKFFDAAQIVLLVAAMEYVKGVEAAFEAITADPGALKGYLQKVVGELTDLITVTQDTTLSKETRKRVMCMITLDAHARDIVDGLCRQGVHEKEHFAWMSQLKQRYVSPEEREQRG

SEQ ID NO: 126103 - protein, 90 aa, Unknown
  Bacterial polypetide isolated from the Sargasso Sea
SKLLYDVLDDSELYKAVADPENRSICNVTFRLDDDEMEKRFLEQSLNEGLYALKGHRDVGGIRASIYNSMPLEGVKALADFMQDFETCET

SEQ ID NO: 126104 - protein, 33 aa, Unknown
  Bacterial polypetide isolated from the Sargasso Sea
MTRHFNFCAGPAALPTAVLERARDEMLDYHGRG

SEQ ID NO: 126105 - protein, 72 aa, Unknown
  Bacterial polypetide isolated from the Sargasso Sea
PVPESDRSQMNVVFRHKDHDEAFEKRFISESKIAAFDGIKGHRSVGGLRASIYNAQTKENIIQFAHFIKTFS

SEQ ID NO: 126106 - protein, 109 aa, Unknown
  Bacterial polypetide isolated from the Sargasso Sea
MRKWNFSAGPAIVPESVLKETQSELLEFKSTGMSVMEMSHRSKDYGEIANAARDDLIELLDVPDSHDVLFLQGGATLQFGLIPMNFAHLGIPEYLETGTWSTKAIKECS

SEQ ID NO: 126107 - protein, 196 aa, Unknown
  Bacterial polypetide isolated from the Sargasso Sea
NINHPSLFIDMSSDFGSYNFEWENISYIYSGAQKNMGIPGVTICVGKNEVLNNTVNPSYLDLKKLVENDSVYNTPPTFSVYVLYLVTEWMLNCGGIKYFEEKSISSSELIYRQLAEHGKHIILPVSEYARSRSNVVFNFNDPSLEEDFFKKAEEENILGIKGHRSVGGVRISLYNAINQEMIDYLNKFISRFFEKI

SEQ ID NO: 126108 - protein, 58 aa, Unknown
  Bacterial polypetide isolated from the Sargasso Sea
MTSTTTSRKFNFSAGPAVLPESVIEQAQQDIWDLDGTGIGLLEHSHRGKAITEVLTKR

SEQ ID NO: 126109 - protein, 199 aa, Unknown
  Bacterial polypetide isolated from the Sargasso Sea
PIESDSPVICDMSSTIASRPIDINKYDLVFAGAQKNLGIAGLTILIIKNKLLSVCNKELLPMFDYSAHAEEASMLNTSPVFSWYVSGLIFDWITEQGGVGMMGKVNMEKSSLLYNYIDESSFYSNPVSKPYRSWMNIPFILARKDLENEFIQSAEDEGLFNLKGHRTVGGMRASVYNAMPIEGIKKLIAFMDDFAKLHE

SEQ ID NO: 126110 - protein, 173 aa, Unknown
  Bacterial polypetide isolated from the Sargasso Sea
FSYIFAGCSKKFWVYLGVTICIFDKDFIQKEDLPSYMNINNHIDKNSTFNTPPTFSIYVMLKVLEWIERNGGLEEFERNNINRANKIYNFLDNNLDDLTPLAPKEFRSTSNIVFDFKDKKKTKIFLEKSYENKFLGLSGHRSVGGIRVSNYNSVTDEMISDFLIFLEKFISSN

SEQ ID NO: 126111 - protein, 225 aa, Unknown
  Bacterial polypetide isolated from the Sargasso Sea
ASDRGVLLRLTTTVGMAYLPTGFAFGVLATQAGLSPAVVIAMSIFIFAGALQFAAVPLLSVATGLGAFAMTTLLINLRHVLYAIPLIEHLPARRWQRAYIVAALTDENYSVLTTLPTDKRQQFAMAVTLIHHVYWIAGTVLGVLLGQKVADWIPNLDFALPSLFTILAIEQYLSQRRLTPALIGVLAYFAATRMATNYLLITALGFGLATLLARALVRGNAVEAS

SEQ ID NO: 126112 - protein, 63 aa, Unknown
  Bacterial polypetide isolated from the Sargasso Sea
YNFSFGQERLLQKFLSESEKEGLFALKGHASVGGIRASIYNSMPLDGVRQLADFMKEFERKNG

SEQ ID NO: 126113 - protein, 294 aa, Unknown
  Bacterial polypetide isolated from the Sargasso Sea
YGLHIGEGKPVIGIIGEFDALPGLSQTADSFRNELTEGGAGHGCGHNLFGTASLGAAVAIKELIEKGDLTGTVKFFGTPAEEKFFGKLWMIREGVFDDVDITMDWHPADHTEANVQPSLALVDFMVEFTGQSAHASADPWNARSANDALELYTSGINAYREHVKPSVRMHYHIQDAGQVVNVVPDYSRIWVRVRDITKEGLQPVYDQVRRMAGGAAIMANVEHKVSLISGIHDLLPNRTGGAIMQKNLEILGDIQYTQDEIDFALDMQKANGKPQIGIDGKIRPLRETLESPGG

SEQ ID NO: 126114 - protein, 244 aa, Unknown
  Bacterial polypetide isolated from the Sargasso Sea
AAVAIKELIEKGDLKGTVKFFGTPAEEKFFGKLWMIREGVFDDVDICMDWHPGDNTEANVQPSLALVDFMVEFTGQAAHASADPWNARSASDALELYTSGINAYREHVRPSVRMHYHIQDAGQVVNVVPDYSRIWVRVRDITKEGLQPVYDQVRKMAGGAAIMANVDHKVSLISGIHDLLPNRTGGAAMQKNLEVLGDIEYSQEEIDFAIEMQKANGKPTLGIDGKIRPLRETLESPGGGSTDV

SEQ ID NO: 126115 - protein, 172 aa, Unknown
  Bacterial polypetide isolated from the Sargasso Sea
MVYAGLQKNLGPSGLALVLIREDLLGFALPQTPKLLDYQLVHAQRSLANTTSVFSIYVTLKMLRWVEKQGGVAVMEQRNREKSKLLYDVLDHSKLYKAVAHPENRSICNVTFRLDDDEMEKRFLEQSLNEGLYALKGHRDVGGIRASIYNSMPLEGVKALADFMQDFERRET

SEQ ID NO: 126116 - protein, 137 aa, Unknown
  Bacterial polypetide isolated from the Sargasso Sea
MQAVTEKFMATVADRVFNFSAGPAVLPLPVLEKAQGELLALPGVGSSVLEISHRSKAFDGILDRTLAGLKSLLGIGEDYEVVLLQGGASLQFSMVPMNFLAGQSGAANYILTGTWGKGGLKEASRIGETHIAWDGST

SEQ ID NO: 126117 - protein, 304 aa, Unknown
  Bacterial polypetide isolated from the Sargasso Sea
MNSLEQKSSALISVSDNIWEAAEVAFREEKSAEYLIEYAEENGLKVEKGLAGMPTAFTATYGEGKPVIGIIGEFDALPGLSQTTVPYKNELVAGGAGHGCGHNLFGTASLGAAVAIKELIEKGDLKGTVKFFGTPAEEKFFGKLWMIREGVFDDVDICMDWHPGDNTEANVQPSLALVDFMVEFTGQAAHASADPWNARSASDALELYTSGINAYREHVRPSVRMHYHIQDAGQVVNVVPDYSRIWVRVRDITKEGLQPVYDQVRKMAGGAAIMANVDHKVSLISGIHDLLPNRTGGAAMQKIF

SEQ ID NO: 126118 - protein, 253 aa, Unknown
  Bacterial polypetide isolated from the Sargasso Sea
MNSLEQKSSALISVSDNIWEAAEVAFREEKSAEYLIQYAEENGLKVEKGLAGMPTAFTATYGEGKPVIGIIGEFDALPGLSQTTVPYKNELVAGGAGHGCGHNLFGTASLGAAVAIKELIEKGDLKGTVKFFGTPAEEKFFGKLWMIREGVFDDVDICMDWHPGDNTEANVQPSLALVDFMVEFTGQAAHASADPWNARSASDALELYTSGINAYREHVRPSVRMHYHIQDAGQVVNVVPDYSRIWVRVRDIT

SEQ ID NO: 126119 - protein, 216 aa, Unknown
  Bacterial polypetide isolated from the Sargasso Sea
MHLTSNETINGVQLREFNKIPHDSLLIDMSSDIGSYSFEWDNLAYVYAGAQKNMGIPGVSICIGNEKYLNSEDNSRYLNLGQLVEKNSLLNTPPTFSIYVLKLVTDWMIEMGGIKYFEEKSIRQSSRLYEQLQTYEEFLILPVNDYSKSRSNIIFKFLNEDLEKKFLIEAIEKGILGLNGHRSEGGIRISLYNSVTDEMVDYLSEFMDKFFAGNGK

SEQ ID NO: 126120 - protein, 71 aa, Unknown
  Bacterial polypetide isolated from the Sargasso Sea
MRQWNFCAGPAAISEEVILEVKSELPEYGTAGASIMEISHRSDVFMEVAYEAKKDLIEILNIPDDYDVLFL

SEQ ID NO: 126121 - protein, 378 aa, Unknown
  Bacterial polypetide isolated from the Sargasso Sea
MNSQSVNKLKKDLLNSIEEKTLELTSLSDKIWEAAEVAFREDKSAEYLIEYAEANGLTIERGLAGMPTAFTASYGKGKPVIGIIGEFDALPGLSQTTAPYRDELIEGGAGHGCGHNLFGTASLGAAIAIKELIEKGSIEGTVKFFGTPAEEKFFGKLWMIREGVFDDVDICMDWHPADKTEANVQPSLALVDFMVEFTGQSAHASMDPWNARAANDALELYTSGINAYREHVKPSVRMHYHIQDAGQVVNVVPDYSRIWVRVRDITKEGLQPVYDHVRKMAGGAAIMANVEHKVSLISGIHDLLPNRTGGAAMQKNLEALGDIQYTQEEIDFALEMQRNNGKPKIGIDGKIRSLRETLKSPGGGSTDVGDVSYNVPSS

SEQ ID NO: 126122 - protein, 360 aa, Unknown
  Bacterial polypetide isolated from the Sargasso Sea
MKNRVHNFSAGPATLPLEVLESIREELINYKDIGSSIIEISHRDKTFVEIAEKTEETLRDLLSIPDNYDVLFLQGGATLQFSMIPLNFSHLGDIANYAEIGSWSSKAIKEASKLCNLNICTSSKKNNFTQIDNLNEWDIKSNSSIIHYCKNETIQGIQIKDEPNFEGSVFVDMSSCLFSEDIDVSKYDFIYACAQKNFGPAGITLVLAKKELISKSNPELPNILRYDAHASEKSMLNTPNTFGWYVAGKMFDWYKKEGGIKKMEETSIEKSNKLYSLIDKSDFYINPVNKEQRSSCNVVFTLSNPKLDSTFLEDSDNEGLKYLKGHRTVGGMRASIYNSLSMDAVESLTDFMRSFETKYG

SEQ ID NO: 126123 - protein, 356 aa, Unknown
  Bacterial polypetide isolated from the Sargasso Sea
MQIHNFSPGPARLDPSIISKSQEAIANYQKTGLSILEIGHRSKDFETLINALQENMINIFNIPSNYFTLLLQGGATYQNTFIANNFDKENKLLGCLVTGTWGRYSVEDFSKIRDTKIIEVSDNEIENYIQTPWDLEGVDYLHLTSNETINGVQLREFNKIEHDSLLIDMSSDIGSYSFEWDNLAYVYAGAQKNMGIPGVSICIGDEKYLNSEDNSRYLNLGQLVEKNSLLNTPPTFSIYVLKLVTDWMIAMGGINHFEEKSIRQSSRIYEQLESYGDFVIIPVSDYSKSRSNIIFKFKNEDLEKKFLIEATEKGILGLNGHRSQGGIRISLYNSITDEMVDYLSEYIDRFFADNGK

SEQ ID NO: 126124 - protein, 322 aa, Unknown
  Bacterial polypetide isolated from the Sargasso Sea
VEVSHRSHAFKEYAEYSESSLRNLLNINDEYTILFLQGGATHQFALIPMNFSKNGVLDYLITGGWSKKASEYASKVANINIVSDSSTNNFTDIADSKTWNISDDPDYFFYCANETVHGLEIHSPIETDSPIICDMSSTIASRPIDIHKYDLIFAGAQKNLGIAGLTIVIVKNELLSDSNNELLPMFDYSAHAQEASMLNTSPVFSWYVSGLIFDWIAEQGGVDKMAHVNREKSSLLYNYLDQSNFYSNPVSKPYRSWMNIPFLLSRDDLQDKFVQCAEDEGLFNLKGHRTVGGMRASVYNAMPIEGVKKLIAFMDEFAKLHE

SEQ ID NO: 126125 - protein, 113 aa, Unknown
  Bacterial polypetide isolated from the Sargasso Sea
CLVSMRWLKNNGGLAEIEKKNINKASLIYEEIDKNEMFTGFASKDDRSIMNVTFNLIDKKYKSAFDDLLKENNISGINGHRSVGGYRASIYNAMEIESVEVLVDTMKKFEKNI

SEQ ID NO: 126126 - protein, 145 aa, Unknown
  Bacterial polypetide isolated from the Sargasso Sea
MIKRDVPSMLSYKVHIDKDSSFNTPPVFSIFSVLMNLREIKSEGLESIEKKNSEKSKLIYDEIDKNKCFVGFSDINDRSHMNATFNLADGCDADLFKSICSDNNISGINGHRSVGGFRASIYNALDIDSVKTLITCMKEFESNYN

SEQ ID NO: 126127 - protein, 214 aa, Unknown
  Bacterial polypetide isolated from the Sargasso Sea
MSKDIFNFSAGPAVIPDSVIAKINLGLHDFDRGMSIIEVSHRSHAFKEFAKSSESSLRNLLNISEEYSVLFLQGGATHQFALIPMNFSKNGVLDYLVTGAWSKKASAYAKKFSKVNIVSDSSSNNFTDLADLNSWNISDNADYFFYCANETVHGLEIHDPIETSSPVICDMSSTIASRPIDVNKYDLIFAGAQKNLGIAGVTIVIVKNKLLSEA

SEQ ID NO: 126128 - protein, 449 aa, Unknown
  Bacterial polypetide isolated from the Sargasso Sea
MVNSIDMKTSDLTSLSDKIWEAAEVAFREDKSAEYLIEYAEANGLIVEKGIAGMPTAFTATYGEGKPVIGIIGEFDALPGLSQDTVPHRHELIEGGAGHGCGHNLFGTASLGAAIAIKELIEKGELQGTVKFFGTPAEEKFFGKLWMIRDGVFDDVDICMDWHPADKTEANVQPSLALVDFMVEFTGQTAHASVDPWNARAANDALELYTAGINAYREHVKPSVRMHYHIQDAGKVVNVVPDYSRIWVRVRDITKEGLQPVYEQVRKMAGGAAIMANVEHKVSLISGVHDLLPNRVGGAALQKNLETLGDIQYTQEEIDFALELQRNNGKPEIGIDGKIRPLRETLDSPGGGSTDSGDVSYNVPVVSLAATTAPKGVPWHSWSVVASSGMSIGHKGMLHAAKALGMTMVDIFKDSKLRENIKKEFDEKIGEYEYDPYLDPGPPPIDYVD

SEQ ID NO: 126129 - protein, 66 aa, Unknown
  Bacterial polypetide isolated from the Sargasso Sea
MRKWNFCAGPAVISEEVLKEVQSEILEFNESGMSVMEMSHRSDIYSKVAFDAKKDLINLFRVPNEY

SEQ ID NO: 126130 - protein, 192 aa, Unknown
  Bacterial polypetide isolated from the Sargasso Sea
MVSDSTSDILSRKEDYSRFGLVYAGLQKNLGPSGLALVLVREDLLGLALPQTPKLLDYQLAHEQRSLANTTSVFSIYVTLKMLRWVEKQGGVAVMEQRNREKSKLLYDVLDDSELYKAVADPENRSICNVTFRLDDDEMEKRFLEQSLNEGLYALKGHRDVGGIRASIYNSMPLEGVKALADFMQDFERRET

SEQ ID NO: 126131 - protein, 191 aa, Unknown
  Bacterial polypetide isolated from the Sargasso Sea
NEDKLISFLEKNCNFRFVEIKNALKLKEINLIILKKDITDNNILEILKNPNYFNSQIFAHKSLQDKIPLNYKVIFYPTKISTFQNTIKKYQEINLSYKDIYLSQDSFLINSNNQKKIYVTEKEFEIISLFFKKKVIKKELIQEEILNLQKTVDTKSLDSHLTRIRNKFLEIDSGLNISSVKNDCLEIKKLV

SEQ ID NO: 126132 - protein, 269 aa, Unknown
  Bacterial polypetide isolated from the Sargasso Sea
MRKWNFCAGPAAIPEEVLIEAQNELLEWGLSGSSVMEVSHRSDLFAEVATSSTTDIKALLNIGDDHEVLFLQGGATLQFTSVPLNFTKNSSIVSYLNTGLWSKKAIKAASKYASVNVVASSEESNYTYVPSTNEWRVDSDSIYFHYVMNETIQGLAMRDPISSEIPVICDMSSCILSEEVDFHNLDLVYAGAQKNIGPAGLTLVIIKKDFLEKANEDIPDILSYKKNSQAGSMLNTPPTFAWYLAGKVFKWLLKKGGSKKYQKENKKKQ

SEQ ID NO: 126133 - protein, 207 aa, Unknown
  Bacterial polypetide isolated from the Sargasso Sea
MNNKVHNFSAGPSILPDKVFEQASSSINNFNGKNLSILEISHRSKDFMDVLEEARSLAIEISELDKNKYTCLFLQGGASMQFLMTAYNFLNKNAAYINTGSWSTKAIKEAKLFGNVTEIASSSDKNFNYIPKNISINEDYDYLHITSNNTIFGTQFHSFPESNCPLIADMSSDIFSRKIDFSKFDLIYAGAQKNLGPAGATMVMINK

SEQ ID NO: 126134 - protein, 155 aa, Unknown
  Bacterial polypetide isolated from the Sargasso Sea
MRKWNFCAGPAVISEEVLSEVQSEIPEYNDIGSSIMEISHRSKIYTKIASEAKEDLKDILGIQENYEILFLQGGATFQFSMIPMNFKHLTGSADYITTGTWTKKAFIEGSKIMDIKNIYSSENNNFTNAPDLEELDFSENASYVHYCPNETIQGN

SEQ ID NO: 126135 - protein, 200 aa, Unknown
  Bacterial polypetide isolated from the Sargasso Sea
MRKWNFSPGPAAIPNEVLLEVQSELLEFKDSGMSIMEMSHRTDLYSSIAFETKQDLIDILNIPDDYDVLFLQGGATHQFSMIPMNFSKLNNTAVYITTGTWTKRAYEEGSKIAKLDQIFTSEDKNFTYAPNFEDLKIPEDASYVHYCPNETIHGVSFNHIPLIDNPLVADMSSSILSEPIDISKFSLIYASAQKNMDHQD

SEQ ID NO: 126136 - protein, 99 aa, Unknown
  Bacterial polypetide isolated from the Sargasso Sea
MHQLNKEKAALLYEVVDASAGFYRPHAETDSRSLMNVTFQLPGDAIQAKFIEQAAEQSLCNLKGHRSVGGIRASIYNAMPREGVERLAEFMRTFYQKNS

SEQ ID NO: 126137 - protein, 165 aa, Unknown
  Bacterial polypetide isolated from the Sargasso Sea
KIWGPAGTTLVVIKDDILGKVNRKIPSMLDYKIHIDKESMFNTPPVFAVYTSLLTLRWIESNGGIVGIEKQNNKKAEMIYNEIDRNNAFKGFTREEDRSIMNATFNLKDGLNEEKFNKLCEENGISGLKGHRSVGGYRASIYNALPFESIEVLIDVMKKFEKISL

SEQ ID NO: 126138 - protein, 85 aa, Unknown
  Bacterial polypetide isolated from the Sargasso Sea
RFIDKSDFYSNKIEESSRSIMNIPFLLGKEELNSKFLIDSSNNGLLALKGHRSVGGMRASIYNAMPEEGVDALIEFMKLFEKENL

SEQ ID NO: 126139 - protein, 182 aa, Unknown
  Bacterial polypetide isolated from the Sargasso Sea
GHWGKTAVKQAGVYVDVNIAASSEADGYRTLPPRADWQLSPEAAYVHITANETIHGVEFRDVPDTGNVPLIADFSSSIASEPLDVRRYGVIYAGAQKNLGPVGIAVMIIRRDLLERSGQPRADIFDYRSHVARDSMLNTPPTWNWYLAGLVFKWMLAEGGVAEFAKRNAAKAALVYGAIDGS

SEQ ID NO: 126140 - protein, 250 aa, Unknown
  Bacterial polypetide isolated from the Sargasso Sea
MRKWNFCAGPAAIPEEVLIEVQNELLEWGLSGSSVMEVSHRSDLFAEVADSSTNDIKALLNIGDYHEVLFLQGGATLQFTSVPLNFTKKSSIVSYLNTGIWSKKAIEAASKFASVNVVASSEKSNYTFVPNTQGWRVDPDSIYFHYVMNETIQGLAMRDRISLEIPVICDMSSCILSEEVDFHNLDLVYAGAQKNIGPAGLTLVVIKKDFLEKANEDIPDILSYKKNSQAGSMLNTPPTFAWYLAGKVFK

SEQ ID NO: 126141 - protein, 278 aa, Unknown
  Bacterial polypetide isolated from the Sargasso Sea
MPESVLTEVQEELLDWNGLGLSVMEISHRSPEFIEIAKQAECDFRDLLSISDEFAVLFTHGGATMQNAMVPLNLASPEGNVDYVNSGHWAKRSIKEAERYTNVNIAATSEDDDFKYFPAQDSWKFSDNSSYVHYTPNETIGGLCLRTLHNCEIPVVADYSSGILSEPIDVSKFSLIYGGAQKNIGPSGLGFVIVKKDLLGKAQSITPNLLNYTLINEGESMSNTPPTFAWYVAGKVFKWLRSIGGVEAISIINNRKANKLYDYIDSSDFYSNNINIEN

SEQ ID NO: 126142 - protein, 79 aa, Unknown
  Bacterial polypetide isolated from the Sargasso Sea
MTRAFNFCAGPAALPEEVLKELQEETLDYKNHGLAVMEMSHRSKEFVSIAEQAKQDFIDLLSIPDEYDVLFIQGGGQFT

SEQ ID NO: 126143 - protein, 96 aa, Unknown
  Bacterial polypetide isolated from the Sargasso Sea
KKAKLLYDFIDSSSFYSNPVEKEYRSIMNVPFLLDDHNADSSFLEKAEITGLLNLKGHRSVGGMRASIYNATPFEAVEDLVSFMSDFERSYTGNGK

SEQ ID NO: 126144 - protein, 187 aa, Unknown
  Bacterial polypetide isolated from the Sargasso Sea
MKIYNFSAGPACLPEPVLNATQKAAIEYKETGMSIMEMSHRSEAIADLFHETTSKVRELLDVPSNYHVLWLQGGASMQFAMVPMNLLSNTSTADYIETGSWSTKAITECNKVAKANVIASSKQDIFSYIPKEYKQKIDSKYLHITSNNTIYGTQYKVFPKVDNRDGCLVADMSSDIFSAPINVSDFG

SEQ ID NO: 126145 - protein, 115 aa, Unknown
  Bacterial polypetide isolated from the Sargasso Sea
VFKWLLKKGGVKSIQKENEKKAKLLYDFIDSSSFYSNPVDKEYRSIMNVPFLLDDQNADSLFLEKAEIKGLLNLKGHRSVGGMRASIYNATPFEAVEDLVSFMSDFERSYTGNGK

SEQ ID NO: 126146 - protein, 308 aa, Unknown
  Bacterial polypetide isolated from the Sargasso Sea
QSEFLEFNSSGMSIMEMSHRSDLYLSIALEAKKDLIDILNIPENYEVLFLQGGATHQFSMIPMNFSKLNGTANYITTGTWSKRAFEQGSKIAKIEQIFTSEDKNFTYAPNFKDLKISKDASYIHYCPNETIQGVSFDHIPLLDKPLIADMSSSILSEPIDISKFSLIYASAQKNIGPSGLTIIIIEKSFMNQGNKDLTNLLTYFEHSKQNSMLNTPPTFSWYMAGKVFKWIKKLGGLNYFKELNNLKASKLYQFIDDSEFYINTVEINNRSIMNIPFILKDNKLDSAFLKESHEAGLLNLRGHFLVEE

SEQ ID NO: 126147 - protein, 177 aa, Unknown
  Bacterial polypetide isolated from the Sargasso Sea
MSFSNRIHNFSAGPAILPEEVLEVAKSELLNFKASGMSIMEMSHRSKEFDEVITTAESTLRSLLGLSDKYSVLFLQGGASLQFSMVPLNLRVEGKPFDVVNTGSWTEKAIKEIKKVGDCRIIASGESNNFTSIPTDIPLNNDASMLYLCSNNTIFGTQWSQFPNTGSVPLVAEYVLR

SEQ ID NO: 126148 - protein, 219 aa, Unknown
  Bacterial polypetide isolated from the Sargasso Sea
MKNFLTILFATITIVSVQSQSANKLKKELLNSIEQKKTELTTLSDNIWEAAEVAFREDKSAEYLIEYAEANGLIVEKGLAGMPTAFTATYGEGKPVIGIIGEFDALPGLSQTTDSHRNVLIEGGAGHGCGHNLFGTASLGAAVAIKELIEKGDLKGTVKFFGTPAEEKFFGKLWMIRDGVFDDVDICMDWHPADKTEANVQPSLALVDFMVEFTGQFCS

SEQ ID NO: 126149 - protein, 186 aa, Unknown
  Bacterial polypetide isolated from the Sargasso Sea
MSISSKLVHNFSAGPSALPKKVIEIIKNDFPNWNESGMSIIEVSHRSKEFVEVALKAEKNLRKLLDISDNYHVLFLQGGASLQFSMIPMNLSKSDSSVDYAVTGSWGKKAVAEAKKFTKVNIVCDSHASDYTSIIDEEEWIKSEEADYVHITSNETIAGVEYHFDPETNEVPLITDASSTLLSRSL

SEQ ID NO: 126150 - protein, 132 aa, Unknown
  Bacterial polypetide isolated from the Sargasso Sea
THVKKDSMFNTPPVLSVFVVNETLKWIEDQGGVGSIENSNKTMSEKLYAEIERNMLFRSPVAIEDRSTMNIPFVFNDDSMDDNDFLQFCDTRGLKTLKGHRSVGGFRASIYNAMPMEGVDALIKAMQDYEDR

SEQ ID NO: 126151 - protein, 252 aa, Unknown
  Bacterial polypetide isolated from the Sargasso Sea
MRKWNFCAGPAAIPEEVLIEAQNELLEWGLSGSSVMEVSHRSDLFAEVATSSTTDIKALLNIGDDHEVLFLQGGATLQFTSVPLNFTKNSSIVSYLNTGLWSKKAIKAASKYASVNIVASSEESKYTYVPSTKEWRVDSDSIYFHYVMNETIQGLAIRDPISSEIPVICDMSSCILSEEVDFHNLDLVYAGAQKNIGPAGLTLVIIKKDFLEKANEDIPDILSYKKNSQAGSMLTLHLLLHGILPEKYLNGF

SEQ ID NO: 126152 - protein, 360 aa, Unknown
  Bacterial polypetide isolated from the Sargasso Sea
MKNRVHNFSAGPATLPLEVLESIKEELINYKDIGSSIIEISHRDKTFVELAEKVEETLRNLLSIPKDYDVLFLQGGATFQFSMIPLNFSYLGDIANYAEIGSWSSKAIKEASKLCDLNICTSSKKNKFTEIDDLNKWDIKNNSSIIHYCKNETIQGIQIKDEPNFASSVFVDMSSCLFSEDIDVSKYDFIYACAQKNFGPAGITLVIAKKELISKSNPELPNILRYDAHASEKSMLNTPNTFGWYVAGKMFDWYTKEGGVKKMEERSIKKSDALYSLIDNSDFYINPVNKAQRSICNVVFTLSNPDLDNKFLEESDAQGLKYLKGHRTVGGMRASIYNSLPMEAVESLVDFMRSFETKYG

SEQ ID NO: 126153 - protein, 356 aa, Unknown
  Bacterial polypetide isolated from the Sargasso Sea
MQIHNFSPGPARLDPSIISKSQEAIANYQKTGLSILEIGHRSKDFETLINSLQENMINIFNIPSNYFTLLLQGGATYQNTFIANNFDNENKLLGCLVTGTWGKYSAEDFSKIRDTKIIEVSENEIENYVQSPWDLEGVDYLHLTSNETINGVQLREFNKVQHDSLLIDMSSDIGSYSFEWDNLAYIYAGAQKNMGIPGVSICIGDEKYLNSEDNSRYLNLGQLVEKKSLLNTPPTFSIYVLKLVTDWMIAMGGIKHFEEKSIRQSSRLYEQLESYEDFIILPVSDYSKSRSNIIFKFKNEDLEKKFLIKATEKGILGLNGHRSEGGIRISLYNSITDEMVDYLSEFMDKFFADNEK

SEQ ID NO: 126154 - protein, 358 aa, Unknown
  Bacterial polypetide isolated from the Sargasso Sea
MPRDIFNFSAGPALIPDSVIEKIHLGLDDFHRGMSIVEVSHRSQAFKEYAYYSELSLRNLLNINDEFSILFLQGGATHQFALIPMNFSRNGVLDYLVTGAWSKKASEYARKVANINIVSDSSSNNFTNIADSKSWNISDNSDYFFYCANETVHGLEIHNPIESESPVICDMSSTIASRPIDIQNYDLIFAGAQKNLGIAGLTIVIVKNRLLSNSDNELLPMFDYSAHAEEASMLNTSPVFSWYVSGLVFDWIAEQGGVEAMGKLNKKKSTLLYDYIDQSSFYSNPVSKSYRSWMNIPFILARKELEDKFNQSAEDVGLFNLKGHRTVGGMRASVYNAMPIEGIKKLITFMDEFAKLHE

SEQ ID NO: 126155 - protein, 297 aa, Unknown
  Bacterial polypetide isolated from the Sargasso Sea
MRKWNFCAGPAAIPKEVLIEAQNELLEWDLSGSSIMEVSHRSDLFAEVAASSTKDIKALLNIGDDHEVLFLQGGATLQFTSVPLNFTKKSSIVSYLNTGLWSKKAIKAASKYASVNVAASSEESNYTYVPSTEEWRVDSDSIYFHYVMNETIQGLAMRDPISSDIPVICDMSSCILSEEVDFNNLDLVYAGAQKNIGPAGLTLVIIKKDFLEKANEDIPDILSYKKNSQAGSMLNTPPTFAWYLAGKVFKWLLKKGGVKSIQKENEKKAKLLYEFIDSSSFYSNPVEKEYRSIMNVP

SEQ ID NO: 126156 - protein, 287 aa, Unknown
  Bacterial polypetide isolated from the Sargasso Sea
MSKDIFNFSAGPAVIPDSVIDKINLGLDDFDRGMSIIEVSHRSHAFKEFAKSSESSLRNLLNISEEYSVLFLQGGATHQFALIPMNFSKNGVLDYLVTGAWSKKASEYASKISDVNIVSDSSSNNFTDVADLNSWNISDNADFFFYCANETVHGLEIHDPIETSSPLICDMSSTIASRPIDVNKYDLIFAGAQKNLGIAGVTIVIVKNKLLSGVNTELPPMFDYSAHANEASMLNTSPVFSWYVSGLVFDWIHEQGGVEEMARINKLKSDLLYDYIDQSEFYNNPVS

SEQ ID NO: 126157 - protein, 284 aa, Unknown
  Bacterial polypetide isolated from the Sargasso Sea
MKVYNFSPGPAKLDSSIISKSQQAMYNFQNTGLSILEIGHRSKEFEKLMNSLQENIRNIFNVPTNYFTLFLQGGATFQNTFIANNFDMRDKDLGCLVTGTWGKSTFDDFSKIRETKLIELSQDEIENFVESGEDLKNVDYLHLTSNETINGVQLREFNKINHDSLLIDMSSDIGSYRFEWDNIAYIYAGAQKNMGIPGVSICIGDEKHLNSADNSKYLNIGQLVEKKSLLNTPPTFSIYVLKLVTDWMIEMGGIEYFEEKSVSQSSRLYKQLESYKDFLNLPVC

SEQ ID NO: 126158 - protein, 358 aa, Unknown
  Bacterial polypetide isolated from the Sargasso Sea
MPKDIFNFSAGPALIPQSVIEKIHSGLDDFHRGLSIVEVSHRSHAFKEYAKSSESSLRNLLNISDEYSILFLQGGATHQFALIPMNFSKNGVLDYLVTGAWSKKASEYASKVANVNIVSDSSSNNFTNVADPKKWNISDDPDYFFYCANETVHGLELHNPIESDSPVICDMSSTIASRPIDINKYDLVFAGAQKNLGIAGLTILIIKNKLLSHCNKELLPMFNYSSHAEEASMLNTSPVFSWYVSGLIFDWITEQGGVGMMGKVNMEKSSLLYNYIDESSFYSNPVSKPYRSWMNIPFILARDDLENDFIQSAEDEGLFNLKGHRTVGGMRASVYNAMPIEGIKKLIAFMDDFAELHE

SEQ ID NO: 126159 - protein, 69 aa, Unknown
  Bacterial polypetide isolated from the Sargasso Sea
MNVPFLLDDQNADSLFLEKAEIKGLLNLKGHRSVGGMRASIYNATPFEAVEDLVSFMSDFERSYTGNGK

SEQ ID NO: 126160 - protein, 213 aa, Unknown
  Bacterial polypetide isolated from the Sargasso Sea
IVDVNVVCSSELSNFNNVPKESSWKRSENAAYLHYVANETIQGNALHIPPTTNAPLITDMSSVILSEPIDISKFSMIYAGAQKNIGPAGLTICIIKNEFLKTASIDLPGMLQYSKHADADSMFNTPPTFAWYLSGKVFAWLKGKGGLDSIGKINRLKAKKIYDFIDNSEFYTNPINLDNRSIMNIPFLLKNSDLNAEFLHDAENAGLLNLKRA

SEQ ID NO: 126161 - protein, 269 aa, Unknown
  Bacterial polypetide isolated from the Sargasso Sea
CADYIDTGSWSAKAIVECKRIGRVNIIGSSRDSLYTYIPKDALPIEGASYLHITSNNTIYGTQYKEYPSINNDKCFLVADMSSDILSQPIDISNFGLIYAGAQKNMGPAGVTLVIIRSDLAEINYRDIPTMMKYSTHVSKDSMFNTPPVFSVCVVNETLKWINSIGGLNQMKTINESKASLLYNEIDRNTLFKSPVVYEDRSTMNVPFIFNNNNLKDEEFLEFCEKRGLRTLKGHRSVGGFRASIYNAMPEAGVEALIAAMQEYEHIHS

SEQ ID NO: 126162 - protein, 291 aa, Unknown
  Bacterial polypetide isolated from the Sargasso Sea
DYNNNGISILEMSHRSQPVVDLMNETSSLARELLSIPDNFHILWLQGGASTQFSMIPMNLLSDDQTADYTDTGLWAAKAIDEAKVFGDINIASSSKESLYSLINKDLSQTSKAIYLHITSNNTIYGTQWKKFPKVLNSEGFIVADMSSDIFSRKIDFKSFGLIYAGAQKNMGPAGVTMVIIRDDIIGKMKRHIPTMLDYRTHINKSSAYNTPPVSTIFVVNRTLKWLDKIGGIAVIEKKNKIKSDKLYEELERNSVFTSPIRKEDRSQMNVPFVFIEEKDENEFLKFCSNK

SEQ ID NO: 126163 - protein, 282 aa, Unknown
  Bacterial polypetide isolated from the Sargasso Sea
SVPLNFTKKSSTVSYLNTGLWSKKAIKAASKYASVNVVASSEESNYTYVPSTKEWRVDSDSIYFHYVMNETIQGLAMRDPISSEIPVICDMSSCILSEEVDFDNLDLVYAGAQKNIGPAGLTLVIIKKDFLEKANEDIPDILSYKKNSQADSMLNTPPTFAWYLAGKVFKWLLKKGGVKSIQKENEKKAKLLYDFIDSSSFYSNPVQKEYRSIMNVPFLLNDENADSSFLEKAEIKGLLNLKGHRSVGGMRASIYNATPFEAVEDLVSFMSDFERSYTGNGK

SEQ ID NO: 126164 - protein, 297 aa, Unknown
  Bacterial polypetide isolated from the Sargasso Sea
MRKWNFCAGPAVISEDVLLEVQSETLEYNDIGSSVMEISHRSKIYKNLANEAKEDLKEILSIPENFEILFLQGGATFQFSMIPMNFKHLTGTADYITTGTWTKKALNEGSKIMNINNIYSSEDDNFTYAPDLEKLSYSKNASYVHYCPNETIQGNAIHKIPKIDKPLIADMSSVILSAPFDVSNFALIYAGAQKNIGPAGLTIVIIDKDFMKNGNPNLPNLLRYSEHSKSDSMLNTPPTFSWYVAGKVFKWIKKCGGLDYFKEQNNLKASKLYDFIDKSDFYSNPVKIENRSIMNIP

SEQ ID NO: 126165 - protein, 190 aa, Unknown
  Bacterial polypetide isolated from the Sargasso Sea
ADMTSVILSQPLDVSKFDLIYAGAQKNIGPAGLTIVIISKELMEKGDSSLPKILSYSEHSKANSMLNTPPTFSWYFAGKVFKWIKRSGGLDHFAALNKKKAEKLYDFIDSSDFYLNNLQKSQRSVMNVTFNLKNDDLNSSFLDESKANSLLNLKGHALVGGMRASIYNAMPQEGVTKLIQFMSEFESKYG

SEQ ID NO: 126166 - protein, 186 aa, Unknown
  Bacterial polypetide isolated from the Sargasso Sea
MKSIYNFSAGPATLHPSVVKSTSDATIEFKDTGMSLMEMSHRSQPVVDMVSETEDLVRKLLNLSDNYKVLFLQGGASLQFCMVPMNLLGKGQVADYTNTGTWSQKAINEAMIYGKVNVISSSKDSNYNYIPKELNQSDNAQYLHLTSNNTIFGTQWNSFPTPMRKESYLVADMSSDIFSREFEIDD

SEQ ID NO: 126167 - protein, 284 aa, Unknown
  Bacterial polypetide isolated from the Sargasso Sea
MRKWNFSAGPAAIPEPVLQEAQSEMLEWQDSGMSVMEMSHRSSDYINIANQARQDLIDLLDIPNDYQVLFLQGGATLQFSMIPMNFASEKVADYALTGSWSQKAIKEASKIIDVNVVTSSESSNFDHVPNEESWTCSEDAAYLHYVANETIQGNALHFPPTINVPLIVDMSSVILSEQIDVSKFSMIYAGAQKNIGPAGLTICIIKDSFLNTASNKLPGMLQYAKHASAESMFNTPPTFAWYLSGKVFKWLKDLGGLKCIGEINKHKAKKLYDFIDQSDFFSNP

SEQ ID NO: 126168 - protein, 270 aa, Unknown
  Bacterial polypetide isolated from the Sargasso Sea
EFEVLFLQGGASLHFSMIPMNLLTKDAVADYTDTGSWSYKALNQAKLFGKVNIASSSRTSNYSFIPKDINQLTESIYLHITSNNTIYGTQWKEFPKPLNSSGFLVADMSSDIFSRPLNFDNFGLIYAGAQKNIGPAGVTLVVIRKELLKEIDRKIPDMLSYRIHIEKNSMFNTPPVMSIYAINCSLKWLKSVGGVESINKNNSIKAKLLYTEIKRNSLFQSPVAKEDRSLMNIPFVFNEDIKENDTLFLEFCDKRGLKTLKGHRSVGGFR

SEQ ID NO: 126169 - protein, 189 aa, Unknown
  Bacterial polypetide isolated from the Sargasso Sea
FLQGGATLQFSMVPMNFGLQGVADYVLSGSWSKKAIYEASRLVDTNVVCTSEPSNFNNVPNETSWNCTENAAYLHYVANETIQGNALHIPPMTNAPLISDMSSVILSEPIDISRFSLIYAGAQKNIGPAGLTICIIKNDFLKTASAELPGMLQYAKHADADSMFNTPPTFAWYLSGKVFAWLKNKGGLD

SEQ ID NO: 126170 - protein, 295 aa, Unknown
  Bacterial polypetide isolated from the Sargasso Sea
MRKWNFSPGPATIPEDVLLEVQSELLEFNNAGISIMEMSHRTELYSSIAFEAKKDFIEILNIPDNYEVLFLQGGATHQFSMIPMNFSNLQGRPAYITTGTWTKRAFEEGSKITEIDQIFSSENENFIYAPNFKDLKIPEDASYVHYCPNETIHGVAFDHIPTINNPLVADMSSSILSEPIDVSKFSLIYASAQKNIGPSGLTVVIVKKSFMKQGNKALTNLLRYSEHSKQDSMLNTPPTFSWYVAGKVFKWVKKLGGLSYFKELNTLKASKLYQVIDNSDFYINPVHINNRSIVN

SEQ ID NO: 126171 - protein, 236 aa, Unknown
  Bacterial polypetide isolated from the Sargasso Sea
EFNFTNVPKFTDWKFRSSNGYFHYVANETIQGNAIHDVPSVENPIIADMSSVILAEPIDISKFSMIYAGAQKNIGPAGLTIAIISKDLLSTCNKDLPNIMNYDKHAQSGSMLNTPPTFAWYMAGKVFKWLKSLGGLEAVKESNYLKASTLYDYIDRSDFYSNPVAKKNRSIMNIPFILKSPDLDGAFLNEAESENLLNLKGHRSVGGMRASIYNAMPQEAIDDLIAFMEAFESKYG

SEQ ID NO: 126172 - protein, 161 aa, Unknown
  Bacterial polypetide isolated from the Sargasso Sea
PAGLTIVIIKNSLIKNNKAKIPAMLDYRNYIEKQSMYNTPPVFSWYVAGLVFEYLINLGGLEAIEKTNIKKSNLLYDYIDNSDFYSNPVEKSCRSRMNIPFLLKDKDLENIFLIDSLNAGLANLKGHRSVGGMRASIYNAIEVEAVQDLISFMKEFEQKYG

SEQ ID NO: 126173 - protein, 217 aa, Unknown
  Bacterial polypetide isolated from the Sargasso Sea
IFVHICSNETIGGVQFKEFPSLEKILIADMSSELLSRQININDFGLIYAGAQKNIGPAGLTIVIVRKDLCSKARPETPAVFDYGAQAEADSMLNTPPTYSWYLAGLVFEWLLELGGLDTVEKINNEKAQNLYDTIDASDFYDSPVDPRYRSTMNVPFKLKDESLDDAFLKEAEQVGLINLKGHRSVGGMRASIYNGVPPEAVYALLDFMKEFETKYG

SEQ ID NO: 126174 - protein, 120 aa, Unknown
  Bacterial polypetide isolated from the Sargasso Sea
TFAWYMAGKVFKWIKKQGGLEFFKQQNYSKSSKLYEYIDSSDFYSNNIDIENRSIMNVTFFLENDELDSPFLLHAEENGLLNLKGHRSVGGMRASIYNAMPLEGVEELIKYMKYFESKYG

SEQ ID NO: 126175 - protein, 301 aa, Unknown
  Bacterial polypetide isolated from the Sargasso Sea
MSVMEMSHRSDEFVAIAEAAEKDLRELAGISDDYAVLFMQGGASSQFSTIPLNLLGDKASADYVNTGIWSKKAIAEAKRYGNVNVVASSEDSGFTTIPDQSGWNTSADAAYLHYTPNETIGGLEYDFIPDSGNVPLVADMSSTMLSRPLDISKFGLIYAGAQKNIGPSGLVVVIIRKDLLGKARKETPTMMNYQVIADNGSMYNTPATYSWYLSGLVFKWLKEQGGVQAMGEMNARKAKKLYGFIDANDFYANPIEPRFRSWMNVPFTLADDALNAEFLKGAEARHLLNLQGHRSVGGMRA

SEQ ID NO: 126176 - protein, 237 aa, Unknown
  Bacterial polypetide isolated from the Sargasso Sea
YTYVPSTQEWRLDSDSIYFHYVMNETIQGLAMREPISSEIPVICDMSSCILSEEVDFHNLDLVYAGAQKNIGPAGLTLVIIKKDFLEKANEDIPDILSYKKNSQAGSMLNTPPTFAWYLAGKVFKWLLKKGGVKSIQKENEKKAKLLYDFIDSSSFYSNPVEKEYRSIMNVPFLLDDQNADSSFLEKAEITGLLNLKGHRSVGGMRASIYNATPFEAVEDLVSFMSDFERSYTGNGK

SEQ ID NO: 126177 - protein, 198 aa, Unknown
  Bacterial polypetide isolated from the Sargasso Sea
MSKQIYNFCAGPAMLPVEVMERAQREFCNFQGLGASVMELSHRGKPYMAVAAKAEADLRELLAVPDNYKVLFMHGGGRGQFSAVPMNLLGGANKKADYLLTGVWAASAVDEARKYGDIQTFDGVAKSAEGISHLLPTPAFRADAAYVHYCPNETIDGIEMFDIPATGDVPLVADLSSTILSRPIDVSRFGIIYAGAQK

SEQ ID NO: 126178 - protein, 208 aa, Unknown
  Bacterial polypetide isolated from the Sargasso Sea
LAMRDPISSKIPVICDMSSCILSEEVDFHNLDLVYAGAQKNIGPAGLTLVVIKKDFLEKANEDIPDILSYKKNSQAGSMLNTPPTFAWYLAGKVFKWLLKKGGVKSIQKENEKKAKLLYDFIDSSSFYSNPVEKEYRSIMNVPFLLDDENADSLFLEKAEIKGLLNLKGHRSVGGMRASIYNATPFEAVEDLVSFMSDFERSYTGNGK

SEQ ID NO: 126179 - protein, 188 aa, Unknown
  Bacterial polypetide isolated from the Sargasso Sea
MTRSINFSAGPATLPTEVLERAKAELLDYQHTGMSIMEMSHRGDEFREALIKAESDFRSLLAISEDYHVLFLQGGATAQFAAVPLNLVREHRNTDYLDTGSWSRKAIKEAGAFSDVHTVATSEEDSYHLIPPEDEWDIRTETSYVHICSNETIGGLQFKQFPKLEVPLVADMSSDILSRELDIENFGA

SEQ ID NO: 126180 - protein, 249 aa, Unknown
  Bacterial polypetide isolated from the Sargasso Sea
NLLRAKSTADYINIGQWSTKAIKEAKNFCTVNIVASTEGNNFTSAPSQAELKLNPDAAYVHYTPNETIGGVEFDYIPDTGDVPLVADYSSSILSEKIDVSKFGLIYAGAQKNIGPAGLCVVIVREDLLGDVIAGTPTMFDYKVAADNASMYNTPPTYSWYLAGLVFAWLKEQGGVEAMAEINRRKAEKLYRFIDTNDFYANPVALNNRSRMNVPFTLADDALDKVFLEESEQAGLMNLAGHRSVGGMRA

SEQ ID NO: 126181 - protein, 209 aa, Unknown
  Bacterial polypetide isolated from the Sargasso Sea
GTQFKKYPSMNNDKCFLVADMSSDILSQPIDISKFGLIYAGAQKNMGPAGVTLVIIRSDLVEINYRDIPTMMKYSTHVSKESMFNTPPVFSVCVVNETLKWINSIGGLNQMKTINESKASLLYNEIDRNTLFKSPVNIEDRSTMNVPFIFYDNDLKDEEFLKFCEKRDLRTLKGHRSVGGFRASIYNAMPEAGVKALIAAMQEYEHINS

SEQ ID NO: 126182 - protein, 285 aa, Unknown
  Bacterial polypetide isolated from the Sargasso Sea
QFTSVPLNFTKKSSIVSYFNTGLCQKKAINAASKYASVNVVASSEESNYTYVPSTNEWRVDYDSIYFHYVMNETIQGLAMRDPISSEIPVICDMSSCILSEEVDFHNLDLVYAGAQKNIGPAGLTLVIIKKDFLEKANEDIPDILSYKKNSQAGSMLNTPPTFAWYLAGKVFKWLLKKGGVKSIQKENEKKAKLLYDFIDSSSFYSNPVDKEYRSIMNVPFLLDDHNADSLFLEKAEIKGLLNLKGHRSVGGMRASIYNATPFEAVEDLVSFMSDFERSYTGNGK

SEQ ID NO: 126183 - protein, 223 aa, Unknown
  Bacterial polypetide isolated from the Sargasso Sea
DSIYFHYVMNETIQGLAMRDPISSEIPVICDMSSCILSEEVDFYNLDLVYAGAQKNIGPAGLTLVIIKKDFLEKANKDIPDILSYKKNSQAGSMLNTPPTFAWYLAGKVFKWLLKKGGVKNIQKENEKKAKLLYDFIDSSSFYSNPVDKKYRSIMNVPFLLDDENADSLFLEKAEIKGLLNLKGHRSVGGMRASIYNATPFEAVEDLVSFMSDFERSYTGNGK

SEQ ID NO: 126184 - protein, 256 aa, Unknown
  Bacterial polypetide isolated from the Sargasso Sea
NLAKTGVSADYIVSGAWSKAAVEEAEKFTALKAQTIQFKQDGLRTLVPASDWQLNDNASFVHFCPNETVDGMEFIDLPSTKAPLVADLSSTILSRQIDVSRYGVIYAGAQKNIGPSGLTLAIVREDLLPAKGSSIPSVLDYRLAADNDSMFNTPPTYAWYLAGLVFQWLKRQGGVEAMQQRNALKAQTLYGYIDQSDFYRNDVAPQFRSSMNVPFLLADETLNDLFVNEAEANGLLALKGHRMVGGMRASIYNAMP

SEQ ID NO: 126185 - protein, 250 aa, Unknown
  Bacterial polypetide isolated from the Sargasso Sea
MDVSKRAYNFCAGPAALPEAVLQRAQGELLDWHGKGLSVMEMSHRSDEFVSIANKAEQDLRDLLDIPSNYKVLFLQGGASQQFAQLPLNLLPEGGTADYIDTGIWGQKAIEEASRYGHVNVAGTAKPYDYFAIPGQNEWKLTKDAAYVHYVANETIGGLEFDWVPQVGDVPLVCDMSSDILSRPIDVSKYGMIYAGAQKNIGPSGILVNIIREDLLGRARSLCPTMLNYKVAADNGSMYNTPPAFAWYLS

SEQ ID NO: 126186 - protein, 331 aa, Unknown
  Bacterial polypetide isolated from the Sargasso Sea
NFSAGPSILPKEVFDGSSNALLEYQETGLSIIEMSHRSKEVGLIIEESKSLVIELLKLNENEYDVLFLQGGASLQFSMVAYNLLNTKAGYLNTGSWSEKAIKEAKLFGEVIELSSSKSNEYRNIPKDFNIPDDIDYLHMTSNNTIYGTQYHSVPKTDAPIVVDSSSDIFSRVFDYSFYDLIYAGAQKNIGPAGVTLVVVKKDILGKVSREIPSMLNYNVHIEKKSLFNTPPVFAIYATLLNLRWIKKQTIEFIDQTNHKKAKMLYDEIDNNSLFNGFADVQDRSIMNVTFDLVDNSLSSTFDALIEKSKISGVKGHRSIGGYRASMYNAYR

SEQ ID NO: 126187 - protein, 266 aa, Unknown
  Bacterial polypetide isolated from the Sargasso Sea
SGGATLQNAMIPLNLSPEGGTADYIYTGHWAKRSISEAKKYTNINIAASSEDKDFTYFPKQSSWNLSKNSAYVHITPNETIGGLRFKDLEDSEVPIVADYSSAILSEVIEVNRFSLIYGGAQKNIGPAGLGFAIIKKELLGKAQSITPTMLNYSEMLEGKSMYNTPPTFAWYVAGKIFKWLKSMGGVSEIEKLNYKKAKKLYSFIDQSDFYENKINKEDRSIMNIPFQLNDEDLNSRFLEESRNAGLLALKGHRSVGGMRASIYNA

SEQ ID NO: 126188 - protein, 198 aa, Unknown
  Bacterial polypetide isolated from the Sargasso Sea
NDKCFLVADMSSDILSQPIDISKFGLIYAGAQKNMGPAGVTLVIMRSDLVEINHRDIPTMMKYSTHVSKESMFNTPPVFSVCVVNETLKWINSIGGLNQMKTINESKASLLYDEIDRNTLFKSPVNVEDRSTMNVPFIFYDNDLKDEEFLKFCEKRNLRTLKGHRSVGGFRASIYNAMPEAGVEALIAAMQEYEHINS

SEQ ID NO: 126189 - protein, 318 aa, Unknown
  Bacterial polypetide isolated from the Sargasso Sea
MRKWNFCAGPAVISEAVLEEVKSELLEFKQVGASIMEISHRSKTFMEVAEQAKNDLVDILKIPKNYDVLFLQGGATHQFSMVPYNFGHNNGQADYVLSGTWSKKAIAEASKITKVNTIASSEAKNFSYAPDPKHWRVDQNSAYVHYCPNETIQGVAIHEPPDINKPIISDASSVILSEPLDVNKFSLIYAGAQKNIGPAGLTIVIIDRDFMELGNQHIPKILKYSEHSRSNSMLNTPPTFAWYMAGKVFKWIKQCGGLEYFREQNHLKASKLYEFVDKSSFYLNNIDIKNRSIMNVTFFLENDELNSAFLLEAEKMDF

SEQ ID NO: 126190 - protein, 168 aa, Unknown
  Bacterial polypetide isolated from the Sargasso Sea
GAQKNIGPAGLTLVIIEKEFMQKDNSDLPNLLRYSQHARSESMLNTPPTFAWYMAGKVFKWIKKSGGLKFFKDQNNAKASMLYSYIDNSSFYNNYVNFENRSKMNVVFNLSDDAHDAKFLTESNERGLLSLKGHRSVGGMRASIYNAMPLEGVKELIKFMDYFESKYG

SEQ ID NO: 126191 - protein, 115 aa, Unknown
  Bacterial polypetide isolated from the Sargasso Sea
MAGKVFKWIKKKGGLEFFKQQNYSKSSKLYEYIDSSDFYSNNIDIENRSIMNVTFFLENDELDSPFLLHAEENGLLNLKGHRSVGGMRASIYNAMPLEGVEELIKYMKYFESKYG

SEQ ID NO: 126192 - protein, 267 aa, Unknown
  Bacterial polypetide isolated from the Sargasso Sea
AAIPEEVLQEAQAEMLEWEGSGMSVMEMSHRSSEYTDIANKARQDLIDLLKVPNDYQVLFLQGGATLQFSMVPMNFGLQGVADYVISGSWSKKAIYEASKLVDTNVVCTSEPSNFNNVPNETSWNCTENAAYLHYVANETIQGNALHIPPMTNAPLISDMSSVILSEPIDISRFSLIYAGAQKNIGPAGLTICIIKNDFLKTATAELPGMLQYAKHADADSMFNTPPTFAWYLSGKVFAWLKNKGGLDSIGEINKLKAKKLYDFIDN

SEQ ID NO: 126193 - protein, 265 aa, Unknown
  Bacterial polypetide isolated from the Sargasso Sea
MKQIYNFSAGPACLPKAAIKGAEEAIKNFQDNGISLLEMSHRSTPVVNLFKETTNNVRDLLEIPDNYDIIWLQGGASTQFSMVPMNLLPENGYADYIDTGSWSAKAIVECKRVGGVNIIGSSKDSLYSYIPKDLIQSGKSSYLHITSNNTIYGTQFKEYPLVNNDKCFLVADMSSDILSKPIDVSKFGLIYAGAQKNMGPAGVTLVIIRSDLVEINYRDIPTMMKYSTHVSKDSMFNTPPVFSVCVVNETLKWIKSHWWSSSNEN

SEQ ID NO: 126194 - protein, 277 aa, Unknown
  Bacterial polypetide isolated from the Sargasso Sea
FPIIFGHNTKEADYVLSGSWSKKAISEASKIIKVNTIASSEGKNFTYAPDPNDWKVSEKSAYLHFCPNETIQGVAIHEPPIIDKPLISDASSVILSEPLDVSKFSLIYAGAQKNIGPSGLTIVIIDREFMEYGDQNIPNILKYSEHSNSDSMLNTPPTFAWYMAGKVFKWIKDSGGLDYFSIQNNKKASELYKFIDESSFYSNNIDIKNRSIMNVTFFLANDDLDKTFLSNAEENGLLNLKGHRSVGGMRASIYNAMPFEGVEELIKFMEYFESKYG

SEQ ID NO: 126195 - protein, 238 aa, Unknown
  Bacterial polypetide isolated from the Sargasso Sea
CLPKAAIQGAEEAIKNFQDNGISLLEMSHRSVPVVNLFEETTNNLRNLLKIPDNYDIIWLQGGASTQFSMIPMNLLPVNGCADYIDTGSWSAKAIVECKRVGRVNIIGSSQDSLYTYIPKDALPIEGSSYLHITSNNTIYGTQFKEYPSINNDECFLVADMSSDILSQPIDISKFGLIYAGAQKNMGPAGVTLVIIRSDLAEINHRDIPTMMKYSTHVSKESMFNTPPVFSVCVVKRH

SEQ ID NO: 126196 - protein, 278 aa, Unknown
  Bacterial polypetide isolated from the Sargasso Sea
MVTGGASTQFSMVPMNLLPENGCADYIDTGSWSAKAIVECKRVGSVNIIGSSRDSLYTYIPKDAFPIEGSSYLHITSNNTIYGTQFKEYPTTNDKYFLVADMSSDILSKPIDVSKFGLIYAGAQKNMGPAGVTLVIIRSDLAEINYRDIPTMMKYSTHVSKSSMFNTPPVFSVCVVNETLKWIKSIGGLHQMKTINESKASLLYDEIDRNTLFKNPVVYEDRSNMNVPFIFNNNNLKDEEFLEFCEKRGLRTLKGHRSVGGFRASIYNAMPEAGVEAL

SEQ ID NO: 126197 - protein, 183 aa, Unknown
  Bacterial polypetide isolated from the Sargasso Sea
CGAKIDVSEHDLIYAGAQKNLGPSGVTVVILSPWASSRRKEGLPTMLDYQTHISKGSMFNTPNTFGIFVLDRVLAWVERNGGLEGAIGRNSEKSGVLYDILDSSDFWRPHADSGCRSMMNVTWRLADESLEQVFLEEAVDSGMGGLKGHRSVGGIRASLYNGCPIESVEALASFMTDFESRHG

SEQ ID NO: 126198 - protein, 259 aa, Unknown
  Bacterial polypetide isolated from the Sargasso Sea
TGAWAKKAAKEGGFVGNSKIIASSEDKNFNYIPKNYSLDNSLDYFHVTSNNTIFGTQLKSLPETNVPIVCDMSSDIFSKKVTISNYDLIYAGAQKNMGPAGTTLYIVKDSVLESNAVPIPTMLNLKTHVDKDSMFNTPPVFAIYTSMLTLRWLKKNGGIDWIEKLNQSKADLIYNEVDRNSLFTGTANIEDRSNMNATFDLTNQDIKTEFDQLLSENNISGLKGHRSVGGYRASMYNALPLESVEVLVNSMKELENKKG

SEQ ID NO: 126199 - protein, 148 aa, Unknown
  Bacterial polypetide isolated from the Sargasso Sea
MELENENLPNILRYSKHSESDSMLNTPPTFAWYMAGKVFKWIKKSGGLEFFKEQNHLKASTLYNYIDNSEFYSNPVKIENRSIMNVPFILADSDLDSLFLKESEENGLLNLKGHRSVGGMRASIYNAMPLEGINELVDFMKVFEAKYG

SEQ ID NO: 126200 - protein, 362 aa, Unknown
  Bacterial polypetide isolated from the Sargasso Sea
MSKQIYNFCAGPAMLPVEVMERAQREFCNFQGLGASVMELSHRGKPYMAVAAKAEADLRELLAVPDNYKVLFMHGGGRGQFSAVPMNLLGGANKKADYLLTGVWAASAVDEARKYGDIQTFDGVAKSAEGISHLLPTPAFRADAAYVHYCPNETIDGIEMFDIPATGDVPLVADLSSTILSRPIDVSRFGIIYAGAQKNIGPSGLAIAIVRDDLLNQARADVPSIFDYQLTAKNDSMFNTPPTYAWYLAGLVFEWLKEQGGLAAMEARNKEKADFLYGYLDQSSFYGNQVDASCRSRMNIPFQLKNAELDKLFLAESEAAGLLALKGHRIVGGMRASLYNAMPLEGVKALVSFMDGFAKRHG

SEQ ID NO: 126201 - protein, 262 aa, Unknown
  Bacterial polypetide isolated from the Sargasso Sea
LSGSWSKKAISEASKIIKVNTIASSEAKNYSYAPDPKTWKISEKSAYVHYCPNETIQGVAIHEAPNVNKPIISDASSVILSEPLDVSKFSLIYAGAQKNIGPAGLTIVIIDRDFMELGNQKIPNILKYSEHSIAESMLNTPPTFAWYMAGKVFKWIKKKGGLEFFKQQNYSKSSKLYEYIDSSDFYSNNIDIENRSIMNVTFFLENDELDSPFLLYAEENGLLNLKGHRSVGGMRASIYNAMPLEGVEELIKYMKYFESKYG

SEQ ID NO: 126202 - protein, 260 aa, Unknown
  Bacterial polypetide isolated from the Sargasso Sea
MSKGAVTKANKYNHAKVVGEVSEKDGCHYVAQPQLSDIDQSAAYYHFCPNETVDGIAFDWLPESGKVPLVSDMSSTILSQPLDVAKHGVIYAGAQKNIGPSGLSVVIVREDLVGKARKETPSIFDYALAAKSDSMYNTPPTFSWYLAGLVFEWLKDMGGVDAMAKRNAEKAALLYSAIDSSDFYSSKVHPDNRSKMNVPFHLANAELDGLFLKQSQEAGLLALKGHRSVGGMRASIYNAMPVEGIVALVEFMREFERVNG

SEQ ID NO: 126203 - protein, 345 aa, Unknown
  Bacterial polypetide isolated from the Sargasso Sea
MRKWNFCAGPAAIPEEVLAEAQNELLEWGLSGSSVMEVSHRSDLFAEVATSSTKDIKALLNIGDDHEVLFLQGGATLQFTSVPLNFTKKSSIVSYLNTGLWSKKAINAASKYASVNVVASSEESNYTYVPSTNEWRVDYDSIYFHYVMNETIQGLAMRDPISSEIPVICDMSSCILSEEVDFHNLDLAYAGAQKNIGPAGLTLVIIKKDFLEKANEDIPDILSYKKNSQAGSMLNTPPTFAWYLAGKVFKWLLKKGGVKSIQKENEKKAKLLYDFIDSSSFYSNPVDKEYRSIMNVPFLLDDQKADSLFLEKAEIKGLLNLKGHRSVGGMRASIYNATPFEAVED

SEQ ID NO: 126204 - protein, 359 aa, Unknown
  Bacterial polypetide isolated from the Sargasso Sea
MTSRKYNFGAGPATMPTEVLLEVQEELLDWNGMGISVMEISHRSPEFTKIAEEAESDFRDLLSIPENYAVLFTHGGASLQNAMIPLNLSKQGIVQYVDSGYWASRSIKEASKFCEVGIAASSKDKDYSYFPSQESWQIDKTANYIHITPNETIGGVAMRSFNDTTIPLVADFSSSILSENLDVSKFGLIYGGAQKNIGPSGLGFVILNKDLIGHAMDGTPSMLDYQVINEGKSMFNTPPTFPWYVAGKVFKWLKSLGGVDEISKINVRKANKLYEFIDNSDFYSNNIQKDSRSIMNIPFLLRNEDLNESFLQNSKEAGLLALKGHRSVGGMRASIYNALPEEAIDTLIEFMSSFEKKAG

SEQ ID NO: 126205 - protein, 355 aa, Unknown
  Bacterial polypetide isolated from the Sargasso Sea
MSKKIHNFNAGPSVLPKEIFKKTSESIVNLDGSGLSILEISHRSNDFKSILSEAQELVLNISNLDSNEYSCLFLQGGASTQFLMVAYNFLYNQAGYLNTGSWSDKAIKEAKHFGNVTELASSKDKNYNYIPKDYIIPTNLDYIHITTNNTIYGTQISSFSKFDQTLVADMSSDIFSREINYSAFDLFYAGAQKNIGPAGATIVVIKNQMIEKINREVPSMLNYKVHIEKESSFNTPPVFSIYACLINLREIKSKGLKNIELENKAKAELLYKEIDNNSCFDGFAETEDRSYMNVTFNLNDENNSEIFEKLCKEKGIIGVNGHRSVGGYRASLYNALKIDSVEALIDCMKKLESLI

SEQ ID NO: 126206 - protein, 361 aa, Unknown
  Bacterial polypetide isolated from the Sargasso Sea
MKKIYNFSAGPGTLPQDALNAASQAMLEYEENGISILEMSHRSQQVVELMKNTTDLARELLSVPNNFHILWLQGGASTQFSMAPMNLLPNNKTADYTDTGLWAAKAISEAKAFGSINIISSTKESLYNHIYKDLEQTPNAIYMHITSNNTIYGTQWKSFPNTLNPDGYIIADMSSDIFSRKINFDPFGLIYAGAQKNMGPAGVTMVIIRDDILGKVNRQIPTMLDYNTHINKQSAFNTPPVSAIFVVNKTLSWLNKLGGVDKVENINRIKSERLYHEIERNSIFTCPVNKEDRSEMNVPFILTDNGDENEFLKFCADRGLLALKGHRSVGGFRASIYNAMPIDGIDALILAMQDYESHHSK

SEQ ID NO: 126207 - protein, 360 aa, Unknown
  Bacterial polypetide isolated from the Sargasso Sea
MRVFNFSAGPAAMPEEVLRQAADEMLDWHGSGMSVMEMSHRGKEFMSIHEAALTDLRDLLGVPASHRILFLQGGGIAENAIVPMNLLGSRTTADFVVTGSWSQKSFNEARKYGTPHLAATGKTEDGFTRAPARAEWQLSDDPAYVHLCTNETIDGVETFEIPDLGDVPLVADVSSHILSRPMDVAKYGVLFGGAQKNIGMAGVTLVIVREDLLDRALSICPSAFEWKTIAANNSLYNTPPTYAIYIAGLVFQWLKRQGGLEAIEARNIEKAKLLYDTIDASSFYLNKVEPAARSRMNVPFFLADETRNEDFLAGAKARGLLQLKGHKSVGGMRASIYNAVPLEGVKALVEYMKDFEQRGA

SEQ ID NO: 126208 - protein, 354 aa, Unknown
  Bacterial polypetide isolated from the Sargasso Sea
MKKHNFSAGPSILSNEVFSKASESVLNLNNIGLSLIEISHRSKDFVAIMEEARELSIDLLGLKAEDYTSLFLQGGASTQFLMIAYNFLSNDAGYINTGSWSVKAMKEAKLFGKVHELASSADKNFNYIPKQFNNHNSLDYLHITSNNTIFGTQYHHIPETNSNLFADMSSDIFSRNINYSKFSLIYAGAQKNIGAAGTTLVIIKKSLLDKICREVPSMLNYKVHVDKDSMFNTPPVFAVYTCLLSLKWLANNGGIDEIEKKNILKSKLLYDEIDRNSQFEGFANIDDRSIMNVTFNLVDESKKEVFDKLSQQSNISGINGHRSVGGYRASIYNAMPNESVQTLVDVMKKFENII

SEQ ID NO: 126209 - protein, 224 aa, Unknown
  Bacterial polypetide isolated from the Sargasso Sea
MDAESAYVHYTPNETIGGLCLRTLESSSVPVVADYSSGILSEPIEIDNFSLIYGGAQKNIGPSGLGFVIIKKELLGNPQPITPNLLNYTLIHEGESMSNTPPTFAWYVAGKVFKWLKSIGGVEAIAEINNRKATKLYDFIDNSDFYKNEIKTENRSIMNVPFLLNNEDLNSLFLEESNQAGLLALKGHRSVGGMRASIYNGLPEEGVDALLNFMESFEQKYSNA

SEQ ID NO: 126210 - protein, 139 aa, Unknown
  Bacterial polypetide isolated from the Sargasso Sea
SILKYSEHSKFDSMLNTPPTFSWYVAGKVFKWIKKCGGLDFFKEQNHLKASKLYDFIDKSGFYSNPVNIKNRSIMNIPFTLSDNELDSTFLKESEQNGLINLKGHRSVGGMRASIYNAMPLEGVEELIKFMDYFEKKYG

SEQ ID NO: 126211 - protein, 358 aa, Unknown
  Bacterial polypetide isolated from the Sargasso Sea
MRKWNFCAGPAVISEAVLEEVKSELLEFKKIGASIMEISHRSKTFMEVAEQAKNDLVDILKIPKNYDVLFLQGGATHQFSMVPYNFGHNNGQADYVLSGTWSKKAIAEASKITKVNTIASSEAKNFSYAPDPKDWRVDQNSAYVHYCPNETIQGVAIHEPPDINKPIISDASSVILSEPLDVNKFSLIYAGAQKNIGPAGLTIVIIDRDFMELGNQHIPNILKYSEHSRSNSMLNTPPTFAWYMAGKVFKWIKQCGGLEYFREQNHLKASKLYEFVDKSSFYLNNIDIKNRSIMNVTFFLENDELNSAFLQEAEQNGFLNLKGHRSVGGMRASIYNALPLEGVEELIKFMTYFESNNG

SEQ ID NO: 126212 - protein, 106 aa, Unknown
  Bacterial polypetide isolated from the Sargasso Sea
KKKGGLEFFKQQNYTKASKLYEYIDSSDFYSNNIDIENRSIMNVTFFLENDELGSQFLLHAEENGLLNLKGHRSVGGMRASIYNAMPLEGVEELIKYMKYFESKYG

SEQ ID NO: 126213 - protein, 120 aa, Unknown
  Bacterial polypetide isolated from the Sargasso Sea
TFAWYVAGRVFQWLESSGGISEMEKTNNIKAEKLYSFIDQSEFYENNINKEDRSIMNVPFQLKDEDLNSIFLETSKDAGLLALKGHRSVGGMRASIYNAMPEEGVDALVSFMATFEKERS

SEQ ID NO: 126214 - protein, 356 aa, Unknown
  Bacterial polypetide isolated from the Sargasso Sea
MKNKVHNFSAGPSILPNIVFEKASSAINNFNNSGLSILEISHRSKDFIEVLEEARSISLDIASLNKDDYSCLFLQGGASMQFLMVAYNFLNNKAGYVNTGSWSTKAIKEAKMFGDVSEIASSADKNFNYIPNLSTINDDFDYVHITSNNTIFGTQFHSFPETASPLFADMSSDIFSRNINFSKFDLIYAGAQKNLGPAGVTMVLIKNQLLDIIKRDVPSMLSYKVHIDKDSSFNTPPVFSIFSVLINLRLIKSEGLDSIEKKNSEKSKLIYDEIDRNKCFIGFSDNNDRSHMNATFNLADGYDADLFKSICSDNNISGINGHRSVGGFRASIYNALDIESVKTLITCMKEFESNYN

SEQ ID NO: 126215 - protein, 360 aa, Unknown
  Bacterial polypetide isolated from the Sargasso Sea
MKRIYNFSAGPGILPQDALDAASEAVIDYNNNGISILEMSHRSQPVVDLMNETSFLARELLSIPDNFHILWLQGGASTQFSMIPMNLLPDEQTADYTDTGLWAAKAIDEAKVFGDINIASSSKESLYRLINKNLGQTSKAIYLHITSNNTIYGTQWKRFPKVLNPEGFIVADMSSDIFSRKIDFNSFGLIYAGAQKNMGPAGVTMVIIRDDIIGKMKRHIPTMLDYRTHINKSSAYNTPPVSTIFVVNRTLKWLDKIGGITVIEKKNKIKSDKLYEELERNSVFTSPIRKEDRSQMNVPFVFIEERDENEFLKFCSNKGLITLKGHRSVGGFRASIYNAMPIEGVDALISAMQEYESILS

SEQ ID NO: 126216 - protein, 359 aa, Unknown
  Bacterial polypetide isolated from the Sargasso Sea
MLRKYNFGAGPATMPEAVLKEVQDELLDWNGLGLSVMEISHRSPEFIEIAKQAEQDFRDLLSISEDFAVLFTHGGATMQNAMVPLNLATQDGNADYVNSGHWAKRSIKEAQRYTNVNIAASSEEEDFRFFPKQESWKLSENSSYVHYTPNETIGGLCLRSIEHSEVPIVADYSSGILSEPLDVSKFSLIYGGAQKNIGPSGLGFVIIKKDLLGNPQPITPNLLNYTLIHEGESMSNTPPTFAWYVAGKVFKWLKSLGGVEEIAKINIRKADKLYSYIDGSNFYRNNINTEDRSIMNVPFLLANEDLNDKFLEQSKEAGLLALKGHRSVGGMRASIYNGLPEEGVDALVDFMEVFSKENS

SEQ ID NO: 126217 - protein, 278 aa, Unknown
  Bacterial polypetide isolated from the Sargasso Sea
MIPMNFKHLTGTADYVTTGSWTKKAFEEGSKIMDIKNIFSSEDSNYTNAPDIEELDLSANASYVHYCPNETIQGNAIHKTPKIDKPLIADMSSVILSEPLDVSNFSLIYAGAQKNIGPAGLTIVIIEKEFMRNGNPDIPNLLKYSEHSKFDSMLNTPPTFSWYVAGKVFKWIKKCGGLDFFKKQNNLKASKLYNFIDNSNFYTNPVETKNRSIMNIPFILSNDKLESSFLKESDQNGLLNLKGHRSVGGMRASIYNAMPLEGVEELIKFMDYFEKKYG

SEQ ID NO: 126218 - protein, 199 aa, Unknown
  Bacterial polypetide isolated from the Sargasso Sea
IADSEVPIVADYSSAILSESIDVSKFALIYGGAQKNIGPAGLGFAIIKKDLLGAAQSITPTMLNYSEMHQGASMYNTPPTFAWYMAGKIFKWLKSMGGISEIEKLNNQKAKKLYSFIDQSEFYRNGINKEDRSIMNIPFQLRQEDLNEQFLIDSRDAGLLALKGHRSVGGMRASIYNAMPEEGVDALIDFMELFEKDKS

SEQ ID NO: 126219 - protein, 359 aa, Unknown
  Bacterial polypetide isolated from the Sargasso Sea
MARSINFAAGPSALPTEVLERAKAELLDYQYTGMSIMEMSHRGSEFREVLAKAESDFRSLLAISEDYHVLFLQGGATAQFAAVPLNLVREHRNTDYLDTGSWSRKAIKEAGAFSDVHTVATSEEDSYHHIPPEDEWDIRTETSYVHICSNETIGGLQFKQFPKLEVPLVADMSSDILSRELDIENFGAIYAGAQKNIGPAGLAIVVVRKDLLGLNNNSIPSFLDYSLQAEADSMLNTPPTFTIYLAGLVFDWLRSKGGLSEIEKENEYKAGLIYEVIERGDFYSCPVHRAFRSTMNIPFRLKVEELEPVFLESAEHAGLFNLKGHRSVGGMRASIYNAVPVSWVEDLIKFMNDFENEYG

SEQ ID NO: 126220 - protein, 358 aa, Unknown
  Bacterial polypetide isolated from the Sargasso Sea
MRKWNFCAGPAVISEEVLEEVKSELLEYNNSGTSIMEVSHRSRLYSSVAVEAKQDLIDILNIPKNYDVLFLQGGATHQFSMVPYNFGNSSGEADYILSGSWSKKAISEASKIIKVNTIASSEAKNYSYAPDPKTWKISENSAYVHYCPNETIQGVAIHEAPNVNKPIISDASSVILSEPLDVSKFSLIYAGAQKNIGPAGLTIVIIDRDFMELGNQKIPNILKYSEHSIAESMLNTPPTFAWYMAGKVFKWIKKKGGLEFFKQQNYSKASKLYEYIDSSDFYSNNIDIENRSIMNVTFFLENDELDSPFLLHAEENGLLNLKGHRSVGGMRASIYNAMPLEGVEELIKYMKYFESKYG

SEQ ID NO: 126221 - protein, 360 aa, Unknown
  Bacterial polypetide isolated from the Sargasso Sea
MKSKIANFSAGPAAIPQEVLQEVKNELLNYKNIGSSIIEISHRDKTFVDIANQAKIDVIDLLNVPNDYEVIFLQGGATLQFSMIPLNFSYLGKVANFAEIGSWSSKAIKEASNICEVNVCTSSKDNNFTKIENFDEWNIVQDTSIVHYCKNETIQGVRVNHDIETNYPLFVDMSSCLFSETIDIKKYDFIYACAQKNFGPSGITLIILKRELLEKSNKDLPNILKYDAHAKENSMLNTPNTFGWYVAGKIFSWYKKNGGVKEMEKNSIKKTNHLYQIIDNSDFYINPVFQEQRSICNVVFTLQNDELESKFLSGAEENGLFYLKGHRSVGGMRASIYNPLEFEHVERLGQYMIDFEKKYG

SEQ ID NO: 126222 - protein, 285 aa, Unknown
  Bacterial polypetide isolated from the Sargasso Sea
GATHQFSMIAYNYKHLSGTADYVTTGSWSTKAFNEASKIFDSNEIFRSDESICTKVPNIEELKLSKNAAYLHYCPNETIEGVAFHETPKIDTPLVADMSSVILSQPLDVNKFSIIYAGAQKNIGPAGLTIVIINKEFMEMGNTNLPNILKYSEHSKSNSMLNTPPTFSWYLAGKVFKWMLSHGGLDYFEKQNKLKASMLYDFIDNSDFYVNIIDAKSRSIMNVPFILKKPMYEEKFLNEASNNGFLNLKGHRSVGGMRASIYNAMPLEGVKELIKFMDYFKSKNG

SEQ ID NO: 126223 - protein, 98 aa, Unknown
  Bacterial polypetide isolated from the Sargasso Sea
MEKLSIQKSSLLYNIIDSSDFYLNPVNPKQRSRCNVVFTLLDEKLEKKFVDEADSEGLKYLKGHRSVGGMRASIYNAMKLSSVEALASFMEEFEKKYG

SEQ ID NO: 126224 - protein, 180 aa, Unknown
  Bacterial polypetide isolated from the Sargasso Sea
MKTVYNFSAGPAVLHPSVIRSTADAANNFNNSGMSLMEMSHRSKPVVDMVNETEELSRELLQIPREFEVLFLQGGASLQFSMIPMNLLTKDAQADYTDTGSWSFKALNQAKLFGKVNIASSSRTSNYSFIPKEINQLTESIYLHITSNNTIYGTQWKEFPKPLNSSGFLVADMSSDIFSR

SEQ ID NO: 126225 - protein, 351 aa, Unknown
  Bacterial polypetide isolated from the Sargasso Sea
GPAALPTAVLQRAQAEMLHWQGKGLSVMEMSHRSDEYVAIASQAEQDLRDLLAVPNDYKVLFLQGGASQQFAEIPLNLLPEGGVADYVETGIWSKKAIEEARRYGAINVAASAKAHDYFAIPGQNDWQLSKDAAYVHYCSNETIGGLQFDWVPQVGDTPLVADMSSDILSRSLDVSQFGLIYAGAQKNIGPSGLVVVIVREDLLGRARSSCPTMLDYKISADNGSMYNTPATYSWYLSGLVFQWLKEQGGVEAMERINRAKKDLLYKAIDDSDFYSNPIAHNARSWMNVPFRLADERLDKAFLAGADERGLLNLKGHRSVGGMRASIYNAVGMDAVEALVAYMAEFEKEHA

SEQ ID NO: 126226 - protein, 205 aa, Unknown
  Bacterial polypetide isolated from the Sargasso Sea
GVAIHEIPKVDIPLIADMSSVILSQPLDVNKFAIIYAGAQKNIGPAGLTIVIINKEFMQMGNKNLPNILKYSEHSKSNSMLNTPPTFSWYLAGKVFKWMINLGGLDYFEEQNKLKASLLYDFIDNSDFYINPIDTSCRSIMNVPFVLENSMLEEKFISEASDNGFLNLKGHRLVGGMRASIYNAMPLEGVKELIKFMDYFKSENG

SEQ ID NO: 126227 - protein, 358 aa, Unknown
  Bacterial polypetide isolated from the Sargasso Sea
MRKWNFSPGPATIPEDVLLEVQSELLEFNNSGISIMEMSHRTELYSSIAYEAKKDLIEILNIPDNYEVLFLQGGATHQFSMIPMNFSHLHGKPAYITTGTWTKRAFEEGSKITEIDQIFSSENENFIYAPHFKDLKIPKDASYVHYCPNETIHGVAFDHIPTISNPLVADMSSSILSEPIDVNKFSLIYASAQKNIGPSGLTVVIIKKSFMKQGNKTLTNLLRYSEHSKQDSMLNTPPTFSWYVAGKVFKWIKKLGGLDHFKELNTLKALKLYRVIDNSDFYINPVHINNRSIVNIPFVLKDKKLEPLFLKESTENGLLNLKGHFTVGGIRASIYNAMPLEGVEDLIKFMDYFESKYS

SEQ ID NO: 126228 - protein, 359 aa, Unknown
  Bacterial polypetide isolated from the Sargasso Sea
MTRAFNFCAGPAALPEEVLKELQEETLDYKNHGLAVMEMSHRSKEFVSIAEQAKQDFIDLLSIPDEYDVLFIQGGASLQFSMIPMNLGIKNQKLDYLEVGSWSKKAIAEAKKFHDVNIAASSKDISFKKYPSINDWNITDDSSYIHMVMNETIEGVACRSLNDLPEKVIVSDCSSNILSEPLDVKKFGLIYAGAQKNIGPAGLAIVIIRKDLIQKRDDLPALMSYQTYADSESMYNTPPTFAWYLSGKVFSWLKRNGGLKSIEEINLRKAKKLYDYIDNSDFYYNDVSIESRSIMNVPFLLNDDSLNDSFLKESEKEGLLNLAGHRSVGGMRASIYNAVPEEAIDALVSFMDVFANKYG

SEQ ID NO: 126229 - protein, 168 aa, Unknown
  Bacterial polypetide isolated from the Sargasso Sea
GAQKNIGPSGLSIVIVRDDMLKLPSLTQSSIMDYRLAVEHDSMFNTPPTFAWYLAAEVFAWLKSLGGVASIAKVNQQKAQMLYACIDANPFYKNGVVAANRSQMNVTFQLADESLDGAFLKEAEAAGLVALKGHRIVGGMRASLYNAMPLEGVAALVSFMNEFAAKHS

SEQ ID NO: 126230 - protein, 362 aa, Unknown
  Bacterial polypetide isolated from the Sargasso Sea
MRKWNFCAGPAAIPEEVLREAQNELLEWNLSGSSVMEVSHRSDLFAEVAASSTKDIKALLNIGDDHEVLFLQGGATLQFTSVPLNFTKKSSIVSYLNTGLWSKKAIKAASKYASVNVVASSEESNYTHVPSAQEWRVDSDSIYFHYVMNETIQGLAMRDPISSEKPLICDMSSCILSEEVDFHNLDLVYAGAQKNIGPAGLTLVIIKKDFLEKANEDIPDILSYKKNSQAGSMLNTPPTFAWYLAGKVFKWLLKKGGVKSIQKENEKKAKLLYDFIDSSSFYSNPIEKKYRSIMNVPFLLNDKNADSLFLEKAEINGLLNLKGHRSVGGMRASIYNATPFEAVEDLVSFMIDFERSYTGNGK

SEQ ID NO: 126231 - protein, 358 aa, Unknown
  Bacterial polypetide isolated from the Sargasso Sea
MRQWNFCAGPAAISEEVLQDLKSELLEYKNSGTSVMEMSHRSEIYTKIAHEAKSDLIEILNIPNNYEVLFLQGGATYQFSMIPMNFKHLTGTADYVTTGTWTKKAHAEGSKIIDINEIYSSEDSNFTCAPDIEKLDISENASYVHYCPNETIQGNAIHDVPNINKPLIADMSSVILSEPIDISKFSLIYAGAQKNIGPAGLTIVIIDKEFMSMDDNSLPNLLRYSQHSKSNSMLNTPPTFAWYMAGKVFKWIKNSGGLDYFKELNHKKASKLYGYIDDSSFYSNPVDINNRSIMNVTFVLADSGLDSLFLEESNTNGLLSLKGHRSIGGMRASIYNAMPLKGVEELIEFMKYFESKYG

SEQ ID NO: 126232 - protein, 358 aa, Unknown
  Bacterial polypetide isolated from the Sargasso Sea
MIKTYNFSAGPAMLNPYVLEATSQATIEYNDCGMSLMEMSHRSQPVVDMVKETELLVGELLQLPQHYQVLFLQGGASLQFSMIPMNLLGPDQVADYTDTGAWAHKAITEAQLFGKVNVACSSKDSSYNHIPKNLKCSKDAVYLHLTSNNTIYGTQWASFPNLDDSRSYLIADMSSDIFSREFDITNFGLIYAGAQKNIGPAGVTLVIIRDDILGKIKREAPMMMRYQTHIEKQSMFNTPPVMAIYAVNRSLEWLKNNGGVSGIEQKNLIKAEKLYAEIERNNLFKSPVAIEDRSLMNVPFIFSGKGSDEDFLSFCDKRGLKTLKGHRSVGGFRASIYNAMPLEGINALVQAMQDYESK

SEQ ID NO: 126233 - protein, 297 aa, Unknown
  Bacterial polypetide isolated from the Sargasso Sea
MLEYNSSGASIIEIGHRTDIYSQVAEESKNDLIEILKIPNSHEVLFLQGGATHQFSMIPLNFRNMGNNADYVVSGTWSKKAADEASKLIDVNISASSENMSFSVFPKCSDWDISKHSSYVHYCPNETIQGIAMHEIPEIDKPLMADMTSVILSQPLDVSKFDLIYAGAQKNIGPAGLTIVIISKELMEKGDSSLPKILRYSEHSKANSMLNTPPTFSWYFAGKVFKWIKRSGGLEHFEALNKKKAKKLYDFIDSSDFYVNNLSKSQRSLMNVTFNLKNDDLNSFFLNESKANSLLNL

SEQ ID NO: 126234 - protein, 360 aa, Unknown
  Bacterial polypetide isolated from the Sargasso Sea
MKKIYNFSAGPACLPQSAIEGAKEAIKDFQGSGISLLEMSHRSTPIVNLFEETTNNLRNLLKIPDKYDIIWLQGGASTQFSMVPMNLLPENGCADYIDTGSWSAKAIVECKRVGAVNIIGSSRDSLYTYIPKDAFPIEGSSYLHITSNNTIYGTQFKKYPTTNDKYFLVADMSSDILSKPIDVSKFGLIYAGAQKNMGPAGVTLVIIRSDLAEINYRDIPTMMKYSTHVSKDSMFNTPPVFSVCVVNETLKWIKSIGGLHQMKTINDSKASLLYDEIDRNTLFKSPVVYEDRSNMNVPFIFNNNNLKDEEFLGFCEKRGLRTLKGHRSVGGFRASIYNAMPVAGVEALIAAMQEYEHIHS

SEQ ID NO: 126235 - protein, 188 aa, Unknown
  Bacterial polypetide isolated from the Sargasso Sea
MSSCLFSETIDIKKYDFIYACAQKNFGPSGITLIILKRELLEKSNKDLPNILKYDAHAKENSMLNTPNTFGWYVAGKIFSWYKKNGGVKEMEKNSIKKTNHLYQIIDNSDFYINPVFQEQRSICNVVFTLQNDELESKFLSGAEENGLFYLKGHRSVGGMRASIYNPLEFEHVERLGQYMINFEKKYG

SEQ ID NO: 126236 - protein, 358 aa, Unknown
  Bacterial polypetide isolated from the Sargasso Sea
MTKVYNFSAGPAMLPEAVMQQAQQELLDWQGLGVSVMEISHRSAEFKAIAATAEADMRELLGVSDDYAVLFLHGGGQSQFSMVPMNLLGDADEVAYTDFGTWGHLAIAEARRYAKVRVVAELQTEGLIALPPQSQWQAADDCAYLYTVDNETVQGVEIPWQVDSPVPLVSDMSSNLLTRPVDVSRYGLIYACAQKNLGPAGVTIVVVKKSLLERVPISTTPKMFDYRQHVDKQSMLNTSPTFPWYMTGLVLKWMKAEGGVAEFARRNAEKAQALYACIDASEWFVSQVDPACRSRMNAVFHCREPQHEAAFLQFAHNEGLLGLKGHRSVGGLRASIYNAMPMAGVQRLIEVIQAFSPV

SEQ ID NO: 126237 - protein, 363 aa, Unknown
  Bacterial polypetide isolated from the Sargasso Sea
MGPSGRIHNFGAGPAVLPLEVVKEVAETLPNLGGSGFGLMEVSHRSQTFQDVIDSAMSRLRGLLGIPDDYEVLFLQGGASTQFYMSALNLMSEGGMADYLVTGIWSKKALVEANRIGDASAVWDDSGSGFRSVPGDGDYSVRDGAEYLHYTSNNTLFGTQFHHLPDSGGKPRVVDASSDICGAKIDVSEHDLIYAGAQKNLGPSGVTVVILSPWASSRRKEGLPTMLDYQTHISKGSMFNTPNTFGIFVLDRVLAWVERNGGLEGAIGRNSEKSGVLYDILDSSDFWRPHADSGCRSMMNVTWRLADESLEQVFLEEAGDSGMGGLKGHRSVGGIRASLYNGCPIESVEALASFMTDFESRHG

SEQ ID NO: 126238 - protein, 372 aa, Unknown
  Bacterial polypetide isolated from the Sargasso Sea
MFVFRASFQDLMMRVFNFSAGPAAMPEEVLRQAADEMLDWQGSGMSVMEMSHRGKEFMSIHEEALVDLRELLQVPASHRILFLQGGGLGENAIVPMNLMGAKARADFIVTGSWSQKSFKEAQKYGTAHLAASGQTAEGFTRAPARSEWQLSDDPAYVHLCTNETIHGVETFEIPDLGNIPLVADASSHILSRPMDIAKYGVLFGGAQKNIGMAGVTVVIVREDMLDRAQAICPSAFEWKTVAENNSMYNTPPTYAIYIAGLVFKWLKKQGGLTAMEARNLEKSKLLYDAIDSSSFYLNKVERGSRSRMNVPFFLADESRNEDFLAGAKARGMVQLKGHKSVGGMRASIYNAVPLEGVKALVEYMKEFEQRTA

SEQ ID NO: 126239 - protein, 316 aa, Unknown
  Bacterial polypetide isolated from the Sargasso Sea
MRGWNFSAGPAAIPQEVIKEVQEELLEYNSSGASIIEIGHRTDIYSQVAEESKNDLIEILKIPNSHEVLFLQGGATHQFSMIPLNFRNMGNNADYVVSGTWSKKAADEASKLIDVNMSASSENMSFSVFPKCSDWDISKHSSYVHYCPNETIQGIALHEIPKLDKPLIADMTSVILSQPLDVSKFDLIYAGAQKNIGPAGLTIVIISKELMEKGDSSLPKILRYSEHSKANSMLNTPPTFSWYFAGKVFKWIKRSGGLDHFEALNKKKAEKLYDFIDSSDFYENNLQKSQRSLMNVTFNLKNDDLNSSFLDESKAN

SEQ ID NO: 126240 - protein, 164 aa, Unknown
  Bacterial polypetide isolated from the Sargasso Sea
NIGPSGLGFVIVKKDLLGKAQSITPNLLNYTLINEGESMSNTPPTFAWYVAGKVFKWLKSMGGVEAISMINNRKANKLYDYIDSSDFYSNNINIENRSIMNVPFLLGNEDLNDKFLEASKEAGLLALKGHRSVGGMRASIYNGLPEEAVDALIEFMDVFQKEYS

SEQ ID NO: 126241 - protein, 297 aa, Unknown
  Bacterial polypetide isolated from the Sargasso Sea
VPSNYHVLWLQGGASMQFSMVPMNLLSKRSTADYIETGAWSTKAITECNRVATANVIASSKEEIFNYIPKEYNQNIESKYLHITSNNTIYGTQYKVFPKPRNTEGYLVADMSSDIFSRSINVSDFGLIYAGAQKNMGPAGVTLVIVRDDLVINELDHLPTMMRYDTHVKKDSMFNTPPVLSVFVVNETLKWIADQGGVGSIENSNKIMSDKLYTEIERNTLFRSPVAIEDRSTMNVAFVFNDRSMDDNEFLQFCDARGLKTLKGHRSVGGFRASIYNAMPIEGVDALIKAMQNYEDR

SEQ ID NO: 126242 - protein, 206 aa, Unknown
  Bacterial polypetide isolated from the Sargasso Sea
IAYCCAKNNVLFIVDEIATGFGRTGTLFASEQANIMPDIMCIGKALTGGCIGMAATAASERVFSAFLSNDVDVAFMHGPTYMANPLAATAANASLDLFENGERLQQVDRIKNTLSEELEPCRKIPGIKDVRVMGAVGVVQMTSPRDIDWLRQRFTEENVWIRPFGDVVYLMPSFIINKDELTALTRAVVRVMTEWSNRQKQDQEQI

SEQ ID NO: 126243 - protein, 282 aa, Unknown
  Bacterial polypetide isolated from the Sargasso Sea
MNKPHPNLWYPYAQMKHLDFVPKAKKTLGSKITLENGEVLIDGVASWWTSCHGYNHPDIINAMQKQLNDMPHIMFGGFTHKPAEDLASNLKTLLPSIYNHYFFVDSGSVAVEVSMKMAIQYWVNKNNKNKRKFLSFKNGYHGDTLGAMSICDPLEGMHSLFKDYVPEQINTDIPIDKAKKENFKNIVFDNKEELAAIIIEPLVQCAGGFKFHNDSTLKFISEIAKENNILFIVDEIATGFGRTGSMFAFQNSKILPDIICLGKALTGGVISLASVVSTDAVY

SEQ ID NO: 126244 - protein, 255 aa, Unknown
  Bacterial polypetide isolated from the Sargasso Sea
ADGVRIKLSDGKDLVDGTSSWWTACHGYGHPHIIEKVTEQLNSMPHVMLGGFVHEPVLTLAKRLTDLLPGDLNHVFFSESGSVSVEISLKMAIQYWRNQGDKRRVKFISFRGGYHGDTMSAMSVCDPEEGMHKLFKGVILEQFVLDLPRDKAGFVGLESFLQREATRVAAVVLEPLVQAAGGMKFHTPEILAKIADTCRRYDVLLILDEIATGFGRTGSMFACEQADVIPDIMTLSKALTGGTMALAATVATDRG

SEQ ID NO: 126245 - protein, 169 aa, Unknown
  Bacterial polypetide isolated from the Sargasso Sea
MNPSQLWLPYCQMQTAPAPQTAVRTEGVRIFLQDGRSLIDGTSSWWTACHGYNHPHIRHAVAEQLESMPHIMLGGLVHTPVLRLTDRLARLFPGELNYVFYCESGSVAVEIAMKMALQYWINQDISGRTRFVSFRDAYHGDTFAAMSVCDPEDGMHRLFKGVLAEQLIL

SEQ ID NO: 126246 - protein, 178 aa, Unknown
  Bacterial polypetide isolated from the Sargasso Sea
IATGFGRTGKLFAYEHTKVTPDIMCIGKALTGGYLSLAATLTTSNVHEVIDGGDPGVFMHGPTFMANPLACCAALASTDLLLQSSWQKAISRIEKNLENGLMPCIDMNQVNDVRVMGGIGVVELKNEVDMQKIIPEFVKRGVWIRPFGKLVYLMPPYITNDDDLNLLTKAIVEVVNTQ

SEQ ID NO: 126247 - protein, 97 aa, Unknown
  Bacterial polypetide isolated from the Sargasso Sea
MRGPDTEQLAFDSQHIWHPYSSMINPPQMFPVESASGVRLRLTDGRELIDGMASWWSVVHGYNHPALNQAAHEQIDRMSHVMFGGLTHSPAIELSRK

SEQ ID NO: 126248 - protein, 286 aa, Unknown
  Bacterial polypetide isolated from the Sargasso Sea
TILPGPLNRVFFADSGSVAVEIAMKMAVQYRLNRGDTGRTRFLSFRNGYHGDTLAAMSVTDPDEGMHALFKGYLPEQVIAPVPRDDATAAEFRRLLDAHGDELAGVIVEPLVQCAGGIKMHDPAVLKTIGDAAHRAGALLICDEVAVNFGRTGTLFAHTQANIAPDVICLGKALTGGAINLAATVATAEVFEAFLSDDANAALMHGPTYMANPLACAAANASLDLFETEPRLQQVATIEAQLSRELAPLAETPGVVDVRVKGAVGAVEVADLHDLDWLKAQFVDAG

SEQ ID NO: 126249 - protein, 214 aa, Unknown
  Bacterial polypetide isolated from the Sargasso Sea
MRNLLDFDFDSAHIWHPYTSMTRALPVFGVHSAQGCELELVDGRKLIDGTSSWWACVHGYGHPAILTAMERQLHQLSHVMFGGITHEPAITLCKKLLAMTCEPLTKVFLCDSGSIAVEVAIKMALQYWQGQDLPLAQKAQKQRILTVKKGYHGDTFAAMSVCDPEGGMHTMFGEAVTKQCFVDAPQTPFGEPLRQDDLAPNATYFTRATSRHAA

SEQ ID NO: 126250 - protein, 226 aa, Unknown
  Bacterial polypetide isolated from the Sargasso Sea
CGLGEVITADGAKGLNKVFFADSGSISVEVAIKMALQCWLGLGQPEKSRLLTIQKGYHGDTFAAMSVCDPVDGMHSMFKHQIIPQLFAPAPQSQFDGDFLAEDEQALTALFEKHHQHLAAFILEPILQGAGGMRFYHPEYLKLARKLCDQYQVLLIADEIATGFGRTGKLFACQHADISPDIICLGKALTGGYLTLAATLCNEKVADGIAKGAVPALMHGPTYMAN

SEQ ID NO: 126251 - protein, 260 aa, Unknown
  Bacterial polypetide isolated from the Sargasso Sea
AILTAMERQLHQLSHVMFGGITHEPAITLCKKLLAMTCEPLTKVFLCDSGSIAVEVAIKMALQYWQGQDLPLAQKAQKQRILTVKKGYHGDTFAAMSVCDPEGGMHTMFGEAVTKQCFVDAPQTPFGEPLRQDDLAPMQRILREQHPEIAAVIIEPIMQGAGGMRFYSSEYLRGLRALCDEYNVLLILDEIATGFGRTGKLFAYEHADITPDILSLGKALTGGYISLAATLCTDNVAQGISQSPAGVFKHGPTFMGNPLA

SEQ ID NO: 126252 - protein, 309 aa, Unknown
  Bacterial polypetide isolated from the Sargasso Sea
MGGITHAPAIALCRQLVAMTPEALECVFLADSGSVAVEVAMKMALQYWQAKGESRQRFLTFRNGYHGDTFGAMSVCDPDNSMHSLWKGYLPDNLFAPAPQSRMGGEWDELDMVPFARLMAAHRHEIAAVILEPIVQGAGGMRMYHPEWLKRIRKMCDREGILLIADEIATGFGRTGKLFACEHADITPDILCLGKALTGGTMTLSATLTTRLVAETISNGEAGCFMHGPTFMGNPLACAVASASLSLLETGEWRSQVAAIEAQLREELAPAADSRWVADVRVLGAIGVIETTHPVNMAALQKFFVERGV

SEQ ID NO: 126253 - protein, 287 aa, Unknown
  Bacterial polypetide isolated from the Sargasso Sea
WLIDGISSWWTACHGYNHEHIIDAMHKQLDEMPHIMFGGLTHEPALKLASRLTDILPGAGSPNALSHIFFSDSGSVAIEVALKMALQYWINIGEKTRKRFVSFKNAYHGDTTGAMSVCDPDEGIHANFKGAILEQIIIEIPKTADQISEFENLLVGGRNEIAGVIIEPLVQAAGGLKFHTNQTLSVIYEICVRNGILFIADEIATGFGRTGSMFACHQADITPDIMCLGKALTGGTISMAATASNQEVFSAFLSGDEKTALMHGPTFMANPLAAAAANASLDLLKTA

SEQ ID NO: 126254 - protein, 271 aa, Unknown
  Bacterial polypetide isolated from the Sargasso Sea
YGHPAILTAMERQLHQLSHVMFGGITHEPAITLCKKLLAMTCEPLTKVFLCDSGSIAVEVAIKMALQYWQGQDLPLAQKAQKQRILTVKKGYHGDTFAAMSVCDPEGGMHTMFGEAVTKQCFVDAPQTPFGEPLRQDDLAPMQRILREQHPEIAAVIIEPIMQGAGGMRFYSSEYLRGLRALCDEYNVLLILDEIATGFGRTGKLFAYEHADITPDILSLGKALTGGYISLAATLCTDNVAQGISQSPAGVFMHGPTFMGNPLACAAACAS

SEQ ID NO: 126255 - protein, 435 aa, Unknown
  Bacterial polypetide isolated from the Sargasso Sea
MSINLEFDRQHIWHPYTSLSKPLPVYPVVSAHGCELMLEDGRTLVDGTSSWWAAIHGYNHPELNAALVTQSQKMSHVMFGGITHQPAVDLAKLLLEMVPQGLSKVFFADSGSISVEVAIKMALQYWLGLGQPEKSRLLTIQKGYHGDTFAAMSVCDPVDGMHSMFKDQIIPQLFAPAPQSQFDGEFLAADELALTALFEQHHQQLAAFILEPILQGAGGMRFYHPDYLKLARKLCDEYQVLLIADEIATGFGRTGKLFACQHAGISPDIICLGKALTGGYLTLAATLCNDKVADGIAQGAVPALMHGPTYMANPLACAVALKSLQLVQKNYWPAQVAAIEQQLKLELEPCRNSPYVADVRVLGAIGVVEMKQNIDVAAMQKAFVELGVWIRPFGKLQYLMPPYIISKTQLSKLTSALCLLSHQAQQKDIQALPGA

SEQ ID NO: 126256 - protein, 353 aa, Unknown
  Bacterial polypetide isolated from the Sargasso Sea
MTNQEFDLHHVWHPYTSLTHPLPCYEVASARGVTLTLSDGRELVDGMSSWWACVHGYQVPELDAAATAQLGKMSHVMFGGLTHAPAVDLCRKLVEITPAKLDRVFLADSGSVAVEVALKMAQQYWHAKGTPRAKFVALRGGYHGDTFGAMSVCDPDGGMHELYKGFLPEHHFVEAPSCRFHAEWDEQCVVELATLVADHHEEIAAIVLEPIVQGAGGMRFYHPRYLQWVRALCDEFGLLLIADEIATGFGRTGQLFACDWAGISPDIMCLGKALTGGYLTLSATLTTEHVARTVCDGKAGVFMHGPTFMGNPLACAVANASIDLLLASPWQERVRAIEHQLRTELVALTLHPA

SEQ ID NO: 126257 - protein, 452 aa, Unknown
  Bacterial polypetide isolated from the Sargasso Sea
MRNLLDLDFDSAHIWHPYTSMTRALPVYGVHSAQGCELELVDGSKLIDGTSSWWACVHGYGHPAILTAMERQLHQLSHVMFGGITHEPAITLCKKLLAMTCEPLTKVFLCDSGSIAVEVAIKMALQYWQGQDLPLAQKAQKQRILTVKKGYHGDTFAAMSVCDPEGGMHTMFGEAVTKQCFVDAPQTPFGEPLRQDDLAPMQRILREQHPEIAAVIIEPIMQGAGGMRFYSSEYLRGLRALCDEYNVLLILDEIATGFGRTGKLFAYEHADITPDILSLGKALTGGYISLAATLCTDNVAQGISQSPAGVFMHGPTFMGNPLACAAACASLDLINQQEWPAQVAAIEQQMQRELADAIDIPSVKEVRVLGAVGVLEMHQAVNTAALQQQFVDLGVWVRPFANLIYIMPPYVISSSQLTRLTQAMKQVAATIAPPHANQSEALVTESITISHG

SEQ ID NO: 126258 - protein, 452 aa, Unknown
  Bacterial polypetide isolated from the Sargasso Sea
MRNLLDLDFDSAHIWHPYTSMTRALPVFGVHSAQGCELELVDGRKLIDGTSSWWACVHGYGHPAILTAMERQLHQLSHVMFGGITHEPAIELCKKLLAMTCEPLTKIFLCDSGSIAVEVAIKMALQYWQGQDLPLAQKAQKQRILTVKKGYHGDTFAAMSVCDPEGGMHTMFGEAVTKQCFVDAPQTPFGESLHQDDLAPMQRILREQHQDIAAVIIEPIMQGAGGMRFYSSEYLRGLRALCDEYNVLLILDEIATGFGRTGKLFAYEHADITPDILCLGKALTGGYISLAATLCTDNVAQGISQSPAGVFMHGPTFMGNPLACAAACASLDLINQQEWPAQVAAIEQQMQRELADAIDIPSVKAVRVLGAVGVLEMHQAVNTAALQQQFVDLGVWVRPFANLIYIMPPYVISPAQLTQLTQAMKQVAATITPPKTTSDDASRGQNICISHG

SEQ ID NO: 126259 - protein, 142 aa, Unknown
  Bacterial polypetide isolated from the Sargasso Sea
MNTFEQFEKNESDIRSYCRSFPVVFKQARGAELVTREGKSYIDFLAGAGTLNYGHNNPILKKALIQYLEDDGITHGLDMYSDAKERFLETFNRVILEPRGLGAYKVQFSGPTGANSVEAALKLARRVTGRSNVISFTNGFHG

SEQ ID NO: 126260 - protein, 281 aa, Unknown
  Bacterial polypetide isolated from the Sargasso Sea
MNDINLEIHLGDNLKILKKFKDKSIDLIYIDPPFNTGKIQSRTRIKTTRSDDGDRIGFKGQTYKTEILGKQSYKDIFDDYIEFLRERIIEAKRILKPNGSFFLHLDYREIHYAKVMCDEIFGRESFINEIIWSYDYGARSKSKWSAKHDNILWYAINPDDYTFNYDEIDRIPYLAPSLVGPEKAAKGKTPTDSWWHTIVSPNSKEKTGYPTQKPMGVLNRIIRVHSNKNDKVLDFFAGAGTTGEAAIQNKRNAILIDNYDQAVKVMKKRFEFHKNTKYLIH

SEQ ID NO: 126261 - protein, 123 aa, Unknown
  Bacterial polypetide isolated from the Sargasso Sea
MTVFDRLESEVQSYARSFPVTFEKAEGAWLTDDNGNRYLDFLAGAGSLNYGHNHPVLQEKLIDYIKSNGITHGLDMHTKAKAAFLEALEGKILKPRDMEYKVQFTGPTGTNAVEAALKLARRV

SEQ ID NO: 126262 - protein, 241 aa, Unknown
  Bacterial polypetide isolated from the Sargasso Sea
MLLPLEADYRQNIERMVDVTNRNARDVGFVYLCNPNNPTGVTVTADEISYLLDNIPEDIPVLIDEAYHHFVEDPAYEESLKYVRDGRRVVIARTFSKIYGMAAMRIGFAIAPPDMIQEMRPYSTGSVNALARWGAVASMEDQPAAERMLVHNKRLREQTISDLESLGYECIPSQTNFFMVNLRQTVAPIRQAFRQRGVAVGRDFPPMLDHLRVSIGTEDEMGRFMNAFEDIMKTMSAGAGD

SEQ ID NO: 126263 - protein, 330 aa, Unknown
  Bacterial polypetide isolated from the Sargasso Sea
GGLSKIEGVNKFYKLSSNENPFGPSSNAIAEYEKVSNDLGLYPDSSNTALKLAISSKYSIDSDRIVCGCGSDEILHLLARVYLDEGNQGLVSENAFAVYPLAIQSSGATVVRAKEEDFQPNIDNFISSLTDETKIIYIANPNNPTGSYIKFDEIERLNRSVPNDVLFVIDAAYSEYVEEEDYSIGFELAKDSENIVITKTFSKAFGLAGLRVGWAYCPKKIAEKLDILKVPFSVNTAAQMAAISALEDDDHINFSIEHNSKWKKILNDCFAEVGLIVYPSQCNFILVEFLESSKFSAKEAYHLLISKGIIVREMEEYNLPNCLRITIGKE

SEQ ID NO: 126264 - protein, 106 aa, Unknown
  Bacterial polypetide isolated from the Sargasso Sea
MSKLVRENIASMQGYSWGEQPKTSTNLIKLNTNENPYPPSPNVIRALQTLDTEGLRTYPNPLADELRAEVAKLNQIADENVVITNGGDEGLRLSLTTFVDPGETVC

SEQ ID NO: 126265 - protein, 258 aa, Unknown
  Bacterial polypetide isolated from the Sargasso Sea
MDLKKLVNKGIDGLSPYEPGKPIEDLERELGIKNAVKLASNENPVGPSPKIIDSIEKIVKETHRYPDGNATRLKAKISSKFNILENQVTVGNGSNDIIEFVARSFLGPNDSAVYSEHAFAVYPLVVRAVGAMGIEVPAKNFSHDLEAMLDSIEENTKLIFIANPNNPTGSFIQQSELLNFLEKVPEEIIVLLDQAYFEYSSFETSDLEFDVLERFPNLVISRSFSKAYGLAGFRVGYSVSSIEIADYLNQGKTTLQCK

SEQ ID NO: 126266 - protein, 186 aa, Unknown
  Bacterial polypetide isolated from the Sargasso Sea
ALEELILSFKGPIIIDEAYVEFADTSVVSLVKQFDNLIVVRTLSKAFGLAGLRLGYFAASKKIADVFTKIIQYPYPLNTLAIQCGILALEKSNKISSIFSLVKNERKKIIQSLKKTGAFDVFDSNANFVLFDARGADRRVYNALIEQGISIRKLGKLGVHKGCLRVTVGTSEMNSKFLLAIRDLLE

SEQ ID NO: 126267 - protein, 217 aa, Unknown
  Bacterial polypetide isolated from the Sargasso Sea
LTDETKIIYIANPNNPTGSYIKFDEIERLNRSVPDDVLFVIDAAYSEYVEEKDYSIGFELAKDSENIVITKTFSKAFGLAGLRVGWAYCPKKIAEKLDILKVPFSVNTAAQMAAISALEDDDHINFSVEHNSKWKKILNDCFAEVGLIVYPSQCNFILVEFLESSKFSAKDAYHLLSSKGIIVREMEEYNLPNCLRITIGKEEANLLLIETVNAFKK

SEQ ID NO: 126268 - protein, 88 aa, Unknown
  Bacterial polypetide isolated from the Sargasso Sea
MSKLVRENIASMQGYSWGEQPKTSTNLIKLNTNENPYPPSPNVIRALQTLDTEALRTYPDPLADELRAEVAKLNRIADENVVITNGGD

SEQ ID NO: 126269 - protein, 214 aa, Unknown
  Bacterial polypetide isolated from the Sargasso Sea
MEVMAERAGIPASDIIRLNGNENPYGPSPQVTRALGSFEHYNHYPDPGQRTLRGILSHYLNIAPELIVCGNGSDELIDLILRLFLAPGDNIILPTPTFGMYAFSAEVVGGRAISVPRTSDFEIDEQAILRSIDSHTKAIFFASPNNPTGNTASDKQIRALLDTGVIVVVDETYYEFCGQSSLNLLSEYENLIILRTFSKWAGLAGLRIGLGVMS

SEQ ID NO: 126270 - protein, 227 aa, Unknown
  Bacterial polypetide isolated from the Sargasso Sea
MRFPKPNNIVAEKYVAGMSLFKSKLAKIKLSANESALGPSPKARKQYLEVSKNFARYPDSDGTFLRKTLADKFKIDKNRIILGSGSDQIFELICKSFLKRGDEVIVPKFSFIIYRIYSRMNGAKVIYSNEDNFTASVKDILKKVTRKTKIVFLANPNNPTGTYISKKELLFLRKKLRSNILLVVDDAYFEYVKQKDYLSGLKTFTNFKNVVMTRTFSKIYGLAGLRV

SEQ ID NO: 126271 - protein, 258 aa, Unknown
  Bacterial polypetide isolated from the Sargasso Sea
MQEKDKSTINAKRSINSIKVYKGGKSSLIGKNNIIKLSSNENSYGPSPKVLEKINSNEKLSNFHRYPSIDGVKLREKIATINQLNADQIVLGCGSDETLLFAALAFCQDGDEIIHAQYGFEMYSIITKIVGATSKLVKEDDNYKLSVSAILDQVTDSTKIIYLANPNNPTGTYLTRKEIINLLNNLPKHIILLLDGAYAEYVTNEDYDQGFSLVEQFENLIITRTFSKAYGLAGLRLGWCYSSKKVASVLNKVKGPFN

SEQ ID NO: 126272 - protein, 193 aa, Unknown
  Bacterial polypetide isolated from the Sargasso Sea
PPEQLLDLAEQLPCPLVVDEAYGDFSESNCLELVEKSDRIIVTRSMSKSYALAGIRFGFAVAQPAVIEQLAKVKDSYNCDAIAIAAATAAIADQGWLRKNQSAIRATRARLVTQLRQFGFSVVDSQANFVWCTHTESSHKEIYESLRKRSILIRFMVYSGWGDGLRITVGTDAEIDVLLGAMESIMQEKNSKE

SEQ ID NO: 126273 - protein, 298 aa, Unknown
  Bacterial polypetide isolated from the Sargasso Sea
NMKLPKFKKIKAERYIAGPSLFKKKAAEIKLSANESALGPSPRAVREYNRVSKSFKRYPDPDGIFLREALAKKFKLDPSRIILGSGSDQIFEIICRAFINKNDEVIVPQYSFIIYRIYSKISGAKIVYSKEKNFKISVDNILSCVTKKTKIVFLANPNNPTGTYIGKKDLIRLRKKLRSNILLVVDDAYWEYVNKKDYSSGLKLFFNSKNVVITRTFSKIYGLAGLRVGWGYSSRRIIKVLNQLKPPFNVSRPALFAASAALSDKTWLKKEINHVNKWSKNMFEVFTKLKIATNKSST

SEQ ID NO: 126274 - protein, 113 aa, Unknown
  Bacterial polypetide isolated from the Sargasso Sea
MNLPKPIKFEVERYIGGLSQFKNISNPIKLSANESALGPSPKAIEVFEKEKNKIFKYPESDSTSLREVLSDKFKIDSQRIICGSGSDQIFDLTCRLFIQPGDEVIVTEFGFIM

SEQ ID NO: 126275 - protein, 290 aa, Unknown
  Bacterial polypetide isolated from the Sargasso Sea
SSGIRRFFDLVMNSKDVISLGVGEPDFATPWSVREEAIYSLEKGTTAYTSNQGIEELRNKISAYLNSRFSVKYSHKHEVLVTVGASEAIDISLRTILNPGDEVIIFEPSFVSYSPLVKLAGGIPISLDTTTTDFLPDIKELKKLISKKTKAVIFCSPNNPTGAVIPRKLLIKIAELAEIFDFWVISDEIYAEICFDKTFVSFASLPSVKKRCILISGFSKAFSMTGWRLGYLCGPKPFIERALKIHQYSMMCASTQSQYAAIEALNDDVMIEIEKMVDSYEKRCRYFVSQ

SEQ ID NO: 126276 - protein, 149 aa, Unknown
  Bacterial polypetide isolated from the Sargasso Sea
MPLVPSYIENLENYVPGKPIEEVQRELGLDHIDKLASNENPIGPSPKAVNEIKKSLNNLHCYPDASGYNLRNKLAKAFNIKMGNVILGAGSEGIMSTIIRTFLMGNDEMISASNSFIGFRVLANASGKKVHWVPMKNHRYDLKSMVKIL

SEQ ID NO: 126277 - protein, 238 aa, Unknown
  Bacterial polypetide isolated from the Sargasso Sea
MKSPTPRKSIFELVPYKPNFGKSNVKSFIRLSANENPYGFSPKILKKVNNTDFNRYPLQHNEKLINVIADRHHLDKNKIILGNGSDELISILSQSYLNPGDQAICTEYGFLQFPQSILISGGKPVIAKDKGLTVSVKNILENVTKKTRLVFIANPNNPTGTFINKKDVINLIENLPKNILLVYDAAYAEYIDEKSYIDGSELVEKYNNVIMLRTFSKMHGLAALRLGWGYCSEKILNT

SEQ ID NO: 126278 - protein, 159 aa, Unknown
  Bacterial polypetide isolated from the Sargasso Sea
DIDFDVLNRFPNLIMSRSFSKAYGLAGFRVGFCVSSTEIADYLNRVRQPFNANSLALFAAEKALEDQDFIDKCLQLNLEQKELLFKELEFLGFDCLPSRGNFISFDCKQDSREAFNKLLKEGVIVRSLAVYKMPNYLRVSVGLPEENLSFLEKIKSTLL

SEQ ID NO: 126279 - protein, 177 aa, Unknown
  Bacterial polypetide isolated from the Sargasso Sea
NKPKGSVLVVDEAYIDFCDAPSCVSWVKEHHDLLVLRTFSKIYGMAGARLGLAIGHPALLERLAVFGGDNVPAGASLLAARASLEDAQLVGQRRALNARLRDETIAWLKGRGFTCTFSHSNCFMIDVKRPAEQVIEQLAARNVLVGRVWKDWPQWVRVTVGNEQEMERFREAFAAQV

SEQ ID NO: 126280 - protein, 127 aa, Unknown
  Bacterial polypetide isolated from the Sargasso Sea
NNPTGTYISKKELLFLRKKLRSNILLVVDDAYFEYVKQKDYSSGLKTFTNFKNVVMTRTFSKIYGLAGLRVGWGYGSKEIISALNKVKPPFNVSRPALFAASAAVKDSLWLNKEIKHVNKWSKKNVF

SEQ ID NO: 126281 - protein, 270 aa, Unknown
  Bacterial polypetide isolated from the Sargasso Sea
MFKASSKLQLVNDEYIQTKRSIESIEVYKGGKSNILGLKNVIKLSSNENSHGPSSSVVKLLNSDKFFSNYHRYPEINGETLRNAIARKHGIEAERIVLGCGSDETLLFSALSFCQDGDEIIYAEHGFEMYSIISKIVGATSKTIKEDDSYKISVQAILNEITVASKLIYIANPNNPTGTYLSRSEIVNIMKKIPKHVIVVLDGAYAEYVMKEDYDKGFSLVDEFDNLIVTRTFSKAYGLAGLRIGWCYSSKKVSNILKKVKGPFNTTAFA

SEQ ID NO: 126282 - protein, 218 aa, Unknown
  Bacterial polypetide isolated from the Sargasso Sea
IVSQYSFIIYRIYSRITGAKVLFAKEKNYKISIKNILSKVTSKTKIVFLANPNNPTGTFLNKKDLLYLRKKLRKNILLVIDDAYNEYVKDKDFSSGLTLFSKSKNVVVTRTFSKIYGLAGLRVGWGYGPKYILKVLNILKPPFNVNRAALFAASAAINDTSWLKKEIKHVRRWSKILYYEFKKLKIETNKSGGNFLLVNFNKIKRDSKEIFQKLANNG

SEQ ID NO: 126283 - protein, 208 aa, Unknown
  Bacterial polypetide isolated from the Sargasso Sea
AVFVCNPNNPTGVLTKKSNMIKIIKNAQKKSSFVFVDETFIELISEKNQSLIKSIKTYENLFILRSFTKSFGLAGLRIGYGVGNKELVSVLQKLKIPWNVSNIAQNAASAAICYHPFLEKSRALIENENQFLKKSISKIKNFSCYNSSTNFILLNTKIKSKTLQKKLLRKNILIRDCSTFRGLNENYVRIAVKKRKDNLKLIKALEAI

SEQ ID NO: 126284 - protein, 308 aa, Unknown
  Bacterial polypetide isolated from the Sargasso Sea
EGPQVRLSSNESSYGCSPMATEAFVNAQFELYRYPDGDQLKLREAVADIYNLSEAQIVCGNGSEELIGLCTRSFVGSGDEVILTRNHFVMCPIYVRGQRAEVILAEEANDVIDVEQILSAITDKTRMIIVANPNNPTGTYINETELGRLIEGIPDSVILILDGAYAEYVTAADFDDGLGHVSDHENIVVTHTFSKIYGLAGLRVGWACAQESVLEKVNKLRTPFNVNGPAMAAAVAAVRDQSFVEKVRNANRGELNWILPAMRDLGFEVADSVANFYLVDTAPVEGATTEGAVSYLESCGVTPRSGGI

SEQ ID NO: 126285 - protein, 215 aa, Unknown
  Bacterial polypetide isolated from the Sargasso Sea
SHDLEAMHKAIEENTKLIFIANPNNPTGSFAEFEELMDFLGKVPKNIIILLDQAYFDYSSFETVDADFSILKKFPNLVMSRSFSKAYGLAGFRVGYSVSSEDIADYLNRVRQPFNANSLALYAAEKALEDDEYMNQCLQLNSEQKKVLYEGLNSQGYKYLPSRGNFISFDCKKDSRDAFNKLLHEGVIVRSLGVYKMPNFLRVSIGLPEENLLFL

SEQ ID NO: 126286 - protein, 291 aa, Unknown
  Bacterial polypetide isolated from the Sargasso Sea
MPLVPSYIKKLSSYKPGANIDDIKLEKSLKNVIKLASNENSMGSSPLAISAINKQIKKVNRYPDASGKKLRKKLANKFNVKSENVIIGSGSEGIMSNILRTFLLTDDEIIGSANSFIGFRVLATATGRKINWVEMENHKTDLKGIIKQINEYTKIIYIANPDNPMGTYITDKEFDEFYEYVPERVLVILDEAYFEYANHLNDYPNSMNYRYDNVITLRTFSKAYGLAGFRIGYGFSHESLIENLLKVKVPFEPSYLAQVAGTAALDDSEFMRETIKKNKNQKIKIEKKLMS

SEQ ID NO: 126287 - protein, 233 aa, Unknown
  Bacterial polypetide isolated from the Sargasso Sea
MKKLKNIKLYEGGISSIPGKKQVIKVSSNESPFGPSLRVQKAISTAKSKTHKYPDGNSLELKNALSKKTKLNINNLFVGNGSDEILGLACQLFLNKGDEVIIPKHSFLMFEIYSKISGGVVKRSSTKNLRFDVKSILNKITKKTKIIFIAQPNNPTGFYLSKEELRLLISRVPKKIFIIIDSAYAEYVTDKDYSNGINFAKKYKNIIVTRTFSKIYGLASLRLGWCYAHTDII

SEQ ID NO: 126288 - protein, 294 aa, Unknown
  Bacterial polypetide isolated from the Sargasso Sea
CDQYLDSRKFNNDEIGIFNGADAAINAIFNCFGEKDQIFLTTNPTFGYYSPCSEMRGMKKITCSYIEENFLFPIEEFSEKIIKYIPKLIFICNPNNPTGTVLSAQEIINLANIKKDSLIIVDELYEKFNGDTLLESIDFEKNNNILIIQSLSKTAGLAGLRVGFTFGNKNLIQYINKVTGPYDVNSFAITAALAALKDKSYIDNYVLEVKKAREWILNKFKSTKIRTHFSGGNYFLIWPKKDPKILIQQMREKGILIRSMENKKDIGKSIRVSIGTKEQMIFFWDNYKVLDLIN

SEQ ID NO: 126289 - protein, 230 aa, Unknown
  Bacterial polypetide isolated from the Sargasso Sea
KVLDKVRLNANESPYSVTQSATSESLNLYPDARPDEIRNMVARYLDISSDNIVITRGSTEAIDVAIRTFCIPNKDGILVFPPTFEMYKFYAEVQGIELHSILLDQDNKYSLDLKALEAFDPSKAKLTFICSPSNPLGHKFSKESIYRVCEYFLDSGLVVLDGAYVEFDSDEVYKEILSKYDNVIILRTLSKAFGLAGVRCGALISSDEICQYIERVIPPYSFSTPAVNAV

SEQ ID NO: 126290 - protein, 174 aa, Unknown
  Bacterial polypetide isolated from the Sargasso Sea
VVLDEAYIEFSELKTMTAKINTYENLIILRTLSKAYALAGVRCGAIIANSEISEFIKKILPPFCFATPTIELIKNSITPENIDNAKAQINLIKKEKERVNKELNKSAIVNKVFQSEGNFLLVKFNDINKLKSILENTNIIIGFLKYPSLSKFARITIGTREENDILLNLLMKIQ

SEQ ID NO: 126291 - protein, 302 aa, Unknown
  Bacterial polypetide isolated from the Sargasso Sea
MSLFKSRRSPIKLSANESALGPSPKAVKSYSSIGKGFVRYPDSDGTFFRKVLAKKFKIKRERIILGSGSDQIFELVCKLFLNKGDEVIVPEYSFIIYRIYSRMFGAKVRYAKEENFKASVTSILNCVNRKTKIVFLANPNNPTGTYLGKSEIIKLRKKLRSDILLVIDDAYYEYIEDPNYSSGIDLFSKSENVIVTRTFSKIYGLAGLRIGWGYGSKNIIKKLYEIKPPFNVSRPALFAATQAVQDSKWLKKAVDHNTFWAEKIFEVADQIGITTNKTNVNFFLFNFNYVKLNSSQVFNKLA

SEQ ID NO: 126292 - protein, 211 aa, Unknown
  Bacterial polypetide isolated from the Sargasso Sea
MDLPKPIKFEVERYVGGLSQFRRIDNPIKLSANESALGPSPKAVKAYEKEKNKILKYPESDSSSLREALSYKFKIDQKRIICGSGSDQIFDLTCRLFINPGDEVIVSEFGFIMHKIYASLYKAKVITAKEKNFKVSVEEIIKKVSDKTKIVFVANPNNPTGTYLSKSEILDLRKKLRSNILLVVDDAYFEFINSGNFNSGLDLFKDSPNVI

SEQ ID NO: 126293 - protein, 239 aa, Unknown
  Bacterial polypetide isolated from the Sargasso Sea
MLGVSGITLPLAGVASTTDPFPARVIRKEGEPIKLSSNENPYGPSDNVRNAIIKAFDEACRYPYGRVTELEEKIAKKEGVSPDMVLVTGGSNEALRATGRYFGIEKKEIIACKPTYLALMTYAEDFGCDINWVPLDEELKYDLNEISRRVSDKTSMVFICNPNNPTGTINTASDLEDFCLSTSKKTCVFVDEAYYDYSIPDGYPTMTKLVKEGHDIIVSRTFSKVYGLAGVRVGYIISN

SEQ ID NO: 126294 - protein, 227 aa, Unknown
  Bacterial polypetide isolated from the Sargasso Sea
MSNINPLNYIHDRWRRLSPYEAVDPPEKLAEAAGIQENEVIKLNANENPYGPSPLVLEALRDLPNVHIYPDPAQVAMRKAIGDYIKVDPHNVVVGNGSDEIIDLVFRAVLSDGDAIINAVPTFGMYPVTAQICGANTISVPRGSSFEIPVHQVMACASKAKIIVVVSPNNPTGNLTPLADIEVLLDSGSLLVLDEAYAEFSNQTAMELINKYPNLIILRTLSKWGGL

SEQ ID NO: 126295 - protein, 225 aa, Unknown
  Bacterial polypetide isolated from the Sargasso Sea
MNNYHYDLDGILSKINAQTKIIYLANPDNPTGTYFNKKMFDDFIKQVPNRVLVILDEAYFEYASHLTDFPDSMIYKYDNVITLRTFSKAYGLAGLRIGYGFGHQELIDSLMKVKLPFEPSSFAQMAGLASLDDNEFLAKTVKSNATGMQKILNSLKNYDVIPSVTNFVTIEFNSNKDSHDFTKFMLSNGVIVRNLKGFGLEHCVRISIGTEVENDFFCDVLYKIK

SEQ ID NO: 126296 - protein, 144 aa, Unknown
  Bacterial polypetide isolated from the Sargasso Sea
SKVMGLAGLRVGWGYASKEIINSLNKIKPPFNVSRPALFAASAAIQDSVWLKKEVNHISKWNKILFKKFKEMKIATNESKTNFLLLNFDRVNISSKRVFQKLGNAGILVRAMNVYGIKNSLRITIGKTIENKKLIFKLRKILNV

SEQ ID NO: 126297 - protein, 278 aa, Unknown
  Bacterial polypetide isolated from the Sargasso Sea
MIRPEVLKLKPYVPATKVLDKVRLNANESPYSVTQSATSESLNLYPDARPDEIRNMVARYLDISSDNIVITRGSTEAIDVAIRTFCIPNKDGILVFPPTFEMYKFYAEVQGIEMHSILLDQDNNYSLDLKALEEFDPSKAKMTFICSPSNPLGHKFTKESIYRVCEYFSDSGLVVLDGAYVEFDSDENYKEILSKFDNVIILRTLSKAFGLAGVRCGVLISSDEICQYIERVIPPYSFSTPAVNAVIESLSDEGIKESKRNIETIIEDRRWLETELES

SEQ ID NO: 126298 - protein, 129 aa, Unknown
  Bacterial polypetide isolated from the Sargasso Sea
GYGYGDSDLIALLNRVRQPFNVNSLSQVAAISALSDSDFLNHCKKANDLGRKQLVEGLSRLGLKVYGGSANFVFAQVGQGQKLFKKLQAKGIIIRPLDSYGLPEYIRITIGTETQNDRFLKILEKEMDS

SEQ ID NO: 126299 - protein, 255 aa, Unknown
  Bacterial polypetide isolated from the Sargasso Sea
PGKRNVIKLSSNESPFGPSPNVALKIRKAIKKTNRYPDGDYKQLKEAIGKKFKLRESNLFCGNGSDEILGIVCQLFLNKGDEVIIPKHSFLMFNIYSTVNGGTIKTSKTRNLKFQVEDILKKINSKTKIIFLAQPNNPTGFYLKKNELAKLIKKVPKRIVIVIDAAYAEYMTDNEYTAGINFAKKNKNIIVTRTFSKIYGIASLRLGWCYAHSDIINLMNKIRGPFNVNHVAQEAGIAALRDKKYELKAVKHNKF

SEQ ID NO: 126300 - protein, 219 aa, Unknown
  Bacterial polypetide isolated from the Sargasso Sea
MNEMKNRVSDKTSMIFVCNPNNPTGTMLDSNALENFCLNISKKTCVFVDEAYYDYSINDGYPTMTKLVKKGHNIIVSRTFSKVYGLAGLRIGYLISNKERISQLKKCTMAGTNILASHAAINAYDDIEFFNYSLNKNNEGLNFLYSLFEDLDLEYKKSYTNFVFFKSGHHIDKVQDFMKKKNILVGRAFPPYYNWCRISTGKMEDLEKFSIALKDFYKT

SEQ ID NO: 126301 - protein, 232 aa, Unknown
  Bacterial polypetide isolated from the Sargasso Sea
KIGFDEKLNLKIDDLISSINKQVCLIVIANPNSPTGTIISEKNIDIIIKKANKYGAKVLIDEAYFEFSKYNCIKKISKYKNLVIIRTFSKIYGLAGLRCGYVVSNYKIIKEYTAIKPMYEINSIAVKAIETILSNKRIIKSYLNELKISEKAASDFCKENKYEFIKCHANFFHVSFNNNPLKIQNFLEKNMFLIKGGPGTKEYSEYVRISLANKNTILKTLNKIKSFLSKKR

SEQ ID NO: 126302 - protein, 279 aa, Unknown
  Bacterial polypetide isolated from the Sargasso Sea
MVSIGFNENPYGPSPRAIRAVTDSIMDVNRYDFVAYTNLENAIGDHLGLEKDPNPAFGANPLFGKSLYPVYVEGGSSFILNQVTMLYGVKNGVGEIIEIDPGYGGVTRAAMTLRSQFGAEIKIKRIPTTSKFVHDLKAMEEAVTDNTTLVVITNPNNPTGTLLTHQELERFINTIPSHVTLLIDEAYIDFVREENYETGVSLAQKYNNVIVTRTFSKMYGLAAMRIGYAVANKSIISDLRASGNSWGLPSINCYAAAAALKDLSFTRQVKRLTDETKDY

SEQ ID NO: 126303 - protein, 253 aa, Unknown
  Bacterial polypetide isolated from the Sargasso Sea
MSANESALGASLGAINALKTFPTDLNRYPPQVSDELTSAISKRYLLNKKKIILGNGSDELISILSQTFLNSNDEAIYTEFGFLQFPQAIAIAGAKGVIANDVNFTANVDNILSKINNKTKLIFLANPNNPTGTFITKNEIIRLHDSIPSNILLVYDAAYSEFVVNDDYTDGSELADEYDNVIMLRTFSKLHGLASLRLGWGYASENIIDNLMKVRGPFSVNTAAIMAGVAALEDLEFQKKSVQHNLKWMSWFE

SEQ ID NO: 126304 - protein, 50 aa, Unknown
  Bacterial polypetide isolated from the Sargasso Sea
MRARLENSHLIRSRVVSRYWSDIVQQLVPYVPGEQPAIARPIKLNTNENP

SEQ ID NO: 126305 - protein, 295 aa, Unknown
  Bacterial polypetide isolated from the Sargasso Sea
KIIDSIEMILKETHRYPDGNATRLKAKIADKFDVLEDQVTIGNGSNDIIEFVARSFLGPGDSAIYSEHAFAVYPLVVQAVGAKGIEVPAKNFSHDLYAMLDSIKESTKLIFIANPNNPTGSFIEYSELIDFLEKVPEDVLVLLDQAYFEYSSYETKDIDFDVLQRFSNLVISRSFSKAYGLAGYRVGFAVSSIEIADYLNRVRQPFNANSLALHAAEIALGDEKFIQKCLELNHEQKQILFTELGSLGYECLPSRGNFISFDCKEDSKDAFNKLLLEGVIVRSLTVYKMPNYLRV

SEQ ID NO: 126306 - protein, 211 aa, Unknown
  Bacterial polypetide isolated from the Sargasso Sea
MNNPTAKLSIEKLETYKPNFGKSKISNLIRLSANEGALGTSLKAIKALNSFTQNINRYPPQVSNDLISAIANRYSLDKKKIILGNGSDELISIITQAFLDTTDEAIYTEFGFLQFPQAISVAGAKGVVAKDVNFTANVDNILSKINKKTKLIFLANANNPTGTFIPKEEVIRLHKSIPSNILLIYDAAYSEFINNNDYIDGSNLGDNHDNV

SEQ ID NO: 126307 - protein, 293 aa, Unknown
  Bacterial polypetide isolated from the Sargasso Sea
QKLSEFYSLPRDNFIIGEGIDGLLGNLVRLFIEPGDEVVSSLGAYPTFKYHVDGFGGKISLVPYRNYFEDLDALLIAAKKRKAKILYLSNPDNPMGTFHPKDHMEDFIDKIPDDTILCLDEAYADFVDKNELASIDLEKENVIRFRTFSKAYGLAGLRIGYGIGNKKMVKAFNKVRNHFGVNKLGQIAAKVALEDKDHLKTVLKKVDQSKNDIAAVFQRFGFTSLSSRTNFVPVNSGGDGKFAAKLMRSLIQEKIFVRMPSVSPLNSFIRITAGTSDDLTVLDNALNKIIKKI

SEQ ID NO: 126308 - protein, 219 aa, Unknown
  Bacterial polypetide isolated from the Sargasso Sea
MDLKALEAFDPSKAKLTFICSPSNPLGHKFSKESIYRVCEYFSDSGLVVLDGAYVEFDSDEVYKEILSKYDNVIILRTLSKAFGLAGVRCGVLISSDEICQYIERVIPPYSFSTPAVNAVIESLSDEGIKESKRNIEIIIEDRRWLETELESLDEVIEVFQSYTNFILVKVNDAKAFCKKSQDLGFLLRDVSYQPLLENCVRITVGTTEQNQKLIRGLK

SEQ ID NO: 126309 - protein, 153 aa, Unknown
  Bacterial polypetide isolated from the Sargasso Sea
MERSITVNSNEIKSRSQILKIPSYSSGDSKVANFESPIKLSSNENPLGPSKDAIDAFIKVKDSLAVYPDSSHFRLRSAISVIHDIDVDRIICGAGSDEIIQFLCQCYAGIGDEVIHTRHGFLMYKISAIAAGARPVSVPEVKRRADVTRIWRL

SEQ ID NO: 126310 - protein, 178 aa, Unknown
  Bacterial polypetide isolated from the Sargasso Sea
MMYNENPYGPSRIAQRAMQKAFSESNLYTMRQAQKEFVQLIALLNNIDKDQISIGFGSREILNKAALMNGIDKGEMISPQLTFEAINNYAKNTMNTKVNRIKMDDGINIDLDKMASKINERTKIVYVCNPNNPTGLALDSNQLESFCLEVSKKVLVFVDEAYHEYALDGNYKSMSHLG

SEQ ID NO: 126311 - protein, 283 aa, Unknown
  Bacterial polypetide isolated from the Sargasso Sea
MPLVPSYIKRLANYKPGKPIEEAKRELGLKNIVKLASNENPLGASPKTISAIKDSLTNIHRYPDASGYQLRSKLAEKFSLNIGNVVIGAGSEGIMSTIMRTFLLRDDELISAKNSFIGFKVLANASGCRVHWIPMKKYCYDLEAMKEKINDYTKIIYIANPDNPMGTYITKQEFDSFYKHVPERVLIILDEAYFEFANEIQDYPDSMTYRYDNVITLRSFSKAYGLGGVRIGYGFAHESLVNNILKVKVPFEPSTIAQVAGHAALDDTKFLLKSITINNEGKQ

SEQ ID NO: 126312 - protein, 77 aa, Unknown
  Bacterial polypetide isolated from the Sargasso Sea
MNLPKPIKFKVERYIGGLSQFKKIENPIKLSANESAIGPSPKAIEAYAKEKNKISKYPESDSNFLKEVLSDKFKLDS

SEQ ID NO: 126313 - protein, 139 aa, Unknown
  Bacterial polypetide isolated from the Sargasso Sea
MTLPKPIKFNVERYIGGLAQFKKIENPIKLSANESALGPSPKAIEAFNSEKDKINKYPESDSSSLRNILSAKFRIDQNRIICGAGSDQIFDLTCRLFLEPNDEVVVTEFGFIMHRIYASLYGAKVIFAKENNFKASVEE

SEQ ID NO: 126314 - protein, 251 aa, Unknown
  Bacterial polypetide isolated from the Sargasso Sea
LELNRYPDPDCKILKEAISNRIQISPEQIVIGNGSDELIQCLMQVFCDEGDTIAFPEPTFGMYAIMGKGMGLNTQTFPLNSKWNFETKLIIEKLITSHTRIIFISYPNNPTGNCFSQSEIQELIENFEGIVVLDEAYYDFSGQTFLSQMKKHNNLVILRSLSKIGLAGLRVGYGIFPSVLANEINKVRLPYNSNSISQIAAAELLKNFSMVQKQIDSIKDERIRLLDEFTKIKSINAFPFRCKFYFVSNFR

SEQ ID NO: 126315 - protein, 168 aa, Unknown
  Bacterial polypetide isolated from the Sargasso Sea
MFNENPYGPSDVAKRAMRKAFTESNLYTMRAALTEFKELIAKLNGVKPENIAIGFGSREILNKTAIMNGVDGGDLISPSLTFEAINQFASNTMKSNVIRVPMTSDINIDLNRTEEVVNSKTKMVYLCNPNNPTGIIMNSSDLESFCKNVSKRSIVFVDEAYHEYVMIR

SEQ ID NO: 126316 - protein, 360 aa, Unknown
  Bacterial polypetide isolated from the Sargasso Sea
MKLPQPRKIIAEKYVAGLSLFKSRRSPIKLSANESALGPSPKAVKSYNSVGKGFVRYPDSDGTYFRKVLAKKFKLKRDRIILGSGSDQIFELICKLFLNKGDEVVVPEYSFIIYRIYSRMFGARVRYAKEDNFSASVESIMNCVNKKTKIVFLANPNNPTGTYLNKTEVLKLRKKLRSDILLVIDDAYFEYIKDPEYASGIDLFSKSENVIVTRTFSKIYGLAGLRIGWGYGPKKLIKKLYEIKPPFNVSRPALFAATQAVLDTKWLNKAIEHNNFWAEKIYSVIDEIGISTNRTNVNFFLLNFDFVNKSASQVFNKLANSGILVRQMDVYDIKNSLRVTIGNSKENKKFISVLRKIFNV

SEQ ID NO: 126317 - protein, 360 aa, Unknown
  Bacterial polypetide isolated from the Sargasso Sea
MKLPQPRKIIAEKYVAGLSLFKSRRSPIKLSANESALGPSPKAVKSYSSIGKGFVRYPDSDGTYFRKVLAKKFKLKRDRIILGSGSDQIFELVCKLFINKGDEVIVPEYSFIIYRIYSRMFGAKVRYAKEENFTPSVETIMNCVNKKTKIVFLANPNNPTGTYLNKDEVLILRKKLRSDILLVIDDAYFEYIKDPEYSSGIDLFSKSENVIVTRTFSKIYGLAGLRIGWGYGPKKLIKKLYEIKPPFNVSRPALFAATQAVLDTKWLNKAIEHNNFWAEKIFDVIDEIGIATNRTNVNFFLLNFDFVNQSANKVFNKLANSGILVRQMDVYGIKNSLRVTIGNSKENKKFISVLRKIFNV

SEQ ID NO: 126318 - protein, 356 aa, Unknown
  Bacterial polypetide isolated from the Sargasso Sea
MSPDILKNLNSGIGDLRPYEPGRSIDEVVAEFGHHEVVKLASNENPLGASPKAISILTELKNDLHLYPDGNGTKLKKEIADHENVAFDNIIIGNGSNEILELAARAFLSPNTSAIASKHAFAVYKIVTKSSGASLTEVPSCNWGHDLKSFDDHLDSGTRVIFIANPNNPTGTYNTHEEVHSLLKKVPSSVLVVLDCAYFEYVTKDDYVRPIDLLNEFDNLLITKTFSKIHGLASIRVGYGVANPSLVEALNRIRQPFNVNTIAQAMACKAINDHEHIRQSMELNSQQYEFLFNQLSTLGLDCIPSVGNFITFKGNFVGKEIFDSLMKKGVIVRCVDLYDMKDYIRVTIGTEAENLK

SEQ ID NO: 126319 - protein, 51 aa, Unknown
  Bacterial polypetide isolated from the Sargasso Sea
MPLVPSYIENLENYVPGKPIEEVQRELGIKNIDKLASNENPIGPSPKAMKK

SEQ ID NO: 126320 - protein, 130 aa, Unknown
  Bacterial polypetide isolated from the Sargasso Sea
MGTAGLALSPLTMGQVEIPPGQIRLIFNENPYGPSPKALAEVAKILPKTAYYPGAIEDDLMGLFMARHQLDREQVFLASGSNEGLQAAMMAFGKHGKVISPALTYSDHLQYAEKLGVALHRGAVARRHGY

SEQ ID NO: 126321 - protein, 273 aa, Unknown
  Bacterial polypetide isolated from the Sargasso Sea
ALLGYLVRLFVQVGDTVVTSNGSYPTFNYHVEGFGGQIFKCDYLDDKEDLSSLIDTASKTKAKLVYISNPNNPMGTWIRGEQIVALLEKLPKDSLLILDEAYVEFAPDEAKVPIFLDDPRMIRFRTFSKAYGVAGARIGYGIGSKELIAEFDKIRNHFGNSLLSQVAAIAAIKDQRYLSEIVKKISLGREEIYQIAQSNGLTAIPSATNFVAIDCGKDGKFANQIMNGLLEAKLFVRKPVVAPLDRTIRVTVGRDEEIDLLKKALPDVLKALR

SEQ ID NO: 126322 - protein, 170 aa, Unknown
  Bacterial polypetide isolated from the Sargasso Sea
YVEEKDYSIGFELAKESENIVITKTFSKAFGLAGLRVGWAYCPKKIAEKLDILKVPFSVNTAAQMAAISALEDDDHINFSVEHNSKWKKILNDCFAEVGLIVYPSQCNFILVEFLESSKFSAKEAYHLLSSKGIIVREMEEYNLPNCLRITIGKEEANLLLIETVNAFKK

SEQ ID NO: 126323 - protein, 331 aa, Unknown
  Bacterial polypetide isolated from the Sargasso Sea
MKSITKPQDFPSAANFSYLNAANVSLMFSGAEKKIHDWFNDVSKNGSNNFTEEVEENVFKDLHLSAAKLINAEPTEISAGSSATELLSSLAWSVSPKNEQNIVSTSSAFPSTVYPWVRIANNTGAEIRLAKEINNYTSIDSINDLIDKNTKIVCISHTEYRNGQTYDLNQLAEIAHQNDAILVVDATQSAGAIPIDVKKNSIDVLVAGAYKWLCGPFGSAFMYIRHNLANQLEPGLVGFRSHDNMWDLDATRIRYKNDASKFEFSTTAFGCAIGLTQSINYLNGIGIEKIYNHNLFLSDHLIKGLQKLGASIKSPLNQNDRSSIITANLKK

SEQ ID NO: 126324 - protein, 112 aa, Unknown
  Bacterial polypetide isolated from the Sargasso Sea
MTISSSQQDSRSLVRQEIAAIAGYIPGEQPQDAGWTKLNTNENPYSPSGNVSKAIAVACEGRSLAKYPDPFANQFRKQAADVLGVRPDMILCGNGSDDLLTILVRCYVGVGD

SEQ ID NO: 126325 - protein, 34 aa, Unknown
  Bacterial polypetide isolated from the Sargasso Sea
NHKKCNVTRTFSKIYGLAGLRVGWGYVQKNLFMY

SEQ ID NO: 126326 - protein, 222 aa, Unknown
  Bacterial polypetide isolated from the Sargasso Sea
GHDLEAMKKAVKTNTKLIFIANPNNPTGTFLKPNEIKSFLDDLDENIIVLLDQAYFDYSSYLNEDVGFEFINQYPNLIISRSFSKAYGLAGFRIGYSVSSKEISDFLNRVRQPFNANSVALIAAEVALSDEEHLKKSLEINANQESALMKGIADLGYDCIPTKGNFISFNSNGDGEKLFNALLKEGVIIRTLGVYKMPNYLRVTIGLPEENSIFLDKLSSLS

SEQ ID NO: 126327 - protein, 197 aa, Unknown
  Bacterial polypetide isolated from the Sargasso Sea
MAAGLAGITASGGTLGAFLNHAPGFSPGKRLANGDIRLSSNENPLGVSPAARDAIIEAIVESNRYGGRRREVIAALSRYVGVKPEQITLGFGSTEILQICTQAFQGPNTPLIAAAPTFEDVMDYQDTMPFEVHTVPLTADLQHDVQQMRDLSMKRPSVVYFCNPNNPTGTITASADIDAWIAEAPETTVFLMDEAYL

SEQ ID NO: 126328 - protein, 326 aa, Unknown
  Bacterial polypetide isolated from the Sargasso Sea
MPIGCRVTRGDLTESIHVAYAVAVAKNGQVIFSTGDPNYLTCIRSSLKPFQAAASVKVGAVDAAGFDEKELALMCASHKGQDMHTSTAENMLSKLGLSVEDYECGSHYPSDIDTRHRMIRENEGMNPLHNNCSGKHAGMLALAKHLSDDISLYIQKDHPVQKTIMEYVKDISGLEEIPTEIDGCSAPTPFMTLQTIANLFQVLAAGIQPELKRVFNAMSSFPEMIGGTGHFDSLFIESLDKRGVTKVGGESIRGISLKTEKHGPIGIAIKVLDGNFRALPIATMKLLEHMQLLNEHELNKLDKFRTNILTNHNGIETGRIEAYIDF

SEQ ID NO: 126329 - protein, 348 aa, Unknown
  Bacterial polypetide isolated from the Sargasso Sea
MKLPKPRKIIAEKYVAGLSLFKSRRSPIKLSANESALGPSPKAVKSYSSIGKGFVRYPDSDGTFFRKVLAKKFKIKRERIILGSGSDQIFELVCKLFLNKGDEVIVPEYSFIIYRIYSRMFGAKVRYAKEENFKASVTSILNCVNRKTKIVFLANPNNPTGTYLGKSEIIKLRKKLRSDILLVIDDAYYEYIEDPNYSSGIDLFSKSENVIVTRTFSKIYGLAGLRIGWGYGSKNIIKKLYEIKPPFNVSRPALFAATQAVQDSKWLKKAVDHNTFWAEKIFEVADQIGITTNKTNVNFFLFNFNYVKLNSSQVFNKLANSGILVRQMDVYNIKNSLRVTIGNSYENK

SEQ ID NO: 126330 - protein, 448 aa, Unknown
  Bacterial polypetide isolated from the Sargasso Sea
MDNKKLDVLRTNINLLDDKILDLLKERAEIVTEIGEQKKSHIEVVDYEREQKVLDRILQSTKAKYSKDSIVRIWREIFQASTKLQEKDKSTIDVKRSINLINIYKGGKSSISGKDNIIKLSSNESSYGPSPKVLEKINLQETLSNSHRYPNIDGAKLRDKLASIHNLNANQIVLGCGSDETLLFTALAFCQDGDEIIHARHGFEMYSIITKIVGATSKLVKEDDYFKVTVTSILDQVTPSTKIIYLANPNNPTGTYLTRNQIIDLLDKLPKSIILVLDGAYAEYVIKQDYDSGFSLVGQFENVIITRTFSKAYGLAGIRLGWCYSSKKVASILNKVKGPFNTQSLSQEMAIVALDDKEYLNKVIKANHETKNWFESELEKIKIKTLPSEGNFSFVEMSNEEAKKISAHLANSGIIVRQLDSYGLANCLRITIGTKEEMEATINSLKDL

SEQ ID NO: 126331 - protein, 198 aa, Unknown
  Bacterial polypetide isolated from the Sargasso Sea
NPLGHKFSDDSIYQVCEHFSDSGLVILDGAYVEFDDDEIYKRILSKFDNVVILRTLSKAFGLAGVRCGVLISSSEICQFIERVIPPYSFSTPAVNAVLESLSDKGIEESKRNIKTIIQDREWLMKELESLDEVIKVFPSYTNFVLVKVKDAKSFCKKSKDIGFLLRDVGYQPLLENCVRITVGTTKQNQKLIKGIKDE

SEQ ID NO: 126332 - protein, 351 aa, Unknown
  Bacterial polypetide isolated from the Sargasso Sea
MNLPKIRDDLSLLEGYHSPQVDVEIRLNTNESPIPPPIKLTEDLGRELLKVNWNRYPDRMASRLHSDIAKFHDVDPSMVLAANGSNEVLQSLLLTYGGFGRKASVFEPTYALHSHISALTGTEVVVGECSEDFTIEEVTVDAVLRQEPDVLFLCSPNNPTGVVAEREFVESVVERCSNLGTLVIVDEAYGEFSDWSAVDLIREGFHIAVTKTFSKTWSMAGIRLGYVVAPDEIIENVRNVVLPYHLDSMKQIAGSLALQYIGDMHSRIDLLIEERERMARKLSDLPVRQWPSGANFILFRPTDEAKISGVSLWEALLERSILVRDCSSWPRLEGCLRVTIGTTEENNSFLE

SEQ ID NO: 126333 - protein, 340 aa, Unknown
  Bacterial polypetide isolated from the Sargasso Sea
MKIKDLVRPEVLNLKPYVPATKVLDKVRLNANESPYSVTKSASNDALNLYPDARPDQIREKVASYLSLSSENIVVTRGSTEAIDVAIRTFCIPNQDGILVFPPTFEMYKFYAEVQGIEMHTILLDDENGYTLDMSAIKAFNSKNAKLTFICSPSNPLGHKFSDDSIYQVCEHFSDSGLVILDGAYVEFDDDEIYKRILSKFDNVVILRTLSKAFGLAGVRCGVLISSSEICQFIERVIPPYSFSTPAVNAVLESLSDKGIEESKRNIKTIIQDREWLMKELESLDEVIKVFPSYTNFVLVKVKDAKSFCKKSKDIGFLLRDVGYQPLLENCVRITVGTTK

SEQ ID NO: 126334 - protein, 141 aa, Unknown
  Bacterial polypetide isolated from the Sargasso Sea
MNEKLLKNLNNGINDLNPYKPGKPISEVMKEYGLTDIIKLASNENPLGASKKVLSALKGLDNEIHLYPDGSSIKLKTKISEIEGVSSEHVIVGNGSNEILELCAKAFINSDKNAIASRHSFAVYKLITQSLGTKLREVPTI

SEQ ID NO: 126335 - protein, 360 aa, Unknown
  Bacterial polypetide isolated from the Sargasso Sea
MKLPQPRKIIAEKYVAGLSLFKSRRSPIKLSANESALGPSPKAVKSYSSIGKGFVRYPDSDGTYFRKVLAKKFKLKRDRIILGSGSDQIFELVCKLFLNKGDEVVVPEYSFIIYRIYSRMFGAKVRYAKEENFVASVDSIMNCVNKKTKIVFLANPNNPTGTYLNKNDVLNLRKKLRSDILLVIDDAYFEYIKDPEYSSGIDLFSKSENVIITRTFSKIYGLAGLRIGWGYGPKKLIKKLYEIKPPFNVSRPALFAATQAVLDTKWLNKAIQHNNFWAEKIFSVIDEIGISTNRTNVNFFLINFDFVNKSASQVFNKLANSGILVRQMDVYGIKNSLRVTIGNSKENKKFISVLRKIFNV

SEQ ID NO: 126336 - protein, 350 aa, Unknown
  Bacterial polypetide isolated from the Sargasso Sea
MKIKDLIRPEVLNLKPYIPATKVLDKVRLNANESPYSVTQSATRESLNLYPDARPDEIRNMVARYLDISSDNIVITRGSTEAIDVAIRTFCIPNKDGILVFPPTFEMYKFYAEVQGIEMHSILLDQDNNYSLDLKALEAFDPSKAKLTFICSPSNPLGHKFSKESIYRVCEYFSDSGLVVLDGAYVEFDSDEVYKEILSKFDNVIILRTLSKAFGLAGVRCGVLISSDEICQYIERVIPPYSFSTPAVNAVIESLSDEGIKESKRNIETIIENRKWLETELASLDEVIEVFPSYTNFILVKVNDAKAFCKKSQDLGFLLRDVSYQPLLENCVRITVGKTEQNQKLIRGLK

SEQ ID NO: 126337 - protein, 234 aa, Unknown
  Bacterial polypetide isolated from the Sargasso Sea
MDYLKYINPGIKSINTYEPGKSIEEVMEKYNLKNIVKLASNENSLGPSPKALEVINNFKDVHLYPDGDGLKLKSKISEIENINSDQIILGNGSNEILEIISQIFLSPVTESIFSKHAFVVYKLASKVRGSKFHEVDACKWGHDLNGFLKKINDKTRLIFIANPNNPTGTYLSHNDILEFLKKVPKKVLVVIDLAYFEYVTAEDYIETNEILDKFPTCDFYKIFFKNSWFICLRK

SEQ ID NO: 126338 - protein, 248 aa, Unknown
  Bacterial polypetide isolated from the Sargasso Sea
MRLPKPKKIIAQRYFGGLSIFKRKKVKIKLSANESALGPSPKAIREYNKISKNFKRYPDTNGTSLREAIANKFNIDKNRIILGSGSDQIFEFVCNAFIKKNDEVIVPKYSFIIYRIYSKINGAKVIFAKEKNFTISVKDILSKVTRKTKLVFLANPNNPTGTYISKKELIHLRKKLRSNILLVVDDAYFEYLNQKDYLSGLKLFSRHKNVLVTRTFSKVYGLAGLRIGWGYASKEIINTLNLIKPPFN

SEQ ID NO: 126339 - protein, 354 aa, Unknown
  Bacterial polypetide isolated from the Sargasso Sea
MKKLKNIKLYEGGISSIPGKKQVIKVSSNESPFGPSLRVQKAISTAKSKTHKYPDGNSLELKNALSKKTKLNINNLFVGNGSDEILGLACQLFLNKGDEVIIPKHSFLMFEIYSKISGGVVKRSSTKNLRFDVKSILNKITKKTKIIFIAQPNNPTGFYLSKKELRLLISRVPKKIFIIIDSAYAEYVTDKDYSNGINFAKKYKNIIVTRTFSKIYGLASLRLGWCYAHTDIIKLMNKVRGPFNVNQIAQLAGVEALKDKKYEKNAINHNKFWLKKMNSELSRLPVHVYDSRANFLLINVGKSVKKLNQYLLSKSIIVRLMDKYNLPDCIRLSIGKSTENRKVLKAMKEFYNAK

SEQ ID NO: 126340 - protein, 362 aa, Unknown
  Bacterial polypetide isolated from the Sargasso Sea
ERQQSTWENKVDYNLSESGVHPRTLKMLFDSEFIEKIENTELTYGFTEGSPDLRQSIASIYQGATVDNVQAFNGSAEANMVSIMTLIETGDEVVYMMPNYLQIYGFARGLGADVKTFQLHESLQWKPDLDELRSIVSEKTKLICICNPNNPTGSVLPKQMVEDIVAIAESVDAWIVSDEVYRGAELNHEECTSFWEPGYGKTIVNCGLSKAYALPGLRLGWSLSNPDYIKQCWANHDYTSISVGRLSDIIAAHVLHPNNRMKTLNYIREALAINLDIFQNWISGFGDHLGFIPPEAGAMAFVHYDWAINSSDLIEKVRKEASVMLVAGDWYGMDRYIRFGYGAKQSDLENALDRITPIFKSL

SEQ ID NO: 126341 - protein, 197 aa, Unknown
  Bacterial polypetide isolated from the Sargasso Sea
MKNLKNINIYEGGISSIPGKKNVVKVSSNESPFGPSIKVKKAISESRLKTNKYPDGNCIELKEAISKSFKLKNSNLFVGNGSDEILGIACQLFLNKGDEVIIPKHSFLMFEIYSKISGGVIKRSATKNLRVDLESLLKSITKKTKIIFIAQPNNPTGFYLSKKDLTTLINKVPKKVMIIIDAAYAEYMTDNDYSNGS

SEQ ID NO: 126342 - protein, 349 aa, Unknown
  Bacterial polypetide isolated from the Sargasso Sea
MFLAQCSIKSFKRRRRQPVSYNRSRRLFIGGTVAASAIGASGISHLVSAQSVSASASPSSVMYGPKPGVAKLNANENPFGPSPKALDAIAKASAEGGAYYAYPAAMTLLDMIAERYGITRKHISLSAGSSPILSYAALAASKNGKILGPDLFWDTTSKAPEKQGAPEIVRVANTAELDIDLDAMYAAIDDSIGMVHICNPNNPTGKVLDPNKLREFCIKASKKTLVLVDEAYNELIDEPPKHSMIPLVKAGHNVIVARTFSKIYGLAGMRVGYLIASEENTEWINRYGMGGYTLNQAGLAAAIASYNDDAFLTFSKEKIYEGKSMVMDAVKANGLTALPSSTNFIFVNL

SEQ ID NO: 126343 - protein, 262 aa, Unknown
  Bacterial polypetide isolated from the Sargasso Sea
LAFCQDGDEIIHAQHGFEMYSIITKIVGATSKLVKEDENFKVTVTSILDEVTPSTKIIYLANPNNPTGTYLTRNQIIDILDKLPKNIILVLDGAYAEYVTKEDYDSSFSLVDQFENVIITRTFSKAYGLAGIRLGWCYSSEKVASILNKVKGPFNTQSLSQEMAIIALDDKEYLSKVIKSNRDTKSWFESELEKIKIKTRPSEGNFSFVEMSDEEAKKIFAHLANSGIIVRQLDSYGLPNCLRITIGTREEMEATINSLKGL

SEQ ID NO: 126344 - protein, 353 aa, Unknown
  Bacterial polypetide isolated from the Sargasso Sea
YKKYLREDINNFKEYFIDNPENMIKLDAMEYPVDKSLRDVIKSLNINEKEILLNRYPESHSHELEKIILDYFGLKSNFGVNFGNGSDELIQNICLAFSKKGNNVMVPSPSFSMYEKIISTINLKYIPEYLNEDFDIKIDQMIKNISKHKPAIIFLACPNNPTSNLWDKDKIIQIIESSESIVVIDEAYVDFCESSYIDLIEKYENLVILRTFSKIGFAGLRLGFMISNREISSIINKIRLPFNINTVSLKIIINIFENFSIIKKNCQNIINLREKLYSDLSDLRNIKVLKSSTNFLIFKTLNKSSDEIYKLLKDSNILIKNLNNNSSLKNFLRVTVGTEEENNSFVSTLSKYL

SEQ ID NO: 126345 - protein, 178 aa, Unknown
  Bacterial polypetide isolated from the Sargasso Sea
MRLTQELLRHRQVEDPTPFFKKVTAERVFERAVEDLNPRHQVLETCVLPTELTAHFICPLNHCLTMTFIEEAETSAVEALLDACGFAHSLTQVEKLRSSYFTSALNLNRCNLWTMNQKNSFNSYSLENSPYGNCLMNSSMSLCYYNTLIGLNPLLIALTNPDTNTNGISNVNIREIFA

SEQ ID NO: 126346 - protein, 168 aa, Unknown
  Bacterial polypetide isolated from the Sargasso Sea
MSCDLFSLATSGVSGLTPYRPGKSIEQLQREMNLDEVVKLASNENPLGPSQIVLDAISATKDLSRYPDGDGFNLKKRLAKKHNLKVENITLGNGSNDILEMVTRAFVTTNHEVIYSQHSFAVYPLVTQAVGAKHGVIPANGWGHDLDAMLSSVNNKTRLIFIANPNNP

SEQ ID NO: 126347 - protein, 289 aa, Unknown
  Bacterial polypetide isolated from the Sargasso Sea
MNLPRPKKINAEKYVAGLSLFKQKAAKIKLSANESALGPSPKAINEFIKVSKNLKRYPDSDGIFLRNILARKFKLDPKRIILGSGSDQIFELICKSFLNKNDEVIVPEFSFIIYRIYSKIYGAKIKYAKEKNFRISIENILSKVTKKTKIVFLANPNNPTGTIISKKELLQLRKKLRSNILLVVDDAYFEYVKDKNYLPGMKLFSKSKNVIVTRTFSKIYGLAGLRVGWGYGPKNLIYALNQIKPPFNINRAALFAAAQSIKDSQWVNKENKHVNKWVKVFYKNFKNLK

SEQ ID NO: 126348 - protein, 162 aa, Unknown
  Bacterial polypetide isolated from the Sargasso Sea
VADLLESYPNLVVLRTLSKAFALAGARCGFLLANEGIIEIIMRVIAPYPVPLPVSEVAVQALSPAGIARMKTQVKELNAQGERLAAALNLYCEQWGGAVLTPNGNYVLAEFDDVAKVAQLLIDNGIVARAYKDPRLAKAIRFSFSSQADTDRLVSLFESQKL

SEQ ID NO: 126349 - protein, 288 aa, Unknown
  Bacterial polypetide isolated from the Sargasso Sea
MTFPKPNNIVAEKYVAGMSLFKSKLAKIKLSANESALGPSPKAKKEYIKVSKSFARYPDSDGTFLRKTLSNKFKLDKNRIILGSGSDQIFELICKSFLKKGDEVIVPKYSFIIYRIYSKMNGAKVIYSRENNFKVSVKEILKKVSKKTKIIFLANPNNPTGTYIKKKDLLFLRKKLRSNILLVVDDAYFEYVKQKDYLPALKIFRNYKNVVMTRTFSKIYGLAGLRVGWGYASKEIINALNKVKPPFNVNRPALFAASAAIKDILWLNKEINHVNKWNKKMFNEFKKR

SEQ ID NO: 126350 - protein, 200 aa, Unknown
  Bacterial polypetide isolated from the Sargasso Sea
IERLLQANTQTLVVIDEAYIDFAGPQGQGGATAIALVNRYPNLLVTQTLSKSRSLAGLRIGLAIGDGALIDGLNRIKDSFNSYPLDRLAIAAGVAAFKDQEWFEKGCEQVIMQREWLNEQLEQRGFESLPSAANFLFTRHEQHSGLSLAQGLREQGIIVRHFGKPERIADYLRITIGTPEQNQALIVALDGLISKWKNAG

SEQ ID NO: 126351 - protein, 204 aa, Unknown
  Bacterial polypetide isolated from the Sargasso Sea
MNAASILSLVRDDLQAFAGYSSARSSALVGDVWLNANESAWANPADVAGGARRYPDPQPAALRERLAALYGCAPEQLLIGRGSDEAIDLLVRALCEPGRDAVVTTPPVFGMYAVCARLQNAPLVEVPLIDRGDALDADIDAVIAAALGGNAKLVFLCSPSNPAGSTIALAEIERVATALQGRALVVVDEAYGEYAEQPSATTLL

SEQ ID NO: 126352 - protein, 270 aa, Unknown
  Bacterial polypetide isolated from the Sargasso Sea
MKTRDLSEHREYAPGKSTGEVAIEIGRDESEIINLSSNENPLGPSLNVIKTLKEKSEGVNRYPKEASKDLINKIAQKWGIGESQVWLANGADGAIDYISRAMIEPGDRVLVPNPGFAYYGMSSRFHHGGVEEYDIGKKEGFELSAENVFRGYKGQKIVYLTNPNNPTGGIFPTKEIEKIIEGVGEDSLVVVDEAYGEYSGKRSSIELCKKYQNIAVIRTFSKAYGLAGCRIGYAIVPEEGSKEYSRVNTPFAAGELSCYAASAALRDEKH

SEQ ID NO: 126353 - protein, 71 aa, Unknown
  Bacterial polypetide isolated from the Sargasso Sea
MNLKDIVNKGILDLSPYKPGKPIEDLERELGIKNAIKLASNENPLGPSPLAIDAVTKVLNGTHRYPDGNAL

SEQ ID NO: 126354 - protein, 188 aa, Unknown
  Bacterial polypetide isolated from the Sargasso Sea
MSFERENITRIEGYSPGEQPSSSDIIKLNTNENPYPASPLVAETLATIKVGELRRYPSPSADEFCNLAAKIHKVRPESIIPTNGGDELLRLTLTTFAEENDTLAITTPSYSLYPILASIHGCSLIEVPLSKDLTYPEKLPDLLGNLSAKICILVNPHAPTGALLPASFIDELAGNFEGVLVVDEAYVD

SEQ ID NO: 126355 - protein, 230 aa, Unknown
  Bacterial polypetide isolated from the Sargasso Sea
MKNSFLENLNQGVLGLKPYEPGLPLEHTQKKLGLEKMIKLASNENPLGPSPKALAVLQEKSNSLSSELNRYPDGNAYDLKEAISKKYKVNMNQITIGNGSNDLIEFVSRCFLGTGKKAIYSQHGFAIYPLAIKATSALPIKSKAKNWGHDLELMLDLVDDQTKLIFIASPNNPTGTAKTLLEIKDFLNNLPDDILVFLDQAYYEYIEGSEFDIPFSLIDDHPNLVISRSF

SEQ ID NO: 126356 - protein, 224 aa, Unknown
  Bacterial polypetide isolated from the Sargasso Sea
MYNENPYGPSRIAKIAMQKAFSESNLYTMRLARTEFTDLIARQNNVDANQISIGFGSREILNKAAMMNGIDNGEMVSPQLTFEAINQYAKNAMKTKIIRVAMNSALHIDLDKMASSITKNTKMIYVCNPNNPTGLALDSDQLESFCKEVSKKVVVFIDEAYHEYAIGDGYKTMSHLVNSNNKIIISRTASKVHGLAGLRVGYAISNPEVTSRIKTYLNGSLNVV

SEQ ID NO: 126357 - protein, 232 aa, Unknown
  Bacterial polypetide isolated from the Sargasso Sea
VPYNNHYEDLDALLSATKKNKAKILYLSNPDNPMGTFHSKENIQEFIDNIPDNTILCLDEAYADFVDKKELAPINIERENVIRFRTFSKAYGLAGLRVGYGIGNNKLIKAFNKVRNHFGVNKLGQIAAKVALKDQEHLKAVLKKVSQSKKNIASIFKKFGFNSLVSRTNFVPINSGGDGEFAAKLMNSLIQEKIFVRMPSVTPLNSFIRITAGTNGDLTVLDDAMNRIIKEL

SEQ ID NO: 126358 - protein, 176 aa, Unknown
  Bacterial polypetide isolated from the Sargasso Sea
DAYFEYVKRKDYLSGLKTFTNFKNVVMTRTFSKIYGLAGLRVGWGYGSKEIISALNKVKPPFNVSRPALFAASAAARDNSWLNKEIKHVNKWSKKMFSEFKKMRIETNKSFTNFLLVKFDKVKINSAKVFRLLAKSGILVRKMDVYGIKNSLRITIGTTSENIALIKKMRKILNVQ

SEQ ID NO: 126359 - protein, 230 aa, Unknown
  Bacterial polypetide isolated from the Sargasso Sea
KEKNFKISIDNILSMVTKKTKIVFLANPNNPTGTIIGKKDLLKLRKKLRSNILLVVDDAYFEYVKNKNYLPGLKLFSNSKNVIVTRTFSKIYGLAGLRVGWGYIPKNLIYSLNQIKPPFNINRAALFAAAESIKDVKWLNKEIKHVNKWSKIFYKNFKDLGIETNISYGNFLLVNFDKIRKSSKKIFLKLAKNGILVRKMDAYKIANSLRITIGNNLENKKFINIIKKVI

SEQ ID NO: 126360 - protein, 284 aa, Unknown
  Bacterial polypetide isolated from the Sargasso Sea
MTFPKPNNIVAEKYVAGMSLFKSKIAKIKLSANESALGPSPKATKQYLEVSKNFARYPDSDGTFLRNTLANKFKIDNNRIILGSGSDQIFELICKSFLKKGDEVIVPKFSFIIYRIYSRMNGAKVIYSKENNFTVSTKDILKKVTRKTKIVFLANPNNPTGTYIPKKELLFLRKKLRSDILLVVDDAYFEYVKNKDYLSGLKTFTNFKNVVMTRTFSKIYGLAGLRVGWGYGSKEIISALNKVKPPFNVSRPALFAASAAVKDSSWLNKEIKHVNKWNKKCFLK

SEQ ID NO: 126361 - protein, 288 aa, Unknown
  Bacterial polypetide isolated from the Sargasso Sea
KTLANKFKIDKKRIILGSGSDQIFELICKSFLKKGDEVIVPKFSFIIYRIYSRMNGAKVIYAKENNFTVSVKDILKKVTRKTKIVFLANPNNPTGTYISKKELLFLRKKLRSNILLVVDDAYFEYVKQKDYFSGLKTFTNFKNVVMTRTFSKIYGLAGLRVGWGYGSKEIVSALNKVKPPFNVSRPALFAASAAVKDSSWLNKEIKHVNKWSKKMFSEFKKMRIETNKSFTNFLLVKFDKVRINSTKVFRLLAKSGILVRKMDVYGIKNSLRITIGTTSENIALIKKM

SEQ ID NO: 126362 - protein, 260 aa, Unknown
  Bacterial polypetide isolated from the Sargasso Sea
MNLPKPIKFEVERYVGGLSEFKKIQDPIKLSANESALGPSPKAIEAFEKEKNKVFKYPESDSNSLREVLSNKFKIDSKRIICGSGSDQIFDLTCRLFLDPGDEVIVTEFGFIMYKIYASIHKAKVILAKEKNFKASVDEIIKKVSDKTKIVFVANPNNPTGTYLSKNEMLELRKKLRSDILLVVDDAYFEFLNSDDFSSGLDLFKNSPNVLVTRTFSKIYGLAGLRLGWGYSSKEIINSMYQIKPPFNVNRAALAAGVEA

SEQ ID NO: 126363 - protein, 287 aa, Unknown
  Bacterial polypetide isolated from the Sargasso Sea
LFKARLGANENMFGPSPKALSALKKYSNEQWMYGDPTSFELRCALAKKHKISADNIVVGEGIDGLLCYLVRLIISEGDEVVTSDGAYPTFNYHVSGFGGILHKVPYLADCEDIVSLIKKAHSVDAKLIYFANPDNPMGTHVPGDKIVEALKDLPEGCLFILDEAYSEFAPAASLPSLDITDKRVVRLRTFSKAYGMAGSRVGYAMAEENLIKSFEKIRNHFGMNRLAQKAALEALSDNQWLLEMVQKVENGRQRIYKIAASNNLKPITSSTNFVAIDCGKDGDYAGK

SEQ ID NO: 126364 - protein, 245 aa, Unknown
  Bacterial polypetide isolated from the Sargasso Sea
SFIIYRIYSKMNGAKVIYSNENNFTVSVKDILKKVTTKTKVVFLANPNNPTGTYVTKKDLLFLRKKLRSNILLVVDDAYFEYVKQKNYSSALKLFSNSKNVAITRTFSKIYGLAGLRVGWGYGSKEIIDTLNKIKPPFNVNKAALFAASAAVKDSVWLNKEIKHVNNWNKKMFNEFKKMKIETNRSYSNFLLVNFDKVKINSSRVFKLLAKVGILVRKMDVYGIKNSLRITIGKSEENRKLISKN

SEQ ID NO: 126365 - protein, 297 aa, Unknown
  Bacterial polypetide isolated from the Sargasso Sea
SALGPSPKAIKEYLKVSKNFKRYPDSDGTFLRKTLSKKFKLDVNRIILGSGSDQIFELVCKAFLDKGDEVIVPKYSFIIYRIYSKMNGARVIYSKEDNFKISAKDILKKVTRKTKIVFLANPNNPTGTYIDKKQLITLRKKLRSNILLVIDDAYYEYVKSKDYSSGLNLFSNFKNVVITRTFSKIYGLAGLRVGWGYASKDLINALNRIKPPFNVGRPALFAASAAIKDSAWLNKEIKHVNKWNEVLFKEFKKMKIIKNRSFTNFILVNFDKLRIKSHKVFQLLANSGILVRKMDVY

SEQ ID NO: 126366 - protein, 267 aa, Unknown
  Bacterial polypetide isolated from the Sargasso Sea
MQAFLNKGDEVVVSQYSFIIYRIYSRMCGANVKFAKEENFTSSVKSILECVNRKTKIVFLANPNNPTGTYLDRNEMLELRKRLRSDILLVVDDAYSEFIQDPNFASGMKLFSKSKNVLITRTFSKIYGLAGLRVGWGYSSKPIIKKLYEIKPPFNVSRPALFAATQAVQDTNWLSKAIKHNNYWCEKIFDVIDEIGISTNKTKVNFFLLNFDFVDKSSSQVFNKLANLGILVRQMDVYSIKNSLRVTIGNSFENKKLISSLRKIFNV

SEQ ID NO: 126367 - protein, 195 aa, Unknown
  Bacterial polypetide isolated from the Sargasso Sea
HSKDNIQDFMANIPDDTILCLDEAYSDFVHKDELAPINVEHENVIRFRTFSKAYGLAGLRVGYGIGNKKLIEAFNKVRNHFGVNKLGQIAAKAALEDQYHLKTVLKKVDQAKKDIAELFGRFGFTSLSSRTNFVPINSGGDGKFAAKLMSSLIKEKIFVRMPSVSPLNSFIRITAGTNDDLMVLDDAMHKIIKVI

SEQ ID NO: 126368 - protein, 190 aa, Unknown
  Bacterial polypetide isolated from the Sargasso Sea
LRNLLEKIPSHVIVLVDEAYFEYAKIEKEYPNCSSWISDFHNLIVTRTFSKAYGLAALRIGYSLSHSKIADLLNRVRQPFNNNSLALVAAEVALQDSEYIESSIKLNQSGMKQLTQAFDNMGLAYIPSKGNFICVNFEQPAIEIYENLLKSGVIVRPISDYDMPNHLRITIGLEHENTKFIEELEKIMTK

SEQ ID NO: 126369 - protein, 189 aa, Unknown
  Bacterial polypetide isolated from the Sargasso Sea
RELTRFLDSVPPSVWVVLDEAYFEYVDDSQYPQGLELQAKYPNLIVTRTFSKAYGLAALRVGYSVSSAEFADVLNRVRQPFNVNSLALEAALSALGDQEFIRASVRVNEIGMAQICSGLDKLNLKVIPSVGNFVSFDTGQSEIDIFNRLLSKGVIVRPIAEYGLPGFVRVTVGLEPENARFLEALGEVL

SEQ ID NO: 126370 - protein, 54 aa, Unknown
  Bacterial polypetide isolated from the Sargasso Sea
MPLVPSYIKKLKSYKPGKPIEEVQRELGLENIIKLASNENPLGPSPKALSAIQN

SEQ ID NO: 126371 - protein, 55 aa, Unknown
  Bacterial polypetide isolated from the Sargasso Sea
MSCDFLALAQPGVQKLSPYVPGKPVEELARELSLDPAGIVKLASNENPLGPSPKV

SEQ ID NO: 126372 - protein, 234 aa, Unknown
  Bacterial polypetide isolated from the Sargasso Sea
MPNPKSTNTYQPGLSAELVKKKYAVSKVVKLASNENPLGPSLNAINAARQEILSLNRYPDGKCSDLIEEIRVYHKKYKLKTKNIIIGNGSNEILELIGRTFLAKNDEVIISKHAFLVYKMISNSMRAKIVEVNINKKNDASFMTVNLDSIKDSISSKTKVIFIANPSNPTGTIIDSKKLKEFLKSIPKKIIVVIDEAYIEYACYRGHKSALDLIKDFKNIIITRSFSKIYAIAG

SEQ ID NO: 126373 - protein, 267 aa, Unknown
  Bacterial polypetide isolated from the Sargasso Sea
MTLPKPIKFKVERYIGGLSQFKKIDNPIKLSANESALGPSPKAIQAIEKDKDKIFKYPESDSNSLREVLSKKFNIDSKRIICGSGSDQIFDLTCHLFLEPGDEVIVTEFGFIMHRIYASLYKAKVILAKEKNFKASVNEILGEVTNKTKIVFIANPNNPTGTYLSKNEMLTLRKKLRSDILLVVDDAYFEFLDSEDFTSGLDLFKDSTNVLITRTFSKIYGLAGLRLGWGYSSKEIIDAMYQIKPPFNVNRTALVSGIEAIKDNEWT

SEQ ID NO: 126374 - protein, 259 aa, Unknown
  Bacterial polypetide isolated from the Sargasso Sea
DEVIVPKYSFIIYRIYSKMNGAKVIYSKEDKFTVSVKDILKKVTKKTKIVFLANPNNPTGTYIKKKNLQFLRKKLRSNILLVVDDAYFEYVKQKDYNSALGIFRNYKNVVITRTFSKIYGLAGLRVGWGYGSKDIINALNKIKPPFNVSRPALFAASAAIRDNDWLNKEIKHVNKWNKKMFNEFKRMKIETNKSYSNFLLVNFDRVKINSQKVFKLLAKTGILVRKMDVYGIKNSLRITIGKSDENRKLISKMKKILNV

SEQ ID NO: 126375 - protein, 257 aa, Unknown
  Bacterial polypetide isolated from the Sargasso Sea
MDLKKLVNKGVDSLSPYEPGKPIEDLEREIGIKNAIKLASNENPIGPSPKVLQSIDAILKETHRYPDGNATRLKDSIAKKFNTSSNQVTIGNGSNDIIEFIARSFLGPDDSAIYSEHAFAVYPLVVKAVGAKGIEVPAKDFSHDLEAMLKAIEENTKLIFIANPNNPTGSFVELDELLDFLEKVPEDIIVLLDQAYFDYSSFETRDANFDILKKFPNLVMSRSFSKAYGLAGFRVGFSVSSEDIANYLNRVRQPFNA

SEQ ID NO: 126376 - protein, 162 aa, Unknown
  Bacterial polypetide isolated from the Sargasso Sea
MTCDFLTLAQPGVQKLSPYVPGKPVDELARELGLDPAGIVKLASNENPLGPSDKVLAAIRAELDELTRYPDGNGFTLKAALASRYAVDAAQVTLGNGSNDILELVARAYLAPGLNAVFSDYAFAVYPIATQAVGAQGKVVPARDYGHDLDAMLAAIDDDTRV

SEQ ID NO: 126377 - protein, 358 aa, Unknown
  Bacterial polypetide isolated from the Sargasso Sea
MNLPKLNKINAEKYVAGTSSFNRKIAKIKLSANESALGPSPKAVREFKKVSKDLKRYPDFSGVFLRKALAKKFRLDPNRIILGSGSDQIFELICKAFLKKNDEVIVSEFSFIIYRIYSKICGAKIRYAKEKNFTVSVENILSKVTKKTKIVFLANPNNPTGTMIYKKDLLKLRRKLRSNILLVIDDAYFEYVKNKNYSSGIELFSNFKNVIVTRTFSKIYGLAGLRVGWGYGSKNFINALNKIKPPFNINRAALLAAVASLNDTKWLNKEIKHVNKWIKIFYKTFVDFGIETNLSNANFLLVSFSKIKGNSKKIFLKLAKAGILVRKMNVYSIRNSLRITIGNSVENKKFIKVLRNII

SEQ ID NO: 126378 - protein, 365 aa, Unknown
  Bacterial polypetide isolated from the Sargasso Sea
MSSDILKNLNPGIENLHPYEPGRSIEEVVDEFDLKEVVKLASNENPLGASPKALSALAEFKTDLHLYPDGNGTKLKKEIASHENVSVNNIIIGNGSNEILELAARAFLNPSTSSIASKHAFAVYKIVTQSAGATLIEVPTLNWSHDLNSFPNYLEQSTKVIFIANPNNPTGTYNSHDQVHTLLEKVPASVLVVLDCAYFEYVTKADYVKPIDLLKEFENLIITKSFSKIHGLASIRVGYGIANPSLIEVLNRIRQPFNVNAIAQVMASIAINDKEHIQQSIKLNSLQYKFLFNKLSKLGLECIPSVGNFISFRGSFSGEELFHGLMKKGVIVRPVDLYDMKDFIRVTIGTEAENLKFIGAIEELL

SEQ ID NO: 126379 - protein, 370 aa, Unknown
  Bacterial polypetide isolated from the Sargasso Sea
MDIKELVNRGIDDLSPYEPGKPIEDLERELGIENAIKLASNENPVGPSPKILDSIEAVLKETHRYPDGNATRLKSTIARKFNVEDNQVTIGNGSNDIIEFVARIFLSPNGHNGQNDSAIYSEHAFAVYPLVVKAVGAKGIEVPAKNFSHDLDLMLESIEESTKLIFIANPNNPTGSFIEYDKLIAFLEKVPEHIIVLLDQAYFDYSSFETKDIDFDVLNRFPNLIMSRSFSKAYGLAGFRVGFCVSSTEIADYLNRVRQPFNANSLALFAAEKALEDQDFIDKCLQLNLDQKELLFKELESLGFDCLPSRGNFISFDCKQDSREAFNKLLKEGVIVRSLAVYKMPNYLRVSVGLPEENLSFLEKIKSTLL

SEQ ID NO: 126380 - protein, 248 aa, Unknown
  Bacterial polypetide isolated from the Sargasso Sea
FIIYRIYSKIYGAKIKYAKEKNYKISINNILSKVTKRTKIVFLANPNNPTGTIVDKKELLRLRKKLRSNILLVVDDAYFEYVKDKNYLPGMKLFSNSKNVIVTRTFSKIYGLAGLRVGWGYGPKNLIYALNQVKPPFNINRAALFAAVESVRDVKWLNKEIKHVNRWANIFYNNFKILGIETNFSYGNFLLVNFNKVKMNAKKIFLKLAKSGILVRKMDVYKIKNSLRITIGNNRENNKLIKTLRKII

SEQ ID NO: 126381 - protein, 352 aa, Unknown
  Bacterial polypetide isolated from the Sargasso Sea
MVKKKYAVSKVVKLASNENPLGPSLNAINAATQEILSLNRYPDGKCSDLIEEIRVYHKKYKLKTKNIIIGNGSNEILELIGRSFLAKNDEVIISKHAFLVYKMISNSMRAKIVEVNINKKNDASFMTVNLDLIKDSISSKTKVIFIANPSNPTGTIIDSKRLKEFLKSIPKKIIVVIDEAYIEYACYRGHKSALDLIKDFKNIIITRSFSKIYAIAGTRVGYGISQTDIIQKLNSMRQPFNVNQIAQIMAIKSLKDKKFLRDSLEINKTCYEYITKELDKDSIKYIDSYTNFITIYFGKDASVIFEGLLKKGIILRPLKNYGLPNYLRVTIGTMNECKLFIKNLRILLKRTR

SEQ ID NO: 126382 - protein, 299 aa, Unknown
  Bacterial polypetide isolated from the Sargasso Sea
MKKTFPEDRVNIGVNKITPYKPGKSSDSLNMSKEKLIKLASNENPIGPSKLATKAISHIVEEAHRYPDGNGTKLKQEISKLEKVPLDCITLGNGSNDLIEFSARAFLTNGDNALYFKHGFAIYPLAILATGADLRELPVTENYHQDLTSVINFVDEKSKVIFIASPNNPTGSANTLSEIEAMLNDLPNDLIVFLDQAYFEYIEDEHYKLPFELIDKYQNLVISRSFSKAHGLAAYRLGYSISSQKIADYLNRVRQPFNVSSFALEAGIASLNDKEHLRKSNDLNQREKNKLMQFLKKKI

SEQ ID NO: 126383 - protein, 149 aa, Unknown
  Bacterial polypetide isolated from the Sargasso Sea
MKPEDLVNKGILNLSPYKPGKPIEDLERELGIKGAIKLASNENPLGPSPLAIEAVSNILNGAHRYPDGNALRLKESISDKFKLDIRNLTIGNGSNDIIEFIARSFLSNEDSAIYSEHAFAVYPLVVQAVGAERIEVPARNFGHDLQAMK

SEQ ID NO: 126384 - protein, 269 aa, Unknown
  Bacterial polypetide isolated from the Sargasso Sea
ICKSFLKKGDEVIVPKFSFIIYRIYSRMNGAKVIYSKENNFIVSTEDILKKVTRKTKIVFLANPNNPTGTYIPKRELLFLRKKLRSDILLVVDDAYYEYVKNKDYSSGLKTFTNFKNVVITRTFSKIYGLAGLRVGWGYGPKEIISALNKVKPPFNVSRPALFAASAAVKDSPWLNKEIKHVNKWSKKMYSEFEKMRIETNKSFTNFLLVKFDKVKINSAKVFGLLAKSGILVRKMDVYGIKNSLRITIGTKPENIALMKKMKKVLNVR

SEQ ID NO: 126385 - protein, 373 aa, Unknown
  Bacterial polypetide isolated from the Sargasso Sea
MELISQIITLPKEETQYSKAIHGGTNILESRELNYGEVLDFSASISPINISSQILEISQKLDLSQYPDPDCLLLKEKITEGLKQYSLSPTNISIGNGSTELIYAIASAFLNKTNTLTSRSLIFHPTYGEYFAASSLHKAEISLITPKYINPGWEWDWELAHNFIQEHNPNLIFLCNPNNPTGNYFSKSQIVQLLEVIKNTSSILVVDEAYIDFVTDHKVLYDLILEYKLILLRSLTKSYGITGLRLGYSLANPEITSQINQYIPPWSVNTLAQNAGIHLFSGNNYIQTGKEMIDESKNYLIHALTELGYTVEPSNANFLLFKVTNAQKMRDALISKNIIIRDCTSFGLPQHVRIGIRSISDCEKLIEAIHEIT

SEQ ID NO: 126386 - protein, 416 aa, Unknown
  Bacterial polypetide isolated from the Sargasso Sea
EIGKQKKSTSNIVDYDREQKVLDRILQHTKTKYSKDSIVRIWREIFQASTKLQEIDRPIIDSKRSINLINIYKGGKSSLKGKDNIIKLSSNENSYGPSPKVLEKINFKEPLSNFHRYPNIDGAQLRDKLASVHNINANQIVLGCGSDEILLFAALGFCQDGDEIIHAEHGFEMYSIITKIVGATSKLIKEDKNYKVTVNSILDQVSPSTKIIYLANPNNPTGTYLTSSEINEILNKLPRNIIMVLDGAYAEYVTKKDYDKGFYLVDQFENIILTRTFSKAYGLAGLRLGWCYTSKKVATILNKVKGPFNTQNLSQEMAIIALEDKEYLDQIVKKNQEVKNWFESELKKINIKTNPSEGNFTFVEMTKEEAKNISARLANMGIIVRELDSYGLPNCLRITIGTKKEMNATIHALKQI

SEQ ID NO: 126387 - protein, 350 aa, Unknown
  Bacterial polypetide isolated from the Sargasso Sea
MHPYEPGRSIDEVVAEFGHHEVVKLASNENPLGASPKALSILAGLENDLHLYPDGNGTKLKKEISNHENVPFNNIIIGNGSNEILELAARAFLNTNTSSIASKHAFAVYKIVTQSAGASLIEVPTCNWGHDLRSFDDYLESSTRIIFIANPNNPTGTYNSHEEVHSLLKKVPSSVLVVLDCAYFEYVTKEDYVKPIDLLNEFENLLITKTFSKIHGLASIRVGYGIANPSLIEVLNRIRQPFNVNTIAQAMACVAINDHEHIRQSIELNSQQYKFLFDKLSKLGLDCIPSVGNFITFKGSFIGKEMFNNLLKKGVIVRSVDLYDMKDFIRVTIGTEAENLKFLSVLEELL

SEQ ID NO: 126388 - protein, 235 aa, Unknown
  Bacterial polypetide isolated from the Sargasso Sea
MTYPRYTPLVSDLPSTVPFVGPESQERDRKLLFDARLGANENMFGPSPKALSALKKYSNEQWMYGDPTSFELRCALAEKHKISTDNIVVGEGIDGLLGYLVRLLISEGDHVVTSDGAYPTFNYHVSGFGGKLHKVPYLADCEDIVSLVKKARSVDAKLIYFANPDNPMGTHVPGDKIVEALKDLPEGCLFILDEAYSEFAPASSLPSLEITDMRVVRLRTFSKAYGMAGARVGYA

SEQ ID NO: 126389 - protein, 361 aa, Unknown
  Bacterial polypetide isolated from the Sargasso Sea
MPLVPSYIKKLASYKPGANIDDIKKEKSLINVIKLASNENSMGPSPMAVSAINKSINKINRYPDAPGKKLRKKLASKFNVKSENVIIGSGSEGIMSNILRTFLLTDDEIIGAANSFIGFRVLATATGRKINWVNMKNHKIDLNEIIRNINDYTKIIYIANPDNPMGTYITDKEFDKFYQSVPERVLVILDEAYFEYANHLDDYPNSMTYRYDNVITLRTFSKAYGLAGLRIGYGFSHETLINNLLKVKVPFDPSFTAQVGGLAALDDDEFMNKTINLNIIEKEKIETKLDELGIERIPSAANFITTHWDTEIKAKTITQKMLDRGIILRHLVSFGWPEHVRISIGLENENENFLQTLEKII

SEQ ID NO: 126390 - protein, 328 aa, Unknown
  Bacterial polypetide isolated from the Sargasso Sea
NESALGPSPKAKKEYIKVSKSFARYPDTNGTFLRETLSKKFKLDKNRIVLGSGSDQIFELICKAYLKKGDEVIVPKYSFIIYRIYSKMNGAKVIYSNENNFTVSVKDILKKVTTKTKVVFLANPNNPTGTYVAKKDLLFLRKKLRSNILLVVDDAYFEYVKQKNYSSALKLFSNFKNVVMTRTFSKIYGLAGLRVGWGYGSKEIIDTLNKIKPPFNVNKAALFAASAAVKDSAWLNKEIKHVNNWNKIMFNEFKKMKIETNRSYSNFLLVNFDKVKINSSRVFKLLAKAGILVRKMDVYGIKNSLRITIGKSEENKKLVSKMKRILNV

SEQ ID NO: 126391 - protein, 326 aa, Unknown
  Bacterial polypetide isolated from the Sargasso Sea
MMFNENPYGPSQVARRAMRKAFNESNLYSMRGAKAEFKELMAKLNGVTPDHIAVGFGSGEILKKAALMNGIDKGELLSPSLTFETINRYAKTMQSNVKRIPMTKNIGIDLDKMSEKISSKTKMVYLCNPNNPTGLLMDTNDLKLFCKQISQKAIVFVDEAYHEYVVDPKYRSMIDLVKSGENVIISRTASKVHGLAGLRVGFAISTPLIIKRLESYLTDSLNIIGLRAAIASYQDQRFQKHSIEMNNKAKSIVTDFLDSKGIQYLDSQTNFIFIKTGIEITELQPAMEKNGVLVGRPFPPFTTWCRLSLAKPEEMPRFNEVFEKVI

SEQ ID NO: 126392 - protein, 212 aa, Unknown
  Bacterial polypetide isolated from the Sargasso Sea
MTLRNINSVVAGLSPYKPGKPIEELSRELGLTDIVKLASNENPLGASEQVKMALVSAVDELTRYPDGSGFALKKALSEKLKVEPHQITLGNGSNDVLDLIARATLEGEAEGIISEHSFVVYGLSIKYAGGRTVVVPALNYGCDLQSMARAVTDKTRVIYIANPNNPTGTWVTNQKLTRFLDSIPSSVWVVLDEAYFEYVDDPEYPPRFGIAS

SEQ ID NO: 126393 - protein, 371 aa, Unknown
  Bacterial polypetide isolated from the Sargasso Sea
MKNNISRKKFLKQGATLFAGTMIGSTIDFSSIVYAANYKPIRMMYNENPYGPSRIAQRAMQKAFSESNLYTMRQAQKEFVQLIALLNNIDKDQISIGFGSREILNKAALMNGIDNGEMISPQLTFEAINNYAKNAMNTKVNRIKMDDDINIDLDKMASKINKKTKMVYVCNPNNPTGLALDSNQLESFCLEVSKKVLVFVDEAYHEYALDGNYKSMSHLVNPNNKILISRTASKVHGLAGLRVGYAIANNDITKRLSSYLTGSLNVVGLRAAIASYNDKNFQAFSIKKNNQARKIVTDHLDKKGIKYLKSHTNFIFLKTGMDINKFQPAMEKHGVIVGRPFPPYKNWCRLSMAKPEEMKFFNRGLDKVLSI

SEQ ID NO: 126394 - protein, 203 aa, Unknown
  Bacterial polypetide isolated from the Sargasso Sea
NPTGDLVGRDGLIALLEKARDRAIVVVDEAYIEFCPEASVVDLLARFPNLVVTRTLSKAFALAGIRCGFTLAGPEVIAMLAKVIAPYPIPEPIAQIAAQALSPMGLELMQERVVELNKQKAAFKAALATLPCVKEVFEDKGNFVLVRFVDGAAVFAAMKAAGIILRDFSTKPGLDNSIRVTIGYQGEMDAVLAVLRDLPSPSF

SEQ ID NO: 126395 - protein, 159 aa, Unknown
  Bacterial polypetide isolated from the Sargasso Sea
MSKYWSPLVSELQPYVPGEQPKMANLVKLNTNENPFGPSPKVIEAIQKELNDNLRLYPDPEGQALKEAIADYHVDFAINARQVFVGNGSDEVLAHIFQGLLKHDKPILFPDITYSFYPVYCGLYQIESTVIPLTDSFEINPEDYKRPNGGIIFPNPNAP

SEQ ID NO: 126396 - protein, 276 aa, Unknown
  Bacterial polypetide isolated from the Sargasso Sea
MSCDFLALAQPGVQKLSPYVPGKPVDELARELGLDPAGIVKLASNENPLGPSDKVLAAIRAELDELTRYPDGNGFTLKTALAARYGVDAAQVTLGNGSNDILELVARAYLAPGLNAVFSDYAFAVYPIATQAVGAQGKIVPAKDYAHDLQAMLAAIDDNTRVVFIANPNNPTGTWFGPDALEAFLAQVPESVLVVLDEAYIEYAEGDELPDGLDYLARYPNLLVSRTFSKAYGLASLRVGYAISSPAIADVLNRVRQPFNVNSLALAAACAALADA

SEQ ID NO: 126397 - protein, 221 aa, Unknown
  Bacterial polypetide isolated from the Sargasso Sea
RDDFSIDPPDYRKANGGIIFPNPNAPTGVALGLEQIEQILDANPDSVVVVDEAYVDFGAETAITLVDRYPNLLVTQTLSKSRSLAGLRVGLAVGHADLIEALERIKNSFNSYPLDRLAIVGAVAAFQDQSWFNQTRQAVMRSRESLAEALAERGFEVLPSQANFVFARHTQRDAAELAQGLRERRVIVRHFRLPRIDQFLRITIGTEAQNKALLAALDEVL

SEQ ID NO: 126398 - protein, 267 aa, Unknown
  Bacterial polypetide isolated from the Sargasso Sea
PYGPSPKALAAMQAELNDNLRLYPDPNSDLLKQAVARYYGIDAGKVFLGNGSDEVLAHIFHGLFQHDLPLLFPDISYSFYPVYCGLYGITFDAVPLDEQFQIRATDYARPNGGIIFPNPNAPTGCVLALDAVEQILKASPDSVVVVDEAYIDFGGETAISLVDRYPNLLVTQTLSKSRSLAGLRVGLAVGHPDLIEALERVKNSFNSYPLDRLAIVGAAAAFDDREYFEKTCQWVIDSRNQVVAQLQGKGFEVLPSAANFIFARHPR

SEQ ID NO: 126399 - protein, 286 aa, Unknown
  Bacterial polypetide isolated from the Sargasso Sea
GGKGHVWLNANEAPLAYPFTIEGSRLNRYPECQPAEVVNGYAAYAGVNPDQVLVSRGADEAIELLIRTFCEAGEDQILICPPTYGMYAISAETCGVGIVEQPLTASRQPDWPAIADRLSDVKLVFLCSPNNPTGDLVGRDGLIALLEKARDRAIVVVDEAYIEFCPEASVVDLLARFPNLVVTRTLSKAFALAGIRCGFTLGHPEVIAMLAKVIAPYPIPEPIAQIAAQALSPMGLELMQERVVELNKQKAAFKAALATLPCVKEVFEDKGNFVLVRFVDGAAVFA

SEQ ID NO: 126400 - protein, 293 aa, Unknown
  Bacterial polypetide isolated from the Sargasso Sea
GKPIEELARELGLNPAEVVKLASNENPLGPSDKAMAAARKALEEMCLYPDGNGFDLKQALSKRFGLGMNQITLGNGSNDVLEVIARCFADSDSEVVFSQYAFAVYPIVTQAIGAKGVSVPARDWGHDLDAMAAAVTDRTKLVFVANPNNPTGTVHEADALEAFLDRIPERVLVVLDEAYCEYLTGDEYPDGIKLLARYPNLIVCRTFSKAWGLAALRVGYAISSPEIADILNRVRQPFNVDTVALAAATAVLEDEAYLNRSREVNEAGLRQLCEGFDRMGLPYIPSAGNFVAV

SEQ ID NO: 126401 - protein, 145 aa, Unknown
  Bacterial polypetide isolated from the Sargasso Sea
MTDFLALAQPGVQQLSPYVPGKPVDELARELDLDPASIVKLASNENPLGPSPKALEAIRSELAELTRYPDGNGFELKSRLAARCGVQINQVTLGNGSNDILDLVARAYLAPGLNAVFSQYAFAVYPISTQAVGAQGKVVPAKDYG

SEQ ID NO: 126402 - protein, 239 aa, Unknown
  Bacterial polypetide isolated from the Sargasso Sea
MSRISSLARQKVQQLVPYASARLSMSGGSVWLNANENSMATDYELSGHYNRYPDCQPKELISAYASYAGVESNQVLTSRGADEGIELLIRSFCEPGQDAISICPPTYGMYKISAESQLVDVNIVPLTQDLTLDLPTLFAQKANVKLVFICSPNNPTGDLIPREQIIEVLEFYKDKALVVVDEAYIEFAPEASVAGLLSQYNNLVVLRTLSKAFALAGLRCGFTLAEPSVIAALRQMIAP

SEQ ID NO: 126403 - protein, 351 aa, Unknown
  Bacterial polypetide isolated from the Sargasso Sea
MSRISSLARQKVQQLVPYASARLSMSGGSVWLNANENSMATDYELSGQYNRYPDCQPKELISAYASYAGVESNQVLTSRGADEGIELLIRSFCEPGQDAISICPPTYGMYKISAESQLVDVNIVPLTQDLTLDLPTLFAQKANVKLVFICSPNNPTGDLIPREQIIEVLEFYKDKALVVVDEAYIEFAPEASVVSLLSQYSNLVVLRTLSKAFALAGLRCGFTLAEPSVIAALRQMIAPYPVPAPVAEIAVQALSVQGQQKMHATVEQINSLRESFSTFAKTLAYVSKVYPSKANYVLLSVPDAAALVSFIAEQGVLIRNQSSQLGLGQVVRVSIGNAAEMAQLQQIMSSY

SEQ ID NO: 126404 - protein, 364 aa, Unknown
  Bacterial polypetide isolated from the Sargasso Sea
MLKPSKRIFSLPKYTPGKPIDELERDFGIENAIKLASNENPLGPSPKAKEAIIEAAAKSHLYPDGDSYHLKKAIALREGILPNQIVLGNGSNEVLELIGHCYIEEGNEVLMGEYCFIVYPIVTMLSEGTIVRVDMPNLVHDIASFKSSITESTKVVFLANPNNPTGTIVSTEEIIGFLEFLPKNILLVVDEAYSEYVEPKYKLEVSSMINKYDNLLILKTFSKMYGIAGLRVGYAMGSVDLISNLEKAREPFNVNIIAQEAALAALDDDEHIARSIKVNNEGMLYLKTEISKLGLKTYPSYANFLLLEFPLDANNIYEELLKHGVIVRPLQNYNLSNCLRVTVGIRDENQKFLNALKQVLGSIK

SEQ ID NO: 126405 - protein, 361 aa, Unknown
  Bacterial polypetide isolated from the Sargasso Sea
MPLVPSYIKKLQNYKPGKPISEATRETGISNIIKLASNENPLGPSPKAMKALKESLINMHRYPDASGYDLRSKLAERFKVKVDNVVLGAGSEGIMSTIMRTFLLNDDELISAENSFIGFRVLANASGRRIHWVPMNKYRYDLEQMATKITDYTKIIYIANPDNPMGTYITKKEFDEFYKYIPERVLIILDEAYFEFANEIQDYPDSMTYRYDNVITLRSFSKAYGLGGIRIGYGLAHGELISNLLKVKVPFEPSLPAQIAGLAALDDAEFLSETLNVNKKGIRFLKEELDILGIENIPSAANFITTVWKSEQQAHRLSNDLLAKGIIVRHLASFGWPNCVRISIGTEKENNRIINALQKIL

SEQ ID NO: 126406 - protein, 362 aa, Unknown
  Bacterial polypetide isolated from the Sargasso Sea
MPDRSQAVSRYWSNIVQQLVPYVPGEQPALAHPVKLNTNENPYPPSPRVVAAIARELGETGDTLRRYPDPVARALRETVAAHHRIEPEQVFVGNGSDEVLAHTFQALLKHDRPLRFPDITYSFYPTYARLYGVQTSIVPLADDFSIRVDDYLDDAGGVLFPNPNAPTGRALPLADVERIAAANPSSVVVIDEAYVDFGAQSAITLIDRYPNLLVVHTTSKARSLAGMRVGFAFGDAALIDALNRVKDSFNSYPLDRLAQVAAQAAYEDIDYFNATCGRVIDSRTRLTHALDALGFDIVPSAANFVFARHPAHDAGAIAAKLKEREIFVRHFRLPRIDQHLRITVGTDAECDALVAALRELLA

SEQ ID NO: 126407 - protein, 370 aa, Unknown
  Bacterial polypetide isolated from the Sargasso Sea
MQQPWKDIALPDLPLREDLKSQHAYGAPQLDVPVCLNVNENPYPPSAALVERIATAVADAARAANRYPDRDFAELRAHLAAYLTHDTGVTIDASRVWAANGSNEVIQQVLQAFGGPGRSALAFTPAYPMYDEYCRTTFTRLHTLPRTRDFALDLGQALDSIREHQPSVVLLTSPNNPTGTALPVDDIRAILDVAPGIVVVDEAYAEFRRRGVPSAVTLLPDHPRLIVTRTLSKAFKFAGGRVGYCACAPAIVEALKRVRLPYHLSAFTQAAACAALAARDEMLSQVEAIKAERDSTVAWLRGLGLTVADSDANFVMFGEFADRHRIWSGLLRHGVLIRESGPPAYLRVSIGTGAEMAAFRAALLDVMALE

SEQ ID NO: 126408 - protein, 362 aa, Unknown
  Bacterial polypetide isolated from the Sargasso Sea
MTLRNINSVVAGLSPYKPGKPIEELSRELGLTDIVKLASNENPLGASEQVKTALVSAADELTRYPDGSGFALKKALSEKLKVEPQQITLGNGSNDVLDLIARATIEGEAEGIISEHSFVVYGLSIKYAGGKTVVVPALNYGCDLQAMSRAVTDKTRVIYIANPNNPTGTWVTNQELTSFLDSVPPSVWVVLDEAYFEYVDDPEYPQGLELQAKYPNLIVTRTFSKAYGLAALRVGYSVSSLEFADVLNRVRQPFNVNSLALEAALSALGDQEFIRDSVRLNDMGMAQIRSGLDKFNLKVIPSVGNFVSFDTGQSEIEVFNRLLSKGVIVRPIAEYGLPGFVRVTVGLEPENARFLEALGEVL

SEQ ID NO: 126409 - protein, 218 aa, Unknown
  Bacterial polypetide isolated from the Sargasso Sea
MSKFWSPFVKDLVPYVPGEQPKLSKLVKLNTNENPYGPSPRAIAAMQAEVNDNLRLYPDPNSDRLKQAVADYYGVKTSQVFVGNGSDEVLAHAFHGLFQHEAPLLFPDISYSFYPVYCGLYGIDYQQLALDEQFQIRVEDYARPNGGIIFPNPNAPTGCLLPLEAIECLLQNSPDSVVLVDEAYIDFGGQTAIALVDKYPNLLVTRPCPSRALWRACA

SEQ ID NO: 126410 - protein, 134 aa, Unknown
  Bacterial polypetide isolated from the Sargasso Sea
MRVGIAVGHPDLIEALERIKNSFNSYPLDRMAIAGAAAAFEDRAYFEKTCQQVIESREVVVAGLQGLGFEVLPSAANFVFSRHPDKDAATLAAGLREQGVIVRHFKQQRIAQFLRITIGTPEQNKALLDALQGL

SEQ ID NO: 126411 - protein, 401 aa, Unknown
  Bacterial polypetide isolated from the Sargasso Sea
MSQVPISQAPTSNVPVTKVPSANSASNTLDNNTLDNNTLDNTSIEPTTLAARLARPELLELTPYQSARRLGGRGDIWINANESPFNNVAVGELDLTKLNRYPECQPPALINAYSQYSGVAESKIVASRGADEAIELLIRAFCVPGIDSIATFGPTYGMYAISAQTFNVGVKALSLTAEYGLPSDFATATRGAKLVFICNPNNPTGTVIDKARIEQAIQALPDAIVVVDEAYIEFCPEYSVADLLETYPNLVVLRTLSKAFALAGARCGFLLANEEIIEIIMRVIAPYPVPLPVSEVAVQALSAAGIARMKTQVKALNTQGERLAAALNLYCEQWGGAVLKPNGNYVLAEFDDVATVAQLLIDNGIVARAYKDPRLAKAIRFSFSSQSDTDRLVSLFESQKL

SEQ ID NO: 126412 - protein, 361 aa, Unknown
  Bacterial polypetide isolated from the Sargasso Sea
MKLKNSFRINSLPTYKPGKSIEELQRELGFEDAIKLASNENPLGPPSSAVDVIQNSAHLVHLYPDGDCYNLKKKISFKENILPNQIIVGNGSNEVLELVAHTFLEKGDEAIMGEYCFIVYPIVTNLSEASIVRIPMKNLALNLNDILPRITNSTKVIFIANPNNPTGARSTKKDVEGFLEKVPANIVVVLDEAYAEYMGGENTNVSTLINKYENLIILKTFSKVYGLAGLRVGYGMASYDMIGLLNKPREPFNVNQVAQLAATVALDDEEHVKKSIELNKAGMIYLKAELTKMNIKSYPSYANFILIEFKSSASTIYEELLKQGVITRPLENYGLNNHLRITVGLEHENVKLINALKKVVA

SEQ ID NO: 126413 - protein, 401 aa, Unknown
  Bacterial polypetide isolated from the Sargasso Sea
MSQVPTSQAPTSPAPTSNVPVTKIPSANCASNTLDNNTLDTTSIEPTTLAARLARPELLELTPYQSARRLGGRGDIWINANESPFNNVAVAELDLSKLNRYPECQPPALINAYSQYSGVAESKIVASRGADEAIELLIRAFCISGIDAIATFGPTYGMYAISAQTFNVGVKALSLTAEYGLPSDFATAARGAKLVFICNPNNPTGTVIDKARIEQAIQALPDAIVVVDEAYIEFCPEYSVADLLESYPNLVVLRTLSKAFALAGARCGFLLANEGIIEIIMRVIAPYPVPLPVSEVAVQALSPAGIARMKTQVKELNAQGERLAAALNLYCEQWGGAVLTPNGNYVLAEFDDVAKVAQLLIDNGIVARAYKDPRLAKAIRFSFSSQADTDRLVSLFESQKL

SEQ ID NO: 126414 - protein, 356 aa, Unknown
  Bacterial polypetide isolated from the Sargasso Sea
MTTPQDIIRRDVLAMTSYPVPDATGYIKLDAMENPFPLPPVLAAHLGEHLAGVALNRYPAPRPEALIEKIKRVMGVPAGCEVLLGNGSDEIISMVSVACAQPGAKVLAPVPGFVMYQMSAKLANLDFIGVPLKPDFTLDTEAMLAAIAEHEPAIVYLAYPNNPTGTLYDDADMERIIAAANKSLVVIDEAYQPFAQQSWLPRADAFDNVVVMRTVSKLGLAGIRLGYLVGKPAWLTEFDKVRPPYNTNVLTQAAADFLLDHVDVLDAQAAQLREERTKLAQAVAELPGAEVFPSAGNFLLVRVPDASVMFETLLAARVLIKNVSKMHPLLVNCVRLTVGSPEENAQLIAGLKLVLH

SEQ ID NO: 126415 - protein, 359 aa, Unknown
  Bacterial polypetide isolated from the Sargasso Sea
MSRYWSDIVHRLTPYVPGEQPAVAHPVKLNTNENPYPPSPRVLDAIRQELGAAAESLRRYPDPSARKLRETVAAYHGIRAEQVFAGNGSDEVLALTFQALLKHDKPLLFPDITYSFYPTYARLFEIDYRTIALDDNFAIHVDEYTAPNGGVLFPNPNAPTGRPLPLADIERLLARNTESVVVIDEAYVDFGAESAVALIDRYPNLLVIQTVSKSRSLAGMRVGFAFGNPELIDALNRVKDSFNSYPLDRLAQVAAIAAYEDDAWFRDNCAKVIASRERLAAGLTALGFEVVPSAANLLFARHDGYDAATLVARLREKEIFVRHFKAARIDQHLRISVGTDAECGILLDALRDIFSGYVG

SEQ ID NO: 126416 - protein, 200 aa, Unknown
  Bacterial polypetide isolated from the Sargasso Sea
MSIANLARRVVRALTPYQSARRIGGKGHVWLNANEAPLAYPFTIEGSRLNRYPECQPAEVVNGYAAYAGVNPDQVLVSRGADEGIELLIRTFCEAGEDQILICPPTYGMYAISAETCGVGIVEQPLTASRQPDWPAIADRLSDVKLVFLCSPNNPTGDLVGRDGLIALLEKARDRAIVVVDEAYIEFCPEASVVDLRPAP

SEQ ID NO: 126417 - protein, 357 aa, Unknown
  Bacterial polypetide isolated from the Sargasso Sea
MTTPQDIIRRDVLAMTSYPVPDASGFVKLDAMENPYPLPEPLAAALGERLAQVALNRYPAPRPTALLDKLRHAMGVPPGCDVLLGNGSDEIISMMSMACAKPGAKVLAPVPGFVMYELSAKLAQLEFVGVPLKADLTLDVDAMLAAVAEHRPALVYLAYPNNPTGTLYDDGDIERIVAAARHSLVVIDEAYQPFAVRSWLPRAAEFDNVVVMRTVSKLGLAGIRLGYLVGSPAWLTEFDKVRPPYNINVLTQATADFLLDHLDVLDAQAADLRAERTRLAQEVAALPGTTVFPSAGNFLLVRVPDAAAVFDALLTERVLVKNVSKMHPLLAECVRLTVGSPDENARLLAALKLALPG

SEQ ID NO: 126418 - protein, 385 aa, Unknown
  Bacterial polypetide isolated from the Sargasso Sea
MSHIHLLLISRSEIFMTTSFGPSYVRAIAPYIAGKPISEVAREFGLDEAAIVKLASNENPLGMPESAQRAMAQAASELGRYPDANAFELKAALSERYGVPADWVTLGNGSNDILEIAAHAFVEKGQSIVYAQYSFAVYALATQGVGARAIVVPAVRYGHDLDAMLAAITDDTRLIFVANPNNPTGTFIEGAKLEAFLDKVPRNVVVVLDEAYTEYLPEAKRYDSIAWVRRYPNLLVSRTFSKAFGLAGLRVGFAIAQPELTDLLNRLRQPFNVNTLAQAAAIAALNDKAFLEKSAALNAQGYRQLTEAFDKLGLEYVPSDGNFVLVRVGNDDAAGNRVNLELLKRGVIVRPVGNYGLPQWLRITIGLPEENEAFLAALEQTLAAA

SEQ ID NO: 126419 - protein, 359 aa, Unknown
  Bacterial polypetide isolated from the Sargasso Sea
MSALIDNLINENLVPLKPYESARRLFSGGQDWLNANESPYANEYSVDSSNFNRYPSCQPEAVVSGYANYAGLDKSQLIVTRGADEGIELLIRTFCTPGKDSILICPPTYGMYAISAETCDVGVKKVPLNDDFSLNVNAVCAEDDVNVIFICAPNNPTGTPVAREDIKTVLNHFADKALVVVDEAYIEFDADNTWANEINNYPNLVVLRTLSKAFALAGLRCGFTLAQAPVIQALLKVIAPYPIPEPVAQIAAQALSAESLTLLELQVATINREKEALAEALNSIEGFELVGDRRANFILFRYAKAQALMQYLVSQGMLIRDQSKQLNLQNCLRVSIGTEEQNQRLMQLINEFKNNEDAA

SEQ ID NO: 126420 - protein, 345 aa, Unknown
  Bacterial polypetide isolated from the Sargasso Sea
KPIEDLERELGLKDIVKIASNENPIGPSPLALKKIKDCLEDLHRYPDGNSFNLKRVLSDKFNLQENRLTIGNGSNDIIEFVSRCFLSSSDSAVFSQYAFAIYPLVIQALGAEGIVSPATNWSHDLEKMLSSIKSNTKIIFIANPNNPTGTFLPKEELLDFSSRVPENILVFLDQAYFDYSSYEEEDVTFQDIEEYPNLLISRTFSKAYGLAGLRVGFSYSSLEMADYLNRIRQPFNVNSLAQIAAETALSDQNHLLKSLKLNATEKQILYKEFDSLGFEYIPSLANFICFDCKGDADELFQSFLEEGIIVRSMRVYGMPNHLRITIGTKEENLKFINALRKLTDG

SEQ ID NO: 126421 - protein, 327 aa, Unknown
  Bacterial polypetide isolated from the Sargasso Sea
NSLATDYELSGQYNRYPDCQPKELISAYAAYAGVETNQVLTSRGADEGIELLIRSFCEPGQDAISICPPTYGMYKISAESQLVDVNIVPLTQDLTLDLPALFAQKANVKLVFICSPNNPTGDLIPREQIVEVLEFYKDKALVVVDEAYIEFAPEASVAGLLNQYSNLVVLRTLSKAFALAGLRCGFTLAAPEVIAALRQMIAPYPVPAPVAEIAVQALSVQGQQKMRATVEQINNLRDSFSAFAKTLSYVSRVFPSKANYVLLAVPDAAALVSFIAEQGVLIRNQSSQLGLGQVVRVSIGSPDEMVQLQQIMSSYSYTANKQTQESL

SEQ ID NO: 126422 - protein, 358 aa, Unknown
  Bacterial polypetide isolated from the Sargasso Sea
MKIAFLTAGGIAPCLSSSIGALIQNYNRVLPNSEMIGYLNGYRGLLLGKSIGFPDSVKNKYETLFEFGGSPIGNSRVKLTNLEDCVKKGYVKEGEDPLQIASEQLKKDKVDILHTIGGDDTNTMAAQLSGYLKENGYNLTVVGLPKTVDNDVYPISQTLGAWTAAEQGAIFFENIVNENTTSTRQLIIHEVMGRNCGWLTAQTAFEYRDRMKKREFLPELLIDQSRWDIDAVYIPESDFDFHSEVSRLGAVMDAKDGVNVFLSEGAGLETIVREMEERGEEIPRDAFGHVRLDDINPGMWFAKQFSGALGAEKTLVQKSGYFARSAKPSNRDFQLIQKSADIAVEYAVARKNGVVVEI

SEQ ID NO: 126423 - protein, 301 aa, Unknown
  Bacterial polypetide isolated from the Sargasso Sea
RYKLPDIEDKKFYEDLFKKLEKYSVGYFFYNGGNDSADTCYKISEAAKKLNYSLNAIAIPKTIDNDLAVTDNCPGFGSAAKYIATSAKEASLDIRSMCKTSTKVFILEVMGRHAGWIAAAAELANDDSNTYVHKILIPEVPFNEESFLNGVQKDVEKFGYSVIVASEGLKNQNGEFYAASATKDSFGHNQLGGLAPKLANLVSEKLKHKYHWSVSDYLQRSARHIASETDIKQSISVGKAAANMALENKSGIMPVISRDSNNPYKWSIKESELQHIANKEKTVPANFISEDGFRITQKGVE

SEQ ID NO: 126424 - protein, 73 aa, Unknown
  Bacterial polypetide isolated from the Sargasso Sea
YFPRDLDFSEAGRVENIRRVGEVAKLMADAGLIVLTAFISPFKAERDMVRALLPQGEFVEIFVDTPLAKISTN

SEQ ID NO: 126425 - protein, 122 aa, Unknown
  Bacterial polypetide isolated from the Sargasso Sea
MKFGGTSVHSKESRQHAIKHIRRSVESNKNVVVVVSAMGRKGDPYATDTLISLLKDVGEPVNPSELDAVMSIGENLSSAYFSHLLSMNGIPSVAFTGGQAGILTDDNPGNAKILEIDTSRIP

SEQ ID NO: 126426 - protein, 87 aa, Unknown
  Bacterial polypetide isolated from the Sargasso Sea
LESAFPCRLESTQQQFNKQQVKTIHKNMVRNPKKLEEEINVMKILDHPNIVRLYETFEDSRSIYLVVELCTAKLLMKSDSSSELMRR

SEQ ID NO: 126427 - protein, 333 aa, Unknown
  Bacterial polypetide isolated from the Sargasso Sea
LDRTVAVKVLAGHRSADEEMLRRFRNEAQSAARLNHENIGLVHAVGSSNGWHFIVFEYIEGTNLRDLVRQRGPLTIAAVVDISMQIAAALDHACHRDVTHRDIKPSNILLTPEGRAKLVDMGLARLQHIAGEQDLTVSGITLGTFDYISPEQARDARSADIRSDLYSLGCTMFFMLVGRAPFAEGTMVQKLLQHQQERPPEISDMRAEVPRRLISVVHKLMSKRPQDRFQHPAALEFELLSIAEEEGFDVTASRPAIDIDLATADKAKVFFWPWVIAGLSLIGFVVWTAMNAPQKKSNPDVPQVVRPQRQMLDDTSVVHVLSQPSQPDELALC

SEQ ID NO: 126428 - protein, 247 aa, Unknown
  Bacterial polypetide isolated from the Sargasso Sea
GDGSMPILKKLAKDGNMKIVAIPKTIDNDVGATESSIGFHTAVDVATQALDNLQSTAASHRRSMILEVMGRDAGHIALNAGIAGGADIILIPEIKYSVDGIINKLNSMKKNDIQHSLIIVAEAVKKEDGSRVVHKYMDGEQRLGGIGDYIAQELMKKTDVECRVTSLGHVQRGAPPTASDRILASAFGVYAVDLLNQKKFDRMVAWRDRRVVDVPIDEGIKTYKNVERKDSLVETALSLGIYLGDEI

SEQ ID NO: 126429 - protein, 223 aa, Unknown
  Bacterial polypetide isolated from the Sargasso Sea
MKIAFLTAGGIAPCLSASIGALIELYNREEPDADLIGYLNGYRGLLLGKSIQFPAEVKSNYEILFDFGGSPIGNSRVKLTNTKDCEDRGYVNSGEDPLKVAAEQLTKDKINILHTIGGDDTNTMAAQLSFYLKENGYDLTVVGLPKTVDNDVFPIQQTLGAWTAAEQGAVFFENIANENTTSTRQLIIHEVMGRNCGWLTAKTAFDYCNRLENRSFLPELLID

SEQ ID NO: 126430 - protein, 262 aa, Unknown
  Bacterial polypetide isolated from the Sargasso Sea
LNAAIRSIFYRAKNKYKMDVYGIRDGTAGLIKRPVDVMQLTHKTFGGYLLRQGGTFLGSTNKGNPFKIPTSNGKHVDKSKEIIEGYHSMKLDGLIIIGGDGSMQILKKLAKDGDMKIVAIPKTIDNDVGATESSIGFHTAVDVATQALDNLQSTAASHRRSMILEVMGRDAGHIALNAGIAGGADIILIPELKYSIDGIINKLNSMKKNDIQHSLIIVAEAVKKEDGSRVVHKYMDGEQRLGGIGDYIAQELMKKTDVECRV

SEQ ID NO: 126431 - protein, 230 aa, Unknown
  Bacterial polypetide isolated from the Sargasso Sea
QSALFFNNIVNENTTSSRQFIIHEVMGRNCGWLTAKSADIYRQMLQKKEFLPEILVNKKRWDIHAVFVPEMEINMEREMNRLREIMDKHDCVNIFLSEGAGLDSIISDMEKNGEQINRDAFGHVRLDEINPGKWFAEKFANAIGAEKVLVQKSGYFARSAASNHEDLDLIFKSVEFAVDSALLQKSGVAGLDDDLNSEMSCIDFKRIKGGKPFDVKESWFVDLLSNIGQY

SEQ ID NO: 126432 - protein, 231 aa, Unknown
  Bacterial polypetide isolated from the Sargasso Sea
MRIVAIPKTIDNDVGATESSIGFHTAVDVATQALDNLQSTAASHRRSMILEVMGRDAGHIALNAGIAGGADIILIPEIKYSINGIIKKLNSMKKHDIQHSLIIVAEAVKKEDGSRVLHKYMDGEQRLGGIGDYIAQELMKKTDVECRVTSLGHVQRGAPPTASDRILASAFGVYAVDLLNQEKFDRMVAWKNRRVIDVPIDEGIKTYKNVERKDSLVETALSLGIYIGDEI

SEQ ID NO: 126433 - protein, 226 aa, Unknown
  Bacterial polypetide isolated from the Sargasso Sea
MVEGFRGSSQDPGVTVHFDQVWFDQLSLEALLVDGNIVRYRARSHDGVQSWLVAVPADAPLDAVSRRLQREFVLAGKLDSAWAVRPLALIRLSRGPVLVYEDNGGALIFPPVDSTLAIGRFLRIAIGAARALRLAHTRGVLHRDIKPTNLIEAANGTIRLLGFRDALGQAGDPSAEPVDTLYGTLAYMSPEQARRAEGLADERSDLYSLGVTLYELLTGQLPSRRP

SEQ ID NO: 126434 - protein, 123 aa, Unknown
  Bacterial polypetide isolated from the Sargasso Sea
AIYYGVFRFAIVRFNLKTPGREKESREIEASEAAQPAGKKAGNSGYNGEVILNALGGADNILALDNCITRLRMSVQDMSRVDDKVLKANGAIGVIKLDEHNLQVVIGPQVHLVKNQLQSLMGA

SEQ ID NO: 126435 - protein, 197 aa, Unknown
  Bacterial polypetide isolated from the Sargasso Sea
MPFCNGGSLADLLRKHGPLSEKDARSVMVQVLHGLRHLHAQPEPVIHYDLKPANILFHDGEVRLSDFGLSKVMAAEGSMPGMELTSYGSGTHGYLPPECYEGGKSRICPKVDVFSAGVVWYVLLFYPNKPFFAQASQQQIMGMAAHAILEETNRLDFPGKVSEELKAVLRRCLAPRRDDRPDVQSLLDDVYFTRAAK

SEQ ID NO: 126436 - protein, 98 aa, Unknown
  Bacterial polypetide isolated from the Sargasso Sea
MVESPNYLTTAFSCLFFMMLVASISYHKAKDDVTTIDGYFLASRGLSGIFIAGSMLLTNLSSEQLIGLNGSAYGFNLSSMAWEVTAAASTICMAFVFL

SEQ ID NO: 126437 - protein, 144 aa, Unknown
  Bacterial polypetide isolated from the Sargasso Sea
MRESIQRFGGAAAGMVIPNIGAFIAWGLITALFIPTGWAPNENLSEMVGPMIVYLLPILIGYTGGKMVHGHRGGVIGAVVTTAIAVGASDPQFFGAMVFGPLSAWTAKKVDAVLQPASPEGFEMLIDNFSLGILATVLAIVAKQ

SEQ ID NO: 126438 - protein, 264 aa, Unknown
  Bacterial polypetide isolated from the Sargasso Sea
EKVMNNLKILGISCVAFFVTVFSAYSETRVTYKSAKTTSSYYQMAVQISEALKKGSNGQIIVTVEESQGSVQNVKEVAVRSGNYVFTTPPVLIKLAQKGLAMFKDKENPKYGNIRALFPIPSLTMHFVARRDSGIRSFSDLQGKKILIGKGSFGAKEGAKYLKLFGLENKVTLANVELNAAVSALKNKQIDGFVTAGSWPAPNVIEASASTEIALLSLSDDQLKLTKRTKLIIPANTYRGVTSPTITTSLPVIAHTTTDRMQTL

SEQ ID NO: 126439 - protein, 134 aa, Unknown
  Bacterial polypetide isolated from the Sargasso Sea
KAYEDYARTLHAQFPRLKFSGETFYPGDFKMGLAQLLQLAFFGGLAMCLLGRSVLPEPYAKFIETYQMYLFGGCFLCNIIAGNLLNTGAFEISYDGELIWSKIEMGRFPQLPELKEALVEVMGRGAIPAVTADQ

SEQ ID NO: 126440 - protein, 255 aa, Unknown
  Bacterial polypetide isolated from the Sargasso Sea
MIKSHLLEAGTIINSKYKIDVFIGEGAFGEVYRVKHVVLDETQVMKVLKNKSTQNNLDEIIEEARILIKLTHPNIVRVFDVDSFKKEDKEYYFITMEFVSGESLNQLLKRKISLDPPVAVSLIVDILKGLDKVHQSRIIHRDINPDNIFLSYDNVMRPTAKLGDFGIARVQDENTNLSGAAGRFIFFAKECFMNVYLPSSDVFSAGIVLYKMITGKHPWDYEFEKYDLTKQENIQSMVFKARVKTFLPASFFNNY

SEQ ID NO: 126441 - protein, 228 aa, Unknown
  Bacterial polypetide isolated from the Sargasso Sea
MSNKKIGILTSGGDCGGLNAAIRSIFYRAKNKYNMDVYGIRDGTAGLIKRPVDAIQLSHHTFGGYLLRQGGTFLGSTNKGNPFKIPTNDGKHVDMSKEIIEGYHSMKLDGLIIIGGDGSMQILKKLAKDGDMKIVAIPKTIDNDVGATESSIGFHTAVDVATQALDNLQSTAASHRRSMILEVMGRDAGHIALNAGIAGGADVILIPEIKYSINGIIKKLNSMKQHDI

SEQ ID NO: 126442 - protein, 248 aa, Unknown
  Bacterial polypetide isolated from the Sargasso Sea
MSPFVCSTFKDMQREREYLVSHVTSTVAHEFNKRRVRYHARDFRWGITEEEVNSGQVISQCLGNVDLTYPYFICILGHRYGWCYDDDGTPDPLLDKQFEVASALYPWLQEDRYRNMSITELEIENRLFHQDWRQNDLVEVMGRVRADAQKGVGSSKSQLNTRGFLCYCREQSEPEFTDTGASAVKLKKLKARLHAHGIAVKPYKDEVEFGALVKQDLLQLLDQDFPERASSNDRITWADHYAQQTSRN

SEQ ID NO: 126443 - protein, 215 aa, Unknown
  Bacterial polypetide isolated from the Sargasso Sea
MKQFIQRVGGAASGMVIPNIGAFIAWGLITSLYIGTGWAPNEDLVSLVDPMILYLLPLLIGYTGGKMIYGHRGGVIGAVVTTAAVVGTSSPQFLGAMLVGPGAAKVLKELDARLRDNVPEGFEMLYDNFSSGILGWGLAIFVYSFLANILQAIADGLGNFASGIVDAGLVPLADIPIEVAKVLFLNNAVNHGVLTPLGAAQAAEEGKSIYYMLES

SEQ ID NO: 126444 - protein, 300 aa, Unknown
  Bacterial polypetide isolated from the Sargasso Sea
EHENVGAYNFDHPDAIDTKYLVEVLQKLMLRQSVEVPVYDFVTHSRSSETIHIDSGDVIIIEGILVLAMEEVRAMCHMKVFVDTDDDLRLARRLKRDTVDRGRSVDGVITQYTTFVKPMFDTFVSPSKKYADIIIPWAQGQNTVAIDLIVQHIRTKLGQNDLRRIYRNLVVLPPQFQIRGMHTIIRDREVNRSDFVFYSDRIIRLVVEHGLGHLPFNEKVVLTPTNDQYKGVTFCSKLCGVSIIRSGEAMENALRACCKGIKIGKLLIERRDKDGMLLRAGSANSDLSASSIKETRSRIH

SEQ ID NO: 126445 - protein, 253 aa, Unknown
  Bacterial polypetide isolated from the Sargasso Sea
DKPMIYYPISTLMLAGIRDINIVLSPDYAGDFVRLLGSGNQWGINFTFTEQAHPNGLVEGITLSEKFLNGSPLALILGDNLFHGSSLMRHLLSGNSQEDGATIFAYRVKDPERYGVLEFSKDGKVLSIEEKPKFPKSNYVATGLYFYDQTVVEKAKRVAVSSSGELEITSLNDIYLKSKNLNVEVMGRGMAWLDTGTHESLHKASSFIRSLEDRQGLRVSCPEEIAWRKKWINDFDLIKLAKPLLKSGYGRYL

SEQ ID NO: 126446 - protein, 228 aa, Unknown
  Bacterial polypetide isolated from the Sargasso Sea
AIPKTIDNDVGATESSIGFHTAVDIATQALDNLQSTAASHRRSMILEVMGRDAGHIALNAGIAGGADIILIPEIKYSINGIINKLNSMKKHDIQHSLIIVAEAVKKEDGSRVLHKYMDGEKRLGGIGDYIAQELMKKTDVECRVTSLGHVQRGAPPTASDRILASAFGVYAVDLLNQEKFDRMVAWKDRKVVDVPIDEGIRTYKNVERKDSLVETALSLDIYIGDDIR

SEQ ID NO: 126447 - protein, 299 aa, Unknown
  Bacterial polypetide isolated from the Sargasso Sea
IFEIKDIFNKYKYFDNDEIKEKFKNRLNNKNIENILKIDFKKEISYIFSNKGRILTNFYYIQKNFNDLKPYLDYYSYVDCWSSVSFLYKKNNLSLPQYLINNKPYINLEQFNNIGIQNSVKNDIILKDKNLIITGPNASGKSTFLKSIILNIILAQTISLSSSKKFIITPFTHINTYLNIPDCQGKESLFQAEMNRCYNQIELLKKTKKNEFVFTIMDEIFVSTNYQEGVSGAYAISKKMSQFNNSLCIVSTHFPILCKVFDNTNKFKNYYFSIEENNKKTYKIKEGYSKQHIALELLN

SEQ ID NO: 126448 - protein, 261 aa, Unknown
  Bacterial polypetide isolated from the Sargasso Sea
MPSTHDYPNDKRNENIQIYLNGKFYHRSKANVSVLDSGFLVGDGVWEGIRLYKKTLIHLEDHLNRLYQGAESIDMKIPLSKESLKIEILKTIQKNSMDTDVHIRLIVSRGIKKTPYQNPKVTTGPATIVIIPEYKKAREIVKKNGITVGTVKTVRDDKVQDPKINSLSKHNCIAACIEANKLGVDEGLMLDPKGFVSTCNSTIFFIIRNDEVWTSNGQYCLNGVTRKSVIRLCKHYKIPVFEKKFTLGEVYKSEEVFVTGT

SEQ ID NO: 126449 - protein, 280 aa, Unknown
  Bacterial polypetide isolated from the Sargasso Sea
AANLNHPNIVQIFDWGIEEEPYFVMEYIEGNTLTSIISNRKTISLSDVLFIGAQVANGLQAAHSQGLVHRDIKPGNIMITPSGKVKVTDFGIVSIQDEESDITKTGSILGTASYISPEQAQGKAVSVGSDLYSLGTVLYELITGNPPFEADTPIATATKHLTEKPEKPSKYRQDLPKGIENAILKLLHKTPRDRFKSAEDLRAVLLQQRNQLEMVQTQESLVDLTNPKIKYKFTLPALVVSIGLVLGTFWTLSQIFDGLPVDGGAPTLIEIPDLTGSDQA

SEQ ID NO: 126450 - protein, 255 aa, Unknown
  Bacterial polypetide isolated from the Sargasso Sea
MAAQLSEYLKDNGYNLTVVGLPKTVDNDVYPISQTLGAWTAAEQGAIFFENIINENTTSTRQLIIHEVMGRNCGWLTAQTAFEYRNRMKKREFIPELLIDQSRWDIDAVYIPESDFDFQFEVSRLREIMDAKDGVNIFLSEGAGLETIVREMEERGEEIPKDAFGHVRLDDINPGQWFAKQFSGALEAEKTLVQKSGYFARSAKPNNRDLKLIQKSAELSVEFATAQKNGVVGKDIDNNNEIGLIEFARIKGGKP

SEQ ID NO: 126451 - protein, 300 aa, Unknown
  Bacterial polypetide isolated from the Sargasso Sea
GSPNLPADDFVFLRRIYLDAVGRIPTDDEAGAFLKNKDPEKRRKLIDRLLLSDGYRSHLFNWLADLLRHKQSIKRTNYSHYERWLKDQIAKNRPWDEMVYDMLSAEGSIASSGPTGYLLRDPGMPLDNLSNTLNVFLGANVACAQCHDHPLADWTQREFYELAAFFGATDVSDRDPRKVGNRLGSGQLSKQDVIKAVAPNMARVHTKGAQTLKFPSDYAYDDVKPGSPVEPLLFVWESGDEKGPAYQVNHKNPRTLRSSFAKWLTHEKNPRFAATIANRLWARAFGLGVKEPLDDLDDLS

SEQ ID NO: 126452 - protein, 305 aa, Unknown
  Bacterial polypetide isolated from the Sargasso Sea
VSSASFWILVVAAISAAAALIIGYTTARSIQRPLQMINKELDYMAAGDMTRRINYRSSCEFGALSRSIDTLAGKTGELLSQINAGSRHLVEEASRAAEISERAVSRVQDQKSQTDQVAAAITELEVSATEVARSTDGTKREVDLADDEARSGRQKVATTRRITEQLAGAMEEAVGITYKLGEFSNNIGSILDVIRSIAEQTNLLALNAAIEAARAGDAGRGFAVVADEVRALANRTQTSTEEIQAMIENLQSSSKLVVEVMGRSQEQTHNCVEQTREMDAALQSIADRMSAIKAMADQVAHAAQE

SEQ ID NO: 126453 - protein, 284 aa, Unknown
  Bacterial polypetide isolated from the Sargasso Sea
MNIIYITALCILTFPLLYSAKSVAAESDITDEVVVTARKREESLLDIPESVQAIGSGDIDRQNIKSLEDVGFLIPNLNLSPRADGFPNVSIRGLGSFGNTQGVGFYLDDVQVFSDASSRFGDLERIEVLKGPQGTLYGGSNIGGAIKFVSTRPDPSSSTKRAKILVGEQGIVDGEISINTPLEGDWALRLFAFGARNDGYLVNPNSARVNGLSADTDEDIGQSDESGLRISLAGNLNDTLSAYASFRWNDYEGPNNHWIRELDKNSLKHSNIVDTTTNPRHERD

SEQ ID NO: 126454 - protein, 297 aa, Unknown
  Bacterial polypetide isolated from the Sargasso Sea
NTGGGGGGGAAGNATHPQSLSKAGGSGIVVIKETTPKCASGRWGVNDIYDNVSNDTWFKRKPTVDYLVVAGGGGGGMDLGGGGGAGGYRASGFGPSPLQGPAVTLKLGSYAVTVGAGGAGSTSGPSAGTPGGSSSFSTITSAGGGGGGSRPANTGQAGGSGGGGGADCGTAGAGNTPPTSPSQGNSGGTNAGGGGGAGGTGSNQPTGSHPRSGGHGGNGVPNNILSLACATTYAGGGGAGSSACSDYGASTPNAPGGGGLGAGPNPTVGGAGTANTGGGGGGGSNAPPKPSCGAGGA

SEQ ID NO: 126455 - protein, 235 aa, Unknown
  Bacterial polypetide isolated from the Sargasso Sea
KEGDMKIVAIPKTIDNDVGATESSIGFHTAVDVATQALDNLQSTAASHRRSMILEVMGRDAGHIALNAGIAGGADVILIPEIKYSIDGIIKKLNSMKKHDIQHSLIVVAEAVKKEDGSTVLHKYMDGEQRLGGIGDYIAQELMKKTDVECRVTSLGHVQRGAPPTASDRILASAFGVYAVDLLNQKKFDRMVAWRDRKVVDVPIDEGISTYKNVERKDSLVETALSLNIYIGDEI

SEQ ID NO: 126456 - protein, 179 aa, Unknown
  Bacterial polypetide isolated from the Sargasso Sea
MRVAARRAVVGAALLAGTSALSTQSQRRRLEDEYKLMEELGAGAFGIVYKARCKSTGAIVAVKQIQRRRAVEATVRREVAMLQRVGLHRGVAAILDHFETDDAFYLVMEYIGGGELFDALVDAGSFSEARAAEYLRQVADAVAFLHAQGLCHADIKPENLLLTCREADAASVKLVDLAS

SEQ ID NO: 126457 - protein, 260 aa, Unknown
  Bacterial polypetide isolated from the Sargasso Sea
MSNKKIGILTSGGDCGGLNAAIRSIFYRAKNKYNMDVFGIKDGTAGLMQRPVAAVQLTHKTFEGYLLRQGGTFLGSTNKGNPFKFPTKDGKFIDTSKEIIEGYHQMKLDGLIIIGGDGSMQILKELAKEGDMKIVAIPKTIDNDVGATESSIGFHTAVDVATQALDNLQSTAASHRRAMILEVMGRDAGHIALNAGIAGGADIILIPEIKYSIDGIIKKLNEMKKHDIQHSLIVVAEAVKKEDGSTVMHKYMDGEKRLGE

SEQ ID NO: 126458 - protein, 172 aa, Unknown
  Bacterial polypetide isolated from the Sargasso Sea
MDKKKKFVVFDIGCFQGNFSRNLKNKLFSKKIQFYLFDPNPNIKLRDFKHYKIAFSNIENIQNYYLNNFFPSSGSSLKTIVKNDKFWNLTRKFLSFNMGKKFKTFVVKTQKLDNFCKSNKISQIDVLKIDVEGSEMEVLMGAKNILKKTKIIQVEILGNKITLIQSIRNLFL

SEQ ID NO: 126459 - protein, 187 aa, Unknown
  Bacterial polypetide isolated from the Sargasso Sea
MAVYEPVLKKTYDDHNKREQDLNSLIALSERFRSLAAMLDEFTLEPPESSQVGADAVPDDDEYVVLSTIHSAKGLEWSRVFVLSVVDGYIPSFRSLQDPAQIEEERRLLYVAMTRAKDELYLIKPNLDDPSAYYPVGGMSFSQVSRFITPDHIEAYFDVWSLGVGQTMPSDDASDPYLEPPTQPYSL

SEQ ID NO: 126460 - protein, 246 aa, Unknown
  Bacterial polypetide isolated from the Sargasso Sea
MATSVDSFQVKVYQGDSAVLFAFDVADADRADLAGFAIQCTPQGGAPYWMPNRLTFDTPIHADAPLKAGKYADSIDAPFQSFHWVHFPPHAAAQLAYTVHARYFVSTNPVQLETRATRIVTVTLQQPMSDWVTVGMVRGYVSSQAFIDHYGGNTALAPDKRAQTKSPLLYDTQPYQNKYAYLGATGRHLIIDLLNQCHASDGYGIDVLAYDLDEPDIIRAIAWLAQNGRKVRVIQDNYVAPAPTRW

SEQ ID NO: 126461 - protein, 218 aa, Unknown
  Bacterial polypetide isolated from the Sargasso Sea
MKELTTRQIEILDFITNYEWRHGFWPSIRNIQMEFDYKSTNAVMGHLRALERKGAIERIPGQARTFRINRPDSPQANFESEIPDNASEVVEIPVYGAIAAGYPDRVESSGAVGRLQVDIQNAGFTNASRKQSFALEVRGDSMVDAQIYDGDRVIIEPREARDGDIVAALIDGEVTLKRLIQKAGEPPYLKAENKNYPELHPSDQLEIQGVAKAVVRAL

SEQ ID NO: 126462 - protein, 110 aa, Unknown
  Bacterial polypetide isolated from the Sargasso Sea
MADFGLATTCESSKPITEKCGTPAFMSPEQHRLPHRSPGYSFPADVWAAGCTMYMILFDRHPFLVGGKQLDERALLDGRLPGAAQGFFGMMVDSGSTGRCSEMSIWQAGK

SEQ ID NO: 126463 - protein, 239 aa, Unknown
  Bacterial polypetide isolated from the Sargasso Sea
VPLKRLGNGDVGSVHLVQLAGTNRLFAMKILVKQEMHERNKLHRVRTEGQILETVDHPFVATLYAAFQTDTHLYFVLEYCEGGELYETLQKEPEKRFPETIAKFYAAEVLVALQYLHLMGFIYRDLKPENILLRRDGHIIVTDFDLSYCASSRAHVIMKEGRAPGARARNRRVSQRRSFAGGGRPSVAIDGGSGKPPGENASGRSPRQSQMSIDATHNGGVAIPGASPKSAGPGLDMIA

SEQ ID NO: 126464 - protein, 83 aa, Unknown
  Bacterial polypetide isolated from the Sargasso Sea
MHKLSPVVIHRDMKAANVLLDERWQAKLTDFGISRMKMGAQQALTSFSGTVAWMAPGKRSIELAIAIAIDTKPASSDGGARSL

SEQ ID NO: 126465 - protein, 87 aa, Unknown
  Bacterial polypetide isolated from the Sargasso Sea
ELLNLMDIKIFVDTDDDIRLLRRLKRDIHKRGRSVESVFEQYENFVRPMHLKFVEPSKRYADIIIPKGGKNLVARDMVISYIERSLN

SEQ ID NO: 126466 - protein, 187 aa, Unknown
  Bacterial polypetide isolated from the Sargasso Sea
MVVRLVQKLNQSYIRSVVKKALEEDLKPSGDITTKLIKFKNKKTKAQIVAKQNGVISGLDFCKTAFKVVGKETVFVSKVKDGSKVKKNKVIAEIKAKTKTILIAERTALNFLNHASGISTLTNLFVQKVKNKTKICCTRKTTPNLRLLEKYAVKIGGGHNHRYNLSDEILIKDNHISAEESLKTLVK

SEQ ID NO: 126467 - protein, 190 aa, Unknown
  Bacterial polypetide isolated from the Sargasso Sea
LPNTAGCFTKKEALLTAELARESLKTDWIKLELISENEMLLPDPLELFATCEELVKKKFKIFAYCSDDPILCKRLEELGCTAVMPLISPIGSGLGIRNEHNLEIIRSICKGVIIVDAGIGTPSHACKVMELGFDGVLLNSSVARSFDPIQMASAMNLATKSGRLSFQSGPIEKTKKAVRSTPFRGKISNF

SEQ ID NO: 126468 - protein, 256 aa, Unknown
  Bacterial polypetide isolated from the Sargasso Sea
MQQASETGKSIFFMVASNPGPGLGLLLGFAIFGKGMSKKSAPGAMIIHFLGGIHELYFPYVLMKPLTLIAMIAGGMTGTWVFHLLDGGLVAGPSPGSIFAYLALTPKGSFLATIAGVTAGTIVTFVITSVILKMEKSVETESEDDFAESARTVKAMKQEGKFSYKNIKRVAFVCDAGMGSSAMGATTFRKRLEKAGLNINVTHYAIENVPQDADIIVTHASLEGRVKRVSEKPLVLIKNYIGDPLLDDLFKRITAN

SEQ ID NO: 126469 - protein, 283 aa, Unknown
  Bacterial polypetide isolated from the Sargasso Sea
FDGGIEKEPYFVMEYIEGNTLTSIIAKNRTISLSDILFIGAQVSSGLHAAHQKGLVHRDIKPGNIMITPDGKVKVTDFGIVSLQNEESDITKTGSILGTASYISPEQAQGKPVSIESDLYSLGTVLYELITGKAPFSGDSPISTATKHLTEKPEKPSMFRRDLPKGVETAILKLLEKAPYDRFKSAEDLRATLLQQRKALQSEQTRENLVDLTNPKVKLRFTLPALIMSIGVVIGTIWTLTQVFDGLPTDGGAPTLIEIPDLTGSEQAQALEDLQNLGFKIGM

SEQ ID NO: 126470 - protein, 248 aa, Unknown
  Bacterial polypetide isolated from the Sargasso Sea
SGALHSPRWMAPEVLTDGRYSKASDVYSFAIVMWEIQSLQTPWKELDVYQIISFVPDGERPSVESAHGEEFVDAPGYRALMQLAWHQDAKTRPTFEEIVEQVQQLLESQMSREQAAKKRANAGLPPLPPARSFEKKSASFGGRDSRAISRRKSSSALEARDVKSLKNVNVTFSRDKTKVPEDDAVVIDTPAASPEKSQRDDDAVGDDALKETTNILELDAGDAPGTPVILRGMRARNSLNGSVRQRIQ

SEQ ID NO: 126471 - protein, 288 aa, Unknown
  Bacterial polypetide isolated from the Sargasso Sea
GAPVVPPSTRASHQESAASIDRRASEPILVMQEAPVVGAALAQLSYDEVRTACRGWAESEKLGEGAVGSVYRGSLGAFGPVAVKRFDKVASSSGAGAGLPAMIREVEMLRKCRHPHILEILAHTDTSDEEEGEVCLVTPLMEGGDLGRALARVPWYARLQIAGQLVRALSFLHAQGRVHRDVKSSNVLLDGSLRHARLGDFGLAKEEDRRGGDSSITRTASISGNTTRIMVVGSPGSMAPELLHRSASPATDAYALGVLFLEMLTGLPTWDPLNHPDRPALVDRVLAP

SEQ ID NO: 126472 - protein, 126 aa, Unknown
  Bacterial polypetide isolated from the Sargasso Sea
MIDIGDYKVKDVIGKGSFGLVYKGIDKKTNKLVAIKLENKNKEFKNLNNEIKIYKNLKGKHIPSIKWIGNTKKWNIMIIDYLGPSLEDLFELCQKKFSLKTILMIVEQVLTVIEHVHSKGYIHRDI

SEQ ID NO: 126473 - protein, 230 aa, Unknown
  Bacterial polypetide isolated from the Sargasso Sea
MEYIEGNTLTSIISNRKTISLSDVLFIGAQVANGLQAAHSQGLVHRDIKPGNIMITPSGKVKVTDFGIVSIQDEESDITKTGSILGTASYISPEQAQGKAVSVGSDLYSLGTVLYELITGNPPFEADTPIATATKHLTERPEKPSKYRQDLPKGIENAILKLLHKTPRDRFKSAEDLRAVLLQQRNQLEMVQTQESLVDLTNPKIKYKFTLPALVVSIGLVLGTFWTLSQ

SEQ ID NO: 126474 - protein, 232 aa, Unknown
  Bacterial polypetide isolated from the Sargasso Sea
KAPRGDLSAAQLRAFGKEGEEQMEVSGYSPYVAQVKFVVPGNSRGRIGLEYYPDGDLIEMLTESDWSPSQTEIQLAVAQLGKGILDLHRHQYSHHDLKPANVLLKRDGGALRFYIADFGLAEHGTDYMKRVNCGTKRYVPPIKRGRNGGFAPEHDWFSYGVILFNMASHPPTYPFKDNYIYSLSSSTLGREFVQLECDGRKLSIDFCTGLMRFLMDVWYKQLTHSENFQRRG

SEQ ID NO: 126475 - protein, 276 aa, Unknown
  Bacterial polypetide isolated from the Sargasso Sea
KAAACKAPGFGDRRKAMLEDIAILTGGTVISEEVGLTLEGASIEDLGTSKRVVLNKDNATIIDGAGDQNAIETRVNQIRAQVEETSSDYDKEKLQERVAKLAGGVAVIKVGAGSEVEMKEKKARVEDALHSTRAAVEEGVVPGGGSALIRCLEAVAKLKGENDDQNVGINIAKKAFESPLRQIVSNAGEEPSVIVNKVIDGKGSFGFNAATSEFGDMIEMGILDPAKVTRTALQAAGSVAGMMITTEAMVTDVPKDDTPMPPMPDMGGMGGMGGMM

SEQ ID NO: 126476 - protein, 161 aa, Unknown
  Bacterial polypetide isolated from the Sargasso Sea
GQAYSYITYNWFMPSYEDSSQSSVVGKMALAPVPGNGSLNGAWGWAIPTSSPNADAAWEFIKWVESPEIVAKRALMGGAPTRSDAFNNPEVLAKYPHYGALNNILATAKNFPVFTYTPQFVEVMGRELSKAVIGEKSIDDALATMNDELEALAKKDGVYKN

SEQ ID NO: 126477 - protein, 251 aa, Unknown
  Bacterial polypetide isolated from the Sargasso Sea
NETQKNARDADNIYIWLEYNSGSISLDKWIKSPENTKNVRIKITSGLSNGIQCLHQMGIVHRDIKPSNIIVNKNKVKIIDFGSSASVTLGTLRKINKKEGYTKQYHPPLFNDDDIDDNNQLFSIGSFYDIWSIMIICTEMVHKRPSEFYTILDPELKENFEDAFGYYLTSQEIKDNQFKENFNRLLGDLMYSETLKKKWEQLFDYDYSVQCDVSSLDKGILIPLENLPWYCRIIADLKKDDLILATVAHKM

SEQ ID NO: 126478 - protein, 197 aa, Unknown
  Bacterial polypetide isolated from the Sargasso Sea
MKGNIFYAQSGGVTPVINATAYGLIEQFFKNKKYFDKFYVGKNGILGALNEDLVDISSEKKSELKLLKQTPGGAFGSCRLKLKDYVQSERQFQRIFEVFKTHNIRYFFYNGGGDSQDTTNKISKFFRTKGYAITCIGLPKTIDNDLPITYCCPGYGSVAKYIATSTLEASLDVKSMSQTSTKVFILEVMGRHAGWLA

SEQ ID NO: 126479 - protein, 95 aa, Unknown
  Bacterial polypetide isolated from the Sargasso Sea
MKNKQIERVNLILPLVFENKEKMVLVMEIAAGGELYDYLSERKCLEENEARRVFRQIACAVYYCHKNNICHRDLKLENILLDENGNAKVRRSTSW

SEQ ID NO: 126480 - protein, 154 aa, Unknown
  Bacterial polypetide isolated from the Sargasso Sea
MLTVLGRGSYGKVIQVRRRDTGEVLAMKAMRKADIVKSNQMRHALTERALLQAVHHPFIVPLRFAFQSDTHLYLVLALQPGGELFFHLRKSGAFTESRVRLYAGEILLALEAIHAAGYVYRDLKPENVLLDAEGHVCLSDFGLAKGPVTALDAG

SEQ ID NO: 126481 - protein, 274 aa, Unknown
  Bacterial polypetide isolated from the Sargasso Sea
DVLHPQGATQPPPWHLRLSLLLDAARGMEALHSHKPKAILHRDIKSLNVLVTKVRLAGSEQYMAKIADFGLAHAFSKTTAARTKEKGAGSFPWMAPEVYKGKYVEGTDSWAFGMMIYEFMTRKLPYEGMSQPQILDAVKAGERPDMALVEAGCPDILKDLMEWCLVADPRARLSFVDIVKRLEGAIPRTMCSSALAKSATTSRRGGGGSVDARLAALEKKSDDRDKAIEELRSDFDRFATSIHGKVARCSTTEDVLKLLDQNTANIKEFVGKVV

SEQ ID NO: 126482 - protein, 105 aa, Unknown
  Bacterial polypetide isolated from the Sargasso Sea
WQKNVWPQGLQALTRALNDSGISDVRPVTLGHVQRGGTPVSNDRLLATSLGEYAVSLVGTDTSNVMVGEVNREPTTVPLTTTSDSKPLNSAQVALMKSIMNGRYG

SEQ ID NO: 126483 - protein, 97 aa, Unknown
  Bacterial polypetide isolated from the Sargasso Sea
GTDENPGSTITKNRKRYKFYNRITSLNAPRHRKSKENNPVDTDDDLNNYITKSIKTLVPYKNSITNILIQITNRIHSRLNYCGSHTIPQIQTNSEFI

SEQ ID NO: 126484 - protein, 296 aa, Unknown
  Bacterial polypetide isolated from the Sargasso Sea
KNKYEILFEYGGSPIGNSRVKLTNLEDCVKKGYVKEGEDPLQIAAEQLKKDKVDILHTIGGDDTNTMSAQLSGYLKDNGYNLTVVGLPKTVDNDVYPISQTLGAWTAAEQGAIFFENIVNENTTSTRQLIIHEVMGRNCGWLTAQTAFDYRSRMKNREFIPELLIDQSRWDIDAVYIPESDFDFQTEVSRLKAVMDAKDGVNVFLSEGAGLDTIVREMESIGQEIPRDAFGHVRLDDINPGKWFANQFSGALGAEKTLVQKSGYFARSAKPNNRDLQLIQRSANLAVKHAVAQKNG

SEQ ID NO: 126485 - protein, 241 aa, Unknown
  Bacterial polypetide isolated from the Sargasso Sea
ILTEIAKRGDLNIVAIPKTIDNDVGATESSIGFNTAVNVATQALDNLQTTAASHQRTMILEVMGRDAGHIAINAGIAGGADVILIPELNYSIKGIVNKLTEMKNRGIVHSLIVVAEAVKTENGKSYTIEYADGQKRLGGIGNYLSEEIMKSTDIECRVTSLGHVQRGAPPTPRDRILASAFGVYAVDLIAKGKFGRMVAWKDRKVVDVPISEGISTYKVVDRSDPLIETALALGVYVGDIK

SEQ ID NO: 126486 - protein, 285 aa, Unknown
  Bacterial polypetide isolated from the Sargasso Sea
LEIIELDLLNDEGWEEAGKDCDYVMHVASPISASDSIDEEVLIRPAVDGTLRSLNAAKVNKAKKVILTSSVASIFYDDSKKKNYDENDWSDVDSNKITPYAKSKTMAEKSAWEFIDNLGEDEKFPLTVFCPYMVLGPALSPDLGGTNVLVQMLTSGKLPGTPNIHLGIVDVRDVAQAHVDAISNQASNNERFILCTSSFWLHEISQILLKAGFTKAPKLRLPNFILRFAALFSVRARESLRMLGDPQFLSNEKVKTILNWQPRPVEETLVDTAKSLEGQNQISIP

SEQ ID NO: 126487 - protein, 130 aa, Unknown
  Bacterial polypetide isolated from the Sargasso Sea
RNPPGTYQEPTRNLPGDLPGDLPGTYQEPTRRPTRRPTRRPTSNVPGAYQEPTRNLPGTYQEPTRRLPGTYQEPTRNLPGTYQATYQEPTRRPTRNLPGTYQEPTRNLPGDLPGPYQATYQEPTGRLPGT

SEQ ID NO: 126488 - protein, 189 aa, Unknown
  Bacterial polypetide isolated from the Sargasso Sea
MSKNVTFCFDFGSPYSYLAYNNLSALKDAGASVEILPVLLGGIFKATGNQPPASVPKKGEYMFKDITRWSKKLDITFKMNPYFPILTVPHMRGAVLAQKEGLLEKYMESMFESIWVKAMNLNDQEILTQVASQSGIDANAFSEGISSDETKNKLRENTEFAIGKGSFGVPTFYYEKEMFWGIDSMKFLI

SEQ ID NO: 126489 - protein, 230 aa, Unknown
  Bacterial polypetide isolated from the Sargasso Sea
SYGLRLHKEGIRCIGIPKTMDNDVPGTDYCIGFSTCVTRTIEFTHQLRTCAGSHERLMVVEVMGRYAGYTALVPAMAGASDRCVIPEHKFDIEKLTELLMKDRRDNDSNYSVVLVSEGAMFEGGEMTFSNQDTDAYGHKKLGGIGDLVCAELQKRAPKYSNREIISTINQRMSYMTRSGHPDAIDSLVPMVYGNLAIDLIMDGKSGRMVCLKDGRYDHVPFEVVTEYEKK

SEQ ID NO: 126490 - protein, 294 aa, Unknown
  Bacterial polypetide isolated from the Sargasso Sea
LTNVDDCVKRGYIDAGQDPLKVAADQLVNDEVDILHAIGGDDTNTMAAQLSLYLKNNNYDLTVVGLPKTVDNDVYPIRQTLGAWTAAEQGAIFFENISNENTTSHRQLIIHEVMGRNCGWLTAYTAKEYRERLKKRTFLPELLINQQRWDIDAIYIPEKDFDFDLECERLKVMMDEKDSINIFLSEGAGTKTIINELQASGESITLDAFGHVALDELNPGQWFAKKFSEKLDAEKTLVQKSGYFARSAAPNSRDIDLITNSSKLAADFAFKGESGVLGMDENAEGQLKLIDFER

SEQ ID NO: 126491 - protein, 266 aa, Unknown
  Bacterial polypetide isolated from the Sargasso Sea
QSKREYERLIDVFKAHDIGYFFYNGGGDSQDTSNKIAQYTKDAGFPVTCIGIPKTIDNDLPYTDNCPGFGSVAKYIATSTKEAALDVKSMSKSSTKVFIFEVMGRHAGWLAASAGLAKSKNNSAPHIILLPEISFNEKLFLKKVKEVVKKEDYCVIVVSEGAKYKNGKFLADAGTVDSFGHKQLGGVAPLIAEMISNKLGFKYHWAVSDYLQRSARHISSQVDLDHAYAVGKAAVEYASSGENAIMPIIVRKKTKSYSWEVGKVAL

SEQ ID NO: 126492 - protein, 154 aa, Unknown
  Bacterial polypetide isolated from the Sargasso Sea
MTVAQAETRVTYKSAKSTSSYYQMAVQIAEAMKTGSGGNIIVTVEESQGSVQNVMEAAVRTGNYVFTTPPVLVRLAQGGKAMFKDKANPKFDEIRALFPIPSLTMHFVMRSDSGVSTFADLEGKTVLIGKGSFGAREGAKYLKLFGLEGKVTLA

SEQ ID NO: 126493 - protein, 219 aa, Unknown
  Bacterial polypetide isolated from the Sargasso Sea
IPKGDGKKVTILPGGKVIAFLGILTITLTVTGHNVLHMPPILGMMFGLGMLGTYGYFLKTKHPEKNKFDIFVITGRAEWDTLLFFYGILFAVGGLASLGYLKLISDDMYVTLGATYANILVGILSAIIDNIPIVYAVLTAHPAMDMGQWLLITLTAGVGGSLLSIGSAAGVALMGQARGVYTFFAHLKWSWAILLGYAASIVVHLWMNQHLFNLVPLER

SEQ ID NO: 126494 - protein, 217 aa, Unknown
  Bacterial polypetide isolated from the Sargasso Sea
QLKEIGQKHLVKKLTDFGLVVIGAHIGVHIKKEVENYKNEKILLIEPVPHNIEAIKKNLFEYKNITVEQTTIGSKKETRDFYFVKENSISKLKKHWASGIGSFDKGHILKHKSKRFNVEEIDIKKISIQCLRFNDLIDKYSINSIHKILIDVEGSEYEILKDIDLDKTQIKNIIFEYKHFDGFFTQGKKLDEIIKRLENNNYKIIKLDEENILAEKY

SEQ ID NO: 126495 - protein, 277 aa, Unknown
  Bacterial polypetide isolated from the Sargasso Sea
DRDKWNQYVHPKLLNSQPYSFLTGGTDLSVFSRETSTSTFKADLTSQWNSKNKIKLGIEFRQHQLNFNDYSLRPPDEKASFNELSDDPFLGNPQRFPDSTIYSSTYNFKPSEFSAYVQDKIELNELIINLGVRLDYFDPKGKMLSDPSDPSIYNPIKPSNIYEDSNENGVWDNGENAVSITKRKQYWFKDTDAKWKISPRFGASFPFSSTGVIHFSYGHFFQIPRFEMLYMNPDFDLGQGTGNIGVVGNANLRPEKTIQGELGLQQQISYNMALDIT

SEQ ID NO: 126496 - protein, 334 aa, Unknown
  Bacterial polypetide isolated from the Sargasso Sea
DSVAAYAQGSYQYTDKLSFTLGGRYTKDDKDAEVYRFVYLGYKNPRDAGTPIAVQSDFTGSESFSHFSPRLGFEYQSNDNFMWYGSYTDGFKSGGFDMRGNQAINPNAGDPYQEETVDTFELGFKSEWNDRTLRLNAAAFTSSYDDMQVTVQRAVNNTVASQVLNAASADIRGFEVEMISVLTSNLELTGILGYTDAKFNEVVFFDAASQTNVDVSDVWSFANTPEWTGTLGLKYTQSANIGEIVYNVMGSYRADTQIFEVPSVLDFGGYTLFNAGATWYSNDGHWDLSAQVRNIGDKETRIAGYNFPLLAGEQTITAYHGDPRTYSLTLGYRF

SEQ ID NO: 126497 - protein, 445 aa, Unknown
  Bacterial polypetide isolated from the Sargasso Sea
LTELVSLKNAEKPAAPKVPDTYMAQEQHKLIEFIALTHKNKTEKFEQQQLLTSQNQALAQPAVYLDKTKRIASASLSPKGDMLLVALADKAEWRDKTDIMPNYITASGNIAAEEVRRRVADQKPQSHQLFLVDVKTQQATELKFDTLPGFDEDVLAAVKAENAKAQGKTYQSKKAPRAIELINDWSWNQSAIQWHNSGSQVAVMLKAWDNKDRWLATVDFARKRLVSQHRLHDEAWINYSFNDFGWLSQKESLYYLSEESGYAHLYVKALNGEAKKLTAGTFEVSNPHLSKNDQYLYFKGNVSHPGIYEIYRVALNNGQLEQMTALKGSADYQLSPDENKLLLTWSNSVTPPELYLMDNKPKAKVTRLTYTVSKELTALNLAAPQVVAVPSSHGKQPVFAKLYLPKDYQQGEKRRAVIFTTVQGICKTVIWGGLVISVNICSITC

SEQ ID NO: 126498 - protein, 253 aa, Unknown
  Bacterial polypetide isolated from the Sargasso Sea
MGSGGVASVMLGVDRQTGFPVAVKALHQSLFKNELIKKKFIREANHYVYLKHDNIVKLKNLIIKEDAIYLVMEFIEGDTLEHYINKISGPIPLEIAVPMMNDILSAIDYAHKKNIVHLDIKPSNIMISKEGDIKVLDFGISADLNNEMGNQGMGTPFYMSPEQIDGKYIDHKSDIFSLGITLFQMLTAKLPFPKLDRAKLFDYIKNKPLKKVDQFINLNDVRLQQVIDLATKKNPKYRYQSCQEFSNDLNELL

SEQ ID NO: 126499 - protein, 334 aa, Unknown
  Bacterial polypetide isolated from the Sargasso Sea
LLFPGDFFSKRTASPLLQQTEYSHTQDMSANDCFKPVSKYWDRINRPEQLISSMLEAMRVLTSPSETGAVTISLPHDVQAETYEFPDEFFQKRIWNIPRLTPDKLLISKAIETIRKSKRPMIISGGGVIYSEAEKELKKFIEKTGIPVAETFAGKGTLHYKHELNLGAMGATGTKGANEISKDADLVIGIGTRYGDFTSASKSAWQNPKVTFININITELDVFKQSAIPLQGDAKETIKIISKELDGYSTDDTYINKIKSLNKEWDKIVDKVYSPVDFNKPVQAEILGALNNFIDDNDVVVCAAGSAPGDLHKLVEDEKLQRISFRIWKFMHGL

SEQ ID NO: 126500 - protein, 492 aa, Unknown
  Bacterial polypetide isolated from the Sargasso Sea
MTHLVTALSCLFFLLIVAAVSYLKTKGDTDTRDGYFLANRGLNGIFIAGSMLLTNLSAEQLIGLNGSAYGFNLSSMAWEVTAAASTICMALIFLPRYLAGAFTTLPEFLSQRFDDDVRRMTVLLFMVGYGLVTIPSVLYSGSIAVLLLFDLPGILNVSYSQALVMTIVLIGLVGSFYAIFGGLKAVAVSDTLNGIGLLIIGITVPLLGLSTLGSGSIIEGLSIITTNNTHKLNAIGSASDPTPFGTIFTGMIFANLFYWCTNQYVIQRTLAARDLSEGQKGVLFSGFFKVMIPFMMMIPGVIAYHLYGESLVSIDQAYPRLIRDVLPNYAKGFFLAVLLGAVFSSYNSLLNSAATLFCLDVYVPMCRGNVDDKKLVRVAKYASVSIALFSFLVAPLLQYAPDGLWQIIRIFTGFYNIPVIVLVIVGLFTKRVPPIGAKIVIIMHIIFYTLFQFIFKDYLDIHFLHLYAILFVLEVMVMLAAGYLDPLQTPWV

SEQ ID NO: 126501 - protein, 826 aa, Unknown
  Bacterial polypetide isolated from the Sargasso Sea
MNSVMRNLGLSALAVAVLTSCAATSTETATPATTPQAYQVPLAQPPQVSQPLTLNQIMANPDWMGIFAKEAYWSDDSQSVFFARQPSASPLRNYYQQGINDSRAVELAIDKLHAADQQFGVLDSAKANKAYLYQGNIFVKHLSSGKITQLTRQRTAISGLRYLNNGDIAYWQGDNVFQIHQDSGLVEQLAEIKMAKAPEGVKEPSSYLAKQQHRLIQYVALQQENAKAKEQFKNELQKSDPTLAANTWYLGDAEVVSELSLSPDGRYLFVALTDKNYTGSSEHDIMPNYLGSEGYIDPVPVRARVAEDTPPGQRFVVLDLNEHKQIDVTIEGLTGFDEDVLAKVKTENAKAKGESYQSTKAPRKIQLMQDWGWTQSAIQWHESEDKLAVMVEATDNKDRWIASVDLAKGKFITEHRLHDDAWVNYDYNQFGWLPGTDTLYYLSEETGYSQLYIKARGEKPRALTQGKFVVSDITLSPDANYIYYKANQSHPGIYNVHRVNIASGKNEQLTQWDGNLDYSLSPDGTKLLLNASRRTEPNELYVQPIGGELKQLTSYTSDAFKQYPWQAPEVVAVPSNHGAGQVYARVYLPQGYDKSRAEKYPAVIFNHGAGYLQNADYGFSGYFREFMFHNLLTQQGYVVMDMDYRGSKGYGRDWRTAIYRNMGHPEVEDLKDGVTWMGQNANVDIKRVGTYGGSYGGFLTFMSLFTEPELFQAGAALRPVADWAHYNAPYTSNILNTPDVDPIAYERSSPIEHAQGLTKPLLIMSGVMDDNVFFQDSVRMVQHLIELEKPMFETAIYPVEPHGFRQPSSWLDEYRRIYKLFEQELK

SEQ ID NO: 126502 - protein, 328 aa, Unknown
  Bacterial polypetide isolated from the Sargasso Sea
MEVYGIRDGTAGLIKRPVDAIQLTYKTFAGYLLRQGGTFLGSTNKGNPFKIPTEDGKHVDKSKEIIEGYHSMKLDGLIIIGGDGSMQILKKLAKDGDMKIVAIPKTIDNDVGATESSIGFHTAVDVATQALDNLQSTAASHRRSMILEVMGRDTGHIALNAGIAGGADIILIPEIKYSIDGIIKKLNSMKKHDIQHSLIVVAEAVKKEDGSQVVHKYIDGEQRLGGIGDYIAKELMKKTDVECRVTSLGHVQRGAPPIASDRILASAFGVYAVDLLNQKKFDRMVAWKDRRVIDVPIDEGIKTYKNVERKDSLVETALSLGVYLGDNI

SEQ ID NO: 126503 - protein, 418 aa, Unknown
  Bacterial polypetide isolated from the Sargasso Sea
MKSQNAIYAQSGGVTSVINATASAVIESSRKSKKINKLYAGKDGIIGILNEDLIDTSLENSSDIKKLMHTPGGAFGSCRHKLKDINQSKREYERLIDVFKAHNIGYFFYNGGGDSQDTSNKIAQYTKDAGFPVACIGIPKTIDNDLPYTDNCPGFGSVAKYIATSTKEAALDVKSMSKSSTKVFIFEVMGRHAGWLAASAGLAQSKNNSAPHIILLPEVTFNEKLFIKRVKEVVKKEDYCVIVVSEGAKYKNGKFLADAGTVDSFGHKQLGGVAPRIAEMINNKLGFKYHWAVSDYLQRSARHISSQVDLDHAYAVGKAAVEYASSGENAIMPIIVRKKTMPYSWEIGKVALSKVANIEKKMPRNFISKDGFGITQSCKNYLSPLIQGEAWAPFEDGVIQTASLKNKLVRKKLKNFKF

SEQ ID NO: 126504 - protein, 362 aa, Unknown
  Bacterial polypetide isolated from the Sargasso Sea
MGNIKKIGILTSGGDCGGLNAAIRSIFFRAKTKYNMDVFGIRDGTIGLSKRPVDVEKLTHETFKGYLLRQGGTFLGSNNKGNNFKFPKNGKVVDTSKLIIEGYKSLNLDGLIIIGGDGSMQILKKLADKGKMNIVAIPKTIDNDVGATENSIGFHTAVDVATQALDNLQSTAASHRRSMILEVMGRDAGHIALNAGIAGGADVILIPEIKYSINGVIKKLNEMKKNKIQHSLIIVAEAVKKEDGSKVMHKYLDGEKRLGGIGDYIASEIMKKTEIECRVTTLGHVQRGAPPTANDRILASAFGVYAVDLLANKKFNRMVAWNNRRVVDVAIDEGIKTYRDVQRDDPLVETALSLGAYIGEIK

SEQ ID NO: 126505 - protein, 362 aa, Unknown
  Bacterial polypetide isolated from the Sargasso Sea
MKNAFYAQSGGVTSVINSSAYGLFLELKKTVPEANIYVGKNGIVGLIEDEVYDLKKSKKSLDLLLDSPGGMFGSCRYKLPEINDEKFYEDLFKKLERYSINYFFYNGGNDSADTCYKISEAAKKLNYPLNAIAMPKTIDNDLAVTDNCPGFGSVAKYIATSAKEASLDIKSMCKTSTKVFILEVMGRHAGWIAAAAELANDDNNTYVHRILMPEVPFNEETFISGVKSDVEKFGYSVIVASEGLKDKNGKFYTASNTKDSFGHNQLGGLAPKLADLIDKKLGYKYHWSVSDYLQRSARHISSQTDVEQAIAVGRAAAKLALNNANGVMPVIKRINNHGEPYAWVIEESELIHIANKEKIVPT

SEQ ID NO: 126506 - protein, 185 aa, Unknown
  Bacterial polypetide isolated from the Sargasso Sea
MKETVQRVGGAMAGMVIPNIGAFIAWGLITALFIPTGWTPNEGLSEMVGPMIVSMLPILIGYTGGKMVHGHRGGVIGAVVTTAIVVGSTTPQFLGAMAIGPLAAWVQKKLDGVLQPATPEGFEMLVDNFSLGILGTVLAVVSKNVIGPILSGITDALGNAAGALVDAGLVPLADIPMKLLRFYSL

SEQ ID NO: 126507 - protein, 311 aa, Unknown
  Bacterial polypetide isolated from the Sargasso Sea
MTIDPSQILLGERVGIGSFGEVHRALWRGTEVAVKRFLDQDISKNLLDDVTFEVDLMRRLRHPNVILLMGAVTVPGNLSIVTEFLHRGSLFKLLHREQTPALQAALDERRRMRMAMDVIRGMHYLHSFEPMIVHRDLKSPNLLVDKSFVVKVCDFGLSRVKRNTYLSSKTNAGTPEWMAPEVLRNEDSDEKADVWSFGVILWELATMKEPWSGMNPMQVVGAVGFAGKQLEIPDDMDHVISKMCRDCWKTQPRDRPSFEDLGNTMRSVPKAPRAVSADGKDSGLPPTPPPQVPPAPAVKPAGDWEDERSRG

SEQ ID NO: 126508 - protein, 286 aa, Unknown
  Bacterial polypetide isolated from the Sargasso Sea
MSNKKIGILTSGGDCGGLNAAIRSIFYRAKNKYKMDVYGIRDGTAGLIKRPVDVMQLTHKTFGGYLLRQGGTFLGSTNKGNPFKFPTGTGKHVDKSKEIIEGYHSMKLDGLIIIGGDGSMQILKRLAKDGDMKIVAIPKTIDNDVGATESSIGFHTAVDVATQALDNLQSTAASHRRSMILEVMGRDAGHIALNAGIAGGADIILIPELKYSIDGIINKLNSMKKNDIQHSLIIVAEAVKKADGSRVVHKYMDGEQRLGGIGDYIAQELMKKTDVECRVTSLATSK

SEQ ID NO: 126509 - protein, 490 aa, Unknown
  Bacterial polypetide isolated from the Sargasso Sea
MVVKPSVLGYGSCGTIVFEGEMDGRRVAVKRLLAQFHELARKELKALIASDEHPNILRCFAFEEDSNFVYMALELCASSLARVVDPVDDETNGQSGGAANALNIQCVDAKTKRPTPECMRILHDVVSGLAALHDQGIVHRDLKPQNVLITSAGRGKIADMGLAKRLNISDGTSFETHVVGGPNANNAAGTSGWQAPERLTRGRQSRSVDVFSLGCLMYYSLTGGSHPFGERLERDSNVVANKFDVSKLDFFPEAEALVRACIDADPSKRPSAKDILAHPMWWDAEKKIQFLIDASDRVELEDRMSDRTMLRSLEMNARRAIRCDDWTVKLDAALLENLGRYREYDGSSLRDLLRVIRNKANHYRELPPKLQRLLGSYPDGLWRYVSVRFPSLLLGVRDFFAPTASSEPTLGKYFLGLEAAVTTFTPPLALDVDDAVPQTPLVAPQVFPSRPGQAVCEFYMKTGRCKFGPSCKFHHPEDAGHWDLPPVRKK

SEQ ID NO: 126510 - protein, 194 aa, Unknown
  Bacterial polypetide isolated from the Sargasso Sea
MSKNVTFCFDFGSPYSYLAYNNLSALKDAGASVEILPVLLGGIFKATGNQPPASVPKKGEYMFKDITRWSKKLDIPFKMNPYFPILTVPHMRGAVLAQKEGLLEKYMETMFESIWVKAMNLNDQEILTQVANQSGIDANVFSEGISSDETKNKLRENTEFAIGKGSFGVPTFYLENEMFWGIDSMKFLIEDIQK

SEQ ID NO: 126511 - protein, 593 aa, Unknown
  Bacterial polypetide isolated from the Sargasso Sea
SFTVTTNGSSNTVNAFSLSGSTVTLTLATAVNPGDETKVTYAGTTALTDIDEGQQAIAAMSAVVATYAVDDQPTLTSSKVTAANTVTMVFSEELAGGAANSFTVTTNGSSNTVNAFSLSGSTVTLTLATAVNPGDETKVTYAGTTALTDIDEGQQAIAAMSAVVATYAVDDQPTLTSSKVTAANTVTMVFSEELAGGAANSFTVTTNGSSNTVNAFSLSGSTVTLTLATAVNPGDETKVTYAGTTALTDIDEGQQAIAAMSAVVAAYVVDDTPTILSSNVSSNGQSIVVHFSEAISSVSATDLSFLVSSSAITPSGVTASSDKRTYTFALSASDYINKGKIVNVGYTHSSGVNDIADLGGTNMADFSGVYVTNGSSLDIVPPELVTTKVASNGQSIVLTFSEEISGSNTVLANSFDITVNGSVINPSGVSGSGAIYTLALGSSDYINQFDEVLISYTLGGGAALTDVGGTQLGDISSTTVINNTDTAPYIINPKVTAANTVTMVFSEELAGGAANSFTVTTNGSSNTVNAFSLSGSTVTLTLATAVNPGDETKVTYAGTTALTDIDEGQQAIAAMSAVVATYAVDDQPTLTSS

SEQ ID NO: 126512 - protein, 1270 aa, Unknown
  Bacterial polypetide isolated from the Sargasso Sea
NGQKKYVGKTKNGQFHGQGVFYNKEGKVVYAGDFSDGKREGPGRLFWDSGKLRYQGNFKAGLFSGEGNLHHQDGSLRLTGVWSKGQPEGLMVVYDPSGKVIYEGTLKTGNWNYDGSGTLFSDKQLAVYQGDFKNGQFSGTGKQFNENGVLLYEGLFRDGLYHGEGTLFRGNGSKYISGKWVFGKPHGPVQFYFPDNGLLQYEGGLKKLDDGSFVFQGQGTLYNQTGQSVYQGLWEDGTRSGNGTAWLEDGSIYSGNWVDDYPDGKGTYLFPDGTEYEGGFIRGKKHGQGTFKEADGFVSYDGEWKDGQRFGRGRVNKRDSSSYEGDWLDGKPHGNGMFTYPDGRVYTGTMKQGLRQGLGELRRSDGSIAYEGEWDRNLRHGKGKAYSASGLIKFDGDFFEGYQSGTGSEYRDDGTLYYQGSWKQNLKDGQGKIYSNAGDIIFEGNFKAGQPDGEGQEFRENGSPVYSGGFVKGLREGSGKLYGMNGVLIYEGQFKANRRHGSGKAFHENGKIAFDGNWNTNQKSGPGDLFDENGVLIFQGSFVEDLPEGSGKEFRKDGSLLFEGSFLQGTRHDSGKIYFPDGTVQYDGEFFEGAQHGIGKEYRSDGTLIYKGSWLSGRRDGNGKLLSQEGVKRFEGLFAKGLIEGKGSEFREDGSLMYQGDFLKGQRHGKGRYFLPGNMLIYDGDFAENTRHGNGTEFREDGSKVYQGKFKFSSRHGKGKIFSADEKVLFDGIFEKGKPDGKGKEYRFDGSLAFEGEFVKGERTGRGLVFGTDGSRLFDGNFIKGSREGEGTEYRENGDILFSGSFLKDQRHGSGTIYGPDESIVFKGNFDQGKPQGAGQEFRDDGTKVYDGNFVEGQRQGQGKLFSMRGELIFEGEFLANLREGQGIEYNEDGIKLYEGAWEKDLREGQGELYDSQQRLVFAGLFIKGEPSGQGKEYRKDGGVLYEGDYENKKRHGQGTLYFISGEILYQGTFAENLKSGEGKEYRKDGSIIYEGFWKEDKRHGEGKILSKEGTLVYQGGFESGKPHGSGTEFRKDGQKFYQGNWQAGLKHGNGKTFGPKGNLVYEGGFQQGKPHGQGQEYRGEKVLFYQGEWKNGKKDGSGKLYFPDGKVAYEGQFVSNQREGNGKEYRKSGTVYYEGNWQKGKKNGPGILFNNDGKKAFSGVFVKGKRDGQGKEYRKDGSLYYAGEWREEIKHGQGAIYNKKEKLVYTGQFREGKRHGKGKQYREDGTLYYNGLWRNNKKHGEGSLFAKNGEQVFTGNFREGRRVDI

SEQ ID NO: 126513 - protein, 826 aa, Unknown
  Bacterial polypetide isolated from the Sargasso Sea
MNSVMRNLGLSALAVAVLTSCAATSTETATPTTTPQAYQVPLAQPPQVSQPLTLNQIMANPDWMGIFAKEAYWSDDSQSVFFARQPSASPLRNYYQQGINDSRAVELAIDKLHAADQQFGVFDSTKANKAYLYQGNIFVKHLSSGKITQLTRQRTAISGLRYLNNGDIAYWQGDNVFQIHQDSGLVEQLAEIKMAKAPEGVKEPSSYLAKQQHRLIQYVALQQENAKAKEQFKNELQKSDPTLAANTWYLGDAEVVSELSLSPDGRYLFVALTDKNYTGSSEHDIMPNYLGSEGYIDPVPVRARVAEDNPPGQRFVVLDLNEHKQIDVTIEGLTGFDEDVLAKVKSENAKAKGESYQSTKAPRKIQLMQDWGWTQSAIQWHESENKLAVMVEATDNKDRWIASVDLAKGKFITEHRLHDDAWVNYDYNQFGWLPGTDSLYYLSEETGYSQLYIKANGEQPRALTQGKFVVSDITLSPDANYIYYKANQSHPGIYNVHRVNIASGKNEQLTQWDGNLDYSLSPDGTKLLLNASRRTEPNELYIQPIGGELKQLTSYTSDAFKQYPWQAPEVVAVPSNHGAGQVYARVYLPQGYDKSRAEKYPAVVFNHGAGYLQNADYGFSGYFREFMFHNLLTQQGYVVMDMDYRGSKGYGRDWRTAIYRNMGHPEVEDLKDGVTWMGQNANVDIKRVGTYGGSYGGFLTFMSLFTEPELFQAGAALRPVADWAHYNAPYTSNILNTPDVDPIAYERSSPIEHAQGLTKPLLIMSGVMDDNVFFQDSVRMVQHLIELEKPMFETAIYPVEPHGFRQPSSWLDEYRRIYKLFEQELK

SEQ ID NO: 126514 - protein, 356 aa, Unknown
  Bacterial polypetide isolated from the Sargasso Sea
YRGLLIGNTIEIPSSIQNKTDILFQYGGSPIGNSRVKLTNIDDCVKRGYVNAGQDPIKVAADQLVKDKVDILHTIGGDDTNTMAAKLSDYLKNNNYELTVVGLPKTVDNDVFPISQTLGAWTAAEQGAIFFENISNENTTSHRQLIIHEVMGRNCGWLTAYTAKEYHKRLMKRTFLPELLIDQSRWDVDAIYIPEKDLDFESECERLTKVMDEKDSVNIFLSEGAGTSTIVNELKDSGESITLDAFGHVALDELNPGQWFAKQFAKKLNADKTLVQKSGYFARSAAPNSQDLDLIQRSSKLAADYALQGKSGVVGMDEDDQDQLTLIGFERIKGGKPFDFEKSWFNDLLTDIGQPK

SEQ ID NO: 126515 - protein, 245 aa, Unknown
  Bacterial polypetide isolated from the Sargasso Sea
IITELRTLHKSTCEYIVRSRGAYFDQGSVSLIMEYMDGGTMSDATKVLGRWEEEDLAATTAMLADGLHYLHTTLNVVHRDIKPINVLLNLRGEAKLSDFGVSGYLIDASKCHSWVGTVTYMSPERIQGDSYEYTADVWSMALTIVECALGRFPYNPPDVSRRFSFWDLLDIVVKDPVPRLRPELQISDEFDNFVALGLNKDPSGRMLARNMIAHPWIFGRDRSDDKRRLAELTARVLATKNASSN

SEQ ID NO: 126516 - protein, 382 aa, Unknown
  Bacterial polypetide isolated from the Sargasso Sea
MKNAFYAQSGGVTSVINSSAFGLFSELKEKAPEANIYVGKNGIVGLIEDEVYDINKSKKPLELLLESPGGMFGSCRYKLPDIEDEKFYEDLFKKLEKYSVGYFFYNGGNDSADTCYKISEAAKKLNYSLNAIAIPKTIDNDLAVTDNCPGFGSVAKYIATSAKEASLDIRSMCKTSTKVFILEVMGRHAGWIAAAAELANEDNNTYVHKILIPEVPFNEESFLNGVQKDVEKFGYSVIVASEGLKNQDGEFYAASAAKDSFGHNQLGGLAPKLANLVSEKLKHKYHWSVSDYLQRSARHISSETDIKQAISVGKAAANMALENKSGIMPVISRDSNNPYKWSIKESELQHIANKEKTVPADFISENGFRITQKGVEYLRPLT

SEQ ID NO: 126517 - protein, 418 aa, Unknown
  Bacterial polypetide isolated from the Sargasso Sea
MKKNIFYAQSGGVTPVINATAAGLIDGYKSKKTNFGKFYVGLNGIAGALNEELIDIKNEKVSELNKLKHTPGGAFGSCRIKLKDLHKNQEEFNRIAEVFKAHNIGYFFYNGGGDSQDTTLKLSSFFKKNNLDIKCIGLPKTIDNDLPITENCPGFGTVAKYIATSTYEASLDVKSMSNSSTKVFLLEVMGRHAGWIAAAAGVLKSSTNAFPHIILFPERVFNEKAFLKKVSDSVKKDAYCVVVTSEGIKYSNNEFVSAGTSRDSFGHAHLGGVAPKLSQMIQNKLKLKVHWAVSDYLQRASRHIGSSVDVKQAYEIGKKSINYAKNGITDVMVTIKKGKTKAYGWEIGYTNLKNVANKEKVMPNSFISKDGFGITNPCKKYILNLIKGEDYPPFKNGVPDYAQLELTTIKKKLKKFKV

SEQ ID NO: 126518 - protein, 224 aa, Unknown
  Bacterial polypetide isolated from the Sargasso Sea
MRAHFAKLNFTSDPSQNQKVSRHDFEQIKVIGRGAFSRVVLVRKKDTGRLYAMKIMRKEKLIKEQKIKPILNERHIMERLVHPFIVRLYWSFHSKSELFFVMDICTGGEMFFHLGKVQKFTEKQALFYFSELLEGLEYIHSKDVVYRDIKPENILIDVDGHLKIADFGLSKIIPKGKRSFSFCGSPEYMCPEILKGSGHDKRADIYCIGALLYELVVGFPPHFN

SEQ ID NO: 126519 - protein, 382 aa, Unknown
  Bacterial polypetide isolated from the Sargasso Sea
CSHASNVFSEGIPAAFRTVQQTRLLTVTAAAILVAAPWYISVGIQTDWEWTKGFFFVHNVGRFVAPMERHSGGLLFHPLTMLVGFYPWSCFLPLAIFGATRQLWKTWRQGQSPHIENLHAPALSLLLLWMSVWVGGFSLAATKLPNYIMPAYPAAALLVAALAMEAVKRSAWLYPRWMGIGVGGIAFGGIATSVTILVGSFYGLTGSEPAAIIGLIPVAGAFWLVWRSRQRPAYAVTTMVFLGLLYSSLAVGPAAAWISRANTLPALIREAHAHAGGHARIGAYSQITPNLVYYAKGLVKRWAHDSDRAEKAAAFLLTGPDAVLVIPENQFNELSTFLPETAGVVGRARPLFKNQDFLLVGSMKESAPAVTKRTASVRSIKK

SEQ ID NO: 126520 - protein, 62 aa, Unknown
  Bacterial polypetide isolated from the Sargasso Sea
MKESIQRVGGAMAGMVIPNIGAFIAWGLITALFIPTGWVPNEGLSEMVGPMIVSLLPILIGY

SEQ ID NO: 126521 - protein, 729 aa, Unknown
  Bacterial polypetide isolated from the Sargasso Sea
MDTDIFESLNDQQKLAVNCSLGNKLVLAGAGSGKTRVLTCRVAKLIYDYDIKPSNILALTFTNKASNEMKQRLQAILKISTQGLWFGTFHGICRRILKIHWKEAGIKDFFSILDSQDQLRIIKRIVKSRKLDDNFYDPKQLQSFINSQKDRGLRYDKCNNDDKLYIDIYKEYDEICRQTNSVDFADLILLTYEMFMNNPEILKYYSSRFKNIMVDEFQDTNTLQFNLLKLLNKENCSLYVVGDDDQSIYGWRGARSENIKYFNKQFKDVEIFRLEQNYRSTTNILDVANNLIAKNKDRMGKNLWTNTNQGNPVYFYEAYNDDDECSFIVDKIEQFVESGMKRSDIAILYRSNFLSRRFEEELNSRSVPYKIFGGFRFFERAEIKDVLAYLRVAVNTSDDSSFERTINNPPRGIGEKSISILREEAKKHNISLWESIHNENTLSLMSSRCVASLNNYKQIIDSLTSLLSELKLKEIIEKIIDISGLTKYYDTKKNEESLSKIENLEELVSTAERFTHNNLDSENLIQDFLDNASLEAGEYQSKLDSDPLQLMTIHSAKGLEFPVVFLTGLDEGIFPNPNRDILPGFLEEERRLCYVAITRAMETLFLTCSNMRYMHGSSSDFIPSRFIGEIPNELIEPIKTEFKKKFGNDNYTESNHYDEFSQEEIYDDISQDNVIPFIRVGQRVNHLKFGHGVILSYTGKKDDLKVQVDFEKYGKKWLVLSYTQLEFIN

SEQ ID NO: 126522 - protein, 328 aa, Unknown
  Bacterial polypetide isolated from the Sargasso Sea
MQAAVIREPGGPEMFEIQTLPDPVPGPDEVLVEIKATALNRADLAQRHGNYPAPVGIRDDIPGLEMAGIIIGVGERVVGWEEGDRVMALLGGMGYATHIAVHERMLMPVPEGLSFEEAAGIPEVYLTAYDAMHLQCELVMGEVALIHAAGSGVGTAAVQLAAAQSCLTFGTAGSDSKLEKAKELGLDVGINYNSQNFREVVMEVTGGNGADVILDVIGAPYWDDNVRSLATLGRLVLVGAMGGGTLDQAKLGALGNKRAIVRGTRLRSRTFEEKATVVQGFAKRILPLFARGKLQSIVDHVFPLNEVAAAHSYMETNVNFGKIILVND

SEQ ID NO: 126523 - protein, 361 aa, Unknown
  Bacterial polypetide isolated from the Sargasso Sea
MNKKIGILTSGGDCGGLNAAIRSIFYRAKNKYKMDVYGIRDGTAGLIKRPVDVMQLTHKTFGGYLLRQGGTFLGSTNKGNPFKIPTSNGKHVDKSKEIIEGYHSMKLDGLIIIGGDGSMQILKKLAKDGDMKIVAIPKTIDNDVGATESSIGFHTAVDVATQALDNLQSTAASHRRSMILEVMGRDAGHIALNAGIAGGADIILIPELKYSIDGIINKLNSMKKNDIQHSLIIVAEAVKKEDGSRVVHKYMDGEQRLGGIGDYIAQELMKKTDVECRVTSLGHVQRGAPPTASDRILASAFGVYAVDLLNQKKFDRMVAWRDRRVVDVPIDEGIKTYKNVERKDSLVETALSLGIYLGDDI

SEQ ID NO: 126524 - protein, 519 aa, Unknown
  Bacterial polypetide isolated from the Sargasso Sea
MKEYEASNIRNLALIGHGSAGKTILAESMLACGGAITRIGSVEQGSTVSDYHEDEQQRQISIHTTSMYAEWKSCKLNILDSPGYADFVGEALSALRVADSAIMTVHGAHGIELGTEQMWEKVCDMKMPTLVAVNVLDAEYVKFDQIVEDLSNQFGKRFFPMTLPVNPGPGFDQLVEVMGRKLHRYDLGGIGQFSTEDLPGDWQDRVEELHQQLMENVAESDDTLLEKFFEEGELSDDEISTGLKGALSQQTFIPVFAVSSATSVGVPQLMDFLAAHAPSPRDVSSAEASRSDGETLEVGLEDGSPLLNIFKTVSEPHVGELSFFRLYSGNVETGMDLINTGRNHQERVGQIFQMNGKERTQVKSIQAGDLAAFVKLKDTHTCDTLSDPKTKLKLPGIDFPAPNLSGALKLKSKGEEEKMSQGLSTLHEEDPTFIYSPDPELHQTLIFGQGELHLQIITERLKSRFQVEVELVQPKIPYRETIRKKGESKYRHKKQTGGAGQFAEVWMRLDPGPRDSGID

SEQ ID NO: 126525 - protein, 407 aa, Unknown
  Bacterial polypetide isolated from the Sargasso Sea
MKNAFYAQSGGVTSVINSSAFGLFSELKEKVPEANIYVGKNGIVGLIDNEVYDLSKSQKPLELLLDSPGGMFGSCRYKLPEKEDEKFYQDLFKQLDKYSIGHFFYNGGNDSADTCYKISEAAKKLNYSLNAIAIPKTIDNDLAITDNCPGFGSVAKYIATSAKEASLDIKSMCKTSTKVFILEVMGRHAGWIAAAAELANDNENTYVHKILIPEIPLDEEAFLAGVQKDVEEFGYSVIVASEGLKNQNGKFYSASDKKDSFGHNQLGGLAPKLANLIDKKLNYKYHWSVSDYLQRSARHISSKTDIEQAISVGKAAANMALNNKNGFMPVICRDSNSPYSWSIRESELIHIANKEKTVPANFISEDGFRISQDGVDYLKPLTIGESYPKYRDGIPVYEQLDLHLAEI

SEQ ID NO: 126526 - protein, 40 aa, Unknown
  Bacterial polypetide isolated from the Sargasso Sea
MKESIQRVGGAMAGMVIPNIGAFIAWGLITALFIPTGWVP

SEQ ID NO: 126527 - protein, 157 aa, Unknown
  Bacterial polypetide isolated from the Sargasso Sea
MKESIQRVGGAMAGMVIPNIGAFIAWGLITALFIPTGWVPNEGLSEMVGPMIVSLLPILIGYTGGKMVHGHRGGVIGAVVTTAIVVGSTTPQFLGAMAMGPLAAWVQKKVDGALQPATPEGFEMLVDNFSLGILGTILAVVSKNVIGPILQGITDSR

SEQ ID NO: 126528 - protein, 260 aa, Unknown
  Bacterial polypetide isolated from the Sargasso Sea
IQFNCGGLPKTVDNDVYPISQTLGAWTAAEQGAVFFENIVNENTTSTRQLIIHEVMGRNCGWLTAQTAFDYRDRMKNREFIPELLIDQSRWDIDAVYIPESDFDFQTEVSRLKAVMDAKDGVNVFLSEGAGLETIVREMEGRGQEIPRDAFGHVRLDDINPGKWFAKQFSGALGAEKTLVQKSGYFARSAKPNNRDLQLIQKSAHIAVEYAVAQKNGVVGKDIDNNNEIGLIEFARIKGGKPFDPNTDWFCSLLNEIGQK

SEQ ID NO: 126529 - protein, 547 aa, Unknown
  Bacterial polypetide isolated from the Sargasso Sea
MSAKDVKFGDSARTQMLDGVNTLANAVKVTLGPKGRNVVLDKSFGAPTVTKDGVSVAKEIELENKFENMGAQMLKQVASQTSDEAGDGTTTATVLAQSIVNEGNKSVAAGMNPMDLKRGIDKAVSAAVEHVKGLSVPCTDDKAIAQVGTISANGDIAVGEIIAEAMEKVGKEGVITVEEGSGIENELDVVEGMQFDRGYLSPYFITNQDNMTVELDSPYILLFDKKISNIRDLLPLLESVAKAGKPLLIIAEDIEGEALATLVVNNLRGIVKAAACKAPGFGDRRKAMLEDIAILTGGTVISEEVGLSLEGASVEDLGTSKRVVLNKDNATIIDGAGDENAIATRVNQIRAQVEETTSDYDKEKLQERVAKLAGGVAVIKVGAGSEVEMKEKKARVEDALHSTRAAVEEGVVPGGGSALIRCLEAVAKLKGDNDDQNVGINIARKAFEAPLRQIVSNAGEEPSVIVNKVIDGKGSFGFNAATSEFGDMIEMGILDPAKVTRTALQAAGSVAGMMITTEAMVTDVPKDDTPMPPMPDMGGMGGMGGMM

SEQ ID NO: 126530 - protein, 165 aa, Unknown
  Bacterial polypetide isolated from the Sargasso Sea
GASVEILPVLLGGIFKATGNQPPASVPKKGEYMFKDITRWSMKLDIPFKMNPYFPILTVPHMRGAVLAQKEGLLEKYMETMFESIWVKAMNLNDQEILTQVANQSGIDANAFSEGISSDETKNKLRENTEFAIGKGSFGVPTFYLENEMFWGIDSMKFLIEDIKK

SEQ ID NO: 126531 - protein, 296 aa, Unknown
  Bacterial polypetide isolated from the Sargasso Sea
MKIGQFIKERYEIVELLGEGGMAFVYKAKDMQLERMVAIKTLKPNYVEQTTFVERFKREAQTAANLNHPNIVQIFDWGIEEEPYFVMEYIEGNTLTSIISNRKTISLSDVLFIGAQVANGLQAAHSQGLVHRDIKPGNIMITPSGKVKVTDFGIVSIQDEESDITKTGSILGTASYISPEQAQGKAVSVGSDLYSLGTVLYELITGSPPFEADTPIATATKHLTEKPEKPSKYRQDLPRGIENAILKLLHKTPRDRFKSAEDLRAVLLQQRNQLEMVQTQESLVDLTNPKIKYKFT

SEQ ID NO: 126532 - protein, 210 aa, Unknown
  Bacterial polypetide isolated from the Sargasso Sea
MDDFYKNIIISLLTFSVGCIISLVSPKILKKVLRRITSATKSKTDDYIAILLIETIKPLGFILSFIVAWKVLLIGGIVDKTLIGISKFLCLIYIVRFINRVFLKIIQRWASKINDQSISEMIRSLSPMVGASVWSLGVIFYLQNMGVQMAAIWALLSAGGIGAGLALKEPVQEFFEYITILLDKPFQSGQFIHIDGIWAKVERVGVRSTR

SEQ ID NO: 126533 - protein, 396 aa, Unknown
  Bacterial polypetide isolated from the Sargasso Sea
MKIAFLTAGGIAPCLSSSIGALIQNYNRVLPNSEMIGYLNGYKGLLLGKSIEFPDSVKNKYEILFEYGGSPIGNSRVKLTNLKDCVKNNYVKEGEDPLQIAAEQLKKDKVDILHTIGGDDTNTMAAQLSGYLKNNGYNLTVVGLPKTVDNDVYPISQTLGAWTAAEQGAVFFENIVNENTTSTRQLIIHEVMGRNCGWLTAQTAFDYRDRMKNREFIPELLIDQSRWDIDAVYIPELDFDFQAEVSRLKAVMDAKDGVNIFLSEGAGLETIVREMEGRGQEVPRDAFGHVRLDDINPGMWFAKQFSGALGAEKTLVQKSGYFARSAKPNNRDRQLIQKSAKIAVECAVAQNNGVVGKDIDNNNEIGLIEFARIKGGKPFDPNTDWFCSLLNEIGQK

SEQ ID NO: 126534 - protein, 418 aa, Unknown
  Bacterial polypetide isolated from the Sargasso Sea
MKVRNALYAQSGGVTSVINATACAVIESSRKSKKIGKVFAGKNGIVGILQEDLIDTSIEDIKEINKLMHTPGGVFGSCRHKLKDAKQNKREYRRLIEVFKAHDIGYFFYNGGGDSQDTSNKIAQYTKEEGFPVTCIGIPKTIDNDLPFTDNCPGFGSVAKYIATSTKEAALDVKSMSSSSTKVFILEVMGRHAGWLAASSGLAQSNNNSAPHIILLPEVPFNENKFLKKVKDSVKKEGYCVVVVSEGAKYKNGKFLADAGTVDSFGHKQLGGVAPRIAALINKKLGLKYHWAVSDYLQRSARHISSQVDLDQAYAVGKAAVEFAAAGENSIMPIIVRKKSKPYSWDIGKVKLSKVANVERKMPKNFISKDGFGITQSCKNYLSPLIQGEPMTPFKDGVIHTASLKNRLVRKKLRSFKI

SEQ ID NO: 126535 - protein, 385 aa, Unknown
  Bacterial polypetide isolated from the Sargasso Sea
MAPKNVFYAQSGGVTSVINASAAGVIETARKYPKKIGKIFAGKNGILGALEENLIDTSYETSRQIELLKYTPGGAFGSARYKLKGIKENRREYERLIEVFKAHDIGYFFYNGGGDSMDTAHKVSQIGSEMGFPIASIGIPKTIDNDLPITDTCPGFGSVAKYIAVSTNEASLDVVSMAETSTKVFILEVMGRHAGWIAAAGGLISKKRNDPPHIILFPEVPFEKKDFLKHVDKSVKQNGYCVIVASEGARYKNGKFLADAGSKDSFGHKQLGGVAPVLADMIKKSLGYKYHYAIADYLQRSARHLASEVDLKQAYAVGEMAVKAAIKGEKSKMMTIVRKSNKPYKWVIGSTDISKVANNEKMMPKKFFTSNGYGITKAPVKKIYD

SEQ ID NO: 126536 - protein, 338 aa, Unknown
  Bacterial polypetide isolated from the Sargasso Sea
MHRRIIVNLLNRLYRRANPKELPDSINSIIIFAQEKLGDAILLLPFLNALHKRFPDAVIDLCCTSYNKKIFEGIPFIRNCISYRPFNLKFAKLIRSEKYQILYNPKSGPSSTFHHLANTIKADVKICLDNVYNNPIYNYHLPNEESKHIAEKYCELLFKYGLTTPVDNWLPDYFYQFPSSVKEKKYVAINMSAGHQDRSFPIDKWKKVITYILEDDLEMQIALFSSEKEKNQAKLIKNIFKERIHYPLESPNLYYASGILNEAEILISVDTSLIHLAAALNKPIIGLYNNDKVAHARYHPYNNISDSVISSTKYIRDIQPESVIKLYKSYKNKSKPSS

SEQ ID NO: 126537 - protein, 179 aa, Unknown
  Bacterial polypetide isolated from the Sargasso Sea
GTNTKIGSNVSIECAEIGKNVLIYSGVKIGQSGFGFAPTKKGHIKIPQVGNVIIGDNVEVGSNTCIDRGSHGSTSIGEGTYIDNLVHIAHNVSIGKYCAIAGQVGIAGSAVIEDYCMFGGQVGIGGHITIGQGSQAGGQAGITKSISPGSKVSGTPALPLSQYHRQTLKLKKLIRGKGK

SEQ ID NO: 126538 - protein, 332 aa, Unknown
  Bacterial polypetide isolated from the Sargasso Sea
MKADLKKILLLIIIWSLGVISNIKAETLDIKEILEIIQKDLRTLERAVYSESFSKSSKSNSNQEISGQNAEDVLTKHLLKLSEIEKQFQELTNKYEEINFKLDKLSSRLSKVQADNQLRFQNLESKTIINNTENSSLTAVPKTETGQQKILPGSSQPQDLGTISYKDMTSTTEKQIVQSVDTTKTVSTEIFQSEEQILPEGTPKEQYEFATSFLKVGDYNMAERAFREFVDNNPDSEFSGNAQYWYAETFRIRQLYTDAASAYLEGYQKYPKSEKAPINLLKLGVSLVQIGEKDQGCLMIAGVKKQYPNATQSVLQKAKYEEKKFECKKENS

SEQ ID NO: 126539 - protein, 209 aa, Unknown
  Bacterial polypetide isolated from the Sargasso Sea
MSETDKTFELRWRSGSLKYQDFKLLSEGGIAKLYSAFDENLRRTVVYKTLHDHLREDEIETQRFLREARVTANIAHPGTVPLYELGRDRNGNLFFTMKHVRGRDLRNIIDALHDGDPATTTAFPLPALIDILTRACETVAHAHSRGVIHRDLKPANILTGQFGVTYVIDWGLAKVWGEPDIAHPEMGHDEDPALTPVGRRYGTPFYMAP

SEQ ID NO: 126540 - protein, 91 aa, Unknown
  Bacterial polypetide isolated from the Sargasso Sea
MHSYGIVHRDLKLENVMMSDNTETSVPKLVDFGLAKMIGPNELALEPFGTLGYVAPEVLQKKPYSFSCDLWSYGCIIYALLSGSLPFDHES

SEQ ID NO: 126541 - protein, 314 aa, Unknown
  Bacterial polypetide isolated from the Sargasso Sea
AIKMMKRGITSRSAQRRFEFESQLLARLQHPGIAQVYEAGTHDDGDGGVPYFVMEYIPNAKELTDYAVEKKLNTRERLRLFTQVCEAVQHGHLKGIVHRDLKPGNILVSGGGHPKIIDFGVARTTDSDMALSTMQTNVGQLIGTLQYMSPEQCAADSSDIDARSDVYALGVILFELLTGQMPYDVSGSAVHEAIRMVCEVDPARISTINKNLKGDIETIALKAMEKDRERRYQSAVELRRDIQHFLDNEPIEARPTSPWYRVRKFVGRNKTLVTSSIIICVLVIAGLIWTSIALGVISSQRNKLAVTNDALVES

SEQ ID NO: 126542 - protein, 320 aa, Unknown
  Bacterial polypetide isolated from the Sargasso Sea
LGRGGMGAVYEAEHQETGEHVAVKVLASHLADDLGLKERFDSEIQTLKPLRSPGIVQLIAYGEDDGQPYFAMELVHGQSLERIIRGGRIFTPEEVVDLSIEIARSLKVAHDHGIIHRDLKPANLLVPDDPHQANAGVKLADFGIAKLFGATSQTAHGSIVGTAEFMAPEQAAGKPLDARADLYTLGLVMFTMIAGKPPFRGSQLTEIITKQLREAAPRVSSFHHNIPKELDGLIDELLAKDPAKRPASALAVGRRLTAIRDILSQLQKPIQDNMGGGPPSLIIQSESDSAAPTNHDRSSSLTKAAPEKKYHKQVVLHLIC

SEQ ID NO: 126543 - protein, 213 aa, Unknown
  Bacterial polypetide isolated from the Sargasso Sea
MGKGSFGVTYQMHNKVDKQLYAVKMISIKDFKRTGGSPERLHHEAMQLAQLNHQNIVRYFTAFETKNSQLGKAFAIVTELLGGGSFADRIRKKPSEKQLAQWIEQVASALSYMHARKMQHRDLKPDNVLFDKSDTAKIIDLGLACTLESKSRVSTRSGGAVGTNLYMSPEKGMGKSYDAKDDVWALGCMVVGCALGTPMESMGFTRKASLLST

SEQ ID NO: 126544 - protein, 256 aa, Unknown
  Bacterial polypetide isolated from the Sargasso Sea
MREIRVLDALKHSDYIVNMHLICVQPFFICLELLEGGDLYSSLDDDIWQHEMSLHTRIRIMRDVAIGLRYLHHKGYVHRDLKPHNILLHYDVSAKPLVHIGTDDIELSDVEMEAKLRTQRNIQDKPIEWGEMKVVAKICDFGMTVKRHHLHESDRTTFAWLDDDVEGGGTSGYTAPEVLMDEECFDLSTDVFSYGVCLWETTTSDRNNILAGKESKTTANHILNGVRPAFTSNQPIFLRKIIQSCWATGTHRRPKM

SEQ ID NO: 126545 - protein, 252 aa, Unknown
  Bacterial polypetide isolated from the Sargasso Sea
MTGGQAAVKSLKKEKVKYIFGLIGSATMEIFDALYHEKNIKFIGVRDERTGTHMADGYARASNQPGIILAGQNGPGATNLVTGLAQAKAAFSPVVSIAGSYSTKDKMEDAFQGLDQQSLFKPVTKKTWTVKSAKKIPQVISNAFKLSMSSRRGPVCINLPRNILAEKSIYKINEKIKSFKNQSSIKAKVSSIKKAIKIISKSKKGIIVVGGGIKHNSKYKEAIELSKLLSFPIVTAAGHGDAIPYNYKLNAG

SEQ ID NO: 126546 - protein, 190 aa, Unknown
  Bacterial polypetide isolated from the Sargasso Sea
CLVLEYCEAGDVRMYLDKGPTPPGFFWRVAEGVALGMAYLHKRDMLHRDLKCSNVLLSSDGGVKLTDFGLAVQIDQERSRGWVGAAEIGTFRWMAPEVARREGYHRSADVYSFAMVLFELLTHQVPFSERPAMQAAAAVALHGVRPPLPTGTPPAIASIVTACWAAKPSQRPSFRKLVTELAAAKKALDP

SEQ ID NO: 126547 - protein, 299 aa, Unknown
  Bacterial polypetide isolated from the Sargasso Sea
MKSSAICRFTPQWVIRAGPREKVYFAPEEVHAAIVTCGGLCPGINDVIRSIVGTLEEGYGVSKISGIRYGFSGFWEDGFENMELSKKVVKKAHKQGGSILGTARGGGDVDKIVDSILRQGINMLFVIGGNGSHAGANAISAECARRGSLVSVVGVPKTIDNDILLLDKTFGFDTAVEEAQKAIQAATIEAQSALRGVGVVKLMGRQSGFISMYATLASGDVDICLIPEVDFDVHGENGVIEHVKDLLDEQGHCILVIAEGAGQEFVKVSGTDAGGNPLLGDIGPWLCKEIKKSTKCDVK

SEQ ID NO: 126548 - protein, 221 aa, Unknown
  Bacterial polypetide isolated from the Sargasso Sea
MPEETVLNFGRQLAAGMAHVWSRGFAHRDLKPANVLLSERSERATIKICDFGFARRMKQRPGSGSSSGNSMNNSRNRQSSSSSSSSSSSPSNDNGGVGMDEDEEADEDYEEAMAASIGGGGGGFGGMDGSAIAGSQVGTPLYSAPEVLDNIATGGGAIHRRQQQQQQQQQQQQQHNASPRGGGGGGGGGGGGGGIANGSAVYSSNVDVYSLGVVLFEMLTG

SEQ ID NO: 126549 - protein, 245 aa, Unknown
  Bacterial polypetide isolated from the Sargasso Sea
FERLEAALPQRYTLIRELARGGMSRVYLARESMPGRDVVIKVLDHELSARMGPDKFVHEVEVTSQLQHPHVVPIYSAGDADGTLYYVMPYIDGATLRDRLAKEGRLPIAESLSITHQIASALQHAHTKGVTHSDIKPSNILFQGGLAVVTDFGIADALRVPEGGGEFTRSGLPIGTPDYMSPEQASGDNRVDEKTDIYALACVLFEMLAGQPPFHSRTAQATLARHLTDTMPSIKSVRSSVPIAL

SEQ ID NO: 126550 - protein, 305 aa, Unknown
  Bacterial polypetide isolated from the Sargasso Sea
GGMATVYLADDLRHERKVAVKVLKPELAAVVGADRFLAEIKTTANLQHPHILPLFDSGEADSFLFYVMPYVEGESIRELITKEKQLGVKDALSITRKVSDALDYAHEHGVVHRDIKPGNVLLSERGEPLVADFGIALAVAQAGGGRITETGLSLGTPHYMSPEQATGDRDVDARSDVYALGCVLYEMLSGRPPFSASTAQGVLVQILTTDPPSITGLRRTVPLHVEGVLARALEKLPADRFKSAAEFTRALDDETFVYAPRPMATDPGRPAVQAPAPVQEVTAPKKGRDFRLIAAVGSPPSSLVS

SEQ ID NO: 126551 - protein, 146 aa, Unknown
  Bacterial polypetide isolated from the Sargasso Sea
RVQVYKAYQVKLRRKVALKVLALEHADKKGFVERFNREAATGARITHRNVVRVYDILTGKSYDDDDVSTEVHVISMEYVDGPHLRTLNETQDLRDDNLRALDYFRQIGAGVSAAHERGIVHRDLKPENIMLDRETDVLKVADFGLA

SEQ ID NO: 126552 - protein, 181 aa, Unknown
  Bacterial polypetide isolated from the Sargasso Sea
MSDLEFGRQIGRGAFGEVFRGRYRGTDVAIKRLCVLDDADGDRRALSEFKRELSFLTRLRHRHVVAFMGASTAPPNLCIVMDYCDKGSLYAYLRNADKSLSAFKALKWMSEAAKGLVYLHARDVIHRDFKSGNLFIDDGGSIKIGDFGLSKFHSGASTSAGAMSLVGTYQFMAPELLEGNP

SEQ ID NO: 126553 - protein, 271 aa, Unknown
  Bacterial polypetide isolated from the Sargasso Sea
FILVYKHPVIKKIAILTSGGDCAGLNAVIRAVTLRAFNKYKWEVYGIKDGTLGLLRDPLDIVKLEPNNFEGNLMRMGGTFLGSNNKGNPFKKISKNGKQIDSTDIIIDGFKRLGIDALIGIGGDGSLKILQRLTKKGNINFVGIPKTIDNDVKNNELSIGYDTAVDVATNALDMLQPTAASHRRAMILEVMGRDAGHIALNAGIAGGADIILIPEIPYSLKSIANHIDSLRSKGRNHALIVVAEAVSKENGKKATVKYVDGEVRLGGIGNY

SEQ ID NO: 126554 - protein, 135 aa, Unknown
  Bacterial polypetide isolated from the Sargasso Sea
MKPENLLRDGAGRARIADFGVARMMRAREPQEQAERAELSFELERLRGALSSLAALPAAAAPGAEAAVAGGEVDEEERVELSRRMSRARRLLERPSSLRLLESSEGSPAFRAPETFREGSHCGRAADVWSLGVTL

SEQ ID NO: 126555 - protein, 198 aa, Unknown
  Bacterial polypetide isolated from the Sargasso Sea
MQAFCHEIAILRAVCDHESISTMFGSAQRRGEGWMFLEMATGGELFDRLIDSGSLTEKMTWPYFKALINAVSHCHSKGIVHRDLKLENVMLMAHDPHAIRIIDFGLAVQLRRKEGGGPDPTDTRTDCTGTQVRATQPPSPLLLCFFFFLSPPSRRRRRRTCACLPCATALACRRHTARPRCSRVSRTTRTSATCGRWG

SEQ ID NO: 126556 - protein, 161 aa, Unknown
  Bacterial polypetide isolated from the Sargasso Sea
MGLEYVRKLGEGTFGVALLVRTRHGKQYCLKEVTVKSNDDRARAEVMDEVACLQRAQHNNVVALIENWWAGSGAMRFHILMEFASNGSLDDIIKQFSSSRRFFPETKLLHFVQEIAEALSYCHNTLRLMHRDLKPANILVDQLGTLKLADFGLSKALTPGT

SEQ ID NO: 126557 - protein, 243 aa, Unknown
  Bacterial polypetide isolated from the Sargasso Sea
KYKKLCQLLDILKEIQMWSNIRHPYLVQFLGVSYDQQENDFYILLEKIDGENLGEHIHNKTSSKTKSINKYAKYQICIQLINVIKFLHTCKPPIIYRDLKPENIMIDKFNNVKLTDFGLSRYMPEESKYKLTGGTGTIRYMAPEVYLGQKYDLKADVYSLGFILYYIIGGKKPFNEYNVDTIRTYMENTDLIHSLDIIKDKKWRELINNCIKKNTEERWDVNTLFENITNITYDNENKPCLIS

SEQ ID NO: 126558 - protein, 186 aa, Unknown
  Bacterial polypetide isolated from the Sargasso Sea
TLTATRESKGIYYIQISTTSSIVNTTYPYLVDVWSLGGTQLFSGSAFKPKTFKPSQSPVRDEYVLSMPNIRKEYKSTETIRMRLYARKKSWSPNIYNVAKSAPENLTIVSGSYRVLRAIDDFEVVSYGTGSIKYTEMSYDVSGSYFDLKMNLFEPGYQYKLKYAFYDGFSKSYVEQPYEFKFRVIK

SEQ ID NO: 126559 - protein, 659 aa, Unknown
  Bacterial polypetide isolated from the Sargasso Sea
MGLSIVQRIIAGFVLMLLLLILLGVISTLKIRGINDGLSQVSDRATPLVIAVAGLKGALQDSNRWVLVYRTNEDASQLPQLASQFKEQQARFSQLSQEMEKFSGVAEAGSRFQQVDTATKQFYGLAEQVLSQHSQWVNAQDQRHKLEIAFIRLEDTYQWAADLLLQQTASKRSMRNKAELITSGIARDLKNIRRADAKTDLNELEKVLSKDIEMARKRLDRVLVPDDVKQRFVSNLDRMQELALGQQGLLATMRNAQQLAASLQTLNQQLDASLINCLGLLDEMGQSAGSIASQSRTTADDAVSSASFWILVVAAISAAAALIIGYTTARSIQRPLQMINKELDYMAAGDMTRRINYRSSCEFGALSRSIDTLAGKTGELLSQINAGSRHLVEEASRAAEISERAVSRVQDQKSQTDQVAAAITELEVSATEVARSTDGTKREVDLADDEARSGRQKVATTRRITEQLAGAMEEAVGITYKLGEFSNNIGSILDVIRSIAEQTNLLALNAAIEAARAGDAGRGFAVVADEVRALANRTQTSTEEIQAMIENLQSSSKLVVEVMGRSQEQTHNCVEQTREMDAALQSIADRMSAIKAMADQVAHAAQEQISVSQGVARHISGIAEVAYETEREARESAGSSEVLAELVAKQQQLIAHFKV

SEQ ID NO: 126560 - protein, 397 aa, Unknown
  Bacterial polypetide isolated from the Sargasso Sea
MEYIEGNTLTSIIAKNRTISLSDILFIGAQVSSGLHAAHQKGLVHRDIKPGNIMITPDGKVKVTDFGIVSLQNEESEITKTGSILGTASYISPEQAQGKPVSIESDLYSLGTVLYELIAGKAPFSGDSPISTATKHLTEKPEKPSMFRRDLPKGVESAVLKLLEKATYDRFKSAEDLRATLLQQRKALQSEQTRENLVDLTNPKVKLRFTLPALIISIGVVVGTVWTLTQVFDGLPVDGGAPALVEIPDLTGSEQAQALEDLQNLGFKVGIENSADASVPAGSVIRTQPPSNTVINPDSLVTIIVSVGPEAFPIPYVLDIETERAIYVVEESGFILGQLLEVNDENIPRGFVISQNPVAGTKMSPGTKVDLVVSKGPSLIEISDLSRKSPEDAIQIL

SEQ ID NO: 126561 - protein, 267 aa, Unknown
  Bacterial polypetide isolated from the Sargasso Sea
ATSGQDGCILIGETAEGSIIEIIELGHGWVEHLEWSKDGMSLAASISKNVYVFDCEGKKRWKSEQHSSTVSAIAWSSNDELATACYSKVAFYDVIENKTRQTLQWKGSLISMKLSSDGDIVACGSQDNTVHFWRRSTGQDSMMSGYPGKPSNIAFDSNGKLLATGGSEIITVWSFENNGPEGTTPGQLRYHKLFVSDFSFAPKGNRLASGARDGSIAVWGLKNDGHGGSIGTSQMSDQVSSIAWRRDARAIAAGDAKGQVVTWKVKT

SEQ ID NO: 126562 - protein, 331 aa, Unknown
  Bacterial polypetide isolated from the Sargasso Sea
MKGATFRDFIILRELGRGLCGTVYLAKYRLTDQLVAFKVMRKQKLIDVGEMRHAVLERRVHEDINDGPFIDKLLHAYQDQWALFLVLEYAPCGDLFQAMNYHGLPTLHDAKMYTSQCALAIDYMHQCGYVYRDLKPENILLDTNGCVRLADFGMSKKLVGNERAYTVCGTAQYMSPEVFNHNGCRFEADFWALGILIYELCSGGTPFGADKDSRQELYRRLVRHRNDTMTFPTWFDIETASIVRALLHEDETKRLGHVGGLSAVLTHPWFAPASHVDVLSGIQVPALQPRRRNIVYDLKLRESIDLGDIPWECGAVVVDPEHVRAYETFGA

SEQ ID NO: 126563 - protein, 289 aa, Unknown
  Bacterial polypetide isolated from the Sargasso Sea
MARPPEQLGSLRLVRQLGVGRKCQIWEASDESKSKRVAVKLVSPEFGSDKGIRQLLKHELTVSRSLEHSEIIHIDRYSTAGRLPHLVMELFRHPNLKMRLTSGAESIADQAPSIAQKSADAISHLHANRWVHRDLKPENILVDDSGNIRLIDLALASRPPGILAQLISLKRTVQGSPSYMSPEQIRGSRVGYAGDIYSFGCLLYELVTGHPPFTGSTQQELLSKQLYATPPFASATNAGVTPQLDRFIRELLAKRPKERPSSMAEVAAHLRNTPFLTPKARSAASKKAD

SEQ ID NO: 126564 - protein, 369 aa, Unknown
  Bacterial polypetide isolated from the Sargasso Sea
MDCLQGEELDDWVNERGAIPEDDVKTLMMSMLDAVAFMHSKGVIHRDLKLENFVFAEKGNLNSLSVVDFGLAKALNARQKAQHVCGTLSYISPEALLAGVYGQGVDVWALGVAMHVLLTNTWPFDDEDEDELYEQIIECDLDFETEAWEGISEVAKDLIEGLLDSRPKHRLTAAQALEHEWFTGQSSHTSDRLHSMHSRLDSLISISNQPPERRFKDGEYITRQGDPSVEFFIIIAGECTLTRDGVVVGVRRVGNFVGELRNLEESVDDVVLAAWTSARAVGDVRVLVFHDTELQWVHQHDYRLTYEFESMIRMQRRSIAKQAREQRKRESALKAAEVETGESDKDHSMMRSASAQPLVCEERVNDNKE

SEQ ID NO: 126565 - protein, 385 aa, Unknown
  Bacterial polypetide isolated from the Sargasso Sea
MKIGQLVKERYEILEILGEGGMAFVYKARDMQLERFVAIKTLKPNYVNQETFVDRFKREAKTAANLNHPNIVQIFDWGIEDEPYFVMEYIEGNTLTSIIAKNRTISLSDILFIGAQVSSGLHAAHQKGLVHRDIKPGNIMITPDGKVKVTDFGIVSLQNEESDITKTGSILGTASYISPEQAQGKPVSIESDLYSLGTVLYELITGKAPFSGDSPISTATKHLTEKPEKPSLFRRDLPKGVESAILKLLEKATYDRFKSAEDLRATLLQQRKALQSEQTRENLVDLTNPKVKLRFTLPALVISIGVVFGTVWTLTQVFDGLPVDGGAPTLIEIPDLTGSEQAQALEDLQNLGFKVGIENSADASVPAGSVIRTQPPSNTIVNPDS

SEQ ID NO: 126566 - protein, 254 aa, Unknown
  Bacterial polypetide isolated from the Sargasso Sea
PSGFIPGVTPLPAQFGDYTLLDEIGRGGMGIVYRAIQESLDRTVAVKMLLRRDLANHSDLARFRSEAEAAARLDHPGIVSIFEVGECDGTPFYSMRFIEGTTLAHRLKEGDIHPREGAELLAKVADAIEAAHSRGILHRDIKPSNILIDTAGEPHVSDFGLAKRLEADHAVTHTGAILGTPCYMSPEQAAGSRGESGPSSDVWSLGAILYQMLTGRPPFQASSPMDTLLAVLESDPPVPRSMNRPVNRDLEMIA

SEQ ID NO: 126567 - protein, 207 aa, Unknown
  Bacterial polypetide isolated from the Sargasso Sea
AGVIHRDLKPANVIVGKFGEVYVLDWGLAKVLGSPSIDRKDVSEEPPDAELSLTPAGRHYGTPLYMSPEMAEGSVLIDERTDVFSLGIILFEILTLRPFLEGEDILEIKDKILNQPYPMPRELSGKHIPKDLEAVCIKALKRNKRKRYAKVSLLLEDLQRYRHGEEVSVYWYSGWEKLVRWNSRHAYSIIALLSALTGAGLWALFGP

SEQ ID NO: 126568 - protein, 274 aa, Unknown
  Bacterial polypetide isolated from the Sargasso Sea
MVHRESTLMRKLCHPNIIRVIEVVETALAYCIVAEHAGGGELLDYIVAHGQLNESETRKFVGQLVSAVSHMHECGVVHRDLKAENLLLDDNLNIKIIDFGMGNTCERGMLMKTLCGSPAYTAPELLAGENYSPAVDVWSLGINMYAMLTGKLPYSSSNITELHALMMETRYKEPEATEQCLHLLARFLDVDPAARIQLDEAMRHPWLTRPLTSGAGAPTGRVPRQRPIDPGSLDPEVVAEAVELGLSRDSVLSSVASRACDRHSATYHFLLARQ

SEQ ID NO: 126569 - protein, 293 aa, Unknown
  Bacterial polypetide isolated from the Sargasso Sea
MKTQKPCIGILTSGGDCPGLNAVIRATVLSSERLGYSCIGFLRGYEGLVDPVEYMPLTPANTSGILTQGGTILGSTNRGRFSATTGKDNRLAIDPDLLTGVAQTVRQLGVCGLICIGGDGSLAIADQFHQFGIPVVGVPKTIDNDLGATAFTFGFDSAVSAATDALDRLRTTAASHERIMVLEVMGRHAGWIALHAGLAGGADVILLPEISWNFESVCRKILDRESVGRRDTLLVVAEGAILPTGDMVCMASTKVNEQVKLGGIGQVVAGEIAQRLDRQTRTVVLGHLQRGGS

SEQ ID NO: 126570 - protein, 280 aa, Unknown
  Bacterial polypetide isolated from the Sargasso Sea
PDAVLSVLMQVAAALDCAEGGGVVHRDIKPENLLLTPRGEVKVADFGLARVLHDNLELTQTGMALGTPLYMSPEQSHGGKVDVRSDLYSLGATAYHLVAGQPPFRGTTGVAVALAHAKEPLEPLADVRPDFPVAVAGVIERLLEKDQGKRFQTSSALLDAVEPLIVERAPPSRTVAMPLSWNPEAAFGKKFSKDRLAKSTFSASQTYTETSQSAGTVASATAMLKASLDREEIDKIISRRVWAVTGALAAFGFAVGFFIGRRRLLPPGRRPPARPQQQEE

SEQ ID NO: 126571 - protein, 73 aa, Unknown
  Bacterial polypetide isolated from the Sargasso Sea
MYSYRLCNGGELFDKIAEEQYFSEQDAAKIIKQILSAINYCHQKNIVHRDLKPENLLMNRDVSDPKITIIDFG

SEQ ID NO: 126572 - protein, 193 aa, Unknown
  Bacterial polypetide isolated from the Sargasso Sea
MWSQVSHPNILQFVGLLWTGTTLQMITEFAPGGTVEALLDGADWPAPLTMDQRAQCAIDVCLAMEYLHSRRIIHRDLKPENLLLSALGSVIVADFGLARVLAGEVLRESPRRQPGVSHALSRGNSAEPYTTHEETGADWVAAAVHSVPSKMGTVGTVDYMAPELCNGDDYDESVDVFSFGLILGCRLLTQDTV

SEQ ID NO: 126573 - protein, 393 aa, Unknown
  Bacterial polypetide isolated from the Sargasso Sea
MSESYADYDNRTPLHVAASEGSFKVADWLVKSGVPVNPVDRWGSTPLESAVYGNHGDLVKMLAKNGGKIKDRVSGTFLPLEESHLSGAAHMQLPVDTMAWEIPDGEFSNVEEIGAGAFGVVYSGTWRGTKVCLKQLHKHLNADEVAQAEFRLELKIMQQLHHPHIVQFLGTTVSAEGLTSIVSEYMAGGSLETLFRAEELLPLRQSLKMALDCARGMAYLHGRTPLPVIHRDLKPGNLMLTKMRTLKIGDFGLSKTLSVRNKLPQEMSQAFNMTGETGSYRYMAPEVFRHEFYGPAVDVYAASMIYYQLFSFQQPFSGRNPVDACRAASLENLRPPIRGGFMPDELSTLVTRMWDPLVKKRPDFLEIITILEPLAEKYAESPDKQPGCGCVVS

SEQ ID NO: 126574 - protein, 43 aa, Unknown
  Bacterial polypetide isolated from the Sargasso Sea
IYFENTAEERELMGISDTMLRISVGIEDTQDLIADFDTALNTI

SEQ ID NO: 126575 - protein, 134 aa, Unknown
  Bacterial polypetide isolated from the Sargasso Sea
AVILQEFDTNIKKLTKHIKDQRTSGKTGCILIVSEGAYNAEGGDGLIKELNKISNFDLRITKLGHIQRGGNPSAVDRVLASRLGASAIDKLLQGSKNCVISQPKDKIELIHFDKLVAKHQLDMKDYYELIFKLA

SEQ ID NO: 126576 - protein, 297 aa, Unknown
  Bacterial polypetide isolated from the Sargasso Sea
AVLPDGSIFTDLKSLRKNNTGYDLKQLFIGAEGTLGVITKVSLRLSSSPKREISSMVSLKSVDDAINLLKETKKRFGDNVTAFEFISQSCLVAINDFLSHIKLPLGHEDSWQVIFEIINHSEDDLSEFLEKKLSEDLIKNALIAKNEKERNDFWLVRHSISEAEKLSGRGVHHDISLPIKKIPEFLQTTIPAMEKVAGKSIVYTFGHLGDGNLHFTKKQPEDMDGDQFMRFSKEINAVVHENAEFLGGSFSAEHGIGSKLKEDLIKYSDPTKVDLMKKIKKTLDPKNIMNPDKLIDI

SEQ ID NO: 126577 - protein, 251 aa, Unknown
  Bacterial polypetide isolated from the Sargasso Sea
MTRHRTVSQHQSLQPLLERLSPPLSGWRRLVIVMGQLGDFDSMEYAQALVPRLSELEQAGISLQAIAIGDQTGADRFCGFTGFPRQALEVNSSSTLHEALGLYAGLKLPGGPWPGFLLMCAGIGSPGTLQEVLRGYTGDRRAAAIFGDDDMVKAWPLPAFPASMFARAGGCGFQRPFELATKRLSNMGEVLSNWRTYVPVDDHIAQRGGTFLIDADGSLLYEWRETHLLGFADDMAVPLAFLDPYLSVNYS

SEQ ID NO: 126578 - protein, 161 aa, Unknown
  Bacterial polypetide isolated from the Sargasso Sea
IFFIEVMGRNSGHLAIHAGNATGAELILIPEINIKNLDSLVQKIKKINIKKKSIIIIYAEGCNLGPVDKITNYVQKKMKNSNVRYSILGHIQRGGSPCEKDRINSSLLGYYSVKEIIKKDKSKMVGIINDKLIVQDLKLSIKRKKEINKDLFKITEIINNY

SEQ ID NO: 126579 - protein, 91 aa, Unknown
  Bacterial polypetide isolated from the Sargasso Sea
MLVAITACAVCLVIALIRTMLGPTAFDRVLAVNAIGTLIILGIALHGFIMERPEFVDIALLYAILNFIGTFAVLKLFSTGSLGDAPPSRKK

SEQ ID NO: 126580 - protein, 59 aa, Unknown
  Bacterial polypetide isolated from the Sargasso Sea
MSSKKIGVLTSGGDCGGLNAAIRSIFYRAKNKYNMEVYGIRDGTAGLIKRPGRCNTINI

SEQ ID NO: 126581 - protein, 254 aa, Unknown
  Bacterial polypetide isolated from the Sargasso Sea
MLTEGSIKTPEQISLMREAGDIVARAMKKCGETLQSGVTTGEIDNFLRGYIENEGAKPAFLGLYGFPATACISINEEIVHGIPGERKLNKDDLISIDCGAIVGGMYSDHARTFIIENSGDEVRNNIVNVADKALQIGIENALPGNRIGVISNAIENYISSMGFGTVREYVGHGIGSELHEPPSVPNFGQKDQGALLRVGMAIAIEPMVTEGNWQTKVLNDNWTVVTKDGKLSSHFEDTILITENGPEILTKVNN

SEQ ID NO: 126582 - protein, 467 aa, Unknown
  Bacterial polypetide isolated from the Sargasso Sea
MKKHIDNLKKLVGDSNALDSQDDIHPFLEDWRGHIKGSTPLILFPNNSDDVQNIVHYCYQNDIKIVSQGGNTSLCGANVPNSSDHRLEIVINTSKMNRVIEVDSFNQSIIVESGCILQNIQNTAEDHGLLFPLSLSAEGTCQIGGNVSTNAGGVNVLKYGMARDQVMGIEAVLPDGSIFTDLKSLRKNNTGYDLKQLFIGAEGTLGVITKVSMKLSSSPKREISSMVSLKSVDDAINLLKETKKRFGDNVTAFELISQSCLVAINDFLSHIKLPLGHEDSWQVIFEIINHSEDDLSEFLENKLSEDLIKNALIAKNEKERNDFWLVRHSISEAEKLSGRGVHHDISLPIKKIPEFLQTTIPAMEKVAGKSIVYTFGHLGDGNLHFTKKQPEDMDGDEFVRFSKEINTVVHENAEFLGGSFSAEHGIGSRLKEDLIKYSDPTKIDLMKKIKKTLDPKNIMNPDKLIDI

SEQ ID NO: 126583 - protein, 467 aa, Unknown
  Bacterial polypetide isolated from the Sargasso Sea
METHINKLKTIVGNTNALHRDEDIQPFLEDWRGQIKGSTPLILFPKNTNDVQKIVSYCYENDIKIVSQGGNTSLCGANVPNSSDHKLEIVINTSKMNKVIEVDPFNQSIIVESGCILQNIQNTAEDHDLLFPLSLSAEGTCQIGGNVSTNAGGVNVLKYGMARDQVMGIEAVLPDGSLFSDLKSLRKNNTGYDLKQLFIGAEGTLGVITKVSLRLSSSPHREISSMVSVEKVDDAITLLKETKKRFGENVTAFEFISQSCLVAINNFLNHIKLPLGYNDSWQIIFEVINHDEDSLSEFLEEQVNNGVVTNGLIAKNEKERNDFWLVRHSISEAEKLSGRGVHHDISLPIKKIPEFLETTIPAMEKVAGKSIVYTFGHLGDGNLHFTKKQPEDMDGDDFMNFSKEINAVVYENAESLGGSFSAEHGIGSKLKNDLVKFSDPIKLDLMKKIKKTLDPKNIMNPDKLIDT

SEQ ID NO: 126584 - protein, 189 aa, Unknown
  Bacterial polypetide isolated from the Sargasso Sea
MSSKKIGVLTSGGDCGGLNAAIRSIFYRAKNKYNMEVYGIRDGTAGLIKRPVDAIQLTYKTFAGYLLRQGGTFLGSTNKGNPFKIPTEDGKHVDKSKEIIEGYHSMKLDGLIIIGGDGSMQILKKLAKDGDMKIVAIPKTIDNDVGATESSIGFHTAVDVATQALDNLQSTAASHRRSMILEVMGRDTG

SEQ ID NO: 126585 - protein, 164 aa, Unknown
  Bacterial polypetide isolated from the Sargasso Sea
MYRPLRWKKCKINGFTFQTVCSTFHTIRTKPTEKDFIVSKRVAVLTSGGDAPGMNACIRAIVIACKKRNYDLIGYLHGYNGLIKQESISLSLDSTHNLIQQGGTVLHSARCKAFTEEAGLKQAAANLSEAGVDALLVIGGDGSFRGATRLADHYHGQIIGIPGT

SEQ ID NO: 126586 - protein, 204 aa, Unknown
  Bacterial polypetide isolated from the Sargasso Sea
DVATNALDMLQPTAASHRRAMILEVMGRDAGHIALNAGIAGGADVILIPEIPYSIKGIANHIDQIRSNGRNHALIVVAEAVKKEDGKKATVKFVDGEVRLGGIGSYLGDEIYKLTDAETRVTVLGHVQRGAQPTHRDRLIASAFGVKAVDLIANAKYNRVVVWKDRSVQDVSLDDIAGKSQTLSKNDPMIEVAKGLGIYIGEFN

SEQ ID NO: 126587 - protein, 193 aa, Unknown
  Bacterial polypetide isolated from the Sargasso Sea
PTAASHRGVMILEVMGRDAGHIALNAGIAGGADVILIPEIPYSLKSIAKHIENIRSTGRNHALIVVAEAVLKEDGSKAIVKYIDGQVRLGGIGSYLGDKIYKITKSETRVTVLGHLQRGAQPTHRDRLIASAFGVYAVDLVAQEKFNRIVVWQNRGVADINLDTIAGKSQKINKEDHLIKVAQGLGIYLGEII

SEQ ID NO: 126588 - protein, 128 aa, Unknown
  Bacterial polypetide isolated from the Sargasso Sea
MQKQLKKKNGKKVTVKHIDGQVRLGGIGAYLGDEIYKLTDAETRVTVLGHVQRGAQPTHRDRLIASAFGVKAVDLIAKKKFNRVVVWQDRSVKDVSLNDIAGKSQTLSNNDPLIKVAKGLGIYIGEFN

SEQ ID NO: 126589 - protein, 302 aa, Unknown
  Bacterial polypetide isolated from the Sargasso Sea
PQKVAADQLVADQVDVLHTIGGDDTNTAAADLAAYLAENDYDLRVIGMPKTIDNDVYPIRQTLGAWTAAEQAANYFANVVAEHNSSPRMLIIHEIMGRHCGWLAAATAKEYHGRLKTKPWLPEIGLSRERHDVHAVYLPELEIDLDAEAARLSKIMDEHGNVNIFLSEGAGVDAIVAAKEAAGEEIVRDAFGHVQLDFINPGQYFAKQFADKIKAEKVLVQKSGYFSRAAAASVKDLNLIKSCVDKAVESSLAGLSGVVGHDEDKQGIMRACEFARIKGGKPFDSNQDWFDELLSELGNRKA

SEQ ID NO: 126590 - protein, 260 aa, Unknown
  Bacterial polypetide isolated from the Sargasso Sea
MKIAFLTAGGIAPCLSASIGALIQRYNYTSPDAELIGYLNGYRGLLIGESLTFSSTVKEQYSTLYDFGGSPIGNSRVKLTNVEDCIKRGYVQNGENPLKVAADQLTKDGINILHTIGGDDTNTMAAQLSFYLKENGYDLTVVGLPKTVDNDVFPVSQTLGAWTAAEQGAIFFENVANENTTSNRQLIIHEVMGRHCGWLTAQTARDYRARLAQRKFLPEIMVSKDRWDVDAIFVPEQSMDLDAEIERLKKVMDKKDGVNI

SEQ ID NO: 126591 - protein, 90 aa, Unknown
  Bacterial polypetide isolated from the Sargasso Sea
TNSETRVTVLGHVQRGAQPTHRDRLIASAFGVYATDLIAKKKFNRVVVWKDRGVQDLPLAQIAGYSKTIQRNDPLIKVAKGLGVYIGEYN

SEQ ID NO: 126592 - protein, 222 aa, Unknown
  Bacterial polypetide isolated from the Sargasso Sea
MKRIGIVTSGGDCGGLNAAVRSIFYRANDKYNLEVYGILEGTVGLMNRPVSYTKLDYNTFSGNLLRQGGTFLGTTNKGNPFKFPMSDGSFKDRTIEIISGYHELGLDGLIVIGGDGSMKILKNIADKGNLNIVAIPKTIDNDVGATESSIGFHTAVSVATNALDNLQFTAASHNRTMILEVMGRDAGHIALNAGIAGGADVILIPEIKYSIDGIIKKLKKNE

SEQ ID NO: 126593 - protein, 206 aa, Unknown
  Bacterial polypetide isolated from the Sargasso Sea
AVDVATNALDMLQPTAASHRRVMILEVMGRDAGHIALNAGIAGGADVILIPEIQYSIKSIADHIEKLRSKGRNHALIVVAEAVKKENGKKATVKYVDGEVRLGGIGNYLGDEIYKITDSETRVTVLGHVQRGAQPTHRDRLIASAFGVYAVDLIAKKKFNRVVVWKDRGVQDLMLSQVAGYSKTVQKNDPLIKVAEGLGIYIGETN

SEQ ID NO: 126594 - protein, 183 aa, Unknown
  Bacterial polypetide isolated from the Sargasso Sea
ILEVMGRDAGHIALNAGIAGGADIILIPEIKYSLKSIANHIDKLRKSGRNHALIVVAEAVKKENGLKATVRYIDGQVRLGGIGAYLGEKIYKITKSETRVTVLGHVQRGAQPTHRDRLIASAFGVYAVDLVAKEKFNRIVVWQNRGVTDISLDSIAGKSKTVRIDDPLIKVAQALGIYVGEFN

SEQ ID NO: 126595 - protein, 194 aa, Unknown
  Bacterial polypetide isolated from the Sargasso Sea
STYCCKSSTSHDFRSYGKRCRAYCLNSGIAGGADVILIPEIPYSLKKIAKHIEKIRASGRNHALCVVAEAVKKEDGTKATVKFVDGQVRLGGIGSYLGDEIYKLTDAETRVTVLGHVQRGAQPSHRDRLIATAFGVYAVDLVAKNKFNRIVVWQNRGVTDISLDSVAGKAKTVSVNDPLIKVAKALGIYVGEIN

SEQ ID NO: 126596 - protein, 151 aa, Unknown
  Bacterial polypetide isolated from the Sargasso Sea
SIKGIASHIEKLRANGRNHALIIVAEAVKKENGSKATVKFLDGEVRLGGIGSYLSDEIYKYTKAETRVTVLGHVQRGAQPSHRDRLIASAFGVYAVDLIAKEKFNRIVVWQNRGVTDIDLDSIAGYSKTININDPLIKVAEGLGIYIGDST

SEQ ID NO: 126597 - protein, 162 aa, Unknown
  Bacterial polypetide isolated from the Sargasso Sea
ADVILIPEIPYSITGIANHIDNIRSKGRNHALIVVAEAVKKEDGKKATVKFVDGEVRLGGIGAYLGDEIYKLTDAETRVTVLGHVQRGAQPTHRDRLIASAFGVKAVDLIANDKYNRVVVWQDRSVKDVALDNIAGKSQTLSKSDPLIEVARGLGIYIGEFN

SEQ ID NO: 126598 - protein, 267 aa, Unknown
  Bacterial polypetide isolated from the Sargasso Sea
FPILYDFGGSPIGNSRVKLTNIKDCVKKGYVKEGGDPLEIAANQLTKDKVDILHTIGGDDTNTMAAQLSFYLKKNGYELTVVGLPKTVDNDVFPVSQTLGAWTAAEQGSIFFENIVNENTTSTRQLIIHEVMGRHCGWLTAKTARDYRDRLKNRNFIPELMVEKSKWDIDAIYIPEQDFDFQYEAERLKNLMDKKDNVNIFLSEGAGQEAIIREMEEKGENVPRDAFGHVRLDEINPGQWFAKQFSSELKAEKTLVQKSGYFARSAK

SEQ ID NO: 126599 - protein, 170 aa, Unknown
  Bacterial polypetide isolated from the Sargasso Sea
LNAGIAGGADVILIPEIKYSIKGIANHIDNIRSKGRNHALIVVAEAVKKEDGRKATVKFVDGEVRLGGIGAYLGDEIYKLTDAETRVTVLGHVQRGAQPTHRDRLIASAFGVKAVDLIANDKYNRVVVWQDRSVKDVALDNIAGKSQTLSKSDPLIEVAKGLGIYIGEFN

SEQ ID NO: 126600 - protein, 203 aa, Unknown
  Bacterial polypetide isolated from the Sargasso Sea
VATNALDMLQPTAASHRRVMILEVMGRDAGHIALNAGIAGGADIILIPEIRYSIKSIADHIEKIRSKGRNHALIVVAEAVKKENGKKATVKYVDGEVRLGGIGNYLGDEIYKITDSETRVTVLGHVQRGAQPTHRDRLIASAFGVYAVDLIAKKKFNRVVVWKDRGVQDLMLSQVAGYSKTVQKNDPLIKVAEGLGVYIGETN

SEQ ID NO: 126601 - protein, 179 aa, Unknown
  Bacterial polypetide isolated from the Sargasso Sea
MDAIDKIRDTASSHHRHFIIEVMGRSAGFLAAEVGIAGGAEYVLIPERPIEIPDLITLLKATSHKKSSSIVIVAEADQPGRSMAIADEIKRMNNLEYKVCILGHTQRGGSPTVTDRKVGSMMGVKAVEGLLSQGVGKMVAIKDSQYLYTDFPKAEHAQRFFENFDLLKVNDILCGVDSS

SEQ ID NO: 126602 - protein, 331 aa, Unknown
  Bacterial polypetide isolated from the Sargasso Sea
NFGGSPIGNSRVKLTNVEDCVKKGYVKEGEDPLEIAANQLVKDGIDILHTIGGDDTNTMAAALAKHLDESGRNLTVVGLPKTVDNDVIPVKQTLGAWTAAEQGAIFFDNIANENTTSRRQLIIHEVMGRHCGWLTAGTAYEYRKLLENRKYLPELFVSKERWDVHAVYIPEVDVDFQKESKRLKKCMDENDCVNIFLSEGAGMDTIVRELESQGTEVPRDAFGHVRLDDINPGQWFAKQFAKALDADKTLIQKSGYFARSAKPGVRDLELIKKSAFMAVDFALKGESGLVGLDENNNGELGLIDLQLIEGGKEFDTSQKWFTEMLNDIGQL

SEQ ID NO: 126603 - protein, 222 aa, Unknown
  Bacterial polypetide isolated from the Sargasso Sea
MSEHWNGQIIGIPGTIDNDIAGTDATIGYYTAIDTAMSSIDKVRDTADAFERIFLVEVMGRNAGFLALNAALSSAADYVVVPEFFTSAEAEIQKIVKQIKAQRRLKGPVSFIVVVAENVWPNGLLGLTEALQQYDINDVRPVTLGHVQRGGSPVAQDRLLATTLGEFAISLVGKDVTNVMVGEVNQRPVTVPLSDTWENTKPLNEARVDAMRTLMNERYRSE

SEQ ID NO: 126604 - protein, 287 aa, Unknown
  Bacterial polypetide isolated from the Sargasso Sea
TTSKGNPFKFPMPDGKYKDRSQDIIDGYKELGLDGLIVIGGDGSMSILTEIAKRGDLNIVAIPKTIDNDVGATESSIGFNTAVNVATQALDNLQTTAASHQRTMILEVMGRDAGHIAINAGIAGGADVILIPELNYSIKGIVNKLTEMKNRGIVHSLIVVAEAVKTENGKSYTVEYADGQKRLGGIGNYLSEEIMKSTDIECRVTSLGHVQRGAPPTPRDRILASAFGVYAVDLIAKGKYGRMVAWRDRKVVDVPISEGISTYKVVDRSDPLIETALALGVYVGDIK

SEQ ID NO: 126605 - protein, 332 aa, Unknown
  Bacterial polypetide isolated from the Sargasso Sea
NTYQMEVMGIRDGTVGLMQRPVAFVPLDYQTFSGSLLRQGGTFLGTTSKGNPFKFPMPNGGYKDRSQDIIDGYKELDLDGLIVIGGDGSMSILTEIAKRGDLNIVAIPKTIDNDVGATESSIGFNTAVNVATQALDNLQTTAASHQRTMILEVMGRDAGHIAINAGIAGGADVILIPELNYSIKGIVNKLTEMKNRGIVHSLIVVAEAVKTESGKSYTVEYADGQKRLGGIGNYLSEEIMKSTDIECRVTSLGHVQRGAPPTPRDRILASAFGVYAVDLIAKGKFGRMVAWRDRKVVDVPISEGISTYKVVDRSDPLIETALALGVYVGDIK

SEQ ID NO: 126606 - protein, 155 aa, Unknown
  Bacterial polypetide isolated from the Sargasso Sea
MGKGTGHIALNAGIGSGAEEILIPEHNMGIERLLDSLSKSEKSGKTSSIIIVTEGEKIGKNVFEYASYIEKNLPEYEVRVTVLGHIQRGGSPSSFDRVLASRMGVYSVDCLIEGISNVMIGIKDDEMVCVKVDKAIKSRGEINKNLIRVFDIISI

SEQ ID NO: 126607 - protein, 108 aa, Unknown
  Bacterial polypetide isolated from the Sargasso Sea
QVRLGGIGAYLGDEIYKLTDAETRVTVLGHVQRGAQPTHRDRLIASAFGVKAVDLIAKKKFNRVVVWQDRSVKDVSLNDIAGKSQTLNNNDPLIKVAKGLGIYIGEFN

SEQ ID NO: 126608 - protein, 97 aa, Unknown
  Bacterial polypetide isolated from the Sargasso Sea
GDQIYKLTDAETRVTVLGHVQRGAQPTHRDRLIASAFGVKAVDLIANEKYNRVVVWQDRSVKDVSLEDIAGKSKTLSSSDPLIKVAKGLGIYIGDLN

SEQ ID NO: 126609 - protein, 396 aa, Unknown
  Bacterial polypetide isolated from the Sargasso Sea
MKVAILTAGGLAPCLSASIGALLDNYSKEMPEAELFGYLYGYQGLLKGDLFQFSTVDIDVSQLFEFGGSLLGNSRVKLTNTEDCIRRGLVADGESPLEVAAQQLQKDEINILHTVGGDDTNTMAAALSNYLSDNNYNLTVIGLPKTVDNDIIPIKQSLGADTAAHQGSIFFKNIVNENTSNPNTFIIHEVMGRHCGWLTAATARKYRSYLLEKEFNRKVLLDRKKWDIDAIYIPEIKIDLKKEASRLKQAMQDKGNVNIFLSEGSCQEEILSDMKRNNQQIEKDAFGHVRLDKINPGEWFSNQFSSKIGAEKTLVQKSGYFSRSAAPNNFDLDLIKQSAKYAVQCAINSQSGVVGIDDEDNDELSIINFDRIKGGKPFDHSCTWFQEMLHDIGQID

SEQ ID NO: 126610 - protein, 376 aa, Unknown
  Bacterial polypetide isolated from the Sargasso Sea
LSQSHIMPRVGILTSGGIAPCLSASIGGLIEKYNEISPESEIIGYLHGYRGLLLGNSIKFSDKVKQNFSALYNFGGTPVGNSRVKLTNIEDCIKKGYVSENQDPLEVAAQQLEKDGIDILHTIGGDDTNTMAAALAKHLETSGKKLTVVGLPKTVDNDVIPVKQTLGAWTAAEQGARFFQNIVNENTTSRRQLIIHEVMGRHCGWLTAGTAYEYRKSLENMTFLPELNMSKERWDVHAVYIPEIDVDFQKESQRLRKCMDENDCVNIFLSEGAGMDTIVREFESQGQEVPRDAFGHVRLDDINPGQWFAKQFADALDADKTLIQKSGYFARSSKPGGRDLELIKKSAFMAAEFALNRKSGLVGLDENNNGELGLID

SEQ ID NO: 126611 - protein, 50 aa, Unknown
  Bacterial polypetide isolated from the Sargasso Sea
MKRIGVLTSGGDAPGMNACVRALVLTAHANELEVIGFQRGFNGVIEQQYQ

SEQ ID NO: 126612 - protein, 395 aa, Unknown
  Bacterial polypetide isolated from the Sargasso Sea
MKIAFLTAGGIAPCLSASIGALIEKYNEIAPEAEIIGYLNGYRGLLLGKSISFPNSIKKDFEILYDFGGSPIGNSRVKLTNIDDCVKKGYVKEGQDPLKVAAEQLKNDGVNILHTIGGDDTNTMAAQLSSYLNDNGYNLTVVGLPKTVDNDVYPIKQTLGAWTAAEQGAIHFENIVNENTTSTRQLIIHEVMGRHCGWLTARTAYDYRERMRSRRFLPELLIDEKRWDLDAIYIPEVDFDIHHEVVRLKKIMDEKDGVNIFLSEGAGQEMIIREMENKGQNIPRDAFGHVRLDEINPGQWFAEQLSNELNAEKTLVQKSGYFSRSAKANQRDLELIKSSAYFGAQNAIDHISGVAGIDDMDGELKLIQFSRIKGGKPFNIKEDWYQKMLEEIGQK

SEQ ID NO: 126613 - protein, 281 aa, Unknown
  Bacterial polypetide isolated from the Sargasso Sea
FEGSLMRMGGTFLGSNNKGNPFKKIIKNGKKIDSSDLVIEGFKKLGIDALIGIGGDGSLKILQTITKKGNINFVGIPKTIDNDVKHNELSIGYDTAVDVATNALDMLQPTAASHRRVMILEVMGRDAGHIALNAGIAGGADVILIPEIQYSIKSIADHIEQLRSKGRNHALIVVAEAVKKENGKKATVKYVDGEVRLGGIGNYIGDEIYKITDSETRVTVLGHVQRGAQPTHRDRLIASAFGVYAVDLIAKKKFNRVVVWKDRGVQDLMLSQVAGYSKTVQ

SEQ ID NO: 126614 - protein, 107 aa, Unknown
  Bacterial polypetide isolated from the Sargasso Sea
MNTIAVLTSGGDAPGMNSSIRAVVRSCAHYNKKCIGIIRGYSGLIENDTKVLNTRSVRGIINRGGTFLYSARCEEFKSIEGRKKAYENLKAMGADGLIIIGGDGSFT

SEQ ID NO: 126615 - protein, 264 aa, Unknown
  Bacterial polypetide isolated from the Sargasso Sea
IINQGGTILKSARSKEFMTKEGRQKAYDNCVKYGIDALVCIGGDGTFTGAKIFNEEFGIRVIGVPGTIDNDIFGTDNTIGYDTALNTAMDAIDKIRDTATSHNRVFFVEVMGRDAGFIALNSGLATGALDILIPERKDSMDELFATFRNAEKTGKASSIVVVAEGEKLANIYELAEQTKTEFPDYDIRVAILGHIQRGGSPSCADRVLASRLGYGAVVGLMDGQNNVMAGMRSNDIVYTPIEEAIKKHNEINKDLLLISEILAI

SEQ ID NO: 126616 - protein, 253 aa, Unknown
  Bacterial polypetide isolated from the Sargasso Sea
RCLEFRTKKGRSKAKNTLDKYNIDSLVVIGGNGSLTGALLLEEEHGIKTIGIPGTIDNDLVGTRCTLGFDTALNTAVNAIDKIRDTASSHNRLFFIEVMGKGSGHIALNAGIGAGAEEVLIPEQGMGLDRLLDSLKKSEKSGKSSSIIVVSEGDKIGDNVFSFSSHIEKNLPHYEIRVSILGHIQRGGSPTSFDRVLASRMGVHAVDCLISNKSKVMVGIIDDKMVTVPMEKAIKGGQQLDKDLVRVCDIISI

SEQ ID NO: 126617 - protein, 298 aa, Unknown
  Bacterial polypetide isolated from the Sargasso Sea
GTFLGSNNKGNPFGTIEKDGKKIEVSKIIIDSFKKLELDALIGIGGDGSLKILKSLTKKGNIKFIGIPKTIDNDVKHNELSIGYDTAVDVATNALDMLQPTAASHRRAMILEVMGRDAGHIALNAGIAGGADVILIPEIPYSIKGIANHIDQIRSKGRNHALIVVAEAVKKEDGKKATVKFLDGEVRLGGIGAYLGDEIYKLTDAETRVTVLGHVQRGAQPTHRDRLIASAFGVKAVDLIAKQKYNRVVVWKDRSVQDVALDDIAGKIPTLSKTDPLIEVAKGLGIYIGEFIKNLPIF

SEQ ID NO: 126618 - protein, 292 aa, Unknown
  Bacterial polypetide isolated from the Sargasso Sea
AVRAVVRTAAFYKLECIAIYKGYQGLIDDNTQRMNPRSVNNIINKGGTILKSARCLEFHSSEGREKAFQTIQRHRIDALVVIGGDGTFTGAMIFQSEFNIPVIGIPGTIDNDIFGTSHTIGYDTALNTVIDAIDKIRDTAISHNRLFFVEVMGRDAGHIALNTGIGAGAEEILIPEENMGLERLLESLSRSEKSGKSSSIVVIAEGDKTGKNVFEIAEYVEKNMPNYEVRVSVLGHMQRGGRPSCFDRVLASRMGVQAIESLKEGKSNVMVGLKEDEMILTPLDKAIKGKSE

SEQ ID NO: 126619 - protein, 153 aa, Unknown
  Bacterial polypetide isolated from the Sargasso Sea
MTSKIKKIGVLTSGGDSPGMNAAVRAVVRSAEFHKIHCFGIYKGYEGLISDDIKKLNARSVKNIVNKGGTILKSARCLEFKTSEGRLKAKQTLDKYEIDSLVIIGGNGSLEGGKIFEEEHGIKVVGIPGTIDNDLAGTRCSLGYDTALNTAVE

SEQ ID NO: 126620 - protein, 281 aa, Unknown
  Bacterial polypetide isolated from the Sargasso Sea
NKVNVYGIQYGYQGLIENIIKILTNTDVGNTIHLGGTILKTARSDEFRTKNGRKKAYSNLIKNKIDGLIILGGDGSLTGAKVFYEENNFPIIGIPCTIDNDLYGTDYSIGLASARETIVDAVDKIRDTAASHERFFIVEVMGRESGFLALESGVAAGAEMILIPENNNNNIDSIINDILKINEEKKSIIIIYAEGCNLGSANKLANQIKEKLPESKVRYSILGHIQRGGRAVPSDRILGTQLGCKSVNYLLKGEKNKMIGIINNKDNLISFEEMLKNKKRN

SEQ ID NO: 126621 - protein, 306 aa, Unknown
  Bacterial polypetide isolated from the Sargasso Sea
VYKRAVIKKIAILTSGGDCAGLNAVIRAVTLRAHNKYKWEIYGIKDGTLGLLKEPLDILKLEPNNFEGNLMRMGGTFLGSNNKGNPFKKFIRNGKKIDSTDIIIEGFKKIGIDALIGIGGDGSLKILQTLTKKGNINFVGIPKTIDNDVKNNELSIGYDTAVDVATNALDMLQPTAASHRRAMILEVMGRDAGHIALNAGIAGGADIILIPEIPYSIKSIAKHIEELRAKGRNHALIVVAEAVKKENGKKATVKYVDGEVRLGGIGNYLGDEIYKITNSETRVTVLGHVQRGAQPTHRDRLIASAL

SEQ ID NO: 126622 - protein, 180 aa, Unknown
  Bacterial polypetide isolated from the Sargasso Sea
MPKEIKIVGVLTSGGDAPGMNAAVRAVVRACEYNEIGCYGIYQGYHGLVNENITKMSARSVKNIINKGGTILKSARCEEFRSKEGREKAFATIKKNNIDALIVIGGNGSLEGAAIFQKEYGVPFVGIPGTIDNDLEGTRATLGYDTALNTVSEAIDKIRDTAISHNRLFFVEVMGKGTGH

SEQ ID NO: 126623 - protein, 214 aa, Unknown
  Bacterial polypetide isolated from the Sargasso Sea
YMGAKRLTEMASPCIGLPGTIDNDIKGTDYTIGYFTALGTVVEAIDRLRDTSSSHQRISIVEVMGRYCGDLTLAAAIAGGCEFVVVPEVEFSRDDLVAEIKAGIAKGKKHAIVAITEHMCDVDELAHYIEKETGRETRSTVLGHIQRGGSPVPYDRILASRMGAYAIELLLAGHGGRCVGIQNEQLVHHDIIDAIENMKRPFKGDWLDCAKKLY

SEQ ID NO: 126624 - protein, 275 aa, Unknown
  Bacterial polypetide isolated from the Sargasso Sea
MGSNNKGNPFKKFYSNGKKIDSTDLIIEGFKKIGIDALIGIGGDGSLKILQSLTKKGNINFVGIPKTIDNDVKNNELSIGYDTAVDVATNALDMLQPTAASHRRVMILEVMGRDAGHIALNAGIAGGADIILIPEIPYSIKSVAKHIEDLRVKGRNHALIVVAEAVKKENGKKATVKYVDGEVRLGGIGNYLGDEIYKITNSETRVTVLGHVQRGAQPTHRDRLIASAFGVYAVDLVAKKKFNRVVVWKDRGVQDLPLNQIAGYSKTIQKNDPLI

SEQ ID NO: 126625 - protein, 262 aa, Unknown
  Bacterial polypetide isolated from the Sargasso Sea
RGFKKLGIDALIGIGGDGSLKILQSITKKGNINFVGIPKTIDNDVKHNELSIGYDTAVDVATNALDMLQPTAASHRRVMILEVMGRDAGHIALNAGIAGGADVILIPEIQYSIKSIADHIEKLRSKGRNHALIVVAEAVKKENGKKATVKYVDGEVRLGGIGNYLGDEIYKITDSETRVTVLGHVQRGAQPTHRDRLIASAFGVYAVDLIAKKKFNRVVVWKDRGVQDLMLSQVAGYSKTVQKNDPLIKVAQGLGIYIGQTN

SEQ ID NO: 126626 - protein, 48 aa, Unknown
  Bacterial polypetide isolated from the Sargasso Sea
MPKEIKIVGVLTSGGDAPGMNAAVRAVVRACEYNKIGCYGIYQGYQGL

SEQ ID NO: 126627 - protein, 212 aa, Unknown
  Bacterial polypetide isolated from the Sargasso Sea
GEEFNFPVVGIPGTIDNDLFGTSHTLGYDTALNTVMEAIDKIRDTAISHHRLFFVEVMGADAGYIALNSGLAIGAQEILIPEVNMSFDNLINSLKKSKTAGKTSSIIVVAEGDKTGKNVFELASKIEKTLPKYETRVSVLGHIQRGGTPSCFDRVLGTQLGVKAVESLIEGKHGSMVGIQNGKIVFTPLNKALKGKTKINKELLRISQIMNT

SEQ ID NO: 126628 - protein, 251 aa, Unknown
  Bacterial polypetide isolated from the Sargasso Sea
IGIGGDGSLKILQSLTKKGNINFVGIPKTIDNDVKNNELSIGYDTAVDVATNALDMLQPTAASHRRVMILEVMGRDAGHIALNAGIAGGADIILIPEIPYSIKSVAKHIEDLRAKGRNHALIVVAEAVKKENGKKATVKYVDGEVRLGGIGNHLGDEIYKITNSETRVTVLGHVQRGAQPTHRDRLIASAFGVYAVDLVAKKKFNRVVVWKDRGVHDLPLNQIAGYSKTIQKNDPLIKVAKGLGIYIGELS

SEQ ID NO: 126629 - protein, 204 aa, Unknown
  Bacterial polypetide isolated from the Sargasso Sea
MPKEIKIVGVLTSGGDAPGMNAAVRAVVRACEYNKIGCYGIYQGYQGLVNENITKMSARSVKNIINKGGTILKSARCEEFRSKEGREKAFATIKKNNIDALIVIGGNGSLEGAALFQKEYSVPFVGIPGTIDNDLEGTRATLGYDTALNTVSEAIDKIRDTAISHNRLFFVEVMGKGTGHIALNAGIGSGAEEILIPEHNMGIE

SEQ ID NO: 126630 - protein, 113 aa, Unknown
  Bacterial polypetide isolated from the Sargasso Sea
MNTIGVLTSGGDSPGMNSAIRAVVRACAHYDKKCIGIVRGYSGLIENNTKVLNTRSVRGIINRGGTFLYSARCEEFKSVEGRKKAFKNLKGAGINGLIVIGGDGSIYWGIEAS

SEQ ID NO: 126631 - protein, 283 aa, Unknown
  Bacterial polypetide isolated from the Sargasso Sea
GNPFGTIVKNGKKIEVLDLILNSFKRLELDALIGIGGDGSLKILQSLTKKGNINFIGIPKTIDNDVMHNELSIGYDTAVDVATNALDMLQPTAASHRRAMILEVMGRDAGHIALNAGIAGGADVILIPEIPYSIKEIANHIDNIRSKGRNHALIVVAEAVKKEDGKKATVKFVDGEVRLGGIGSYLGDEIYKLTNAETRVTVLGHVQRGAQPTHRDRLIASAFGVKAVDLIAKDKYNRVVVWQDRSVKDVALDDIAGKSKTLSKSDPLIEVAKGLGIYIGEFN

SEQ ID NO: 126632 - protein, 226 aa, Unknown
  Bacterial polypetide isolated from the Sargasso Sea
FKKFIRNGKKVDSTDIIIEGFKKIGIDALIGIGGDGSLKILQSLTKKGNINFVGIPKTIDNDVKNNELSIGYDTAVDVATNALDMLQPTAASHRRVMILEVMGRDAGHIALNAGIAGGADIILIPEIPYSLKSIAKHIENLRSKGRNHALIVVAEAVKKENGKKATVKYVDGEVRLGGIGNYLGDEIYKITNSETRVTVLGHVQRGAQPTHRDRLIASAFGVYAVD

SEQ ID NO: 126633 - protein, 256 aa, Unknown
  Bacterial polypetide isolated from the Sargasso Sea
RIRCSNCIGGDGSLKICKSLTKKGNINFIGIPKTIDNDVKHNELSIGYDTAVDVATNALDMLQPTAASHRRAMILEVMGRDAGHIALNAGIAGGADVILIPEIPYSIKGIAKHIEKIRGEGRNHALIVVAEAVKKEDGKKATVKFVDGEVRLGGIGSYLGDKIYKLTDAETRVTVLGHVQRGAQPTHRDRLIASAFGVKAVDLIANGKFNRVVVWQDRSVKDVSLNDIAGKSQTLSKNDPLIEVATALGIYIGDIN

SEQ ID NO: 126634 - protein, 254 aa, Unknown
  Bacterial polypetide isolated from the Sargasso Sea
MTSKLNKIGVLTSGGDSPGMNAAVRAVVRSAEFHNIHCYGIYKGFEGLISDEIKKLNARSVKNIVNKGGTILKSARCLEFRTKEGRLKAKNNLDKYGINSLVVIGGNGSLLGGKIFEEEHGVKVVGIPGTIDNDLAGTRCTLGYDTALNTAVDAIDKIRDTAISHNRLFFIEVMGKGSGHIALNAGIGAGAEEVLIPEKNMGIDRLLKSLKHSEQSGKSSSIIVVSEGDKIGDNVFKFSSYIEKNFPHYETRVS

SEQ ID NO: 126635 - protein, 294 aa, Unknown
  Bacterial polypetide isolated from the Sargasso Sea
DVVELKPDFFDGNLMRMGGTFLGSNSKGNPFGTINKEGKKIEVSELIINNFKKLNLDALIGIGGDGSLKILQSLTKKGNINFIGIPKTIDNDVKHNELSIGYDTAVDVATNALDMLQPTAASHRRAMILEVMGRDAGHIALNAGIAGGADVILIPEINYSIKGIANHIEKIRSKGRNHALIVVAEAVKKEDGKKATVKFVDGEVRLGGIGAYLGDEIYKLTDAETRVTVLGHVQRGAQPTHRDRLIASAFGVKAVDLIANNKYNRVVVWQNRSVKDVSFNEIAGKSQTLTKTDP

SEQ ID NO: 126636 - protein, 178 aa, Unknown
  Bacterial polypetide isolated from the Sargasso Sea
MNTIGVLTSGGDSPGMNSAIRAVVRACAHYEKKCIGIVRGYSGLIENNTKVLNTRSVRGIINRGGTFLYSARCEEFKSVEGRKKAYKNLKDVGIDGLIVIGGDGSFTGALKLEEEFNFPVVGIPGTIDNDLYGTSHTLGYDTALNTVMDAIDKIRDTAISHHRLCFVEVMGADAGYIA

SEQ ID NO: 126637 - protein, 251 aa, Unknown
  Bacterial polypetide isolated from the Sargasso Sea
INWNCGDGSMKILQKLTQKGGINFVGIPKTIDNDVMDNDLSIGYDTAVDVATNALDMLQPTAASHRRAMILEVMGRDAGHIALNSGIAGGADVILIPEIPYSLKKIADHIDNIRAQGRNHALIVVAEAVKKEDGLKATVKFVDGQVRLGGIGSYLGDEIYKLTDAETRVTVLGHVQRGAQPTHRDRLIASAFGVYAVDLIAKEKFNRIVVWKNRGVTDIDLNSIAGQSKTINVSDPLIKVAQGLGIYVGEI

SEQ ID NO: 126638 - protein, 316 aa, Unknown
  Bacterial polypetide isolated from the Sargasso Sea
VLTSGGDAPGMNAAIRAIVRTSLNNDTRIIGFKNGYEGIIDNDYVTFDKRSVGNIIQRGGSILHTSRSLRFLKKKHRQVAENNLRELCIDGLIVIGGEGSTKGAIELSKISKTKCVVIPATIDKDMAFVGSTIGFDTAINTALTAIDKIRDTATTANVTHIVEVMGRNCGWLGILAGIGAGAEVTIIPEVKTNITKLAQKIKHQLNTGKKGCIIILAEGGFSKGGASLANALKEKGNFDLRITTLGHMQRGGNPSAVDRVLATELGVNAVLALKEGFSDVIIAKPVATIEKVDFDKVVNAKVNVDMYLHDLIENTA

SEQ ID NO: 126639 - protein, 136 aa, Unknown
  Bacterial polypetide isolated from the Sargasso Sea
MVQLDRYSVSDMINRGGTFLGSARFPEFREEHIRAVALENMKKRGLDALVVIGGDGSYMGAMRLTEMGFPCIGLPGTIDNDIKGTDYTIGFFTALSTVVEAIDRLRDTSSSHQRISVVEVMGRYCGDLTLAAAIAG

SEQ ID NO: 126640 - protein, 362 aa, Unknown
  Bacterial polypetide isolated from the Sargasso Sea
MVVKKIAILTSGGDCAGLNAVIRAVTLRAYNKYNWDVYGIKDGTLGLLKEPLDVIKLEPQNFEGSLMRMGGTFLGSNNKGNPFKKIIRNGKKIDSSDLVIEGFKKLGIDALIGIGGDGSLKILQSITKKGNINFVGIPKTIDNDVKHNELSIGYDTAVDVATNALDMLQPTAASHRRVMILEVMGRDAGHIALNAGIAGGADVILIPEIRYSIKSIADHIEKLRSKGRNHALIVVAEAVKKENGKKATVKYVDGEVRLGGIGNYLGDEIYKITDSETRVTVLGHVQRGAQPTHRDRLIASAFGVYAVDLIAKKKFNRVVVWKDRGVQDLMLSQVAGHSKTVQKNDPLIRVAEGLGIYIGETN

SEQ ID NO: 126641 - protein, 115 aa, Unknown
  Bacterial polypetide isolated from the Sargasso Sea
MTSKIKKIGVLTSGGDSPGMNAAVRAVVRSAEFHKIDCFGIYKGYEGLISDDIKKLNARSVKNIVNKGGTILKSARCLEFKTSEGRLKAKQTLDKYEIDSLVVIGGNGSLEGGKI

SEQ ID NO: 126642 - protein, 337 aa, Unknown
  Bacterial polypetide isolated from the Sargasso Sea
TLRATNQYGWKFYGLRDGTLGLMKDPIDVVELKPDFFDGNLMRMGGTFLGSNNKGNPFGTIMKNGKKIEVLDIILNSFKKLELDALIGIGGDGSLKILQSLTKKGNIKFIGIPKTIDNDVKHNELSIGYDTAVDVATNALDMLQPTAASHRRAMILEVMGRDAGHIALNAGIAGGADVILIPEIPYSIKGIANHIDNIRSKGRNHALIVVAEAVKKEDGKKATVKFVDGEVRLGGIGAYLGDEIYKLTDAETRVTVLGHVQRGAQPTHRDRLIASAFGVKAVDLIAKNKYNRVVVWQDRSVKDVALDDIAGKSQTLSKSDPLIEVAKGLGIYIGEFN

SEQ ID NO: 126643 - protein, 348 aa, Unknown
  Bacterial polypetide isolated from the Sargasso Sea
MVKKIGILTSGGDCGGLNAVVRAATLRAKNKYQWKVLGIRDGTLGLLKNPLDVLELTTKHFDGNLMRMGGTFLGTNNKGNASEQKVLEGFKKLELDALIGIGGDGSMKILQKLTQKGGINFVGIPKTIDNDVKDNDLSIGYDTAVDVATNALDMLQPTAASHRRAMILEVMGRDAGHIALNSGIAGGADVILIPEIPYSLKKIADHIDNIRTQGRNHALIVVAEAVKKEDGSKALVKFVDGQVRLGGIGTYLGDEIYKLTDAETRVTVLGHVQRGAQPTHRDRLIASAFGVYAVDLIAKEKFNRIVVWKNRGVTDIDLDSIAGQSKTINVSDPLIKVAQGLGIYVGEI

SEQ ID NO: 126644 - protein, 328 aa, Unknown
  Bacterial polypetide isolated from the Sargasso Sea
MPKEIKIVGVLTSGGDAPGMNAAVRAVVRACEYNKIGCYGIYQGYHGLVNENITKMSARSVKNIINKGGTILKSARCEEFRSKEGREKAFATIKKNNIDALIIIGGNGSLEGADIFQKEYSVPFVGIPGTIDNDLEGTRATLGYDTALNTVSEAIDKIRDTAISHNRLFFVEVMGKGTGHIALNAGIGSGAEEILIPEHNMGIERLLDSLSKSEKSGKTSSIIIVTEGEKIGKNVFEYASYIEKNLPEYEVRVTVLGHIQRGGSPSSFDRVLASRMGVYSVDCLIKGISNVMIGIKDDEMVAVEIDKAIKSRGEINKNLIRVFDIISI

SEQ ID NO: 126645 - protein, 278 aa, Unknown
  Bacterial polypetide isolated from the Sargasso Sea
AVYISTPHTLHAELSIKAAGKGKHILCEKPGAVNFIQGEKVIQAVQEAGVFYKEGFMYRCHPQIPALLDLLKNKVIGDLKKVTSSFGFDMTKIIPQHRLFNKDLAGGAILDVGLYPVSFSRMIAGVNSGKKFINPIKINAEAKIGSTGVDEVSSATMEFDNGLIAHVYTAIMKNMDNNAIIDGSDGKIIVDDPWMPGKNGGPYHSTIRIIKNNKEEIKEFKGPEHLFFFEAELSSQTILKEKQEVPYPGMTWEDTLGNLKVLDQWRQKINYKIKEDKI

SEQ ID NO: 126646 - protein, 211 aa, Unknown
  Bacterial polypetide isolated from the Sargasso Sea
MSFAAKNTLVHFLEFSSCDQIDSEERFQILEGIAQGLRMIHACDILHLDIKPANVLIAEDGTPWLTDFGTSESLSTTTRKGGAGTCQYMSPERFDDYEAPTKAADVFSLGVLMWEVLVGETPWAGKDRAKIMKSVCMKEGRPSLASGADWRESPHVVATGMGGLIELMWAQEHEDRPTIETASDAPPPPPFFRLHTRRFFVRLNELITLDL

SEQ ID NO: 126647 - protein, 318 aa, Unknown
  Bacterial polypetide isolated from the Sargasso Sea
LPATYLEQNVERKSEEAAKSLAFLAKQLPEVRNHLDVAENKLNAFRQDKDSVDLPLEAKAVLDSMVNIDAQLNELTFKEAEISKLFTKAHPAYRTLLEKRQALEDEKAKLNGRVTAMPKTQQEIVRLTRDVESGQQVYMQLLNKQQELKITEASTVGDVRIVDPAIAQPGVLKPKKALIILGSIILGLMLSIVGVLLRSLLNRGIESPQVLEENGISVYASIPLSEWQKARDNVKTVKGVKRYKQSQLLAVGNPTDLAIEAVRSLRTSLHFAMMQAQNNVLMLTGVSPSIGKTFVCANLAAVISQTNKRVLLIDCDMR

SEQ ID NO: 126648 - protein, 227 aa, Unknown
  Bacterial polypetide isolated from the Sargasso Sea
SPHIGTLNEGSLHASLKRYISQTGDKFEVPINGFVIDIVRETNSETTVLIEIQTQSFLAMKKKLVSLLDEYPVHIVYPVAKETLLMKPGKKPRKSPKKYSVISIFEELVSIPELISHQNLSFEVVSVSVTKIQQYDSSLRRGRGGYRTVNTELTEIHSAHLFEGIADFLNLLPKSLPSVFTTFDIASCANIPRESAQQMAYCFRKAGVFQELSQTKAGKHYKIRKNV

SEQ ID NO: 126649 - protein, 314 aa, Unknown
  Bacterial polypetide isolated from the Sargasso Sea
HVRGCCYRHGRTSADNKFVHRDLAARNILIDATMECKVADFGLSRRTAVSAVLAGDNGGSGQDDGDAERAYYRSEKGTFAIRWAAPEAMETMRFDEATDIWSFGIVMVEVFGDGAKPYAHLANQGVIVHVQAGKRHEAPSGCPPDVFAAMQSCWHAEPQQRPKFAALLTTLNALHLQCKLEGAIGDQPMLVRGFTVSRKNGYVSESKGPSPLPAGPTGYAPDTFEAHDDHSVPSGTSLALLQQSNSQRLQQIEADEGYQMPTGATNTNLMQQAEERRSLTLRKDGDGAEATYEFPSAAQSNGSANTHGNLYVLA

SEQ ID NO: 126650 - protein, 265 aa, Unknown
  Bacterial polypetide isolated from the Sargasso Sea
GANIIEKKNGESISLRYRDRKSIKLNIGDTIHRHMLDGDPILFNRQPTLHRMSMMCHRARIMHEGSTFRLNVAVTKPYNADFDGDEMNLHGPQDEESQAELIHLAAVPKQIISPANNSSIIGIFQDSLLGTYRFTRPDIDFTHREAMNLLMYYDNPKTKLFEKNKKKRITNFDLLSQILPPLSLKFKNGQFKDSENKKKSNNIVEVNNGKYLRGQIDKKTLASGSKGIIQRIFNDYNYNKSEKFIDDLQAIITEYMKISSYSVGV

SEQ ID NO: 126651 - protein, 228 aa, Unknown
  Bacterial polypetide isolated from the Sargasso Sea
MNKAIGFIGLGIMGFPMAGHLSKHYKIRVFNRSPEKTKSWKKKYSGHECSSIKEISEESDILFLCVGNDNDVREIISKKDGALEHLKAGSSIVDHTTTSADLAIEMNNFLSSKSINYLDAPVSGGQAGAESGQLSIMVGGKKEAYEELKDILMAYSKFIKYMGESGSGQLTKMVNQICIAGLLQGLAEGMNFSEKAGLNSKDVLEVISKGAAQSWQMENRWHTMLVDN

SEQ ID NO: 126652 - protein, 286 aa, Unknown
  Bacterial polypetide isolated from the Sargasso Sea
ANQHHLLSLLYTRWGLYELALEQCSVVDSLMSYLNGKEDVNYDTSLILGKNYSRKCELFTILRDYQKALTNSRSAIALLKNSPIELVKHYKIDSEIYIAQNDIYKALESIDTGLSICDLNGMSIQELDLLDKKMKILKSNKLERSALDISQKIIAKKEQIENKRIEILLESLSYRSELLKNRNEISASENRQKMTLVISFAIIVMLGFILKYYRNKREYLEQQVKLNEQEKQIVASELKKKESDLIRMSTFIVSKNDLLSSIVKDLEYHISLIDNKSDRKSLEPLK

SEQ ID NO: 126653 - protein, 309 aa, Unknown
  Bacterial polypetide isolated from the Sargasso Sea
FQFIAQGSGYEGETMLITDAWTGTPSFDFVSPAIAQNVDAIPGSYTNAIVWDDVVGEFGEVYDVYGSRDPFTGNIRHQNWDVIALGVSEDVQEAYHDLTVPLSDRPADWYYAVVVTDAAGNRSLPAVMTSPVSNTARGIPTISLTAPAGFKADGDLSEWKSSGIIPLFMGVSTNSFGTPKVINTVDNDDDASVNVYLAADSGRLYVAADVTDDDFNVETGNWWEQDAFELFIGLYDQRGPKHANAGRGAEPDYKFVFLGDSAFVEFTTPSLGLSHRSFVEYANSGVNGSPGAAKEFSIRLDSLAAMNSD

SEQ ID NO: 126654 - protein, 321 aa, Unknown
  Bacterial polypetide isolated from the Sargasso Sea
LDLNFPTLALSYFIDANEKSIIKGKKPWILINIGNVYYQQEQWIEAKEKYLDAIDAFRKRNSQHPNALSGKTVALSNLGRIEMNLNHYDQALAYFKEALDIKRNSARYQAFQKTRMNPKPAYSGVAAGVANQHSLLSSLYIKWGLFELAAEQCQAIDSLMSFITGKEDVRYEPSVILGKNYSRKCEINTKIAKYSQALTDSRAAIASLDNWPIELVKHYKIESDMYIAQNDLYQALASIDKGLKICDINGMSMQELDFLDKKMNLLMSNNLERSALDISLVIIEKKEIIEDARVNRSLENLNYISEFHKDREIIGHAKARE

SEQ ID NO: 126655 - protein, 258 aa, Unknown
  Bacterial polypetide isolated from the Sargasso Sea
GWNINPFHDMSYEWMKDSVQFMYKTAKYSGNNIRLQYEAGSGKLVKEVDITADDKWHTVKIALKDFVYGDNTTSGFDTTQVKVFQFIAQGSGYEGETMLITDAWTGTPSFDFVSPAIAQNVDAIPGSYTNAIVWDDVVGEFGEVYDVYGSRDPFTGNIRHQNWDVVALGVSEDVQEAYHDLTIPLSDRPADWYYAVVVTDAAGNRSLPAVMTSPVSNTARGIPTISLTAPAGFKADGDISEWKSSGIIPLFMGVSTNS

SEQ ID NO: 126656 - protein, 164 aa, Unknown
  Bacterial polypetide isolated from the Sargasso Sea
MGQAGNVLDLTFPYPVPELVDFIKLLFLDVRKLVMLDCWNIGGFYGKIVTNIAVVPAVLVGVCLLIYISQKRTLTAVIAAGAADTSGLEMLKVKLKQNLFLGIFLVYPTITTTLFRVPQCHRFGDESFHEDDYTIDCSTTKFTVTVAFSVLVILLVPIGVPAIF

SEQ ID NO: 126657 - protein, 277 aa, Unknown
  Bacterial polypetide isolated from the Sargasso Sea
HISKKALDIKRNSARYQAFQKTRMNPKPTYAGVAAGVANQHSLLSSLYIKWGLFELAAEQCQAIDSLMSFITGKEDVRYNPSVILGKNYSRKCEINTNIGKYLQALTDSRAAIASLDNWPIELVKHYKIESDLYIAQNDLYQALASIDKGLKICDINGMSMQELDLLDKKMNLLMSNNLDRSALDISLVIIAKKEIIEDGRVNRSLENLNYISEFHKDREIIDHAKAREKLYFTIIGFFMLFFSMVIKYYNSKKVQIKQEIKINKQEKQIIESKLKN

SEQ ID NO: 126658 - protein, 342 aa, Unknown
  Bacterial polypetide isolated from the Sargasso Sea
MGYGILSYGAYVPPIRMKRESVLQAVGWAVPGVRGLAAGERSVASWDEDSVTMAVEAARNCLVDCSDLPSSITLASTTFPFADRSNSGIVADALNLPLNTLTEDTFGSRRSGTSALVKNFLGSTSTLLLASECREAKPGSTQEMTYGHGAAALLLGEGNTIADILSVESVHEDLIDQYRTVDAKYDYSLEERWVREEGWLKIVPDAINLALSKAEIQITDVDKVIVQGSAGAARSLSKKVGIDGGKLADSLQATVGDCGAAHPLLMLSHVLAESNPNEIVMIVGFGQGTDIILLKTNNKISQKNTKNGLQIHLDNKRQIDNYTLYLSLRGHIDIDFGLRSER

SEQ ID NO: 126659 - protein, 681 aa, Unknown
  Bacterial polypetide isolated from the Sargasso Sea
MCAVVFSVNAQETDDGNDVEEVVVTGTQIKGARINEALPVTVITKDDIDDRGVNSGDELLATITEQGVNQFNDVGSNGGGVNASRGDVGAFDIRSLGTGNTLVLLNGRRMISTPSYQTEEVGGSYVPVATVNSNNIPVSLVDRVEILRDGAGAVYGSDAVAGVVNNVLETDFVGFEMRGRFQNWQHFNRDDHKFSMKWGQDFNGGKTNISMFFSFYDRDRVAAAEDEIMGRCDYDDLVPDQFNSAFYRCSSNSAWGQFDMSGTAAYTDSSGEFLIYPAGDPDCVLNLGNGVCAAKDTAGNLIHNWNGQRDVLGDVQRHNTFIFINHDLGDGREAFAEFGQYRSEYNGNRHSSSSFSSVKHVVPATNPYNFTGKALLMDNYRFVDAGPRIVDNDKETNRMLMGLRGVTDTGWDWESAISYSTAEAEDVTHNRVSNTLMDQLLQATGPNAYNPFNGGGVYISPRVSHNPVDLTPGGIGPAVVDVFRNNERTMTTFDMRFSNPNVWETKAGWIGVAVGYEFRSDSFKDDRDPRLDGTIVFTERKTSGSLSTSPGDTYPYVSDVVNSSPTPDGSGNRTVNSYYLELDVPVVSPEQNVPFVQQLDLQVAYRAEAYSDFEGTEVPRLAFGWRVADWLKFRGSSQDTFRAPNLITINESLVVRNNTRNDAANKYAIALGADTDDSDGR

SEQ ID NO: 126660 - protein, 598 aa, Unknown
  Bacterial polypetide isolated from the Sargasso Sea
MFLNDFVGFEMRGRFQNWQHFNRDDHKFSMKWGQDFNGGKTNISMFFSFYDRDRVAAAEDEIMGRCDYDDLVPDQFNSAFYRCSSNSAWGQFDMSGTAAYTDSSGEFLIYPAGDPDCVLNLGNGVCAAKDTAGNLIHNWNGQRDVLGDVQRHNTFIFINHDLGDGREAFAEIGQYRSEYNGNRHSSSSFSSVKHVVPATNPYNFTGKALLMDNYRFVDAGPRIVDNDKETNRMLMGLRGVTDTGWDWESAVSYSTAEAEDVTHNRVSNTLIDQLLQATGPNAYNPFNGGGVYISPRVSHNPVDLTPGGIEPAVVDVFRNNERTMTTFDMRFSNPNVWETKAGWIGMAVGYEFRSDSFRDDRDPRLDGTIVFVERKTSGSLSTSPGDTYPYVSDVVNSSPTPDGSGNRTVNSYYLELDVPVVSPEQNVPFVQQLDLQLAYRAEAYSDFEGTEVPRLAFGWRVADWLKFRGSTQDTFRAPNLITINESLVVRNNTRNDAATKYAIALGADTDDSDGRYSVQRAATGSNLLKAEESENTTMGMVLEFNNLTLTYDVWSIESENTIGLFGEENHMLYDLLLRLQQNDLSNCASVVGNPAVVR

SEQ ID NO: 126661 - protein, 211 aa, Unknown
  Bacterial polypetide isolated from the Sargasso Sea
MEVTRLSDALGAKISGVDLSNVDAGTAEEIRESFHKHQVLLFRNQDISMEQHISFSKNFGPLEVHISKDSLHEDHEEILLVSNMKKDGEYVGVENAGDAWHSDLSYMPEPSLGSLLYALEVSEIGGDTEWLNMYDAYDTLSTKTKKRIDGVKARHSFNRFKNKRIGVPKQRQNGGKERYEKLSPPDVFHPVARTHPETGRKALYISPRFTL

SEQ ID NO: 126662 - protein, 585 aa, Unknown
  Bacterial polypetide isolated from the Sargasso Sea
MILCFILPITFIFGNGKSSDIKFEKVIDSLKTLRNRSPERAIRYAREILDDHGSNDLGHNESRILNTVGEIYLELSLPALALSYFIDANEKSAVKGKKPWISINIGNVYFQEEDWLSAKEKYFDALDAFRRRNVSHPNTLSGKAVALSNLGRIEMNLNNHDQALSYFKEALDIKRNSARYQAFQKTKLDAKPAYAGLGAGVANQHHLLSLLYTRWGLYELALEQCSVVDSLMSYLNGKEDVNYDTSLILGKNYSKRCELFTILREYQKALTNSRSAIALLKNSPIELVKHYKIDSEMYIAQNDIYKALESIDTGLSICDLNGMSIQELDLLDKKMKILKSNKLERSALGISQKIIVKKEQVENKRIEILLESLSYRSELLKNRKEISASENRQKMTLVISFAIIVMLGFILKYYRNKREYLEQQVKLNEQEKQIVASELKKKENDLIKMSTFIVSKNDLLSSIVKDLEYHISLIDNKSDRKSLEPLKKRISNKIDDSADWDQFLTQFSTAYPDFIDCLTEKYPKLRSGDIKLCCYLKMNMNTKEIAKVSGLSVRAVENKRYRLRKKLELETDVSLDSYIHSMRNK

SEQ ID NO: 126663 - protein, 400 aa, Unknown
  Bacterial polypetide isolated from the Sargasso Sea
MHVSFTSEENDFQKEVNSFFNEKYPADIKEKQNKSVPLEKEDFIRWQKTLYEQGWAAPNWPVEYGGTGWTPVQKYIFANENAKANAPAIVPFGLGMVGPVIYTYGNEAQKKKFLPGILASDVWWCQGYSEPGSGSDLASLKMKAERVGNEYVLNGTKTWTTLGHMADWIFCLVRTSSDVARRQEGISFILVDMATEGVSVKPIITIEGDREVNEVHFENVKVPAENLIGEEGKGWTYGKVLLQHERTSIAGVARSQYRLSRLKEKIRNSDNTQPSLTGDNDFLKKIGQLEIELKALEFTELRTLAAVSVGKAPGPESSLLKIRGTEIQQKLDELFMEAAGYFSLPYVPQQYNLNSDPEEHVGFGADSVSSLVYFNNRKASIYGGSNEIQKNIIAKHVLGL

SEQ ID NO: 126664 - protein, 508 aa, Unknown
  Bacterial polypetide isolated from the Sargasso Sea
MGEIYLDLNFPTLALSYFIDANQKSMIKGKKPWILINIGNVYYQQEQWIEAKEKYLDAIDAFRKRNSQHPNALSGKTVALSNLGRIEMNLNHYDQALAYFKEALDIKRNSARYQAFQKTRMNPKPTYAGVAAGVANQHSLLSSLYIKWGLFELAAEQCQAIDSLMSFITGKEDVRYDPSVILGKNYSRKCEINTNIGKYLQALTDSRAAIASLENWPIELVKHYKIESDLYIAQNDLYQALASIDKGLKICDINGMSMQELDLLDKKMNLLMSNNLDRSALDISLVIIAKKEIIEDARVNRSLENLNYISEFHKDREIIGHAKTREKLYFIIIGFFILFFGLAINYYNSKKVQIKQEIKINKQEKQIIESKLKNKEDELIKMSTNIVTKNNLLSSIVKDLEYHMSLIDSKSDRKSLEPFKKRIIEKIDDSADWDQFQIQFSLAYPDFIESLKRNYPKLRSGDVKLCCYLKMNMNTKEIAKITTLSVRAVENKRYRLRKKLDLHTDTSL

SEQ ID NO: 126665 - protein, 419 aa, Unknown
  Bacterial polypetide isolated from the Sargasso Sea
VLLSIYFLLFKIKKNFKKIIISYWIISFIALWLWFLIISFFAYNQITSFSDGIIFLRFIIFTVAIYFIFSEIDFKFLKILFYISLLIFSFVTLDTLFQFYNYDSALGFKGDIFGIKPEGLEGRLSGPFKDLIPGAYLSRFYFLILLIFFIDHSLNKKTNNKIILFFILFLSLATIYFTGERMAISIALFSFGIVVLFIKNHKIYFFNLILISFVFIFINTIFHSHYNNYTIIDSTAKHEGLLIQKEFPCPENTNEVCYKEVSRQPKFTDVLFNFKDSAYGSIYLTSFKMWVDYPITGIGLNNFNLVCKNENKYLKYSKDFGCTTHPHNLYIQALVETGIIGLLLFINLVCAIFYKILLTKNYNIKILGFVIILTIFWPIMSTGSFLKNWNMIFISFLIGFTIALSEFSSTKKSEFKNTN

SEQ ID NO: 126666 - protein, 478 aa, Unknown
  Bacterial polypetide isolated from the Sargasso Sea
MKKASLLFSLLLFISCSDSSESNNVITEVTESEKQSEEQIQENTETQEESNKNNKQSVEESNSRTVNEETITLNNLPDVKEFINNKSDRFIVDFEDIVAAHPYVGSRSPKPHNDLQVYFSNSDPRWVNATKPSDYPPIYAVADGVIQMAQGNFSLYNVVDHSDSDPPWWHSAYLFKLQFAQNDGNIVSFLYQMEGYVIKEDRNFFADYLLVKDGQSVKKGDILGYMYVPTFDEMVGSMQGSSHIAFAIMEKMGPQEEQEKVPSMFTSEIIDKFSNLSRNPTEGWESTSYGNDWSRGRGLPNLIGWMIGPEEHMFGGEYLDAVYYGDERDASLDSDKVIDSTKLGFQTDTYIFNSHGKGDAELDMTFSRNEKVDFVVVTNGSPVTMKFIFKQDNGEERESQFMNKRKGQGHQFQYYQSFGFNKNTTLIIEDPEEWGWSVAFVPEGTPALIPGESRDIQPYCPPGCPPSPNPYKLQQGNK

SEQ ID NO: 126667 - protein, 256 aa, Unknown
  Bacterial polypetide isolated from the Sargasso Sea
MVAVKQLRPDSALTRAELALEASMTALFDHRNVVQLVGVVSAPQSMPLLLLLQFCENGQLDLYMRNRTGDNEVEVALRLSFCADVACGMQYLSSRRVVHRDLAARNVLLDASLVCKVADFGMSAMLAGHDEATIEYQKDYVRKVGGQVPIRWCAVEVLADDKYSAASDVWAYGVMVWEVMADGAIPYSDEANLNVVAEMIKNGQLLPRPARCASEIYAKLMTPCWRVDRSERPTFAELQTAALNLGGSVNRVQDLN

SEQ ID NO: 126668 - protein, 275 aa, Unknown
  Bacterial polypetide isolated from the Sargasso Sea
ADFGLSRATVLGSGDEGAEYYRSQKGTFPVRWTAPEAMAELKFSTASDVWSFAITVVEIFTDGCKPYPDIQSNSQVITAVTGGHRCQRPPDCSPRLFALLVRCWSEAPEARPGFADIIRELEVVQVEHNEATRPPGWSSADQTGPSGTGGEAGRAPRPQLGSAPNSHAGLHQDGLGRRAPVGSDGYVFGHGALPGVDAAVARDSTQGAPLGPDGYVFGDGGLAMAGAVARSGVQGAPLGSDGYVLGHAALAVADELQQSQQSPPAAAGAPLRESA

SEQ ID NO: 126669 - protein, 273 aa, Unknown
  Bacterial polypetide isolated from the Sargasso Sea
HPNIVRMRGVVVDAEDYVCLLMELSEVGSLRSMLDKGPVPQTAQVKIVKGIAEGMAFLHARLPTPILHHDLKSANVLVFPDDVAKISDFGMATGAQRGSQSTMTNVHSTQFGAGTPAYMAPETIRETDVKFVKASDVYAFAIVVWEVATCKVPWDKMNFPAILRAIDAEKRPGSPPPDSPLGQLVERCWAQKPEERPTFKEVLSEPPLSPEPDGGGRSGGDDTAHLELNKGIAAESYSVDASFALFVGRGRTRSSSSERSSSRGLNELGMLKQ

SEQ ID NO: 126670 - protein, 235 aa, Unknown
  Bacterial polypetide isolated from the Sargasso Sea
LAIHPTARWVWRTPGPYAMFCVAGCVVAPHLAWLPGADNPTLSYLSSRLPEQGSWTDHILHPLEFLASQTGAVIGIPLLISSVFGWKWHRKPADDSRAVARDYLLCVVFGPPLLAISVSIFTGLYLVALWGSAMWTFFGVLLMVLFEPTGTVGQYRQLARRCIAWGAIFLAAFGIAKAFHGELKGVPRRVQYPGRALANEVERRWSLAVNDQPLQLIGGDWWLAGLASFYDPQRP

SEQ ID NO: 126671 - protein, 130 aa, Unknown
  Bacterial polypetide isolated from the Sargasso Sea
KYLAKKSEYKMEYIYNDLVSLNNPKDKMPISDLDSKKIHVVSGISNPQSFYSYLRSQNYELLIHEYPDHHIYNENDLEFDDDFPVVMTEKDAVKCFKYSNERYWYLPISAKLSERFTLDLNELLERNKYG

SEQ ID NO: 126672 - protein, 258 aa, Unknown
  Bacterial polypetide isolated from the Sargasso Sea
MKVKRPIFWDSFNFISLLLLPFSLITIIFNFFKSLSLKKYFKIKTICVGNIYLGGTGKTPLVLKINDMLKYNFKTVFIKKKYIDQIDEQNILSKYGNLICLSFRDIALRIAEKKNYQLAILDDGLQDKSLNYDISIVCFNSSELVGNGLVLPAGPLREKISNIANYDVVFLNGERNSKRFEKKLKRLNSNLKIFRAKYSAKNLKSFKFKSNFLMFSGIGNPLEFQQTLKKYNFKIKKIMTFPDHYKYKNSDINNIKNI

SEQ ID NO: 126673 - protein, 104 aa, Unknown
  Bacterial polypetide isolated from the Sargasso Sea
MLNHIWYGNSLLSWCLIPLTWPVRWVIHRRRQQASPKGSTPEGVTVIVVGGLTAGGTGKTPVLIGLGKWLAEQGYRVGVVSRGYGGTYGPEPHSVTEVDTAAVV

SEQ ID NO: 126674 - protein, 253 aa, Unknown
  Bacterial polypetide isolated from the Sargasso Sea
MNFLCWIYGILVWMRLIFYRKKLLRSSHPGIPVISVGNLTVGGTGKTPMVGFLTESAKQAGWKPAIISRGYRNRSQAKIQRVRYCENSNLDVDAFGDEPSMLALENPEVPVYVSASRVDAAEVAKERDNPGILILDDAYQHLKIKRDLNLLLVDAERGFGNSQLLPLGPLREPLESAERADAVIVTKSNLGNFDEVFQIVLKFKRDGCPVFRFDYRIEKITSLDGQEEKETSELKGKRLLLSSGIANPPKLSK

SEQ ID NO: 126675 - protein, 272 aa, Unknown
  Bacterial polypetide isolated from the Sargasso Sea
LTYNILKLFLKSKYEFKTPIICVGNIFVGGTGKTPLSMYVYNLLKRKKFRPAIIRKYYSSHLDEIKLTKKKVRHFFSEKNRAKAIQKAEQNKNNIIVMDDGLQDVSIKKDLNIVCFNSTDLAGNGFLLPAGPLRESLKNLNRYQIVVINGKKNVKFEKKLKKLSNNIKIYQSFYKIKNTKKLKNLKILAFAGIGNPEGFFSLLKNYGLKLEETISFPDHHNYSKNEIKDLIVKAKKNSLKLLTTEKDFFRIKQLGLKKIDYVSVELEIIKHK

SEQ ID NO: 126676 - protein, 208 aa, Unknown
  Bacterial polypetide isolated from the Sargasso Sea
PFYIDKNRVRAVKTIIKNHNCDVIISDDGLQHYAMGRDIEIAVIDGKRRFGNSLTFPAGPLRESKKRLQSVDFIVNNSGPTEENEYLMSISPSKFVHLKSGKSYSVENWPMHKQIHAVAGLGNPGRFFDLLEKLGFDINRHPFPDHHNFLSSDIYYLDHLPIVMTEKDASKCKDFDNNKIWYLTIDADVNNKFIENIDKRLKSILNNE

SEQ ID NO: 126677 - protein, 111 aa, Unknown
  Bacterial polypetide isolated from the Sargasso Sea
MNWWEKGWYRQHPFTLLFWPLSLLYRLVAVIRRFGYQRGWFSSFAVEKPVVIVGNISVGGTGKTPFTLWLCKFLTEQGFTPGIVSRGYGARITEPVRVTSLHLAADVGDEP

SEQ ID NO: 126678 - protein, 178 aa, Unknown
  Bacterial polypetide isolated from the Sargasso Sea
MESIWYQDKKPPFLLILLSKLYGFLLNARKALFDLGLLSGNKPDIPVIIIGNLNIGGTGKTPFTLYLANMLSRSGKKVGIVSRGYKGKKSSSKPYLLGKNSNARDFGDEAVYLSRHADAMVCVCKKRSLAAHFLSDQGVDIILSDDGLQHYGLKRDIEFAVVSSNRGLETGICFRQDL

SEQ ID NO: 126679 - protein, 226 aa, Unknown
  Bacterial polypetide isolated from the Sargasso Sea
MKIYKPKFWDKKNLTFFSSILLPISYIYSLILIIKKSFKREKKYSIPIICVGNIYIGGTGKTPMCIKLKNLLDDKRVPVIIKKNYKNQKDEIELLKKYSKLIICKKRNEGIISAIEKNFDTVILDDGFQDLSIKKDLNILCFNNNQEIGNGQVLPAGPLREGLSALKIANIIMINGGKNTELENKLKKYNIDLKFFYFNYILKKFDEFKNRKLIAFAGIGNSINFF

SEQ ID NO: 126680 - protein, 271 aa, Unknown
  Bacterial polypetide isolated from the Sargasso Sea
MKLIKPKFWDKKNLGFFSLTLLPFSFIYIVIANIYKFFQKEKKYSIPVICVGNIYIGGTGKTPICIKLKNLLDEKRVPIIIKKEYKNQKDEIELLKKYSKLLVCEKRAKGIETAIEKKFDTIILDDGFQDKSIKKDLNILCFNNNQQIGNGQVLPAGPLRETLSALKTANIIMVNGEKNIEFELKLKKYNNELKFFYFNYNLKKFEEFKNRKLIAFAGIGNSINFFNTLKDNRLNVIKEITFPDHYDYSDNDLENLLKTETQNKAKLIPQK

SEQ ID NO: 126681 - protein, 211 aa, Unknown
  Bacterial polypetide isolated from the Sargasso Sea
MLFKKPFFWDYEKPNYLAYLLLPLTSVIAIRNFLSKFKKKRSVNIKTICVGNIYVGGTGKTPLVIKTKNILNNLNFKTAFIKKFYKDHIDEQKLLEKNGDLFCSKKRSAALDNAIKEGFDAVLFDDGLQDNSINYDLKFVCFNSDKWIGNGLLLPAGPLREKINSISKYNAVFLNGNSKNNQNIKNQIKKYNDKAKIFETYYKISNLNEIN

SEQ ID NO: 126682 - protein, 178 aa, Unknown
  Bacterial polypetide isolated from the Sargasso Sea
DDGMQHYKMARSIECCIVDSERKFGNGLLMPAGPLRETVSRLKSVDVVIENGSEDEFSYRLQPSVIKRVADNTDIATPLKAAHAVSAIGNPGRFEASLQAQGIKLLSTHHFRDHYAYSADDFAQFGDDCVLMTEKDAVKCRDFAKPNWYYLPVDAQPTAAVISTLNLLLKEKGIHHGL

SEQ ID NO: 126683 - protein, 177 aa, Unknown
  Bacterial polypetide isolated from the Sargasso Sea
MTLLGYPIASSYSAVMALRNSHYDRVGGQKIPGVKVVSVGNLVVGGTGKTPFSAWVAKELKVRDLSPAIVSRGYGRDELILHNKWNPDTPVVADSDRLKAASLAGLEGADIVVLDDGFQHRRIARDFDIVLLSAEDDFPGYLLPTGPYREPVQSLRRADVVLVTRRTAPCLVAEKIL

SEQ ID NO: 126684 - protein, 236 aa, Unknown
  Bacterial polypetide isolated from the Sargasso Sea
MQLKKPLFWDFKKPNLYANFLRIFSIFPIVYNKLFINKVVINNLKTICVGNIYLGGTGKTPTCIYINQKIKNSNNKTAFIKKFYKDQIDEQNLLKKNGNLICSSSRIKAANIAKSKRVDLAIFDDGLQDKNIDYDIKIACFNSKSLIGNGLVLPAGPLREQIKNIKNYDAAIINGNGENISKFKKYLKNIDKNLRIFEGRYLPDKNVKKLQKEKFIAFSGIGNHISFLDTLNNNNI

SEQ ID NO: 126685 - protein, 147 aa, Unknown
  Bacterial polypetide isolated from the Sargasso Sea
LNSVDFVINNGGPVHHGEVLMSLTPAPLMPVTNSLVEPLTEGQPLVAMAAIGNPQRFFNTLTQLGYQLARTVEFNDHHVFSASELHALSHDNPLVMTEKDAVKCRDFAQSHWWYLPVNAKLTPEFDHAFLSQLKQVAQTKKGLSHGI

SEQ ID NO: 126686 - protein, 167 aa, Unknown
  Bacterial polypetide isolated from the Sargasso Sea
MESIWYQDKKPPFLLILLSKLYGFLLNARKALFDLGLLSGNKPDIPVIIIGNLNIGGTGKTPFTLYLANMLSRSGKKVGIVSRGYKGKKSSSKPYLLGKNSNARDFGDEAVYLSRHADAMVCVCKKRSLAAHFLSDQGVDIILSDDGLQHYGLKRDIEFAVVSSNQR

SEQ ID NO: 126687 - protein, 233 aa, Unknown
  Bacterial polypetide isolated from the Sargasso Sea
MNFLCWIYGILVRMRLVFYQKKLLRSSHPGIPVISVGNLTVGGTGKTPMVGFLTEFSQQAGRKPAIISRGYRNRSHAKIQRVRFCENSNLDVDAFGDEPSMLALENPEIPVYVSASRVDAAEVAKERDNPEILILDDAYQHLKIKRDLNLLLIDAERGFGNSQLLPLGPLREPLESAERADAVIVTKSNLGNFDEVIQTLLKFKRDDCPVFRFDYRIEKITSLDGQEEKEISE

SEQ ID NO: 126688 - protein, 186 aa, Unknown
  Bacterial polypetide isolated from the Sargasso Sea
MESIWYQDKKPPFLLILLSKLYGFLLNARRALFDLGLLSGNKPDIPVIIIGNLNIGGTGKTPFTLYLANMLSRSGKKVGIVSRGYKGKKSSSKPYLLGKNSNARDFGDEAVYLSRHADAMVCVCKKRSLAAHFLSDQGVDIILSDDGLQHYGLKRDIEFAVVSSNRGFGNRYLLRAGPLREGLERL

SEQ ID NO: 126689 - protein, 257 aa, Unknown
  Bacterial polypetide isolated from the Sargasso Sea
MRFCEKKHADPDLFGDEPYMLAMRNPEVPVYVDSSRIAAADSAKNNDNPDVLVLDDAFQHLAIHRDLNLLLIDAERGLGNGNLIPYGILREPASQWKRADALIVTKANISSTDAVSEILNKELKVTCPVFNFIFEARSFYRLDGKDRQQIQHLAGKNLLTVSGIAQPDGFRKMLESLEGNLTGSLEFADHHDYSINDVHKILKKQDELKPDFIVTTEKDAVKLRQFSELSNSVWILEIGVHPEESWNAFFENFIDTL

SEQ ID NO: 126690 - protein, 94 aa, Unknown
  Bacterial polypetide isolated from the Sargasso Sea
MSWLCWIYGILVQMRLIFYRNKLLRSSHPGIPVISVGNLTVGGTGKTPMVGFLTESSQQAGRKPAIISRGYRNRSQEKIQRVRFCENSNLDVDA

SEQ ID NO: 126691 - protein, 289 aa, Unknown
  Bacterial polypetide isolated from the Sargasso Sea
MLPFSYLYRLLVTINKLFKKEESFSIPVICVGNIYIGGTGKTPISIKLKNLLDDNRKTIIIKKNYKDQKDEIELLKKYSKLIVCEKRNIGINSAIKKKFDTVILDDGFQDTSIKKDLSILCFNSNQQIGNGQVLPAGPLRETLSSLESANIIMINGEKNIEFELKLKKYNSNLKFFYFNYNLKKFDEFKNRKLIAFAGIGNSINFFNTLKNNRLNVIREISFPDHYDFTDKDLERLSIMEDQNKAKLITTEKDYLRINPLKRRRFGFVSINVDIKNENDLIAEVNKIFK

SEQ ID NO: 126692 - protein, 178 aa, Unknown
  Bacterial polypetide isolated from the Sargasso Sea
MESIWYQDKKPPFLLILLSKLYGFLMNARRTLFDLGLLSSNKPDIPVIIIGNLNIGGTGKTPFTLYLANMLSRSGKKVGIVSRGYKGKKSSSKPFLLGKNSNARDFGDEAVYLSRHADAMVCVCRKRSLAAHFLSDKGVDIILSDDGLQHYGLKRDIEFAVVSSNRGLETGICFRQDL

SEQ ID NO: 126693 - protein, 194 aa, Unknown
  Bacterial polypetide isolated from the Sargasso Sea
DRGVDVILSDDGLQHYALGRDIEFAVVSSNRGFGNRYLLPAGPLRERIERLDSFDLLLVNGKQIDQDLNMKNIISFEILNREVKNIHDGEVRPMEDFANRDILLIAGIGDPDALQEKLINLDIKVESIDVADHETADLSLIDDIKSRTIFLTPKDLVKYSKDDLPRETWELIPEMSIDHSEEQILIRQIQGIME

SEQ ID NO: 126694 - protein, 216 aa, Unknown
  Bacterial polypetide isolated from the Sargasso Sea
DEAQILAKLNIPFYIDKNRVRAVKKLIDNHDCDVIISDDGLQHYKMGRDIEINVIDGKRRLGNNLTFPAGPLRESKSRLKTVDFVVNNSGPTKDDEYLMNIIPSKFVHLKSGKSYSVEDWPMHKQVHAVAGLGNPGRFFDLLDKLGFDIIRHPYPDHHNFSSNDIFYLDHLPIVMTEKDASKCKDFDNNKIWYLTIDADVNNKFIDDLEDKLKSIS

SEQ ID NO: 126695 - protein, 168 aa, Unknown
  Bacterial polypetide isolated from the Sargasso Sea
WNRGIGNGLCLPAGPLREPLERVENVDFIINSSKIIDLQTKHKNYLMNYHPIEWARISDNKRFNADSWPLSKNVHAVAGIGNPAKFYKTLSSLGLNPIHHSFPDHYQFSEEDLDFGDSLPVIMTEKDAVRCLEMKNKNLWYLSIEAKFEDENLADEILTKLKLSKINE

SEQ ID NO: 126696 - protein, 325 aa, Unknown
  Bacterial polypetide isolated from the Sargasso Sea
MSKYTENYFFSFNKIKILNIILLPLSLIYYVFFILRKNYLLTNSYKTSKYLIVIGNITVGGTGKTSFTIWLANYIENTLNKKVAIISHGYGSKFPKKLSEVTNNSSLLDVGDESLIIRRNTNAKIYKCKDRLKAYKYIEDKLNIDYVIMDDGLQHYKLKPNLSICLAKEKNSFGNGLLLPAGPLREPIKSIKKFDILLYKKVRNSKEDYGFTYKADKLINLKNGKSQNIKDYSGKVFHLILTIADSYFVEEVLKDNNIKYISHFYPDHFNINDKMLEFDDNYDILLTEKELVKITNMENTKIFYIPTEISVDEKIQNDINLKLNY

SEQ ID NO: 126697 - protein, 1046 aa, Unknown
  Bacterial polypetide isolated from the Sargasso Sea
MKRMLFNATQQEELRVAIVDGQKLIDIDIETAGREQRKGNIYKGVITRIEPSLEACFVNYGEDRHGFLPFKEVARQYFKEGIDMRSARIQDALREGQELIVQVEKEERGNKGAALTTFISLAGRYLVLMPNNPRGGGVSRRIEGDERQELRETMAQLQIPDGMSMIARTAGIGRSAEELQWDLNYLLQLWRAIEAASQSGNAGQPMLIYLESSLVIRAIRDYFQPDIGEILIDTNEIHDQARAFMDIVMPDNVAKVKRYHDDVPLFSRFQIEHQIETAYSRTVPLPSGGAIVIDHTEALVAIDVNSARATKGADIEETATRTNLEAADEVARQLRLRDLGGLIVIDFIDMESAKSQREVEQRLKDALKHDRARVQMGKISRFGLMELSRQRLRPALSEGSHVTCPRCNGTGHIRDTESSALQVLRIIQEEAMKENTAAIHCQVPVEVTAFLLNEKRQEINKIESRFKVGIVLIPNKHLDTPHYKLERLRHDDARLDDPRASWKMAEEAARELESETGYSKRAAEVKPKQEAAVKGITPERPAPSPAPQRPVEPVAAPAPVAPATGGFIGWLKGLFGVSPAPAPAPVAPAPAKEQAARPARGERAEKSEQRGERGGDRNRNRRGGAQQAQGGRDQVAAGRGQSQRQEREGKEVREPREAREPREGREPREGREPREGRENREGREGRSPREGREPRESREPREPRENREPREPRERVEQPEGVEAAGRGERQERRERRKPTQHAATLETVTRGETHPEPEADKAVAEALPGAELAADAEAGARDGEERRRRRRGRRGGRREREEDGAAVDHAEQGAEGEVTVQAVTPEAPAAAEPAHTAAPAVVVAAAAASAVVAEAVVEHHAEPAAPAAVEPQPAPVHVEAAPVEAAVVAQAAEPAPVAPAVDTEAGPAPVAVSPTDAFEVPAAPVAVEAPQPAPVEQAAPAVTTEAAPVVAEPAHVEAAPVEAVAAPAPAPAPAPAQPAAAPASASLDTVLEQAGLVWVNTDADKFAAAQEAASRLPRPARVPRERKALPPVDTAPMQQVETTHH

SEQ ID NO: 126698 - protein, 306 aa, Unknown
  Bacterial polypetide isolated from the Sargasso Sea
MVSYVLIPISLLYLLIFYLIRIFKTEYKIDIPIICIGNINLGGTGKTSTLLEIINHFKINNKNICVLLKGYGGKKTIFKKVSPDESAVQVGDEAILYSNHVPTYISTNRRLAVKKILDDVNPDFILLDDGFQDKSLFKDKNILMVNGARGFGNGLCLPAGPLRELIKPALKKAQFLIIVGDDKTKIKSMYKNINIDTLTASIKPLYVDKNKKYLAFSGIGNNQSFFDTLIDNNCTVLKTVEFPDHHFFSENDLNKLKKIASDNNLSLITTEKDFVRIPKEKRDGIECLKVKIKLHNMDKFMHKLVN

SEQ ID NO: 126699 - protein, 289 aa, Unknown
  Bacterial polypetide isolated from the Sargasso Sea
MKAPKFWYEPNSWRATFLLPLGYLYNLLTYLRGKTGKPLKYNCLTICVGNLNVGGTGKTPTTIALADHFLKKGLNVHIVSRGYKGKFQGTFLVNPRNHKADEVGDEPLLMSEFTSVWVSKRRKNGIAAAEKAGAQVVLLDDGFQDPSFHKDFSILVVDGTRGFGNKKCLPAGPLRENIFQGFKRADALVIVGSSLYGFDTFPSHLKVIRSTLKPVETGMNWKEGKYIAFAGIAHPDKFFNMLRSIGANLIDCVALSDHQRLSAQILKRLEHKALTAHAQLVTTEKDAVR

SEQ ID NO: 126700 - protein, 339 aa, Unknown
  Bacterial polypetide isolated from the Sargasso Sea
MILKFIENIWYKSFWSLTGVIVILMSPLSILYLFAIKLHDLLYKMKILRVLILKTPVLIVGNLTVGGTGKTPFCIWLSNYLEKLQIKVGIVASGYKSNGSSPKVVDKSSSPLDVGDEAIELASMTNAIVVSSNNRAKSSLFLENNFDLDLIIHDDGLQNKKIGRDVEILLINDNLKYGNGFLLPAGPLREFPDKRIQKSNLIVYSKCREHQYNIYNSKNIPAFMVENKLVTNSISKESRQIDSFERIHLVCGISSTKIIEENIRTLNVEYILHKYSDHYSFKGNEILFDDNLPVFVTMKDYVKLEPYKINNLWIIKNNLILNQSIENAIKKITTDIKKL

SEQ ID NO: 126701 - protein, 217 aa, Unknown
  Bacterial polypetide isolated from the Sargasso Sea
MKVKRPTFWDSFNFISLLLLPFSLITIIFNFFKSLSLKKYFKIKTICVGNIYLGGTGKTPLVLKINDMLKYKFKTVFIKKKYIDQIDEQNILSKYGNLICLSFRDIALRIAEKKNYQLAILDDGLQDKSLNYDISIACFNSSELVGNGLVLPAGPLRERITNILNYDLAFLNGEKNNKTFEKTLRRLNPNLKIFRAKYTPRNLESFNFKNNFLVFSG

SEQ ID NO: 126702 - protein, 308 aa, Unknown
  Bacterial polypetide isolated from the Sargasso Sea
QGKHSDLLEEEGIYASLYKNVPFESKKSSSTSLQKVSYLQPIDDVENNSSFVINAWYQKHLWLYLLLPFSWIFTFLTNRRRRKYLKNQISSFKTDTPVVVVGNINIGGTGKTPLVKHIASKLKERGLKVGIVSRGYGGNFSGTLRVDDNTEYKKSGDEAQMLANLNVPLYLDKNRPRAIQNLINENDCDVILSDDGLQHYKMYRDIEIIVIDGSRRLGNGLTFPAGPLRESSKRLKTGNYIINNGGPTEDGEILMTLQPSKFVHLNTGKSYDIDKWPMHNQIHAVAGLGNPGRFFDTLSQLNFDIERH

SEQ ID NO: 126703 - protein, 214 aa, Unknown
  Bacterial polypetide isolated from the Sargasso Sea
MLENNSSFVINAWYQKHLWLYLLLPFSWIFTFLTNRRRRKYLKNQISSFKTDTPVVVVGNINIGGTGKTPLVKHIASKLKERGLKVGIVSRGYGGNFSGTLRVDDNTEYKKSGDEAQMLANLNVPLYLDKNRPRAIQNLINENDCDVILSDDGLQHYKMYRDIEIIVIDGSRRLGNGLTFPAGPLRESSKRLKTGNYIINNGGPTEDGEILMTL

SEQ ID NO: 126704 - protein, 216 aa, Unknown
  Bacterial polypetide isolated from the Sargasso Sea
MIRIVKILENIWYRDKKPPNFLIGLSVVYGILLKVRRSLYDLGIFSTSKPEIPVIIIGNINVGGTGKTPFTLYLANTLSHLGKKVGIISRGYRGKKSSSKPFILDKKSKAEDFGDEAVYLSKHTDSMVCVCKKKLLAANLLFDRGVDVILSDDGLQHYELGRDIEFAVVSSNRGFGNRYLLPAGPLRERIERLDSLDLLLINGKQIDQDLNMKNII

SEQ ID NO: 126705 - protein, 298 aa, Unknown
  Bacterial polypetide isolated from the Sargasso Sea
ADQIVVLDNGLISQQGKHSDLLEEEGIYASLYKNDPIESKKSSSTSLQKVSYLQPIDDVENNSSFVINAWYQKHLWLYLLLPFSWIFTFLTNRRRRKYLKNQISSFKTDIPVVVVGNINIGGTGKTPLVKYIASKLKERGLKVGIVSRGYGGNFSGTLRVDDNTEYKKSGDEAQMLANLNVPLYLDKNRPRAIQNLINENDCDVILSDDGLQHYKMYRDIEIIVIDGSRRLGNGLTFPAGPLRESSKRLKTGNYVINNGGPTEDGEILMTLQPSKFVHLNTGKSYDIDKWPMHNQLHA

SEQ ID NO: 126706 - protein, 246 aa, Unknown
  Bacterial polypetide isolated from the Sargasso Sea
MFQFFLQKIWYRENFYKYLFMPFSWAFHVCLILRKKAYQIGIFKIYKANCPVVVIGNITVGGTGKTPITIWLADYFISKGYKILILSRGYGSKIGDHPIEVSRNMDVSMVGDEPLLMASKLKCPIIVHPSRAQSLIHIDGRKFDLILCDDGLQHYQLDRDFEIAVVDGEREFGNKCLLPAGPLREPISRLLEVDISLINNSNQESAKGDSFKLVGKKVINVHTNEVRSIEDFEGHEVHGVAGIGNP

SEQ ID NO: 126707 - protein, 246 aa, Unknown
  Bacterial polypetide isolated from the Sargasso Sea
MDHGKIVEVGDHASLIEKDSHYAELHRNQFKDDLQVITKTDEVTDLTIPEDAEIDQVSFIEDSWYKKRLWLWALWPFSRLIRSLVTRRRNKFLLNSELSWKPNIPVIVVGNITVGGSGKTPFVIWLSKVLEEQGYKPGIVSRGYGSKSNQFPLVINKDSRIEDSGDEPLIIYRNTNRPVCISPNRTQAVKKLLEDTDTDIVISDDGLQHYKLGRDMEIVVFDGIRGIGNSLCLPAGPLREPIERSK

SEQ ID NO: 126708 - protein, 253 aa, Unknown
  Bacterial polypetide isolated from the Sargasso Sea
DEVPVIVVGNVSAGGNGKTPLVSQIAKDLRTVGYRPTIVLRGYKGNFNGTVELNDDSDAKHVGDEAIFHYNRGFPVVVDRDRARAVSYAQRNINTDIVISDDGLQHHGLRRDFEIIVEDSKRDFGNGFFIPAGPLRDKKERINKTDLFLYSGRNKDNVDFFELEPASWVNIKTGDEFEIEDYPFGTSANLISGIAKPERFLNSVSNLGIACEHKFFPDHHYFSGNDIKFDFKRAILMTEKDAVRMDKKLIQKN

SEQ ID NO: 126709 - protein, 260 aa, Unknown
  Bacterial polypetide isolated from the Sargasso Sea
MEQRLLRAWYSRAGWLKLLRPLSALYRRVVVRRRQQYLDGQRAQWQPPVPLIVVGNITVGGTGKTPMVVWLVEFLRRQGYRPGVVSRGYGAAPPSFPWFVSPTDAPAIAGDEPLLIVQRCQVPLVIDPDRPAAARRLLEEGVDLIISDDGLQHYALGRSVELVLLDQQRDLGNRRCLPEGPLREPAERLQSVDLVVRNGATADGPKGYAMQLAPGVLVNLVSGERVAANRWSGSRQVAAMAGIGNPERFFATLQTLALNA

SEQ ID NO: 126710 - protein, 241 aa, Unknown
  Bacterial polypetide isolated from the Sargasso Sea
AFPRGNVGDEPLLIARATDLPVWVFPDRVLCAQTLLASHPGCNVIVCDDGLQHYRLRRDIEIIVFDARMGGNGFLLPAGPLREPMTRKRDATLINDPHYRATPDRPNIFGMHLALQDAYNLADPALRRPLAQFARVEGEQLLAAAGIGNPERFFASLRAEGLKPSTLPLPDHYDFANNPFADSHAEVILITEKDAVKCGHLDDPRIWVVPTTPVVDAALVEQVCQRVRALADRATAKAGAQ

SEQ ID NO: 126711 - protein, 211 aa, Unknown
  Bacterial polypetide isolated from the Sargasso Sea
MAPIFFSKTFVDRVWYSKNILSLLLLPISWIYIIIIKIRSALYQVGVIPVSKINVPIIVVGNITAGGTGKTPLVIWLANYFKNKGFLPGIISRGYGGKYLSDIEFVHSDSDPLLVGDEPLIIAKKCNCPVAVAKKRVRAAKELVSKYNCNIIISDDGMQHYSLGRDIEIAVIDGQRRLGNGYCLPAGPLREPKNKLLNIDLIVSKYTSQIF

SEQ ID NO: 126712 - protein, 201 aa, Unknown
  Bacterial polypetide isolated from the Sargasso Sea
MPEYEDEDSTSFVVDSWYKKSLWLYLLYPFSLIFSYLTSRRRKRYLNNKIASYKSEIPIIVVGNLTIGGTGKTPLVKYIVTELKKRGYRPGIVSRGYGGKFKETLKVSNDTPVKETGDEAQILAKLDVPFYIDKNRVRAVKKLTKNHECDVIISDDGLQHYKMGRHIEIAVIDGKRRFGNNLTFPAGPLREASKRINTVDF

SEQ ID NO: 126713 - protein, 228 aa, Unknown
  Bacterial polypetide isolated from the Sargasso Sea
MPEYEDEISTSFVVDSWYKKSMWLYLLYPFSLLFSYLTNRRRRKYIKNKVKSFKPNIPVIVVGNLTIGGTGKTPLVKYIATKLIDKGYRPGIVSRGYGGDFKETLRVNENTSVKETGDEAQILAKLNIPFYIDKNRVRAVKKLIDNHDCDVIISDDGLQHYKMGRDIEINVIDGKRRLGNSLTFPAGPLRESKSRLKTVDFIVNNSGPTKDDEYLMNIIPSKFVHLKS

SEQ ID NO: 126714 - protein, 234 aa, Unknown
  Bacterial polypetide isolated from the Sargasso Sea
MPEYEDEDSSSFVIDSWYKKSLWLYLLYPFSLIFSYLTSRRRKRYLNNKIASYKSKIPIIVVGNLTIGGTGKTPLVKYIVTELKNKGYRTGIVSRGYGGKFKETLKVSTDTPVKETGDEAQILAKLDVPFYIDKNRVRALKKLTKNHECDVIISDDGLQHYKMGRHIEIAVIDGKRRFGNNLTFPAGPLREASKRINTVDFIVNNSGPTNEDEYLMNISPTKFVHLKSGKSYSI

SEQ ID NO: 126715 - protein, 248 aa, Unknown
  Bacterial polypetide isolated from the Sargasso Sea
KVAIVSRGYGGNFTGTLRVDDNTEYKKSGDEAQMLANLNVPLYLDKNRSRAIKNLINENDCDVILSDDGLQHYKMHRDIEIIVIDGSRRLGNGLTFPAGPLRESSKRLKTGNYIINNGGPTEDGEILMTLQPSKFVHLNTGKSYDIDKWPMHNQIHAVAGLGNPGRFFDTLSQLNFDIERHPFPDHHQFEESDFGFLDHHPIIMTEKDAARCKNFGNPRIWYLTVEPKIEESFINDLESRIRSLPNDE

SEQ ID NO: 126716 - protein, 209 aa, Unknown
  Bacterial polypetide isolated from the Sargasso Sea
MPEYNDEVTTSFVVDSWYNKSIWLYLLYPFSLVFSFLTSRRRRRYIKNKIKSFTSKIPLIVIGNLTIGGTGKTPLVKYIAKELMAKGYKPGIVSRGYGGQFKKTLKVTVETSVKETGDEAQILSKLGIPFYIDKNRVRAVKELLKNNDCDVILSDDGLQHYKMGRNIEIAVIDGKRRFGNNLTFPAGPLRESKNRLKTVDFIVNNSGPY

SEQ ID NO: 126717 - protein, 293 aa, Unknown
  Bacterial polypetide isolated from the Sargasso Sea
QRLAIARAFYKDSPIIILDEATSSLDTESELIVQEALEKLITNRTTIVIAHRLSTIENASKIIVLDDGVLSETGTHKELLLNDGIYQSLYKNKFEDSPSEKITISESKQLYVPEYDEEDNASFVVDSWYKKSLWLYLLTPFSLLFKYLTKRRRRKYIQGKLESFKSDIPIIIVGNLTIGGTGKTPLVAYIAQELSKLGYKPGLVSRGYGGKFKETLEVTRDTPVKQTGDEAQILSKLNLPFYIDKNRVRAVKTLANNHDCDVIISDDGLQHYNMNRDIEIVVIDGKRRFGNNL

SEQ ID NO: 126718 - protein, 239 aa, Unknown
  Bacterial polypetide isolated from the Sargasso Sea
QYPLIIDDNSRVDDSGDEPLIIHRNTNRPICISPNRTQAVKKLLEETDTDIVISDDGLQHYKLDRDMEIVVFDGIRGIGNNLCLPAGPLREPIERLKDVDFIVSSSKRLDLDEIQEDCLMTYKPLEWVRLSDNRRFPANDWPLSRNVHAVAGIGNPSKFYNTLNALGLNLIEHSFPDHYQFKEEDLNFQDNHPILMTEKDAVRCMDMKNKNLWYLSIEADINNNGFKQELLSKLKEIGG

SEQ ID NO: 126719 - protein, 290 aa, Unknown
  Bacterial polypetide isolated from the Sargasso Sea
YIQEALIELSKNKTTLVIAHRLSTIESADKIVVLDHGKIVEIGDHATLIQKDSHYAELHRNQFKDDPQVATKEDEVRDLIIPEETEIDQVSFIEESWYKKRLWLWVLWPLSRLIKSLVTRRRNKFLLNSELSWKPDIPVIVVGNIIVGGSGKTPFVIWLSKVLEEQGYRPGIVSRGYGSKSNQYPLIINDDSRVEDSGDEPLIIHRNTNRPVCISPNRTQAVKKLLEETDADIIISDDGLQHYKLGRDIEIIVFDGLRGIGNNLCLPAGPLREPIERSKDADFIVSSTKR

SEQ ID NO: 126720 - protein, 182 aa, Unknown
  Bacterial polypetide isolated from the Sargasso Sea
MPKPSLISYLLIPFTLPIILRNLLFKFLKKEKPSNIKTICVGNIYLGGTGKTPLSIKIYEILKNFNNKVATVKKNHSNQNDEQLLLKQKTSLIISNSRKNAINEGLNQNYEILIFDDGLQDTEIDFDIKLVCFKSKNWIGNGQLIPAGPMREKISSLKRFDAVILNGNSSNFEKIEKSNKNY

SEQ ID NO: 126721 - protein, 190 aa, Unknown
  Bacterial polypetide isolated from the Sargasso Sea
TNTDTNIIISDDGLQHYSMPRDVEIAVFDGARGLGNGLCLPAGPLREPKSRLNDVDFILSSNEYLKEDIKSEIFSYEAVDFVRSLDGSSIKVSDWPLSRKINALAGIGNPNKFFDTLRFLGMDPIEHSFPDHYDFMEEDLNFEENLPIVMTEKDAIRSEDLNHLDFWYLRIKVSPPENLLDRILDKIKDK

SEQ ID NO: 126722 - protein, 201 aa, Unknown
  Bacterial polypetide isolated from the Sargasso Sea
AAIKKLLADTDTDIVISDDGLQHYKMDRDIEIVVFDGNRGIGNGLYLPAGPLRESLKRTDEADFIVSSSKLTRLKTKHNNYLMNYQPIEWARIKDNKRFNANSWPLSKNVHAVAGIGNPAKFFNTLISLGLNPIRHSFPDHYQFKEEDLDFGDTLPIIMTEKDAVRCLEMNSNNLWYLSVEAKFENEDLAENILNKLTINK

SEQ ID NO: 126723 - protein, 263 aa, Unknown
  Bacterial polypetide isolated from the Sargasso Sea
MRSIWFGTNPVRYALLPLAWLFRLIVWARRKAYLLSLLDSYRSPVPVIIVGNITVGGTGKTPLVIWLVGFLSALGFRPGIVARGYRGKAGSWPQQVRRDSDPVVVGDEAIILARRTDRPVAVGPSRGDAIQALLTHSDTNIVVSDDGLQHYAVTRDIEVAVLDGKERLGNGLFLPAGPLREPVSRLKEVDFVVAKGVASRGEFAMKYRADMLHNVAGGSKSMQAGEFRYKKVHAVAGLGQPEGFFNILKRLDFDCVKHVFPDH

SEQ ID NO: 126724 - protein, 206 aa, Unknown
  Bacterial polypetide isolated from the Sargasso Sea
SHCPVVVCPDRVAAAQYLLETTDCDIVISDDGLQHYRLQRDLELVLIDGQRGLGNQQLLPAGPLREPVSRLQSVDAVIVNSGNFESAQYKMLLKPVKPLALDGQSQWPEQAQAVTLVAAIGNPQRFVDTVKNFGIEVKASVFFRDHFAFDEQSLANIEGPVLMTEKDAVKCRAFAKPNWYYLPVEADLSDEFKFWLQHQLRQWRED

SEQ ID NO: 126725 - protein, 197 aa, Unknown
  Bacterial polypetide isolated from the Sargasso Sea
MQPIDDVENNSSFVINAWYQKHLWLYLLLPFSWIFTFLTNRRRRKYLKNQISSYKTDTPVVVVGNINIGGTGKTPLVKYIASKLKERGLNVGIVSRGYGGNFSGTLRVDDNTEYKKSGDEAQMLANLNAPLYLDKNRPRAIQNLINENDCDVILSDDGLQHYKMYRDIEIIVIDGSRRLGNGLTFPAGSSKRIIKKI

SEQ ID NO: 126726 - protein, 271 aa, Unknown
  Bacterial polypetide isolated from the Sargasso Sea
LEKLISDRTTIVIAHRLSTIENADQIVVLDNGLISQQGKHSDLLEEEGIYASLYKNVPIESKKSSSTSIQKVSYLQPIDDVENNSSFVINAWYQKHLWLYLLLPFSWIFTFLTNRRRRKYLKNQISSYKTDTPVVVVGNINIGGTGKTPLVKYIASKLKERGLNVGIVSRGYGGNFSGTLRVDDNTEYKKSGDEAQMLANLNAPLYLDKNRPRAIQNLINENDCDVILSDDGLQHYKMYRDIEIIVIDGSRRLGNGLTFPAGSSKRIIKKI

SEQ ID NO: 126727 - protein, 255 aa, Unknown
  Bacterial polypetide isolated from the Sargasso Sea
MDRLDSSTVKSGLIDSNYTVEEERYSERNLWYNGSRIPFVLMPLEYIFKQLIFFRRLCYRFKIKSSWRSPVPVIVVGNITVGGTGKTPFVIWLANYLSNLGLRPGIVLRGVGGRANGVSVRVGEKTHVDEVGEEALILARKTGCPTVVAKKRVNAAKKLLSEESVDLIISDDGLQHYSLERDMEVVIVDGQREFGNEHLLPVGPLREPISRLEGVDWVIANEKVSYRVPQKQTLIEVAPVYFVALGTGEKLSIKT

SEQ ID NO: 126728 - protein, 155 aa, Unknown
  Bacterial polypetide isolated from the Sargasso Sea
LGNARLLPAGPLREGAWRLKQADIVVANSQAVAGADGVMQLKAAPARSLISDSELDSRDVTLVAGIGNPQRFERTAVAAGFNITARHYFADHHKFTAADFTAIDGPVLMTEKDAVKCQQFAKADWFSLGVDAELDAQLKTKLTLLLTELRSKYGT

SEQ ID NO: 126729 - protein, 201 aa, Unknown
  Bacterial polypetide isolated from the Sargasso Sea
SLFLFPFSLIFFIIIKIRRTLYKYRILAKYKSSIPLIIIGNITIGGTGKTPFVIWLANHLANKGLKVGVISSGYKSTSKTPEIVNKNSNSNQVGDEAVLIAKHTDSIVVSGGSRVDATKLLTSISTNDIILHDDGLQHYKLERDYEIILVNSKNPFGNGLLLPAGPLREPKSRLEDTDIVAFTNSSNESSYSIASISDSVV

SEQ ID NO: 126730 - protein, 281 aa, Unknown
  Bacterial polypetide isolated from the Sargasso Sea
LPEYQDEISTSFVVDSWYKKSLWLYLLYPFSLIFSYLTNRRRRKYIKNKVSSYKSSIPIIVVGNLTIGGTGKTPLVKYIATQLISKGYKPGIVSRGYGGKFKETLQVTKDTSVKETGDEAQILAKLNIPFYIDKNRLRAVKTITDNHDCDVIISDDGLQHYKMARDIEIIVIDGKRRFGNNLTFPAGPLRETKSRLKTVDFIVNNSGPTEDNEYLMNISPSKFVHLKSGKSYSVEDWPMHKQVHAVAGLGNPGRFFDLLDKLGFDIIKHPYPDHHIFSSSD

SEQ ID NO: 126731 - protein, 287 aa, Unknown
  Bacterial polypetide isolated from the Sargasso Sea
MPEYEDEVSTSFVVDSWYKKSMWLYLLYPFSLIFSYLTNRRRRKYIKNRLDSFKPNIPIIVVGNLTIGGTGKTPLVKYIATELMDRGYKPGIVSRGYGGNFKETLQVNKDTSVKETGDEAQILAKLNIPFYIDKNRVRAVKKLISNHDCDVIISDDGLQHYKMGRDIEINVIDGKRRLGNNLTFPAGPLRESKARLKTVDFIINNSGPTEDGEYLMNITPSKFVHLKSGKSYSVEDWPMHKQVHAVAGLGNPGRFFDLLGKLGFDIIRHPYPDHHNFSSNDIFYLDH

SEQ ID NO: 126732 - protein, 140 aa, Unknown
  Bacterial polypetide isolated from the Sargasso Sea
LRSVDAIIVNGGVAQAGEIPMQLRPGLAVNLRSGERRDVASFENVVAMAGIGHPPRFFATLESCGVLPVKTVALADHQALTQASVSALVNPQQTLLMTEKDAVKCRGFAESNWWYLPVDAIMTDERAQQLLTELVTLAQR

SEQ ID NO: 126733 - protein, 256 aa, Unknown
  Bacterial polypetide isolated from the Sargasso Sea
CQLLKKEGLKPGIISRGYLSKSKTYPLLLNSETPIEESGDEPAIMFKNSQCPVVIGPNRIQAAKHLMENTDSNVILSDDGLQHFSLGRDIEILMIDGNRKFGNELLLPAGPLREPKSRIKTVDYTISSNRKWPSVAKYEMKYRPFKWVHMKSQKEYDIFDWPLKKEVNAVAGIGNPSNFFNLLKQMGFDISEYTFPDHHDFHSVDFEIMDNQPTVMTEKDAIKCSFLDHTNYWYLKIEAEVSDNFEQDFLNEIKSK

SEQ ID NO: 126734 - protein, 191 aa, Unknown
  Bacterial polypetide isolated from the Sargasso Sea
MNDLSSVSFIEQSWYQKKLWLWLLWPLSLLTKFAAKRRREKFINQPQLSWKPDVPVIVVGNIVVGGTGKTPMVIWLVKNLERKGFKPGIVSRGYGGSSPSIPQIVDDATPVKISGDEPLIIYKNTLRPVCISSNRTSAISKLLEETDTDIIISDDGLQHYKMDRDIEIVIFDGNRGIGNGLCLPAGPLRDL

SEQ ID NO: 126735 - protein, 287 aa, Unknown
  Bacterial polypetide isolated from the Sargasso Sea
MKLPSALDSESENYIQDALQELTKNRTTLVIAHRLSTIESSDKIVVLESGNIVEMGSHQNLISNDGHYAELHKNQFKDDPSELKKKSLPIEYLEEDLNDLSSVSFIEQSWYQKKLWLWLLWPLSLLTKFAAKRRREKFINQPQLSWKPDVPVIVVGNIVVGGTGKTPMVIWLVKNLERKGFKPGIVSRGYGGSSPSIPQIVDDATPVKISGDEPLIIYKNTLRPVCISSNRTSAISKLLEETDTDIIISDDGLQHYKMDRDIEIVIFDGNRGIGNGLCLPAGPLRDL

SEQ ID NO: 126736 - protein, 142 aa, Unknown
  Bacterial polypetide isolated from the Sargasso Sea
FVMVNGGHAQANQYEMQLSPSAVLPVNPKAEAVFDSTQPVVAMAGIGHPARFFETLTQQGIQLALSHGFDDHQAYDKHVLCELAASRPLMMTEKDAVKCRDFAQENWWYLAVDAKLSPQFDQQLLSRVRSVAAAKQGKSHGV

SEQ ID NO: 126737 - protein, 305 aa, Unknown
  Bacterial polypetide isolated from the Sargasso Sea
MSALFWLISITRKQMYRFGIFKQFKSDIPIIVVGNISVGGNGKTPFVLWLYDFLTKQGLSVGIISRGYGGKASNYPLIVKDNTPAAEAGDEPKLLFHRLKCPIAIGPNRQRNIELLALDYNLDIIISDDGMQHYKMARTIECCIVDSERQFGNGLLMPAGPLRETPARLKSVDLIVENGGQNSNNYTLEPAALRSVKSSFPISESIKNGHAVSAIGNPKRFENTLKKQGITLLSSNHFRDHHPYTAEDFTRFGNDNILMTEKDAVKCSEFAKDNWYYLPVNARPTQAVINKLTLILKEKGILNGL

SEQ ID NO: 126738 - protein, 287 aa, Unknown
  Bacterial polypetide isolated from the Sargasso Sea
MTRIVKILENIWYRDKKPTNFLIVLSMVYGILIKIRRLLYDLGIFSTSKPEIPVIIIGNINVGGTGKTPFTLYLANRLSHLGKKVGIVSRGYRGKKSSSKPFILDKNSKAEDFGDEAVYLLKNTDSMVCVCKKRLIAANLLFDRGVDIILSDDGLQHYALGRDIEFAVVSSNRGFGNRYLLPAGPLRERIERLDSLDLLLINGKQIEKDLNIKNIISFEILNREVKNIHDGEVRPMEDFVNRDILLIAGIGDPGALQEKLINLDINVDSIDVIDHETADLSLIDDIK

SEQ ID NO: 126739 - protein, 328 aa, Unknown
  Bacterial polypetide isolated from the Sargasso Sea
MESIWYQDKKPPFLLILLSKLYGFLLNARRALFDLGLLSSNKPDIPVIIIGNLNIGGTGKTPFTLYLANMLSRSGKKVGIVSRGYKGKKSSSKPYLLGKNSNARDFGDEAVYLSRHADAMVCVCKKRSLAAHFLSDKGVDIILSDDGLQHYGLKRDIEFAVVSSNRGFGNRYLLPAGPLREGLERLETLDHLLVNGKKLDQDLRVDNLIGFEIVNREVKNIHDGDIRPIDEFLNRDVSLIAGIGDPEFLAESLKNKGINIHSIDVKDHEKIDLNTINEIENRTLFLTPKDLVKYSKDDFPKDTWELIPDLLIDQADQEIILNKVMKIV

SEQ ID NO: 126740 - protein, 336 aa, Unknown
  Bacterial polypetide isolated from the Sargasso Sea
MIRIVKILENIWYRDKKPPNFLIGLSVVYGILLKIRRSLYDLGIFSTSKPEIPVIIIGNINVGGTGKTPFTLYLANTLSHLGKKVGIISRGYRGKKSSSKPFILDKKSKAEDFGDEAVYLSKHTDSMVCVCKKKLVAANILFDRGVDVILSDDGLQHYALGRDIEFAVVSSNRGFGNRYLLPAGPLRERIERLDSLDLLLVNGKQIDQDLNMKNIISFEILNREVKNIHDGEVRPMEDFVNRDILLIAGIGDPDALREKLINLDIKVESIDVVDHDTADLSLIDEIEKRTIFLTPKDLVKYSKDDLPRETWELIPEMSIDHSEEQILIRQIQGIME

SEQ ID NO: 126741 - protein, 191 aa, Unknown
  Bacterial polypetide isolated from the Sargasso Sea
MLENNSSFVINAWYQKHLWLYLLLPFSWIFTFLTNRRRRKYLKNQISSFKTDTPVVVVGNINIGGTGKTPLVKHIASKLKERGLKVGIVSRGYGGNFSGTLRVDDNTEYKKSGDEAQMLVNLNVPLYLDKNRPRAIQNLINENDCDVILSDDGLQHYKMYRDIEIIVIDGSRRLGNGLTFPAGPLRESSKR

SEQ ID NO: 126742 - protein, 327 aa, Unknown
  Bacterial polypetide isolated from the Sargasso Sea
MNKFFEQIWYSNFNVYSLILFPFSLIFLIIIKIRIILYRYGILVKYKSPIPLIIIGNITIGGTGKTPFTIWLANHLTKKGLKVGVISSGYKSTSKTPKIVKENSNANQVGDEAVLIAKYTDSIVVSGGSRVDATKLLTKISINDIILHDDGLQHYKLERDYEIILINSKNPFGNGLVLPAGPLREPKSRLDNTDIVAYTNNNNDSTYSIATISNSVVNSVSEESKNIKDFALKKIHLVTGIASMEMIIENLKSYKIQCILHEYDDHYIFDGSEVIFDDNYPVFITQKDYVKLSGINNKNIWIIDHKVKPNNLLITKLNSDLSHLLNI

SEQ ID NO: 126743 - protein, 209 aa, Unknown
  Bacterial polypetide isolated from the Sargasso Sea
ARGAAYLSDELHCDLIICDDGLQHYALHRDVEIVVMDDRKVGSGYLLPMGPLREGQWRLGTVDALVHNSRSMPTFSHAVAPQYLMTLVPGDFTSVSNRVRTSPLEEIQKVPCSAIAGIGSPQRFFSQLKEMGIQLSSATPLADHHAITRSDIPNGRVLMTEKDAVKAAPFAHNDCWFLPVTAHLAPDFFNLVNVKLAKAGLKINQDGQE

SEQ ID NO: 126744 - protein, 334 aa, Unknown
  Bacterial polypetide isolated from the Sargasso Sea
MLAPKFWYPENNEKSFSSLALVPFGHIYSLLSKLRMSKAVKKQFDIPIVCIGNLNAGGTGKTPTTISAAEFLKDRKYNVHIVSRGYGGTAMGPLSVNDKEHSADEVGDEALMLSAFAPTWVATKRSDGVQSAIKEGADIILLDDGFQDPSVYKDLSILTVNAKKGFGNNRCIPAGPLREKLSSGLERADVLISIGTETSQITFKSIYKNYINMPLGIANLEVLNTGLSLENMKVLAFAGIAHPENFFDTLRAQGAEIVDYQALADHQKLSSKIMKRLIVSARAENAQLITTEKDYVRLPKEFRGEVMTLPVRIKLNENLSWEKIFKPILCCQGK

SEQ ID NO: 126745 - protein, 271 aa, Unknown
  Bacterial polypetide isolated from the Sargasso Sea
MTVGGTGKTPIIIYLAKLLKKQGLKPGIISRGYLSKSKTYPLLLNSETPIEESGDEPAIMFKNSQCPVVIGPNRIQAAKHLMENTDSNVILSDDGLQHFSLGRDIEILMIDGNRKFGNELLLPAGPLREPKSRTETVDFTISSNRKWPSVAKYEMKYRPYKWVHMKSQKEYDIFDWPLKKEVNAVAGIGNPSNFFNLLKQLGFDISEYAFPDHHDFHSVDFEIMDNQPTVMTEKDAIKCSFLDHTNYWYLKIEAEVSDNFEQDFLAEIKSK

SEQ ID NO: 126746 - protein, 269 aa, Unknown
  Bacterial polypetide isolated from the Sargasso Sea
VVWLVEQLQARGYRPGVVSRGYGGKAPHYPYRLDAASTTVQAGDEPVLIARRCGCPVVVAPKRADAVRLLEQSGEVDIIITDDGLQHYALARDIELVVVDGARRFGNACLLPMGPLREPVTRLKRVDAIICNGGEPGRGEYPMRLVADAPRRVCDEAPLATPLVGPVDALAGIGHPPRFFATLEGLGYQLDQRVAYGDHHPFDRDELVSRFAGKPLLMTEKDAVKCRSFALDNWWYLPVSAELPASLLDTLLHKLGASGKGQGATKAQG

SEQ ID NO: 126747 - protein, 207 aa, Unknown
  Bacterial polypetide isolated from the Sargasso Sea
VPVAVSPVRSDAVKAILAQHDVQIIVTDDGLQHYRLARDVEIVVIDGERRFGNGWWLPAGPMRERAGRLKSVDATIVNGGVAQPGEIPMRLEPGLAVNLRTGERRNVAQLPNIVAMAGIGHPPRFFATLKACGASVQKSIALADHQSLTYSDVSAFVNAGQTLVMTEKDAVKCRAFADENWWYLPVDAHLSGDRPDMLLDSLISLTR

SEQ ID NO: 126748 - protein, 212 aa, Unknown
  Bacterial polypetide isolated from the Sargasso Sea
WWEPKRVDTAKALLAEFAVDVIICDDGLQHYALGRDIELVVIDGKRGLGNQHLLPAGPLREGAWRLNQVDFVVVNGGPAQANQYEMQLSPSAVLPVNPKAEAMFDPTQPVVAMAGIGHPARFFETLTQQGIQLALCHGFDDHQAYDKHVLCELAASRPLMMTEKDAVKCRDFAQENWWYLAVDAKLSPQFDQQLLSRVRSVAAAKQGKSHGV

SEQ ID NO: 126749 - protein, 342 aa, Unknown
  Bacterial polypetide isolated from the Sargasso Sea
MSAPDGPLARLEARLTREWQRRGALAWALTPFACVFGLCAALRRTAYAQGWKKPVDVGVPVVVVGNVTVGGTGKTPTVIALVDALRAAGFTPGIVSRGYGANVKAPTAVTPASRASAGGDEPLLIARRTGAPVWVCPDRVAAAQALRAAHPDVDVIVSDDGLQHYRLARTVELVVFDHRLGGNGFLLPAGPLREPLSRHRDATLVNDPYSGALPPWPDTYSLALTPGAAWHLDQPALRRPLSQFANERVLAAAGIGAPERFFATLRAAGLAPATRALPDHYAFAENPFVDDAVDAILITEKDAVKLGASWRDARLWVVPVEAALDPRLIALVVEKLRGRSPA

SEQ ID NO: 126750 - protein, 360 aa, Unknown
  Bacterial polypetide isolated from the Sargasso Sea
KNQFKEDEEDGLRREPQINFFEESADDLSSASFIEQSWYEKKLWLWLLWPLSLLTQFVSRRRRYKFLDQPKLSWKPEVPVVVVGNIVVGGTGKTPLVIWLTKLFEKNGYKPGIVSRGYGGSSTKPILIDDETSVSVSGDEPLIIYKNTLRPVCISTNRIAAIKKLLADTDTDIVISDDGLQHYKMDRDIEIVVFDGNRGIGNGLYLPAGPLRESLKRTDEADFVVSSSKLTRLKTKHTNYLMNYQPIEWARIKDNKRFNANSWPLSKNVHAVAGIGNPAKFFNTLISLGLNPIKHSFPDHYQFKEEDLDFGDALPIIMTEKDAVRCLEMNSNNLWYLSVEAKFENEDLAENILNKLKTNK

SEQ ID NO: 126751 - protein, 338 aa, Unknown
  Bacterial polypetide isolated from the Sargasso Sea
MSGPNDRLEARLAREWQQRGPLAWALTPLACVFGAIAAARRAAFSFGWLKSVRIGVPVVVVGNVTVGGTGKTPTVIALVEALRAAGFKPGVVSRGYGARVKEPTPVLATSAANVGGDEPLLIARRTGAPVWVCPDRVAAAQALCAAHREVDLIVSDDGLQHYRLERDAELVVFDHRLGGNGFLLPAGPLREPLSRRRDATLVNDPYARTLPPWPNTFALQLAPADAWHLDNPGLRRPLAQFSGERVLAAAGIGAPERFFATLRAAGLTPTTRALPDHYAFERNPFTDVDADTILITEKDAVKLGSWRDARIWVVPVEAALDHRLIALVVEKVRGRSPA

SEQ ID NO: 126752 - protein, 256 aa, Unknown
  Bacterial polypetide isolated from the Sargasso Sea
PRSWPQVGVVSRGYGATPTSLPWRVRADQPAAQAGDEPLLIVQRTGVPLMIDPDRSRAVRALLAEEPLDLILCDDGLQHYRLARDLELVLIDAARGLGNRRCLPAGPLREPVERLAEVDAVLFNGAEADCADGYAFRLQPTALVNLVSGERVGLEHFPPGQAVHAVAGIGNPQRFFNTLEALNWRPVPHPFADHAQYDATQLSFEPSLPLLMTEKDAVKCRAFAAADWWYLAVDAAPTPAFVDWLDGELARLIPGS

SEQ ID NO: 126753 - protein, 323 aa, Unknown
  Bacterial polypetide isolated from the Sargasso Sea
MNWWEKGWYQQHPFTLIFWPLSLLYRLVAVIRRFGYQRGWFQSFAVEKPVVIVGNISVGGTGKTPFTLWLCKFLAEQGFTPGIVSRGYGARITEPVRVTSLHLACDVGDEPLLLASKSHCPVVVCPDRVAAAQYLLDTTDCDIVISDDGLQHYRLQRDLELVLIDGQRGLGNQQLLPAGPLREPVSRLQKVDAVIVNSGDFALAKHKMSLKAVIPQALDGQSQWPEQAQPVTLVAAIGNPQRFVDTVKSVGIEIKATAFFRDHFAFDEHSLADIEGPVLMTEKDAVKCRAFAKPNWYYLPVEADLSDEFKFWLQQQLRQWRDE

SEQ ID NO: 126754 - protein, 335 aa, Unknown
  Bacterial polypetide isolated from the Sargasso Sea
MQALVNKIWYEGHPLRWLLLPFSVLFALITAIRRSLFRLGLKSQTALPVPVIVVGNITVGGSGKTPTVIYLIELLRQQGFNPGVISRGYGVDIQGVKVVTTADSAAAVGDEPAMIVARTDVPMVVGAKRVDTAKALLAEFAVDVIICDDGLQHYALGRDIELVVIDGKRGLGNQHLLPAGPLREGAWRLNQVDFVVVNGGPAQANQYEMQLSPSAVLPVNPKAEAMFDPTQPVVAMAGIGHPARFFETLTQQGIQLALCHGFDDHQAYDKHVLCELAASRPLMMTEKDAVKCRDFAQENWWYLAVDAKLSPQFDQQLLSRVRSVAAAKQGKSHGV

SEQ ID NO: 126755 - protein, 335 aa, Unknown
  Bacterial polypetide isolated from the Sargasso Sea
MQALVNKIWYQGHPLRWLLLPFSALFALITAIRRGLFRLGIKSQTTLPVPVIVVGNITVGGSGKTPTVIYLIELLRQQGFNPGVISRGYGAHIQGVKVVSVKDAATDVGDEPAMIVARTGVPMVVGPKRVDTAKTLLAQFAVDVIICDDGLQHYALGRDIELVVIDGKRGLGNRHLLPAGPLREGAWRLNQVDFVVVNSGPAQANQYEMQLSPSAVLPVNPKAEAVFDPTQPVVAMAGIGHPARFFETLTQQGFQLALSHGFDDHQAYDKHVLCELAASRPLMMTEKDAVKCRDFAQENWWYLAVDAKLSPQFDQQLLSRLRSVAAAKKGKSHGV

SEQ ID NO: 126756 - protein, 204 aa, Unknown
  Bacterial polypetide isolated from the Sargasso Sea
NIPIGSGLGGGSADAAATLVLLRTLFNKDKNHYKMPISKILQIGSELGSDVPSCIMSKDLRLSGYGKEIKRKKFPSNYYFLIIYPNIELSTKSVFQHYSDFKNFNHKSKKILFENIKIHNSLLLSATSLAPKIRDVLVILRKIPNIVAYGMTGSGSTCFGIVKSLKDIPNLVKFFNNEYFIWFGQKANFNLNRVSFSKVLENKF

SEQ ID NO: 126757 - protein, 146 aa, Unknown
  Bacterial polypetide isolated from the Sargasso Sea
MEYKYRSYAKINSYLNVMSKLDNGYHEILTHFQIIDLYDEVLFKESDVLLIDSNEKTIKDNNSITKTIKWFNEKYGVNQKFEAKIKKSIPIGAGLGGGSSNAAIALRFLAEFHNIQIKDIDNTEIALALGADVPVFVHKKSCYASG

SEQ ID NO: 126758 - protein, 170 aa, Unknown
  Bacterial polypetide isolated from the Sargasso Sea
MNKLLLKSPAKINLDLTILNKLKNGYHEINTSFQLIDLFDEIEFESSKNNISLSSNLKELNSDDNIITTVARKLKNSNSKLGVKIKLKKLIPIGAGLGGGSSNAASTIVALNKLWDLKMSKSEMHNFARNIGADVPFFLFGQNAQGNGIGDILKYKDSITDNILIIDPMI

SEQ ID NO: 126759 - protein, 185 aa, Unknown
  Bacterial polypetide isolated from the Sargasso Sea
MILKSFAKINLSLLVNKKLTSGLHDLQSIYCLINLFDTISIKKIKNKKKDKISIKGPYSKYVSQSNNSITKTLNLMRKSKLISDFYSITINKKIPVFAGLGGGSSNAATVIKFLIKQNLRKKILNLLTKQVSSDLILFFHDQGYLKNLHTVYKIKKKYNLNFLLIYPNIKSSTKKVYSSLKNIQK

SEQ ID NO: 126760 - protein, 172 aa, Unknown
  Bacterial polypetide isolated from the Sargasso Sea
MEYKYRSYAKINSYLNVMSKLDNGYHEILTHFQIIDLYDEVLFKESDVLRIDSNEKTIKDNNSITKAIKWFNEKYGVNQKFEAKIKKSIPIGAGLGGGSSNAGIALRFLAEFHNIQIKDIDNTEIALALGADVPVFVHKKSCYASGIGDILGKKSFNASEYLLICPQILFHP

SEQ ID NO: 126761 - protein, 234 aa, Unknown
  Bacterial polypetide isolated from the Sargasso Sea
MQDLAKTKINIKSPAKINLHLEVIGKREDGFHELAMIMQNIDLSDYLEFEINNEGLIKLESDCNDLSLSDDNLIVKSANLLRKKSNIDYGANIFLRKNIPIGAGLAGGSSNAAATLIGLNKLWDLNLNQETLCSLASTLGSDIPFFINGGIQLCFGRGEILEKLDSNFDYGVILLKNPNVSVSTAETYKKYSNRFCDRYLTNREMIENIRKDLRDNGLNNLKNVNFDNQHLTIK

SEQ ID NO: 126762 - protein, 167 aa, Unknown
  Bacterial polypetide isolated from the Sargasso Sea
MKNTVILSPAKINLTLQIKERLKNGYHVISSHMIFLDLFDRIFIQNKTSDFLKIVGPFKKKMNSSDRNNLIFKTLKFCRKNKLTNDSFKITLEKNIPISAGLGGGSSNSASIIRYFLKHNKNEKVSKIVNLSQKLGADIPACLYSQPLLAEGIGERISLINFNKNLD

SEQ ID NO: 126763 - protein, 221 aa, Unknown
  Bacterial polypetide isolated from the Sargasso Sea
EKNIPIGAGLAGGSTDAAATLLGLNKLWKLNLKTDELENLSKEIGSDIPFCISGGRQICFGRGEILEKLKFDQIQLGLVLVKDPSIQVSTPVAYKKYKEQFGESYLEDDRDFEIKRNSIRSIDWSDQSLFDHRKEIQNDLQKSVRPMTPEVEKSLNLLSSLPDSRLVSMSGSGPSCFALFQNYDQANKVLKEHVNEFERAGLSAWACSMMSNGVELRNEFT

SEQ ID NO: 126764 - protein, 176 aa, Unknown
  Bacterial polypetide isolated from the Sargasso Sea
MEYKYKSYAKINSYLNVMSKLDNGYHEILTHFQIIDLYDEVSFKESDSLLIASNEETIKDNNSITKTIKWFNEKYGVNQKFEAKIKKSIPIGAGLGGGSSNAAIALRFLAEFHNIQIKDIDNTEIALALGADVPVFVHKKSCYASGIGDILGKSSFNSSEYLLICPQNICFHSEPL

SEQ ID NO: 126765 - protein, 221 aa, Unknown
  Bacterial polypetide isolated from the Sargasso Sea
MSPAKINLYLEVLEKTSSGFHNIESLMTFCDFGDIINIKKEKSFRLTIDGPFSKKLPLNDNIIYKSVSFIERLINKNLTVHINLTKNLPIASGMGGGSSNAATVILCLIEMFNIDCKKDFHKSLFSLGADIPFCFCRKSAIVTGKGENILKIDNNYENFFVLLVNPMIQISTKKIFEKLTIPKRKDCTIFDEKFLSNSQIVDFLNSRNNDLEKPAILQCEE

SEQ ID NO: 126766 - protein, 231 aa, Unknown
  Bacterial polypetide isolated from the Sargasso Sea
MKVLVPAKINTLLYLLHKREDGYHELYSHFFPISLYDSLEIIPQNQSGITLEVDGMDFEEGLQNNLVYRAAELFQENSSNPFGMSIILKKNIPVGAGLGGGSADAAATLHVLNQLHQNPFSRKKLQDLALNLGADVPFFIYPEPSEVRGIGNVICPLNHYPLLPLLILKPPFSISTAEAFQECIPRRMKVPVKIVNDEELVRNLENRFEYTLFKKYPELKELKNQCLEHGA

SEQ ID NO: 126767 - protein, 136 aa, Unknown
  Bacterial polypetide isolated from the Sargasso Sea
MLTSKSYAKINLSLELLNKRKDGFHNISSIMQTISLSDLISVSLSDQMIIDSNTDSIPLGSNLVYIAAQKVKEKFNIKQNAHIKLTKNIPMSSGLGGGSSNAATVINLLKELWDIKCSHQDLLDLASQYWVRMYHS

SEQ ID NO: 126768 - protein, 254 aa, Unknown
  Bacterial polypetide isolated from the Sargasso Sea
MIMQNIDLSDYIEFENNQIGEINLKSDSKDLSLDEDNLIIKAATYIKDMSKNKELGANIFLKKNIPIGAGLAGGSSNAAATLVGLNKLWDLDLDYETIFILSAKLGSDVPFFIEGGCQFCFGRGEILEKYSSNFDFGVILLKNPNISISTVDTYKKYSQEFCPKYFTETEKTNKIRNDLRVNGFNDFKLSEQRINVRNDLQVIVERENNSVKKALYLLSNLQNCLSFSMSGSGPTCFALFKKINIANEVFEQKL

SEQ ID NO: 126769 - protein, 255 aa, Unknown
  Bacterial polypetide isolated from the Sargasso Sea
MIEIDTKSPAKINLYLRILNKRNDGYHNIETSFQYIDLYDFLNFKESKHDISIDSDSPVFKNTNNTVFQAASKMKEYSNNSSGVSIKIEKKIPIGSGLGGASSNAASTILALNKLWGLNLSDAELFSIGKGIGADVPFFIFGKNALGEGIGDILKNTESIENNIFIIDPKIHNSSKEMFTLYDSWIKNNKDANDYSQNSFWNIFIKENHIIQKFYDENINNYKLKLSGSGSCMYVEYKERQEIDQILKKIPSNWR

SEQ ID NO: 126770 - protein, 306 aa, Unknown
  Bacterial polypetide isolated from the Sargasso Sea
QGFIPSFKHQTIELNPETVQNIHNIGGSILSSSRGPQDIGEIVDCLERQDIRQLFCIGGDGTLRGAHEIAMEVEKRGLNIGILGIPKTIDNDIPFCIKTFGFETAFSKAVEAVQAAHSEAFGNNYGIVIIKLMGRDSGFIAANTSLASPDVNFVLIPEVPFSMEGENGLLHCLEQALHKKLQEGRHPHSVIVVAEGVGQELMGNTGEEKDASGNIRYKDISHFLKNKIIEHFQNRYPVNVKLIEPSYMIRSLPANPHDAIFCYHLADNAVHAMMSGKTDLMIGYWNGHFTHVPLQAVVQEQKRIDP

SEQ ID NO: 126771 - protein, 256 aa, Unknown
  Bacterial polypetide isolated from the Sargasso Sea
LEILGKRPDQFHDLTSIIVSVNLCDEIKIEESSELEIFCSNMLIKKESNLAYLVANALRNQYKISTGAKITLSKNIPVAAGLGGGSSDAATTLIGLNKLWGLGLKIDQLSPIARSFGSDITFFLHNGTAMVQGKGDIIRKLPQANIKYAVILSPDIPINNKTRLMFSKVTSSHYTKGALTRKLESRIRSRGDIPPELLFNVFDPISSELFPELKSTLQIFSEIWSEEIHICGAGPSLFTLVESREIATALSLLLNK

SEQ ID NO: 126772 - protein, 218 aa, Unknown
  Bacterial polypetide isolated from the Sargasso Sea
MQEVIPIKDNIILKAAEILKEKTNCSKGVQISIEKNIPLQKGLGGGSSNAAATLLALNVLWDTGLTKSELLKLSLELGSDVPFFVFGHSAWAEGRGEKLSKINCKEEWHLLFMPKAEISTKEAFEQLPLLTSNSYSYEDYCSKGGFNTFEKWARESYEEIDKIFIKLENIGKAHLSGTGSSVFISFKKKEIAEEVKKEFSNCILVKSLERSPLMQIIE

SEQ ID NO: 126773 - protein, 220 aa, Unknown
  Bacterial polypetide isolated from the Sargasso Sea
FQEIDLYDEIILEKLESGCEFSSNVDWLKNDSSNLCVNAWDQLSKFCSIGGVSISLLKNIPPGSGLGGGSSNAATILKGLCVLYDFHSPYEKLINAAINLGADVPFFLDGGLQQVSGIGEVLTPLDGCVNGTYLLVMPDIKINTTWAYNSFKKFLEESKEKVNFSNLLTKGTVPFEFFENDFESIVIPAYPEIANIKEMLWATGPKFVSLSGSGSTVYGI

SEQ ID NO: 126774 - protein, 214 aa, Unknown
  Bacterial polypetide isolated from the Sargasso Sea
HILDRRKDGYHNLESIFCIIDFYDRLSFQKNNSTKINFKTNSNEIDSTYNLVTKAYDLISSLYDIEGIDIFLDKKIPIGSGLGGGSSNAAVTLLALNEIFKLNMSKDNLLKISKEIGSDVPFFINGGAAYISGKGEIINSISIDKKYFVLILPNLNISTKDIYESLSSKDFMTQYSLDELMASNINSFEEIVMSKYPSLKETKYWLSAFGSVRM

SEQ ID NO: 126775 - protein, 240 aa, Unknown
  Bacterial polypetide isolated from the Sargasso Sea
MNNNIVLKSPAKLNLTLEILDKYKDNFHEINSVVLNVNLFDEIKIEKSNRFEIYTNAEIDAKENLIYKAYQLLFEQYGKLPTKVNLTKNIPLDSGLGGGSSNAANFLQGMNKLWSLDLNKNDLKLIGNQLGMDVNLFYDPGVNFLKGKGNLIDPIVTTPKGGLIIFYDDYRIPKKTFRAYNMIRNSDFSNGKISEQLIDCIKGRSFNLGSITCFNVFDKYINDLYPLTSEFKEYLKFANR

SEQ ID NO: 126776 - protein, 247 aa, Unknown
  Bacterial polypetide isolated from the Sargasso Sea
MLADRAPAKVNLTLHVLGRRVGDGYHVLESLVAFAGSADRLTLDPDGPLGLTVSGPTAGPAGPTDDNLVLRAARGLAARVPGLRAGAFHLVKRLPVAAGIGGGSSDAAAALRLLARLNRLPLDHAAVGAVARETGADVPVCLDPRARMMRGAGEEIGAALGLEPLPAVLINPGVPVPTAPVFRALGLSVGQDLAGAPHPTIPQATATDTLLQALAGARNDLEAPALTVAPVIGDALAALRAQGCRLA

SEQ ID NO: 126777 - protein, 197 aa, Unknown
  Bacterial polypetide isolated from the Sargasso Sea
KYNLKIGLDITLEKKIPLGSGLGGGSSNAAVTLHAINRLYNIQLAKDELLTLADQLGSDVPFFINGGTACVSGKGNIVNKVSSNPKFYVLIFPGISISTKHIFGIISDRHFCKPNDLNSLLESEHNSFEEVVLKNYPELIQTKYWLSSFGKVRMSGTGSTLYIEFDSYESAIEANKEIGNRYRSKMVSSLESYDIFS

SEQ ID NO: 126778 - protein, 133 aa, Unknown
  Bacterial polypetide isolated from the Sargasso Sea
MKLRTSAKINLNLEIFPEKQDNFHKLSSLMIPIDIYDDIEIEESVSEKIKFNDEHLNTTETTIHKALNLLRKVNPSFDKTFDVYIDKKIPYKSGLGGGSSNAGAVIRYLCDNYELDLPSNLEIVREVGSDVPF

SEQ ID NO: 126779 - protein, 272 aa, Unknown
  Bacterial polypetide isolated from the Sargasso Sea
MKDSFTELAPAKINLFLKILNKRNDSYHNIRSGITLINLVDEIFIEKSSFFNINYIGKFAPKNNKYTDCIINKLFNTFKISKPKYNFTIKKNIPTGSGLGSASTNAAAVFRILNKINLYKLNKFEDAKILGSDIPLFLNDNDCLIRGVGEKITNKTFPKYYFLLVKPKLKLQTKKMYSLININKLNYKIELDNEEINEFDKGNDFEEIAKTQNKDIISIFKFLKNLNNLVFYSLTGSGSCCYAAFKKKQHAIDAQIKFKTKFPYLWSFMAEN

SEQ ID NO: 126780 - protein, 271 aa, Unknown
  Bacterial polypetide isolated from the Sargasso Sea
MNKLLLKSPAKINLDLTILNKLKNGYHEINTSFQLIDLFDEIEFESSKNNISLSSNLKELNSDDNIITTVARKLKNSNSKLGVKIKLKKLIPIGAGLGGGSSNAASTIVALNKLWDLKMSKSEMHNFARNIGADVPFFLFGQNAQGNGIGDILKYKDSITDNILIIDPMIFSSTEEMYREYDLINNKNKIIKDNPNNNDFLDIFLEKNNQVKEFFENNAQEFEIRLSGSGSCMFVIYNDEKNIQKFIKKIPSNWRFFSCKPLQYSPICYIK

SEQ ID NO: 126781 - protein, 63 aa, Unknown
  Bacterial polypetide isolated from the Sargasso Sea
MNGAYTEVKSFKWPSPAKLNLFLHIVGRRPDGYHLLQSIFRFTNLCDFINYEILESEIIKRSS

SEQ ID NO: 126782 - protein, 261 aa, Unknown
  Bacterial polypetide isolated from the Sargasso Sea
MCLHVINRRDDGYHDIQGIFHVIDLHDTIIFKMNEGNSVNIHSTDKNLINNDNLIYKACRMLSQKYNLKIGMDITLDKKIPLGSGLGGGSSNAAVTLHAINRLYNIQLAKDELLTLADQLGSDVPFFINGGTAYVSGKGNIVKKISSNPKFYVLIFPGFSISTKHIFGIISDRHYCKPHDLNGLLMSEHNSFEEVVMKNYPELIQTKYWLSSFGKVRMSGTGSTLYIEFDSYESAIEANKEIGNRYRSKMVSSLESYDIFS

SEQ ID NO: 126783 - protein, 302 aa, Unknown
  Bacterial polypetide isolated from the Sargasso Sea
MQDLAKTKINIKSPAKINLHLEVIGKREDGFHELAMIMQNIDLSDYLEFEINNEGLIKLESDCNDLSLSDDNLIVKSANLLRKKSNIDYGANIFLRKNIPIGAGLAGGSSNAAATLIGLNKLWDLNLDQKTLCSLASTLGSDIPFFINGGIQLCFGRGEILEKLDSNFEYGVILLKNRNVSVSTAETYNKYGKRFCDQYLTDREMIENIRKNLRDNGLNNLNFDNQHLFIKNDLQVVVENENDSVKQALSLLSKLENSLTFSMSGSGPTCFALFKDIETAKKELTANSKLFKDKGYDSWVCT

SEQ ID NO: 126784 - protein, 189 aa, Unknown
  Bacterial polypetide isolated from the Sargasso Sea
MNKLLLKSPAKINLDLTILKKLKNGYHEINTSFQLIDLFDEIEFESSKNNISLSSNLKELNSDDNIIITVARKLKNANSKLGVKIKLKKLIPIGAGLGGGSSNAASTIVALNKLWDLKMSENEMHNFARNIGADVPFFLFGQNAQGNGIGDILKYKDSITDNILIIDPMIFSSTEEMYREYDLINKKNK

SEQ ID NO: 126785 - protein, 186 aa, Unknown
  Bacterial polypetide isolated from the Sargasso Sea
ASGIGGGSADAAATVRLISKVYDEPKPPINKLISLGADVPVCMHKGIVRMMGVGEKIINLSPAPNVGILLVNPRKALSTSKVFNAVKKKNNSGVKSHTFMEDKLNLWFDWINSMRNDLTSSAINLVPEIRFILDKLVTCDGAKVVRMSGSGATCFALFENFDLLQDAKDKIGKDCPSFWCEKGQLI

SEQ ID NO: 126786 - protein, 283 aa, Unknown
  Bacterial polypetide isolated from the Sargasso Sea
MVLKSFAKINLSLSINSKLANGLHNIQSIFCLVNIFDKIQITKIKKKNININKDKISFYGPYSSDVENKNNSIEKTLNILRDQKIISDFYSIKIFKNIPVFAGLGGGSSNAATVLNFFVKKKNERKIINKVINQVGSDIRLFFYTQGFLRNLDKVDKLKNNFKLHFLIIYPKIRCSTKNIFLKVKKFSKRVSFSNRYLKDKTIFLKRLKLANNDLQSIVEKKHPIISKLLEAISNEKGCLFSRLTGSGSVCYGLFINEYSSKVALKSLRKRYPNFWISIAKTI

SEQ ID NO: 126787 - protein, 264 aa, Unknown
  Bacterial polypetide isolated from the Sargasso Sea
MEYKYRSYAKINSYLNVMSKLDSGYHEILTHFQIIDLYDEVSFKESDNLLINSNEKTIKNNNSITKTIKWFNEKYGVNQKFETKIKKTIPVGAGLGGGSSNAAIALRFLAKFHNIQIKDIDNTEIALALGADVPVFVHKKSCYASGIGDILGKSSFNSSEYLLICPQIFVSTQNLYQSTYLEFQNIENKEINSFLPVLIKENEEFKDFYGLLRSQLPNKTFEKLKLSGTGSTLFLQNPSESEKEIINEKIGKNFRIFLAKGLEY

SEQ ID NO: 126788 - protein, 286 aa, Unknown
  Bacterial polypetide isolated from the Sargasso Sea
MKKFVLNSYAKINLFLKVGKKINKKKLHNIQSLVFLINLSDKVSIKKINYPKDSIKFTGKFNNNIKKSDNSIKKSLYLLRKKKIIKKNISYQINVKKNIPVFSGLGGGSSNAATIIRYFLRGKKILKNNIEYFSEKLGSDLGLFFKSKKVFQKNLSTIIDFKQSYNFYILLVYPYFKCSTKEIYSKLKTFDKIQAQNNYFKGNKYKFINTLKSTTNSLQKVVISKFPKVANILEEMKTIKKCQFSRMTGSGSACFALFLNKRDGTLALRQIKKKFPKFWCVLCKTI

SEQ ID NO: 126789 - protein, 264 aa, Unknown
  Bacterial polypetide isolated from the Sargasso Sea
NFQIFDQVEPNPSIETTEKIISEFKNENFSTVIGLGGGSSLDVAKYVGYKLEKKKIMIPTTFGSGSEVTKISVLNVDGKKTSFHDTKIISDVAIIDSNFIKGTPKNVIKNSAIDSCAQCSEAYDSKIANPYTKFLCEKAFDILESALLKNNYEKLALGSLITGLGFGNSSTTLGHALSYVYSNEGIMHGHALAHTTSVAHGFNNSKFYERFKKIVKYLDFSEINLSQNLDDAAELILKDRKHLDNNPKTVSKTDLISLLKEINS

SEQ ID NO: 126790 - protein, 289 aa, Unknown
  Bacterial polypetide isolated from the Sargasso Sea
MEKISILSPAKLNLTLKVAEKIDNGYHKIDSVVQIINFFDEIQLSKSSKDEEIIFNFSDSSVKKNENLAFIAIESFINFFQIKEGIKVDIKKNIPMGAGLGGGSSNAAAVLIGLHKLFKLNNFDQLVKLGAKIGSDVPLFLYGRSANLSGRGEIVETIKNPFNLNYLLIIPQIHSSTEELYSEWDKNQAAVSQYFQNKDTKLNIKDHIIELRNDFLPLLIKKFVIYDEIFSTLKDFGLSNISISGTGSSIFAIINNSYDCEPIIDYFKSSNQLKILQAQSIEGWQLQID

SEQ ID NO: 126791 - protein, 277 aa, Unknown
  Bacterial polypetide isolated from the Sargasso Sea
MELLKSPAKINLFLDVLSKDNDGFHNIKSILTLIDLHDEIIIKDSESLDINFSGEFSNEINQNNIQILFDFLIKKNFIKSGKYSINIRKNIPVGAGLGGGSSNIAVILNSLCSKKIIKYNEAINIARELGSDIEFFFDTAPAIIIGKGNVLRRINTFKEFYLVLVYPNFILSTEKVYKNNSQFDNENQIAFDKENYDFDEIMQLSSNSLQAAAIGLCPDIKYIIDKLTSMKGSLYSRMTGSGSCCFAVFDEKDLAQEATNTLKRHYPDWWVYQSKII

SEQ ID NO: 126792 - protein, 131 aa, Unknown
  Bacterial polypetide isolated from the Sargasso Sea
MKIIKTKCPAKINLYLKVGNLRKDGLHNIRSRFQLVDLYDDLMIKKTNCDFLIKSNLNKKKFLQNNILNLAHYHLTQETGDNLRCEVSLKKNIPIGAGLGGGSSNAASFLVATNKLFKLGLSLGKLNKIAA

SEQ ID NO: 126793 - protein, 244 aa, Unknown
  Bacterial polypetide isolated from the Sargasso Sea
YHDLDTEFRLVSLYDYLEIKESKNFQLNINNDEIKTEDNLITKAYFLMKSLCHEKSDFSFKVQKNIPIGAGLGGGSSNCASTLIVLNKLFKLNLPDSKLLKIGLSLGSDVPFFIKGKNSVAKGRGELLETIEIDSNYYLIIYPDIKISTADAFKFYEENKIDFPKHLKNDFEYFARKVYPEINEIFNLMSQYGTVELSGTGSSMYLNFNSSEEAYTIATKVPTNCKFFVTRSLDKSPIYDELNK

SEQ ID NO: 126794 - protein, 348 aa, Unknown
  Bacterial polypetide isolated from the Sargasso Sea
EKQVKMRAAQLWQWIYQKGERNFSQMSNLSKNYRELLSENFILDVPKVISKQCSKDGTRKYLLQLAGGHEVEAVYIPEEGRGTLCVSSQVGCTLTCSFCHTGTQKLVRNLTPGEIVGQVLIARDDLGEWKNLNGTNNETRLLSNVVLMGMGEPLYNFENVRDALKIVMDPEGICLSRKRITLSTSGVVPEISRTADEIGCLLAVSFHGTTDEIRDKLVPINKKWNIETLIKALKDYPRLSNSERITFEYVMIKGVNDSELDAYRLVKLIAGIPAKINLIPFNEWPGSPYRRSEWPQIKKFADIIHRAGYASPVRTPRGEDIMAACGQLKSETERQRKSKKEITMEAGI

SEQ ID NO: 126795 - protein, 276 aa, Unknown
  Bacterial polypetide isolated from the Sargasso Sea
MSLSNSTFSPAKINLFLRVDKKRSDGFHNIESRFQLINLFDEITIKKTNNKNISLSSNIKDKSFLNKNIILDAFFKLQEAVDEDLGCEVTVIKNIPMGAGLGGGSSNAASTLVGLNDLFKLNLSRTELTQLGAELGADIPFFINGKNADVSGFGEILSPCDSINSKILLIYPNIDVSTKEMFDELQAQRRIQGHKKISDKHNDFQDIFNKKFPVISNFFSQSEKEFNLEFAITGTGSSHFCFYKKELEISEFVKKIPNNWRFFNVEPLQYSPINDN

SEQ ID NO: 126796 - protein, 311 aa, Unknown
  Bacterial polypetide isolated from the Sargasso Sea
MQDLAKTKINIKSPAKINLHLEVIGKREDGFHELAMIMQNIDLSDYLEFEINNEGLIKLESDCNDLSLSDDNLIVKSANLLRKKSNIDYGANIFLRKNIPIGAGLAGGSSNAAATLIGLNKLWDLNLDQETLCSLASTLGSDIPFFINGGIQLCFGRGEILEKLDSNFEYGVILLKNPNVSVSTAETYKKYSNRFCDQYLTDREMIENIRKNLRDNGLNNLNFDNQHLSIKNDLQLVVENENDSVKQALYLLSKLENCLTFSMSGSGPTCFALFKDIETAKKELTANYKLFRNKGYDSWVCTFLEKGITFI

SEQ ID NO: 126797 - protein, 444 aa, Unknown
  Bacterial polypetide isolated from the Sargasso Sea
MTGSTDFNIKSLGPCRIPSPLKLELKDGTPYFNFVSDETKILYEVEKTNGSGSDIAFEKAGPRENIYYDPSKIRTGIVTCGGLCPGINNVIRTLVMQLYHNYGVRHIQGFRYGFQGFIPSFKHQTMELNPETVQNIHNIGGSILSSSRGPQDIGEIVDCLERQDIRQLFCIGGDGTLRGAHEIVMEVEKRGLNIGILGIPKTIDNDIPFCIKTFGFETAFSKAVEAVQAAHSEAFGNNYGIVIIKLMGRDSGFIAANTSLACPDVNFVLIPEVPFSMEGENGLLNCLEQALHKKFQEGSHPHSVIVVAEGVGQELMGNTGEEKDASGNIRYKDISHFLKNKIIEHFQSSYPVNVKLIEPSYLIRSLPANPHDAIFCYHLADNAVHAMMSGKTDLMIGYWNGHFTHVPLQAVVQEQKRIDPRGDFWRQVLFSTGQPLNMFMNSKA

SEQ ID NO: 126798 - protein, 275 aa, Unknown
  Bacterial polypetide isolated from the Sargasso Sea
MSEVLTTKSPAKINLYLHILDKRDDGYHNIKTHLQLIDIYDHIKFKTSKNRNIYIKSKESYLNNKDNTIYNAAKKLQNYQKRNSFKGVEIEVDKNIPIGSGLGGASSNAASTLIVLNKLWNLNLSEDKLMRIAATIGADVPFFVYGKNAFGEGIGEKLKEVDVISDKILIFNPNIHCSTKKMFSLHDKFLKNNKNISLSNQNHFWNIYLDKNPNIKNFITNNQLEEKINLSGSGSCMFIKYKNKKDIDKIIEKMPSNWRLFFSKPLQYSPICYIK

SEQ ID NO: 126799 - protein, 232 aa, Unknown
  Bacterial polypetide isolated from the Sargasso Sea
SIIDLYDEVLFKESDVLRIDSNEKTIKDNNSITKAIKWFNEKYGVNQKFEAKIKKSIPIGAGLGGGSSNAGIALRFLAEFHNIQIKDIDNTEIALALGADVPVFVHKKSCYASGIGDILGKKSFNASEYLLICPQIFVSTQNLYKSNYLEFQNIENKEINSFLSVLIKENKEFKDFYGLLRNQLPNKTFEKLKLSGTGSTLFLQNPSESEKDIINEKIGKNFRIFLAKGLEY

SEQ ID NO: 126800 - protein, 264 aa, Unknown
  Bacterial polypetide isolated from the Sargasso Sea
MEYKYRSYAKINSYLNVMSKLDNGYHEILTHFQIIDLYDEVLFKESDVLLIDSNEKTIKDNNSITKTIKWFNEKYGVNQKFEAKIKKSIPIGAGLGGGSSNAAIALRFLAEFHNIQIKDIDNTEIALALGADVPVFVHKKSCYASGIGDILGKKSFNASEYLLICPQIFVSTQNLYKSNYLEFQNIENKEINSFLSVLIKENKEFKDFYGLLRNQLPNKTFEKLKLSGTGSTLFLQNPSESEKDIINEKIGKNFRIFLAKGLEY

SEQ ID NO: 126801 - protein, 231 aa, Unknown
  Bacterial polypetide isolated from the Sargasso Sea
DRNLASQAVCAWREATGDDQGVSITIKKRIPIMAGLGGGSSDASATLGALNNMHGNKLSPRELSEVAARLGSDCPAFLVQGGCVAGGRGEKVRPLEQKAGDRLAGRRIFLLKPPIGFSTREVYARFADAGDNDSWSGKDMMKIVRDWEDSDLEIGELTRNDLQTVVFEKYPFMPAMFEILNLQFGSNPLMSGSGSCCFVAVSEAASFDQFALLVRESWGEEAFVFEARIRP

SEQ ID NO: 126802 - protein, 271 aa, Unknown
  Bacterial polypetide isolated from the Sargasso Sea
MKKIEINSPAKLNLFLKVKEKNQDGYHNIDTSFQLIDLFDYMSFEISNKNIVIKSNESFLENENNTIYQSAKLLLNFMDRQMGVNIKIEKKIPTGSGLGGGSSNAASTLIALNKLWNLNLSKEELMNIAIKIGADVPFFVHGENAYGSGIGDKLKSKDAIKDKVLLICPKINNASGEMYKLLDIYRKNGGNNSNHLQNDFWDIFLNKNNEIKEFYEATFDSNSLNLSGSGSSMYVLYKTENDIKEILKKIPSNWRFFFCKPLQYSPICYIK

SEQ ID NO: 126803 - protein, 223 aa, Unknown
  Bacterial polypetide isolated from the Sargasso Sea
MIEIDTKSPAKINLYLRILNKRNDGYHNIETSFQYIDLYDFLSFKESKHDISIDSDSPVFKNTNNTVFQAASKMKEYSNNSPGVSIKIEKKIPIGSGLGGASSNAASTILALNKLWGLNLSDEELFNIGKGIGADVPFFIFGKNALGEGIGDILKNTESIENNIFIIDPKIHNSSKEMFTLYDSWIKNNKDVNDYSQNSFWNIFIKENHIIQKFYDENINNYK

SEQ ID NO: 126804 - protein, 267 aa, Unknown
  Bacterial polypetide isolated from the Sargasso Sea
GKKNKKNKLHNVQSLVCLMNLFDEIAIKRINAKKDKVKFNGKFCSYIDRNYNTVSSCLSLLRKKKVIKKNYNYNISIKKNIPVFSGLGGGSSNAATIVKYFVKRKLTKKEKIFFSQKIGSDLRLFFDSKQVFQKNLSQIFNLKKKIKFYFILVYPFLKSSTKEVYSKVTEYKKLDNYNFYDKSSNFRIIEYLKHQENSLEKIVISRFPIIQKILFELMITKNCEFSRLTGSGSACFGVFLTKKSAVLGLKKIKKKFPKFWCVVGKTI

SEQ ID NO: 126805 - protein, 282 aa, Unknown
  Bacterial polypetide isolated from the Sargasso Sea
MKVLVPAKINTLLYLLHKREDGYHELYSHFVPISLYDSLEIIPQNQSGITLEVDGMDFEEGLQNNLVFRAAELFQEHSSKPFGVSIILKKNIPVGAGLGGGSADAAATLHVLNQLHQNPFSRKELQDLALNLGADVPFFIDPEPSEVSGIGDVIRHLKHYPLLPLLILKPCFSISTAEAFEECIPRRMKVPMKIVNDEELVRNLENRFEYTLFKKYPELKELKNQCLEHGALGASVSGSGSALFALFRTESEQMEAARKLKRISLTKIFPCKMLKKHIYGGL

SEQ ID NO: 126806 - protein, 189 aa, Unknown
  Bacterial polypetide isolated from the Sargasso Sea
VPMGGGLGGGSSDAATTLLALNQLWQLKLSNAQLCELGLKLGADVPVFVFGKTAFAQGVGEKLQPVSLPQKYYLIVTPEVHVSTAEVFGNPDLIRNTPVMSVKDLLDCDWKNDCETLVKRLYPEVAMVLNWLIEYAPSRMTGTGASVFAEFQDELSARQTLAKLPPPWRGFVAKGVNQSAVLTELEQAV

SEQ ID NO: 126807 - protein, 159 aa, Unknown
  Bacterial polypetide isolated from the Sargasso Sea
MKFLSPAKLNLNLRVISKRIDGYHDLETTFQLIDLFDEITFEKSNESFNIDCDGLEIEPENNLIFKSFNAIKEYCEADEGIQIHLKKNIPVGAGLGGGSSNAATTLIALNKIWGLDLSREELAKIGKPLGADIPIFIYGKNAIATGIGDVFLDVEFRKN

SEQ ID NO: 126808 - protein, 270 aa, Unknown
  Bacterial polypetide isolated from the Sargasso Sea
MKEIRIKAPAKLNLHLQVLNKRSDGYHNISSLFTIIDFCDSITLKKNEKTIELEESSPIKDNIVLKAANLLKEQFSVDEGVSITLTKNIPDQKGLGGGSSDAASVLIGLNKIWELGLSKNELSVLALELGSDVPFFIHGKTSWAEGRGEILSNYPYKERFFLLSFPDLKMSTKQAFESLPLKKVKALKQSDYTDNKSFNSFESWIRETSAEMEKQFRKLSTIGTPKLSGTGSTIFIEFNEENSAKEVLEKFPHLVFTKSLERSPLMQIIE

SEQ ID NO: 126809 - protein, 174 aa, Unknown
  Bacterial polypetide isolated from the Sargasso Sea
MQDLAKKKINIKSPAKINLHLEVIGKREDGFHELAMIMQNIDLADYLEFEINNEGLIKLESDCNDLSLSNDNLIVKSANLLRKKSNIDYGANIFLRKNIPIGAGLAGGSSNAAATLIGLNNLWDLKLDQETLCSLASTLGSDVPFFINGGIQLCFGRGEILEKLDSNLEYGAIL

SEQ ID NO: 126810 - protein, 283 aa, Unknown
  Bacterial polypetide isolated from the Sargasso Sea
MTRSDTPILELAPAKINLYLHIEAKLNNGMHSIDSLIMFADCADQVFVTPQKNITLDRYGPMSANLPAVPDDHVYKAAQKLAVLTNNKAGAKIIVKKNLPIAGGLGGGTADAAAVIRALGKLWRVDISDDLKRNLAKELGADFHVCLENKSSRVKGIGDELLPLKVPHDLSAVLVNPLKTLMTVEVFSVFRKEVHINQTLDIPSSWSDDSREFIRQIKELRNDLTDPAISLCPIISEVLLKLGSSDGCMLQRMSGSGATCFGLFVDHERAVNAAEKIRSNNLD

SEQ ID NO: 126811 - protein, 234 aa, Unknown
  Bacterial polypetide isolated from the Sargasso Sea
MKFLSPAKLNLDLRVISKRIDGYHNLETTFQFIDLFDEITFDKSNESFNISCDGLEIEPKNNLIFKSFNAIKEYCKVDEGIRIHLKKNIPVGAGLGGGSSNAATTLIALNKIWNLDLSREELAKIGKPLGADIPIFIYGKNAIATGIGDVFLDVELRKNKFLLICPNIEVSTSEMFRKLKIDKLSPKHQNSFLDTLLRENKSIEEFYVSKYNDYDLKLSGTGFTLLIEYDKKMI

SEQ ID NO: 126812 - protein, 254 aa, Unknown
  Bacterial polypetide isolated from the Sargasso Sea
LHLEVIGKREDGYHELAMIMQNIDLFDYVEFENNQLGEIKLNSDSKDLSLNSDNLIVKAADYLKELSNNRKLGANIYLKKNIPIGAGLAGGSSNAAATLIGLNKLWDLNFDYETIFSISAKLGSDVPFFIDGGCQFCFGRGEILEKYNSKFNYGLILLKNPKISVSTAETYKKYSNKYLSEYFTENKEINSIRNNLRIKRFNDENNQDQLMKIKNDLQVIVEQENESVRKALYLLSNLKNCFSFSMSGSGPTCF

SEQ ID NO: 126813 - protein, 234 aa, Unknown
  Bacterial polypetide isolated from the Sargasso Sea
MLEEKASAKVNLCLQIVGQKSNGFHLLDSIVGFTEFGDHLSFKKSDELKLTIKGAFSDQIPVDKSNLILKAAELLRTINNIKAGAHITLTKNLPPSAGLGGGSSDAAATIRGLSRLWDTDLPEIDDLMKLGSDLPVCIKQKTQHMKGFGEVLEEINTFPNLPILLVNPLKKVSTQTVFRMLKNKKNPPLSKYEKLFQAKKDWIKWLLLQRNDLMEPAVKVEPVISEVLRLFQNK

SEQ ID NO: 126814 - protein, 150 aa, Unknown
  Bacterial polypetide isolated from the Sargasso Sea
MKFLSPAKLNLNLRVISKRIDGYHNLETTFQFIDLFDEITFHKSNESFNISCDGLKIEPENNLIFKSFNAIKEYCEVDEDIQIHLKKNIPVGAGLGGGSSNAATTLIALNKIWDLDLSRKELAKIGKPLGADIPIFIYGKNAIAKGIGDV

SEQ ID NO: 126815 - protein, 256 aa, Unknown
  Bacterial polypetide isolated from the Sargasso Sea
LLQTVFQFIQLCDFIDFTVLESGLIKRSSNNFGIDEENDLVIRAAQKIKEKTGSKLGVDIKVEKNIPVGGGLGGGSSNAATTLVALNELWQTGLSMQELGEIGLSLGADIPFFINGKTAWAEGVGEKLVSIELDEGFYLVISPGCSVSTKAVFQASDLTRNTPRITIRDFYDGYGKNDCETYVRDHYVDVAEALDWLEGYAPSRLTGTGACLFAKFSEEKEIYEVKSKLPQKWQGFVVKGINKSPLLDRLKNEQKS

SEQ ID NO: 126816 - protein, 164 aa, Unknown
  Bacterial polypetide isolated from the Sargasso Sea
LWSTGLNEDELAQLGLALGADVPIFVRGKTAFAGGVGEDIMPAPQDEKWYLVANPNVHVSTGAVFTHPDLPRNTPPIQWKDYKFEETRNDCQQLVANCHPEVANLLQWLLHYAPSRMTGTGACVFATFSDKTSAEKVMAKLPNAWQGFVAKGVNSSPLLNKIEQ

SEQ ID NO: 126817 - protein, 261 aa, Unknown
  Bacterial polypetide isolated from the Sargasso Sea
MHRRNDGYHELQTLFQLLNYGDELTFKPNNSGIFEFHQTTESQALALPASQNLIVEAAQLIQKTTKRKNIGAKIDLYKRIPIGAGLGGGSSNAATTLKALNKLWGCNLSDQELTTLALELGADVPFFLKGESAWGEGIGEKLKPIKLKKAWFAIITPNCSVSTARIFSHENLTRNTQAIKMADFLAGSTENTKNDCEPVVRKLYPQVDEAFRWLESHAEPRMTGTGSSVFAKFSSEEQAKALLTRLPDNMRGFVAEGINTL

SEQ ID NO: 126818 - protein, 148 aa, Unknown
  Bacterial polypetide isolated from the Sargasso Sea
MEELKLRAPAKLNLHLEVVKKRSDGFHDLSSLFTLIDLFDDITLKKNSNSIELIESIPIKQNIVLKAANLLKDLFSVKEGVKIELVKSIPDQKGLGGGSSDAASTLLGLRKFWNLDISDQDLAKIALKLGSDVPFFLYGKTAWVEGRG

SEQ ID NO: 126819 - protein, 218 aa, Unknown
  Bacterial polypetide isolated from the Sargasso Sea
MKFLSPAKLNLDLRVISKRIDGYHNLETTFQFIDLFDEITFDKSNESFNISCDGLEIEPKNNLIFKSFNAIKEYCKVDEGIRIHLKKNIPVGAGLGGGSSNAATTLIALNKIWNLDLSREELAKIGKPLGADIPIFIYGKNAIATGIGDVFLDVELRKNKFLLICPNIEVSTSEMFRKLKIDKLSPKHQNSFLDTLLRENKSIEEFYVSNINDYDLKL

SEQ ID NO: 126820 - protein, 222 aa, Unknown
  Bacterial polypetide isolated from the Sargasso Sea
MRPPLMGTITVTAPAKVNLHLEVLGIRPDGFHELAMVMQSIDLADRLSFQPTADAALTLSCDDPSLSLGEDNLVIRAAQLLRSRSGFSELGAAIHLEKRIPIGAGLAGGSSDGAAALVGLNALWGLGHSSTDLERFAAELGSDMPFCVAGGSQLCFGRGELLEPLPAVQESLAVLLVKDPRVSVSTPWAYRRCRELQGDRYLQGEDAFEQRRQVLRDTAWTQ

SEQ ID NO: 126821 - protein, 128 aa, Unknown
  Bacterial polypetide isolated from the Sargasso Sea
MLLRVTGRRKDGYHLLDSLVTFCELGDSLELSLNDRYDELVVEGTFYNEIGEDNIVRRTLKKFREATGWCQPVKIRLKKEIPVGAGLGGGSSDAATTLKLLTQIPETPPLSRAEIFKIALDLGADVPA

SEQ ID NO: 126822 - protein, 173 aa, Unknown
  Bacterial polypetide isolated from the Sargasso Sea
MKFLSPAKLNLNLRVISKRNDGYHNLETTFQLINLFDEISFEESNKSFGFSCDGLDIEPENNLIFKSLNAITKYCNVDKGIKIHLKKIIPAGAGLGGGSSNAATTLIALNKIWDLNLSTQELVSIGKGLGADVPIFIYGKNAVARGIGDVFLDIEFKKNKYLLICPDIEVSTR

SEQ ID NO: 126823 - protein, 137 aa, Unknown
  Bacterial polypetide isolated from the Sargasso Sea
MEELKLKAPAKLNLHLEVVKKRNDGFHDLSSLFTLIELFDDITLKKNSNSIELIESIPIKQNIVLKAASLLKDLFSVKEGVKIELVKSIPDQKGLGGGSSDAASTLLGLRKFWNLDISDQDLAEIALKLGSDVPFFL

SEQ ID NO: 126824 - protein, 103 aa, Unknown
  Bacterial polypetide isolated from the Sargasso Sea
QATGYPGGAEIWLEKRLPMGGGLGGGSSDAATTLVALNQLWNTQLSNDKLTAIGLKLGADIPVFIRGFAAFAESVGERLQAVTPTEFWYLVIAPDAHVSTAAE

SEQ ID NO: 126825 - protein, 201 aa, Unknown
  Bacterial polypetide isolated from the Sargasso Sea
MRAPAKINLHLEVLGLRDDGFHELAMVMQTLDLADELAVDSAPAGELSLCCSDPQLPVDGSNLIVKAAEALRRHCGRPELSAQLSLTKRIPIGAGLAGGSSDGATALLLLNRYWDLQLSAAELHNLAAQLGSDVAFCLQGGTQLCFGRGERLEAIAVAAKPAVLLIKNPNVSVSTPWAYGLCKERLGSGYLSSEADFERQR

SEQ ID NO: 126826 - protein, 242 aa, Unknown
  Bacterial polypetide isolated from the Sargasso Sea
MGYHNLETTFQFIDLFDEITFHKSNESFNISCDGLKIEPENNLIFKSFNAIKEYCEVDEDIQIHLKKNIPVGAGLGGGSSNAATTLIALNKIWDLDLSRKELAKIGKPLGADIPIFIYGKNAIAKGIGDVFLDVEFRKNKFLLICPNIEVSTSEMFRKLKIDKLSSKHQNSFLDILLRENKSIEEFYASNINDYDLKLSGTGSTLFIEYDKKDDLKKILQKIPKNWRFFFCEGLQYSPLTGV

SEQ ID NO: 126827 - protein, 200 aa, Unknown
  Bacterial polypetide isolated from the Sargasso Sea
GADIWLNKRLSMGGGIGGGSSDAATTLLGLDHLWQTQLGEDRLAELGLTLGADVPVFVRGRAAFAEGVGERLTPVELDEPWFLVAVPQVFVSTAEVFGSPELTRDTPPIKVRSLLAGGGRNDCQPVVEKRYPEVRNALILLNKFVSARLTGTGACIFGSFPNRDDADKVARQLPGTLPSFVAQGRNISMLHRRLQALAKK

SEQ ID NO: 126828 - protein, 199 aa, Unknown
  Bacterial polypetide isolated from the Sargasso Sea
MKFLSPAKLNLKLRVISKRIDGYHNLETTFQFIDLFDEITFEKSNESFNISCDGLEIEPENNLIFKSFNAIKEYYEVDEGIQIHLKKNIPVGAGLGGGSSNAATTLIALNKIWDLDLSMEELAEIGKPLGADIPIFIYGKNAIATGIGDVFLDVVFRKNKFLLICPNIEVSTGEMFNKLKIDKLSPKHQNSFLDTLLRE

SEQ ID NO: 126829 - protein, 185 aa, Unknown
  Bacterial polypetide isolated from the Sargasso Sea
VKSIPDQKGLGGGSSDAASTLLGLRKFWNLDISDQDLAEIALKLGSDVPFFLYGKTAWAEGRGEILAEYPYQKKYYLLFLPALKISTKNAFEQASFVPRPKISKKNYTSDQSFNSFEVWIRRTYSEMDEAFNNLRLIGEPKLSGTGSTIFLEFDNKSAAESAQKNFPELVLTKSLERSPLMQIIE

SEQ ID NO: 126830 - protein, 50 aa, Unknown
  Bacterial polypetide isolated from the Sargasso Sea
MINEFAPAKINLSLHLVGQKSDGYHLLDSIVSFVNVGDTLRMTPGGSSGL

SEQ ID NO: 126831 - protein, 257 aa, Unknown
  Bacterial polypetide isolated from the Sargasso Sea
NVLKKRSDGFHDIETNFQFLEWGDEIAFNFDTSTSQVTCPKVKEKNNLAYKAIHLLKKTYKINKEVSLKIKKNIPIGSGLGGGSSNAATVLLVLNKYWKLNLNNEVLKDLGSSLGSDVPIFIEGVARKANGKGEIFSKAFLKEEIIFLVMPKCNISTAKAFQEIEISDFKNSKNSKDFNFFEKWARKNYKEVDDSFIWLESIKKGNLTGTGSALYAIFNSFEEASKIIDNAPKNNNYFVTRSLNESPLLKELNKNGV

SEQ ID NO: 126832 - protein, 207 aa, Unknown
  Bacterial polypetide isolated from the Sargasso Sea
MEELRLQAPAKLNLHLQVLRPRDDGFHDISSLFSLIDISDLLIFKKNGKSINLIESSPIEDNIVFKAAKLLKDYSGTNKGVSIELVKSIPDQKGLGGGSSDAATTLLGLNRLWELEISNKKLLDLALRLGSDVPFFMFGKTAWAEGRGEILREYPYTEKYFLLSFPKLKISTKEAFNSISIDNKAQLTAESYNKDKAFNSFEAWIRD

SEQ ID NO: 126833 - protein, 192 aa, Unknown
  Bacterial polypetide isolated from the Sargasso Sea
IKEYCEVDEDIHIHLKKNIPVGAGLGGGSSNAATTLIALNKIWDLDLSRKELAKIGKPLGADIPIFIYGKNAIAKGIGDVFLDVEFRKNKFLLICPNIEVSTSEMFRKLKIDKLSSKHQNSFLDILLRENKSIEEFYASNINDYDLKLSGTGSTLFIEYDKKDDLKKILQKIPKNWRFFFCEGLQYSPLTGV

SEQ ID NO: 126834 - protein, 160 aa, Unknown
  Bacterial polypetide isolated from the Sargasso Sea
MEELKLRAPAKLNLHLEVVKKRNDGFHDLSSLFTLIELFDDITLKKNSNSIELIESIPIKQNIVLKAANLLKDLFSVKEGVKIELVKSIPDQKGLGGGSSDAASTLLGLRKFWNLDISDQDLAEIALKLGSDVPFFLYGKTAWAEGRGEILDEFPYQKKY

SEQ ID NO: 126835 - protein, 237 aa, Unknown
  Bacterial polypetide isolated from the Sargasso Sea
NKPAPGGDRLTVTGPFSAAMPSVEADNICLRAVQAFRDAGGACVPLDIHLDKQIPAGAGLGGGSSDAAAILRHLNLASAVPLSAERLATVALGLGADVPVCLAGGAQHMTGIGESLVAIDPAPTGHVVLAKPDIALSTPDVFARFSRSDFSQPSEPGDGTDALTLVALGNDLTAAAVELVPAIAALLAAIAACDGHQAAQISGSGSACFGLFHDLASAQAAAQSLETAGYWTVATEF

SEQ ID NO: 126836 - protein, 260 aa, Unknown
  Bacterial polypetide isolated from the Sargasso Sea
MRNYRSPAKINLFLKIVDKRSDGYHDIQSIFQLIDLHDEISINLRKDRQINLNSNKKKIIKDNLIFTAIKKFLEYTKLKRIGMDIFLNKNIPIGSGLGGGSSNAAIILLAMNKIYNSNLRASQLKTIANSIGSDVTFFLHGKNAWVEGTGNVITPIYLKPAWFILIHGKHKVSTSNIFSRYRINGYSKNFSYDDYLNNNTRNDLEDVVFELYPSIYQSYKNLSKYGNARMSGSGGTVFLPLSSYNEARKVISRLPKQITR

SEQ ID NO: 126837 - protein, 254 aa, Unknown
  Bacterial polypetide isolated from the Sargasso Sea
MIAPAKLNLFLHINGRRDDGYHELETLFTFLNYGDELHFKLSTDTLISISGDTNGIALTDNLIYKAALLLQTHCKVDMGAKINLTKRLPMGGGVGGGSSDAASTLLALNTLWNTALSLDELADLGLKLGADVPVFIKGKSAIAHGIGEQLEYLELPPKWYCVVFPNQHVSTAQIFTHPDLKRDTPKLSGDWQQQILTNDCEPLVKKLCPEVEKTLQWLLKYAPSKMTGTGSCCFVEFASQVQAQDVLANLPHTG

SEQ ID NO: 126838 - protein, 269 aa, Unknown
  Bacterial polypetide isolated from the Sargasso Sea
GTGGSPPSCSRGGNGEDSILCTTTATGGGGGGGTSCAAKPGLAGGSGGGAGRNCGTGGAGTPGQGNPGGDTNAPPGKGGAGGGGAGAAGGTGGDSGGAAGGAGSSASPLSSCTFAGGGGGGADCNPSSGGAGGPGGGGAGSGRPGGGPGGSGTAGTGNTGGGGGGGPGCGGTGGAGGSGRVIIKELNRASGMWSMQSQYSAQREGTWPVFLPITGATVLVVAGAGGGGFDNGAGGGGGGMILATGVSFAKGCVAAVIGARGVGGAGNPT

SEQ ID NO: 126839 - protein, 262 aa, Unknown
  Bacterial polypetide isolated from the Sargasso Sea
MKLLSPAKLNLNLKVISKRIDGYHNLETTFQFIDLFDEITFEKSNESFNISCHGLEIEPENNLIFKSFNAIKEYCEVDEGIQIHLKKNIPVGAGLGGGSSNAATTLIALNKIWDLDLSREELAKIGKPLGADIPIFIYGKNAIAEGIGDVFLDVEFRKNKFLLICPNIEVSTGEMFRKLKIDKLSPNHQNSFLDTLLRENKSIEEFYANNINDYDLKLSGTGSTLFIEYDKKDGLKKILQKIPKNWRFFFCEGLQYSPLTGV

SEQ ID NO: 126840 - protein, 293 aa, Unknown
  Bacterial polypetide isolated from the Sargasso Sea
MIETTDSLRDCLAPAKLNLFLHITGRRPDGYHTLQTVFQLLDWGDTLHFKRRDDGLITRSTEIADVPPEHDLTVRAATLLKAHTGSPEGVDIEIEKRLPMGAGLGGGSSDAATTLLALNRLWKLDLPRLELQALALKLGADVPFFVFGKNAFAQGVGEALDVVQLPPRHFLVVTPRVHVPTAAIFSEKALTRDSKPLIITDFPAELSCNTDWPESFGRNDMQQVVVGKYAEVAQVLRWFENIAPARMSGSGASVFAAFRSKAEAEAAQAKVPSEWNSAVTAGLDQHPLFAFAS

SEQ ID NO: 126841 - protein, 293 aa, Unknown
  Bacterial polypetide isolated from the Sargasso Sea
MTDSTRSLRNCLAPAKLNLFLHITGRRPNGYHDLQSVFQLLNWGDTLHFTLRDDGRVARVTDVHGVPEESDLVVRAANLLKAHTGTAHGVDIEIDKCLPMGAGLGGGSSDAATTLLALNRLWQLDLPRAELQSLAVKLGADVPFFIFGKNAFAEGIGEELAEVQLPTRWFLVVTPRVHVPTAEIFSDELLTRDSKRVTITDFLARQSSDAGWPDSFGRNDMQQVVTSKYAEVAQVVKWLYDVTPARMTGSGASVFAAFRSKHEAEAAKAKLPASWNGAVAESLNEHPLFAFAS

SEQ ID NO: 126842 - protein, 155 aa, Unknown
  Bacterial polypetide isolated from the Sargasso Sea
MKTHFLKSPAKINLFLKVGKRIKRKKHHNIQSLIFLTSLHDEILIKKIKKNKDIVKFTGRFSNNIMRVNNTVSKSMYLLRKKKLIDNKTKYQITIKKNIPVFSGLGGGSSNAATIIKHFLKKRKISKYNTNFFSKYLGSDFRIFLKSKKIFQENL

SEQ ID NO: 126843 - protein, 302 aa, Unknown
  Bacterial polypetide isolated from the Sargasso Sea
MRAPAKINLHLEVLGLRDDGFHELAMVMQTLDLADDLTVDAAPAGQLSLSCTDPELPVDGSNLILKAAELLRQHCRRPELSAQLELTKRIPIGAGLAGGSSDGATALLLLNRFWELQLTAAELHGLAAELGSDVAFCLQGGTQLCFGRGECLEPIKAASHPAVLLIKNPSVSVSTPWAYGRCKELMGATYLTGESAFERQRQALRESPLLCWLEGNQSTVPPLRNDLQQVVAPENESVQKGLQLLASAAEPLQVAMSGSGPSLFALYRDQAAAAAAARALAPALAENGFQHWICQFTEARHG

SEQ ID NO: 126844 - protein, 270 aa, Unknown
  Bacterial polypetide isolated from the Sargasso Sea
MEELKIRAPAKLNLHLEVVKKRSDGFHDLCSLFTLIELFDDITFKKNSNSIELIESIPIKQNIVLKAANLLKDLFSVKEGVKIELVKSIPDQKGLGGGSSDAASTLLGLRKFWNLDISDQDLAEIALTLGSDVPFFIYGKTAWAEGRGEILAEYPFKKKYYLLFLPALKISTKNAFEQASFVSRPKISKKNFTSDKSFNSFEVWIRRTYSEMDEAFKNLRLIGEPKLSGTGSTIFVEFDSKSAAESAQKHFPELVLTKSLERSPLMQIIE

SEQ ID NO: 126845 - protein, 337 aa, Unknown
  Bacterial polypetide isolated from the Sargasso Sea
MAGGPQPLCARSHHGAAPEPATHGHLATAAASTRISQEAGPLSRHFSAPLSMHTFYDVPAPAKLNLFLHITGRRADGYHLLQSVFMLIDWQDRLHFERTHSAQISRQDLNPEAPPLPADDLCTRAAQALQAATGCTQGVRIAIDKHIPAQAGMGGGSSDAASTLVALNRLWNLQLSRTELARIGERLGADVPFFIHGQNAWVEGIGEHIAPLTGAAQLPASDFIVVKPQAGLDTQGIFTAPNLTRDTKRARIEDFAADHYGFGHNDLQPVAEALCPDVRKARQLLESLGLHATMTGSGSAVFAQISKAIELQDAPCGWQIKLCKNLEKHPLLHWIPE

SEQ ID NO: 126846 - protein, 232 aa, Unknown
  Bacterial polypetide isolated from the Sargasso Sea
VRGAFSDQIPVDKSNLILKAAELIKTRNNIKTGAHITLTKNLPPSAGLGGGSSDAAAAIRGLSRLWGADLPEIHDLMKIGSDLPVCINQKTQHMRGFGEVLNVINTFPNLPILLVNPLKRISTQKVFRMLKNKKNSPLSKYEKLFQTKKDWINWLLLQRNDLMEPAVRIEPVISEVIRLISNQISVEKVSMSGSGSTCFGVFENKHDCDLAMEKVRQERPEWWSVSTEIISI

SEQ ID NO: 126847 - protein, 177 aa, Unknown
  Bacterial polypetide isolated from the Sargasso Sea
CEVDEGIQIHLKKNIPVGAGLGGGSSNAATTLIALNKIWDLDLSREELAKIGKPLGADIPIFIYGKNAIAKGIGDIFLDVEFKKNKFLLICPNIEVSTGEMFRKLKIDKLSFKHQNSFLDTLLREHKSIEEFYVTNIKGYDLKLSGTGSTLFIEYDKKDDLKKILQKIPKKLEILFL

SEQ ID NO: 126848 - protein, 334 aa, Unknown
  Bacterial polypetide isolated from the Sargasso Sea
AKNTYNMEVLGIRDGTVGLMQRPVAYLPLDYQTFSGSLLRQGGTFLGTTSKGNPFKFPMPDGKFKDRSQEIIDGYHELGLEGLIVIGGDGSMSILTEIAKRGNLNIVAIPKTIDNDVGATESSIGFNTAVNVATQALDNLQTTAASHQRTMILEVMGRDAGHIAINAGIAGGADAILIPEIKYSIKGIVNKLTEMKNRGIVHSLIVVAEAVKTEEGRSYTVEFADGQKRLGGIGNYLSEEIMKMTDIECRVTSLGHVQRGAPPTPRDRILASAFGVYAVDLIAQGKMGRMVAWRDRKVVDVPISEGISTYKVVDRSDPLIETALALGVYVGDID

SEQ ID NO: 126849 - protein, 267 aa, Unknown
  Bacterial polypetide isolated from the Sargasso Sea
LRLRAPAKLNLHLEVVKKRRDGFHDLSSLFTLIELFDDITLRKNSNSIELTESIPIKQNIVLKAANLLKNLFSVKEGVKIELVKSIPDQKGLGGGSSDAASTLLGLRKFWNLDISDQDLAKIALKLGSDVPFFIYGKTAWAEGRGEILAEYPYKKKYYLLFLPSLKISTKDAFEQASFVSRPKISKRNFTSDQSFNSFEDWIRKTYSEMDEAFNNLRLIGEPKLSGTGSTIFLEFDSKSAAESAQKHFPELVLTKSLERSPLMQIIE

SEQ ID NO: 126850 - protein, 270 aa, Unknown
  Bacterial polypetide isolated from the Sargasso Sea
MNEIYIKAPAKLNLHLQVVSKRDDGFHNLRTLFTYINLYDYLSFKETKNKIELQEVMPIKDNIILKAAEILKDKTKCSKGVQISIEKNIPLQKGLGGGSSNAAATLLALNVLWETGLTKSELLKLSLELGSDVPFFVFGHSAWAEGRGEKLSKINCKEEWHLLFMPKAEISTKEAFEQLPLLTSNSYSYEDYCSKGGFNTFEKWARESYEEIDKIFIKLENIGKAHLSGTGSSVFISFKKKEIAEEVKKEFSNCILVKSLERSPLMQIIE

SEQ ID NO: 126851 - protein, 196 aa, Unknown
  Bacterial polypetide isolated from the Sargasso Sea
KRLPMGGGIGGGSSDAATTLLGLDHLWQLHLGEDRLAALGLTLGADVPVFVRGRAAFAEGVGERLQPVDLPEPWFLVIAPQVSVSTAEIFADPELTRNTPAITVRSLLAGGGHNDCQPIVEKRYPEVRNALSLLNKFVPASMTGTGACVFGSFPNEGEADKVRRQLPDTLPSFVAHGRNVSMLHRSLKKLAQEASA

SEQ ID NO: 126852 - protein, 284 aa, Unknown
  Bacterial polypetide isolated from the Sargasso Sea
MSINEIHVRAPAKINLALEVTGRRRDGFHEIDTVMTTVSLFDYISIESSEKLSINFIGPYSQGIDPSNDLAGRAAIELAKTIGREPNVTITIEKQIPSSAGLGGGSSDAAAVLRGLNEFWNLNQELKDLEKIASKIGSDVSFFLYGGTARCTGRGEIIHPLKDLSKLRALILLPEVSKIQNKTATLYSQIHSNNFSDGNHSKRIAHRIDRKLPPPTADMVNVFETVIKNHYSELIEYYALLRSKGAPILHLCGSGPAVYLWIHQNAKVEELMFDFRQVGASVFE

SEQ ID NO: 126853 - protein, 282 aa, Unknown
  Bacterial polypetide isolated from the Sargasso Sea
MTHWPSPAKLNLFLYITGQRADGYHSLQTLFQFLDYGDTIDIALRGDGEIRLLTPVEGVAHEDNLIVRAARLLMKVASESNRLPNGSGADISIDKRLPMGGGLGGGSSNAATVLVALNHLWQCGLSIDELAALGLTLGADVPVFVRGHAAFAEGVGEILTPVEPEEKWYLVAHPGVSIPTPVIFNDPDLPRNTPKRSIKTLLKCEFGNDCEVIARKRFREVDAALSWLLEYAPSRLTGTGACVFAEFDTESRARQVLEQAPEWLKGFVAKGVNLSPLHRALL

SEQ ID NO: 126854 - protein, 251 aa, Unknown
  Bacterial polypetide isolated from the Sargasso Sea
MRWPAPAKLNLFLHVNGRRPDGYHELQTLFIFLNHGDWLEFEPLTDTDLLTLSPAIPGVPDEQNLIIRAARLLQARLPSPQGAHIRLEKVLPMGGGIGGGSSDAATTLVALNHLWQAGLSEDELAELGVQLGADVPVFVRGKAAFAEGVGERLQPVELPSAWYLVLKPDCHVATAAVFQDPDLPRDTPKMALHNLLEGEWKNDCELLVKKRHPEVANALGWLLEYAPSRMTGTGACVFAQLKTKWLLGKCG

SEQ ID NO: 126855 - protein, 167 aa, Unknown
  Bacterial polypetide isolated from the Sargasso Sea
MNLKIESHLSPAKINLFLHVLRRRADGYHELQTLFQLLDYGDELTFETNSNGTLELHQESADKIRTLPYSQNLIIKAARLLRQESGDTKLGVKIYLNKRIPAGAGLGGGSSNAATTLKTLNKLWDCDLSMEELKTLALKLGADVPFFLEGKSAWGEGLGEKLQPVEL

SEQ ID NO: 126856 - protein, 284 aa, Unknown
  Bacterial polypetide isolated from the Sargasso Sea
MSNDISRNWPAPAKLNLFLHINGRRADGYHELQTLFQFIDCCDQLDFRVTQTPELILHSNMSAVVADSDNLILRAAKSLQQATGYPGGAEIWLEKRLPMGGGLGGGSSDAATTLVALNQLWNTQLSNDKLAAIGLKLGADIPVFIRGFAAFAEGVGERLQAVTPTEFWYLVIAPDAHVSTAAVFQDPLLPRNTPKLGIDTLMSQPWANDCQDLVVSKYPQVAKALGWLLEYAPSRMTGTGACVFGEFSSQQQALAALAKLPSDMQGFVAKGMNISPLVVRLTHP

SEQ ID NO: 126857 - protein, 204 aa, Unknown
  Bacterial polypetide isolated from the Sargasso Sea
MSQEISRNWPAPAKLNLFLHINGRRSDGYHELQTLFQFVDCCDQLDFRVTYTPELILHSNMSNVVADSDNLILRAAKSLQQSTGYPGGAEIWLDKRLPMGGGLGGGSSDAATTLVALNQLWNTQLSHDELAAIGLKLGADIPVFIHGFAAFAEGVGECLQTVNPAELWYLIIAPDAHVSTAAVFQDPQLPRNTPKLGIDTLLSK

SEQ ID NO: 126858 - protein, 558 aa, Unknown
  Bacterial polypetide isolated from the Sargasso Sea
MKFSIGFDFGTNSCRGILVNISSGKEECEHVYNYKKGSSGVILTKNNPLLARQHPIEYTNALIECTKKIIKKAKKKINKFSPDKVIGLGVDTTGSSPMPVDKEGKPLALNKKYKNNLNALVWLWKDHTSFKEAEIITNLANKLFPEYLKNIGGRYSSEWFWSKIFHLKNIDPKLFNSIYSFVEICDYIPALLSGNTNPLELKRSACAAGHKALYNEKWGGLPDKKFLNKLDPKIAVLKNRLYKNVYNPEEPAGYLSEIWAKKLGLKKNIKIAMGGFDAHIGAVGANIEEKVLVKVMGTSTCDIAIQSQKKKIKNIPGVCGIVKNSVISNYLGIEAGQSAVGDIFASYIKNNVGEKYGKNFKEKFSNLEKLASLIKPGEHGLLALDWHNGNRTILVDTALSGLLVGQNLQTKQHEIFKALIEATAFGSLMIIDQIEKHGVSIKEIIAIGGLSQSYVIMQIYADITGRKIKVLKSDQVCAVGSAILAACNNTEGYLNLKTTQKKMSVKVKKIYHPNIKNNKIYKRIYKLYSNLHDVFGRVNNKKSLHHIMKELILIRNLY

SEQ ID NO: 126859 - protein, 380 aa, Unknown
  Bacterial polypetide isolated from the Sargasso Sea
YSFVEICDYIPALLSGNTNPLELKRSGCAAGHKALYNEKWGGLPDKKFLNKLDPKIAVLKNRLYKNVYSPEEPAGYLSEIWAKKLGLKKNIKIAMGGFDAHIGAVGANIEEKVLVKVMGTSTCDIAIQSQKKKIKNIPGVCGIVKNSVISNYLGIEAGQSAVGDIFASYIKNNVGEKYGKNFKEKFSNLEKLASQIKPGEHGLLSLDWHNGNRTILVDTALSGLLVGQNLQTKQHEIFKALIEATAFGSLMIIDQIEKHGVSIKEIIAIGGLSQSYVIMQIYADITGRKIKVLKSDQVCAVGSAILAACNNKEGYLNLKTTQKKMSVKVKKIYHPNMQNNKIYKRIYKLYSNLHDVFGKVNNKKSLHHIMKELILIRNLY

SEQ ID NO: 126860 - protein, 212 aa, Unknown
  Bacterial polypetide isolated from the Sargasso Sea
DQRQLGWPLESLAAQYPELRTAIEAHKRELLPSLAAAWEQQRDLAHLPVVLDWFNGRRTPYANQRLQGTVTGLNLGTDAPDLFGALVASTAFGARSIMECMTSQQVPVEQVIALGGIARKSATVMQTCADVMNRPIQVVASDQCCALGAAIFAAVAAGIHADVAKAQRHMASAVERTHQPDPERVAEYERLYQRYLAWGAAAEPLYNRGVPA

SEQ ID NO: 126861 - protein, 275 aa, Unknown
  Bacterial polypetide isolated from the Sargasso Sea
GSIGCGIEEGMLVKVIGTSTCDCAIVDLSKSDTIPGLCGIVEGSILPGFYGIEAGQSAVGDIFKWWVERVCQGGPALHEELSREAAGMKAGQSGLLALDWNNGNRTILVDQRLTGLILGQTLYSTRAEIYRALVEATAFGARAIVERMTDYGVPIDKVVCAGGIAEKNPMLMQTYADVMNRTMLVTRSAQTCALGAAVAAASVAGTHEDIKTTTRAMTGLKDIRYDPIPENVAVYEELYGLYLTLHDGFGGITRDSDLSRIMKDLIDIRDRVRAA

SEQ ID NO: 126862 - protein, 173 aa, Unknown
  Bacterial polypetide isolated from the Sargasso Sea
QQRDLAHLPVVLDWFNGRRTPYANQRLQGTVTGLNLGTDAPDLFGALVASTAFGARSIMECMTSQQVPVEQVIALGGIARKSATVMQTCADVMNRPIQVVASDQCCALGAAIFAAVAAGIHADVAKAQRHMASAVERTHQPDPERVAEYERLYQRYLAWGAAAEPLYNRGVPA

SEQ ID NO: 126863 - protein, 557 aa, Unknown
  Bacterial polypetide isolated from the Sargasso Sea
MSNVLWAYALGLDYGSDSVRALLVDTQTGAEVATNVVYYPRWKKGLFCEPAKNQFRQHPLDYIESLIEVVQGLWAKAPSGAAQRVCGLSVDTTGSTPIAVDEAGVALALKPEFANNPNAMFLLWKDHSAILEAQQITAAANNASENYLKYEGGIYSSEWFWAKALFVLRHDTEVRQAAYSWVEHCDWITALMTGTTHPKVFKAGRCAAGHKVMWHESWNGYPPNDFFVGIDPLLDGLRDKLPLETCTSDKVCGQLTPQWAQHLGLSTEVIVSFGSFDCHAGAVGANVKPGVLTKVMGTSTCDITVASYEDIGERCIKGICGQVDGSVLPGMIGLEAGQSAFGDLYAWFRELTAWPMQQLDTSALFDDDTRTKLIQQLEAETLTVLGNAAAKIPVGETGIVALDWINGRRTPDADQSVAMAIIGLTMGSQAPQVFKALVEASAYGARAIIERFKQEGVCIDHVVTIGGISKKSDFIMQTCADVWNCNIDVLESEQSCALGAAIYAATAAGVYPDVLSAQAAMASSVAKTYQPNPENAQKYQALYQAYLALGHYVDGAK

SEQ ID NO: 126864 - protein, 557 aa, Unknown
  Bacterial polypetide isolated from the Sargasso Sea
MSNVLGAYALGLDYGSDSVRALLVDTQTGAEVATNVVYYPRWKKGLFCEPAKNQFRQHPLDYIESLIEVVQGLWAKAPSGAAQRVCGLSVDTTGSTPIAVDELGVALALKPEFANNPNAMFLLWKDHSAILEAQQITAAANNSSENYLKYEGGIYSSEWFWAKALFVLRHDAEVRQAAYSWVEHCDWITALMTGTTHPKVFKAGRCAAGHKVMWHESWNGYPPNDFFVGIDPLLDGLRDKLPLETCTSDKVCGKLTPEWAQHLGLSTEAIVSFGSFDCHAGAVGANVKPGVLTKVMGTSTCDITVASYDDIGERCIKGICGQVDGSVLPGMIGLEAGQSAFGDLYAWFRDLTAWPMQQLDTSALFDENTKAKLIQQLEAETLTMLGNAAAKIPVGETGIVALDWINGRRTPDADQSVAMAITGLTMGSQAPQVFKALVEASAYGARAIIERFKQEGVCIDHVVTIGGISKKSDFIMQTCADVWNCNIDVLESEQSCALGAAIYAATAAGVYPDVLSAQAAMASNVAKTYQPNPENAEKYQALYQGYLALGHYVDGAK

SEQ ID NO: 126865 - protein, 264 aa, Unknown
  Bacterial polypetide isolated from the Sargasso Sea
AGNNALVKVIGTSTCDILIADEATIGDRAIAGICGQVDGSVVPGMVGLEAGQSAFGDIYAWYQRQLGWPLESLAAQYPELRTAIEAHKRELLPSLAAAWEQQRDLAHLPVVLDWFNGRRTPYANQRLQGTVTGLNLGTDAPDLFGALVASTAFGARSIMECMTSQQVPVEQVIALGGIARKSATVMQTCADVMNRPIQVVASDQCCALGAAIFAAVAAGIHADVAKAQRHMASAVERTHQPDPERVAEYERLYQRYLAWGAAAE

SEQ ID NO: 126866 - protein, 563 aa, Unknown
  Bacterial polypetide isolated from the Sargasso Sea
MSEHPRSEQITIGLDFGSDSVRALAVRCHDGAELATQVAYYPRWQAGRYCQPVTNQFRHHPLDYLESMEQAVVAVVSQLTQRQRAAVRGIGVDSTGSTPAPIDEEGRVLALRPEFADNPNAMFVLWKDHTAIEEAEAITALCHGGQFPDYSRYIGGVYSSEWFWAKILHVSRADAAVRAAACNWVELCDWVPAILSGTQAPADIRRGRCSAGHKSLWHPSWGGLPPAEFLNALDPLLTQDLDYPLFTDSWTADLPVGTLTPEWAERLHLSCEVVIAGGAFDCHMGAVGAGAGNNALVKVIGTSTCDILIADEATIGDRAIAGICGQVDGSVVPGMVGLEAGQSAFGDIYAWYQRQLGWPLESLAAQYPELRTAIEAHKRELLPSLAAAWEQQRDLAHLPVVLDWFNGRRTPYANQRLQGTVTGLNLGTDAPDLFGALVASTAFGARSIMECMTSQQVPVEQVIALGGIARKSATVMQTCADVMNRPIQVVASDQCCALGAAIFAAVAAGIHADVAKAQHHMASAVERTHQPDPERVAEYEHLYQRYLAWGAAAEPLYNRGITA

SEQ ID NO: 126867 - protein, 227 aa, Unknown
  Bacterial polypetide isolated from the Sargasso Sea
QTFSHFSYDANLLEDLQNTFKNYGETGTAKTRTYVHNLHESELYDVPSGEFTEWRDLPSDTDLLFYEGLHGAAKYENINIPQHADLKIGVVPVVNLEWIQKIHRDTDSRGYTTEAVTDTILRRMHDYVHCICPQFTETDINFQRVPVVDTSNPFIARWIPTADESIVVIRFRDPHGIDFPYLVSMIHDSWMSRANSIVIPGGKLDLAMQLILTPLIKRLIERSKKSG

SEQ ID NO: 126868 - protein, 165 aa, Unknown
  Bacterial polypetide isolated from the Sargasso Sea
LLFYEGLHGAVVNDEVNLAKHADLKIGVVPVINLEWIQKIHRDRDSRGYSTEAVTDTILRRMHAYVHCVCPQFTETDINFQRVPVVDTSNPLVARWIPTADESLVVIRFKDPHGIDFPYLVSMIHDSWMSRANSIVIPGGKLDLAMQLILTPLIGRLVNQSRRSM

SEQ ID NO: 126869 - protein, 100 aa, Unknown
  Bacterial polypetide isolated from the Sargasso Sea
MYEQVKALKEGKAVDKPIYNHVTGVFDPAEKIESPEVLILEGLHPFADERVRDMFDFKIYLDISDEVKFAWKIQRDMAERGHSLESIKASIEARKPDFDA

SEQ ID NO: 126870 - protein, 280 aa, Unknown
  Bacterial polypetide isolated from the Sargasso Sea
MAKGSKELAAMSQILADIGGTSIRIGWQSKKAEDIRDSVTYACRDFAKPVDALRQYCDQNQLKVNSVVLAVAAEISGLEVDITNNPWIFNARELAQELGANEYLLINDFTAQAFSNSALLSPKPIINPKLHILLRKGLQAAGSPLLVTGPGTGLGVAGLLPSSSGPMVIEGEGGHVSFVPRDEAERNILAVLAAKFGHVSAERVVSGPGLEAIYKIQNGARLAAPEIGDGALAGDNKCLKAVNLMFKSFATVIANAALSFGAGAGIVIAGGITPKVTWLA

SEQ ID NO: 126871 - protein, 161 aa, Unknown
  Bacterial polypetide isolated from the Sargasso Sea
MKLLVADIGGTNARFGYQENNKSEIKHIEFLNCIDFANIGQAIAHYVSKNSLNIENLSLSIAGPCGNNFVKFTNNHWFFDKIDLLNETNCNSLLAINDFAAQGLGFTNLFSAHSNFLDKKILDRHELVLLNHGKSLDGTNVLITGPGTGLGVGTLVFIDNV

SEQ ID NO: 126872 - protein, 234 aa, Unknown
  Bacterial polypetide isolated from the Sargasso Sea
MKADLDLAEFIVLNDFTAVAMSLPALKQTELVQIGEGHADQFKPMAVLGAGTGLGVAHLIPTALGYLPLPGEGGHVDFTAQTEQEWFIHKFLANKYGHVSPERLLSGPGLEDLYLAIAAFNNKVVEPLNAAQIAGKALDGSCVLCKAVIEQFFASLGGLAGDLALTLSTFGGVFVAGGITPKLLGLMNQSEFRSRFEAKGRFKDFNRRIATFVVTAEQPGLTGCAVYLKQHMAS

SEQ ID NO: 126873 - protein, 96 aa, Unknown
  Bacterial polypetide isolated from the Sargasso Sea
MKLLVADIGGTNARFAYQIKNNGDLTNFAYLKCSDFENIYDAIEHYQQKNNLDIENMSIAVASTTKKNDIKFTNNHWNFRQSEFLKYFNLNKLIFV

SEQ ID NO: 126874 - protein, 304 aa, Unknown
  Bacterial polypetide isolated from the Sargasso Sea
MTASKLTLISDIGGTNARLALVDNKKKTVNEKVYLHQDYEGLEQILEDFIKVTGEPELQRGILGVAAPIIGDEVNFVNANLSFSQKNLEDKFFKHGLVVLNDLELQVLALNSLTKGDVTVIGEQQLNNSTKILISPGTGLGLAGLVKGTPVATESGHINIPHIAGLESLIESFRQKKGRTPTFEDLLSGKGILFLNEFVSNEINGSVTSEQALMSNTKEGQEVREIFSVILAIFCRFSALMWGSKGGVYLSGSIINSLIEQINLNDFRDNFEDSQTMKDLLMACPIIHVKNKNLGFIGAKTLIK

SEQ ID NO: 126875 - protein, 106 aa, Unknown
  Bacterial polypetide isolated from the Sargasso Sea
QDITERALAGECLDCRRTLSLFCVLMGRFAGNLALNMGTFGGVYIAGGIVPRFQEFFIGSGFRVAFEDKGRFKSYLKDIPVFLITHEGPGLLGAGAYLRQSLGIKL

SEQ ID NO: 126876 - protein, 97 aa, Unknown
  Bacterial polypetide isolated from the Sargasso Sea
GECLDCRRTLSLFCVLMGRFAGNLALNMGTFGGVYIAGGIVPRFQEFFIGSGFRVAFEDKGRFKSYLKDIPVFLITHEGPGLLGAGAYLRQSLGIKL

SEQ ID NO: 126877 - protein, 40 aa, Unknown
  Bacterial polypetide isolated from the Sargasso Sea
MTKYALVGDVGGTNARLALCDIASGEISQAKTYSGLDYPS

SEQ ID NO: 126878 - protein, 199 aa, Unknown
  Bacterial polypetide isolated from the Sargasso Sea
MVGDIGGTNARFALWRDEQLQAVQVLATADFPGPEQAIAAYLHAQGLPLGAVDAVCLACAGPVSGDLFRFTNNHWRIERAAFCAALQIEHLLMINDFSAMALGMTRLRDGERLQVCPGEAQAGRPALVIGAGTGLGVGTLLGLEDGRWLVLPGEGGHVDLPIGSPREAELWQVLHQQLGHVRAEDVLSGNGLLALYRAI

SEQ ID NO: 126879 - protein, 322 aa, Unknown
  Bacterial polypetide isolated from the Sargasso Sea
MADIQFAIVADIGGTNARFSRVDLDSLHLDKVAVYPCADFDTLADALQFYRAEQGLTAIRHVALAIACPVTGDFVKMTNFRWQFSVSQMKADLDLAEFIVLNDFTAVAMSLPALKQTELVQIGEGHADQFKPMAVLGAGTGLGVAHLIPTALGYLPLPGEGGHVDFTAQTEQEWFIHKFLANKYGHVSPERLLSGPGLEDLYLAIAAFNNKVVEPLNAAQIAGKALDGSCVLCKAVIEQFFASLGGLAGDLALTLSTFGGVFVAGGITPKLLGLMNQSEFRTRFEAKGRFKDFNRRIATFVVTAEQPGLTGCAVYLKQHMAS

SEQ ID NO: 126880 - protein, 307 aa, Unknown
  Bacterial polypetide isolated from the Sargasso Sea
MADIQFAIVADIGGTNARFSRVDLDSLHLDKVAVYPCADFDTLADALQFYRNEQGLTAIRHVALAIACPVTGDFVKMTNFRWQFSVSQMKADLDLAEFIVLNDFTAVAMSLPALKQTELVQIGEGHADQFKPMAVLGAGTGLGVAHLIPTALGYLPLPGEGGHVDFTAQTEQEWFIQKFLANKYGHVSPERLLSGPGLEDLYLAIAAFNNKAVEPLNAAQIAGKALDGSCVLCKAVIEQFFASLGGLAGDLALTLSTFGGVFVAGGITPKLLSLINQSEFRTRFEAKGRFKDFNRRIATLSSLQSNQ

SEQ ID NO: 126881 - protein, 230 aa, Unknown
  Bacterial polypetide isolated from the Sargasso Sea
FSHLEIINDFTAVSMAIPMLKKEHLIQFGGAEPVEGKPIAVYGAGTGLGVAHLVHVDKRWVSLPGEGGHVDFAPNSEEEGIILEVLRAEIGHVSAERVLSGPGLVNLYRAIVKSDGRLPENLQPKDITARALEDSCIDCRRALSLFCVIMGRFGGDLALTLGTFGGVYIAGGIVPRFLDFFKASGFRGGFEDKGRFKAYVQDIPVYLIVHDNPGLLGAGAHLRQTLGHIL

SEQ ID NO: 126882 - protein, 227 aa, Unknown
  Bacterial polypetide isolated from the Sargasso Sea
MQHTHALVGDVGGTNARLALCELATGTISQAKTYSGLAHPSLEAVVRLYLDEHKVQVGEACIAIACPINGDWVAMTNHSWEFSISEMQANLGLSRLQVINDFTAVSMAVPVLGAADCIQLGGAAPVAGKPIAIYGAGTGLGVAHLVHSGEQWLSLPGEGGHVDFAANSEEEDAVLQVMRAELGHVSAERLLSGPGLVNIYRGLVKSDGREPQAFEPKDITERALAGE

SEQ ID NO: 126883 - protein, 164 aa, Unknown
  Bacterial polypetide isolated from the Sargasso Sea
RAARGLCCHSEEEDAVLQVMRAELGHVSAERLLSGPGLVNIYRGLVKSDGREPQAFEPKDITERALAGECLDCRRTLSLFCVLMGRFAGNLALNMGTFGGVYIAGGIVPRFQEFFIGSGFRVAFEDKGRFKSYLKDIPVFLITHEGPGLLGAGAYLRQSLGIKL

SEQ ID NO: 126884 - protein, 200 aa, Unknown
  Bacterial polypetide isolated from the Sargasso Sea
MQHTHALVGDVGGTNARLALCELATGTISQAKTYSGLAHPSLEAVVRLYLDEHKVQVGEACIAIACPINGDWVAMTNHSWEFSISEMQANLGLSRLQVINDFTAVSMAVPVLDAADCIQLGGAAPVAGKPIAIYGAGTGLGVAHLVHSGEQWLSLPGEGGHVDFAANSEEEDAVLQVMRAELGHVSAERLLSGPGLVNIY

SEQ ID NO: 126885 - protein, 89 aa, Unknown
  Bacterial polypetide isolated from the Sargasso Sea
MKCRTVVITQGSTATVVVENGVATSHAVEPLAKELLVDTNGAGDAFVGGFLAQLAQGKSTADCVAAGHWAARVIIQRSGCSYPETCDYK

SEQ ID NO: 126886 - protein, 253 aa, Unknown
  Bacterial polypetide isolated from the Sargasso Sea
GKDAFAAQMKTSCEGDGVFANYMVDESTPTGTCAVIVKDGERSLCAALNAANNYKAEHLDASENFALVEKADFYYMAGFFMTVSPESIMRVAKHACENKKTFMMNLSAPFLMQVPPFLECLMNSLPYVDILFGNESEAVTFAESQKWETKDVKEIALKISAMPVAEGKPSRTVVITQGADATVVARDGAVNEYAIIPLAKEDLVDTNGAGDAFVGGYISQLVQGGDVAKCCAAGNYAANKIIQVSGCKCEGVP

SEQ ID NO: 126887 - protein, 264 aa, Unknown
  Bacterial polypetide isolated from the Sargasso Sea
VQKHYIENRKIISLEGNLLRFAINEKISRDEFIKFYVGNEINPNLKSFLDTNETWKKFFQKYKLKFKEIRDRLIEISNKLGISVTDYKLMVSRIQKGEKESRIAKKEMVEANLRLVISIAKKYTNRGLQFLDLIQEGNIGLMKAVDKFEYRRGYKFSTYATWWIRQAITRSIADQARTIRIPVHMIETINKIVRTQRLILSEFGREATPEELAKKLRMPLEKVRKVLKISKEPVSLEKPVGDEEDSSLGDFIEDTKALAPLETA

SEQ ID NO: 126888 - protein, 98 aa, Unknown
  Bacterial polypetide isolated from the Sargasso Sea
MAKVHFYYSTMNAGKSTSLLQSNHNYEIRGHKTYLFTPRVDAEINDGKIHSRIGLSKSAEIFDEDFDFKKYFLRKSKENIACILLDEAQFLTEIQVRQ

SEQ ID NO: 126889 - protein, 187 aa, Unknown
  Bacterial polypetide isolated from the Sargasso Sea
MTLTPINSGWIEVICGSMFSGKTEELMRRLRRAEIAKMNIEIFKPKIDSRFSSEHIVSHDRSKMESHIIDDPKEILNISKDSEVIGIDETQFFAFSIVKVCKKLASQGKRVVVAGLDTDYRGLPFGPMPDIMCEADYLDKLRAICVKCGNPASYTQRTSSDSLQVVIGEHDKYEARCRNCFQPPKKN

SEQ ID NO: 126890 - protein, 36 aa, Unknown
  Bacterial polypetide isolated from the Sargasso Sea
MIKTRIKSLTVKTSYDVYDIGKDFDVIGIDEVQFFD

SEQ ID NO: 126891 - protein, 275 aa, Unknown
  Bacterial polypetide isolated from the Sargasso Sea
ARALEDVDNVVHAFDVVGIDEGQFFGDLVEFCERWARLGKTVIVAALDATFQRKPFNDVLSLVPIAEDVTKLSAVCNACGCDASFTKRVGSSDETVELIGGEGMYVATCRGCHDLPASSFPQRGTNTHALAAASTPKAAVNASRTPQRPPSSASSAERIRVRTVAEGMPVAGLVKTKGDMDTALKAGASGAAMSEIGDKMRSLAVMDSPATPEDAFGGFGYERSVGATPGTAARKKAAGLGAAAMAAAAGVAAGGSRSKGAGGPGRSPYNDLAGR

SEQ ID NO: 126892 - protein, 286 aa, Unknown
  Bacterial polypetide isolated from the Sargasso Sea
KFFQKYKLEFKNIRDRLIETSNRLGISVTEYKLMVSRIQKGEKESRIAKKEMVEANLRLVISIAKKYTNRGLQFLDLIQEGNIGLMKAVDKFEYRRGYKFSTYATWWIRQAITRSIADQARTIRIPVHMIETINKIVRTQRLILSEFGREATPEELAKKLRMPLEKVRKVLKISKEPVSLEKPVGDEEDSSLGDFIEDTKALAPLEQAIKSNLSEATTKILSTLTPREERVLRMRFGVGMNTDHTLEEVGLQFSVTRERIRQIEAKALRKLKHPSRSKQLKSFLES

SEQ ID NO: 126893 - protein, 109 aa, Unknown
  Bacterial polypetide isolated from the Sargasso Sea
MAKLYFYYSAMNAGKTTTLVQSAYNYRERGMNTLVLKPIIDERFIYSVVRSRIGLETDAVSVEGKDDLFLLTEKSNKNNPLSCVLLDEAQFLTKSQVFSLGEIVDKLDI

SEQ ID NO: 126894 - protein, 187 aa, Unknown
  Bacterial polypetide isolated from the Sargasso Sea
MALTPINSGWIEVICGGMFSGKTEELMRRLRRAEIAKMSISIFKPKIDSRYDEGHIVSHNKDKMMSFIIDNPKEIINASVNHDVVGIDETQFFDHSIVDVCRKLASNKKRVIVAGLDTDYRGLPFGPMPDMMCEAEYVDKLRAICLECGDPASYSQRTSKDSDQVVIGEMDKYEARCRNCFQPPEGH

SEQ ID NO: 126895 - protein, 275 aa, Unknown
  Bacterial polypetide isolated from the Sargasso Sea
NKKIVVKEIKTICIGNIYVGGTGKTPLSICLSKLLENLNYKTAFIKKKYNDQIDEQKMLSSRGRLYCENDRISALKKAISEKNNIAIFDDGLQDKNFKYDISFVCFNAENLIGNGLMLPSGPLRENLKNLKNYDGVFVNGNGEKISEIKNIIQNINPNLPIFETQYVPLNMEKFDKNQNYIAFSGIGNPKSFLKTLKNYNFKIVENFDFPDHYDYSNQDLIMIKETAKKNNAKIITTEKDYNRLDKSVSNGIEFLEINLEIFNEKELIKLLNKKL

SEQ ID NO: 126896 - protein, 276 aa, Unknown
  Bacterial polypetide isolated from the Sargasso Sea
YKEYNKLIKYQNEKLDCLLNSKQFSISKEKNYKKIVDDILENIKTLQLSPSVLEELVQKHYVENRKIISLEGNLLRLALNEKISRDEFIKFYVGNEINPNLKSFLDTNDTWKKFFQKYKSQFKDIRDRLIEISNKLGISVTDYKLMVSRIQKGEKESRIAKKEMVEANLRLVISIAKKYTNRGLQFLDLIQEGNIGLMKAVDKFEYRRGYKFSTYATWWIRQAITRSIADQARTIRIPVHMIETINKIVRTQRLILSEFGREATPEELAKKLRMPL

SEQ ID NO: 126897 - protein, 117 aa, Unknown
  Bacterial polypetide isolated from the Sargasso Sea
MAKVHFFYSTMNAGKSTALLQSAHNYHETGNETILFIPREDADKNSGLIKSRIGLSASAVVIDSKLKIYNYVKKELSKRKVDAILVDEAQFLKKHHVLPMCKVCDELQIPRNVLWHK

SEQ ID NO: 126898 - protein, 156 aa, Unknown
  Bacterial polypetide isolated from the Sargasso Sea
MTITDPTLAAFAAPASHVPRVLTIAGSDSGGGAGIQADLKTFAALGCYGMSAITAITAQNTLGVTAVESLTPDIVAAQIDAVASDIGVDAAKTGMLGTPQVVEAILSALDRHPIANLVVDPVMVSTSGAQLGSDATAQAMAKWLFPRALLVTPNLP

SEQ ID NO: 126899 - protein, 117 aa, Unknown
  Bacterial polypetide isolated from the Sargasso Sea
MAKVHFFYSTMNAGKSTALLQSNYNYHESGMQTLLFLPKIDAEKNNGKIHSRIGLKADAISVDSDFNFFNYVSQKQMEKTIECILIDEVQFLLRDQIRQICKVSDELNIPAMCYGIR

SEQ ID NO: 126900 - protein, 93 aa, Unknown
  Bacterial polypetide isolated from the Sargasso Sea
LAYGLRSDFRGELFEGSLHLLAWADELVEIKTICHCGKKAGMVLRLDENGEPVNIGDQVKIGGNDIYVSVCRKHFKQQQAENILDDSGPNLSS

SEQ ID NO: 126901 - protein, 173 aa, Unknown
  Bacterial polypetide isolated from the Sargasso Sea
TLLYTPHIDHQNGRPVIHSRIGITAEAIPFTEKYEFLHEIQQEHQKEKVHCVLIDESQFLTAEQVLQLTVVCDQLSIPVLCYGIRTDFQGEPFEGSKYLLSWADNLIEIKTICRSGKKATMNARIDEEGNRVTEGNQVDVGHHYEALSRKEFQLETVSPIRHDTRIYSTNNRK

SEQ ID NO: 126902 - protein, 148 aa, Unknown
  Bacterial polypetide isolated from the Sargasso Sea
VIKPSIDNRYSNEKIITHNDLSHECYAMNSWATVLKKFNFDKSEVDMVFLDEIQFMETHDTLSNVEAILNNGIDVVCAGLDQDSRGKPWETSSMLLGLSDKIVKIYGFCNVCGLEATKTFRKTEGGKRTQVGAANIYEPRCLKHWEPR

SEQ ID NO: 126903 - protein, 165 aa, Unknown
  Bacterial polypetide isolated from the Sargasso Sea
MNEINIEPSIDLIIGPMFSGKSTELLRRLVLYKEIFSPEHVLYVNCDIDDRSNKNFSTHNSLIKNSELDFMSKKVNINFINVLLEIENIKVIGIDEAQMFTDLYTIVMKLVEEKGIKVILSGLNSDCYRNDFGELCKFFSKCDTVTKLNPFCKECKDSEIIKPAI

SEQ ID NO: 126904 - protein, 159 aa, Unknown
  Bacterial polypetide isolated from the Sargasso Sea
LTICSKVYADANSSKIKSRIGLDADAYSFDQAFNFRGYLDGELAKKTSCIFVDEAQFLTKLQVRELCYIADCHNIPVMCYGIRTDFRGELFEGSSELLAMADTLNELKTVCDSGKKATMVVRLDEEGNVITEGDQIKIGGNDTYKAVSRSLFRKLTKLI

SEQ ID NO: 126905 - protein, 273 aa, Unknown
  Bacterial polypetide isolated from the Sargasso Sea
GEIENSGWELSLNTALINTSNLRWDVNVNIDGNENKITELGDEGNWQKIYANGVDGGDSVYVVGGHRLGYPVNGLWGTLITEWDAANKTHKRSDYAKYRGPFLPKNNYSLGNTITFGDFRFYALISQTKGAVFSNSDRPYKVRQGGSDEFLKHFDFDNLDANGNPSRTAAADSTLNYWSLTGAYDSRDALRLREISLTYSVPNALSSRIGLGATTITFSGQNVWWWDDCHCDDPDMQYSQGANYNGNTYGTNASGFLAQPSPRTFLLTFKTAL

SEQ ID NO: 126906 - protein, 310 aa, Unknown
  Bacterial polypetide isolated from the Sargasso Sea
FILPLAAMENEIKPKVLKTIHTLTKEYNKLIKYQKERLQNVLDGKTFSSSKEKNYEKIVSFILENIKSLQLSPAVLEELVQKHYGENKKIISLEGNLLRLALDHKIPRNEFLKFYVGNEINPNLKKFLDTNVVWKQFFQKNKDEFKNIRERLIEISNKLGISVTEFKKMLSRIQKGERESRIAKKEMVEANLRLVISIAKKYTNRGLQFLDLIQEGNIGLMKAVDKFEYRRGYKFSTYATWWIRQAITRSIADQARTIRIPVHMIETINKIVRTQRLILSEFGREATPEELAKKLRMPLEKVRKVFKISK

SEQ ID NO: 126907 - protein, 144 aa, Unknown
  Bacterial polypetide isolated from the Sargasso Sea
ISRIGLEADAIIVDNEYNFFNEIEKLNHKDISCIFVDEAQFLSKKQVQSLGKVADDLSIPVMCYGIRTDFQGQLFDGSKELLAIADNLKELKTICSMCEKKATMVVRLNQEGEVVLEGEKIVIGGNDIYKTLCRKHFRQLTKLI

SEQ ID NO: 126908 - protein, 193 aa, Unknown
  Bacterial polypetide isolated from the Sargasso Sea
MAKLHFFYSTMNAGKSTALLQSNHNYLESNLYTLLFIPEQIGNKSNGKIISRIGLNADATVIDDKYDFYEEIKKSNFKDISCIFVDEAQFITQNQVHSLGKIADELNIPVMCYGIRTDFQGKLFVGSQELLALADNLKELKTICSMCDKKATMVVRLDKNGKVLLEGEKVLIGGNEIYKTVCRKHFRELTKLI

SEQ ID NO: 126909 - protein, 185 aa, Unknown
  Bacterial polypetide isolated from the Sargasso Sea
MIKEQNSFGSIEVICGNMFSGKTEELIRRLRRAKIARLNVKIFKPKIDTRYEEGNIVSHNQLKLESLAVKSINELNDLASDADVVGIDEAQFFDESIIEIAKDLSSKGKRVIIAGLDTDFKGEPFGPMPKLMCEADFLDKLQAICVKCGNPASYTQRLSKDNKQVVIGETDIYEARCRHCYEGPN

SEQ ID NO: 126910 - protein, 548 aa, Unknown
  Bacterial polypetide isolated from the Sargasso Sea
MQSPCRVEVIGRLPARLLPLPSHWPPQRRIDPDISGLTTTTTQEAGGDVGPVSQPSPQLQREALEDWYGRLHQDGSFPQHGGQGPVEEPLACLRMLSRHCDLPFRRDVLRRILQDQRQRSSNGELPVQALAAICDLLGLRTTALQPNSVELIGRAPYPAITVTSGGHPLVLWEARQGEVLVGDPRQGQQWMDASTLLIQAGGERLQLLCVERSSSAPKARFGLSWFVPAIKKHRGALLQVVITSFFVQLLGLFNPLLIQQIIDAVISQGNFSSLNVLGTLLVAMALAQALLGSLRTYLFSDTTNRIDISLGASIIHHLLRLPLGYFAKRPVGEVSSRIGELEKIRSFLTGTALTVLLDAVFSVVYIAVMLVYSVPLTFAALGVLPLFVGLTMGVAPIIRRQLRQQAEANAKVQSHLVETLSGMETVKGQGMELPSEWRWEQLYGGQIEAGFRNTVTSTAAGSANQFLGQVSGLIVIWLGAMLVLEGKMTLGQLIAFRILSGYVTSPLLRLASLWQNFQETALSLERLSDIVDHKEEIEIAGEGLPPLP

SEQ ID NO: 126911 - protein, 495 aa, Unknown
  Bacterial polypetide isolated from the Sargasso Sea
MLNALSQSPITAQQFFEWNNKLQNDEILVREIIDIDTNYMEDEDTGQSAKQKKSDDGNNNQNSEESNNTNEDDEFNPTLAAMETEIKPKVLQTVNNLTKDYNKLIKYQKEKLDCVLNLKQFSISKEKNYKKIVEDILENIKTLQLSPSVLEELVQKHYVENRKIISLEGNLLRYALNEKIPRDEFIKFYVGNEINPNLKTFLNTNEIWKKFFQKYKTEFKNIRDRLIEISNKLGISVTEYKLMVSRIQKGEKESRIAKKEMVEANLRLVISIAKKYTNRGLQFLDLIQEGNIGLMKAVDKFEYRRGYKFSTYATWWIRQAITRSIADQARTIRIPVHMIETINKIVRTQRLILSEFGREATPEELAKKLRMPLEKVRKVLKISKEPVSLEKPVGDEEDSSLGDFIEDTKALAPLEQAIKSNLSEATTKILSTLTPREERVLRMRFGVGMNTDHTLEEVGLQFSVTRERIRQIEAKALRKLKHPSRSKQLKSFLES

SEQ ID NO: 126912 - protein, 64 aa, Unknown
  Bacterial polypetide isolated from the Sargasso Sea
WPGQTNYGKIKTVCHCGKKAIMTVRLNEEGKPCRAGEQIQIGGNESYVSMCRRHFKSSLGLSEI

SEQ ID NO: 126913 - protein, 318 aa, Unknown
  Bacterial polypetide isolated from the Sargasso Sea
MILKKPKFWDLKKSNFLVYLLYPFTIFVKINNTISSFIPKKKFTEIKTICVGNIYVGGTGKTPTTLFLYNLLKKMNINPVTAKKFYNNQIDEQKFLKDNSNFISYSNREKIVKKAIEMKFDTVIFDDGLQEKWINYDIKFACFDSEKWIGNGHLIPSGPLREKMNVLKNYHGIFLKTVNDDSNLDYIYNKIREINPNIEVFESNIEIKNISKFNIDRNYIIFSGIGNPDSFKKLLLKNKFKIIEEITFPDHYNYQDKDILKIIDKANSNNAAIITTEKDFKRIPQNFKEKISFLEINMKIKDENKLVQFLKTKINEIN

SEQ ID NO: 126914 - protein, 183 aa, Unknown
  Bacterial polypetide isolated from the Sargasso Sea
MNAGKSTALLQSNYNYHERGMETLLFLPKIDAEKNNGKIHSRIGLVADAISVDSNFNFFNYVSQKQLAKSISCILIDEVQFLSREQIRQICKVSDELNIPAMCYGIRTDFQGNLFEGSSELLALADNFIELKTVCYCGRKAIMVVRLDENGKIVKDGDQIKIGGNNSYKVLCRKHFRELTQLI

SEQ ID NO: 126915 - protein, 187 aa, Unknown
  Bacterial polypetide isolated from the Sargasso Sea
MTLTPINSGWIEVICGSMFSGKTEELMRRLRRAEIAKMNIEIFKPKIDSRFSSEHIVSHDRSKMESHIIDDPKEILNLSKDSEVVGIDETQFFKYSIVEVCKTLASEGKRVVVAGLDTDYRGLPFGPMPDIMCEADYLDKLRAICVKCGNPASYTQRTSSDSLQVVIGEHDKYEARCRNCFQPPKKN

SEQ ID NO: 126916 - protein, 55 aa, Unknown
  Bacterial polypetide isolated from the Sargasso Sea
FERIKTVCHCGRKATMVLRLNAKGEVVSDGTQIEIGGEEKYVSVCRKHFIEKNIG

SEQ ID NO: 126917 - protein, 58 aa, Unknown
  Bacterial polypetide isolated from the Sargasso Sea
MAKLYFHYSTMNAGKSTLLLQASHNYQERGMKTYLITAQLDNRAGEGQIGSRIGINAS

SEQ ID NO: 126918 - protein, 57 aa, Unknown
  Bacterial polypetide isolated from the Sargasso Sea
MAKLYFNYSSMNAGKSTALLQASHNYQERGMDTLIITSQKDDRGGKGNITSRIGLSK

SEQ ID NO: 126919 - protein, 193 aa, Unknown
  Bacterial polypetide isolated from the Sargasso Sea
MASLHYKFATMNSGKSTQLIQAHFNYLERGMHPLAMTPAIDDRFGVGVISARVGLELRVEVFSDSCDLFEMVKARHAERHIDVFIVDEAQFLTKEQVYQLARIVDEQDIPVIAYGLKTDFRGELFPGSYHLLCLADKFEELKSICWCGNKAHMNSRVNEAGQVMRDGEQVEIGGNDRYVSLCRKHYLEGRAFK

SEQ ID NO: 126920 - protein, 171 aa, Unknown
  Bacterial polypetide isolated from the Sargasso Sea
SGKTEELIRRIKRAKIANQKIKVFKPVIDSRSKNFIESHDESKLECIEVKSSNEILKKIDNCDVVAIDEAQFFDDLIVPVCNKIANNGVRVIIAGLDMDYLGNPFGPMPNLMAISEYVTKVHAVCKKSGNIANYSYRKNNKKDIVVIGEKDKYEPLSRSVFYKKMNKNKKI

SEQ ID NO: 126921 - protein, 185 aa, Unknown
  Bacterial polypetide isolated from the Sargasso Sea
MIREMNNFGCIEVICGNMFSGKTEELIRRLRRAKIARLDVKIFKPKIDTRYEEGNIVSHNQLKLKSFVVESITEINDLANDADVVGIDEAQFFDDSIIDLVKDLSSRGKRVIIAGLDTDFKGVPFGPMPKLMCESDYLDKLQAICVKCGNPASYTQRLSKDNSQVVIGETDIYEARCRHCYKNPI

SEQ ID NO: 126922 - protein, 225 aa, Unknown
  Bacterial polypetide isolated from the Sargasso Sea
MSGKIVNYYDDSTECIGFLSLPESSNLVPLILVAHTWKGRSEFEDQKVVALNDLGYAALSIDIFGGGVNGQSIEENQALIAPFVNDRQLFRKRLISAVEFGKTIESVDSSRIGLIGFCFGGLAAIELARSGYEIAGCVSFHGLLNQSSEPFQKVKSKLLVLHGDKDPMVTSEEILALQDEMTESEADWQFISYGNTYHAFTNPAADDIEMGTVYNPESDKRSWIA

SEQ ID NO: 126923 - protein, 73 aa, Unknown
  Bacterial polypetide isolated from the Sargasso Sea
QGELFEGSKYLLAWADNLKEIKTVCWCGRKATMVVRINDKNEIISEGEQIEIGGNERYVPLCRSHFVSKNLGN

SEQ ID NO: 126924 - protein, 180 aa, Unknown
  Bacterial polypetide isolated from the Sargasso Sea
MAKLHFFYSTMNAGKSTSLLQSNHNYLESNLKTLLFLPEEISKKSDSNIVSRIGLKAKAISINTVFKFYEYLEKADYKSINCIFVDEAQFLTKLQVRDLSKIADELNIPVMCYGIRTDFQGELFDGSSELLAIADNLNELKTICSECDKKATMVVRLDENGKVILAGEKILVGGNDIYKT

SEQ ID NO: 126925 - protein, 107 aa, Unknown
  Bacterial polypetide isolated from the Sargasso Sea
MTLTPKYSGWIEVICGPMFSGKTEELIRRLVRAQIAKQKVAIFKPVTDDRYDQQYIVSHNQKKIKSIQVKSADEILAFINKAVVFGIDEAQFFDKSIVTTCKKLANA

SEQ ID NO: 126926 - protein, 113 aa, Unknown
  Bacterial polypetide isolated from the Sargasso Sea
MAKLYFYYSTMNAGKSTILLQAAYNYRERGMEPFLITAKLDNRAGQPKIVSRIGIEGKAKLFDSSDDLFLIIKEKIKEKKINCILLDEAQFLSKKQVWQLGRVVDDLQIPVLC

SEQ ID NO: 126927 - protein, 156 aa, Unknown
  Bacterial polypetide isolated from the Sargasso Sea
MAKLHFFYSTMNAGKSTALLQSNHNYLESGLKTMLFIPHEIGNKSKGKIISRIGLEADAVIVNKDYDFYIEVKKTNFKEISCIFIDEAQFLSRNQVHNIGKIADELNIPVMCYGIRTDFQGMLFEGSQELLAIADNLKELKTICSECDKKATMVVR

SEQ ID NO: 126928 - protein, 193 aa, Unknown
  Bacterial polypetide isolated from the Sargasso Sea
MASLHYKFATMNSGKSTQLIQAHFNYLERGMYPLAMTPAIDDRFGAGVISARVGLELKVEVFSDSCDLFEMVKARHAKRHIDVFIVDEAQFLTREQVYQLARIVDEQDIPVIAYGLKTDFRGELFPGSYHLLCLADKFEELKSICWCGNKAHMNSRVNEAGQVMRDGEQVEIGGNDRYVSLCRKHYLEGRAFK

SEQ ID NO: 126929 - protein, 105 aa, Unknown
  Bacterial polypetide isolated from the Sargasso Sea
SKAQVRQLTDVVDELRVPVLAFGLRTDFLGETFAGSEALLAWADKLIELKTICHCGRKANFVVRLDENGQAATAGSQVQIGGNESYVSMCRAHFKALVWQDKQTE

SEQ ID NO: 126930 - protein, 125 aa, Unknown
  Bacterial polypetide isolated from the Sargasso Sea
PLSCVLLDEAQFLSKSQVFSLGEIVDRLEIPVLAYGLRSDFRGELFEGSMHLLAWADELVEIKTICHCGKKAGMVLRLDENGKPVNIGDQVKIGGNDIYVSVCRKHFKLQQAENISDGTGPNLSS

SEQ ID NO: 126931 - protein, 193 aa, Unknown
  Bacterial polypetide isolated from the Sargasso Sea
MAKVHFFYSTMNAGKSTALLQSNYNYNERGMDTLLFLPKADADANKNKIHSRIGLIANAISADTNFDFFEYVKDFKNKKKVDAILIDEVQFLTKDQVRQICKISDTLNIPSMCYGIRTDFRGELFEGSSELLALADNLIELKTVCDCGRKATMVVRLDESGNVITAGKKIQIGGNDTYKVYCRKHFRELTNLI

SEQ ID NO: 126932 - protein, 124 aa, Unknown
  Bacterial polypetide isolated from the Sargasso Sea
YNLLKSKQKSSPIACVFIDEAQFLTKEQVWQLARAVDELFLPVLCYGLRVDFQGNLFPGSSALLGLADELKEIKTICHCGKKATMVVRKSTNNKPIKDGSQIQIGGNDLYESLCRIHWRQLMES

SEQ ID NO: 126933 - protein, 189 aa, Unknown
  Bacterial polypetide isolated from the Sargasso Sea
NFDKQTGWIEVVCGSMFSGKTEELIRRIRRAKYANLDVIIFKPKVDKRDKKDNVVSHDDTTIDCKTIKRASEIYKIVKDSKVIGIDEAQFFDDEIVEVCNSLANHGVRVIVAGLDMDYKGVPFKNMANLMATAEYVTKVHAICPKTGGLAHYSYRKTKSKKRILLGKGDEYMPLSRAAYFKKKNKKSKG

SEQ ID NO: 126934 - protein, 144 aa, Unknown
  Bacterial polypetide isolated from the Sargasso Sea
MAKLHFFYSTMNAGKSTSLLQSNHNYLESNLKTLLFLPKEISDKADSNIVSRIGLKAKAISIDNEFKFYEYVKNIEYKNINCIFVDEAQFLTKKQVRNLSKISDKLDIPVMCYGIRTDFQGELFHGSSELLAIADNLNELKTIC

SEQ ID NO: 126935 - protein, 167 aa, Unknown
  Bacterial polypetide isolated from the Sargasso Sea
TGMHTILFIPKEDVSKNSGSIKSRIGLKAPAVVLDKNMNLFNFVKDKDAVQKIDAVLIDEVQFLNKKQVNEVCKVADLLDIPVMCYGIRTDFRGELFEGSSSLLALADKLEELKTICTECNRKATMVIRLDKDSKVVTSGEQILIGGNETYKVLCRKHFNEITKLLD

SEQ ID NO: 126936 - protein, 189 aa, Unknown
  Bacterial polypetide isolated from the Sargasso Sea
MICRFLQLILGPMFSGKSTELIRRLKRYEIARYSCLIVKYAKDVRYDHESIATHDQQTLKAMSTDKLKDLKVKLEDYDVIGIDEGQFFPDVVEFSEEMANKGKTVVIAALDGTFQRKAFTSILQLVPLAEHVMKLNAVCMNCFGEASFTKRISADKEVFIYKLLMSELPVYTGVMLAFEAVVNILPQNQ

SEQ ID NO: 126937 - protein, 120 aa, Unknown
  Bacterial polypetide isolated from the Sargasso Sea
MAKLYFNYSSMNAGKSTMLLQANHNYIERGMNPRIYTSDLDNRFGKGEIVSRIGLKAKSNIFTSKTDIYKDILNFCKNSSVDCVLIDEAQFLTQNQVSQLSKVVDELDIPVLTFGIRTDF

SEQ ID NO: 126938 - protein, 100 aa, Unknown
  Bacterial polypetide isolated from the Sargasso Sea
ARVVDDLQIPVLCYGLRVDFQGELFPGSLVLLSIADEMREIKTICHCGRKATMVARLNKDGKVITKGEQIQIGGNESYISLCRLHWREEIKNANINDSQF

SEQ ID NO: 126939 - protein, 184 aa, Unknown
  Bacterial polypetide isolated from the Sargasso Sea
MAKLYFHYSSMNAGKSTALLQAHHNYGERGMKTFLLTAYLDDRHGVGVIRSRIGIQQEATPFRKGDNLLDVVRKKKQEDSLSCVLVDEAQFLSKEQVGQLAEVVDKEGIPVLAFGIRTDFLTEPFEGSQYLMAWADEIKEIKTICHCGKKATMNARIDSSGKMEMAGDQIEIGGNERYGSLCRA

SEQ ID NO: 126940 - protein, 193 aa, Unknown
  Bacterial polypetide isolated from the Sargasso Sea
MAKVHFFYSTMNAGKSTALLQSNYNYHERGMETLLFLPKIDAEKNNGKIHSRIGLEADAVSVDVNFNFFNYVSQKQLAKSISCILIDEVQFLSREQIRQICKVSDELNIPAMCYGIRTDFQGNLFEGSSELLALADNFIELKTVCHCGRKAIMVVRLDENGKIVKDGDQIKIGGNDSYKVLCRKHFRELTQLI

SEQ ID NO: 126941 - protein, 203 aa, Unknown
  Bacterial polypetide isolated from the Sargasso Sea
MAKLYFYYSAMNAGKTTTLVQSAYNYRERGMNTLVLKPEIDERYSSSIVRSRIGLETDAKTIGAKDNLFLLVEKTNRKNPLSCVLLDEAQFLTKSQVYSLGEVVDKLEIPVLAYGLRSDFRGELFEGSLHLLAWADELVEIKTICHCGKKAGMVLRLDENGNPINIGDQVKIGGNDIYVSVCRKHFKQQQAENILDDSVPKFK

SEQ ID NO: 126942 - protein, 166 aa, Unknown
  Bacterial polypetide isolated from the Sargasso Sea
MAKVHFHYSTMNAGKSTSLLQSNHNYEVRGLKTYLFTPKADADMYHGAIHSRLGLEKKANIFEESFEFDKYFLDKKDEKIACILVDEAQFLTSKQVKELCLVCDKLNIPVMCYGIRTDFRGDLFSGSAALLAYADTLVELKTICEYEGCARKATMIARYTDGKIVT

SEQ ID NO: 126943 - protein, 201 aa, Unknown
  Bacterial polypetide isolated from the Sargasso Sea
MFLENTLKYGKQFGWIEVVCGSMFSGKTEELIRRLKRAKFAKLKVAIFKPSIDTRHKKSKIVSHNKNKIKCKTVKTAKDIYKLGHKCDVVGIDEAQFFDDGIIEVCNGLANSGVRVIVAGLDMDYTGKPFGPMANLMATAEYVTKVHAICSKTGGLAQYSYRKAKSDELIMLGEEQEYEPLCRATFFKRMTKRAKKITVSE

SEQ ID NO: 126944 - protein, 96 aa, Unknown
  Bacterial polypetide isolated from the Sargasso Sea
MAQLYFYYSAMNAGKSTTLLQSAHNYEERGMRTLLYTSIIDDRSGRAVIHSRIGITAEATAFRQDYDFFQSVKQEDEKEKVHCVLIDEAQFSHSSA

SEQ ID NO: 126945 - protein, 184 aa, Unknown
  Bacterial polypetide isolated from the Sargasso Sea
MNAGKSTVLLQASHNYGERGMKTMLFTAELDNRSKVGNISSRIGLSEKASTFNNDNNLFSSVEKRLKKDKISCVFVDEAQFLTDKQVWQLSDVVEILKVPVMCFGLRTDFQGKLFEGSSTLLAIADELKEIKTICHCGKKANMVVRVDSNGKVLKEGAQIEIGGNEKYISLCRKHWKNEMENNR

SEQ ID NO: 126946 - protein, 99 aa, Unknown
  Bacterial polypetide isolated from the Sargasso Sea
MAKVHFHYSTMNAGKSTSLLQSNHNYEVRGLKTYLFTPKADADMYHGAIHSRLGLEKKANIFEESFEFDKYFLDKKDEKIACILIDEAQFLTSKQVKEL

SEQ ID NO: 126947 - protein, 195 aa, Unknown
  Bacterial polypetide isolated from the Sargasso Sea
MAKVHFFYSTMNAGKSTALLQSAHNYHETGNETILFIPREDADKNLGLIKSRIGLSASAVVIDSKLKIYNYVKKELSQRKVDAILVDEAQFLKKHHVLQMCKVCDELQIPVMCYGIRTDFRGELFEGSAALLALADNLIELKTVCNVCSRKATMVVRLDESGKVITEGSKVQIGGNDVYRVLCRKHFNEATKLLD

SEQ ID NO: 126948 - protein, 124 aa, Unknown
  Bacterial polypetide isolated from the Sargasso Sea
DYVYKHRSDDLSCILVDEAQFLSKKQVRELGKIADELNYPVMCYGIRTDFQGELFEGSSELLAVSDNLIELKTICAFCNRKATMVVRTDDKNNIITEGNKVEIGGNEIYKSVCRKHFRELTGLI

SEQ ID NO: 126949 - protein, 191 aa, Unknown
  Bacterial polypetide isolated from the Sargasso Sea
MFLENSVHRNKQFGSIEVICGSMFSGKTEELIRRLKRAKIANQKIQIFKPSLDSRNNEYIESHDKNRIKSLTVKTSYDVYDIGKDFDVIGIDEVQFFDDEIVSVCNSLANNGVRVIAAGLDMDYLGNPFGPMPNLMAIAEYVTKVHAICSKTGNIANYSYRKNKEDSIILIGEKDEYEALSREIFYEKMDS

SEQ ID NO: 126950 - protein, 200 aa, Unknown
  Bacterial polypetide isolated from the Sargasso Sea
MAKLYFNYSTMNAGKSTVLLQASHNYRENKMQTYLLTARVDDRAGTGRIASRIGISAEADIFAAEDNLFEKISSRLKQGSVAAIFVDEAQFLTREQVWQLARVVDDLRVPVLAFGLRVDFQGNLFPGSATLLALADEMREVRTICHCGKKATMVVRQDDQGNVLTEGDQVQIGGNETYVSLCRRHWRAAMGDLPASSDGN

SEQ ID NO: 126951 - protein, 121 aa, Unknown
  Bacterial polypetide isolated from the Sargasso Sea
MHQKPIELGWIEVICGSMFCGKTEELLRRLRRAKIANLNIIAFKAKIDNRYSKDKIVSHDRNSLESIAIDNAEDLMKLGRNYDVVGIDEAQFFDNSLLLACKTLAENRTRVIVAGLDTDYK

SEQ ID NO: 126952 - protein, 195 aa, Unknown
  Bacterial polypetide isolated from the Sargasso Sea
MAKVHFFYSTMNAGKSTALLQSAHNYHETGNETILFIPREDADKNSGLIKSRIGLSASAVVIDSEFKIYDYVKKELSQRKVDAILVDEAQFLKKDHVLQMCKVCDELQIPVMCYGIRTDFRGELFEGSASLLALADNLIELKTVCNMCSRKATMVVRLDENGKVITEGSKVQIGGNDVYRVLCRKHFNEATKLLD

SEQ ID NO: 126953 - protein, 220 aa, Unknown
  Bacterial polypetide isolated from the Sargasso Sea
MRVLDEIGSVSRAAGRARVCTSSVYSAHSTISGEIHLILGPMFAGKTTALLDQIAREEAHGMSVTLVKSSKDNRYSHDEIVSHDGTSRRCNAVAELSDLRGIIGEEQWNGAHVLAIDEAQFIPDLVSFCVNAADEHQKKVIVAGLDGDFRRQRFGEVLDLLPLCDTVTKLTAQCGVCSVRPALFSLRTTGDTSTQELVGGADSYKPACRLCYVKATSGNE

SEQ ID NO: 126954 - protein, 187 aa, Unknown
  Bacterial polypetide isolated from the Sargasso Sea
FYSTMNAGKSTALLQSNHNYSESNLKTLLFIPKDLGDKSDGKIISRIGLEADAIIVDNEYNFFNEIEKLNHEDVSCIFVDEAQFLSKEQVQSLGKVADDLSIPVMCYGIRTDFQGQLFDGSKELLAIADNLKELKTICSMCEKKATMVVRLNQEGEVVLEGEKIVIGGNDIYKTLCRKHFRQLTKLI

SEQ ID NO: 126955 - protein, 180 aa, Unknown
  Bacterial polypetide isolated from the Sargasso Sea
WIEVICGSMFSGKTEELIRRVKRAKLAKQKIKIFKPKQDVRYSKKKVTSHDNNSIKSKPVKSSEKILELSVKCDVIGIDEAQFFDDGIIEVCNKLANAGKRVIVAGLDMDYRGNPFGPMPNLLAIAEYVTKVHAICTRSGKMASYTHRIVKSEDLVLLGDTRRYEALSRREFIKAKQKKK

SEQ ID NO: 126956 - protein, 131 aa, Unknown
  Bacterial polypetide isolated from the Sargasso Sea
MFLENSLHGNKQFGSIEVICGSMFSGKTEELIRRLKRAKIANQKIQIFKPSLDSRNSEYIESHDKNRIKSHTVKTSYDVYDIGKDFDVIGIDEVQFFDDEIVSVCNSLANNGVRVIAAGLDMDYLGNPFGP

SEQ ID NO: 126957 - protein, 119 aa, Unknown
  Bacterial polypetide isolated from the Sargasso Sea
MIQKPKNMGWIEVICGSMFSGKTEELIRRLRRARIAQLPISIYKPKIDSRYSESHIVSHNKSEMQSQIVKNAEEVLTLSKNDKVVGIDEAQFFDNSLIKVCKKLASERKRVIVAGLDRD

SEQ ID NO: 126958 - protein, 186 aa, Unknown
  Bacterial polypetide isolated from the Sargasso Sea
MHQKPIELGWIEVICGSMFCGKTEELLRRLRRAKIANLNVIAFKAKVDDRYSKNRIVSHDRNSLESIAIDNAEDLMKLGRDYDVVGIDEAQFFNDSLLLACRALAKNRTRVIVAGLDTDYKGQPFGPMPLIMCESDYLDKLTAICMKCGRDATYTQRIISNTQQVVIGETDAYEARCRKCFIPPKI

SEQ ID NO: 126959 - protein, 183 aa, Unknown
  Bacterial polypetide isolated from the Sargasso Sea
MGSIEVICGSMFSGKTEELIKRIEKINNTNLNYKVFKPEIDKRSGESKIKTHNNKSIDAINIKNVSEIINQSNHCDVIGIDEAQFFTEDIVDVCNTLANKGIRVIIAGLDMDYLGKPFGPMPKLMAIAEDVIKVHAVCTETGKPANYSFRKSNKNDTVMLGEKNEYEPLSREAFVSKMKKKKN

SEQ ID NO: 126960 - protein, 193 aa, Unknown
  Bacterial polypetide isolated from the Sargasso Sea
MAKLYFFYSTMNAGKSTALLQSNHNYSESNLKTLLFIPKDLGDKSDGKIISRIGLEADATIVDSEYNFFNEIEKLDHKDISCIFVDEAQFLSKEQVQSLGKVADELSIPVMCYGIRTDFQGQLFDGSKELLAIADNLKELKTICSMCEKKATMVVRLNQEGEVVLEGEKIVIGGNDIYKTLCRKHFRQLTKLI

SEQ ID NO: 126961 - protein, 195 aa, Unknown
  Bacterial polypetide isolated from the Sargasso Sea
MFLENPAYNSEQFGWIEVICGSMFSGKTEELIRRVKRAKIANQNVKIFKPIIDSRTKNFIESHDDNKLQSIEVKSSSEILNKLKNCDVVAIDEAQFFDDEIIDVCNIIANKGVRVIVAGLDMDYLGKPFGPMPDLMAISEYVTKVHAVCKKSGNIANYSYRKNRKKDIVIIGEKDKYEPLSRAMFFKKMKKNKSK

SEQ ID NO: 126962 - protein, 186 aa, Unknown
  Bacterial polypetide isolated from the Sargasso Sea
MHKKLINSGWIEVICGGMFSGKTEELLRRIRRAQIANMSTIIFKPQIDTRYSKNKIVSHNNNSMESEIIQKTKDIFNIGKNNDVVGIDEAQFFDSELLDVCKKLAKNNTRVIIAGLDSDYRGLPFSSMPEIMCEADYLDKLTAICVKCGNPASCTQRITKEKDQVIIGETDIYEARCRNCFNPPEK

SEQ ID NO: 126963 - protein, 194 aa, Unknown
  Bacterial polypetide isolated from the Sargasso Sea
MAKVHYFYSTMNAGKSTSLLQSSHNYEERDLNVLLFTPEVDAKIHDSFIHSRIGLKKPAYVFNEKFDFIDYVYKENKKRVSCILVDEAQFLTSEQVKQLCRICDEKNIPIMCYGIRTDFRGELFPGSLALLSLADNIIEIKTICEYPSCSRKATMIARYDKNGEIVLEGNQIDIGADKYKVYCRKHYRELTKII

SEQ ID NO: 126964 - protein, 187 aa, Unknown
  Bacterial polypetide isolated from the Sargasso Sea
MTHTPINSGWIEVICGSMFSGKTEELMRRLRRAEIAKMSISVFKPKIDSRYDKGHIVSHNKTKMMSSIIENPKEIINASKDHNVVGIDETQFFDHSIVDVCKRLAYNKKRVIVAGLDTDYRGLPFGPMPDMMCEAEYVDKLRAICIECGNPASYSQRTSEDSHQVLIGEMDKYEARCRNCFQPPKGY

SEQ ID NO: 126965 - protein, 193 aa, Unknown
  Bacterial polypetide isolated from the Sargasso Sea
MAKLYFFYSTMNAGKSTALLQSNHNYSESNLKTLLFIPKDLGDKSDGKIISRIGLEADAIIVDNEYNFFNEIEKLDHKDVSCIFVDEAQFLSKEQVQSLGKVADELSIPVMCYGIRTDFQGQLFDGSKELLAIADNLKELKTICSMCEKKATMVVRLNQAGEVVLEGEKIVIGGNDIYKTLCRKHFRQLTKLI

SEQ ID NO: 126966 - protein, 193 aa, Unknown
  Bacterial polypetide isolated from the Sargasso Sea
MAKVHFHYSTMNAGKSTSLLQSNHNYEVRGLKTYLFTPKADADMYHGSIHSRLGLEKKANIFDESFEFDKYFLDKKDEKIACILVDEAQFLTSKQVKELCLVCDKLNIPIMCYGIRTDFRGDLFSGSAALLAYADTLVELKTICEYEGCARKATMIARYTDGKIVTEGQQIDIGGDKYKVFCRKHYRKLTNLI

SEQ ID NO: 126967 - protein, 110 aa, Unknown
  Bacterial polypetide isolated from the Sargasso Sea
MNPKPVNAGWIEVICGSMFSGKTEELLRRLRRAQIAKMHTIVFKSRVDSRFDKNRIVSHNKLTMKSSIIAKASDIFLLSKKADVIAIDEAQFFDDSLIDVSKKLADIGKR

SEQ ID NO: 126968 - protein, 196 aa, Unknown
  Bacterial polypetide isolated from the Sargasso Sea
MFLENSVHGNKQFGSIEVICGSMFSGKTEELIRRLKRAKIANQKIQIFKPSLDSRNNDYIESHDKNRIKSLTVKASYDVYDIGKDFDVIGIDEVQFFDDEIVSVCNSLANNGVRVIAAGLDMDYLGNPFGPMPNLMAIAEYVTKVHAICSKTGNIANYSYRKNKEDSIILIGEKDEYEALSREIFYEKMNSKKKKT

SEQ ID NO: 126969 - protein, 188 aa, Unknown
  Bacterial polypetide isolated from the Sargasso Sea
MTLTPHNSGWIEVVCGSMFSGKTEELIRRLRRAEIAKMNIVIFKPKIDSRFSAEHIVSHNQLKMRSHVISDTKEILKISKSNEVVGIDEAQFFDQSIVMICKQLAGEGKRVIVAGLDTDYRGLPFGPMPEIMCEADYLDKLRAICVKCGNPASYTQRTTKDSGQVVIGELDKYEARCRNCFRAPDKNL

SEQ ID NO: 126970 - protein, 197 aa, Unknown
  Bacterial polypetide isolated from the Sargasso Sea
MSKLFFRYGAMNSGKSTAMLQVAHNYEERDQRVVLVKSSVDTKGDDQIVSRLGVTRRADLLLSPGQDLRAALQTLSAQRSELSDGVACVLIDEAQFLTPEQVDQALAIAVLDMIPVVAFGIRTDFRTKAFPGSQRLMEVAHSLQEMKTICRCGNKAIFNARLGEQGIIRQGEQVMIDGESARYEALCARCYLEAEGG

SEQ ID NO: 126971 - protein, 195 aa, Unknown
  Bacterial polypetide isolated from the Sargasso Sea
MAKVHFFYSTMNAGKSTALLQSAHNYHETGNETILFIPREDADKNSGLIKSRIGLSASAVVIDSELKIFDYVKKELSKRKVDAILVDEAQFLKKHHVLQMCKVCDELQIPVMCYGIRTDFRGELFEGSASLLALADNLIELKTVCNVCSRKATMVVRLDENGKVITEGSKVQIGGNDVYRVLCRKHFNEATKLLD

SEQ ID NO: 126972 - protein, 185 aa, Unknown
  Bacterial polypetide isolated from the Sargasso Sea
MAKLYFSYSTMNAGKSTVLLQASHNYGERGMKTMLFTAELDNRSKVGNISSRIGLSEKASTFNNNDNLFYSVEKRLKKDKISCVFVDEAQFLTDKQVWELSDVVEILKVPVMCFGLRTDFQGKLFEGSSTLLAISDELKEIKTICHCGKKANMVVRVDSNGKVLKEGAQIEIGGNEKYISLCRKH

SEQ ID NO: 126973 - protein, 194 aa, Unknown
  Bacterial polypetide isolated from the Sargasso Sea
MAKLYFSYSTMNAGKSTVLLQASHNYGERGMKTMLFTAELDNRSKVGNISSRIGLSEKASTFNNDDNLFSSVQERLNIDKISCVFVDEAQFLTEKQVWELSDVVEILNIPVMCFGLRTDFQGKLFEGSSSLLAIADELKEIKTICHCGKKANMVVRVDSNGKVLKEGAQIEIGGNEKYISLCRKHWKNEMENNR

SEQ ID NO: 126974 - protein, 193 aa, Unknown
  Bacterial polypetide isolated from the Sargasso Sea
MAKLHFFYSTMNAGKSTALLQSNHNYLESNLKTILFLPEEISKKSDKKIVSRIGLEAEAIPIDKDFNFFDYIKDQDHKSLSCVFIDEVQFLSKEQIQQLGRIADEINLPVMCYGIRTDFQGKLFDGSSELLAIADNLIELKTICSECDKKATMVVRLDSNGKVLLEGEKVLVGGNDIYKTVCRKHFRDLTKLI

SEQ ID NO: 126975 - protein, 195 aa, Unknown
  Bacterial polypetide isolated from the Sargasso Sea
MAKVHFFYSTMNAGKSTALLQSAHNYHETGNETILFIPREDADKNSGLIKSRIGLSASAVIIDSELKIYDYVKKELSQRKVDAILVDEAQFLKKHHVLQMCKVCDELQIPVMCYGIRTDFRGELFEGSASLLALADNLIELKTVCNVCSRKATMVVRLDENGKVITEGSKVQIGGNDVYRVLCRKHFNEATKLLD

SEQ ID NO: 126976 - protein, 193 aa, Unknown
  Bacterial polypetide isolated from the Sargasso Sea
MAKLHFFYSTMNAGKSTALLQSNHNYKESNLKTLLFVPKSIADKSNGKIVSRIGLQADAIIVNNEYDFYNEISKKQSEKISCIFVDEAQFLTKKQVHGLGKIADELNIPVMTYGIRTDFRGELFEGSQELLALADNLKELKTICSECDKKATMVVRLDSNGKILLEGEKILIGGIEIYKTLCRKHFRELTKLI

SEQ ID NO: 126977 - protein, 195 aa, Unknown
  Bacterial polypetide isolated from the Sargasso Sea
MFLENPAYNNEQFGWIEVICGSMFSGKTEELIRRVKRAKIANQKVKIFKPIIDSRSKNYIESHDDNKLESIEVKSSSEILNNIENCDVVAIDEAQFFNNEIVDVCNHIANNGIRVIIAGLDMDYLGNPFGPMPNLMAISEYVTKVHAVCKKSGNVANYSYRKNKKKDIVVIGEKDKYEPLSRSVFFKKMKKKKSK

SEQ ID NO: 126978 - protein, 279 aa, Unknown
  Bacterial polypetide isolated from the Sargasso Sea
MEVIFGPMFSGKSTELQRRLRRHTVASRRVLVVKHAGDNRYDEQVGSTTSAVTHDLASMPALPTKDLRNIDNVSHNYDVIGIDEGQFFNDIAHYCEKWAQTGKTVIVAALDATFQRKPFNSILQLVPLAEKVTKLTAVCTDCAADAAFTARTTKETDVEVIGGSSSYKAVCRNCYEKYAAEMRENGASAKTAVGTPLTKRVAEHMGELSLKTPAPTETSFTFATPATPTLGEATVHKTKNVESSAMKSAKKSRGFGGPGRSPLNDFMTGFHRSPLSTLR

SEQ ID NO: 126979 - protein, 193 aa, Unknown
  Bacterial polypetide isolated from the Sargasso Sea
MAKVHFHYSTMNAGKSTSLLQSNHNYEVRGLKTYLFTPKADADMYHGAIHSRLGLEKKANIFEESFEFDKYFLDKKDEKIACILVDEAQFLTSKQVKELCLVCDKLNIPVMCYGIRTDFRGDLFSGSAALLAYADTLVELKTICEYEGCARKATMIARYTDGKIVTEGQQIDIGGDKYKVFCRKHYRKLTNLI

SEQ ID NO: 126980 - protein, 193 aa, Unknown
  Bacterial polypetide isolated from the Sargasso Sea
MAKLHFFYSTMNAGKSTALLQSNHNYLESNLKTMLFIPHEIGNKSKGKIISRIGLEADAVIVNKDYDFYKEVKNTNFEEISCIFIDEAQFLSKHQVHSIGKIADDLNIPVMCYGIRTDFQGMLFEGSQELLAIADNLKELKTICSECDKKATMVVRIDENGKVILEGEKILIGGNEVYKTLCRKHFRELTKLI

SEQ ID NO: 126981 - protein, 112 aa, Unknown
  Bacterial polypetide isolated from the Sargasso Sea
MAALHFIYSTMNAGKSTALLQASHGYRERGLETMVFTSSKDDRYGESEVVSRVGLRTPAHTYTESDDILVMVQDMNKKNELSCVLIDEAQFLSKDQVEQLGKIVDEMNITVM

SEQ ID NO: 126982 - protein, 193 aa, Unknown; identical to SEQ ID NO: 126979
  Bacterial polypetide isolated from the Sargasso Sea

SEQ ID NO: 126983 - protein, 193 aa, Unknown
  Bacterial polypetide isolated from the Sargasso Sea
MFLENPAYNNEQFGWIEVICGSMFSGKTEELIRRVKRAKIANQKVKIFKPIIDSRSKNYIESHDDNKLESIEVKSSSEIFNKLKNCDVVAIDEAQFFDDEIVDVCNKIANSGIRVIIAGLDMDYLGNPFGPMPNLMAISEYVTKVHAVCKKSGNVANYSYRKNKKKDIVVIGEKDKYEPLSRSVFFKKMKKNK

SEQ ID NO: 126984 - protein, 154 aa, Unknown
  Bacterial polypetide isolated from the Sargasso Sea
MAKVHYFYSTMNAGKSTSLLQSSHNYEERDLNVLLFTPEVDAKIHDSFIHSRIGLKKPAYVFSEKFDFIDYVYEENKKRVSCILVDEAQFLTSEQVKQLCRICDEKNIPIMCYGIRTDFRGELFPGSLALLSLADNIIELKTICEYPSFPEKPQ

SEQ ID NO: 126985 - protein, 178 aa, Unknown
  Bacterial polypetide isolated from the Sargasso Sea
MGRIEVICGSMFSGKTEELINRVKKSNKSYKVFKPDIDTRNEKGKIKSHSKIEIDATTIDDINEILNYKDKFDVIGIDEAQFFSNDIVSVSNSLANNGVRVIIAGLDMDFSGKPFGPMPFLMAIAEDVTKVHAKCVETGEPALYSFRKVDNDETVMIGEKKEYQPLSRKAFISKSKKS

SEQ ID NO: 126986 - protein, 198 aa, Unknown
  Bacterial polypetide isolated from the Sargasso Sea
MRKVAKLYFYYSAMNAGKTTTLLQSSHNYAERGMTTLLLKPLIDDREGLNVIRSRVGLEAEAKNFEKDDNLFQTIEAQYKTKSLNCVLVDEAQFLTRDQVIQLGDVVDRLDIPVLCYGLRTDFLGELFEGSRSLLAWADELREIKTVCHCGKKAIMTVRLNEEGKPLQAGEQIQIGGNESYVSMCRRHFKSSLGLSEI

SEQ ID NO: 126987 - protein, 167 aa, Unknown
  Bacterial polypetide isolated from the Sargasso Sea
MAALHFIYSTMNAGKSTALLQASHGYRERGLETMVFTSSKDNRYGESEVVSRVGLRTPAHTYTESDDILMMVQDMNKKNELSCVLIDEAQFLSKDQVEQLGKIVDEMNITVMAFGIRTDFQGELFEGSKYLLAWADRLKELRAVCHCGSKATMIVRVSEDGSIMRSG

SEQ ID NO: 126988 - protein, 192 aa, Unknown
  Bacterial polypetide isolated from the Sargasso Sea
MAKLFFNYSTMNAGKSTILLQAAHNYEERGMVPYLLTAEIDKRSGEGKIASRIGIEKQADTFNDRLNLYNLLKSRQKSSPIACVLIDEAQFLTKEQVWQLARAVDDLFLPVLCYGLRVDFQGNLFPGSSALLGLADELKEIKTICHCGKKATMVVRKSTNNKPIRDGSQIQIGGNDLYESLCRLHWRQLMDS

SEQ ID NO: 126989 - protein, 193 aa, Unknown
  Bacterial polypetide isolated from the Sargasso Sea
MAKLYFSYSAMNAGKSTLLLQASYNYGERGMKTILFTAKLDNRSKLGEITSRIGLAEKAKTFEEQDNLFSIIENKISDYSISCILIDEAQFLTQKQVWELSDVVDKLNIPVMCYGLRTDFQGKLFPGSETLLSIADELREIRTICDCGKKAIMVVRQDEKGKVIKEGEQIEIGGNDKYISLCRFHWKSQMNKI

SEQ ID NO: 126990 - protein, 167 aa, Unknown
  Bacterial polypetide isolated from the Sargasso Sea
AGHEYTRDQPRIDSRSGENRVRSRIGLEAEAVDVDPSVNLLGLVQNTSEGQPIHCVLVDEAQFLSADQVDQLTEVVDALNIPVLAYGLRTDFLGTLFEGSRQLLALADELREIKTVCHCGRKATMVVRFDGEGQPMHSGDQIQIGGNETYVSMCRRHFKESLKISSG

SEQ ID NO: 126991 - protein, 165 aa, Unknown
  Bacterial polypetide isolated from the Sargasso Sea
FTPKLDDRFGEGKVSSRIGLERDVEKFEGEDDLYVWTAHEHQREKISCVLVDEAQFLTPKQVLQLSLVVDKLKIPVLCYGLRTDFRGEPFPGSIYLLGWSDEITELKTICKSGKKATFNARLDENGNRVTEGDQISIGLNYEAQARDVFELDKVSPIDYQIPEAN

SEQ ID NO: 126992 - protein, 123 aa, Unknown
  Bacterial polypetide isolated from the Sargasso Sea
MAKLYFNYSSMNAGKSTMLLQANHNYQERGMSTIIYTSSVDDRYGKKEIVSRIGLKAESNIFSANTNIYEEIINFNKENRVDCVLIDEAQFLNKEQVSQLGQIVDNLDIPVLTFGIRTDFKGN

SEQ ID NO: 126993 - protein, 147 aa, Unknown
  Bacterial polypetide isolated from the Sargasso Sea
MAALHFIYSTMNAGKSTALLQANHGYHENDLETMVLTSSKDDRYGESEVVSRVGLRAPAHTYAESDNILMMVQDMNEKNELSCVLIDEAQFLTKDQVDQLGKIVDELNITVMAYGIRTDFQGELFEGSKYLLAWADRLKELRAVCHV

SEQ ID NO: 126994 - protein, 137 aa, Unknown
  Bacterial polypetide isolated from the Sargasso Sea
MAKLYFNYSSMNAGKSTMLLQANHNYIERGMNPRIYTSDLDNRFGKGEIVSRIGLKAKSNIFSSKTDIYKDVLNSCKNSIVDCVLIDEAQFLTQNQVIQLGKIVDELDTPVLAFGIRTDFQGNLFEGSKYLLAWADN

SEQ ID NO: 126995 - protein, 198 aa, Unknown
  Bacterial polypetide isolated from the Sargasso Sea
MRNVAKLYFYYSAMNAGKTTTLLQSSHNYAERGMKTLLLKPLIDDREGLNVIRSRVGLEAEARNFEKDDNLLQTIEAQHKTKSLNCVLVDEAQFLTRDQVIQLGDVVDRLEIPVLCYGLRTDFLGELFEGSRSLLAWADELREIKTVCHCGKKAIMTVRLNEEGKPLQAGEQIQIGGNESYVSMCRRHFKSSLGLSEI

SEQ ID NO: 126996 - protein, 149 aa, Unknown
  Bacterial polypetide isolated from the Sargasso Sea
HSRIGITADATAFAETYDFFDAIREAQQTQPVHCVLIDEAQFLTAPQVLQLTQVCDHLSIPVLCYGIRTDFRGEPFEGSKYLLSWADNLIEIKTICRSGKKATMNARLDEAGNRVIEGEQIDIGHHYEALSRKEFHLEEVSPVIRKTCK

SEQ ID NO: 126997 - protein, 118 aa, Unknown
  Bacterial polypetide isolated from the Sargasso Sea
KYKEISCIFIDEAQFLSKKQVHNLGRIADELNIPVMCYGIRTDFQGELFEGSKELLALADNLKELKTICSLCDKKATMVVRIDQDGKVILKGEKILIGGNEKYKTLCRKHFRELTKLI

SEQ ID NO: 126998 - protein, 141 aa, Unknown
  Bacterial polypetide isolated from the Sargasso Sea
RIGIGQKSETFNSKEDLFLKLQSQLQISRIDCVLIDEAQFLTKDQVWQLAKTVDDLNVPVMCFGLRVDFRGELFPGSASLLALSDEMREVRTICHCGKKATMVVRKDCKGRAILSGDQIQIGGNETYLSLCRKHWRQEVGC

SEQ ID NO: 126999 - protein, 200 aa, Unknown
  Bacterial polypetide isolated from the Sargasso Sea
MAKLYFYYAAMNAGKSTTLLQSAHNYEERNMRTLLFTPKLDDRFGEGKIASRIGLDRECEIFTADDDLYVWTAHEHQREKVSCVLVDESQFLSPKQVLQLSLVVDKLKIPVLCYGLRTDFRGEPFPGSVYLLAWADEMTEIKTICKSGKKATMNARLDENGNRVTEGDQISIGLNYEAQARDVFELDKVSPIGYQIPEAN

SEQ ID NO: 127000 - protein, 186 aa, Unknown
  Bacterial polypetide isolated from the Sargasso Sea
MSALHFIYSTMNAGKSTALLQASHGYRERGLETMVFTSSKDNRYGESEVVSRVGLRTPAHTYTESDDILMMVQDMNKKNELSCVLIDEAQFLSKDQVEQLGKIVDEMNITVMAFGIRTDFQGELFEGSKYLLAWADRLKELRAVCHCGSKATMIVRVSEDGSIIRSGEQVEIGGNERYLSLCRKCF

SEQ ID NO: 127001 - protein, 192 aa, Unknown
  Bacterial polypetide isolated from the Sargasso Sea
MAKLYFNYSSMNAGKSTMLLQANHNYQERGMNTIIYTSSVDDRYGKKEIVSRIGLKAESNIFSSDTNIYEEVISFNKDKKVDCVLIDEAQFLSKDQVAQLGQIVDDLDIPVLTFGIRTDFKGNLFEGSEYLLAWADNLKEIKTVCHCGRKATMVLRLDQKGNVIEEGDQIEIGGNEKYVSICRKHFYEKNIG

SEQ ID NO: 127002 - protein, 147 aa, Unknown
  Bacterial polypetide isolated from the Sargasso Sea
SEVVSRVGLRTPAHTYTESDDILMMVQDMNKKNELSCVLIDEAQFLSKDQVEQLGKIVDEMNITVMAFGIRTDFQGELFEGSKYLLAWADRLKELRAVCHCGSKATMIVRVSEDGSIIRSGEQVEIGGNERYLSLCRKCFYKGAIGS

SEQ ID NO: 127003 - protein, 187 aa, Unknown
  Bacterial polypetide isolated from the Sargasso Sea
ACCIFVHYQERGMRAVVYTAEIDDRFGAGKVSSRIGLSSPAKLFNQNSSLYEEIRAENEQQRIHCVLVDESQFLTRQQVYELSEVVDRLDIPVLCYGLRTDFRGELFGGSEYLLAWSDKLVELKTICFCGRKASMVLRLDQSGRPYNEGEQVVIGGNERYVSVCRKHYKQAQSEGSLTAIQERHSHD

SEQ ID NO: 127004 - protein, 125 aa, Unknown
  Bacterial polypetide isolated from the Sargasso Sea
QIEAQHKTKSLNCVLVDEAQFLTRDQVIQLGNVVDRLEIPVLCYGLRTDFLGELFEGSRSLLAWADELREIKTVCHCGKKAIMTVRLNEEGKPLQAGEQIQIGGNESYVSMCRRHFKSSLGLSEI

SEQ ID NO: 127005 - protein, 192 aa, Unknown
  Bacterial polypetide isolated from the Sargasso Sea
MAKLYFNYSSMNAGKSTMLLQANHNYQERGMNTVIYTSSVDDRYGKKEIVSRIGLRADSNIFSESTNIYEEVVNLNKTKKVDCVLIDEAQFLNKEQVKQLGKIVDILNTPVLTFGIRTDFRGNLFEGSEYLLAWADNLKEIKTVCHCGRKATMVLRLDENGNVLETGDQIEIGGNEKYVSICRKHFYEKNIG

SEQ ID NO: 127006 - protein, 192 aa, Unknown
  Bacterial polypetide isolated from the Sargasso Sea
MAKLFFNYSTMNAGKSTILLQAAHNYEEKGMVPYLLTAEIDNRSGEGKIASRIGIEKRADTFNDRLNLYNLLKSKQKSSPLACVLIDEAQFLTKEQVWQLARAVDDLFLPVLCYGLRVDFQGNLFPGSSALLGLADELKEIKTICHCGKKATMVVRKSNNNKPIKDGSQIQIGGNDLYESLCRIHWRQLMES

SEQ ID NO: 127007 - protein, 193 aa, Unknown
  Bacterial polypetide isolated from the Sargasso Sea
MAALHFIYSTMNAGKSTALLQASHGYRERGLETMVFTSSKDDRYGESEVVSRVGLRTPAHTYAESDNILRMVQDMNKKNELSCVLIDEAQFLSKDQVEQLGKIVDELNITVMAFGIRTDFQGELFEGSKYLLAWADRLKELRAVCHCGSKATMIVRVSEDGSIIRSGEQVEIGGNERYLSLCRKCFYKGAIGS

SEQ ID NO: 127008 - protein, 192 aa, Unknown
  Bacterial polypetide isolated from the Sargasso Sea
MAKLYFNYSSMNAGKSTMLLQANHNYIERGMKPRIYTSDLDNRFGEGEIVSRIGLKAKSNIFTSKTDIYKDVLNVHNNSIVDCVLIDEAQFLTKNQVIQLGEVVDELDIPVLAFGIRTDFQGNLFEGSKYLLAWADNLKEIKTVCHCGRKATMVLRLNAKGEVVSDGTQIEIGGEEKYVSVCRKHFIKKNIG

SEQ ID NO: 127009 - protein, 200 aa, Unknown
  Bacterial polypetide isolated from the Sargasso Sea
MAKLYFYYAAMNAGKSTNLLQSAHNYEERNMKTLIFTPKLDDRFGEGKVSSRIGLERDVEKFEGEDDLYVWTAHEHQREKISCVLVDEAQFLTPKQVLQLSLVVDKLKIPVLCYGLRTDFRGEPFPGSIYLLGWSDEITELKTICKSGKKATFNARLDENGNRVTEGDQISIGLNYEAQARDVFELDKVSPIDYQIPEAN

SEQ ID NO: 127010 - protein, 200 aa, Unknown; identical to SEQ ID NO: 126999
  Bacterial polypetide isolated from the Sargasso Sea

SEQ ID NO: 127011 - protein, 200 aa, Unknown
  Bacterial polypetide isolated from the Sargasso Sea
MAKLYFYYAAMNAGKSTNLLQSAYNYEEREMRSLIFTPKLDDRFGEGKITSRIGLERDVEKFVGEDDLYVWTAHEHQREPVACVLVDEAQFLTPKQVLQLSLVVDKLKIPVLCYGLRTDFRGEPFPGSAYLLGWADELVELKTICKSGKKATFNARLDENGNRVTEGDQISIGLNYEAQARDVFELDKVSPIDYQIPEAN

SEQ ID NO: 127012 - protein, 196 aa, Unknown
  Bacterial polypetide isolated from the Sargasso Sea
MAKLYFSYSTMNAGKSTLLLQASHNYGERGMKTMLFTAELDDRSSVGNISSRIGLTEKASTFNSKDNIHKLIKDRLTIEKISCIFIDEAQFLTKKQVWELSDVVEILKIPVMCYGLRTDFQGNLFEGSASLLAIADELKEIKTICHCGKKATMVVRLDGNGNVVKEGAQIEIGGNDKYVSLCRKHWKLDMQINNLV

SEQ ID NO: 127013 - protein, 189 aa, Unknown
  Bacterial polypetide isolated from the Sargasso Sea
MYFYYSAMNAGKSTSLLQSSYNYRERGMNTLVMTASIDDRYGKGKVASRIGIETEAQVFSSQDNLIDMITTAHQQNHLSCVLVDECQFLSKEQVKQLTYVVDKIDIPVLCYGLRTDFQGELFSGSHYLLAWADKLVELKTICHCGRKANMVVRLDGEGKVMREGEQVAIGGNESYESVCRKHFREFIWD

SEQ ID NO: 127014 - protein, 187 aa, Unknown
  Bacterial polypetide isolated from the Sargasso Sea
MTLSPKNSGWIEVITGSMFSGKTEELIRRIRRAEIAKMKTVLFKPFIDNRYSSKHVVSHNKSKLESIMVKTSNEIIKYSNEMDVIGIDEAQFFDNQIVDVCKRLADKKIRVIVAGLDTDYRGKPFGFMPQLMCESDYLDKLRAICVICGNPASYTQRTISNSKQVLIGETDMYEARCRNCFELPVND

SEQ ID NO: 127015 - protein, 200 aa, Unknown
  Bacterial polypetide isolated from the Sargasso Sea
MAKLYFYYAAMNAGKSTNLLQSAHNYEERNMKTLIFTPKLDDRFGEGKVTSRIGLERDVERFEGEDDLYVWTAHEHQREKVSCILVDEAQFLTPKQVLQLSLVVDKLKIPVLCYGLRTDFRGEPFPGSIYLLGWADELIELKTICKSGKKATFNARLDENGNRVTEGDQISIGLNYEAQARDVFELDKVSPIDYQIPEAN

SEQ ID NO: 127016 - protein, 189 aa, Unknown
  Bacterial polypetide isolated from the Sargasso Sea
MYFYYSAMNAGKSTSLLQSSYNYRERGMNTLVMTASIDDRYGKGKVASRIGIETEAQVFSRDDNLIEMITAAHQVNHLSCVLVDECQFLTKEQVKQLTYIVDNIDIPVLCYGLRTDFQGELFSGSHYLLAWADKLIELKTICHCGRKANMVVRLDGEGKVMREGEQVAIGGNESYESVCRKHFREFIWD

SEQ ID NO: 127017 - protein, 169 aa, Unknown
  Bacterial polypetide isolated from the Sargasso Sea
HNYQERGMNTVIYTSSVDDRYGKKEIVSRIGLRADSNIFSESTNIYEEVLNLNKTKKVDCVLIDEAQFLNKEQVKQLGKIVDILNTPVLTFGIRTDFRGNLFEGSEYLLAWADNLKEIKTVCHCGRKATMVLRLDENGNVLETGDQIEIGGNEKYVSICRKHFYEKNIG

SEQ ID NO: 127018 - protein, 193 aa, Unknown
  Bacterial polypetide isolated from the Sargasso Sea
MAALHFIYSTMNAGKSTALLQASHGYRERGLETMVFTSSKDNRYGESEVVSRVGLRTPASTYAESDNILMMVQDVNKKNELSCVLIDEAQFLTKDQVKQLGKIVDEMNITVMAFGIRTDFQGELFEGSKYLLAWADRLKELRAVCHCGSKATMIVRVSEDGSIIRSGEQVEIGGNERYLSLCRKCFYKGAIGS

SEQ ID NO: 127019 - protein, 205 aa, Unknown
  Bacterial polypetide isolated from the Sargasso Sea
MAKLYFNYSSMNAGKSTMLLQANHNYIERGMNPRIYTSDLDNRFGKGEIVSRIGLKAKSNIFSSKTDIYKDFLNSCKKSIVDCVLIDEAQFLTQNQVIQLGKIVDELDTPVLAFGIRTDFQGNLFEGSKYLLAWADNLKEIKTVCHCGRKATMVLRLNARGEVVSDGTQIEIGGEEKYVSVCRKHFIEKKHWLKYSNNKSSKAGC

SEQ ID NO: 127020 - protein, 193 aa, Unknown
  Bacterial polypetide isolated from the Sargasso Sea
MAALHFIYSTMNAGKSTALLQASHGYRERGLETMVFTSSKDDRYGESEVVSRVGLRSPAHTYSESDNILKMVHDENEKHELSCILIDEAQFLTKDQVKQLGKIVDELKITVMAFGIRTDFQGELFEGSKYLLAWADKLKELRAVCHCGSKATMIVRVSEDGSIMRSGDQVEIGGNERYLSLCRKCFYSGTIGP

SEQ ID NO: 127021 - protein, 256 aa, Unknown
  Bacterial polypetide isolated from the Sargasso Sea
MNKNKISIYSGLYKQLVGNIKDIDDFDTFSYSDEIKNYDLLICLGGDGSILDSLSIVRSSNIPVFGINTGRLGFLSSISSEEVKSPLDEILSGNLQYERRSILKLSTKSNHFGDINYALNEVTVQKKDSSSMMTIHAYVDDEYLNSYWADGLIVSTPTGSTGYNLSCSGPIIMPGSEVFIITPIAPHNLNVRPLIIPDKKKITLKLEGRDDEFLVALDARSEPIKINEELVINHGEFYMNVVRTPDHSFFSTIRNK

SEQ ID NO: 127022 - protein, 217 aa, Unknown
  Bacterial polypetide isolated from the Sargasso Sea
MKIALYIAFQNKSSIDCCKEIIDLISENNQLIIDSKFKNDLDESKRDSFIFFDSNEPIDSDIDFVFAIGGDGTILRSITYVKDSNIPILGVNTGRLGFLTSIQKESISDAISQIKNKEYTVIERTILRVNLGSTNNAFADYPYALNEITIQRKDTTSLLNISCEINDNYLTNYWSDGLIVSTPTGSTGYSLSNGGSIVSPESNVILLNHIAPHNINM

SEQ ID NO: 127023 - protein, 170 aa, Unknown
  Bacterial polypetide isolated from the Sargasso Sea
GFPVFNADKEVLKIYKHNRVCFKKIKQKFAKYKLSYPLKKKDLAKIIIKNKENIKKINKIVHPLVRKRIKFFLKKNKNKKAVVLDIPLLLENNLYNKKYILIFVESKNKIILNRLKKRKNYNPKVLKILKKIQLPLEFKKKKSDYIIKNNFAKSSVKKSVRLLKRKIFKK

SEQ ID NO: 127024 - protein, 198 aa, Unknown
  Bacterial polypetide isolated from the Sargasso Sea
MLIGLTGGIGSGKSLAGDFFKSKNIDVIDADDLAHNALDIKGEGYKKFLDIFGETFLDENSEIDRKALRKYIFQNPEMKNKLEEIVHPIVQNGILNFINNSNSIYRIIIVPLIAETNSSSFYDRVLAIDCKKEIQIERASKRDNSNEEQILKIIQSQASSEDRNKIANDVVENNDTKDEFLMNLEDIHKKYLILANND

SEQ ID NO: 127025 - protein, 200 aa, Unknown
  Bacterial polypetide isolated from the Sargasso Sea
MGKSLKIGLTGGIASGKTTISDYFKALGILIIDADVISHEVTKPNGSAFEEIISSFGSNILDESGLIDRKKMRAIIFDDASKKEMLEGIIHPKVREKMFNLVSQSNNHYLILSVPLLIETGMNQMMDRTLVVDCSVQTQIERLIQRDKINLNEAKSILRNQTNRSTRLKVADDLIVNEKNVTLSDLEKEVFELHRIYSKL

SEQ ID NO: 127026 - protein, 194 aa, Unknown
  Bacterial polypetide isolated from the Sargasso Sea
MGLTGINGEWEWETSTASLFEKYNCGVWDADKAVHRLYAKGGEAVKPIAELFPKAITKCSVNRTKLKQCLSEDFEKITLLENIVHPLVSADRKKFIEDTKYEINVFDIPLLFETGSNKIMDKVACVFVSKPIQLQRIRSRRSMTEEQIEKIIKQQMPIEKKCKLSDFVIETYNKKDTEKQVVSIIKEIEKCLYA

SEQ ID NO: 127027 - protein, 198 aa, Unknown
  Bacterial polypetide isolated from the Sargasso Sea
MIVGLTGGIGSGKSSAAKFFIELGIDVIDADEVSKNILDSNIEAKDKFVDIFGNEFLDTNNKIDRSLLRSEIFKDEQKKTLLESIIHPLVREQILKFIENSKSIYKIIMVPLIFETKSESFYDKILVVDCEEEIQIKRASKRDKKSTDNIINIMKAQASRQERNSIADIIIMNNDSLEDLKKEVTKTHQKLLGININE

SEQ ID NO: 127028 - protein, 60 aa, Unknown
  Bacterial polypetide isolated from the Sargasso Sea
MQRRIGLTGGIASGKSRVGRLLEAYGWPVLDADSYAREALAAGSDATLEVLKRWGDAVRA

SEQ ID NO: 127029 - protein, 196 aa, Unknown
  Bacterial polypetide isolated from the Sargasso Sea
MYKLGITGGIGSGKTTASLFFEKKGAKIFNADKEAKKHLKNTITLQHKIIESLGKDVVENNKLSLKKLAEVSFSNKLNQEILNGIMWPEVYLLIDAAIDKAKSKKNEIFILDAAMIFEAKLASFLDEVLLVTAKKTIRIERALKRKNLPLEQIQNRMSLQVTEKEKRSKADFIIENNSTEEKFYDKLEEFYSSLSI

SEQ ID NO: 127030 - protein, 83 aa, Unknown
  Bacterial polypetide isolated from the Sargasso Sea
MDILQKTKNKQRRIGLTGGIASGKTTITNYIRKHRNIPILDADNLSRELIKPNTYGYKKILDYFGNKIIDNKNNSERLINRKL

SEQ ID NO: 127031 - protein, 197 aa, Unknown
  Bacterial polypetide isolated from the Sargasso Sea
MLKIGLTGGIGSGKSEVSKFLNLWGAYIFDADKEAKTIIDKNKIAQKEIIEEFGSDVINKENKIEKKKLARIAFQDDFHQSKLNAIVHPYVFKKIDETFEKIAKENKHKIFVVDAALIYESGADTHMDYVIVVTSLLRYRTERVMSKGEISRDDFMKRVDLQWSDEDKEHMADYVIQNNADIKTLENESKKIFETLF

SEQ ID NO: 127032 - protein, 199 aa, Unknown
  Bacterial polypetide isolated from the Sargasso Sea
MLRVGITGGIGSGKTALTDWLATQGIVIVDADLAARLVVEPGQPALTEIAETFGEEFLLPDGQLDRAALRQRVFANEDQRKALEVITHPRIRDELARQMSEAGSPYVVLSSPLLLESGQSAMVDVSVVVDVPEALQIERTMARDQNDRQLVEQIMAAQLDRETRIARADMVIDNSTSLDALHKRAAVLHETLLARAAAH

SEQ ID NO: 127033 - protein, 47 aa, Unknown
  Bacterial polypetide isolated from the Sargasso Sea
MDILQKSKNNQRRIGLTGGIASGKTTITNYIRKHKNIPILDADNLSR

SEQ ID NO: 127034 - protein, 200 aa, Unknown
  Bacterial polypetide isolated from the Sargasso Sea
MDESKKIGLTGGIASGKTTVSDCFEKIGAHVIDADVISHDVTKPDGSAFSEIISSFGPDILDENGWINRKKMRSIIFDDVSKKEILEEIIHPKVSQEILKAINQSNEHYLIISVPLLIETGMIQMMDRTLLVDCSETTQIERLMKRDEITLHEARSIMANQALRSDRQRFADDLIVNENNVTLIELEEQVLELSQRYSKL

SEQ ID NO: 127035 - protein, 121 aa, Unknown
  Bacterial polypetide isolated from the Sargasso Sea
LKKITLLENIVHPLVSADREKFIEDTKYEINVFDIPLLFETGSNKIMDKVACVFVSKPIQMERIRSRKSMTEEQIEKIIKQQMPIEEKCRLSDFVIETYNEKDTEKRVVSIIKEIEKCLYA

SEQ ID NO: 127036 - protein, 196 aa, Unknown
  Bacterial polypetide isolated from the Sargasso Sea
MTKTIAITGGIGSGKSTLCSKLKEKGFKIHSSDEQVAKIYKNPEKKFVTYLRTIGLSKSISKKNIDKKIISKIIFENTQIRKKLELYIFKIVRKKRSDFIKQEKQKKTRLIFIDIPLLFENNLEKQFNKVISIIASKQVRLKRLKKTRKMTENQFKNITRSQTSDVIRKKKSDYVIYNNSTLKDYKIKINKLISKL

SEQ ID NO: 127037 - protein, 185 aa, Unknown
  Bacterial polypetide isolated from the Sargasso Sea
MIDQKQTNNLCLRWKGKQRRIGITGGIASGKTIIGDFLFQAKQWPILDADLYAHEALSAESEIVKKVWLRYGSQIIKNSSKNNQIINRKALAKIVFQNEIEKKWLEGIIHPFVNRRIEEELEKLKSNSIVILIIPLLFEKNYTGLCSEICYIDCPRSMALKRLQSRDNLSIKEANQRIDAPWGNA

SEQ ID NO: 127038 - protein, 196 aa, Unknown
  Bacterial polypetide isolated from the Sargasso Sea
MYVLGITGGIGSGKSTASNYLKNKGAVIFNADQEAKKHLKHTKILQNRIIDAFGQRVVEKNKLSISKLAETAFSNKIDQKILNGLMWPEVFILVEKSINEAKQNKEKLFVVDAAMIFEANFEHMFNSTLLILTRKKIRLERALKRKNLHLEQIQNRMSLQMPETEKKIKADYIINNDGTIENFYKKMDDFMEQINF

SEQ ID NO: 127039 - protein, 197 aa, Unknown
  Bacterial polypetide isolated from the Sargasso Sea
MLKIGLTGGIGSGKSEVSKFFQAWGAYIFDADKEAKHIINTDESAQKEIIKEFGSDVIDADQNIDNQKLARVAFQDEFHQLALNSIIHPHVFKKIDSAFEKIQQQNKHNCFVVDAALIYESGADTHMDYVIVITSLLRYRTERVMSRNNMTRDDFLKRVSLQWPDEDKEHMADYIIQNNSDLNNLERESKKIFDSII

SEQ ID NO: 127040 - protein, 200 aa, Unknown
  Bacterial polypetide isolated from the Sargasso Sea
MDESKKIGLTGGIASGKTTVSDCFEKIGAHVIDADVISHDVTKPDGSAFSEIISSFGPDILNEDGWIDRKKMRLMIFNDVSKKEMLEEIIHPKVSQEIFKAINQSNEHYLIISVPLLIETGMIQMMDRTLLVDCSETTQIERLMKRDEITLDEASSIMANQALRSDRQRFADDLILNEKNVTLKELEEQVLELHKRYSKL

SEQ ID NO: 127041 - protein, 109 aa, Unknown
  Bacterial polypetide isolated from the Sargasso Sea
MIVGLTGGIGSGKSAAASFFKNEGISVIDADHVAKEVVEKDTPGFKKVVEYFGTEIIHADGSIDRAKLRKEVFESIEKREALESITHPLVREKMLERILASKSPYSIIE

SEQ ID NO: 127042 - protein, 198 aa, Unknown
  Bacterial polypetide isolated from the Sargasso Sea
MLIGLTGGIGSGKSLAGDFFKSKNIDVIDADDLAHNALDIEGEGYKKFLDIFGETFLDENSEIDRKALRKYIFQNPEMKNKLEEIVHPIVQNGILNFINNSNSIYRIIIVPLIAETNSSSFYDRVLAIDCKKEIQIERASKRDNSNEEQILKIIQSQASSEDRNKIANDVVENNDTKDEFLMNLEDIHKKYLILANND

SEQ ID NO: 127043 - protein, 198 aa, Unknown
  Bacterial polypetide isolated from the Sargasso Sea
MTKIIGITGGIGCGKTTLAEYLKKNNFKVHESDKVVSQIYNKPKKQFIFYLKKTFSNEIVNHKKINKSKIAEIIFNNTTTKKSLEKYLHKEVKKSRDVFIKKNLKNSKGALFFDVPLLFENNMEKKFDVVLCIIAKKKTRAERVLKNKKFTKPTLKKIFKSQISDSERKRRSDMVIYNNKTKKDFIFSTDKALIELLK

SEQ ID NO: 127044 - protein, 99 aa, Unknown
  Bacterial polypetide isolated from the Sargasso Sea
MDESKKIGLTGGIASGKTTVSNCFKKIGAHVIDADVISHDVTKPDGSAFSEIISSFGPDILNQDGWIDRKKMRSMIFNDVSKKEMLEEIIHPKVSQEII

SEQ ID NO: 127045 - protein, 77 aa, Unknown
  Bacterial polypetide isolated from the Sargasso Sea
MDILQKSKNNQRRIGLTGGIASGKTTITNYIKKYKNIPILDADNLSRELIKPNTYGYKKILDYFGNKIIDHKNNSER

SEQ ID NO: 127046 - protein, 120 aa, Unknown
  Bacterial polypetide isolated from the Sargasso Sea
MLKIGITGGISSGKSTASLHLSKKDKVFIFNADQESKKHLKKSLSLQKKLIHVFGNKITENKKISIDLLAQEAFSNETNHKILNGIMWPEILILINRAYENAKKNKFKLFIVDAALIFEA

SEQ ID NO: 127047 - protein, 41 aa, Unknown
  Bacterial polypetide isolated from the Sargasso Sea
MKKPYIIGLTGGIGCGKSTVARMLEKRGYPVIDADLLGHRV

SEQ ID NO: 127048 - protein, 123 aa, Unknown
  Bacterial polypetide isolated from the Sargasso Sea
MNILQKLKNNQRRIGLTGGIASGKTTITSYIRKHKNIPILDADHFSRELIKPNTYGYKKILDYFGNKIIDNKSNSEKEINRKLLRNIIFKHSESKEWIEKLLHPLIKERMIEECSQYRNNQTI

SEQ ID NO: 127049 - protein, 45 aa, Unknown
  Bacterial polypetide isolated from the Sargasso Sea
MDESKKIGLTGGIASGKTTVSDYFEKIGAHVIDADVISHDVTKPD

SEQ ID NO: 127050 - protein, 154 aa, Unknown
  Bacterial polypetide isolated from the Sargasso Sea
MTKTIAITGGIGSGKSTFCSKLKEKGFKIHSSDEQVAKIYKNPEKKFVTYLRTIGLSKSISKKNIDKKIISKIIFENKQIRKKLELYIFKIVRKKRSDFIKQEKQKKTKLIFIDIPLLFENNLEKQFSKVISIIASKRVRLNRLKKTRKMTENQ

SEQ ID NO: 127051 - protein, 101 aa, Unknown
  Bacterial polypetide isolated from the Sargasso Sea
MLIGLTGGIGSGKSLAGDFFKSKNIDVIDADDLAHNALDREGEGYKKFLDIFGETFLDENSEIDRKALRKYIFQNPEMKNKLEEIVHPIVQNGILNFINNS

SEQ ID NO: 127052 - protein, 88 aa, Unknown
  Bacterial polypetide isolated from the Sargasso Sea
VVLDIPLLFETGGDSACDAVAVVSAPFYLQSLRVLARSGMTAEKFFGIMARQMSDLEKRRRADFVIPTGLGRRKSLLSIRDIIKVTTR

SEQ ID NO: 127053 - protein, 145 aa, Unknown
  Bacterial polypetide isolated from the Sargasso Sea
MKFKLGLTGSMGMGKTSTAILFQKHNCGVWDADKAVHRLYGKDGDAVKPIAKYFPKAITEGSVNRTALKKYLSADFDKITLLEKIVHPLVSADREKFIEKTKYKINVFDIPLLFETGSNKIMDKVACVYVSNSIQNGENTVTKIH

SEQ ID NO: 127054 - protein, 189 aa, Unknown
  Bacterial polypetide isolated from the Sargasso Sea
MRRIGILGDIGCGKTYIAKCFGFPVFNADLEVAKIYRHDKKVFQKLKKKLPNYFDSFPVKKKEIIDAILSNRKNLKKIIKIVHHEVRKKMNDFLRKNKHKKFVVLDIPLLLENKINKKKDILIFVESKKSEILKRLRKRKNFNMKIVNNFKRIQLSLVLKKKKSQFIIKNNFKKNSVKVRVKEIVKNLV

SEQ ID NO: 127055 - protein, 198 aa, Unknown
  Bacterial polypetide isolated from the Sargasso Sea
MIVGLTGGIGSGKSVAGDFFIELGIDVIDADHVSKNILDDNESAKKLFLEHFGEKFIDKNNNVDRALLRDEIFKNEDKKEALESIIHPLVREEIFNFIENSNSVYKIIMVPLIYETNSQDFYDKIVVVDCKEENQIIRASKRDNKTKNDIINIMKNQASSDERMSIADEVIKNDSSLDDLKKQVIKVHQKLLGINIDD

SEQ ID NO: 127056 - protein, 72 aa, Unknown
  Bacterial polypetide isolated from the Sargasso Sea
MTTIIGLTGGIASGKTTAVNFLKSKGYPIHDSDSVVKKIYSKPNKQLINLLKKTSLSRAIVGKKINTKIIRD

SEQ ID NO: 127057 - protein, 198 aa, Unknown
  Bacterial polypetide isolated from the Sargasso Sea
MTQKSIIGLTGGIGSGKSAAAKYFSNHGVSVVDADQASREVVKKGEPALSSISDYFGKDILKKDGSLDRSKLRVIVFKDEKKRKWLQSLMYPITNNWIIGAIEKSNSSYTILMNPLLIESRQYKWCKRIAVVDVSIETQINRTMTRDDNTRDQVESIIAAQVDRAKRLQFADDVINNDHSRKDLEEKIIKLHNKYLTL

SEQ ID NO: 127058 - protein, 214 aa, Unknown
  Bacterial polypetide isolated from the Sargasso Sea
MKKPYIIGLTGGIGCGKSTVARMLEKRGYSVIDADLLGHRVLEPSHPGFNEVLQAFGKGILDQEGRISRPKLGLMVFQDPKKLEKLNSISHPHIARMIEEESLKLAQEQASRIVFLEAALLIETNWQETCQKVWVIDSKEENVLKRLALRNGLSREEAKQRISSQISSEERLDHADLLLENNGTETDLEEKIDEELEFILRFNRAEMSLTRRVN

SEQ ID NO: 127059 - protein, 90 aa, Unknown
  Bacterial polypetide isolated from the Sargasso Sea
MGKSLKIGLTGGIASGKTTISDYFKALGIPIIDADVISHEVTKPNGSAFEEIISSFGSNILDKSGLIDRKKMRAIIFDDVSKKEILEGII

SEQ ID NO: 127060 - protein, 123 aa, Unknown
  Bacterial polypetide isolated from the Sargasso Sea
NVLNKKNIKIISKIVHPYVKLNLKKFLKKNFKKKYVVLDIPLLIENNLYKKTDILVYVKAPKNLILKRLKKRGIFNKKIIDILNSQQLKVSKKIKISKFLIDNKYGKKHIIEQIKKIKKQLDD

SEQ ID NO: 127061 - protein, 197 aa, Unknown
  Bacterial polypetide isolated from the Sargasso Sea
MLKIGLTGGIGSGKSAVSTLFYNWGAYIFDADAVAKEILETNETAQSEIIAEFGTDILNRENKIEKFKLSRIAFQDENHQLRLNTIIHPYIFEKIDSTFNSILKKNKHELFCIDAALIYESGADTHMDYVVVVTSHLKLRTERVMERGGLTRDEFLKRVELQWPDEDKVHMADFVIHNNGSESDLFDEAKKIYSLLR

SEQ ID NO: 127062 - protein, 139 aa, Unknown
  Bacterial polypetide isolated from the Sargasso Sea
MTKIIGLTGGIGSGKTTVAHYFMEQNIPVYIADDEARKITDSKNVIEKIVSNFGNQVIENGTVNRKALANIVFKDKDKLAQLNAIIHPEVKKHFKKWLKKHQKHSFVIKESAILFESGSYVDCDAIILVTAPLELRIQR

SEQ ID NO: 127063 - protein, 119 aa, Unknown
  Bacterial polypetide isolated from the Sargasso Sea
NLKKIIKIVHPLVRFNMNKFLKKNNNKKYVVLDIPLLLENKINKKKDILIFVDGNKKKTALRLKKRFNFNPKIVKKFKKLQLPLEFKKKHSTFIIKNNFINKSVKKNVRNIKKKILLNA

SEQ ID NO: 127064 - protein, 114 aa, Unknown
  Bacterial polypetide isolated from the Sargasso Sea
MIVGLTGGIGSGKTAVSDCFEELGIVIVDADLASRVVVEKGKPCLEQISERFGQDILNEAGELDRAKLREIIFNSDEEKDWLESLLHPAIARQIQDELKASTSPYSIFSFTPFT

SEQ ID NO: 127065 - protein, 194 aa, Unknown
  Bacterial polypetide isolated from the Sargasso Sea
IGLTGGIGSGKTIAGKYFQDFGVDVIDADDIAKAVMEPEGKAYQKFIQTFGIKYLDHENKIDRKKLRKLIFEDKDAKASLESIIHPLVSQEIGAFIQSAKSPYQIVIVPLITETSSADFYDRILVIDCEVVKQLSRAAQRDAVEINDIRKIVNKQAKREKRNSIADDIIENSGTLEDLQTQVKEQHKQYLKLIK

SEQ ID NO: 127066 - protein, 198 aa, Unknown
  Bacterial polypetide isolated from the Sargasso Sea
MIVGLTGGIGSGKSSAAKFFIELGIDVIDADEVSKNILDSNIEAKDKFVDTFGNEFLDTNNKIDRSLLRSEIFKDEQKKTLLESIIHPLVREQILKFIENSKSIYKIIMVPLIFETKSESFYDKIVVVDCEEEIQIKRASKRDKKSTYNIINIMKAQASRQERNSIADIIIINNNSLEDLKKEVTKTHQKLLGININE

SEQ ID NO: 127067 - protein, 44 aa, Unknown
  Bacterial polypetide isolated from the Sargasso Sea
MIVGLTGGIGSGKTAVSDCFEELGIVIVDADLAFRVVVEKGNHA

SEQ ID NO: 127068 - protein, 44 aa, Unknown
  Bacterial polypetide isolated from the Sargasso Sea
MIIGLTGGIGSGKSAAANFFQNEGITVIDADDLAREVIETEHAW

SEQ ID NO: 127069 - protein, 198 aa, Unknown
  Bacterial polypetide isolated from the Sargasso Sea
MTLTVAITGGIGSGKSTFSNEVLKKKLKLFDSDKQVHKIYKIPKKNFLEYLNKIGLEKAVQNKNINKNIIRNTIFTDYKIKKKLENYIFNIVRREREGFIKKHRRRNTKIIFFDIPLLFENDLTNNFDVVISIISSKKNRFQRLKSSKKISIEIFNNIIKSQTSDVVRKEKSDIVIYNNTSMENYIKKIHKALERILP

SEQ ID NO: 127070 - protein, 201 aa, Unknown
  Bacterial polypetide isolated from the Sargasso Sea
IILMIVIGLTGGIGSGKSSVSEIFEGLGVKVVDADVASRQPVMKGQPALKKIAEKFGSNILTSEGELDRRKLREIIFKESSAKDWLENLLHPLIHQILINGLATATSKYAILVSPLLFETNQKDLCSKTIVVDTSEDNQIDRTTKRDNVEASQIKSIIDSQIDRNSRNKLADIIISNNGSLQELEEKVKKIHQDLEREILK

SEQ ID NO: 127071 - protein, 195 aa, Unknown
  Bacterial polypetide isolated from the Sargasso Sea
MKIIGLTGGIGSGKSSVLEIFKKIGISTYNADESAKELISSDKKIIDSIKQLFGEDIYNENELNSKLVSKIVFNDNEKLKSLNSIIHPAVAVDFDNFCFKHRDENYIVKEAAIIFETKTENLFDKIIYVKAPKEARIDRVMQRDKLSRDDVLNRIQNQINETSIIDKCDFIIDNINFTDLEGKVLEIHDTLINLR

SEQ ID NO: 127072 - protein, 133 aa, Unknown
  Bacterial polypetide isolated from the Sargasso Sea
MKIIGLTGGIGSGKSSVLEIFKKIGISTYNADESAKELISSNRKIIHSIKQLFGEDIYNENELNSKLVSKIVFNDKEKLKSLNLIIHPAVAIDFDNFCFNHRDESYIVKEAAIIFETKTENLFDKIIYVKAPK

SEQ ID NO: 127073 - protein, 228 aa, Unknown
  Bacterial polypetide isolated from the Sargasso Sea
MINYQIYFVNIPFVGDSIIRFGGYIQAVKSSFLPMGYLSSSYSDDIQKIFSITWILLICFALILFLSVMKFNKKKLKKFLILFSLVIVSALPHLSISRSFGIYLPSIFALMLISILIEKTFNSFNTSNNLLKFISKILSVLIIFIGITGGIYRSNLHIESVNKFSNSIVQYDARMLYQLKDASIPEERFNYNKKHLENLNVYEYNWKKTYSGIVSPKIIDNKYHPLKF

SEQ ID NO: 127074 - protein, 205 aa, Unknown
  Bacterial polypetide isolated from the Sargasso Sea
MDILQKLKNNQRRIGLTGGIASGKTTITNYIRKHKNIPILDADHFSRELIKPNTYGYKKILDYFGNKIIDNKSNSEREINRKLLRNIIFKHSASKEWIEKLLHPLIKERMIEECSQYRNNQTIVLVIPLLFEAKFEDICTEIWLVKCPKELQKNRLITRDKISEKEAYELINFQLSFEEKRKFSDIILENSDDQNKWINTIKELL

SEQ ID NO: 127075 - protein, 523 aa, Unknown
  Bacterial polypetide isolated from the Sargasso Sea
PRAVTELSHTILVFDAFYDVQAKAEQGNEFATQVLNSWSEAEWFTSRDPLQHKLTLTVFRVTGETNTDDLSPAQDAWSRPDIPLHALAMLKNERDGVTNAMQQLQELKEKGFPLVYVGDVVGTGSSRKSATNSLLWHMGVDIPFVPNKRSGGITIGAKIAPIFFNTMEDSGSLPLEMCIDNLNMGDIIDIYPYDGIVKRHNTEEVLANFTLRNPVLLDEWRAGGRIPLIIGRGLTERARKYFGLPPSDIFTKPSQGKNLGKQAFTYAQKIVAKACGLTGGILPGTYCEPKVTTVGSQDTTGPMTRDELKDLACLGFSADLVLQSFCHTAAYPKPVDISTHHSLPDFVRTRGGVSLKPGDGVIHSWLNRMLLPDTVGTGGDSHTRFPLGISFPAGSGLVAFGAATGVIPLDMPESVLVKFSGSLQPGITLRDLVHAIPYFAIQEGLLTVSKENKLNVFSGRILEIEGVEHLKCEQAFELSDASAERSAAGCTIKLDKEPIQEYLESNIVLLKWMIARGYGDKRA

SEQ ID NO: 127076 - protein, 198 aa, Unknown
  Bacterial polypetide isolated from the Sargasso Sea
MIVGLTGGIGSGKSSAAKFFIELGIDVIDADEVSKNILDENLEAKDKFLDAFGKEFLDINNKIDRSLLRSEIFKDEQKKTLLESIIHPLVREQILKFIENSKSIYKIIMVPLIFETKSESFYDKIVVVDCEEEIQIKRATKRDKKSTDNIINIMKAQASRQERNSIADIIIMNNNSLEDLKKEVTTTHQKLLGININE

SEQ ID NO: 127077 - protein, 200 aa, Unknown
  Bacterial polypetide isolated from the Sargasso Sea
MFTVGLTGGIGSGKTTIASFFLDQNIEVINADEIARKVVEPGTAALSKIQERFGSEILINEKSLNRALLREKIFKDNSHRNWLENLLHPLIEEEITNLMAGAVSRYVILESPLLFETNQHKLVNRTLVVDVSPEIQLERAISRDGGSEATIKAIMDSQISREDRISLADDILDNEQNLQSVQTQLKKFHQNYLNLAKKND

SEQ ID NO: 127078 - protein, 197 aa, Unknown
  Bacterial polypetide isolated from the Sargasso Sea
MIVGLTGGIGSGKSAAACVFKNEGINVIDADNLAKEVVAKDTPGFIKVVEYFGSEIIAEDGSLDRAKLRKEVFGSNEKRIALESITHPLVREKMSEKILASQSPYSIIEVPLIFETKSMSSYDRILVIDCESKLQLERAILRDNNSGDVIQKIINSQCSREERLSIANDVISNNDSLKNLQMRSLAMHHFYLGLTKQ

SEQ ID NO: 127079 - protein, 195 aa, Unknown
  Bacterial polypetide isolated from the Sargasso Sea
MIIGLTGGIGSGKTAVSDTFEELGIVVVDADLASRVVVEKGKPCLEEIAKHFGDDILTENLELDRAKLREIIFQSEEEKHWLESLLHPAIAKQIQDELSASSSPYTILVSPLLLETNQKDFCNKVLVVDVPVELQMERTLKRDGVSEEQVKSIIKAQISRDDRLELADEVIINDGSLEDLQSQVKELHERIISEI

SEQ ID NO: 127080 - protein, 151 aa, Unknown
  Bacterial polypetide isolated from the Sargasso Sea
MIVGLTGGIGSGKSVAGDFFIELGIDVIDADHVSKNILDDNESAKKLFLEQFGEKFIDKNNNVDRALLRDEIFKNENKKEALESIIHPLVREEIFNFIENSNSVYKIIMVPLIYETNSQDFYDKIVVVDCKEENQIIRASKRDNKTKNDII

SEQ ID NO: 127081 - protein, 195 aa, Unknown
  Bacterial polypetide isolated from the Sargasso Sea
MIIGLTGGIGSGKTAVSDCFEKLGIVIVDADLASRVVVEKGKPCLEKISERFGQDILKESGELDRAKLREIIFNSDEEKDWLESLLHPAIARQIQDELKASTSPYTVLVSPLLLETNQKDFCDKVLVVDVPVETQVERTLKRDGVSEEQVQSIIKAQISRQKRLEHADEVIINDNTLEALQLAVKKLHQQFIAEL

SEQ ID NO: 127082 - protein, 129 aa, Unknown
  Bacterial polypetide isolated from the Sargasso Sea
MGKSLKIGLTGGIASGKTTISDYFKALGIPIIDADVISHEVTKPNGSAFEEIISSFGSNILDESGLINRKKMRAIIFDDVSKKEILEGIIHPKVREEIFNLVSQSNDHYLILSVPLLIETGMNKMMDRI

SEQ ID NO: 127083 - protein, 55 aa, Unknown
  Bacterial polypetide isolated from the Sargasso Sea
MSGYIVGLTGGIGSGKTTIANLFHDLGVQSVDADLVAREVVMPGEPALAAIVQHF

SEQ ID NO: 127084 - protein, 207 aa, Unknown
  Bacterial polypetide isolated from the Sargasso Sea
MLLIGVTGSIGMGKSTVAKMFTEYGFGLYNADDTVHYIYENDEEVINKIEESFPGTKLEGKVNRIALRDILNKEPEKFRDLEKIVHPATRRYQIVYIEKLISEDSPGCILDIPLLFETGGEKYIDVSVVVTASEEKQKERVVAERKVPLEIFNSIKNQQMPDREKLKKADYIISTDQTLDETKLEVKDVVSKIKLINPKAWKAFYKK

SEQ ID NO: 127085 - protein, 214 aa, Unknown
  Bacterial polypetide isolated from the Sargasso Sea
MKKPYIIGLTGGIGCGKSTVARMLEKRGYPVIDADLLGHRVLEPSHPGFNEVLQAFGKGILDQEGQISRPKLGLMVFQDPQKLEKLNSISHPHIARMIEEESLKLTQEQASPIIFLEAALLIETNWHKTCQKVWVIDSQEENVLRRLALRNGLSREEAKQRISSQISSEERLDHADLLLENNGTETDLEEKINEELEFLLRFNRAEMSLTRRDN

SEQ ID NO: 127086 - protein, 172 aa, Unknown
  Bacterial polypetide isolated from the Sargasso Sea
MSKSIKIGLTGGIASGKTTVSNFFKQFGTEVIDADVISHQVTKPDGTAFQEIISSFGSSVLDENGLIDRKKMRKIIFDDVSKKEMLERIIHPKVREEMFNLASQSNDHYLIVSVPLLVETGMNEMMDRTLVVDCSEETQIERLMHRDKITLGEAKSILRKSTNRTTRLKPAD

SEQ ID NO: 127087 - protein, 200 aa, Unknown
  Bacterial polypetide isolated from the Sargasso Sea
MDESKKIGLTGGIGSGKTTVSDCFEEIGARVIDADVISHNVTKPDGSAFSEIISSFGSDILDENGWINRKKMRSIIFDDVSKKKMLEKIIHPKVSEEIFKAINQSNEYYLIISVPLLIETGMIQMMDRTLLVDCSEDTQIERLMKRDEITLDEAKSIMANQALRSDRQRFADDLIVNEKNVTLKELKEQVLELHKCYSKL

SEQ ID NO: 127088 - protein, 205 aa, Unknown
  Bacterial polypetide isolated from the Sargasso Sea
MDILQKLKNDQRRIGLTGGIASGKTTITNYIRKHKNIPILDADHFSRELIKSNTYGYKKILDYFGNKIIDNKSNSEREINRKLLRNIIFKHSASKEWIEKLLHPLIKERMIEECSQYRNNQTIILVIPLLFEAKFEDICTEIWLVKCPRELQKNRLITRDKISEQEADELINFQLSFEEKRKFSDIILDNSDDQNKWINTIKELL

SEQ ID NO: 127089 - protein, 210 aa, Unknown
  Bacterial polypetide isolated from the Sargasso Sea
MSKSDIKASPWVLGLTGGIGCGKTAVSNMFEQLGITIVDADIIARQVVKPKSDGLNAIVSKFGQSILLREGTLNRSALRERIFTNSADKEWLNNLLHPLIRNKIHNDLTAAKSPYVVLVAPLLFENALDKLCNRTLLIDIPQSVQIERTASRDNVSVEQVKAIIAAQMSREDKQKKADDILNNDRALSDVNHDLLTLHKRYLHKAQMQAT

SEQ ID NO: 127090 - protein, 195 aa, Unknown
  Bacterial polypetide isolated from the Sargasso Sea
MKIIGLTGGIGSGKSSVLEIFKKIGISTYNADESAKELISSNKKIIFLIKQLFGEDIYNKNELNSKLVSKIVFNDKEKLKSLNSIIHPEVAKDFDNFCFEHRNESYIVKEAAIIFETKTENLFNKIIYVKAPKEIRIDRVMQRDNLSRDDVLNRIQNQINETSIIDKCDFIIDNINYTELEEKVLKIHNTLINLN

SEQ ID NO: 127091 - protein, 197 aa, Unknown
  Bacterial polypetide isolated from the Sargasso Sea
MLKVGLTGGIGSGKSSVSALFSDWGSYIFDADSVAKEILNHNETAQGEIIAEFGTDILDGNNSIDKQKLARVAFQDENHQLRLNTIIHPYVFSEIDSKFDIILAKKEHEIFVVDAALIYESGADTHMDYVIVVTSHLRLRTQRVMERGGLTREEFLDRVDLQWPDEDKVHMADFVIHNNGTEKNLLEESKKVFDRLG

SEQ ID NO: 127092 - protein, 195 aa, Unknown
  Bacterial polypetide isolated from the Sargasso Sea
MIIGLTGGIGSGKTAVSDSFEALGITIVDADLASRVVVEKGKPSLNSIEEHFGNEILTPEGELDRAKLREIIFNSDSEKQWLESLLHPAIANQIQEELSSSKSPYTILVSPLLFETNQKEFCSKVLVVDVPVETQVIRTLERDGVSEEQVNSIINSQIDREKRLELADEVILNNGSLADLQEAVRELHHKFLSEI

SEQ ID NO: 127093 - protein, 201 aa, Unknown
  Bacterial polypetide isolated from the Sargasso Sea
MTIFVGLTGGIATGKSTIVKFLKKKGYKIHDSDLIVNKIYSQPNKKLFVILKKIGLSKSIKNKKIDKSIIRDEIFSNKVKKKKLETFIHKEVRKSRSLFIKKYKNKKNKIIFFDIPLLFEAKLTQICHYIILLYAPKKTKIERALKRKTINKKVITKILKNQIDDKIKKKKSDYIINTSKPKNHSFKMILKAISNILETNA

SEQ ID NO: 127094 - protein, 207 aa, Unknown
  Bacterial polypetide isolated from the Sargasso Sea
MLLIGVTGSIGMGKSTVAKMFTEYGFGLYNADDTVHYIYENDEEVINKIEESFPGTKSEGKVNRIALRDILNKEPEKFRDLEKIVHPATRRYQIVYIEKLISEDSPGCILDIPLLFETGGEKYIDVSVVVTASEDKQKERVVAERKVPLEIFNSIKNQQMPDREKLKKADYIISTDQTLDETKLEVKDVVSKIKLINPKAWKAFYKK

SEQ ID NO: 127095 - protein, 192 aa, Unknown
  Bacterial polypetide isolated from the Sargasso Sea
MKIVGLTGGIGSGKSSVLNQFKNLGINTYSADNAAKKLINSDKDLIKSIKNLFGDNIYENNILDSVKLSKIVFKDPYKLKSLNSIIHPAVAKDFESFIKTINGDYIVKEVAIIFETNTEHNYNKIILVRAPLEERIKRVILRDNLSREDVIKRVNNQIDDSTIIDNCDYIIENINLKDLKEKVLKIHIDLIR

SEQ ID NO: 127096 - protein, 200 aa, Unknown
  Bacterial polypetide isolated from the Sargasso Sea
MGKSLKIGLTGGIASGKTTISDYFKALGIPIIDADVISHEVTKPNGSAFEEIISSFGSNILDKSGLIDRKKMRAIIFDDVSKKEILEGIIHPKVREEIFNLVSQSNDHYLILSVPLLIETGMNQMMDRVLVVDCSVNTQIERLIQRDKINLDEAKSILRNQTNRSIRLKVADDLIVNEKNVTLIDLEKEVFELHRIYSKL

SEQ ID NO: 127097 - protein, 197 aa, Unknown
  Bacterial polypetide isolated from the Sargasso Sea
MLKIGLTGGIGSGKSEVSKFFNLWGAYIFDADQEAKKIIDKNKIAQKEIIEEFGTDVVNKENKIEKKKLARIAFQDDFHQSKLNAIVHPYVFKRIDETFEKIAKEDKHKIFVVDAALIYESGADTHMDYVIVVTSLLRYRTERVMSNGQISRDDFMKRVDLQWSDEDKEHLADYVIQNNADIKTLEKESKKIFETFF

SEQ ID NO: 127098 - protein, 201 aa, Unknown
  Bacterial polypetide isolated from the Sargasso Sea
MTIFVGLTGGIATGKSTMVKFLQKKGYKVHDSDSIVNKIYSRPNKGLFVILKKIGLSKSIKNKKIDKSVIRDEIFSNKLKKKKLEKFIHKEVRISRNLFIKKHKNKKNKIVFFDIPLLFEANLTHICHYIILLYAPKKTKIERALKRKTIDKKVITKILKNQIDDKIKKKKSDYIINTSKPKNHSFKMILEAISNILDQNA

SEQ ID NO: 127099 - protein, 196 aa, Unknown
  Bacterial polypetide isolated from the Sargasso Sea
MTKTVAITGGIGSGKSTFCSKLKEKGFKIHSSDEQVAKIYKNPEKKFVNYLRTIGLSKSISKKNIDKKIISKIIFENKQIRKKLELYIFKIVRKKRSDFIKQEKQKKTKLIFIDIPLLFENNLEKQFNKVISIIASKRVRLKRLKKTRKMTENQFKNITRSQTSDVIRKKKSDYVIYNNSTLKDYKIKINKLISKL

SEQ ID NO: 127100 - protein, 194 aa, Unknown
  Bacterial polypetide isolated from the Sargasso Sea
MIIGLTGGIGSGKTAVSDLFQDLGITIVDADLASRVVVEKGREELNKISDHFGQDILTKEGELDRAKLREIIFNSEEEKLWLESLLHPAIAAQIKMELDSSKSLYTVLVSPLLLETEQKNFCTKVLVVDVPVEMQIQRTSERDNVSEEQIKSIIASQIDRDSRLEQADEVILNDGSIQDLKNKVKKLHIKFLSS

SEQ ID NO: 127101 - protein, 55 aa, Unknown
  Bacterial polypetide isolated from the Sargasso Sea
MAPGEPFSQRRIGLTGGIASGKSSVGHWLAQQGLPVLDADQFAREALAPGRPATT

SEQ ID NO: 127102 - protein, 214 aa, Unknown
  Bacterial polypetide isolated from the Sargasso Sea
MKKPYIIGLTGGIGCGKSTVARMLEKRGYPVIDADLLGHRVLEPSHPGFNEVIQAFGKGILDHEGRISRPKLGLMVFQDPQKLEKLNSISHPHIARMIEEESLKLAQEQALRIVFLEAALLIETNWQETCQKVWVIDSKEENVLKRLALRNGLSREEAKQRISSQISSEERMSHADLVIENNGAESELEEKIDEELEFILRFNRAEMCLTRRDN

SEQ ID NO: 127103 - protein, 200 aa, Unknown
  Bacterial polypetide isolated from the Sargasso Sea
MDESKKIGLTGGIASGKTTVSDYFEKIGAHVIDADVISHDVTKPDGSAFNEIISSFGPDILNEDGRIDRKKMRSIIFNDVSKKEMLEEIIHPKVRQEIFKAINQSNEHYLIISVPLLIETGMIQMMDRTLLVDCSETTQIERLMKRDEITLDAARSIMANQALRTDRQRFADDLILNEKNVTLKELEEQVLELHKRYSKL

SEQ ID NO: 127104 - protein, 200 aa, Unknown
  Bacterial polypetide isolated from the Sargasso Sea
MDESKKIGLTGGIASGKTTVSDCFEKIGARVIDADVISHDVTKPDGSAFSEIISSFGTDILDENGWIDRKKMRSIIFDDLSKKEMLEKIIHPKVSQEIFKAINQSNEHYLIISVPLLIETGMIQMMDRTLLVDCSEDTQIERLMKRDQITLDEAQSIMANQALRSYREGFADDLILNEKNVTFKELEEQVLELHKCYSKL

SEQ ID NO: 127105 - protein, 196 aa, Unknown
  Bacterial polypetide isolated from the Sargasso Sea
MKVVGITGGIASGKSTISSYLQNKHKAYIFDADKEAKLLLNSKLISEKIYKAFPKLLDLSKTSIANEAFKNQESQRKINNIIHPVISDLILERINDKKTSHTLFVIDAALIIESGIFNKHRENGSKLILVTAEKDLRLKRALERSNLSEQTINNRMKLQMNDSQKIKYADYIIKNNSTKSELYNRVDEIIKKIIHE

SEQ ID NO: 127106 - protein, 197 aa, Unknown
  Bacterial polypetide isolated from the Sargasso Sea
MLKIGLTGGIGSGKSEVSNFFNLWGAYIFDADQEAKSIIDKNKIAQKEIIEEFGTDVVNKENKIEKKKLARIAFQDDFHQSKLNAIIHPYVFKKIDETFEKIAKEDKHKIFVVDAALIYESGADTHMDYVIVVTSLLRYRTERVMSKGEISRDDFMKRVDLQWSDEDKEHLADYVIQNNADIKTLEKESKKIFETFF

SEQ ID NO: 127107 - protein, 198 aa, Unknown; identical to SEQ ID NO: 127042
  Bacterial polypetide isolated from the Sargasso Sea

SEQ ID NO: 127108 - protein, 198 aa, Unknown
  Bacterial polypetide isolated from the Sargasso Sea
MLIGLTGGIGSGKSLAGDFFKSKNIDVIDADDLAHNALDIEGEGYKKFLDIFGKTFLDENSEIDRKALRKYIFHNPEMKNKLEEIVHPIVQNGILNFINNSNSIYRIIIVPLIAETNSSSFYDRVLVIDCKKEIQIERASKRDNSNEEQILKIIQSQASSEDRNKIANDVVENNDTKDEFLTNLEDIHKKYLILANND

SEQ ID NO: 127109 - protein, 198 aa, Unknown
  Bacterial polypetide isolated from the Sargasso Sea
MLIGLTGGIGSGKSLAGDFFKSKNIDVIDADDLAHNALEKEGEGYKKFLDIFGETFLDENSEIDRKALRKYIFRNPEMKNKLEEIVHPIVQNGILKFINNSNSTYRIIIVPLIAETNSSSFYDRVLAIDCKKEIQIERASKRDNSNEEQILKIIQSQASSEDRNKIANDVVENNYTKDEFLMNLEDIHKKYLILANND

SEQ ID NO: 127110 - protein, 253 aa, Unknown
  Bacterial polypetide isolated from the Sargasso Sea
MEPPDPISNSEVKRVNANGSAGSPCVRVGNRQAFYFRLLVKNTKSLFLWLRYNYGMIVGLTGGIGSGKSSAANFFIELGIDVIDADEVSKNILDSNLQAKDKFLDAFGKEFLDTNNNIDRSLLRSEIFKDEQKKTLLESIIHPLVREEILKFIENSKSIYKIIMVPLIFETKSQSFYDKIIVIDCEEKIQINRASKRDNKSRDNIINIMNAQASRQDRNSIADIIIMNNDSLEDLKKEVIKTHQKLLGININE

SEQ ID NO: 127111 - protein, 62 aa, Unknown
  Bacterial polypetide isolated from the Sargasso Sea
MIGITGGIASGKSTVIQYLLYQGFPVIDADKLGHKVLEPGNHGYNKVVEQFGEGILNKDKSV

SEQ ID NO: 127112 - protein, 138 aa, Unknown
  Bacterial polypetide isolated from the Sargasso Sea
MAKIVGITGGIGSGKTTASEYLKNNNFAVHESDQIVAQMYNRPKKSFLNFLKKNVSSEVVRNNKISKQKIANIIFNNTNIRKSLEAYVHKHVKKSRDSFIKKNNKNKKGIVFVDIPLMLENKLEKNCDVVLCLIAQKK

SEQ ID NO: 127113 - protein, 60 aa, Unknown
  Bacterial polypetide isolated from the Sargasso Sea
QFVVGLTGGIGSGKTTVANLFAAEGVCLVDADVVAREVVAPGTYGLNAIIDHFGTEMVNN

SEQ ID NO: 127114 - protein, 198 aa, Unknown
  Bacterial polypetide isolated from the Sargasso Sea
MTKVIGITGGIGSGKTTLCNYLKKRGFAIHESDKVVSDMYTQSNKSFVVFVKENVSKEAVQKNKINKNKIANVIFNNQKAKTGLEKYIHKEVQASRKKFIQNNRKIKKKIVFVDIPLLFENNLENEFDLIVCIISSKKNRSNRVLKKKKFTKKILNKIFNLQTSDKERRKRSQIIINNNKTKKDFIFNAEKALIGLLK

SEQ ID NO: 127115 - protein, 130 aa, Unknown
  Bacterial polypetide isolated from the Sargasso Sea
MIGLTGGIASGKSTVVQYLRYQGYPIIDADKLGHKVLEPGNPGYSKVVEKFGKSILNKDKTINRLILGGIVFSDPSRLKALNEISHPIIAEMVLKEFKSIDSKDSKGIVFLEAALLIEANWYNMCHQIWV

SEQ ID NO: 127116 - protein, 150 aa, Unknown
  Bacterial polypetide isolated from the Sargasso Sea
MIGLTGGIASGKSTVSALLQEAGVALIDADKLYHELIQPTDGKASALGQKIADAFPGVLLEDGSINRTALGSRVFGNEEELKKLSSITHPAVGGAFMARVQELQQSGESLAVYDVPLLYERGMEQMLAGVIVVWVPQHLQLARLMSRDKI

SEQ ID NO: 127117 - protein, 198 aa, Unknown
  Bacterial polypetide isolated from the Sargasso Sea
MTIKIGITGGIGSGKTTLSKHLKKKNFPVHESDQVVDNMYKKPSKKFKKLLISLGLEAAINKKSINKKIISNIIFSNTHIKQKLETFIHKETKNQRAEFIKNHKTKNKKIIFFDVPLLFEKNLDNFFDKIICIISSKKTRLKRVLYSRNVSKKLFNKIINQQTINQERFRRSDYIIYNNKDKKNFISKVDRVISLINI

SEQ ID NO: 127118 - protein, 162 aa, Unknown
  Bacterial polypetide isolated from the Sargasso Sea
MKPWILGLTGGIGSGKSAVAQGFIERGVHVVDADHAARWVVEPGRPALARIVEHFGAGVLQANGELDRAALRKLVFAAPEQRRWLESLLHPLIGQEIVQVLARAESPYAILVSPLLVESGQRQMTQRILVVDTPAELQVQRTIARDQSSEEQVRAIMQAQAS

SEQ ID NO: 127119 - protein, 78 aa, Unknown
  Bacterial polypetide isolated from the Sargasso Sea
MSKFVVGLTGGIGSGKTTVANLFAEEGVDLVDADIVAREVVAKGSKGLEAIITHFGTEIVTEAGELDRAKLRQRVFSE

SEQ ID NO: 127120 - protein, 107 aa, Unknown
  Bacterial polypetide isolated from the Sargasso Sea
MIKIGITGGIGSGKSIVSGFFLEWGAYVFDADKEAKIILKENETAQSEIIAEFGTDILGSNNRIEKKKLSKIVFQDENHLLRLNTIVHPYIFNEVDKRLEIISAKSK

SEQ ID NO: 127121 - protein, 124 aa, Unknown
  Bacterial polypetide isolated from the Sargasso Sea
MTKIVGITGGIGSGKTTLCKHLKKNGYLVHESDKLVSGIYKKPNKSFLSFIKKNVSKDVVENYKINKKKVAKIIFNNEVVRKKLEKYIHKEVRISRESFIKKNHKNKKGVIFVDIPLLFENNLD

SEQ ID NO: 127122 - protein, 205 aa, Unknown
  Bacterial polypetide isolated from the Sargasso Sea
MNETFKIGLTGGIASGKTTVCNLFKELSIDIIDADVISHELSKKGGAAFEEIVEAFEDDIIGDDGELDRKKLRSIVFSNNTKKKMLENIIHPKVLLSINEKIEASLSNYLIISVPLMIETGMNAMMDRVLLIDCSAETQIQRLIKRDQTTREEAIIIIENQASIETKRELSDDIIINNNATSIEELRMKVKDLDDFYRYLNNKKI

SEQ ID NO: 127123 - protein, 173 aa, Unknown
  Bacterial polypetide isolated from the Sargasso Sea
GYAVHESDKLVSNIYKKPNKPFINFLKKNVSKDVVQNYKINKNKVANIIFNNKIIRKKLEKYIHKEVKISREDFIKENYKNKKGIIFVDIPLLFEKNLDKNFDIVICVISKKKIRTERVLKSKKFTKEILKKIFKSQTSDKNRRSRAQIIINNNKTKKDFISSAERALVGCLK

SEQ ID NO: 127124 - protein, 175 aa, Unknown
  Bacterial polypetide isolated from the Sargasso Sea
MDILQKLKNNQRRIGLTGGIASGKSTITNYIRKHKNIPILDADNLSRELIKPNTYGYKKILEYFGNQIIDNKNNSEKAINRTCLRKIIFNNSESKEWIEALLHPLIKERMIEECSQYESNQTLLLIIPLLFEANFEDICTEIWLVKCPSELQKKRLIKRDKISEKEAYEIINSQL

SEQ ID NO: 127125 - protein, 198 aa, Unknown
  Bacterial polypetide isolated from the Sargasso Sea
MTKVIGITGGIGSGKTTLCKYLKKNGYNVHESDKIVFNIYKNPSRLFLNFIKKNISEKVVKNYKINKKKVAEIVFNNDVIRKKLENYIHQEVKVSRERFIKKNQKNNKRVVFVDIPLLLENNLEKKFNVVVCIISKKKIRTERVLKSKKFTKPILNKIFNSQTSDKNRRLRSQIIINNNKSKKDFIFSAEKALIDFLK

SEQ ID NO: 127126 - protein, 144 aa, Unknown
  Bacterial polypetide isolated from the Sargasso Sea
MTNQKFVVGLTGGIASGKTTVANLFAEFGIELVDADVIAREVVAKGSAGLSAIVDHFGDEILLANGQLDRATLRNKVFNNETQRLWLNNLLHPMIRQKMLDQVQASTSKYVIMVVPLLFENQLDSLVSTTLVVDISPELQISRT

SEQ ID NO: 127127 - protein, 52 aa, Unknown
  Bacterial polypetide isolated from the Sargasso Sea
MSKFVVGLTGGIGSGKTTVANLFAAEGVCLVDADVVAREVVAPGTYGLNAHY

SEQ ID NO: 127128 - protein, 207 aa, Unknown
  Bacterial polypetide isolated from the Sargasso Sea
MSGYVVGLTGGIGSGKTTVANLFHDLGIQSVDADLVARQVVMPGEAALDAIVQHFGADILQHDGQLDRAALRTKIFANEAEKQWLNQLLHPLIRQRMLQQLAACTSDYALLIAPLLLENNLQIYADRVLVVDVPEELQLSRTIQRDQVPAEQVQNILNSQISRPERLRLADDVVLNTVPVFALQPQIQQLHSRYQQFAKEKLAKSST

SEQ ID NO: 127129 - protein, 45 aa, Unknown
  Bacterial polypetide isolated from the Sargasso Sea
MSKFVVGLTGGIGSGKTTVANLFAAEGVCLVDADVVAREVVAPGT

SEQ ID NO: 127130 - protein, 204 aa, Unknown
  Bacterial polypetide isolated from the Sargasso Sea
MYVVAITGGIGSGKTTVANQFAELGIEVVDADVIAREVVEPGTPALAAITAHFGSAVITPAGQLDRRRLRERVFTDPQAKGWLNALLHPLIRTEMQRQCAAARSPYCLLVVPLLVENRLTALANRVLVIDVDEATQIERTCRRDGVSREQAQAILAAQASRAERLAAADDVLDNQNGTPEAIKSRILTLHETYLAFASQQARQL

SEQ ID NO: 127131 - protein, 139 aa, Unknown
  Bacterial polypetide isolated from the Sargasso Sea
MSKFVVGLTGGIGSGKTTVANLFAEEGVDLVDADIVAREVVAKGSKGLEAIIAHFGTDILTETGELDRAQLRQRVFSDEQARQWLNQLLHPMIRQEMLSQVENATSDYVIMVVPLLFENGLDRLVNRTLVVDISPELQI

SEQ ID NO: 127132 - protein, 198 aa, Unknown
  Bacterial polypetide isolated from the Sargasso Sea
MIVGLTGGIGSGKSAAGDFFIELGIDLIDADMISKDILDNNLKAKELFIENFGEIYIDENNNINRGLLREDIFKDNNKKEKLESIIHPFVREDITEFITKSNSIYKIIMVPLIYETKSQDFYDKIILIDCDEDYQIKRASQRDEKSKEDIINIIKNQATREERQSIADEIILNNSTLDDLKNQVIKVHQRLLGININE

SEQ ID NO: 127133 - protein, 52 aa, Unknown
  Bacterial polypetide isolated from the Sargasso Sea
MILVGLTGGIGSGKSTVINYFKELGITCYQADDEAKKLMNSDKSLIKKIKNS

SEQ ID NO: 127134 - protein, 198 aa, Unknown
  Bacterial polypetide isolated from the Sargasso Sea
MFSIGLTGGIGSGKTFIAEILKANFDIKIFDSDYSAKEIIQKNKSVKKSIILNFGKESYIDDQINNKFISKIVFNNPNKLIKLNSIVHPLVFKDFEDFKLKYSEKIIIVESALLFESGMYLSNNINILVTSPLEIKLQRLIVRDKRNEEDVLKIINSQWDDSKKIKLADFVIENINKLETEKKVKKLMSDIISKYEEN

SEQ ID NO: 127135 - protein, 87 aa, Unknown
  Bacterial polypetide isolated from the Sargasso Sea
MKIIGITGGIASGKSTVSLYLQDKYKAYIFDADKEAKALLQSSFVKDKILQAFPNLEDFSTTSIAQEVFKNSESQAKINNIIHHYNK

SEQ ID NO: 127136 - protein, 192 aa, Unknown
  Bacterial polypetide isolated from the Sargasso Sea
MKIVGLTGGIGSGKSTVLNQFKNLGINTYCADKASKKLINSDKDLIKSIKNLFGNNVYENDVLNTAKLSKIVFQDPNKLKSLNSIIHPAVAKDFESFIKNNNGDYIVKEVAIIFETNTEDNYDKIILIRAPLEERIKRVILRDNLSREDVIRRVNNQIDDSTIIDNCDYIIDNNNLKDLKEKVLKIHKDLIR

SEQ ID NO: 127137 - protein, 205 aa, Unknown
  Bacterial polypetide isolated from the Sargasso Sea
MSKFVVGLTGGIGSGKTTVANLFAEEGVDLVDADIVAREVVAKGSKGLEAIITHFGTEIVTEAGELDRAKLRQRVFSDEQARQWLNQLLHPMIRQEMLSQVENATSDYVIMVVPLLFENGLDRLVNRTLVVDISPELQISRTVKRDNVDATQVNNIINSQCSRSDKLARADDIIDNQGEISTLKQEVQALHQRYLQLSGNHDAHD

SEQ ID NO: 127138 - protein, 122 aa, Unknown
  Bacterial polypetide isolated from the Sargasso Sea
MIVGLTGGIGSGKSAAGKYFVELGIDVIDADDISKNILDENIKAKELFIKNFGDKFLDKNNNIDRDLLRSEIFVNEEKKNILESIIHPIVREEITKFINQSDSIYKLIMVPLIYETNSQDFY

SEQ ID NO: 127139 - protein, 193 aa, Unknown
  Bacterial polypetide isolated from the Sargasso Sea
MKKIGITGGIGSGKSFISEIIKAMGYPVFNSDMVAKDIMNNNVDTIKFIINNFGSSSYHNGTINKAYLAKQFFNNPEKLKIINNHIHPKVRDQFDDFCNVSNSDFIFNESAIIFETGIQERFDAVVLILSPKELRIKRIMDRDDVSLEDVTKRMDNQLSDEQKLPLTKFHINNDNESPLLIQIHDFIEELSSI

SEQ ID NO: 127140 - protein, 198 aa, Unknown
  Bacterial polypetide isolated from the Sargasso Sea
MFVVGLTGGIGSGKSAATSIFEDLGIDVVDADLASREAVLPGSKSLSEIQKKFGNEILLEDKSLNRAKLREIIFDSSKDKVWLEQLLHPEIRNIIQSKLKKSSSEYVILVSPLLFETDQHEFCNDTILIDSSLDSQISRTSKRDSVSKESVKKIISAQMSREDKLKIATIVIKNDDSLEQLETNVKKVHKNLLKKIHK

SEQ ID NO: 127141 - protein, 198 aa, Unknown
  Bacterial polypetide isolated from the Sargasso Sea
MTLIVGLTGGIGSGKSTFSKELTKRNIKTLDSDKEVALIYKKPTKKFLHYLKKIGLSGSTKSKKINKRLISEKIFSNKETKKQLENYIFKITRKKRHQFIKREKKRKTKIIFLDIPLLFENKLNNEFDLIISILSTKKNRYNRLKLSKNMSKTQFGAIIKTQTSDVVRKNNSDIVIYNNNTMVNYISKINKILDRLIL

SEQ ID NO: 127142 - protein, 198 aa, Unknown
  Bacterial polypetide isolated from the Sargasso Sea
MIVGLTGGIGSGKSAAAKIFVELGIDVIDADELSKNVLIENQKAKKIFVEKFGHKYINSNDEIDRELLREDIFKDEKKRKDLEGIIHPIVREEISEFVVNSKSIYKIIMVPLILETNSVDAYEKIVVVDCDLDKQIERASRRDDVSKENVENIIKNQASREERLSIADQVIMNNASLDDLRLEVIKVHQKLLGLKIDE

SEQ ID NO: 127143 - protein, 194 aa, Unknown
  Bacterial polypetide isolated from the Sargasso Sea
MIIGLTGGIGSGKTAVSDIFQGLGITVVDADLASRVVVEKGREELNKISDHFGKDILSRDGELDRAKLREIIFNSQDEKLWLESLLHPAIAAQIKKELDSSTSPYTVLVSPLLLETDQKNFCSKLLVVDVPIETQIQRTSKRDNVSEEQIKSIISSQIDRESRLRQADEIILNDGSLEELAVKVKELHEKFLAT

SEQ ID NO: 127144 - protein, 205 aa, Unknown
  Bacterial polypetide isolated from the Sargasso Sea
MSKFVVGLTGGIGSGKTTVANLFAAEGVCLVDADVVAREVVAPGTYGLNAIIDHFGTEILTASGELDRAKLRQRVFSDEQARQWLNQLLHPMIRQEMLLQVKNATSDYVIMVVPLLFENGLDRLVNRTLVVDISPELQISRTVKRDNVDATQVNNIIESQCSRSEKLARADDIIDNQGEISTLKQEVQALHQRYLQLSGNHNAHD

SEQ ID NO: 127145 - protein, 200 aa, Unknown
  Bacterial polypetide isolated from the Sargasso Sea
MFVVGLTGGIGSGKSTVADLFAAHGVPLVDTDLIAHRITAPHGIAMPQIAAEFGDSFVAADGSLDRARMRTLVFSDDGARKRLEGITHPLIRAETEREQREAQGPYVIVVVPLLVESGNWRTRVNRVLTVDCSVETQIARVMSRNGFSREQVLAIIARQVTREARLAAADDIINNDNAPLDALKAQVDAQHRAYLALAAA

SEQ ID NO: 127146 - protein, 202 aa, Unknown
  Bacterial polypetide isolated from the Sargasso Sea
MFAIGLTGGIGSGKTTVADLFGARGASLVDTDLIAHRITAPRGLAMPAIEQAFGRSFVAADGSLDRAKMRALIFSDDAALRRLEAITHPLIRAETDREAREAQGPYVIFVVPLLVESGNWKARCDRVLVVDCPVETQIARVMRRNGFTREQVEAIIAKQATREARLAAADDVIVNDATTPDALAAQVDALHQRYLGFAAAAR

SEQ ID NO: 127147 - protein, 61 aa, Unknown
  Bacterial polypetide isolated from the Sargasso Sea
KRDPKGLYKKARSGEIKDFTGIDSPYEIPKDPDLEIDTKNLSIEDSENLLLDFISEKTSNS

SEQ ID NO: 127148 - protein, 143 aa, Unknown
  Bacterial polypetide isolated from the Sargasso Sea
YYFDGDNVRHGLNSDLGFNEESRIENIRRIGEVSKLFLDSGIIALTAFISPFKSDRKLVRELFQMGEFLEVFIDSSLEVCESRDPKGMYAKARSGEIKNFTGISSPYEPPHNPEIHVINNSITLDEASDQIITYLIDRQLINS

SEQ ID NO: 127149 - protein, 155 aa, Unknown
  Bacterial polypetide isolated from the Sargasso Sea
VALHKHGYSTYVLDGDNIRHGLCKDLGFSDLDREENIRRIGEVSKLFLDAGIIVLTAFVSPFRADRDNARSLVGENDFIEIYCSADLEVCETRDTKGLYAKARTGDIKDFTGISSPYEDPQSPELKIDTGNLEIDKCVDIVTNLLVKKKIISKIA

SEQ ID NO: 127150 - protein, 194 aa, Unknown
  Bacterial polypetide isolated from the Sargasso Sea
MNAAVTSDAIDAPVSKDDRALQKHQKPCIIWFTGLSGSGKTTTAIALEKRLNAIGKHTYLIDGDHLRQGLNSDLSFTDEDRTENIRRVGEVAKLFVDAGLIVIVALISPFRADRLAVRNLVKKDEFIEVYMSTPLEVCEQRDVKGLYKKARAGEIQNFTGVDSIYESPQNPDVVIDSSTAETEENIDRVIGTIL

SEQ ID NO: 127151 - protein, 183 aa, Unknown
  Bacterial polypetide isolated from the Sargasso Sea
MTKLTIDKSTREKLYSQRGKVFWMTGLSASGKTTIADAFEKTLHESRLRTCILDGDNLRQGLNKDLGFVEADRIENSRRVAEVAKLMIDTGLIVIAALISPFKSGRDAARALFEKGDFVEVYIDAPLDVVEKRDPKGLYKKARNGEIPYFTGIDSSFEVPEQPELHLQTAELTVEQSVQRLIE

SEQ ID NO: 127152 - protein, 283 aa, Unknown
  Bacterial polypetide isolated from the Sargasso Sea
ENVKILKNKGHFDDFLMPVQWVNRPNQKFRGFSGKVECGTLMPGDIVRVLPSKKTSVIDRIVTYDGDLYQAKENQSITLTFKDEIDCSRGQIITNKNSNIELSDQFETIIIWMNEESMIFGRSYYLKIGTQTVSASISKPKYKINVDSMEKEAALSLDLNDICVANISTDQLIPFLSYKQNHTLGGFILIDKMTNATVGAGLINHALRRSQNIHWQKMDIDRYHHAKLKKQRPVVLWMTGLSGSGKSTIANALEKRLAEMNKHTILLDGDNVRQRLNKDLGFT

SEQ ID NO: 127153 - protein, 93 aa, Unknown
  Bacterial polypetide isolated from the Sargasso Sea
FISDRDKVRKIIGSKDFIEVYCAADITVCEKRDTKGLYKKARLGEIKEFTGISSPYEAPHNPEIVVDTGSLDLNDSVEKVINYLTKENFLNKA

SEQ ID NO: 127154 - protein, 99 aa, Unknown
  Bacterial polypetide isolated from the Sargasso Sea
TAFVSPFISDRDKVRKIIGSKDFIEVYCSADIKVCENRDTKGLYKKARLGEIKEFTGISSPYEAPHNPEIVVDTGLLDLNDSVEKVINYLKKENFLNKA

SEQ ID NO: 127155 - protein, 230 aa, Unknown
  Bacterial polypetide isolated from the Sargasso Sea
KTVPFSTFKENKILGSFIIIDPINNQTMGMGMINFSLRRSQNIQLQNLTINKNLREKINGHKGQVLWMTGLSGSGKSTIANEVEKILYSQGKKTYILDGDNIRHGLNKDLGFTDKDRVENIRRVAEVAKLMCDAGLIVITAFISPFRLEREMARSLFEKNDFKEIYISTPLKVAEKRDPKGLYKKARQGKIPNFTGIDSIYEKPTNPELEIDTSKVSLSKAVKKILNIIT

SEQ ID NO: 127156 - protein, 121 aa, Unknown
  Bacterial polypetide isolated from the Sargasso Sea
MNVQRIGFVASEITKNSGIAICAPIAPYRSDRNINRQLISKVGGYIEIFVNTPLEKCEERDPKGLYKMAREGKIKEFTGISDPYEEPENAEIVVSSDGLVSPEKLVDMIYNRITEIGYIAK

SEQ ID NO: 127157 - protein, 182 aa, Unknown
  Bacterial polypetide isolated from the Sargasso Sea
EAALNQKGITLWLTGLSGSGKTTIGAFLEKKLFQNNITTTLLDGDNIRTGINNNLSFSDKDRIENIRRIAEVSKLFNSSGIVSINCFVSPFQSSRDLAKKIIGRENFFEVFVDTSIEECEKRDVKGLYKKARAGEIKNFTGISSSFETPINPDFTISTLGKTAKESGDELFNYILPKIKAKK

SEQ ID NO: 127158 - protein, 83 aa, Unknown
  Bacterial polypetide isolated from the Sargasso Sea
MLVKKRDRSLIKKHRSCIIWLTGLSGAGKSTVADLLEQKLNKQDKHTFLLDGDNLRHTLNQDLGFSDYDRNENIRRIGHVGKL

SEQ ID NO: 127159 - protein, 80 aa, Unknown
  Bacterial polypetide isolated from the Sargasso Sea
SKDFIEVYCSADIAVCENRDTKGLYKKARLGEIKEFTGISSPYEAPHNPEIVVDTGSLDLNVSVEKVINYLKKENFLNKA

SEQ ID NO: 127160 - protein, 239 aa, Unknown
  Bacterial polypetide isolated from the Sargasso Sea
MYDIIDLPNITNVIYGRDVGYKVEKVSFDKDIESISATNVRKSMNISPTKNEVTIKERFKRSGHAGGVVWLTGLSASGKTTIACQVERELFDKGYNVFMLDGDNLRDGLNFNLGFSKEDRHENIRRAGEVAAILSSSGFIVISSFITPLAIDREVAKKACNDNFYEVFVSASIEECESRDPKGLYKKARSGEIKDFTGIGSIYEIPENPHLILNTEDAKENDSANQLIDFIISKFPLKQ

SEQ ID NO: 127161 - protein, 198 aa, Unknown
  Bacterial polypetide isolated from the Sargasso Sea
MPQDFKNLSPATPTNGHSASSDVKQDRAFVVWLTGISGAGKSTLATLLQEQLNARGLRTYLLDADRLREGLNRDLGFSDADRHENIRRTAEVAKLLVDAGFVVIAALISPFQEARAKARARFAAGTFFEVFVDTSLEVAEARDPKGLYALARQGAIRQFTGIDSVYEPPQSPDVHVRTAETSPSECVDAIIRKLPLGG

SEQ ID NO: 127162 - protein, 152 aa, Unknown
  Bacterial polypetide isolated from the Sargasso Sea
MKVILLENIRRIGSIGDVIDVKRGFARNYLIANKKGLYASKENIKQVEKIKSELDKKDLEKKKIAKQIHDNVNGNTYEVKKLSTENKELYGSVKPTEISKLIHEKDKVEIKPSLIQLTKEIKTLGTFKVKINLHSEVQSEVSIRVVQEETIQ

SEQ ID NO: 127163 - protein, 151 aa, Unknown
  Bacterial polypetide isolated from the Sargasso Sea
MSSPTPIPLPAGAPDDSRAFLQRSHGEVTSQDRMQMFRHKPVTIWLTGLSGAGKSTIAFELERRLAALGHACYVLDGDNVRHGLASDLGFDRKDRRENIRRVAHVAQLMNDAGLIVITALISPMRGDRGMAREIIGPRAFHRNLPVGLCRR

SEQ ID NO: 127164 - protein, 183 aa, Unknown
  Bacterial polypetide isolated from the Sargasso Sea
MKVKRANRSFIKKHRSCIIWLTGLSGAGKSTVADLLEQKLNKQNKHTFLLDGDNLRHTLNQDLGFSDDDRNENIRRIGHVGKLMVDAGLIVIASFISPFEKQREFTRNLFEKNEYIEVFLNTPLEVCEKRDTKGLYKKARSGQLKDFTGIDSAYEIPKNPEITFDGEKYTADELSDKIIKYFV

SEQ ID NO: 127165 - protein, 210 aa, Unknown
  Bacterial polypetide isolated from the Sargasso Sea
MSKITNQYTVLQEPAVYRKDREEMNGHKSVVVWFTGLSGSGKSTLAYALEKTLHENKVRTFVLDGDNIRQGLCNDLGFSDNDRVENIRRIGEVSKLMMNAGSIVITAFISPFINDRRIARELVGGNDFIEIYCDCPLEICESRDVKGLYKKARKGEIPEFTGISSPYEIPKSPELILKTHSLSIEQCLEKLLTYILEKKLLHQFENNFSK

SEQ ID NO: 127166 - protein, 71 aa, Unknown
  Bacterial polypetide isolated from the Sargasso Sea
IFVDTPLEECESRDPKGLYKKARSGILKNFTGIDSVYEVPSDPEIKLKTLSKSPEELADEVLDFLKVNNII

SEQ ID NO: 127167 - protein, 173 aa, Unknown
  Bacterial polypetide isolated from the Sargasso Sea
WFTGLSGVGKSTIAQAAKLRLELNGMKVLILDGDAVRSELHMDLGFSESDIKENNRLILELCLKHQKKYNIILVPIISPFIHSRSEARKKLGTKYFEIHLDASLKILHKRDTKGLYKKARNNQIDNLIGVSKKSKYEPPTNPDLRINTEKSMEENSINLFYNFVLDSYKKDSV

SEQ ID NO: 127168 - protein, 262 aa, Unknown
  Bacterial polypetide isolated from the Sargasso Sea
QWVNRSSSDFRGYAGTITSGKISKGDVITTASSNSQTSIKNIYGPNGELDEAFTNQAVTLTLQDELDISRGDIFLTQDNKEIIKADQFAAHLVWMDQDAMLPERNYIFRFNNTYISGQITDLAHSINVNSYEEIATKKLNLNDIAYCKIALNKMHSIAPYKNNHQLGSFVIIDPYNNKTIGAGMIDHALRRSTNISWHEMSINKETRSKLNIQQPCVIWFTGLSGSGKSTIANILEQKLHTMNKRTYLLDGDNVRHGLNKDL

SEQ ID NO: 127169 - protein, 290 aa, Unknown
  Bacterial polypetide isolated from the Sargasso Sea
GSAVTLLIEDDIDISRGDILAKPNSLPEIADQFSAWLIWLHEEEMLPERPYFIRFSNLEATAQITELSYQLDINSLDHHACKTLKLNQIGYCKIALDRSIAFDSYKTNRITGSFVLIDKRTYATVGAGIINFALMRAKNIGWHQMQVNKTFRGKLKNQKPQLIWFTGMSGSGKSTVADLLEQELVQKGYHTYILDGDNLRHGLNRDLGFTDKDRVENIRRVSEVGKLMVDAGLIVLACFISPFRAERDMARNLFNKDEFVEVYVDTPLKICELRDPKGLYKKARAGILKN

SEQ ID NO: 127170 - protein, 182 aa, Unknown
  Bacterial polypetide isolated from the Sargasso Sea
MKDQDQTNSTNIKWHNLTIDRDQLEKMRGHKGMVIWFTGLSGSGKSTLANALNEVLHLEGFSTYVLDGDNIRHGLCKDLGFSDQDREENIRRIGEVANLFMNAGIITITAFVSPFISDRDKVRKIIGSKDFIEVYCAADIKVCENRDTKGLYKKARMGEIKDFTGISSPYEAPHNPEIIVDT

SEQ ID NO: 127171 - protein, 150 aa, Unknown
  Bacterial polypetide isolated from the Sargasso Sea
LEKSLFKRGVRSYILDGDNIRHGLNKDLGFTNADRVENIRRVAEVAKLMVEAGLLVITAFISPFRSERAVARALFDQDEFIEVFVNVPIEVAESRDPKGLYKKARQGDLPNFTGIDSDYEIPESAELEVNTSDLNLEQSVIKILELLDKK

SEQ ID NO: 127172 - protein, 298 aa, Unknown
  Bacterial polypetide isolated from the Sargasso Sea
QKDKKSCYSDQSISLCIDKELDISRGDILVSEKNILNLTDQFACNIMWFDEQELIPEREYTFLLSTTETIAKITKLEYQVDINSDKKLATKTLKQNQIGYCKVTINKPIVAHDYKTNKNLGSFILIDRITNNTVGAGTIIFSLRRSENLFWQNHKINKKIRSENKNQKSCIIWFTGLSGSGKSTIADKLEQKLNFQGKHTYILDGDNIRHGLNKDLGFTDEARVENIRRVAEVGKLMVDAGLITIVAFISPFNQERMMARRMFKKEEFFEVFVDTPLEVCKKRDPKGLYKKALAGKIK

SEQ ID NO: 127173 - protein, 246 aa, Unknown
  Bacterial polypetide isolated from the Sargasso Sea
NDIAYCKIALSKPTFFKSYIQNNQLGSFVIIDQFNNLTVGAGMIDFELRRSSNISWHDMTIDKNKRSTLNSQKPCALWFTGLSGSGKSTIANILEQKLHQLNKRTYLLDGDNIRHGLNKDLGFTDADRVENIRRVAEVSKLMTDAGLITLISFISPFKSERRMARDLFDTNEFIEIFVDTPIEECEKRDPKGLYKKARSGKLKNFTGIDSDYEIPLSPEIKLKTVSKKPEELADEILNYMKKNNII

SEQ ID NO: 127174 - protein, 198 aa, Unknown
  Bacterial polypetide isolated from the Sargasso Sea
TNIKWHNLTIDREKLEKMRGHKGMVIWFTGLSGSGKSTLANAINEILHLDGFSTYVLDGDNIRHGLCKDLGFSDEDREENIRRIGEVANLFMNAGIITITAFVSPFISDRDKVRKIIGSKDFIEVYCAADIEVCENRDTKGLYKKARLGEIKDFTGISSPYEAPHNPEIMVDTGSLDLKDSVEKVLHYLKQENFLKKS

SEQ ID NO: 127175 - protein, 296 aa, Unknown
  Bacterial polypetide isolated from the Sargasso Sea
SSNFRGYSGTISSGKIKVNDEVQVLPSGEKNKIKKIITPSGEKDYAVKDQAVTLTFDKEIDVSRGNLICSNGKHNYFSADQFASHIIWMNKEKMLPERNYIFRFINSQIVGKITDLVHKVNINTFDKIASKSLGLNEIGYCKVALNKNTIFNSYKKNKRLGSFVIIDQFTNQTLAAGVIDHELRRASNISWQDMSINKNLRSSINGQKPCILWFTGLSGSGKSTIANIIEQKLHELSKHTYLLDGDNVRHGLNKDLGFTDSDRVENIRRISEVSKLMVDAGLITIVSFISPFKSRG

SEQ ID NO: 127176 - protein, 309 aa, Unknown
  Bacterial polypetide isolated from the Sargasso Sea
ERIVLFDEELESAVKPQSVTLTLDKEIDASRGDVIVSSNQPCQVSDQFDCQLVWLDSEEGYIGRTYWLILGSERVNATLSEIKFKYNVNTLEELPARSFELNDIGRVTLSCDKAIPFETYEACREMGSLVLVDRFSNSTVGAGMVNFALRRAQNIHWHHHAITKLDREKLNGHRGRVLWLTGLSGSGKSTIASELEKSLFNRGIRSYILDGDNIRHGLNKDLGFTNADRVENIRRVAEVAKLMVEAGLLVITAFISPFRSERAVARALFDQDEFIEVFVNVPIEVAESRDPKGLYKKARQGDLPNFTGI

SEQ ID NO: 127177 - protein, 101 aa, Unknown
  Bacterial polypetide isolated from the Sargasso Sea
MNKKNKNTDFSNEVFKHAMKIDKLNRSKIKNQKPCIIWFTGLSGAGKSTVADLLEQKLNKLKKHTFLLDGDNLRHSLNSDLGFSNEDRDENIRRIGHLGAL

SEQ ID NO: 127178 - protein, 320 aa, Unknown
  Bacterial polypetide isolated from the Sargasso Sea
KSNIKQKKVHSKFRLPIQNVLRPNSDFRGYQGTVASGAIKKGDKVIIQPGSHSTRIKEIFFSGKKVDQVQSGSAVTVTLKNEIDISRGNILTEEKGQCESSNQFQSKLIWMDENEGHIGRSYILKINNQTAGAQISKIKAKIDINKLSEVTATKLNLNDISIVNINLDKDIFFEPYDNNKTLGGFILVDRFTNKTVAAGLINFSLRRAQNIFEQNLTINKKLRQKLNNHKSKILWFTGLSGSGKSTIANELEKKLYERGIRSFILDGDNIRHGLNKDLGFTDADRIENIRRIGEVAKLMVDAGLVVITAFISPFIAERNM

SEQ ID NO: 127179 - protein, 112 aa, Unknown
  Bacterial polypetide isolated from the Sargasso Sea
MATDNVVWHKHEVNKTTRSEKLGQTPRVFWLTGLSGSGKSTLANLLEKKLHEQHKHTYLLDGDNVRHGLCGDLGFSDKDRVENIRRISEVAKLFVDAGTIVLTAFISPSKPT

SEQ ID NO: 127180 - protein, 146 aa, Unknown
  Bacterial polypetide isolated from the Sargasso Sea
MKEQDQRKSTNIKWHNLTIDREKLEKMRGHKGMVIWFTGLSGSGKSTLANALNEVLHLDGFSTYVLDGDNIRHGLCKDLGFSDEDREENIRRIGEVANLFMNAGIITITAFVSPFISDRDKVRKIIGTKDFIEVYCAADITVCENR

SEQ ID NO: 127181 - protein, 198 aa, Unknown
  Bacterial polypetide isolated from the Sargasso Sea
MTSNLHFHGATISTKDKATKNKHRPAVLWFTGLSGSGKSTLANAVECLLFQRGYQTHTLDGDNIRMGLNSDLGFSPEDRTENIRRISEVANLMRESGTIVCTAFISPYRKSRQSARDIIGKDFIEIYVKAPLETCEDRDPKGLYKKARSGEIPNFTGVSAPYENPENPEVVVETHESKIDDCAEQIIKYLEDNEYFKL

SEQ ID NO: 127182 - protein, 234 aa, Unknown
  Bacterial polypetide isolated from the Sargasso Sea
CDKAIPFETYEACREMGSLVLVIGFSNSTVGAGMVNFALRRAQNIHRHHHAITKQDREKLNGHRGRVLWLTGLSGSGKSTIANELEKSLFKRGVRSYILDGDNIRHGLNKDLGFTNADRVENIRRVAEVAKLMVEAGLLVITAFISPFRSERAVARALFDQDEFIEVFVNVPIEVAESRDPKGLYKKARQGDLPNFTGIDSDYEIPESAELEVNTSDLNLEQSVIKILEFLDKK

SEQ ID NO: 127183 - protein, 82 aa, Unknown
  Bacterial polypetide isolated from the Sargasso Sea
MSASPTYGEITNQGASTNIAWHKASVNRAARAEQRGHSSAILWFTGLSGSGKSTLANAVNAALFQRGLATYVLDGDNVRHGL

SEQ ID NO: 127184 - protein, 119 aa, Unknown
  Bacterial polypetide isolated from the Sargasso Sea
MATDNVVWHKHEVNKTTRSEKLGQTPRVFWLTGLSGSGKSTLANLLEKKLHEQNKHTYLLDGDNVRHGLCGDLGFSDKDRVENIRRISEVAKLFVDAGTIVLTAFISPFKADRDYCRSL

SEQ ID NO: 127185 - protein, 197 aa, Unknown
  Bacterial polypetide isolated from the Sargasso Sea
MSQVVWQNYQISRFDREQQNGHQGVVLWFTGLSGAGKSTVANALEQELVKRKVHSYLLDGDNVRHGLCADLGFSEADRTENIRRVGAVAGLMLDAGLVVLSAFISPYRAQRQAIKDSLPDGKFLEIYIATSLDVCEQRDVKGLYQKARRGEISHFTGISDPYEAPEQADLIIDTAQQSLEQSVDQLIALLTEKGVLS

SEQ ID NO: 127186 - protein, 407 aa, Unknown
  Bacterial polypetide isolated from the Sargasso Sea
PLRCQIQDVYKLDDRRILVGRIESGKIKKGDKLIFSPSNKSSEINTIEFWGKGANKESVYKGHSVGITLKDQIFIERGEIASHVTKNDMPIETDIFKARVFYLGSSPMFIGQSFTMECGTCSVKVFIQDIISIISTDDLSHNKSSTVSKNQVAELVIRSEKIIAIDEFINISATGRFILINENIIVAGGLISMEGYANQRGLDISLSKNLTSVEHRVSIDERAERNRHNGGVFWLTGLSGSGKSTIALDVERRLFEAGYQVYLLDGDNVREGLNSNLSFSPEDRSENIRRVGEVALLFANAGFIVLSAFITPYISDRARLRRNLSDKTEFHEIYIESSIEICEQRDPKGLYKKARVGEIKDFTGIDSPYDIPVNPDLVINTISEDKNLSASKLENYIHKNLGFLLKT

SEQ ID NO: 127187 - protein, 79 aa, Unknown
  Bacterial polypetide isolated from the Sargasso Sea
MDENIVWHNYATTKAQRSEQKKHKPAILWFTGFSGSGKSTVANALEAALNQQGVHTYLLDGDNVRHGLCKDLGFSDEDR

SEQ ID NO: 127188 - protein, 207 aa, Unknown
  Bacterial polypetide isolated from the Sargasso Sea
MKEQDQTKSTNIKWHNLTIDREKLEKMRGHKGMVIWFTGLSGSGKSTLANALNEVLHLDGFSTYVLDGDNIRHGLCKDLGFSDEDREENIRRIGEVANLFMNAGIITITAFVSPFISDRDKVRKIIGAKDFIEVYCAADITVCENRDTKGLYKKARLGEIKEFTGISSPYEAPHNPEIVVDTGSLDLNDSVEKVINYLKTENFLKKA

SEQ ID NO: 127189 - protein, 225 aa, Unknown
  Bacterial polypetide isolated from the Sargasso Sea
MSSSPTYGELTNQGASTNIAWHQASVDRAARAEQRGHRSAILWFTGLSGSGKSTLANAVNAALFQRGLATYVLDGDNVRHGLCKDLGFSDADREENIRRIGEVAKLFLDSGVIVLTAFVSPFHADRDKARALVDDGDFLEIHCAADLEVCESRDPKGLYAKARSGQIKEFTGISSPYEAPEAAELKIETGSQELAESVDMVIKALQERGVIPAALSQSGLHQPGF

SEQ ID NO: 127190 - protein, 161 aa, Unknown
  Bacterial polypetide isolated from the Sargasso Sea
MKSENVIWHEHQVSREERERLKGHQGAVLWFTGLSGSGKSTVANEVEYLLNRSGVHTYLLDGDNVRHGLNNNLGFSKEDRAENIRRIGEVCKLMSDAGLITFTAFISPYRVDRNKVRNLMEGMPFIEIYCKASLETCESRDSKGLYKKARAGEITGFTGID

SEQ ID NO: 127191 - protein, 218 aa, Unknown
  Bacterial polypetide isolated from the Sargasso Sea
LDSAGGGIVGIGVIDFALRRSTNISWHQTTVDQAARARVHSHQPCVVWFTGLSGSGKSTVANVLEQKLHSEGRHTYLLDGDNVRHGLCRDLGFTDADRVENIRRVSEVARLMADAGLIVIASFISPFANEREMARLAAGDILFVEAFVDTPLAVCESRDPKGLYKKARNGELKNFTGIDSAYEAPSRPEITLHGAEHTPEVLADQVAEYLSSKNVFSV

SEQ ID NO: 127192 - protein, 199 aa, Unknown
  Bacterial polypetide isolated from the Sargasso Sea
LNGHRGGVVWFTGLSGSGKSTIANLVDHKLHAMQVHTFLLDGDNVRHGLNATTSRLADQYNQAFGERFGLGFSEEDRQENIRRIGEVAALFAEAGLLVLTAFVSPYRRDRDAVRNRLEEGDFVEVFVDAPLEICEQRDPKGLYRKARAGEIQGMTGIDDPYESPERPELVLPSGQDSAESLADEVLRYLRAAEKIPSIS

SEQ ID NO: 127193 - protein, 224 aa, Unknown
  Bacterial polypetide isolated from the Sargasso Sea
SPVVLFLDSAGGGIVGIGIIDFALRRSTNISWHQTTVDQAARARVHSHQPCVVWFTGLSGSGKSTVANVLEQKLHSEGRHTYLLDGDNVRHGLCRDLGFTDADRVENIRRVAEVARLMADAGLIVIASFISPFANEREMARLVAGDILFVEVFVDTPLAVCESRDPKGLYKKARTGELKNFTGIDSAYEAPSRPEITLHGAEHTPEVLADQIAEYLSSKNVFSV

SEQ ID NO: 127194 - protein, 167 aa, Unknown
  Bacterial polypetide isolated from the Sargasso Sea
MTASPTYGELTNQGASTNIAWHQASVDRAARAEQRGHRSAILWFTGLSGSGKSTLANAVNAALFQRGLATYVLDGDNVRHGLCKDLGFSDADREENIRRIGELAKLFLDSGVIVLTAFVSPFRADRDKARALVEDGDFIEIHCAADLEVCESRDPKGLYAKARAGQI

SEQ ID NO: 127195 - protein, 160 aa, Unknown
  Bacterial polypetide isolated from the Sargasso Sea
KSTLANLLEKKLHEQNKHTYLLDGDNVRHGLCGDLGFSDKDRVENIRRISEVAKLFVDAGTIVLTAFISPFKADRDYCRSLMEDGEFVEVFIDTPLEVCEKRDPKGLYKKARSGEIKDFTGIDSAYEAPEAPEVHLTYQDEPAEQTAERLYALLQEKGLV

SEQ ID NO: 127196 - protein, 265 aa, Unknown
  Bacterial polypetide isolated from the Sargasso Sea
LIWMDQEPMLPERNYIFRFNNSYINGKITDLVHSINVNSFEEVASKKLNLNDIAYCKVAIDKMHDISSYANNQKLGSFVIIDPYNNKTIGVGMIDHALRRSSNISWHEMSINKKTRSELNSQKPCVVWFTGLSGSGKSTIANILEQKLHTIGKRTYLLDGDNVRHGLNKDLGFTDTDRVENIRRVAEVSKLMVDAGLITLVSFISPFKSERQMAKDLLSSDEFFEIFVSTSLEECEKRDPKGLYKKARAGELKNFTGIDSLYEEP

SEQ ID NO: 127197 - protein, 241 aa, Unknown
  Bacterial polypetide isolated from the Sargasso Sea
MTTNLHYHKHKITNIMRSNKYGHKPAVIWLTGLSGSGKSTVANLVESKLFDLGCKTYILDGDNVRLGLNNDLGFSPGDRKENIRRIGEVAGLFSDSGSIVLAAFISPYKDDRNQARKSCNHDFIEVYVNCSIEECERRDPKGLYKKARSGEIKGFTGVDAPYEEPESPDVIINTNNFSVEECADSIVAELVRRGTIKASLGEIATLDKKKTIAIDFDGVVHAYSRGFSGLDNAYDPPHHGV

SEQ ID NO: 127198 - protein, 214 aa, Unknown
  Bacterial polypetide isolated from the Sargasso Sea
MSASPTYGELTNQGASTNIAWHQASVDRAARAEQRGHRSAILWFTGLSGSGKSTLANAVNAALFQRGLATYVLDGDNVRHGLCKDLGFSDADREENIRRIGEVAKLFLDSGVIVLTAFVSPFRADRDKARALVDNGDFIEIHCAADLEVCESRDPKGLYAKARAGQIKEFTGISSPYEAPEAAELKIDTGSQELAESVELVIKALQERGVIPAA

SEQ ID NO: 127199 - protein, 207 aa, Unknown
  Bacterial polypetide isolated from the Sargasso Sea
MKEQDQTKSTNIKWHNLTIDREKLEKMRGHKGMVIWFTGLSGSGKSTLANALNEVLHLDGFSTYVLDGDNIRHGLCKDLGFSDEDREENIRRIGEVANLFMNAGIITITAFVSPFISDRDKVRKIIGSKDFIEVYCSADIKVCENRDTKGLYKKARMGEIKEFTGISSPYEAPHNPEIVVDTGSLDLNDSVEKVINYLTKENFLNKA

SEQ ID NO: 127200 - protein, 207 aa, Unknown
  Bacterial polypetide isolated from the Sargasso Sea
MKEQDQTKSTNIKWHNLTIDREKLEKMRGHKGMVIWFTGLSGSGKSTLANALNEVLHLDGFSTYVLDGDNIRHGLCKDLGFSDEDREENIRRIGEVANLFMNAGIITITAFVSPFISDRDKVRKIIGSKDFIEVYCSADITVCENRDTKGLYKKARLGEIKEFTGISSPYEAPHNPEIVVDTGSLDLNDSVEKVINYLKKENFLNKA

SEQ ID NO: 127201 - protein, 203 aa, Unknown
  Bacterial polypetide isolated from the Sargasso Sea
MAAATNIVWHEASVDREARSRQRGHRSVILWFTGLSGSGKSTLANAVNAVLFERGLATYVLDGDNIRHGLCKDLGFSDADREENIRRIGEVAKLFVDAGVITLTAFVSPFRADRDKARDLVAHGDFIEVYCAADLAVCEDRDPKGLYAKARAGVIKEFTGISSPYEAPEAPELQVDTGSQSLEESVASVLSLLEEKGVLKAAA

SEQ ID NO: 127202 - protein, 208 aa, Unknown
  Bacterial polypetide isolated from the Sargasso Sea
MKELNQKNLGRNIKWHNLTIDRNKLERMRGHKGMVIWFTGLSGSGKSTLANALNEVLHLDGLSTYVLDGDNIRHGLCKDLGFSDEDREENIRRIGEVANLFMNAGIITITAFVSPFISDRNKVREIIGSKDFVEVYCAANIDVCESRDTKGLYKKARMGEIKEFTGISSPYEAPINPEIFVDTGSLDLNDSVEKIMNYLKEQNLIERL

SEQ ID NO: 127203 - protein, 141 aa, Unknown
  Bacterial polypetide isolated from the Sargasso Sea
HTFLLDGDNVRHGLNKDLGFTESDRIENIRRIGEVAKLMTDAGLIVLTAFISPFRADRQLVRDMIDGGEFIEIHVDTPLEIAEARDVKGLYKKAREGKLKNFTGIDSPYEPPESPEIRVNTVEMTPEEAADHIIAKILPLK

SEQ ID NO: 127204 - protein, 199 aa, Unknown
  Bacterial polypetide isolated from the Sargasso Sea
MNENNIKWQQHDINAQSREALFGHKSAVIWFTGLSGSGKSTVANALEQALAAQGKHTYLLDGDNVRHGLCADLGFSAQDRTENLRRVGAVAGLMVDAGLLVLSAFISPYRNQRELVKSFIPQGKFIEVHIATPLEVCEQRDVKGLYKKARAGEISHFTGISDPYEAPEAADLVLDTSVTSLQDSVQQLLALLRERQIIS

SEQ ID NO: 127205 - protein, 207 aa, Unknown
  Bacterial polypetide isolated from the Sargasso Sea
MTATTPKATNIVWHEASVDRQARASKRGHSSSILWFTGLSGSGKSTLANAVNAALFERGLATYVLDGDNIRHGLCKDLGFSDADREENIRRIGEVAKLFLDAGVIVLTAFVSPFRADRDKARALVADGDFLEIHCAADLAVCESRDPKGLYAKARAGQIKEFTGISSPYEAPEKPELCLDTGAQNLEQCVAAVINLLEERGVLKAAA

SEQ ID NO: 127206 - protein, 190 aa, Unknown
  Bacterial polypetide isolated from the Sargasso Sea
MKINKLNRSNIKNQTPCIIWFTGLSGAGKSTVADLLEQKLNKLKKHTFLLDGDNLRHSLNSDLGFSNEDRNENIRRIGHLGALMVDAGLIVIASFISPFKKQRENTRNLFEKKEFIEVFLDTPIRICEKRDPKGLYKKARSGLIKDFTGIDSAYEKPENPEITLDGSQKTPEDLSGEIISYLLKNDIINL

SEQ ID NO: 127207 - protein, 174 aa, Unknown
  Bacterial polypetide isolated from the Sargasso Sea
VVWFTGLSGSGKSTVANGVEKELHRHGVRTYVLDGDNVRHGLSKDLGFTDADRVENIRRVAEVARLMVDAGLVVLTSFISPFRSERDLARQLFDEGEFFEVYVNVPLTVAEERDPKGLYRKARAGEIPNFTGIDSDYEAPVSPELEVRTNELLLPECIQAVFELLKANSIFMTR

SEQ ID NO: 127208 - protein, 165 aa, Unknown
  Bacterial polypetide isolated from the Sargasso Sea
MSNIVWHQHAVGKERRAELKGQKPLVIWFTGLSGAGKSTLAGALEQALAAQGKHTYLLDGDNVRHGLCGDLGFDDAARQENIRRVGEVAKLMVDAGLIVLTAFISPFRAERELVRNLVGEGEFVEVFVDAPLSVCEERDPKGLYKKARAGEIRNFTGIDSAYEAP

SEQ ID NO: 127209 - protein, 195 aa, Unknown
  Bacterial polypetide isolated from the Sargasso Sea
HRGCVIWFTGLSGSEKSTLANEVDRQLHARGHRSFILDGDNVRHGLNASPKILETIHGQPFAKRFGLGFGPEDRQENIRRVGAVAELFTQAGIITLTAFISPYRSDREAVRKMLPAADFIEVYVKAPLDICESRDPKGLYKKARAGEISGFTGIDAPYEEPEKAEITVESTTKSPQVLAEQILVWLERAKVIPVR

SEQ ID NO: 127210 - protein, 198 aa, Unknown
  Bacterial polypetide isolated from the Sargasso Sea
MATDNVVWHKHEVNKTTRSEKLGQTPRVFWLTGLSGSGKSTLANLLEKKLHEQNKHTYLLDGDNVRHGLCGDLGFSDKDRVENIRRISEVAKLFVDAGTIVLTAFISPFKADRDYCRSLMEDGEFVEVFVDTPLEVCEKRDPKGLYKKARSGEIKDFTGIDSAYEAPEAPEVHLTYQDEPAEQTAERLYALLQEKGLV

SEQ ID NO: 127211 - protein, 291 aa, Unknown
  Bacterial polypetide isolated from the Sargasso Sea
KPGFVGRGYFLKIGTTLVNAIITKIKHKINIDNLNSSPANELIFNNIYEVSIKLNKEILCDKFSDYPGTGSFILIDKESLNTVGGGMINFVLHRSHNLFKQKFKITTKDRFLLNGHKAKVIWFTGLSGSGKSTIANELEKKLYSMGIRTFILDGDNVRQGLNSDIGFKDADRIENIRRVSEVAKLMFDAGLVVIVSFISPFRSERDMARKLFKKNQFFEVFVNTPLNIAEKRDPKGLYKKARKGLLPNFTGIDSPYQKPIKPEITLDTTTKKAKDCSELIVKKIFKNPIQI

SEQ ID NO: 127212 - protein, 189 aa, Unknown
  Bacterial polypetide isolated from the Sargasso Sea
MKINKLNRSIIKNQTPCIIWFTGLSGAGKSTVADLLEQKLNKLKKHTFLLDGDNLRHSLNSDLGFSNDDRNENIRRIGHLGALMIDAGLIVIASFISPFKKQRDNTRNLFERKEFIEVFLDTPIGICEKRDPKGLYKKARSGLIKDFTGIDSAYEKPENPEIILDGSQKTPEDLSEEIINYLLKNNIIN

SEQ ID NO: 127213 - protein, 199 aa, Unknown
  Bacterial polypetide isolated from the Sargasso Sea
MSKPVEGPSGKQDQVTEEVDVRWHAATISRDQRERSAGHRGCVIWFTGLSGSGKSTLANEVDKLLHARGHRSFILDGDNVRHGLNASPSLLETIHGQPFAKRFGLGFGAEDRKENIRRVGAVAELFTQAGIITLTAFISPYRSDREAVRKMLPEADFVEVYVKAPLDICESRDPKGLYKKARAGEISGFTGIDDPYGRA

SEQ ID NO: 127214 - protein, 203 aa, Unknown
  Bacterial polypetide isolated from the Sargasso Sea
DQTKSTNIKWHNLTIDREKLEKMRGHKGMVIWFTGLSGSGKSTLANALNEVLHLDGFSTYVLDGDNIRHGLCKDLGFSDEDREENIRRIGEVANLFMNAGIITITAFVSPFISDRDKVRKIIGSKDFIEVYCAADITVCENRDTKGLYKKARLGEIKEFTGISSPYEAPHNPEIVVDTGSLDLSDSVEKVVNYLQKENFLDKA

SEQ ID NO: 127215 - protein, 207 aa, Unknown; identical to SEQ ID NO: 127200
  Bacterial polypetide isolated from the Sargasso Sea

SEQ ID NO: 127216 - protein, 233 aa, Unknown
  Bacterial polypetide isolated from the Sargasso Sea
MSKPVEGPSGKQDHVTEEVDVRWHAATISREQRERSAGHRGCVIWFTGLSGSGKSTLANEVDKLLHARGHRSFILDGDNVRHGLNASPSLLETIHGQPFAKRFGLGFGSEDRKENIRRVGAVAELFTQAGIITLTAFISPYRSDREAVRKMLPEADFVEVYVKAPLDICESRDPKGLYKKARAGEISGFTGIDDPYEEPEKAEITVESAVHNPQVLAQQVLVWLERAEIIPAR

SEQ ID NO: 127217 - protein, 205 aa, Unknown
  Bacterial polypetide isolated from the Sargasso Sea
MSNIVWHQHSVDQAARAKLKGQNPVLLWFTGLSGAGKSTLAGALERALFEAGFHTYLLDGDNVRHGLCKDLGFSVADRDENLRRVGEVAKLMVDAGLVVLSAFISPTREERDSIRARFPAGQFIEVHVSTPLSVCEARDPKGLYVKARKGEIAHFTGISSPYEAPLSAELTIDTSKGDLASQVRALIDYLTAIDVISPSRLTALA

SEQ ID NO: 127218 - protein, 199 aa, Unknown
  Bacterial polypetide isolated from the Sargasso Sea
MKEQNQTKSTNIKWHNLTIDREKLEKMRGHKGMVIWFTGLSGSGKSTLANALNEVLHLDGFSTYVLDGDNIRHGLCKDLGFSDEDREENIRRIGEVANLFMNAGIITITAFVSPFISDRDKVRKIIGSKDFIEVYCAADITVCENRDTKGLYKKARLGEIKEFTGISSPYEAPHNPEIVVDTGSLDLNDSVEKVINYLK

SEQ ID NO: 127219 - protein, 212 aa, Unknown
  Bacterial polypetide isolated from the Sargasso Sea
MNSKKLQKATNISWHEGEISRFDRYKILPQKGATIWFTGLSGSGKSTIAVALEKALYKDGILSYRLDGDNVRMGINKNLGFSEKDRQENIRRIGEVCKLFGDAGLIAISSFISPYTHDRDDVRQLHIESNLEFIEVFVDCPLEVAEKRDPKGLYKKARAGKIQNFTGIDDPYEPPESPEIHLRSHEMSLESEVNAIINYLNECGIIKAKKNE

SEQ ID NO: 127220 - protein, 198 aa, Unknown
  Bacterial polypetide isolated from the Sargasso Sea
MATDNVVWHKHEVNKTTRSEKLGQTPRVFWLTGLSGSGKSTLANLLEKKLHEQNKHTYLLDGDNVRHGLCGDLGFSDKDRVENIRRISEVAKLFVDAGTIVLTAFISPFKADRDYCRSLMEDGEFVEVFIDTPLEVCEKRDPKGLYKKARSGEIKDFTGIDSAYEAPEAPEVHLTYQDEPAEQTAERLYALLQEKGLV

SEQ ID NO: 127221 - protein, 197 aa, Unknown
  Bacterial polypetide isolated from the Sargasso Sea
MSNIVWHAHAVDKQSRAGQKGQKPLVIWFTGLSGAGKSTLAGALEQALVAEGKHTYLLDGDNVRHGLCGDLGFDDAARQENIRRVGEVAKLMVDAGLIVLTAFISPFRAERELVRNLVGEGEFVEVFVDAPLAICEGRDPKGLYKKARAGEIRNFTGIDSAYEAPENPEIHLLNAGKPVEVLVDELLTALRLRRLID

SEQ ID NO: 127222 - protein, 591 aa, Unknown
  Bacterial polypetide isolated from the Sargasso Sea
MESTLIGRMLYESQMIFDDQVASLKNDSKKYGTQGEDIDFALLVDGLSAEREQGITIDVAYRFFSSSKRKFIVADTPGHEQYTRNMATGASTADMAILLVDARNGILTQTKRHSFIVSLLGIQNIVLAINKMDLIGYDKKIYEKLSSEYISFSKKLNFKKIQSIPISALKGDNIHNKSKNMKWYSDKTLFDYLETTKSQNSNKDGFIFPVQRVNRPNLNFRGYSGTITCGKIKIGDELTSLPSNQKAKVKDILIGEKSIKSAGLKQSVTITLNKEIDTSRGDVLCSKKSVIEMADQFNLNVIWMSEEKCFNGRTYLAKIHNISTSIKIMSIKKIYNVNTLEFDVRDELKLNDVAEISVSFNKDIPYSTFKENKTLGSLIIIDPISNQTIGMGMINFALRRSQNIQIQNLSINKNLREKINGHKGQVLWMTGLSGSGKSTLANELEKKLYSQGKKTYILDGDNIRYGLNKDLGFTDKDRIENIRRVAEVAKLMCDAGLIVITAFISPFRLEREMARSLFEKSDFKEIFISTPLKVAEKRDPKGLYKKARQGKIPNFTGIDSVYEKPINPDLEIDTSKISLGEAVKKILNIIV

SEQ ID NO: 127223 - protein, 526 aa, Unknown
  Bacterial polypetide isolated from the Sargasso Sea
MDLEKFFQHQNNKKQVKILTCGSVDDGKSTLLGRLLYDSQNVFIDQIDQTKIESEKYGTQGKDIDLALLIDGLQAEREQGITIDVAYRFFETSKCKFIVADTPGHEQYTRNMATGASNSDVAIILIDAQKGVLEQTKRHSFIVNLLGIQHVVVAINKMDLVNYDENIFHKIVKEYKELIKNFHFISTNYIPLSALKGDNVFSTFENTKWYTGPSLIETLENIQIEEEDLNNSFSMPVQWVNRSSSDFRGYAGTISSGKISKGDVITTPSSNSQTSIKNIYGPNGELDEAFTNQAVTLTLQDELDISRGDIILTRDNKKILKADQFAAHLVWMDQDSMLPERNYIFRFNNTFINGQITDLVHSININSYEEIATKKLNLNDIAYCKIALNKMHNIAPYKNNHQLGSFVIIDPYNNKTIGAGMIDHTLRRSTNISWHEMSINKETRSKLNTQQPCVIWFTGLSGSGKSTIANVLEQKLHTKNKRTYLLDGDNVRHGLNKDLGFTDTDRVENIRRVAEVSKLMLDAGLI

SEQ ID NO: 127224 - protein, 207 aa, Unknown
  Bacterial polypetide isolated from the Sargasso Sea
MKEQNQTKSTNIKWHNLTIDREKLEKMRGHKGMVIWFTGLSGSGKSTLANALNEVLHLDGFSTYVLDGDNIRHGLCKDLGFSDEDREENIRRIGEVANLFMNAGIITITAFVSPFISDRDKVRQIIGSKDFIEVYCAANITVCENRDTKGLYKKARLGEIKEFTGISSPYEAPLNPEIVVDTGSLDLNDSVEKVINYLKKENFLNKV

SEQ ID NO: 127225 - protein, 207 aa, Unknown
  Bacterial polypetide isolated from the Sargasso Sea
MTATTPKATNIVWHEASVDRQARASKRGHNSSILWFTGLSGSGKSTLANAVNAALFERGLATYVLDGDNIRHGLCKDLGFSDADREENIRRIGEVAKLFLDAGVIVLTAFVSPFRADRDKARALVPDGDFLEIHCAADLEVCESRDPKGLYAKARAGQIKEFTGISSPYEAPEKPELSLDTGAQSLDQCVAAVINLLEERGVLKNAA

SEQ ID NO: 127226 - protein, 214 aa, Unknown
  Bacterial polypetide isolated from the Sargasso Sea
MFRWHTATISRNQRERSAGHRGCVIWFTGLSGSGKSTLANEVDKQLHARGHRSFILDGDNVRHGLNASPNLLETIHGQPFAKRFGLGFGAEDRKENIRRVGAVAELFTQAGIITLTAFISPYRSDREAVRKMLPEADFIEVYVKAPLDICESRDPKGLYKKARAGEIKGFTGIDDPYEEPESAEITVESTVNSPQVLAQQVLVWLERAEVIPVR

SEQ ID NO: 127227 - protein, 530 aa, Unknown
  Bacterial polypetide isolated from the Sargasso Sea
CKFIVADTPGHEQYTRNMATGASSSDVAIILIDAQKGVLEQTKRHSFIVNLLGIQHVVVAINKMDLIKYDKNIFNKIVTEYKELIKNFNFISTKYIPLSALKGDNVFSSFENTKWYTGPSLIETLENIKIQEVDLNNAFSMPVQWVNRSSSDFRGYSGTISSGKISKGALITTALSNSQTSIKNIYGPNGELDEAFNNQAVTLTLQDELDISRGDIILTQDNKEIIKADQFAAHLVWMDQDSMLPERNYIFRFNNTYINGQITDLVHSININSYEEKATKKLNLNDIAYCKIALNKMHSIAPYKYNHQLGSFVIIDPYNNKTIGAGMIDHALRRSTNISWHEMSINKETRSKLNTQQPCVIWFTGLSGSGKSTIANILEQKLHTINKRTYLLDGDNVRHGLNKDLGFTDTDRVENIRRVAEVSKLMVDAGLITLVSFISPFRSERKMAKDLLQEGEFFEVFVSTPLEECEKRDPKGLYKKARSGELKNFTGIDSTYEIPENADLVLDTKTNNAEELADQIINFLESKKII

SEQ ID NO: 127228 - protein, 201 aa, Unknown
  Bacterial polypetide isolated from the Sargasso Sea
MANHDENVVWHSHVVTREQREQHHGHRGVVLWFTGLSGSGKSTVAGALEVALSKLGVSTYLLDGDNVRHGLCSDLGFSDADRKENIRRVGEVARLMVDAGLVVLTAFISPHRSERAMVRERLGEGRFIEVFVDTPLEVCETRDPKGLYKKARAGELRNFTGIDAVYEPPEMPEIHLDGQQLVTNLTAQLLDLLRREDIIKS

SEQ ID NO: 127229 - protein, 205 aa, Unknown
  Bacterial polypetide isolated from the Sargasso Sea
MSNIVWHQHSVDQAARAKLKGQNPVLLWFTGLSGAGKSTLAGALERALFEAGFHTYLLDGDNVRHGLCKDLGFSVADRDENLRRVGEVAKLMVDAGLVVLSAFISPTREERDSIRARFPEGQFIEVHVSTPLSICEQRDPKGLYVKARRGEISNFTGISSPYEAPLSAELTIDTSKGDLASQVRALIDYLTAIGVINPDKAKALA

SEQ ID NO: 127230 - protein, 621 aa, Unknown
  Bacterial polypetide isolated from the Sargasso Sea
MYKAGTIRRYLKSQASLNLLRFITCGSVDDGKSTLIGRMLYESQMIFDDQVASLKNDSKKYGTQGENIDFALLVDGLSAEREQGITIDVAYRFFSSSKRKFIVADTPGHEQYTRNMATGASTAELAILLVDARNGILTQTKRHSFIVSLLGIKNIILAVNKMDLVNYDKNIYEKISSEYKLFSKKLNFKNIQSIPISALKGDNIHKKSKYMKWYNDKTLFDYLETTKTKIQSSDRFVLPVQSVNRPNLNFRGYSGTIAEGKIRKGDELISLPSNQKVKVKDIFVGERSLKTANLKQSITLTIDKEIDTSRGDILCSKNSTVDMADQFNVNVIWMSEDKGFTGRTYLAKIHNISTSIKIMNIKKIYDVNTLEFAAGNELKLNDVAEISISFNKTVPFSTFKENKILGSLIIIDPINNQTIGMGMINFSLRRSQNIQLQNLTINKNLREKINGHKGQVLWMTGLSGSGKSTIANELEKILYSQGKKTYILDGDNIRHGLNKDLGFTDKDRVENIRRVAEVAKLMCDAGLIVITAFISPFRLEREMARSLFEKNDFKEIYISTPLKVAEKRDPKGLYKKARQGKIPNFTGIDSIYESPINPELEIDTSKVSLSKAVKKILNIIT

SEQ ID NO: 127231 - protein, 39 aa, Unknown
  Bacterial polypetide isolated from the Sargasso Sea
MKKFIISIDQGTTSSRVILFDTKGNIVFVFTYEFKQYFP

SEQ ID NO: 127232 - protein, 242 aa, Unknown
  Bacterial polypetide isolated from the Sargasso Sea
MTRSHPLSKYRNIGIMAHIDAGKTTTTERILYYTGKSHKIGEVHDGAATMDWMEQEQERGITITSAATTCFWKDHRINIIDTPGHVDFTIEVERSLKVLDGAVAVFDGVAGVEPQSETVWRQADKYKVPRMCFVNKLDRTGANFFMCVDMISDRLGSYPLVTQLPIGIESNLKGVVDLVSNNAIVWQDESLGAKFDVVEIPEDLKEKSAEYRLKLIEKAVEEDDTIMENYLKGNEPTVEELK

SEQ ID NO: 127233 - protein, 209 aa, Unknown
  Bacterial polypetide isolated from the Sargasso Sea
MEIDVTKGKTEPRDRGNLNPPEFNSIDEERRHGLERLASAFRMFAHFGFDEGLAGHITLRDPEHKDHFWVNPFGVHFGQMKVSDLLLVSHDGDIVIGDRPVNNAAFAIHSRLHMNHPDLNAAAHSHSMYGKTFSTMGRLLEPITQDSCAFYDNHVLFDDFTGVVLETSEGDRIAEALGDKKAAILKNHGLLTTGKTVDEAAWGFLSMDR

SEQ ID NO: 127234 - protein, 275 aa, Unknown
  Bacterial polypetide isolated from the Sargasso Sea
MGFWKDHRINIIDTPGHVDFTIEVERSLKVLDGAVAVFDGVAGVEPQSETVWRQADKYKVPRMCFVNKLDRTGANFFMCVDMISERLGSYPLVTQLPIGIESNLKGVVDLVSNNAIVWQDESLGAKFDVVEIPEDLKEQSEEYRIKLIEKVVEEDDSIMENYLEGNEPTIEELKLCIRKGTLNGSFVPVLTGSAFKNKGVQPLLDAVIDYMPSPTDVANVKGVDVNDDTKELTRKCEDNEPFSALAFKIMTDPFVGSLTFARIYSGSINTKDSVL

SEQ ID NO: 127235 - protein, 162 aa, Unknown
  Bacterial polypetide isolated from the Sargasso Sea
ARSSNVNDGIYIVPAFIGMGAPYWRPDARGLITGLTRDSNWQSLVRATVESVAYQSYDLFNAMNKDGLKPRIVKIDGGMVANNWFSQFLSDTINLKVIRPKVLETTALGVALFAGYQVGEFKSLNEIKNIWQKDRAFSPKIKNSLRNQLLQGWKLAIKKTLA

SEQ ID NO: 127236 - protein, 186 aa, Unknown
  Bacterial polypetide isolated from the Sargasso Sea
IQWLRDKYLMFKDSKDTDEFYSNANKDENVIAIPALTGLGAPHWQPQVRGAFFGLTRNTSRNEIVKSILESLSFQTLELVHCMEKDSKIKIKEMRVDGGMAKNNNFVQSLSNILQMKIIKPNNTETTSLGVAYLSGIHGGLIKNIDEISKLLDRKKIYNPKINKSIIKKQFFRWQEATKLLIKFHS

SEQ ID NO: 127237 - protein, 66 aa, Unknown
  Bacterial polypetide isolated from the Sargasso Sea
MKKFLLSIDQGTTSSRVILYNKNFKIIDIVQKQLTQYFPKNGWVEHDALEIWLDVKSLIYKIIKKN

SEQ ID NO: 127238 - protein, 159 aa, Unknown
  Bacterial polypetide isolated from the Sargasso Sea
FAIHSSLHDARPDVNAAAHSHSMYGKTFSTFGRLLEPITQDSCAFFDNHVLFDDYTGVVLEGDEGKRIAAAIGDKKAAILKNHGLLTTGGTVDEALWAFLSMDRCCQSQILAESVGQMERIPDDVAQLTKSQVGSDMAMWASYQPLYDLMLEKDPSFLN

SEQ ID NO: 127239 - protein, 169 aa, Unknown
  Bacterial polypetide isolated from the Sargasso Sea
APETEKIARSSNINDGIYVVPAFSGMGAPYWRPDARGLITGLTRDSNWQSLVRATVESVAYQSYDLFNAMNKDGLKPRIVKIDGGMVANNWFSQFLSDTINLKVIRPKVLETTALGVALFAGYQVGEFKSLNQIKNIWQKDKAFSPKIKNSLRNQLLQGWKLAIKKTLA

SEQ ID NO: 127240 - protein, 301 aa, Unknown
  Bacterial polypetide isolated from the Sargasso Sea
SRESLTDDCEILVVGAGFAGLLLWYKLKNAGFEDVRFCEKGGDVGGTWYWNRYPGIACDVESYSYFPLLEEMGYFPTMKFASGFEIMEYCQKLAEKFGFYDKCLFHTTVERTVWEEEEQSWRVHTDRGDQMKARYVILANGLLTTPKLARIEGMESFKGDSFHTSRWNYNVDLKDKRVGIIGTGATAVQVVPEIAKVVKELYVFQRTPSSIDVRDQRETTQEEIDQWKTEPDWAKARRARFAKISSGRTALKANDDYLAGKVADFKERKQHTRELSTEEMMTKQLDTNFRIMEQIRNRVTT

SEQ ID NO: 127241 - protein, 79 aa, Unknown
  Bacterial polypetide isolated from the Sargasso Sea
MVDNVPAVREGLEKGSALVGTVDTWLAWKLTGGAGGEGTKHVTDVTNASRTMLMDLGSGTWHTPSIEGNFPRARMKAWS

SEQ ID NO: 127242 - protein, 78 aa, Unknown
  Bacterial polypetide isolated from the Sargasso Sea
MSFILAIDQGTTSTRSIIFDEKLKLISTAQEEFTQHFPQSGWVEHNPQDLLSTTIDTCISALNQKSINPNKIAAIGIT

SEQ ID NO: 127243 - protein, 72 aa, Unknown
  Bacterial polypetide isolated from the Sargasso Sea
MKKYILTIDQGTTSSRVVLYDNKFIIKSIQQKEFKQFFPKDGWVEHDAEEIWNDVKKLIQLTIKKNKLKSTQ

SEQ ID NO: 127244 - protein, 66 aa, Unknown
  Bacterial polypetide isolated from the Sargasso Sea
MKSYIIALDQGTTSSRAVAFDQDGSLVGISQKEFQQHYPKSGWVEHDPKEIWESQWNVLEELINHH

SEQ ID NO: 127245 - protein, 285 aa, Unknown
  Bacterial polypetide isolated from the Sargasso Sea
ITSAGLAIQRSTFLFWEKETCKPVTPAISWQDCRASSISNSFQSYGKKLWTITGTPLSAHFGGPKFLYMIQNNKNLASKIEKGELYFGSLSAFLTHAITGTVAIDHSIACRTMLYNIQKGYWSKYALDLFQVPITCLPPLTPTQHNYGNMFDSNILLSLVIGDQQAALIGQGGLQNNSVAANFGTSASVQYNVDKKPKNIEGLISSVLYSKKSTKTFMVEGTINGCNSLFYYLENILGITHKKMQWNQRIKLEETEGVFIPGFNGLAAPYGKMALKTYELILVKG

SEQ ID NO: 127246 - protein, 162 aa, Unknown
  Bacterial polypetide isolated from the Sargasso Sea
AKSKKNNDGVYIVPAFSGMGAPYWRPDARGAITGLTRNSDWKSLVRAVIESVAYQSYDLFDAMKKDGLKPKLIKVDGGMVANNWFSQFLSDIINLNVIRPKILETTALGAALLAGYQIGEFKSLNEIQVNWKKDRVFSPKLNKSLRNNLLQGWKQAIRKTLA

SEQ ID NO: 127247 - protein, 106 aa, Unknown
  Bacterial polypetide isolated from the Sargasso Sea
DFTGVVLETSEGDRIAEALGDKKAAILKNHGLLTTGKTVDEAAWGFLSMDRCCQSQLLAENVGQMQRIPDDVAEVTRGQVGSPFGMWASYQPIYDLMVEKDDSFLN

SEQ ID NO: 127248 - protein, 112 aa, Unknown
  Bacterial polypetide isolated from the Sargasso Sea
EVLRGMEVDAKLDVEELRVDGGASLNDWLMQFQADVASVPVRRAPIVETTALGAAGLAGLKAGVWSTAGDFVQAQGKASHFEPGHHAADRQDAMVGWDRAVRATLAWARDRG

SEQ ID NO: 127249 - protein, 50 aa, Unknown
  Bacterial polypetide isolated from the Sargasso Sea
MTKNGYILSIDQGTTSSRAALISREGNIIAQKNIEFKQHFPNNGWVEHDP

SEQ ID NO: 127250 - protein, 55 aa, Unknown
  Bacterial polypetide isolated from the Sargasso Sea
MKKYILSIDQGTTSSRVVLYDNKFKICSILQKELKQYFPKDGWVEHDALEIWKAY

SEQ ID NO: 127251 - protein, 264 aa, Unknown
  Bacterial polypetide isolated from the Sargasso Sea
MSRKHPLSKYRNIGIMAHIDAGKTTTTERILYYTGKSHKIGEVHDGAATMDWMEQEQERGITITSAATTCFWNDHRINIIDTPGHVDFTIEVERSLKVLDGAVAVFDGVAGVEPQSETVWRQADKYNVPRMCFVNKLDRTGANFFMCVDMITERLGSYPLVTQLPIGIESNLKGVVDLVSNNAIVWQDESLGAKFDIVDIPDDLKDQAAEYREKLIEKAVEEDDKIMEKYLDGNEPTVEELKSCIRKGTISGSFVPVLTGSAFK

SEQ ID NO: 127252 - protein, 49 aa, Unknown
  Bacterial polypetide isolated from the Sargasso Sea
ALEGSIFIAGAGVQWLRDKIKLINNAYETEKIAKSTKSNNEVYVVPAFS

SEQ ID NO: 127253 - protein, 137 aa, Unknown
  Bacterial polypetide isolated from the Sargasso Sea
MLWDDRDIFNFGILLEEKNHKTDATNASRTMLMNLKTTQWDESLLKIFNIPKIILPEICPCDDTFGSIKAHGMKFPITGVIGDQQSALFGQNCFEFGEMKSTYGTGCFLMVNTKEQIHKSEARLLSTVGCMLGNKTT

SEQ ID NO: 127254 - protein, 122 aa, Unknown
  Bacterial polypetide isolated from the Sargasso Sea
ITQDSCAFFDDHVLFDDFTGVVLETDEGDRIANALGDKRAAILKNHGLLTTGETVDAAVWGFLSMDRCCQSQMIAESVGQMERIPDETAAMTKEQVGSELGMWVMYQPIYDLMLEKDDSFLN

SEQ ID NO: 127255 - protein, 155 aa, Unknown
  Bacterial polypetide isolated from the Sargasso Sea
FIPALTGLGAPHWQPNARGAIFGLTRNTSIPDIIKAALDSISFQTFDLIECIKKDAKIKVKEIRVDGGMINNPNFLQNLANVTQVNIIKPNNLETTSLGVAYLAGLNAGLINNTAQIQKLWKVSKILQPKIQKNIIRKKIQDWKKSVKILIKFHS

SEQ ID NO: 127256 - protein, 292 aa, Unknown
  Bacterial polypetide isolated from the Sargasso Sea
VFWNDHRVNIIDTPGHVDFTIEVERSLKVLDGAVAVFDGVAGVEPQSETVWRQADKYNVPRMCFINKLDRTGANFFMCVDMIPERLGSYPLVLQLPIGIESDLKGVVDLVSNNAIVWQDESLGAKFDIVEIPDDLKEQAKEYREKLIEKVVEEDDTIMESYLDGKEPSIDDLKKCIRQGTIKGSFVPVLTGSAFKNKGVQPLLDAVIDYMPSPIDVASVRGVDVEDDSKELSRKCDDGEPFSALAFKIMTDPFVGSLTFTRIYSGTINTKDTVLNSNSGKKENIGRMLLMHA

SEQ ID NO: 127257 - protein, 248 aa, Unknown
  Bacterial polypetide isolated from the Sargasso Sea
QPPPVRLTFPPPLAPPSRERPPHVPKSYVPSPAKFRGVTTNMETYPAHPPSPTPLTTAKPYRKSDVPFDDRTTTKEHFPAHQPTSPGPLPVKQYQPSPAKFSSATTNKEHFPAHPPSPTPLTTAKPYRKSDVPFDDRTTTKEHFPAHQPTSPGPLPVKQYQPSPAKFSSATTNKETYPAHEPPAKMPPIGLWVENDRVEILLHSGAELPARCSRMFSTTSRDQTAVAVRFVQGWSRRASQCALLGVFE

SEQ ID NO: 127258 - protein, 55 aa, Unknown
  Bacterial polypetide isolated from the Sargasso Sea
MKYIVALDQGTTSSRAILINEKGELVGIEQKEFKQIFPKPGWVENISMEIFSSQI

SEQ ID NO: 127259 - protein, 77 aa, Unknown
  Bacterial polypetide isolated from the Sargasso Sea
TKIKWILDNVEGAKKKAKEGKLCFGTVDAYLMYVLSNKKIHKTDITNASRTMLFNINTLSWDNYLLDLFDIPESMLP

SEQ ID NO: 127260 - protein, 42 aa, Unknown
  Bacterial polypetide isolated from the Sargasso Sea
MSLDGYLLSIDQGTTSSRALILDIKGNIISQKNFEFKQYFPN

SEQ ID NO: 127261 - protein, 143 aa, Unknown
  Bacterial polypetide isolated from the Sargasso Sea
GAPYWRPDVRGLITGITRNSDWKTIVRAVLESVAYQSFDLFESMKSDGLRPKSIQVDGGMIANNWFSQFLSNIINMRVVRPKVLETTALGAAMLAGYQCGEIKSLNEIKVKLKKNNVFSPKLSKSLRNKLLQGWRQAIRKTLT

SEQ ID NO: 127262 - protein, 71 aa, Unknown
  Bacterial polypetide isolated from the Sargasso Sea
MTKKIISIDQGTTSSRAVLFDENGELLDFKQKEFKQNFPKDGWVEHDPEEIWSSVVEVTEELIKGHRLSAR

SEQ ID NO: 127263 - protein, 280 aa, Unknown
  Bacterial polypetide isolated from the Sargasso Sea
LLWYKLKNAGFEDVRFCEKGGDVGGTWYWNRYPGIACDVESYSYLPLLEEMGYFPTMKFASGFEIMEYCQKLAEKFGFYDKCLFHTTVERTIWEEEEQSWRVHTDRGDQMKARYVILANGLLTTPKLARIEGMESFKGDSFHTSRWNYNVDLKDKRVGIIGTGATAVQVVPEIAKVVKELYVFQRTPSSIDVRDQRETTQEEIDQWKTEPGWAKARRARFAKISSGRTALKANDDYLAGKVADFKERKQHTRELSAEEMMTKQLDTNFRIMEQIRNRVTT

SEQ ID NO: 127264 - protein, 78 aa, Unknown
  Bacterial polypetide isolated from the Sargasso Sea
KKKWSKKLLKLFNIPSTILPAVVENSYNFEHTNLFGKSILIGGMAGDQQAATIGQACFNKGQSKSTYGTGCFLLINIG

SEQ ID NO: 127265 - protein, 69 aa, Unknown
  Bacterial polypetide isolated from the Sargasso Sea
MSLSGYILSIDQGTTSSRALILNELGQILAQKNIEFKQYYPKNGWVEHDPVEILQTTTDAIKQVLAELK

SEQ ID NO: 127266 - protein, 202 aa, Unknown
  Bacterial polypetide isolated from the Sargasso Sea
MVVQNFYNQNELDLIWKELDFYTEPNKLFDAKEYGGVVDRTNAKAILLDDLYRGDNKKNFRNISNILTVNRKLFNCGVLDKFSELHGCCSIAPKCNHDVTKVRYYHNNEYYDPHTDRSVQFLAFSYFYKEPKKFIGGDLIFPKYDFKLPCENNSMVIFPGWVEHGVRKVTIEDSDYFDGWGRYCISSFFSCRDKSFFENNDD

SEQ ID NO: 127267 - protein, 149 aa, Unknown
  Bacterial polypetide isolated from the Sargasso Sea
KVVGVNTLGETQGQNINFAVAVNQVKQFIKENPYVAKVNPLNAAMKKEFPKAITQDYNNNGTIDTWYIDTNNNGSVDLAFLDDNEDGKVEAVLIDENENGKWEATRVDENQDGTIDYVLLDEDEDGKNDLIATDVDNDGKFDKVEPIKS

SEQ ID NO: 127268 - protein, 177 aa, Unknown
  Bacterial polypetide isolated from the Sargasso Sea
MKLIASASETEAIAAAQAGNNGVYMVPALTGLGAPHWAPNARGAIYGITRDTGPADFVRAALESVAYQTNDLFTAIAGDGIPVSVLRVDGGMTANDWLMQFLADIINLQVDRPVVRETTALGAAMLALMQSDPSITLDDLASRRQHDASFTPTMDAGDRNSLIAGWNQAMKRTLTEG

SEQ ID NO: 127269 - protein, 252 aa, Unknown
  Bacterial polypetide isolated from the Sargasso Sea
MKLITKITMILFLFTSLSACNAITRLSELDSGPKVTPISNPVGRPKYRPVSMPMPSPKNVLHKANSLWRPGARKFFRDQRAGQVGDILTVKLSLEDSAALKNKTTGARDDTEDGDVTNLLGLEGEFTEFLPQGLNAATALSLGTKKSTSGDGAIDRSEKLAITLAAVITQVLPNGNFVIFARQELKVNFEMREVMVTGIIRPEDITSANEIWHTKIAEMRVAYGGRGTLSDLQQPRYGHQLVDIISRSNSNS

SEQ ID NO: 127270 - protein, 255 aa, Unknown
  Bacterial polypetide isolated from the Sargasso Sea
MDQKEKGSLLPIECKSIEETRRYNLERLASGFRMFAHFGFDEGIAGHITYRDPEHEDHFWVNPFGMHFNQICVSDLILVNKDGEVVLGDKPVNTAAFAIHSSLHDARPDVNAAAHSHSMYGKTFSTFGRLLEPITQDSCAFFDNHVLFDDYTGVVLEGDEGKRIAAALGDKKAAILKNHGLLTTGGTVDEALWAFLSMDRCCQSQILAESVGQMERIPDDVAQLTKSQVGSDMAMWASYQPLYDLMLEKDPSFLN

SEQ ID NO: 127271 - protein, 1083 aa, Unknown
  Bacterial polypetide isolated from the Sargasso Sea
MHKSPGVVFTHDKGKSHSSGKLLYSARVIPQRGSWLDFEFDAKDVLFVRIDRRRKFHATILLRALGYTEDQLLKYFYKFEKLDLSDVNPGLDPDTQSYYIMMDEEIILDQRLQLPITDPKTGEILVNSGQRINKRLLKKLQKSKVKRFNLTLNELKGRIVAQTIYKDGSKDELIPCNTPLTAELLTTIAENGITEVDLLHIGPQNIASPLRDTLALDKLSSPEQSLIELYKKMKPGDPPTLEAAHLMLQNFFFKRERYSLSKVGRLKLNEKLSLDDPLDNTVLTEEDILKTVKYLLELKRGQPNRMIDDIDHLGNRRVRSVGELLETQFRIGLVRMERTIKERMSLQDSETMMLHDIVNAKPVAGAIHEFFGSSQLSQFMDQTNPLSEITHKRRLSALGPGGLTRERAGFDVRDVHSSHYGRICPIETPEGPNIGLIASLATFGRVNEFGFIETPYLKVESSRVSKNVEYLTAIEEEKFSIAQANAVLDKKKSFVNDFVTSRVGSEFSTVLKENIDYIDISPRQLVSVAAAMIPFLEHDDANRALMGSNMQRQGVPLVKPKAPLVGTGMEHQVAMDSGSCVVATRSGVVDNVDAGRVVIQADVDLSSEDSIVPANVDIYHLIKYRRSNQNTCINQRPLVKIGDRIEAGDVIADGSCTENGELALGQNINIAFMPWRGYNFEDSIMVSQRLLHEDSFTSVHIDVLDTVARDTKLGKEEITRDIPNVSEDALKNLDDSGIIAVGTSVKSNDILVGKVTPKGESQLNPEEKLLRAIFGEKAGDVRDTSLRVPQGVDGVVTDVVVFNREGVERDERTKQIEQELLARYEKDHYDEMRIVHSNLVNRIISVADKKPLVADVLSLQGELLASKGTKISHEVLHEIPLKSTDGIQIKDKNINLKIGTFVRNALQQMYLLENVYQDRCEKVSKGDDLPPGVIRMIKVYIAIKRKLSVGDKMAGRHGNKGVVSTVQPIENMPYMEDGNPVDIVLNPLGVPSRMNVGQVLETHLGRVAKGLGEKVQEFLDQNNPADQIRSFLKKVYDCPIAQKHFESMDDNTFLEFVKKYKPGIHMSTPVFDGAKESDIQKMA

SEQ ID NO: 127272 - protein, 203 aa, Unknown
  Bacterial polypetide isolated from the Sargasso Sea
MSRDLLAKKRNFHWDSIFKITATCAGAFVLLIIVLIFGQLLSDSWLIWEKEGLAFVTGDRWNPVEGRESFGALPYIAGTLVTSLIALCIAVPLSIGIAMFLSEIAPTRIREPISFVVELLAAVPSIIYGLWGLFTFRIVFKDWFESPTHEALGEHIFLFRDAPFGLDILTASVVLAIMIIPTISAVSREILLAVPAIQREAAY

SEQ ID NO: 127273 - protein, 190 aa, Unknown
  Bacterial polypetide isolated from the Sargasso Sea
MSRDLLAKKRNFHWDSIFKIAATCAGAFVLLIIVLIFGQLLSDSWLIWEKEGLAFVTGDRWNPVEGRESFGALPYIAGTLVTSLIALCIAVPLSIGIAMFLSEIAPTRIREPISFVVELLAAVPSIIYGLWGLFTFRIVFKDWFESPTHEALGEHIFLFRDAPFGLDILTASVVLAIMIIPTISAVSREI

SEQ ID NO: 127274 - protein, 469 aa, Unknown
  Bacterial polypetide isolated from the Sargasso Sea
MNYIVIDQGTSSTKAFLFNASGQILHQNRIKCSLEKPIPFHVQIDPLIILEDIKKLFIEMVHVSGNSTITCAGLAIQRSTFLFWEKETCKPVTPAISWQDCRASSISNSFQSYSKKLWTITGTPLSAHFGGPKFLYMTQNNKNLASKIEQGELYFGSLSAFLTHAITGTAAIDHSIACRTMLYNIQKGYWSKYALDLFQVPITCLPPLTPTQHNYGNMFDSNILLSLVIGDQQAALIGQGGLQNKSVAANFGTSASVQYNVGKNAKKIEGLISSVLYSNKSTKTFMVEGTINGCNSLFYYLENLLGITHKKMQWNQRIKLEKTEGVFIPGFNGLAAPYWKNGFEDIRIDLSERPNEIIRAAMESIGFLVNDILNCIIKAGLDLPETLTASGGGAKSSLLQFTANITGKTISHSLVKDKTAFGIYRILSSNNLDQISKEATGDIFYPEKIPTLKGKTDKWKQGIKILERL

SEQ ID NO: 127275 - protein, 129 aa, Unknown
  Bacterial polypetide isolated from the Sargasso Sea
MARLLEPITQDSCAFLINHVLFDDYTGVVLEGDEGKRIASALGDKKAAILKNHGLLTTGGTVDEALWAFLSMDRCCQSQILAESVGQMERIPDDVAQLTKSQVGSDMAMWASYQPLYDLMLEKDPSFLN

SEQ ID NO: 127276 - protein, 139 aa, Unknown
  Bacterial polypetide isolated from the Sargasso Sea
ETARGSLFGLTRFSNKSHIARSVLESVAFQTFELLKSMEKDLDIEFENIKVDGGMVENNLLMQFQSDILNKSVMSQNINEITSLGVGVASYIYIKKLPIEEMGKYFSTEKTWSPNMNNDSRIKTLSLWYKAIERSKNWL

SEQ ID NO: 127277 - protein, 118 aa, Unknown
  Bacterial polypetide isolated from the Sargasso Sea
MVRVHVTDYFDNLFGEYGSDDASLNKSVEVIQENERGILVLIRDSGKSIINRLITNSSSGDNKSENEKDELRIYGMGAQILSELGVKKMILLTNTEWKFIGLEAYGIDIIETKLLGEL

SEQ ID NO: 127278 - protein, 232 aa, Unknown
  Bacterial polypetide isolated from the Sargasso Sea
TGCFIMTNTGSEKSLPKDGLLTTIAYRINGQTSYASEGSIFVAGQAVKWLRDQLGIIQNVKDIEKAFVTTKGDTGGVSVLPAFTGLGAPHWDPEARGLISGLTLDTTVEQIVVATLQSIAFQIADLVSLMLKGGPIDQLRVDGGMAVNDPFCQFLADILGQNVDRPIDTETTARGAALLAGLGSGVWMDLNEIRATWQTERVFAPDMEQSLRDSLVKEFALSVERAKLRLNN

SEQ ID NO: 127279 - protein, 331 aa, Unknown
  Bacterial polypetide isolated from the Sargasso Sea
MIGRSDAFGQSRQATGIGALIPISNASRPLVGGPNAAPSGHDDITGLPLPGSELSVSQDVTDADGIFDVRYQWLRDGVPIPSATSTTYSLSPSDTGKNLVVEVSYLDGRGKRERMTSAATEALGVLENDGTAGLAFNSTSQLYLIRGSADVLPLQRDVGTPLQSSGLYGFSITAAVESSSHHKLHLRRFDREYLLRINEGGVLGSLFHSLENLHTIPLDISARESSHTLNVAARAGAYEINGVHNPTLFVRRGQTYLFNLNAADHPFYLQTTGDGYRPSNVYAGGFTGNGQTTGAYQWVVSQDAPDEIFYQCEFHPVMFGKIIIVDSTNTD

SEQ ID NO: 127280 - protein, 233 aa, Unknown
  Bacterial polypetide isolated from the Sargasso Sea
MKSTYGTGCFLMVNTEEKPLNIDEGLLTTVAYQLDNKVHYAIEGSIYSSGTIIKWLRDKMKFFESAEDSEKYLNKNGNSNNVLFLPAFNGLGAPHWNSDIRGGFYGLTQDSSIEDMVTAAFHSISFQTKEITSILEEYDIQITNLSVDGGMVKNNSFCQLLADTLNKKIIQPKNVESTAIGACKVCMLASGLSINNSKKDDMNVFTPNTELTKTYDRAFNDWKSYVEKSLMTS

SEQ ID NO: 127281 - protein, 264 aa, Unknown
  Bacterial polypetide isolated from the Sargasso Sea
MEIDVTKGKTEPRNRGNLNPPEFNSIDEERRHGLERLASAFRMFAHFGFDEGLAGHITLRDPEHKDHFWVNPFGVHFGQMKVSDLLLVSHDGDIVIGDRPVNNAAFAIHSRLHMNHPDLNAAAHSHSMYGKTFSSMGRLLEPITQDSCAFYDNHVLFDDFTGVVLETSEGDRIAEALGNKKAAILKNHGLLTTGKTVDEAAWGFLSMDRCCQSQLLAENVGQMQRIPDDVAEVTRGQVGSPFGMWASYQPIYDLMVEKDDSFLN

SEQ ID NO: 127282 - protein, 280 aa, Unknown
  Bacterial polypetide isolated from the Sargasso Sea
MKQKVFWRVIPPKFTPISDSVFKKIECEDVDLIISCGRKSIIPSLFLKKNSKKKVFNIHIQNPKIKLDNFDLVVVPEHDNLDGDNVLKTKGAIHYLTSEEIEKDKEYLFSISSKLRDKNIISLIIGGPTQYYDYSDRNIQEIFSKVNYLVKENNLNLVVIPSMRTPKGTIEHAKIYFGNDHLVLDGVDKKAYLSALAISKHIVITCDSSSMISEAALTGKPIYIATIPPKKSDKRFKNFRKLFQEMKIVRELGEKLENWNYEKLDETNRVANIIKDKIQL

SEQ ID NO: 127283 - protein, 116 aa, Unknown
  Bacterial polypetide isolated from the Sargasso Sea
VHNNNPSYSYECLVNYAGATISWLKNNLKILNSAKETNQILNKTKDSQGVVFVPAFVGLSSPHWIPDSKAMIYGLTPSINKNHIIRAALESIAFQIKDYLDDLKKNNKINYNDIYI

SEQ ID NO: 127284 - protein, 357 aa, Unknown
  Bacterial polypetide isolated from the Sargasso Sea
MSRTHSLEKYRNIGIMAHIDAGKTTTTERILYYTGKSHKIGEVHDGAATMDWMEQEQERGITITSAATTCFWNDHRVNIIDTPGHVDFTIEVERSLKVLDGAVAVFDGVAGVEPQSETVWRQADKYNVPRMCFINKLDRTGANFFMCVDMIPERLGSYPLVLQLPIGIESDLKGVVDLVSNNAIVWQDESLGAKFDIVEIPDDLKEQAKEYREKLVEKAVEEDDKIMESYLDGNEPSIEDLKKCIRKGTIKGSFVPVLTGSAFKNKGVQPLLDAVIDYMPSPIDVASVRGVDVEDDSKELTRKCDDNEPFSALAFKIMTDPFVGSLTFTRIYSGSINTKDTVLNSNSGKKENIGRML

SEQ ID NO: 127285 - protein, 233 aa, Unknown
  Bacterial polypetide isolated from the Sargasso Sea
MNNIRLFYQENLSNNLKGKLDKKQSHYISKVMRIKENGKFNVFNNAGEWVAKIIRIANGFVEFRIVKQLRSIENANEIWLAFSPIKSNYFNFMIHKATEIGVTRFIPILTERTMVRKLNEKRINKIIIEASEQSNRLKVPSLDKLTKLDAFLKLNQNTNIIFGDINSENKKIDLKNKNPLCVLIGPEGDFSLKERERILKLKNIIPLKINDNILRSETAAISMISIISFNLLS

SEQ ID NO: 127286 - protein, 538 aa, Unknown
  Bacterial polypetide isolated from the Sargasso Sea
MTRSHQLSKYRNIGIMAHIDAGKTTTTERILYYTGKSHKIGEVHDGAATMDWMEQEQERGITITSAATTCFWKDHRINIIDTPGHVDFTIEVERSLKVLDGAVAVFDGVAGVEPQSETVWRQADKYKVPRMCFVNKLDRTGANFFMCVDMISDRLGSYPLVTQLPIGIESNLKGVVDLVSNNAIVWQDESLGAKFDIVEIPEDLKEQSAEYRLKLIEKAVEEDDSIMESYLEGNEPTIEELKLCIRKGTLNGSFVPVLTGSAFKNKGVQPLLDAVIEYMPSPTDVANVKGVDVNDDSKELTRKCEDNEPFSALAFKIMTDPFVGSLTFARIYSGSINTKDSVLNSNSGKKENIGRMLLMHANNREEIKTANAGDIVALVGLKDVTTGETLCASDNPIVLEKMDFPDPVIEVAVEPKTKVDHEKMGQALGRLAQEDPSFRVTTDHESGQTIIKGMGELHLEILVDRMKREFKVEANVGAPQVAYRETISNSYDVDYTHKKQSGGAGQFARVKIKFEPGEPGTGYQFINQIKGGNIPTEH

SEQ ID NO: 127287 - protein, 265 aa, Unknown
  Bacterial polypetide isolated from the Sargasso Sea
MKKIDTSAGKLPQREKGSLVPQEFKSIDEERRHNLERLASAFRMFAHFGFDEGLAGHITYRDPEYKDHFWVNPFGVHFGQMCVSDLLLVSHEGDIVHGDRPVNNAAFAIHSRLHMKHENLNAAAHSHSMYGKTFSTMGRMLEPITQDSCAFYDNHVLFDDFTGVVLETDEGDRIADALGNKKAAILKNHGLLTTGKTVDEAAWSFLSMDRCCQSQLLAETVGQMERIPDEVAETTRGQVGSEFGMWASYQPIYDLMLKKDDSFLN

SEQ ID NO: 127288 - protein, 259 aa, Unknown
  Bacterial polypetide isolated from the Sargasso Sea
MINKNNYIVAIDQGSTSTRTVIYDHKLNLINSSQRKTKEIYPENGWVEQDPEEILITAKETLIEAINIPEINKENILSIGITNQRESIVFWHKETLLPLSPAISWQCLRGIELCKYIKDTKLESIINKSTGLKVDPYFSFSKIVWALKNIEALSDTKNICVGTIDSWLLTNLVEGNPHLTEISNASRTGLYNTEKEEWDDEILELLNIPKSILPKVVQSNYNFGFLSEDILGKKIPINSILGDQQASLFGHKKDKFQEI

SEQ ID NO: 127289 - protein, 134 aa, Unknown
  Bacterial polypetide isolated from the Sargasso Sea
MSRDLLAKKRNFHWDSIFKITATCAGAFVLLIIVLIFGQLLSDSWLIWEKEGLAFVTGDRWNPVEGRESFGALPYIAGTLVTSLIALCIAVPLSIGIAMFLSEIAPTRIREPISFVVELLAAVPSIIYGLWGLF

SEQ ID NO: 127290 - protein, 75 aa, Unknown
  Bacterial polypetide isolated from the Sargasso Sea
CTPRVVRPTRIETTAMGAAFLAGLAVGFWKSSEELEDKFSVDREFIPQMDRDDRAKRYNGWKKAVERSRRWAEEE

SEQ ID NO: 127291 - protein, 172 aa, Unknown
  Bacterial polypetide isolated from the Sargasso Sea
INNAFDTETIAQSKKNNEGVYVVPAFSGMGAPYWRPDARGVITGLTRNSDWKTLVRAVLESVAYQSNDLFNAMKKDGLKPTKLKIDGGMVKNNWFSQFLSDIININTERPKVLETTGLGVALLAGYQIGLFKSLYQIKRKWKKDKIFKPKINRKVRNDLINGWKLSVQKALL

SEQ ID NO: 127292 - protein, 302 aa, Unknown
  Bacterial polypetide isolated from the Sargasso Sea
TCAGAFVLLIIVLIFGQLLSDSWLIWEKEGLAFVTGDRWNPVEGRESFGALPYIAGTLVTSLIALCIAVPLSIGIAMFLSEIAPTRIREPISFVVELLAAVPSIIYGLWGLFTFRIVFKDWFESPTHEALGEHIFLFRDAPFGLDILTASVVLAIMIIPTISAVSREILLAVPAIQREAAYMLGATKWEVFRMSVLPYAKSGLIGASILGLGRAVGETMAVTMLIGNAVGPKAFPFGFFQQGNSLASIIANEFNEASPVSLYFPALIGLGLILLFVSLGINVCAHLIIRRVTNAHEGGIKGF

SEQ ID NO: 127293 - protein, 52 aa, Unknown
  Bacterial polypetide isolated from the Sargasso Sea
MTIILAIDAGTTGVRTLAVNDRGDIVSSSYKEFKQYFPKPGWVEHDPEEIWV

SEQ ID NO: 127294 - protein, 131 aa, Unknown
  Bacterial polypetide isolated from the Sargasso Sea
MGYITIDSSTSSTTVLVFNDSLKVLKRFQKEHKQIYTKEGYIEHDLEEIFQNLIELVKQASFLSPDPKFISITNQRETFSLFKKKTGKPIHNAIVWQCTRGQKICDDLLINKELTQTIKKKTGLQPNTFFS

SEQ ID NO: 127295 - protein, 196 aa, Unknown
  Bacterial polypetide isolated from the Sargasso Sea
YALKGSIFIAGAGVQWLRDKIKFLKKAADSEKIIKKLKDNHGVYLVPAFTGLGTPYWNAKSRGVLSGLTRDTGVSEIVRATVESVGYQTYDLFEAMKNDGLRPKIVRVDGGMVKNNWFSQFLSDIINVKVLRPKVDETTALGAAFMAGLKIGVYKSLKDISKNWSLDKKFSPKMKNLDRRKLIFGWQKAIKRTLIT

SEQ ID NO: 127296 - protein, 251 aa, Unknown
  Bacterial polypetide isolated from the Sargasso Sea
MYLSIDQSTSSSTIFLYNKKFKLICKFSKAHKQIQKSLGFVEHDANEIINNIFFLFKKISKKIKFDKNLFLSITNQRETFVIFDKNSGKPLHNAIVWQCRRGQKVCDEINKSVKNKKLIKKKTGLTLDTYFPASKLKELLNSNKKIKDKLKNGSALFGTIDTYLIYQLTNQKIYSTDYTNASRTLFFDNSSLCWSKDLLKLFNLNLKKLPEVRESSSIFGYTNFNGLLKNNIPISGVIGDSQASIFANQCF

SEQ ID NO: 127297 - protein, 111 aa, Unknown
  Bacterial polypetide isolated from the Sargasso Sea
MKYVLSIDQGTTSSRAIVFDENQKIIAESQKEYELQYPNDGWVEANPDEILSSVNETIKEALESADVDIAACGITNQRETVIVWDRLTGKPIYPAIIWQDRRTSDLCNDLK

SEQ ID NO: 127298 - protein, 292 aa, Unknown
  Bacterial polypetide isolated from the Sargasso Sea
EECIFGYEIFQYSPSTFAPANIVPISSTYALGPGDKLTIDLYGVKQDSEQVTVSRDGTIYLPFMGRMNVAGLTFPEAQKAINKRAEKELIGTEVSISLDELRSITVYVLGEAYQPGVYTLSALSTVTNSLFLSGGVNKQGSLRNIQVKRGGKTVNQYDLYDMLIKGDTSTDFRLEDGDTVFIPFFESTVRVGGSFRRPYLYELLDGETLEDVISLAGGFKNEVSINPQVEYTTINRITNQRETTLITYNEETKTKLVLNGDTVNVSENSELEPLYVELTGQFKKPGVYTLSK

SEQ ID NO: 127299 - protein, 115 aa, Unknown
  Bacterial polypetide isolated from the Sargasso Sea
MKYFLVIDQGTSSTRAILFDEKFVEVNVSQTEFKQFFPKDGWVEHDANEIFDTVVSCIKDVMEKSETTHKEIIAIGITNQRETCLLWDKKGNPLGKAIVWQDRRTAELVINQKRG

SEQ ID NO: 127300 - protein, 180 aa, Unknown
  Bacterial polypetide isolated from the Sargasso Sea
LKDELKIVSSNKEIKIISKKTKKNKIYFVPAFNGLGAPYWNRNARGAIYGINRNTNKFDIINATIESIGFQTKDLLNLIEKDSKNKIKQIRVDGGIANNKDFLQFLSNILNIHILQSKYSESTALGAAYLAGIGSGIMKINKIDSHWKKENTFKSKINITERNKIYSGWLNAIDKTLYKL

SEQ ID NO: 127301 - protein, 171 aa, Unknown
  Bacterial polypetide isolated from the Sargasso Sea
KASETEKIIKKLKDNNGIYLVPAFTGLGAPHWNANSRGVLSGITRDTSPEEIVRATIEAVAYQTYDLFEAMKHDGLRPKIVKVDGGMVMNNWFSQFLSDVVNVKVLRPKVQETTAAGAAFMAGLKIGVYKSLKDISKNWKIDKNFSPKMKNTKRNALLKEWGKAVKRTLIN

SEQ ID NO: 127302 - protein, 251 aa, Unknown
  Bacterial polypetide isolated from the Sargasso Sea
VIGDQQAALVGQGCFKNGDMKSTYGTGCFLMVNTENKHYEIDEGLLTTVAYKLGDEVHYAIEGSIYSCGNIIQWLRDKMEFFANSKDSEKFLNPNGNSNNVLFLPAFNGLGAPFWNSDVRGGFYGITQDSSINDMVTAAFQSIAFQTKEITTILENYDIEINKLLVDGGMVNNNRFCQVLSDTLGKDIIQPSNVESTAIGACKVAMIASGEDLINITDHSPSIYKPNLDLVKVYEDNHAKWKGYLLNSLKN

SEQ ID NO: 127303 - protein, 189 aa, Unknown
  Bacterial polypetide isolated from the Sargasso Sea
IIDWLKNNLQVFDNYNELEDILKNTSINSEIVMVPAFTGLGAPHWKPNSRASISGLTRDSNKNEIIVSSVQSISLQTYDLMNAINEDTNKLFENPLHSIRVDGGMTENDWFMQNLSDICDIKISKSNEQEATALGAASLSALGSQEINNLKEFNVNLYKNKEFLPQMENQTREEIIKNWNKAINKTINV

SEQ ID NO: 127304 - protein, 205 aa, Unknown
  Bacterial polypetide isolated from the Sargasso Sea
MAKKLMNKKQLLFGTIDSFLIWKLTKGQIHATDATNASRTMIYNISSNKWDDTILKILKIKKHILPEVKNCADDYGHTHSSITGESIPITGVVGDQQSASIGQCCFEPGSLKSTYGTGAFVLLNTGYKKIYSKNRLLTTIGYRINGKTTYAMEGSIFIAGAGVQWLRDRMKFFKKAYETEKILKSLNDNKDVYLVPAFTGMGAPY

SEQ ID NO: 127305 - protein, 111 aa, Unknown
  Bacterial polypetide isolated from the Sargasso Sea
MNYKILTIDQGTTSSRSITYDIYGGTIESSQHEYPLIYPEDGWVEIDPQVLMDSVIKSLNDINKDDIELISITNQRETTIVWEKQSGNPIYNDDCMAGQENIAILRKHQIR

SEQ ID NO: 127306 - protein, 82 aa, Unknown
  Bacterial polypetide isolated from the Sargasso Sea
MKKYFLVIDQGTTSSRIVLYNKKFEIFDIVQKEFKQYFPNEGWVEHNATEIWEDVRNLISKILRKNKLNSKNIISIGIPIKE

SEQ ID NO: 127307 - protein, 153 aa, Unknown
  Bacterial polypetide isolated from the Sargasso Sea
YFVPAFVGLGAPYWNSKVRGVLSGLTRNTGPGEIVRAIIESTAYQSLDLLSAMKKDGLRPKFIKIDGGMVKNNWFCQFLTDVLNVKIYKSKTDETTALGAAFMAGLHVGIFKSLNDISKKWKLKSKFTPRMKNSERLYLLKGWSQAIRKTLLN

SEQ ID NO: 127308 - protein, 243 aa, Unknown
  Bacterial polypetide isolated from the Sargasso Sea
MYISIDQSTSSTTVFLYNKNLKLLNKFSKPHKQIQKVSGYVEHDANEIYKNILLLIKKISKKIKYGNNLFLSITNQRETFVIFDTITGKPLHNAIVWQCRRGQNICNKINKSTLNRNLIKKNTGLTLDTYFPAPKLIQLLNLNNNLKEKLKKGSALFGTIDTYLIYRLTKQKSYVTDFTNASRTLFFDNNSLKWSKTLLKLFSLNLNKLPEVKESSSIFGYTNVNGILKANIPISGVMGDSQA

SEQ ID NO: 127309 - protein, 101 aa, Unknown
  Bacterial polypetide isolated from the Sargasso Sea
MTVPAVLAIDQGTTGTTCLVIDADGRVLGRGYSEFKQYFPRPGWVEHDANEIWEVTLRVARDAVADASGAKVCSIGIANQRETVVLWDRETIEPVHRAIVW

SEQ ID NO: 127310 - protein, 39 aa, Unknown
  Bacterial polypetide isolated from the Sargasso Sea
MTSVLGDQQAALFGQNCINSGDVKNTYGTGCFALTNTRK

SEQ ID NO: 127311 - protein, 279 aa, Unknown
  Bacterial polypetide isolated from the Sargasso Sea
LLKLTDGRVHATDATNASRTSLFNIKTGKWDPRLLEIFNVPCQVLPVVKDSSHLFGVTAKSVLGKEIPITAILGDQQSAAVGQACFEPGSLKATFGTGGFLLINTGTKALKSKSRLLTTILFQINKKIFYAMEGSIFITGAAIQWLRDEMKTLNSAQESESLARQLESNEGVYLVPSFTGFGAPHWQPEARGAIFGITRNTGPRHLARAALESVAYQTNDIIQIMSAEGTLPTVLRADGGMVDNSWFMGFLADIANITVDVPKVKETKNLGVALMAAYA

SEQ ID NO: 127312 - protein, 178 aa, Unknown
  Bacterial polypetide isolated from the Sargasso Sea
RDKIRLIDNAYETEKIAQLKKDNEGVYVVPAFSGMGAPYWRPDARGIITGLTRNSDWKIFVRAVIESVAYQSYDLFESMKKDGLKPKIVKVDGGMVANNWFSQFLSDIINLNVVRPKVQETTALGVALLAAYQIGEFKSLNEIQNKWKKDRVFSPKLNKSARNNLLQGWKLAIRKTLA

SEQ ID NO: 127313 - protein, 97 aa, Unknown
  Bacterial polypetide isolated from the Sargasso Sea
MKYFGCIDQGTTSSRFIVFNDQGQIVASQQQEFTQYLPNEVSVEHDPIEIWDSVKNCISKVDDEFSINQLDSIGITNQRETTLAWRKSTGVPLHNAL

SEQ ID NO: 127314 - protein, 67 aa, Unknown
  Bacterial polypetide isolated from the Sargasso Sea
MKNFIVSIDQGTTSSRVILFNTKGKIEFVSQYEFKQYFPKNGWVEHNPNEIWSTTLKALKNVINRAN

SEQ ID NO: 127315 - protein, 214 aa, Unknown
  Bacterial polypetide isolated from the Sargasso Sea
MLDGIITTVAASSSGQKKQYVLEGSIFSAGSTVQWLRDQLGFFEEAAETAEIASALDDSGGVVMIPGFTGLGSPHWDEEVRGAFLGINRDTNKYHLIRAGLEAIAHQTSDVIDTFVRAGYEISELRVDGGAAANDWLMQFQANILDIPILRAEFLENTARGVAGMAGVEAGIIDLDVMSNRPGGKIFTNEIDPETRRISRERWAHALETVREFK

SEQ ID NO: 127316 - protein, 243 aa, Unknown
  Bacterial polypetide isolated from the Sargasso Sea
CFKEGMVKSTYGTGCFLLMNTGNKFIESNSKLLSTTAYNIFDKKDFALEGSIFNAGTVVQWMRDEMNFIDNASEVEVLANSSQNTIQFIPAFTGLGAPYWNSDVRGQITGITRDTSKADIAMAALKSVCYQTRDLLECLLNDTEVKRNEFTMRVDGGMSKNNLMMQLLSNITQIRVERPVNQESTAVGAAFLAGMKSGLYKDVAVAEKLWKTDKTFEPAISLDEADKQYNGWLKTVKGLINNG

SEQ ID NO: 127317 - protein, 89 aa, Unknown
  Bacterial polypetide isolated from the Sargasso Sea
TGCFLMVNTKEKIYKSEAKLLSTVGCMLGNKVSYALEGSIFSAGTSIQWLRDEMRFFDDSSKSEDLIDDEFDSKGVNFIPAFTGLGAPH

SEQ ID NO: 127318 - protein, 288 aa, Unknown
  Bacterial polypetide isolated from the Sargasso Sea
LYNAIVWQCRRGQKICDKINKSSKNQSLIKKNTGLKLDTYFPAPKLVKLLDNKKKLKEKLKNGSALFGTIDTYLIYRLTNKKSYATDYTNASRTLFFNNKSLNWSKELLKLFDLNIKMLPQVKESASIFGYTNLNQILKDKIPIAGVMGDSQASIFANQCFNKGNTKITLGTGASILTNIGNQYSYKKNTITTLSYVYNNKPSYSYECLINYAGATVSWLNSNLKIINKPQETNSIFTKTNNSNGVVFIPAFVGLSSPHWLPNSKGMIYGLTPSVNKNHIIRAALESI

SEQ ID NO: 127319 - protein, 96 aa, Unknown
  Bacterial polypetide isolated from the Sargasso Sea
MADQPLLLALDQGTSSSRAALFTASGALVASASAPLPIHYPADGWVEQDPQAIWNSQRQALIDLHNALSEEQRQAVVTCGITNQRETTVLWRRSSG

SEQ ID NO: 127320 - protein, 261 aa, Unknown
  Bacterial polypetide isolated from the Sargasso Sea
MTRTSGGSNAEPPFAYTNADSYGNYTYALTSTDLAHFGQGYDHLIVAMQSDAAGNTESTGPFQFAIDTILTRDIAITSIGGLDSVVSGNFGDNLIVGVAEAGATVEFFDGGNTKLGETTALGDDSFTYELTVNNLITLGQGGDKKITARQTDVAGNTENSQEFQFEVDTNLTPPLSVSSIGGVDSVVSGNSDDNLIVGVAEVGSTIELFDGENTKLGETTALGDDSFTYELTSDNLSTIGEGDKKDLMVLQTDVAGNTTTL

SEQ ID NO: 127321 - protein, 78 aa, Unknown
  Bacterial polypetide isolated from the Sargasso Sea
LGDQQAAAIGQACYEKGSVKSTYGTGAFLLMNTREKKIISKNKLITTICYRINNKTTYALEGSIFIAGAGVQWLRDTT

SEQ ID NO: 127322 - protein, 146 aa, Unknown
  Bacterial polypetide isolated from the Sargasso Sea
YSKNRLLTTIVYRINGKTTYALEGSIFIAGAGVQWVRDRMKFIKKASDTEKIVKSLKDNAGIYLVPAFTGIGAPYWNANARGVLSGITRDTGPKEIVRAIIESVAYQTYDLFEAMKHDGLRPKLVKVDGGMVMNNWFSQYLADMIN

SEQ ID NO: 127323 - protein, 178 aa, Unknown
  Bacterial polypetide isolated from the Sargasso Sea
LFADVSETQKMAESVSDSGGVYVVPAFVGLGAPHWDPYARGTILGLSRDTNRNHIVRASLEAIAFQSAEVLQSIAKDTSHEIKELRIDGGAAANDFLCQFQADVLGLHVNRPQILETTAMGAAFLAGLSVGIWKDQEEISKLWKQKKIFSPNISREDSARMMEGWGRAVERAKEWIVS

SEQ ID NO: 127324 - protein, 78 aa, Unknown
  Bacterial polypetide isolated from the Sargasso Sea
MGTKKKKTPWYRLNIVKKFLVAIDQGTTSTRVILFDIKGNIKFISQLEFKQYFPKNGWVEHNPNEIWQTTLKSLKKVI

SEQ ID NO: 127325 - protein, 58 aa, Unknown
  Bacterial polypetide isolated from the Sargasso Sea
MKKFIISIDQGTTSSRAILFDLKGKPIFISQKEFTQYFPRDGWVEHDPEEIWKTTLKV

SEQ ID NO: 127326 - protein, 82 aa, Unknown
  Bacterial polypetide isolated from the Sargasso Sea
CFEPGSLKSTYGTGAFVLLNTGYKKIYSKNRLLTTIAYRINGKTTYAMEGSIFIAGAGVQWLRDRMKFFKKAYETEKILRSL

SEQ ID NO: 127327 - protein, 179 aa, Unknown
  Bacterial polypetide isolated from the Sargasso Sea
MRDKIKLINNAYETEQIAKSKKNNEGVYIVPAFSGIGAPYWRSDARGLITGLTRNSDWKSLVRAVVESVAYQSFDLFESMKKDGLKPKIIKVDGGMVANNWFAQFLSDTINLKVVRPKVSETTALGVALLAGYQIREFKSLNEIKAKWKKDRVFSPKLNKSLRNKLLQGWRQAIRKTLA

SEQ ID NO: 127328 - protein, 266 aa, Unknown
  Bacterial polypetide isolated from the Sargasso Sea
MYLSIDQSTSSTTIFLYNKNLKLLNKVTKSHKQIQKGSGYVEHDTNEIFKNILFLVKKISKKIKYNSNLFLSITNQRETFVIFDKMTGKPLHNAIVWQCRRGQHICDKINKSKLNRNLIKKNTGLTLDTYFPAPKLVQLLNLNKKLKEKLKNGSALFGTIDTYLIYRLTKQKSYATDFTNASRTLFFDNKSLKWSKKLLNLFNLNLKTLPEVKESSSIFGYTNINGILNKKIPIAGVMGDSQASIFANQCFNKGNTKITLGTGASI

SEQ ID NO: 127329 - protein, 179 aa, Unknown
  Bacterial polypetide isolated from the Sargasso Sea
MELFSDAAETESMALSVPDSGGVFVVPAFVGLGAPHWDPYARGLMVGLTRDTRRSHIVRASLEAIAFQSAEVLNSISQDTYESLNELRIDGGAAANQFLCQFQADLLGLDVRRPQILETTAMGAAFLAGLAVGIWSDQQVLSNLWKEEKIFRSSIDRDTADAKMKEWLRAVERSKSWIQ

SEQ ID NO: 127330 - protein, 205 aa, Unknown
  Bacterial polypetide isolated from the Sargasso Sea
MTDLILALDQGTTSSRSILFTEKAGIRAVASEPLECRFPDSGWVEQDAEAIWETQRSTIVKVLDQAGIGLFEVSAIGITNQRESTIAWNRETGEALCPAINWQCRRTAGFCDELKEEGFDELIRNRTGLVTDPYFSGTKMHWILQNVPEAANLERQGKLCFGTVDSWLIWKLSGGKTHAIEISNASRTLVFDIQKCEWDSEILSR

SEQ ID NO: 127331 - protein, 94 aa, Unknown
  Bacterial polypetide isolated from the Sargasso Sea
MSRILTIDQGTTSSRSIIFDINGDIEQVAQEEYPLIFPNDGWVEIDPDVLYKSVTNTLNQLDLEGVKFGGITNQRETTIIWNKNTLEPIYNAIV

SEQ ID NO: 127332 - protein, 196 aa, Unknown
  Bacterial polypetide isolated from the Sargasso Sea
GKSVSYALEGFIFSAGTSIQWLRDEMQFFDDSSESEELINEDFDSRGLNFIPAFTGLGAPHWNSEIRGSIHGIQRDSSKEDIITAVFKAICFQTLEIVEALELDGVSVHSLKVDGGMVKNRKFLQLLSNTLSINVKKPDQIESTAVGAFKIALLGSGIKDIDEIQEIGSYDEVKSKQSPQLIDDYLIWKKYLTKNL

SEQ ID NO: 127333 - protein, 92 aa, Unknown
  Bacterial polypetide isolated from the Sargasso Sea
MKFVLSIDQGTTSSRAILFDQYLNPAFKAQKEFRQLFPKSCWVEHDPDEIWKSVVFVCKEVLKKANIDASQIISIGITNQRETTLVWEKNSG

SEQ ID NO: 127334 - protein, 73 aa, Unknown
  Bacterial polypetide isolated from the Sargasso Sea
MRKFIISIDAGTTSNRSILFDLKGKPIFSSQKEFTQYFPKSGWVEHNPDEIWKTTIKTLKDVIQKAKKLKGKI

SEQ ID NO: 127335 - protein, 254 aa, Unknown
  Bacterial polypetide isolated from the Sargasso Sea
GRSTCCSIWTNCLKAGQMKSTYGTGCFLMLNTGDKPIYSTDGLLTTLAFHWNGDCHYAIEGSIYSAGTIVQWLRDGLKLIHESRDCEKYLDPNFQTNNVIFTPAFNGLGAPFWNSRIRASFEGITRDTSKEDLITASLSSISYQTKEIVDCLLNIGIEINELKIDGGMSVNKWFQKHLATTINKNVLIPSNTESTALGVTIMSLMNAELTNVDIFNGISFNKVEPDADLKSYVDEDNKKWRNNLLKKLNPSPSS

SEQ ID NO: 127336 - protein, 52 aa, Unknown
  Bacterial polypetide isolated from the Sargasso Sea
MDTYISIDQGTTSSRAILFGEDGSILKTCQMEFKQIYPKPGWVEHNPEEIWE

SEQ ID NO: 127337 - protein, 97 aa, Unknown
  Bacterial polypetide isolated from the Sargasso Sea
MDKKYILSLDAGTTSSRSIIFDKNGNQIAISQYEFEQFFPNKGWVEHDPEEIWISQLKSIKNVIKLAKIDPDEIDSIGITNQRETTVIGIKKQENPI

SEQ ID NO: 127338 - protein, 288 aa, Unknown
  Bacterial polypetide isolated from the Sargasso Sea
YTNASRTMLFNIHTLSWDQDLLKLFDIPESLLPEPVACDSKFGNIEFANNPEINAVLGDQHAALFGQNCLNRGQMKSTYGTGCFLMVNTGLKPINSQDGLLTTLAFHWQNNCHYALEGSIYSAGTIVQWLRDGLMLFKESKDCENFLDENFFTNNLIFIPAFNGLGTPFWNSEIRSSFHGITRDTTKINLVTAALASVSYQTNEIVSCLSNIGIEVDELKIDGGMTVNKWFRRHLATTLNKNIMTPDNPESTALGVAIMSLINASIVDNEIFKTLNFSMTTPTKSLVG

SEQ ID NO: 127339 - protein, 181 aa, Unknown
  Bacterial polypetide isolated from the Sargasso Sea
RDEMNFINDASKVEELAKKSANTIQFIPAFTGLGAPYWNSDVRGQITGITRDTSKADIAMAALKSVCYQTRDLLECLISDTELKRNDFTIRVDGGMSKNNLIMQLLSDITQVRIERPMNQESTAMGAAYLAGMKSGVYKDVAEVEKLWKTDRKFEPAISLDEADQQYDKWLKTVKGLINNG

SEQ ID NO: 127340 - protein, 264 aa, Unknown
  Bacterial polypetide isolated from the Sargasso Sea
NQCWDDELLKLFGIPKNILPEVTASNFEFGKCKNSGLKLNAVIGDQQAALVGQQCFNKNSMKVTFGTGCFLMMNMGKEFRISNKKLLTTIAYKFNDQCIYGMEGSIFSAGTIIKWLRDNLNFFNSAKESESYINLEWNSNGVLFVPAFTGLGVPQWNPNIKASFYGITAENDKNDLVTAAFKSIVYQLKDILMIIKEDGYDISSLSIDGGMSNNRKFCQMISDILGLEILVPENVESTATGAAIVSSIRDVKQDLKDLPLPSYT

SEQ ID NO: 127341 - protein, 264 aa, Unknown
  Bacterial polypetide isolated from the Sargasso Sea
TVLVFDEKLEILKKFQKEHSQIVTQEGYIEHDLEEIYQNLLELVQKASEILPNPKFISITNQRETFTLFNEKDGKPLHNAIVWQCTRGQDICEKILNDDLKRAKIINKTGLKPNTFFSGSKLKWIYDEKEEIRRKIDNGEILFGTIETYLIYRLTNMESYVSDTTNASRTLLFNCLTNEWDQELLNIFDIKKIKLPKVINSSNIFGESDFNKIFNKIIPIIGVAGDAQASLFANFCFNKGDTKITTGTGFNIQTNIGNEMFIDE

SEQ ID NO: 127342 - protein, 180 aa, Unknown
  Bacterial polypetide isolated from the Sargasso Sea
RTGNIKEASELESLALQCDSTGGVFLVPAFTGLGSPWWDSSARGTLIGITRGTGRSEIARAAIESMVFQTRDVVESMRRVTGRPIKSLKVDGGASVMNTMLQLQAKHLQVNVSRPVSHETTALGAAYLAGLAHGFWKSMEEIASLWSVEFTAHPTDLTDKDEFTYQQWLLAVSRSLEWVV

SEQ ID NO: 127343 - protein, 95 aa, Unknown
  Bacterial polypetide isolated from the Sargasso Sea
MKKFIVSIDQGTTSSKVILYNKKFHVIDILQKEFRQFFPKNGWVEHDPLEIFKDIKFLIKKLIKKNDIKCSEIISIGIANQRETTILWDKLSGKP

SEQ ID NO: 127344 - protein, 242 aa, Unknown
  Bacterial polypetide isolated from the Sargasso Sea
MLLDPYFSATKIKWILDNVDGAKSMAEKGDLLFGTIDSYLIYVLSKEKNHLTDVTNASRTLLFNIKTMEWDNDLLELFNIPKSMMPKVLACDDNFGTLLTDDHEIPIRGVIGDQQAALVGQDCFKEGDMKSTYGTGCFLMVNTNKEPFTINEGLLTTVAYKLRDEVHYAIEGSIYSCGNIIKWLRDRMNFFSSASESEKFINNSGNSNNVLFLPAFNGLGAPFWNSDIRGGFYGITQDTTKE

SEQ ID NO: 127345 - protein, 197 aa, Unknown
  Bacterial polypetide isolated from the Sargasso Sea
MLFNINNNKWDKEILKKLNIPKSILPEVKNSADDFGETDKKITGKEIPISAVLGDQQAAAVGQTCFEKGSIKSTYGTGAFVIMNTGSKKINSKNKLLTTVCYRLNNKTTYALEGSIFIASAGVQWLRDKMKLIKKAPKTEKIAKSSKINDGIYIVPAFNGMGAPYWRPHARGLITGLTTDSNWQSLVRATVESIAYR

SEQ ID NO: 127346 - protein, 182 aa, Unknown
  Bacterial polypetide isolated from the Sargasso Sea
DAATGAPIGNAVVWLDARTAEAVKALEKARGGADAFRAVCGLPLSTYFAGVKMRWLLDNDPAVAAANKAGTLRFGTMDAWLVHRLTGGAKYVTDVTNASRTMLMRLDDQTWHEPTLAAFGVRRSALPSIVSNAEPEAFGAIAEGALRGVPITGCLGDQHAATLGQRCGVGEAKNTYGTGCFA

SEQ ID NO: 127347 - protein, 142 aa, Unknown
  Bacterial polypetide isolated from the Sargasso Sea
RNLSNILTVNRKLFDDGITSTFASIHDSCCLANQSNYDTTKVRYYHDGEYYEPHTDRPFQFLAFSYFYKEPKKFEGGELFFPKYNYEIPCDNNSMIIFPGWVEHGVKKVSIEDSDYFDGHGRYAITSFFGCKDKSKNLDKST

SEQ ID NO: 127348 - protein, 307 aa, Unknown
  Bacterial polypetide isolated from the Sargasso Sea
MYLSIDQSTSSSTVFLYNKNLKLISKFSKPHKQIQKSLGFVEHDANEIISNIFLLVRKISKKMKFKKDLFLSITNQRETFVIFDKNSGKPLHNAIVWQCRRGQKVCDKINKSKKNKNLIKKKTGLTLDTYFPASKLITLLNSNKKIKDKLKNGTALFGTIDTYLIYRLTNQKMYATDYTNASRTLFFDNSSLCWSKDLLKLFKLNLKNLPDVRESSSIFGYTNFNGIFKNHIPISGVIGDSQASIFANQCFHKGNTKITLGTGASILTNIGKTFKYNNNIITTLSYVYKNKPSYSYECLINYAGATL

SEQ ID NO: 127349 - protein, 159 aa, Unknown
  Bacterial polypetide isolated from the Sargasso Sea
MESNSGVYLVPAFTGLGCPYWDPDARGAIYGITRDTGKNEITRAAIESVAYQTRDLFKAMSEDGVSPKMLRVDGGMTDNDWLMQFLSNILDISVEVPKITETTALGVAMMAALTDGKYSTLEELSNLWSSNKSYIPKIDKSERDNLLKNWDYYVNKTLT

SEQ ID NO: 127350 - protein, 381 aa, Unknown
  Bacterial polypetide isolated from the Sargasso Sea
NIYCKELISKGYEKIVKEKTGLVLDPYFSATKIKWILENVDGAKDLAKKGDLLFGTVDSYLIYKLTEEKNHFTDVTNASRTLLFNINTMEWDEDLLNLFEIPKSMMPEVLSCDGNFGNLVFDNKKIPIRGVIGDQQAALVGQGCFKSGDMKSTYGTGCFLMVNTEDKPIVINEGLLTTVAYKLNGNVHYAIEGSIYSCGNIIKWLRDKMLFFKCAHESEKYLNINGDTNNVLFLPAFNGLGAPFWNSDIRGGFYGITQDTTINDMVTSAFNSISFQTKEITTILEKYDIKINNLLVDGGMVQNKTFCQMLSNALNKEILTPVNVESTAIGACKVCMLSSEIDINNLSKEMNSYRPDSSLQDVNLTNFDNWKTYVSKSIKTI

SEQ ID NO: 127351 - protein, 249 aa, Unknown
  Bacterial polypetide isolated from the Sargasso Sea
DQQAALFGQGCLEKGQLKSTYGTGCFIMSNVGDKPIHSDDGLLTTIGFSLNGKVFYAIEGSIYASGTTVQWLRDNLQFFDKSDQSEIYLNEDGNANNVLFIPAFTGLGAPYWNSEIRASFHGITRDTSRTDMINAAFNSVTYQTKDIIDCLIRSGIKIESLNVDGGMVANKKFIQQIANLLNIKVSIPENSESTARGVAVLAGVASKTFDLKLVSNQKRTSTHPDIEAHDFMLKDYENWKGLITKLLSP

SEQ ID NO: 127352 - protein, 87 aa, Unknown
  Bacterial polypetide isolated from the Sargasso Sea
MKNFLSIDQGTTSSRSIIFDSNLKLVKDSQKEYDLEYPHDGWVELKPENVIETVLETLEEVLSSNHDIEACGITNQRETTIVCQNYL

SEQ ID NO: 127353 - protein, 68 aa, Unknown
  Bacterial polypetide isolated from the Sargasso Sea
MKKFIVSIDQGTTSSRVVLFDTKGNIQFISQYEFKQYFPRNGWVEHNPNEIWLTTIKALKQVIKKAIS

SEQ ID NO: 127354 - protein, 157 aa, Unknown
  Bacterial polypetide isolated from the Sargasso Sea
MVPAFTGLGAPHWKPDSRASISGLTRDTNKNDIIIASIQSVSLQTYDLIKAIHEDTHDLFKKSFQGIKVDGGMTDNQWFLQNLSDICETKIIKSSEQEATALGAATLSALGSNEINELSEFNINSNENIEFLPIIKKQLRSKIIKNWGIAINKTIND

SEQ ID NO: 127355 - protein, 172 aa, Unknown
  Bacterial polypetide isolated from the Sargasso Sea
LEDILKNTSINSEIVMVPAFTGLGAPHWKPNSRASISGLTRDSNKNEIIASSVQSISLQTYDLMNAINEDTNKLFENPLNSIRVDGGMTENDWFMQNLSDICDIKISKSNEQEATALGAASLSALGSQEINDLKEFNVNLYKNKEFLPQMENQTREEIIKNWNKAINKIINV

SEQ ID NO: 127356 - protein, 168 aa, Unknown
  Bacterial polypetide isolated from the Sargasso Sea
PSAPEIENLAKNSNKNSNVYFIPAFTGLGAPYWDPEARGAIFGLSRETTKNDISQALLEAIAFQTKDIFECMSSDGVDLKSLKIDGGMVENKYFNQILADVLNLKILLPDNKEATAKGAAFLASLGSNHTNSLSDLDEFVGSYEQFTPLESRDSKYQSWKNLVTKILA

SEQ ID NO: 127357 - protein, 205 aa, Unknown
  Bacterial polypetide isolated from the Sargasso Sea
TLGFSFNKEIHYAIEGSIYSAGTVVQWLRDNLEFFAESPESEKFLNSDANANGVYFIPAFTGLGAPYWDSNIRASYHGITRDTSKKDLINAAFNSISYQTKDIVDCLEQTNIEVKSLSVDGGMAANKTFVSHVANILNIPIQVPKNTESTAKGVACLAGITTGLMNIDLIENQEKTVCNPNNALNQSMEKDYKEWKKLIKKNVSP

SEQ ID NO: 127358 - protein, 311 aa, Unknown
  Bacterial polypetide isolated from the Sargasso Sea
INKAKKLKGHILTLGITNQRETTILWNKKTGKPIYNAIVWQDRRTQDYCKLLKKKNYENLFRNKTGLFIDPYFSATKIKWILDNVKSSKKLLSSNDLLFGTVDTFLIWKLTKGKQHLTEASNASRTMLYNINSNKWDKEILKKLNIPQKILPEVKNSADNFGKTDKKITGVEISISAVLGDQQAAAFGQTCFEKGSIKSTYGTGAFVIMNTGLKKINSKNKLLTTICYRLNNKNTYALEGSIFIAGAGVQWLRDKVKLIKKAPETEKISKSSKVNDGVFVVPAFSGMGAPYWRPDARGVITGLTRDSDGKV

SEQ ID NO: 127359 - protein, 315 aa, Unknown
  Bacterial polypetide isolated from the Sargasso Sea
ILNSVKETIKKALETSEVDIAACGITNQRETVVVWDRLSGKPIYPAIIWQDRRTSDLCNDLKKNKNLENEIRKKTGLLLDPYFSATKIKWILDNVENARKMAENGELCFGTIETYLVWNLTKEKNHKTDATNASRTMLMNLETLEWDNSLLEIFNIPKSILPKICSCDDNFGSIDVSNQSFPITGVIGDQQSALFGQNCFEFGEMKSTYGTGCFLMVNTKEKIYKSEAKLLSTVGCMLGNKASYALEGSIFSAGTSVQWLRDEMRFFDDSSESEDLIDDEFDSKGVNFIPAFTGLGAPHWNSEIRGSIHGIQRDS

SEQ ID NO: 127360 - protein, 115 aa, Unknown
  Bacterial polypetide isolated from the Sargasso Sea
MKYFGAIDQGTTSSRFIVFDQNGSIVKQHQQEVTQYLPDEVSVEHDPNEIWESILNCINEVNKDFQIDQLDSIGITNQRETTLAWKKSTGEPLHNALVWQDTRTQNICDELKTIS

SEQ ID NO: 127361 - protein, 281 aa, Unknown
  Bacterial polypetide isolated from the Sargasso Sea
KKTGLFIDPYFSATKIKWILDYVKDSKKLLKSNNLLFGTVDTFLIWKLTRGKHHLTEATNASRTMLFNINNNQWDNEILKKLNISKNILPKVKNSADNFGKTDKKITGIEIPISAVMGDQQAAAVGQTCFEKGAVKTTYGTGAFVILNTGSKKINSKNKLLTTICYRLKNKNTYALEGSIFIAGAGVQWLRDKIKLINNAYETEKIVKSTKSNNKVYLVPAFSGMGAPYWRPDARGLITGLTRDSDWKNLVRATIESVAYQSYDLFSAMNKDGLKPKNCKN

SEQ ID NO: 127362 - protein, 170 aa, Unknown
  Bacterial polypetide isolated from the Sargasso Sea
SLRDKTSNVLVVPAFTGLGAPHWDPEARGAIFGITRATGINEITTATLESIAFQTRDLIEASAKDGAVIKELRVDGGMVANDWFNKQLSNLLGVKILKPKFLETTALGAAYLAGISSGLVDDFNHLQNSILVDKEISPMEAEKVSLELKYKNWLKAVEAVKLIKSNQEEI

SEQ ID NO: 127363 - protein, 320 aa, Unknown
  Bacterial polypetide isolated from the Sargasso Sea
MIKKYILSIDAGTTSSRAILFNKNAEVIEIAQYEFNQFFPKEGWVEHNATEIWNTQLKAIKDVINKSKIDPNEIDSIGITNQRETTIIWDKQTGKPVYNAIVWQDRRTASFCDELIEKNKTTLIQQKTGLVIDAYFSGTKIKWILDNTKELREKANDNKLLFGTVDTWLIWNLTNGKSHITDPSNASRTLLYNIKDDKWDKELLELFDVPENILPKVVDSSSVSTNIDKEILGVEIPISGIAGDQQAALFGQLCINEGDIKNTYGTGCFCMMNTGENFVMSKNKMLSTIAWRINGEITYALEGSVFVAGALIQWLRDQLE

SEQ ID NO: 127364 - protein, 281 aa, Unknown
  Bacterial polypetide isolated from the Sargasso Sea
MNYVLAIDQGTTSSRAILFNESMEPAFISQKEFPQYFPHSGWVEHDPDEIWESVIFVCRDVIKKSGIKSSQIVSMGITNQRETTLIWDRITGKALHRAIVWQDRRTSSICRELKDKGYEPLITKITGLLLDPYFSATKVKWLLDRNEKVRKNSMRGNYIFGTVDTFLIWKLTGGKVHATDATNASRTMLYDIGKDDWSEEICKLFGVPIEILPKVLDCADDFGVADSRFFGHKIPIRGVAGDQHAATIGQACFEPGMIKSTYGTGCFVMLNTGEGRVKSTN

SEQ ID NO: 127365 - protein, 164 aa, Unknown
  Bacterial polypetide isolated from the Sargasso Sea
SISKNSKNNSDVYFVPAFTGLGAPYWIPEARGIISGLTRDTGQNEIVKAALQSVVYQSKDLLDAMKDDGLKPSLIKVDGGMTQNDWFNQFLANVSNLKVLKPKTQETTALGAALIAALGAGIFKSLSQIAKKNRINKQFRPKMNKKIRLKLLNGWSQAIRKTII

SEQ ID NO: 127366 - protein, 349 aa, Unknown
  Bacterial polypetide isolated from the Sargasso Sea
YPKDGWVELNVEDVLRTVRETVKSVLSNNLEIEACGITNQRETTVVWSKSTGEAIYPAIVWQDRRTHKYCNNLKLEGHEETIRNKTGLVLDPYFSATKIKWILDNVNGARDKAEEGDLLFGTIDTFLIYKLTGHQNHFTDVTNASRTMLFNIHTLEWDKELLQLFDIPKSMLPEVLSCDGNFGNLNVNNTNIPIRGVIGDQQAALVGQRCMKNGDMKSTYGTGCFLMANTEEKPVSINEGLLTTVAYTLDGKTHYAIEGSIYSCGNIIKWLRDKMNFFETSEQSESYLNINGESNNVLFLPAFNGLGAPFWDSDIRGGFYGLTQDSSIQDMVTACFNSVAFQTKEITSI

SEQ ID NO: 127367 - protein, 135 aa, Unknown
  Bacterial polypetide isolated from the Sargasso Sea
MKKYIISIDAGTTSNRSILFDLKGKPVFSSQKEFTQYFPKSGWVEHNPEEIWRTTLKTLKDVIQKAKRLRGKILSIGITNQRETTVLWDKKTGKPVYNAIVWQDRRQEEFCKKLRKQNKDTMIFNKTGLLIDSYF

SEQ ID NO: 127368 - protein, 287 aa, Unknown
  Bacterial polypetide isolated from the Sargasso Sea
FSKNGWVEHNPNEILSSSIKSLKNVIRKASALKGKILTIGITNQRETTILWNKKTGKAIYNAIVWQDRRTQEYCQKLKKKKYENTFRKKTGLFIDPYFSATKIKWILENVKISKKILKSNNLLFGTVDTYLIWKLTNGKHHLTDATNASRTMLFNINNNTWDKEILKKLNVPKSILPDVKNSADNFGVTNKKIVGHEIPISAVLGDQQAAAVGQSCFEKGSIKSTYGTGAFAIMNTGSKKIFSKNKLLTTICYRLNGKNTFALEGSIFIAGAGVQWLRDKLKLINNA

SEQ ID NO: 127369 - protein, 294 aa, Unknown
  Bacterial polypetide isolated from the Sargasso Sea
ITNQRETTILWNKKTGKPVYNAIVWQDRRTHEYCEKLKQKKYENIFRRKTGLFIDPYFSATKIKWILENVKISKKLQKSNNLLFGTVDTFLIWKLTNGQHHLTEATNASRTMLFNINNNTWDKEILKKLNISKSILPDVKNSADNFGSTNKKIVGYEIPISAVLGDQQAAAVGQSCFKKGSIKSTYGTGAFVIMNTGSKKIFSKNKLLTTICYRLNGKNTFALEGSIFIAGAGVQWLRDKLKLINNASDTDQIAKSKKNNEGVYVVPAFSGLGAPYWRPDARGVITGLTRDSDW

SEQ ID NO: 127370 - protein, 214 aa, Unknown
  Bacterial polypetide isolated from the Sargasso Sea
MKKFIISIDQGTTSSRVILFDSKAKIVFKSQFEFKQYFPKNGWVEHNPKEIWLTTIKALKNVIKKASRLKGKIISIGITNQRETTILWNKKTGKPVYNAIVWQDRRTEKYCNVLKKKNYEKSFRKKTGLFIDPYFSATKIKWILDNVAETKNLVKSNNLLFGTVDTYLIWKLTNGKNHLTDATNASRTMLFNINNNKWDNEIIKKLKIPKNILP

SEQ ID NO: 127371 - protein, 293 aa, Unknown
  Bacterial polypetide isolated from the Sargasso Sea
SAEAILFDLKGNPKYTSQMEFTQYFPKDGWVEHDPEEIWSTTLKVIKNVIKKSKQLKGKIITIGITNQRETTILWDKSTGKPVYNAIVWQDRRSADYCNKLIKKKKETIIYNKTGLLIDAYFSATKIKWIIDNIPKAKQLIKQKRLLFGTVDCFLLWRLTGGTKHFTDATNASRTMLYNISSNKWDKQILDILKIPNHILPEVKDCSDDFGHTDPKITGESYSVTSMVGDQQAATIGQCCFEPGSLKSTYGTGAFVLLNTGSKIIYSKNRLLTTIGYRINGKTTYALEGSIFI

SEQ ID NO: 127372 - protein, 263 aa, Unknown
  Bacterial polypetide isolated from the Sargasso Sea
TGGKVHATDATNASRTMLFNINKNNWDNEILKIFKINKNILPIVKNSADDFGYTSKKVIGEKISISAVLGDQQAAAFGQACFEKGSVKSTYGTGAFIIMNTGNKKLISKNKLLTTICYRLNNKNTFALEGSIFVAGAGVQWLRDKIGLINNANETEKIVKSKENNDGVYIVPAFTGLGAPYWSSSSRGLITGLTRNSDWKDLVRATIESVAYQSYDLFDAMKKDGIKPKIVKVDGGMVTNNWFSQFLSNIINTKVIRPKVKET

SEQ ID NO: 127373 - protein, 204 aa, Unknown
  Bacterial polypetide isolated from the Sargasso Sea
CYRLNNKNTFAIEGSIFVAGAGVQWLRDKIRLINNAYETEKIAKLKENNDGVYIVPAFTGLGAPYWSPNSRGLITGLTRNSDWKDLVRAVIESVAYQSYDLFECMRKDGLKPKIVKVDGGMVINNWFSQFLSNIIDAKVVRPKVKETTALGAALMAGLKIGVYKSLSDISNYWKIDKKFTPKISKSNRTKLLKGWQQAIRKTLV

SEQ ID NO: 127374 - protein, 274 aa, Unknown
  Bacterial polypetide isolated from the Sargasso Sea
YPADGWVEQDPLAIWSSQLQAMQQLEDQLSQEQRAAVAACGITNQRETTVLWRSDQGQPCGPALVWQDRRTASICRHWRQQPDAESWQQRTGLVLDPYFSASKVQWLLQNNAEAAAAQADGSLRFGTVDSWLLWQLTAGSVHATDLSNASRTLLLDLDRGCWLPEACERAGLTASALPELKPCRSNFGCIAAGLPFSGVPITALLGDQQAASFGQLCLEPGQAKCTYGTGAFLVINVGPKPVRAPGGLLSTVGWTEADGSTTYCIEGSLFNAGT

SEQ ID NO: 127375 - protein, 240 aa, Unknown
  Bacterial polypetide isolated from the Sargasso Sea
KNTYGTGCFMCSNTGDKAVQSHNGLISTAACQSGTKRSYALEGSVFVGGAVVQWLRDGLRAIQRSADVEGLAASVPDSGGVVFVPSFTGLGAPYWDPTAQGAIVGLSRGTTIGHIARAALESIAFQSTALLQAMTRDAVSTISELRVDGGASANNLLLQFQADLLGIPVVRPEIIETTALGAAYLAGIATGFYRDEAEVAQQWRASRTFHPVISRDEAAHRIAQWEMAVAQVRLPTARAH

SEQ ID NO: 127376 - protein, 165 aa, Unknown
  Bacterial polypetide isolated from the Sargasso Sea
MAVVVSIDAGTTGVRSFALNEAGHQLALSYQEFTQHYPNPGWVEHDPNEIWNAVHFTLSELKDQLQEPVVAIGITNQRETVVAWNRKTGEPLCNAIVWQDLRTSHRCEQLLELGYLDQIRQTTGLLLNPYFTATKIEWLLNNNVVEHNSDLAFGTIDSWLLWKLT

SEQ ID NO: 127377 - protein, 287 aa, Unknown
  Bacterial polypetide isolated from the Sargasso Sea
MTKILTIDQGTTSSRSIVFDSNANIVEVSQKEYPLIYPEDGWVEIDPEVLIKSVTDTLGNINLDDIASAAITNQRETTIVWERDTGKPIYNAIVWQDRRTKDFCSSINDKEIRKEVSARTGLLLDPYFSATKIKWILENVEGAKKKAKEGKLCFGTVDTYLMYVLSNKKIHKTDITNASRTMLFNINTLSWDNYLLDLFDIPESMLPEVSNSDELFGTLSDCNNINVNAVLGDQQAALFGQGCLNTGSLKSTYGTGCFLMANIGAEPLASDKGLLTTIGFSFNKEIH

SEQ ID NO: 127378 - protein, 136 aa, Unknown
  Bacterial polypetide isolated from the Sargasso Sea
MSSILAIDQGTTSTRSIIFDENLKIIGTAQEEFTQHFPQSGWVEHNPKDLLGTTIGTCKSVLNSTSIDPKNVAAIGITNQRETTLVWDKNTGEPVYNAIVWQDRRTAIHCEKLRKGGHEKKVTEITGLLLDPYFSS

SEQ ID NO: 127379 - protein, 286 aa, Unknown
  Bacterial polypetide isolated from the Sargasso Sea
VEHNPDDLWNSVLRTCRKVMADLNITANDIIAIGITNQRETTLVWDKKTGKPVYNAIVWQDRRTTAYCESIYSSETEALINAKTGLLLDPYFSASKIRWILDHVPDAKQRAAAGELAFGTVDSFLLWQLTNGKVHRTDATNASRTMLFDIHHQQWDDELLTLFDIPKSMLPEVLDSSADFGVTAAEWLGGEIPVYGMAGDQQAALFGHACFDQGMAKSTYGTGCFLMLNTGDTALKSTNRLLTTVAYRLNGKVTYAIEGSIFMAGATMQWIVEGLNYFATQVKVKQ

SEQ ID NO: 127380 - protein, 259 aa, Unknown
  Bacterial polypetide isolated from the Sargasso Sea
KRERLINRKTGLLIDPYFSGTKIKWIIQNISKAKKLLKRKQLLFGTIDTFLLWRLTKGKIHSTDATNASRTMLYNINTNKWDNQVLKSLKIPVHILPVIKNSSDNFGVTHKSITGKSYPITGVVGDQQAATIGQCCFDKGSVKSTYGTGAFVLMNTGNKKIYSKNRLLTTVCYRLNGKSTYALEGSIFIAGAGVQWLRDKMKLIRSANETEKIVKSLKTNSNVYLVPAFVGLGAPYWDSNARGVLSGLTRDTGPKEIIR

SEQ ID NO: 127381 - protein, 284 aa, Unknown
  Bacterial polypetide isolated from the Sargasso Sea
AKKLLKRKQLLFGTIDTFLLWRLTKGEVHATDATNASRTMLYNINTNKWDNQILKSLKIPSHILPIIKNSSDSFGRTHKSITGKPYLITGVVGDQQAATIGQCCFEKGSVKSTYGTGAFVLMNTGYKKIYSKNRLLTTVCYRLNGKSTYALEGSIFIAGAGVQWLRDQMKFVKKASDTEKIVKSLKDNKGIYLVPAFTGIGAPYWNTKARGVLSGISRDTGPKEIVKAVIESVAYQTHDLFEAMRYDGLTPKFVKVDGGMVMNNWFSQYLSDMINVKVLRPKSS

SEQ ID NO: 127382 - protein, 118 aa, Unknown
  Bacterial polypetide isolated from the Sargasso Sea
MKKFIISIDQGTTSSRVILFNTKGKIEFISQYEFKQYFPKNGWVEHNPNEIWSTTLKALKNVINKANKIRGHIISIGITNQRETTILWNKKTGKPIYNAIVWQDRRTQEYCKKLKNKK

SEQ ID NO: 127383 - protein, 218 aa, Unknown
  Bacterial polypetide isolated from the Sargasso Sea
RSQNGLLTTIGWKLGDEVTYALEGSVFIAGALVQWLRDGLELFSDAAETESMALSVPDSGGVFVVPAFVGLGAPHWDPYARGLMVGLTRDTRRSHIVRASLEAIAFQSAEVLNGISQDTSESLNELRIDGGAAANQFLCQFQADLLGLDVRRPQILETTAMGAAFLAGLAVGTWSDQEALSNLWKEEKTFRSSIDRDTADAKMKEWLRAVERSKSWIQ

SEQ ID NO: 127384 - protein, 131 aa, Unknown
  Bacterial polypetide isolated from the Sargasso Sea
MKKKYILSIDAGTTSSRAIIFNKNAEVIEIAQYEFSQFFPKEGWVEHDAIEIWNTQLKAIKDVISKSKIDPNDIDSIGITNQRETTIIWDKQTGKPVDNAIVWQDRRTASFCDELIEKNKTSLIQQKTGLL

SEQ ID NO: 127385 - protein, 208 aa, Unknown
  Bacterial polypetide isolated from the Sargasso Sea
MSHVLAIDQGTSSSRTIIFDTQLRKVESLQEEYPLDYPKSGWVEIDPESLMASVENTLEPLLKKYKNTIEAIGITNQRESTVVWERRSGKPIYPIIVWQDRRTEDLCKKIKADGNEELIFKKTGLQVDPYFSATKIAWILDNIPEARQKAEKGDLLFGTIDTFLLWQLAGEHKTDVTNASRTMLYNINSREWDDDLLKLFNIPKTILP

SEQ ID NO: 127386 - protein, 301 aa, Unknown
  Bacterial polypetide isolated from the Sargasso Sea
LTIDPYFSATKIHWLLNNVEGAKEQALNGDLLFGTVDTFLIWKLTEGRCHKTDITNASRTMLFNIAKQQWDDDLLNIFEIPRQILPEVCDNVSDYGMTEVFGGEVSIGGVAGDQQAALIGQCCFDPGDVKSTYGTGCFMMVNSGDKILYSENKLLSTIGYRIDGKTTYALEGSIFVAGSAIQWLRDGLNFFEDSFETEAMSRKASLDSRVLVIPALTGLGAPYWDAEARGAIFGITRDTSKEDITKATLESVAFQSKDLVEAMQKDNGTFKRLMIDGGMVKYNWFCQQLCNTLSVEVSRPV

SEQ ID NO: 127387 - protein, 291 aa, Unknown
  Bacterial polypetide isolated from the Sargasso Sea
FGIPPESLPEVVPSSGVIAEVDESLFGGSAPIAGAAGDQQAALFGQACFYPGMAKNTYGTGCFMISNTGKHLVRSQNGLLTTIGWKLGDEVTYALEGSVFIAGALVQWLRDGLELFNDAAETESMALSVPDSGGVFVVPAFVGLGAPHWDPYARGLMVGLTRDTRRSHIVRASLEAIAFQSAEVLNSISQDTSESLNELRIDGGAAANQFLCQFQADLLGLDVRRPQILETTAMGAAFLAGLAVGTWSDQQVLSNLWKEEKTFRSSIDRDTADAKMKEWLRAVERSKAWIQ

SEQ ID NO: 127388 - protein, 320 aa, Unknown
  Bacterial polypetide isolated from the Sargasso Sea
KLEGYEEVIKESTGLILDPYFSATKIKWILDNVEGARNKAENGELLFGTIDSFLIYNLTKEKNHFTDVTNASRTLLFNIKSMKWDDELLKLFDIPKSMMPKVLSCDSTFGTLSIDGNNIPIRGVIGDQQAALVGQNCFKSGDMKSTYGTGCFLMVNTEEKIYKIDEGLLTTVAYKLEGKIHYAIEGSIYSCGNIIKWLRDKMKFFDKSKESEKFLNRNGCSNNVLFLPGFNGLGAPFWNSDVRGGFYGLTQDTSINDLVTSAFQAITFQTKEITTILEDYDIQISKLLVDGGMVNNNKFCQALSDTLEKEIVKPSKCRVY

SEQ ID NO: 127389 - protein, 222 aa, Unknown
  Bacterial polypetide isolated from the Sargasso Sea
MTVSAVLAIDQGTTGTTCLVIDADGRVLGRGYSEFKQHFPRNGWVEHDANEIWEVTLRVARDAVAEASGAEVCSIGIANQRETVVLWDRETIEPVHRAIVWQDRRTAPMCRSLKEAGHEEEVRRRTGLVLDPYFSGTKISWLLESDPEIRRKAEEGLLAAGTVDSWLIAKLTSGGSHLTDPTNASRTLLFNLHDSSWDHWALDLLGVPAGLLPEVRASSGGV

SEQ ID NO: 127390 - protein, 267 aa, Unknown
  Bacterial polypetide isolated from the Sargasso Sea
DPSITGKSIPITGVVGDQQSATIGQCCFEPGSLKSTYGTGAFILLNTGSRKIYSKNRLLTTIGYRLNGKTTYALEGSIFIAGAGVQWLRDRMKFVNRASDTEKIVKSLKDNSGIYLVPAFTGLGAPHWNANARGVLSGVTRDTGPKEIVRAIIESVGYQTYDLFEAMRHDGLRPKIVKVDGGMVMNNWFSQFLADINNVKVLRPKIHETTALGASFMAGLKIGVYKSLKDISKRWSLDKQFSPKVSNKFRMNLIKGWNVAVKRTLIT

SEQ ID NO: 127391 - protein, 286 aa, Unknown
  Bacterial polypetide isolated from the Sargasso Sea
AQRRAVVSCGITNQRETTVLWRRSSGNPCGPALVWQDGRTADICQAWKADGLEAAWCQRTGLLLDPYFSASKIRWMLEHHPEAAAAAAQDDLCFGTVESWLLWNLTGGQRHGSDMSNASRTLLMDLEQRCWMDEFREQTDLPANALPELLPCRGEFGHIAAELPFAGLTIQAMLGDQQAATLGQLCLQPGEAKCTYGTGAFLVINTGDSIRRSSAGLLSTLGWTDASGTPTYCLEGSLFNAGTVVQWLRDGLKIIERADEVNALAQSVPDSGGVMLVPAFTGWGTP

SEQ ID NO: 127392 - protein, 284 aa, Unknown
  Bacterial polypetide isolated from the Sargasso Sea
MNLFNIPMSMMPEVKDCDSEFGTLSISDTEIPIKGVIGDQQAALVGQNCFKDGDMKSTYGTGCFLMVNTNQNIISVDEGLLTTVAYKINNEVHYAIEGSIYSCGNIIKWLRDKMKFFENSEDSEDFLRKDGNSNNVLFLPAFNGLGAPYWNSEIRGGFYGITQDTSIEDMTTAAFQSVAFQTKDITNILSLYDIKIQKLLVDGGMVSNKTFCQVLADTLQIEIVKPKNVESTAIGACKVAMLSSGISIENLSKNEIPYKVNKDRRDVYFRNYSKWQEYLLNTIK

SEQ ID NO: 127393 - protein, 176 aa, Unknown
  Bacterial polypetide isolated from the Sargasso Sea
MDTYISIDQGTTSSRAILFGEDGSILKTCQMEFEQIYPKPGWVEHNPEEIWETTKSVLKDLYHSNIAKKHKIRGIGITNQRETTILWDKKSGKPIYNAIVWQDRRTSDFCKSLVKQGLEETVMNKSGLVIDPYFSATKIKWILDNVHGARSKAENNEICFGTVDSFLLWKLTGGKV

SEQ ID NO: 127394 - protein, 282 aa, Unknown
  Bacterial polypetide isolated from the Sargasso Sea
GHITSIGITNQRETTILWNKKTGKPIYNAIVWQDRRTQEYCKKLKNKNYENIFRKKTGLFIDPYFSATKVKWILDNVKGSKKLLKSKNLLFGTVDTFLIWKLTKGKQHLTEATNASRTMLFNINNNKWDQEILKKLNIPKSILPAVKNSADDFGKTDKKITGKEIPIAAVLGDQQAAAVGQTCFEKGSIKSTYGTGAFVIMNTGPKKINSKNKLLTTICYRLNNKTTYALEGSIFIAGAGVQWLRDKMKLIKKAPETEEIAKASKINDGIYVVPAFSGMGAP

SEQ ID NO: 127395 - protein, 248 aa, Unknown
  Bacterial polypetide isolated from the Sargasso Sea
ITNQRETTIVWSKETGIPIYPAIVWQDRRTNDLCESMRSIELDNLIKEKTGLILDPYFSATKIKWILDNVEGARKKAENGELLFGTVDTFLIYNLTSEQNHFTDITNASRTMLFNIVEKKWDEELLKLFDIPISMMPTVKSCDAYYGTIKKNDKKIPINGVIGDQQSALVGQGCFQKGDIKSTYGTGCFLIANTGDEVVNVKEGLLTTIGYELNNEVCYALEGSIYSCGTLVKWLRDQMKLFNKASES

SEQ ID NO: 127396 - protein, 95 aa, Unknown
  Bacterial polypetide isolated from the Sargasso Sea
MKKFIISIDAGTTSNRSILFDLKGKPVFSSQKEFTQYFPKSGWVEHNPEEIWRTTLKTLKDVIQRAKRLRGEILSIGITNQRETTVLWDKKTGKP

SEQ ID NO: 127397 - protein, 235 aa, Unknown
  Bacterial polypetide isolated from the Sargasso Sea
TTKTALNDLYQSEIAKKHNIRGIGITNQRETTILWDKKSGKPLYNAIVWQDRRTSDFCKSLVKQGLEETVMNKSGLVIDPYFSATKIKWILDNVPEARSKAENNEICFGTVDSFLLWKLTGGKVHATDATNASRTSLYNIESLEWDNELLKIFDVPKSLMPDVMDSNSHFGDTSNDIMNFELPVLSILGDQQAAAVGQACFKPGSIKSTYGTGCFVIINSGSKIIKSNSRLLGTI

SEQ ID NO: 127398 - protein, 276 aa, Unknown
  Bacterial polypetide isolated from the Sargasso Sea
DRDLNVIHSQQKEYSLKYPNDGWVEIEPDELMASVHNTLDPVIEACSEITALGITNQRETTLVWDASSGKPIYNAIVWQDRRTAQDCMRLKKDGQEEIIKNKTGLLLDPYFSATKISWILDNVDGARKKAINGELRFGTVDTYLLWQLSDGAIYKTDLTNASRTNLFNIHSKVWDQELLDIFNIPSSMLPEVHSSDSVFGEISRKNIKIMISGVIGDQQSALVGQKCFEPGQMKATFGTGCFLMVNTGEKSNPSSSGLLNTIGYGISNENPYALEG

SEQ ID NO: 127399 - protein, 269 aa, Unknown
  Bacterial polypetide isolated from the Sargasso Sea
FGQIREGLPFAGLPIQALLGDQQAATLGQLCLEPGEGKCTYGTGAFLVINTGERIRRSDAGLLSTLGWTDAAGTPTYCLEGSLFNAGTVVQWLRDGLQIIDSADEVNRLAMEVPDSGGVMLVPAFTGWGTPHWDPQARGLMVGLTRDSSRGHIARAALEGIALSVATLVELAENALGKSLGELAVDGGAAASDPLLQAQADSTGLTVRRPASLESTARGVALFAGLQAGVVTDLHDLAQQRSEGADRFEPQIDTSARTAWRRRWNDAVT

SEQ ID NO: 127400 - protein, 255 aa, Unknown
  Bacterial polypetide isolated from the Sargasso Sea
MKKFIVSIDQGTTSSRAVLFDTKGNIKFISQYEFKQYFPRNGWVEHNPNEIWSTTIKALKQVIKTAKSLKGHILTIGITNQRETTILWNKKTGKPIYNAIVWQDRRTQEYCKSIKNKNFENTFRKKTGLFIDPYFSATKIKWILDNVKVSKKLIKTNNLLFGTVDTFLIWKLTKGKQHLTEATNASRTMLFNINNNKWDNEILQKLKIPRSILPEVKNSADNFGKTDKRVTGKEIPISAVLGDQTAAAVGQACFE

SEQ ID NO: 127401 - protein, 319 aa, Unknown
  Bacterial polypetide isolated from the Sargasso Sea
NKIKLNQIISIGITNQRETTVLWDKITGKPVYKAIVWQDRRTADYCKRLKLKKIDKKIQKITGLLLDPYFSATKINWILKNVVNKKKLQYKNILFGTIDTWLLWKLTEGKSHLTDITNASRTMLYDANKERWSEELLKLFKIDKNILPEVKENAYNFGTTKLFGGEIEIGGMAGDQQAATIGQACFNAGQSKSTYGTGCFLLMNIGSKFKLSSNKLLTTVAFKIHGKKMFCYEGSIFVAGSAIQWLRDNMMFFKESKETDKIYSKANKYENVIVVPALTGLGAPHWQPNTRGAIFGLTRNTSKADIVKATLDSLAFQTR

SEQ ID NO: 127402 - protein, 289 aa, Unknown
  Bacterial polypetide isolated from the Sargasso Sea
RLTNGRVHATDATNASRTMLYDIEKDEWSKDLCDLMGIPKRMLPRVLNSADDYGMTCPSIFGVEIPINGIAGDQHAATIGQACFEPGMVKSTYGTGCFAMVNTGKKLRRSRKNLLSTIAYKLEGKITYALEGSIFVAGAVVQWLRDGIQIIDQAKQSGEIAVSADPSQRLYLVPAFTGLGAPYWDSEARGAIFGLTRNSGRAEISRAALESVGFQTLDLLEAMKADIPGIKESILRVDGGMSASNWTMQFISDILGSPVDRPKNLETTALGAAWLAGMHLNFYPSMSEF

SEQ ID NO: 127403 - protein, 266 aa, Unknown
  Bacterial polypetide isolated from the Sargasso Sea
LRKDGHEKRVTEITGLLLDPYFSSTKLAWILDNVDGARSKAEMGSLLFGTVDSYLIWHLTGRQSHVTDATNAARTMLYDIRNGAWSTEMCDMLNIPIKMLPEVCDCAADFGMTSPDFFGVSISVTGVAGDQHAATLGQACFEPGMMKSTYGTGCFALLNTGDAMVSSHNRMLTTIGYQLDGKTTYALEGSIFIAGAVVQWLRDGLKILAKASESGDLAKLSDNSQNLILVPAFTGLGAPYWNAECRGAVYGLTRNSGPAEFSRAAL

SEQ ID NO: 127404 - protein, 279 aa, Unknown
  Bacterial polypetide isolated from the Sargasso Sea
QLLFGTIDCFLVWRLTKGKVHATDATNASRTMIFNISSNKWDKSILKLLKIKENILPEVKDCADDYGQTHPSITGKSIPITGVVGDQQSATIGQCCFEPGSLKSTYGTGAFVLLNTGNKKIYSKNRLLTTIGYRINGKTTYAMEGSIFIAGAGVQWLRDRMKFFKKAPETEKIVKSLKSNNGIYLVPAFTGLGAPYWNANSRGVLSGITRDTNPKEIVRATIEAVAYQTYDLFEAMKHDGLRPRIVKVDGGMVMNNWFSQFLSDVVNVKVLRPKVQETT

SEQ ID NO: 127405 - protein, 248 aa, Unknown
  Bacterial polypetide isolated from the Sargasso Sea
ALFGQYGYNLNDTKCTYGTGCFILANTGKIKVDSNNGLLTTISCDKNGKPTYAIEGSVFIGGAVIQWLRDELKLIKNAQETEGIAEKLTGNDGVYIVPAFSGLGAPYWDMESKGIITGLTRGTNASHIIRAALESIAFQVNDMIKCLNSDLKCQIKTLKVDGGATLNRFLMQFQSNISNINVQKPNNIESTALGAALLSGIGSKYWIDIDDLKKQKKDTVYLPKMNDTSREKILQEWKQAVEKCLQSN

SEQ ID NO: 127406 - protein, 111 aa, Unknown
  Bacterial polypetide isolated from the Sargasso Sea
MSFILAIDQGTTSSRSIIFDENLKIIGTAQEEFTQHFPHSGWVEHNPQDLLITTIDTCKSALNQKSIDPKKIAAIGITNQRETTLVWDKNKGEPVYNAIVWQDRRTATYCE

SEQ ID NO: 127407 - protein, 215 aa, Unknown
  Bacterial polypetide isolated from the Sargasso Sea
MNENNLLVGTIDTWLIWNFTKGECHYTDVTNASRTMLYNINEDCWDDELLKIFNINKNILPDVKNCVDDFGSIDSSLFGEKISIGGVAGDQQAATIGQACFKEGMVKSTYGTGCFLLMNTGNKFIESKSKLLSTKAYNIFDKKDFALEGSIFNAGTVVQWMRDEMNFINDASKVEELANNSTNEIQFIPAFTGLGAPYWNSDVRGQITGITRDTF

SEQ ID NO: 127408 - protein, 175 aa, Unknown
  Bacterial polypetide isolated from the Sargasso Sea
IKSSSEMKKVALSVGDTNGVYLVPAFSGLGAPHWDPHAKGIILGLTRGTNRGHIARAALESIAYQSLDLLKAMESDSKIRLTQLRVDGGACVNNLLLQFQTDLIRVPLIRPQTIETTALGAAYLAGLSVGFWKNKEEISLQWRSERMFHPVKAKNEMESLYLGWQNAVEISKSKN

SEQ ID NO: 127409 - protein, 297 aa, Unknown
  Bacterial polypetide isolated from the Sargasso Sea
TNASRTMIYNISSNKWDETILNLLKIKKHILPEVKDCADDYGQTHSSITGKSIPINGVVGDQQSATIGQCCFEPGSLKSTYGTGAFVLLNTGSKKIYSKNRLLTTIAYRINGKTTYAMEGSIFIAGAGVQWLRDRMKFFKKAPETEKIVKSLKDNNNIYLVPAFTGLGAPYWDANARGVLSGITRDTSPKEIVRATIEAVAYQTYDLFEAMKHDGLRPKIVKVDGGMVMNNWFSQFLSDIVNVKVLRPTVQETTALGAAFMAGLQIGVYKSLKDISKNWHLDKKFSPKMEKSYKKLT

SEQ ID NO: 127410 - protein, 182 aa, Unknown
  Bacterial polypetide isolated from the Sargasso Sea
MSLSGYILSIDQGTTSSRALILNELGQILAQKNIEFKQYYPENGWVEHDPVEILKTTTDAIKQVLAELKINAQDVVVAGITNQRETIVAWDKLTGKPIYNAIVWQDRRTENYCNELKEKNLTDTIKSKTGLVIDPYFTATKIKWILENIDEAKECLNKGNLLVGTIDTWLIWNFTKRSEHST

SEQ ID NO: 127411 - protein, 138 aa, Unknown
  Bacterial polypetide isolated from the Sargasso Sea
MKKFIISIDAGTTSNRSILFDLKGRPIFSSQKEFTQYFPKSGWVEHNPDEIWKTTIKTLKDVIQKAKRLKGKILSIGITNQRETTVLWDKKTGKPVYKAIVWQDRRTEEFCKKLRKQNKDTMVFNKTGLLIDSYFSGT

SEQ ID NO: 127412 - protein, 306 aa, Unknown
  Bacterial polypetide isolated from the Sargasso Sea
NPDEIWRTTLKTLQDVIQKAKRLKGEILSIGITNQRETTVLWDKKTGKPVYNAIVWQDRRQEDFCKKLRKQNKDTMIFNKTGLLIDSYFSGTKIKWILDNVSKAKVLMSKKQLLFGTIDSFLIWRLTRGKTHATDATNASRTMIYNISSNQWDDTILNLLKIKKHILPEVKDCADDYGKTHSSITGKSIPINGVVGDQQSATIGQCCFEPGSLKSTYGTGAFVLLNTGSKKIYSKNRLLTTIAYRIKGKTTYAMEGSIFIAGAGVQWLRDRMKFFKKAPETEKIVKSLNNNNDIYLVPGFYWIRSA

SEQ ID NO: 127413 - protein, 270 aa, Unknown
  Bacterial polypetide isolated from the Sargasso Sea
TTSNRSILFDLKGKPVYSSQKEFTQYFPKSGWVEHDPDEIWKTTIKTLKDVITKAKKLRGKILSIGITNQRETTVLWDSKTGKPVYKAIVWQDRRQEEFCKKLRKQNKDTMIFNKTGLLIDSYFSGTKIKWILDNIPRARQLMNKKQLLFGTIDSFLIWKLTKGKVHATDATNASRTMIYNISSNKWDDTILNLLKIKKHILPEVKDCADDYGQTDSSVTGISIPINGVVGDQQSATIGQCCFEPGSLKSTYGTGAFVLLNTGNKKIYSK

SEQ ID NO: 127414 - protein, 259 aa, Unknown
  Bacterial polypetide isolated from the Sargasso Sea
QGTTSSRVVLFDTKGNIKFISQYEFKQYFPKNGWVEHNPNEIWSTTLKALKQVIKKAISLKGHVITIGITNQRETTILWNKKTGKPIYNAIVWQDRRTQEYCKSLKNKNYEKTFRKKTGLFIDPYFSATKIKWILDNVKISKKLLKTNNLLFGTVDTFLIWKLTKGKQHLTEATNASRTMLFNINNNKWDNEILQKLKIPKGILPEVKNSADNFGKTDMRVTGKEIPISAVLGDQQAAAVGQACFEKGSIKSTYGTGAF

SEQ ID NO: 127415 - protein, 125 aa, Unknown
  Bacterial polypetide isolated from the Sargasso Sea
MKYILAIDQGTTSSRAILFDDKLNMAFVAQEEFTQHFPKPGWVEHNPDDIWNSVLSVCKNVIRQAGITGNDILSIGISNQRETTLIWNKKTGKPLQNAIVWQDRRTSDICYELRTDGHQETITKI

SEQ ID NO: 127416 - protein, 220 aa, Unknown
  Bacterial polypetide isolated from the Sargasso Sea
MKYFGAIDQGTTSSRFIVFDETGSIVKQHQQEFTQYLPDEVSVEHDHNDIWESVLNCIMEVNKEFSIDQLDSIGITNQRETTLAWRKSTAEPLHNALVWQDTRTQNICDELKGLTELEESFHKTGLPIATYFSLSKILWLLRNVKEVKQAREDNDLSFGTIDSWLLFKLTGEHVTDVTNASRTLLMDLETLKWMKDILMTLDIPESSLPEIKPSLYNFGT

SEQ ID NO: 127417 - protein, 278 aa, Unknown
  Bacterial polypetide isolated from the Sargasso Sea
KGKPIYSSQQEFTQHFPKSGWVEHNPEEIWNTTKKTLKKVIAKVRDFRGNVLAIGITNQRETTVLWDKKTGKPVYNAIVWQDRRTEDYCKKLRKQNKETVIFNKTGLLIDSYFSGTKIKWILDNVPLARKLMNSKRLLFGTIDSFLIWRLTKGKVHATDATNASRTMIYNITSNKWDDSILKILKIKKHILPEVKNCADDYGSTHSSITGKPIPITGVVGDQQSATIGQCCFEPGSLKSTYGTGAFILLNTGSRKIYSKNRLLTTICYRLNGKTTYAL

SEQ ID NO: 127418 - protein, 248 aa, Unknown
  Bacterial polypetide isolated from the Sargasso Sea
MSKYLLSFDQGTTSSRAILFGLSGEVIAQSQEEFEQHFPNPGWVEHAPSDLWQTSLKCARDVLKQVGAKASDIVSIGITNQRETTLIWDRQTGEPVYPAIVWQDRRTADLCRQWEGQKNEISARTGLLLDPYFSATKIRWILDNVEGARARAEAGELAFGTVDTWLIWQLTGGRSHLTDATNACRTMLYNIHEECWDADLLSLFDIPAPLLPEVQDSASDFGKTLSGWLGGAVQIGGVAGDQQAALIG

SEQ ID NO: 127419 - protein, 186 aa, Unknown
  Bacterial polypetide isolated from the Sargasso Sea
MKNYLAIDQGTTSSRSILFNSKLEKIHDSQKEYDLSYPDDGWVELNPDDVLMTVKETLQNVLNKCAEVEACGITNQRETTIVWSRETGEPIYPGIVWQDRRTSSYCDNLKSEGHEEIIKCKTGLVLDPYFSATKIKWILDNVDGAREQAEEGKLAFGTIDSYLIYKLSIEKNHFTDVTNASKNFVI

SEQ ID NO: 127420 - protein, 221 aa, Unknown
  Bacterial polypetide isolated from the Sargasso Sea
MSLSGYILSIDQGTTSSRALILNELGQILAQKNIEFKQYYPENGWVEHDPVEILKTTTDAIKQVLAELKINAQDVVVAGITNQRETIVAWDKLTGKPIYNAIVWQDRRTENYCNELKEKNFIDTIKSKTGLVIDPYFSATKIKWIIENIEEAKECLNKGDLLVGTIDTWLIWNFTKGSEHFTDVTNASRTMLYNIVENEWDDELLDIFALPKSILPHVKNS

SEQ ID NO: 127421 - protein, 251 aa, Unknown
  Bacterial polypetide isolated from the Sargasso Sea
LKGKILTIGITNQRETTILWDKKTGKHVYNAIVWQDRRTAEFCKKYRTEKKEKIINKKTGLLIDPYFSGTKIKWILENVPKAKKLAKKNRLLFGTVDTFLIWKLTKGKVHATDATNASRTMLYNITTNKWDKSILSNLKIPKNILPKVKNSSDDFGFTSKSITGISYGINGVVGDQQAAAFGQSCFQRGSVKSTYGTGAFVLMNTGNKKIYSKNKLLTTIFYKLKGKTTYALEGSIFIAGAGVQWLRDKLK

SEQ ID NO: 127422 - protein, 291 aa, Unknown
  Bacterial polypetide isolated from the Sargasso Sea
MTDLILALDQGTSSSRSILFTEKAEIRAVASEPLECRFPNSGWVEQDAEAIWETQRSTIVKVLDQAGIGLSEVSAIGITNQRESTIAWNRETGEALCPAINWQCRRTAGFCDELKEEGFDELIRNRTGLVTDPYFSGTKMHWIFQNVPEAANLARQGKLCFGTVDSWLIWKLSGGKTHAIEISNASRTLVFDIQKCEWDSEILSRFRIPPESLPEVVPSSGVIAEVDESLFRGSAPIAGAAGDQQAALFGQACFSPGMAKNTYGTGCFMISNTGKHLVRSQNGLLTTIGWK

SEQ ID NO: 127423 - protein, 273 aa, Unknown
  Bacterial polypetide isolated from the Sargasso Sea
TLPDLLGGAIAVRGIAGDQQAATIGQACFTPGMMKSTYGTGCFALLNTGATPVASKNKLLTTVAYQLDGQRTYALEGSIFVAGSAVQWLRDGLGIIRQAADTGPLADQSDPMQAVYLVPAFVGMGAPYWNPRVRGALFGLTRNTGPAELAHAALESVCYQTYDLWAAMRADWPEAQAANTVLRVDGGMTASDWTMQRLADLLDAPVDRPVIQETTALGAAYLAGLGAGLYPEPKRFADNWRLEHRFKPNMSEATRSRKLQGWSRAVQGLLASD

SEQ ID NO: 127424 - protein, 94 aa, Unknown
  Bacterial polypetide isolated from the Sargasso Sea
MADFIISIDQGTTSSRAILFNLKGKPIYSSQKEFTQYFPKSGWVEHNPEEIWSTTKKTLKKVIDKVKDFKGNILAIGITNQRETTVLWDKKTGK

SEQ ID NO: 127425 - protein, 248 aa, Unknown
  Bacterial polypetide isolated from the Sargasso Sea
LKAKRLKGKILTIGITNQRETTVLWDKKTGKTVYRAIVWQDRRQADYCKKLKNQNKETLIFNKTGLPIDSYFSGTKIKWILDNVPLAKKLMNKKQLKFGTIDSFLIWRLTKGKTHATDATNASRTMIYNISTNKWDDTILKILKIKKHILPDVKDCADNYGSTHPSITGKAIPITGVVGDQQSAAIGQCCFEPGSLKSTYGTGAFVLLNTGYKKIYSKNRLLTTIAYRIKGKTTYAMEGSIFIAGAGV

SEQ ID NO: 127426 - protein, 255 aa, Unknown
  Bacterial polypetide isolated from the Sargasso Sea
MKKFIVSIDQGTTSSRVVLFDTKGNIQFISQYEFKQYFPRNGWVEHNPNEIWLTTIKALKQVIKKAISLKGHILTIGITNQRETTILWNKKTGKPIYNAIVWQDRRTQEYCKTLKNKNYENTFRKKTGLFIDPYFSATKIKWILDNVKVSKKLLKSNNLLFGTVDTFLIWKLTKGKQHLTEATNASRTMLFNINNNKWDNEILQKLKIPKSILPEVKNSADNFGKTDKRITGIEIPISAVLGDQQAAAVGQTCLK

SEQ ID NO: 127427 - protein, 315 aa, Unknown
  Bacterial polypetide isolated from the Sargasso Sea
AILFNLSGKPIYISQKEFRQYFPKNGWVEHNPSEIWNTVKKVLLDVIVKSKKLKGKILSIGITNQRETTILWDKKTGKHVYNAIVWQDRRTEEYCKKIKKKENLIRKKTGLFIDPYFSATKIKWILENVPKASNLLKKKRLLFGTIDSFLIWKLTKGKVHATDATNASRTMLFNINKNNWDNEILKIFKINKSILPIVKNSADDFGYTSKKVIGEKISISAVLGDQQAAAFGQACFEKGSVKSTYGTGAFVIMNTGNKKLISKNKLLTTICYRLNNKNTFAIEGSIFVAGAGVQWLRDKIRLISNAYETEKIAKS

SEQ ID NO: 127428 - protein, 251 aa, Unknown
  Bacterial polypetide isolated from the Sargasso Sea
MRKFIVSIDQGTTSSRAILFDLKGKPVFVSQLEFTQYFPKDGWVEHNPEEIWSTTQKVLKKVIQKSKSLKGKILTIGITNQRETTILWDKHTGKAVYNAIVWQDRRAVEYCNKLIKQKKETLIYNKTGLLIDAYFSATKIKWIIDNVPKAKQFIKQKRLLFGTVDCFLLWRLTGGTNHFTDATNASRTMLFNIATNKWDKQILDILKIPSHILPEVKDSSDDFGHTDPKITGESYSVTGMVGDQQSATIGQ

SEQ ID NO: 127429 - protein, 199 aa, Unknown
  Bacterial polypetide isolated from the Sargasso Sea
MKKFIISIDQGTTSSRAVLFDLKGKPIFISQLEFTQYFPKDGWVEHNPEEIWSTTKKVLINVIKKSKSLKGKILTIGITNQRETTILWDKHTGKPVYNAIVWQDRRAVEYCNKLIKQKKETIIYNKTGLLIDAYFSATKIKWIIDNVPKAKKLLKQKRLLFGTVDCFLLWRLTGGTNHSTDATNASRTMLFNIVNNKWD

SEQ ID NO: 127430 - protein, 222 aa, Unknown
  Bacterial polypetide isolated from the Sargasso Sea
MKKFIISIDQGTTSSRAILFNLKGQSVYVSQTEFTQYFPKAGWVEHNPDEIWKTTLKVLRDVINQSKKLKGKILTIGITNQRETTILWDKTTGKPVYNAIVWQDRRSSEYCKKLIKQKKETIIYNKTGLLIDAYFSATKIKWIIDNVPKAKDLIKKKRLLFGTVDCFLLWKLTNGADHATDATNASRTMLFNISTNEWDNQILKILKIPREILPIVKDCSAD

SEQ ID NO: 127431 - protein, 243 aa, Unknown
  Bacterial polypetide isolated from the Sargasso Sea
QCCFDPGSLKSTYGTGAFVLLNTGSRKIYSKNRLLTTIAYRIKGKTTYAMEGSIFIAGAGVQWLRDRMKFFKNASETEKIIKSLKDNKDVYLVPAFTGMGAPYWNQNARGVLSGLTRDTGPKEIVRATVESVAYQTHDLFEAMKHDGLRPKIVKVDGGMVMNNWFAQFLSDVVNVKVLRPKVHETTALGAAFMAGLKIGAYKSLKDISKNWSLDKKFSPKMKKKSRNLLLHGWSKAIKRALIN

SEQ ID NO: 127432 - protein, 209 aa, Unknown
  Bacterial polypetide isolated from the Sargasso Sea
MSKFIISLDQGTTSSRAVLFDEKGICIAIKQKEFRQIFPQQAWVEHDPKEIWETQQAVLNEILELPEVKQGKVISIGVTNQRETTVIWNRLTGEPIYNALVWQDKRTAPICEDLREQGLVDYCKKNTGLVIDSYFSGTKIKWILDHIEGAREKAKKGELCFGTIDTWLLWNLTKGSAHATDYSNASRTLIYNISDLAWDEKMLEALQIP

SEQ ID NO: 127433 - protein, 257 aa, Unknown
  Bacterial polypetide isolated from the Sargasso Sea
KAEIIYTAQKEIGLILPHDGYVEQDPKEIWQSVLYCMNQALKQAKKLKQAVLSIGITNQRETTLIWHKKSGKAIYNAISWQDSRTGESCKRYSARNKSYIAKKTGLILNPYFSATKIKWLIEHKLKGKNLDNYAFGTIDSFLVYRLTGGKNHATDTSNASRTLIFDIKKIAYDDKLLKLFHVKKSMLPQVKNSVDDFGLTDKNLFKQEIPICSVIGDQQAATIGHCCFKAGEAKATYGTGCFVMVNTSKKIVKSKFK

SEQ ID NO: 127434 - protein, 225 aa, Unknown
  Bacterial polypetide isolated from the Sargasso Sea
MKKYILSIDQGTTSSRVILYNKNFKKIDTLQKEFKQYFPKDGWVEHDALEIWSDVKSLISRIIKKNKIKSRDIISIGITNQRETTVLWNKKTGKPINKAIVWQDRRTFNYCKKLIAEKKEPIIQKITGLLIDPYFSATKIKWILENNKKAKKVFREGNLLFGTIDTWLLWNLSEKRSHLTDITNASRTMLFDLKKDQWSKKLLKLFKIPKTILPKVVENVFDFGV

SEQ ID NO: 127435 - protein, 228 aa, Unknown
  Bacterial polypetide isolated from the Sargasso Sea
MKSIIIALDQGTTSSRAVAFDQDGMLIGIAQKEFKQHYPKPGWVEHDAMEIWNTQLEVFEQLLSNQKIDIKSIRSIGITNQRETTVVWNKKTGKPIHNAIVWQDKRTADICERLKRQNLESYVKKNTGLVLDSYFSGTKINWILKHVEGAKEASEKGELLFGTIDTWLIWKLTEGKVHATDYSNASRTLIFNIHSLQWDKKLLSTLEIPENMLPEVRNSSGDFGTFSY

SEQ ID NO: 127436 - protein, 137 aa, Unknown
  Bacterial polypetide isolated from the Sargasso Sea
MKKLIISIDQGTTSSRVILFNTKGKVEFVSQYEFKQYFPKNGWVEHNPNEIWSTTLKALKNVINKANKIKGHITSIGITNQRETTILWNKKTGKPIYNAIVWQDRRTQEYCKKLKNKNYENIFRKKTGLFLDPYFFS

SEQ ID NO: 127437 - protein, 171 aa, Unknown
  Bacterial polypetide isolated from the Sargasso Sea
DAAESEALAQRARQDNGVFLVPAFTGLGAPYWDPDARGAILGLTRDTGISEIVAAGLQSVCYQTKDLQKAMESDGARPTTIRVDGGMSRNDWVMGFLSDILGAEVERPEITETTALGAAFLAGLQAGIFDSIDDLTHCWKSDSVFTPRLTKQERDKAYDGWKAAVDRIRCS

SEQ ID NO: 127438 - protein, 251 aa, Unknown
  Bacterial polypetide isolated from the Sargasso Sea
RNRTGLVTDPYFSGTKMHWILQNVPEATNLARQGKLCFGTVDSWLIWKLSGGKTHAIEISNASRTLVFDIQKCEWDSEILSRFGIPPESLPEVVPSSGVIAEVDESLFGGSAPIAGAAGDQQAALFGQACFSPGMAKNTYGTGCFMISNTGKHLVRSQNGLLTTIGWKLGDEVTYALEGSVFIAGALVQWLRDGLELFNDAAETESMALSVSDSGGVFVVPAFVGLGAPHWDPYARGLMVGLTRDTRRSHI

SEQ ID NO: 127439 - protein, 281 aa, Unknown
  Bacterial polypetide isolated from the Sargasso Sea
FVKKFLVAIDQGTTSTRVILFDTSGNVKFTSQQEFRQYFPKNGWVEHNPNEIWKTTLNSLKKIIQKANKLNGRILSIGITNQRETTIIWNKQNGKAIYNAIVWQDRRTQQYCDSLKKNNFEKKIRNKTGLFIDPYFSATKIKWILNNVKNSKKLLKSNDLLFGTIDTFLIWKLTKGQKHLTETTNASRTMLFNINTNKWDKDILKKLKIPYKILPKIKNSADNFGSTNREIVGKEIPITAVLGDQQAAAVGQSCFQKGSIKSTYGTGAFVIMNTGSKKIYQ

SEQ ID NO: 127440 - protein, 282 aa, Unknown
  Bacterial polypetide isolated from the Sargasso Sea
MKKLIISIDQGTTSSRVILFNTKGKVEFVSQYEFKQYFPKNGWVEHNPNEIWSTTLKALKNVINKANKIKGHITSIGITNQRETTILWNKKTGKPIYNAIVWQDRRTQEYCKKLKNKNYENIFRKKTGLFIDPYFSATKVKWILDNVKESKKLLKSNNLLFGTVDTFLIWKLTKGKKHLTEATNASRTMLFNININKWDQEILKKLNIPKSILPEVKNSADDFGKTDKKITGKEIPIAAVLGDQQAAAVGQTCFEKGSIKSTYGTGAFVIMNTGPKKINQKI

SEQ ID NO: 127441 - protein, 259 aa, Unknown
  Bacterial polypetide isolated from the Sargasso Sea
ELLGDQQAATIGQACFNQGQAKSTYGTGCFLLMNIGKKFKKSSNNLLTTVAYKINGKKMYSYEGSIFVAGSAVQWLRDKLFLFKKSEETDKLYKESSKDQNIIVIPALTGLGAPHWQPNVRGAIFGLNRNTSIPEIVKATLDSLSFQTLDLIESMEKDSKIKINEIRVDGGMISNNSFIQSISNMTRIKIVRPSNIETTALGAAYLAGLHSGVLKNTIQIEKLWKKNKSFKPLIDKKEVNLKIKHWRKSLKILINLNPL

SEQ ID NO: 127442 - protein, 267 aa, Unknown
  Bacterial polypetide isolated from the Sargasso Sea
LKEVSARTGLLLDPYFSATKIKWILDNVEGAKKKAKEGKLCFGTVDAYLMYVLSNKKIHKTDITNASRTMLFNINTLSWDNYLLDLFDIPESMLPEVSNSDESFGTLSDCNNINVNAVLGDQQAALFGQGCLNAGSLKSTYGTGCFLMANIGTKPLASDKGLLTTLGFSFNKEIHYAIEGSIYSAGTVVQWLRDNLEFFAESPESEKFLNSDANANGVYFIPAFTGLGAPYWDSNIRASYHGITRDTSKKDLINAAFNSISYQTKDI

SEQ ID NO: 127443 - protein, 140 aa, Unknown
  Bacterial polypetide isolated from the Sargasso Sea
MKYIISLDQGTTSSRAILINDQGALVGIEQMEFEQIFPKPGWVEHSPMEILNSQIKVFEDLIVNNNISLDSIISLGITNQRETIVLWDKDSGKPLYNAIVWQDKRTTNICEKIKKDDLEKYIKENTGFGCRLIFFCYKNK

SEQ ID NO: 127444 - protein, 277 aa, Unknown
  Bacterial polypetide isolated from the Sargasso Sea
ITNQTEKQQSYGDKKTGKTVYKAIVWQDRRQAEYCKKLKKQNKETLIFNKTGLPIDSYFSGTKIKWILDNVSLARKLMNKKQLLFGTIDSFLIWRLTKGKVHATDATNASRTMIFNISTNKWDDTILNILKIKKHILPEVKNCADDYGSTHSSITGKSIPITGVVGDQQSASIGQCCFEPGSLKSTYGTGAFVLLNTGYKKIYSKNRLLTTIGYRINGKTTYAMEGSIFIAGAGVQWLRDRMKFFKKAFETEKILKSLKDNKDVYLVPAFTGMGAPY

SEQ ID NO: 127445 - protein, 213 aa, Unknown
  Bacterial polypetide isolated from the Sargasso Sea
SKNKLLTTICYRLNNKTTYALEGSIFIAGAGVQWLRDKIKLINNSYETEKIAKSTKSNNEVYVVPAFSGIGAPYWRPDARGLITGLTRDSDWKTLVRATVESVAYQSYDLFYSMKKDGLKPRIIKIDGGMVANNWFSQFLADVINLKVIRPKVLETTALGVALFAGYQVGEFKSLNQIKNTWKKDKAFKPKINKKLRNHILHGWKQAIKKTLA

SEQ ID NO: 127446 - protein, 253 aa, Unknown
  Bacterial polypetide isolated from the Sargasso Sea
ATKIKWILDNVEGAREKASLGQLSFGTVDTYLMSFLSDGAIHSTDMTNASRTMLYNINTLEWDHELMQLFDIPLDMMPDVKTSNADFGSLSNVNNISVCGVLGDQQAALFGQGCLDTGESKCTYGTGCFLMTNIGSKPSFNDCGLLTTIGYSINEDVIYALEGSIYSAGTIIQWLRDNLEFFTDSSDSEGLINVNANSNGVKFIPAFNGLGAPYWNSDIRASFHGITRDTNKNDLTTAAYNSIAYQTLDIVNL

SEQ ID NO: 127447 - protein, 187 aa, Unknown
  Bacterial polypetide isolated from the Sargasso Sea
AGAGVQWLRDRMKFFEKALETEKIVKSLQNNNDIYLVPAFTGLGAPYWDANARGVLSGITRDTGPKEIVRATIEAVAYQTHDLFEAMKHDGLRPKIVKVDGGMVMNNWFSQFLSDIVNVKVLRPKVQETTALGAAFMAGLKIGVYKSLKDISKNWQLDKKFSSKMKISSRKILINGWEKAIKRALIN

SEQ ID NO: 127448 - protein, 262 aa, Unknown
  Bacterial polypetide isolated from the Sargasso Sea
IGLSEVSAIGITNQRESTIAWNRETGEALCPAINWQCRRTAGFCDVLKEEGFDELIRNRTGLVTDPYFSGTKMHWILQIVPEAASLARQGKLCFGTVDSWLIWKLSGGTTHAIEISNASRTLVFDIQKCEWDSEILSRFGIPPESLPEVVPSSGVIAEVDESLFGDSAPIAGAAGDQQAALFGQACFSPGMAKNTYGTGCFMISNTGKHLIRSQNGLLTTIGWKLGNEVTYALEGSVFIAGALVQWLRDGLELFSDAAETES

SEQ ID NO: 127449 - protein, 325 aa, Unknown
  Bacterial polypetide isolated from the Sargasso Sea
SATKIKWILENVRNAKKLLKSNNLLFGTVDTFLIWKLTNGKYHLTEATNASRTLLFNINTNKWDKEILKKLKISENILPEVKNSADNFGYTNKKIIGTEIPISAVLGDQQAAAVGQSCFEKGSVKSTYGTGAFVIMNTGYKKIYSKNKLLTTICYRLNGKNTYALEGSIFIAGAGVQWLRDKLKLVDNAYDTERIAQSKKNNNEVYIVPAFSGMGAPYWRPDARGLITGLTRDSDWKILVRAVLESVAYQSHDLFNAMGKDGLKPNIVKIDGGMVENNWFSQFLANIININTERPKILETTALGVAFFAGYQIGVFKSLDQIKKK

SEQ ID NO: 127450 - protein, 284 aa, Unknown
  Bacterial polypetide isolated from the Sargasso Sea
TNQRETTILWDKYTGKPVYNAIVWQDRRSADYCNKLIKQKKETIIYNKTGLLIDAYFSATKIKWIIDNVPKAKQLIKQKRLLFGTVDCFLLWRLTGGTNHFTDATNASRTMLYNISSNKWDKQILDILKIPYHILPEVKDCSDDFGHTDPKITGESYSVTGMVGDQQAATIGQCCFEPGSLKSTYGTGAFVLLNTGNKIIYSKNRLLTTIGYRINGKTTYALEGSIFIAGAGVQWLRDKVKFLIKASDSEKIIKKLKNNCGVYLVPAFTGIGAPYWNSKSRGVL

SEQ ID NO: 127451 - protein, 124 aa, Unknown
  Bacterial polypetide isolated from the Sargasso Sea
MSRYLLAIDQGTTSSRAIVFNETGNQVAVAQQEFHQYFPKDGWVEHDAREIWDSTLAVCRGVLDKAGLQASDLAGIGITNQRETTIIWDRATGEPIHHAIVWQDRRTASLCTKLRADGYESLVV

SEQ ID NO: 127452 - protein, 221 aa, Unknown
  Bacterial polypetide isolated from the Sargasso Sea
MTKFIISIDQGTTSSRAILFNIKGRPVYSSQKEFTQYFPKSGWVEHNPEEIWNTTKKTLKDVINKSKRLKGSVLAIGITNQRETTVLWDKKTGRTVYNAIVWQDRRQAEFCKKLKKQNKETLIFNKTGLPIDSYFSGTKIKWILDNVPKAKKLMNKKQLLFGTIDSFLIWRLTKGKVHATDATNASRTMIYNISTNKWDDSILKILKIQKHILPEVKNCSD

SEQ ID NO: 127453 - protein, 267 aa, Unknown
  Bacterial polypetide isolated from the Sargasso Sea
MALDQGTTSSRTLFFSEKGEIIADSNALLACYYPQSGWVEQDAQEIWVSQSQTIREVLKKAALTMKDIAAVGITNQRETTIAWNRKTGEAITPAINWQCRRTADFCEELKHEGFNRVLKNRTGLVTDPYFSGTKMRWIMENVPEASELAQQGNLCFGTVDSWLIWKLTSGQVHATEISNASRTMVFNIDVCSWDDEILARFNIPRETLPDVKPTSGIIAEIDPDLFGGAAPIAGVAGDQQAALFGQACFETGMAKNTYGTGCFMISN

SEQ ID NO: 127454 - protein, 146 aa, Unknown
  Bacterial polypetide isolated from the Sargasso Sea
MEDDVCFGTIDSWIVYNLTGNFYTDVTNASRTLMYDLHNMEWSDDILNELSIPKHSLPEVKPSLSNFGEIVGVIKGVPITAILGDQQAALFGQNCTSKGDVKNTYGTGCFALTNTGKDIIESDNGLLTTLAYQIEGEDPLYALEGS

SEQ ID NO: 127455 - protein, 275 aa, Unknown
  Bacterial polypetide isolated from the Sargasso Sea
FSGETSLISSKNIPISGVMGDQQAAFFGQRCFQRGSTKCTYGTGCFTLINTGDEANTTSSGLLTTIAFSDGISTEYALEASIFMGGSTVQWLKDGLGIIDRSEEIEELAEKVEDANGVILVPAFTGLGAPHWDPHARGIIIGLTRDTNKNHIARSVLDAIAWQVTDVIDLMSETAEIEIDFIRVDGGAVENNLLMQIQADYLQRPVYRSSHKETTALGAAMVSSLGIKLHKNKQEIPVIASEPKIFKPKITQAMKESAQSTWYRAVKRSLSWTID

SEQ ID NO: 127456 - protein, 295 aa, Unknown
  Bacterial polypetide isolated from the Sargasso Sea
NPNEIWSTTLKALKQVIKKAISLKGHILTIGITNQRETTILWNKKTGKPVYNAIVWQDRRTQEYCKSLKNKNYENTFRKKTGLFIDPYFSATKIKWILDNVKVSKKLLKTNNLLFGTVDTFLIWKLTKGKQHLTEATNASRTMLFNINNNKWDNEILQKLKIPKGILPEVKNSADNFGKTDKRVTRKEIPISAVLGDQQAAAVGQACFEKGSIKSTYGTGAFIIMNTGSKKINSKNKLLTTICYRLNNKTTYALEGSIFIAGAGVQWLRDKIKLINNAYETEKIAKSTKSNNEVY

SEQ ID NO: 127457 - protein, 296 aa, Unknown
  Bacterial polypetide isolated from the Sargasso Sea
KETIIFNKTGLLIDPYFSGTKIKWVLDNVPLAKKLMNRKRLLFGTIDSFLIWRLTKGKIHATDATNASRTMIYNITSNKWDDTILNLFKIKKHILPEVKNCADDYGHTHPSITGKSIPISGVVGDQQSAAIGQCCFETGSLKSTYGTGAFILLNTGSRKIYSKNRLLTTICYRLNGKTTYALEGSIFIAGAGVQWLRDRMKFINKASDSEKIIKSLKDNSGIYLVPAFTGIGAPYWNANARGVLSGITRDTGPKQIVRAIIESVAYQTHDLFEAMRHDGLRPKLVKVDGGMVMNNW

SEQ ID NO: 127458 - protein, 85 aa, Unknown
  Bacterial polypetide isolated from the Sargasso Sea
MSYIVAIDQGTTSTRSILFDHNMSAINISQKEFTQYFPHSGWVEHDPEDLWNTAVSTFRDVLKKSKLTADKITAIGITNQRETTV

SEQ ID NO: 127459 - protein, 107 aa, Unknown
  Bacterial polypetide isolated from the Sargasso Sea
LLTTICYRLNGKNTFALEGSIFIAGAGVQWLRDKLKLINNASDTYQIAKSKKNNEGVYVVPAFSGLGAPYWRPDARGVITGLTRDSDWKTLVRAVLESVAYQSYDLF

SEQ ID NO: 127460 - protein, 288 aa, Unknown
  Bacterial polypetide isolated from the Sargasso Sea
QQKTGLLADPYFSATKLAWLLQHVAGAKQQAKNGELCFGTVDSYLLWQLTGGKVHATDASNASRTLLFNIHSQCWDDELLKLFDIPAALLPEVKDNAGLFGLTDSKLFGAAIPVLSMIGDQQAALLGQACVSAGMSKSTYGTGCFAVVNTGDNIISSQHKLLTTVAWRLNGNCTYALEGSIFMAGATVQWLRDKLGVIQQASETEALAEQSHYQQTELLIPAFTGLGTPYWQPEIKAALFGMTRDTGRVELAAAALCSVAYQSRDLLTAIAQDGITVDSLRVDGGMTA

SEQ ID NO: 127461 - protein, 235 aa, Unknown
  Bacterial polypetide isolated from the Sargasso Sea
  misc_feature (229)..(229): Xaa can be any naturally occurring amino acid
MDTYISIDQGTTSSRAILFGEDGSILKTCQMEFEQIYPKPGWVEHNPEEIWETTKSVLKDLYHSDITKKHKIRGIGITNQRETTILWDKKSGKPLYNAIVWQDRRTSDFCKSLVKKGLEETVMNKSGLVIDPYFSATKIKWILDNVPGARSKAEKNEICFGTVDSFLLWKLTGGKVHATDATNASRTSLYNIESLEWDNELLKIFDVPKSLMPVVMDSNSPILVIFPKXYNKCEL

SEQ ID NO: 127462 - protein, 298 aa, Unknown
  Bacterial polypetide isolated from the Sargasso Sea
YKAIVWQDRRTVNYCKELQKKGYTKKIQKITGLVIDSYFSATKIKWIIDNIESSKKLLKENRLLFGTIDTWILWKLTEGRSHYTEATNASRTMLYDITKNSWSKSLLKIFNIPASILPVVKDSVDEFGYTKIFGSKIKIGGIAGDQQAATIGQACFEPGSIKSTYGTGCFMIMNIGKNIKISKNNLLTTIAYRIEGKTTYALEGSIFIAGAAIQWLRDSLKVISSAEETEDLYKSNDKSQQIYFVPAFVGLGAPYWDGEARGAIFGMTRNTGVSELGKSAIDSVAYQTKDLIISMEKD

SEQ ID NO: 127463 - protein, 195 aa, Unknown
  Bacterial polypetide isolated from the Sargasso Sea
YALEGSIFIAGAGVQWLRDKIKLINNAYETEKIAKSRNDSKGVYIVPAFTGLAAPYWSTKARGIITGLTRDSDWKDLVRATIESVAYQTFDLFESMRKDGVNLTSVKVDGGMASNNWFTQFLSEILKIKITRSKINETTALGAAFIAGYQVGIYRSLKDIKRNWKKDRDFKPKFNNNYRNNLLQGWEQAIKKTLA

SEQ ID NO: 127464 - protein, 316 aa, Unknown
  Bacterial polypetide isolated from the Sargasso Sea
DQGTTSSRAILFGQDGTILNSFQEEFKQIYPKPGWVEHNPEEIWETTKSVLSDLYNSEIAKKNNIRGIGITNQRETTIVWDKKTGKPLYNAIVWQDRRTSDFCKKLVENGLEQKVINKSGLVIDPYFSASKIKWILDNISDAREKANKNEIFFGTVDSFLLWRLTDKKVHATDATNASRTSLYNIEKLEWDDELLSIFDVPKSMMPKVMDSNSDFGKVSKNVMNFELPILSILGDQQAAAVGQACFTPGSIKSTYGTGCFVIINSGDKIIKSKSRLLGTICYKVDGKPTYALEGSIFVAGAVVQWLRDNLKLIQNA

SEQ ID NO: 127465 - protein, 262 aa, Unknown
  Bacterial polypetide isolated from the Sargasso Sea
TTILWDKHTGAPVHNAIVWQCRRTTQRVKGLETYKDMIKEKTGLFLDPYFSATKIEWILNTIPGLTDRAAKGQVLFGTVDSWILWKLTKGAVHATDVSNASRTMLYNIHTLNYDDELLQLFSVPPAMLPEVRPSASYFGETAADITGKSIPITGIIGDQQASLFAQCGSNPKRIKNTYGTGLFVVVNTGKEIPSTSKLLNTIGWQIGDDISYALEGSIFVGGSAVQWLRDGIKLIKEAKDTEPLAESIPGNEGVYFVPALAG

SEQ ID NO: 127466 - protein, 319 aa, Unknown
  Bacterial polypetide isolated from the Sargasso Sea
MSYYIAIDCGTTSTRVITFDINFSIVHCESMDIPLIESKNNYIDQSPVDLWQLTHKCLTNTLSIIEPKKIISIGLTNQRETCMIWDKETGQPLGNAISWQCSRTSSFCKSLDEHASIIRYKTGLPIDPYFSATKYNWLINEYSESIELINKNQLHFGTVDTWLLWNLTNRAVFATDVTNASRTLLFNIRSLKYDPDLCSLFNIPIHLLPKVYSSSHNFGHYSFNNINIPITAIMGDQQAALFAQCGRNQNQIKNTYGTGLFLMANTGSSIIESDELITTIGIGVNSKVDYAIEGAVFTGGSLISWLRDNLNIIDDPEIT

SEQ ID NO: 127467 - protein, 246 aa, Unknown
  Bacterial polypetide isolated from the Sargasso Sea
EVIKEKTGLVLDPYFSASKIKWILDNVKGAREKASKGELLFGTIDSYLVYKLSKENNHFTDVTNASRTLLFNIKTMDWDDELLDLFDIPRNMMPEVLCCDGNFGHLNINNKEIPIRGVIGDQQAALVGQGCFKNGDMKSTFGTGCFLMVNTKEKPVHIEEGLLTTIAYSFNGEVNYAIEGSIYSCGNIIKWLRDKMNFFKTAKDSEKFINNNGETNNVLFLPAFNGLGAPFWDSDIRGGFYGITQD

SEQ ID NO: 127468 - protein, 303 aa, Unknown
  Bacterial polypetide isolated from the Sargasso Sea
GTTSNRSILFDIRGKPVYSSQKEFTQYFPKSGWVEHDPDEIWKTTIKTLKDVIAKAKRLRGKILSIGITNQRETTVLWDKKTGKTVYKAIVWQDRRQEEFCKKLRKKNKDTMIFNKTGLLIDSYFSGTKIKWILDNVPRAKYLMNQKQLLFGTIDSFLIWKLTKGKVHATDATNASRTMIYNISSNKWDDAILKLLKIKKHILPEVKNCADDYGYTHSTITGKPIPINGVVGDQQSAAIGQCCFEPGSLKSTYGTGAFVLLNTGNKKIYSKNRLLTTIAYRINGKTTYAMEGSIFIAGAGVQW

SEQ ID NO: 127469 - protein, 286 aa, Unknown
  Bacterial polypetide isolated from the Sargasso Sea
YCKKLKEKGLEKTIQNITGLVIDPYFSATKIKWIIDNNQTAKKILKKGDLLFGTIDTWLIWNLTERKSHITDITNASRTMLFDSKKEEWSKKLLKLFKIPEKILPKVVENSYNFGSTSLFGGKINIGGVAGDQQAATIGQACFKKGQSKSTYGTGCFLLMNIGENFKKSSNRLLTTVAFKINGKKMYCYEGSIFVAGSAIQWLRDKLLFFKNSNETDKLFKKANTKNSLVVLPALTGLGAPHWQPNTRGAIFGLTRNTSIAEIVKATLDSISFQTLDLIQCMQRDS

SEQ ID NO: 127470 - protein, 225 aa, Unknown
  Bacterial polypetide isolated from the Sargasso Sea
MEVILSIDAGTTGVRSMLVDRQGSIVMSSYREFSQYFPQAGYVEHDPMEIWVAIEETIAEVIQRFGSQPVAIGITNQRETIVCWDKKSSLPQCNALVWQDRRTSERCTQLLEDGVLPLVRESTGLVLDPYFSATKIEWIIKNRIELSESIAFGTIDSWILWKLTDGAVFATDVTNASRTMLFNIHDLCWDDNLLGIFGVSSSNLPEVFPSSGHFGTTKINHLLMQ

SEQ ID NO: 127471 - protein, 188 aa, Unknown
  Bacterial polypetide isolated from the Sargasso Sea
TNQRETVIIWDRETGRPIHRAIVWQDRRTAELCDNLKKQNNEQTVTEKTGLVLDPYFSATKINWILDNVDGARASANLGRLAFGTVDTFLLWRLTDGAVHATDITNASRTSLFNIHKKAWDDDLLKLFNVPKTLLPEVKNCTGSYGYTSPKLFGSSIPITGIAGDQQAASIGQACFKQGMVKSTYGTG

SEQ ID NO: 127472 - protein, 316 aa, Unknown
  Bacterial polypetide isolated from the Sargasso Sea
IISIDQGTTSSRAILFSLKGKPVYSSQKEFTQYFPKSGWVEHDPEEIWSTTKKTLGDVINKAQRIKGNVLAIGITNQRETTVLWDKKTGNPVYKAIVWQDRRQEQFCKKLRKQNKETLIFNRTGLLIDSYFSGTKIKWILDNVPLARKLMAKKQLLFGTIDSFLIWRLTKGKVHATDATNASRTMIYNISSNKWDDTILKILKIKKHILPEVKDCADNYGSTHPSITGKSIPIRGVVGDQQSATIGQCCFEPGSLKSTYGTGAFILLNTGPRKIYSKNRLLTTIGYRINGKTTYALEGSIFIAGAGVSWGRDRMKF

SEQ ID NO: 127473 - protein, 240 aa, Unknown
  Bacterial polypetide isolated from the Sargasso Sea
MKEKIISIDQGTTSTRSVLYDKGGNFICSAQQEFNQFFPNDGWVEHNPEDIWQSVLSTLQKLVKESGITSSEIASIGITNQRETTLIWNKKTGKPIHNAIVWQDRRTSEFCNDLVSYENIIHKKTGLTIDPYFSATKIHWLLNNVEGVKELALNGDLLFGTIDTFLIWKLTEGRCHKTDITNASRTMLFNIAEQQWDDDLLEVFEIPRQILPEVCDNVSDYGMTEILGGEVSIGGVAGDQ

SEQ ID NO: 127474 - protein, 177 aa, Unknown
  Bacterial polypetide isolated from the Sargasso Sea
EHNPEEIWSTTKKVLKDVIFKAKKLRGKILTIGITNQRETTILWDKKTGKTVYKAIVWQDRRQADYCKKLKNQNKETLIFNKTGLPIDSYFSGTKIKWILDNVPLAKKLMNKKQLMFGTIDSFLIWRLTKGKIHATDATNASRTMIYNISTNKWDDTILKILKIKKHILPRCKRLCR

SEQ ID NO: 127475 - protein, 282 aa, Unknown
  Bacterial polypetide isolated from the Sargasso Sea
TNTLNKVVNADLGIEACGITNQRETTIVWSKSSGEAIYPGIVWQDRRTHEYCSYLKSNGHESVIKEKTGLLLDPYFSATKIKWVLDNVDGAREKASKGELLFGTVDSYLIYMLSKEKNHFTDVTNASRTLLFNIKNMEWDDELLELFEIPKNMMPEVLSCDGDFGNLKINDCEIPIRGVIGDQQAALVGQGCFKNGDMKSTYGTGCFLMVNTEENPLNVDEGLLTTVAYQLDDKVHYAIEGSIYSSGTIIKWLRDKMKFFESAEDSEKYLNKRGNSNNVLFL

SEQ ID NO: 127476 - protein, 161 aa, Unknown
  Bacterial polypetide isolated from the Sargasso Sea
MKKNFIISIDQGTTSSRAILFNIKGKLIYSSQKEFTQYFPKSGWVEHNPEEIWSTTKKTLKNVISKAKRLKGKILAIGITNQRETTVMWEKKTGKAVYKAIVWQDRRQEEFCKKLRKQNKETLIFNRTGLLIDSYFSGTKIKWILDNVPLARKLMSKKQLL

SEQ ID NO: 127477 - protein, 124 aa, Unknown
  Bacterial polypetide isolated from the Sargasso Sea
MKRYILSIDQGTTSSRVVLYDNKFKIKYIEQKEFRQFFPKDGWVEHDAEEIWDDVKKLIQLTIKKNKLKTNQIASIGITNQRETTVLWNKITGKPLYKAIVWQDRRTADYCDKLKAQNKDKIIQ

SEQ ID NO: 127478 - protein, 127 aa, Unknown
  Bacterial polypetide isolated from the Sargasso Sea
MNTKILTIDQGTTSSRAVIFGENMEVLDQSQQEYPLIYPADGWVEIDPNVLLNSVIETLSAFKDEHIENVAITNQRETTLVWDKKTGNPIYNAIVWQDRRTSDYCESIKTKDVQSLVQKKTGLILDP

SEQ ID NO: 127479 - protein, 86 aa, Unknown
  Bacterial polypetide isolated from the Sargasso Sea
MKYIIALDQGTTSSRALLINEVGKLIDVKQKEFKQIFPKQGWVEHDPIEILNTQLEVFEELISSISLSDIISIGITNQRETTVIWD

SEQ ID NO: 127480 - protein, 306 aa, Unknown
  Bacterial polypetide isolated from the Sargasso Sea
SKKQLLFGTIDSFLIWRLTKGKVHATDATNASRTMIFNISTNKWDDTILNILKIKKHILPEVKNCADDYGSTHPSITGKPIPITGVVGDQQSASIGQCCFEPGSLKSTYGTGAFVLLNTGYKKIYSKNRLLTTIGYRINGKTTYAMEGSIFIAGAGVQWLRDRMKFFKKAYETEKILKSLKNNKDVYLVPAFTGMGAPYWNQHSRGVLSGLTRDTGPREIVRATIESVAYQTHDLFEAMKHDGLRPRMVKVDGGMVMNNWFSQFLSDVVNVKVYRPKVHETTALGAAFMAGLKIGAYKSLKDISKN

SEQ ID NO: 127481 - protein, 305 aa, Unknown
  Bacterial polypetide isolated from the Sargasso Sea
MKTFCETLREKNLTKLIQSKTGLIIDPYFSATKIKWIIENIDEAKIAMSQNNLLVGTIDTWLIWNFTKGECHYTDVTNASRTMLYNINEDCWDDELLNIFNINKNILPDVKNCVDDFGVIDSSFFGEKISIGGVAGDQQAATIGQTCFKEGMVKSTYGTGCFLLMNTGNKFIESESKLLSTKAYNIFDKKDFALEGSIFNAGTVVQWMRDEMNFIKDASKVEELANNSTNEIQFIPAFTGLGAPYWNSDVRGQIIGITRDTSKADIAMAALKSICYQTRDLIECLLKDTELKRSDFTIRVDGGMS

SEQ ID NO: 127482 - protein, 281 aa, Unknown
  Bacterial polypetide isolated from the Sargasso Sea
MPLVWQDRRTSEFCHELGSYENIIQKSTGLTVDPYFSASKIHWLLNNVEGARELALNGELLFGTVDTFLIWKLTEGRCHKTDITNASRTMLFNIEEQQWDDELLDIFEIPRQILPEVCDNVSDYGMTEVLGGEVSIGGVAGDQQAALIGQCCFDPGDVKSTYGTGCFMMVNSGDKILYSKNKLLSTIGYRIDGKTTYALEGSIFVAGSAIQWLRDGLNFFEDTIESEAMSKKASLDSRVLVIPALTGLGAPYWDAEARGAIFGITRDTSKEDITKATLESV

SEQ ID NO: 127483 - protein, 313 aa, Unknown
  Bacterial polypetide isolated from the Sargasso Sea
KTGKPVYNAIVWQDRRQEEFCKKLRKQNKDTMIFNKTGLLIDSYFSGTKIKWILDNVPKAKQLMNKKQLLFGTIDSFLIWRLTRGKVHATDATNASRTMIYNISSNKWDETILNLLKIKKHILPEVKDCADDYGQTHSSITGKSIPINGVVGDQQSATIGQCCFEPGSLKSTYGTGAFVLLNTGSKKIYSKNRLLTTIAYRINGKTTYAMEGSIFIAGAGVQWLRDRMKFFKKAPETEKIVKSLKDNNNIYLVPAFTGLGAPYWDANARGVLSGITRDTSPKEIVRATIEAVAYQTYDLFEAMKHDGLRQKIV

SEQ ID NO: 127484 - protein, 213 aa, Unknown
  Bacterial polypetide isolated from the Sargasso Sea
TGLLLDPYFSATKIKWILDNVKNARRKAENGELCFGTIETYLIWNLTEEKNHKTDATNASRTMLMNLETLGWDDSLLEIFGIPKNILPEICSCDDNFGSIGACDQNFPVTGVIGDQQSALFGQNCFEFGEMKSTYGTGCFLMVNTKEKIYESQARLLSTVGCMLGKSVSYALEGSIFSAGTSIQWLRDEMQFFDDSSESEELINEDFDSRGVN

SEQ ID NO: 127485 - protein, 154 aa, Unknown
  Bacterial polypetide isolated from the Sargasso Sea
MADQPLLLALDQGTSSSRAAVFDAKGDLVASATAPLPIQYPADGWVEQHPGDIWNSQRQALQDLHQQLDEEQRRAVVSCGITNQRETTVLWRRSSGSPCGPALVWQDGRTADICQAWKADGLESAWCQRTGLLLDPYFSASKIRWMLEHHPEAA

SEQ ID NO: 127486 - protein, 183 aa, Unknown
  Bacterial polypetide isolated from the Sargasso Sea
MKRFIISIDAGTTSNRSILFDLKGKPIFSSQKEFTQFFPKSGWVEHNPDEIWKTTIKTLKDVIQKAKKLKGEILSIGITNQRETTVLWDKKTGNPVYRAIVWQDRRTEEFCKKLRKQNKDTMVFNKTGLLIDSYFSGTKIKWILDNVPKARQLMSKKQLLFGTIDSFLIWRLTKGKVHATDAT

SEQ ID NO: 127487 - protein, 236 aa, Unknown
  Bacterial polypetide isolated from the Sargasso Sea
DQGTTSSRAILFDLKGKPIFTSQLEFTQYFPRDGWVEHDPEEIWKTTLKVLKEVIKKSKKLKGKVLTIGITNQRETTILWDKKTGKSVYNAIVWQDRRSSEYCKKLIKLKKETIIYNKTGLLIDAYFSATKIKWIIDNVPQARDLIKKKRLLFGTVDSFLLWKLTKGVDHATDATNASRTMLFNISTNKWDDQILKILNIPKEILPTVKDCAADFGYTDPSITGSSYPITGMVEIN

SEQ ID NO: 127488 - protein, 228 aa, Unknown
  Bacterial polypetide isolated from the Sargasso Sea
MIINTGDKKIDSTSRLLSTIAYRFNNKITYGLEGSVFVAGSSIQWLRDELGFFKNASDTESLVSSRDNTSNVLVVPAFTGLGAPHWDPEARGAIFGITRATGVKEITAATLESIAFQTRDLIEASVIDGADIKELRVDGGMVANDWFIKQLSSLLGMKILKPKFLETTALGAAYLAGISSSLVDDFNHLQNTLLVDKEISPVETENALLDIKYRNWLKAVEAIKTIKD

SEQ ID NO: 127489 - protein, 166 aa, Unknown
  Bacterial polypetide isolated from the Sargasso Sea
MKNFILSIDQGTTSTRSILFDLKGKPVFVSQKEFKQYYPQDGWVEHNPEEIWVTTKKVIKEIINKNKKIKGNILTIGITNQRETTLLWDSKTGKCIYNAIVWQDRRTTNLCNKLKKKGLENLIKSRTGLLLDPYFSATKIKWIIENIPLAKKLLKKDRLLFGTNRY

SEQ ID NO: 127490 - protein, 221 aa, Unknown
  Bacterial polypetide isolated from the Sargasso Sea
NISKNILPEVKNSADNFGFTNKKIIGQEIPISAVLGDQQAAAVGQACFAKGSVKCTYGTGAFIIMNTGSKKIYSKNKLLTTICYRINGKNTYALEGSIFIAGAGIQWLRDKLKLINNAYETEKIAKSKKNNDNVYVVPAFSGMGAPYWRPNARGLITGLTRNSDWKNLVRATIESVAYQSYDLFNSMRKDGLKPKFVKVDGGMVANNWFSQFLSDIINLNV

SEQ ID NO: 127491 - protein, 262 aa, Unknown
  Bacterial polypetide isolated from the Sargasso Sea
FGQAIPISAVLGDQQAAAIGQACFQKGTIKSTYGTGAFVIMNTGSKKIFSNNKLLTTICYRLHGKNTYALEGSIFIAGAGVQWLRDKIKLINNANETEKIIKSKKNNDGVYIVPAFSGIGAPYWRSDARGIITGLTRNSDWKSLVRAIIESVAYQSYDLFYAMKKDGLKPKLIKIDGGMVANDWFAQFLSDIINLNVIRPKVLETTALGAAFLAGYQIGEFKSLKEIQIKWKKSRIFSPKLSKSLRNNLLQGWRQAIRKTLA

SEQ ID NO: 127492 - protein, 287 aa, Unknown
  Bacterial polypetide isolated from the Sargasso Sea
DTWLLWKLTEGRSHLTDITNASRTMIYDPKKERWSEELLNLFNIDKSMLPDVKENSYNFGTTKLFGGKIEIGGMAGDQQAATIGQACFNAGQSKSTYGTGCFLLMNIGNKFKISSNKLLTTVAFKINGKKMFCYEGSIFVAGSAIQWLRDNMLFFKDSKETDKIYSQANRYEEVIVVPALTGLGAPHWEPNTRGAIFGLTRNTSQADIIKATLDSLSFQTLDLIELMERDAKIKITEIRVDGGMINNNNFLQSLSDVTQVKIIKPENIETTSLGAAYLAGLNSGLIN

SEQ ID NO: 127493 - protein, 120 aa, Unknown
  Bacterial polypetide isolated from the Sargasso Sea
MPKKIISIDQGTTSSRAVVYSDQGELIGYEQMEFSQKFPDDGWVEHDPEEIWQSVVQVLKRSIQRFDLIPSDIASIGITNQRETVVIWDKKTGKPIYNAIVWQDRRTSDFCDALKESERA

SEQ ID NO: 127494 - protein, 205 aa, Unknown
  Bacterial polypetide isolated from the Sargasso Sea
MSKIVMALDQGTTSSRTILFNEKGEIIANASAPLTCYYPQSGWVEQDPQEIWTSQSKTIQEVLKKAALTMKDITAVGITNQRETTIAWDRNTGEAITPAINWQCRRTADYCEVLKEEGFECVLRNRTGLVIDPYFSGTKMRWILENVPQAHKLAEQGNLCFGTVDSWLIWKLTSGQYHVTEISNASRTMVFNIDACSWDYEIWQN

SEQ ID NO: 127495 - protein, 253 aa, Unknown
  Bacterial polypetide isolated from the Sargasso Sea
YSSEGLLTTPAYRLDGKVTYALQGSIFMAGATIQWLRDNLKIIQNASDTELLAQELNSNAGVYLVPAFVGLGTPYWEPDARASITGLGRDSEIAHIARAALESVAYQTFDLITAMVRDSGLNIPSVRVDGGMTQNNWLMQFLANVIDITVERPTFTETTAKGAFVLAALQSNILNSISDVESAWIVDKSFESDIKESQRRQLIDGWQQAVDSVIGLSKFKSSKQPNEDQYYSEIGKKIADENLDDLMSRLMDD

SEQ ID NO: 127496 - protein, 260 aa, Unknown
  Bacterial polypetide isolated from the Sargasso Sea
MKNRNKFIVAIDQGTTSSRAILFDSNGQSLFKSQLEHKQYFPKNGWVEHNPEEIWNKTKKVLVNVINKSKNFKGEVLSIGITNQRETTILWDKLSGKPVYRAIVWQDRRTADFCKKFKSPKKELLINKKTGLFIDPYFSATKIKWIIQNVPKARKLLKKKQLLFGTIDTFLLWRLTKGKIHATDATNASRTMLYNINTNKWDEQILKSLKIPNHILPTIKNSSDFFGKTHKSITGKSYYITGVIGDQQAAAFGQCCFDKG

SEQ ID NO: 127497 - protein, 271 aa, Unknown
  Bacterial polypetide isolated from the Sargasso Sea
SVDQETTSSRAIIFDENQKVIAESQREYKLSYPKDGWVEANPRTILDTVKEVINEVLTTTGVKVACCGITNQRESVVVWNKHTGEEVYPAIIWQDRRTSEFCRSLALKKPKFEKQLRQKTGLLLDPYFSATKIQWILKNVSGAMKLAQKGDLCCGTIDSFLVWHLTEENNHLTDVTNASRTMLMDIRSCQWDQELLREFDIPESMLPEIKNNDYNFGTIKSNHSFPITGVIGDQQSALFGQDCLSSGDMKITFGTGCFLMVNTLKEIVYCK

SEQ ID NO: 127498 - protein, 310 aa, Unknown
  Bacterial polypetide isolated from the Sargasso Sea
IWGDVKNLIKKILKKNNLSSANIISIGITNQRETTILWNKNNGKPIYKAIVWQDRRTSKYCIHLKKNKKDKIIQQITGLELDPYFSATKIKWILENIKSAKSNLKKNNLMFGTIDTWLLWNLTKGKSHLTDITNASRTMIFDAKKEKWSNQMMSIFGIPKNILPKVVENSYDFGTTDLFGSSIRIGGMAGDQQAATIGQACFDKGQSKSTYGTGCFLLMNTGNKFKLSKNRLLTTVAYKIKGKKMFCYEGSIFVAGSAIQWLRDNLKFFKFSDETDKLYNKANKGENIFFVPALTGLGAPYWNPNARGTF

SEQ ID NO: 127499 - protein, 253 aa, Unknown
  Bacterial polypetide isolated from the Sargasso Sea
IEIFESVSNAVGKLLDECKIQFSSITSVGITNQRETIIAWDKTTGKPVYNAIVWQCRRTTNYCNLLIDKGLSQTIKNTTGLTIDPYFSATKISWILENVPGARTLADNGSLAFGTVDSWLVWNLSHGSSHIIDITNASRTMLFDINKLEWSDELLNIMNIPESMLPEVVPSSGKLANVSFGLNNPSLPLTGIAGDQQSALFGQGCFEPGMVKVTYGTGAFLLINTGSQLISTGKELLTTIGWSLNGHVSYALE

SEQ ID NO: 127500 - protein, 284 aa, Unknown
  Bacterial polypetide isolated from the Sargasso Sea
IKKTGKPINKAIVWQDRRTAHYCKKLKKSNNLKIIKKITGLEIDPYFSATKIKWILENNKSAKKLLKEENLLFGTIDTWLLWNLTEKKSHLTDITNASRTMIFNSQTENWSKRLLKLFKIPHSILPSVVENTFNFGTTNLFGYPINIGAMAGDQQASNIGQACFNTGQSKSTYGTGCFFLMNIGNKFKVSNHKLLTTIAFKINGKKMYCYEGSIFVAGSAIQWMRDNLNFFKDSVKTNKLYLKANKQEKIIVVPALTGLGAPHWDPNIRGAIFGLTRNTSIPDI

SEQ ID NO: 127501 - protein, 252 aa, Unknown
  Bacterial polypetide isolated from the Sargasso Sea
MGDQQAAAVGQSCFKKGSIKSTYGTGAFVIMNTGSKKIFSKNKLLTTICYRLNGKNTFALEGSIFIAGAGVQWLRDKLKLINNAHDTEQIATSKKNNEGVYVVPAFSGLGAPYWRPDARGVITGLTRDSDWKTLVRAVIESVAYQSYDLFSAMRKDGLKPNIVKIDGGMVENNWFSQFLANIIDIKTERPKVLETTALGVALFAGYQIGIFKSLDQIKRKWKKDKTFKPKLSSTMRKKLLNGWKLSVEKTLL

SEQ ID NO: 127502 - protein, 249 aa, Unknown
  Bacterial polypetide isolated from the Sargasso Sea
QSATIGQCCFEPGSLKSTYGTGAFVLLNTGSKKIYSKNRLLTTIAYRINGKTIYAMEGSIFIAGAGVQWLRDRMKFFKKAPETEKIVKSLQNNNDIYLVPAFTGLGAPYWDANARGVLSGITRDTSPKEIVRATIEAVAYQTHDLFEAMKHDGLRPKIVKVDGGMVMNNWFSQFLSDVVNVKVLRPKVQETTALGAAFMAGLYIGIYKSLKDISKNWNLDKKFSPKMKNKSRTILINGWEKAVKRALIN

SEQ ID NO: 127503 - protein, 293 aa, Unknown
  Bacterial polypetide isolated from the Sargasso Sea
TKIKWIIDNVKEVKKNLKSNNLLFGTIDTWLLWNLTNGKSHLTDISNASRTMIFDSQKEKWSDEILKILNIPKKILPTVVENTFDFGSTKLFGNEIPIGGMAGDQQSATIGQACFIKGQSKSTYGTGCFLLMNIGEKFKLSKNRLLTTVAFKINGKKMFCYEGSIFVAGSVIQWLRDNLKLIKDTGETDKLYKKANKDENLYFVPALTGLGAPYWNPNARGTFFGITRKTSKEDIIKASLDSLSFQTYELIECMEKDSKIKISEIRVDGGMVKNNSFLQKFGKCLSNKKSLGQ

SEQ ID NO: 127504 - protein, 202 aa, Unknown
  Bacterial polypetide isolated from the Sargasso Sea
MKKFIISIDQGTTSSRAILFDLKGKPVFTAQTEFTQYFPNDGWVEHNPEEIWKTTLKVLRQVISKSKKLKGKVLTIGITNQRETTILWDKASGKPVYNAIVWQDRRASEYCKKLIKQKKETIIYNKTGLLIDAYFSATKIKWIIENVPKARELIKKKRLLFGTVDSFLLWKLTNGVDHATDATNASRTMLFNISTNKWDDQI

SEQ ID NO: 127505 - protein, 142 aa, Unknown
  Bacterial polypetide isolated from the Sargasso Sea
MEYYGAIDQGTTSSRFIVFDNSGNIVEQHQEEFNQYFPDEYSVEHNPLEIWTSVVKCVDEVLKNIDKKHIRSIGISNQRETTIAWSKSTGKPLFNAIVWQDTRTQLICDDISKNKNIEEDIKRTGLPIATYFSLSKILWLID

SEQ ID NO: 127506 - protein, 201 aa, Unknown
  Bacterial polypetide isolated from the Sargasso Sea
MASIKIVKKFLVAIDQGTTSSRAILFSLSGIPIYTSQMEFTQYFPKDGWVEHDPSEIWSTTKKVLINVIEKSKKLKGKILTIGITNQRETTILWDKKTGKHVYNAIVWQDRRTAEFCKRFKTKNREKIIKKKTGLLIDPYFSGTKIKWILENIPKAKKLAKNNQLLFGTVDTFLIWKLTKGKKHFTDATNACRTMLFNISK

SEQ ID NO: 127507 - protein, 268 aa, Unknown
  Bacterial polypetide isolated from the Sargasso Sea
KAILPNVCNSSEIIGRTNKSHLGYEIPIGGIAGDQQAALFGQMCVNPGDVKNTYGTGCFCIMNTGKKPVISKNKMLTTIAWSIKNETTYAIEGSVFIAGALVQWLRDQLNIVKSSPEIEQLAKTVKNNGGVTFIPALSGLGAPFWDPHATGAIMGITRGTKKGHIARAALESIALRSRDIILEMEKDANTKFHSLKVDGGASKNNLLMQIQADLLKTKVIRPKITETTALGAAFFSGLSTEFWPSINSINDMWEEDQSFVPKLSDQKA

SEQ ID NO: 127508 - protein, 279 aa, Unknown
  Bacterial polypetide isolated from the Sargasso Sea
LLWNKKNGRPIHNAIVWQDRRTQKFCQNLKKNNYENSIRKKTGLFIDPYFSAPKIRWILDNVKESKKLLKSNNLLFGTIDTFLIWKLTKGKGHLTEATNASRTMLYNINTNQWDKNILKKLKIPYKILPEVKNSADNFGTTDKKIIGQEIPISAVLGDQQAAAIGQSCFQKGSIKSTYGTGAFVIMNTGSKKIFSKNKLLTTICYRLNGKNTYALEGSIFIAGAGVQWLRDKIKLINNAYETEKIAKSKKNNDGVYVVPAFSGIGAPYWRSDARGVITG

SEQ ID NO: 127509 - protein, 236 aa, Unknown
  Bacterial polypetide isolated from the Sargasso Sea
DVKNTYGTGCFCVMNTGDKVVKSKNKMLSTIGWRINGKITYALEGSVFVAGALVQWLRDKLEIISESSDIEELAKTVDTNGGITFIPALSGLGAPYWDPFAQGAVFGLNRGTEKGHIARAALESIALRTRDIIIEMQKDAEIEFKNLKVDGGASNNNLLMQIQSNLLGNKVVRPKTTETTAMGVAFMAGLATGFWSDISELNNLWEMDKTFNPNEDFDSKSIIDLWDKRIVKTLSD

SEQ ID NO: 127510 - protein, 239 aa, Unknown
  Bacterial polypetide isolated from the Sargasso Sea
MFFLHKRNLLNTFLKVAEVEHNPEEIWKTTVKTLKDVIQKAKKLRGKILSIGITNQRETTVLWDKKTGKAIYKAIVWQDRRTEDFCKILRKKNKDTMIFNKTGLLIDSYFSGTKIKWILDNVSKARGLMKKKQLLFGTIDSFLIWRLTKGKIHATDATNASRTMIYNISSNKWDDTILKLLKIDKNILPDVKNCADDFGATHPSITGKAIPINGVVGDQQSATIGQCCFEPGSLKSTYG

SEQ ID NO: 127511 - protein, 193 aa, Unknown
  Bacterial polypetide isolated from the Sargasso Sea
MKKFIVSIDQGTTSSRVVLFDTKGNMKFISQYEFKQFFPRNGWVEHNPNEIWSTTIKALKQVIKKAKSLKGHILTIGITNQRETTILWNKKTGKPIYNAIVWQDRRTQEYCKSLKNKNYENIFRKKTGLFIDPYFSATKIKWILDNVKVSKKLLKTNNLLFGTVDTFLIWKLTKGKQHLTEATNASRTMLFNI

SEQ ID NO: 127512 - protein, 111 aa, Unknown
  Bacterial polypetide isolated from the Sargasso Sea
MKKFIVSIDAGTTSNRAILFNLKGKPVFSSQKEFTQYFPKSGWVEHNPEEIWNTTKKVLKDVISKAKKLHGKVLAIGITNQRETTVLWDKKTGKTVYKDIVWQDRRQAEYC

SEQ ID NO: 127513 - protein, 280 aa, Unknown
  Bacterial polypetide isolated from the Sargasso Sea
MSKFFLVIDQGTTSSRIVLYDQKFEIFDFVQKEFKQYFPNEGWVEHNATEIWDDVRNLISKILKKNKLIAKNIISIGITNQRETTVLWDKKTGKPIYRAIVWQDRRTANLCEKLKRKGIDKKIQKITGLELDPYFSATKIKWIIDNVKEVNKNLKNNNLLFGTIDTWLLWNLTKGKSHLTDISNASRTMIFDSQKEKWSDEILKLFKIPKKILPTVVENAYDFGPTKLFGDAIPIGGMAGDQQSATIGQACFKKGQSKSTYGTGCFLLMNIGEKFKLSKN

SEQ ID NO: 127514 - protein, 285 aa, Unknown
  Bacterial polypetide isolated from the Sargasso Sea
LKKVIAKASKLKGNIISIGITNQRETTILWNKKTGKPVYNAIVWQDRRTQKYCEKLKKRKYEKSFRKKTGLFIDPYFSATKIKWILENIKESKKLLKSKNLLFGTVDTFLIWKLTRGKKHLTEASNASRTMLFNINNNKWDNEILRKLNIPASILPLVINSADNFGITNKKVVGKEIPISAVLGDQQAAAVGQSCFEKGSIKSTYGTGAFVIMNTGSKKIYSNNKLLTTICYRLNGKNTYALEGSIFIAGAGIQWLRDKLKLINNAYDTEKIAKSKKNNEGLYVV

SEQ ID NO: 127515 - protein, 220 aa, Unknown
  Bacterial polypetide isolated from the Sargasso Sea
MKKFIISIDQGTTSSRVILFNTKGRIEFVSQYEFKQYFPKNGWVEHNPNEIWSTTLKALKNVINKANKIRGRIISIGITNQRETTILWNKKTGKPIYNAIVWQDRRTQEYCKKLKNKKYENDFRKKTGLFIDPYFSATKVRWILDNVKESKKLLKSNNLLFGTVDTFLIWKLTKGKQHLTEATNASRTMLFNINNNKWDHEILKKLNIPEEYSAGSKKFS

SEQ ID NO: 127516 - protein, 90 aa, Unknown
  Bacterial polypetide isolated from the Sargasso Sea
MKKFLLSIDQGTTSTKVILYNKNFKVIDTQQKEFKQFFPKNGWVEHDALEIWKDVKYLVTKTIRKNNLKSSNILSIGITNQRETTVLGTK

SEQ ID NO: 127517 - protein, 260 aa, Unknown
  Bacterial polypetide isolated from the Sargasso Sea
LLFLSKILWLIDNVPTVQSSLENDDINFGTVDSWLIYKLNGTFQTDVTNASRTLLFDLDSLNWNDNLLNEFNIPTNSLPIIKPSLHNYGECKNILEGIPITAVLGDQQASLFGQHCFHKGEVKNTYGTGCFALTNTGDDIIYSNNGLLTTVAYQYGERNVKYAVEGSVAIAGAAVQWLRDNLNLIERSDQIESYALEEKNNGGVYFVPAFSGLFSPHWDETARGVLVGLTRYSNKSHICRAVLESVAYQSHDLLQAMEKD

SEQ ID NO: 127518 - protein, 186 aa, Unknown
  Bacterial polypetide isolated from the Sargasso Sea
AGAGVQWLRDKIRFIKKASDTEKIIKSLKSNNGIYLVPAFTGLGAPYWAVNARGILSGLTRDTGQKEIVRATVESVAYQTYDLFEAMKNDGLRPKIIKVDGGMVKNNWFSQFLADIVNIKVLRPKVDETTALGAAFMAGLQIGVYKSLNDISKNWQVDKGFYPRMKNSERKNLIKGWSAAIKKTLS

SEQ ID NO: 127519 - protein, 248 aa, Unknown
  Bacterial polypetide isolated from the Sargasso Sea
MQKQSGETQRSTIVKVLDQAGISLSEVPAIGITNQRESTIAWNRETGEALCPAINWQCRRTAGFCDELKEEGFDELIRNRTGLVTDPYFSGTKMHWILQNVPEAANLARQGKLCFGTVDSWLIWKLSGGTTHAIEISNASRTLVFDIQKCEWDSEILSRFGIPPESLPEVVPSSGVIAEVDESLFGGSAPIAGAAGDQQAALFGQACFSPGMAKNTYGTGCFMISNTGKHLIRSQNGLLTTIGWKLGD

SEQ ID NO: 127520 - protein, 233 aa, Unknown
  Bacterial polypetide isolated from the Sargasso Sea
MKEKIISIDQGTSSTRSVLYDKKGQYIDSVQQEFDQLFPSEGWVEHNPEQIWKTVIDTLSSLVQRNRLTSEEIASIGITNQRETTIVWNRKTGKPIYNAIVWQDRRTASFCEELVSYEKEIQKKTGLTIDPYFSATKVNWILSNVDGAAELAQKGELLFGTVDTFLIWKMTEGQKHLTDVTNASRTMLFNIVDQVWDEELLELFKIPRNMLPDVCDNVHNFGITNILGGDVSI

SEQ ID NO: 127521 - protein, 287 aa, Unknown
  Bacterial polypetide isolated from the Sargasso Sea
IKTLKDVIQKAKRLKGKILSIGITNQRETTVLWDKKTGKPVYKAIVWQDRRTEEFCKKLRNQNKDTMVFNKTGLLIDSYFSGTKIKWILDNIPKARQLMNKKQLLFGTIDSFLIWRLTKGKVHATDATNASRTMIYNISSNKWDDTILNLLKIKKHILPEVKDCADDYGQTHPSVTGKPIPINGVVGDQQSATIGQCCFEPGSLKSTYGTGAFVLLNTGSKKIYSKNRLLTTIAYRINGKTTYAMEGSIFIAGAGVQWLRDRMKFFKKAPETEKIVKSLQNNNDIYL

SEQ ID NO: 127522 - protein, 267 aa, Unknown
  Bacterial polypetide isolated from the Sargasso Sea
RQAEYCKKLKKQNKETLIFNKTGLPIDSYFSGTKIKWILDNVSLARKLMNKKQLLFGTIDSFLIWRLTKGKIHATDATNASRTMIYNISTNKWDDTILNILKIKKHILPEVKNCADDYGSTHPSITGKSIPITGVVGDQQSASIGQCCFEPGSLKSTYGTGAFVLLNTGYKKIYSKNRLLTTIGYRINGKTTYAMEGSIFIAGAGVQWLRDRMKFFKKAYETEKILKSLKDNKDVYLVPAFTGMGAPYWNQNSRGVLSGLTRDTGPK

SEQ ID NO: 127523 - protein, 275 aa, Unknown
  Bacterial polypetide isolated from the Sargasso Sea
ESPNQRESTIAWNRETGEALCPAINWQCRRTAGFCDELKEEGFDELIQNRTGLVTDPYFSGTKMHWILQNVPEATNLARQGKLCFGTVDSWLIWKLSGGKTYAIEISNASRTLVFDIQKCEWDSEILARFGIPLESLPEVFPSSGMIAEVDESLFGGSAPIAGAAGDQQAALFGQACFSPGMAKNTYGTGCFMISNTGKHLIRSQNGLLTTIGWKLGDEVTYALEGSVFIAGALVQWLRDGLELFKDAAETESMALSVPDSGGVFVVPAFVGLGA

SEQ ID NO: 127524 - protein, 238 aa, Unknown
  Bacterial polypetide isolated from the Sargasso Sea
MIVALVGALDQGTTSTRFLVVDEAGTVVASAQRPHAQHFPKPGWVEHDAVEILENTWTVIGAALATVDLAAADLAAVGITNQRETLVVWDPTTGQPLHRAIVWQDTRTAGIVDRLADGNPDRFRAATGLPLTTYFSGPRATWLLENVDGLRELGESGGAVLGTLDSWLLWNLTGGADGGRHATDVTNASRTLLMDLTTLEWDPNLLDAMDIPVAMLPQIVPSIGRLGVGVGPLAGVPI

SEQ ID NO: 127525 - protein, 92 aa, Unknown
  Bacterial polypetide isolated from the Sargasso Sea
MKKFIISIDQGTTSSRVILFDTKGNIVFVSQFEFKQYFPKNGWVEHNPNEIWFTTLKALKQVINKAKKLKGHILTIGITNQRETTILWNKKT

SEQ ID NO: 127526 - protein, 220 aa, Unknown
  Bacterial polypetide isolated from the Sargasso Sea
MSADKKYVVALDQGTTSSRAIVFDQNANIVATSQREFTQHYPKAGWVEHDPMEIWATQSSVFTEVLAKSGLHSEQIAAIGITNQRETTVVWEKATGKPIYNAIVWQCRRTAAICEELKARGLEEYVRENTGLVLDAYFSGTKVKWILDNVEGAREKAMNGELLFGTIDTWLVWKMTNGEVHVTDPTNASRTMLYNIRDLKWDQRMLDELGIPMSMLPEVK

SEQ ID NO: 127527 - protein, 249 aa, Unknown
  Bacterial polypetide isolated from the Sargasso Sea
MGKFIVALDQGTTSSRAILFNKAGKLIYSSQKEFTQYFPKDGWVEHDPNDIWRTTKKVLKDVVYKANQLKGEILTIGIANQRETTVLWNKKSGKKIYNAIVWQDRRTAEFCKKIKTKKKEKLIKKKTGLLIDPYFSSTKIKWIFDNVPKAKKLAKKNLLAFGTIDTFLIWKLTGGKVHATDATNACRTMLFNISTSKWDKEILKIFNIPFNILPEIKNSSDNFGFTLKSITGKSIPIKWSLLEINKLQL

SEQ ID NO: 127528 - protein, 287 aa, Unknown
  Bacterial polypetide isolated from the Sargasso Sea
SIDQGTTSSRAVIFSDKGELIGFEQMEFTQYFPKDGWVEHDPEEIWQSVVTVLKKSIKSFGLTASDIASIGITNQRETVVLWEKKTGKPIYNAIVWQDRRTSDFCESLRGEQDLIQQKTGLTVDPYFSASKVNWILDQVKGARKRAEKGELLFGTIDSFLIWKLTEGRDHKTDVSNASRTMLYNIEANKWDKELLSLFDVPDNLLPSVCDNSHDFGYTKLFGGEISIGGVAGDQQSALIGQCCFDVGEVKSTYGTGCFMMINTGNGIIKSSNKLLSTIAYRLEGKTT

SEQ ID NO: 127529 - protein, 122 aa, Unknown
  Bacterial polypetide isolated from the Sargasso Sea
MKEYFLVIDQGTTSSRVVLYNKKFRIFDIVQKEFNQYFPNEGWVEHDALEIWNDVKNLIKKILKKNKLLSKNIISIGITNQRETTVLWNKKTGVPIYNAIVWQDRRTSFYCSKLQKKGMQKK

SEQ ID NO: 127530 - protein, 247 aa, Unknown
  Bacterial polypetide isolated from the Sargasso Sea
MADIILAIDQGTTSSRAILFNSDGLSLGSAQKEIPQHFPDNGWVEHDPEDIWGSVLETTTLAIEESGTDVSNVKAIGITNQRETTVVWDRRTGIPIYRAIVWQDRRTTEYCENLKNDGLEDFIVAKTGLLIDPYFSATKIRWILDNVDGAREKAEAGQLAFGTVDTFLLWKLTNGESHKTDATNASRTMLYNIHDSKWDLELLELFGIPESILPEVMNSSDSFGHTCESILGSAIPIAGIAGDQQAA

SEQ ID NO: 127531 - protein, 239 aa, Unknown
  Bacterial polypetide isolated from the Sargasso Sea
MKKFIISIDQGTTSSRVILFDSKAKIVFKSQFEFKQYFPKNGWVEHDPKEIWSTTIKALKKVIKKASRLNGKILSIGITNQRETTIMWDKRTGKPVYNAIVWQDRRTQKYCNLLKSKKYENNFRKKTGLFIDPYFSATKIKWVLNNIPQTKRLIKSNNLLFGTVDTFLIWKLTNGKQHLTDATNASRTMLYNINTNEWDNEIIKKLRIPMNILPKVKNSIDDFGYSDTKITGKKIPIFA

SEQ ID NO: 127532 - protein, 303 aa, Unknown
  Bacterial polypetide isolated from the Sargasso Sea
MDQGTSSSRAAVFDAKGDLVASATAPLPIQYPADGWVEQHPGDIWNSQKQALQDLHQQLSEAQRRAVVSCGITNQRETTVLWRRSSGNPCGPALVWQDGRTADICQAWKADGLEAAWCQRTGLLLDPYFSASKIRWMLEHHPEAAAAAAQDDLCFGTVESWLLWNLTGGQRHGSDMSNASRTLLMDLEQRCWMDEFREQTDLPANALPELLPCRGEFGHIAAELPFAGLTIQAMLGDQQAATLGQLCLQPGEAKCTYGTGAFLVINTGDSIRRSSAGLLSTLGWTDASGTPTYCLEGSLFNAG

SEQ ID NO: 127533 - protein, 113 aa, Unknown
  Bacterial polypetide isolated from the Sargasso Sea
MRKFIISIDAGTTSNRSILFDLKGKPVFSSQKEFTQYFPKSGWVEHDPDEIWRTTVKTLKDVIQKAKKLRGKILNIGITNQRETTVLWDKRTGKPIYNAIVWQDRRQEEFCVN

SEQ ID NO: 127534 - protein, 242 aa, Unknown
  Bacterial polypetide isolated from the Sargasso Sea
SAVLGDQQAAAVGQACFEKGSIKSTYGTGAFIIMNTGSKKINSKNKLLTTICYRLNNKNTYALEGSIFIAGAGVQWLRDKIKLINNAYETEKIAKLTKSNNEVYIVPAFSGIGAPYWRPDARGLITGITRDTDWKNLVRATVESVAYQSYDLFYSMNKDGLKPRIVKIDGGMVANNWFSQFLADVINLKVIRPKVLETTALGAALFAGYQIGEFKSLNQIKNTWKKDKAFKPKINKKLRNHI

SEQ ID NO: 127535 - protein, 247 aa, Unknown
  Bacterial polypetide isolated from the Sargasso Sea
DFIISIDQGTTSSRAILFNLKGKPVYSSQKEFTQYFPKSGWVEHNPEEIWSTTKKTLKDVINKAKRLRGKVLAIGITNQRETTVLWDKKTGKAVYKAIVWQDRRQEEFCKKLRKQNKETLIFNRTGLLIDSYFSGTKIKWILDNVPLARKLMSKKQLLFGTIDSFLIWRLTKGKVHATDATNASRTMIYNISSNKWDDTILKILKIKKHILPEVKDCADNYGSTHPSITGKSIPIRGVVGDQQSATI

SEQ ID NO: 127536 - protein, 238 aa, Unknown
  Bacterial polypetide isolated from the Sargasso Sea
QSKSTYGTGCFLLMNIGNKFKLSKNRLLTTVAFKINGKKMYCYEGSIFVAGSAIQWLRDNLSFFKDSKETDKLYDKANNNGKIYFVPALTGLGAPYWNPNARGTFFGLTRNTSKEDIIKATIDSLSYQTYELIECMEKDSKTRINQIKVDGGMVKNNNFLKSLSNITQIKIMRPKNIETTSLGVAYLAGLQSGIIKNTNEINQFWKKDKIFKAVISKNKAKSNIKIWKSIIKTVNNFY

SEQ ID NO: 127537 - protein, 235 aa, Unknown
  Bacterial polypetide isolated from the Sargasso Sea
RVILYNNKFKKIDTLQKEFKQHFPKDGWVEHDALEIWKDVKNLILRIIKNNKISSKNILTIGITNQRETTVLWNKKTGIPVNKAIVWQDRRTSDYCKKIKSANKEVIIQKITGLLIDPYFSATKIKWILENNKKAKKILKEGNLIFGTIDTWLLWNLTEKRSHYTDITNASRTMLFDCKKEEWSKTLLKLFNIPINILPEVEENVFNFGITNLFGSPIPIGGMAGDQQSATIGQA

SEQ ID NO: 127538 - protein, 286 aa, Unknown
  Bacterial polypetide isolated from the Sargasso Sea
KKTGKPIYNAIVWQDRRTQDYCKLLKKKNYENSFRNKTGLFIDPYFSATKIKWILDNGKISKKLLGSNDLLFGTVDTFLIWKLTKGKQHLTEASNASRTMLYNINNNKWDKEILKKLNIPQKILPEVKNSADNFGKTDKKITGVEISISAVLGDQQAAAFGQTCFEKGSIKSTYGTGAFIIMNTGPKKINSKNKLLTTICYRLNNKNTYALEGSIFIAGAGVQWLRDKVNLIKKASETETISKSSKINDGVFVVPAFSGMGAPYWRPDARGVITGLTRDSDWKSIV

SEQ ID NO: 127539 - protein, 214 aa, Unknown
  Bacterial polypetide isolated from the Sargasso Sea
HNLLTTIAWKINDKVEYALEGSVFMGGAVVQWLRDGLGIINSSEEIETVATSIKDSGGVYLVPAFAGMGAPHWDPHARGLIMGLTRGSTSAHIARAALESIAYQCYDLLNAMQADSNIKLRQLRVDGGASVNNFLMQFQANLLDIPVVRPRITETTALGAAFLAGLAVSFWEDQADISRQWEPEMIFSSKIHKDEMDQHYSGWVKAVEKARSNV

SEQ ID NO: 127540 - protein, 216 aa, Unknown
  Bacterial polypetide isolated from the Sargasso Sea
MSYILSIDQGTSSSRAILFDESFRAVHSSQKEFTQYFPNEGWVEHDPSEIWRSVFDVVEDVLKNCPADINEIASIGITNQRETTVIWDKETGKEVYPAIVWQDRRTTDFCNSLVDDQLEGMVSKKTGLIIDPYFSASKIKWILDNVPDAKKKAEEGKLAFGTIDSFLVWKLTEGRVHKSDATNASRTMLYNINEDCWDEGLLNLFDIPLKMMPEVS

SEQ ID NO: 127541 - protein, 318 aa, Unknown
  Bacterial polypetide isolated from the Sargasso Sea
DNVKESKKLLKSNNLLFGTVDTFLIWKLTKGKQHLTEATNASRTMLFNINNNKWDHEILKKLNIPKSILPEVKNSADDFGKTDKKITGKEIPISAVLGDQQAAAVGQTCFEKGSIKSTYGTGAFVIMNTGSKKINSKNKLLTTICYRLNNKTTYALEGSIFIAGAGVQWLRDKMKLIKKAPETEKIARSSSINDGMYIVPAFSGMGAPYWRPDARGLITGLTRDSNWQSLVRATVESVAYQSYDLFNAMNKDGLKPRIVKIDGGMVANNWFSQFLSDTINLKVIRPKVLETTALGVALFAAYQVGEFKSLNEIKNIGQ

SEQ ID NO: 127542 - protein, 259 aa, Unknown
  Bacterial polypetide isolated from the Sargasso Sea
MAGDQQAANIGQACFKVGQSKSTYGTGCFFLMNIGNKFLISKNKLLTTVAFKIHGNKMFCYEGSIFVAGSAIQWLRDKLNLFNSSDKSSDLYNKANIEEKTIIIPALTGLGAPHWEPKVRGAIFGLTRNTSIPEIVKGTLDSICYQTNDLIESMEKDSKLKIKEIRIDGGMVNNESFVKSLSNITQKKIIKPLNIETTSLGVAYLAGLNAGILKNTFQINKLWKQDKIYLSKLSKKEVTKNIKKWKNAVSFLIRFSSKI

SEQ ID NO: 127543 - protein, 293 aa, Unknown
  Bacterial polypetide isolated from the Sargasso Sea
INIVKKFIVAIDQGTTSTRVILFDVTGNVKFISQFEFKQYFPKNGWVEHNPNEIWLTTLKALRKVIKKSLQLKGNIISIGITNQRETTILWNKKTGKPIYNAIVWQDRRTQQYCEKLKKRKYEKSFRKKTGLFIDPYFSATKIKWILENVKDSKKLLKSNNLLFGTVDTFLIWKLTKGKKHLTDATNASRTMLFNINNNKWDKEILRKLHIPKNILPEVKNSADDFGITNKKIIGKEIPISAVLGDQQAAAVGQTCFEKGSIKSTYGTGAFVIMNTGSKKIYSNNKLLTTNLL

SEQ ID NO: 127544 - protein, 168 aa, Unknown
  Bacterial polypetide isolated from the Sargasso Sea
IVWQDRRTADYCQQLKEQGHEEWVQQKTGLLLDPYFSASKIQWLLRNNADVQQALADNELAFGTIDSFLLWRLTSGQVHATDTTNASRTLLLNIQSLNWDQELLQLFDVPEQILPQVKQSADSYGLCDTRLFGLALPVLALVGDQQAAALGQGCISAGSLKSTYGTGC

SEQ ID NO: 127545 - protein, 276 aa, Unknown
  Bacterial polypetide isolated from the Sargasso Sea
VYNAIVWQDRRTEEYCKKLRKKNKETIIFNKTGLLIDPYFSGTKIKWILDNVPIAKSLMNKKRLLFGTIDSFLIWRLTKGKVHATDATNASRTMIYNITSNKWDDSILKLLKIKKHILPEVKNCADDYGYTHPSITGKSIPITGVVGDQQSATIGQCCFEPGSLKSTYGTGAFILLNTGSRKIYSKNRLLTTIGYRLNGKTTYALEGSIFIAGAGVQWLRDRMKFVNKASDTEKIVKSLKSNSGIYLVPAFTGLGAPHWNANARGVLSGVTRDTWT

SEQ ID NO: 127546 - protein, 302 aa, Unknown
  Bacterial polypetide isolated from the Sargasso Sea
KVLKEVIKKSKTLKGKVLTIGITNQRETTIMWDKKTGKSVYNAIVWQDRRSFEYCKKLIKQKKETIIYNKTGLLIDAYFSATKIKWIIDNVPKAKDLIKKKRLLFGTVDSFLLWKLTKGVDHATDATNASRTMLFNISTNKWDDQILKILKIPKEILPVVKDCAADFGYTDPSITGTSYPITGMVGDQQSATIGQCCFEPGSLKSTYGTGAFVLLNTGSKKVYSKNRLLTTIGYRINGKTTYALEGTIFIAGAGVQWLRDKIKFISKASDTETIAKSLSSNNGIYLVPAFTGLGAPYWMRVR

SEQ ID NO: 127547 - protein, 186 aa, Unknown
  Bacterial polypetide isolated from the Sargasso Sea
IWSSTLEVCRKAIADSGLDSAEIAAIGITNQRETTLVWEAETGKPIHPAIVWQDRRTADYCAGLKGEGHEAMVAAKTGLLIDPYFSATKLRWILHNVPGARERAQRGELRFGTVDSYLLWHLTGGKVHRTDASNASRTLMFNIHQQCWDEELLALFDIPASLLPEVLDCAADFGHTDSQLLGASIP

SEQ ID NO: 127548 - protein, 111 aa, Unknown
  Bacterial polypetide isolated from the Sargasso Sea
MAIDQGTTGTTVAVMNTRGVLLGSVNYEFPQIYPKPGWVEHDPEAIWASVLKGIRAVFRKGLCKPADVACIGITNQRETALLWERRSGKPLGNAIVWQCRRTASFCEGLRK

SEQ ID NO: 127549 - protein, 107 aa, Unknown
  Bacterial polypetide isolated from the Sargasso Sea
MKNFLSIDQGTTSSRSIIFDANLNLVKDAQEEYDLTYPEDGWVELEPKKIIETVTNTLNKVVSADIGLEACGITNQRETTIVWSKSTGEAIYPGIVWQDRRTHEYCT

SEQ ID NO: 127550 - protein, 222 aa, Unknown
  Bacterial polypetide isolated from the Sargasso Sea
EEFCKKLRKQNKDTMVFNKTGLLIDSYFSGTKIKWILDNVPKARQLMNRKQLLFGTIDSFLIWRLTKGKVHATDATNASRTMIYNISSNKWDDTILNLLKIKKHILPEVKDCADDYGQTHPSLTGKPIPINGVVGDQQSATVGQCCFEPGSLKSTYGTGAFVLLNTGSKKIYSKNRLLTTIAYRINGKTTYAMEGSIFIAGAGVQWLRDRMKFFKKAPETEK

SEQ ID NO: 127551 - protein, 277 aa, Unknown
  Bacterial polypetide isolated from the Sargasso Sea
FYGDKKTGKPVYKAIVWQDRRTEEFCKKLRKQNKDTMVFNKTGLLIDSYFSGTKIKWILDNVPKARQLMNRKHLLFGTIDSFLIWRLTKGKIHATDATNASRTMIYNISTNRWDDTILNLLKIKKHILPEVKDCADDYGQTHPSITGKSIPINGVVGDQQSATIGQCCFEPGSLKSTYGTGAFVLLNTGSKKIYSKNRLLTTIAYRINGKTTYAMEGSIFIAGAGVQWLRDRMKFFKKAPETEKIVKSLQNNNEIYLVPAFTGLGAPYWDANARGVL

SEQ ID NO: 127552 - protein, 114 aa, Unknown
  Bacterial polypetide isolated from the Sargasso Sea
MSYVISIDQGTTSTRSILFDHKMNAINSSQIEFKQYFPKSGWVEHNPEDLWNTTVSTFKDVLKKSNLTPNMVAAIGITNQRETTVVWDPKTGECPTKAIVWQDRRTSDFCKRLK

SEQ ID NO: 127553 - protein, 283 aa, Unknown
  Bacterial polypetide isolated from the Sargasso Sea
TMLFNINTNRWDNEILKKLKIPYKILPEVKNSADNFGTTNKKVIGEEIPISAVLGDQQAAVVGQACFETGSIKSTYGTGAFVIMNTGCKKIISKNKLLTTICYTLNGKNTYGLEGSIFIAGAGVQWLRDKIKLIKNAYETEKIAKSKKNNEDVYVVPAFSGLGAPYWRPDARGLVTGLTRDSDWKSLVRAVVESVAYQSFDLFESMKKDGLKPKIIKVDGGMVANNWFSQFLSDIINLKVKRSKVLETTALGVALLSGYQIGEFKSLKEIQVKWKKDRVFSPK

SEQ ID NO: 127554 - protein, 262 aa, Unknown
  Bacterial polypetide isolated from the Sargasso Sea
APIAGAAGDQQAALFGQACFSPGMAKNTYGTGCFMISNTGKHLVRSQNGLLTTIGWKLGDEVTYALEGSVFIAGALVQWLRDGLELFKDAAETESMALSVSDSGGVFVVPAFVGLGAPHWDPYARGLMVGLTRDSRPSHIVRASLEAIAFQSAEVLNSISQDTSESLNELRIDGGAAANQFLCQFQADLLGLDVKRPQILETTAMGAAFLAGLAVGTWSDQQVLSNLWKEEKTFRSSIDRDTADAKMEEWLRAVERSKAWIQ

SEQ ID NO: 127555 - protein, 328 aa, Unknown
  Bacterial polypetide isolated from the Sargasso Sea
DKQKKYYCKQLKKVQNLMGEILSIGITNQRETTILWDKKTGRSIYNAIVWQDRRTTDFCKKYSLNKIREKIIRKKTGLIIDPYFSATKIKWIIKNVKKAKILLKQKRLLFGTIDTFLLWKLSKGKIHATDATNASRTMLYNINKNKWDIEILKSFNIPSNILPIIKNSSDYYGLTSKSITKKVYPITGVVGDQQAAAIGQACFKNGSVKSTYGTGAFVLMNTGDKKIYSKNRLLTTVCYRINNKSTFALEGSIFVAGSGVQWLRDKMKLIKSAAEIEKIIKLLKTNSGVYLVPAFVGLGAPHWNSEARGVLSGLTRDTGPKEIIRAII

SEQ ID NO: 127556 - protein, 236 aa, Unknown
  Bacterial polypetide isolated from the Sargasso Sea
MKKFIVSIDQGTTSSRVVLFDTKGNIKFISQYEFKQYFPRNGWVEHNPNEIWSTTLKALKQVIKKAISLKGHILTIGITNQRETTILWNKKTGKPIYNAIVWQDRRTQEYCKSLKNKNYENAFRKKTGLFIDPYFSATKIKWILDNVKVSKKLLKTNNLLFGTVDTFLIWKLTKGKQHLTEATNASRTMLFNINNNKWDNEILQKLKIPKSILPEVKNSADNFGKTDKRVVGKEIP

SEQ ID NO: 127557 - protein, 289 aa, Unknown
  Bacterial polypetide isolated from the Sargasso Sea
KFIISIDAGTTSNRSILFDLRGKPVYSSQKEFTQYFPKSGWVEHNPEEIWRTTVKTLKDVIQKAKRLNGKILTIGITNQRETTVLWDKKTGKTVYNAIVWQDRRQEDYCKNLRKQNKENMIFNKTGLLIDSYFSGTKIKWILDNIPKAKQLMNKKQLMFGTIDSFLIWRLTRGSVHATDATNASRTMIFNITTNKWDDAILKILKIKKHILPIVKDCADDYGQTHSSITGKSIPINGVVGDQQSATIGQCCFEPGSLKSTYGTGAFVLLNTGNKKIYSTNQVINYNSLQ

SEQ ID NO: 127558 - protein, 242 aa, Unknown
  Bacterial polypetide isolated from the Sargasso Sea
HATDATNASRTMLFNINKNKWDNKLLKIFKVPYQILPIVKNSADSFGFTDRSVTLKTYPITGVIGDQQAAIIGQGCFSKGSTKITYGTGAFVIMNTGNKKIISKNKLITTICYRLNNKTTYALEGSIFNAGAAVQWLRDKIKLIKDVHETEKILKSKKNHESIYIVPAFTGLGAPYWIPDSRGLITGLTRNSDWKSLVRATIESVAYQTFDLLESMTKDGLRLTNVKVDGGMASNNWFTQFL

SEQ ID NO: 127559 - protein, 229 aa, Unknown
  Bacterial polypetide isolated from the Sargasso Sea
VNDNKLLFGTVDTWLIWNLTNGNSHITDPSNASRTLLYNIKDDKWDKELLELFDVPENILPKVVDSSSVSTSIDKEILGVEIPISGIAGDQQAALFGQLCINEGDIKNTYGTGCFCMMNTGENFVMSKNKMLSTIAWRINGEITYALEGSVFVAGALIQWLRDQLGIIKSSPEVEELAKTVNDNGGLTFVPALSGLAAPYWDPYVQGTIFGITRGTENGHIARAALESI

SEQ ID NO: 127560 - protein, 270 aa, Unknown
  Bacterial polypetide isolated from the Sargasso Sea
MVKKYILSIDAGTTSSRAILFNKKAEVIEIAQYEFNQFFPKEGWVEHDAIEIWNTQLKAIKDVINKSKIDPNEIDSIGITNQRETTIIWDKQTGKPVYNAIVWQDRRTANFCDKLIQKNKTSLIQQKTGLVIDAYFSGTKIKWILDNNQELREKANDNKLLFGTVDTWLIWNMTNGKSHITDPSNASRTLLYNIKDDKWDKELLELFNVPENILPKVVDSSSISTNIDKEILGVEIPISGMQVINKQHYLVSYASMKVISKTLMVQVVFV

SEQ ID NO: 127561 - protein, 233 aa, Unknown
  Bacterial polypetide isolated from the Sargasso Sea
STYGTGAFVIMNTGSKKIYSKNKLLTTICYRLNGKNTYALEGSIFIAGAGIQWLRDKLKLINNAYETEKIAKSKNNNDNVYVVPAFSGMGAPYWRPDARGLITGLTRNSDWKSLVRAVVESVAYQSYDLFNSMRKDGLKPKFVKVDGGMVANNWFSQFLSDIINLNVTRPKILETTALGVALFAGYQVGQFKSLNEIKLKWKKDRIFSPKLNKSSRIKLLNGWKSAVNRTLLK

SEQ ID NO: 127562 - protein, 504 aa, Unknown
  Bacterial polypetide isolated from the Sargasso Sea
MAEPLLLALDQGTSSSRAVIFDGSGQALASAQVPLPIEYPADGWVEQDPLAIWSSQLQAMQQLEDQLSPEQRAAVAACGITNQRETTVLWRSGDSQPCGPALVWQDRRTASICRQWQEQPGAESWQQRTGLVLDPYFSASKVQWLLQNNAEAAAAQADGTLRFGTVDSWLLWQLTGGSVHATDLSNASRTLLLDLDRGCWLPEACERVGLTASALPELRPCRSRFGCIAEDLPFAGVPITALLGDQQAASFGQLCLEPGQAKCTYGTGAFLVINVGSKPVRAPGGLLSTVGWTEADGTITYCIEGSLFNAGTVVQWLRDGLGLIPTSAAIEELAASVDSAGELMLVPAFTGWGTPHWDPEARGLMIGLTRDTGPGHIARAALEGIALAVTTLTQLAEQALGQPLQELAVDGGAAASDLLLQAQADSSGVPVRRPDQLESTALGVALLAGLSAGCLIDLNAVRQARAAGSRLFDPAIDAAERERWLQRWESAVHRCLEWHGDALR

SEQ ID NO: 127563 - protein, 400 aa, Unknown
  Bacterial polypetide isolated from the Sargasso Sea
GNHFTMQLVWQDRRTADFCKSLVKQGLEETVMNKSGLVIDPYFSATKIKWILDNVPEARSRAENNEICFGTVDSFLLWKLTGGKVHATDATNASRTSLYNIESLEWDDELLKIFDVPKSLMPDVMDSNSHFGDISKDVMNFELPILSILGDQQAAAVGQTCFKPGSIKSTYGTGCFVIINSGKKIIKSNSRLLGTICYKINGQATYALEGSIFIAGAVVQWLRDSLKIIETATQTEDIIENMQNNSNVYLVPAFTGLGCPYWDPDARSAIYGITRDTGKKEITRAAIESVAYQTRDLFKAMSEDGISPQILRVDGGMTDNDWLMQFLSNILDISVEVPKITETTALGAAMMAMLTDGKYSTLEELSNLWGSNKSYIPKINKNERDNLLKNWDYYVSKTLT

SEQ ID NO: 127564 - protein, 409 aa, Unknown
  Bacterial polypetide isolated from the Sargasso Sea
MSAEKKYVVALDQGTTSSRAIVFDQDANIVATSQREFTQHYPKAGWVEHDPMEIWATQSSVFTEVLAKSGLRSEEIAAIGITNQRETTVVWEKATGKPIYNAIVWQCRRTAAICEELKARGLEEYVRDNTGLVLDAYFSGTKVKWILDNVEGAREKAMNGELLFGTIDTWLVWKMTNGEVHVTDPTNASRTMLYNIRDLKWDQKMLDELGIPMSMLPQVKPSSEVYGYTTRGGGSRIPIAGIAGDQQSALFGQLCFEKGMAKNTYGTGCFMLMNTGTEPVRSNNGLLTTVAIGPKGEVNYALEGAVFMGGATIQWLRDELKIIHDARDTDYFASKVGDTNGVYLVPAFVGLGAPYWDPYARGTMVGLTRGANRNHIIRAALESIAYQSRDVLDAMQQDSGIKLAALKVD

SEQ ID NO: 127565 - protein, 496 aa, Unknown
  Bacterial polypetide isolated from the Sargasso Sea
MSYVLAIDQGTTSTRAIVFDNNLQIVAASQKEIEQFFPFPGWVEHDLEEIYATVIATVRDAVKGAKISSQDILSIGITNQRETTAIWNAETGQALSKAIVWQDRRTSEFCNELKKNGKERVYQRKTGLLIDPYFSATKVKWLLDKYDPERTRANSGKLLFGTIDCYLIWRLTNKKSHSTDITNASRTMLFNIESLEWDNDILGDLNVPKKILPNVKECADDFGEMVSEILGSPIPIRGVAGDQQAATIGQACFQKGMIKSTYGTGCFALLNTGDQFVLSKNKLLSTIAYKIDGKICYALEGSIFIAGAVVQWLRDSINIIDKADQVGELASEAKDQDIYFVPAFTGLGAPYWDPNARGAIFGLLRDTGREEIALAALESVGFQTRDLLEAMIKDVNGMERGHIKLRVDGGMTQSSLTMKILANLTGVEINIPDIQESTAKGVAWLAGMKIGLYNQLEAFEEEWTLKEKFSPKLSPDERDKKYEGWKKAIGRTRISA

SEQ ID NO: 127566 - protein, 496 aa, Unknown
  Bacterial polypetide isolated from the Sargasso Sea
MTDLILALDQGTTSSRSILFTEKAEIFAVASEPLECRYPDSGWVEQDAEAIWETQRSTIVKVLDQAGIGLSQVCAIGITNQRESTIAWNRETGEALCPAINWQCRRTAGFCDELKEEGFDQLIRNRTGLVTDPYFSGTKMHWILKNVPEAANLAHQGKLCFGTVDSWLIWKLSGGKTHAIEISNASRTLVFDIQKCEWDSEILARFGIPPESLPEVVPSSGVIAEVDESLFGRSAPIAGAAGDQQAALFGQACFSPGMAKNTYGTGCFMISNTGKHLVRSQNGLLTTIGWKLGDEVTYALEGSVFIAGALVQWLRDGLEFFNDVAETESMALSVPDSGGVFVVPAFVGLGAPHWDPYARGLMVGLTRDTRPSHIVRASLEAIAFQSAEVLNSISQDTSESLNELRIDGGAAANQFLCQFQADLLGLDVRRPQILETTAMGAAFLAGLAVGTWSDQQVLSNLWKEEKTFRPSIDRDTADAKMKEWLRAVERSKAWIQ

SEQ ID NO: 127567 - protein, 462 aa, Unknown
  Bacterial polypetide isolated from the Sargasso Sea
MTKNGYILSIDQGTTSSRAALISEDGNIVSQKNIEFKQYFPNNGWVEHDPRDILSSTIDCIKYVINESKVKPEDIMTSGVTNQRETIVAWDKTSGDPVYNAIVWQDRRTEDICESLREKDVEGSIQKKTGLLIDPYFSASKIKWILENVDRAKSLIADNNLIIGTIDTWLIWNLTNKQYHLTDVTNASRTMIYNIIDDCWDEELLKLFNIPREILPEVKNSMDNFGVISRDFFGSEIPITGVAGDQQAAAFGQLCIEKGMVKSTYGTGCFMLMNTGKEVYQSQNKLLSTTAFKTSDQKMYALEGSIFNAGTIVQWMRDELSFFKKAGEIELLASESKNDIVFVPAFTGLGAPYWRSDIRGSIHGITRDTSKSDIAMAALKSVCFQSKDLYLSLQKDMANDDLNSVIRVDGGMSQNNLMMQYLADLLQINVERPVIQETTVMGAAYLAGLQHGIYKSIDDLKG

SEQ ID NO: 127568 - protein, 146 aa, Unknown
  Bacterial polypetide isolated from the Sargasso Sea
MKNFIISIDAGTTSNRSILFDLKGKPIYSSQKEFTQYFPKSGWVEHNPEEIWKTTLKTLKDVINKAKRLKGKILSIGITNQRETTVLWDKKTGKPVYNAIVWQDRRQEEFCQKLRKQNKDTMIFNKTGLLIDSYFSGTKIKWILDN

SEQ ID NO: 127569 - protein, 155 aa, Unknown
  Bacterial polypetide isolated from the Sargasso Sea
MSVIIAIDQGTTSTRAVAFDKDLNIIDSEQKEYPLIYPKDGWVEIEPEHLMDSVYATIDPVISACKDISAIGITNQRETTLVWDADSGQPIYNAIVWQDRRTAEQCAQLKKDGHEEVINSATGLLLDPYFSSTKIAWILDNIDGARKKAEAGKLR

SEQ ID NO: 127570 - protein, 335 aa, Unknown
  Bacterial polypetide isolated from the Sargasso Sea
VFDENQNIISESQKEYELQYPNDGWVKANPDEILGSVKETIKKALESSKVEIAACGITNQRETVVVWDRVSGEAIYPAIVWQDRRTSDLCSELKQKENLESEIREKTGLLLDPYFSATKIKWILDNVENAKKMAERGELCFGTIETYLIWNLTEEKNHKTDATNASRTMLMNLETLEWDDSLLEIFNIPKNILPEICSCDDTFGSIDLFDQKFPITGVIGDQQSALFGQNCFEFGEMKSTYGTGCFLMVNTKEKIYKSEARLLSTVGCMLGNTVSYALEGSIFSAGTSIQWLRDEMKFFDDSSESEDLIDDEFDSRGVNFIPAFTGLGSPHWNSE

SEQ ID NO: 127571 - protein, 428 aa, Unknown
  Bacterial polypetide isolated from the Sargasso Sea
KANKIKGHILCIGIANQRETSILWNKKTGKPIYNAIVWQDRRTQQYCKNLKNKKNENFFRKKTGLFIDPYFSATKIKWILDNVKVSKKLLKSNNLLFGTVDTFLIWKLTNGKKHLTEATNASRTMLFNINTNKWDKEILKKLNIPKKILPKVKNSADDFGKIDKKIIGKEIPISAVLGDQQAAAVGQACFEKGSIKSTYGTGAFIILNTGSKKINSKNKLLTTICYRLNNKNTYALEGSIFIAGAGIQWLRDKIKLINNAYETEQIVKSTKSNNEVYIVPAFSGIGAPYWRPDARGLITGLTRDSNWKMLVRATVESVAYQSHDLFNAMNKDGLKPRIVKIDGGMVANNWFCQFLSNIINLKVIRPRVLETTALGAALFAAYQIGEFNSLNEIKNLWRKDRVFSTKIDNSLRKKLLQGWKLAIKKTLA

SEQ ID NO: 127572 - protein, 264 aa, Unknown
  Bacterial polypetide isolated from the Sargasso Sea
GKPITIGGMAGDQQSATIGQACFNKGQSKSTYGTGCFLLMNIGNKFKMSKNRLLTTVAFKINGKKMFCYEGSIFVAGSAIQWLRDNLNFFSSSSETDKLYVKANKNESVYFVPALTGLGAPYWNSNARGTFFGITRNTSKEDIIKATIDSLSYQTYELIECMEKDSKTRINEIKVDGGMVKNNNFIQSLSNITQIKIIRPKNIETTSLGAAYLAGLQSGIIKNTKEINKFWEKDKILKSKIPKNKAISNINKWKSTIRAVNKFY

SEQ ID NO: 127573 - protein, 287 aa, Unknown
  Bacterial polypetide isolated from the Sargasso Sea
MDQGTTSSRTILFSEKGEIVADASTPLACYYPQSGWVEQDAQEIWVSQSQTIREALKKAALKMKDIAAVGITNQRETTIAWNRNTGEAISPAINWQCRRTADYCEQLKDEGFDRVLRKKTGLVTDPYFSGTKMRWILENVPEASKLVEHGNLCFGTVDSWLIWQMTSGQVHATEISNASRTMVFNIDSCSWDNEIMSRFNIPRETLPDVIPSSAIIAEIDPDLFGGSAPIAGVAGDQQAALFGQACFETGMAKNTYGTGCFMISNTGSEQVHSKHGLLTTIAWQMTR

SEQ ID NO: 127574 - protein, 206 aa, Unknown
  Bacterial polypetide isolated from the Sargasso Sea
IAYRINGKTTYAMEGSIFIAGAGVQWLRDRMKFFKKAPETEKIVKSLQNNNDIYLVPAFTGLGAPYWDANARGVLSGITRDTSPKEIVRAIIEAVAYQTHDLFEAMKHDGLRPKIVKVDGGMVMNNWFSQFLSDIVNVKVLRPKVQETTALGAAFMAGLNIGVYKSLKDISKNWQLDKKFSSKMKNSSRKILINGWEKAVKRALIN

SEQ ID NO: 127575 - protein, 204 aa, Unknown
  Bacterial polypetide isolated from the Sargasso Sea
MADQPLLLALDQGTSSSRAVVFDAKGGLVASATAPLPIQYPADGWVEQHPGDIWDSQRKALQDLHQQLAEEQRRAVVSCGITNQRETTVLWRRSSGSPCGPALVWQDGRTADICQGWKTDGLEDAWCRRTGLLLDPYFSASKIRWMLEHHSEAAAAAAQGDLCFGTVESWLLWNLTAGQRHGSDMSNASRTLLMDLEQRCWMDA

SEQ ID NO: 127576 - protein, 361 aa, Unknown
  Bacterial polypetide isolated from the Sargasso Sea
TGLTMDPYFSASKVNWILDQVNGARQRAENGELLFGTIDSFLIWKLTEGRDHKTDVSNASRTMLYNIETNEWDEELLSLFKVPSNLLPTVCDNAYDYGYTELLGGKISIGGVAGDQQSALIGQCCFEVGEVKSTYGTGCFMMINTGNEIIQSSNKLLSTIAYRLEGKTTYALEGSIFVAGSAIQWLRDGLNFFENASESEDLALQAKDNSRVLVVPALTGLGAPYWDADARGAIFGLTRDTGIPEITKAVLESVVYQTKDLLEAMKNDNASFNSLKIDGGMVANNWFSQELSNVLEVKVSRPSVIETTSLGAAYLAGLHAGVFDTLSSLKENWSTDKEFEPQDTRNRYLEWKEAVNKVLTH

SEQ ID NO: 127577 - protein, 195 aa, Unknown
  Bacterial polypetide isolated from the Sargasso Sea
FALEGSIFIAGAGVQWLRDKLKLINNAYDTEQIAKSKKNNEGVYVVPAFSGLGAPYWRPEARGVITGLTRDSDWKTLVRAVIESVAYQSYDLFNAMRKDGLKPNIVKIDGGMVENDWFSQFLANIIDIKTERPKVLETTALGVALFAGYQIGVFKSLDQISRKWKKDKTFKPKLTHTVRKKLLNGWKLSVDKTLL

SEQ ID NO: 127578 - protein, 333 aa, Unknown
  Bacterial polypetide isolated from the Sargasso Sea
MLFGTVDTYLVWKLTGGKIHATDSTNASRTMIFNIKKNCWDKKLLKLLKIPNIILPDIKNSADDFGSTNKSITYKSYPISGVIGDQQAAAIGQSCYTRGSTKITYGTGAFVIMNTGDKIIKSKNKLLSTVCYRIDNKTTYALEGSIFVAGAAVQWLRDKLKIIKYANLTEKISRKQKNNNNLYLVPAFTGLGAPYWKPDARGTLVGITRDTERDHVIRATLESIAYQSSDLLNAMQKDGVKPLIVKVDGGMVQNNWLMQFISDVLNLPIYRPKVHETTALGAALIAGYGIGIYKSLSYMSKKLKYDKKFYPKMAHKKRFKLLNGWSQAIRKSI

SEQ ID NO: 127579 - protein, 292 aa, Unknown
  Bacterial polypetide isolated from the Sargasso Sea
MRQQAILSIDQGTSSSRALLFNRDGKVLAVAQQELDCVYPEQGWVEQDAELIWLSVLKVCRQVLVQAVQLGIEVLGVSISNQRETTVLWHKAKDKVLAPAIVWQDRRTADYCQQLKDQGHEEWVQQKTGLLLDPYFSASKIQWLLRHNTEVQQALADNELAFGTIDSFLLWRLTSGQVHAIDTTNASRTLLLNIQSLNWDQELLQLFGVPEQILPQVKQSADSYGLCDTRLFGLALPVLALVGDQQAAALGQGCISAGSLKSTYGTGCFALLNTGCSPLFSKHRLLTTVAFT

SEQ ID NO: 127580 - protein, 496 aa, Unknown
  Bacterial polypetide isolated from the Sargasso Sea
MKRFILSIDQGTTSSRVVLYDDKFKIKNIEQKEFRQFFPKDGWVEHDAQEIWNDVKKLIQLTIKKNKLKPNQIASIGITNQRETTVLWNKITGKPIHKAIVWQDRRTAEYCEKLKAQNKDKIIQKITGLVLDPYFSATKIKWILNKVSNKKKILNKKILFGTIDTWLLWKLTEGKSHFTDITNASRTMLYDSRKEEWSKELLTLFKIDKNILPKVKENAYDFGSTKLFGGEIQIGGMAGDQQAATIGQACFSAGQSKSTYGTGCFLLMNIGSKFKLSSNKLLTTVAFKINGKKMFCYEGSIFVAGSAIQWLRDNMMFFKNSKATDRLYSLANKNENVIVIPALTGLGAPHWQPNTRGAIFGLTRNTSQADIIKATLDSLSYQTLDLIESMEKDAKISISEIRVDGGMINNNNFLQSLSNVTQVKIIKPENIETTSLGVAYLAGLSSGIIKNTNDIKKFWKKNKEIKPKIKKSIVQKKVATWKKTIKNLIELNNQTT

SEQ ID NO: 127581 - protein, 480 aa, Unknown
  Bacterial polypetide isolated from the Sargasso Sea
TSTKVILFDTKGNTKFISQFEFKQYFPKNGWVEHNPKEIWMTTLKSLKKVIQKAKQLKGNILSIGITNQRETTLLWNKKNGRPIYNAIVWQDRRTQKFCQNLKRNNYENSIRKKTGLFIDPYFSATKIRWILDNVKESKKLFKSNNLLFGTIDTFLIWKLTKGKRHLTDATNAARTMLYNINTNQWDKNILKKLKIPYKILPEVKNSADNFGTTNKKIIGQEIPISAVLGDQQAAAIGQSCFQKGSIKSTYGTGAFVIMNTGSKKIFSKNKLLTTICYRLNGKNTYALEGSIFIAGAGVQWLRDKIKLINNAYETEKIAKSKKNNDGVYVVPAFSGIGAPYWRPDARGVITGLTRNSDWKCLVRAVVESVAYQSYDLFDAMKKDGLKPKLIKVDGGMVANNWFTQFLSDIIKLNVIRPKTLETTALGAAFLAGYQIGEFKSLNEIQGKWKKDRVFSPKLNKSLRNNLLQGWKQAIRKTLA

SEQ ID NO: 127582 - protein, 464 aa, Unknown
  Bacterial polypetide isolated from the Sargasso Sea
MKKFIVSIDQGTTSSRVVLFDIKGNIKFISQYEFKQYFPKNGWVEHNPNEIWSTTLKALKQVIKKTKSLKGHIITIGITNQRETTILWNKKTGKPIYNAIVWQDRRTQEYCKSLKNNNFEKTFRKKTGLFIDPYFSATKIKWILDNVKVSKKLLKTNNLLFGTVDTFLIWKLTKGKQHLTEATNASRTMLFNINNNKWDNEILQKLKIPRSILPEVKNSADNFGKTDKRVTGKEIPISAVLGDQQAAAVGQACFEKGSIKSTYGTGAFIIMNTGSKKINSKNKLLTTICYRLNNKTTYALEGSIFIAGAGVQWLRDKIKLINNAYETEKIAKSTKSNNEVYVVPAFSGIGAPYWRPDARGLITGLTRDSDWKTLVRATVESVAYQSYDLFYSMKKDGLKPRIVKIDGGMVANNWFSQFLANVINLKVIRPKVLETTALGAALLAGYQVGEFKSLNQIKNTWKKR

SEQ ID NO: 127583 - protein, 485 aa, Unknown
  Bacterial polypetide isolated from the Sargasso Sea
MPKKIISIDQGTTSSRAVIFSDSGELIGFKQKEFSQIFPSDGWVEHNPEEIWQSVLEVLDQSITSFNIEASDIASIGITNQRETVVIWNKKTGKPIYNAIVWQDRRTSDFCNSLQDNQKMIQQRTGLTLDPYFSASKIRWVLNKVDGAREKAENGELLFGTIDSYLIWKLTEGREHKTDATNASRTMLYNIETNQWDQDLLDLFCVPANMLPQVCDNSSDFGHTELLGGKINIGGVAGDQQSALIGQCCFDIGEVKSTYGTGCFMMINTGNEVLKSNNKLLSTIAYRLDGKTTYALEGSIFVAGSAIQWLRDGLNFFDDASESESLALQAKDNSKIFVVPALTGLGAPYWDSEARGAIFGLTRDTGVPEITKAVLESVVYQTKDLLEAMNNDEASFTSLKVDGGMVANNWFTQELSNVLGVQVTRPKITETTSLGAAYLAGLSADVFDNFSSLKKNWSIDKEFVPQKTTNGYLKWKEAVKKVLTN

SEQ ID NO: 127584 - protein, 465 aa, Unknown
  Bacterial polypetide isolated from the Sargasso Sea
MKYFLVIDQGTSSTRAILFDEKFVVVNVSQTEFKQFFPKDGWVEHDANEIFDTVVGCIKEVMKKSETTHKEIIAIGITNQRETCLLWDKKGNPLGKAIVWQDRRTAELCNKFKKEGLEKKINQITGLLPDPYFSGTKLSWLLEDTETPKDFFMGTIDTFLVWKLTEGRSYSVDATNASRTLLMDINNVSWSEEMCNLLNIPINRLPEIKNSADEYGETSLFGGKIKISGIAGDQQAALIGQGCFKAGEAKSTYGTGCFMMLNTGPDVKLSKSKLLSTIGYQIDGKVSYALEGSIFMAGASVQWLRDNLEFFPSAPEIENLAKNSNKNSNVSFIPAFTGLGAPYWDPEARGAIFGLSRETTKNDISQALLEAIAFQTKDVFECMSSDGVDLKSLKIDGGMVENKYFNQILADVLNLKILLPDNKEATAKGAAFLASLGSKHTNSLSDLNEFIGSYEQFTPLNQETA

SEQ ID NO: 127585 - protein, 393 aa, Unknown
  Bacterial polypetide isolated from the Sargasso Sea
PIYPAVIWQDRRTSDLCNDLKKEKNLESEIRKKTGLLLDPYFSATKIKWILDNVENARRMAENGELCFGTIETYLIWNLTEEKNHKTDATNASRTMLMNLETLGWDDSLLEIFDIPKNILPEICSCDDNFGSIGAYDQKFPITGVIGDQQSALFGQNCFEFGEMKSTYGTGCFLMVNTKEKIFESQARLLSTVGCMLGKSVSYALEGSIFSAGTSIQWLRDEMQFFDDSSESEELINEDFDSRGINFIPAFTGLGAPHWNSEIRGSIHGIQRDSSKEDIITAVFKAICFQTLEIVEALELDGVSVRSLKVDGGMVKNRKFLQLLSNTLSTNVKKPDQIESTAVGAFKIALLGSGIKDIDEIQEIGSYDEVKSKQSPKLIDDYQIWKNYLTKNL

SEQ ID NO: 127586 - protein, 287 aa, Unknown
  Bacterial polypetide isolated from the Sargasso Sea
MKNFLAIDQGTTSSRAIVFNSNLQPISESQKEYDLSYPNDGWVELDISDVLNSVRETVTSVLSDNLTIEACGITNQRETTVVWSKSSGEAIYPAIVWQDRRTHEYCNKLKSEGHEESVRNKTGLVLDPYFSATKIKWILDNVDGAKDKAEKGDLLFGTIDTYLIYKLTGNKNHLTDVTNASRTMLFNINTLEWDKELLDLFEIPESMLPKVLSCDGDFGNITINNQTIPIKGVIGDQQAALVGQRCIKKGDMKSTYGTGCFLMLNTEEEPISIDEGLLTTIAYSIRG

SEQ ID NO: 127587 - protein, 492 aa, Unknown
  Bacterial polypetide isolated from the Sargasso Sea
MKKFIISIDQGTTSSRVVLFDTNGNKLFISQYEFKQYFPRNGWVEHNPNEIWSTTLKALKHVIKKAKSLKGHILTIGITNQRETTILWNKKTGKPVYNAIVWQDRRTQEYCKFLKNKNYENIFRKKTGLFLDPYFSATKIKWILDNVKVSKKLLKTNNLLFGTVDTFLIWKLTKGKQHLTEATNASRTMLFNINNNKWDNEILQKLKIPMNILPEVKNSADNFGKTDKRVTGKEIPISAVLGDQQAAAVGQACFEKGSTKSTYGTGAFIIMNTGSKKINSKNKLLTTICYRLNNKTTYALEGSIFMAGAGVQWLRDKIKLINNAYETEKIAKSTKSNDEVYVVPAFSGIGAPYWRPDARGLITGLTRDSNWKTLVRATVESVAYQSNDLFYSMNKDGLKPTIVKIDGGMVANNWFSQFLANIINLKVVRPKILETTALGAALLAGYQIGEFKSLNHIKNTWRKDKEFVPKIDKKLRNHLLQGWQQAIKKTLA

SEQ ID NO: 127588 - protein, 362 aa, Unknown
  Bacterial polypetide isolated from the Sargasso Sea
KKTGLLLDPYFSATKIKWILDNVENARSMAENGELCFGTIETYLIWNLTEEKNHKTDATNASRTMLMNLETLGWDDSLLEIFDIPKNILPEICSCDDNFGSIGACDQKFPITGVIGDQQSALFGQNCFELGEMKSTYGTGCFLMVNTKEKIYESQARLLSTVGCMLGKSVSYALEGSIFSAGTSIQWLRDEMQFFDDSSKSEELINEDFDSRGVNFIPAFTGLGAPHWNSEIRGSIHGIQRDSSKEDIITAVFKAICFQTLEIVEALELDGVSVRSLKVDGGMVKNKKFLQLLSNTLSTNVKKPDQIESTAVGAFKIALLGSGIKDIDEIQEIGSYDEVKSKQSQQLRDDYQTWKNYLTKNL

SEQ ID NO: 127589 - protein, 465 aa, Unknown
  Bacterial polypetide isolated from the Sargasso Sea
MKKFIVSIDQGTTSTKVVLYNKNFHVIDTLQKEFKQFFPKNGWVEHDPIEIFKDVKFLIKKLIKKNDIKCSEILSIGIANQRETTVLWDKLSGKPVYKAIVWQDRRTISICEKLINKKLASKIQKITGLVIDPYFSATKIKWLLKNVKKTKKLLKENRLLFGTIDTWLLWNLTEKKSHFTDITNASRTMLYDSNKEEWSKSLLKLLEIPHKILPEVKPNVFDFGYTKIFGSPINIGGMAGDQQASAIGHTCFTLGKAKSTYGTGCFLLMNIGNKFKISKNKLLTSVAYKIGNKKMYCYEGSIFVAGSSIQWLRDKLLMFKDSKDTDKLYSNSNKDENVISIPALTGLGAPHWQPQVRGAFFGLTRNTSRNEIVKSILDSLGFQTLELVHCMEKDSKIKIKEMRVDGGMTKNDSFIQSLCNILQIKIIKPNNTETTSLGVAYLSGIHSGLIKNLDEISKLWNRKKV

SEQ ID NO: 127590 - protein, 493 aa, Unknown
  Bacterial polypetide isolated from the Sargasso Sea
MKKFILSIDQGTTSSRAILFDLKGNPKYTSQMEFTQYFPKDGWVEHDPEEIWSTTLKVLKNVVKKSKILKGKILTIGITNQRETTILWDKYTGKPVYNAIVWQDRRSADYCNKLIKQKKETIIYNKTGLLIDAYFSATKIKWVIDNVPKAKQLIKQKRLLFGTVDCFLLWKLTGGTNHFTDATNASRTMLYNISSNKWDKQILDILKIPNYILPEVKDCSDDFGHTDPKITGESYSITGMVGDQQAATIGQCCFEPGSLKSTYGTGAFVLLNTGSKIIYSKNRLLTTIGYRINGKTTYALEGSIFIAGAGVQWLRDKVKFLTKASDSEKIIKKLKSNHGVYLVPAFTGIGAPYWNSKSRGVLSGITRDTGISEIVRATVESVGYQTYDLFEAMKNDGLRPKIVRVDGGMVKNNWFSQFLSDVINIKVLRPKVEETTALGAAFMAGLKIGVYKSINDISKNWSLDKKFSPKMKKTTRKKLINGWQKAIKRALIT

SEQ ID NO: 127591 - protein, 497 aa, Unknown
  Bacterial polypetide isolated from the Sargasso Sea
MSLSGYILLIDQGTTSSRALILNELGQILAQKNIEFKQYYPENGWVEHDPVEILKTTTDAIKQVLAELKINAQDVVVAGITNQRETIVAWDKLTAKPIYNAIVWQDRRTENYCNELKEKNLIDTIKSKTGLVIDPYFSATKIKWILENIEEAKECLNKGNLLVGTIDTWLIWNFTKGSEHSTDVTNASRTMLYNIADDQWDEELLDIFVLPRSILPHVKNSVDDFGKIVPDFFGNEIQIGGVAGDQQAASVGQSCFKEGMVKSTYGTGCFLLMNTGDNILNSKSNLLSTVAYNIKGKKSYAIEGSIFNAGTVVQWMRDELQFYNKASEVENLASKSVNDIHFVPAFTGLGAPYWRSDIRGQISGITRDTSKADIAMAALKSICFQTRDLFECLLNDSNLTREKFIIRVDGGMTSNNMMMQFLSDILQVKIERPVNQESTAIGAAYLAGIYAGIYKDVADVEKLWKTDQIFEPKISIDQAEQFYDGWKKTIERLISNG

SEQ ID NO: 127592 - protein, 342 aa, Unknown
  Bacterial polypetide isolated from the Sargasso Sea
MKYFLSIDQGTTSTRCILFNTDGSIASSHQIELTQYFPDNNSVEHDPIEIIDSVNKCIQNVVNDIDVNEIVSIGITNQRETTVAWSKSTGKPFYNAIVWQDTRTQSICDELSKNKRFTEVIKNTGLPISTYFSLSKILWLIENVPEIRSSLEDNVCFGTIDSWIVYNLTGNFYTDVTNASRTLMYDLHNMEWSDDILNELSIPKHSLPEVKPSLSNFGKIDGVIKGVPITAILGDQQAALFGQNCTSKGDVKNTYGTGCFALTNTGTDIIESDNGLLTTLAYQIEGEDPLYALEGSVPIAGAAVQWLRDNLNIIKSSDEIESLAMGEKDNGDVYFVPAFSGL

SEQ ID NO: 127593 - protein, 487 aa, Unknown
  Bacterial polypetide isolated from the Sargasso Sea
MDYFLSIDQGTTSTRCILFDQDGGIKETHQVEFKQIFPDNKSVEHDANEILETVKTCIQYVIKDTELESIKSIGITNQRETTVAWSKSTGKPLYNAIVWQDTRTQDICDELIADESLSSLFEKTGLPIATYFSLSKILWLIRNVPNIKNSLEDDVCFGTIDSWLIYNLTGNFYTDVTNASRTLLYDLYDMEWCSDLLEKLDIPINSLPQVKPSFSNFGEMKEIIPGVPVTAILGDQQAALFGQNCINKGDVKNTYGTGCFALTNTGKDIVKSNNGLLTTIAYQKEGEDPMFALEGSVPIAGAAVQWLRDNLNIIDKSEDIESLAMLEKDNGDVYFVPAFSGLFSPHWDETARGSLFGLTRFSNKSHMARAVIESVAFQTYELLESMEKDLDTDFESLKVDGGMVANNLLMQFQSDILNKSIHSQEINEITALGVGVASYLYVMDLPLSSMGNYITSSKTWNPNMSNETRINSLKSWYKAIEKAKNWL

SEQ ID NO: 127594 - protein, 276 aa, Unknown
  Bacterial polypetide isolated from the Sargasso Sea
MKRYFLIIDQGTTSSRVVIYKKNFEIFDIVQKEFKQFFPNEGWVEHDANEIWTDVKYLITKALKKNKLLAKNIISIGIANQRETTVLWNKATGKPICRAIVWQDRRTSEYCSNLKKRGLGKKIQKITGLELDPYFSASKIKWIFDNVKEANINLKQNNLLFGTIDTWLLWNLTEGKSHLTDISNASRTMIFDSKKEEWSNEILKIFRISKKILPQVVENSFNFGSTKLFGEQISIGGMAGDQQAATIGQACFDKGQSKSTYGTGCFLLMNIGDKFK

SEQ ID NO: 127595 - protein, 323 aa, Unknown
  Bacterial polypetide isolated from the Sargasso Sea
MSLDGYLLSIDQGTTSSRALILDIQGNIISQKNFEFKQYFPNDGWVEHDPIEILKTTQDAVNFVIRETNISPKDINIAGITNQRETVVAWNKITGKPVYNAIVWQDRRTENFCETLREKNLTKLIQSKTGLIIDPYFSATKIKWIIENIEEAKKIANENNLLVGTIDSWLIWNFTKGECHYTDVTNASRTMLYNVKEDCWDDELLDIFNINKNILPDVKNCVDDFGAIDSSFFGEKISIGGVAGDQQAATIGQACFKEGMVKSTYGTGCFLLMNTGNKFIESESKLLSTKAYNIFDKKDFALEGSIFNAGTVIQWMRDEMNFI

SEQ ID NO: 127596 - protein, 484 aa, Unknown
  Bacterial polypetide isolated from the Sargasso Sea
MKNFLSIDQGTTSSRSIIFDANLNLVTDAQEEYDLTYPEDGWVELEPKKIIETVTNTLKKVVNADIGLEACGITNQRETTIVWSKSTGEAIYPGIVWQDRRTHEYCSYLKSNGHEPVIKEKTGLLLDPYFSATKIKWILDNVEGAREKASKGELLFGTVDSYLIYMLSKEKNHFTDVTNASRTLLFNIKSMEWDDELLELFEIPKTMMPEVLSCDGDFGNLTINNCEIPIRGVIGDQQAALVGQGCFNNGDMKSTYGTGCFLMVNTEEKPLNIDEGLLTTVAYQLDDKVHYAIEGSIYSSGTIIKWLRDKMKFFESAKDSEKYLNKKGNSNNVLFLPAFNGLGAPYWNSDIRGGFYGLTQDSSIEDMVTAAFHSISFQTKEITAILQKYDIQITNLSVDGGMVKNNSFCQLLADTLNKKIIQPKNVESTAIGACKVCMLASGLSIINAKNDDVNVFTPNIELTKTYDRAFNDWKSYVEKSLTTS

SEQ ID NO: 127597 - protein, 471 aa, Unknown
  Bacterial polypetide isolated from the Sargasso Sea
MISTRRITQHFPQSGWVEHNPKDLLNTTIDTCKSALNQKSINPKKIAAIGITNQRETTLVWDKNTGKPVYNAIVWQDRRTASHCEELRKKGYEKKVTDITGLLLDPYFSSTKLAWVLDNVEGVRSRAEAGNLLFGTVDSYLIWHLTGRQSHVTDATNAARTMLYDIRNGAWSTEMCDMLNIPIKMLPEVCDCAAEFGLTSQEIFGVSIPIKGVAGDQHAATLGQACFEPGMMKSTYGTGCFALLNTGDTIVSSHNRMLTTIGYQLDGKTTYALEGSIFIAGAVVQWLRDGLKILAKASESGDLAKLSDNSQNLILVPAFTGLGAPYWNAECRGAVYGLTRNSGPAEFSRAALESVGFQTRDLLEAMISDWQGGAKGGVLRVDGGMSASDWTMQFLSNILNAPVDRPEILETTAMGAAWLAGMRVGLYPEQSEFAKSWSLEKRFQPDMDDELREQRYKDWKSAVAATLEVRT

SEQ ID NO: 127598 - protein, 300 aa, Unknown
  Bacterial polypetide isolated from the Sargasso Sea
MEYFLSIDQGTTSTRCILFNENGEIKLSHQVEIKQYFPDSNSVEHDGKEIIKTVEECIKAVVKNIDTNSIKSVGLTNQRETTIAWSKSTGEPFHNAIVWQDTRTQDICNELLANKKLKNHFERTGLPVATYFSLSKILWLIRNVPSIKNGLDDDVCFGTIDSWIIYNLTGKFLTDVTNASRTLMFDIYDLDWSQAILEELGIPIDSLPKVMPSLSNFGDINKIIPGVPITAVLGDQQAALFGQNCTTRGDVKNTYGTGCFALTNTGEEIIKSSHGLLNYIAYQVEGRKPLYALEGSVPIA

SEQ ID NO: 127599 - protein, 492 aa, Unknown
  Bacterial polypetide isolated from the Sargasso Sea
MKKFIISIDQGTTSSRAILFDLKGKLIFTSQTEFTQYFPKDGWVEHDPEEIWKTTLKVFKEVIKKSKKLKGKVLTIGITNQRETTILWDKKTGKPVYNAIVWQDRRSSEYCKKLIKQKKETIIYNKTGLLIDSYFSATKIKWIIDNVPKARDLIKKKRLLFGTVDSFLLWKLTKGVDHATDATNASRTMLFNISTNKWDDQILKILKIPKEILPVVKDCAADFGYTDPSITGTSYPITGMVGDQQSATIGQCCFEPGSVKSTYGTGAFLLLNTGSKKVYSKNRLLTTICYRINGKTTYALEGTIFIAGAGVQWLRDKIKFIKKASDTEKIAKSLSSNQGIYLVPAFTGLGAPYWNVNARGILTGLTRDTGPKEITRATVESVAYQTYDLFEAMKNDGLKPKLIKVDGGMVLNNWFSQFLSDTINTKVLRPKVNETTALGAAFMAGLQIGVYKSLKDIAKNWQADKSFKPRIKNSERKILVDGWSKAIKKTLS

SEQ ID NO: 127600 - protein, 500 aa, Unknown
  Bacterial polypetide isolated from the Sargasso Sea
MQDQYILALDQGTTSSRAMLFDRQGNIVSIAQKEFEQIYPQPGWVEHDPQEIWSTQAGVAAEAVTRTGLNGTSIAAIGITNQRETTIVWDRETGQPVYNAIVWQDRRTADFCDSLKAQGFEAKVRAKTGLPIDSYFSGTKIRWILDNVPGAREKAKQGKLAFGTVDSWLVWNFTKHELHVTDVTNASRTMLFNIHTREWDNELLDMLDIPRSMLPEVKASSEIYGHTKTTVFASKIPLAGIAGDQQAALFGQMCTQSGMVKNTYGTGCFLMMNTGDKPIESKNNLVTTIAWQIGDNVQYALEGSIFIAGAVVQWLRDGVGIIKSAAEIEALAASVPHTDGVYLVPAFAGLGAPHWNARARGSVFGVTRGTTSAHLARAALDSIAYQSLDVLAAMEADSGISIGELRVDGGASANNLLMQFQADLLGVDAVRPQITETTALGAAYLAGLAIGYWKNLDEVRSQWQLDRRFSPSMPKEQVERCMSGWQRAVRAAKAWADDAQ

SEQ ID NO: 127601 - protein, 443 aa, Unknown
  Bacterial polypetide isolated from the Sargasso Sea
MTRAYVGSVDQGTTSTRFVVYEAANARDPSTYEAIASHQIEHAQKYPRPGWCAHDGEEIFERAVTCAREALKRASIEASDLACVGITNQRETTMAWRRSDGTPCCDAVVWLDTRTRETCEWLVREKCGGDKRAFANVCGLPVSTYFSGVKMRWLLDNEPSVRAAADAGDLCFGTIESWLVYKLTGGKVHVTDASNASRTMLMRLDDLTWDDATCEAFGVPKEALPEIKSCAEFYGEVDASVEGLGGIKITGCIGDQQSATLGQRCDVGEAKNTYGTGCFMILNTGATAVPSKHGLLTTLAWQLGGRDKAPKYALEGSVAIGGAVVHWLRDNLGLITKASEIEGLASGVEDAAGVTFVPAFSGLFAPRWREDARGVIVGLTQYANKGHIARAALDAIAFQSRDVLEAMRQDAAESTSHALNTLKVDGGAQCERSTHANPIGLRR

SEQ ID NO: 127602 - protein, 152 aa, Unknown
  Bacterial polypetide isolated from the Sargasso Sea
MKYILSIDQGTTSSRAIVFDENQNIISESQKEYQLHYPKDGWVEANPDEILGTVKETIKKALETSEVDIAACGITNQRETVVVWDRLSGKPIYPAIIWQDRRTSDLCNELKNKENLESEIRKKTGLLLDPYFSATKIKWILDNVENARKMAE

SEQ ID NO: 127603 - protein, 311 aa, Unknown
  Bacterial polypetide isolated from the Sargasso Sea
HLMAAEQWLYNINNNKWDKEILKKLNIPQKILPEVKNSADNFGKTDKKITGVEISISAVLGDQQAAAFGQTCFEKGSIKSTYGTGAFVIMNTGPKKINSKNKLLTTICYRLNNKNTYALEGSIFIAGAGVQWLRDKVKLIKKAPETEKISKSSKVNDGVFVVPAFSGMGAPYWRPDARGVITGLTRDSDWKSIVRATVESVGYQSFDLFDSMNKDGLKPKIVKVDGGMVANNWFTQFLADIINLKVVRPKILETTALGVALLAGHQIGEYKSLNQIKNMWKKDRIFKPKMKQNFRKDLLNGWKLAIKKTLA

SEQ ID NO: 127604 - protein, 240 aa, Unknown
  Bacterial polypetide isolated from the Sargasso Sea
MKNFLSIDQGTTSSRSIIFDANLNLVTDAQEEYDLTYPEDGWVELEPKKIIETVTNTLNKVVSADIDLEACGITNQRETTIVWSKSTGEAIYPGIVWQDRRTHEYCSYLKSNGHETIIKEKTGLLLDPYFSATKIKWILDNVDGAREKASKGELLFGTVDSYLIYMLSKEKNHFTDVTNASRTLLFNIKSMEWDDELLELFEIPKTMMPEVLSCDGDFGNLKINDCEIPIRGVIGDQQAA

SEQ ID NO: 127605 - protein, 374 aa, Unknown
  Bacterial polypetide isolated from the Sargasso Sea
TGKPIYPIIVWQDRRTEDLCKKIKAEGNEELIFKKTGLQVDPYFSATKIAWILDNVPEARQKAENGDLLFGTIDTLLLWQLAGEHKTDVTNASRTMLYNINNKEWDEDLLELFNIPKTILPQVEESSHEFGQHKETKIKITGIIGDQQAALFGQQCFSMNSMKATFGTGCFLMANTGGEPKYSDQGLLTTIGYGVSNTTAYALEGSIFSCGTIVKWLRDGLGFFKDASDTEALINKGWNSNGVLFIPALSGLGVPHWNPTIKGSFYGLTADNTKEDLITAAFKSIAYQLKDILKLLKSEGLVVEGLSIDGGMTVNKTFCQLLSDLLEEQVNVSENPESTAIGAASVAMVGVGLLSSIDDLKKSFISWCNINPEG

SEQ ID NO: 127606 - protein, 369 aa, Unknown
  Bacterial polypetide isolated from the Sargasso Sea
TGLLLDPYFSATKVRWILENIDGCRKKAEDGKLAFGTIDAWLIWNLTGGKHHITDVTNASRTLLYNIHDMDWDNDLLEMFSIPKEILPKVRPSSFIYGKTKSNLFKQKIAISGIAGDQQAALFGQNCIESGMVKNTYGTGCFMLMNTGDKPIRSDHNLLTTIAWMLDNKVEYALEGSVFMGGAIVQWLRDGLGIINSSEEIETVATSIKDSGGVYLVPAFAGMGAPHWDPHARGLIMGLTRGSTSAHIARAALESIAYQCYDLLNAMQADSNIKLRQLRVDGGASVNNFLMQFQANLLDIPVVRPRIKETTALGAAFLAGLAVSFWEDQADISRQWEPEMIFSSKIHKDEMDQHYSGWVKAVEKARSNV

SEQ ID NO: 127607 - protein, 483 aa, Unknown
  Bacterial polypetide isolated from the Sargasso Sea
MKNYLSIDQGTTSSRAIIFNSNLELVRDSQKEYDLVYPNDGWVELDPRDVIETVKETITAVLDKNEEIEACGITNQRETTLVWSKSTGEPIYSAIVWQDRRTHEICSKLKSDGYEELISQKTGLLLDPYFSATKIKWILDNVDGARSMAEEGDLLFGTIDTYLIYKFSKEKNHFTDVTNASRTLLFNINTMEWDDELLELFDIPKPMMPKVLACDEDFGTISINGNNIPIRGVIGDQQAALVGQGCFSNGDMKSTYGTGCFLMVNTEDNPVSIKEGLLTTIAYKLEGRVHYAIEGSIYSCGNIIKWLRDKMKFFNSAIESESFIDKEGNSNNVLFLPAFNGLGAPFWDSDIRGGFYGITQDTTITDMTTASFLAIAFQTKEITSILEKYKIEISKLLVDGGMVQNKTFCQLLADALQKEIIKPTNVESTALGACKVAMIGSGVDLREISNQNLSTFRPNKDLKEQYLINHKNWKEYITDSLKN

SEQ ID NO: 127608 - protein, 301 aa, Unknown
  Bacterial polypetide isolated from the Sargasso Sea
NINENNWDNEILKIFKINKNILPIVKNSADDFGYTSKKIIGEKISISAVLGDQQAAAFGQACFEKGSVKSTYGTGAFVIMNTGNKRLISKNKLLTTICYRLNNKNTFALEGSIFVAGAGVQWLRDKIRLINNANETEKILKSKENNDGVYIVPAFTGLGVPYWSSSSRGLITGLTRNSDWKDLVRAIIESVAYQSYDLFESMRKDGLKPKIVKVDGGMVTNNWFSQFLSNIIDTKVIRPKVKETTALGVAFMAGLKIGVYKSLSDISNYWKIDKKFTPKISKSNRTKLLKGWQQAIRKTLV

SEQ ID NO: 127609 - protein, 267 aa, Unknown
  Bacterial polypetide isolated from the Sargasso Sea
TSKKVIGEKIPFSAVLGDQQAAAFGQACFKKGSVKSTYGTGAFVIMNTGNKKLISKNKLLTTICYRLNNKTTFAIEGSIFVAGAGVQWLRDKIKLINNAYETEKIAKSRENNDGVYIVPAFTGLGAPYWNSSSRGLITGLTRNSDWKDLVRATIESVAYQSYDLFESMRKDGLKPKIIKIDGGMVANNWFSQFLSNIIDTKAIRPKVKETTALGVAFMAGLKIGVYKSLSDISNYWKIDKKFTPKISKSYRTKLLKGWQQAIRKTLV

SEQ ID NO: 127610 - protein, 296 aa, Unknown
  Bacterial polypetide isolated from the Sargasso Sea
MGRYHSKALKIKKHILPEVKDCADDYGQTHSSITGKSIPINGVVGDQQSATIGQCCFEPGSLKSTYGTGAFVLLNTGTKKIYSKNRLLTTIAYRINGRTTYAMEGSIFIAGAGVQWLRDRMKFFKKAPETEKIVKSLNTNNDIYLVPAFTGLGAPYWNANARGVLSGITRDTSPKEIVRATIEAVAYQTHDLFEAMKHDGLRPKLVKVDGGMVMNNWFSQFLCDVVNVNVLRPKVQETTALGAAFMAGLQIGVYKSLKDISKKWSLDRKFKPKMKNQLRNALVKGWATSVKRALIV

SEQ ID NO: 127611 - protein, 478 aa, Unknown
  Bacterial polypetide isolated from the Sargasso Sea
MTKILTIDQGTTSSRSIVFDSNANIVEVSQKEYPLIYPEDGWVEIDPEVLIKSVTDTLGKVNLDGIASAAITNQRETTIIWERDTGKPIYNAIVWQDRRTKDFCSSIDDKEILKEVSARTGLLLDPYFSATKIKWILDNVEGAKKKAKEGKLCFGTVDAYLMYVLSNKKIHKTDITNASRTMLFNINTLSWDNYLLDLFDIPESMLPEVSNSDESFGTLSDCNNINVNAVLGDQQAALFGQGCLNAGSLKSTYGTGCFLMANIGTKPLASDKGLLTTLGFSFNKEIHYAIEGSIYSAGTVVQWLRDNLEFFAESPESEKFLNSDANANGVYFIPAFTGLGAPYWDSNIRASYHGITRDTSKKDLINAAFNSISYQTKDIVDCLEQTNIEVKSLSVDGGMAANKTFVSHVANILNIPIQVPKNTESTAKGVACLAGITTGLMNIDLIENQEKTVCNPNNALNQSMEKDYKEWKKLIKKN

SEQ ID NO: 127612 - protein, 483 aa, Unknown
  Bacterial polypetide isolated from the Sargasso Sea
MKKYLSIDQGTSSSRAIIFDANLNLINDSQQEYDLAYPNDGWVELNPNDVLETVRDTVVNVLSEGQAIEACGITNQRETTVVWSKETGDPIYPAIVWQDRRTNEYCNKLKSKGFEKRVKEKTGLVLDPYFSATKIKWILDNVDGAKDMAKKGDLLFGTVDTYLIYKLTNEKNHLTDVTNASRTLLFNIKTMQWDDELLELFDIPKSMLPEVLGCDGDFGTLSLGTTNIPIRGVIGDQQAALVGQGCFKNGDMKSTYGTGCFLMVNTENKHYEIDEGLLTTVAYKLGDEVHYAIEGSIYSCGNIIQWLRDKMEFFTNSKDSEKFLNPNGNTNNVLFLPAFNGLGAPFWNSDVRGGFYGITQDSSINDMVTAAFQSITFQTKEITTILENYDIEINKLLVDGGMVNNNTFCQVLSDTLGKDIIQPSNVESTAIGACKVAMIGSGEDLSNITDDSQSIYKPNLDLIKVYEDNHAKWKGYLLNSLKN

SEQ ID NO: 127613 - protein, 463 aa, Unknown
  Bacterial polypetide isolated from the Sargasso Sea
MKNYLSIDQGTTSSRSIIFNSNLEKQIDSQLEYKLDYPDDGWVELRPDDVVNTVKKTIANVLDNFNGSIEACGITNQRETTIVWSRDTGEPIYPGIVWQDRRTNEYCQELKSNGYEKKVSEKTGLVLDPYFSATKVKWILDNVEGAKERAQKGELAFGTVDSYLIFKLTKEKNHLTDVTNASRTMLFNIHNKEWDQELLDIFEIPNSMLPEVLFCDGDYGTIVHSDKKIPIRGVIGDQQGALVGQDCYEYGDMKSTYGTGCFLMVNTKDEAVKSDQGLLTTIAYGLNGNISYALEGSIYSSGNIIQWLRDKMKFFDDAKESEKYINASGNSNNVLFLPAFNGLGAPFWDSNIRAGLKGITQDTSINDIVTAAFNSIAFQTKEITKVLETNNININKLLVDGGMVANESFCQMLADTLQKNIKRPANVESTALGACKVAMMASGENISKIKSNSSNFEPNKSLE

SEQ ID NO: 127614 - protein, 130 aa, Unknown
  Bacterial polypetide isolated from the Sargasso Sea
MKKFIVSIDAGTTSNRSILFDINGKPVFSSQKEFTQYFPKSGWVEHDPDEIWRTTLKTLKDVIKKAKRLKGEILTIGITNQRETTVLWDKRSGKPVYKAIVWQDRRTEDFCKKLRKQNKDTAIFNKTGLL

SEQ ID NO: 127615 - protein, 451 aa, Unknown
  Bacterial polypetide isolated from the Sargasso Sea
QGTTSSRAIIFDSDLNLINDSQKEYDLAYPNDGWVELNPNDVLETVRDTVVNVLSEDQEIEACGITNQRETTVVWSKETGDPIYPAIVWQDRRTNEFCNELKSKGFEKTVKKKTGLVLDPYFSATKIKWILDNVDGAKDMAKKGNLLFGTIDTYLIYKLTNEKSHLTDVTNASRTMLFNIKTMQWDNELLELFDIPKSMLPEVLGCDGEFGTLSIGTTNIPIRGVIGDQQAALVGQSCFKNGDMKSTYGTGCFLMVNTENKPYEIDEGLLTTVAYKLGDEVHYAIEGSIYSCGNIIQWLRDKMEFFANSKDSEKFLNPNGNTNNVLFLPAFNGLGAPFWNSDVRGGFYGITQDSSINDMVTAAFQSITFQTKEITTILENYDIEINKLLVDGGMVNNNTFCQVLSDTLGKDIIQPSNVESTAIGACKVAMIGSGEDYRVLLMIPHPFISQI

SEQ ID NO: 127616 - protein, 120 aa, Unknown
  Bacterial polypetide isolated from the Sargasso Sea
MKKFIISIDQGTTSSRVILFNTKGKIEFISQYELKQYFPKNGWVEQNPNEIWSTTLKALKQVIKKANKFKGRILTIGIANQRETTILWNKKTGKPLYNAIVWQDRRTQEYCKILKNKKYE

SEQ ID NO: 127617 - protein, 430 aa, Unknown
  Bacterial polypetide isolated from the Sargasso Sea
MKKFIVSIDQGTTSSKVILYNKKFHVIDILQKEFRQFFPKNGWVEHDPLEIFKDIKFLIKKLIKKNDIKCSEIISIGIANQRETTVLWDKLSGKPVYKAIVWQDRRTIPMCKKLINNKLASKIQKITGLVIDPYFSATKIKWLLNNVRKTKKLLKENRLLFGTIDTWLLWNLTEKKSHFTDITNASRTMLYDSKKEEWSKSILKLLQIPHKILPEVKPNVFDFGSTKIFGSPIKIGGMAGDQQASAIGHTCFTLGKAKSTYGTGCFLLMNIGNKFKISKNKLLTSVAYKIGNKKMYCYEGSIFIAGSSIQWLRDKLLMFKNSKDTNKLYSNANKDENVIAIPALTGLGAPHWQPQVRGAFFGLTRNTSRNEIVKSILESLGFQTLELVNCMEKDSKIKIKEMRVDGGMTKNDSFVQSLCNILQIKNIKPK

SEQ ID NO: 127618 - protein, 461 aa, Unknown
  Bacterial polypetide isolated from the Sargasso Sea
SQLEFKQYYPKNGWVEHNPNEIWSSVIKVTKNVLEKSKKLKIKIKALGITNQRETTICWDKKNGKPVYNAIVWQDRRTENYCKKIKNKEKLIRKKTGLFLDPYFSATKVKWIIDNVPKAKKLLRKNQLLFGTIDSFLIWKLTEGKIHATDATNASRTMLFNIVDNRWDKEILKIFKLNKKILPIVKNSADNYGFTSKNIIGQNIPITGVLGDQQASMIGQACFEKGAVKSTYGTGAFVLMNTGDERLFSKNKLITSICYRIKNKTTYALEGSIFIAGAGVQWLRDKIKLINNASETEKIAKSKNNNKGVFVVPAFTGLGAPYWNSKSRGLVTGLTRDSDWKDLVRATLESVAYQTFDLFESMRKDGLKPSRVKVDGGMVSNNWFTQFLSDILKINITRPKINETTALGAAYIAGYQIGIFKSFKDIKRNWKKNRDFKPKLNKTYRNKLLQGWKQAIKKTLA

SEQ ID NO: 127619 - protein, 393 aa, Unknown
  Bacterial polypetide isolated from the Sargasso Sea
IVWQDRRTQQYCQNLKKNNYENILRKKTGLFIDPYFSATKIRWILDNIKNSKKLLKSNNLLFGTIDTFLIWKLTNGRKHLTEATNASRTMLFNINTNQWDKDILKKLNIPYKILPEVKNSADNFGSTDKKVIGQEIPISAVLGDQQAAAVGQSCFQKGSIKSTYGTGAFVIMNTGSKKIFSKNKLLTTICYRLNGKNTYALEGSIFIAGAGVQWLRDKIRLINNAYETEEIAKSIKNNDGVYIVPAFSGIGAPYWKPDARGIVTGLTRNSDWKNLVRAVVESVAYQSYDLFDAMKSDGLKPKLIKVDGGMIANNWFSQFLSNIINLNVVRPKILETTALGAALLAGYQIGEFKSLNEIQTKWKKDRVFTPKINVSLRNNLLQGWKQAIRKTLA

SEQ ID NO: 127620 - protein, 281 aa, Unknown
  Bacterial polypetide isolated from the Sargasso Sea
MEYFGAIDQGTTSSRFIVFDNKGNIVEQHQEEFSQYFPDEYSVEHNPEEIWISVVNCIKKVLKTININDIKSIGISNQRETTVAWSKTTGKPLFNAIVWQDTRTQSICDDISNKKNIKEDIKRTGLPIATYFSLSKILWLIDNVPEVQNALEKDDVIFGTVDSWLIYKLNGTFQTDVTNASRTLLFDLHSLDWNVNLLKEFKIPSNSLPIIKPSLHNYGECKSILEGIPITAVLGDQQASLFGQHCFKKGEVKNTYGTGCFALTNTGDDIIYSSNGLLTTV

SEQ ID NO: 127621 - protein, 500 aa, Unknown
  Bacterial polypetide isolated from the Sargasso Sea
MKKGKSVQKKYVVALDQGTTSSRAIVFDHDANIVSVSQREFTQLYPNPGWVEHDPMEIWASQSSVLIESLARAGIHSDEVAAIGITNQRETTVVWEKATGKPVYNAIVWQCRRSAEICEQLKAHGLEDYVRENTGLLLDPYFSGTKIKWILDNVPDARAKAKRGELLFGTVDTWLLWKLTEGKVHVTDPTNAARTLLFNIHSLSWDSKLLEALDIPAAMLPEVKPSCSVYGTTRIAGEGSEIPLAGIAGDQQAALFGQLCVEPGMAKNTYGTGCFLLMNTGNKAVRSSHGLLTTVAVGAQGEVNYALEGSVFMGGATIQWLRDELGLIRDASDTEYFASKVADTNGVYLVPAFVGLGAPYWDPNARGALFGLTRGANRNHIIRAALESIAYQSKDLLDAMIKDSGVSLKRLKVDGGAVANDFLMQFQADITDVEVLRPSVCETTALGAAFLAGLAVGFWHSVTELEHKACIDKHFKPNIDASKRERLYAGWQDAVARTRS

SEQ ID NO: 127622 - protein, 489 aa, Unknown
  Bacterial polypetide isolated from the Sargasso Sea
MKAILAIDQGTTSTRAIAFSFDGKKLFSSQLEFKQYFPKSGWVEHNPNEIWLKTLKVIKNVGNKCKKNKITIVTIGITNQRETTVLWDKTNGKPVYNAIVWQDRRTENYCKKIKNKENLIRKKTGLFIDPYFSATKIKWVLDNVAKAKKLLKKNLLLFGTIDSFLIWKLTGGKLHATDATNASRTMLFNLNKNKWDHDILKIFKIKKNILPVVKNSADNFGFTSKKILGKKISISAVLGDQQAAVVGQGCFEKGSVKSTYGTGAFVIMNTGNKKLISKNRLLSTICYRLNNKTTYALEGSIFIAGAGVQWLRDKIKLINNAYETEKIARSKKNNQGIYLVPAFTGLGAPYWSPNSRGLITGLTRNTDWKDLVRAVVESVAYQSFDLFESMRKDGLRPKIVKVDGGMVTNNWFSQFLADILNIKVIRSKTEETTALGVAFMAGYQVGVYKSLGHIKSKWKKRRDFTPKLNKTYRNKLLQGWKQAIRKTLA

SEQ ID NO: 127623 - protein, 308 aa, Unknown
  Bacterial polypetide isolated from the Sargasso Sea
MDLEQQHWVDDFREPTGLPASALPELLPCRGEFGRMAADLPFAGLPIQAMLGDQQAATLGQLCLQPGEGKCTYGTGAFLVINTGDVVRRSDAGLLSTLGWTDAAGTPSFCLEGSLFNAGTVIQWLRDGLQIIDQAPQVNELARSVPDSGGVMLVPAFTGWGTPHWDPQARGVLVGLTRDSGRGHIARAALEGIALSVATLVELAEQALGSGLGELAVDGGAAASDPLLQAQADCTGLTVRRPASLESTARGVALFAGLQAGVISDLEQLATARRDGAELFHPQMDASQRDRWRTRWQDAVSRSLGWHG

SEQ ID NO: 127624 - protein, 386 aa, Unknown
  Bacterial polypetide isolated from the Sargasso Sea
MSTIVMALDQGTTSSRTILFSENGEIVADANAPLACHYPQSGWVEQDPQEIWTSQSQTIQEALKKAALTMKEIAAVGITNQRESTIAWDRNTGEAIAPAINWQCRRTADFCEELKDEGFDRVLRNKTGLVTDPYFSGTKMRWILENVPQARELAEQGNLCFGTVDSWLIWQLTSGHLHVTEISNASRTMVFNIYTCLWDDEILSRFGIPRETLPEVRPSSGIIAQIDPELFRGSAPIAGVAGDQQAALYGQACFETGMAKNTYGTGCFMISNTGSEPVHSKNGLLTTIAWQIEQEITYALEGSVFIAGALVQWLRDGLQLFADASETQKMAESVSDSGGVFVVPAFVGLGAPHWDPYARGTIVGLSRDTNRNHIVRASLEAIAFNQ

SEQ ID NO: 127625 - protein, 499 aa, Unknown
  Bacterial polypetide isolated from the Sargasso Sea
MQDQYILALDQGTTSSRAMLFDRLGNVVSTAQKEFQQIYPRPGWVEHDPQEIWSTQAGVAAEAVTRAGMNGTSIAAIGITNQRETTIVWDRETGHPIYNAIVWQDRRTADFCDQLKEQGLEEKVRAKTGLPIDSYFSATKIRWILDNVEGAREKAKQGRLAFGTVDSWLVWNFTKGGLHVTDVTNASRTMLFNIHTLKWDDELLEALDIPRNMLPEVRASSEVYGPTKTTVFASKIPLAGIAGDQHAALFGQMCTESGMVKNTYGTGCFLVMNTGDKPIESKNNLVTTIAWQIGDQINYALEGSIFIGGAVVQWLRDGLGIIKNAAEIETMARSVPHCDGVYLVPAFAGLGAPHWNARARGTLFGVTRGTSSAHIARAALDSIAYQSLDVLKAMEADSGIRIGELRVDGGACANNLLMQFQADILGVDAVRPKVSETTALGAAYLAGLAVGYWKDVNELQSQWALDRRFTPALPHAEVKECLDGWQRAIRAAKAWADTP

SEQ ID NO: 127626 - protein, 493 aa, Unknown
  Bacterial polypetide isolated from the Sargasso Sea
MKKYFLVIDQGTTSSRIVLYNKKFEIFDIVQKEFKQYFPNEGWVEHNATEIWDDVRNLISKILRKNKLNSKNIISIGITNQRETTVLWNKKTGKPVYRAIVWQDRRTANLCENLKRKGIDKKIQKITGLELDPYFSATKIKWIIDNVKEVNKNLKNNNLLFGTIDTWLLWKLTKGKSHLTDISNASRTMIFDSQKEQWSDKILKIFNIPKNILPTVVENAYDFGSTKLFGDSIPIGGMAGDQQSATIGQACFKKGQSKSTYGTGCFLLMNIGEKFKLSKNRLLTTVAFKINGKKMFCYEGSIFVAGSAIQWLRDNLKFIKDSSETDKLYKKANKDESLFFVPALTGLGAPYWNPNARGTFFGITRNTSKEDIIKATLDSLSFQTYELIECMEKDSKTKISEIRVDGGMVKNNSFLQSLANISQIKIIRPSNVETTSLGAAYLAAIQSGYLKNTSQISKLWKKDKTVKANINKSISTSSISKWKSIINVVNNFY

SEQ ID NO: 127627 - protein, 388 aa, Unknown
  Bacterial polypetide isolated from the Sargasso Sea
TSDFCKKLKEQSKEEMIKNKTGLLLDPYFSSTKLNWLINNIPDGYNRAKNGELIFGTVDSYLIWKLTGGKSHVTDATNASRTMLFNIKDNKWDKEICNLMGIPMNMLPRVLDSSDFFGEVEENIFGTSIPILGVAGDQQAAAIGQACFNPGMIKSTYGTGCFSLLNTGSKFVKSENNMLTTIAYRINNKTTYALEGSIFIAGAVIQWLRDEMKFLKSADKSGIMAEEADQDQRLYFVPAFTGLGAPYWQPDVRGAIFGLNRNTGQKEITKAALESVAFQSLDLINAMLLDFEMSLDKLILRVDGGMSASNWTMQNLSNIIQAPVDRPKFLETTALGAAWLAGLKAGVYPKMDDFSEQWDLDIRFKPKIQKYIASDLYKGWKKAVSCTL

SEQ ID NO: 127628 - protein, 488 aa, Unknown
  Bacterial polypetide isolated from the Sargasso Sea
MEYFGAIDQGTTSSRFIVFDNKGNIVEQHQEEFTQYFPDEYSVEHNPDEIWISVVNCINEVLKKININDIKSIGISNQRETTVAWSKSTGKPLFNAIVWQDTRTQSICDDISNNKNVTEDIKRTGLPIATYFSLSKILWLIDNVPAVQSSLENDDIIFGTVDSWLIYKLNGTFQTDVTNASRTLLFDLDSLNWNDNLLNEFNIPINSLPIINPSLHNYGECKSILEGIPITAVLGDQQASLFGQHCFNKGEVKNTYGTGCFALTNTGDDIIYSNNGLLTTVAYQYGERNVKYALEGSVAIAGAAVQWLRDNLNLIETSEQIESYALEEKNNGGVYFVPAFSGLFSPHWDETARGVLVGLTRYSNKSHICRAVLESVAYQSYDLLQAMEKDIGTKFNEVKVDGGMVNNNLLMQFQSDIFNKNIISRDIQEITAYGAAIASYVSFKGIEIEDLDIDIKTFNSWSPNINETSRSEYVFLWNKAIEKSKNWL

SEQ ID NO: 127629 - protein, 161 aa, Unknown
  Bacterial polypetide isolated from the Sargasso Sea
MKKFIVSIDQGTTSSRVVLFDTKGNIKFISQYEFKQYFPRNGWVEHNPNEIWSTTLKGLKQVIKKAKSLKGNILTIGITNQRETTILWNKKTGKPIYNAIVWQDRRTQEYCKSLKNKNYENTFRKKTGLFIDPYFSATKIKWILDNVKVSKKLLKTNNLLF

SEQ ID NO: 127630 - protein, 419 aa, Unknown
  Bacterial polypetide isolated from the Sargasso Sea
DPNEIDSIGITNQRETTIIWDKQTGKPVYNAIVWQDRRTASFCDELIEKNKTSLIQQKTGLVIDAYFSGTKIKWILDNNQELREKANDNKLLFGTVDTWLTWNLTNGKSHITDPSNASRTLLYNIKNDKWDKELLELFDVPENILPKVVDSSSVSTNIDKEILGIEIPISGIAGDQQAALFGQLCINEGDIKNTYGTGCFCMMNTGENFVMSKNKMLSTIAWRINGEITYALEGSVFVAGALIQWLRDQLGIIKSSPEVEELAKTVDDNGGLTFIPALSGLAAPYWDPYVQGTIFGITRGTENGHIARAALESIALRTRDIVVEMEKDAGIKFKDLKVDGGASNNNLLMQIQANLLSTNVVRPKTTETTALGVAFLAGLATGFWKDISDLKKLWIEDMSFHPDTSFKSNDIIELWQNRI

SEQ ID NO: 127631 - protein, 497 aa, Unknown
  Bacterial polypetide isolated from the Sargasso Sea
MRKIVMALDQGTTSSRTILFSEKGEIVADASTPLACYYPQSGWVEQDAQEIWVSQSQTIREALNKAALKMKDIAAVGITNQRETTIAWNRNTGEAITPAINWQCRRTADYCEQLKDQGFDRVLRKRTGLVTDPYFSGTKMRWILENVSEASELAKYGNLCFGTVDSWLIWQMTSGQVHATEISNASRTMVFNIEACSWDDEILARFGIPRETLPDVKPSSEIIAEIDSDLFGGSAPIAGVAGDQQAALFGQACFETGMAKNTYGTGCFMISNTGTEQVHSKHGLLTTIAWQIDQEVTYALEGSVFIAGALVQWLRDGLQFFSDASETQEMAESVSDSGGVFVVPAFVGLGAPHWDPYARGTIVGLSRDTNRNHIVRASLEAIAFQSAEVLQSIAKDTGQEIKELRIDGGAAANDFLCQFQTDVLGLYVKRPKVLETTAMGAAFLAGLSVGVWRDKDQISKLWQQEKMFSPSISREDSARMMVEWGRALERAKGWIVS

SEQ ID NO: 127632 - protein, 491 aa, Unknown
  Bacterial polypetide isolated from the Sargasso Sea
MFLIIDQGTTSTKVMLFDLNGKKVDSSQKSFEQVFPNNGWVEHNPEEIIGTVISCCNEIIENNPNHNICSIGITNQRETVVVWDKQTGKSLYNAIVWQDRRTESLCRDLKEKGYEELIINKTGLLLDPYFSSTKISWIINNVDGVKESINQDRVCAGTIDSWIIWHLTKGKVFATDITNAARTNLFNIEELKWDDDLLNLFQVNKSILPEVLESDAFYGQSEALIKKLPIYGVIGDQQSAAIGQKCFNFGDIKSTYGTGCFVLLNTGKNIAYSKNGLLSTVAYKINGEIAYALEGSIFMAGAIIDWLKNNLQVFDNINELEDILKNTSINSEIVMVPAFTGLGAPHWQPNSRATISGLTRDSNKNEIIASSVQSISLQTYDLMNAINEDTKKLFENPLNSIRVDGGMTENDWFMQNLSDICDIKISKSNEQEATALGAASLSALGSQEINDLKEFNVNLYKNKEFLPQMENQTREEIIKNWNKAINKIINV

SEQ ID NO: 127633 - protein, 418 aa, Unknown
  Bacterial polypetide isolated from the Sargasso Sea
MKKFIVSIDAGTTSNRAILFDLKGKPVFSSQKEFTQYFPKSGWVEHNPEEIWNTTKKVLKDVISKAKKFRGEVLAIGITNQRETTVLWDKKTGKTVYKAIVWQDRRQAEYCKKLKKQNKETLIFNKTGLPIDSYFSGTKIKWILDNVPLARKLMNKKQLLFGTIDSFLIWRLTKGKVHATDATNASRTMIFNISTNKWDDTILNILKIKKHILPEVKNCADDYGSTHPTITGKSIPIAGVVGDQQSASIGQCCFEPGSLKSTYGTGAFVLLNTGYKKIYSKNRLLTTIGYRINGKTTYAMEGSIFIAGAGVQWLRDRMKFFKKAYETEKILKSLKDNKDVYLVPAFTGMGAPYWNQNSRGVLSGLTRDTGPKEIVRATIESVAYQTHDLFEAMKHDGLRPRMVKVDGGMVMNNWFSQF

SEQ ID NO: 127634 - protein, 496 aa, Unknown
  Bacterial polypetide isolated from the Sargasso Sea
MEKKYILSIDAGTTSSRAIIFNKNAEVIEIAQYEFSQFFPKEGWVEHNAIEIWNTQLKAIKDVISKSKIDPNEIDSIGITNQRETTIIWDKQTGKPVYNAIVWQDRRTASFCDELIKKNKTSLIQQKTGLVIDAYFSGTKIKWILDNNKELTEKLNDNKLLFGTVDTWLIWNLTNGKSHITDPSNASRTLLYNIKDDKWDKDLLDLFDVPENILPNVVDSSSVSTNIDKEILGVEIPISGIAGDQQAALFGQLCINEGDIKNTYGTGCFCMMNTGENFVLSKNKMLSTIAWRINGEITYALEGSVFVAGALIQWLRDQLGIIKSSPEVEELAKTVIDNGGLTFVPALSGLAAPYWDPYVQGTIFGITRGTENGHIARAALESIALRTRDIVIEMEKDAGIKFKDLKVDGGASNNNLLMQIQANLLSTNVVRPKTTETTALGVAFLAGLATGFWKDISDLKKLWIEDISFNPDSNFNSNDIIELWQDRINKLLKVNE

SEQ ID NO: 127635 - protein, 464 aa, Unknown
  Bacterial polypetide isolated from the Sargasso Sea
MKKFIISIDAGTTSNRSILFDLKGKPIFSSQKEFTQYFPKSGWVEHDPDEIWRTTIKTLKDVIQKAKKLKGEILSIGITNQRETTVLWDKKNGQPVYKAIVWQDRRQEEFCKKLRKQNKDTMIFNKTGLLIDSYFSGTKIKWILDNVPKARQLMNKKQLLFGTIDSFLIWRLTKGKVHATDATNASRTMIYNISSNKWDDTILNLLKIKKHILPEVKDCADDYGQTHSLITGKSIPINGVVGDQQSATIGQCCFEPGSLKSTYGTGAFVLLNTGSKKIYSKNRLLTTIAYRIKGKTTYAMEGSIFIAGAGVQWLRDRMKFFKKAPETEKIVKSLDNNNDIYLVPAFTGLGAPYWDANARGVLSGITRDTSPKEIVRATIEAVAYQTFDLFEAMKHDGLRPKIVKVDGGMVMNNWFSQFLSDIVNVKVLRPKVQETTALGAAFMAGLQIGKYKSLKDISKKLAFR

SEQ ID NO: 127636 - protein, 155 aa, Unknown
  Bacterial polypetide isolated from the Sargasso Sea
MGVYFVPAFTGLGAPYWRSDARGTIVGLTGSSGKAEIVRAALEAVAYQSVDLFDAMSSDGQKPIVLKVDGAMSNNDWLIQFLSNISKTKIQKSYNSETTSQGAAILSSIGSGLLTSLKESSKFWKLNKSYNPKMQSAEINKYRNGWKKAIKRTIM

SEQ ID NO: 127637 - protein, 492 aa, Unknown
  Bacterial polypetide isolated from the Sargasso Sea
MKKFIISIDQGTTSSRVILFNTKGKIEFVSQYEFKQYFPKNGWVEHDPNEIWSTTLKALKNVISKANKIRGHIISIGITNQRETTILWNKKTGKPIYNAIVWQDRRTQEYCKKLKNKKYENDFRKKTGLFIDPYFSATKVRWILDNVKQSKKLLKSNNLLFGTVDTFLIWKLTKGKQHLTEATNASRTMLFNINNNKWDYEILKKLNIPKSILPEVKNSADNFGKTDKKITGKEIPISAVLGDQQAAAVGQTCFEKGSIKSTYGTGAFVIMNTGSKKINSKNKLLTTICYRLNNKTTYALEGSIFIAGAGVQWLRDKMKLIKKAPETEKIARSSSINDGIYIVPAFSGMGAPYWRPDARGLITGLTRDSNWQSLVRATVESVAYQSYDLFNAMNKDGLKPRIVKIDGGMVANNWFSQFLSDTINLKVIRPKVLETTALGVALFAGYQVGEFKSLNEIKNIWQKDRAFSPKIKNSLRNQLLQGWKLAIEKTLA

SEQ ID NO: 127638 - protein, 481 aa, Unknown
  Bacterial polypetide isolated from the Sargasso Sea
MTKILTIDQGTTSSRAIVFDSNAQIVEVHQEEYPLIYPEDGWVEIDPEILVKSVADTLEKINFNGIASAAITNQRETTIIWERDSGKPIYNAIVWQDRRTKDFCSSINDQEIVNEVSTRTGLVLDPYFSATKIKWILENVEGARKKADEGKLCFGTVDTYLMYVLSNKKIHKTDITNASRTMLFNINTLSWDNYLLELFNIPESMLPEVSNSDDLFGTLSECNNLDIRAVLGDQQAALFGQGCLNAGDLKSTYGTGGFLMSNIGLTPLNSDKGLLTTIGFSFNNEIHYAIEGSIYSAGTVVQWLRDGLDFFSESSHSEKFLNLDANANGVHFIPAFTGLGAPYWDSEIRASFHGITRDTTKKNLITAAFNSISYQTKDIVDCLEQTNISVNSLSVDGGMAENKTFVGHIASILNIPIQVPKNTEATAKGVACLAGITTGLMNVDLITRQEKTIYDPEIALNSIMKEDYQIWKKLINANVSP

SEQ ID NO: 127639 - protein, 175 aa, Unknown
  Bacterial polypetide isolated from the Sargasso Sea
MKKFIISIDQGTTSSRAILFNLKGQSVYVSQLEFTQHFPKNGWVEHNPDEIWKTTLKVLRDVIKKSKKLKGKILTIGITNQRETTILWDKITGKPVYNAIVWQDRRSSEYCKKLIRQKKETIIYNKTGLLIDAYFSATKIKWIIDNVPKAKELIKKKRLLFGTVDCFLLWKLTNG

SEQ ID NO: 127640 - protein, 262 aa, Unknown
  Bacterial polypetide isolated from the Sargasso Sea
MKKFIISIDQGTTSSRAILFDLKGKPIFISQKEFTQYFPKDGWVEHDPEEIWKTTLKVLKEVIKKSKKLKGKVLTIGITNQRETTILWDKKTGKSVYNAIVWQDRRSSEYCKKLIKQKKETIIYNKTGLLIDAYFSATKIKWIIDNVPKAKDLIKKKRLLFGTVDSFLLWKLTKGVDHATDATNASRTMLFNISTNKWDDQILKILKIPKEILPVVKDCAADFGYTDPSITGTSYPITGMVGDQQSATIGQCCFEPGSLKST

SEQ ID NO: 127641 - protein, 385 aa, Unknown
  Bacterial polypetide isolated from the Sargasso Sea
MDGILALDQGTTSTKGIIFTTTGEIITTSRAPLHQIYPEDGWVEQDPNEIISSVLSVMTDCYRRSKEQGIRITSVGITNQRETTIIWDKTTGLPIYNAIVWQDRRTTKLIQSLKDQNLEDTINAKTGLMLDPYFSASKITWILDNVPNARNLVKQNKLMFGTVDTYLIWKLTEGEVHATDVTNASRTSLFNLTTLTWDDDLLKIYNIPKNILPNIKKCTDHYGDISKTFVGESFPIYGVAGDQQAALVGQSCFQEGQVKSTYGTGCFALVNTGSKILHSKNNLITTISYQLQDTLAYGLEGSIFIAGASSDWLLDNLEVINNHSEIEQICRSTPDDHNVYMVPAFTGLGAPWWQPNARAAIYGLTRQTTKNEVVRAAIESVAYQT

SEQ ID NO: 127642 - protein, 440 aa, Unknown
  Bacterial polypetide isolated from the Sargasso Sea
MTDLILALDQGTTSSRSILFTEKAEIRAVASEPLECRYPDSGWVEQDAEAIWETQRSTIVKVLDQAGIGLSEVSAIGITNQRESTIAWNRETGEALCPAINWQCRRTAGFCDVLKEEGFDELIRNRTGLVTDPYFSGTKMHWILQNVPEAANFARQGKLCFGTVDSWLIWKLSGGTTHAIEISNASRTLVFDIQKCEWDSEILSRFGISPESLPEVVPSSGVIVEVDESLFGGSAPIAGAAGDQQAALFGQACFSPGMAKNTYGTGCFMISNTGKHLVRSQNGLLTTIAWKLGDEVTYALEGSVFIAGALVQWLRDGLELFNDAAETESMALSVPDSGGVFVVPAFVGLGAPHWDPYARGLIVGLTRDIRSSHIVRASLEAIAFQSAEVLNSISQDTSESLNELRIDGGAAANQFLCQFQADLLGLDVRRPQILETTAMG

SEQ ID NO: 127643 - protein, 493 aa, Unknown
  Bacterial polypetide isolated from the Sargasso Sea
MKKFIISIDQGTTSSRAVLFDLKGKPIFISQLEFTQYFPKDGWVEHNPEEIWSTTKKVLINVIKKSKSLKGKILTIGITNQRETTILWDKHTGKPVYNAIVWQDRRAVEYCNKLIKQKKETIIYNKTGLLIDAYFSATKIKWIIDNVPKTKKLLKQKRLLFGTVDCFLLWRLTGGTNHFTDATNASRTMLFNIVNNRWDKQILDILKIPENILPEVKDCSDDFGHTDPKITGESYSITGMVGDQQSATIGQCCFEPGSLKSTYGTGAFVLLNTGNKVIYSKNRLLTTIGYRIDGKTTYALEGSIFVAGAGVQWLRDKINFIKKASDTEKILKSLETNKGIYLVPAFTGLGTPYWNAKSRGVLSGLTRDTGIKEIVRATVESVAYQTYDLFEAMKNDGLRPKIVRVDGGMVKNNWFSQFLSDIVNVKVLRPKVDETTALGAAFMAGLKIGVYKSLKDISKNWSLDKKFSPRMKKSKRKLNIQGWGKAIKRSLIT

SEQ ID NO: 127644 - protein, 308 aa, Unknown
  Bacterial polypetide isolated from the Sargasso Sea
MFLIIDQGTTSTKVMLFNLEGKKVDSSQKPFKQIFPNNGWVEHNPEEIIETVISCCNEVIDNNPDQNICSIGITNQRETVVLWDKTTGKSLYNAIVWQDRRTDIFCNELKDKGHEKFINQKTGLLLDPYFSSTKIRWIIDNVKGVKEGIDDNRVCAGTIDTWIIWHLTKGKVFATDLTNAARTNLFNIKDLKWDDDLLDLFGVNKSILPDVQESDGFYGKSEVLIKKIPIYGVVGDQQSAAIGQKCFNVGDIKSTYGTGCFVIQNTGKEIVYSKNKLLSTIAYKVKGRNSLCFRGLYFYGWSYNRLVE

SEQ ID NO: 127645 - protein, 152 aa, Unknown
  Bacterial polypetide isolated from the Sargasso Sea
MKKYFLVIDQGTTSSRIVLYNRNFEIFDIAQKEFRQFFPNEGWVEHDAIEIWNDVKNLIKKILKKNKLNPKNIISIGITNQRETTVLWDKITGKPVYKAIVWQDRRTGNYCSNLRKKGLHKKIQKITGLELDPYFSATKIKWIFDNIKEAKK

SEQ ID NO: 127646 - protein, 159 aa, Unknown
  Bacterial polypetide isolated from the Sargasso Sea
MTKYILAIDQGTTSSRAIIFDKNLNVISSDQKEFNQHFPSSGWVEHDPEDIWQTTLETCHNAITRALISSSDLLSIGIANQRETIILWDRETGTPIYRAIVWQDRRTANICQKLKSQNLEVEVKEKTGLLLDPYFSATKISWILENVSGARWPRPKANW

SEQ ID NO: 127647 - protein, 435 aa, Unknown
  Bacterial polypetide isolated from the Sargasso Sea
CLRKTIQKVKKLKGKILTIGITNQRETTLLWNKKNGRPIHKAIVWQDRRTQNFCQNLKKNNYENIIRKKTGLFIDPYFSATKIRWILDNIKESKRLLKSNNLLFGTIDTFLIWKLTKGKRHLTEATNASRTMLFNINTNQWDKNILKKLKIPYKILPEVKNSADNFGITDKKIIGQEIPISAVLGDQQSAAIGQSCFQKGSIKSTYGTGAFIIMNTGSKKIFSKNKLLTTICYRINGKNTYALEGSIFIAGAGVQWLRDKIKLINNAYETEKVAKSKKNNDGVYIVPAFSGIGAPYWRSDARGVITGLTRNSDWKNLVRAVVESVAYQSYDLFDAMKKDGLKPKLIKVDGGMVANNWFTQFLSDIINLNVIRPKILETTALGVALLAGYQIGEFKSLNEIQGKWKKDRVFSPKLNKSMRNNLLQGWKQAIRKTLA

SEQ ID NO: 127648 - protein, 486 aa, Unknown
  Bacterial polypetide isolated from the Sargasso Sea
MSLIIAIDQGTTSTRTVAFDRDLNIIHSQQKEYSLKYPNDGWVEIEPDELMASVHNTLDPVLEACSDIVALGITNQRETTLVWDASTGKSIYNAIVWQDRRTAEDCARLKKDGYEETIKNKTGLLLDPYFSATKISWILENVDGARQKAANGELRFGTVDTYLLWQLSEGAIHKTDVTNASRTNLFNIHSKVWDQELLDIFNIPSSMLPDVHLSDSVFGEISRQNRKIKISGLIGDQQSALVGQKCFEPGQMKATFGTGCFLMVNTGDKSNPSSSGLLNTIGYGISNQTPYALEGSIFSAGTIIQWLRDEMKFFPDSKNSIDFLSTTGDSKDIFFIPGFTGIGAPHWNSEIRAAFYGITRDTSQKDITTAAFKALIYQVIDIKEALAKDSIKIKNLSIDGGMASNSMFCQLLSDYLGQEVNVPSSLESTAIGAAITAGLGVNYFSIKELQEGTKNSVIFKPREGIFDPEDLTKWRKFLSVLMEAYN

SEQ ID NO: 127649 - protein, 222 aa, Unknown
  Bacterial polypetide isolated from the Sargasso Sea
MNTGPKKINSKNKLLTTICYRLNNKNTYALEGSIFIAGAGVQWLRDKVKLIKKAPETEKISKSSKVNDGVFVVPAFSGMGAPYWRPDARGVITGLTRDSDWKSIVRATVESVGYQSFDLFDSMNKDGLKPKIVKVDGGMVANNWFTQFLADIINLKVVRPKILETTALGVALLAGHQIGEYKSLDQIKNMWKKDRIFNPKMKKNFRKDLLNGWKLAIKKTLA

SEQ ID NO: 127650 - protein, 113 aa, Unknown
  Bacterial polypetide isolated from the Sargasso Sea
MAKFLISIDQGTTSSRAILFSLKGKPVYSSQKEFTQYFPKSGWVEHNPEEIWSTTKKTLKDVITKAKKLRGNILAIGITNQRETTVLWDKKTGKPVYNAIVGKIGDKSSIVSN

SEQ ID NO: 127651 - protein, 481 aa, Unknown
  Bacterial polypetide isolated from the Sargasso Sea
TSSRTILFNLKGKPVYSSQKEFTQFFPKSGWVEHSPEEIWNTTKKTLKDSINKAKKLRGNVLTIGITNQRETTVLWDKKTGKAVYKAIVWQDRRTEDFCKKLRKQNKETMIFNKTGLLIDPYFSGTKIKWILDNVTEARKLMSKKRLLFGTIDSFLIWRLTKGEVHATDATNASRTMIYNISTNKWDDTILKILKIKKHILPVVKDCADDYGYTHPSITGKSIPITGVVGDQQAATIGQCCFEPGSLKSTYGTGAFILLNTGSKKIYSKNRLLTTIGYRLKGKTTYALEGSIFIAGAGVQWIRDKMNFVKKASDTEKIIKSLKDNSEIYLVPAFTGIGAPYWNANARGVLSGITRDTGPKEIVRAIIESVAYQTYDLFEAMRRDGLKPKLVKVDGGMVMNNWFTQYLSDIINVKVLRPKVHETTALGAAFMAGLKIGVYKSLKEISRQWSLDKKFSPKVKKTFRKKVLKGWNTAIKRTLIT

SEQ ID NO: 127652 - protein, 420 aa, Unknown
  Bacterial polypetide isolated from the Sargasso Sea
LAIGITNQRETTVLWDKKSGKTIYKAIVWQDRRQAEYCKKLKKQNKETLIFNKTGLPIDSYFSGTKIKWILDNVSTAKKLMKKKQLLFGTIDSFLIWRLTKGKVHATDATNASRTMIFNISTNKWDDTILKILKIKKHILPEVKNCADDYGHTHSSITGMSIPITGVVGDQQSASIGQCCFEPGSLKSTYGTGAFVLLNTGYKKIYSKNRLLTTIGYRINNKTTYAMEGSIFIAGAGVQWLRDRMKFFKKAFETEKILKSLKDNRDVYLVPAFTGMGAPYWNQQSRGVLSGLTRDTGPKEIVRATIESVAYQTYDLFEAMKHDGLRPKMVKVDGGMVMNNWFSQFLSDVVNVKVYRPKVHETTALGAAFMAGLKIGAYKSLKDISKNWSLEKKFTPKMKNSDRKTLLLGWSKAIKRALIN

SEQ ID NO: 127653 - protein, 491 aa, Unknown
  Bacterial polypetide isolated from the Sargasso Sea
MFLIIDQGTTSTKVMLFNLEGKKVDSSQKPFKQIFPNNGWVEHNPEEIIETVISCCNEVIDNNSDQNICSIGITNQRETVILWDKTTGKSLYNAIVWQDRRTDTYCNELKAKGYEELINQKTGLLLDPYFSSTKIRWIIDNVKGVKEGIDDNKVCAGTIDTWIIWHLTKGKVFATDLTNAARTNLFNIKDLKWDDDLLDLFGVNKSILPDVQESDGFYGKSEALVKKIPIHGVIGDQQSAAIGQKCFNVGDIKSTYGTGCFVIQNTGKEIAYSKNKLLSTIAYKVKGETAYALEGSIFMAGAIIDWLNNNLQVFDNYSELDDILINAEINPEVVMVPAFTGLGAPHWKPDSRASISGLTRDANKNDIIVASIQSVSLQTYDLIKAIHEDTHDLFKKSFQGIKVDGGMTDNQWFLQNLSDICETKIIKSSEQEATALGAATLSALGSNEINELSEFNINSNENVEFLPIIKKQLRSKIIKNWGIAINKTIND

SEQ ID NO: 127654 - protein, 331 aa, Unknown
  Bacterial polypetide isolated from the Sargasso Sea
TIDSFLIWRFTKGKVHATDATNASRTMIYNISSNKWDDAILKLLNIKKHILPEVKDCADDFGQTHSSITGKSIPINGVVGDQQAATIGQCCFEPGSLKSTYGTGAFVLLNTGSKKIYSKNRLLTTIAYRIKGKTTYAMEGSIFIAGAGVQWLRDRMKFFKKAPETEKIVKSLSNNNDIYLVPAFTGLGAPYWDANARGILSGITRDTSPKEIVRATIEAVAYQTFDLFEAMKHDGLRPKIVKVDGGMVMNNWFSQFLSDIVNVKVLRPKVQETTALGAAFMAGLQIGVYKSLKDISKNWHLDKKFLPKMKNKSRSVLIKGWEKAVKRALIN

SEQ ID NO: 127655 - protein, 395 aa, Unknown
  Bacterial polypetide isolated from the Sargasso Sea
NAIVWQDRRTHEYCEKLKQKKYENIFRRKTGLFIDPYFSATKIKWILENVKISKKLQKSNNLLFGTVDTFLIWKLTNGQHHLTEATNASRTMLFNINNNTWDKEILKKLNISKSILPDVKNSADNFGITNKKIVGYEIPISAVLGDQQAAAVGQSCFKKGSIKSTYGTGAFVIMNTGSKKIFSKNKLLTTICYRLNGKNTFALEGSIFIAGAGVQWLRDKLKLINNAYDTEQIVKSKKNNEGVYVVPAFSGLGAPYWRPDARGVITGLTRNSDWKTLVRAVIESVAYQSYDLFNAMRKDGLKPNILKIDGGMVENDWFSQFLANIIDIKTERPKVLETTALGVALFAGYQIGIFKSLHQIRRKWKKDRTFKPKLSSTMRKKLLNGWKLSVEKTLL

SEQ ID NO: 127656 - protein, 224 aa, Unknown
  Bacterial polypetide isolated from the Sargasso Sea
MLNTGSKIIYSKNRLLTTIGYRINGKTTYALEGSIFIAGAGVQWLRDKIKFLKKAADSEKIIKKLKDNHGVYLVPAFTGLGTPYWNAKSRGVLSGLTRDTGISEIVRATVESVGYQTYDLFEAMKNDGLRPKIVRVDGGMVKNNWFSQFLSDIINVKVLRPKVDETTALGAAFMAGLKIGVYKSLNDISKNWSLDKKFSPKMKNKDRRKLIFGWQKAIKRTLIT

SEQ ID NO: 127657 - protein, 196 aa, Unknown
  Bacterial polypetide isolated from the Sargasso Sea
MKYILSIDQGTTSSRAIVFDENQNIISESQKEYKLQYPNDGWVEAKPDEILESVKETTKKALESSKVDIAACGITNQRETVVVWNRASGDPIYPAIIWQDRRTSDLCNELKKKKNLESEIRKKTGLLLDPYFSASKIKWILDNVDNARKMAENGELCFGTIETYLIWNLTKEKNHKTDATNASRTMLMNLETLDWD

SEQ ID NO: 127658 - protein, 254 aa, Unknown
  Bacterial polypetide isolated from the Sargasso Sea
MKKFIISIDQGTTSSRVILFDTKGNIVFVSQFEFKQYFPKNGWVEHNPNEIWSTTLKALKQVIDKAKKLKGNILTIGITNQRETTILWNKRTGKPIYNAIVWQDRRTQDYCKLLKKKNYENSFRNKTGLFIDPYFSATKIKWILDNVKISKKLLSSNDLLFGTVDTFLIWKLTKGKQHLTEASNASRTMLYNINNNNWDKEILKKLNIPQKILPEVKNSADNFGKTDKKITGVEIFISAVLGDQQAAAFGQTCF

SEQ ID NO: 127659 - protein, 162 aa, Unknown
  Bacterial polypetide isolated from the Sargasso Sea
AKSKENSDGVYIVPAFTGLGAPYWSPSSRGLITGLTRNSDWKDLVRATIESVAYQSYDLFESMRKDGLKPRIVKVDGGMVTNNWFSQFLSNIIDTKVIRPKVKETTALGVAFMAGLKIGVYKSLSDISNYWKIDKKFTPKISKSNRTKLLKGWQQAIRKTLV

SEQ ID NO: 127660 - protein, 485 aa, Unknown
  Bacterial polypetide isolated from the Sargasso Sea
MKEKIISIDQGTTSTRSVLYDKEGNFICSAQQEFNQFFPKDGWVEHNPEDIWQSVLSTLQKLVKESGITSSEIASIGITNQRETTLIWNKKTGNPIHNAIVWQDRRTSEFCHELGSYENIIQKSTGLTIDPYFSATKIHWLLNNVEGAKELALNGDLLFGTVDTFLIWKLTEGKCHKTDITNASRTMLFNIAEQQWDDELLDIFEIPKQILPEVCDNVSDYGMTELLGGEVSIGGVAGDQQAALIGQCCFDPGDVKSTYGTGCFMMVNSGDKILYSKNKLLSTVGYRIDGKTTYALEGSIFVAGSAIQWLRDGLNFFEDSIETEAMSKKASLNSKVLVIPALTGLGAPYWDAEARGAIFGITRDTSKEDITKATLESISFQSKDLVEAMKKDNATFKKLMIDGGMVNNNWFCQQLANTLQVEVSRPVIIETTSLGAAFLAGLKADLFEDLSSLKETKVIDKVFSPDADEDRYQEWKDAVKRILVK

SEQ ID NO: 127661 - protein, 221 aa, Unknown
  Bacterial polypetide isolated from the Sargasso Sea
EKFKLSKNRLLTTVAFKINGKKMFCYEGSIFVAGSAIQWLRDNLKFIKDSSETDKLYKKANIEENLFFVPALTGLGAPYWNPNARGTFFGITRNTSKEDIIKATLDSLSFQTYELIECMEKDSKTKISEIRVDGGMVKNNSFLQSLANISQIKIIRPSNVETTSLGAAYLAAIQSGYLKNTSQISNLWKKDKTVKANISKSISTSSIIKWKSIINVVNNFY

SEQ ID NO: 127662 - protein, 391 aa, Unknown
  Bacterial polypetide isolated from the Sargasso Sea
WQDRRTQEFCEQLKQKKYEDIFRRKTGLFIDPYFSATKIKWILENVKISKKLQKSNNLLFGTVDTFLIWKLTNGQHHLTEATNASRTMLFNINNNTWDKEILKKLNISKNILPDVKNSADNFGSTNKKIVGYEIPISAVLGDQQAAAVGQSCFKKGSIKSTYGTGAFVIMNTGSKKIFSKNKLLTTICYRLNGKNTFAVEGSIFIAGAGVQWLRDKLKLINNAYDTEQIAKSKKNNEGVYVVPALSGLGAPYWRPDARGVITGLTRDSDWKTLVRAVIESVAYQSYDLFSAMRNDGLKPNIVKIDGGMVENNWFSQFLANIIDIKTERPKVLETTALGVALFAGYQIGIFKSLDQIKRKWKKDKTFKPKLSSTMRKKLLNGWKLSVEKTLL

SEQ ID NO: 127663 - protein, 124 aa, Unknown
  Bacterial polypetide isolated from the Sargasso Sea
MKKFIVSIDQGTTSTKVVLYNKNFHVIDTLQKEFKQFFPKNGWVEHDPIEIFKDVKFLIKKLIKKNHIKCSEILSIGIANQRETTVLWDKLSGKPVYKAIVWQDRRTISICEKLINKKLASKIQ

SEQ ID NO: 127664 - protein, 501 aa, Unknown
  Bacterial polypetide isolated from the Sargasso Sea
MEEFILALDQGTSSSRALLYDNSGRSISFAQQAIEMSHPKDGWVEQDPNEIWNSVLTTGREAISSSGIDPKFIKGIGITNQRETTLVWNKKTGECVYDAIVWQDRRTITTCIEMDSATLDGKALSEQIADKTGLLIDPYFSSTKLHWILSEIVASDSSLHTDDLLFGTVDTYLIWKLTGGHSHTTDVTNASRTQLLNISSLKWDEDLLRYFDIPRFLLPKVLDSSAQYGYAEEKWFGAPIPITGVAGDQQAALVGQCCFDSGMSKVTLGTGCFIMTNTGSEKSLPKNGLLTTIAYRINGQTSYASEGSIFVAGQAVKWLRDQLGIIESVKDTEKAFAATKGDAGGVSVVPAFTGLGAPHWVPEARGLISGLTLDTSVEQIVVATLQSIALQIADLVSLMLKGGPVDKLRVDGGMAVNDPFCQFLADILGQNVDRPIDTETTARGAALLAGLGSGVWKDLNEIRATWQAERIFTPDMEPSLRDSLVEEFALSVERAKLRLKS

SEQ ID NO: 127665 - protein, 293 aa, Unknown
  Bacterial polypetide isolated from the Sargasso Sea
KIFNIPYKILPEVKDSADDFGYTTLFGDKIKIGGIAGDQQAATIGQACFKPGSIKSTYGTGCFMIMNIGQKLKISKNNLLTTIAYKINNKTTYALEGSIFIAGAAVQWLRDSLKVIKTAQETEIFYSKSDQSQKIYFVPAFVGLGAPYWDGEARGAIFGMTRNTGIAEFVKAAIDSVAYQTKDLVIAMQKDSGVPIKQLKVDGGMVANEDFLQFLSNILILNCDRPKVTETTALGAAYLAGLSSGFIKNTEEISKRWQSDKIFKPKLHKKEVKYLYDGWLKAVKKTTTKKNSK

SEQ ID NO: 127666 - protein, 381 aa, Unknown
  Bacterial polypetide isolated from the Sargasso Sea
MKIVIAPDSFKESLSALDVANAIEQGLTQVIPDCKIVKIPVADGGEGTVQSMVDATGGSIVNLEVMGPLGHKVKAHYGILGQQAKGTIAVIEMASASGLHHVPRDLRNPLLTTSYGTGELICDALNRGIKHIILGLGGSATNDGGAGMAQALDILLLDKQGKTLSAGGAALSQLASIDISHAHPLLKECIFEVACDVDNPLCGERGASAIFGPQKGATPEMVSILDAALGHYADVIAKSGVTDHRNQAGAGAAGGMGLGVMAFLGAELKPGVEIVMQTVGLADKIRGADLVITGEGRIDGQTIFGKTPMGVLKQAQLQNIPTIGIAGCLGDNANAVLEQGMAAIFPIIPHLSPLDDVLANAKANLTNTARNIGAVLMLGQR

SEQ ID NO: 127667 - protein, 381 aa, Unknown
  Bacterial polypetide isolated from the Sargasso Sea
MKIVIAPDSFKESLSALDVANAIEQGLTQVIPDCEIVKIPVADGGEGTVQSMVDATGGSLVNLEVMGPLGHKVKAHYGILGQQAKGTIAVIEMASASGLHHVPRDQRNPLITTSYGTGELVCDALNRGIKHIILGLGGSATNDGGAGMAQALDILLLDKQGKTLSAGGAALSQLASIDMSNAHPLLKECTFEVACDVDNPLCGERGASAIFGPQKGATPEMVSILDAALSHYADVIAQSGVTDHRNQAGAGAAGGMGLGVMAFLGAELKPGVEIVMQTVGLADKIRGADLVITGEGRIDGQTIFGKTPMGVLKQAQLQNIPTIGIAGCLGDNANAVLEQGMAAIFPIIPHLSPLDDVLANAKTNLINTARNIGAVLMLGKR

SEQ ID NO: 127668 - protein, 113 aa, Unknown
  Bacterial polypetide isolated from the Sargasso Sea
FATPISIDDNYEQDISHFFDFSIYLDADEPVIRKWYIERFLDLRKEAFSDESSFFNRFTSINDDEAVDLATTIWETINLRNLNENILPTRNRASMIVKKNENHMIEELWLRKI

SEQ ID NO: 127669 - protein, 113 aa, Unknown
  Bacterial polypetide isolated from the Sargasso Sea
LQPPIHNENYFEPVISDFFDFSIYLDADEPVIRKWYIERFLNLRQKAFSDENSFFNRFADIDDQEAINLATQIWETINLKNLDEYILPTRNRASMIVKKDEDHKIDELWLRKI

SEQ ID NO: 127670 - protein, 211 aa, Unknown
  Bacterial polypetide isolated from the Sargasso Sea
MYSNLLLEVWNHNYRGTIKDIDPEEIKSFMSANLEITLSEIKKFNGIVAAIDDCLYLSVPRISGKFPNPLIIGIAGSVSVGKSTFAKIFQLLISRNFESDNVELVTTDSFLYPNSILEKKGLMQRKGFPESYNTKLLYDFLSNIQSGIKNVEIPKYSHLVYDIIEDENIILNSPSILIVEGINVLQTPIAIDDNYKQEISHFFDFSIYLDA

SEQ ID NO: 127671 - protein, 109 aa, Unknown
  Bacterial polypetide isolated from the Sargasso Sea
IHKENYFEPVISDFFDFSIYLDADEPVFRKWYIERFLNLRQKAFSDENSFFNRFADIDDQEAINLATQIWETINLKNLDEYILPTRNRASMIVKKNEDHKIDELWLRKI

SEQ ID NO: 127672 - protein, 295 aa, Unknown
  Bacterial polypetide isolated from the Sargasso Sea
MSPEKWKNLKTIKDIDIDIDPEEIKSLMSGNLEITLSEIKKFKDIVELIMSYVSKSVSRTNCKFPTPLIIGIAGSVSVGKSTFSKIFQLLLSRIYKSENVELVTSDSFLYPNSILEKKGLMQRKGFPESYNTKLLYDFLSNIQSGIKSVEIPKYSHLVYDIIEDENIIVSSPSILIVEGINVLQTPIGIDDNYEQDISHFFDFSIYLDADEPIIRKWYIERFLDLRKEAFSDESSFFNRFTSINDDEAVDLATTIWETINLRNLNENILPTRNRASMIVKKNENHMMEELWLRKV

SEQ ID NO: 127673 - protein, 143 aa, Unknown
  Bacterial polypetide isolated from the Sargasso Sea
KYSHLVYDILEDENITINSPSILILEGINVLQPPIPKENYFEPVISDFFDFSIYLDADEPVIRKWYIERFLNLRQKAISDKNSFFNRFADIDDQEAINLATQIWETINLKNLDEYILPTRNRASMIVKKNEDHKIDELWLRKI

SEQ ID NO: 127674 - protein, 212 aa, Unknown
  Bacterial polypetide isolated from the Sargasso Sea
RLLKQLLARWPSSPKVDLVTTDGFLYPNAVLEMEGLMRRKGFPESFDTAAILRFLSAIKAGMPNVKAPLYSHLSYDVLPDGFVTVDRPDILIFEGINVLQARDLPAGGRMVPMVSDFFDFSIYIDASTDLIHHWYVERFLKLRQTAFRDPASYFHRYARLTEEDALSTAEDLWNNINMKNLIENILPTRPRADLILRKGRDHLVETVALRKL

SEQ ID NO: 127675 - protein, 243 aa, Unknown
  Bacterial polypetide isolated from the Sargasso Sea
MPQSKNLNSPYIIFSKEEWADLGFGATLNLTENEIIELRGLNEPMSIDEVRDVYLPISRLLNLYISGTEKLFEATNLFLGKKNFKVPFIIGIGGSVAVGKSTTSRILQALLSKWSDNITVSLVNTDGFLMSNNNLEKRSLMERKGFPESYNLTLLLDFLNSVKSGKSNVKAPVYSHLLYDNVPGEFINVNKPDILIIEGLNVLQPAPLPRDGNAIPYVSDFFDFSIFVDADEKNIKNWYIQRF

SEQ ID NO: 127676 - protein, 247 aa, Unknown
  Bacterial polypetide isolated from the Sargasso Sea
MRRQAVLEQFLGTNGERIPYIISIAGSVAVGKSTTARVLQALLSRWPEHRKVELITTDGFLHPNQVLKDRGLMKKKGFPQSYDMHRLVKFVSDLKSGVPNVTAPVYSHLIYDVIPDGDKTVAQPDILILEGLNVLQSGMDYPHDPHHVFVSDFVDFSIYVDAPEELLQTWYINRFLKFREGAFTNPDSYFHNYAKLSEDEAINTATSLWKEINWLNLKQNILPTRERASLIMTKSANHAVEQVRLRK

SEQ ID NO: 127677 - protein, 289 aa, Unknown
  Bacterial polypetide isolated from the Sargasso Sea
MHQSKNQNSPYIIFSKKEWADLGFGATLNLTENEIVELRGLNEPMSIDEVRDVYLPISRLLNLYISGTEKLFEATNLFLGKKNFKVPFIIGIGGSVAVGKSTTSRILQALLSKWSDNITVSLVNTDGFLMSNNNLEKRSLMERKGFPESYNLTLLLDFLNSVKSGKSNVKAPVYSHLLYDNVPGEFIHVNKPDILIIEGLNVLQPAPLPRDGNAIPYVSDFFDFSIFVDADEKNIKNWYIQRFLKLKATAFKEEKSYFNKYSYLSDEDAVNVATSLWEKINHVNLIENI

SEQ ID NO: 127678 - protein, 316 aa, Unknown
  Bacterial polypetide isolated from the Sargasso Sea
MTSKNPIQKALYLAFERAQWSVLRDAVPMTLSEQDLENLRGINEKVSLSEVTDIYLPLSRLLNLIVKAKQQRGLVLDEFLGQKPSSSPYIISIAGSVAVGKSTTARILQALLSQWPEHPKVDLVTTDGFLYPLADLKRKGLLQRKGFPESYDMKMLVEFISAVKSGQAHVNAPIYSHVTYDRIRGQHQTVSQPDILILEGLNVLQTGLDSPVDIRRPFVSDFVDFSIYVDAEEHLLKQWYQERFLQFRKGAFSDEKSYFHHYASLTDDEAYTIAAKIWDTINGPNLQLNIQPTRERAHLILQKGQDHLMSHVLLRK

SEQ ID NO: 127679 - protein, 256 aa, Unknown
  Bacterial polypetide isolated from the Sargasso Sea
MTTEHNPYLQFTREQWALLRDSVPLTLTEHDLQTLRGINEKVSLQEVEEIYLPLSRLLNLYVKAKQRRSRVLEQFLGQSRGKGTYIISIAGSVAGGKSTTARIMQALLERWPEHPRVELVTTDGFLYPNKVLEERGLMRRKGFPESYDIRHLVEFVANIRAGHEKVEAPVYSHLIYDIIPDEKKVVEQPDILILEGLNVLQSGMDYPQEPHRVFVSDFVDFSIYVDAEAELLRTWYIERFLKFRSGAFSDPDSYST

SEQ ID NO: 127680 - protein, 316 aa, Unknown
  Bacterial polypetide isolated from the Sargasso Sea
MTSKNPIQKALYLAFERAQWSVLRDAVPMTLSEQDLENLRGINEKVSLSEVTDIYLPLSRLLNLIVKSKQQRGLVLDEFLGQKPSSSPYIISIAGSVAVGKSTTARILQALLRHWPEHPKVDLVTTDGFLYPLADLKRKGLLQRKGFPESYDMKMLVEFISAVKSGQAHVNAPIYSHVTYDRIRGQHQTVSQPDILILEGLNVLQTGLDSPVDIRRPFVSDFVDFSIYVDAEEHLLKQWYQERFLQFRKGAFSDEKSYFHHYASLTDDEANAIAAKIWDTINGPNLQLNIQPTRERAHLILQKGQDHLMSHVLLRK

SEQ ID NO: 127681 - protein, 317 aa, Unknown
  Bacterial polypetide isolated from the Sargasso Sea
MDVKKTAHPLGGLYNKFSPKKRNKSNSDEDIDINQEKVNSLLGLDTELDAKEIKELYLPMTELIMLSIHNRYSLNNKINEFLNTETNTPYIIGVAGSVAVGKSTFSKILQLLFSEIYKSKNIELVTTDGFLYPNSVLEEKGLMERKGFPESYNTKLLYDFLFNIKSGIKSVEVPKYSHLVYDILEDENITINSPSILILEGINVLQPPIHKENYFEPVISDFFDFSIYLDADEPVIRKWYIERFLNLRQKAFSDENSFFNRFADIDDQEAINLATQIWETINLKNLDEYILPTRNRASMIVKKDEDHKIDELWLRKI

SEQ ID NO: 127682 - protein, 304 aa, Unknown
  Bacterial polypetide isolated from the Sargasso Sea
MYTKSPPKETGRFKNYEGIDFRLEGINSEICTDLEISNFEIRKFYIDIAELILPNYAKIWHLKNKQSFFTPKTTTPFIIGIAGSVAVGKSTFSKILQRLLSIIYRIQNVELITTDGFLYPNSELEKKGLMERKGFPESYNAEQLYDFLSKIKSGVKSVEVPKYSHLVYDILEDENITVNSPSILILEGINVLQSPIGMNDNHEQDISHFFDFSIYLDADEPVIRRWYIERFLDLRKEAFSDENSFFNRFTSINDDEAVDLATTIWETINLKNLNENILPTRNRASMIVKKNENHMIEELWLRKI

SEQ ID NO: 127683 - protein, 249 aa, Unknown
  Bacterial polypetide isolated from the Sargasso Sea
MSATTIVDVHVSLGLGGPRVFRRPLGGRATSRSLLPHRLRHPSSTKTSVAVASATCSGDGSQMNVSSSTGRALTIQSHVVSGYVGNKCAVFPLQLHGFDVDPILSVQFSNHTGYGCWKGEVMTGEQLQSLVEGLEQNGLLEGYTHLLTGYIGSASMLRTVARLVRKLRTYNPNLVYVCDPVLGDNGRLYVPAELTTIYREEIVPLATLLTPNQFEAELLTGMTIGSEEDALAACASLHQVGPPSVVLQA

SEQ ID NO: 127684 - protein, 288 aa, Unknown
  Bacterial polypetide isolated from the Sargasso Sea
MKRVLSIQSHVVFGCAGNSAAVFPMRRMGLEVWPVNTVQFSNHTQYSAGWQGMVMPNGHIRQLMAGLADIGVLGQCDAILSGYLGSAEQGEEILAAVAHLKALNPNARYFCDPVMGHPDKGCIVAPGVADFLKNRALACADLLAPNLLELEQLTGREICNLSEALAACQQLREGGVELVMVKHLGRAGLSLDRFEMLLVCEEGAFHISRPLYEFQRQPIGVGDLLSATMLANLLAGFTPVAAFERTNASVDAVLAQTWLAGAYELQLVAAQQAMVEPEIRTCARRLPA

SEQ ID NO: 127685 - protein, 302 aa, Unknown
  Bacterial polypetide isolated from the Sargasso Sea
QCILFGEHAVVFGHPAVAVAIEQGVRVSVKGSNEWLLEGQPFEPSRHPHISHIIQNIFQYNGQPLDIDVQSSLFSTAGMGSSAALSNAFGAALHSHLNPSTPLDPIRLAKMAHSAEATAQKGRASPTDTATSALGGCVVVSGQHVTGTRHVFDTSLETPEGSRSWAINVVDLPADIDDAWLVVGYSGTGSPTGRMVAKVANLISESPQRMEEMEAIANITRAGLTALSAGNLEGLGIAMDACHESLRKLEVSTNKLDRMVSAARPHSLGAKLTGAGGGGCMVALTQDPARVSEAIEIAGGRP

SEQ ID NO: 127686 - protein, 313 aa, Unknown
  Bacterial polypetide isolated from the Sargasso Sea
MPSAFAPGKCILFGEHAVVFGHPAVAVAIEQGVRVSVKDSNEWLLEGQTFEPSRHPHISHIIQNIFQYKGQPLDIDVQSSLFSAAGMGSSAALSNAFGAAMHSHLNPSTPLDPIRLAKMAHSAEATAQKGRASPTDTATSALGGCVVVSGEHVTGTRHVFDTSLETPEGSRNWAINVVDLPADIGDAWLVVGYSGTGSPTGRMVAKVANLISESPQRMEEMEAIANITRAGLTALSAGNLEGLGIAMDACHESLRKLEVSTNKLDRMVSAARPHSLGAKLTGAGGGGCMVALTQDPARVSEAIEIAGGRPLQT

SEQ ID NO: 127687 - protein, 63 aa, Unknown
  Bacterial polypetide isolated from the Sargasso Sea
TNKLDRMVSAARPHSLGAKLTGAGGGGCMVALTQDPARVSEAIEIAGGRPLQTKLGSKGVSIL

SEQ ID NO: 127688 - protein, 248 aa, Unknown
  Bacterial polypetide isolated from the Sargasso Sea
IIRLKKIAKANKLYLIEDAAHAYSAKFKSNYLGTLGDIGVYSFHETKNIVSGQGGCISINNPSLIKRANFILDKGTNRIEFINNYKKKIILSNNKKFYSWVDIGSEYRAPELSCALLYSQLKKLNKIQRSRKKIWQWFKKEIDKINSNEFYIIKPLKNSISSYHLFVIVFNKKNIARKFMNYMQKNKIAATFHYVPLHMSKMAMKIKKQKLKTSESIYSRIVRLPLFPGMNQKMLNKIVFNIKRFLDE

SEQ ID NO: 127689 - protein, 311 aa, Unknown
  Bacterial polypetide isolated from the Sargasso Sea
RGARPAPRPAYAAPEVLRGDAFDASADLWSLGVILYLLLTGTHPFDARNDADDAEVTRRVLAGADAAGAFKGAAWARVPSAARPLVKRLLADRPSDRPAAAEVLAHAWLQDPTRGEGFRDKAAAKAASDALREFHLGRRRFKAMLLAVMVGYADQALARERGAGTAQLGSRRAAMDVFDSDNNGYVTTEDIKRVARLLGDELDEADTRQMLRSVARPGDDVLKVPKERLRHMLPPLYPAHSLRRGDLVFSAGETDPAFYILLDGDVLISHSFLLRPRSGFASKSGRELSLGLHRLRTGESFGETELLEGVR

SEQ ID NO: 127690 - protein, 185 aa, Unknown
  Bacterial polypetide isolated from the Sargasso Sea
EDLEIRGAGEILGVKQSGHIDTIGMSLYMSMLKTALNNDQIEVSPSCEIKVAVTSLIPEYYLPSPVERLKIYKKLSGADSRTLREIKDDLLDRCGKHPVELENLFKITEISIKAKYLEITKIVQSSKYLKFKFSETLKDKTLSKILSITNENPEMYGIKKNGELWINFNGQDVLNLLDNAIQKFT

SEQ ID NO: 127691 - protein, 167 aa, Unknown
  Bacterial polypetide isolated from the Sargasso Sea
MKVGRASDIWSLGCILYQMVYGHTPFSKITGTIQKLHAITDPRHKIVFSPLPNENHALIDLMSRCLERDPRNRISVKEILAHKFLRPFAETASSSSSSEASGLSMTQLQDLLAQIQKHGAEVDVNAVTAEVFRQISSGEPVTLSPIVRKHSKSSTRLYGDENVAPME

SEQ ID NO: 127692 - protein, 116 aa, Unknown
  Bacterial polypetide isolated from the Sargasso Sea
MVKNSDIFNNKTLLITGGTGSFGNAVAKKFLDSSIREIRILSRDEKKQDDMRKKYKNNKLKFYIGDVRDYSSVNNAMSGVDYFFHSAALKQVPSCEFLPMEAVKTNIFGTDNVLVA

SEQ ID NO: 127693 - protein, 205 aa, Unknown
  Bacterial polypetide isolated from the Sargasso Sea
MLHFPQRNNATPQLYADDTDTPLPETLNPKIRYAYFSTIAKGGKSLIQSCRDLYLGRTVCYKTLKPEFQKDPTENLRLLREARISAMLQHPNTMPTYEIGRDNRGQYFFTMKLVHGYTLRELFNYRQRYDFSQLMNVIVQVGNALGYAHSAGVVHRDIKPDNVLIGPYGEILLLDWGLAKVWHREGASASTEGNLPDLDIGVAMT

SEQ ID NO: 127694 - protein, 234 aa, Unknown
  Bacterial polypetide isolated from the Sargasso Sea
MTEQVEQKSWQKNRGWISCPPHPHVVTLLLSANANVFISPYIEGVSGDLIASILDAALLNANQKRVIIIKIGLHVAWAVEHMHDQGIWHLDLKPSNLLITIDDSDPDKPRFWQQIHVRVCDYSRCSARACSNMSRRGTVGYWSPEQVHDRTNPGTDPDASLYWGLKKSDDPPPASQADMTSRSDCWGWATMMLGLMGRLEEMRKTGYQKFLQNLLNKGFVVDLSAIFLYEQQAF

SEQ ID NO: 127695 - protein, 209 aa, Unknown
  Bacterial polypetide isolated from the Sargasso Sea
MKLADQMLERCEALHGRHLIHRDVKPANFTMGDASSSPLVYCIDFGLSKRFRNPHTLQHIPHRVGKSLTGTPRYASISNHLGIEQSRRDDMEAVGYVLVYFAKGRLPWQGLKAKSAHKKYKLILDKKQEISIAQLCHGCPAQFAEYLSYCRSLKFDASPNVAYLRRLFRDLYSTSGHDVAQIAANDWDWMANADVRVDATTAQAYGARP

SEQ ID NO: 127696 - protein, 184 aa, Unknown
  Bacterial polypetide isolated from the Sargasso Sea
LVMQYIEGNSLNQEMRAMVNAGLQMPFDRISTILLQLCEALEYLGDMDPPVFHRDVKPHNIMMTPYGGAVLIDFGLAKGVDAGKGTSLSGGNHTPGWAPPERENGVTGPTTDVYSLGQLLWHMLTNQRPGVISEEARLEKMDEMGHPEWLGELVNYSTVPHSPDERIQSVAEFRVRLENQGELP

SEQ ID NO: 127697 - protein, 126 aa, Unknown
  Bacterial polypetide isolated from the Sargasso Sea
MPNPRSGHCQVTAKPWPWPSHGQSIARPRHGSKPHANNSEQNIDIKGRVGARQIRAPEVVMGLKWTTVADLWSLGCTLAALYTGTRLFQVHDDMEHLAVIEHLLGSAIPASMSSCCSERILEKGEV

SEQ ID NO: 127698 - protein, 285 aa, Unknown
  Bacterial polypetide isolated from the Sargasso Sea
MKSDIDEQQIQIGHMLKRGAFGTLYHGVYPSTTCEGRKMNTPVAMKYLTVTRETRESVELDFFQEVNMLKQLEHPNIIGYIGSIVDGKHFCLVTQFATEGSLREILQERGVMPNPDVRTILLGIARGMCYLHEEKSVMHRDLKTANILMANTLEAKISNLSLAREFTGDAPSAYTAETGSYRWMAPEVITHMKYNSKLDVYSFAIMLWEIVTGGQTPFEELNPIQAAVAVVQRGVRPQIPQKCDPLFADLLKRCWKTDPEMRPRFREIVTLLEARNVDEDNVQSE

SEQ ID NO: 127699 - protein, 149 aa, Unknown
  Bacterial polypetide isolated from the Sargasso Sea
MKSILLLTVRLLKILKEIHSLDIIHQDIKPDNFAVGRGKLKKNIYIFDFGLSKFKESTYRPQDKTSSLLGTIRYASITAHQGYPLSYRDDFESLMYMIIYLYNRKLPWQGVQGNSRNEKNRKVLNIKRNIDLSQLCYKLPIEYQKIIYY

SEQ ID NO: 127700 - protein, 87 aa, Unknown
  Bacterial polypetide isolated from the Sargasso Sea
LQIIKTQINQFKPKRRAIDSLSALARGVSLNAFRQLVIAVTGYTKQEEIAGFFTNTAEEFMGSHSITDSHISTITDTILLLQNVEIK

SEQ ID NO: 127701 - protein, 293 aa, Unknown
  Bacterial polypetide isolated from the Sargasso Sea
DDVKIAEPLTKYSASITDGNRIREFVDKAYLIATNGYPGAVHLSIPVDIMFSSFPENAGLEERPFSQSKKIKNIAWPDPNQMSEVLKLASNSKKPMLIGGHGVWWSGSEKKLESAGQNLNIPIFNVPYHQKLLGEEAKSYMGLADIHQYPPSKFAFDESDLILMVGTRLDNQMNFGNPPLFPKSTKIVCINGSHEEIELNRAADINMLCDPGVFLDTLSKLKVNNKWNLDNKWIEQNILEKKKWIDKSLKDLEKETIKAKKNGGKIHPLQLALDVQDAMKDNDWLVIDGGNTH

SEQ ID NO: 127702 - protein, 253 aa, Unknown
  Bacterial polypetide isolated from the Sargasso Sea
MSLKNKSILITGGTGSFGRSFVSKLLEKNNKIKRLVIFSRDELKQDQMRSEFPENKYKNLRYFLGDVRDYQRLLRALDGIDIIIHAAALKQVPAAEYNPIEFIKTNVLGAQNIIEASIEKRIKKVIALSSDKACAPINLYGATKLCSDKLFVAANSYAGRYGTFAVVRYGNVMGSRGSIIPKFLNEAKKGVLNVTDPNMTRFNITLTESVKMVLFALENMKGSEILVPKIPSYRIIDLAKSIGPSCKIKNIGV

SEQ ID NO: 127703 - protein, 305 aa, Unknown
  Bacterial polypetide isolated from the Sargasso Sea
DYISLDRKLITYDRIAMALGEYQRSQVALDYPFSRYVDGDINAISEEAKEGALLFFGEGKCFGCHAGAKFSDEQFYPLATPQIGRGKNVFSQDFGRYNTVPDVSDKFAFRTPSLINAELTFPYMHAGSIATLEEAIRWHFDPVAQLEGYDYSLDHLAQFAGLNINTSGHQAQVPAISAAYQQWRSNKSRRYNRVPSVVSSEKVSQYAAFIRSLTADCLKSSVCVEQWMPDYTSVDPDGFRLEPEFSFFDNTAVFDVFPPAPGESVAPVFPDLSEIEPANISSCVAMDVDSRPEIDLSVGFRKVVL

SEQ ID NO: 127704 - protein, 143 aa, Unknown
  Bacterial polypetide isolated from the Sargasso Sea
HISIALLAFFFNVVNASLQSYWIIFFGNYEETNIIFYSGLLIFFTGMYINIKSDNILMNLRTKKEEYVVPTGFLFKKITSPNYFGETIEWLGWALLTFNFAGFVFFIWTIFNLLPRAISTHKWYQSKFKDYPKNRKIFIPYIF

SEQ ID NO: 127705 - protein, 128 aa, Unknown
  Bacterial polypetide isolated from the Sargasso Sea
MENGNPLTGNCGTSLVATAPEVYRAIAYDSAVDSWALGVLLYEFVTGLFPFRGRGRRLREEIARASVKFDDFFPGSPDSRNLILSLIRANPRDRFTLSEALRHGWFRSPVTGDLGLAKVFLGEEGRQN

SEQ ID NO: 127706 - protein, 103 aa, Unknown
  Bacterial polypetide isolated from the Sargasso Sea
MFKNSTILVTGGTGSFGRAFTSMTFARYNPKKVIIFSRDEMKQWDMQQDYLENDRIRFLLGDVRDKERVYRAMKDVDYVIHAAANKIVPLAEKDPFECIKTNV

SEQ ID NO: 127707 - protein, 215 aa, Unknown
  Bacterial polypetide isolated from the Sargasso Sea
MDSFESAQQVSSQSYEVEGILGEGNYSQVYKATLNSTQQPVALKIIDKAKVKRYKKTDEVLVERWVLSKLRHPSIAKLYHAFQEESALYLSLELVEGGELWAVTHKVGLPMSISTFYGAQMLEVLQFLHERDVVHRDVKPENVLITAVGHIKVIDFGTAKLLRHPIKLGADDGDDGGRSDRRTRFKEFVGTPEYMSPEAINNKFADQRADLGATV

SEQ ID NO: 127708 - protein, 119 aa, Unknown
  Bacterial polypetide isolated from the Sargasso Sea
MKTRRNATLGLATSQGDLADLFRNRSRSNTHFAEPEIWAVFVQACDALCHMHKRRMMHRDVKPANIFLCAKGVVKLGDLGLGRYFSSNTYRAYSVVGTPFYMSPEVIASEGYSFKSDVW

SEQ ID NO: 127709 - protein, 255 aa, Unknown
  Bacterial polypetide isolated from the Sargasso Sea
MSLEDFYNLFLALWALTAIGTFIGLFFKVAPYGRYLDSVTSVTLPSRVGWILMESPTVIGIFIFLLVFQKSIGYVEICLSSIWLLHYIHRTLMWPFRAKLENKRMTLTVILMALLFNTVNITIQCLWIFILGEYVDEWLFSPFFLIGLSLFLIGMLINIKSDNILMNLRTNHGEGYHVPNGFLYRYITCPNYLGELIEWFGWFVLTMSPAALTFFVWTFANLVPRAKSNHEWSKLNIKIIRPIERLSWLLSIDRI

SEQ ID NO: 127710 - protein, 168 aa, Unknown
  Bacterial polypetide isolated from the Sargasso Sea
ADHGMKPKHDINRNPVVIYIQDILDEWLGKSEARVILPITDPYVVHHGALGSFATVYLPTRSNANEIVNLLKDIEGISLAIRNDEAVRRFELPTDRIGDIVIISDENMTIGTSMDRHNLAALKEPLRSHGGLTEQRIPFIVNRKIDLPFYPELRNFDAFYYAAIAASL

SEQ ID NO: 127711 - protein, 270 aa, Unknown
  Bacterial polypetide isolated from the Sargasso Sea
KNFFKHPGVDAKGVLRAIKNNIFNLIKSNRLEGASTITQQVAKNFLLSNEVSLDRKIKEAILAFRIERVLSKERILELYLNQIYLGEGSYGIASASLRYFDKPIGQLNYSESALLAALPKAPSKYNPYKNKELATYRRNLVIKNLYENTYISKEKYDELINSEIILKKRKRIFLEDTRYFLEDIRKKVIQEYGYDKVHKQGFNIKTPLNLELQNLASASLRKGLIDYDKRKGWRGPLDNMNGKDWTKNLDKFNLEKTSWLGHSNCKRIDK

SEQ ID NO: 127712 - protein, 299 aa, Unknown
  Bacterial polypetide isolated from the Sargasso Sea
IKKIRYIYIWLNNKTLLITGGTGSFGRRFTEILLKKFNLKKIIIFSRDELKQHEMQKALLWNKKTEMRYFIGDVRDLSRLERAMKNVDFVVHAAALKHVPIAEYNPFEAIKTNVIGAQNVIQSCLSSNVKKVIALSTDKAAAPINLYGATKLASDKLFISANNYKGSRDIKFSVVRYGNVMGSRGSVIPHFYETSKKKHINLTHKDMTRFNITLEEGINFVIHSLKNMWGGELFVPKIPSFKIYDLAKAIAPKVKPKIIGIRPGEKLHEEMITETDSLNAAEFKNYYVILPDSKYIVWN

SEQ ID NO: 127713 - protein, 205 aa, Unknown
  Bacterial polypetide isolated from the Sargasso Sea
MAQPPPARSVAGDFRWGRKLGQGSFGVVYEVHRKACGRRFVVKQCHIGRMSRAEQEEAITEVHLLASLKHEYIVQYHDSFIGAGQLNIVMEHCPGGDLASKLAELRKRGQRLPEASVWRYLLQVASALRFVHKEKILHRDLKSQNVFLGANGDVRLGDFGVSKLLESTSDLARTKVGTPYFMSPELCESRPYSSKSDVWALGCLL

SEQ ID NO: 127714 - protein, 101 aa, Unknown
  Bacterial polypetide isolated from the Sargasso Sea
MLSTELKSQIQGAYSRFLEAKSLKPRYGQRLMIAEIAKVLGTIRSDDEGKRLGDPAVVAVEAGTGTGKTVAYSLATIPTAKAAGKRLVIATATVALQEQIV

SEQ ID NO: 127715 - protein, 191 aa, Unknown
  Bacterial polypetide isolated from the Sargasso Sea
IETYLDLEGIPIIISDTAGIRESSDEIEKKGVKLAINKAEDADLIIILLDPKNLDFRGFFNEKIKDKSIIVINKSDLGTANLKNFDLKITPQIISIKKDKNINKLIEKIKSKLKKDFLKSDNILITRTRHRLHLKECYNHLIDFIEKKDNEEFDLASEDLRLSIRHLGTIVGKVDVEEILGSIFENFCIGK

SEQ ID NO: 127716 - protein, 134 aa, Unknown
  Bacterial polypetide isolated from the Sargasso Sea
MTETLIPGLKHQILLTVEKHHTADAYGNPGVEVFATPALITLFQNVCGECIRPFLSEDGFSVGTKVNIRHLGATPLGFEVSAQSELIEVDRRRVVFRVEAHDGVEKIGEGTHERFIMDNLDLFLQKTQEKFQQG

SEQ ID NO: 127717 - protein, 60 aa, Unknown
  Bacterial polypetide isolated from the Sargasso Sea
MSTRIGKAVRRAATPSKARVYAEANDEKPREYWDYEALSVQWGEQDDYEVVRKLGRGKYS

SEQ ID NO: 127718 - protein, 212 aa, Unknown
  Bacterial polypetide isolated from the Sargasso Sea
CLGLQYIHTKFIFYDLKPENIMVNLNIKNVKIIDFGSSLDKYKHRSSFYHQSRYYRSPELIFHLQFNEKIDIWSLGCIIGELICNNPLFKGKNERDLLFKMTEKLDFPKDYIYINSINFNTYFTKLKEDFGEKKEEEEEYEYFRIKEGLTLNRKYKPMNYCLKEHLNKYLQFFRGEEHNKENLIDLISKLLVYNYHNRLSAEECLLHPLFLF

SEQ ID NO: 127719 - protein, 53 aa, Unknown
  Bacterial polypetide isolated from the Sargasso Sea
MNDKKFGKSNKMQVQKLPTGIEGFDDVCRGGLPVSRSTLVSGTSGTGKTVFSL

SEQ ID NO: 127720 - protein, 94 aa, Unknown
  Bacterial polypetide isolated from the Sargasso Sea
MLSKNSTILITGGTGSFGRAFLNKLIDSDVKEIRIFSRDEKKQDDMRKEFNNEKLNFVIGDVRDTDSCMVATKGADYIFHAAALKQVPSCEFYP

SEQ ID NO: 127721 - protein, 155 aa, Unknown
  Bacterial polypetide isolated from the Sargasso Sea
MYNYGVTLRDFLKKHVEGGAHTLKIATDILCGLQELNERFCVCHLDLKPTNVLYSSTDDTFRLCDFGEAQHVPLSSHSVNSKTGTIGYRGGEFADIDSVNNDDYFKVDMWSLGCILFEVIWGQPLWRWYLSGYPPGEPLPKDISDTGHPDRYQRV

SEQ ID NO: 127722 - protein, 127 aa, Unknown
  Bacterial polypetide isolated from the Sargasso Sea
GTYFGSIQEYSAEFMSNWNFIVGVFLFVVGAYINIKSDNILLSLRTKSGEYKIPEGFMFKYVSFPNYLGEILEWMAFALMTWSLAGLSFMIWTMANLVPRAIKGHQWYHKKFDSYPKNRKAIFPFII

SEQ ID NO: 127723 - protein, 154 aa, Unknown
  Bacterial polypetide isolated from the Sargasso Sea
NILKHSNKITIQIKDLRVLDLYSGTGSFGLECLSRGASYALFVENDKDALKNLNKNIKNLSFEKKTTISNQDIYLFFKKSSFDKKFDLIFFDPPYIDKKYIEIIKEIKIKNIINKDHVVILHREKNSYNNLSNYINIIESRTYGRSEIFFGKLF

SEQ ID NO: 127724 - protein, 36 aa, Unknown
  Bacterial polypetide isolated from the Sargasso Sea
AASFGWDLLELIDQNKLFILDASPDPDGQDVAGNFV

SEQ ID NO: 127725 - protein, 214 aa, Unknown
  Bacterial polypetide isolated from the Sargasso Sea
KGRQLSCILMPLVDGDKFKKREMVNYTDEEKIKFVKDLLNIYKTLTENGVLHGDIKFENMLIEEHEGKQKLKLIDFGFAKDLTEKITDHRRYVVCGTPNYLPHTRRTRDPSLDRYAICVMILEIFHLDEVESVRNEELKSPQHQMCMDIEVYTENCKKGFINLLRQDKEASTTQGMKRPLNKISEAVRDKLLQIISTAQIGSPKEFIELAKLFN

SEQ ID NO: 127726 - protein, 86 aa, Unknown
  Bacterial polypetide isolated from the Sargasso Sea
ECIRPFLSENGFSVGTRVDIRHLGATPLEFEVSVQCKVIEVDRRRVEFCVEAHDGVEKIGEGTHERFIMDNLDLFIQKTREKFQQG

SEQ ID NO: 127727 - protein, 292 aa, Unknown
  Bacterial polypetide isolated from the Sargasso Sea
PQEREEQARRAYVQRQAERLLDVTQGDFTPVAKICSLFGDASQLYLVKRVDQDSEQRFTLRTYSKESIAKQNLKKLVMDEVQLLGSIPQCPFIPALLSTFSSKNGLFSVYGALMAADLSVVLGDRQLAQDGEEGETTARFLLSGILSAAIHLHAEEIVCRMIYRDSIVLDWRGYPMLADLTLAKSLRDCGGATYTLCGTPEYNAPEQITKAGYGTEPDYWAIGVLMYELFTATTPWPALVAKKKGKSVAEAGEPSPVDILEAIGNYKPVGGNELPYPEKLTKASIDIMDDLI

SEQ ID NO: 127728 - protein, 177 aa, Unknown
  Bacterial polypetide isolated from the Sargasso Sea
YFPKNIKTRPLKDSVRENIFNILSHSNSIAVDIKKSEVLDLYAGTGSFGLECVSREAAKVIFVENNVYALKNLKKNIINLNSHNETALINQDVLKFFYMNDVELFKEKFNIIFLDPPYHDKKCVEIIKIIKKKVLLNKKHIIIIHREIKSEDNINKHLNIIENRVYGRSEIFFGRFF

SEQ ID NO: 127729 - protein, 126 aa, Unknown
  Bacterial polypetide isolated from the Sargasso Sea
MKHQILLTVEKHHTADVYGNPGVEVFATPALITLFENVCGECIRPFLSVDGFSVGTRVDIRHLGATPLGFEVSAQCELIEVDRRRVVFRVEAHDGVEKIGEGTHERFIMDNLDLFLQKTREKFQQG

SEQ ID NO: 127730 - protein, 213 aa, Unknown
  Bacterial polypetide isolated from the Sargasso Sea
MRNYKSFIVFIFLFNSYLFSQKPYRGAEYRTINEFLHGRFEVKMKTATGSGVVSSFFTIDDYWAEGQSSTENWREIDFEALGNISNAIQTNIITAYETHHEEIIYTPFYPYSDFHVYAFEWTPQSIKFFVDDQLVRENYDDYISTLNTGQKIMMNIWQPIWESWVGEFDQSILPVYAYYDWVKYYSYTPGEGAYGSFNNFSYEWEDNFDSLMI

SEQ ID NO: 127731 - protein, 135 aa, Unknown
  Bacterial polypetide isolated from the Sargasso Sea
MEEVIGKGSYGVVCAAIDRQTGKRVAIKKVKNAFDHASDATRILREVTLLRHLKHPDIVEVLNILLPPNPRDFNDVFIVFEVMETDLHQVIKANDDLTDEHYQFFLYQLLRGLKYMHSAKVFHRDLKPKNILANS

SEQ ID NO: 127732 - protein, 139 aa, Unknown
  Bacterial polypetide isolated from the Sargasso Sea
MRTIGSSLSIVYLYDSFEDNDAVHLLMDLCEGGELLGAIRKGATYTEADAAELVRSVIRTAAQCHSRGIIFRDIKPDNFLFERDEPGSPLKATDFGLAGLITPGERLQRRCGTPSYMAPEVINRNYGEEADVWSCGVVA

SEQ ID NO: 127733 - protein, 266 aa, Unknown
  Bacterial polypetide isolated from the Sargasso Sea
MHDLKLICKLGAGGFGVVTLEKHERSGQLFAVKALNRAKLQKQGMETKAASERDVLRMVDTRFIIRFYEAFADDVDIFFVLEPCLGGELFTVLHSKRLFGVDRYAQFYVACVLEAYDHLHARHILFRDLKPENVLLDVKGQGKLCDMGLAKFCIGKAFTLCGTPEYMGPEVIKGAGYGKAADWWMVGIFLFELLTSRTPFVAAAPYEICKNIRRGYAAYANENLTETHLPREPFKSLIPALLDPNPLARLPVLPQKGVDGFREHEY

SEQ ID NO: 127734 - protein, 126 aa, Unknown
  Bacterial polypetide isolated from the Sargasso Sea
MPIFDPNLLKSIIFQIVQGLKYMKNHHIIHCDMKPENVIFTDDSYQKVKIIDFGSSCTDSKSGFSYVQSRYYRAPEVVLGLPYSHGVDMWSLGCIVYELITGKPIFPGHDENELLEYMVVTVGRVP

SEQ ID NO: 127735 - protein, 136 aa, Unknown
  Bacterial polypetide isolated from the Sargasso Sea
MVLLLEADPSTASIEAYLDNAWCFAAKYKDEIVAVCVAKLIRDKVAEIFNMAVWPDYQRQGIGSVLLSFVLTELARKSVVRVELGTGSFGYQLTYYQRQGFRVEAVIKDHFLTHYDEPLFEQGLQHKDMLRLALEL

SEQ ID NO: 127736 - protein, 118 aa, Unknown
  Bacterial polypetide isolated from the Sargasso Sea
FISLPSGKLPMECVMDQSENLKFEIDLGWATAGGADPQIWIEKYTNKIIACHLKDFYSKDKDMLDHTNQSAVGDGFINWKELIYKIKKTNCNLFIIEHDDPTDYKDYTIKSLENLSSI

SEQ ID NO: 127737 - protein, 313 aa, Unknown
  Bacterial polypetide isolated from the Sargasso Sea
LVRGHFHFALCELKLPSPLRLWQAKRLLPLAGESRVYPDFARLYGAQLKAVDDWLSQLGVRQRPRRGLGLEFHQLREFRDGDTLRQIDWKATARKRTPIAREYQDERDQQIVFLLDCGRRMRSQDDELSHFDHALNACLLLSYVALRQGDAVGLATFAGNQSRYLAPVKGPAQLNVLLNAVYDLDTSQQPADFSAAADLLLARQRRRSLVVLVTNLRDEDDQDLLAAVRRLSRQHRVLIASLREEALDRLRQTPVEQFDQALAYCGTLDYLNARADLHERLAAHEVPVLDARPGELGPELVSSYLAWKKAGAL

SEQ ID NO: 127738 - protein, 134 aa, Unknown
  Bacterial polypetide isolated from the Sargasso Sea
MTETLIPGLKNQILLTVEKHHTADAYGNPGVEVFATPALITLFENVCGECIRPFLSEDGFSVGSRVDIRHLGATLLGFEVSAQCEVIEVDRRRVVFRVEAHDGVEKIGEGTHERFIMDNLDLFLQKTRDKFQQG

SEQ ID NO: 127739 - protein, 231 aa, Unknown
  Bacterial polypetide isolated from the Sargasso Sea
AAVEHPNVLPLLGVTVSPSGTVAVLTAYMPRGSVFGMLHPRNGRGTPLPRVLAMRMLADCARGVGYLHGCSPPIIHRDLKSQNLLVGADYSVKVADFGLSRECLQPGAMTRVGSVQWAAPEVLLGKSYSHKCDLWSFGVVCWEVLTARVPFDGMAPTTVATKVAMEGLRLPVPPQAPMRLLRLIARCWSEDPEQRPSFEAVVTELGAIEVALTAEAPRSSDAPTRPASSTQ

SEQ ID NO: 127740 - protein, 157 aa, Unknown
  Bacterial polypetide isolated from the Sargasso Sea
PGAVGRASSRYSFKHSFKYSSPCGRYSFLVLELCAEDLLQVLQREGRLAEPAAAFYTAQLLAGLAHVHRQGWVHRDVKPRNLLLTSLLQLKVADFGQATDQPDTSFGGDARYPVAHREDAHKLKQPPGSLGVDFPAPRSPDLFWNSFLLLRTDLVAL

SEQ ID NO: 127741 - protein, 114 aa, Unknown
  Bacterial polypetide isolated from the Sargasso Sea
MNGTARKVACGAAETLPLVQVTNLARTLREIKDAGVWVVGTAGETDTELFDANLTGPMAVVMGAEGDGMRRLTREHCDLLVKIPMAGSVSSLNVSVATGICLFEVLRQRNATQI

SEQ ID NO: 127742 - protein, 300 aa, Unknown
  Bacterial polypetide isolated from the Sargasso Sea
MDSDDDETVAAPTPKTAVKAPVRVKTEHDVEAVTQAIAAVAIKTEPVVKSQFPEFVKAEPVEGEVKVEIKQEEDEISPLAALLRECGQSERDVLPMEEVISRFTAAGVLKIGEGTYGEAFKCGGNVLKIVPMGGDVLINGEPQMGPGQIRAEAAIAKRLTRLRPDYQAAEAAEFKAMTGVKCELPLNSTEGFINTAAVTVCRGPYAPPLLNAWKKYDKERESENENPEGFPEDQLYIVFACADGGVDLEHIQLNNAAEATAMLLQVTVALAVAEEAMKFEHRDLHWGNVLLQRCGVDETR

SEQ ID NO: 127743 - protein, 79 aa, Unknown
  Bacterial polypetide isolated from the Sargasso Sea
AKMASVVGTRVDIRHLGATPLGFEVSAQCEVIEVDRRRVVFRVEAHDGVEKIGEGTHERFIMDNLDLFLQKTREKFQQG

SEQ ID NO: 127744 - protein, 258 aa, Unknown
  Bacterial polypetide isolated from the Sargasso Sea
MELCERGDLAGRIKKCQRMRRRVDERTIWANMVEMAEGIAYLHSKNIYHRDIKPANVFLAADGTAKLGDLNVSKLTKGDDLMQTKIGTPYYMAPEVWDGRKYDGACDVWSIGTVVYELAALEPPFQANSIMQLKRVVKAGRFPPIPSIYSSELSRIINMMIVTDPSKRPSAQTIVDHELVRKRRASHLLSHPAAAPEEGDDTELLATIKPPKKGSRNDLKILASQLSQMSGQVATSRSESKSDLAPPRGGLRSNLERS

SEQ ID NO: 127745 - protein, 132 aa, Unknown
  Bacterial polypetide isolated from the Sargasso Sea
FNECIDIWSAGCVIYEIFFDDVLNYARQDSDYLLFIQEVLGVPPKNYIDSHNNISRYYKNYEPLYLQDSRYRYRYPLNNDIFNIKNEYNEDDYEINIFPLLKFIKTFLNWDYNKRITPRQALEFVGPLIEIL

SEQ ID NO: 127746 - protein, 208 aa, Unknown
  Bacterial polypetide isolated from the Sargasso Sea
MEKTILKKNLIIFTPYFNPEPFPINTFVSELSKKEEIQSIKVITSLPNYRKYGFYNGYSILGPYSEKKDKVSIARLLIIPRFSNSIFAIFLFYLSFFFSSFVYLLFFSILNRNKYQHILTFCGSPVYVGYLGFFASKLLNTKSSQWIQDIWPEAIQTTVGLRMNFLARIIRLLQDKMWNYCDILFAESESLKKYLSDIFPKKKVITLY

SEQ ID NO: 127747 - protein, 49 aa, Unknown
  Bacterial polypetide isolated from the Sargasso Sea
MNDKKFGKSNKMQVQKLPTGIEGFDDVCRGGLPVSRSTLVSGTSGTGKT

SEQ ID NO: 127748 - protein, 78 aa, Unknown
  Bacterial polypetide isolated from the Sargasso Sea
MLAALAYCHASGVIHRDVKPENFLFESEEGAEEGTAILKLVDFGIATRLRAEETRPEIMLRFDSEMTTTNSVLLLFPD

SEQ ID NO: 127749 - protein, 298 aa, Unknown
  Bacterial polypetide isolated from the Sargasso Sea
LLHGLHFCHNNNILHRDIKGSNLLISNKGVLKLGDFGLAKSITNEQAAPLTNRVITLWYRPPELLLGATSYGPSVDMWSVGCIFAELVHGRPILPGKTELEQLDLIFKLCGTPTPENWPDAEKLPHAKHFKQKKHYPRRLREVFNRFSPCEKDLLERFLTLDPTKRISAREALDSDWFWEDPLACDPDDLPRYEPSHEFQTKKRRQEAKRMGEQNKKQRTEERAPPPPPQEMKRGPSGPNHGPRGSQGGRPHHGHRPGGQGSSGGRYGAGSAASGWSAGGGKKNLTRAEEVPWAVTEA

SEQ ID NO: 127750 - protein, 224 aa, Unknown
  Bacterial polypetide isolated from the Sargasso Sea
MFNNKTILVTGGTGSFGIAFIEGIYSKYKPKKLIVYSRDEHKQHMLSKIFKKPKYKGIRFFIGDVRDTRRLSSALKNVDFVIHAAALKHVPIAEYNPQECIKTNILGTQNLIDCCIENNVKKVIALSTDKAANPINLYGATKLVADKLFVSSNSLSAHTDTIFSVVRYGNVLNSRGSVIPFFKDLAKKKQPLPLTDIKMTRFFISIEDAVKFIIHCFSKMHGGE

SEQ ID NO: 127751 - protein, 125 aa, Unknown
  Bacterial polypetide isolated from the Sargasso Sea
MKTIGKLAKSLNLNVETIRFYEREGLITQPIKPISGYRQYDESITGQLRFITKAKALGFTLREIKLLMSMDNNCSQVELLSRQKLAIIRDKINDLQRLEKVILDMTNTCMQNEDPTHCPIIDSLK

SEQ ID NO: 127752 - protein, 203 aa, Unknown
  Bacterial polypetide isolated from the Sargasso Sea
MQSFVNNSHLGAGFNIAHEDLEIRGAGEILGVKQSGHIDTIGMSLYMSMLKTALNNDQIEVSPTCEIKVAVTSLIPEYYLPSPVERLKIYKKLSGADSRTLREIKDDLLDRCGKHPVELENLFKITEISIKAKFLEITKIVQSSKYLKFKFSKTLKDKTLSKILSTTNESPEMYEIKKNGELWIKFNGQDVLNLLDNAIQKFT

SEQ ID NO: 127753 - protein, 209 aa, Unknown
  Bacterial polypetide isolated from the Sargasso Sea
MFKISNKVRRLTNQEKDKYLKDGYLTGLPVFDDEAKDDLNDLFVSLSSRLSNDIDINQTNMWHKASLKFYNLCRTPAILDYVEDLLGPNFFQWGGQFFLKEPKDGSVVPWHQDAQYWPLSPAKSVTVWLALYDTDEENAAMKVVKGSHKQGMFKHHTNKASNLVLDQEVSNDQIKQDDIISLNLKAGEISLHDDGLLHGSEANHSNRRR

SEQ ID NO: 127754 - protein, 117 aa, Unknown
  Bacterial polypetide isolated from the Sargasso Sea
MRIISGDLKGKKLLAPLDKSTRPLKDMVRESIFNILDHSNKVSTKIRNSKVLDLFSGTGSFGIECLSRGASNVIFFENYQNSLKILRKNIIDLKLENKSTVYNNSAYNLRKFHLKEG

SEQ ID NO: 127755 - protein, 258 aa, Unknown
  Bacterial polypetide isolated from the Sargasso Sea
MQRLSADRLFSGRDARQVWDAYEKLGVLGTGSFGTVYRAKDRQGSGIVVAIKQVGKEQAAATGAEKGAFEEFAMCVRISHPHVLRVFSYFDTPHSLYIVSEIAAGGELHEYLCSHPELNDEAGIARLVSQGLAAIVHLHHEGMTHHDVKPPNLLVTGHAWAGDASGATPLVVLADFGTAKLMQKAAHRVRRVSIVEGEGSKKEVKAVEVLGTPEYCGPECFSTLGAAHDAGRHSDVYALGVTIFELLVGEKPFQIEWG

SEQ ID NO: 127756 - protein, 274 aa, Unknown
  Bacterial polypetide isolated from the Sargasso Sea
MYTVDFEQLCFKQRPTGENVVLGEGSFATVYMGTLADTCEPVAIKKLRPEFAGRVGAVAMFSNEAKILRECQHENIIGFLGAAEDPGTSPINKYLLLELVVGGSFANLLGLYGPLFNPDFPAESCTAISAYIGQVLDALEYLHGKGYTHRDIKPENILVDHLGLIKLVDFGTLVDLAGLDTSTRELAGSVAFADRSVLLGNEYGQEADIYSLGATVWNLASGIHPFHDVATTQDELLRARRERELAVVCDPSWPDPLRDFVAVCTQPTDRPSAA

SEQ ID NO: 127757 - protein, 85 aa, Unknown
  Bacterial polypetide isolated from the Sargasso Sea
KTFCGTPAFMSPEICNNRGYLGPAADNWAAGVVLYTIMFGMEPFKGHSEVDLFKKINAGKLNFPTSSHPDFSKSNNVPTRDNSVR

SEQ ID NO: 127758 - protein, 227 aa, Unknown
  Bacterial polypetide isolated from the Sargasso Sea
MKLKIAVHKRCKNKQNPDKVSKGWSNIYEDLEWLIGWVEHGYGWCATHFNNRHRKADNANGSNLIVIDFDGDTTLEKFWECDTAKQWCAATYTSSSHTEQEHRFRAIFPLEIELSSVGQHKGAYWLVVNRLLAELELEKLADNCGQKPERLWYGNTNTLIQRNDGALVPEFLLKDIDFEERPTNFTTSDLSDQDIERCKWLLENYLKPTEDGEYESYYVPVMAACAG

SEQ ID NO: 127759 - protein, 170 aa, Unknown
  Bacterial polypetide isolated from the Sargasso Sea
MELADGGDLLQAIEKRKKTQVKFTEEEVWHFFVQIARGLKALHDLKIVHRDIKCANLFLTKDGAVKLGDLNVSKVAKMGLLSTQTGTPYYASPEVWKDRPYDHRSDIWSLGCVLYEMITLLPPFRASSMAGLAKKVTQGQYEKVPAKFSVDLAQMVRSLLQVEPRNRPTI

SEQ ID NO: 127760 - protein, 424 aa, Unknown
  Bacterial polypetide isolated from the Sargasso Sea
MNIVALVDCNSFYASCETIFKPDLSKKSVVVLSNNDGCVIARSSEAKKLGIKMGVPFFEIKQIIKKYPVHVFSSNYSLYGNISSRVMGVLKEHCDRLEVYSIDEAFLILNKYSERSFVSRAEGIKKIIRKWIGIPVSIGIANNKTLSKVANHLAKKDELGSQVVEIINQKQIEISLKVLGVGDIWGIGARIEKFLQKNSIYTAYDLYKTDPRWVRQHLGVVGERTYRELHGEICIPIVERSEPKKQCRVSRSFENYVTSFHDLEKRIISYATRASEKIRSDGLQAKKITTFIRSNKFNNNNKQYHAARTYDFISPSNDLFETIKFAIKALKSIYRPEIKYKKAGVLLSDLTPEGEYNRDLFFHQSEESILKKIRVNKVFDNLNNRYGSGTICVAKENYEKFYITRRQNLSPAYTSNFDDLPNVN

SEQ ID NO: 127761 - protein, 249 aa, Unknown
  Bacterial polypetide isolated from the Sargasso Sea
METYNNILFVWLGISIIAFITLLFKSAPYGRHSVSSWGPSISSRLGWILMESPTVYLMILFMILFNSSLGVVEAVFILIWMVHYVHRSFIWPLRAKLEGKTMSVVIILLAILFNFVNVYIQGSWILIFGSYSIEWLWSPFFIIGLSIFCIGLFINIKSDNILIELREKHGSGYHIPEGFLFNKISSPNYFGEILEWLGWFIMTLSPAGLVFFIWTMANLIPRAKSNHEWSLKNIEGYPTDRKKVIPFLY

SEQ ID NO: 127762 - protein, 281 aa, Unknown
  Bacterial polypetide isolated from the Sargasso Sea
MDTESPFKRKLRIIIFGTDTPAGRYFDLGLIICIVLSVALVFLDTVEAFHRDYGHIIRVLEWVFTLIFTVEYGLRLYCATHPVLYARSFYGLVDLLSVLPSYLALFIPGANFTLVIRVLRLFRIFRVLKLLRYLSEGNLLLKAMMQSSRKVFLFFFSVSLIIMVLSAVMYVVEGPENGFSSIPKSVYWTIVTITTVGYGDITPKTELGQAIAAFTMLLGYSIIAIPTGILTAEISQEAGRHRDLRTCNQCHKMGHDLDATYCNRCGCELDNLEIPQGKGDK

SEQ ID NO: 127763 - protein, 922 aa, Unknown
  Bacterial polypetide isolated from the Sargasso Sea
MPDAKNKFICEKELLSNIADDTKFLENEVISQNAQKIIELCRKNKTDRTKLDAFLSEYGLDNKEGVALMCLAESVLRIPDKNTRDLIISEKLSEGRWIDHLNKADSLFVNASTWGLLLAGKVVSTPSKWSKDPNNFITELISKSGEMPIRTAVLAAMGILSQEFVIGKDFKDIENIKGLENESYSFDMLGEAARTSSQAEKYFESYFNAIDEVGRLNLTKDLSNGVSIKISALHPRYEMRKLDELESKLFPKLAELINYAHSKDVEITIDAEEQDRLSLSFHIIKKLAFEKKIKDWSGFGIALQAYGKRALRAVDWLNKIVEKRAGMHLRLVKGAYWDYEIKHSQVYGYEGYPVFSKKSITDIFYLACAKEILRNKKLFAKFATHNAHTISSIQYLGEGSDYEFQRLYGMGELLYQSASETLELSSKPSIYAPIGSHKDLLPYLVRRLLENGANSSFINRLLDPETDSAWLAENPYERLKKETKDIPVPKKIFFDRENSSGKDISEIENLEDLKSKIDNFSGLKVDAESIYAGRLDANNTEEKAFSISNRCEIGTITLDDPIQIKKALEKDTLNEWKEIEVNERAKILNLIADDLENNPYELIYFLINEAGKTIQNAIDEIREAVDFLRYYSSQSIELFNNTELNGPTGEDNQMSFTPKGTFLCISPWNFPVAILIGQISAALSCGNRVIVKPSEYSSILGYLVVKKFHDHGVPISALSLILGDGLYGDFLTKIRPLHGVAFTGSLPTAKKIQANIIDNQNQIIPLIAETGGVNTMIVDSSALLEQVTDDVVRSAFDSAGQRCSALRVLCVQEEIYDDLKSMIIGNMQIQTVGDPNFFDTDIGPIINDKAYKKLTSYISLCSEKGYKIHQLNQKVSDMHIAPTLIEINSISNITEEQFGPILHILKYSSNEIDELINQINRK

SEQ ID NO: 127764 - protein, 717 aa, Unknown
  Bacterial polypetide isolated from the Sargasso Sea
MKGTVLYDVKEGIAILTVDNPPVNPLSDGVRTGLFESLVKAEEDSSVSGVVLTGNGRAFIAGADISEFGGNVEGVSLNEVFNKLEYCSKPVVAAINGIALGGGLETALCCNYRIADKNAFVGLPEVNLGLLPGGGGTQRLPRLVGPGEALKMMLSGGHVPATKALHMGIVDKISENVVEDAMAFIKEVSESVENHPKVRDKNEKMIEARGDDKVMLEAQALAAKTRKGQFAPGQIIKCVESAINLDDFDEGLKKEGEYFLECLLHPQREAMIHMFFGERAASKISDVPKDTKVMDIKKAGIIGSGTMGGGIAMCFANAGIPVHIIDQDQDNLARGISVIEKNYDFMVGRGKLTQDQKDAVFGLVSSSLDYKDVSDCDIVIEAVYENLELKHEIFKSLDEHVKDDAILASNTSGLDIDSIASVTKRPEKVVGTHFFSPANIMRLLEVVRGDQTSNETLATIMAIGKKLKKAAVVSLNAPGFIGNRMLFGYTAQANMLLLEGALPHQIDQALESFGLNMGPFRMMDLVGLDLGWRARKLGGKDSPLHAKIGDELCEQNRYGQKNGAGYYNYSEGSRAPNPAPENEATYEKISAENGFTRRDISDEEIVDRCILALINEGADILSEGVAQRAADIDVVYINGYGFPIWRGGPMHHANAMGLDVVIEKLNKYREITGNDVYKPSEMLLKLAESGERLGEAPAKEDRKEKLDFEMSSVANNF

SEQ ID NO: 127765 - protein, 387 aa, Unknown
  Bacterial polypetide isolated from the Sargasso Sea
METKNIGLRNIPIADTKISLIDGEKGKLIYRGFDVLDLTKNSNFEECCFLLLHDHLPNKIEFNEFTTKLKEARAIPEQMQKNMKNWRKNAHPMDVLQAFVAALAGYYDEQGTEKEISQQRAINLISKVPTIIASWERVRNDKEPIQPDPELSHASNFLYMLTGNKPDKEMERVFDVCLILHADHTFNASTFAAREVASTRAHMYSAVSAAVGALSGELHGGANYEVMKMLLDIKDENNATNWVKSRIEKGDRIMGMGHAVYKTVDPRSMVLKELSKKLSAKTGLPWYNITKKVEETTSEIMKNRKERDIFPNVDLYSASVYYMLNIPMDLNTPIFAISRVSGWAAHVIEEKFAEAAPKPMLYRPKATYVGKYEGPQGCNYIPIEERK

SEQ ID NO: 127766 - protein, 914 aa, Unknown
  Bacterial polypetide isolated from the Sargasso Sea
MKDPRGSVWRKWDLHIHTPFSFHWNEGANIKKLPPEEREKILDQLIEKIVESDVAAFGIMDYWTFDGYLAIRERLAARKLEISKAIFPGMELRIEAPVDFRLNIHVLLSDALTTQNLNDFKSALQIRSSNNYARALSNEALIEYARSLDPSKAKIHGFQDTDLKDEEKLLRLGSMTALVTRESLRDAIKRIPPDTCLVIMPYDTSDGLSELDWEKHPHDDNYFMRSADIFETRNPDNVDLFLGRETDKNRKFLANFVKTMGGKPKPAISGSDAHKIADYGVFPSNRITWIKADPTFEGLRQTIYEPISRVQISAEKPIEPLFAIRNVVLNFPADAKLVSNIVSASQPDPFCFRGRTEIVFSAYLTCLIGGRGSGKSTLLNLLHEKLDPGRTRFFVDNSLTPTKTTDIASCVTIDGDAEQKIVEFLQQNEIEQFAVAPHGFTEAIFKRLSKRDTDGKLATIDEAIQSAIDETEAQSQRLAEHHTLAITLASAEKELATARTLIVSFQNPEYTQLNADLGASNKELQGLRTWRSRLESLLKELRAVCQKQKLPPSETPNLYETEFFAIQKAIDELLVPVEARANLADASARETALTHEVAALTQKLEDFLRGRGLSQENLLDVGKANERIAQIEQELPAQKAKASELEKQIAAFKNQRELIDERVGVVTELLMPLNDTLSRLGKEVKPIELRYEFDDAQFKQVMVERIQERFEAGDGPAPRIDHLHTMLSSVDFKSLTTSADFLSKLPGERSTAKLLRDHFSNEPNFELLKVEAEKLLMDHRAFGRIRVSYDGKPVESSSFGQRCTTVIVILLLLGNTPIVIDEPEAHLDSALIANYLVELVKKAKLNRQIIFATHNANFVVNGDAELIHVLEMGADKSTKVVSVTIENLEHRGKLLTLEGGSEAFLKRESRYGIA

SEQ ID NO: 127767 - protein, 204 aa, Unknown
  Bacterial polypetide isolated from the Sargasso Sea
MSLEDFYNLFLALWALTAIGTFIGLFFKVAPYGRYLDSVTSVTLPSRIGWILMESPTVVGILIFLLMFQESIGYVEICLSSIWLLHYIHRTFMWPFRAKLENKRMTLTVILMALLFNTVNITIQCLWIFILGEYVDEWLFSPFFLIGLSLFLIGMLINIKSDNILMNLRTNHGEGYHVPNGFLYRYITCPNYLGELIEWFGWFV

SEQ ID NO: 127768 - protein, 170 aa, Unknown
  Bacterial polypetide isolated from the Sargasso Sea
MEDKKIVLFDLDGTLIDTAPDMYLALNILLDEENVKTVSYDEVRNQVSNGVLGIFSVAFSDDSEIEGERYERYLDIYESVLGQECKLFDNVYELLDSLDSREIDYGVVTNKSSRFTIPLLSQFDLLRRMKTLVCGDEVNNRKPDPEPLIKALDKTENSYNTSQCVLCWRC

SEQ ID NO: 127769 - protein, 289 aa, Unknown
  Bacterial polypetide isolated from the Sargasso Sea
MSDLSPEKPDTESPLKHQLRTIIFGTDTPAGRYFDIGLMVCIVLSVALVFLDTVEAVHQDYGHIIRVLEWVFTLIFTIEYGLRLYCATHPVLYARSFYGLVDLLSVLPSYLALFIPGANFTLVIRVLRLFRIFRVLKLLRYLSEGNLLLKAMLQSSRKVFLFFFSVSLIIMVLSAVMYVVEGPENGFSSIPKSVYWTIVTITTVGYGDITPKTELGQAIAAFTMLLGYSIIAIPTGILTAEISQEVGRHRDLRSCNQCHKMGHDLDATYCNRCGCELDKLEAPQAKGDK

SEQ ID NO: 127770 - protein, 334 aa, Unknown
  Bacterial polypetide isolated from the Sargasso Sea
MLSKNSTILITGGTGSFGRAFLNKLIDSKVKEIRIFSRDEKKQDDMRKEYKNDKLNFVIGDVRDPNSCNQVTKGVDYIFHAAALKQVPSCEFYPIEAVKTNVLGTENILNSAITNKVKKIICLSTDKAVYPINAMGVSKALMEKIVIAKARMYSDSNTTICLTRYGNVMGSRGSVIPLFVQQIEQQNPLTVTDPNMTRFLMTLDDAVDLVLFAFENGINGDIFVQKSPASDIQTLVNAVKKYLNVENHPVETIGTRHGEKLHETLLSREEFAIAEDLNDFYKISPDLRNLNYEKFYESGVRIDSNEDYNSSNTRQLTEKEIISLLEKININSIE

SEQ ID NO: 127771 - protein, 275 aa, Unknown
  Bacterial polypetide isolated from the Sargasso Sea
MVEASAGARRANASGATKTASTVSETETKTKTTKRETAPVGDMFGEDSDEDALFLNPADDAGGMAKPAGAVDMSRGLADNWDDAEGYYCARIGEVLDDRYTITAHLGKGVFSSVLRAVDKTKDDGESEVAIKVIRCNETMRKAAQLEIDILQKLSGSDPENKRHCVRFLRHFEYRDHVFIVFESLARNLREVIKKFGRNVGINIKAVQAYATQLFIALRHLQNCGVVHADIKPDNILVNENHNVLKLCDFGSAMFDGDNELTPYLVSRFYRAPEV

SEQ ID NO: 127772 - protein, 307 aa, Unknown
  Bacterial polypetide isolated from the Sargasso Sea
MNKKSIVLITGGTGSFGRAMSERLIKDKVKEIRIFSRDEKKQDDMRREFNDSRIKFYIGDIRDEKSVENVVQGVDFIFHAAALKQVPSCEFYPMEAVKTNILGVENLLDKAIRAKVKKIICLSTDKAVYPINAMGVSKSMMEKVITAKSRNSKNTNICITRYGNVMYTRGSVLPLFVNQIMHKNYITVTDLSMTRFMMSMNDAINLVLFAFKNGKNGEIFVKKSPAATIDTIVKSLNKIFKKKPKVKIIGSRHGEKFHETLLTKEEFKKTINFKNFYKIVSDNRDLNYDKYFSKGSKKNISDDYTSE

SEQ ID NO: 127773 - protein, 112 aa, Unknown
  Bacterial polypetide isolated from the Sargasso Sea
INLVFYLGLLIFFMGMFINIKSDNILINLRTANEDYSIPTGFLFNKITSPNYFGETIEWLGWALLTFNFAGFVFFIWTLFNLLPRAISTHKWYLSEFKDYPKNRKIFIPYIF

SEQ ID NO: 127774 - protein, 301 aa, Unknown
  Bacterial polypetide isolated from the Sargasso Sea
FWNHKNIISLSLLPLSLVVQLVIFLKKKFTKTVNFKIPIVCIGNVYVGGTGKTPLSILVSKELSKIGKKPVIIRKYYKEHKDEHALIKENLNNLILNLNRTDAIQEAQNKNFDTAILDDGFQDFKIKKDLSIICFNSNFEGNGFVIPAGPLRENLNSIKNAQIIVINGYKNLKFEKKILEINNNIDIYYSKYKAVNFEKFNQKELLVITGIGNPENFLNLLNNHNLKIAKKYIFPDHYTFSKEELYNFIREAKKNGYQIICTEKDYHRIKEYSIEEIDFLRVELVLEKKETLIKKIQDIYD

SEQ ID NO: 127775 - protein, 658 aa, Unknown
  Bacterial polypetide isolated from the Sargasso Sea
MDRKFDYPGLLIAAGFFVLFAAQLLMLHPTSAPIAYSDFHQLVAARLVDDLEVGPVSISGTLKMPQAGTMLPASEAAAVREAGAPWRFTTSRVADEHLTDALTAAGIRYHGAPDTSWIASLASWLLPLVLFVFIWNMMLRRRGGLQDFTGMGKSRARVYVQQETGITFDDIAGIDEAKAELQQLVAFLRNPERYQRLGGKIPKGVLVVGAPGTGKTLLARAVAGEAAVPFFSISGSAFVEMFVGVGAARVRDLFEQAQQKAPCIVFVDELDALGKVRGVGPMSGNDEREQTLNQLLVEMDGFQAGSGVIIMAATNRPEILDPALMRPGRFDRHIAIDRPDVNGRRQILGVHVKRVKLAADVDLGELASRTPGFVGADLANVVNEAALHAAELGKPAIGMADFDEAIDRALTGLERKSRVMNAQEKLTIAYHEAGHALVAESRTHCDPVKKVSIIPRGVAALGYTQQVPTEDRYVLRRSELLDRIDALLGGRVAEELVFGDVSTGAQNDLERATAMARHMVMQYGMSEKIGLATFDDGDARQGMPGAWHGGDGRCSEHTARMIDDEVRTLLADAHARVATTLGERRDVLERIARRLLQCEVLERDALQALIDGRVEPPSASTMAPDDAAGARDGTVETEQASAVERDFVAYGPPREPER

SEQ ID NO: 127776 - protein, 134 aa, Unknown
  Bacterial polypetide isolated from the Sargasso Sea
MTAALALGLKHQILLTVEKNHTADAYGNPGVEVFATPALITLFENVCGECIRPFLSEDGFSVGTRVDIRHLGATPLGFEVSAQCEVIEVDRRRVVFRVEAHDGVEKIGEGTHERFIMDNLDLFLQKTRDKFQQR

SEQ ID NO: 127777 - protein, 536 aa, Unknown
  Bacterial polypetide isolated from the Sargasso Sea
MYLEFRTETDNEFSAGTWVEAPGFNIPIKIDKTTMPHALTINSDGSFSFAPWPHWEDRLVGDEVTNPTPHFISTTGGINRYIKDIFVYRNRLGFLTEDYVSLSKAGEFFNFFAKSAVASGNDDPIDISVSDNDSPSLNYVSKETAGLLLYGKTGQYLLATDSDILSPTTAKINKVAGYEADMDNPAISLGSTTAFISKTASTTKMFELLKVNALEPPQSIEQTRTVPELVPTDVDSIVGSPDVGLVSFGKVGTKDLYHFNYLRAADQEIGSAWYRWKLPGNLEHQFFDGNSYHTILRTDNNEHVVVSFDVAQSSTDGVLSLESGKKTDLHLDVFQNNPFTTYTEVAAGSYVNKTKVYLPTNKVTGLKLVVVMYSNRSQVFDEDNVTYTTGSDSYGDYVEVSGDWRGSDVFIGYKFDMSVELPRMYYKKSENQQVSSDIDADLILHRLRVKTGLTGPVDYKIKIIGIPVRTSTVSVTPPEQYLLNSTNMTESAVHDVPVYQRNNNTTITIQSNTAFPTTIESINWEGRYSTNYYRRS

SEQ ID NO: 127778 - protein, 328 aa, Unknown
  Bacterial polypetide isolated from the Sargasso Sea
MFNDKTILITGGTGSFGRKYTEIILERYSPKKLIIFSRDELKQYEMEQEFNDGCMRYFIGDVRDEARLDQAMIDVDYVIHAAAMKHVTAAEYNPMECIKTNINGAQNVISAALNNNVEKIIALSTDKAANPINLYGATKLASDKLFVAANNIGGKQNTRFSVVRYGNVIGSRGSVVPYFKKLIKNGETHLPITDESMTRFWITLESGVDFVLKNFERMRGGEIFVPKIPSANIMDVAKAIAPEMPTKIIGIRPGEKLDEVMCPSDDSHHTIEFDDHYVIAPSVVFFTSDNNFSSNALNENGKPVDRGFEYQSGTNPHFLSVEEIKQLL

SEQ ID NO: 127779 - protein, 457 aa, Unknown
  Bacterial polypetide isolated from the Sargasso Sea
MEIQEAESVDVTVHQGRNFGDFSAKKIYDEFDVQELIGRGIYGSVRRAKDRLTGDVVAVKSILRSRMVASAITDECDVLQVLCGHHPNFPAKFMIYEDHPKLKSEVTHIVTDLYSGGTMIQAISSRGLFDEGDWCVFANQLLGAVSFMHSLGVAHRDLKPDNIMLKEPWSPTPGSIPTLKIIDFGSATFCLSNETMRGHVGTKFFSAPECLRRKPYTKKCDVWSVGVLLMVLLKGFPSGLEVEEQWRSLQRGEEPSFPSSIPKHFIKLIKAALVMDPARRPSCGSILKAADEWLGTSFTHNRVFTSPKKSRPARPLSLPKDFKAAYDLHVENVKATSVVRDQQEDHEEEDISVYKGNSWQLDLRLEKGVVRSPSGRALDVVESLSTHNNVLIYQRHVTDMLSVVATPIEVRGVMKNINSKLQGRYQRTGRNEHTWCPALMLEEAANDTGAVDVWRNS

SEQ ID NO: 127780 - protein, 177 aa, Unknown
  Bacterial polypetide isolated from the Sargasso Sea
PTSIIFISCWVLHYFNRSIIYPLRQNNPAKMPLLIALLAFLFNIVNGYINGTYLGSIQEYSIDYMSNWNFILGLCLFILGAYINIKSDNILLSLRSKSGEYKIPEGFMFKYVSFPNYLGEILEWMAFALMTWSLAGLSFMIWTMANLVPRAIKGHQWYHSKFDSYPKNRKAIFPYII

SEQ ID NO: 127781 - protein, 360 aa, Unknown
  Bacterial polypetide isolated from the Sargasso Sea
MSEKKVRGGSLIARALRDKGIENVFTLSGGFCNPALEGLMECQIDVINCPHEQIAGHLADGHTRITRKPTVCLVGPEGFANAVPSMMEAWGERSPVIFITGSSSLRRQGAGGFKEIDDVKIAEPLTKYSASITDGNRIREFVDKAYLIATNGYPGAVHLSVPVDIMFSSFPENAGLEERPFSQSKKIKNIAWPDPNQMSEVLKLASNSKKPMLIGGHGVWWSGSEKKLEAAGQNLNIPIFNVPYHQKLLGEEAKSYMGLADIHQYPPSKFAFDESDLILMVGTRLDNQMNFGNPPLFPKSTKIVCINGSHEEIELNRAADINMLCDPGVFLDTLSKLKVNNKWNLDSKWIEQNILEKKKW

SEQ ID NO: 127782 - protein, 350 aa, Unknown
  Bacterial polypetide isolated from the Sargasso Sea
MSEKKIRGGSLIARALRDKGIENVFTLSGGFCNPALEGLMECQIDVINCPHEQIAGHLADGHTRITRKPTVCLVGPEGFANAVPSMMEAWGERSPVIFITGSSSLRRQGAGGFKEIDDVKIAEPLTKYSASITDGNRIREFVDKAYLIATNGYPGAVHLSVPVDIMFSSFSENAGLEERPFSQSKKIKNIAWPDPNQMSEVLKLATNSKKPMLIGGHGVWWSGSEKKLEAAGQNLNIPIFNVPYHQKLLGEEAKSYMGLADIHQYPPSKFAFDESDLILMVGTRLDNQMNFGNPPLFPKSTKIVCINGSHEEIELNRAADINMLCDPGVFLDTLNKLKVNNKWNLDNKWI

SEQ ID NO: 127783 - protein, 340 aa, Unknown
  Bacterial polypetide isolated from the Sargasso Sea
MTSEYRIVSLLGEGTFGRVFECWDFVTESTCAVKVIRNVKKYRDASMVEIEVLKTLVAGAELGDVEKHHCIRLKRAFDYQGHVCMVFDKYGPSLYDFMRQHSYRPYHPKAVQRITLKILEAVRYVHSLGMVHTDLKPENVLLVSDAFVHSDEYSIPQDCSVRLIDFGSTTFINRHHSAVVSTRHYRAPEIILGLGWSYSCDMWSIGCLIIELLTGEALFQTHDNVEHLKMMERALRRNSFPPNMIMGMEKDVRTFFFDKHCSVKWPNIMTDIESRAALGKTGIIDHMVRERIPAVKPRNAFLSLLSQLMNMDPKYRIRAEAAIYHRFFLEDVDPPAKPKK

SEQ ID NO: 127784 - protein, 367 aa, Unknown
  Bacterial polypetide isolated from the Sargasso Sea
AGGPVGGYELTKYISHGKSAVIMQARRGGEDVAIKVFHPELIEQYGREAQLVRINRERELIDKTHPNLIRILDAGCCEATAHLFVAMKFAPGEPLSKALAKIPRANIPLLIEQLASAAMQLENWGLTHRDIKPDNIHISEDLKSLTLLDFGVLKPHGDDTATSLQVSKGFVGTHQYSPPEMIHGREENTLDGWRAITFYQIGAVLHDLIARKPIFATATKRHADLVAAIDHQLVNVTSDDADPHLCNLATRCLLKLPRDRLNVVQWDDFMFSARDANKPSLDARREALRRQMLAGAVLRRIDPLENAEARRLKEAKFSGVVQSAKAQFDEALSAMGTMMPSRTTTLNGQSHPLPAITYTFAAAPKLG

SEQ ID NO: 127785 - protein, 322 aa, Unknown
  Bacterial polypetide isolated from the Sargasso Sea
STNAGGINVLRYGMPRDLVLGIEVVLADGTIWNNLTSLRKDNRGYDLKQLFIGSEGTLGIITSAVLKLFPSPKNIETALFAIPNSEAAIELFGLARSASADLLNAYELVSRIGMEMVLKNIPGAKEPMSNKYKWYVLLEFSSSSTNNMRKQMENLFEVAINKNIVLDGVIAESTQQRKDLWLLRDGLNEAQKPEGGSIKHDISIPINNVSTFINDATYSVEKFIPNSRVVAFGHIGDGNIHFNISQPIKSNKEDFLKKWESVNKIVFDIVNDLDGSFSAEHGIGKLKREELKFYNPEIEINLMKSIKNTFDPNNILNPGKVL

SEQ ID NO: 127786 - protein, 487 aa, Unknown
  Bacterial polypetide isolated from the Sargasso Sea
GKGGMSSVYLAEHTSMHLPVAIKVLPVKRVGEKSYLERFKREAKASFKLRHDNIAGATNFDHNGDLWYIVLDYIEGEDLHQKVKRAGPLPIRDAVEYIRQAACGLQYAHEEGLVHRDIKPANLMLDTKGTVKILDLGLALDGDDDEEGGLTKAHDEKVLGTADYLAPEQSKNSHSADPRSDIYALGCTLYYLIVGRAPFARGSVIERIKAHWNEPAPNPLEELEKPPADLDSALIDLYFRMMEKHPDARPQTAGEVSEQLDAWLNQHQQDRPQPAGLRRHTTESPEGSSGSLPTSHFSSITGLRRQPSKKTQKSNIGSSGNLRRTPGGKNPESSDDFEHPDDDDDFLDSADTDGETEEEEEDDFLFAGSGSNSPATSSGDQSGSNEDDDFLAMTGGISGSGVSPQTQLQADDISVDEWWSTTFMRLSLRAWFWIGIGLFFTFVLTVVTNEVMKAYEAGPYKTEADADPNENSKPPPPATTKPNANSK

SEQ ID NO: 127787 - protein, 151 aa, Unknown
  Bacterial polypetide isolated from the Sargasso Sea
PLHGVGVVNCWTALDPIPMETALRFWAGSHREACLYQAANFAGDSDYRHVRSDRPIIPDIDSDASARILAVELEPGDMLVWDSYTFHSAPGNTLDRRRAAFSINWASDAIRFHDVPCLASYRAPELTEGSVMTCDKFPLVRTRAQAAGESS

SEQ ID NO: 127788 - protein, 372 aa, Unknown
  Bacterial polypetide isolated from the Sargasso Sea
QGKHLYSRNGDGRAALAPMLREYLISEAMYHLGIPTTRSLAVVKTGETVVREKPLTGAILTRVAESHIRVGTFQYASISKDEDNLKTLLNYSIERHYPHIKNSENPAIEILDIVIEKQIKLVTEWMRVGFIHGVMNTDNVTISGETIDYGPCAFMDIYNPETVFSSIDHQGRYAYFNQPLITKWNLARFAESLIPLINKNKEKAISIATEKINNFDNKYKTYWFKMMRKKLGLFGDKPNDEKIIENLLKWMFVNKADYTNTFCFLMKENIKDNEVYKNETFLEWQKEWHQRLKHNTKNFDESLKMMKEMNPLVIPRNEKVEEALTSASNNEFNKFNKLLKILGTPYENQNGIEDYQEPSKDIDGKYQTFCGT

SEQ ID NO: 127789 - protein, 320 aa, Unknown
  Bacterial polypetide isolated from the Sargasso Sea
MDVEQKVLITGFNGELGSKIVKKLVEHNKKVIAIDINDSQEKINSVTYIKDTILNYDLINSIFKKNYISEVYHFAALLSQTASKNPKLAIQVNEDASRNLIDCAFQNAVDNNYITKFFFPSSIAVYGPRKIKFASEQDIIKPNTIYGNNKLAIEQYGSRVHEKSNLKVCGLDFRSIRFPGVISYDTVPSGGTTDYASQMIHAALKGQHFDCNLLPETSLPFISINKTISSIMKLMSFKNINSIIRAFNVEEVNFSVKELSDMLIQKFPTFTVSFNEEKKFQSVADTWPSSLNCDNSKKYWKFSSNMQLEDFLDNIIDKAK

SEQ ID NO: 127790 - protein, 275 aa, Unknown
  Bacterial polypetide isolated from the Sargasso Sea
GDDGDDVDRYDGIVKCLGFGFHDASNVAFIRLEMMTTGSLEDVVRRGVRFESSPRAALCVVRCLANALAFLHDVARVVHRDVKPSNVLFDETGACKLCDFGLCAPADAASSPTRRLDGTVVYMSPERLASSDPRCGPESDVWGVGVTVLESVLGRPPFDIQDGGPLGLVMQIVDTVIDVDACVPGDSVDALVLRRVLTACLVKDHRRRVSVRELRDPNDERWDLSAYTRADVRAFVDSLPEAPSRPGSPALSSASASASASDDEHRASGFSHRFE

SEQ ID NO: 127791 - protein, 136 aa, Unknown; identical to SEQ ID NO: 127735
  Bacterial polypetide isolated from the Sargasso Sea

SEQ ID NO: 127792 - protein, 453 aa, Unknown
  Bacterial polypetide isolated from the Sargasso Sea
NDNDGLIDEKRDNEATAIVGPTEGITDINAFLDFYKLNMEDLKEHWDADEDQDWQDGDDANGDGIYQISENYGDDIGIDGVGPGELNYNGPDADGSECNHKPDFLEGVGCEPNFNTTDVSESDMVGLTSFRMFPIPSHAPSNETTWFKNDEAMWGLIGVDSLEEYLDNISNLVEVFASGPFPLYQGRVERISMSELHSYDPLEGLSSAEHTAPALYELKRIVQVIYEKDYRFAQPPEMPTLTATAGDSKVILTWDDMADTKTRDPFVGNINDFEGYKIYRSTDKYMSDPEIITDGYGTPMFKKPIYQCDLVDDIYGFTDFGLVNGAGYNLGAETGITHIFVDNTVQNGRTYYYAVVAYDFGAPNIGPGIAPSENNAVIELDEAEEVRTIGKNVAIVVPHQRAAGYVPPQIDLEESELLGTGSVEPIIRAQGSLKQGHQYALTFSVDTIASIGS

SEQ ID NO: 127793 - protein, 1040 aa, Unknown
  Bacterial polypetide isolated from the Sargasso Sea
MDVTDRKYGDHNGNRIFNRFYNFGGIGDAGGSLSGIYPFGSGHSYFYEFTPVIAASVIDTNGNRVHIVSDGAVGLKDNSPQGYQWGFEPLTGYANPNQEIMAMSDKDFTWPETWPNRDSDWDGFWNGQYGKYVRADQESYFVMDDYYNDEFSHFPDSTDFDVVPKRRSGIGVELECRIYQWNHPAAEDIIIVTYWITNVGTSRLDSVIFGMYGDADIGSTNGDYTDDDAWFDVENDIVYQWDHDGWSNADGGFKPVYFGWSFLESPGNPHDGIDNDDDGMIDESQFDGIDNDGDWLAERDDIGSDGLGAYHYDYNGPDPDGTEGNGIPDLGEPNFEITDNDESDQIGLTSFYSSPYPSIYPSNDEIMWSQLQPGFFDVPTQNIDQTFLYGSGFIGLDPGEKKKFSVAMVFGNDMDDILRNTVTMQNIYDNDYNFAKPPLKPNLTVVPGDKQVTLFWDKLSENSLDAIYGSDFEGYRIYRSTDPGFIDPYVITDAYGNNTFNKPIAQFDLIDSLKGPHPIGFNGIQYDMGTDSGLEHMFIDSNNVYNGMTYYYAVVAYDKGYDIDFYELGFSEQDNLLPIAPSECSIIVDLDRKGNVINMSENAGMAVPNATVAGYMGPNTATLGQEFVVHDSGYATGRIEVITVDPTAVPEDATYSLTFDREFGSPIIYYSVLDEQIKMETFVIAGGYGALEHKNIDSSSVIVTDETGNMVYVLGVDYSMDYENGMIIALENGGLVEMGTFVASFKYYPIMNSSSTAGETNNPIFDGMKVFIYNEPIAVDFDSSGWLGSNSPHCYRIFDQRIHPADFEIIWDGDLGDSITSDYSNLPSPFRVRNITEDIDVTFRIYDISNNGRWEPEEPILLMPYPGMQTPYMFVQFFPDSIICPYNENDFLYDTTSTIVKGDRFRIATKRPFSSQDKYHFTTKKSWVDNELAKVEMNDIAVVPNPYVVTARWEPKHIYVSGRGPRKLDFINLPQECTIKIFTLSGYLVDEIHHASQYEYGTYSWDMLSKDGLEIAYGLYIYHVDAPNVGEKTGKFAVIK

SEQ ID NO: 127794 - protein, 284 aa, Unknown
  Bacterial polypetide isolated from the Sargasso Sea
MNIHASTSGSSDRESRGTDGGSTSEPSGTSSGTPTGVLPTKHTSKMTTKEVKLGARSFDSLNEYILIKDLGRGSHSKVKLAMNQQDNRLYAVKWTHSKVGCLKAVRKEIAVLKKLNHPNIRTLHEVIDDESKKELILVLEYCQRGSIFTRFNTVPIQERILLRYARDIVLGLDYLHSLHIAHMDLKPENMLLCADGEVKLADFGVSFIHDLVASDGVEKRLVGTPAFVAPDCLDESGYDPFKADIWSLGVCFYSMATARVPFTGKCVHQIVANKRSQDVDFPDT

SEQ ID NO: 127795 - protein, 300 aa, Unknown
  Bacterial polypetide isolated from the Sargasso Sea
TFDPQSGESLRPPTTNWHSTPPSTSTTPSAIDNFAIKGLIGRGGMGHVYRGFDNKLDRDIAIKVMHPSRAEDEVSKKRFLHESKTAASINHPSIVTIYQIGEHNKLPYIAMQYIDGPNLSEYRTQLGGLIPIPEAIRIGREICEGLAAAHEKDLVHRDIKPDNILLESPNQHVQIIDFGLAHEAGDKEGRLTIDNAVIGTPAYMSPERIGTDEVNAKSDLFGLGVILYEMISGKLPFDGKSMVSILASISRGKPTTIHTLVPDIPQDLADLIMQLLSSERDKRPADATEVVRRLRAIEKQ

SEQ ID NO: 127796 - protein, 174 aa, Unknown
  Bacterial polypetide isolated from the Sargasso Sea
MGRVVGTQAGESPGKPLALEEVVNGESSPAADNGDGSDGSDDGEEDEDLAALAPLPPPPNPMGLRRALTQHVVSRWYRAPELAMCQPYSGGVDVWSVGCVFFECILCLLGPPADDFGQGTQGSGGHRPRPRPLFKGKSCYPLSPRGVDTWSESHDQLSCIFRVIGTPEESAIES

SEQ ID NO: 127797 - protein, 226 aa, Unknown
  Bacterial polypetide isolated from the Sargasso Sea
SSREPLTEYVATRWYRAPELLLGSTSYGHEVDQWAIGCIMGELIDGQPLFPGESDLDQLFIAQRSRGPLTDAQKIAFERNPRFEGARMPRSDARSREEHGVERKYAGKVDKRGMDFLKALLAMDPDARPTWHGMLTHPWFEGCEGFDPNAEPGPNAFRQRKQQPIEDAASSGGASKNAARIDSSSGGNNNVPLASNSGSVAQHHPPPPPARAPPPLTPEEEEERRR

SEQ ID NO: 127798 - protein, 166 aa, Unknown
  Bacterial polypetide isolated from the Sargasso Sea
MTRGTRRDAAGETGARRRGDETKGNRAEVVGGRWTLGEKLGRGSFATVWRGTCAKTGVEVAVKEIDCERLSKKLRESLKLEVEVMRKMRDDHILRFIDMETSKDTVYIVLEYCGGGDLSQFIKRHGRVDESAAKRFMLQLARGLRAMRKAQLVHRDLKPQNLLLTS

SEQ ID NO: 127799 - protein, 160 aa, Unknown
  Bacterial polypetide isolated from the Sargasso Sea
MDADSFFTEYGEANRFTIHEVIGKGSYGVVCSATDSKTGEKVAIKKITDVFEHVSDATRILREVKLLRVLKHPDIVEVKHIVLPPNPRDFKDIFVIFELMETDLHQVIKANDDLTQEHHQFFLYQLLRGLKYVHTANVYHRDLKPKNILANADCKLKICD

SEQ ID NO: 127800 - protein, 264 aa, Unknown
  Bacterial polypetide isolated from the Sargasso Sea
KLDQFELRAVCGSGGMATVYRAHDEILGRDVAVKLMQPEFSNDSNAMAGFFREAQYQASLNHTNIVQVYNYGHFKGHKYLVMEVADRGDLDGLIQKNGRVDELYVLDAGIKIAGALELVRKKEIIHLDLKPDNILYNIDGEPKLTDFGIARKVNEPRAAEGLVGTPFYIAPERVARGVQDFRSDMYSLGATLYHALTGQVPFNGNSVEETVWAHVKTRITPPRKIVRDISANTEGAILRAMNKDPEKRFRDYDEMILTLEASRS

SEQ ID NO: 127801 - protein, 233 aa, Unknown
  Bacterial polypetide isolated from the Sargasso Sea
FDNNYSGEGYKLLIMNFLGPSLEDLFNFCSRNFSLKTVAMIGIQLLNRLEHIHNLGIIHRDIKPENFLIGIGSTKSKIYIIDFGLSKSYRENNNHIEYRNNKNFTGTYRYSSIRNHRGVEQSRRDDLESVGYMLVYFYKGLLPWQGLKISDKNERNREIYQKKRTTDLGAITSNMPSEFQEYLQYCRLLRFTQDPDYKYLKNLFKKVLIDSMSKNDLIFDWNIVAKKKRRQQR

SEQ ID NO: 127802 - protein, 248 aa, Unknown
  Bacterial polypetide isolated from the Sargasso Sea
GEGTFGSVRVGKHKETGILRAIKTIPKMLLDESGLWQEIEIMRMVDHPNIMRLFVTFEDQKNVYMVTEFCSGGELFDALIKTQAGFSEAVAAKIVKQMLSAVCYLHNQKICHRDLKPENFLLSNQDDIENVNVKLIDFGTAKCFREGEELKTKICTLHYVAPEILSRKETPYSERCDVWSLGVLIYLMLCGQPPFSGDSDMEILKKIKRGRYTFEPDEVWDEISKEAKNLIGMLVMENRMMLFNVATQ

SEQ ID NO: 127803 - protein, 144 aa, Unknown
  Bacterial polypetide isolated from the Sargasso Sea
TRYYRAPEVIMGLEYDNKVDIWSVGCLLYEIYFGEILFNPNKDKNFTRDMYHMNMIKHISGNFPEEMIKKSPRKKEFFDKNNQLKKLDDNNIDKIKNNFEKIKNTNNNFLKLLKGMLEIDPNKRLSIKNCLELLNKIKNLEKEI

SEQ ID NO: 127804 - protein, 175 aa, Unknown
  Bacterial polypetide isolated from the Sargasso Sea
MPDDFDILKLVGQGAFGKVFQVRKKDSGGIYAMKVMKKDRIIEKDQAEYTKAERDILTAVTHPFIVSLRFSFQTTSKLYLILEFINGGHLFFQLYQQGTFGDDLTRFYISEICLAIGHLHSLNIMHRDLKPENILVDVDGHVKITDFGLAKKISEDERAKSLAGSIDYMAPEILN

SEQ ID NO: 127805 - protein, 236 aa, Unknown
  Bacterial polypetide isolated from the Sargasso Sea
MRVLGSGSFGKAVLFRHRSRVDFAVIKQTWSGRGGGGADLRRLEREVSALMSLKNQQHVIRYRTCFLQNEMLCIVTDYAAGGTLHHQIVAARKSAKHLPVAALLRWAAQLASALHAIHSEKVMHRDVKPSNILLTEKLDIKLGDFGLSRPHNSIDLATTACGTPYYMSPELINAERYSYPADVWAFGCVLFELLTLNRAFNADSFPQLTKAILGSDSDASTQNQSTLLAQCKARDP

SEQ ID NO: 127806 - protein, 137 aa, Unknown
  Bacterial polypetide isolated from the Sargasso Sea
MELCTEGTLMKVHKIRGKLSEPDCRYFIRQIGKGLSYIHERGIAHRDLKLGNILLNAGMVCKIADFGFAVELADGAVSFDKRIGSPSYTAPEIILGVGHGLPVDLWSLGCVLFMLVTGKSAFQGGSIEVIYREGKQS

SEQ ID NO: 127807 - protein, 260 aa, Unknown
  Bacterial polypetide isolated from the Sargasso Sea
CKLHQLNPQWSEQRKVTYVKHAARECEIHKQLRHPSVVQLIDVFEVDQNCFCTVLELCTGDDLDARLKAQGAVSEREARAILAQVFAGLAYMNSGSSTVIHYDLKPGNILFDAAGRVKITDFGLSKKRDMNGVQTLSADTGMELTSQGAGTYWYLPPECFETGPTPPKISSKVDTWSCGVILYQMLFNRRPFGHDQSQEQILHAGTIRHAKEVEFPQTPKVSAECKEFIKRCLTYRKEDRPDVPTAARDPYMTYAKPGSE

SEQ ID NO: 127808 - protein, 208 aa, Unknown
  Bacterial polypetide isolated from the Sargasso Sea
FILNTIHADLKPENIMLNQKTSKIKIIDLGSSMDKDKVKTLFYHQSRYYRAPEIIFQLQFNEKIDIWSLGCIIYELITKKPLFKGRTMRDLLFKIIEKIDMPNQKEYLESGKFNDYFTSFEEEEEIKEYFRIEDKYTITQKYKIPSYYLDEDIYKHIHFFKDEECKKQYIIDFICKTIIYDFENRPSAEECLGDIVFSEKKIIKNTIL

SEQ ID NO: 127809 - protein, 80 aa, Unknown
  Bacterial polypetide isolated from the Sargasso Sea
MTAEHVSCMLCQILLGVQALHSVGILHRDLKPGNVLVSRDCRVRITDFGLSRCVAGLAADAARADAADDAKNPLTEYVVT

SEQ ID NO: 127810 - protein, 260 aa, Unknown
  Bacterial polypetide isolated from the Sargasso Sea
MAAAAPSPPDSPAPATSAAGSSEQQQPSASNASTPPSPSPLVGRAVATTTSSSTSSTPSSPYGARRARTNSSSPSSPSIKELDLRAQALRRVEREVRILSSLSHPHIIKYRSCFHEGNTVCIVTDYAASGTLRHVIHSHAAVQGAFIHSECIVRWLRQLSSALSFVHSQSILHRDIKPENIFLTPAAADTLTGTWKGEDVSCTNVKLGDFGLSTELSRMPEQDIFASTTCGTPYYMSPERFECVSYSKESDLWGIGCVLW

SEQ ID NO: 127811 - protein, 166 aa, Unknown
  Bacterial polypetide isolated from the Sargasso Sea
MVFSGEDDVERPTLPIHRISAYDALGELGKGQFGIVSQAVRCKRGGAKEVVAVKMLKFDFLKEGFPLEALREITLLSSLRHPNIVRMHAVACGSGEAPSDWHLVMEPAGHELTTLVKGARQRPMTEAQVKHLMLQLLRALAALHSVWVMHRDLKTPNVLVDDRGLL

SEQ ID NO: 127812 - protein, 207 aa, Unknown
  Bacterial polypetide isolated from the Sargasso Sea
RARRLFRQLLQGLEYLHHHGIIHRDIKPSNLLVTADDRLKIGDFGASTFCDRSGGGRQSLDPLGSPSRSPRSSTPDTPRSARRMITTLSRGAASARNIWLRSAGIASPVSKKASSFTFPAGTASGNGGTGADGEHFRGISRSFVRGTREASGRRVPPSSGIASSSAAAADLTDDSTSFGGHPRTRSISTEGRCPAGSSSLLSPKSDS

SEQ ID NO: 127813 - protein, 109 aa, Unknown
  Bacterial polypetide isolated from the Sargasso Sea
SGVKDLDDMCGGGYFQDSIILATGATGTGKTMLVSKFVEDAYNNNERAILFAYEESRAQLLRNATSWGIDFEKMESDGLLKIICAYPESTGLEDHLQIIKTQINQFKPK

SEQ ID NO: 127814 - protein, 162 aa, Unknown
  Bacterial polypetide isolated from the Sargasso Sea
MEYSDNGDLFQKITESQKKQMYIQEDEIWKIFIQIVRGLKSLHDVNIFHRDLKSANIFLHKDGTSKLGDMNVSKVAKKGLLYTQTGTPYYASPEVWRDQPYDHKSDIWSLGCVIYEAVTLKPPFRAEDMQGLYKKVLKGVYPKIPSIFSNELAQIIKMLIQV

SEQ ID NO: 127815 - protein, 269 aa, Unknown
  Bacterial polypetide isolated from the Sargasso Sea
RERDTHAYLQESDLPASIIRMEQYLTINKTLYILFPLYTMNLFDLIEKKNFQGLSLELTSKFISQLIEALVFLEEKGIIHADIKLENILLKHPRRAAISLADFGLALKAKDAQKGYLLQSKYYRSPEICQKLDYDNKIDIWSLGCVFVELYTGSVLFESTPEQSHLEKIKEIIDSDSDCEEEEEEEEEEYDKRKAKKRKIEETQTKLFYILIQNTKKLDHARYQEQLKDVYITYDKWLSKVLALNPAKRPNAAQTASSFKQICEKFKRQ

SEQ ID NO: 127816 - protein, 265 aa, Unknown
  Bacterial polypetide isolated from the Sargasso Sea
MPHIGNYELDKIIGRGRFGRVYKGVHSKTGEFVAVKLEDRRSESKLLDEANTIKKIRKCCKGVPDIYRIGNSNKWNYMIMSYLGPNLEELFIYCKRTFSLKTTVLLSLQIFNIIKGIHESGFIHRDIKPDNFVIGFGESHNKIFLIDFGLSISFIDDKTMQHKEYEHKHQFTGSFRYSSINNHKGIQQSRRDDLESICYMMLYFYKGKLPWQNILAKDKREKLKKTYERKMEVSIDELCENCPREFKQIVSYCRKLVIKKDRIIL

SEQ ID NO: 127817 - protein, 244 aa, Unknown
  Bacterial polypetide isolated from the Sargasso Sea
MQHAGKLRDFYRIGKMLGSGAFGEVRVCVHRESGAQRAVKVLRKASMDEDEKKMLFNEINNLKDLDHPNILKMYEFFEDEKRYYIVTDICKGGELFDEIVSRGKFTENDAALLMKQVLSCINYCHKNHIVHRDLKPENVLLEQNKEFDQIKIIDFGTSLVFDENSVLNEKLGTPYYIAPEVLAKSYGPKCDIWSCGVIVFIVLSGVPPFNGSSDQEIMKKVKIGKFSFADPVWNSVSDNAKDFI

SEQ ID NO: 127818 - protein, 208 aa, Unknown
  Bacterial polypetide isolated from the Sargasso Sea
MAEHPSPPRALGRSAADAAGTPDPSPKKEKTVNVTSSHSPTLGQLQSAKTLDEFDVVDVLGQGMVGLVLRAKHRTSGKVCAIKTMPKSQIMEHGEEEHCMAEVRALKELRHAPFVCNYYASFQDPWALYLVMEDCVGDMFDLFNQSGLPGIGQIKVYTAQVLLGLEYIHNAGYVYRDMKPENLLLRSDGSITIGDFGFAKKWKRASAR

SEQ ID NO: 127819 - protein, 232 aa, Unknown
  Bacterial polypetide isolated from the Sargasso Sea
MVFEKCGLSLFDFLRKNHYKPFSSNLVQNYGRQLMRAVAFLHTLKLVHTDLKPENILLLSSAYQRVPVSSGSKFTKRVPMDSTIRLIDFGSATFENQHHSTVVSTRHYRAPEVILGMGWSYPCDIWSVGCILVELLTGDALFQTHENLEHLAMMEVVLGEMEQGVINRANKHAQKYFKDFGGLAERTLLNWPDGAQSRESIRAVGKMKPLQDIVSSRLDGLTARHFTDLLSK

SEQ ID NO: 127820 - protein, 208 aa, Unknown
  Bacterial polypetide isolated from the Sargasso Sea
MNHPNVVRLHETFYEARRKPALGVLVMDHAAGPRLSEELRSRKDCRMSENDAREVMVQLADVLRGCAESGIVCGSLDLDSVMLREKDSERLDVVLTTMRHACMIGQPLAYDMELVEYEIEDEMQETVTRTYAQCAGRNMHFMAPELLTPSLRPGLEPTVDVWSFGVIMYTLLAGYRPFDGEDEISLAEKIRSGNFVAFTYDSETWDSV

SEQ ID NO: 127821 - protein, 258 aa, Unknown
  Bacterial polypetide isolated from the Sargasso Sea
MSIVLSKYSLADEIGRGASGIVYKALNLQTGGMVAIKKVALRGESKDQLQLLQREIDLLKLLKNPYIVEYRESFNTADTLYIVMEYIENGSLATIIKKFGRLTESLVSIYILQVLEGLTFLHEQGVVHRDIKGANILISTGGQVKLADFGVAAKMEAKVDTQASTVVGTPYWMAPEIIQMSGFTTSADIWSVGCTVHELITGAPPHFEHPPMPALFRIVNEQKPPIPPNVSATLHDFLSLCFLKDPSQRPPARKLRSH

SEQ ID NO: 127822 - protein, 136 aa, Unknown
  Bacterial polypetide isolated from the Sargasso Sea
MEYADNGDVFQKICTYQKRETYIKEKKIWYIFIQIVRGLKALHDRKILHRDMKVSESMANRWQSANIFLYRDMQAKLGDLNVSKIVKKGLSYTQTGTPYYASPEVWRDMPYDSKSDIWSLGCVLYEMCALVPPFRA

SEQ ID NO: 127823 - protein, 147 aa, Unknown
  Bacterial polypetide isolated from the Sargasso Sea
MIGGGSFGYVYKCKHVQTGQYYAIKYFKNKFATMKKAFDQREIQILQRFNKIDKKGPGNHCPFVMKAERIEYENRKLFIVFEQMDMSLTQFIKRKVKSGQKLDEQNEIKILMKQILTGMQYLNEECGILHRDLKPDNIMVNVNPLIA

SEQ ID NO: 127824 - protein, 227 aa, Unknown
  Bacterial polypetide isolated from the Sargasso Sea
AHRDVKPSNILICRTGEPKITDFGIVGDLRGTKKELLDSFKGTMCYMSPERCENRAYGRAADVWSVGIALLECAVGRYPYDVGDGGPVGLMMQIANDPTPVPERKDPEFFPPGLERLVLACTRKDPEARPTAREISLDPWVAEQMRVVPPSEVAAYVCSAVSEDEHLRSNAETFLKHYHALVDDLGADARTLASLYRGSSCLTTAQGDRARGGDAIGAALSRRAAKG

SEQ ID NO: 127825 - protein, 270 aa, Unknown
  Bacterial polypetide isolated from the Sargasso Sea
MLHFPQRNNSAPHLYAEETDAPLPETLNPKLRYAYFSTIATGGKSLIHSCRDLYLGRTVCYKTLKPEFRKDPIENLRLLREARISAMLQHPNTMPTYEIGRDNHGHYFFTMKLVHGYTLRELLNYRERYDFSQLINVILQVGNALGYAHSVGVLHRDIKPDNILIGPYGEVLLLDWGLAKVWHSDDAAASKQTFLPDLDVGVSMTSAGKLQGSVVYMSPEQVDREAAIDFRSDIYSLGAVMYEALTGQTPFSGTLVRKILEDVRHKVPDG

SEQ ID NO: 127826 - protein, 208 aa, Unknown
  Bacterial polypetide isolated from the Sargasso Sea
MYFFIICVSSVLSSEKFCLNYGSQYIKKIGCGRSGEVIAYKDSTGLFFARKRIELNNEDLGNCGVKYEIECLKKLKHKNIISLVNFYVTGDLSSSVIVFIDMPLMDMSLRDYINKIKKYNISYDSELNILLTYQLLCGVNYIHSSQLMHRDLKPENILLNSDYILKVADFGLAKAIGIQDGKGLYYTDYVITRWYRPPEVLLNFFYNQ

SEQ ID NO: 127827 - protein, 238 aa, Unknown
  Bacterial polypetide isolated from the Sargasso Sea
MAYDLDDVIHQNKRGPLVHQDILHVARDVAAGLAHLHANRIMHRDLKPSNVLVAEGSGIIRCKIADFGISKELTHTLTKMTCKQGTCAYMAPEMLSDDGRVGTSADAYAYGVLAWELLACKKPWTGKSEHQIHNALVRGERLPRPEAPVVPELADWAVECFGVAAERPTMGVLEQSLDDLLCSDESDLEMLRAGLAEALRGDKDVYEEAWDIYARDPHCGEMLDLCALLAKRHAETPR

SEQ ID NO: 127828 - protein, 269 aa, Unknown
  Bacterial polypetide isolated from the Sargasso Sea
MKGLDNEHCLALYDVVVEEDSGSIFVVMELAHMELTTRMEDSASGRLSEGAAREYLRQLMEGLTYLHGKNIIHRDIKFENVMLDKRDRVKIGDFGMSKVSAPGKHLATRCGSTRYISPEMALMQPGDTYDGRAMDVWSSGVLLFAMITGTLPFPQEALGDMLKAITRGAYKIPSFVSSDAHDLISKMLAINYKDRYTLDQIKQHPWLQTAKAPARPRKIENMRSMDAEQRKAQHEAELRKAKEREQRKAAERGGGTRRRGSRRTSNHRN

SEQ ID NO: 127829 - protein, 184 aa, Unknown
  Bacterial polypetide isolated from the Sargasso Sea
MTSAGLALMYAHTRGVIHRDVKPENIWVGNFGEVILLDWGVAKVWGQRDDTPESERNVESGRFQAITMTGDRPGTPLYMSPEQISGNRQTVDERTDIFSMGVALYEATCFSEPFRGRVIQETFENILNTTPPLPSEVQTHEPVPPALDDIIMKAIAKKPSQRFQTMRQMIDALRTIHFATSDET

SEQ ID NO: 127830 - protein, 225 aa, Unknown
  Bacterial polypetide isolated from the Sargasso Sea
GVATRLTDTTTKRRSLIGTPYWMAPEVIEQSRYDGAADVWSVGITAIELATTKPPHSSLHPMKVLFVVPKAAPPTLEGEFTDQFKAFVARCVAKDASDRPPADELLSDEWIASGDFAGSSKPLLASLVAEAAASAPPPPPPSSRSPTPSPLITPAASPHTPRTPASLSQYARSPASLPSVSASPRRPGRSRAFRQVVAPAIAAAARHAIRGGDRRRPAAAALDDL

SEQ ID NO: 127831 - protein, 253 aa, Unknown
  Bacterial polypetide isolated from the Sargasso Sea
MNDLLIENKYKLISLINTGTYSKVFKAQHVKKGIYVAIKFDYDEKSKIILENEIRIYIKLLKYKIDNIVNIKSFGVIDKYNYIVMNIIPNTLENYIDDIVNLDNKIINNLMDQLLVLLSKLHKVDIYHRDLKPDNIMMNKEKIYLIDLGLSTDNKDIINKSVIGNWLFCSYSCHKENYNYKKEDDIISIYYIFFYLLSNKKLPWSSISIDDVKIKNNVYYNLKKYTNFNNYYKDFPILTNLIKEYNKIIYYHK

SEQ ID NO: 127832 - protein, 274 aa, Unknown
  Bacterial polypetide isolated from the Sargasso Sea
REIQALRRLSPHGNVIKLLEVLYDQPTGRLALVFELMDMNIYELIRGRRHYVAEERVRTYMYQLVKSMDHMHRNGIFHRDIKPENILITDDSLKLADFGSCRGIYSKQPYTEYISTRWYRAPECLLTDGYYNYKMDMWGVGCVFFEIVALFPLFPGTNELDQIQKIHSVVGTPSPELLAKMKQRSQHMDFNFPRKTGSGVEKLIPHCAPECVDLINKLLAYNPDERLSARQALRHPYFREIREMEKRQHAMLNPKAAPLGGSDKDPGARRSERE

SEQ ID NO: 127833 - protein, 150 aa, Unknown
  Bacterial polypetide isolated from the Sargasso Sea
KISDLGAAYELSEQELKEQSVYEKNEQVTRWYRSPELLETSRHFLKSDLWSVGCIHAEMFLQRPLFPGEKSMQLDTIKSVMRRPITDIFDSMDLRELDLVHGMLIPDPKARLSAEAAGKHRFFYPSIKEEQTRNAEPASKKRRVERKDSQ

SEQ ID NO: 127834 - protein, 224 aa, Unknown
  Bacterial polypetide isolated from the Sargasso Sea
MGGRYVLMNMLGRGGFSEVYKAFDVVEMREVACKLHQLSPQWSEARKQTYVRHAQRECMIHKRLSHPHVVEMIDVFEVDRDSFCTVLELCTGDDLDARLKAHGPVPEREARAILAQVFAGLAYLNSGPKKIIHYDLKPGNILFDAAGRVKITDFGLSKVDDRAAQGGGGLLGGGGGSLVGDSGMELTSQGAGTYWYLPPECFETGPAPPRISSKVDAWSCGVIL

SEQ ID NO: 127835 - protein, 160 aa, Unknown
  Bacterial polypetide isolated from the Sargasso Sea
CSSKPKNDYDLNYDFKSLQSFTQLAPQPSDDPLSAQRIQTEITQQLSQKGFTENASSPDFKVAYGLLTQDKPKDSGLSIGLGTGSFGRSGGIGVGTSVGVPLGSDTAKIQTIQIDIIDTKTNKLIWRGTDSFDFDGGGDKKAQDTAKAVSRILAQFPPQP

SEQ ID NO: 127836 - protein, 115 aa, Unknown
  Bacterial polypetide isolated from the Sargasso Sea
MNRGEKSDPNGGGGVGVPEPEALAIFASAARAVAAMHAASPPVCHRDVKPENLLLGADGAWKLCDFGSASVGETSLRTPAERLAAESDFAKNTTPAYRAPEMHDAHRWPSVGPPA

SEQ ID NO: 127837 - protein, 159 aa, Unknown
  Bacterial polypetide isolated from the Sargasso Sea
LHKKDKKQDVGIPKVYLFAKEGSYNIMVMEMLGKSLEDLNQSCKGKFSLKTVLMLGEQCVERIKYFHSRHFLHRDIKPDNFVMGVERKKHIVYIIDFGLSKRYIGKDGKHIKYREGKDLTGTARYASINTHAGVEQARRDDLESLGYVLLYFLRGKLPW

SEQ ID NO: 127838 - protein, 209 aa, Unknown
  Bacterial polypetide isolated from the Sargasso Sea
MRANWHSAPPSTSTTPSTVDNFAIKGLIGRGGMGHVYKGFDAKLDRDIAIKILHPSRAQDEVSKKRFLRESKTAASINHPSIVTIYQIGEHDRLPYIAMQLINGPNLSEYRSQQGGLVPIPEAVRIGREISEGLAAAHEKDLVHRDIKPDNILLEEPNQHVRIIDFGLAHEAGDKEGRLTLDNAVIGTPAYMSPERIGTDEVNAKSDLF

SEQ ID NO: 127839 - protein, 117 aa, Unknown
  Bacterial polypetide isolated from the Sargasso Sea
MQFPPTSGSTQMQVQKLPTGIEGFDDVCQGGLPIGRSTLISGTSGTGKTVFSLHFLHNGIKHFDEPGIFVTFEESPLDILRNAASFGWNLQEMVEQDKLFILDTSPDPDGQDVAGSF

SEQ ID NO: 127840 - protein, 107 aa, Unknown
  Bacterial polypetide isolated from the Sargasso Sea
MSGPASRTFTLCGTPEYLAPEILMNKGHGLLCDWWAFGVFLSEMLHGYPPFVAEDPFEIYQKILANEPSFSPQLCDGAVTDLMQRLLVTAQTARLGAEGGAKDVLVH

SEQ ID NO: 127841 - protein, 203 aa, Unknown
  Bacterial polypetide isolated from the Sargasso Sea
MAKALTKQILAAVKYLHSSLNIVHRDLKPDNILLQPVNEGNDRSSGGVPCIKIADFGLSTFFESTRMMKEQCGTPAYTAPEVQCGAGYSRAVDLWAVGAMLYYMLSLRMPFHITKADRRHLREKTATVEEVYPSCLEFGSISCPVVQDLIRRLLRLEPLERYSAIEAAQHEWITGVQVEHRPSVMEMLRDHDYSLLESQESGA

SEQ ID NO: 127842 - protein, 237 aa, Unknown
  Bacterial polypetide isolated from the Sargasso Sea
MPEARLKDYMYQLLKSMDHMHRNGIFHRDIKPENILVCDDELKLADFGSCRGIYSKQPYTEYISTRWYRAPECLLTDGFYNYKMDMWGVGCVFFEVKRFLASSRRALLALRSRRPDLRGANPTSHWVFMSAGFSTLLLAACPSRARCSPCIPYFLARTSLTKLIRSTTSSAPRPPRPWPSSKSTATHISTSTFHTRRARRCTSSSRTSRRTVSSSSLSCLPTTPMTASPRDRRSSTH

SEQ ID NO: 127843 - protein, 255 aa, Unknown
  Bacterial polypetide isolated from the Sargasso Sea
MCSGGELFKAVDKRARPGVRPPFTESRSAELLRQMLGVVRYMHSQGVCHRDLKLENWLFDSADPDTATLRLVDFGLARVFGPLRPDLSKTRSKTNFDERVGSAYYCAPEVLEGIYDRRCDLWSLGVIAYMLFSGTPPFWGRSDKEILKRVRSTEVKFPPELFRSTSSEGLSLVRGLLQRDVELRLTADQALEHPFFSLYATLVRSVSGLVEGILPDQEEEPPLLDALRSFAALNAFSKLVVEVAAAHLAPARLVQ

SEQ ID NO: 127844 - protein, 136 aa, Unknown
  Bacterial polypetide isolated from the Sargasso Sea
MQLLQGVAHLHSRAVVHCDIKPSNLLLTAAGGVQLCDLGCASKLLHGSSRTTYCGSPAYMSPERVMVQLLSLQGAGYTHEADIWSCGVVLFEMLAGCLPFQADGSVQVRPMLPHRRSHVCTVAGATAKDSVCIPPI

SEQ ID NO: 127845 - protein, 140 aa, Unknown
  Bacterial polypetide isolated from the Sargasso Sea
DGDGFLKVIDFGLAKMMEAGSVATTVAGTPMYIAPEVLNGSGHGTAVDWWAIGILMFEMLFGVTPFWSKNGFDMRNKIQKAQLTFPSREKYTQFKYTDEVTELISAFLNRDKTKRLGSTGGYKEVLAHPYFADVDVEAYL

SEQ ID NO: 127846 - protein, 250 aa, Unknown
  Bacterial polypetide isolated from the Sargasso Sea
MPQKKWQTFQRKEFKAFVKWWPDICGQFLFDDRYICVSQLNIEGGQADVFKAEDLETSTICAVKVFKPTSGSDEGKDKEALNREWKALEKLRGHKNILELYSYGNHEVTERFFLITPWKDLTLASFMRENQAVTKWPEAFNDILLGILDGLIYAFDNEIIHRDLKPDNIFLDHIGDKSEGGPYIPIIGDFGVSKIKDTPPSDVTFVMGGSEPWTPWRDLRDSSDELQHQNTYDVYSWGAIAIALITGACQ

SEQ ID NO: 127847 - protein, 198 aa, Unknown
  Bacterial polypetide isolated from the Sargasso Sea
MKLYDINLTKFIKKNAGKIDKDEVDKIESQIIEGLKYLHGLNIIHGDLKPDNILFTKEGNIVLCDYGLSEYFVKGKKHDFKTIQTLWYRAPEILLKDSYDEMIDYWSLGCIKYEMEKGRVLFKVSNETDLFILINVYLGCPSFYKTIKKYNFLYDNLDSPMFIKHNNEIFAFKDLEFRKRNPNNFYLNWDPKKRKIKY

SEQ ID NO: 127848 - protein, 250 aa, Unknown
  Bacterial polypetide isolated from the Sargasso Sea
IVAVKVLDLEEHEPEHLDEIRREAQTMSMLSHPNLVKYYCSFVHESSLWVVMPFLAGGSTLNLMKWSHPGGFEEPVIACIVKAALKALDYFHRNGNIHRDIKAGNILVDADGAVKLADFGVSASCWGSGGRPRTRLTFVGTPCWMAPRGDGTREWVRFSRRYLVPRDHGVGTVPRARAVFKVSTHEGFTHDVAKPRADARGEASRRETLFSRASRVRHSVSAKGSVQTPVREQAARTQVSQGGEKSGLAR

SEQ ID NO: 127849 - protein, 128 aa, Unknown
  Bacterial polypetide isolated from the Sargasso Sea
MQTLDHPNLLHFYEHCIHGDEMYVVMELAEGGQLAQRIEESRRSNVRIEEGLIWRWLCDVAGALAYMHTRRILHRDVKPSHIYIGATGQAKLGDFGLSKLFGEAQDAIAFSCVGTPFYMSPEIVRGDG

SEQ ID NO: 127850 - protein, 228 aa, Unknown
  Bacterial polypetide isolated from the Sargasso Sea
DAVEQRVRSTIEEKAVDQRSWDKALALECVRKKILTKFQAREILAGHTRFTLGQYRVLSEIGRGGMGQVFKAEHVLMKRTVAVKVLPLSKANPRTEAAFQREIELLAKLDHDNIIRALDAGYDGNVYYLVTEYMQGIDLRKQVTKYGALEQNQAVTVTVQAAQGLAYAHSRGFVHRDVKPSNILVTPDGRILILDLGLAGAMFDPESMNPARRLGTPGYMSPEQIRAP

SEQ ID NO: 127851 - protein, 99 aa, Unknown
  Bacterial polypetide isolated from the Sargasso Sea
MIKERNKRGRQRRELTPHIISRWYRPPEIIMLEKQYDCSVDIWSLGCILAEILYCSNNYKGNYKEKGIGTLRNKDLFPGTSCFPLSPNKNRKGQIQDIL

SEQ ID NO: 127852 - protein, 243 aa, Unknown
  Bacterial polypetide isolated from the Sargasso Sea
ELKLIDFGLSHLGKKNKEISAKGRVGTLSYMAPEVLLRQAYAKPCDIWSLGVVAFILLAGRRPFHSRDRDEKIDLILHAEPRYGGSGWKGISDEAKQFVQALLRKEPDQRLTAPQALQHPWLVRMRASEPTSSPQSAIKQNLEVMRSLQAFSTTGRLHKVALELLAFAAPSHEVDQLRNVFVAIDADGSGAISREEFKQAMAAHPQYGDGEIRRLFDQIDFSRKGELSYNEFLAATLGAASGV

SEQ ID NO: 127853 - protein, 223 aa, Unknown
  Bacterial polypetide isolated from the Sargasso Sea
ITQCYHVPQIIWHGKTDTNRILVMDLYGSSLETLKRKDFEFTVPIVSRLAIQILQALQQVHDRKVLHRDLKPDNILIGANRDINNFYLVDFGLSKNFIRNGSHLEYREDKSFVGTLRYSSVKSHIGIQQSRRDDLESFGYVLIYLLHSDLPWTTGSSKDKEAKYKHIKLTKIVASLHDLCKGIPIEFYQYLCYCKNLDFEETPNYEYLIQLFENLLSSYDSTL

SEQ ID NO: 127854 - protein, 180 aa, Unknown
  Bacterial polypetide isolated from the Sargasso Sea
MGAGTAGIVWRGTYATTPVAVKVVQSDRICVETVCELRQEAALCMNLRHPHVIQTLGLASDGRDKYALVTELMHCSLAQLLDRGAAARLSRPLTWSSPLLDICIDIARGMAYLHARGILHRDLKPGNVLCGAGPRYLAKVADLGDSTAGSPVSQPAPSAMHRPPMGTLIQARARRRVLRS

SEQ ID NO: 127855 - protein, 210 aa, Unknown
  Bacterial polypetide isolated from the Sargasso Sea
ACLVLALQRLHSLGIVYRDLKPENVLLREDGWPMIADFGLSSFHVTDKPLYSLCGTPEFMAPEVIGGTGSAGYGPAADWWSLGVLLCQCLTLCTPFCDAQQRPRCTFDNVLRGRLTMPPEQHYKRVASQHAAQMIESLLTSDVGRRLGSPARGEIRAHPFFWMLDWERLEKRQLEPPHVDYCKERARDAKKVFFRQSSPKPMRREGFNPM

SEQ ID NO: 127856 - protein, 117 aa, Unknown
  Bacterial polypetide isolated from the Sargasso Sea
QQLSQKGFTENASSPDFKVAYGLLTQDKPKDSGLSIGLGTGSFGRSGGIGIGTSVGVPLGSDTAKIQTIQIDIIDAKTNKLIWRGTDSFDFDAGGDKKAQDTAKAVSRILAQFPPQP

SEQ ID NO: 127857 - protein, 337 aa, Unknown
  Bacterial polypetide isolated from the Sargasso Sea
MPTEVDGQGPIFLSATDYALPKVIPEGVDKYTGYREMARGGCAILRTCFDQMTGRTVVMKSLLTKYLLDKQENQRLLREARITAQLQHPNTVPVYDIGRDHRQGLYFTMKRISGENLFTILSRVAQKDPVTVAEFDLRRRVEIVMTAGLALLYAHARGVIHRDVKPENIWVGNFGEVILLDWGVAKVWGQPDDGPGRPQVIQQGEADQSLTMAGDRPGTPLYMSPEQVNTNRATIDERSDIFSMGVVLYEAIALREPFRGRVIQETFENIIHNDPCPPSTLAPEKNIPKELDDIVMKALEKKPANRFQTMQEMLDAVRLLDSAYTLQVLRKLENQDQ

SEQ ID NO: 127858 - protein, 330 aa, Unknown
  Bacterial polypetide isolated from the Sargasso Sea
GGFGQVFKVYHKIDSSLYAIKKIPIKNCDLISENGINLEKILNEVRCIAKLNHQNIIRYYNSWIEYDIIDYDVNSKKSLDYDSDSEKEDSITTDNNISEKCKLTLFIQMELCDLNLKDWIIKRDEYSNFNYNHSVEIFKQLVLGLNYIHKNNVIHRDIKPANIFLFHIYKDTFVPDSEVEKFNYIIKIADFGLSKEKLRKSKSYQNNLFQLEFNNKGLKKSLSYNNFQQSSSQSDTSNLGTQSYASPEQLNSFNYEYKTDLYSLGIILFELMYENKTMMERYMNIKNLREQNKLPKDFLFEKEKELILKLTNINPIFRPDTGNILKDYFI

SEQ ID NO: 127859 - protein, 457 aa, Unknown
  Bacterial polypetide isolated from the Sargasso Sea
MEELQQLGRYQIRRVLGRGAMGVVYEGVDPKLNRPVAIKTILKSQLSDPEMAAEYQVRFEREAQAVARLNHPHIVGVFDFGEENNVAYIVMELIRGEELKAYFDKGTQFAVKDAVRMTGELLDALGYAHEQGIVHRDVKPANVMLDAQMRVKLTDFGVARLSDTGSDGTQAGTMVGTPSYMSPEQAMGNPVGTRSDIFAVGIVLYQLLTMKRPFVGDGHWAVQRQIIQDDPVPPSVQNPALDPVFDAIVFRALAKNPEERYPYARAFKEDLQRALAGQAIDEDEATMLAVAAARARPPGETGAARGTRGANDSSAVEIEFWKTIKDSSDPDEFELYIAKFPNGTYADLARRKLAKLHGDDSAASRSGVRGEGVAEGGTRLALDRPVLPGMPAALGDGSMRVAPVGKKPARIALIAVASVAVLAVGGGGYFMLRQSTPVPSGGGGPAASVAPPLDANG

SEQ ID NO: 127860 - protein, 303 aa, Unknown
  Bacterial polypetide isolated from the Sargasso Sea
MIDGGEWELTERQLVFNEKIASGAFGLLYRGSYCGQEVAIKVLKSNANDSESNGVRSETIREFAQELSILRRVHHKNIIQLIGALTKRTTMCLVTDFMHGGNLLQHVQEHPLKLPELIKHCLGVGMGLDYLHKINIIHRDIKTANLLLDENLVVKIADFGVARTKPTDGSWMTAETGTYRWMAPEVIAHQYYDEKADVFSYGVMVWELVSGGEVPYPGYTPLQAAVGIVQRGLRPTISPSVHPVIAQVMQYCWNVDPAARPSMEQIITLLRNIDVPRQQEGKHGFLDRLRSVSFKSKKSTRSQ

SEQ ID NO: 127861 - protein, 264 aa, Unknown
  Bacterial polypetide isolated from the Sargasso Sea
MAEHPSPPRALGRSAADAAGTPDPSPKKEKTANVTSSLSPALRSHSPTLGQLQSAKTLDEFDVVDVLGQGMVGLVLRAKHRTSGKVCAIKTMPKSQIMEHGEEEHCMAEVRALKELRHAPFVCNYYASFQDPWALYLVMEDCVGDMFDLFNQSGLPGIGQIKVYTAQVLLGLEYIHNAGYVYRDMKPENLLLRSDGSITIGDFGFAKKLEKGERAYTICGTPDYLAPELILHQGCTRAADIWAFGILVFEMIAGFPPFRDRKRR

SEQ ID NO: 127862 - protein, 178 aa, Unknown
  Bacterial polypetide isolated from the Sargasso Sea
MGYKNIASLFVALVFVSACSSKPKNDYDLNYDFKALQSFIQLAPQPSDDPLSAQRIQTEITQQLSQKGFTENASSPDFKVAYGLLTQDKPKDSGLSIGLGTGSFGRSGGIGVGTSVGVPLGSDTAKIQTIQIDIIDTKTNKLIWRGTDSFDFDGGGDKKAQDTAKAVSRILAQFPPQP

SEQ ID NO: 127863 - protein, 376 aa, Unknown
  Bacterial polypetide isolated from the Sargasso Sea
MLDKVTIDDFRIIKLISSGAYSRVFLAQKRATGDLYAVKAMRKHDLAYKNMMEQVIAERDALIAAANPFTIKLYYSFTSARHVYLVTEYANGGDLYSLLTQLGRLSETNARQYCSEIVLALEYVHSQGITHRDLKPGNCLISADGHIKLADFGLSRIHRDVDETIGSGSDSPMPYTTSAVSPSSPGSSFRIPGRESTITNSPIQRMSLQASTRLSPSHSPSRQVHKRSASRHGSGPKGTPNYLAPEILLCEPCGQAGDWWALGAITYEMLVGVPPFNASTPLAIFSRIITGTVEWPEEENRFSQEALTFVESLLNHNVEERLGTIAGADEVKAHSWFTTVNWEHVYDKSAPSVFVPKPENLGDTSYFVPSSNTNSN

SEQ ID NO: 127864 - protein, 333 aa, Unknown
  Bacterial polypetide isolated from the Sargasso Sea
EVLERIGAGGFSTVARARHRSTGAEVAIKVVDKSKYAPTDRSFDREVAVLSEVRHENVVELYATYVTERNVFMVCELVEGGELLDVVSRAGSFTEKDAMVIIRQVLSAVAHMHARNIVHRDLKLENILLSDDGAAPRVKLIDFGLARFKPEGQTLRTICGSPLYIAPEILELETSKNEDEFYTPACDMWSVGVILFALLSGYSPFDDEDESVLYRNIRNGVYHLEPGVWDFISDPAKSLVAALLETDPNRRLSAEQALAHEWLRSDDAVDSTASTMIGRATPHGDRPDVARAERLKRQAEFIRAVREEEALAFRQAKRVAGGASEEALFHIDE

SEQ ID NO: 127865 - protein, 915 aa, Unknown
  Bacterial polypetide isolated from the Sargasso Sea
MAGKRHYRLGALLGEGGSGVVFRATCDETGQDVAIKLMRDDVARTEAERARQRMRFRRETSLCEALRHPNIVALLDKGEAPDGRLFAVFERVQGRTLRDRLAMEGPLSAIDTGRLMTEVLEALAAAHRRGIVHRDLKPQNIVLAMAEDGLHAKLLDFGIGALLPGTTDIAPQAATLAAEVLGSPSYCAPEQLRNEPPTPGSDLYAWGLVVIECLTGEVVMQGTSVADILYRQLSPVDVALPPAIASHPLGSVLRQALGKHPAQRAASADELVAQFRALNFAALVGPLDAGRASRRPQPHPFAPRSDAVATAGEYRQVTSLCCCVTIAGDGRQRHAGTDHGALLDRYEAQWLTKCADIAVGYGAQVDERLGDTLLFHFGLQGDIDWPARRAARAALDMVRVAARARLPVPADARDAVGGEGWHVEVAAAIHVGQVLVHAAQRAGGSTPVVASRLLRLAGPGQILISDDARLALERHADFRPTALRLARAGLAPQPVHELLGERRADTPFDSLDGGMRAPMIGRARELDALLRAWQATRVRHRRAMRGVPRLVVGDAGIGKSRLVYALCEAVRTQGHAFAHCGCLPERENHALFPILRFIGAHWQLDADSPADITHAAIDAMLAALECDRAAARVALATWLGLPCDAKAARWPSAREPHALFDVLEQLIVSLGNGAPVLLVVEDVQWIDRSTEDFLAYLQRSPRAAALCIVLTSRPARLARWRGATERVVLRRLPRDDARRLMSAHLGQGALDPAWLDPLVHRTAGIPLFIEAVARELTMSGADGSLAGLRTTDPCPLPLSLGGMLGRALDRIDDARDTAQLAATIGLEVDAQLLAAASPHDRVTLDAHLQLLLEERIMYAQHRRDRVFYSFRHALIRDAAYASMPPDVRGANHARVSRALAAQANGVDGHFARACM

SEQ ID NO: 127866 - protein, 159 aa, Unknown
  Bacterial polypetide isolated from the Sargasso Sea
MCDLRARARDEDWLIDVDDACSLDERLGEGTTALAFSAHWLGAKVVVKKIKVMKDELSRRAFVRECSIMSRMRHPNVLAFYGASLEADRHISLVTEAATGGTLKAWLYQSEGAPLPQNRSLSARLSIAMDILHAFVYFETRKPIVLHRDLKPSNVFIMS

SEQ ID NO: 127867 - protein, 268 aa, Unknown
  Bacterial polypetide isolated from the Sargasso Sea
MKDKKFGKSDKMQVQKLPTGIEGFDDVCRGGLPVSRSTLVSGTSGTGKTVFSLQYLHHGICNFDEPGIFVTFEESPLDIIRNAASFGWDLQELIDQNKLFILDASPDPDGQDVAGNFDLSGLIERISYAIRKYKAKRVAIDSITAVFQQYDAIYVVRREIFRLIARLKEIGVTTVMTTERVDDYGPIARYGVEEFVSDNVVLLRNVLESEKRRRTLEVLKLRGTTHMKGEYPFTMGLDGISVFALGAMRLTQRSSNIRISSGVKDLDD

SEQ ID NO: 127868 - protein, 220 aa, Unknown
  Bacterial polypetide isolated from the Sargasso Sea
MEDLTTGPVDQAHKRLEKLCLQNADLAGQLRELFATVSVTDAVAMESTIIMRSDDGRSGADEKDIRPFIGDGFVPGVSSLPAQFGEYELLEEIGRGGMGIVYRAVQKSLQRVVAVKMLLRRDLASPADLARFRSEAEAAAQLDHPGIVSIFEVGEHKGHPFYSMRYIEGTTLAKRLQAGPIPPREGAQILLRVAEAVQAAHSRGVLHRDLKPSNILIDLA

SEQ ID NO: 127869 - protein, 62 aa, Unknown
  Bacterial polypetide isolated from the Sargasso Sea
ASPQYIRQLAAALSYCHSKHVIHRDIKPENLLLDMRGELKIADFGWSVHSRNSRRKTLCGSA

SEQ ID NO: 127870 - protein, 104 aa, Unknown
  Bacterial polypetide isolated from the Sargasso Sea
MPPEMIEGKDHDYHVDVWSLGVLMYEFLTGSPPFEANGHTETYKKIARVAITWPDHISAEARDLISRLLVKDPEKRMQLTDIENHPWIRKHTSDDAPVHAAPKL

SEQ ID NO: 127871 - protein, 278 aa, Unknown
  Bacterial polypetide isolated from the Sargasso Sea
MPPGWVDSSRDAARNATQAFHLKVYHKADKTGFEQSKDFMIGQGDVIVNRYRVVEGIGRAAFSKTVRAQDLQTNTPVCLKILNNNKDCVDQGLDEIKLLRLLNDQDPDDTQGIVRMIDFFYYKEHLFIVLELLRANLFEFQKYEMETAQTPYFSLARVQCIAKQVLNSLAFIHGKNLIHCDLKPENVLIQSYADCKVKMIDFGSSCFTSDVLSSYCQSRAYRAPEVIIGAKYSQKVDVWSLGCILAELVSRQILFRSNSVPALLARMVSIRGPFDKKF

SEQ ID NO: 127872 - protein, 162 aa, Unknown
  Bacterial polypetide isolated from the Sargasso Sea
TYIASLARALIYCHKKHVIHRDIKPENLLVGIKGELKIADFGWSVHAPNSRRQTLCGTLDYLPPEMVEGRDHDYAVDVWSLGVLAYEFLVGTPPFEAEGHSETYKRILRVDLQFPSYISENAKDLIRSLLVKEPAARIPLSRLLDHPWIKENASPNGIPLPE

SEQ ID NO: 127873 - protein, 312 aa, Unknown
  Bacterial polypetide isolated from the Sargasso Sea
RQGEGGGAHPDGAQGGGEDFNRKKIKAIDMEEKVRREIKILRLFMHPHIIRLYEVLETPHDIYVVMEYVKAGELFDYIVEKGRLGENEARHFFQQIVSGVEYCHRNMVVHRDLKPENLLLDAKSNVKIADFGLSNVMRDGHFLKTSCGSPNYAAPEVISGKLYSGPEVDVWSCGVILYALLCGSLPFDDESIPNLFKKIKGGIYNLPSHLSPGARDLIARMLLVDPLKRVTISEIRAHPWFVVHLPRYLVVPPPDTLAQATNVDAETLDMVVNLGFEREHVVDALRHQLRNKATVAYFLLLDNRRNVFGGYL

SEQ ID NO: 127874 - protein, 299 aa, Unknown
  Bacterial polypetide isolated from the Sargasso Sea
SCNRFNNCCLSQYDAIYVVRREIFRLIARLKEIGVTTVMTTERVDDYGPIARYGVEEFVSDNVVLLRNVLESEKRRRTLEVLKLRGTVHMKGEYPFTMGMDGISVFALGAMRLTQRSSNIRISSGVKDLDDMCGGGYFQDSIILATGATGTGKTMLVSKFVEDAYNNNERAILFAYEESRAQLLRNATSWGIDFEKMESDGLLKIICAYPESTGLEDHLQIIKTQINQFKPKRMAIDSLSALARGVSLNAFRQFVIAVTGYTKQEEIAGFFTNTAEEFMGSHSITDSHISTITDTILLL

SEQ ID NO: 127875 - protein, 292 aa, Unknown
  Bacterial polypetide isolated from the Sargasso Sea
ARYGVEEFVSDNVVLLRNVLESEKRRRTLEVLKLRGTVHMKGEYPFTMGMDGISVFALGAMRLTQRSSNIRISSGVEDLDDMCGGGYFQDSIILATGATGTGKTMLVSKFVEDAYQNNERAILFAYEESRAQLLRNATSWGIDFEKMESDGLLKIICAYPESTGLEDHLQIIKTQINQFKPKRMAIDSLSALARGVSLNAFRQFVIAVTGYTKQEEIAGFFTNTAEEFMGSHSITDSHISTITDTILLLQYVEIKGEMARALNVFKMRGSWHDKRIREFIITNSGPENKDSF

SEQ ID NO: 127876 - protein, 311 aa, Unknown
  Bacterial polypetide isolated from the Sargasso Sea
FSLQYLHHGICNFDEPGIFVTFEESPLDIIRNAASFGWDLQELIDQNKLFILDASPDPDGQDVAGNFDLSGLIERISYAIRKYKAKRVAIDSITAVFQQYDAIYVVRREIFRLIARLKEIGVTTVMTTERVDDYGPIARYGVEEFVSDNVVLLRNVLESEKRRRTLEVLKLRGTVHMKGEYPFTMGMDGISVFALGAMRLTQRSSNIRISSGVKDLDDMCGGGYFQDSIILATGATGTGKTMLVSKFVEDAYNNNERAILFAYEESRAQLLRNATSWGIDFEKMESDGLLKIICAYPESTGLEDHLQIIKT

SEQ ID NO: 127877 - protein, 281 aa, Unknown
  Bacterial polypetide isolated from the Sargasso Sea
VQKIPTGIEGFDDVCRGGLPAARSTLVSGTSGTGKTVFSLQYLHHGICNFDEPGIFITFEESPLDIIRNAASFGWDLQKLIDQNKLFILDASPDPDGQDVAGNFDLSGLIERISYAIRKYKAKRVAIDSITAVFQQYDAIYVVRREIFRLIARLKEIGVTTVMTTERVDDYGPIARYGVEEFVSDNVVLLRNVLDAEKRRRTLEVLKLRGTVHMKGEFPFTMGDDGIIVFALGAMRLTQRSSNIRISSGVKDLDEMCGGGYFQDSIILATGATGTGKTMLV

SEQ ID NO: 127878 - protein, 281 aa, Unknown
  Bacterial polypetide isolated from the Sargasso Sea
MVAARWHAQALASRAKDFWDYEALQVQWGDQDDYEVVRKVGRGKYSEVFEGIKVATGTKVIIKILKPVKKKKIKREIKILQNLAGGTNIIQLLDIVRDPQSKTPCLIFEYVNNTDFKVLYPTLTDYDIRYYMYELLKALDFCHANGIMHRDVKPHNVMIDHEKRKLRLIDWGLAEFYHPEREYNVRVASRYFKGPELLVDLQDYDYALDMWSLGCMFAGMIFRKEPFFHGHDNYDQLVKIVKVLGTDELFDYLDKYNLELDPHFDGILGRHTRKPWSKFLN

SEQ ID NO: 127879 - protein, 60 aa, Unknown
  Bacterial polypetide isolated from the Sargasso Sea
RRVSMLTGMPNRLIQSCMQQIFAGLAFCHAQHVLHRDLKPQNVLIDRSGQVRLADFGLAR

SEQ ID NO: 127880 - protein, 142 aa, Unknown
  Bacterial polypetide isolated from the Sargasso Sea
MNDKKFGKSNKMQVQKLPTGIEGFDDVCRGGLPVSRSTLVSGTSGTGKTVFSLQYLHHGICNFDEPGIFVTFEESPLDIIRNAASFGWDLQELIDQNKLFILDASPDPDGQDVAGNFDLSGLIERISYAIRKYKAKRVAIDS

SEQ ID NO: 127881 - protein, 204 aa, Unknown
  Bacterial polypetide isolated from the Sargasso Sea
MTEEVDRHVLRKYDIVQKLGKGAYGIVWKAIDKRSNDKVALKKIFDAFQNATDAQRTFREVVFLQQMDKHENIVQLQNVIKADNDRDLYLIFEYMDTDLHAVIRANILEPVHKQYIMYQSFKALMYMHSAQLVHRDMKPSNLLLNGECLMKVADFGLARSLTKSNQLDDIEHGAPILTDYVATRWYRAPEILLGSTKYGKAVDL

SEQ ID NO: 127882 - protein, 246 aa, Unknown
  Bacterial polypetide isolated from the Sargasso Sea
GLDQHLVVDYRDGELQAGDRFLLVSDGVWACLNDKRIGELLQRDDDAEAICQALVDEAHHAGSQDNASALLVRIEQLPEAALADTLAQLEHWPLPPRLREGQEFEGWQVEGLLGESRQSLIYRVRDADNLPWLLKTLPPSRAGEEQAGPALLQEEWFLRRVAGRHFPELHALPQRQHLYYVQREYAGQTLAARLRQHGPLSLADWQDLAPRLIKALGLLHRRNIIHRDIKPENLLLGDDGELRVLD

SEQ ID NO: 127883 - protein, 305 aa, Unknown
  Bacterial polypetide isolated from the Sargasso Sea
WDLQGLIDQNKLFILDASPDPDGQDVAGNFDLSGLIERISYAIRKYKAKRVAIDSITAVFQQYDAIYVVRREIFRLIARLKEIGVTTVMTTERVDDYGPIARYGVEEFVSDNVVLLRNVLESEKRRRTLEVLKLRGTVHMKGEYPFTMGTDGISVFALGAMRLTQRSSNIRISSGVKDLDDMCGGGYFQDSIILATGATGTGKTMLVSKFVEDAYNNRERAILFAYEESRAQLLRNATSWGIDFEKMESDGLLKIICAYPESTGLEDHLQIIKTQINQFKPKRMAIDSLSALARGVSLNAFRQFV

SEQ ID NO: 127884 - protein, 65 aa, Unknown
  Bacterial polypetide isolated from the Sargasso Sea
MDNFEKVEKIGEGTYGVVYKARDRRDDAVVALKRIRLDQEEEGVPSTAIREISLLKELKHENIVR

SEQ ID NO: 127885 - protein, 194 aa, Unknown
  Bacterial polypetide isolated from the Sargasso Sea
SRAQLLRNATSWGIDFEKMESDGLLKIICAYPESTGLEDHLQIIKTQINQFKPKRMAIDSLSALARGVSLNAFRQFVIAVTGYTKQEEIAGFFTNTAEEFMGSHSITDSHISTITDTILLLQYVEIKGEMARALNVFKMRGSWHDKRIREFIITNRGPEIKDSFSNFEQIFSGAPHRIVPDQNIQNVFKGLDNN

SEQ ID NO: 127886 - protein, 222 aa, Unknown
  Bacterial polypetide isolated from the Sargasso Sea
MSTTEDDDSQYSESSYTETTTDDSGEEEEGAPRRRRRRRARGDGGRGGVEDGVTRAARAKRRKARRERDARREGGQRQTVTSKFAVCGTVFEVDAKYAPIKPIGKGAYGVVCSAREVETNRKVAIKKIVNAFENVVDAKRTLREIKLLRHLRHENVIEIIDCVKPEGRNEFEDVYLMYDLMDTDLYQIIRSSQSLTDEHCQYFVYQILRGLKYIHSADVLHR

SEQ ID NO: 127887 - protein, 228 aa, Unknown
  Bacterial polypetide isolated from the Sargasso Sea
MRRPIDAAAQRGGELVMKVIAKDCMTSHRSVTQLAKEITVLRTLRHPSLCYMHDVLHSRDHLLLVMERGGEDLFDFFEAYPHGVTEADSSRIMRGVVAGLDCVHAHGICHRDLKPENVLVSLARGEGGRDVVKICDFGLCERVGAPGTRLCDLCGSPGFFAPEMITLGRYDGRRADVWSLGCILLELVLGHEQFYAVWMSAYDHEVIQSPQRFGERIRDATRATTALL

SEQ ID NO: 127888 - protein, 205 aa, Unknown
  Bacterial polypetide isolated from the Sargasso Sea
MIILAFEYLHSNQIIYRDLKPENVLVARDGRCKLGDFGYSRKLDVGEKAFTFCGTPGYVAPEIVLSKGYGYAVDWWALGVLTFVIITSQQPFCFTKDPLNKEDPLVVMRRIVDMSFAVEYPPYASETACHFISQLLRREASKRLGNTAGGVSELKNHPWFADFDWSLLESGEYKPKPLALTPQFMELQRERLASLKRESLLATEM

SEQ ID NO: 127889 - protein, 273 aa, Unknown
  Bacterial polypetide isolated from the Sargasso Sea
PTPAPPTQRYEISRQLAKGGMGEVYLALDHQLQRHVALKVMTPEIAANPDLSNRFTQEALVLGRLDHPHIVPIHDLGVDAQGRNYYAMKFVRGTTLKEVLHGLRQGQSATVDRYPLARLLDIFSKTCDAVSYAHSKGIIHRDLKPANIMIGEFGEVLVMDWGIAKILSQPEKAPDSDPPTGTTEGTRYGTVMGTPSFMAPEQAEGRLDAINERTDIYSLGAILYNILALRPPITGSSADAEVMERIKTGRITPPTQRAQDSRDTNVLLHCPDH

SEQ ID NO: 127890 - protein, 244 aa, Unknown
  Bacterial polypetide isolated from the Sargasso Sea
MNYSLGKIDKYTALGDYKVLKKAIGKGSFSKIYKGFSENGDPVAIKIIKKKNVKDEKYILREIEVMKSLNHINVLGLLNVLVSDNKYYLILQYCSFGDLKEYTKRMILDEEKLKFFMKQIKNGLCELYKNNIIHRDLKPQNILVCNKEILKISDFGFAKAYSRELNMQQTMCGSPLYMAPEILQYKPYTDKADLWSVGVIMYELFFKKTPIEGTTLHNLVSNMKGYIFKIKNGKLSANCEDLLK

SEQ ID NO: 127891 - protein, 182 aa, Unknown
  Bacterial polypetide isolated from the Sargasso Sea
MNQYVVIKNLGQGAFGKVKLCLNTQTNKLCALKCINRKLLRRKYAGMGRDKGSQAVATEIAIMKKLHHPNVVRLYEVIDDATGQYIFMVLEYAAGGPIYDPERHDGAGLGEDLAWHYFRETCEALDFLHRAGVIHRDLKPDNILKTTDGTVKLTDFGVSTLFDENSKGELVTVGERASGPFA

SEQ ID NO: 127892 - protein, 237 aa, Unknown
  Bacterial polypetide isolated from the Sargasso Sea
ILDASPDPDGQDVAGSFDLSGLIERINYAIRKYKAKRVAIDSITAVFQQYDAVFVVRREIFRLIARLKEIGVTTVMTTERIDEYGPIARYGVEEFVSDNVVILRNVLEGERRRRTLEILKLRGTTHMKGEFPFTMGTHGISIFPLGAMRLTQRSSNVRVSSGVPRLDDMCGGGFFKDSIILATGATGTGKTMLVSKFIEDACRNKERAILFAYEESRAQLMRNGTSWGIDFEQMSKT

SEQ ID NO: 127893 - protein, 278 aa, Unknown
  Bacterial polypetide isolated from the Sargasso Sea
DLSGLIERISYAIRKYKAKRVAIDSITAVFQQYDAIYVVRREIFRLIARLKEIGVTTVMTTERVDDYGPIARYGVEEFVSDNVVLLRNVLESEKRRRTLEVLKLRGTVHMKGEFPFTMGKDGISVFALGAMRLTQRSSNVRISSGVKDLDDMCGGGYFQDSIILATGATGTGKTMLVSKFIEDAYNNNERAILFAYEESRAQLLRNATSWGIDFEKMESDGLLKIICAYPESTGLEDHLQIIKTQINQFKPKRMAIDSLSALARGVSLNSFRQFVIGV

SEQ ID NO: 127894 - protein, 215 aa, Unknown
  Bacterial polypetide isolated from the Sargasso Sea
MASGHRELSSSSARAGAALADETRTAAAARAVAEHQLTGHKVAVKILNRNRIRQLEMDEKVRREIKILKLFYHPHIIRLYEVIYTPTDIYMVMEFVPGGELFDFIVSNGRLSEQRARTMFQQLVSGVEYCHQHMVVHRDLKPENLLLDAEQQLRIADFGLSNVMKDGDFFKTSCGSPNYAAPEVISGKLYAGPEVDVWSCGVILYALLCGSLPFD

SEQ ID NO: 127895 - protein, 180 aa, Unknown
  Bacterial polypetide isolated from the Sargasso Sea
MNDKKIGKSNKMQVQKLPTGIEGFDDVCRGGLPVSRSTLVSGTSGTGKTVFSLQYLHHGICNFDEPGIFVTFEESPLDIIRNAASFGWDLQELIDQNKLFILDASPDPDGQDVAGNFDLSGLIERISYAIRKYKAKRVAIDSITAVFQQYDAIYVVRREIFRLIARLKEIGVTTVRQQKG

SEQ ID NO: 127896 - protein, 273 aa, Unknown
  Bacterial polypetide isolated from the Sargasso Sea
MGELIGSGGTSRVHKAVDQRTGSVCAIKEIPLREMSHDQLERITSEVELLSRLEHPNIVKYEGATKVGDSLYILLEYAENGSLARVVHPSRFGAFPESLCAVYVAQVLRGLAYLHSQGVVHRDIKGANILTTKEGVVKLADFGVATKGGRHAPGDGFGDLFGADDVGTKGAGEASEGEESGEGGVIGATEGDEAAMGTPYWMAPEVIEMRNVTAAADIWSVGCTIIELLTSSPPYFDLDPMPALFRIVRDEHPPLPPRISDAMKDFLLLCFKR

SEQ ID NO: 127897 - protein, 196 aa, Unknown
  Bacterial polypetide isolated from the Sargasso Sea
MVVTKGTLGEGAFGKVRRCRLKVGGEVFALKQMVKADIVSMGQVEHIMQETELLTEISHPFVTNKYAGFVTPSNLILIMEFCPGGDLFDQLYKHKSFTVPDTRIFTSQVLLPLEYLHAMSIVHRDLKLENILVSQDGALKLTDFGFAKRIKYRSWTLCGTPEYLAPEIILEKGHGKAVDYWAFGVLFYEMLNGHSP

SEQ ID NO: 127898 - protein, 327 aa, Unknown
  Bacterial polypetide isolated from the Sargasso Sea
ERIINEGDEGTHFYIIVEGEVAVTKKGTDGELARRKAGDYFGELSLRTGAPTNASVTAATAAKVVRMDRGAFQRLLGPLDSLLAMRKYTQGGVEMTGSAEDGEAAAAKAAAASVPKDHAFNKADKTLTLADMVVTKGTLGEGAFGKVRRCRLKVGGEVFALKQMVKADIVSMGQVEHIMQETELLTEISHPFVTNKYAGFVTPSNLILIMEFCPGGDLFDQLYKHKSFTVPDTRIFTSQVLLPLEYLHAMSIVHRDLKLENILVSQDGALKLTDFGFAKRIKYRSWTLCGTPEYLAPEIILEKGHGKAVDYWAFGVLFYEMLNGHSP

SEQ ID NO: 127899 - protein, 235 aa, Unknown
  Bacterial polypetide isolated from the Sargasso Sea
YCETDLANLIKDVANEPLDAARIKGYMLGTLRGLAFIHAAWCLHRDLTPGNLFLTPDGVVKIGDFGLARVYGSPDRRYSPNTVTRWYRPPEILFGAKFYGTAVDMWSVGCIFAELHRRAPYFPGNGEIDQLGKIISARGTPTEETWPGVTSLPTYIPYNECAEKPLRENFAAASDDALALLGALLTMCPAKRISAEDALEHAYFKAEPKAATFAELAPRAKRQESSSGGQKRGRE

SEQ ID NO: 127900 - protein, 224 aa, Unknown
  Bacterial polypetide isolated from the Sargasso Sea
PPALSGKARYLKGAVLGEGTFGVVTKAEDTLTRKAVAIKKIRLGKYKEGVNFTAIREIKLLQELRHPHVIELVDVFPHKRNLHLVFECCESDLEAVVKDKFLPLGVPEIKSYVQMTLKAVAYCHSCWVLHRDLKPNNLLIAPNGALKLADFGLARVFGSPNRRFTHQVFARWYRAPELLLGSKIYGPGVDLWAVGCIFAELMLRRPFVPGSSDIDQLGRIYQQL

SEQ ID NO: 127901 - protein, 249 aa, Unknown
  Bacterial polypetide isolated from the Sargasso Sea
MSKEYLGRGAFGVVRKARSVRTGMVCAIKQVVKVFDQPGMTRRVLREMRVLSMVQHSSLVQLIDLKYQGEALYFVTECCETDLHSLMHKDKSRYYENSVGMSARVSIMHQVLLGLQHLHSFAIAHRDIKPSNILLTSDLQAKICDFGLARQITTKSADMSVLHDESMVFGNNDPMTPYVVTRWYRAPEVVITEGVYQLKQDIWAGGCVFAEMMSGKVLFPGRDTVHQMHLIVAGLGRPTAADVNFPGVS

SEQ ID NO: 127902 - protein, 200 aa, Unknown
  Bacterial polypetide isolated from the Sargasso Sea
MTDKKFGKSNKMQVQKLPTGIEGFDDVCRGGLPVARSTLISGTSGTGKTVFSLQYLHHGICNFDEPGIFVTFEESPLDIIRNAASFGWDLQELIDQNKLFILDASPDPDGQDVAGNFDLSGLIERISYAIRKYKAKRVAIDSITAVFQQYDAIYVVRREIFRLIARLKEIGVTTVMTTERVDDYGPIARYGVEEFVSDNV

SEQ ID NO: 127903 - protein, 253 aa, Unknown
  Bacterial polypetide isolated from the Sargasso Sea
RPEARQGRMCAKNPPKLSAVPQSHATLFPADGIVWKATCKKLNNVVAVKKIFDAFQNSTDAQRTYREIIFLQQMDKHENIIGLKNVMTADNNRDIYLVFEFMETDLHAAIRANILEDVHKKYILYQCFKALKYMHSAELVHRDMKPANLLLNAECLMKVADFGLARSLTDCLGGNGDFEPPNCTDYVATRWYRAPEILVGSQRYGKQVDIWSMGCIFAEMLLGRPVFTGKTTMHQLEIIVENLGRPTQLRSSR

SEQ ID NO: 127904 - protein, 292 aa, Unknown
  Bacterial polypetide isolated from the Sargasso Sea
RACHRQRCVRSRSLKSSPTRTSWRKFPILSARKAVCWCQCPGPTDSLNPFSSVRPVVSTGSLRDVVQESGRLYLIFEFLDKDLKRYLDAHSGPLPMEMVKSFCFQICRGLAFCHARGVMHRDLKPQNLLVTTDGRLKLADFGLARAFCPPIRPLTHEVVTLWYRPPEILLGSTTYAPPVDVWAVGTILVEMVTKRPIFPGDCEIDQIYKIFRVLGTPTEETWPNCTALQDWNPAFPQWPRIALASVCPGLDQQGLEMLEHMFFYDPKARVSARAVMNHPFFDDVDKEAHNTI

SEQ ID NO: 127905 - protein, 263 aa, Unknown
  Bacterial polypetide isolated from the Sargasso Sea
AMRLTQRSSNIRISSGVKDLDEMCGGGYFQDSIILATGATGTGKTMLVSKFIEDAYNHNERAILFAYEESRAQLLRNATSWGIDFEKMESDGLLKIICAYPESTGLEDHLQIIKTQINQFKPKRMAIDSLSALARGVSLNAFRQFVIGVTGYSKQEEIAGFFTNTAEEFMGSHSITDSHISTITDTILLLQYVEIKGEMARALNVFKMRGSWHDKRIREFIITSQGPEIKDSFSNFEQIFSGAPHRIIPDNNIQNIFKGIDKN

SEQ ID NO: 127906 - protein, 142 aa, Unknown
  Bacterial polypetide isolated from the Sargasso Sea
MDFAEDGDIAGKITRHYKNNTCFAEFELWSYLIQLLSGLKALHDLNIMHRDIKPANILVSKSGTVKLADFNVSKVVNRADGLLNTQTGTPYYACPEVWSNKPYNFKSDIWSLGCVMYEMAALRPPFKAGDMCGLHKKVTQAY

SEQ ID NO: 127907 - protein, 230 aa, Unknown
  Bacterial polypetide isolated from the Sargasso Sea
TEAEVKRLMLDLTSAIAYCHDRWVFHRDLKTSNLLMNNRGEVSICDFGLARYYHEPPAGYSPTVVTLWYRAPEVLLSDTGRGIKTTYGPAIDVWSLGCIFAELVLTQPLMPGQGEIDQIKRIFELLGTPTEESWPGCMDLHYLKKVKLRPQPFPRLRDKFRRTSFTSATALSEAGVDLLGQMLCLNPEKRVTAAEALKHRYFAEEPAPKPHYLMPTFPSTHKQPPRRPGK

SEQ ID NO: 127908 - protein, 244 aa, Unknown
  Bacterial polypetide isolated from the Sargasso Sea
IRLLRSLRHPNVLHLTDIMPPPSLSADNWKDVYLVTRLFDTNLHRVIYSGQPLTDPHVQYILWQLFRALRYLHAAQVVHRDMKPTNLLLNRDCELALADFGLARYMPSSEDRRSSLATNAEPRGKSGQLTKYVVTRWYRAPELLVQNKRYDSKVDMWSVGCILAEVIGAKALFPGKDSLHQLRLIVEKLGTPTPDELAVIENEQAVNYITGLRHKDSGSRSQTAAARLKALFPKAEPLLVDLLA

SEQ ID NO: 127909 - protein, 225 aa, Unknown
  Bacterial polypetide isolated from the Sargasso Sea
HQYRIAYRDLKPENILIDAQGYIKVVDFGFAKVVYEGERTWTLCGTPEYLAPEVILRKGHDVRVDWWSLGILIVELFTGGTPFYSDDHFDVFKKIVKGEIPEGTWKRMSPEAADCVKALLVKEPEKRLGAVEKGGPRMIRETKFFQPLDFVKLVNKQVTPPWKPIVSHATDTRYSPDEDEIELPEPTAAAMKAAEEHENLYDFFPEFQIMDEPGGEEMEEYGGGE

SEQ ID NO: 127910 - protein, 245 aa, Unknown
  Bacterial polypetide isolated from the Sargasso Sea
MTCDYCEGKTIGQGTFGKVRLGSHVITQEKVAIKILEKDKIKEQADITRVMREIQILKIVRHPNIVQLYEIIETSRQLFLIMEFVPNGELFNLIVKKKRLPDREACRFFHQILAGIEYLHKIKICHRDLKPENLLLDENMNIKIVDFGLSNTYKKPTDTLKTACGSPCYASPEMIAGKRYLGLDTDLWSLGVITYAMTVGYLPFEDPDTNKLYKKILDSSYTMPNYVEKPCREIIRNLLMTDPTK

SEQ ID NO: 127911 - protein, 286 aa, Unknown
  Bacterial polypetide isolated from the Sargasso Sea
RILHRDLKPQNILVRRSIDRRTLKISDFGLSRAFGRPRAHTREVVTLWYRAPEILLGAEDYSTPVDVWSVGCILAEMAAPLTVHGAPTPLFPGDSEIDQLYKIFRVRGTPSDREWPGVSRLPHYSPVFPNWPALRLERVVGRIVVQDHAGVVGGVSPALAGPATDFLGRCLAYEPSSRITAREALVHTFIDPYAADRAAAATAALAADRAAAAEAARAAAEALVDEVNCDPTKFGGFHSAFTSPARLKRARLVTPPNGFPARLEPCGTHAVSTPGRVSPLLQGMEA

SEQ ID NO: 127912 - protein, 215 aa, Unknown
  Bacterial polypetide isolated from the Sargasso Sea
MGAAGEARRGVRPFFFPPTIECSPLRVACAHSSFGKVFKARNEQTGVLAAVKIVPVEQDAGEVTREIETLKQCSSSNIVQYFGSTTKDGELWILMEFCPGSSLADIMEARGRCLNEAQIAAAMAGTLAGLSYLHGRTPQLIHRDVKAGNLLLADSGVVKLADFGVSAQIGSTLSKRGTVIGTPFWMAPEVISGGPQAGYNTKADVWSLGITAIEL

SEQ ID NO: 127913 - protein, 140 aa, Unknown
  Bacterial polypetide isolated from the Sargasso Sea
MKDKKFGKSNKMQVQKLPTGIEGFDDVCRGGLPVSRSTLVSGTSGTGKTVFSLQYLHHGICNFDEPGIFVTFEESPLDIIRNAASFGWDLQELIDQNKLFILDASPDPDGQDVAGNFDLSGLIERISYAIRKYKAKRVAI

SEQ ID NO: 127914 - protein, 182 aa, Unknown
  Bacterial polypetide isolated from the Sargasso Sea
MQLREVKSLKKLNHPNIVKLKEVIRENDELFFVFEFMEANLYELMKKRERHFPESKIRNIMTCRTMRHPQPSRRSRTSGPAHYQIFQGIAFMHKHGFFHRDIKPENMLVKGDTCKIADFGLAREIRSRPPYTDYVSTRWYRAPEVLLRSLQYTSPIDTAVAGGGAGEPNSAFARCTQARQSR

SEQ ID NO: 127915 - protein, 45 aa, Unknown
  Bacterial polypetide isolated from the Sargasso Sea
MRAVVVARQVVLGLPYNQKVDVWSLGCILAELFTSNARAPSPPPP

SEQ ID NO: 127916 - protein, 257 aa, Unknown
  Bacterial polypetide isolated from the Sargasso Sea
RGTVHMIGEYPFTMGMDGISVFALGAMRLTQRSSNIRISSGVKDLDDMCGGGYFQDSIILATGATGTGKTMLVSKFVEDAYNNKERAILFAYEESRAQLLRNATSWGIDFEKMESDGLLKIICAYPESTGLEDHLQIIKTQINQFKPKRMAIDSLSALARGVSLNAFRQFVIAVTGYTKQEEIAGFFTNTAEEFMGSHSITDSHISTITDTILLLQYVEIKSEMARALNVFKMRGSWHDKRIRRFIITNSGPEIKDS

SEQ ID NO: 127917 - protein, 284 aa, Unknown
  Bacterial polypetide isolated from the Sargasso Sea
LHHGICNFDEPGIFVTFEESPLDIIRNAASFGWDLQELIDQNKLFILDASPDPDGQDVAGNFDLSGLIERISYAIRKYKAKRVAIDSITAVFQQYDAIYVVRREIFRLIARLKEIGVTTVMTTERVDDYGPIARYGVEEFVSDNVVLLRNVLESEKRRRTLEVLKLRGTIHMKGEYPFTMGMDGISVFALGAMRLTQRSSNIRISSGVKDLDDMCGGGYFQDSIILATGATGTGKTMLVSKFVEDAYNNNERAILFAYEESRAQLLRNATSWGIDFEEMESDGL

SEQ ID NO: 127918 - protein, 274 aa, Unknown
  Bacterial polypetide isolated from the Sargasso Sea
MKEKKFGKSNKMQVQKLPTGIEGFDDVCKGGLPVSRSTLISGTSGTGKTVFSLQYLHHGICNFDEPGIFVTFEESPLDIIRNAASFGWDLQELIDQNRLFILDASPDPDGQDVAGNFDLSGLIERISYAIRKYKAKRVAIDSITAVFQQYDAIYVVRREIFRLIARLKEIGVTTVMTTERVDDYGPIARYGVEEFVSDNVVLLRNVLESEKRRRTLEVLKLRGTVHMKGEYPFTMGIDGISVFALGAMRLTQKSSNIRISSGVRDLDEMCGGGF

SEQ ID NO: 127919 - protein, 81 aa, Unknown
  Bacterial polypetide isolated from the Sargasso Sea
MSAAQTDFQPSPQSGELFDRITSTTHFLEVHAAEQVRQILEAVKYLHANGVLHRDLKPENLLLASTAADAPSATHRQTHCH

SEQ ID NO: 127920 - protein, 229 aa, Unknown
  Bacterial polypetide isolated from the Sargasso Sea
MVQVKPCLVSKFVEDAYNNNERAILFAYEESRAQLLRNATSWGIDFEKMESDGLLKIICAYPESTGLEDHLQIIKTQINQFKPKRMAIDSLSALARGVSLNAFRQFVIAVTGYTKQEEIAGFFTNTAEEFMGSHSITDSHISTITDTILLLQYVEIKGEMARALNVFKMRGSWHDKRIREFIITNSGPEIKDSFSNFEQIFSGAPHRIVPDQNVQNVQNVFKGLDNNNN

SEQ ID NO: 127921 - protein, 202 aa, Unknown
  Bacterial polypetide isolated from the Sargasso Sea
PLHENGPVVTLWYRAPELLLGARHYTRAVDIWAAGCIFAELTTLVVPFKGVPKGKEDPKSMYQAEQIESIAAAKGAPTEDEWPLFREHPDYERAKKIFYPPSHPEGRPINDKAPIRKDPELSAVFDELCAYDPEKRPTAYEALTTLDYFATTEPGPTKNIFDYELAPGEQRIVYPHRKILHGTGDCKPPDNEAPKKRHKTSS

SEQ ID NO: 127922 - protein, 267 aa, Unknown
  Bacterial polypetide isolated from the Sargasso Sea
LIDQNKLFILDASPDPDGQDVAGNFDLSGLIERISYAIRKYKAKRVAIDSITAVFQQYDALYVVRREIFRLIARLKEIGVTTVMTTERVDDYGPIARYGVEEFVSDNVVLLRNVLESEKRRRTLEVLKLRGTVHMKGEYPFTMGIDGISVFALGAMRLTQRSSNIRISSGVKDLDDMCGGGYFQDSIILATGATGTGKTMLVSKFVEDAYNNSERAILFAYEESRAQLLRNATSWGIDFEKMESDGLLKIICAYPESTGLEDHLQII

SEQ ID NO: 127923 - protein, 156 aa, Unknown
  Bacterial polypetide isolated from the Sargasso Sea
MPAQIDEYQILGEIGRGGMGSVLLGRRQDDRFKKRVAIKIMRRGLDTADMLQRFELEKQVLGALNHPNIARLFDAGATPDGRPYFVMEYVEGVPIDVYCDEQNLTIQERLRLFEKVCSAVHYAHQNLIVHRDLKPSNIIVNNAGEPKLLDFGIAKL

SEQ ID NO: 127924 - protein, 281 aa, Unknown
  Bacterial polypetide isolated from the Sargasso Sea
QKLPTGIEGFDDVCRGGLPVSRSTLVSGTSGTGKTVFSLQYLHHGICNFDEPGIFVTFEESPLDIIRNAASFGWDLQELIDQNKLFILDASPDPDGQDVAGNFDLSGLIERISYAIRKYKAKRVAIDSITAVFQQYDAIYVVRREIFRLIARLKEIGVTTVMTTERVDDYGPIARYGVEEFVSDNVVLLRNVLESEKRRRTLEVLKLRGTVHMKGEYPFTMGADGISVFALGAMRLTQRSSNIRISSGVKDLDDMCGGGYFQDSIILATGATGTGKTMLVS

SEQ ID NO: 127925 - protein, 195 aa, Unknown
  Bacterial polypetide isolated from the Sargasso Sea
MKKKKKLGEGAYGVVYEAEIENDGGVEKVAVKRNYGDVENQGISCIRELNFLATLNHPCITKLKSVSLGDPFPKECPMTPRPQRNEMREDTHHFILEFSQHCLEDYYLECEDFYELKIIMTQILLGLEYIHHRKILHRDLKPGNVLVSKEKNLPYAKICDFGLSCFPSNYRPSTPGAVTSWYRAPEICCEYDSYS

SEQ ID NO: 127926 - protein, 241 aa, Unknown
  Bacterial polypetide isolated from the Sargasso Sea
MLMDYVPGGELFTVLRAQHRFLEPVAAFYAGIVVLVFEYLHDRKIVYRDLKPENLLFDAQGYLKLVDFGFAKEVITKTWTLCGTPEYLAPEIILNKGHDCAADWWALGILIYEMLTGAPPFTDDHDPMQIYQKVLKGSVPEPKGQRPLPPDSKACVTRLLARDSSERLGCQKLGTEEVKRAAFFSKLNWHRLEKKLIQPPYVPEIADPYDVSNFDCEGLITPRNEHKTSANAGNAHLFEDF

SEQ ID NO: 127927 - protein, 509 aa, Unknown
  Bacterial polypetide isolated from the Sargasso Sea
MNDKKFGKSNKMQVQKLPTGIEGFDDVCRGGLPVSRSTLVSGTSGTGKTVFSLQYLHHGICNFDEPGIFVTFEESPLDIIRNAASFGWDLQELIDQNKLFILDASPDPDGQDVAGNFDLSGLIERISYAIRKYKAKRVAIDSITAVFQQYDAIYVVRREIFRLIARLKEIGVTTVMTTERVDDYGPIARYGVEEFVSDNVVLLRNVLESEKRRRTLEVLKLRGTVHMKGEYPFTMGMDGISVFALGAMRLTQRSSNIRISSGVKDLDDMCGGGYFQDSIILATGATGTGKTMLVSKFVEDAYNNNERAILFAYEESRAQLLRNATSWGIDFEKMESDGLLKIICAYPESTGLEDHLQIIKTQINQFKPKRMAIDSLSALARGVSLNAFRQFVIAVTGYTKQEEIAGFFTNTAEEFMGSHSITDSHISTITDTILLLQYVEIKGEMARALNVFKMRGSWHDKRIREFIITNSGPEIRDSFSNFEQIFSGAPHRVVPDQNVQNVFKGLDNN

SEQ ID NO: 127928 - protein, 287 aa, Unknown
  Bacterial polypetide isolated from the Sargasso Sea
MQFPPTSGQPQMQVQKLPTGIEGFDDVCQGGLPIGRSTLISGTSGTGKTVFSLHFLHNGIKDFDEPGIFVTFEESPLDILRNAASFGWNLQEMVEQDKLFILDASPDPDGQDVAGSFDLSGLIERINYAIRKYKAKRVAIDSITAVFQQYDAVFVVRREIFRLIARLKEIGVTTVMTTERIDEYGPIARYGVEEFVSDNVVILRNVLEGERRRRTVEILKLRGTTHMKGEFPFTMGTHGISIFPLGAMRLTQRSSNVRVSSGCARLDDMCGGGFFKDSIILGTVPRA

SEQ ID NO: 127929 - protein, 336 aa, Unknown
  Bacterial polypetide isolated from the Sargasso Sea
MKDKKFGKSNKMQVQKLPTGIEGFDDVCRGGLPVSRSTLISGTSGTGKTVFSLQYLHHGICNFDEPGIFVTFEESPLDIIRNAASFGWDLQELIDQNKLFILDASPDPDGQDVAGNFDLSGLIERISYAIRKYKAKRVAIDSITAVFQQYDAIYVVRREIFRLIARLKEIGVTTVMTTERVDDYGPIARYGVEEFVSDNVVLLRNVLESEKRRRTLEVLKLRGTVHMKGEYPFTMGIDGISVFALGAMRLTQRSSNIRISSGVKDLDDMCGGGYFQDSIILATGATGTGKTMLVSKFVEDAYNNNERAILFAYEESRAQLLRNATSWGIDFEKMES

SEQ ID NO: 127930 - protein, 510 aa, Unknown
  Bacterial polypetide isolated from the Sargasso Sea
MNDKKFGKSNKMQVQKLPTGIEGFDDVCRGGLPVSRSTLVSGTSGTGKTVFSLQYLHHGICNFDEPGIFVTFEESPLDIIRNAASFGWDLQELIDQNKLFILDASPDPDGQDVAGNFDLSGLIERISYAIRKYKAKRVAIDSITAVFQQYDAIYVVRREIFRLIARLKEIGVTTVMTTERIDDYGPIARYGVEEFVSDNVVLLRNVLESEKRRRTLEVLKLRGTVHMKGEYPFTMGNDGISVFALGAMRLTQRSSNIRISSGVKDLDDMCGGGYFQDSIILATGATGTGKTMLVSKFVEDAYNNNERAILFAYEESRAQLLRNATSWGIDFEKMESDGLLKIICAYPESTGLEDHLQIIKTQINQFKPKRMAIDSLSALARGVSLNAFRQFVIAVTGYTKQEEIAGFFTNTAEEFMGSHSITDSHISTITDTILLLQYVEIKGEMARAINVFKMRGSWHDKRIREFIITNSGPEIKDSFSNFEQIFSGAPHRVVPDQNVQNVFKGLDNNN

SEQ ID NO: 127931 - protein, 512 aa, Unknown
  Bacterial polypetide isolated from the Sargasso Sea
MQFPPASGSTQMQVQKLPTGIEGFDDVCQGGLPIGRSTLISGTSGTGKTVFSLHFLHNGIKHFDEPGIFVTFEESPLDILRNAASFGWNLQEMVEQDKLFILDASPDPDGQDVAGSFDLSGLIERINYAIRKYKAKRVAIDSITAVFQQYDAVFVVRREIFRLIARLKEIGVTTVMTTERIDEYGPIARYGVEEFVSDNVVILRNVLEGERRRRTVEILKLRGTTHMKGEFPFTMGTHGISIFPLGAMRLTQRSSNVRVSSGVPRLDEMCGGGFFKDSIILATGATGTGKTLLVSKFIEDACRNKERAILFAYEESRAQLLRNGTSWGIDFEQMEQDGLLKIICAYPESTGLEDHLQIIKTEIGQFKPSRMAIDSLSALARGVSHNAFRQFVIGVTGYAKQEEIAGFFTNTSEEFMGSHSITDSHISTITDTILMLQYVEIRGEMARALNVFKMRGSWHDKGIREFVITGNGPQIKDSFSNFERIISGVPHRVTTDERSELSRIARGVSSED

SEQ ID NO: 127932 - protein, 268 aa, Unknown
  Bacterial polypetide isolated from the Sargasso Sea
MGRFELKKQLGRGAQATVWLALDPRLQREVAIKLMRPMQDQDPSVLEQWLREARHVGRLAHPYIVQVFEADVQGAQPYIVFEYVPGSTLAEHLAQQGRCTPHDAVALMVDVLDGLHAAHQAGIVHRDLKPSNIMIDAHRHARVMDFGMAAPVQAAPDAQLASGTPAYMAPEAAAGAAPTPAMDVYSAGLVLIEMLTGRPLIHQKDTWQALYRIANENLALPADLGPGVDDGLRAILQRAMAHEPAQRYATAADFRDALRAWAARASAP

SEQ ID NO: 127933 - protein, 361 aa, Unknown
  Bacterial polypetide isolated from the Sargasso Sea
MSRQTTDFGLGNEETVTEHSDSLIGHTFGDVVIESLLASGGMGRVYQGRQRSPDRKVAIKVIRPGHRSPRAFQRFQRETELLGRLSHPGIAQIYTAGSITRNGEDSPYFVMELIQDAMPLVKSANHRNLSNQERLTLFSLLCKAVAYGHLHSVIHRDLKPSNILVDAAGHPKVIDFGIARIEQDNDATETGTFLGTRQYSSPEQCAGKKVDARSDVYSLGVLLYELLTGKLPYEVKNTSFLETARIIHEQQPNKLRIPENKLRSGVELIAEKCLEKNPADRYLNAEKLSLDIDALLSGQPLAAKPQTVLKRSLDYLKSHSSPAATIGTLLLIAIVFFFSGTFSSPEKNISKTTDRSLENIK

SEQ ID NO: 127934 - protein, 316 aa, Unknown
  Bacterial polypetide isolated from the Sargasso Sea
MVAACRSVDEFERLNKIDEGTYGVVFKARDKRTNEIAALKRVKIDEGGDGFPLTALREVNILLSLNHPSIVNVNEVVIGWKLNSVFMVMEYVENDLKGVMDQMAESTNPKFTIPEVKALMLQLLSGISYLHENWIMHRDLKMSNILVTNSGELKICDFGLARQFGGPGKYTQLVVTLWYRAPELLLGATVYGAAVDVWSLGCIFGELLAGAPLFNGRTEIDQLQKIFKLLGTPNERIWPDFPSLPSTQKVTFVEQPYNKLRQKFPCDTTGLSDKGFELLNRMLTYDPLRRFDSAEALHHPFFDESPCPRRPLFSLE

SEQ ID NO: 127935 - protein, 351 aa, Unknown
  Bacterial polypetide isolated from the Sargasso Sea
EIFRLIARLKEIGVTTVMTTERVDDYGPIARYGVEEFVSDNVVLLRNVLESEKRRRTLEVLKLRGTVHMKGEYPFTMGMDGISVFALGAMRLTQRSSNIRISSGVKDLDDMCGGGYFQDSIILATGATGTGKTMLVSKFVEDAYNNNERAILFAYEESRAQLLRNATSWGIDFEKMESDGLLKIICAYPESTGLEDHLQIIKTQINQFKPKRMAIDSLSALARGVSLNAFRQFVIAVTGYTKQEEIAGFFTNTAEEFMGSHSITDSHISTITDTILLLQYVEIKGEMARALNVFKMRGSWHDKRIREFIITNSGPEIRDSFSNFEQIFSGAPHRVMPDQNVQNVFRGIDNN

SEQ ID NO: 127936 - protein, 340 aa, Unknown
  Bacterial polypetide isolated from the Sargasso Sea
GGGGGEDSAAGAAARGGGGASSDVDGGAGGGPGSDSALDNSVATGGRLKIGDFGLACRVESDNERKTTICGTPNYIAPEVLAGSKGGGHSYEVDVWSIGVIIYTLLVGIPPFQTSDVHATYKRIRANAYEFPECVVNEGARELIRRCLAPKPGDRPKIAEIAAHPLLNAGWRGATPWSMPTPRVDAEKMERSTRSGGAGGGDAAKKPRAPPALSAGGRSRRAPLSPLTVADPSAPRTAPRNVNDATPPPATPAPFDVLDSDVVGSAHLARTPDAYPEVSAAAGPPRRATEEGAAAATASLESRVASMRLTTEAPAEEDRLAAAEAGRLGENGGKNVDAKT

SEQ ID NO: 127937 - protein, 363 aa, Unknown
  Bacterial polypetide isolated from the Sargasso Sea
SQQYDAIYVVRREIFRLIARWKEIGVTTVMTTERVDDYGPIARYGVEEFVSDNVVLLRNVLESEKRRRTLEVLKLRGTVHMKGEYPFTMGIDGISVFALGAMRLTQRSSNIRISSGVKDLDEMCGGGYFQDSIILATGATGTGKTMLVSKFVEDAYNNSERAILFAYEESRAQLLRNATSWGIDFEKMESDGLLKIICAYPESTGLEDHLQIIKTQINQFKPKRMAIDSLSALARGVSLNAFRQFVIAVTGYTKQEEIAGFFTNTAEEFMGSHSITDSHISTITDTILLLQYVEIKGEMARALNVFKMRGSWHDKRIREFIITNNGPEIKDSFSNFEQIFSGAPHRVVPDQNVQNIFKGLETN

SEQ ID NO: 127938 - protein, 278 aa, Unknown
  Bacterial polypetide isolated from the Sargasso Sea
MENYEKVLKIGEGTYGVVYKARSLRDDSMVALKRIRLDQDDEGVPSTAIREISLLKELRHENVVSLLEVIHEETKLYLVFEYLDLDLKKHMDSTPHVLNDRMMVKGYVYQMCAGIAFCHSHRVLHRDLKPQNLLIDTTNNVLKLADFGLARAFGIPVRAYTHEVVTLWYRSPEILLGVRRYSTPVDVWSIGCIFAEMINQSPLFPGDSEIDELFKIFKKLGTPNDELWPEARDLPDFQEGFPRWQPKPWEALCPALDEDGVDLLRQLLQYAPEKRISA

SEQ ID NO: 127939 - protein, 265 aa, Unknown
  Bacterial polypetide isolated from the Sargasso Sea
MCHTSLAPSKPRRWTKGDNLGEGSYGSVWLALNGDTGELFALKEVRVGSSDKHRDESIEQLEQEVEVLSRLVHPNIVRYIGITREETALYIFLEYVPGGSIASLVQRFGKFEENVIRVYTRQILIGLAYLHSQRVVHRDIKGANILVEKSGRIKLADFGMAKVLESVSIGKSFKGSACWMAPEVIRQQNVGFESDIWSVGCTVYEMATGAPPWSDCSTQVQIIFKIASSSEIPTIPEHLSSEGQSFLRLCLQRDAGRRPEAVALL

SEQ ID NO: 127940 - protein, 456 aa, Unknown
  Bacterial polypetide isolated from the Sargasso Sea
MDVKEVFDFGDELGRGQFGAVFAVTEKSSGRSLACKSISKRDLKNEKARNVVRNEVRIMHHLSGDDRVVELIGAYEDATHVHLVMERLDGMELFDAMSEHFDEAPYGERDAAEMMRTIVSAVDYFHQMDVIHRDLKPENFVLKTKAKDAPICAIDFGLSTFYHENQTFTEFVGSPYYMAPEVLGYRYSLEADVWSCGVILYILLSGVPPFWGQTEKATFDAIKRYKKGVEPLDFDSAPWPSVSDEAKELIRGMLELDPKKRLTAKQVLTHPWIADPKCPPASALDAVVFERFKQFAGMTKFKKMGLKAMASNLSADEVAGLKELFKDFDKDGSGTISLDELREGLKLNASEAASAELDAIMAAIDLDGSGELDYEEFIAATLARSKRQSEVAVHAAFDYFDKDGDGSITAEEFEEAFSKMSPVERANLGDVDELIAAADADGDGRIDFDEFMAMMN

SEQ ID NO: 127941 - protein, 285 aa, Unknown
  Bacterial polypetide isolated from the Sargasso Sea
EGEYPFTMGMDGISVFALGAMRLTQRSSNIRISSGVKDLDDMCGGGYFQDSIILATGATGTGKTMLVSKFVEDAYNNNERAILFAYEESRAQLLRNATSWGIDFEKMESDGLLKIICAYPESTGLEDHLQIIKTQINQFKPKRMAIDSLSALARGVSLNAFRQFVIAVTGYTKQEEIAGFFTNTAEEFMGSHSITDSHISTITDTILLLQYVEIKGEMARALNVFKMRGSWHDKRIREFIITNSGPEIKDSFSNFEQIFSGAPHRVVPDQNVQNVQNVFKGLDNN

SEQ ID NO: 127942 - protein, 336 aa, Unknown
  Bacterial polypetide isolated from the Sargasso Sea
MDNYEKMDRIGEGTYGVVYKARCKTTNALVAMKRVRMDQERDGMPLTSLREIKLLQRLRHENVVRLLRVIQGNNPENVFLVFEYCEHDVGRLIDHMHTTFTTSEVKSLMTQTLRAVEYLHERCIFHRDLKLSNLLLNQRGELKLCDFGLARPYEPIERGSYTPKVVTLWYRAPELLFGCDTYTSAIDMWAVGCIFAEFLKHQPLFPGSTEIEQVQIICMLLGSPNAQIWPGWDSLPNVKNFKLPDQPYNFLEVNFPKLSPAGVNLLDVLLTYDPEQRVTAKEALAHEYFRESPPPKPPAEMPTFPSTHSALPAGPRRNEPKRQRVGVLDDRIASVF

SEQ ID NO: 127943 - protein, 451 aa, Unknown
  Bacterial polypetide isolated from the Sargasso Sea
EVREIAIQLIDALHYLHSNRVIHRDLKPENILIGADRCVKVCDFGLARSMSQQSLVMTSIKGTPLYMAPELVQEQPYDHTVDLWSLGVILYELFVGTTPFYTTSMYTLMQRIVKDVVPWPNSMSPSFKSFLQGLLNKKPQQRLNWPSVLDHPFVRKDKDDAGEGLSNGNSDVNVENEAAFRKIERRRQSVVGGGRKGIHESDGASTLGPTLGDVSEDLQKLELEAHKSVKAAAGLRRDRAALSKLLETLQPQNTHRSKFLPSYISNRTLASKKIELKSTKMADIASALRTLLAMLKVPRKILMSVGGGSVALTKDLPAAVIAACTTAANANDPPQPELLALAIQVVSTVAFPDGSTPWCGLGLNGYLMFLGKLLGYTSRDIGEIVATTASKAIADTIEAAKERGISSELAATRGALGPANSKGGGVTDALCQTLARSTKQATATQVCRALF

SEQ ID NO: 127944 - protein, 202 aa, Unknown
  Bacterial polypetide isolated from the Sargasso Sea
MILEYAARGELYKELQKCKRFSEKRSATYIASLAKALLYCHQKHVIHRDIKPENLLVGIKGELKIADFGWSVHAPNSRRQTLCGTLDYLPPEMVEGRDHDSAVDVWSLGVLAYEFLCGVPPFEAEGHSETYKRILRVDLNFPSHVSRSARDMISALLVKEPRHRLPLRKLLEHPWIVENASPNGIPDDLNLQPNKNGAPAAE

SEQ ID NO: 127945 - protein, 289 aa, Unknown
  Bacterial polypetide isolated from the Sargasso Sea
LRGTVHMKGEFPFTMGHDGISVFALGAMRLTQRSSNIRISSGVKDLDDMCGGGYFQDSIILATGATGTGKTMLVSKFIEDAYNHSERAILFAYEESRAQLLRNATSWGIDFEKMESDGLLKIICAYPESTGLEDHLQIIKTQINQFKPKRMAIDSLSALARGVSLNAFRQFVIGVTGYSKQEEIAGFFTNTAEEFMGSHSITDSHISTITDTILLLQYVEIKGEMARALNVFKMRGSWHDKRIREFIITSQGPEIKDSFSNFEQIFSGAPHRIIPDQNIQNVFKGVDKN

SEQ ID NO: 127946 - protein, 182 aa, Unknown
  Bacterial polypetide isolated from the Sargasso Sea
MGLVLFGLGEGLLVLSTTGNSPWSVFAEGISKKTDISIGAATFIVSVSVLFLWIFLKQKPGIGTVMNIIIIAGMIDVTLYLFDPPTNFFSKYLLSVVSVLLVGLGSGIYLVANLGPGPRDGLMTGLTKIMNLPIAFVRACLEISVVLIGWYLGGTVGIGTLIFAFGIGPAVAFGLFFVNKIS

SEQ ID NO: 127947 - protein, 187 aa, Unknown
  Bacterial polypetide isolated from the Sargasso Sea
FFFLCLGLVLFGLGEGLLVLSTTGNSPWSVFAEGISKKTDISIGAATFIVSVSVLFLWIFLKQKPGIGTVMNIIIIAGMIDITLYLFDPPTNFFSKYLLSVVSVLLVGLGSGIYLVANLGPGPRDGLMTGLTKIMNLPIAFVRACLEISVVLIGWYLGGTVGVGTLIFAFGIGPAVAFGLFFVNKIS

SEQ ID NO: 127948 - protein, 161 aa, Unknown
  Bacterial polypetide isolated from the Sargasso Sea
LGGMTLMTGSDAPVTLSLPLNDEWYYAVCYSGISVSTAAARDILPKQVEMATALTFGRQLGVFVHALHVGNFDLAASVMNDVIAEPYRKSLLPGFDEARAFSEQAGALAFGISGSGPTVFAVCPSKAQAEKVAAYLTENYIQNEDGFSHVCQIPSQGTIVS

SEQ ID NO: 127949 - protein, 250 aa, Unknown
  Bacterial polypetide isolated from the Sargasso Sea
HWRAKGIACPVPVRARDGEVLHKLSNRQAAIVTFLAGMWPRRIQPYHCGELGRALARMHLAGNDFALRRSNDLSVQSWRSLLCRSADRADEVQQGLAEDLETELAALELNWPDTLPCGIIHADLFPDNVFFRGPELTGLIDFYFACTDMFAYDIAICMNAWCFEADGSFNVTKAKRLLTAYGRVRDFSDDELAALPVLARGAAMRFLLTRLYDWLYTPADALVTKKDPLEHWKRLQFHQRVTGPQDYGLV

SEQ ID NO: 127950 - protein, 197 aa, Unknown
  Bacterial polypetide isolated from the Sargasso Sea
LAGYPLPKEKLLELAIDIEGHPDNVVPSLIGGLCVTAKTANDRWRVVRCDWDQSIKAVVAIPSIRLSTSEARRVMPENIPINDAVINLGALTLLLQGLKTGNEDLIADGMHDKLHEPYRWGLIKGGLEVREAAKAAGALGCAISGAGPSILALCKATRGREVSVAMVKAWEAAGVASRAPLMSLQLRGSECISNTIG

SEQ ID NO: 127951 - protein, 194 aa, Unknown
  Bacterial polypetide isolated from the Sargasso Sea
HQAGMDFDQTRDNDLSIEGWRDLYAAIEPRADEVLDGLHAELKAALIELEKNWPQGLPAGVIHADLFPDNVFYLGNRLSGLIDFYFACNDSFAYDIAICLNAWCFEADGSFNVTKARQLLSGYNRVRTLGSDELSAMPVLAQGAALRFLLTRLYDLLNHVEGALVQPKDPLEYLQRLRFHRGVRSPAEYGLGAP

SEQ ID NO: 127952 - protein, 251 aa, Unknown
  Bacterial polypetide isolated from the Sargasso Sea
NVAGVVALAMLKEYPVDFGIEITMNKGFSPGSGLGSSAASSAGAAFGVNQLLNKPFSNLELTKFAMLGEKIACGTPIADNVAAVIFGGFILIRSYEPLDVIKLPVPKDLRLVAIHPQIEIKTKDAREVLPDQIPLSIAVKQWANVGGLISGLYTKDYKLISNSLIDEIVEPKRKHFIPYFDLVKEEAINAGALGAGISGSGPTIFSLCEGDSVVENVYKSIKKAYKNKNVDFRLFSSKINTEGIKILEAKT

SEQ ID NO: 127953 - protein, 234 aa, Unknown
  Bacterial polypetide isolated from the Sargasso Sea
MAVYTTVDDSALNEFLIAYDIGEILSFAGIVEGVENSNYLLRTTKAHFILTLYEKRVDTVDLPFFIELMTHLSAAGMNCPVPVAARDGQVLHQLAGRTCAIFSFLDGTFSRFPNLLKCRALGASLAELHIKSQGVSRHRANALGPASWTPLLHSIGADADILAKGMHDTITARLQQILMDWPTDLPHGIIHADLFPNNVLFVGDKLTGLIDFYFACEDILAYDIGICLNSWCFE

SEQ ID NO: 127954 - protein, 214 aa, Unknown
  Bacterial polypetide isolated from the Sargasso Sea
MFLTIKKIPSKTWSSEKPLNFKPKFSTFFFLCLGLALFGLGEGLLVLSTTGNSPWSVFAEGISKKTDISIGTATFLVSVCVLFLWIFLKQKPGIGTVMNIIIIAGMIDVTLYLFDPPTNFFSKYLLSFVSVLLVGLGSGIYLVANLGPGPRDGLMTGLTEITNLPIAFVRACLEISVVLIGWYLGGTVGIGTLIFAFGIGPAVAFGLFFVNKIS

SEQ ID NO: 127955 - protein, 116 aa, Unknown
  Bacterial polypetide isolated from the Sargasso Sea
MEKIRVFCPASVANVSCGFDVLGFCLNEVGDEIIIRKSKQKRIKIISKEGYRLPSDPKKNVAGIAINSFLNKYPSNFGFEIEIIKRIKPGSGIGSSAASSAGAVFGVNKILGDPAT

SEQ ID NO: 127956 - protein, 205 aa, Unknown
  Bacterial polypetide isolated from the Sargasso Sea
AGLIGANAIMNSPLSKEKLLELAIDIEGHPDNVVPSLLGGLCLTARSSSQRWRIIRCDWHDSIKTVVAIPAIRLSTSEARKVMPKNVPISDAVTNMGALTLLLNGLKAGNAELIKEGMFDKLHEPYRWKLIKGGLEVKDAALNAGALGCAISGAGPSILALCKKENGKNVSQAMVKAWEKSGVASRAPFLNVQTTGSQFSTIAGK

SEQ ID NO: 127957 - protein, 220 aa, Unknown
  Bacterial polypetide isolated from the Sargasso Sea
MAVYTHLSHEEINKFLEEYKIGHLLNFSEIAEGVENSNFLITTSIDKYILTLYEKRVNPNDLPFFLNLLTHLSSAGLSCPLPVEGIDGNALRTLGGRPAAIVTFLEGTWPRHSNTHHCKALGSAMAMMHEFGQTFKQTRTNALTLPSWRPLLESCRLPEREIYINLFNELNQELNWLENNWPKNLPSGIIHADLFPDNVFFTKSDLSGIIDFYFACNDFF

SEQ ID NO: 127958 - protein, 77 aa, Unknown
  Bacterial polypetide isolated from the Sargasso Sea
MQMRSHLGRVRGLGSSNNGVQHWWMQRLSGIALVPLSLWFVFSVIGLLINADLATVTNWVGQHYNPVLLILFVICMF

SEQ ID NO: 127959 - protein, 238 aa, Unknown
  Bacterial polypetide isolated from the Sargasso Sea
IQDKKGNYSNSIQNKKAVITSFLKGRSIDQIKPIHCASLGSTIARMHKESARLEMTRKNELGFVNLNSLIQTLKNVDDNINAQVIDVINEEYTFLSGNLGHSLPSGIIHADLFPDNIFFEGNEVTGIIDFYFACTDYYAYEIAICLNAWCFEPNNNEFNPTKAKHLLGSYNQLREFSEEEKKALPLLTRASSLRYLLTRLIDYYSHDDNELILKKDPNEYLTKLQFHQSVKKVGEYGL

SEQ ID NO: 127960 - protein, 129 aa, Unknown
  Bacterial polypetide isolated from the Sargasso Sea
IFLKQKPGIGTVMNIIIIAGMIDVTLYLFDPPTNFFSKYLLSVVSVLLVGLGSGIYLVANLGPGPRDGLMTGLTKIMNLPIAFVRACLEISVVLIGWYLGGTVGVGTLIFAFGIGPAVAFGLFFVNKIS

SEQ ID NO: 127961 - protein, 176 aa, Unknown
  Bacterial polypetide isolated from the Sargasso Sea
GEGLLIVSLSGASPWSVLAQGISLNVNYSIGLITFIISVVVLIMWIPLKQKPGIGTILNALIIAGMIDLCINFVPSPENFISQISLAIVAVLTVGLGGGIYLVANLGPGARDGLMIGLQRVTNLPIASVRAFIEISVVSIGWYLGGTVGIGTLLFAFGIGPCVALGLYLVDKIFNN

SEQ ID NO: 127962 - protein, 312 aa, Unknown
  Bacterial polypetide isolated from the Sargasso Sea
MAVYTKVNFAEAHQFLEKYYSIEDLEELIEIPQGVENTNYIIKTKNKKFILTLYESRVSHSDLPFFINLLVALNDKNIECPNPIKMKNGSYTKLLNNKHAAIFSFLPGKSTTSIKNEHCFLVGQTLANIHLKTKDLSLHRENTLSLKYLTDLLSLINQTPGNPLNKLYMDISNEYDFLMNNWPTDLPKGIIHGDLFPDNIFFQNNKLTGVIDFYFACNEFYIFDIAICINAWCFESDYSFNITKASYLLKGYRSLKKLTEDEVQFLPIMCRGSALRFLITRLVDWNKRDENVLVTPKDPSEYYNKLQFHQSV

SEQ ID NO: 127963 - protein, 320 aa, Unknown
  Bacterial polypetide isolated from the Sargasso Sea
MAVYTHISREELDLFTDHYSIENVLEFSGIKGGTSNSNYLLKTLEKNYILTIFEERTNQDNLQFFFDLMNHLNKNNVKCPEVIQDKKGNYSNSIQNKKAVITSFLKGRSIDQIKPIHCASLGSTIARMHKESARLEMTRENELGFVNLKSLIQTLKNFDDNIDAQVIDLINEEYTFLSGNLGHSLPSGIIHADLFPDNIFFEGNEVTGIIDFYFACTDYYAYEIAICLNAWCFEPNNNEFNPTKAKHLLGSYNQLREFSEEEKKALPLLTRASSLRYLLTRLIDYYSHDDNELILKKDPNEYLTKLQFHQSVKKVGEYGL

SEQ ID NO: 127964 - protein, 224 aa, Unknown
  Bacterial polypetide isolated from the Sargasso Sea
MAVYTSISQDDLNQFLSLYNMEDVNSFEGIRNGVSNSNYLLFGKNNKYILTIFEEMTNDRDLPYFFQLMNHLNSKNIMCPRIIKDKTNNFSNIIKGKQAAISSFLEGQSIEHIKPSHCAELGTMVAKFHNASNELEIYRENDLGINKLEAIIGSIDKISERLSPSVIDVIHSENDYLKNISFDIPSGIIHADLFPDNIFFNENKLSGIIDFYFACNDFYAYEIA

SEQ ID NO: 127965 - protein, 306 aa, Unknown
  Bacterial polypetide isolated from the Sargasso Sea
MLEEKKITIEVPASTGNVGPGFDCIGLAVDIWNKVTIEKSDGVFEILNQGINKEKYDSIPIKENLITKGILLACPEIDLNKFKIISENNIPFAGGLGSSAASISAGLIIGNHLSGNKLNNDDLMQMAIAMEGHPDNATPCIHGGLTISFYDENKSRWIYRKIETIGDLNIMTFVPNFISETNQSRKKIPSEILLKDVVNNMSRVALLIDSFKSGDYSFLNNATQDFIHQNIRLESFPQIKFLMSAAIEAGALGAILSGSGPTLMVFTKGKEFTVDYELKEAARKHNLEGKITLTKISNKGISIIDG

SEQ ID NO: 127966 - protein, 388 aa, Unknown
  Bacterial polypetide isolated from the Sargasso Sea
KQIDDNEIEIERLGESLVPENLRETADAVVELVSEIAAAVDEMSLIQARARVEAITIEPERIDPDIAFEVARANRLDWMNNRAALVDQWRLIQFNAMSLLAGLDLEIDGNVSTTGTNPARFRAPTGVMGGRLRFDAPLTRLRERNNFRQSILDYQQVRRQQIRYEDRIKLSIRQLLRQLELDERNLETQRRAVIIAIRRVDQTRLSLSQPAPPPPPPSADGSIPIIDAAAGQLAPTATLNLIYAFNDLRSSQDALTSIWINYYATRASLAYQLGVMNLDENGVWVDMPFTDCSRMSAEETVLPPPVPQEWLDYLEEIDPPPPMPEDAGIEALDTPGILPSIMARAMPSVTEDAESEPTDETNSKVVLPASAEVKEDQPWADLIPSFLR

SEQ ID NO: 127967 - protein, 291 aa, Unknown
  Bacterial polypetide isolated from the Sargasso Sea
YSKCGSGFDCIGLAIDVWNSLSISFNSDKLIIKNSGVNNNAYESIKIKDNLIITGIQAVCPEFDISKIKILSENEIPFSNGLGSSAAALCTGLLIGNYLIGNKFSLEDLNEKAIKIEGHPDNVTPCLFGGLTISVFNDKKDKWIIRKIDVSSELNIMVFTPNFISNTNNSRKKLSKSVTRSAAVYNISRVALLIDSLNKKDFTFLNEATKDSLHQDTRLEGFPEMRSIMNAAIDGGALGAIVSGSGPSVMIFTKGNEFTIDYEIKEVARKHNLHGSIILTKPSNQGIILSK

SEQ ID NO: 127968 - protein, 524 aa, Unknown
  Bacterial polypetide isolated from the Sargasso Sea
MKKLSILLISFLLISCTNNEKAKVELFTEGAKISGVNGIHFGPDGYLYATSVIGSDISVVDTDNKTIVKRYGPKEGVFGPDDVAFNDKGEFYWTTILTGEVAGFNIQGEKVIAANLGPGVNPITFSDDGRLFVAQCFFGDGLYEVDPLGIKEPRSIKKDLGPNCGLNGMDWGPDGRLYGPRWFKNEVVSLNVDTGEMNVVVKGLNVPAAVKFDSKGVLHVLDTADGQVLKVIDGQLEVVASLLTGLDNFDFNSKDEIFVSSYADGSILKVTDNEIIEILPGGISHPGGLAVSQNSLVVADIQSVRAFNLGTKEEDWVLRNIFRSSPLGASTSAASLDNNIILTSWLDNTVKILDPSNGQIIKSFEGLNIPISTAKFDGHYAVALHGNTSISLLKEDGSLKILSDEFDSPTHVVNYKEGLLVSDRNRGELITVSAEGDTNTLISGLDSPEGIAILGDTIFVYEGNTGEIKSISENKISIIAKLSAGSPAASPMQPPSMVFNGLVAYEGSVYATDEMKRAIFKITP

SEQ ID NO: 127969 - protein, 232 aa, Unknown
  Bacterial polypetide isolated from the Sargasso Sea
ENQGVALTLEKNLPVGSGLGSSASSVVAALYALNEHFERPYDKQALLELMGEFEGKISGSVHYDNVAPCYLGGMQLMLNVPGAICEPIPSFKEWYWVVAYPGISLSTAMMRKLMPEQYDKSVAIDFGRYLSAFVHASYQQNAKLAIQVLKDVLAEPYRAAAIPGYDNARAALAELGMLTTGISGSGPTLFSVTDDLATANAAKAWLEAHYLSEAGGFAHVCRLDEQGTRRVD

SEQ ID NO: 127970 - protein, 204 aa, Unknown
  Bacterial polypetide isolated from the Sargasso Sea
MSIPEVGKKIRVSVPSTTANLGPGFDCLGAALDLYNEFIFTRIEGGGDRFDLIMESTDGNHLRGGPENLVFRAAQKVWNSANIDPFALEARVKLAVPPARGLGSSATAIVAGLIGANAIMNSPLPKEKLLELAIDIEGHPDNVVPSLLGGLCLTARSSSQRWRIIRCDWHDSIKAVVAIPAIRLSTSEARKVMPKNIPISDAVT

SEQ ID NO: 127971 - protein, 247 aa, Unknown
  Bacterial polypetide isolated from the Sargasso Sea
MSSPEVGKKIIVTVPSTTANLGPGFDCLGAALDLYNEFIFTRIDGGGDRFDLIMESTDGNHLRGGPENLVFRAAQKVWESANIKPFALEARVKLAVPPARGLGSSATAIVAGLIGANAIMNSPLPKEKLLELAIDIEGHPDNVVPSLLGGLCLTARSSSQRWRIIRCDWHDSIKTVVAIPAIRLSTSEARRVMPKNVPISDAVTNMGALTLLLNGLKTGNDELIKEGMFDKLHEPYRWKLIKGGLEV

SEQ ID NO: 127972 - protein, 303 aa, Unknown
  Bacterial polypetide isolated from the Sargasso Sea
GFDCFGFAVDVRNELIVERGEFEIDIVGEGKDELPRDETNAIYDAVVTGFEAARPGCALPKNLRFTSVNRIPPARGLGSSSAALVSGLACGLALGGMEVDAPRTKQILLNLASDIEGHPDNVAPAIYGGFQISINDDNQWITQRVNCPTDVQSVLFIPKFQSLTAETRAQLSPTLSVQGAVHNIARAGLLVNAFATGNLELLPYATQDVIHQPIRGKPFGLDSLIDAALKAGAQGCFMSGAGPTVLAIVGGHGGSVENDTAGTFKASKVADAMLQASRANNVDGEVVIASPTENGVTAWVELA

SEQ ID NO: 127973 - protein, 288 aa, Unknown
  Bacterial polypetide isolated from the Sargasso Sea
LGAALDLYNEFIFTRIDGGGDRFDLIMESTDGNHLRGGPENLVFRAAQKVWESANIKPFALEARVKLAVPPARGLGSSATAIVAGLIGANAIMNSPLPKEKLLELAIDIEGHPDNVVPSLLGGLCLTARSSSQRWRIIRCDWHDSIKTVVAIPAIRLSTSEARRVMPKNVPISDAVTNMGALTLLLNGLKTGNDELIKEGMFDKLHEPYRWKLIKGGLEVKDAALQAGALGCAISGAGPSILALCKKDNGREVSQAMVKAWENSGVASRAPYLNVQTTGSQFRDISGK

SEQ ID NO: 127974 - protein, 255 aa, Unknown
  Bacterial polypetide isolated from the Sargasso Sea
MSIPEVGKKIRVTVPSTTANLGPGFDCLGAALDLYNEFTFTRIEGGGDRFDLIMESTDGNHLRGGPENLVFRAAQKVWESANMDPFALEARVKLAVPPARGLGSSATAIVAGLIGANAIMNSPLSKEKLLELAIDIEGHPDNVVPSLLGGLCLTARSSSQRWRIIRCDWHDSIKAVVAIPAIRLSTSEARKVMPKNVPISDAVTNMGALTLLINGLKAGNAELIKEGMFDKLHEPYRWKLIKGGLEVKDAALNAG

SEQ ID NO: 127975 - protein, 246 aa, Unknown
  Bacterial polypetide isolated from the Sargasso Sea
FLGQLRKYWESANMDPFALEARVKLAVPPARGLGSSATAIVAGLIGANAIMNSPLPKEKLLELAIDIEGHPDNVVPSLLGGLCLTARSSSQRWRIIRCDWHDSIKAVVAIPAMRLSTSEARKVMPKNIPISDAVTNMGALTLLLNGLKAGNEELIKEGMFDKLHEPYRWKLIKGGLEVKDSALNAGALGCAISGAGPSILALCKKENGKNVSQAMVKAWEKSGVASRAPFLNVQTTGSQFSTISGK

SEQ ID NO: 127976 - protein, 299 aa, Unknown
  Bacterial polypetide isolated from the Sargasso Sea
MAFTIRLPGSTANLGPGYDVLGLALGIHNRVTVRESESGRHVARNSGNGTEELPTDGTNLFFQAAETLADRVGKTLPPIEAESTIDVPLARGLGSSSTAIVAGVVAANHLLCDELDRQALLNVATEIEGHPDNVSPCLYGGFTVSTVADGHVTCVRAEPPKDFQAVVVVPDFQLKTKDARNSLPAEISHEDATFNVGRACVVTAAMLQGDLDALAAAMEDRLHQPFRTSLIPHYEGVTGAALDAGALGVALSGAGPTIFAFARENAQAIGDAMAAVWTENGIDAIPYALPVDLDGTVIE

SEQ ID NO: 127977 - protein, 187 aa, Unknown
  Bacterial polypetide isolated from the Sargasso Sea
MGRQISCCHTVRYCPYDKQALLELMGEFEGKISGSVHYDNVAPCYLGGMQLMLNVPGAICEAIPSFKQWYWVVAYPGISLSTAMMRKLMPAQYDKSVAIDFGRYLSAFVHASYQQNAKLAIQVLKDVLAEPYRAAAIPGYDNARAALAELGMLTTGISGSGPTLFSVTDDLATANAAKAWLEAHYLD

SEQ ID NO: 127978 - protein, 261 aa, Unknown
  Bacterial polypetide isolated from the Sargasso Sea
LFEKRVQKKDLPFFMNLMDKLSKHKINCPKPQRNKKGSFLIKIKNKTGSIVSFVEGKDKLKLNLKNCYEIGKNIAKFHRASKKIKLYRKNSLSLKDLPKLLNKIGNKSKIINPNLSSLMKNSFLEIKNKWPKNLPFGIIHADLFIDNIFFKKNKFHGYIDFYFACNDFLMYEIAICINALCFDKKNNKFIFNKKKSKNLIKGYSKIRKFSEKEKKSLNVLCKGAALRYLLTRTYDYLNTPKSAIIKIKNPREYIQKLKVHN

SEQ ID NO: 127979 - protein, 190 aa, Unknown
  Bacterial polypetide isolated from the Sargasso Sea
MSIPEVGKKIRVTVPSTTANLGPGFDCLGAALDLYNEFIFTRIEGGGNRFDLIMESTDGNHLRGGPENLVFRAAQKVWESAKMDPFALEARVKLAVPPARGLGSSATAIVAGLIGANAIMNSPLSKEKLLELAIDIEGHPDNVVPSLLGGLCLTARSSSKRWRIIRCDWHDSIKAVVAIPAIRLSTSEAR

SEQ ID NO: 127980 - protein, 176 aa, Unknown
  Bacterial polypetide isolated from the Sargasso Sea
MSIPEVGKKIRVTVPSTTANLGPGFDCLGAALDLYNEFIFTRIEGGGNRFDLIMESTDGNHLRGGPENLVFRAAQKVWESAKMDPFALEARVKLAVPPARGLGSSATAIVAGLIGANAIMNSPLSKEKLLELAIDIEGHPDNVVPSLLGGLCLTARSSSKRWRIIRCDWHDSIKAV

SEQ ID NO: 127981 - protein, 125 aa, Unknown
  Bacterial polypetide isolated from the Sargasso Sea
MSIPEIGKKIRVTVPSTTANLGPGFDCLGAALDLYNEFIFTRIEGGGDRFDLIMESTDGNHLRGGPENLVFRAAQKVWESANMNTFALEARVKLAVPPARGLGSSATAIVAGLIGANAIMGSPLP

SEQ ID NO: 127982 - protein, 116 aa, Unknown
  Bacterial polypetide isolated from the Sargasso Sea
MSSPEVGKKIIVTVPSTTANLGPGFDCLGAALDLYNEFIFTRIDGGGDRFDLIMESTDGNHLRGGPENLVFRAAQKVWESANIKPFALEARVKLAVPPARGLGSSATAIVAGLIGA

SEQ ID NO: 127983 - protein, 222 aa, Unknown
  Bacterial polypetide isolated from the Sargasso Sea
MAVPPARGLGSSATAIVAGLIGANAIMNSPLSKEKLLELAIDIEGHPDNVVPSLLGGLCLTARSSSQRWRIIRCDWHDSIKAVVAIPAIRLSTSEARKVMPKNIPISDAVTNMGALTLLLNGLKAGNDELIKEGMFDRLHEPYRWKLIKGGLEVKDAALQAGALGCAISGAGPSILALCKKENGKLVSKAMVKAWEKAGVASRAPFLNVQTKGSQFSTISSK

SEQ ID NO: 127984 - protein, 314 aa, Unknown
  Bacterial polypetide isolated from the Sargasso Sea
MGKPEIGTTVVVDVPATTANLGPGFDCLGAALDLNNQFQLKVLEGGAERFELIIESKEGSHLRGGPDNLVYRAAQRVWREVGMQPIALEARVQLAVPPARGMGSSATAIVAGLMGANALAGEALGKEKLLELAIDIEGHPDNVVPSLLGGLCLTAQAASRRWRVVRCEWHENVQAVVAIPSIRLSTADARRAMPKQIVVPDAVSNLGSLTLLLQGLRSGNGDLITDGMHDRLHEPYRWPLIQGGSAVRKAAMDAGAWGCVISGAGPSLLALCLPERGQAVAEAMERQWEQEGVNTRALPLKLQSGGSRWRPKDT

SEQ ID NO: 127985 - protein, 298 aa, Unknown
  Bacterial polypetide isolated from the Sargasso Sea
TANIGPGFDCLGAALDLSNQFTIKRIEGNAERFELIMESTEGNHLRGGPENLFYRAAQRVWRTAGVEPVALEARVKLAVPPARGLGSSATAIVAGLVGANALAGYPLPKEKLLELAIDIEGHPDNVVPSLIGGLCVTAKTANDRWRVVRCDWDQSIKAVVAIPSIRLSTSEARRVMPENIPVNDAVINLGALTLLLQGLRTGNEDLIADGMHDKLHEPYRWGLIKGGLEVREAAKAAGALGCAISGAGPSILALCKATKGREVSVAMVKAWEAAGVASRAPLMSLQLRGSECISNTFG

SEQ ID NO: 127986 - protein, 301 aa, Unknown
  Bacterial polypetide isolated from the Sargasso Sea
MNSVNVKAPATTANLGPGYDCLGMALDLWNELEIRLLESEDLSIFVKGFGEGTVPLNNDNLIYKAIQFLYSELEIPVPGMVINCTNNIPLNRGLGSSSAAIVSGLVAANELCGNPYQINEILEMAVEIEGHPDNVTPCIYGGCRLIAVEEKNIYTVPIPIPADLDAIVFIPDVEISTEEARNILPDTLSYKDAVYNMSRVGLLVAGLFSNNPDYFNVATQDRLHQPYRQEIFRPMKVIFKGALDGGATGVFLSGSGSTVIAFSKDRQMTVGYEMAEAARQCGLEGTLKVLKTSNIGCHVTK

SEQ ID NO: 127987 - protein, 312 aa, Unknown
  Bacterial polypetide isolated from the Sargasso Sea
MSLTVYAPASMGNVGVGFDLLGAALAPIDGSLLGDRVTIAAADAGVSLTQVGAWAHKLPSNPEENIVHQCAVFFLKALGKENQGVALTLEKNLPVGSGLGSSASSVVAALYALNEHFERPYDKQALLELMGEFEGKISGSVHYDNVAPCYLGGMQLMLNVPGAICEAIPSFKQWYWVVAYPGISLSTAMMRKLMPAQYDKSVAIDFGRYLSAFVHASYQQNAKLAIQVLKDVLAEPYRAAAIPGYDNARAALAELGMLTTGISGSGPTLFSVTDDLATANAAKAWLEAHYLTEAGGFAHVCRLDEQGTRRVD

SEQ ID NO: 127988 - protein, 312 aa, Unknown
  Bacterial polypetide isolated from the Sargasso Sea
MSLTVYAPASMGNVGVGFDLLGAALAPIDGSLLGDRVTIAAADAGVSLTQVGAWAHKLPSNPEENIVHQCAVFFLKALGKENQGVALTLEKNLPVGSGLGSSASSVVAALYALNEHFERPYDKQALLELMGEFEGKISGSVHYDNVAPCYLGGMQLMLNVSGAICEAIPSFKEWYWVVAYPGISLSTAMMRKLMPEQYDKSVAIDFGRYLSAFVHASYQQNAKLAIQVLKDVLAEPYRAAAIPGYDNARAALAELGMLTTGISGSGPTLFSVTDDLTTANAAKAWLEAHYLTEAGGFAHVCRLDEQGTRRVD

SEQ ID NO: 127989 - protein, 168 aa, Unknown
  Bacterial polypetide isolated from the Sargasso Sea
MAQPRIGQKVVVDVPATTANLGPGFDCLGAALDLNNRFAMRRIEGSGERFELIIEGTEGSHLRGGPDNLVYRAAQRVWKAANMEPVALEARVRLAVPPARGLGSSATAIVAGLMGANALVGEPLSKEKLLELAIDIEGHPDNVVPSLLGGLCMTAKAASQRWRVVRCE

SEQ ID NO: 127990 - protein, 163 aa, Unknown
  Bacterial polypetide isolated from the Sargasso Sea
MVKVYAPASSANMSVGFDVLGAAVTPVDGTLLGDNVSVEAADSFSLQNVGRFASKLPSVPQENIVYQCWERFCQEIGKKVPVSMVLEKNMPIGSGLGSSACSVVAALVAMNEFCGKPLNEMRMLALMGEMEGRISGSIHYDNVAPCYLGGMQLMIEENGIISQ

SEQ ID NO: 127991 - protein, 315 aa, Unknown
  Bacterial polypetide isolated from the Sargasso Sea
MAQPRIGQKVVVDVPATTANLGPGFDCLGAALDLNNRFAMRRIEGGGERFELIIEGSEGSHLRGGPENLVYRAAQRVWKAAGLEPVALEARVRLAVPPARGLGSSATAIVAGLMGANALVGEPLSKEKLLELAIDIEGHPDNVVPSLLGGLCMTAKAASQRWRVVRCEWAPSVKVVVAIPSIRLSTSEARRAMPKTVPIGDAVVNLGALTLLLQGLRTGNGDLISDGMHDRLHEPYRWRLIKGGDQVKQAAMEAGAWGCAISGAGPSVLALCEEDKGPAVSRAMVKAWEAAGVASRAPVLNLQTSGSHWQPAEDE

SEQ ID NO: 127992 - protein, 309 aa, Unknown
  Bacterial polypetide isolated from the Sargasso Sea
MSQPRIGQKVVVDVPATTANLGPGFDCLGAALDLNNRFAMRRIEGSGERFELIIEGTDGSHLRGGPDNLVYRAAQRVWKAANMEPVALEARVRLAVPPARGLGSSATAIVAGLMGANALVGEPLSKEKLLELAIDIEGHPDNVVPSLLGGLCMTAKAASQRWRVVRCEWISSVKAVVAIPSIRLSTSEARRAMPKAIPVSDAVVNLGALTLLLQGLRTGNGDLIADGMHDRLHEPYRWRLIKGGDDVKAAALEAGAWGCAISGAGPSIIALCAEDKGQAVSRAMVKAWEAAGVASRAPVLNLQTSGSHG

SEQ ID NO: 127993 - protein, 315 aa, Unknown
  Bacterial polypetide isolated from the Sargasso Sea
MSIPEVGKKIRVTVPSTTANLGPGFDCLGAALDLYNEFIFTRIEGGGDRFDLIMESTDGNHLRGGPENLVFRAAQKVWESAKMDPFALEARVKLAVPPARGLGSSATAIVAGLIGANAIMNSPLSKEKLLELAIDIEGHPDNVVPSLLGGLCLTARSSSQRWRIIRCDWHDSIKAVVAIPAIRLSTSEARKVMPKNVPISDAVTNMGALTLLLNGLKAGNAELIKEGMFDKLHEPYRWKLIKGGLEVKDAALNAGALGCAISGAGPSILALCKKENGKNVSQAMVKAWEKSGVASRAPFLNVQTTGSQFSTISGK

SEQ ID NO: 127994 - protein, 315 aa, Unknown
  Bacterial polypetide isolated from the Sargasso Sea
MSIPEVGKKIRVTVPSTTANLGPGFDCLGAALDLYNEFIFTRIEGGGDRFDLIMESTDGNHLRGGPENLVFRAAQKVWESANMDPFALEARVKLAVPPARGLGSSATAIVAGLIGANAIMNSPLPKEKLLELAIDIEGHPDNVVPSLLGGLCLTARSSSQRWRIIRCDWHDSIKAVVAIPAIRLSTSEARKVMPKNVPISDAVTNMGALTLLLNGLKAGNAELIKEGMFDKLHEPYRWKLIKGGLEVKDAALNAGALGCAISGAGPSILALCKKENGKNVSQAMVKAWEKSGVASRAPFLNVQTKGSQFSTISGK

SEQ ID NO: 127995 - protein, 315 aa, Unknown
  Bacterial polypetide isolated from the Sargasso Sea
MSIPEVGKKIRVTVPSTTANLGPGFDCLGAALDLYNEFIFTRIEGGGDRFDLIMESTDGNHLRGGPENLVYRAAQKVWESANMASFALEARVKLAVPPARGLGSSATAIVAGLIGANAIMDSPLSKEKLLELAIDIEGHPDNVVPSLLGGLCLTARSSSQRWRIIRCDWHDSIKAVVAIPAIRLSTSEARKVMPKNVPISDAVTNMGALTLLLNGLKTGNNELIKEGMFDKLHEPYRWKLIKGGLEVKDAAQKAGALGCAISGAGPSILALCKKENGKSVSQAMVKAWEQLGVASRAPFLNLQTTGSQFSTISSK

SEQ ID NO: 127996 - protein, 315 aa, Unknown
  Bacterial polypetide isolated from the Sargasso Sea
MSIPEVGKKIRVTVPSTTANLGPGFDCLGAALDLYNEFIFTRIEGGGDRFDLIMESTDGNHLRGGPENLVFRAAQKVWESANMDPFALEARVKLAVPPARGLGSSATAIVAGLIGANAIMNSPLSKEKLLELAIDIEGHPDNVVPSLLGGLCLTARSSSQRWRIIRCDWHDSIKAVVAIPAIRLSTSEARKVMPKNVPIYDAVTNMGALTLLLNGLKAGNAELIKEGMFDKLHEPYRWKLIKGGLEVKDAALNAGALGCAISGAGPSILALCKKEDGKNVSQAMVKAWEKSGVASRAPFLNVQKTGSQFSTISAK

SEQ ID NO: 127997 - protein, 322 aa, Unknown
  Bacterial polypetide isolated from the Sargasso Sea
MTEGGSVVAYAPASSANLSVGFDVLGAALAPVDGSLLGDRVQVKAADVPFALSSVGRYAHKLPADPKKNILHDCWLAYGEVLEKRGLGLKPLEMVLEKNLPVGSGLGSSACSVVAALEGLNAFHGAPLNEHDLLLLMGEMEGKISGSVHYDNVAPCYLGGMQLVLEEHGVISQGIPVFEQWYWVVCYPGTVVSTAAARAILPAQYRRQDCLTYGRRLAAFVHASYTGQEGLAASVLKDVIAEPYRAALIEGFAEVRAQAAQNGALATGISGSGPSVFVVMKDLAQAERMKDWMDAHFVQNEDGFARVCKLDMAGARVTGSEL

SEQ ID NO: 127998 - protein, 256 aa, Unknown
  Bacterial polypetide isolated from the Sargasso Sea
MIEVYAPASIGNFAVGFDALGAALAPIDGSLLGDVALVSAAPCDEFVCSGEYAHKLPSDAKENLAYQCLVHFRAHVAPDMPTVKLELKKNLPIGSGLGSSACSVVATFAALDKFAKTQLSQVQLIELMADFEAVVSGGRHYDNITPCYLGGLQLTGDLIPNKSIELPVDENWYYVAAFPGFSLNTAKARSVLPKDLSMHASVEFAQRLSSFSSLLLTARFDDALSIMKDEIAEPYRAPLITGFSEAKSSLPALELR

SEQ ID NO: 127999 - protein, 315 aa, Unknown
  Bacterial polypetide isolated from the Sargasso Sea
MAQPRIGQKVVVDVPATTANLGPGFDCLGAALDLNNRFAMRRIEGSGERFELIIEGTEGSHLRGGPDNLVYRAAQRVWKAANMEPVALEARVRLAVPPARGLGSSATAIVAGLMGANALVGEPLSKEKLLELAIDIEGHPDNVVPSLLGGLCMTAKAASQRWRVVRCEWINSVKAVVAIPSIRLSTSEARRAMPKAIPVSDAVVNLGALTLLLQGLRTGNGDLIADGMHDRLHEPYRWRLIKGGDEVKAAALEAGAWGCAISGAGPSIIALCTEDKGLAVSRAMVKAWESAGVASRAPVLNLQTSGSHWQPAEPG

SEQ ID NO: 128000 - protein, 315 aa, Unknown
  Bacterial polypetide isolated from the Sargasso Sea
MSIPEVGKKIRVTVPSTTANLGPGFDCLGAALDLYNEFIFTRIEGGGDRFDLIMESTDGNHLRGGPENLVFRAAQKVWESANMDPFALEARVKLAVPPARGLGSSATAIVAGLIGANAIMNCPLSKEKLLELAIDIEGHPDNVVPSLLGGLCLTAKSSSQRWRIIRCDWHDSIKAVVAIPAIRLSTSEARKVMPKNVPISDAVTNMGAITLLLNGLKAGNEELIKEGMFDKLHEPYRWKLIKGGLEVKDAALNAGALGCAISGAGPSILALCKKENGKNVSQAMVKAWEKSGVASRAPFLSVQTTGSQFSTISSK

SEQ ID NO: 128001 - protein, 318 aa, Unknown
  Bacterial polypetide isolated from the Sargasso Sea
MQQWSSKVTNRVWVMGDAVVDLIPEGERHYLQCPGGAPANVAVGVARLGGDAAFIGRVGGDPFGRFMADTLSGEGVDIAALRLDPDHRTSTVLVALDEEGERSFTFMVRPSADQFLTPNELPRFDAGQWLLTCSIALANEPVRGSCLQAMAAIKAAGGRVCFDPNLRPEVWGNPAEMLPLVREAIAQADVVKLSVEELQLLSGLDDLAAGLATMAGPALVLVTRGAAGVVARLDGELLEWVGPKVTPIDTTGAGDAFVAGLLAALAGRSSLPTLAELPAILVQAHGCGALATTAKGAMTALPTRTELDEFLRSGTSGC

SEQ ID NO: 128002 - protein, 293 aa, Unknown
  Bacterial polypetide isolated from the Sargasso Sea
MKAKVWVLGDAVVDLLPESEGRLLQCPGGAPANVAVGVARLGGNSGFIGRVGGDPFGRYMRHTLQQEQVDVSHMYLDDHHRTSTVVVDLDDQGERTFTFMVRPSADLFLAEEDLPQFAAGQWLHVCSIALSAEPSRSATFAAMENIKSVGGRISFDPNIRPDLWQDQALLQACLDRALSMANVVKLSEEELVFISGSKDLAYGIASVTERYQPELLLVTRGKAGVLAAFQQKFTHFSAKPVVSVDTTGAGDAFVAGLLASLAANGMPADINALEPTLALAQPAVPWQPWRKAR

SEQ ID NO: 128003 - protein, 304 aa, Unknown
  Bacterial polypetide isolated from the Sargasso Sea
MNKNKTKIIATVGPNCSDQKYLIDMVAKGVSCFRINLSHGSQKEKKDYFSLINSLKINGSEIRPPILADLAGPKVRVRRLEKSIVLDEGDSIIISSGKRGDGIIPVSKGLVFDSVESGSKVMINDGKVCLKVIKKLSSEAFECKTLVGGKIKGKKGVNFIGITLNVPSLTEQDELDLELALKNGADWIALSFTRSKDDFSLIRSKIKELGYDVPIMAKIEKWEAVSNLDDIIQTFDGVMVARGDLGVEIPLERVPVVQKEIIKKAALFGKPVIIATQILDSMIKMPVPTRAEVSDIANSILDGA

SEQ ID NO: 128004 - protein, 126 aa, Unknown
  Bacterial polypetide isolated from the Sargasso Sea
MEYSIQKFIKKRPKTKIVCTIGPASSELKTLKKMISEGMSVARLNLSHGTINQHKLYVENAKQAALELDAPLGILIDIPGPKYRVGKIIGDSVDIKKGQKIILGNETILDGKILKLKVWPPRYFKR

SEQ ID NO: 128005 - protein, 279 aa, Unknown
  Bacterial polypetide isolated from the Sargasso Sea
MSFVRNASDINDLKKVLKNKAKKVKIISKIEDREGLSNIEEICEVSDSVMVARGDLGIETDLANLPNIQRKIMSNCAKYGVRSIVATHLLESMIDNPTPTRAEVTDVANAIYEGADAVMLSGETTIGKYPIESVKFISRIAKQTEKYRTLGYESQLISKTDWQHLGVAAKDIAESIKADGIIAITRSGQTAEIVANAKPFMIPIFAFSNNKKTIKQLSLTGSVHAYKSSMYSDHEKNLQSIMKILKKELSPTRELKFVVISGILSENSADAIEVRSLNM

SEQ ID NO: 128006 - protein, 61 aa, Unknown
  Bacterial polypetide isolated from the Sargasso Sea
IQRNIIKIASSKGKKSIVATQLLESMIDSPHPSRAEVSDVANAVYEGTDALMLSGETSIGK

SEQ ID NO: 128007 - protein, 241 aa, Unknown
  Bacterial polypetide isolated from the Sargasso Sea
MANKVAPKADEQLRKTKIICTIGPATASFQKIKALRNAGMDLVRLNMSHSSHAEAKKVIDWVNKLNQTGESPVSVLLDTQGPEIRTGELKNPIKLKTGQIVSLTVRDADLVETQSILVNYEEIVDVVDVGSLITLDNGLLNFEVLEKKGGQLVCRVLDGGTLGSRKHVNLPGIRVNLPAITEKDKRDIQFAKNHGVDFIALSFVREASDIEELRRILGAKEETIKIIAKIEDRSGVENIHS

SEQ ID NO: 128008 - protein, 240 aa, Unknown
  Bacterial polypetide isolated from the Sargasso Sea
MVAVIGGVPKEVVITKEAASSHVVPSFHVTVAPGVYETSRVVENEHAKANAVRTVSLRATAISLDEVFSPEAPVRKTKIVCTMGPKCWDEEELGQLIDAGMGVARFNFSHGDHEAQQKVLDRARKVAAEKGSFLAYLLDTKGPEIRTAMLRDHEPIELEANQEIFIEAVGDKYVEFEGYKTPEETRIGLSYAKLCQSVKPGNNILIADGSVVIKVTEIISDTVLKGTVMNSKKLGERKNC

SEQ ID NO: 128009 - protein, 283 aa, Unknown
  Bacterial polypetide isolated from the Sargasso Sea
MVGELRSNQGVAFPDSNLSVSTLTKKDIEDLEFGNQLGVDFVAVSFVRNAEDIMNVKKYIDDDIKVIAKIELKSAVKNLKSIIQESDGVMVARGDLGVQLPLERIPLVQKEILNETNLQGKITITATEMLTSMISSHRPTRAEVSDITNAILDGTDAVMLSAETSIGENPIEVVSAMAKICSEVDSVSGTKITSSKDILTSDELTNSLSKAAVQVANDSNAKAIVAFTETGKTALLISNHRPDAPIFTFTTVEKTFNQLNLIWGVEQIKIERLETTDEMFAIA

SEQ ID NO: 128010 - protein, 220 aa, Unknown
  Bacterial polypetide isolated from the Sargasso Sea
VPKIQLSLIKKCNRFSKSVIVATQMLESMIENFTPTRAEINDIATAIFQGADTVMLSAETAVGRYPIQSVKTMFKTIISTEKYKRDHIEDFKNSVETKTDPIKSIVLSVKDLAYNPSVKAIIAFSSSGKTAKLVSAVRPSVKIITISPNINISRQMSLLWGVQSIKSKDARGWKDMMNISRQIIRKDKSIKKNDFVIITAGLPFGNAAMTNMIRLYRVGS

SEQ ID NO: 128011 - protein, 54 aa, Unknown
  Bacterial polypetide isolated from the Sargasso Sea
MSNIDLKRRTKIVATIGPATQSEEIITNLIKAGVTTFRLNFSHGDHKDHAERIK

SEQ ID NO: 128012 - protein, 277 aa, Unknown
  Bacterial polypetide isolated from the Sargasso Sea
GILKSKKGINLLETILKDSALTSADKRNVKKGMELGVDWIALSFIQSPEDIKDLRKICKKNVSIMAKIEKPTALNHINKITELADGLMIARGDLGVELPIQDVPSWQKRIIREARMQGKPVVVSTQMLESMITSKTPTRAEVSDVATAVFEGSDAVMLSAESAIGDNPELAVKMMNKIAHSVEKNPNYSSILLAQLEETPDSTPDAIATASRTLATELNSPVIVCYTESGSTGIKVSRVRPKQMILTVTPIIETARKLTLVWGVKCIVQKDANNLKK

SEQ ID NO: 128013 - protein, 267 aa, Unknown
  Bacterial polypetide isolated from the Sargasso Sea
MTISSQFNVDWSDCNLTGVVLRYISLEGANLSGADLSGADLTGSNLTGADLTNAKLFGVDLRQADLYQANLENAVLDGADLRDTIMEDVNLNYASLRHAYIYKTILAETEFTNVDASYSNFCGQDLTEKIFHNANLSGSNLAHTKMQYTYLGNAILYKTNFEESNLVGSNFSENSLKEVNFRGSNLYSVNLENADLTNANLENADLTNANLENADLTNANIFGVNFSKTVTEGIDLSKAIDRQIIKDEEKSDLEILHKYSNLSEMNF

SEQ ID NO: 128014 - protein, 234 aa, Unknown
  Bacterial polypetide isolated from the Sargasso Sea
MKLNKTKIIATLGPASSSKTMLSKLIVSGVDVFRVNFSHADHKDVERIVSDIKALRIKHNKHVSILGDLQGPKIRLGNVVPETFLKKGETILFSTKRIKNGDSNRVTINYTSFPKDVKKGETVLVDDGKIILQVEKTDRETSVNLIVIQGGLLSSNKGVNLPSTKISLPALTPKDIKDAKFAAKLGLDWVALSFVRSKNDVLQLREILDKSSNELIPIISKIEKPQAINNMDQI

SEQ ID NO: 128015 - protein, 259 aa, Unknown
  Bacterial polypetide isolated from the Sargasso Sea
MLKNYRKTKILATIGPSSEKINKIEKLVHNGVDAFRINCSHTNVHQLSNYVKNIRAVEKKIKKPIGILIDLQGPKLRVGEIENDSMVLKKGQIVVIKNSSKSSNKTEIPIPEEKVFKSIKVNHPIFIDDGKIKLKVLKVSKNIIQARVVLEGKLRSKKGINLPETILKNSALTASDKKNVRAGVKLGVDWIALSFIQSPADIKDLKKICHKNISIMAKIEKPSALNHIDKIAELADGLMIARGDLGVELPIEDVPGGKK

SEQ ID NO: 128016 - protein, 192 aa, Unknown
  Bacterial polypetide isolated from the Sargasso Sea
MVARGDLGVQLPLEQVPFVQKQILDAANKRGKISITATEMLQSMKTSYRPTRAEVTDITNAILEGSDAVMLSAETAIGDNPNRVVEVMSLICAETDSRNDTSSLLSKEDSKEDSITTTLARAAVQVANEIDATSIIAFTETGRTPLLISNFRPKAEIITFTTKKKTLNQMNLLWGVDQFLIQREEHFSENVE

SEQ ID NO: 128017 - protein, 300 aa, Unknown
  Bacterial polypetide isolated from the Sargasso Sea
MFTRTKIICTIGPATCELSKMQKMYAAGMNVVRINMSHASHDEALNVINNVKLINKDLDIKMGPISILIDTQGPEIRTGDRDTSLDLKLGDKVNLTVRDEVDVETSSIKINYRGLINSVKKGSKISVDNGLVNFKVLEKHDDKLLCKVIDGGKIGSKRSVNLPGVRIDLPSITKKDKKDINFAIEHDVDYIALSFVRTTADVHSLRKILKRKKSHIKIVSKIEDNEGLSNIHSITQESDAVMVARGDLGIETSLADLPNVQRRIMYACSKWGVRSIVATHLLESMIEKPTPTRAEVTDGC

SEQ ID NO: 128018 - protein, 161 aa, Unknown
  Bacterial polypetide isolated from the Sargasso Sea
MANGGDAAAARAESEGKFREKDTQRIGFKSKIICTLGPVSRTVEILEQMLRAGMSIARFNFSHGSHEYHQETLDNLRTACANTGIQCGVLLDTKGPEIRTGMLACGGPVMLEAGNEVILTTDYEFKGSAEKIAVSYPDLAKDVEPGSKILCADGSVTFTVL

SEQ ID NO: 128019 - protein, 213 aa, Unknown
  Bacterial polypetide isolated from the Sargasso Sea
MTFTRSKIICTIGPASSSPKILKKLHTAGMNVARINMSHATHSSAKQIIENINKINKEKNDKLSEIGILLDTQGPEIRTGDTSLPIDLKVGDKVTLTVRDEVDVETSSIKVNYKGLIHSVDVGSKISVDNGLISFKVLSKQSENLICKVVHGGKVGSKRHVNLPGVRLDVPSITSKDITDINFGIKNNVNFIAASFVRNKKDLEVLHEILSKK

SEQ ID NO: 128020 - protein, 238 aa, Unknown
  Bacterial polypetide isolated from the Sargasso Sea
MKRNRKAKILATLGPASSNKKIIEDLFVAGCDVFRLNFSHGDLETHRKNYENIRSLEEKYNHSTCILADLQGPKLRVGLFKNNKQNLAKGEKFILDLSTEKGDSERVNFPHPEIYSFLTPNSILLIDDGRIRLQVIEQSKDYLVTEILNDAEISNNKGVNIPDIILPIDALTKKDKSDLMKALDMGVDWVALSFVQQAEDIIKLKKIISDKALVMAKIEKPSAVKNIDEIINVADGIM

SEQ ID NO: 128021 - protein, 201 aa, Unknown
  Bacterial polypetide isolated from the Sargasso Sea
KPVIIATQMLESMITNQVPTRAEVSDIANSIFDSVDALMVTGETAIGNYPIEVVKTLKEVIRLTEKSLVQEKVFNPDEINKTSDAISHAVCQITKDLNINIIMTMTHSGSTARMISKYRPPSNVIALTPFNSIIRQLRLIWGITPIKVDKYDDIDLIPDLCKNVIHANKLLKRGEKFIITGGVPMGVSGTTNYLSVQTNDN

SEQ ID NO: 128022 - protein, 296 aa, Unknown
  Bacterial polypetide isolated from the Sargasso Sea
NPRPTRAEVSDVANAILDGTDAVMLSNETAVGDYPVEAVETMATIARRIERDYPLKAIESHLPSTIPNAISAAVSNIARQLDAGAIIPLTKSGSTARNVSKFRPPTPILATTTERSVARRLQLVWGVTPIVVKNDQRTAKTFSLAMQIAQEMGILNQGDLVVQTAGTLTGISGSTDLIKVGLVRKIVSRGISIGEIGVTGKARIIKNNLDISLICPGEILFVPKELMENIPLSKNIAGIVTNQNVNDVYALFNKNNKKISTICNLENIDNHQISNGDLITLQLNEGVIYMGQIEDD

SEQ ID NO: 128023 - protein, 154 aa, Unknown
  Bacterial polypetide isolated from the Sargasso Sea
MLSTKIICTIGPASDSPKILEKLAEAGMNIARLNFSHGTHNSHKKIIKQIHELNRSRQFPIAIMLDTQGPEIRTGNETSDLMSKEIVTVSCPPFKENEGNIHINYAALKSDLKPGNYISIDSGLVKLKVLGKHIKGLKCEVIDGGIVNGHRHVN

SEQ ID NO: 128024 - protein, 226 aa, Unknown
  Bacterial polypetide isolated from the Sargasso Sea
LEIPTEEVPLNQKIMVELAKKARKPVIVATQMMESMIDNLTPSRAEVNDVANSVMDGADCIMLSGETSIGKYPCEVVRKIGKIISSVENTEYGLIQAGNVNINKERLITNSVCYHASLLADSIKASAICTLTNSGYTGWEISSYRPKSLVLVFTSNTRILSQLNLLWGVKCIFYNKLESTDKTVEEVNELALQKRYIKKGDFVINLAAMPIKQKGQVNTLRITKIE

SEQ ID NO: 128025 - protein, 231 aa, Unknown
  Bacterial polypetide isolated from the Sargasso Sea
DLAIGYRGTGEVPKVQLSLIKKCSQFSKSVIVATQMLESMIQNNTATRAEINDIATAIFQGADTVMLSAEAAIGKFPTQAVSTMTQTILSTEKYKRQHIEDFKNSIISNRDPVKSILLSVKDIAYNPNVKAIIVFSNSGKSAKLVSAMRPAAKIVTISPNVNVSRQVSLLWGVQSINSRDANGWKDMMSISKEIIKKLKFIKKDDFVVITAGLPFGKAGMTNMIRLYKVGS

SEQ ID NO: 128026 - protein, 297 aa, Unknown
  Bacterial polypetide isolated from the Sargasso Sea
DDLDLRLALDKGADWIALSFVRSADDIVNVHNIMDECNKRLPVMAKIEKWEALDDLQNITEAFDGIMVARGDLGVEIPSGKVPAAQKEIIELAGVNGKPVVIATQLLESMVENHTPTRAEVSDIANAIFDGVDCLMVTGETAMGNYPVEVIKTLQQVILETEGSSDISKNPLPEVITKTADAISHAVCQIAEDLEVKVIMSMTHSGSTARMISRYRPNSSIYALTPFNHIIRQLQLVWGVRPIRVDNYDNVEKIPALCNDIIKEIDVLQPGEQFVITGGVPMGIAGTTNYLSIQVHN

SEQ ID NO: 128027 - protein, 259 aa, Unknown
  Bacterial polypetide isolated from the Sargasso Sea
GVAFPDSNLSVSTLTKKDIEDLEFGNQLGVDFVAVSFVRNAEDIINVKKYIDDDTKVIAKIELKSAVKNLKSIIQESDGVMVARGDLGVQLPLERIPLVQKEILNETNLQGKITITATEMLTSMISSHRPTRAEVSDITNAILDGTDAVMLSAETSIGENPIEVVSAMAKICNEVDSVSGTKIISSKDILTSDELTNSLSKAAVQVANDSNAKAIVAFTETGKTALLISNHRPDAPIFTFTTVEKTFNQLNLIWGVEQI

SEQ ID NO: 128028 - protein, 286 aa, Unknown
  Bacterial polypetide isolated from the Sargasso Sea
AKKLKKPVAILVDLKGNKIRIGDFKNHMIELEHDSDINVIFTQEKKTDNHEIFIDAEYCFPQIEVGDRILLDDGLIQLTVKSINQKNMALKCLVEKGGLLRSNKGFEVENKIIHRSGLGEEDKKDIKRLAELDIDWIALSFVNEASDVTQAREVLTQIGSRINLIAKIERLVALNQLFWIIKASDGVMVARGDLALESGPGELTGLQKDIIKQTVKGKRIAITATQMMESMITNPTPTRAEMTDVSNAVLDGTDAVMLSAETAIGNHPVETVKAMHEVCMGAETYK

SEQ ID NO: 128029 - protein, 143 aa, Unknown
  Bacterial polypetide isolated from the Sargasso Sea
MRRKHQTKIVATLGPASEQPEIIRALFQAGVDVFRLNFSHGTHADKKSNIEIIRDVEKETGRPIAIMMDLQGPKLRIGQFSEGAVELNVGDAFRLELEDNPGSEKRVTLPHAEIFAALNATTDLLLDDSKIRLKVKDSGPDFA

SEQ ID NO: 128030 - protein, 250 aa, Unknown
  Bacterial polypetide isolated from the Sargasso Sea
ALKNMFKIIKATDSLMIARGDLAIDIGHSEVPKVQLSLIKKCSQFSKSVIVATQMLESMIENNTATRAEINDIATAIFQGADTVMLSAEAAIGKFPSQAVSTMTKTILSTEKYKRQHIEDFKNSIQSNKDPVKSILLSVKDIAYNPDVKAIIVFSNSGKSAKLVSAMRPAAKIVTISPNINVCRQVSLLWGVQSINSRDANGWKDMMSISQEIIRKLKFIKKNDFVVITAGLPFGKAGMTNMIRLYKVGT

SEQ ID NO: 128031 - protein, 29 aa, Unknown
  Bacterial polypetide isolated from the Sargasso Sea
MKKTKIVCTIGPKTESEEMLTKMLDAGMN

SEQ ID NO: 128032 - protein, 249 aa, Unknown
  Bacterial polypetide isolated from the Sargasso Sea
MANKVARQADEQLRKTKIICTIGPATASFQKIKALRNAGMDLVRLNMSHSSHAEAKKVIDWVNKLNQTGGSPVSVLLDTQGPEIRTGELKSPMKLKTGQIVSLTVRDAGLVETQSILVNYEEIVDVVDVGSLITLDNGLLNFEVLEKKGGQLVCRVLDGGTLGSRKHVNLPGIRVNLPAITEKDKRDIQFAKNHGVDFIALSFVREASDIEELRRVLGAKGETIKIIAKIEDRSGVENIHSIVGAADGV

SEQ ID NO: 128033 - protein, 55 aa, Unknown
  Bacterial polypetide isolated from the Sargasso Sea
MSNIDLKRRTKIVATIGPATQSEEIITNLIKAGVTTFRLNFSHGDHKDHAERIKT

SEQ ID NO: 128034 - protein, 99 aa, Unknown
  Bacterial polypetide isolated from the Sargasso Sea
MKSLKILRATKIVSTLGPSTSDYKTIKSLMIAGVNVFRLNFSHGSHEDHKKSVEIIRRLEMELDFQIAILADLQGPKFRIGYVQEKIILKKGNKFVFDQ

SEQ ID NO: 128035 - protein, 277 aa, Unknown
  Bacterial polypetide isolated from the Sargasso Sea
MTLKRTKIICTIGPATESYSSLMRLYKAGMNIARLNMSHSDHKSAKKIIERINKINKKVSNPIGILLDTQGPEIRTGDTSSVVHLEPGEKVSFTIRDEIDVETTSIRVHYDELINSVKVGSLITLDNGLLNFKVLAKTKNELECIVLDGGKLGSKRHVNLPGIRINLPSVTEKDKKDIAFGLKENVDFIALSFVRDASDIDDLKVVLKNKSSQVKVISKIEDREGLSNIEEICKVSDAVMVARGDLGIETDLSKSSNIQRKIMSNCAKHGVRSIVAT

SEQ ID NO: 128036 - protein, 240 aa, Unknown
  Bacterial polypetide isolated from the Sargasso Sea
LKGNKIRIGDFKNHMIELEHASDVDIIFTKEKKTNKHEIFIDADYCFPNIEVGDKILLDDGLIQLTVKSINQKNMALKCQVEKGGLLRSNKGFEVENKIIHRSGLGEEDKKDIKRLAELGIDWIALSFVNEASDVTQAREVLTQIGSRINLIAKIERLEALKQLFWIIKASDGVMVARGDLALESGPGELTGLQKDIIKQTVKGKRIAITATQMMESMISNPTPTRAEMTDVSNAVLDGT

SEQ ID NO: 128037 - protein, 263 aa, Unknown
  Bacterial polypetide isolated from the Sargasso Sea
ALSFVRSPDDVVELQQFLGSKRQSTKIVAKIEDQEGVNNIHQIVAVADGVMVARGDLGIETDIADLPNVQRRIVHACARQGKRCIVATHLLESMIDNPIPTRAEVTDVANAIYEGVDAVMLSGETSVGQYPSRCVEQLSNIADRTERFPGLGYEKALEIEGDKQHVAVHAVALAESVEAAGIIVITRRGIVADYVTAARPQHVPIFAFTNNSQTRRRLAMNRSVYAHRIAFSSDPEKTLRRAFDVLKKEGVAVDAKLVLISDV

SEQ ID NO: 128038 - protein, 307 aa, Unknown
  Bacterial polypetide isolated from the Sargasso Sea
NVVRINMSHASYDEALNVINNVKLINKNPDIKMGPISILIDTQGPEIRTGDRDTSLDLKLGDKVNLTVRDEVDVETSSIKINYRGLINSVKKGSKISVDNGLVNFKVLEKHDDKLLCRVIDGGKIGSKRSVNLPGVRIDLPSITKKDKADINFAIKHDVDYIALSFVRKIEDIHSLRKVLKRKKSQIKVVSKIEDNEGLSNIHAITQESDAVMVARGDLGIETSLADLPNVQRRIMYACSKWGRRSIVATHLLESMIEKPTPTRAEVTDVANTIYEGADAIMLSGETSIGKYPIECIKFLKSIADRS

SEQ ID NO: 128039 - protein, 129 aa, Unknown
  Bacterial polypetide isolated from the Sargasso Sea
MLSTKIICTIGPASDSPEILEKLAEAGMNIARLNFSHGTHTSHKKIIKQIHELNRSRQFPIAIMLDTQGPEIRTGNKTSDLMSKEIVTVSCPPFKENEGDIHVNYAALKGDLKPGNYISIDSGLVKLKV

SEQ ID NO: 128040 - protein, 246 aa, Unknown
  Bacterial polypetide isolated from the Sargasso Sea
MKRNRKAKILATLGPSSSTSDLIKNLFLEGCDVFRLNFSHGDIESHRNNLEIIRKLEDEYNHSTCVLADLQGPKLRLGLFKNDEENLTKGQNFQLDLNNELGNSKRVNFPHPEIYDNLTPNTIMLVNDGKIRLQVIEQTKEVIKTEILNDGIISNNKGVNIPDIVLPIESLTNKDKSDLMKALDMGVDWVALSFVQQASDIIKLKKLINNKAQVMAKIEKPSAVKNIDEIKQNADGIMIARGDLGV

SEQ ID NO: 128041 - protein, 131 aa, Unknown
  Bacterial polypetide isolated from the Sargasso Sea
QEGVERLEEIVEEADGVMVARGDLGIEVDLEEVPQIQRRIAFLCAKFGKRLIVATHMLESMIEHPVPTRAEVTDVANAVFEQSDSIMLCAETSIGKYPVRSVETLKRIAKRTENFRGVNFSKNLIQKDKRT

SEQ ID NO: 128042 - protein, 58 aa, Unknown
  Bacterial polypetide isolated from the Sargasso Sea
MSNIDLKRRTKIVATIGPATQSEAIITNLIKAGVTTFRLNFSHGDHKDHAERIKTIRE

SEQ ID NO: 128043 - protein, 259 aa, Unknown
  Bacterial polypetide isolated from the Sargasso Sea
TRTKIICTIGPATSELITMQKMYSAGMNVVRINMSHASHDEALNVIKNVKLINKNPDIKKGPISILIDTQGPEIRTGVRDTSLDLKLGDKVNLTVRDEVDVETSSIKINYRGLINSVKKGSKISVDNGLVNFKVLEKHDDKLLCRVIDGGRIGSKRSVNLPGVRIDLPSITKKDKADINFAIKHDVDYIALSFVRKIEDIHSLRKILKRKKSQIKIVSKIEDNEGLSNIHAITQESDAVMVARGDLGIETSLADLPNVQ

SEQ ID NO: 128044 - protein, 86 aa, Unknown
  Bacterial polypetide isolated from the Sargasso Sea
MKRNRKAKILATLGPASSSPKIIEDLFVAGCDIFRLNFSHGSIETHRSNVEIIRKLEKKYDHATCILADLQGPKLRVGSFINNEVE

SEQ ID NO: 128045 - protein, 188 aa, Unknown
  Bacterial polypetide isolated from the Sargasso Sea
MLSTKIICTIGPASDSPKILEKLAEAGMNIARLNFSHGTHTSHKKIIKQIHELNRSRQFPIGIMLDTQGPEIRTGNETSDLMSKEIVTVSCPPFKENEGNIHVNYAALKSDLKPGNYISLDSGLVKLKVLGKHKKGLKCEVIDGGIVNGHRHVNLPGTVVKLPGITEADKRDILFGMKQKVIFIALSF

SEQ ID NO: 128046 - protein, 312 aa, Unknown
  Bacterial polypetide isolated from the Sargasso Sea
GEEDKKDIKRLAELDIDWIALSFVNEASDVTQAREVLTQIGSRINLIAKIERLEALNQLFWIIKASDGVMVARGDLALESGPGELTGLQKDIIKQTVKGKRIAITATQMMESMITNPTPTRAEMTDVSNAVLDGTDAVMLSAETAIGNHPVETVKAMHEVCMGAETYQESITKNEEYKFSEINNIDEAIAISSMSIARNMEIKAIVALTESGSTALMLSRYRTNIPIYAFTRNQDTQRRVSLYRGVISYQYPFLVDSMADVIEDVRKELVDSSILKSGDLIVLTSGSPLRVSGGTNSLRLINILKKPERPFR

SEQ ID NO: 128047 - protein, 302 aa, Unknown
  Bacterial polypetide isolated from the Sargasso Sea
MKHKRTKIICTVGPTTATFSSIKKLHEAGMNVARLNMSHSDHKNAKKIIDRIKKLNKTIDNPVGILLDTQGPEIRTGDTSQIVNLEPGQLVSFTIRDEVDVETTSIRVHYDELIQSVNVGTFISLDNGLLNFKVLKKSENELECKVLDGGKLGSKRHVNLPGIRINLPSVTEKDKRDIAFGLKEDVDFIALSFVRNASDIDDLKKFLKNKTKKVKIISKIEDREGLSNIEEICEISDSVMVARGDLGIETDLANLPNIQRKIMSNCAKYGVRSIVATHLLESMIDNPTPTRAEVTDVCKCIY

SEQ ID NO: 128048 - protein, 216 aa, Unknown
  Bacterial polypetide isolated from the Sargasso Sea
FGKPVVVATQMLESMVSNHTPTRAEASDVANAIYDGTDAVMLSAESAIGLFPEESVTIMNRIIKSVETDSNNFNLEITNQESSSTNKKISTTDAITSAAYTIAKNAEAKAIVTFSVSGITTMRMSRERAPVLIIGLSPILETARKLQISWGVYSIHAKQDAQNATEMVSIACKALKNKRLAEAGNSIVITAGVPFGSAGSTNLLRIAEIIDDKDLT

SEQ ID NO: 128049 - protein, 277 aa, Unknown
  Bacterial polypetide isolated from the Sargasso Sea
MEKGVNFPEIALDVPVLTDQDEKDLLLSLQKEADWIALSFVRSPSDYSLISSKIKEAGYKTPVMAKIEKWEAVQNLNSIIESFDAVMVARGDLGVELPVAKVPLVQMDVVEKAHQLGKPVVIATQILDSMTDRPVPTRAEVSDIANSILDGADALMVTGETAIGNHPKKVIKVLKGVIKETESAINYQRNIEMPTSKTSNTAMAISQAACSVATHQNINVLVTMTHSGSTARMAARYRSTARIVAMTPSKKICRQLSIVWGVSPILVDEYESADEIP

SEQ ID NO: 128050 - protein, 293 aa, Unknown
  Bacterial polypetide isolated from the Sargasso Sea
MVKILLLVGNYLPGFKSGGALRSTVNMVERLGDEFEFWIITSDRDIGDTSGYSRVNKNKWNIVGKAKVFYLSPADSTIWNISKIINNTEHDILYLNSFFNPVFTIYPLIARRLNKLPNKPVIVATRGEFAKGALSIKKWKKIIYIMFSNALRLYKKVFWQASSEFEAIDIRRVMKSYSPQVHVAPNIPKYLNLNHLSSDIRVKKNENLLKICFLGRIAPVKNLDYALRVLSKLDLPINFDIYGPKEDKKYWDLCTEIIDLLPKSIDVNYMGPIENEGVNDMFCKYDLFFLPTK

SEQ ID NO: 128051 - protein, 198 aa, Unknown
  Bacterial polypetide isolated from the Sargasso Sea
MITNFSPTRAEASDVANAIYDGTDAVMLSGESAVGKYPIETVKVMNSIIESVENDKDNFDLVIDEMRIAKKVDNTDAITNAAYYIAKNAEAKAIITFSVSGKTTIRMAKERAPVQIIGLSPNLSTARYLQLVWGVNSCHGEDAQSASEMVKIACSIAKEKKLVEKDDNVIITAGVPFGNAGSTNLLRIAKIIEDKNLT

SEQ ID NO: 128052 - protein, 222 aa, Unknown
  Bacterial polypetide isolated from the Sargasso Sea
KIKEAGYNTPVMAKIEKWEAVQNLNSIIESFDAVMVARGDLGVELPVARVPLVQMDVVEKAHQLGKPVVIATQILDSMTDRPVPTRAEVSDIANSILDGADALMVTGETAIGNHPKKVIRVLKGVIKETESAINYQRNIEMPTSKTSNTAMAISQAACSVATHQNINVLVTMTHSGSTARMAARYRSAARIVAMTPSKKICRQLSIVWGVSPILVDEYESAD

SEQ ID NO: 128053 - protein, 188 aa, Unknown
  Bacterial polypetide isolated from the Sargasso Sea
MKRNRKAKILATLGPASSDKKIIEDLFVGGCDVFRLNFSHGNLETHRKNYETIRSLEEKHNHASCILADLQGPKLRVGTFKNTKENLVKGQNFVLDLSTAPGDNNRVNFPHEEIYDYLTPNSILLINDGRIRLQVIEQKKDSLITEVLNDSEISNNKGVNIPDVILPIDALTKKDKSDLMKALDMGVD

SEQ ID NO: 128054 - protein, 61 aa, Unknown
  Bacterial polypetide isolated from the Sargasso Sea
MRRTKIVATVGPASQSQDMIGRLLGAGVDVFRLNFSHGAQADHAQVAQHIRRQAGHHGRYV

SEQ ID NO: 128055 - protein, 224 aa, Unknown
  Bacterial polypetide isolated from the Sargasso Sea
NIISRCRDFGKPVVVATQMLESMVSNHTPTRAEASDVANAIYDGTDAVMLSAESAIGLFPEESVTIMNRIIKSVETDSNNFNLEIKNQENSSMNKKISTTDAITSAAYTIAKNAEAKAIVTFSVSGITTMRMSRERAPVLIIGLSPILETARKLQISWGVYSIHTKQDAQNATEMVSIACKALKNKRLAEAGNSIVITAGVPFGSAGSTNLLRIAEIIDDKDLT

SEQ ID NO: 128056 - protein, 252 aa, Unknown
  Bacterial polypetide isolated from the Sargasso Sea
EGSLLCKTIIPGIVENRKGVNFPGVALDIPTLTDQDKEDLKLSLKNGADWIALSFVRSAEDFNIVRSKIKKLGYNVPIMAKIEKWEAVKSMEKIIETFDAVMVARGDLGVEVPGEKVPIIQKKIIEKAGQAGKPAVIATQLLDSMIERPVPTRAEISDIANSILDGADALMVTGETAIGNHPIKVIKVLIKVMNETESSIDYKNYFISKDHKILNTAKAISHAACSVAQDQGINTLVTMTHSGSTARMVARY

SEQ ID NO: 128057 - protein, 192 aa, Unknown
  Bacterial polypetide isolated from the Sargasso Sea
MKYSINNFIKNRPKTKIVCTIGPSTGEIEILKKLIKEGMSVARLNLSHGETKEHIRYVENCRKSAEELKVPLGILIDIPGPKYRVGKLPNNSISLKKGQKIILGSVNEIENGIAKKIKVWPEGLKKDLNKIKIIFLDDGAIKLNVQKTKGKEIFCTVNNAALLKSNKSVTIPGFISKLDYFTEETVKGLKLA

SEQ ID NO: 128058 - protein, 231 aa, Unknown
  Bacterial polypetide isolated from the Sargasso Sea
DAVMVARGDLGIETSLADLPNVQRRIMYACSKWGRRSIVATHLLESMIEKPTPTRAEVTDVANTIYEGADAIMLSGETSIGKYPVECIKFLKSIADRSEKFRTLGYEEKLQLNGDWEYLAKTARDLAESIDADGIIVITRSGYTANLVSNAKPFNVPIYAFTNDKRVHRQLSLVGSVLSIYQRSIVDNKNNMSKIANTLKKVFSKKKKLKFVLISGMFSEKHSDAIRVVNF

SEQ ID NO: 128059 - protein, 74 aa, Unknown
  Bacterial polypetide isolated from the Sargasso Sea
MISRKTKIIATIGPSSSTVAKLVKMIDAGMNVARVNMSHHTNDEEVEKIVENIRLASKKSNETVSVLFDICGPK

SEQ ID NO: 128060 - protein, 264 aa, Unknown
  Bacterial polypetide isolated from the Sargasso Sea
IEFNNITKGAKILIDDGKIQLEATQIISKNSIECKTLIGGEVLERKGVNFPGILIDTPSLTQQDISDLTIALEEGADWIALSFVRSEKDILAVHKVMDEIGKRLPIMAKIEKWEALEKLDLIANAFDGIMVARGDLGVEIPAEQVPLAQKRIINLAGALGKPVVIATQLLESMVDSKTPTRAEVSDIANAIYDSADALMVTGETAIGKNPVDVIKTLKLVIIETERSVDSNRLPLPEDINKIPDAISHAVSQIARNLDINLIMT

SEQ ID NO: 128061 - protein, 265 aa, Unknown
  Bacterial polypetide isolated from the Sargasso Sea
MHDDTKVIAKIELKSAVKNLKSIIQESDGVMVARGDLGVQLPLERIPLVQKEILNETNLQGKITITATEMLTSMISSHRPTRAEVSDITNAIIDGTDAVMLSAETSIGENPIEVVSAMAKICSEVDSVSGTKITSSKDILTSDELTNSLSKAAVQVANDSNAKAIVAFTETGKTALLISNHRPDAPIFTFTTVEKTFNQLNLIWGVEQIKIERLETTDEMFAIANQWLTEEMNFLKNDKVVIVAGTPPNKEAATNLIRVMKIGEF

SEQ ID NO: 128062 - protein, 446 aa, Unknown
  Bacterial polypetide isolated from the Sargasso Sea
LILSGVDAFRINCSHTNENQLKSYVRKIRNAERKLKKSIGILIDLQGPKLRLGEIKGDEFLITRGYKVLIVNKNISSKKNEIPIPEKKIFESIKTNHPIFIDDGKIKLKVLKITNNNIEAKVIQGGTLKSKKGINLPKTILKSSALTSIDRANVKKGINLGIDWVALSFIQSQEDIKELRKICKNKVSIMAKIEKPNALKHIKKITEYADGLMIARGDLGVELPIQDVPGWQKRIIREARIQGKPVVVSTQMLESMVSSPTPTRAEVSDVATAVFEGADAVMLSAESAVGDNAQLAVKMMNDIALSAEQNPNYTSILSAQLEETPDSTPDAIATASRTLATELNSSLIVCYTESGSTGIKVSRVRPKQMILTVTPVIQTARKLSLVWGVNCIVQKDANDLEEMIKITKSYSKREKLTKKGEKIVVTAGLPLKKLGTTNLIRVIKVD

SEQ ID NO: 128063 - protein, 469 aa, Unknown
  Bacterial polypetide isolated from the Sargasso Sea
MRRTKIISTFGPSISDPKILKEVCKFSDVIRINLAHGTWDESEEYNHKKNIHLIQEISKDLNKPVGIQVDLRGNKIRISDFKNHFIELENASEIDVIFTKEQKTDNHEIFIDADYCFSKIEVGDKILLDDGLIQLIVNKIDSKNKKLNCIVENGGLLKSNKGFEVENKIIHRSGLGEEDKRDIKKLAELNIDWIALSFVNEASDVTQAREVLAQIGSPINLIAKIERLEALKQLFWIIKASDGVMVARGDLALESGPGELTGLQKDIIKQTVKGKRIAITATQMMESMISNPTPTRAEMTDVSNAVLDGTDAVMLSAETAIGKYPIETVKAMHEVCEGAETYQESITKNEEYKFSEINNIDESIAISSMSIARNMEIKAIVALTESGSTALMLSRYRTNIPIYAFTRNEDTQRRVSLYRGVISYQYPFLVDSMAEVIDDVRKELVGSSILKTGDLIVITSGSPLRVSGG

SEQ ID NO: 128064 - protein, 368 aa, Unknown
  Bacterial polypetide isolated from the Sargasso Sea
MNTNTKIIATVGPSCDNKEVLQSMIDSGVNTFRLNMSHGDEKSKRKLYDLIKSLKTKTGKRPAILTDLAGPKIRIVGLKEELVINENESIIVSNEPHFKEDHLKVTGGIHFSNMLSGAEVLIDDGRIKLEVSEVISKHTLKCKTVIGGEISNRKGVNFPGITLETPSLTEEDIIDLKMALEQGADWIALSFVRCADDVRAVHKVMDEHRKRMPVMAKIEKWESLENLEEITNAFDGIMVARGDLGVETPASKVPLAQKKIVDLASTMGKPVVIATQLLESMIDSKTPTRAEVSDIANAIFDGVDALLVTGETAIGKYPVDVIKILKQVIFETESATKFSDYLLSEKLNKTSDAISHAVCEIATNLNIS

SEQ ID NO: 128065 - protein, 589 aa, Unknown
  Bacterial polypetide isolated from the Sargasso Sea
MGWIKNREHLHEAAVSTVKAISKNKKITSNKGLSQRPPMGNHIIIPSAPRSNKDIKQWRGESDFQAFWHLFHSKTKEPPLTLPARMIFNELEISRVELLGCLEYLGSKENISNFIEAKSLSLNDEKSLNFLSYGANLWLKNAAEFKLSETSKNILNKFNEKYKLDSSLDPIKADLLANIKDQKKFEKISIKFLKKLKLIKESAEDQEDDSELNESPGSNDELNEQDLNLDGDSSEEQKADLKDFKGDIDIDIQDAIDKTDDTSIDEEIEALAYPNNQFNAQHKKDYSIYTTNFDEIIEAKDLITTDESLRLRNQLDNLIKPHLPTIGRLANRLQRLLLAKQHTSWNYNLDEGMLDNARLHRVIANPGYPLSFKQETENNFKDTVVTLLIDNSGSMRGRSISLAAICTDIIGSTLERCQVKTEILGFTTKHWKGGDSKKLWQINGGSSNPGRLNDIRHIIYKSADNSWRRSRKYFGAMLREGLLKENVDGEALAWSHERLTKRPEERKILIVISDGAPVDDSTLSANREDFLDNHLREIISKIENESPIELQAIGIGHDVTKYYKNALTINRAEELGEVLLDELTKLFND

SEQ ID NO: 128066 - protein, 324 aa, Unknown
  Bacterial polypetide isolated from the Sargasso Sea
MWGELRSNQGVAFPDSSLSLATLTDKDKNDIEFGNQLDVDFVAVSFVRDVDDILNVKKLINPNTMVIAKIELKSAVKNLKSIIEESDGVMVARGDLGVQLPLERIPFIQKEILNESNLQGKITITATEMLTSMISSYRPTRAEVSDITNAILDGTDSVMLSAETSIGDNPILSVQAMANICEEVDETSNKNYLNKKDISVSNEITNSLSKAAVQVANDSNAKAIVAFTETGRTPLLLSNHRPDAPIFTFTTIDKTYNQLNLFWGVEQVKINRLETTDEMFSIANKWLKDEMNFKKNDTVVIVAGTPPNKEAATNLIRVMKIGEF

SEQ ID NO: 128067 - protein, 140 aa, Unknown
  Bacterial polypetide isolated from the Sargasso Sea
MARKTKIIATIGPSVNSKELVDEIIDAGANVLRLNFSHGTHEDHKKVVEWARSSNKKIAIMQDIQGPKIRTGKLEQPIHLERDKEIKLSNDIKSKDKEAISINYENLFKDIHEGERVLIDDGQIVLRISKKTKTKFTSII

SEQ ID NO: 128068 - protein, 478 aa, Unknown
  Bacterial polypetide isolated from the Sargasso Sea
MRRTKIISTFGPSIADPKILQDVCEYADVIRINLAHGTWDENEKYNHKRNIQLIQEIAKKLKKPVAILVDLKGNKIRIGDFKNHMIELEHASDINVIFTQEKKTDNHEIFIDADYCFPKIEIGDRILLDDGLIQLTVKSINQKNMALKCQVEKGGLLRSNKGFEVENKIIHRSGLGEEDKKDIKRLAELGIDWIALSFVNEASDVTQAREVLTQIGSRINLIAKIERLEALKQLFWIIKASDGVMVARGDLALESGPGELTGLQKDIIKQTVKGKRIAITATQMMESMISNPTPTRAEMTDVSNAVLDGTDAVMLSAETAIGKHPVETVKAMHEVCMGAETYQESITKNEEYKFSEINNIDEAIAISSMSIARNMEIKAIVALTESGSTALMLSRYRTNIPIYAFTRNEDTQRRVSLYRGVISYQYPFLVDSMADVIEDVRSELIGSSILKAGDLIVLTSGSPLRVSGGTNSLRLINI

SEQ ID NO: 128069 - protein, 239 aa, Unknown
  Bacterial polypetide isolated from the Sargasso Sea
MEGLIRWWVRNPVAANLLMLIVITAGYLGLRDIEKEALPAVQPDIVQVEVIWPGAAPKEVEQQVVQRVEQVLKNVPNVYRVTSDARDSYGSVTVQTFPTVDLNSFLNDVKNAVDSVTAFPRDIENPSVRRLEWRKTMMRVVVAGEIGERALTRLGQRLRNQLANLPYISQVDIAASRREEVTIQLSERDLQNFGLSFSDVANAIRRDSMNVSVGEVRTETGDVQLRAQNLADTQSDLNG

SEQ ID NO: 128070 - protein, 242 aa, Unknown
  Bacterial polypetide isolated from the Sargasso Sea
MKRNRKAKILATLGPASSDKKIIEDLFVAGCDVFRLNFSHGDLETHRKNYETIRSIEEKHNHASCILADLQGPKLRVGTFKNIKENLVKGQNFILDLSTEPGDNNRVNFPHEEIYDFLTPNSTLLLNDGRIRLQVVEQKKDSLITEVLNDAEISNNKGVNIPDVILPIDALTKKDKSDLMKALDMGVDWVALSFVQQEEDIIKLKKIINNKALVMAKIEKPSAVKNIDDIINAADGIMIARR

SEQ ID NO: 128071 - protein, 278 aa, Unknown
  Bacterial polypetide isolated from the Sargasso Sea
MIKNYRKTKILATIGPSSEKITKIEKLISSGVDAFRINCSHTTESQFESYIKNIRKVEKKLKKPIGILIDLQGPKLRIGEIENNIPLKRGQKLLFINSKKSSKSNEVPLPEEKVFKSIKVNHPIFIDDGKIKLKVLKVYKNIIETKVLLEGVLKSKKGINLPETVLKNSALTSKDKKNVKKGIELGVDWIALSFIQSPEDIKDLRKICKKNVSIMAKIEKPTALNHINKITELADGLMIARGDLGVELPIQDVPSWQKRIIREARMQGKTCCCIHTNA

SEQ ID NO: 128072 - protein, 478 aa, Unknown
  Bacterial polypetide isolated from the Sargasso Sea
MRRTKIISTFGPSISDPKILKNVCQYADVIRINLAHGTWDENEKYNHKKNIQLIQETAKKLKKPVAILVDLKGNKIRIGDFKDHMIELEHASDIDIIFTKEKKTNKHEIFIDADYCFPNIEVGDKILLDDGLIQLVVERTNQKNMILHCKVEKGGLLRSNKGFEVENKIIHRSGLGEEDKKDIKRLAELGIDWIALSFVNEASDVTQAREVLTQIGSPINLIAKIERLEALKQLFWIIKASDGVMVARGDLALESGPGELTGLQKDIIKQTVKGKRIAITATQMMESMITNPTPTRAEMTDVSNAVLDGTDAVMLSAETAIGKYPVETVKAMHEVCMGAETYQESITKNEEYKFSEINNIDEAIAISSMSIARNMEIKAIVALTESGSTALMLSRYRTNIPIYAFTRNEDTQRRVSLYRGVISYQYPFLVDSMADVIEDVRSELVGSSILKSGDLIVLTSGSPLRVSGGTNSLRLINI

SEQ ID NO: 128073 - protein, 256 aa, Unknown
  Bacterial polypetide isolated from the Sargasso Sea
MTKYIHAFSDPITDEIDQSLIGNKGYNLCLMHGMDLPIPEGFIITSKATKEFKKKNNFGDEFTKELKGNLNWIQEKANLQVGNPEKPLILSVRSGSVISMPGMLDTILNVGLNQNIVKKLAENKSGFFAYDTWRRFIQMYSHVVHRIDNYDFDEILENYLLGANLSNVSQLDAEDLEEISKMYLNLFNERIGEDFPEDPYQQINDSIIAVLNSWDNERAISYRSINDIPQDIGLAVTIQRMVFGNLNDQSASGVIF

SEQ ID NO: 128074 - protein, 47 aa, Unknown
  Bacterial polypetide isolated from the Sargasso Sea
MKFKRTKIICTIGPSTESFSSIKKLHEAGMNVARLNMSHSNHKNAKK

SEQ ID NO: 128075 - protein, 158 aa, Unknown
  Bacterial polypetide isolated from the Sargasso Sea
MPRRTKIVATLGPATNSQAIIEKLILAGASVFRFNFSHGSAEDHKQRAEMVRAAAANTGAHVAILGDLQGPKIRVSTFKNGSVILEEDQHFVLDADLPKGEGDETQVGIDYKELPADVQPGDVLLLDDGRIQMIVEHVVGQRIHTKVSVAGKLSNNKG

SEQ ID NO: 128076 - protein, 233 aa, Unknown
  Bacterial polypetide isolated from the Sargasso Sea
MKRNRKAKILATLGPASSDKKIIEDLFVAGCDVFRLNFSHGDLETHRKNYEIIRSLEEKHNHASCILADLQGPKLRVGSFKNTKENLVKGQNFILDLSTEPGDNNRVNFPHEEIYDFLTPNSILLVNDGRIRLQVVEQKKDSLITEVLNDAEISNNKGVNIPDIILPIDALTKKDKSDLMKALDMGVDWVALSFVQQAEDIHKLKKIINNKALVMAKIEKPSAVKNIDDIINA

SEQ ID NO: 128077 - protein, 555 aa, Unknown
  Bacterial polypetide isolated from the Sargasso Sea
MTKYIHAFSDPITDEIDQSLIGNKGYNLCLMHGMDLPIPEGFIINANATKEYKIQNNFSDKFFDELKINLDLIQDKTNLQIGNPEKPLILSVRSGSMISMPGMLDTILNVGLNHEIVKTLAKNNNGFFAYDTWRRFIQMYSHVVHRVDTYDFDEILENYLLGANLNAVSQLDAEDLEEICKMYLDLFRERVGKDFPEDPYDQINKSIIAVLNSWDNERAISYRNINDIPDNIGLAVTIQRMVFGNLNDKSASGVIFSRNPDTGEDKIKGEYLIESQGEDVVSGFVTPKNISEKANDEAFINIFPDIYSQINIISKDLERYFGFVQDIEFTIESNILWVLQSRDAELNAQASFKVLSDFVNEKIINQTEALKLIKDAHIEKAFVPILDDSQKLKSLTKGLPASPGVVSGLVAFDIEGINRIKNRDEKSILILIETNTNDIKAMHASDGILTSRGGLTSHAAVVARGLNKPCITGAIEIEINPKDKNISINDKVISEFDTITLDGHSGEVFEGIAKTKLQEPTSDLKEILDWCKEIVSDEEIIDPLKIISKAKLKLE

SEQ ID NO: 128078 - protein, 478 aa, Unknown
  Bacterial polypetide isolated from the Sargasso Sea
MRRTKIISTFGPSISDPKILKEVCKFSDVIRINLAHGTWDEGEEYNHKKNIQLIQEISKDLNKPVGIQVDLRGNKIRIGDFKNHFIELENASEIDVIFTKEQKTDNHEIFIDADYCFSKIEVGDKILLDDGLIQLIVNKVDSANMKLNCIVENGGLLKANKGFEVENKIIHRSGLGEEDKRDIERLAELNIDWIALSFVNEASDVTQAREVLTQIGCSINLIAKIERLEALKQLFWIIKASDGVMVARGDLALESGPGELTGLQKDIIKQTVKGKRIAITATQMMESMISNPTPTRAEMTDVSNAVLDGTDAVMLSAETAIGKYPIETVEAMHEVCEGAETYQESITKNEEYKFSEINNIDESIAISSMSIARNMEIKAIVALTESGSTALMLSRYRTNIPIYAFTRNEDTQRRVSLYRGVISYSYPFLVDSMAEVIEDVRKELVGSSILKTGDLIVITSGSPLRVSGGTNSLRLIHI

SEQ ID NO: 128079 - protein, 131 aa, Unknown
  Bacterial polypetide isolated from the Sargasso Sea
MKRNRKAKILATLGPSSSDKKTIEELFRAGCDVFRLNFSHGDIEVHRKNYEFIRSLEDKYNHATCVLADLQGPKLRVGLFKNTKENLVKGEKFILDLSSDPGDNKRVNFPHAEIYEFLTPNSILLVNDGRI

SEQ ID NO: 128080 - protein, 377 aa, Unknown
  Bacterial polypetide isolated from the Sargasso Sea
TSELSTMQKMYAAGMNVVRINMSHASHDEALNVIKNVKLINKNPDIKKGPISILIDTQGPEIRTGDRDTSLDLKLGDKVNLTVRDEVDVETSSIKINYRGLINSVKKGSKISVDNGLVNFKVLEKHDDKLLCRVIDGGKIGSKRSVNLPGVRIDLPSITKKDKADINFAIKHDVDYIALSFVRKIEDIHSLRKILKRKKSQIKIVSKIEDNEGLSNIHAITQESDAVMVARGDLGIETSLADLPNVQRRIMYACSKWGRRSIVATHLLESMIEKPTPTRAEVTDVANTIYEGADAIMLSGETSIGKYPTECIKFLKSIADRSEKFRTLGYEEKLQLSGDWEYLAKTARDLAESINADGIIVITRSGYTANLVSNAKP

SEQ ID NO: 128081 - protein, 128 aa, Unknown
  Bacterial polypetide isolated from the Sargasso Sea
MGLSRGNRHGSYVDLSKEATSGGQTSILDNVGVRTDGSFKSKIICTLGPVSRTVEILEQMLRAGMSIARFNFSHGSHEYHQETLDNLRTACANTGIQCGVLLDTKGPEIRTGMLACGGPVMLEAGNEV

SEQ ID NO: 128082 - protein, 258 aa, Unknown
  Bacterial polypetide isolated from the Sargasso Sea
MIAKIERLEALKQLFWIIKASDGVMVARGDLALESGPGELTGLQKDIIKQTVKGKRIAITATQMMESMISNPTPTRAEMTDVSNAVLDGTDAVMLSAETAIGKYPIETVEAMHEVCEGAETYQESITKNEEYKFSEINNIDESIAISSMSIARNMEIKAIVALTESGSTALMLSRYRTNIPIYAFTRNEDTQRRVSLYRGVISYQYPFLVDSMAEVIEDVRKELVGSSILKTGDLIVITSGSPLRVSGGTNSLRLIHI

SEQ ID NO: 128083 - protein, 327 aa, Unknown
  Bacterial polypetide isolated from the Sargasso Sea
DVEIGGELRSNQGVAFPDSNLSVSTLTKKDIEDLEFGNQLGVDFVAVSFVRNAEDIINVKKYIDDDTKVIAKIELKSAVKNLKSIIQESDGVMVARGDLGVQLPLERIPLVQKEILNETNLQGKITITATEMLTSMISSHRPTRAEVSDITNAILDGTDAVMLSAETSIGENPIEVVSAMAKICSEVDSVSGTKITSSKDILTSDELTNSLSKAAVQVANDSNAKAIVAFTETGKTALLISNHRPDAPIFTFTTVEKTFNQLNLIWGVQQIKIERLETTDEMFAIANQWLTEEMNFLKNDKVVIVAGTPPNKEAATNLIRVMKIGEF

SEQ ID NO: 128084 - protein, 408 aa, Unknown
  Bacterial polypetide isolated from the Sargasso Sea
MNTNTKIIATVGPSCDKKEVLQSMINSGVDTFRLNMSHGDMASKRKLYDLVKSLKPKNGVRPAILTDLAGPKIRIVGLKEELIINENESIIISNEPGFKENHLEVSGGIHFSSVLSGAEVLIDDGRIKLEVSEVISKHTLKCKTVIGGEISNKKGVNFPGVTLNTPSLTQEDIIDLKMALDQGADWIALSFVCKANNILDVHSVMDEHGKRIPVMAKIEKWESLENLEEIINAFDGVMVARGDLGVETPASKVPLAQKKIVDLASTIGKPVVIATQLLESMIDSKVPTRAEVSDIANAIFDGVDALLVTGETAIGKYPVDVIKILKQVIFETESATKFSNALPPKKLNKTADAISHAVCEISTNLDINTIMTMTHSGSTARMISNYRPKATIFALTPFDEIVRQLQLI

SEQ ID NO: 128085 - protein, 276 aa, Unknown
  Bacterial polypetide isolated from the Sargasso Sea
FVRKPEDVLELRRLLARKKSRAGIVAKIEDQEGVTNVNRIAALSDGVMVARGDLGIETDIADLPNVQRRIVHACAEQGVRSIVATHLLESMIDNPIPTRAEVTDVANAIYEGVDAIMLSGETSVGKFPIKCVEQLNKIAQRTERFPGLGYERSLKLEHEKQHVAVHAVALAESLEAKGIVVITRHGLTADFVTSARPHKVPIFAFTNQEKTLRKLALNRAVSPYRIPFSADSEKMLARAFKMLANEAHMELNSKLVVVSDVLVNQPTEAIQVRTFA

SEQ ID NO: 128086 - protein, 468 aa, Unknown
  Bacterial polypetide isolated from the Sargasso Sea
MNRTKIIATVGPACANKKILQKLISHGVSCFRINLSHGSALDKASYFDLIRSLEMPSGLRPTILADLAGPKIRVKDLEAPILVKKGDKIELSNEKIEDGTIPVSSGVRFQKVNPGAQILIDDGRVSLKVLEYVTDQTLSCEALEDGTIENGKGVNFPEIALDVPVLTDQDEKDLLLSLQKEADWIALSFVRSPSDYSLISSKIKEAGYKTPVMAKIEKWEAVQNLNSIIESFDAVMVARGDLGVELPVAKVPLVQMDVVEKAHQLGKPVVIATQILDSMTDRPVPTRAEVSDIANSILDGADALMVTGETAIGNHPKKVIRVLKGVIEETESAINYQRNIEMPTSKTTNTAMAISQAACSVATHQNIEVLVTMTHSGSTARMAARHRSVARIVAMTPSKKICRQLSIVWGVSPILVDEYESADEIPIVANKVLKDNGLLKEGEKFVITGGVPVGVPGTTNYLSVLKLN

SEQ ID NO: 128087 - protein, 104 aa, Unknown
  Bacterial polypetide isolated from the Sargasso Sea
MAFIRTKIICTIGPQSSNKTTLSRLHSAGMNVARINMSHATHKNAKEIIDIIKSINETKNSKSSNIGILLDTQGPEIRTGDTSLPINLKVGDKVTLTVRDEVDV

SEQ ID NO: 128088 - protein, 325 aa, Unknown
  Bacterial polypetide isolated from the Sargasso Sea
GKLKPYQGVNKKGGGLSLSGITQKDKTDLKKSLSLEYDYVAVSFVKDNKDLNDIRKIVKDKDIKIIAKIERNEAIKNIDKITKAADGLLVARGDLGVEIGIEQLPATQKFLIRKAISFDKIVIVATQMMESMITNRVPTRAEVFDVANAVTSGVDAIMFSAETAIGKHPSEVISEASRICIESEGAYVRPLSVDRVVPKTLPVDQVIALSAVYSAKLTKVVAIAALTETGSTALWMSRVQSNIPIYAMTQNNKTSRRICLYKGVQSIKLDKLEENHAQANMQVISLMRKIGTVKKGDLVIITKGDLLGTSGGTNAMKVVEVGNMI

SEQ ID NO: 128089 - protein, 400 aa, Unknown
  Bacterial polypetide isolated from the Sargasso Sea
QGPKLRIGKIENNMPLKRGQKLLLINNKKNSKPNEVPLPEEKVFKSVKVNHPIFIDDGKIKLKVLKVSKNIIETKVILEGVLKSKKGINLPETVLKNSALTSADKKNVKKGIELGVDWIALSFIQSPEDIKELRKICKKNVSIMAKIEKPTALNHINKITELADGLMIARGDLGVELPIQDVPSWQKRIIREARMQGKPVVVSTQMLESMITSKTPTRAEVSDVATAVFEGADAVMLSAESAIGDNPELAVKMMDKIAHSVEKNPNYSSILLAQLEETPDSTPDAIATASRTLATELNSPIIVCYTESGSTGIKVSRVRPKQMILTVTPIVETARKLTLVWGVKCIVQKDANNLEEMIKMTKAYSKREKIIKKGEKMVITAGLPLKKLGTTNLIRVIKLD

SEQ ID NO: 128090 - protein, 315 aa, Unknown
  Bacterial polypetide isolated from the Sargasso Sea
AINSGVNVFRINFSHGTLDEHKQFIDWARSSKNQVAIMQDIQGPKIRTGQVNKNTVLQKSQEINLTNKEVESSDEIIFINYKNLYEDISVNDRVFIDDGQIILKITEKQKNKLKALILIGGELRDNQGVAFPDSKLSVPAITEQDIEHLKFGTEQDVDFVAVSFVRNSDDIQAVREIIPKDIKIIAKIELKTALENIDEILNVADGVMVARGDLGVQLPIEKVPFVQKQILDAANRKGKISITATEMLQSMKSSYRPTRAEVTDITNAILEGSDAVMLSAETSIGDHPNRVIEVMSNICKEVDSRNDTSSLLSKE

SEQ ID NO: 128091 - protein, 261 aa, Unknown
  Bacterial polypetide isolated from the Sargasso Sea
MRRYRNTKIVATLGPSSRTKRQIRSMIKAGVDVFRLNFSHGSHEDHRSRFNAIRQLEKELDWPVAIMADLQGPKLRIGVFENDEIELNVGSSFVLDLEEAAGSGRRVQLPHQEIFDAAVVGMDLLLDDGKIRLRVQNATESSIETKVITGGTLSNRKGVNVPGVTLGLSSLSEKDRKDLEFALSLGFDWIALSFVQRPKDVAEARELINGRAFVLIKLEKPAAIEHLDELVKMSDAVMVARGDLGVELPPEKVPGIQKRIV

SEQ ID NO: 128092 - protein, 151 aa, Unknown
  Bacterial polypetide isolated from the Sargasso Sea
MSNIDLNRRTKIVATIGPATQSEEIISNLIKAGVTTFRLNFSHGDHKDHAERIKTIREVSKKLDIDIGILQDLQGPKIRLGRFKDGPVKVKKGDKFILTSNEVDCTNTIANVTYDKLSQEVSEGKRILLDDGKIEMIVEKVIQKLIIWSAW

SEQ ID NO: 128093 - protein, 89 aa, Unknown
  Bacterial polypetide isolated from the Sargasso Sea
MSKNKATKIIATIGPASNHENILLSMVKKGVNAFRLNFSHGDLSAHLHSIEIIRAIEKKLKLSLPIIGDLQGPKFRIGNLTDDIDLKKR

SEQ ID NO: 128094 - protein, 83 aa, Unknown
  Bacterial polypetide isolated from the Sargasso Sea
MSNIDLKRRTKIVATIGPATQSEEIITDLIKAGVTTFRLNFSHGDHKDHAERIKTIREVSKMLDIDIGILQDLQGPKIRLGRF

SEQ ID NO: 128095 - protein, 294 aa, Unknown
  Bacterial polypetide isolated from the Sargasso Sea
MSVDWVALSFVQQPEDILKLKKIIDNKALIMAKMKKPSAVKNIDEIIKVSDGIMIARGDLGVEMQTEKVPIVQKNIIKRCRYFGKPVVVATQMLESMVNNLVPTRAEASDVANAIYDGTDAVMLSGESAVGKHPLEAVKVMNNIIENVEMDKNNFDLDSNNNESKSKTDNTDAITSAAYSIAKNADAKAIITFSVSGKTTMRMAKERAPVQIIGLSPYLKTSRKMQLVWGVNSCHSDDAQSATEMVKIACVIAKDKGLVKPDDNVIITAGVPFGNAGSTNLLRLAKIIADKDLI

SEQ ID NO: 128096 - protein, 142 aa, Unknown
  Bacterial polypetide isolated from the Sargasso Sea
MKRALKIDVMRRFRNGKIVATLGPATSDTAAISALFEAGADVFRMNFSHGGHEDHAARIGIIRELETHFQRPIGIVADLQGPKLRVGEFTDGVVQLEAGDAFRLDLEEALGDARRASLPHPEVFRALQPGMRLLMDDGRIHS

SEQ ID NO: 128097 - protein, 237 aa, Unknown
  Bacterial polypetide isolated from the Sargasso Sea
MLRRTKIVATLGPATDRDNNLEKIIRAGANVVRLNFSHGVAQDHKDRAQAVRDIAKRLNKHIAILADLQGPKIRVSTFKEGKVTLEVGAKFILDAKMEKGQGDVNAVGIDYKELPQDVSPNDLLLLNDGLIQLTVDKVVDHLVHCTVTVGGVLSNNKGINRLGGGLTAPAFTDKDKEDLITAAEIDVDYIAVSFPRSGDDMRYVRSLAEAAGSKAQLLAKIERAEAVETQEAIDDIV

SEQ ID NO: 128098 - protein, 168 aa, Unknown
  Bacterial polypetide isolated from the Sargasso Sea
MISSVHAGDKITVDNGLINLEVLEKQERIMRCRVLDGGVLKSKSHVNLTGVRLNLPAITQKDRRDILFGIKHDVDFIALSFVWESAEVLQLKKLLGDKVGKIEIIAKIEDQEGVTNIEKIISEADGIMVARGDLGIEIPINSVPTVQRKIVRSCFRTGKKSNYSHTFT

SEQ ID NO: 128099 - protein, 238 aa, Unknown
  Bacterial polypetide isolated from the Sargasso Sea
MTILDLARRTKIVATIGPATESASQITKLVEAGATTFRLNFSHGDHEEHAQRIKTIRKVSDDLGIHIGILQDLQGPKIRLGRFKNGPVNVKNGDRFVLTSKNIECNQEQANVTYDKLAEEVTAGNRILLDDGRVEMKVIEVDLKEQKLICSITVGGVLSNNKGVNFPDVQLSIRALTEKDKKDLAFGLKEGVDWVALSFVRNPSDLIEIKDLIRNHGFDTPVVAKIEKFEAIDQIDAV

SEQ ID NO: 128100 - protein, 267 aa, Unknown
  Bacterial polypetide isolated from the Sargasso Sea
GVDAFRINFSHNTNGINKIISRIRRLEKKNGKKLSLIADLQGVKLRIGKVKNENQQIKFNQKFVFDNKKLPGDSQRVNFPYPKIIKKLKKGNKILIDDGKYLFSVIGKKGNSVITKCQSQNCIIKSNKSFHVPNLDITFNKLTVKDKRDIKTAVKLGCNWIALSYLQNEKLILETRKLIKKDIGIISKIENKHALKNIKKILQSTDSIMIARGDLAIDIGHSEVPKVQLSLIKKCSQFSKSVIVATQMLESMIENNTATRAEINDIA

SEQ ID NO: 128101 - protein, 277 aa, Unknown
  Bacterial polypetide isolated from the Sargasso Sea
SFVNDASDVNQAREVLSQEDSDIKLIAKIERLEALKQLYWIIKASDGIMVARGDLALQSGPGELTGLQKNIIKQTVKGKKVAITATQMMESMIDNPSPTRAEMTDVSNAVLDGSDAVMLSAETAIGSYPVETIEAMHEVCLGAERYQQSISKKEEFKYSEVQNIDEAIALSSMSIAKNMDIKAIVALTESGSTALMLSRTRSDIPIYAFTRNKITQRRVSLFRGVLPFSYPFLAESLDQVLDDIRKELLGSDMLNSGDLIIVTSRFTLEGSGRNKLT

SEQ ID NO: 128102 - protein, 281 aa, Unknown
  Bacterial polypetide isolated from the Sargasso Sea
ALSFVQRPDDVAQARKLIAGRAAVMAKLEKPMALNSLEKIVSLCDAIMVARGDLGVEMPAEEVPIQQKRIISACRSAGKPVIVATQMLDSMVHAPTPTRAEASDVATAIYDGADAVMLSAETAVGEYATEAVAMMDRIIARVEKDPIYGQQMDATRLPPEATAADAITTAARQVSHTISAAIIVTFTSTGSTTLRASRERPLVPILGLTPRAETARRLVLAWGVHAVETEDLHTFGDMVITAIRVAKSEKIADVGDAMAITAGVPFGTPGATNILRIAWVE

SEQ ID NO: 128103 - protein, 262 aa, Unknown
  Bacterial polypetide isolated from the Sargasso Sea
MRLALEKGADWIALSFVRLPSDFECIIRIIKEMGYTAPIIAKIEQWEAVENLNSIIEIFDAVMVARGDLGVEMPIEKVPLIQNEVVRIARSLGKPVIIATQILDSMTTRPIPTRAEVSDIANSILDGADALMVTGETAIGNHPNKVIKVLKKVIKETERSRSSSQNYNESENENQIGTSQAISHAACSVARDQRINVLVTMTHTGSTARMASRYRPTAKIIAMTPFKKTCRQLLIVWGVHPILVSEYMSSDDIPNIVDNEVS

SEQ ID NO: 128104 - protein, 270 aa, Unknown
  Bacterial polypetide isolated from the Sargasso Sea
MKRNRKAKILATLGPASSSSDIIENLFKEGCDVFRLNFSHGSVETHRKNLEYIRNLEEKYDHATCILADLQGPKLRVGEFKKTEESLKKGQKFTLDTNSALGDDKRVNFPHSEIYDHLTPNSTLLINDGRIRLQVIEQHKDQLITEVLNDGIISNNKGVNIPDVILPIESMTNKDRSDLQKALEMNVDWVALSFVQQADDIIKLKKIVEGKALIMAKIEKPSAVKNIDEIIKVADGIMIARGDLGVEMPTEKVPIVQKILLKDAVIMENQ

SEQ ID NO: 128105 - protein, 271 aa, Unknown
  Bacterial polypetide isolated from the Sargasso Sea
LEENVDVVALSFLRNRDTVLEVREMFRERGEQIKLIAKIENQEGVDNLEEIIQVTDGIMVARGDLGIEIDMEELPQIQRKIAYLCAKYGKRLIVATQMLESMMENPVPTRAEITDIANAVFEQSDAIMLSGETSTGKYPVRCVETLVRIARRTEVHPGVQFTENLIQEDGPEENQGKGRQMLAAAATKIARQLKVPGMLVITRKGRGATKMANLRVRGIPIFAFTESEKTISTLMLLRGVYPYLLKFDEDPELTIQNALRLLKKKQDMPSG

SEQ ID NO: 128106 - protein, 231 aa, Unknown
  Bacterial polypetide isolated from the Sargasso Sea
MPEEVPPIQKHIIEKTRALGKPVVVATQMLESMITSPSPTRAEVSDVANAVYDGADAVMLSAETAAGQWPVEAVTIMDRIAAKVESDTTYRERIHLTRTPPDATSADALSEACAQIADTLTIEGIVVFTGSGGSARRVARERPAAPMLVLTPSQPTARRIALLWGAHAVVTRDIGSFEEMIAKGKRMALRHGFGAAGSRLVALAGVPFGVPGSTNLLHIVTLTGNELDTPK

SEQ ID NO: 128107 - protein, 143 aa, Unknown
  Bacterial polypetide isolated from the Sargasso Sea
MSNIDLKRRTKIVATIGPATQSEEIITDLIKAGVTTFRLNFSHGDHKDHAERIKTIREVSRKLDIDIGILQDLQGPKIRLGRFKDGPVKVKKGDKFTLTSNDVECTSTIASVTYEKLSQEVSEGKRILLDDGKIEMIVEKVDI

SEQ ID NO: 128108 - protein, 232 aa, Unknown
  Bacterial polypetide isolated from the Sargasso Sea
MIARGDLGVELPPQELPAIQKRIILKSRKIGKPVIVATQMLESMIELPMPTRAEASDVAGAVFEGADAIMLSAETAIGKNPVKSVKMMSSIAKSAENHIKQFPGDGPTNLQIENSTYHAVAQSTVNLAEMINASLIIAFTASGNTALRIARERPQMPIYAISPSTSVNRKLKLVWGTVSSFQEEIEYNQAIVKTIDKVFKEKFVKKGDNVIIVSGLPFGLIGSTNTIRVAKI

SEQ ID NO: 128109 - protein, 272 aa, Unknown
  Bacterial polypetide isolated from the Sargasso Sea
HKKNKSDLNKALEMGVDWVALSFIQSAEDINNLKKLVGNKASIMAKIEKPSAVKNIDSIIEASDGLMIARGDLGVEMPAEQIPVIQKNIISRCRDFGKPVVVATQMLESMVSNHTPTRAEASDVANAIYDGTDAVMLSAESAIGMFPEESVTIMNRIIKSVETDSNNFNLEIKNQENSSTNKRISTTDAITSAAYTIAKNAEARAIVTFSVSGITTMRMSRERAPVLIIGLSPILETARKLQISWGVYSIHAKQDAQNATEMVSIACKALKK

SEQ ID NO: 128110 - protein, 216 aa, Unknown
  Bacterial polypetide isolated from the Sargasso Sea
RCRHFGKPVVVATQMLESMIENLVPTRAEASDVANAIYDGADAVMLSGESAVGVHPIEVVITMNKIIENVENDKNNYDLRIIQENVDDVNNTDAITLAAYSIAKKSDAKAIITFSVSGRTTTRMARERAPVQIVGLSPNINTTRKMQLYWGVNSCHTQEDAQNAQDMVNIACSIAKNKKLVKPGDNVVISAGVPFGSAGTTNLLRLAEIIADKDLK

SEQ ID NO: 128111 - protein, 250 aa, Unknown
  Bacterial polypetide isolated from the Sargasso Sea
MGQFDQDRRTKIVATIGPATESSERIKELVQAGATTFRLNFSHGDHSEHAARISTIRQVSEELGINIGILQDLQGPKIRLGRFAEGPITLANGDSFSLTSRPVSCNQSIATVTYDKLADEVTAGSRILLDDGRVEMKVEQVNQAEQTLHCTVTVGGVLSNNKGVNFPDVQLSVRALTDKDKVDLEFGLSQGVDWVALSFVRNPSDMEEIRGLIREHGHETPVVAKIEKFEAIDQIDAILPLCDGVMVARG

SEQ ID NO: 128112 - protein, 233 aa, Unknown
  Bacterial polypetide isolated from the Sargasso Sea
RGDLGVEMPTEQVPTAQKNIIKRCRHYGKPVVVATQMLESMISNLVPTRAEASDVANAIYDGTDAVMLSGESAMGDYPIESVATMDRIIENVEKDKNNFNLEIENEENIKKIDNTDAITNAAYSIAKNAGAKAIITFSVSGKTTLRMARERAPVQIIGLSPNIKTSRKMQIVWGVNSCHSVEDAENTTEMVKIACRVAKNKKLVNADDNVIITAGVPFGNAGSTNLLRIAKII

SEQ ID NO: 128113 - protein, 304 aa, Unknown
  Bacterial polypetide isolated from the Sargasso Sea
MLPHQEIFEVLKVGSVILVDDGKIKLEVIEAARDQINTKVLVGGKISNKKGVNIPDVILPFSALSTKDRKDLEYVCNLGVDWIGLSFIQRFEDILEAKKLIKGRASILAKIEKPAAVETFDKILQEADAIMVARGDLGVELPIYSLPPIQKKLIKLCRKAGKPVVVATQMLESMIESPSPTRAEVSDVAQAIYEGADAVMLSAESAAGKHPIKAVEMMNSVAVEIENDDSFRQIIETSRPIMGTDTSNAITVAAREVSERTDVKAICCFTHSGTTAILTSRERPKIPIIALTPELSIARELALN

SEQ ID NO: 128114 - protein, 257 aa, Unknown
  Bacterial polypetide isolated from the Sargasso Sea
MRRQRNIKIVATLGPSSSDYDTIKDLHLAGADVFRLNMSHGTHDEIAKRHKIIRQIEDELSSPIAILADLQGPKLRVGPFKNGIEELTENEKFRLDLKDKLGTKDRVQLPHPEIFQALHEGAHLLINDGKIKLMVEKCGPDFADCLVLNGGEISDRKGVNVPDVILPLAALSEKDRADLDFICDLGIDWLALSFVQRAEDIVDARNLIAGRASVISKIEKPSAVKSFDEILKVSDGVMVARGDLGVELPVQNVPPIQ

SEQ ID NO: 128115 - protein, 283 aa, Unknown
  Bacterial polypetide isolated from the Sargasso Sea
KINGKKLSLIADLQGVKLRIGKVKNENQQIKFNQRFIFDSKKIPGDSKRVNFPHPKIIKKLKKGNKILIDDGKYLFTVISKKGNAIITKCRSQNCILKSNKSFHIPNLDVAFNKLTGKDKKDIKTAIKLGCNWIALSYLQNEKLILETRRLIKKDMGIISKIENKHALKNIKKIIQATDSIMIARGDLAIEIGHSEVPKVQLSLIKKSSQFSKSVIVATQMLESMIKNSTATRAEINDIATAIFQGADTLMLSAETAIGKFTTQTISTMTQTIQSTEKYKREH

SEQ ID NO: 128116 - protein, 268 aa, Unknown
  Bacterial polypetide isolated from the Sargasso Sea
SHGQAEDHIERAKRVREAAKNLGKYVAILGDLQGPKIRVARFAEGAVRLEVGAKFILDAELGRDEGDINQVGIDYKALPDDVSAGDILLLDDGRIQLRVTGVEGRKVITEVTVGGKLSNNKGINRQGGGLSADALTEKDKEDIKTAAKIGVDYLAVSFPRSGADLNYARELAEAAGCYAKICAKVERAETVASDEAMDDIIVASDAVMVARGDLGVEIGDAELVGVQKKLIARSRQLNKVVITATQMMESMIDSPMPTRAEVMDVANA

SEQ ID NO: 128117 - protein, 291 aa, Unknown
  Bacterial polypetide isolated from the Sargasso Sea
VRLGCNWIALSYLQNEKLIYQTRKLIKKDIGIISKIENKHALRNINEIIKATDIVMIARGDLAIDIGHSEVPKVQLSLIKKCSQSSKSVIVATQMLESMIENSTATRAEINDIATAIFQGADTVMLSAETAVGKFPAQAVSTMLRTIVSTEKYKREHIEDFKNSIVTNKDPVKSILLSVKDMAYNPNVKAIIVFSNSGKSAKLVSAMRPAANIVTISPNINVCRQVSLLWGVRSVNSRDANGWKNMMSISKEIIKKLKFVKKNDFVVITAGLPFGKAGMTNMIRLYKVGSK

SEQ ID NO: 128118 - protein, 233 aa, Unknown
  Bacterial polypetide isolated from the Sargasso Sea
YKDLFKDLNSGERIFIDDGQIVIRIIKKTKSSMLGQIEIGGELRSNQGVAFPDSKLSVSAITEKDIADLKFGNKLDVDIVAVSFVRDANDIKKVREIVDKNIKIIAKIELKNAVKNLDSIIDEADGVMVARGDLGVQLDLEKVPFIQKQILNEANAKGKITVTATEMLQSMKESHRPTRAEVTDITNAILEGTDCVMLSAETAIGNHPEVVVSAMSDICKEADSRNDTSVLRV

SEQ ID NO: 128119 - protein, 285 aa, Unknown
  Bacterial polypetide isolated from the Sargasso Sea
NGADWIALSFTRSQNDYDLVKSKINKLGFNTPVMAKIEKWEAVKNLDSIVQAFDGVMVARGDLGVELPLEQVPVIQKSIIKKAKLYGKPVVIATQMLDSMIENPTPTRAEVSDIANSILDGADALMVTGETAMGKYPTDVIDVLSDVIKETEKSLKFYSRTIGKDTVDSISGAISHAACTIAKDLDLKSIVTMTQSGGTARMVSSFRPSANVYAMTTLKSTFRSLSIIWGVIPVLVNQYNSADEMPELAKQKLLDMKVLNKEEKFIITGGVPVNVPGTTNYISIL

SEQ ID NO: 128120 - protein, 250 aa, Unknown
  Bacterial polypetide isolated from the Sargasso Sea
MKKQLHRNRKVKIVATLGPASDTKLEIRRMFLAGADIFRLNMSHGDHSAVERRHNILRDLEKEFSRPICILADLQGPKLRCGDFKGAKSTLEAGQKFCFDLIERLGNKERVCLPHPKIFQSVKKGDKLLIDDGKVAMQVSKASEKRIECTVLNDGIISNKKGVNCPDSILDLAPLTEKDKQDLEFVCGLGVDWIGLSFVQRAKDVENVKKLLRGRAGIIAKIEKPAAVRVFDSIIDSADGIMVARGDLGV

SEQ ID NO: 128121 - protein, 261 aa, Unknown
  Bacterial polypetide isolated from the Sargasso Sea
TQIIAEVIQGGEVKSNKGFNLPNTKISLSPLTDKDVKDVILAIKENVDWIALSFVRKRSDIESLVKIINKKSEYSIPVIAKIEKPEALKNIDEIIKVSSGLMVARGDLGVELQSSEIPLIQKKLVAKAKKSRIPVIIATQMMESMMESVTPSRAEVNDVANSVMDGADAVMLSGETSVGKFPTEVIKTMSSIINKVENSNLISLANKRPKDQKSKRYITKSICFSAAKMANDIKAKAISTLTNSGYTAFQISSWRPSTHVL

SEQ ID NO: 128122 - protein, 235 aa, Unknown
  Bacterial polypetide isolated from the Sargasso Sea
KDIKTAVILGCNWIALSYLQNEKLILETRKLIRKDIGIISKIENKHALKNIKRIIQATDSIMIARGDLAIDIGHSEVPKVQLSLIKKCSQFSKSVIVATQMLESMIENNTATRAEINDIATAIFQGADTVMLSAEAAIGKFPAQAVSTMTQTILSTEKYKREHIEDFKNSVVANKDPVKSILLSVKDMAYNPNVKAIIVFSNSGRSAKLVSAMRPAAKIVTISPNINVSRQVSLL

SEQ ID NO: 128123 - protein, 184 aa, Unknown
  Bacterial polypetide isolated from the Sargasso Sea
MTRRTKILATLGPATDSLEKIQALIAAGANTVRMNFSHGQAEDHIERAKRVRQAAKNLGKYVAILGDLQGPKIRVARFAEGAVRLEVGAKFILDAELGRDEGDINQVGIDYKALPDDVSAGDILLLDDGRIQLRVTGVEGRKVITEVTVGGKLSNNKGINRQGGGLSADALTEKDKEDIKTAAK

SEQ ID NO: 128124 - protein, 314 aa, Unknown
  Bacterial polypetide isolated from the Sargasso Sea
LIDDGKYLFSVIGKKGNSVTTKCRSQNCIIKSNKSFHVPNLDITFNKLTIKDKKDIKTAVKLGCNWIALSYLQNEKLILETRKLIKKDMGIISKIENKHALKNIKKIIQSTDSIMIARGDLAIDIGHSEVPKVQLSLIKKCSQFSKSVIVATQMLESMIENNTATRAEINDIATAIFQGADTVMLSAEAAIGKFPTQAVSTMTQTILSTEKYKREHIEDFKNSIITNKDPVKSILLSVKDMAYNPDVKAIIVFSNSGKSAKLVSAMRPAAKIVTISPNINVSRQVSLLWGVQSINSRDANGWKDMMSISKEIIK

SEQ ID NO: 128125 - protein, 246 aa, Unknown
  Bacterial polypetide isolated from the Sargasso Sea
MSNIDLKRRTKIVATIGPATQSEEIITDLIKAGVTTFRLNFSHGDHKDHAERIKTIRNVSKKLAIDIGILQDLQGPKIRLGRFNDGPVKVKKGDKFTLTSNKVECTNTIANVTYEKLSQEVSEGKRILLDDGKIEMIVEKVDIKANLLECLVTVGGVLSNNKGVNFPDVQLSVKALTDKDKEDLKFGLSQGVDWIALSFVRNPSDINEIKDLINKNGHSTPVIAKIEKFEAIDQIDTVLPLCDGVM

SEQ ID NO: 128126 - protein, 308 aa, Unknown
  Bacterial polypetide isolated from the Sargasso Sea
HFEGHDRSRDGCCAIGLAHGTVDEQIAKFQMVRAVAADLGRHVGIVVDLPGPKVRCMPFTDGGAELVEDTQVSLGVEETKSSSDHINVDYPNLLQDVQLGDSLSFGDGQVVVSIENREGERLKARVVHGGKLNGSPGLHVPSDRLRMSSPTDHDLELLDTFVEMGTDMVAVSFVRSAHDIRRLGVEPAPRGPMVIAKVETKAAVSNLEGIIEASGAVMVARGDLGSEMDIEELPHLQKYIIQECIALGRPAITATQMLESMVSAPTPTRAEASDIANAVFDGTSALMLSGETAIGRDPVNAVRTMARI

SEQ ID NO: 128127 - protein, 227 aa, Unknown
  Bacterial polypetide isolated from the Sargasso Sea
MLHTKIICTIGPASDSPEVLENLADAGMNVARLNFSHGTHDSHRNIVEKIRLLNTNLEFPVAILLDTKGPEIRTGDQHMKLITGTQVRVVSDPELKDERHLFVDYPHLTEQLGQGNHILLDSGLVKLEILENHGDSLACRVLDGGTITPKRHVNLPGISVKLPGITLSDRKDLEFALEENVDVVALSFLRNRDTVLEVREMFRERGEQIKLIAKIENQEGVDNLEEI

SEQ ID NO: 128128 - protein, 157 aa, Unknown
  Bacterial polypetide isolated from the Sargasso Sea
MLSTKIVCTIGPASDSPEILEKLANAGMNVARLNFSHGTHNSHKKIIKQIHELNRTRKFPIAIMLDTQGPEIRTGNETSNLKSKEIVTVCCPPFKENEGNIYVNYAALKSDLKPGNYISLDSGLVKLKVISKHKKGLKCEVIDGGIVNGHRHVNYQV

SEQ ID NO: 128129 - protein, 151 aa, Unknown
  Bacterial polypetide isolated from the Sargasso Sea
MKLTEPSDIRRTKIVATLGPATSELSVLVQILQAGVNVVRLNFSHGVHADQLKRIETVREAAKEVGCVVGILADLQGPKIRVANFSAGKITLSAGDTFILDAGHDPEAGDQQRVGIDYKELPNDVVKGDTLLLDDGRLDLTVEKVSGSEII

SEQ ID NO: 128130 - protein, 216 aa, Unknown
  Bacterial polypetide isolated from the Sargasso Sea
MAFTRTKIICTIGPQSSNNATLCRLHSAGMNVARINMSHATHKNAKEIIDIIKSINETKNSKLSNIGILLDTQGPEIRTGDTSLPINLKVGDKVTLTVRDEIDVETSSIKVNYKGLVHSVDVGSRISVDNGLISFRVLSKESDNLVCKVIHGGKVGSKRHVNLPGVRLDMPSITSKDIKDISFGIKNNVDFIAASFVRNKKDLRILEDLLFKQKSE

SEQ ID NO: 128131 - protein, 260 aa, Unknown
  Bacterial polypetide isolated from the Sargasso Sea
MRRQRNIKIVATLGPSSSDYDTIKDLHLAGADVFRLNMSHGTHHEIAKRHKIIRHIEDELSSPIAILADLQGPKLRVGSFKNGIEELTENKKFRLDLKDKLGTKDRVQLPHPEIFQALHEGAHLLINDGKIKLMVEKCGPDFADCLVLNGGEISDRKGVNVPDVILPLAALSEKDRADLDFICDLGIDWLALSFVQRAEDIVEARNLIAGRASVISKIEKPSAVKSFDDILKVSDGVMVARGDLGVELPVQNVPPIQKRL

SEQ ID NO: 128132 - protein, 264 aa, Unknown
  Bacterial polypetide isolated from the Sargasso Sea
LLDSGLVKLEILENHGDSLACRVLDGGTITPKRHVNLPGISVKLPGITLSDRKDLEFALEENVDVVALSFLRNRDTVLEVREMFRERGEQIKLIAKIENQEGVDNLEEIIQVTDGIMVARGDLGIEIDMEELPQIQRKIAYLCAKYGKRLIVATQMLESMMENPVPTRAEITDIANAVFEQSDAIMLSGETSTGKYPVRCVETLVRIARRTEVHPGVQFTENLIQEDGPEENQGKGRQMLAAAATKIARQLNIPGMLVITRKGR

SEQ ID NO: 128133 - protein, 214 aa, Unknown
  Bacterial polypetide isolated from the Sargasso Sea
FKKEIILACRIAGKPVIVATQMLESMINNSSPTRAEASDVATAVFDGADAVMLSAETAIGKFPIETVKIMDKILNAAEVHIKTHPTDAPISLTAESTIYHAVSRSAVNLAETVDAKAIVAFTASGKTALRISRERPELMLVVMTPKHLVRRRLSLLWGTISFLSKVQGYEAAIQEARRIIKKNKLAAQGENIVVVAGMPFGISGSTNSIRVVTI

SEQ ID NO: 128134 - protein, 244 aa, Unknown
  Bacterial polypetide isolated from the Sargasso Sea
NSSGINKIVSKIRKVEKKNGKKLSLIADLQGVKLRIGEVKNDNQQIRYNQRFIFDGNKIPGDSKRVNFPHPKIIKKLKKGNKILIDDGKYLFTVISKKGNAVTTKCQSQNCVLKSNKSFHVPNLDIVFNKLTGKDKKDIKTAVKLGCNWVALSYLQNEKLIQETRRLIKKDMGIISKIENKHALKNINKIIQATDSIMIARGDLAVDIGHSEVPKVQLSLIKKSSQFSKSVIVATQMLESMIKN

SEQ ID NO: 128135 - protein, 245 aa, Unknown
  Bacterial polypetide isolated from the Sargasso Sea
VTDGIMVARGDLGIEIDMEELPQIQRRIAYLCAKYGKRLIVATQMLESMMENPVPTRAEITDIANAVFEQSDAIMLSGETSTGNYPVRCVETLVRIARRTEVHPGVQFTENLIQEDGPEENQGKGRQMLAAVATKIARQLKVPGMLVITRKGRGATKMANLRVRGIPIFAFTESEKTISTLMLLRGVYPYMLEFDEDPEITIQNALRLLKKKQDMPSGISIVVVADIMTGEGYVNCLQIRTLPED

SEQ ID NO: 128136 - protein, 277 aa, Unknown
  Bacterial polypetide isolated from the Sargasso Sea
MKRNRKAKILATLGPSSSDKKIIEELFTSGCDVFRLNFSHGDIEIHRKNYESIRSLENKYKHATCVLADLQGPKLRVGLFKNTKEKLIKGEKFILDLSSEPGDNKRVNFPHSEIYEFLTPNSILLVNDGRIRLQVIEQNKDSLVTEILNNAEISNNKGVNIPDVILPIDALTNKDKSDLMKALDMGVDWVALSFVQQAEDINKLKKMIGNKALVMAKIEKPSAVKNIDEIVNAADGIMIARGDLGVEMPTEQVPIAQKNIIRRCRHLENQSLWQLKC

SEQ ID NO: 128137 - protein, 301 aa, Unknown
  Bacterial polypetide isolated from the Sargasso Sea
RISFPYPKILKKLKKGNKILIDDGKFTFVVTGKKNLAVTTVCKSQNCFMKSNKSIHIPNFDIAFNKLTSKDKKDIRTAIKLGCNWVALSYLQNEKLILEARKLIKKDMGIISKIENKHALKNIVKIIKATDSVMIARGDLAIDIGHSEVPKVQLSLIKKCSQFSKSVIVATQMLESMIENSTATRAEINDIATAIFQGADTVMLSAEAAVGKFPTQAVSTMTQTILSTEKYKRQHIEDFKNAIISNKDPVKSILLSVKDIAYNPDVKAIIVFSNSGKSAKLVSAMRPAAKILTISPNINVS

SEQ ID NO: 128138 - protein, 188 aa, Unknown
  Bacterial polypetide isolated from the Sargasso Sea
MLHTKIICTIGPASDSPEVLENLADAGMNVARLNFSHGTHDSHRNIVEKIRLLNKNREFPVAILLDTKGPEIRTGDQHMKLITGTQVRVVSDPELKDERHLFVDYPHLTEQLGQGNHILLDSGLVKLEILENHGDSLACRVLDGGTITPKRHVNLPGISVKLPGITLSDRKDLEFALEENVDVVALSF

SEQ ID NO: 128139 - protein, 244 aa, Unknown
  Bacterial polypetide isolated from the Sargasso Sea
VNLPGVRVNLPSLTAKDLEDINFGIKNKVDFIALSFVRNSEDLEKLQEILDKKKSHAKIIAKIENQEGLDNIHDISKASWGVMVARGDLGIETSLTDLPNIQRRIMYACAKWGRRSIVATHLLESMINNPTPTRAEVTDIANAIYEGADAIMLSGETSVGKYPYECVNFLKSIAEKTEKFRTLGYENNFVPSSDWQYIGVAAKNLAESIGADGIIAITRTGKTANYISNSKPHGIPVFTFTENK

SEQ ID NO: 128140 - protein, 261 aa, Unknown
  Bacterial polypetide isolated from the Sargasso Sea
MGIISKIENKSALKNINEIIQATDAIMIARGDLAIDVGHSEVPKIQLGLIKKCNQFSKSVIVATQMLESMIENYTATRAEINDIATAIFQGADTVMLSAESAVGRYPLQAVKTMTKTIVSTEKYKKEHIEDFKNKIDAKKDPIKSIVLSVKDLAYNPSIKAIIAFSNSGKTAKLVSAMRPRVKIITISPNINISRQMSLLWGVQSLNSRDANGWKDMMNISREIIKKDSSIKKNDFVVITAGLPFGNAGMTNMIRLYKVGT

SEQ ID NO: 128141 - protein, 82 aa, Unknown
  Bacterial polypetide isolated from the Sargasso Sea
MTRRTKILATLGPSTDSLEKIKELIAAGANTVRMNFSHGQAEDHIERAKRVREAARSLGKYVAILGDLQGPKIRVARFKKAP

SEQ ID NO: 128142 - protein, 235 aa, Unknown
  Bacterial polypetide isolated from the Sargasso Sea
MTFTRTKIICTIGPNSSNKATLKKLHLAGMNVVRINMSHATHKNAKEIINIIKNINSIKNSKLSNIGILLDTQGPEIRTGDTSLPINLKVGDKVTLTVRDEVDVETSSIKVNYKGLVHSVNVGSRISVDNGLISFRVLSKESDNLVCKVIHGGKVGSKRHVNLPGVRIDMPSITSKDIKDITFGIRNNVDFIAASFVRNKKDLQILEELLLKHKSESKIIAKIENQEGLDNIDEI

SEQ ID NO: 128143 - protein, 270 aa, Unknown
  Bacterial polypetide isolated from the Sargasso Sea
MKRIKKTKIIATLGPSSSSKDYIEMLIKEGADVLRINFSHSTHKEAKSLINDIRKINEELNTNTSILADLQGPKLRIGEIKADTSLCDGDEIEIETGKEFVGDKNKIYVDYKSLPSDVNVGEKILINDGKIILKVIGTNKKNKISAGVIQGGDLTSRKGFNLPNTNISQPALTDKDIKDAIFSIEQSVDWIALSFVRHESDIKSLINLIEENTDHRIPVIAKIEKPEGVKNIDDIMKHASGIMVARGDLGVEINAAEVPLIQKKLVDKAK

SEQ ID NO: 128144 - protein, 263 aa, Unknown
  Bacterial polypetide isolated from the Sargasso Sea
SFIALSFVRSAQDISNLRAILKRNKSSIKIIAKIENQEGLDNIHEITQAADIVMVARGDLGIETDLADLPNIQRRIMYATAKWGRRSIVATHLLESMIYHPTPTRAEVTDVANAIYEGADAVMLSGETSVGKYPIQCIKMLKKIAVRTEHFRTLGYEKFLQDNSDWQNIAQGARDLAERINADGIVVITRSGQTANVVSNTKPFRMPVYAFTNNHDTYSHLSIIGGMKPHFIKSITNQTKTISQIKSTLMSGKKSKKSLKFVF

SEQ ID NO: 128145 - protein, 252 aa, Unknown
  Bacterial polypetide isolated from the Sargasso Sea
AGMNVARINMSHATHDNAKEIIDSIKQINSSVAGSISKIGILLDTQGPEIRTGDTSLPIELKVGDKVTLTVRDEIDVETSSIKVNYKGLIESVSVGSQITVDNGLINFKVLSKQSETLLCKVIHGGKIGSKRHVNLPGVRINMPSITPKDIQDIEFGIKNNVDFIAASFVRSEKDLNILEQILNKKKSKAKIIAKIENQEGLENIENISKSAWGIMVARGDLGIETSLTDLPNIQRKIMYSCAVHGKRSIVA

SEQ ID NO: 128146 - protein, 274 aa, Unknown
  Bacterial polypetide isolated from the Sargasso Sea
DSGLVKLEILENHGDSLACRVLDGGTITPKRHVNLPGIYVKLPGITLSDRKDLEFALEENVDVVALSFLRNRDTVLEVREMFQERGEQIKLIAKIENQEGVDNLEEIIQVTDGIMVARGDLGIEIDMEELPQIQRKIAYLCAKYGKRLIVATQMLESMMENPVPTRAEITDIANAVFEQSDAIMLSGETSTGKYPVRCVETLVRIARRTEVHPGVQFTENLIQEDGPEENQGKGRQMLAAAATKIARQLKVPGMLVITRKGRGATKMANLRVRG

SEQ ID NO: 128147 - protein, 304 aa, Unknown
  Bacterial polypetide isolated from the Sargasso Sea
VEKKNGKKLSLIADLQGVKLRIGKIKNENQQIRYNQRFIFDGKKIPGDSKRVNFPHPKIIKKLKKGNKILIDDGKYLFTIISKKGNAITTKCQSQNCILKSNKSFHVPNLDIVFNKLTGKDKKDIKTAVKLGCNWVALSYLQNEKLIQETRRLIKKDMGIISKIENKHALKNIEKIIQATDSIMIARGDLAVDIGHSEVPKVQLSLIKKSSQFSKSVIVATQMLESMIKNTTATRAEINDIATAIFQGADTVMLSAETAIGKFTTQAVSTMTQTIRSAEKYKREHIEDFKNSVITNKDPVKSIL

SEQ ID NO: 128148 - protein, 299 aa, Unknown
  Bacterial polypetide isolated from the Sargasso Sea
MDTQGPEIRTGELKNPMKLKTGQIVSLTVRDAELVETQSILVNYEEIVDVVDVGSLITLDNGLLNFEVLEKKGGQLVCRVLDGGILGSRKHVNLPGIRVNLPAITEKDKRDIQFAKNYGVDFIALSFVREASDIEELRRVLGIKGETVKIIAKIEDRSGVENIHSIVDAADGVMVARGDLGIETNIADLPNIQRRIVHSSAVGGKRCIVATHLLESMIENPIPTRAEVTDVANAVYEGADAVMLSGETSVGKYPTRCVEQIVDIVKRAEKYAGLGYEKELVALDDKQHLAVHAVALAES

SEQ ID NO: 128149 - protein, 310 aa, Unknown
  Bacterial polypetide isolated from the Sargasso Sea
IRRVKKKFGRPICILADLQGPKLRCGEFKNKDAELVPGKFFIFDKDRKLGDSSRVYLPEFKAFTNLKIGSKVLVNDGKIRLEVKEVNKSSVKTEVLVGGVISDKKGINVPDQILPLSALSKKDLSDLEFVCDLGIEWLGLSFVQRAKDVKEAKKIVRGRAAILSKIEKPSAVDAFEEILEETDAVMVARGDLGVELPIETLPPIQKRLVRQCRDSGKPVIVATQMMESMINSPVPTRAEVSDVAQAIYEGADAVMLSAESAVGNYPVEAVKTMNSIATEVEKEKTYRQVIESSRNPLKGDVSDAITVAAR

SEQ ID NO: 128150 - protein, 262 aa, Unknown
  Bacterial polypetide isolated from the Sargasso Sea
RINFSHNTSGINKIVSKIRKVEKKNGKKLSLIADLQGVKLRIGKIKNENQQIRYNQRFIFDDKKIPGDSNRVNFPHSKIIKKLKKGNKILIDDGKYLFTVISKKGNAITTKCQSQNCILKSNKSFHVPNLDIVFNKLTGKDKKDIKTAVKLGCNWVALSYLQNEKLIQETRRLIKKDMGIISKIENKHALKNIEKIIQATDSIMIARGDLAVDIGHSEVPKVQLSLIKKSSQFSKSVIVATQMLESMIKNTTATRAEINDIA

SEQ ID NO: 128151 - protein, 273 aa, Unknown
  Bacterial polypetide isolated from the Sargasso Sea
SFPKDVKKGETVLVDDGKIILQVEKTDRDANVNLIVIQGGLLSSSKGVNLPSTKISLPALTSKDIKDAKFAAKLGFDWVALSFVRSKNDVLQLREILDKSSNEHIPIISKIEKPQAINNMDQILKVSNGLMVARGDLGIEIPAEEVPLYQKILVKKANEARKPIIIATQMMESMIDSLTPSRAEVNDVANSVMDGADCIMLSGETSVGKYPCEVVKKVGTIIAGVEDSQPVKNKFTLPKLKSKRLITKTVCRHASLIANEKKASAVCTLTHSG

SEQ ID NO: 128152 - protein, 296 aa, Unknown
  Bacterial polypetide isolated from the Sargasso Sea
RVTVLDVKGDEIHCQVMNTAKLSNNKGINRFGGGLNAKALTDKDRLDLKFAVDSDMDFIALSFPRSEDDIHEARALMEKHKGNAGIIAKIERAEAVTCINEIVKASDGVMVARGDLAVEIGDSEVPLVQKEIIQSARSLDKPVIVATQMMESMINEPVPTRAEVSDVANAVLDNTDAVMLSAETAAGRYPVESVRAMSDVCVRVEKQPCSQTSGHRLECEFVRVDEAIAMATMYTANHMPVAAVVALTESGGTTLWMSRIRTGLPIYGLSRFTRTLGKMSLYRGVYPVSFDVTGCT

SEQ ID NO: 128153 - protein, 261 aa, Unknown
  Bacterial polypetide isolated from the Sargasso Sea
RIPVIAKIEKPEGVRNIDEIMKYASGIMVARGDLGVEINAAEVPLIQKKLVNKAKKARIPVIIATQMMESMMKSLNPNRAEVNDVANSIMDGADAVMLSGETSVGEHPVEVIKTISQIIGKVENSDLISLKHKHPTDYESERFITKSVCYYAAKIANETKAKAISTLTNSGYTAYQISSWRPKTHVLVFTSNKRILTQLNLLWGVKAFYYNGTESTDRTIEEINEIAVKNSLLQKDDKVINLTSMPIEKKGMVNTVRVSKI

SEQ ID NO: 128154 - protein, 251 aa, Unknown
  Bacterial polypetide isolated from the Sargasso Sea
MTFIRTKIICTIGPNSSNKATLKKLHLSGMNVARINMSHASHKNAKQIIDVIKTINKTKNNKLSNIGILLDTQGPEIRTGDTSLPINLKVGDKVTLTVRDEVDVETSSIKVNYKGLVHSVNVGSRISVDNGLISFRVLSKESDNLVCKVIHGGKVGSKRHVNLPGVRIDMPSITSKDIKDITFGIKNNVDFIAASFVRNKKDLQILEDLLLKNKSESKIIAKIENQEGLDNIDEICESAWGIMVARGGFRN

SEQ ID NO: 128155 - protein, 219 aa, Unknown
  Bacterial polypetide isolated from the Sargasso Sea
VPLLQKELVNKCLKAAKPVIIATQMMESMITSISPTRAEVNDVANAVLDGADALMLSAETSVGKYPVKVIKAMTKIIDQIEKSELIYHHAFPPELNEDRFISDSICYNACRLSQRVDSKAIVTMTHSGYTAAKISSFRPKAGIYAFTGNHSLLNTLSLVWGVKGFYYDKYVSTDHTISDIKFILKKKNLVKEKDLIINIASMPINEKGQSNMVKLSYVE

SEQ ID NO: 128156 - protein, 252 aa, Unknown
  Bacterial polypetide isolated from the Sargasso Sea
GKFLNVKEQLKKNQIFTFDQNKKDGDRSRVYLPHKEIFKSISIGQRLLVNDGKVRLKVKSKSSSAIKCVVTDGGEISNNKGLNIPDTKLDLKIITPKDKKDLELAIKLDVDWIALSFIQTTKDLASAKKLIPAKFKVMVKVEKPSAMEEIESITENCDGIMVARGDLGVETNPEDVPIHQRTMVAACRKFGKPCIVATQMLESMIDSPTPTRAEASDVATAVFQGVDAVMLSAESAAGNYPKESVEMMDKII

SEQ ID NO: 128157 - protein, 245 aa, Unknown
  Bacterial polypetide isolated from the Sargasso Sea
IICTIGPATASFQKIKALRNAGMDLVRLNMSHSSHAEAKKVIDWVNKLNQNGDSPVSVLLDTQGPEIRTGELKNPMKLKTGQIVSLTVRDAELVETQSIVVNYEEIVDVVDVGSLITLDNGLLNFEVLEKKGGQLVCRVLDGGTLGTRKHVNLPGVRVNLPAITEKDRQDINFALEHGVDYIALSFVREAQDILELRHILQAKNKATKIIAKIEDQSGVENIHSIVGVADGVMVARGDLGIETNI

SEQ ID NO: 128158 - protein, 276 aa, Unknown
  Bacterial polypetide isolated from the Sargasso Sea
FKKKNQIIRKNQLFTFDLKNELGSKDRVTLPYPKLIKNIKKNHIILVDDGKYAFKVIKNNPLSIITKNLSQDFEISDMKSVHVKNLSIPFNNFTKKDKLDIKLAKKLGCEWVALSYVENAKLIYKAKKLLGKNIGIISKIENKVAVKNIDEIIKASDAIMIARGDLALDVGHSEVPKIQLDLIKKCNRNSKAVIVATQMLESMINNFTATRAEINDIATAIFQGADTVMLSAETAVGNYPVQAVKTMFKTIISTEKYKKEHIEDFKNSIEVKTDPI

SEQ ID NO: 128159 - protein, 199 aa, Unknown
  Bacterial polypetide isolated from the Sargasso Sea
SSSVEVIKEMYDKGLNVCRLNFSHGDHSIHEENIKRVQEVNNEINSNIAILADLQGPKLRVGVMENEGCEIKNGDKIIFTNQECVGTAKKVYMTYKNFAKDVNPGELILIDDGKLAVKVESSNGVDEVIAVVEHGGILKSKKGVNLPNTKISLPFLTKKDREDLDYILTQDVEWVALSFVRSAQDIIELRKLIQESGKN

SEQ ID NO: 128160 - protein, 285 aa, Unknown
  Bacterial polypetide isolated from the Sargasso Sea
DHSNVVKWIRELEKSVAIMQDIQGPKIRTGEAKESTQFKQSHEIKITNKETISDDNLIYINYKDLFKDLNSGERIFIDDGQIVIRIIKKTKSSMLGQIEIGGELRSNQGVAFPDSKLSVSAITEKDIADLKFGNKLDVDIVAVSFVRDANDIKKVREIVDKNIKIIAKIELKNAVKNLDSIIDEADGVMVARGDLGVQLDLEKVPFIQKQILNEANAKGKITVTATEMLQSMKESHRPTRAEVTDITNAILEGTDCVMLSAETAIGNHPEVVVSAMSDICKEADS

SEQ ID NO: 128161 - protein, 168 aa, Unknown
  Bacterial polypetide isolated from the Sargasso Sea
LIDDGKLCLKIIKAESQIAEAEVVTGGSISDHKGVNIPNAVLPISPLGEKDREDLNFALELGADLIGLSFVQRPDDVLEASELIGGRASILSKLEKPSAIDQLDQIIKVSDAIMIARGDLGVELPPEDLPSLQKQIIRKCRQQGKPVVVATQMLESMIEAPKPTRAEA

SEQ ID NO: 128162 - protein, 110 aa, Unknown
  Bacterial polypetide isolated from the Sargasso Sea
MSNIDLKRRTKIVATIGPSTQSEEIIEDLIKAGVTTFRLNFSHGDHKDHAERIKTIREVSSKLDIDIGILQDLQGPKIRLGRFKDGPVKIYKRDKFSLTSKEIECTDTML

SEQ ID NO: 128163 - protein, 251 aa, Unknown
  Bacterial polypetide isolated from the Sargasso Sea
TKCLSQNCYLSSNKSLHVSNISLPFNNLTSKDKKDIKIAKKIGCNWVALSYLQNAKLIYQTRKLISKDMGIISKIENKSALKNINEIIHATDAVMIARGDLAIDVGHSEVPKIQLGLIKKCNQFSKSVIVATQMLESMIENYTATRAEINDIATAIFQGADTVMLSAESAVGKYPLQAVKTMTKTIVSTEKYKKEHIEDFKNSIDAKKDPIKSIVLSVKDLAYNPSIKAIIAFSNSGNTAKLVSAVRPRVK

SEQ ID NO: 128164 - protein, 265 aa, Unknown
  Bacterial polypetide isolated from the Sargasso Sea
MNKTKIIATIGPSCSDKELLQEMVNSGVGTFRINMSHGDTQSKKHLFELVKSVSHPEGGHPAILADLCGPKIRIVDISCSFKLQDGDTVVISNKEDIGDIFVTSSISLSNVKTGSKILINDGKVQLDVSEVIDENTLRCKTLIGGEIQKGKGVNFPGVSLGVPALTSQDKEDLKLALKEGSDWIALSFVRNASDIDEVHKIMDDSNIRLPVMAKIEKWEALEDLANITDTFDGVMVARGDLGVEIPSGKVPAAQKEIISLASANG

SEQ ID NO: 128165 - protein, 290 aa, Unknown
  Bacterial polypetide isolated from the Sargasso Sea
IINQIHELNRSRQSPIAIMLDTQGPEIRTGDETSELKSKEIVTVSCPPFEDNEGNIHVNYAALKSDLKPGNYISIDSGLVKLKVLSKHKKGLRCEVIDGGIVNGHRHVNLPGTLVKLPGITEADKKDIIFGIKQKVNFIALSFVRSAETIREVRKLLDKHASHTEIIAKVENQEGVDRLEEIVQEADGVMVARGDLGIEVELEEVPQIQRRIAFLCAKYGKRSIVATHMLESMIEHPVPTRAEVTDVANAVFEQSDAIMLSGETSIGNYPVRSVETLKRIAKRTEIFPGV

SEQ ID NO: 128166 - protein, 297 aa, Unknown
  Bacterial polypetide isolated from the Sargasso Sea
MKKIKKTKIIATLGPSTSSIESIENLIKEGVDVLRINFSHITHKEAEKVIKQIRRINESLATNTAILADLQGPKLRIGVVVENTELIDGDNINIKTGKEFKGNNKKLYLNYNNLAKDIKKGEKILIDDGKIILKVIEIDKKNEIIAEVVQGGMLSSNKGFNLPNTNISQPALTNKDIEDAIFSAKQNVDWIALSFVRNGSDIESLIKLLDKNTNYRIPVIAKIEKPEGVRNIDEIMKYASGIMVARGDLGVEINAAEVPLIQKKLVNKAKKARIPVIIATQMMESMMKSLNPNKSRS

SEQ ID NO: 128167 - protein, 273 aa, Unknown
  Bacterial polypetide isolated from the Sargasso Sea
NSVITKCRSQNCELKSNKSFHVPKLDITFNKLTEKDKKDIKTAIKLGCNWIALSYLQNEKLILETRKLIKKDIGIISKIENKHALKNIKRIIQATDSIMIARGDLAIDIGHSEVPKVQLSLIKKCSQFSKSVIVATQMLESMIENNTATRAEINDIATAIFQGADTVMLSAEAAIGKFPTQAVSTMTQTILSTEKYKREHIEDFKNSVVTNKDPVKSILLSVKDIAYNPNVKAIIVFSNSGRSAKLVSAMRPAAKIVTISPNINVSRPSIITL

SEQ ID NO: 128168 - protein, 217 aa, Unknown
  Bacterial polypetide isolated from the Sargasso Sea
MSNIDLKRRTKIVATIGPATQSEEIITNLIKAGVTTFRLNFSHGDHKDHAERIKTIREVSKKLDIDIGILQDLQGPKIRLGRFKDGPVKVKKGDKFTLTSNEVECTNTIANVTYDKLSQEVNEGKRILLDDGKIEMIVEKVDTKANNLECMVTVGGVLSNNKGVNFPDVQLSVKALTEKDKEDLKFGLSEGVDWIALSFVRNPSDINEIKDLINKNG

SEQ ID NO: 128169 - protein, 173 aa, Unknown
  Bacterial polypetide isolated from the Sargasso Sea
MSNIDLKRRTKIVATIGPATQSEEIITNLIKAGVTTFRLNFSHGDHKDHAERIKTIREVSKKLDIDIGILQDLQGPKIRLGRFKDGPVKVKKGDKFTLTSNEVECTNTIANVTYDKLSQEVSEGKRILLDDGKIEMIVEKVDIEANLLECLVTVGGVLSNNKGVNFPDVQLSV

SEQ ID NO: 128170 - protein, 445 aa, Unknown
  Bacterial polypetide isolated from the Sargasso Sea
SLGVDAFRINFSHDLTNIKKIIQQIRSLEKKTSKKVSIIGDLQGVKIRIGRFKKKNQVIKKNQFFTFDLKNKLGDKNRVTLPYPKLLKKIKKNHIILVDDGKYAFKVIKRNSLSVITKNLSQDFTISDMKSVHIKNLSIPFNNFTKKDKLDIKLAKKLGCEWVALSYVENAKLIYKAKKLLGKNIGIISKIENKLAVKNIDEIITASDAIMVARGDLALDVGHSEVPKIQLGIIKKCNNNSKPVIVATQMLESMINNFTATRAEINDIATAIFQGADTVMLSAETAVGKYPVQAVKTMFKTIVSTETYKKEHIEDFKSSIEVKRDPIKSIVLSVKDLAYNPSVKAIIAFSNSGTTAKLVSAVRPRVKIITISPNIIVSRQMSLLWGVQSIKSKDASGWKDMINISRQIIKKDKSIKKNDFVIITAGLPFGNATMTNMIRLYKVGS

SEQ ID NO: 128171 - protein, 387 aa, Unknown
  Bacterial polypetide isolated from the Sargasso Sea
VQLVNGQSLRLDLDASPGDASRVNLPHPEIIEALQPGMSLLLDDGRLRLKVTGKQADAVDTCVIAGGELSDRKGVNVPEAVLQLSPLTEKDRRDLAFGLELGVDWVALSFVQRPEDIVEARELIGGKAFLMAKIEKPSAVQHLEEIAKLCDAIMVARGDLGVEVPAENVPRIQKDIVRTCRQLGRPVVVATQMLESMRFSPAPTRAEVTDVANAVAEGADAVMLSAETASGDYPLETVQMMSKIIRQVENGPDYQSQLDVGRPQAEATASDAISCAIRRISSILPVAALVNYTESGSSSLRASRERPKAPILSLTPSLTTARRLTVAWGIYSVVNERLRRVEEVTSTALEIAQAQGMAKRGETVVITAGEPFGQPGSTNSLRIETLH

SEQ ID NO: 128172 - protein, 367 aa, Unknown
  Bacterial polypetide isolated from the Sargasso Sea
MTRKTKIIATVGPSIHSKEAINEIIDAGANVLRLNFSHGSNDEYKQIVDWARSSNKKIAIMQDIQGPKIRTGFLEQSFDLSQGAEIEIFNKDSKKNNENIVINYEQLFEDVSEGERILIDDGKLSLRVTKKEKNKVLADVEIGGELRSNQGVAFPDSNLSVSTLTKKDIEDLEFGNQLGVDFVAVSFVRNAEDIINVKKYIDDDTKVIAKIELKSAVKNLKSIIQESDGVMVARGDLGVQLPLERIPLVQKEILNETNLQGKITITATEMLTSMISSHRPTRAEVSDITNAILDGTDAVMLSAETSIGENPIEVVSAMAKICSEVDSVSGTKITSSKDILTSDELTNSLSKAAVQVANDSNAKAIVA

SEQ ID NO: 128173 - protein, 427 aa, Unknown
  Bacterial polypetide isolated from the Sargasso Sea
MRRTKIIATLGPATDKPDILEKLINAGVDVFRLNYSHQTHEHHENRMKEIRRLSSKHKHAVAIIADLQGPKIRIENFKNGEIELVEGENFKIDTTISKNDGDQSRVGTSYKKLPDDIKVKDTLMIDDGRIVLNVLSKNKNVIDCKVITGGTLSNGKGINIQGGGLSAKSITEKDIEDMQHAAKIKVDYIAISFPRNGSDIKKARKMMKDCNCNAHVIAKIERADALINIDEIIEESDAIMIARGDLGVEIGDAALPPIQKSLIKKARQMDRVAITATQMMESMIENKIPTRAEVFDVANAVIDGTDAVMLSGETSIGNYPDEAVKSMSRICEEAEKQRSVRVSDHRTNLSFDNIPMAIAMSSMYSANHIGAKAICSLTETGGTCLWMSRISSGIPIFAFTRHTSTRRRVALFRGVFPMKFDITHTDP

SEQ ID NO: 128174 - protein, 469 aa, Unknown
  Bacterial polypetide isolated from the Sargasso Sea
MFTRTKIICTIGPATSELSTMQKMYLAGMNVVRINMSHASHDEALNVINNVKLINKNPDIKKGPISILIDTQGPEIRTGDRDTSLDLKLGDKVNLTVRDEVDVETSSIKINYRGLINSVKKGSKISVDNGLVNFKVLEKHDDKLLCRVIDGGKIGSKRSVNLPGVRIDLPSITKKDKADINFAIKHDVDYIALSFVRKIEDIHCLRKILKRKKSQIKIVSKIEDNEGLSNIHAITQESDAVMVARGDLGIETSLADLPNVQRRIMYACSKWGRRSIVATHLLESMIEKPTPTRAEVTDVANTIYEGADAIMLSGETSIGKYPIECIKFLKSIADRSEKFRTLGYEEKLELSGDWEYLAKTARDLAESINADGIIVITRSGYTANLVSNAKPFNVPIYAFTNDKRVHRQLSLVGSVLSIYQKSIVDNKNNMSKIASTLKKVFSKKKKLKFVLISGMFSEKHSDAIRVVNF

SEQ ID NO: 128175 - protein, 404 aa, Unknown
  Bacterial polypetide isolated from the Sargasso Sea
KEIRKINDSLSTNTAILADLQGPKLRIGEVSENTELKDGDNIIIKTGKEFKGDSKTLYLNYNNLAKDIKKGEKILIDDGKIILKVIDIDKKNQITAEVIQGGILSSNKGFNLPNTNISQPALTEKDIEDAIFSAKQNVDWIALSFVRHGSDIESLIKLLDQNTNHRIPVIAKIEKPEGVRNIDEIMKFASGIMVARGDLGVEINAAEVPLIQKKLVNKAKKARIPVIIATQMMESMMKSLNPNRAEVNDVANSIMDGADAVMLSGETSVGEHPVEVIRTISQIIGKVENSDLISLKHKHPTDYDSERFITKSVCYYAAKIANDTKAKAISTLTNSGYTAYQISSWRPKTHVLVFTSNMRILTQLNLLWGVKAFYYDGTESTDRTIEEINKIAVENNLLQKDIKL

SEQ ID NO: 128176 - protein, 469 aa, Unknown
  Bacterial polypetide isolated from the Sargasso Sea
MKFKRTKIICTIGPATESYSSLKKLYSAGMNVARLNMSHSDHKNAKKIIDRIKKLNKKVKNPIGILLDTQGPEIRTGDTSEVVNLEPGELVSFTIRDEVDVETTSIRVHYDELIQSVDVGTLISLDNGLLNFKVLNKTKNQLECQVLDGGKLGSKRHVNLPGIRINLPSVTEKDKKDIAFGLKENVDFIALSFVRDASDIGDLKKVLKTQSKKVKIISKIEDREGLSNIEDICIVSDAVMVARGDLGIETDLSNLPNIQRKIMSNCAKYGVRSIVATHLLESMIENPTPTRAEVTDVANAIYEGADAVMLSGETTIGKYPEEAVNFISRIANQTERYRTLGYEEKLISNTDWQHLGIAAKNLAQSIDADGIIAITRSGQTAEIVSNAKPFMKPVYAFSNNKKTVSQLSLAGSVQAFLSPMYTDHEKNINSIMKILRKELSPTEDLKFVVISGILSESSADAIELRSLNL

SEQ ID NO: 128177 - protein, 469 aa, Unknown
  Bacterial polypetide isolated from the Sargasso Sea
MKLKRTKIICTIGPTTETFSSIKKLHQAGMNVARLNMSHSDHKNAKKIIDRIKKLNKTIENPVGILLDTQGPEIRTGDTSQVVNLEPGQLVSFTIRDEVDVETTSIRVHYDELIQSVNVGTLISLDNGLLNFKVLKKSKNELECKVLDGGKLGSKRHVNLPGIRINLPSVTEKDKRDIAFGLKEDVDFIALSFVRNASDIDDLKEVLKNNIKKVKIISKIEDREGLSNIEEICQVSDSVMVARGDLGIETDLANLPNIQRRIMSNCAKYGVRSIVATHLLESMIDNPTPTRAEVTDVANAIYEGADAVMLSGETTIGKYPIESVKFISRIAKQTEKYRTLGYESQLISKTDWQHLGVAAKDIAESIQADGIIAITRSGQTAEIVANAKPFMIPIFAFSNNKKTIKQLSLTGSVHAYKSSMHSDHEKNLEYIMRILKRELSPKRDLKFVVISGILSENSADAIEVRSLNT

SEQ ID NO: 128178 - protein, 405 aa, Unknown
  Bacterial polypetide isolated from the Sargasso Sea
MKSKRTKIICTIGPATESYSSIKKLYSAGMNVARLNMSHSDHKTAKKIIDRIKKLNTKVKNPVGILLDTQGPEIRTGDTSEVVNLEPGELVSFTIRDEVDVETTSIRVHYDELIQSVDVGTLISLDNGLLNFKVLNKSKNQLECQVLDGGKLGSKRHVNLPGIRINLPSVTEKDKKDIAFGLKENVDFIALSFVRDASDIDDLKKVLKTQSRKVKIISKIEDREGLSNIENICQVSDAVMVARGDLGIETDLSNLPNIQRKIMSNCAKYGVRSIVATHLLESMIENPTPTRAEVTDVANAIYEGADAVMLSGETTVGKYPVEAVNFISRIANQTERYRTLGYEEKLISNTDWQHLGIAAKNLAQSIDADGIIAITRSGQTADIVSNAKPFMIPVYAFSNNKKTVS

SEQ ID NO: 128179 - protein, 339 aa, Unknown
  Bacterial polypetide isolated from the Sargasso Sea
MERRTKIISTVGPKTNTESFISKLCVAGTNVIRINMSHASHAELEKIITIVKKINKSKICSVGIMIDTQGPEIRTAPITKSIQLIKGEVVHLTPKALKGTKYIVVDNLKQVKGLKKGGKVSFDNGAIDLKIKNIDKDKNVKCEVLDSGEIGSRKHVNFPGAKVTLPSLTDKDKKDIKYAISKGVDFIALSFCRSKKDLNELKKFLGKKVSDVEIFVKIEDQEGLSNLEEVIENSDGVMVARGDLGIETDITNLPYIQRNIIKIASSKGKKSIVATQLLESMIDSPHPSRAEVSDVANAVYEGTDALMLSGETSIGKYPVECVKYIDQVARNAERSETLH

SEQ ID NO: 128180 - protein, 469 aa, Unknown
  Bacterial polypetide isolated from the Sargasso Sea
MAFIRTKIICTVGPNSSDKATLKKLHLAGMNVVRMNMSHATHKNAKEIINIIKDINKTKNSKLSNIGILLDTQGPEIRTGDTSLPINLKVGDKVTLTVRDEVDVETSSIKVNYKGLIHSVNVGSRISVDNGLISFRVLSKESDNLICKVIHGGKVGSKRHVNLPGVRIDMPSITSKDIKDITFGIKNNVDFIAASFVRNKKDLQILEDLLLKQKSESKIIAKIENQEGLDNIDEICESAWGIMVARGDLGIETSLTDLPNIQRKIMHSCAKWGKRSIVATHLLESMIENPTPTRAEVTDVANAVYEGADAIMLSGETSIGKYPVECVKFLKSISKRTEKFKTLEYEKELITNSDWESIAVAARDLSESINADGIIAVTRTGSTAGYISNAKPKDIPIYTFTNNINTFNQLSLVGSAIPFYLKRLNNHKKTLEHVRDVLKPLHKKKKLKFVMVSGIFSEKHSEAIQIINF

SEQ ID NO: 128181 - protein, 287 aa, Unknown
  Bacterial polypetide isolated from the Sargasso Sea
AIKNNVSFIALSFVRSAQDILNLRSILKRKKSSIKIIAKIENQEGLDNIHEITQAADTVMVARGDLGIETDLADLPNIQRRIMYATAKWGRRSIVATHLLESMIHNPTPTRAEVTDVANAIYEGADAVMLSGETSVGKYPIQCIKMLKKIAIKTEHFRTLGYEKFLQDNSDWQNIAQGARDLAARIKADGIVIITRSGQTANVVSNTKPFRMPVYAFTNNHDTYFHLSLIGGIKPHFIKSITNQTNTILKIKSILTSVKKSKKSQKFVLIAGVYSASHTDSIQIITT

SEQ ID NO: 128182 - protein, 466 aa, Unknown
  Bacterial polypetide isolated from the Sargasso Sea
MFTRTKIICTIGPSTDSYSSLENLVLSGMDVARINMSHATHKNASNIIEFIHKINKKNKTNVSVLLDTQGPEIRTGDTKLPIDLKSGDIVSLTVRDEVDVETSSIKINYKGLIQSVKKGSKISVDNGLINFEVISKDYETLECKVIDGGKIGSKRHVNLPGVRINLPSITTKDIEDIKFGIKSGVDFIALSFVRSADDITELQKLINKNKSSVKIISKIENQEGLDNIEDICKSSWGVMVARGDLGIETSLTNLPNIQRKIMLSCATHGKRSIVATHLLESMINNPTPTRAEVTDIANAVYEGADAVMLSGETSIGKYPEECIKFMKSIVAETEKFKTLGYENNLQKNSDWEYIGQAAKNLAESIKADGIIAITRTGDTATYIANAKPHGVPIFSFTNNEVTLRQLSLVGSTVSFLIKDISNHDKTIKQCSNILKKYFSKKKKLKFIMVSGIFSEKHSDAIQIINF

SEQ ID NO: 128183 - protein, 471 aa, Unknown
  Bacterial polypetide isolated from the Sargasso Sea
MIKNYRKTKILATIGPSSEKINKIEKLVLSGVDAFRINCSHTTGFQFKNYIENIRKVEKKLKIPIGILIDLQGPKLRIGEIENNMALKRGQKLLLINNKKNLKPNEVPLPEEKVFKSVKVNHPIFIDDGKIKLKVLKVSKNIIETKVILEGVLKSKKGINLPETVLKNSALTSADKKNVKKAMELGVDWIALSFIQSPEDVKELRKICKKNVSIMAKIEKPNALNHINKITELADGLMIARGDLGVELPIQDVPSWQKRIIREARMQGKPVVVSTQMLESMITSKTPTRAEVSDVATAVFEGSDAVMLSAESAIGDNPQLAVKMMDKIAHSVEKNPNYSSILLAQLEETPDSTPDAIATASRTLATELNSPVIVCYTESGSTGIKVSRVRPKQMILTVTPIIETARKLTLVWGVKCIVQKDANNLEEMIKMTKAYSKREKIIKKGEKMVITAGLPLKKLGTTNLIRVIKLD

SEQ ID NO: 128184 - protein, 306 aa, Unknown
  Bacterial polypetide isolated from the Sargasso Sea
PGVRLDMPSITSKDMKDITFGIKNDVDFIAASFVRNKKDLKILEDLLLKQKSESKIIAKIENQEGLDNIDEICESAWGIMVARGDLGIETSLTDLPNIQRKIMHSCAKWGKRSIVATHLLESMIQNPTPTRAEVTDVANAVYEGADAIMLSGETSIGKYPVECVKYLKSISKRTEKFQTLEYEKELITNSDWESIAVAARDLTESIKADGIIAVTRTGSTAGYISNAKPKNIPIYTFTNNINTLNQLSLVGSVIPFYLKRLNNHKKTLEHVRDVLKPLHRKKKLKFVMVSGIFSEKHSEAIQIINF

SEQ ID NO: 128185 - protein, 217 aa, Unknown
  Bacterial polypetide isolated from the Sargasso Sea
MKILDLARRTKIVATIGPATESASQISKLVEAGATTFRLNFSHGDHEEHAQRIKTIRKVSDDLGIHIGILQDLQGPKIRLGRFKNGPVNVKNGDKFILTSKNIDCNQDQANVTYDKLAEEVNVGNRILLDDGRVEMKVEDVDIKEQSLICSITVGGVLSNNKGVNFPDVQLSIRALTDKDKKDLAFGLKQGVDWVALSFVRNPSDLIEIKDLIRNHG

SEQ ID NO: 128186 - protein, 158 aa, Unknown
  Bacterial polypetide isolated from the Sargasso Sea
MGQFDQNRRTKIVATIGPATESSERIKELVQAGATTFRLNFSHGDHSEHAARIATIRQVSEELGINIGILQDLQGPKIRLGRFADGPITLANRDRFSLTSRPVSCNQTIATVTYDKLADEVTAGSRILLDDGRVEMKVEQVDQAEQTLHCSVTVGGVL

SEQ ID NO: 128187 - protein, 478 aa, Unknown
  Bacterial polypetide isolated from the Sargasso Sea
MKKRTKIIATIGPASCSSSMINKMIVGGTDVFRINLSHATIDDAKKILDILKNESIKAKRPVASLLDLQGQKIRIGSFANKKNIHLKSSTKFTLNGSLPLDKGTSKEVGISYKSLAKHVKVGDELLLSDALIKLAIVKINGNKILTNVIRGGVLKPNQGVNKKGGGLPLRGLTDKDLSNLKQALSLDIDYIAVSFVKDEKDIMKVRKILKKKNIGIIAKIERAEALKKIDQIAKASDGILVARGDLGVEIGIEQLPAVQDEIIRKSISLDKIVIVATQMMESMINNRVPTRAEVFDVANAVTSGADAIMLSAETAIGKYPSDVVHEATRICHIAEKTNTKIIKLDRRAENIDAVDQIIALSAAHAAASSQIKAIACLTETGSTPMWMSRVQSSIPIYAMTQNDYTSRRICLYKGVYSIKLNTIEYDHARANKQVIDLMVEWGAVKKGDFVIITKGDLMGTSGGTNAMKIVEVGNLVEV

SEQ ID NO: 128188 - protein, 325 aa, Unknown
  Bacterial polypetide isolated from the Sargasso Sea
KRHVNLPGISVKLPGITLSDRNDLEFALEENVDVVALSFLRNRDTVLEVREMFRERGEQIKLIAKIENQEGVDNLEEIIQVTDGIMVARGDLGIEIDMEELPQIQRKIAYLCAKYGKRLIVATQMLESMMENPVPTRAEITDIANAVFEQSDAIMLSGETSTGKYPVRCVETLVRIAKRTEVHPGVQFTENLIQEDGPEENQGKGRQMLAAAATKIARQLKVPGMLVITRKGRGATKIANLRVRGIPIFAFTESEKTISTLMLLRGVYPYFLKFVEDPELTIQNALRLLKKKQDMPSGISIVVVADIMTGEGYVNCLQVRTLPED

SEQ ID NO: 128189 - protein, 226 aa, Unknown
  Bacterial polypetide isolated from the Sargasso Sea
MQYQKPVIVATQMLDSMQYSRRPTRAETTDVANAILDGADACMLSGETAIGDHPRRVVEMMRRIAQSTERQYLNSRRQYLDELLGKSRVGAAGNAYLPKPQRLVHGLHPITQAVVEGASRIAAELDARLFVVASKSGVTAIARSKHRGAVPTIGLTDDPATLRQMTLYWGVTPVAVPEGADVNQLLSHVSEWGLQNGRLERGDRIVLVAGIGFGAGGHNMAMVHEV

SEQ ID NO: 128190 - protein, 365 aa, Unknown
  Bacterial polypetide isolated from the Sargasso Sea
IATVGPGCDDKSVLQDLVSKGVSCFRINLSHGTEDQKRHYFNLVKSLKTPSGLRPSILADIAGPKIRVKGLNEKIKITKGDPVLLSNDKNNQSSISISEGVHFEKVNPGAKILIDDGRLYLEVKELVSNQTIDCVAINDGFIENGKGVNFPGIALNVPTLTKQDEIDLSLSLSEEADWLALSFVRTPSDYGYVKDKVKSAGFDTPIIAKIEKWEAVQNLEDIIRSFDAVMVARGDLGVEMPIEQVPLIQKEVIEKANSKGKPVIIATQILDSMVDRPVPTRAEVSDIANAILDGADSLMVTGETAIGKHPKKVIKVLSKVINKTELSINYGQYSKWSTNKEINTANAISHAACAVSRSQRIGVLA

SEQ ID NO: 128191 - protein, 437 aa, Unknown
  Bacterial polypetide isolated from the Sargasso Sea
MRKTKIVVTIGPATDSPEVIDQLVENGMDCARLNFSHGTFESHAKIIKSVREAAQKHNRRVAILQDLGGIKMRLGTIDGQVQLNHGDRVSVVPADSSDDPKIIPFPQAEILKNLTKDNLIYISDGTICLEILSNDNGVVNCRVRNGGMISSYKGLNLPGAKIDLPVLTEADKEAIKFGVEQGVDWVAVSFVRSLEDVRYAKAYMKEVGATAPMMAKLERAEAVVNVDEILSEVDGVMVARGDLGVEIDMVDVPVIQKNIVSQAKQAAKVSVIATQMLRSMVVSPTPTRAEVSDISNAVLDGCDAILLSDETAVGQFPVEALTVAARTILKAEEIYPYYQDLSEDTRTQAIASGAARLVKSLGAKPVVVTNSGASARQVSRFRPDSEIAVITHDKAMLDRLALLWGCTAVGVVPAERDSSKLVSSIVETLINSETISD

SEQ ID NO: 128192 - protein, 299 aa, Unknown
  Bacterial polypetide isolated from the Sargasso Sea
KDKKDIKTARKIGCNWIALSYLQDAKLIHQTRKLISKDMGIISKIENKMALKNIDEIIKSTDSVMIARGDLAIDVGHSEVPKIQLGLIKKCNQYSKSVIVATQMLESMIENYTATRAEINDIATAIFQGADTVMLSAESAVGRYPLQAVKTMTKTIISTERYKKDHIEDFKNKIDAKKDPVKSIVLSVKDLAYNPSVKAIIAFSNSGKTAKIVSAMRPRVKIITISPNINVSRQMSLLWGVQSLNSRDANGWRDMMNISREIIKKDSEIKKNDFVVITAGLPFGNAGMTNMIRLYKVGT

SEQ ID NO: 128193 - protein, 468 aa, Unknown
  Bacterial polypetide isolated from the Sargasso Sea
MEKKAKIIATLGPAIYSEKKLKKIISLGVDAFRINFSHDIKEVKQIISQIRKLENKLNKRIAIIADLQGVKLRIGKTSSEKLRIKRNQKFTFDTNKKVGNNLRVCFPYPFIINKIKIGNKILLDDGKFTFKVIKKNKKSLVTRCLSTNCILSSNKSVHIPNIMIPLKRLTKKDKKDISTAKSMGCNWIALSYIQNSSLIKETRKLINSDIGIISKIENKIAIKNIKEIINASDAIMIARGDLAIDIGLSEVPSFQLELIKKCAALSKPVIVATQMLESMIENPSPTRAEINDIATAIFQGADAVMLSAESAIGKNPTQSVKTMSKTILSSEKYKKQHISEFKSSIDAKKNIMKSVVLSVKDLAYNPRVKGIIAFSNSGKTAKFVSSMRPSVSIITISPNVNVSRGLSLLWGVKSIKSRDARNWNDMIEISKEIIAKEKSIKKKDYVIITAGLPFGKAKMTNMIRLYEV

SEQ ID NO: 128194 - protein, 180 aa, Unknown
  Bacterial polypetide isolated from the Sargasso Sea
MSNIDLKRRTKIVATIGPATQSEEIITDLIKAGVTTFRLNFSHGDHKDHAERIKTIREVSKKLDIDIGILQDLQGPKIRLGRFKDGPVKVKKGDKFTLTSNEVECSKTIANVTYEKLSKEVSEGKRILLDDGKIEMIVEKVDIKANLFRMSGNCWRGTFKYKGCKFPRCSIIRKSINRKR

SEQ ID NO: 128195 - protein, 136 aa, Unknown
  Bacterial polypetide isolated from the Sargasso Sea
MLHTKIICTIGPASDSPEVLENLADAGMNVARLNFSHGTHDSHRNIVEKIRLLNTNREFPVAILLDTKGPEIRTGDQHMKLITGTQVRVVSDPELKDERHLFVDYPHLTEQLGQGNHILLDSGLVKLEILENHGDS

SEQ ID NO: 128196 - protein, 287 aa, Unknown
  Bacterial polypetide isolated from the Sargasso Sea
GIKHNVDFIAAFFVRNKNDLEKLDEILKKFKSSAKIIAKIENQDGLDNIDEICQSSWGVMVARGDLGIETSLTDLPNIQRNIMYACAKWGKRSIVATHLLESMINNPTPTRAEVTDIANAIYEGADAIMLSGETGIGKYPVDCVNFLKSISFKTEKFKTLGYEKNLITKSDWEYIAVAAKNLAESIEADGIIAVTRTGATASYISNAKPNGIPIFTFTNNKSTLKQLSLVGSTLSFYISRLNDHDKTLKEAEKVLKEYYKKKTNLKFIMVSGIFSEDHSEAIQIINF

SEQ ID NO: 128197 - protein, 474 aa, Unknown
  Bacterial polypetide isolated from the Sargasso Sea
MKLNKTKIIATLGPASSSKTMLSKLIMSGVDVFRVNFSHADHKDVERIVGDIKALRIKHNKHVSVLGDLQGPKIRLGNVVPETFLKKGDSILFSTKKIKNGGSNRVTINYTSFPKDVKKGETVLVDDGKIILQVEKTDRDTSVNLIVIQGGLLSSNKGVNLPSTKISLPALTPKDIKDAKFAAKLGLDWIALSFVRSKNDVLQLREILDKSSKELIPIISKIEKPQAISNMDQILKVSNGLMVARGDLGIEIPAEEVPLYQKILVKKANEARKPIIIATQMMESMIDSLTPSRAEVNDVANSVMDGADCIMLSAETSVGKYPCEVVKKVGTIIAGVEDSQPVKNKFTLPKLKSKRLITKTVCRHAALIANEIKASAVCTLTHSGYTGWQISSWRPNCLVLVFTSNKRILSQLNMLWGVKCIYYNKFQSTDKTVEDVNALAIKNRYVRKGDTVVNLASMPIKDKGQVNTLRITKL

SEQ ID NO: 128198 - protein, 276 aa, Unknown
  Bacterial polypetide isolated from the Sargasso Sea
MKTNTKIIATIGPSCDTLESLQSMVQEGVGTFRINMSHGDAESKKRLFDLVKSINIDQGERPAIIADLCGPKIRITDAPENFHPNEGNSVVLCNQKGLGEICVTDSISFSDVSIGSKILINDGKVQLEVKELASAESLNCEVIIGGEILIGKGVNFPGITLGVPALTDQDKDDLKLALNEGADWVALSFVRNAKDIQPVHAIMKDYNSHLPVMAKIEKWEALEDLQNITEAFDGIMVARGDLGVEIPSGQVPVAQKEIIELAGANGKPGCHCNAIT

SEQ ID NO: 128199 - protein, 393 aa, Unknown
  Bacterial polypetide isolated from the Sargasso Sea
EFKDGEIELASGDNFSLDLKEKLGSKSRVQLPHTEIFDAAEAGMDLLLDDGRIRLRVQKVSESVINTKVVTGGRLSARKGVNVPGVTLGLSALSEKDKSDLEFALGLGCDWIALSFVQRPSDVKEARKLIENRAAVLIKLEKPAAIDHLEELMTLTDAVMVARGDLGVELPPEKVPGLQKKIVKLCRKWGKPVVVATQMLDSMVHSPAPTRAEASDVATAVYDSADAVMLSAETAAGEYPIESVDMMNRIILEAEGDEAYQASITSKQNVVEPTVSDAITLAARQVAETVNANCIVTYTTSGSTTLRAARERPTVPILCVTSSLLTARRMAIAWGIHSVHIDQEERFSTVVKRAVDIAETQGFASSGDHIVITAGVPMGKSGSTNVLRIERIP

SEQ ID NO: 128200 - protein, 470 aa, Unknown
  Bacterial polypetide isolated from the Sargasso Sea
MEKKAKIIATLGPAIYTENKLKKLVDLGVDAFRINFSHNTNGINKIVSKIRKVEKINGKKLSLIADLQGVKLRIGKVKNEHQQIKFNQRFIFDSKKIPGDSKRVNFPHPKIIKKLKKGNKILIDDGKYLFTVISKKGNAVTTKCRSRNCILKSNKSFHVPNLDITFNKLTGKDKKDIKTAIKLGCNWIALSYLQNEKLILETRRLIKKDMGIISKIENKHALKNIKKIIQATDSIMIARGDLAVEIGHSEVPKVQLSLIKKSSQFSKSVIVATQMLESMIKNTTATRAEINDIATAIFQGADTLMLSAETAIGKFTTQTVSIMTQTIQSTEKYKREHIEDFKNSIITNKDPVKSILRSVKDIAYNPNVKAIIVFSNSGKSAKLVSSMRPAAKIVTISPNINVSRQVSLLWGVQSINSRDANGWKDMMSISKEIIKKLKFIKKNDFVIITAGLPFGKAGMTNMVRLYKVGS

SEQ ID NO: 128201 - protein, 348 aa, Unknown
  Bacterial polypetide isolated from the Sargasso Sea
MERRTKIISTVGPKTNTEFFISKLCVAGTNVIRINMSHASHGELEKIIRIVKRINKSKICSVGIMIDTQGPEIRTAPITKSIQLIKGEVVHLTPKALKGAKYIIVDNLKQVKGLKKGGKVSFDNGAIDLKIRNIDKDKNVKCEVLDSGEIGSRKHVNFPGAKVTLPSLTDKDKKDIKYAISKGVDFIALSFCRSKKDLNELKKFLGKKVSDVEIFVKIEDQEGLSNLEEVIENSDGVMVARGDLGIETDITNLPYIQRNIIKIASSKGKKSIVATQLLESMIDSPHPSRAEVSDVANAVYEGTDALMLSGETSIGKYPVECVKYIDQVARNAERSETLHFENNSNNKP

SEQ ID NO: 128202 - protein, 243 aa, Unknown
  Bacterial polypetide isolated from the Sargasso Sea
GLSNLEEVIENSDGVMVARGDLGIETDITNLPYIQRNIIKIASSKGKKSIVATQLLESMIDSPHPSRAEVSDVANAVYEGTDALMLSGETSIGKYPVECVKYIDQVARNAERSETLHFENNFKQQTDWHKLAATSVKLASKIDADAIVVLTRSGFTANLISRAKPTVPVFAFSNRLETQSKLSISSSTQNLFLKFTKDHEKTINLAFEVLKKHYKMKGRKKFVVISGVFSDIYADAIQIRSFG

SEQ ID NO: 128203 - protein, 441 aa, Unknown
  Bacterial polypetide isolated from the Sargasso Sea
MKRTKIICTIGPATESFSSLKKLYKAGMNVARLNMSHSDHKSAKKIIDRLKKLNKQVKIPVGIMLDTQGPEIRTGNSASVVDLVPGQIISFTVRDNVDVETTSIRVNYDELIESVKVGTLISLDNGLLNFKVLKKFENELECRVIDGGKLGSKRHVNLPGIRINLPAVTEKDKEDITFGLEEGVDFIALSFVRSANDIDDLRKFLGKRQKGVKIISKIEDREGLTNIDQICEASDGVMVARGDLGIETDLFNLPNIQRKIMSKCAENGVRSIVATHLLESMIDNPTPTRAEVTDIANAIYEGADAVMLSGETSIGKYPVDCVAYISKISKQTEKYRTLGYESKLVADTDWQYLGIAAKSMAESIQADGIIAITRSGQTAEIVSNAKPFMIPVYAFSNNRKTLNQLSLAGSVNSFYSRMYSDHEKNVDSALKVLQKELNPNK

SEQ ID NO: 128204 - protein, 174 aa, Unknown
  Bacterial polypetide isolated from the Sargasso Sea
MESFMPRRTKIVTTLGPATDREGILEGIIRAGADMVRMNFSHGTAEDHILRANQVRDIAAKLGRHVAIMGDLQGPKIRVSTFKDGKIYLAVGDKFILDAALGKGEGCQEQVGIDYKSLPGDVIAGDILLLDDGRVQLKVEQVEGTRIHTSVTVAGPLSNTRASTRRVAVSPPRP

SEQ ID NO: 128205 - protein, 366 aa, Unknown
  Bacterial polypetide isolated from the Sargasso Sea
MFTRTKIICTIGPATNSYSSLEELVLSGMDVARINMSHATHENASNIIEFIHKINKKHKTNISVLLDTQGPEIRTGDTKLPIDLKSGDIVSLTVRDEVDVETSSIKINYKGLIQSVTKGSKISVDNGLINFEVISKDYETLECKVIDGGKIGSKRHVNLPGVRINLPSITTKDIEDIKFGIKSGVDFIALSFVRSADDITELQKLISKNKSSVKIISKIENQEGLDNIEDICQSSWGVMVARGDLGIETSLTNLPNIQRKIMLSCATHGKRSIVATHLLESMINNPTPTRAEVTDIANAVYEGADAVMLSGETSIGKYPEECIKFMKSIVAETEKFKTLGYENNLQKNSDWEYIGQAAKNLAESMK

SEQ ID NO: 128206 - protein, 287 aa, Unknown
  Bacterial polypetide isolated from the Sargasso Sea
DIDIVAVSFVRDANDIKKVREIIDKNIKIIAKIELKNAVKNLDSIIDEADGVMVARGDLGVQLDLEKVPFIQKQILNEANAKGKITVTATEMLQSMKESHRPTRAEVTDITNAILEGTDCVMLSAETAIGNHPEVVVSAMSDICKEADSRNDTSALRFKETSTVDTLTTSLAKAAVQVANEIEAKAIVAFTETGRTPLLISNYRPEAPIFTMTTIDKTYNQMNLLWGVQQIKIDRLETTPEMFEIADTWLQNNKNFKKNDKVVIVAGTPPNKEAATNLIRVMKIGEF

SEQ ID NO: 128207 - protein, 244 aa, Unknown
  Bacterial polypetide isolated from the Sargasso Sea
MGQFDLNRRTKIVATIGPATESPERIKELVKAGATTFRLNFSHGDHSEHAARIATIRQVSEELGQTIGILQDLQGPKIRLGRFAEGPITLANGDPFTLTSRPVSCDKTIATVTYDKLADEVTAGSRILLDDGRVEMKVDTVDKAQQTLHCTVTVGGVLSNNKGVNFPDVQLSVRALTDKDKTDLAFGLSQGVDWVALSFVRNPSDMEEIRGLIREQGHETPVVAKIEKFEAIDQIDSILPLCDG

SEQ ID NO: 128208 - protein, 147 aa, Unknown
  Bacterial polypetide isolated from the Sargasso Sea
MGQFDQNRRTKIVATIGPATESSERIKELVQAGATTFRLNFSHGDHSEHAARISTIRQVSEELGINIGILQDLQGPKIRLGRFAEGPITLANGDSFSLTSRPVSCNQSIATVTYDKLADEVTAGSRILLDDGRVEMKVEQVDQANRP

SEQ ID NO: 128209 - protein, 468 aa, Unknown
  Bacterial polypetide isolated from the Sargasso Sea
MNRTKIIATIGPACANVKMLQKLIDHGVVCFRINLSHGSDKEKEEYFDLVRSLQTQHGLRPTILADLSGPKIRVSNLENPINLSKGHKIKISNEEVATGVIPVSKEVRFKKVNPGAQILIDDGRTSLKVVEHVSDQTLLCVALEDGIVENRKGVNFPEIDLNVPALTQQDEKDLLLSLEKGADWIALSFVRSPSDYTLISTKIKKAGYQTPVIAKIEKWEAVQNLQEIIQSFDAVMVARGDLGVEIPIAKVPLVQMDVIEKAHQAGKPVIVATQILDSMVERPVPTRAEVSDIANSILDGADALMVTGETAIGKHPKKVIKVLGGVIRETESAIKYHSKFEISEDNTTNTARAISHAACSVSSDQGINILVTMTHSGSTARMAARYRPSARIVAMTPFKAICRQLEIVWGVSPILVEEYESADEIPEIASLALKEKGLLNVGEKFVITGGVPVGIPGTTNYLSVLKIS

SEQ ID NO: 128210 - protein, 258 aa, Unknown
  Bacterial polypetide isolated from the Sargasso Sea
MIIVEIHGNVRVVASATLQARSMPLPDHQRRTKIVATIGPATESPDSIRQLILAGATTFRLNFSHGDHEEHAQRAATIRQVAHELGVHVGILQDLQGPKIRLGRFADGPITVGKGDSFALTARDVPCTQTIATVTYDKLASEVEPGSRILLDDGKVEMKVDWIDQAEQTLHCKVTVGGKLSNNKGVNFPDCLLSVRALTAKDRNDLAFGLQLGVDWVALSFVRNPSDMQEIKELISSLGHATPVVAKIEKFEAIDQID

SEQ ID NO: 128211 - protein, 363 aa, Unknown
  Bacterial polypetide isolated from the Sargasso Sea
MPHKEIFDAAKAGMDLLLDDGRIRLRVQKVSNHVIDTKVVTGGRLSNRKGVNVPGVTLGLSALSEKDKTDLEFALGLGCDWIALSFVQRPSDVKEARKLIADRAAVLIKLEKPAAIDHLEELMTLTDAVMVARGDLGVELPPEKVPGLQKKIVKLCRKWGKPVVVATQMLDSMVHSPAPTRAEASDVATAVYDSADAVMLSAETAAGEYPIESVDMMNRIILEAEEDEAYQSSIASNQNVVEPTVSDAITLAARQVAETVSANCIVTYTTSGSTTLRAARERPTVPILCVTSSLATARRLAIAWGIHSVHIEQEERFSAVVKRAVDISETQGFASSGDHIVITAGVPMGTPGSTNVLRIERIP

SEQ ID NO: 128212 - protein, 465 aa, Unknown
  Bacterial polypetide isolated from the Sargasso Sea
MTRKTKIIATVGPSVNSKDGIKKLVEAGADVLRLNFSHGTEEDHSNVVKWIRELEKSVAIMQDIQGPKIRTGEAKESTQFKQSHEIKITNKETISDDNVIYINYKDLFKDLNSGERIFIDDGQIVIRIIKKTKSSMLGQIEIGGELRSNQGVAFPDSKLSVSAITEKDIADLKFGNKLDVDIVAVSFVRDANDIKKVREIVDKNIKIIAKIELKNAVKNLDSIIDEADGVMVARGDLGVQLDLEKVPFIQKQILNEANAKGKITVTATEMLQSMKESHRPTRAEVTDITNAILEGTDCVMLSAETAIGNHPEVVVSAMSDICKEADSRNDTSVLRFKETSTVDTLTTSLAKAAVQVANEIEAKAIVAFTETGRTPLLISNYRPEAPIFTMTTIDKTYNQMNILWGVQQIKIDRLETTPEMFEIADTWLQNNKKFKKNDKVVIVAGTPPNKEAATNLIRVMKIGEF

SEQ ID NO: 128213 - protein, 301 aa, Unknown
  Bacterial polypetide isolated from the Sargasso Sea
HATHDEVERIVDDVNDLRKELGSNVTLLGDLQGPKIRIGELENNIELKKNQSLSICSNLSESNGVDKIFISYPSFAKDVKPGENILVDDGKLIFKVVSTNKKDTVDIKVVQEGVLKPRKGVNLPNTKISQPALTEKDIDDAKFAVKKSFDWIALSFVRSKKDVLQLRELIESQCDYHIPIISKIEKPQAIEKIDSIIKASNGVMVARGDLGIEIPAEEVPLNQKKIVAKCKKRGIPVIIATQMMESMIDSLTPSRAEVNDVANSVMDGADAIMLSGETSMGKYPCEVVKKIGDIIFGVEDS

SEQ ID NO: 128214 - protein, 279 aa, Unknown
  Bacterial polypetide isolated from the Sargasso Sea
MEEIRGLIREQGHETPVVAKIEKFEAIDQIDAILPLCDGVMVARGDLGVEMPAEEVPLLQKELIQKANSLGIPIITATQMLDSMASSPRPTRAEVSDVANAILDGTDAVMLSNETAVGDFPVEAVQTMATIACRIEKDYPERSVDSHLASTVPNALSGAVSTIASQLNASAILPLTKTGATAKNVSKFRPAATILAITPDPTVACRLQLVWGVKPLVIPQHERTTHTFLAAMTKAKTLGLLKEGDLVVQTAGTHTGVSGSTDLVKVGIVSSEESPVNMI

SEQ ID NO: 128215 - protein, 350 aa, Unknown
  Bacterial polypetide isolated from the Sargasso Sea
VDWIALSFVRNPSDINEIKNLINKNGHSTPVVAKIEKFEAIDQIDTVLPLCDGVMVARGDLGVEMPAEEVPLLQKELIRKANSLGIPIITATQMLDSMASNPRPTRAEVSDVANAILDGTDAVMLSNETAVGDYPVEAVETMATIARRIERDYPLKAIESHLPSTIPNAISAAVSNIARQLDAGAIIPLTKSGSTARNVSKFRPPTPILATTTERSVARRLQLVWGVTPIVVKNDERTAKTFSLAMQIAQEMGILNQGDLVVQTAGTLTGISGSTDLIKVGLVRKIVSRGISIGEIGVTGKARIIKNNLDISLICPGEILFVPKELMKYIPLSKNIAGIVTNQNVNDVYA

SEQ ID NO: 128216 - protein, 284 aa, Unknown
  Bacterial polypetide isolated from the Sargasso Sea
LSHKEIYNCVKKDTLILIDDGKIKLEVIKKTGTQIVTQIIDGGTLTSNKGLNLPNAILETDSLTLKDKKDLKFILKNNIEWIAISFVQKLSDVLKVKKIVNSKAAIISKIEKPSALNELNEIILASDAIMVARGDLGVELPPERVPGIQKDIILACRTNGKPVIVATQMLESMILSPAPTRAEASDVATAVFDGADAVMLSAETAVGRYPIETVKIMDRIIKASEHHIKTHRKETNKKLMVDNSIYYAVSRSAVDLAETVNARAIVAFTASGKTALRISRERPD

SEQ ID NO: 128217 - protein, 279 aa, Unknown
  Bacterial polypetide isolated from the Sargasso Sea
MKKKILVNKTKIIATIGPSSYKKSVLEDMIISGVDAVRLNFSHGEFDKHKKVIENTRKISDKLNIPIAIIQDLQGPKIRIGKIKNDKIKLNDGQNLDIQLSDVLGTNKIISISNKNLFQDINPDEHILIDDGKIKLKVLKKTRELISTIVESGGELKSNKGVNLPDTDILLSSLTEKDKKDLDFGLENGVDWIALSFVRSSKDVNELRKIINSKKLKTKIIAKIEKPQALKNLDKIIESSDALMVARGDLGVEIPMESVPIYQKRIVNKCNKQFKPVII

SEQ ID NO: 128218 - protein, 304 aa, Unknown
  Bacterial polypetide isolated from the Sargasso Sea
KRVTFPHAEIYDHLTPNTTLLINDGRIRLQVLEQNQNSLITEVLNDGVISNNKGVNIPDVILPIDSLTSKDKADLQKALEMNVDWVALSFVQQAEDINKLKKIVDGKALVMAKIEKPSAMKNIDEIIQAADGIMIARGDLGVEMPTEKVPIAQKNIIKRCRHYGKPVVVATQMLESMISNLVPTRAEASDVANAIYDGTDAVMLSGESAMGNYPVESVSTMDRIIENVEKDKNNFNLEIEDEENIKKIDNTDAITNAAYSIAKNADAKAIITFSVSGKTTLRMARERAPVQIIGLSPNIETSRK

SEQ ID NO: 128219 - protein, 113 aa, Unknown
  Bacterial polypetide isolated from the Sargasso Sea
MAFVATKIICTIGPVTQSEDMLEKLMDAGMNVARMNFSHGTHEYHAQTIANIRAVCERTGKSCAIMLDTKGPEIRTIKLAGGKNVDLEAGQKFTFLTDTAVVATAPRSRSPTQ

SEQ ID NO: 128220 - protein, 304 aa, Unknown
  Bacterial polypetide isolated from the Sargasso Sea
RRTKIVATIGPATQSEEIITNLIKAGVTTFRLNFSHGDHKDHAERIKTIREVSKKLDIDIGILQDLQGPKIRLGRFKDGPVKVKKGDKFTLTSNEVKCTNTIANVTYDKLSQEVSEGKRILLDDGKIEMIVEKVDKKANNLECIVTVGGVLSNNKGVNFPDVQLSVKALTEKDKEDLKFGLSEGVDWVALSFVRNPSDINEIKDLINKNGHSTPVVAKIEKFEAIDQIDSVLPLCDGVMVARGDLGVEMPAEEVPLLQKELIRKANSLGIPIITATQMLDSMASNPRPTRAEVSDVANAILDGT

SEQ ID NO: 128221 - protein, 276 aa, Unknown
  Bacterial polypetide isolated from the Sargasso Sea
MKELFTAGCDVFRLNFSHGDIETHRKNFEYIRSLEEKYNHATCVLADLQGPKLRVGSFKNNKENLIKGEKFILDLSSEPGSNKRVNFPHAEIYEYLTPNSILLVNDGRIRLQVIEQSADKLITEILNDAEISNNKGVNIPDVILPIDALTKKDKSDLIKALDMGVDWVALSFVQQAEDIIKLKKIIGNKALVMAKIEKPSAVKNIDDIVNVADGIMIARGDLGVEMPTEQVPIAQKNIIRRCRHFGKPVVVATQMLESMINNLVPTRAEASDVANA

SEQ ID NO: 128222 - protein, 243 aa, Unknown
  Bacterial polypetide isolated from the Sargasso Sea
NCNLPGVKVDIPVLTAKDINDVQNFCCKNKMDFVAASFVQTGEDVQLIRKTLDDAGGQNVQIICKIENEAGMENFDEILKYTDGVMVARGDLGMEIPSEKVALAQKMMITKCNIAGKFVICATQMLESMCDNPLPTRAEMLDVANAVFDGADATMLSGETANGAFPAKAVATMSAIAQNAEEGLEGDMTYQNIWNNTPKPVSPLEATASSAVKACLDMGAVALVVFADMMLPATLLSKYKPPV

SEQ ID NO: 128223 - protein, 225 aa, Unknown
  Bacterial polypetide isolated from the Sargasso Sea
EVVIGGEISNHKGVNVPGVVLPLSSLTDKDRKDMQFGLDHGVDWVALSFIQRPEDLAEARRLIGGRAPILTKLEKPAAIDRLDEIIELSDAVMVARGDLGVEMPPEDVPVLQRRILRACRQTGKPVIVATQMLESMIDSPQPTRAEASDVATAVYDGSDAIMLSAETAAGKYPVESVEMMNRIVKRVERDSVWRSTMDANHPEPEATSADAISAAARQIAHTLSA

SEQ ID NO: 128224 - protein, 208 aa, Unknown
  Bacterial polypetide isolated from the Sargasso Sea
MLDHCSKFDIYSNPAAQRQTGIICTIGPKTQAPDKLTMLRMAGLNIVRMNFSHGSYEYHAETIANARAAVAESPLDGRLVGIALDTKGPEIRTGALKPDLGSTVMLEKGAKLTVTTDAAFKDSCDASTLYMDYVNLPKVMTAGQSIMVDDGLIELKVEAVDEAAGTLACEVVNAGALGGKKGCNLPEVDVDLPALSEKDKADLAFAVS

SEQ ID NO: 128225 - protein, 296 aa, Unknown
  Bacterial polypetide isolated from the Sargasso Sea
LITEVLNDGIISNNKGVNIPDVILPIDSLTNKDRSDLQKALEMNVDWIALSFVQQADDIIKLKKIIDGKALIMAKIEKPSAVKNIDEIIKVADGIMIARGDLGVEMPTEKVPIVQKNIIKRCRHFGKPVVVATQMLESMISNLVPTRAEASDVANAIYDGTDAVMLSGESAVGDYPIESVSTMNNIIENVEKDKNNFNLSIDNLVSDSKVDNTDAITNAAYSIANNAGAKAIITFSVSGMTTMRMARERAPVQIIGLSPNIKTARKMQIIWGVNSCYSTKDAANTTEMVNIACGVV

SEQ ID NO: 128226 - protein, 249 aa, Unknown
  Bacterial polypetide isolated from the Sargasso Sea
MKLRNRKAKIVATLGPACETEKDIEKLFLSGADVFRLNFSHGDHGDHKKKVKIIRNLEKKHDRYICILGDLQGPKFRVGRFLNVKEQLKKNQIFTFDQNKKEGDSSRVYLPHKEIFKSIAIGQRLLVNDGKVRLKVKSKSTSAIKCVVTDGGEISNNKGLNIPDTKLDLKIITPKDKKDLELAIKLDVDWIALSFIQTTKDLLTAKKLIPAKFKVMVKVEKPSAMEEIESITENSDGIMVARGDLGVET

SEQ ID NO: 128227 - protein, 260 aa, Unknown
  Bacterial polypetide isolated from the Sargasso Sea
PEVLENLADAGMNVARLNFSHGTHDSHRNIVEKIRLLNTNREFPVAILLDTKGPEIRTGDQHMKLITGTQVRVVSDPELKDERHLFVDYPHLTEQLGQGNHILLDSGLVKLEILENHSDSLACRVLDGGTITPKRHVNLPGISVKLPGITLSDRKDLEFALEENVDVVALSFLRNRDTVLEVREMFRERGEQIKLIAKIENQEGVDNLEEIIQVTDGIMVARGDLGIEIDMEELPQIQRKIALSLCEIRETIDCCNPDAG

SEQ ID NO: 128228 - protein, 276 aa, Unknown
  Bacterial polypetide isolated from the Sargasso Sea
SSPLKIHSLFQAGADIFRLNFSHGTHEDHRKRVFHIRQYEKRLGRPIAILGDLQGPKIRIGLFKKTSTVLNNNQRFVLDLNPKEGDQNRVFLPHKEIFKSVKKNNKILIDDGKIILNINKVLSDQIITEVLVGGKISNRKGVNVPEAFIKMSSLTEKDVKDLKFCLDLSLDYIALSFVQKAKDLNDLKKYVGNHTGIMAKFEKPLAIKNMNEILQYCDAAMVARGDLGVEMPPEEVPIIQKRIVQSCRDYGIPVVVATQMLDSMVESPSPTRAEAS

SEQ ID NO: 128229 - protein, 306 aa, Unknown
  Bacterial polypetide isolated from the Sargasso Sea
MSNIDLKRRTKIVATIGPATQSEEIITDLIKAGVTTFRLNFSHGDHKDHAERIKTIREVSNKLDIDIGILQDLQGPKIRLGRFKDGPVKVKKGDKFTLTSNEVECTNKIANVTYDKLSKEVREGKRILLDDGKIEMIVEKVDITANLLECLVTVGGVLSNNKGVNFPDVQLSVKALTEKDKEDLKFGLSEGVDWIALSFVRNPSDINEIKDLINKNGHSTPVVAKIEKFEAIDQIDTVLPLCDGVMVARGDLGVEMPAEEVPLLQKELIRKANSLGIPIITATQMLDYMASNPRPTRAEVSDVQMQ

SEQ ID NO: 128230 - protein, 275 aa, Unknown
  Bacterial polypetide isolated from the Sargasso Sea
AEALTEKDKQDIKTAAQIGVDYLAVSFPRSGADLNYARELAEAAGCYAKICAKVERAETVATDDAITDIISASDAVMVARGDLGVEIGDAELVGVQKKLIARSRQLNKVVITATQMMESMIDSPMPTRAEVMDVANAVLDGTDAVMLSAETAAGSFPIETVQAMARVCEGAETHPSVKISKHRMDQQFSSTSESIALSAVYAANHLPSVKAIVGLTESGTTPKLMSRITTSLPIIAMSRHEGTLNAMALYRGVKPVFFDSSNSEPGKLKHDVVAC

SEQ ID NO: 128231 - protein, 285 aa, Unknown
  Bacterial polypetide isolated from the Sargasso Sea
MDDGKLQFKVKDISKDEIKTEVVVGGPIKSNKGLNLPDVVLNTSPLTAKDIEDLKFILNQEIDWIALSFVQKLNDVEEVKKYIGDKAGVIAKIEKPSALKELNEIIEACDSIMVARGDLGVELAPEEVPGIQKEIILKCRQAGKPVIVATQMLESMIETPSPTRAEASDVATAVFDGADAVMLSAETAVGSYPLETVNIMDRIITSAENHIKMNPGDGPQNLRRENFIYNAVSRSAVSLAESVNAKAVVAFTASGNTAYRMSRERSNLLLVVMTPEINVKRKLSL

SEQ ID NO: 128232 - protein, 253 aa, Unknown
  Bacterial polypetide isolated from the Sargasso Sea
KGDKFTLTSNEVECTNTIANVTYDKLSNEVSEGKRILLDDGKIEMIVEKVDIKANTLECMVTVGGVLSNNKGVNFPDVQLSVKALTEKDKEDLKFGLSEGVDWIALSFVRNPSDINEIKDLINKNGHSTPVVAKIEKFEAIDQIDTVLPLCDGVMVARGDLGVEMPAEEVPLLQKELIRKANSLGIPIITATQMLDSMASNPRPTRAEVSDVANAILDGTDAVMLSNETAVGDYPVEAVETMATIARRIERDY

SEQ ID NO: 128233 - protein, 225 aa, Unknown
  Bacterial polypetide isolated from the Sargasso Sea
PIAQKNIIRRCRHFGKPVIVATQMLESMIDNLVPTRAEASDVANAIYDGTDAVMLSGESAVGTHPIEAVKTMNKIIETVENDKNNYDLRIEDDNIEDVDNTDAITLAAYSIAKKSNAKAIITFSVSGRTTRRMARERAPVQIVGLSPKIDTTRRMQLYWGVNSCHSNEDAQNAQEMVKIACTLVKTKKLVNPGDSVVISAGVPFGSAGTTNLLRLAEIIADKDLT

SEQ ID NO: 128234 - protein, 225 aa, Unknown
  Bacterial polypetide isolated from the Sargasso Sea
DARVLTGAPRPTRAEATDVANAVLDGTDCVMLSGETAAGSYPVEAVSIMADICRESEAYVDNYAVFKNLMDHQSLPMNPLESLASSAVRSAHKVGAELIVCLAKSGRTAQLLAKYRPNATILAVCVEDPNDQSHDAASAARRLLLSRGIRPVVAPVSWRASAEETAADADAGSKHHAVVNVTETKNLMQNAVDYAKEHGMVNPGAMVVGVHRVVGDLILKIVQCH

SEQ ID NO: 128235 - protein, 285 aa, Unknown
  Bacterial polypetide isolated from the Sargasso Sea
ADVFRLNMSHGTHDEIAKRHKIIRQIEDELSSPIAILADLQGPKLRVGPFKNGVEELNENEKFRLDLKDELGTKDRVQLPHSEIFQALHEGAHLLINDGKIKLVVEKCGPDFADCLVLSGGEISDRKGVNVPDVILPLAALSEKDRADLDFICDLGIDWLALSFVQRAEDIVEARNLIAGRASVISKIEKPSAVKSFDEILKVSDGVMVARGDLGVELPVQNVPPIQKRLVRKCRAAAKPVIVATQMLESMIESPMPTRAEVSDVATAIYEGSDAIMLSAESAAG

SEQ ID NO: 128236 - protein, 294 aa, Unknown
  Bacterial polypetide isolated from the Sargasso Sea
SLGFSTPVVAKIEKFEAIDQIDMILPLCDGVMVARGDLGVEMAAEEVPLLQKELIRKANSMGIPIITATQMLDSMVSNARPTRAEVSDVANAILDGTDAVMLSNETAVGDYAIEAVETMARIARRIEQDYPNRQPDTQLTSTIPNAISMAVSTIATQLDAAAILPLTKSGATARNVSKFRPATPILAITSDVKVARQLQLVWGVNPLVIANQSSTSRTFSMAMGVAQEQSLLQEGDLVIQTAGTLAGVSGSTDLVKVGIVSAVLGRGSGYGSQSVSGQVRVANSPAEAARIESG

SEQ ID NO: 128237 - protein, 300 aa, Unknown
  Bacterial polypetide isolated from the Sargasso Sea
VSARFSGPDMAQFEKNRRTKIVATIGPATESAERIRELVQAGATTFRLNFSHGDHSEHAARIATIRKVSSELGQHIGILQDLQGPKIRLGRFAEGPITLGKGDRFALTSRQVSCNQTIATVTYDKLAEEVTAGSRILLDDGRVEMKVEEIDQSEQTLHCSVTVGGVLSNNKGVNFPDVQLSVRALTDKDREDLAFGLQQGVDWVALSFVRNPSDMQEIRELIRSHGFSTPVVAKIEKFEAIDQIDTIMPLCDGVMVARGDLGVEMPAEEVPLLQKELIRRANSLGIPIITATQMLDSMAS

SEQ ID NO: 128238 - protein, 291 aa, Unknown
  Bacterial polypetide isolated from the Sargasso Sea
KIEKFEAIDQIDTVLPLCDGVMVARGDLGVEMPAEEVPLLQKELIRKANTLGIPIITATQMLDSMASNPRPTRAEVSDVANAILDGTDAVMLSNETAVGDYPVEAVQTMATIARRIERDYPLKAIESHLPSTIPNAISAAVSNIARQLDAGAIIPLTKSGSTARNVSKFRPPTPILATTTERSVARRLQLVWGVTPIVVKNDERTAKTFSLAMQIAQEMGILNQGDLVVQTAGTLTGISGSTDLIKVGLVRKIVSRGTSIGEIGVTGKARKINTNLDLSLICPGEILLSKR

SEQ ID NO: 128239 - protein, 298 aa, Unknown
  Bacterial polypetide isolated from the Sargasso Sea
VQLPHPEIFQALHEGAHLLINDGKIKLMVEKCGPDFADCLVLNGGEISDRKGVNVPDVILPLAALSGKDRADLDFICDLGIDWLALSFVQRAEDIVEARDLIAGRASVISKIEKPSAVKSFDEILKVSDGVMVARGDLGVELPVQNVPPIQKRLVRKCRAAAKPVIVATQMLESMIESPMPTRAEVSDVATAIYEGSDAIMLSAESAAGQFPIQAVETMNNVAIEVESDPTYTEVMEASRRAKRNSVADGIVSAAREIAETTDIKAICCFTQTGTTALLTARERPRVPIIALSSEIET

SEQ ID NO: 128240 - protein, 322 aa, Unknown
  Bacterial polypetide isolated from the Sargasso Sea
LLDDGKIEMIVEKVYIKANHLECLVTVGGVLSNNKGVNFPDVQLSVKALTEKDKEDLKFGLSEGVDWIALSFVRNPSDINEIKDLINKNGHSTPVVAKIEKFEAIDQIDTVLPLCDGVMVARGDLGVEMPAEEVPLLQKELIRKANSLGIPIITATQMLDSMASNPRPTRAEVSDVANAILDGTDAVMLSNETAVGDYPVEAVETMATIARRIERDYPLKAIESHLPSTIPNAISAAVSNIARQLDAGAIIPLTKSGSTARNVSKFRPPTPILATTTERSVARRLQLVWGVTPIVVKNDDRTAKTFSLAMQIAQEMGILNQG

SEQ ID NO: 128241 - protein, 317 aa, Unknown
  Bacterial polypetide isolated from the Sargasso Sea
NKLSQEVSEEKRILLDDGKIEMIVEKVDIKANLLECLVTVGGVLSNNKGVNFPDVQLSVKALTEKDKKDLKFGLSEGVDWIALSFVRNPSDINEIKDLINKNGHSTPVVAKIEKFEAIDQIDTVLPLCDGVMVARGDLGVEMPAEEVPLLQKELIRKANTLGIPIITATQMLDSMASNPRPTRAEVSDVANAILDGTDAVMLSNETAVGDYPVEAVETMATIARRIERDYPLKAIESHLPSTIPNAISAAVSNIARQLDAGAIIPLTKSGSTARNVSKFRPPTPILATTTERSVARRLQLVWGVTPIVVKNDERTAK

SEQ ID NO: 128242 - protein, 288 aa, Unknown
  Bacterial polypetide isolated from the Sargasso Sea
MRRQRNIKIVATLGPSSSDYDTIKELHLAGADVFRLNMSHGTHDEIAKRHKIIRQVEDELSSPIAILADLQGPKLRVGQFKNGVEELTENEKFSLDLKDELGTKDRVQLPHPEIFQALHEGSNLLINDGKIKLMVEKCGPDFADCVILNGGEISDRKGVNVPDVILPLAALSEKDRTDLDFICDLGIDWLALSFVQRAEDIVDARNLIAGRASVMSKIEKPSAVKSFDDILKVSDGVMVARGDLGVELPVQNVPPIQKRLVRKCRAAAKPVIVATQMLESMIESPIPT

SEQ ID NO: 128243 - protein, 288 aa, Unknown
  Bacterial polypetide isolated from the Sargasso Sea
MKRNRKAKILATLGPSSSNKKIIEDLFAAGCDVFRLNFSHGDIEVHRKNYQTIRLLEDKYKHASCVLADLQGPKLRVGLFKNTKESLIKGEKFTLDLSPELGDNKRVNFPHAEIYEFLTPNTILLVNDGRIRLQIIEQHNDSLVTEILNDSEISNNKGVNIPDVILPIDSLTNKDKSDLIKALDMGVDWVALSFVQQADDINKIKKMIGNKALVMAKIEKPSAVKNIDEIINAADGIMIARGDLGVEMPTEQVPIAQKNIIRRCRHFGKPVVVATQMLESMIDNLVPT

SEQ ID NO: 128244 - protein, 249 aa, Unknown
  Bacterial polypetide isolated from the Sargasso Sea
GVDWIALSFVRNPSDINEIKDLINKNGHSTPVVAKIEKFEAIDQIDTVLPLCDGVMVARGDLGVEMPAEEVPLLQKELIRKANTLGIPIITATQMLDSMASNPRPTRAEVSDVANAILDGTDAVMLSNETAVGDYPVEAVETMATIARRIERDYPLKAIESHLPSTIPNAISAAVSNIARQLDAGAIIPLTKSGSTARNVSKFRPPTPILATTTERNVARRLQLVWGVTPIVVKNDERTAKTFSLAMQI

SEQ ID NO: 128245 - protein, 278 aa, Unknown
  Bacterial polypetide isolated from the Sargasso Sea
VIKLKKIINNKALVMAKIEKPSAVKNLDAIIENSDGIMIARGDLGVEMPTEKVPIVQKNIIKRCRHFGKPVVVATQMLESMINNITPTRAEASDVANAIYDGSDAVMLSGESAVGNNPVETINVMNSIIESVEHDKDNFDLDMEEINIKRKVDNTDAITNAAYYIARNAGAKAIITFSVSGKTTIRMAKERAPVQIIGMSPNLSTARNLQLVWGVNSCHGEDAQSATEMVKIACAIAKEKELVKPDDSVIITAGVPFGNAGTTNLLRIAKIIADKDLT

SEQ ID NO: 128246 - protein, 264 aa, Unknown
  Bacterial polypetide isolated from the Sargasso Sea
FRKNPSDINEIKDLINKNGHSTPVVAKIEKFEAIDQIDTVLPLCDGVMVARGDLGVEMPAEEVPLLQKELIRKANSLGIPIITATQMLDSMASNPRPTRAEVSDVANAILDGTDAVMLSNETAVGDYPVEAVETMATIARRIERDYPLKAIESHLPSTIPNAISAAVSNIARQLDAGAIIPLTKSGSTARNVSKFRPPTPILATTTERSVARRLQLVWGVTPIVVKNDERTAKTFSLAMQIAQEMGILNQGDLVVQTAGTLTGI

SEQ ID NO: 128247 - protein, 298 aa, Unknown
  Bacterial polypetide isolated from the Sargasso Sea
MADGLIRLQVIEVSGIKGSTVMCNVIDGGPVSSRKGINVPGTLVDLPAIGPKDHAALAHALKSGADWVAVSYVRTAEDIRPAREAIKAAGFHTPIIAKIEHPSALSNLNSILDAADAVMVARGDLGVEIPLEQVPLAQQRIIDSALMRGMVVIVATQMLESMTYSPRPTRAEVSDVSTAIRHGGTAVMLSGETASGDYPIKAVETMVKIAQATEDGLTSTGGTPGALTKFRSTRAVAHAGVELARLAEARHILVATQHGNAPRLVGGYRPNANITAVTNQIRAARRMCLLPGVSSVMV

SEQ ID NO: 128248 - protein, 287 aa, Unknown
  Bacterial polypetide isolated from the Sargasso Sea
SRQGVNLPGVNLSVAAMSQDDWHHAEWAAAAGADFVSLSFVRSPVEVKLLKELLRTRGSQARVIAKIEKREAIENLESIVQAAEAVMVARGDLGVETDVASMPMVQKQIIRICQRYQKPVIVATQMLDSMHHSKRPTRAETTDVANAILDGCDACMLSGETAIGEHPCLVVDMMRRIASETEKQYLADRWHYMGGRFLGEKKNIGVPVQEFLPSPEFLIDGLHPITQAVVDGASRIAGEVGAKLFVVASRSGLTAIARSKRRGAVPTIGLSDNASTLRQMSLYWGVT

SEQ ID NO: 128249 - protein, 294 aa, Unknown
  Bacterial polypetide isolated from the Sargasso Sea
DISSPSMTEKDKKDLEFILDNDIDWVALSFVRSAHDIIDLKHIISLKNSSAKVIAKIEKPEAIEDIDDIIQQSDGLMVARGDLGVEIPFQEVPLIQKRLIQKCRQNAKPVIVATQMMESMMTNLTPTRAEVNDVANAVLDGTDAVMLSGETSVGKYPVKVIQVINNIINEMEKDDEIYHKEEAPMTDHDRFITDSICFNACRLALRVNANAIITMSFSGYTAYKISSQRPKASVYVFTSNKKIMSQLNLVWGVHAFYYDKRISTDHTIADIKYILKKKSILKSGDMVINIASIP

SEQ ID NO: 128250 - protein, 270 aa, Unknown
  Bacterial polypetide isolated from the Sargasso Sea
MVSGTNVRATVVVGGDLSSNKGINLPGVQVSASTFTEKDREDLRFGIENEVDYVAMSFVRAAADIGLVKREARNWGAEIPVIAKLERSEAVDALDEILEVADGVMVARGDLGVEMAPEQVPVLQKRIIASANEAGVFVITATQMLESMTENPRPTRAEASDVANAIYDGTDAVMLSGETAVGHFPVETVQMMARIISEAEAGVRVLDSHERRSGGTGTFPDAIGHAATMAAEDVGARAIVAFTQSGSTARLISKRRPFTPIVAFTPDARI

SEQ ID NO: 128251 - protein, 297 aa, Unknown
  Bacterial polypetide isolated from the Sargasso Sea
MEALLRRRRRVKIAATLGPASNSREVIKELFLSGADVFRLNLSHGTHADIKARFDIIRDIETEFGRPICVMADLQGPKLRCGRFKDGSANLEEGNKFCFDLDEALGDSTRVCLPHREIFQALKVGSILLIDDGKIRLQVVTCKNDFAVLTVLVGGVISDNKGVNLPDVILPVAALSEKDLIDLEFVCNLGVDWLALSFVQRAQDVEEARKLVKGRAEILSKIEKPAAVEAFDSILEVSDGIMVARGDLGVELPVEAVPPIQKRLVRACRAKGKPVIVATQMMESMINSPVPTRAEVS

SEQ ID NO: 128252 - protein, 307 aa, Unknown
  Bacterial polypetide isolated from the Sargasso Sea
CKDLQGPKIRLGRFKDGPVKVKKGDKFTLTSNEVECTNTIANVTYDKLSQEVSEGKRILLDDGKIEMIVEKVDIEANLLECLVTVGGVLSNNKGVNFPDVQLSVKALTEKDKEDLKFGLSEGVDWIALSFVRNPSDINEIKDLINKNGHSTPVVAKIEKFEAIDQIDTVLPLCDGVMVARGDLGVEMPAEEVPLLQKELIRKANTLGIPIITATQMLDSMASNPRPTRAEVSDVANAILDGTDAVMLSNETAVGDYPVEAVETMATIARRIERDYPLKAIESHLPSTIPNAISAAVSNIARQLDAGA

SEQ ID NO: 128253 - protein, 309 aa, Unknown
  Bacterial polypetide isolated from the Sargasso Sea
PLRRTKIVATLGPASDREGVLEAMLKAGVDVVRLNFSHGTADDHRRRLARVREIAAQLGRSVAALGDLQGPKIRVARFKEGAVYLEEGQPFVLDMAMDSDAGDIHGVGCDYKTLADDVTAGDRLLLDDGRVVLDVTRVEGKQVHTEVVVGGKLSNHKGINKQGGGLSAPALTEKDRADLKTAVEIGVDYLAISFPRSAEDMQEARRLLGEEGKEIGLVAKVERAEAVADDATLDGIIEASEAVMVARGDLGVEIGDAKLVGVQKRMIKRARSLNRAVITATQMMESMISAPLPTRAEVFDVANAVLDGS

SEQ ID NO: 128254 - protein, 274 aa, Unknown
  Bacterial polypetide isolated from the Sargasso Sea
ELAREAGSNAKIVAKVERAETVASDEAMEDIILGSDAVMVARGDLGVEIGDPELVGVQKKLIRHSRRLNRVVITATQMMESMINAPLPTRAEVMDVANAVLDGTDAVMLSAETAAGQFPIETVTSMASVCVGAEKHPSLNVSNHRMSYTFTSVEEAVAMSTMYAANHLEGVKAIVALTESGTTPLLMSRISSGLPIFAMSPHNKTLAWANLYRGVTPVLFDGDETKPVYEVCRDALDVLKAKGLLQSGDMVLLTHGDKMETVGSTNTCKVMMVE

SEQ ID NO: 128255 - protein, 274 aa, Unknown
  Bacterial polypetide isolated from the Sargasso Sea
RELAEAAGCKAKICAKVERAEAVATDEAIDDIISASDAVMVARGDLGVEIGDAELVGVQKKLIARSRQLNKVVITATQMMESMIESPMPTRAEVMDVANAVLDGTDAVMLSAETAAGSYPVETVKAMARVCEGAETHPSVKISKHRMDELFGSVHETIALSAVYAANHLPGVKAIVGLTESGSTPRLMSRITTTLPIVAMSRHEETLNLMALYRGVKPVFFDSRDSAPGELRKDVVALLKEKNLVEDGDIVILTHGDRMETIGATDAIKIIVVE

SEQ ID NO: 128256 - protein, 247 aa, Unknown
  Bacterial polypetide isolated from the Sargasso Sea
GDHSEHAARIATIRQVSDELGINIGILQDLQGPKIRLGRFADGPITLTNGDSFSLTSRSVSCNQTIATVTYDKLADEVTAGSRILLDDGRVEMKVEQVDQSEQTLHCSVTVGGVLSNNKGVNFPDVQLSVRALTDKDKVDLEFGLSQGVDWVALSFVRNPSDMEEIRDLIRQHGHATPVVAKIEKFEAIDQIDAILPLCDGVMVARGDLGVEMPAEEVPLLQKELISKANSLGIPIITATQMLDSMA

SEQ ID NO: 128257 - protein, 285 aa, Unknown
  Bacterial polypetide isolated from the Sargasso Sea
GVDWVALSFVQRARDVIEAKAAIDGRAALMSKIEKPAALAELSDIVTASDGVMVARGDLGVELPPEDVPGWQKRIVAECRMVGKPVVVATQMLESMITNPTPTRAEASDVAGAVFDGADAVMLSGETAVGKYPVETVQMMGRIIAAAEGHIIANPENAPPKLPTEPSLYHAVALATVSLAETVGAEVIVAFSTSGNTAVRIARERPRIPFLVLSPFVEVRRRLAILWGTQTAGSTITEDFEAAIAEGVAEIGNRGIAASGAHVVIVAGMPFGIAGTTNSIRVATI

SEQ ID NO: 128258 - protein, 285 aa, Unknown
  Bacterial polypetide isolated from the Sargasso Sea
MSNIDLKRRTKIVATIGPATQSEEIITDLIKAGVTTFRLNFSHGDHKDHAERIKTIREVSKKLDIDIGILQDLQGPKIRLGRFKDGPVKVKKGDKFTLTSKEVECTNTIANVTYDKLSQEVSEGKRILLDDGKIEMIVEKVDTNANNLECMVTVGGVLSNNKGVNFPDVQLSVKALTEKDKEDLKFGLSEGVDWIALSFVRNPSDINEIKDLINKNGHSTPVVAKIEKFEAIDQIDTVLPLCDGVMVARGDLGVEMPAEEVPLLQKELIRKANSLGIPIITATQM

SEQ ID NO: 128259 - protein, 298 aa, Unknown
  Bacterial polypetide isolated from the Sargasso Sea
LGPASSSPSKISSLFQAGADIFRLNFSHGTHEDHRKRVFHIRQYEKRLGRPIAILGDLQGPKLRIGYFKNSFEVLKNSQKFSFDLNPAPGNKSRVFLPHPEIFKSIKKKNNILIDDGKIILSVLKVSSEKIETEVINGGRISNMKGVNVPETFLKLSSLTKKDLKDLELCLDLSLDYVALSFVQKAQDLIDLKKYVGENTGIMAKFEKPLAIKRMDEILKLCDAAMVARGDLGVEMPAEEVPIMQKRIVQACRDFGKPVVVATQMLDSMINAPTPTRAEASDVATAVFDAARLFNVIC

SEQ ID NO: 128260 - protein, 300 aa, Unknown
  Bacterial polypetide isolated from the Sargasso Sea
SVFINDGKIKGIIKSIHADNAVCQITSGGFISDHKGVNLPFTNLSMSAFTKKDEIDAVTAIEIGCDYVALSFISSAYDILSFRSFLEKHNGQHIKVIAKIERQLAVDNLLEIMTVSDAVMVARGDLGVEIGIERVPKVQKQIIQTANRYIKPVIVATQMLESMIDASVATRAEVSDVANAIYDHCDAVMLSAETAVGINPVNVIRVMAEICSEADKHLKEMREESQVIEKKIFESDSTATSVCRAADQIAEKNNAKAIMAFTSSGNTPLIASKLNSLFPIIAPTDSIDVCYRSSLYRGVR

SEQ ID NO: 128261 - protein, 294 aa, Unknown
  Bacterial polypetide isolated from the Sargasso Sea
RYLEKKYDHTTCILADLQGPKLRIGQFDNKEKKIKKGQQFSLDLDSSPGNDKRVNFPHKEIYEILTPNSVILIDDGKLRLQIIKQEKDCLTTEALNDGIISDNKGVNIPDIILPISSLTSKDESDLNKALEMGVDWIALSFVQTHKDIEELRKLVGNKVSIMAKIEKPSAVKNVDKIIDASDGLMIARGDLGVELPTEQVPVIQKDIINRCREYGKPVVVATQMLESMISNNVPTRAEASDVANAIYDGTDAVMLSAESAIGSYPVESVTIMNKIIQSVENDKNNFKLEDFHQK

SEQ ID NO: 128262 - protein, 278 aa, Unknown
  Bacterial polypetide isolated from the Sargasso Sea
ESSERIKELVEPGATTFRLNFSHGDHSEHAARIATIRQASEELGINIGILQDLQGPKIRLGRFAEGPITLANGDSFSLTSRPVSCNQSIATVTYDKLADEVTAGSRILLDDGRVEMKVEQVDQAEQTLHCTVTVGGVLSNNKGVNFPDVQLSVRALTDKDKVDLEFGLSQGVDWVALSFVRNPSDMEEIRGLIREHGHETPVVAKIEKFEAIDQIDAILPLCDGVMVARGDLGVEMPAEEVPLLQKELIRKANSLGIPIITATQMLDSMASSPRPTRA

SEQ ID NO: 128263 - protein, 478 aa, Unknown
  Bacterial polypetide isolated from the Sargasso Sea
ASSGKAGIQSLIEGGVDVFRLNMAHGSIHEHTETLNTIRHVSDEVGRPVGVLVDLAGPKIRLGEIASGSVECVEGSDVFFIRGPATDRPHHFVTTYPTLVDELAVGDSIMLADGTISLVVSEKTSDQARCRVVQGGVVRSRQGVNLPGVDLSVAAMSADDWKHAEWASSVGADFVSLSFVRSSVEVNLLKELLRTRQSSARVVAKIEKREALENLESIIDGADVVMVARGDLGVEIDVASMPMVQKRIIRVCQQYQKPVIVATQMLDSMQHSRRPTRAETTDVANAILDGADACMLSGETAIGDHPRRVVEMMRRIAQSTERQYLQSRRQYLEELLGKSRLGAVGNDFLPRPQRLVHGLHPITQAVVEGASRIAAELDARLFVVASKSGVTAIARSKHRGAVPTIGLTDDLATLRQMTLYWGVTPVAVPEGADVNQLLSHVCDWGLQDGRLERGDRIVLVAGIGFGAGGHNMAMVHEV

SEQ ID NO: 128264 - protein, 249 aa, Unknown
  Bacterial polypetide isolated from the Sargasso Sea
IINVADGIMIARGDLGVEMPTEQVPIAQKNIISRCRHFGKPVVVATQMLESMIDNLVPTRAEASDVANAIYDGTDAVMLSGESAVGNHPIQVVKTMSNIIEKVEEDENNYNLRIEEENIDDVDNTDAITLAAYSIAKKSNAKAIITFSVSGRTTSRMARERAPVQIVGLSPNINTTRRMQLFWGVNSCHTTEDADNAQEMVNIACRIVKEKKLVNPGDNVVISAGVPFGSAGTTNLIRIAEIIANKDLT

SEQ ID NO: 128265 - protein, 479 aa, Unknown
  Bacterial polypetide isolated from the Sargasso Sea
MFRRTKIVTTLGPATDRDDNLRRIIAAGANVVRLNFSHGSPEDHLKRATQAREIAKELGVHVAILGDLQGPKIRVSTFKDNKKVQLNLGQAYILDAELGKGEGDENQVGIDYKQLPDDVNVGDILMLDDGRVQLRVERVEGRKVHTTVTVAGPLSNNKGINKQGGGLSAAALTEKDKADILTAAMIQVDYLAVSFPRSGADLEYARSLAQQAGSNALIVAKVERAEAVASEEAMDDVILASDVVMVARGDLGVEIGDAALVAVQKKLIARSRQLNKIVITATQMMESMISSPMPTRAEVMDVANAVLDGTDAVMLSAETAAGDFPEETVKAMANVCIGAESHPSVKVSKHRLDARFTSVEETIALSTMYAANHLEGVKAIIALTESGATPKLMSRISSSLPILGLSRHETTLAKMALYRGVLPIYFDSTIYPADELAQKALESLTTAGYLQSGDLVLMTKGDAMETIGGTNTCKVLIVA

SEQ ID NO: 128266 - protein, 270 aa, Unknown
  Bacterial polypetide isolated from the Sargasso Sea
MVTVGGVLSNIKGVNFPDVQLSVKALTEKDKEDLKFGLSEGVDWIALSFVRNPSDINEIKDLINKNGHSTPVVAKIEKFEAIDQIDTVLPLCDGVMVARGDLGVEMPAEEVPLLQKELIRKANSLGIPIITATQMLDSMASNPRPTRAEVSDVANAILDGTDAVMLSNETAVGDYPVEAVQTMATIARRIERDYPLKAIESHLPSTIPNAISAAVSNIARQLEAGAIIPLTKSGSTARNVSKFRPPTPILATTTERSVARRLQLVWGVTP

SEQ ID NO: 128267 - protein, 479 aa, Unknown
  Bacterial polypetide isolated from the Sargasso Sea
MFRRTKIVTTLGPATDRDDNLRRIIAAGANVVRLNFSHGSPEDHLKRATQAREIAKELGVHVAILGDLQGPKIRVSTFKDNKKVQLKLGQAYILDAELPKGEGDENQVGIDYKQLPDDVNVGDILMLDDGRVQLRVERVEGRKVHTTVTVAGPLSNNKGINKQGGGLSAAALTEKDKADILTAAMIQVDYLAVSFPRSGADLEYARSLAQQAGSNALIVAKVERAEAVASDEAMDDVILASDVVMVARGDLGVEIGDAALVAVQKKLIARSRQLNKIVITATQMMESMISSPMPTRAEVMDVANAVLDGTDAVMLSAETAAGDFPEETVKAMANVCVGAESHPSVKVSKHRLDARFTSVEETIALSTMYAANHLEGVKAIIALTESGATPKLMSRISSSLPILGLSRHDTTLAKMALYRGVLPIYFDSTIYPADELAQKALESLTKAGYLHSGDLVLMTKGDAMETIGGTNTCKVLIVA

SEQ ID NO: 128268 - protein, 478 aa, Unknown
  Bacterial polypetide isolated from the Sargasso Sea
MKRNRKAKILATLGPSSSSREIIEEMFIAGCDVFRLNFSHDTIENHRNNLEIIRDLEKKYNHSTCILADLQGPKLRIGEFKNKEEKLKKGDHFQLDLKNELGSEKRVNFPHENLYEFLTPNTNLLIDDGKIKLQIIDQKKDSLITEVINEGLISNNKGVNIPDIVLPIESLTNKDKSDLQKVLEMQVDWVALSFVQQAEDVIKLKEIIKNKALVMAKIEKPSAVKNLDEIIKNSDGIMIARGDLGVEMPTEKVPIVQKNIIKRCRHFGKPVVVATQMLESMITNLTPTRAEASDVANAIYDGTDAVMLSGESAVGNNPIETINVMNSIIESVEQDKDNFDLDIDEINIKRKVDNTDAITNAAYYIARNAGAKAIITFSVSGKTTMRMAKERAPVQIIGMSPNLSTARNLQLVWGVNSCHGEDAQSATEMVKIACATAKEKELVKPDDNVIITAGVPFGNAGTTNLLRIAKVIANKDLT

SEQ ID NO: 128269 - protein, 369 aa, Unknown
  Bacterial polypetide isolated from the Sargasso Sea
SSEEIYDFLTPNSILLINDGRIRLQVIEQKKDSLITEVLNDAEISNNKGVNIPDIILPIDALTKKDKSDLMKALDMGVDWVALSFVQQAEDIHKLKKIINNKALVMAKIEKPSAVKNIDDIINAADGIMIARGDLGVEMPTEQVPIVQKNIIKRCRHFGKPVVVATQMLESMIENLVPTRAEASDVANAIYDGADAVMLSGESAVGAHPIEVVRTMNKIIENVENDKNNYDLQIIQENIDDVDNTDAITLAAYSIAKKSDAKAIITFSVSGRTTTRMARERAPVQIVGLSPNINTTRKMQLYWGVNSCHTQEDAQNAQDMVNIACSIAKNKKLVKPGDNVVISAGVPFGSAGTTNLLRLAEIIADKDLK

SEQ ID NO: 128270 - protein, 474 aa, Unknown
  Bacterial polypetide isolated from the Sargasso Sea
MDLQKTKIVCTIGPSSDSIDTLIDLIKSGMNVARINLSHGSEEDHIKMISNIRKASDKMDSSIPILADLPGPKYRVGTIDSDFLELKVNEEISFECSEQNDNENLIIWPPGIHNDVKVGAILLIDDGAVELEVIEIKNSLIRTKVNLSGKISSNKAVVARGFPSMLDYFTEETISALNFVISNDIDYIGLSYVRNAEDIVKVKKQLKNRQLKIISKIELQTALDNLDEIIHNSDSIMVARGDLGVHLPISQVPAAQKFIISSCNKKGKEVITATQMLESMTENPQPTRAESTDVHNAVLDGSDAIMLSGETSIGKYPNRAVEFMREISSIAENDIDHIDLRSKRVSYLDSKNSNQIDELIAHGAANIAEQLDAKLILAFTESGSTAARVAAYRPSQPVIAISPDKHAGINLGLRWGVNTISVDSFDHIEKMFSYSEQLVQKENLASSGDTIVVVAGLPIGFKGNTNLIRVITIN

SEQ ID NO: 128271 - protein, 422 aa, Unknown
  Bacterial polypetide isolated from the Sargasso Sea
MSNIDLKRRTKIVATIGPATQSQEIITDLIKAGVTTFRLNFSHGDHKDHAERIKTIREVSKKLAIDIGILQDLQGPKIRLGRFNDGPVKVQKGAKFTLTSNEVECTNTIANVTYEKLSQEVSVGKRILLDDGKIEMVVEKVDIKNNLLECLVTVGGVLSNNKGVNFPDVQLSVKALTDKDKEDLKFGLSQGVDWIALSFVRNPSDINEIKDLINKNGHSTPVIAKIEKFEAIDQIDTVLPLCDGVMVARGDLGVEMPAEEVPLLQKELIRKANSLGIPIITATQMLDSMASNPRPTRAEVSDVANAILDGTDAVMLSNETAVGDYPVEAVQTMATIAIRIERDYPLKAIESHLPSTIPNAISAAVSNIARQLDAGAIIPLTKSGSTARNVSKFRPPTPILATTTERSVARRLQLVWGVTPIV

SEQ ID NO: 128272 - protein, 624 aa, Unknown
  Bacterial polypetide isolated from the Sargasso Sea
MFWNRGLNVATRSPSAKSAKARGGKPRNTAAATAGEREARSAAPAAVTTQQEESGSPLALAELTTAGEAAELSTGQSAHSAAELPDAEVAPAPPPAPPVLVSNTASPHKATLVSTGAQPPVAPFGAQPPHPTRSAHSSDPIQTRRLMHRATKIVATIGPASSTPEILLQMIRAGLDVVRLNFSHGTADDHRQRAEFVREAARQAGREVAIMADLQGPKIRVGKFENGKTTLVPGNSFILDAECELGNDERVGLDYKDLPRDLKPGDVLLLNDGLIVLDVVRVLGSEIHTTVKVGGDLSNNKGINRQGGGLTAPALTAKDMEDIRTAMSLGVDYVAVSFPKNATDMEMARQLANIAGAPYGIKPKMIAKIERAEAIPALQGILDASDGIMVARGDLAVEVGNAAVPALQKRMIRMARESNKFVITATQMMESMIYAPVPTRAEVSDVANAVLDGTDAVMLSAESAAGKYPVQTIETMAAICLEAEKSEQSELDKDFLDRTFTRIDQSIAMGALFTAFHLGAKAIVALTESGSTALWMSRHWTHVPIFALTPRVGSERAMAIYRNVTSLHLDTSTDRDTALQQALETVVSKGYASRGDMVVLTVGEPMGQAGGTNTLKIVRVGEPY

SEQ ID NO: 128273 - protein, 479 aa, Unknown
  Bacterial polypetide isolated from the Sargasso Sea
MKRNRKAKILATLGPASSSSDIIENIFKAGCDVFRLNFSHGSVETHRQNLESIRNLEEKYDHATCVLADLQGPKLRVGDFKNTQEELKKGQKFILDTNAALGDDKRVNFPHSEIYEHLTPNSILLINDGRIRLQVLEQHKDQLITEVLNDGIISNNKGVNIPDVILPIDSLTNKDRADLQKALEMNVDWVALSFVQQADDIIKLKKIIDGKALIMAKIEKPSSVKNIDEIIKVADGIMIARGDLGVEMPTEKVPIVQKNIIKRCRHFGKPVVVATQMLESMISNLVPTRAEASDVANAIYDGTDAVMLSGESAVGDFPIESVSTMNNIIENVENDKNNFNLTVENIVSDRKVDNTDAITNAAYSIANNAGAKAIITFSVSGKTTMRMARERAPVQIIGLSPNINTARKMQIIWGVNSCYSTKDAANTTEMVNIACSLVKNKNLVKADDNVIITAGVPFGNAGSTNLLRIARIIDDKDLT

SEQ ID NO: 128274 - protein, 478 aa, Unknown
  Bacterial polypetide isolated from the Sargasso Sea
MKLRNRKAKIVATLGPACETEKGIEELFLSGADVFRLNFSHGDHEDHKKKVKIIRDLEKKHDRYICILGDLQGPKFRVGRFLNVKEQLKKNQIFTFDQNKKDGDSSRVYLPHKEIFKSISIGQRLLVNDGKVRLKVKSKSSSAIKCVVTDGGEISNNKGLNIPDTKLDLKIITPKDKKDLELAIKLDVDWIALSFIQTTKDLVTAKKLIPAKFKVMVKVEKPSAMEEIESITENCDGIMVARGDLGVETNPEDVPIHQRTMVAACRKFGKPCIVATQMLESMIDSPTPTRAEASDVATAVFQGVDAVMLSAESAAGNYPKESVEMMDKIIKRVESDPKYLANIQNYNLNVVKTSTEAIATAALEVANIAECNCIATFSQTGRSVLRVARMRPDVTLIGLTTNRKVARQNILTWGTFMDVVDEISSSSEMVDRACKIAKVRKILKHGDKIIITAGVPFGKVGTTNTLRIAKIISESKLT

SEQ ID NO: 128275 - protein, 390 aa, Unknown
  Bacterial polypetide isolated from the Sargasso Sea
KGDVFILDLDNEAGSKKRVNFPHPEIYEHLTPNTIILINDGRIRLQIIEQKNDYLKTEVLNNGIISNNKGVNIPDVILPIDSITTKDKSDLMKALEMNVDWIALSFVQQLDDVIKLKKLVNNKALIMAKIEKPSAVKNIDQIIEASDGIMIARGDLGVEMHAEKIPIVQKNIIKRCRNFGKPVVVATQMLESMINNLVPSRAEASDVANAIYDGTDAVMLSGESAIGNYPIQSITTMNNIIENVEKDKNNFDLEFEDKDLNHKIDNTDAITNAAYSIAKNAGAKAIITFSVSGKTTIRMAKERAPVQIIGLSPNIKTARKMQILWGVNSCHSEDSANATEMVNIACTTAKNKELVGADDKVIITAGVPFGNAGSTNLLRIAKIISKENLN

SEQ ID NO: 128276 - protein, 478 aa, Unknown
  Bacterial polypetide isolated from the Sargasso Sea
MKRNRKAKILATLGPASSDKKIIEDLFIAGCDVFRLNFSHGDLETHRKNYENIRSLEEKHNHASCILADLQGPKLRVGTFKNTKENLVKGQSFVLDLSNEPGDNNRVNFPHEEIYDFLTPNSILLVNDGRIRLQIVEQKKDSLITEVLNDAEISNNKGVNIPDVILPIDALTKKDKSDLMKALDMGVDWVALSFVQQAEDIHKLKKIINNKALVMAKIEKPSAVKNIDDIINAADGIMIARGDLGVEMPTEQVPIVQKNIIKRCRHFGKPVVVATQMLESMIENLVPTRAEASDVANAIYDGTDAVMLSGESAVGAHPIEVVRTMNKIIENVENDKNNYDLQITKENIDDVDNTDAITLAAYSIAKKSDAKAIITFSVSGRTTTRMARERAPVQIVGLSPNINTTRKMQLYWGVNSCHTQEDAQNAQDMVNIACSIAKNKKLVQPGDNVVISAGVPFGSAGTTNLLRLAEIIADKDLK

SEQ ID NO: 128277 - protein, 474 aa, Unknown
  Bacterial polypetide isolated from the Sargasso Sea
MKLNKTKIIATLGPSCSSKTMLNKLIVSGVDVFRINFSHADHKEVERIVNDIKALRIKRNEHVSILGDLQGPKIRLGNVVPETILQKGDNIVFTTRKIKNGNSNRVTINYASFPKDVKRGETVLVDDGKIILKVEKTDRDTSVNLIVIQGGLLSSNKGVNLPSTKISLPALTPKDIKDAKFAAKLGFDWVALSFVRSKNDVLQLREILDKSSKELIPIISKIEKPQAIKKMDQILKVSNGLMVARGDLGIEIPAEEVPLYQKILVKKANEARKPIIIATQMMESMIDNLTPSRAEVNDVANSVMDGADCIMLSGETSIGKYPCEVVKKVGTIISSVEDTQPVKNKFTLPKLKSNRLITKTICRHAALIANEIKASAVCTLTHSGYTGWQISSWRPNCLVLVFTSNKQILSQLNLLWGVKCIYYNKFQSTDKTVEDVNTLAIKNRYVRRGDVVVNLASMPIKDKGQVNTLRITKL

SEQ ID NO: 128278 - protein, 324 aa, Unknown
  Bacterial polypetide isolated from the Sargasso Sea
MKLNKTKIIATLGPACSSKTMLSKLIVSGVDVFRINFSHADHKEVERIVSDIKDLRTKHNKHVSVLGDLQGPKIRLGNVLPETYLKKGDNITFSTAKIKNGNSDNVTINYASFPKDVKRGETILVDDGKIILKVEKTDRVSTVDLIVVQGGLLSSNKGVNLPSTKISLPALTPKDIKDAKFAARLGLDWVALSFVRSKNDVLQLREILDKSSKEVIPIISKIEKPQAINKMDQILKVSDGLMVARGDLGIEIPAEEVPLYQKILVKKANEARKPIIIATQMMESMIDNLTPSRAEVNDVANSVMDGADCIMLSGETSVGKHPCE

SEQ ID NO: 128279 - protein, 340 aa, Unknown
  Bacterial polypetide isolated from the Sargasso Sea
MTLPPHAPIHDPIRRTKIVATLGPASDREGVLEAMIAAGVDVVRLNFSHGSPDDHRQRLTRVREIADRLGRSVAALGDLQGPKIRIARFAEGAVELAEGAPFVLDMALDGNAGDATRVGCDYQQLIDDVAPGDRLLLDDGRVVLDVTAVEGREVHTTVVVGGRLSNNKGINKQGGGLSAPALTDKDRADLATAVAIGVDYLAVSFPRSAADMAEARALLGEAGREIGLVAKLERAEAVACEATLDGIIEASEAVMVARGDLGVEIGDAQLIGMQKRIIKRARTLNRAVITATQMMESMIEAPLPTRAEVFDVANAVLDGTDAVMLSAETAAGRFPVRPSR

SEQ ID NO: 128280 - protein, 468 aa, Unknown
  Bacterial polypetide isolated from the Sargasso Sea
MLSTKIVCTIGPASDSPEILEKLADAGMNVARLNFSHGTHNSHKKIIKLIHELNRNRKFPIAIMLDTQGPEIRTGNETSVLKSKEIVTVSCPPFKENEGNIHVNYAALKSDLKPGNYISLDSGLVKLKVIGKHKKGLKCKVIDGGIVNGHRHVNLPGTVVKLPGITESDKKDILFGIKHKVNFIALSFVRNAETIKEVRELLGKNAEHTEIIAKVENLEGVERLEEIVKEADGVMVARGDLGIEIELEEVPQIQRRIAFLCAKYGKRSIVATHMLESMIEHPVPTRAEVTDVANAIFEDSDAIMLSGETSIGDYPVRSVETLKRIAKRTEIFPGVNFSKNLIMEKNGQHLAASAIQIASDLKIRAAVVITRNGRGARYLSNLRPHGIIIYSFTENTDVLTSNVMYRGVYPFLLKLKKNPEDTIQDALKMLNNIGNFSDNEQVIVLANILTGEGFNTSLQVRTIPSDDL

SEQ ID NO: 128281 - protein, 359 aa, Unknown
  Bacterial polypetide isolated from the Sargasso Sea
MRKTKIIATLGPASSSATMVEQLIQAGTNVFRLNFSHGSPEQHLALAAKIRACAVRLDREIGILADLQGPKIRIASFADGSIRLQPGDPFTIDAGLDSHLGDQSRVGTDYPALAGELQTGNIVLLDDGRIQLCVEQVIDERIETRVLVGGTLSSRKGINVLGGGLSAPALTDKDKADILTARLLEADYIAVSFPRSAADLEEARTLIRASGSRAAIVAKVERAEVVASVAAMDELIHAADLIMVARGDLGVEIGDARLPGVQKRLIRRCRALGRPVITATQMMESMIASPMPTRAEVMDVANAVMDGSDAVMLSAESATGRYPVEAVAAMARIALAAEQEMEPAGHGLAASHGELARLA

SEQ ID NO: 128282 - protein, 568 aa, Unknown
  Bacterial polypetide isolated from the Sargasso Sea
LIKAGVTTFRLNFSHGDHKDHAERIKTIREVSKKLDIDIGILQDLQGPKIRLGRFKDGPVKVKKGDKFTLTSDEVECTNTIANVTYDKLSQEVSEGKRILLDDGKIEMIVEKVDTKANNLECMVTVGGVLSNNKGVNFPDVQLSVKALTEKDKKDLKFGLSEGVDWIALSFVRNPSDINEIKDLINKNGYSTPVVAKIEKFEAIDQIDTVLPLCDGVMVARGDLGVEMPAEEVPLLQKELIRKANSLGIPIITATQMLDSMASNPRPTRAEVSDVANAILDGTDAVMLSNETAVGDYPVEAVETMATIARRIERDYPLKAIESHLPSTIPNAISAAVSNIARQLDAGAIIPLTKSGSTARNVSKFRPPTPILATTTERSVARRLQLVWGVTPIVVKNDERTAKTFSLAMQIAQEMGILNQGDLVVQTAGTLTGISGSTDLIKVGLVRKIVSRGISIGEIGVTGKARIIKNNLDISLICPGEILFVPKELMKNIPLSKNIAGIVTNQNVNDVYAFFNKNNKKISTICNLENMDSHQISNGDLITLQLNEGVIYMGQIEDDDAIDKYKYV

SEQ ID NO: 128283 - protein, 423 aa, Unknown
  Bacterial polypetide isolated from the Sargasso Sea
RLAARNKKIYLPILADLPGPKYRVGEISNGSMEVEIDQEIIFDCNSENTSQKSINIWPNGLSNDIEEGAILMIDDGAVELEVINISETIIETKVRLSGKISSNKAVVARGFPSMLDYFTEETESALSFVDTNDIDYIGLSYVRNSEDIKSVKKKLSNKKLRIISKIELQKALDNLDEIIDNSDVVMVARGDLGVHLPISQVPSAQKFIIDLANKKGKEVITATQMLESMTENPQPTRAESTDVHNAVLDGTDAIMLSGETSVGNYPIRAVEFMREISDIAEKEIDHLDIRNTRLENVNSSSSRIIDELIAHGAASIAEQLDAKLIVAFTESGSTAARVASYRPSQSVIALSPDISAEINLGLRWGVKTVKVKSFNEIEVMFDYANDVVKEMSLASTGDSIVVVAGLPIGVKGNTNLIRVITIS

SEQ ID NO: 128284 - protein, 259 aa, Unknown
  Bacterial polypetide isolated from the Sargasso Sea
VERAEAVADDETLDDIIRASDAVMVARGDLGVEIGDAELVGQQKRIIARSRQLNRVVITATQMMESMIESPMPTRAEVMDVANAVLDGTDAVMLSGETAAGKYPVDTVKAMARVCDGAEKHPRVQISKHRMDVAFTEISETIALSAMYAANHLTGIKAIISLTESGYTAKLMSRITSSQPIYALSRHQKTLNKMALYRGVYPVFFDSTQNLGQQKVSAAAIEAVQEIAHLKSGDLVILTYGDMMETVGASNTCKIVQIN

SEQ ID NO: 128285 - protein, 470 aa, Unknown
  Bacterial polypetide isolated from the Sargasso Sea
MKKTKIVCTIGPKTESKEMLAKMLDAGMNVMRLNFSHGDYAEHGGRISNLRAVMAETGKHAAILLDTKGPEIRTIKLEGGNDVALVAGQTFTFTTDQTVVGNKDKVAVTYAGFANDLRVGNRILVDDGLIGLDVIEITEREVICKVLNNGDLGENKGINLPGVSIKLPALAEKDKRDLIFGCEQGVDFVAASFIRKKEDVLEIREHLKAHGGENIQIISKIENQEGLDNFDEILAVSDGIMVARGDMGVEIPVEEVIFAQKMIIEKCNKARKVVITATQMLDSMIKNPRPTRAEAGDVANAILDGTDAVMLSGESAKGKYPLEAVTIMATICERTDAVMPSNLSAANDSNKLRITEAVCKGAVETSEKLDAPLIVVATEGGKSAKAIRKYFPKAWILAITTNKKTAAQLVLTKGVVAHVVDSIASTDDFYRIGKEAALASGMGLKGDVVVMVSGALVPSGTTNTASVHVL

SEQ ID NO: 128286 - protein, 338 aa, Unknown
  Bacterial polypetide isolated from the Sargasso Sea
DKLVTEVLNDAEISNNKGVNIPDVILPIDALTNKDKSDLMKALDMGVDWVALSFVQQAEDIHKLKKMIGNKALIMAKIEKPSAVKNIDAIVNAADGIMIARGDLGVEMPTEQVPIAQKNIIRRCRHFGKPVIVATQMLESMIDNLVPTRAEASDVANAIYDGTDAVMLSGESAVGAHPIEAVKTMNKIIETVENDKNNYDLRIEDDNIDDVDNTDAITLAAYSIAKKSNAKAIITFSVSGRTTRRMARERAPVQIVGLSPKIDTTRRMQLYWGVNSCHSNEDAQNAQEMVKIACTVVKNKKLVDPGDSVVISAGVPFGSAGTTNLLRLAEIIADKDLT

SEQ ID NO: 128287 - protein, 482 aa, Unknown
  Bacterial polypetide isolated from the Sargasso Sea
MKRNRKAKILATLGPASSSEEIIDKLFVAGCDVFRLNFSHGSIEDHRNNYKYIRSLEKKYDHATCILADLQGPKLRIGTFVQDKIELKKGQSFILDLNSSPGNKDRVNFPHEEIYETMTPNSEILIDDGRIKLQIIKQEKKSLTTEVLNNGIISNNKGVNIPGVVLPISSLTQKDKSDLNKALEMGVDWVALSFIQSAEDINNLKKLVGNKASIMAKIEKPSAVKNIDSIIEASDGLMIARGDLGVEMPAEQIPVIQKNIISRCRDFGKPVVVATQMLESMVSNHTPTRAEASDVANAIYDGTDAVMLSAESAIGLFPEESVTIMNRIIKSVETDSNNFNLEIKNQESSSTNKKISTTDAITSAAYTIAKNAEAKAIVTFSVSGITTMRMSRERAPVLIIGLSPILETARKLQISWGVYSIHTKQDAQNATEMVSIACKALKNKRLAEAGNSIVITAGVPFGSAGSTNLLRIAEIIDDKDLT

SEQ ID NO: 128288 - protein, 324 aa, Unknown
  Bacterial polypetide isolated from the Sargasso Sea
MTFTRTKIICTIGPNSSDRATLKKLHLAGMNVVRINMSHATHKNAKEIINIIKNLNKTKNSKLSNIGILLDTQGPEIRTGDTSLPINLKVGDKVTLTVRDEVDVETSSIKVNYKGLVHSVNVGSRISVDNGLISFRVLSKESDNLVCKVIHGGKVGSKRHVNLPGVRIDMPSITSKDIKDISFGIKNNVDFIAASFVRNKKDLQILEDLLLKHKSESKIIAKIENQEGLDNIDEICESAWGIMVARGDLGIETSLTDLPNIQRKIMNTCAKLGKRSIVATHLLESMIENPTPTRAEVTDVANAVYEGADAIMLSGETKYWEISS

SEQ ID NO: 128289 - protein, 324 aa, Unknown
  Bacterial polypetide isolated from the Sargasso Sea
MLSTKIICTIGPASDSPKILEKLAEAGMNIARLNFSHGTHTSHKKIIKQIHELNRSRQFPIAIMLDTQGPEIRTGNETSNLMSKEIVTVSCPPSKENEGNIHVNYSDLKINLKPGNYISIDSGLVKLKVLGKHKKGLKCEVIDGGIVNGHRHVNLPGTVVKLPGITEADKRDILFGMKQKVNFIALSFVRSPETIREVRKLLGKHASHTEIIAKVENQEGVDRLEEIVQEADGVMVARGDLGIEVELEEVPQIQRRIAFLCAKYGKRSIVATHMLESMIEHPVPTRAEVTDVANAVFEESDAIMLSGETSIGKYPVRSVETLKR

SEQ ID NO: 128290 - protein, 596 aa, Unknown
  Bacterial polypetide isolated from the Sargasso Sea
MSNIDLKRRTKIVATIGPATQSEEIIKNLIKAGVTTFRLNFSHGDHKDHAERIKTIREVSKKLEIDIGILQDLQGPKIRLGRFKDGPVKVKKGDKFTLTSNEVECTNTIANVTYDKLSQEVSHGKRILLDDGKIEMIVEKVDKKANNLECIVTVGGVLSNNKGVNFPDVQLSVKALTEKDKEDLKFGLSEGVDWIALSFVRNPSDINEIKDLINKNGHSTPVVAKIEKFEAIDQIDSILPLCDGVMVARGDLGVEMPAEEVPLLQKELIRKANTLGIPIITATQMLDSMASNPRPTRAEVSDVANAILDGTDAVMLSNETAVGDYPVEAVETMATIARRIERDYPLKAIESHLPSTIPNAISAAVSNIARQLDAGAIIPLTKSGSTARNVSKFRPPTPILATTTERSVARRLQLVWGVTPIVVKNDQRTAKTFSLAMQIAQEMGILNQGDLVVQTAGTLTGISGSTDLIKVGLVRKIVSRGISIGEVGVTGKARIIKNNLDMSLICPGEILFVPKELMQYIPLSKNIAGIVTNQNVNDVYALFNKNNKKISTICNLENIDNHQISNGDLITLQLNEGVIYMGQIEDDDATDKYKYV

SEQ ID NO: 128291 - protein, 254 aa, Unknown
  Bacterial polypetide isolated from the Sargasso Sea
DDILKASDGVMVARGDLGVELPVQNVPPIQKRLVRKCRAAAKPVIVATQMLESMIESPMPTRAEVSDVATAIYEGSDAIMLSAESAAGQFPIQAVETMNNVAIEVESDPTYTEVMEASRRAKRNSVADGIVSAAREIAETTDIKAICCFTQTGTTALLTARERPRVPIIALSSEIETARRLALTWGTNCVLSGNKTRFKEAVVSAVRAALAEGLANETDQVVITAGVPFNITGTTNILRVAPCNERMIYAMDPE

SEQ ID NO: 128292 - protein, 226 aa, Unknown
  Bacterial polypetide isolated from the Sargasso Sea
NADEPAVKSVDLSIAQGEVLAIVGGSGSGKTTTLKMINRLIEPTSGSVKVMGEDVTNVDPVNLRRSIGYAFQGVGLFPHMTVGQNVSVTLQLRGWTKETIGERVNELLAMVDLPADEYKGRLPSELSGGQQQRVGFARALASNPQAILMDEPFGALDPITRDALQQEFRALQKKLELSVVLVTHDVSEAVLLADRIAVMHKGELAQVATPGVLLTSPVNKYVALTD

SEQ ID NO: 128293 - protein, 211 aa, Unknown
  Bacterial polypetide isolated from the Sargasso Sea
MSSTSILIGIAGGTGSGKTSIANKLLGEYDKGDIVVIEQDTYYRDISHISLEDRHLHNFDHPDAIDIELFNQQLISLLKGQIVEIPIYDFSTHSRLKDTKTVNPHRVIIVEGILTLHYHALRELMDIKIFVDTPDDIRFIRRISRDIENRNRTVESVIEQYLKTVRPMHQQFVEPSKYFADIIIPEGSKNKVAIDLIRTKINSILSNQIDQ

SEQ ID NO: 128294 - protein, 303 aa, Unknown
  Bacterial polypetide isolated from the Sargasso Sea
  misc_feature (4)..(4): Xaa can be any naturally occurring amino acid
PKFXEKKKSLLALFLLPFSFIYQILFFIKKKLTSVNSFEIPVICVGNIYLGGTGKTPLSIFLANELTLHKKHPAIIKKYYKDQSDEQDFIKDKFNSLFLHKNRIAAIKSALKKDHKLIILDDGFQDFSIKKNLSILCFNSEQLIGNEMTLPSGPLREKLDSINRAQIIMINGRKNVDFENKIRTISKNIKIYYSNYNPTNIEEFKNKKVLAFAGIGNPSNFFKLLRDNNINLQKEIEFPDHYEFNRSELQKIVDISKEDSLQIITTEKDYFRIKKYNFENIKFLKLNLEINNKKDFINQLSKL

SEQ ID NO: 128295 - protein, 208 aa, Unknown
  Bacterial polypetide isolated from the Sargasso Sea
MSLSPILIGIAGGTGSGKTSIAKKLLEEYGNGDVVVIEQDAYYRDISNITMEDRHLQNFDHPDAIDIELFNQQLISLIKGQIVEVPIYDFSTHSRLKDTKTVHPHRVIIVEGILTLHYTILRELMDIKVFVDTPNDIRFIRRISRDIDKRNRTVESVIDQYLKTVRPMHEQFVEPSKYFADIIIPEGSKNKVAIDLIRTKINSILNNK

SEQ ID NO: 128296 - protein, 207 aa, Unknown
  Bacterial polypetide isolated from the Sargasso Sea
MQSPLIIAISGASGSGKSLFTKNLFNGFSAQGRPVQVLREDHYYRAQDHLPMEQREKNNYDHPNAFEHELLKAHLQALRDGQPIDYPHYCYKTHTRLPETERLNPAPVIILEGIMLLARTDLLPLYDVKIFIDTPLDICLMRRMMRDLKERGRSIESVAKQYEETVKPMYHQFIEPSRFTADVVVTQGGKNQIALDVIKSHIQQALL

SEQ ID NO: 128297 - protein, 212 aa, Unknown
  Bacterial polypetide isolated from the Sargasso Sea
MNSQQCVIIAIAGASASGKSLIAKTIFDELRRDLGTDQIGVINEDAYYRDQSHLSMDERVLTNYDHPKALDHQLLCTHLQLLKSGEAVDIPCYSYTEHTRMAETVKMTPKKVIILEGILLLTDPKLRELMDASVFMDTPLDICFLRRLTRDVAERGRTMESVISQYKKTVRPMFLQFIEPSKQYADIIVPRGGKNRIATDILKTRIQHLLAK

SEQ ID NO: 128298 - protein, 214 aa, Unknown
  Bacterial polypetide isolated from the Sargasso Sea
MSDTQHSCVIIGIAGASASGKSLIAQTIYEELVAELGAGQIGVITEDCYYRDQTHLTMEERVKTNYDHPNALDHDLLVQHLSQLVQGDAVNIPQYSYTEHTRMSEVTPFAPRRVIILEGILLLTDSRLRDLMDASIFMDTPLDICLLRRLVRDVQERGRTMDSVLKQYQKTVRPMFLQFIEPSKQYADVIVPRGGKNRIAIDMLKARIRHMLIG

SEQ ID NO: 128299 - protein, 212 aa, Unknown; identical to SEQ ID NO: 128297
  Bacterial polypetide isolated from the Sargasso Sea

SEQ ID NO: 128300 - protein, 303 aa, Unknown
  Bacterial polypetide isolated from the Sargasso Sea
GQLVWDFVGLWSGVLDGLRIAADQHRSTIQSIGVDTWGVDFSFVTKNDALLSEPVCYRDSRTRGLIEAAQAILSKEETFNATGLQFIEINTLYQLLAVKRDRPELFEAADQLLMIPDLVHWLLSGQRSNERTIASTTQCFNPQSGQWANDLLTQFGIPTELFRPVSEPGHDIGSIRSDIASDTGLGDVRVVLPGSHDTASAVAAVPALEPPSSRPDWCYISLGTWALVGAELDRPLVTPECLAHNFTNEGGVGGTTRLLKNLCGLWLVQQCRASWQRSGNNWNWDQLTALAAESAPLQTIIDS

SEQ ID NO: 128301 - protein, 322 aa, Unknown
  Bacterial polypetide isolated from the Sargasso Sea
YWLTGNKSCEYTHVTTQQLYNPNKQDWDFETMETLGIPDKIFPEVLKPGTKIGNYQKIPVILSACHDTASAVVSVPSNTRDSAFLSSGTWSLLGIELDELILNDQALEANLTNEGGYGGTNRFLQNIAGLWLVQQSVRTWAEEGNSVSYDQTVFMAESASPFKAFIDPDLPEFHPPGDMPLRIREFCRQSGQYVPESREEILRVIYESLALKYRYFLEILIKVSGVEVKTLHVLGGGSKNRLLNQFCSNAMQIPVVAGPAEATSIGNAMVQLMALGEIGNHEQARRIIAESAELEYFEPTHGGIWNEQFEKYNEVIIGTMKT

SEQ ID NO: 128302 - protein, 304 aa, Unknown
  Bacterial polypetide isolated from the Sargasso Sea
DIFYENWYANHVRKIDIDSLASWGFNAIRLPMHYNLFTLSIQDEPILGENTWLTKGFEMTDSLVSWCKQNNMYVILDLHAAPGGQGGNSGISDYNPNFPSLWEDVNNQNKTFSLWKKIAEHYVNEPTIAGYDFLNETNWNLGNNVLRNFYIELTDSVRSVDNNHIIFIEGNWYANDFSGLTPPWDPNMVYSPHKYWSKNFQADIQWALDIRNTWNVPIWFGESGENSNTWFRNAIRLIEDFDVGWAWWPMKKIESISCPMSITKTTDYQNLLNYWSNGTNQPTSASAINTLYQLTEDLKLENCR

SEQ ID NO: 128303 - protein, 177 aa, Unknown
  Bacterial polypetide isolated from the Sargasso Sea
KALMELYEWGWIKKIPRIAVINANGANTLYQLYNGIFEEEKLRWNEGTPNFGLIERFYNKMNQDETLKPKTKATAIQIGKPSNIAKGLRALEFTDGIVEEVSDKEMLDGMSVVGLNGFDCEMASGASVAGIKKLRDKEIIKKDDKVIGILTGRQKEPLLPIDYHNDPANRFARPPKI

SEQ ID NO: 128304 - protein, 296 aa, Unknown
  Bacterial polypetide isolated from the Sargasso Sea
KIICASTGNTSASAGMFAANENMECDVYIPHGQIAPGKLSQAYQFGTQMVQVDGNFDDAFTKSLEAAKEPGSYTVNSVNPFRIEGQKTIPYRALEALDWDVPDWLVYPGGALGNISSCGKSLMELYEWGWIKKIPRIAVINANGANTLYQLYNGIFDEEKLRWNDGVPNFELIERFYKKMNKDETLKPKTKATAIQIGKPSNIAKGLRALDFTDGIVEEVTDKEMLDGMSVVGLNGFDCEMASGASVAGIKKLRDKEIIKKDDKVIGILTGRQKEPLLPIDYHNDSTNKFARPPKN

SEQ ID NO: 128305 - protein, 296 aa, Unknown
  Bacterial polypetide isolated from the Sargasso Sea
AKKIICASTGNTSASAGMFAANENMECDVYIPDGQIAPGKLSQAYQFGTQMVKVNGNFDDAFAKSLQAAEEPGSYTVNSVNPFRIEGQKTIPFRTLETLEWEVPDWLIYPGGALGNTSSCGKSLMELYEWGWIKKIPRIAVINASGANTLYQLYNGIFDEEKLRWNDGTPNFELIERFYKKMNEDKNLKPKTKATAIQIGKPSNIAKGLRALDFTDGIVEEVSDKEMLDGMSVVGLNGFDCEMASGASVAGIKKLRDKEIIKKDDKVVGILTGRQKEPLLPIDYHNDPANKLQDHL

SEQ ID NO: 128306 - protein, 404 aa, Unknown
  Bacterial polypetide isolated from the Sargasso Sea
MHYLACDLGAESGRLMLGSLKDGRLSLEELHRFPNVPIEDTVGRHWNVEALFAELQTGLALAGQRGLPIASISVDAWGLDYFLLDETGAVMEPTFCYRDSRNQRGIDRTLDTLPWETLYEETGIQFMQINSLFQMATESPERIERMRTFLPLGDGFNYLLSGVAKAEISLASTTQLYNPRTRNWSDKLLDAFDWPRSKFPELIPSGTRLGTLKPELAAASGLGEIEVLATCSHDTGAAVAAVPADGDQWAYLSSGTWSLIGVELPEPIINDAARDLNFTNEIGHGNTVRLLRNIIGLWLVQECRREWSEDGKEYDYSTLTQLATEAIPFAALIDPSDERFFKPQSMSGAIAEFCHETDQTPPSTPGGFIRCALESLALLYHRRLNEVCELTNRKVKQLHIVGGG

SEQ ID NO: 128307 - protein, 447 aa, Unknown
  Bacterial polypetide isolated from the Sargasso Sea
MQQKAKLVCINPDCGKTFSIRSLAIKCDACNFLLDVKYENKPSSNLKDVFYERRNPQGSIYNESGVWRFRELLNFCEIETEDIEQCSKYLVSLDGAEGRQSKPYHMSKVAEFVGLDNENVVFQPEGYNPSGSFKDNGMSAAVTHGKMMGAKKIICASTGNTSASAGMFAANENMECDVYIPDGQIAPGKLSQAYQFGTQMVKVNGNFDDAFTKSLQAAEEPGSYTVNSVNPFRIEGQKTIPYRALEYLNWEVPDWLVYPGGALGNTSSCGKSLMELYEWGWIKKIPRIAVINASGANTLYQLFNGIFDEEKLRWNNGAPNFELIQRFYDQMNKDENLKPKTKATAIQIGKPSNIAKGLRALEFTDGIVEEVTDKEMLDGMSVVGLNGFDCEMASGASVAGIKKLRDKGIIKKDDKVVGILTGRQKEPLLPIDYHNDPSNRFARPPKI

SEQ ID NO: 128308 - protein, 378 aa, Unknown
  Bacterial polypetide isolated from the Sargasso Sea
VRIMQQKAKLVCINPNCGKKYSIKSLAIKCDSCNFLLDVKYENKPSSNLKDVFYERRNPQGSIYNESGVWRFRELLNFCEIETEDIEQCSKYLVSLDGAEGRQSKPYHMSKVAEFVGLDNENVVFQPEGYNPSGSFKDNGMSAAVTHGKMMGAKKIICASTGNTSASAGMFAANENMECDVYIPDGQIAPGKLSQAYQFGTQMVKVNGNFDDAFTKSLQAAEEPGSYTVNSVNPFRIEGQKTIPYRALEYLNWEVPDWLVYPGGALGNTSSCGKSLMELYEWGWIKKIPRIAVINASGANTLYQLFNGVFDEEKLRWNEGALNFQLIERFYDEMNKDENLKPKTKATAIQIGKPSNIAKGLRALEFTNGIVEEVTDKE

SEQ ID NO: 128309 - protein, 99 aa, Unknown
  Bacterial polypetide isolated from the Sargasso Sea
GAAFSQLHIVGGGCQNALLNQLCADACGIRVMSGPIEASTLGNIGIQLMTLDELNNVDDFRQVVRANYELTTFIPNPESEIARYQAQFQSLRQTKELCA

SEQ ID NO: 128310 - protein, 494 aa, Unknown
  Bacterial polypetide isolated from the Sargasso Sea
MSVNIAAVDLGASSGRVIWASYDPVNENITMQEMHRFTNGMVHSNGHDCWEPERLFSNILLGLEKIDDAGIVLDAVGIDSWGVDFVLLDAAGQMLGDAVAYRDARTDGVPERVWQQLSRDEIYRRSGIQFLKFNSLYQIRALLDEKPAWLDKVTRLLLIPDYLHYRLTGQFSCEFTNASTSQLVNARSRDWDPELIALIGEGGKWLQPIAAPGTRLGHWISPSGRQVSVILPATHDTGSAIVATPLSGRGAAYISSGTWSLVGVERKAPLTDAAALAANLTNEGGVEGTWRLLKNVMGLWLVQGLQVLWPQLGFAELVAQAEQAEPFAYLIHPNDERFLNPACMRSAIQHFCQETGQGTPQTPGELVRCVLDSLALCYDQVLRELENVTGESITRLHIVGGGSQNRLLNQLCADICQCTVLTGPVEASALGNIGWQLKGLGLLQDLTDVRRLIRHNTRIDTLHPHEVPQLDYYRTRFAALCAHTHSDTLIEEVV

SEQ ID NO: 128311 - protein, 203 aa, Unknown
  Bacterial polypetide isolated from the Sargasso Sea
MSFRHCVAVDLGASSGRVMLASYECGPRTLTLREIHRFTNSLQKVDGYDCWDVDRLEGEIRRGLVKVCEQGILIDSIGIDTWGVDYVLLDKHGERVGLPVSYRDSRTHGLMHHAEEQIGRAEIYRRSGIQFMSFNTLYQLRALVEQQPELVSQVSHALLIPDYFSFRLTGNLNWEYTNATTTQLININSDSWDEELLNWSGAP

SEQ ID NO: 128312 - protein, 208 aa, Unknown
  Bacterial polypetide isolated from the Sargasso Sea
TNEGGAEGRYRVLKNIMGLWLLQRVLKERQISDLPTLISQTQALPACQFLINPNDDRFINPDDMSAEIQAACRESGQPVPLQNAELARCIFDSLALLYADILQELAQLRGAAFSQLHIVGGGCQNTLLNQLCADACGIRVVSGPIEASTLGNIGIQLMTLDELNNVDDFRQVVRANYELTTFIPNPESEIARYQAQFQSLRQTKELCA

SEQ ID NO: 128313 - protein, 217 aa, Unknown
  Bacterial polypetide isolated from the Sargasso Sea
ELKEIAAISSCLVNNIGTLDDNWRPSFLEASKYYVEQEKPIILDPVGSGASKLRTQTSLDIIKSSKNLIIRGNASEIQSLVDQNKISSKGVDSSIESHAAIESGKILSNENNCVVFISGRDDFIIYEDNVTKISNGSSVMTKVTAIGCSLSCIVGAFAAVGESLYKSAISSAAIFSIAGELAASKSEGPGDFQVNFLNKLNNITEKEILDNLKITSV

SEQ ID NO: 128314 - protein, 274 aa, Unknown
  Bacterial polypetide isolated from the Sargasso Sea
MGLMDPIHIQFSRFVVNASKGEFGISYQLRRPVSDLIVERLPATIELVVISALIALISGTLLGVYTGINRKGFLSDIILAISLLGVSLPTFVIGILFIYLFAVILGILPSFGRGEVVDLGFWTTGFLTISGLKAIILPSITLSLFQMTYIIRLVRAEMMEILQTDYIKFARARGISEKSINYKHALKNGLIPVITIAGINIGTLIAFSIITETVFQWPGMGFLFIQAVQFVDIPIMSAYLVFIAFVFVMINFIVDILYYFIDPRIRLKGDSVSG

SEQ ID NO: 128315 - protein, 191 aa, Unknown
  Bacterial polypetide isolated from the Sargasso Sea
FLEASKYYVEQEKPIILDPVGSGASKLRTQTSLDIIKSSKKLIIRGNASEIQSLVDQNKISSKGVDSSIESHAAIESGKILSNENNCVVFISGSDDFIIYEDNVTKISNGSSVMTKVTAIGCSLSCIVGAFAAVGESLYKSAISSAAIFSIAGELAASKSEGPGDFQVNFLNKLNNITEKEILDNLKISSV

SEQ ID NO: 128316 - protein, 101 aa, Unknown
  Bacterial polypetide isolated from the Sargasso Sea
MARQIGTIVVVTGEVDYVTDGQRTVGVDGGDPLMTRVVGTGCALSAVVAASCALRGDRLDNVASACSWMKQAGQIATEQSNGPGSFVPAFLDALYNLNAQE

SEQ ID NO: 128317 - protein, 123 aa, Unknown
  Bacterial polypetide isolated from the Sargasso Sea
MQPDLHSRALAAHTLHQFRTLSPLTHCMTNEVVQSFTANTLLALGASPAMVIEPEEASQFAAIASALLVNVGTLTQERATAMRAAVERAYHAKTPWTLDPVAVGALEFRRRFCLDLLSLQPAA

SEQ ID NO: 128318 - protein, 245 aa, Unknown
  Bacterial polypetide isolated from the Sargasso Sea
ALGLSLQQIALFGQQAENEFMDCQCGIMDQLISAKGQQGHALLIDCSDLQTTAVPLPEDIKLVIINSNYPRKLVDSEYNQRRLDCEQAAQKMGVRTLRHATLELLNDTAPKLSDTEFRRARHVITENSRVLATQKALIANDMLTLSELMRASHLSLQNDFEVTVPPVDGLVEICHQLFKYQIAVRMTGGGFGGAILCLCREEHIEPLRQAVLAQYTKKFGLTADFYLCHAGSGLQIELFNQQNNC

SEQ ID NO: 128319 - protein, 146 aa, Unknown
  Bacterial polypetide isolated from the Sargasso Sea
MSNPAQRATKLFVQTFGTKADDLYQAPGRVNLIGEYTDYNDGFVLPAAINFHTVIAVKRREDNKFRAVADAFPGQIKEWSFGKDTEINPEDGWVNYLKGLTVAMANTGLIAKGLDLAVVGDVPLAAGLSSSGALVVAFGTAISDSS

SEQ ID NO: 128320 - protein, 278 aa, Unknown
  Bacterial polypetide isolated from the Sargasso Sea
IESASADVAELSGQAARWQAAAPGRVNLIGEHTDYNQGWVLPMAIDRYIAMAAAPGVPGQIRVRSSAMDEERSLSLDQLHTPHGDPWMRYVQGVIAQYDQHGVRCPGLDVAVVSSVPPGGGLSSSAALELATAHLLEAVTGQTLTPAERIQVSVQAEREMAGVPCGIMDQTVVELAASGQALLLDCLDQTARSVPFESHAPVLLVIHSGVSHSLAEGAYAQRRAECERASALLGVNSLREVSPDQLARLKDEVVLHQRVTHVVTENERVRDAVTAIEQ

SEQ ID NO: 128321 - protein, 267 aa, Unknown
  Bacterial polypetide isolated from the Sargasso Sea
MKNIKEFNYKILIESPGRVNLIGEHIDYNGGNVLPASIDKKIFLYFKKNLKNSICKVNSTHYNEIITFELNEEKKELNSNWKNYIFGVIHYLKKLKGDQLNGFECIIDSNLPLGSGISSSSALICGLIKGLNDLFKLKISNHEMINISQKVEHNFIGVKGGIMDQFAIFYGKKDKIILLNCDTLNLKMIDSKFSPYKFLLLNTNVNHNLSSSDYNTRVKECESALKKIKIENKKLSCLANAPEDYIIKNEPLFTKNEFKRALYVSQE

SEQ ID NO: 128322 - protein, 240 aa, Unknown
  Bacterial polypetide isolated from the Sargasso Sea
PMPQLATIGQLAENRFVGVNCGIMDQFVSANGRAGHALFLDCRDLSFELVPIGDEGVRIVICNSGVKRGLTDSLYNERRNACEEGVRRLALASGHSFGALRDVTMEHLEDYKGALSDEIFARCHHVITEIERTTSAADALKHGDLGALGELMGASHASLRDDYEVSGSELDQLVEIADSVKGVIGARMTGAGFGGCIVCLTEENAVEVLVETVEKRYTANSQYRAEVYTCSAVNGVERIG

SEQ ID NO: 128323 - protein, 180 aa, Unknown
  Bacterial polypetide isolated from the Sargasso Sea
MSNPAQRATKLFVQTFGTKADDLYQAPGRVNLIGEYTDYNDGFVLPAAINFHTVIAVKRREDNKFRAVADAFPGQLKEWSFGKDTEINPEDGWVNYLKGLTVAMANTGLIAKGLDLAVVGDVPLAAGLSSSGALVVAFGTAISDSSQLHLSPMAVAQLAQRGEYRYVSSACSNRTIWSAP

SEQ ID NO: 128324 - protein, 262 aa, Unknown
  Bacterial polypetide isolated from the Sargasso Sea
KKEVNWADFIIGSCLFFGKKYSIVIKKLSFNIKSLLPLGIGLSSSAAITVSTLKALGNYYKKDISDDELINLAYDIENNFVGVGGGIMDQFVSVLGNQNQALFLNTLNRSYELIDIFEDYNFLIIDSNTKRILSNSEFNQKKELCLSASKKMNLNNLCEKEIISKEDIEILSDEEFKVCKHVVEENVRVKKAVQFLKDDNPDEFGKLMTESHLSLSKYYGVSTNELNKLVSLSNSFGALGSKLTGAGFGGAVVTLVKNDKVE

SEQ ID NO: 128325 - protein, 219 aa, Unknown
  Bacterial polypetide isolated from the Sargasso Sea
TEYAEKHIAILAQKVERDYIGVAGGIMDQMVSSIGIHRKAFFLDCLSLKFELIDLPDNWVFCLVDSAVQRNLRDSAYNERYSQLKKAEEYLGTEYLGSIKPEQFDENKINDELILKRARHVITENARVLEAKKCILNKDIKSFGKLMNESHQSYAKDFEASTEDVDSIVERSKISGAEGARLTGGGFGGFTVSLIHKNNYDEWQKNMHKYYDNKNIFEV

SEQ ID NO: 128326 - protein, 206 aa, Unknown
  Bacterial polypetide isolated from the Sargasso Sea
KVERDYIGVSGGIMDQMVSSIGIHRKAFFLDCLSLKFELIDLPDNWVFCLVDSAVQRNLRDSAYNERYSQLKKAEEYLGTEYLGSIKPKQFDENKINDELILKRARHVITENARVLEAKKYILNKDIKSFGKLMNESHQSYAKDFEASTEDVDSIVERSKISGAEGARLTGGGFGGFTVSLIHKNNYDEWQKNMIKYYDNKNIFEV

SEQ ID NO: 128327 - protein, 189 aa, Unknown
  Bacterial polypetide isolated from the Sargasso Sea
MSNPAQRATKLFVQTFGTKPDELYQAPGRVNIMGEHTDYNEGLALPAAINFKTVIAVKHRDDNLFRAVSTAFPGKIEQWRFGEEGTIAAGDDWTHYLKCVTAAMNQSGLLAKGLDLAIVGDVPLGAGLSSSAALEVAFGTAISYASQLHLSPLAIAQLAQRGESQFMCLDCGMMDQMISAMAEPRPRLT

SEQ ID NO: 128328 - protein, 253 aa, Unknown
  Bacterial polypetide isolated from the Sargasso Sea
MRKRVEDEYRSRFGRVPSVVAAAPGRVNLIGEHIDYNNGFVLPMAIERYVIIAAAPCSDPSQEHAIFYSSHMQESTDIPIGMSFGPTCSGWGRYVEGVIAGFVSRGCDVPPLEAVIGSSVPSGGGLSSSAALEVATATMLEGITDHQIEPLEKAILCQHAEHTFAGMPCGIMDQFSSVFGMPGELMLLDCMSQEIQAVPFREEEVSVLITNSNVKHELTDGEYAERRRQCESALEKLDLLSWRDVRLADLEAA

SEQ ID NO: 128329 - protein, 361 aa, Unknown
  Bacterial polypetide isolated from the Sargasso Sea
MNSLKLFQTNFQCSPVSSAQAHGRVNLIGEHTDYNYGFVLPTLIDQKIEVSIGPRSDSQIVGISDEFGKKSSLFDSKTDGSWIDFVRGALFYLGKEGHHMSGLNLSVTSDIPAGSGLSSSAALEIALIKALCKMVKLELPLTKIAQIGQLIEHNFIGTYCGIMDQMSSAIAKFGQALFLDCENLSTEIIPIFSEYTFVVIHSGSTRKLSEGLYNERKRETEAAAKFLNIPSLRHAEITNLSLIKDPKILKRARHVISENFRVKKAVQFLKNNNAQAFGELMNESHSSMDKDYEISSPELNYVVKKAQSHGALGARLTGAGFGGCTVILTSNIQREDITEKILNDCPKSYLITNISQNNIIN

SEQ ID NO: 128330 - protein, 360 aa, Unknown
  Bacterial polypetide isolated from the Sargasso Sea
MINSSKELFEKNFSQSPIATAFAPGRVNLIGDHTDYNFGLVMPTPLSLGIEVSIIPSNTLLIEGKTELFKESVRPISAPVDGSWLDFVTGAINVFYEEFPNSSKILKNGIKLAISSNLPANSGVSSSAALEISLLRAINKIENQVLDNYKLAKLAQKIEHNFIGTMCGLMDQMVISSGVTEKAMFFDTKNGNIENVSLFKNHKFLIIHSGSTRTLSKSLYNLRCQECQDASKKLNIQNLSEANRDMVDSLEGISFKRANHVISENKRVEICLNALKNNDPETFGEKMYESHFSLSQNYEVSSELLDNIIEKSQSLNILGGRLTGAGFGGCCIFLINQNDTEQIFDTLSSHFSDIKFVDVI

SEQ ID NO: 128331 - protein, 325 aa, Unknown
  Bacterial polypetide isolated from the Sargasso Sea
MGFKDIFHTDFSVVNSAHARVNLIGEHTDYTGGYVLPSLLNFKTTIQISKNENKKYQVYSEHFNEQMNFTDFIKSKNNEWVDYVKGCLFVFYDENKHIPNTHLNIFISSTIPMGRGISSSSALCVAVLKALNNFFKTEYAEKHIAILAQKVERDYIGVSGGIMDQMVSSIGIHRKAFFLDCLSLKFELIDLPDNWVFCLVDSAVQRNLRDSAYNERYSQLKKAEEYLGAEYLGSIKPEQFNENKINDELILKRARHVITENARVLEAKKYILNKDIKSFGKLMNESHQSYAKDFEASTEDVDLIVERSKISGAEGARLTGGGLED

SEQ ID NO: 128332 - protein, 277 aa, Unknown
  Bacterial polypetide isolated from the Sargasso Sea
MRVTASVPARINIIGEHTDHFGGLSLTFSSQHRLELTASPRDDRSRGDQTVTSLWEAAGGWSADLDVDSNIPIGAGLSSSAALCVAIVMCSQNTVDPMEISLEAQRIENHVLRSNCGLMDQISVTHSKEGLATLLDFSKMSIESFRMPDDWRFKLVDTGIRRSLSETNYSSSEIKIETRRIHAKEESARVRTALTSDARILGTILNESHASISDNIRASTPEIDNMVKEIQSTAGVLGARLMGGGFGGMILALVEEEDALPGELLVSSAPAFLQETL

SEQ ID NO: 128333 - protein, 381 aa, Unknown
  Bacterial polypetide isolated from the Sargasso Sea
MSNPAQRATKLFVQTFGTKADDLYQAPGRVNLIGEYTDYNDGFVLPAAINFHTVIAVKRREDNKFRAVADAFPGQIKEWTFGKETEIHPEDGWVNYLKGFTAAMANTGLIAKGLDLAVVGDVPLAAGLSSSGALVVAFGTAISDSSQLHLSPMAVAQLAQRGEYRYVASACSIMDHMVCAMGEPDHALLIDCLDLDSEPIAIPENLSLIIIDAHIEKQRLAAISQQRREECAQAAEFFGLDALRHLELRQLESAKDKLDETLYRRAKHVVTENKRTQSAARALEQNNISKFSLLMAQSHQSLRDDFEVTLPEFDTLVDIVSQVIGERGGIRMTDGCVVALVDHELTDAVVSAVEQTFFEQTGIDATVYLCSASAGAGRIDS

SEQ ID NO: 128334 - protein, 355 aa, Unknown
  Bacterial polypetide isolated from the Sargasso Sea
MGFKELFKVDFSASSSAHARVNLIGEHTDYTGGFVLPSLLKFQTTIQISKNDTKEYQVYSENFNEIKKFNDFIKSKNNDWIDYIKGCLFVFYDENKHIPNAHLNVYISSTIPMGRGISSSSALCVSFLKSLNSFFNTNYSDKHIAILAQKVERNYIGVSGGIMDQMVSSIGIHRKAFFLDCLSLKFELIALPPDWVFCLVDSAVQRNLRESAYNERYSQLKKAEEYLGAEYLGSIKPEQFDENKINDELILKRARHVITENARVLEAKECIINGDIKSFGNLMNESHQSYAKDFEASTEDVDLIVAKSITSGAEGARLTGGGFGGFTVSLIHKNKFDEWKKNMKKFYNEKNIFEM

SEQ ID NO: 128335 - protein, 381 aa, Unknown
  Bacterial polypetide isolated from the Sargasso Sea
MSNPAQRATKLFVQTFGTKADDLYQAPGRVNLIGEYTDYNDGFVLPAAINFHTVIAVKRREDNKFRAVADAFPGQIKEWSFGKDTEINPEDGWVNYLKGLTVAMANTGLIAKGLDLAVVGDVPLAAGLSSSGALVVAFGTAISDSSQLHLSPMAVAQLAQRGEYRYVSSACSIMDHMICAMGEPDHALLIDCLDLDSEPIAIPENLSLIIIDAHIEKQRLAAINQQRREECAQAADFFGLDALRHLDLRQLESAKDQLDDTLYRRAKHVVTENKRTQSAARALEQNNLSKFSLLMAQSHQSLRDDFEVTLPEFDTLVDIVGQVIGERGGIRMTDGCVVALVDHELTDAVVSAVEHAFYEQTGIDATVYLCSASAGAGRIDS

SEQ ID NO: 128336 - protein, 356 aa, Unknown
  Bacterial polypetide isolated from the Sargasso Sea
MKSFKDIFHTDFSVVNSAHARVNLIGEHTDYTGGYVLPSLLNFKTTIQISKNENKKYQVYSEHFKEQINFTDFIKSKNNKWVDYVKGSLFVFYDENKNIPNTHLNIYISSTIPIGRGISSSSALCVAVLKSLNSFFNTEYTEKHIAILAQKVERNYIGVSGGIMDQMVSSIGIHRKAFFLDCLSLKFELIDLPDNWVFCLVDSAVQRNLRDSAYNERYNQLKKAEEYLGTEYLGSIKPEQFDQNKIKDELILKRARHVITENARVLEAKGYILNKDIKSFGKLMNESHQSYSKDFEASTEDVDLIVERSNTSGAEGARLTGGGFGGFTVSLIHKNNYYEWKTNMSKYYDNKNIFEV

SEQ ID NO: 128337 - protein, 293 aa, Unknown
  Bacterial polypetide isolated from the Sargasso Sea
MPAADQFMELRQRVENEYQSRFGRVPSVVAAAPGRVNLIGEHIDYNNGFVLPMAIERYVIIAAAPCSDPSHEHAIFYSSDLQESTDIPIGASFGPTCSGWGRYVEGVVAGFVSRGCDVPPLEAVIGSSVPSGGGLSSSAALEVATATMLEGITDHQIEPLEKAILCQHAEHAFAGMPCGIMDQFSSVFGMPGELMLLDCMSQEIQAVPFREEDVSVLITNSNIKHELTGGEYAERRRQCESALEKLDLLSWRDVRLADLEAARDRLNDDELACGRHVVTEIARTLDAAKAFSN

SEQ ID NO: 128338 - protein, 100 aa, Unknown
  Bacterial polypetide isolated from the Sargasso Sea
MRPQSNPRERVIEEFKNLFHTDPSFLVRAPGRVNLIGEHTDYNDGFVLPMALSQSIWIALSSQTNLEVELHSLDFEESVKVPLEENYEKSRGWQEFLKGV

SEQ ID NO: 128339 - protein, 90 aa, Unknown
  Bacterial polypetide isolated from the Sargasso Sea
MTPNQRVSTVFAEQFAKAPDLLVRAPGRVNLIGEHTDYNDGFVLPCAIDYETCVAIGLRDDRQVQVIAADYDNQRDQFDLDQPIEHHPSQ

SEQ ID NO: 128340 - protein, 59 aa, Unknown
  Bacterial polypetide isolated from the Sargasso Sea
MTPNQRVSTVFAEQFAKAPDLLVRAPGRVNLIGEHTDYNDGFVLPCAIDYETCVAIGLR

SEQ ID NO: 128341 - protein, 272 aa, Unknown
  Bacterial polypetide isolated from the Sargasso Sea
GWKGVATGNVPIGAGLSSSAAFELAIARAFTSVGNWEWQPLEMARLCQRAENDWVGMNCGIMDQTISALGQDRNALFLDCRSLETRQVRIPDNLQIAVMDTGTRHELVDSAYNERRLQCEKAAAFFKVKALRDLSLEKLLSSEKELDPVVFRRARHVVTENQRVLSFIKALESGNPEKAGELMNESHHSLRDDFEVSSEALDLISECAQESPGCYGARMTGGGFAGCGVALVDQSRSQEFSKELERKYKTVTGRTAKNYLCSPSEGAESFKI

SEQ ID NO: 128342 - protein, 267 aa, Unknown
  Bacterial polypetide isolated from the Sargasso Sea
PAQGIAAAPGRVNLIGEFTDYNDGFVFPCSLEFRTQVMFKERDDNIITVHSLNYPGEKDSFSVDEDISEGQSQWGNYIRAVSFVLKRAGHTLRGADLLIDSNLPQGSGLSSSAALEVAIGGMFNHIAQLGLSEEKIALLGQEAENDFMHCQSGIMDQLISAKGENGHALLIDCENLATESVKVPDDLNIVIVNSNYPRKLVDSEYNQRRVDCEQAAAKMNVATLRKATMDTLEATKDALSENEYKRAHHVISENERVIAATKALQNN

SEQ ID NO: 128343 - protein, 105 aa, Unknown
  Bacterial polypetide isolated from the Sargasso Sea
MIPQSNPRERVIEEFKNLFHTDPSFLVRAPGRVNLIGEHTDYNDGFVLPMALSQSIWIALSSQPNPEVELHSLDFEESVNVPLEENYEKSRGWQEFLKGVLDVLK

SEQ ID NO: 128344 - protein, 241 aa, Unknown
  Bacterial polypetide isolated from the Sargasso Sea
MRPQSNLRERVIEEFKNLYHTDPSHLVRAPGRVNLIGEHTDYNEGFVLPMALSQSIWIALSSQPNPEVELHSLDFEESVNVPLEENYEKSRGWQEFLKGVLDILKQEGYSLSGWKGVAAGDVPIGAGLSSSAAFELAIARAFTSVGNWEWQPLEMAGFCQRAENEWVGMNCGIMDQTISALGQAGNALFLDCRSLETLQVRMPDNLQIAVMDTGTRHELVDSAYNQRRLQCEKAAAFFEVK

SEQ ID NO: 128345 - protein, 210 aa, Unknown
  Bacterial polypetide isolated from the Sargasso Sea
MIPQSNPRERVIKEFKNLFHTDPSFLVRAPGRVNLIGEHTDYNDGFVLPMALSQSIWIALSSQPIPEVELHTLDFEESVKVPLEENYEKSRGWQEFLKGVLDVLKQEGYSLSGWKGVAAGDVPIGAGLSSSAAFELAIARAFTTVGNWEWQPLEMARFCQRAENEWVGMNCGIMDQTISALGQTGNALFLDCRSLETRQVRMPDNLQIAV

SEQ ID NO: 128346 - protein, 149 aa, Unknown
  Bacterial polypetide isolated from the Sargasso Sea
MSLTVAELHQLFSSHFSATADYHFRAPGRVNLIGEHTDYNDGFVLPCAINFDTHVLARKNGLNIIRVVAADYANQVDEIPLDQVIAHHLDYQWANYVRGVVQSLQRQGISLVGCDLSISGNVPQGAGLSSSAALEVALGLTFTTLAGHA

SEQ ID NO: 128347 - protein, 379 aa, Unknown
  Bacterial polypetide isolated from the Sargasso Sea
MDNQVLSSNFETHYGEAPALIAHAPGRVNIIGEHTDYNEGFVFPAAINFGTWVAATKRADNDIVVTAMDYENQQNQFSLSDINYDEEQGWANYVRGVVKVLKEAMPDFGGANLLVTGNVPQGAGLSSSASFEVAILKALSALYELPLDGVQAALLGQKAENTFVGCSCGIMDQLISAMGNEGMAMLLDCQSLAIEHSPLPDSHQIVIINSNVKRGLVDSEYNLRRQQCEQGASLLGVSSLREATMEMLEGAKAHMPEVVYRRAKHIVTENARTLAASQALKAGDIETVSEAMAQSHISMRDDFEITVRPIDYLVEIIGEVLGKSGGVRMTGGGFGGCVVALVPTDKVEAVKQVVADKYSDETGYSADIYVCTATQGAFA

SEQ ID NO: 128348 - protein, 380 aa, Unknown
  Bacterial polypetide isolated from the Sargasso Sea
MTPSQRVSAVFAEQFEQQPDLLVRAPGRVNLIGEHTDYNDGFVLPCAIDYETCVAIGLRDDSLVHVIAADYGNQRDLFDLDQPIGHHADQRWSDYIRGVVKYLQERGYPLRGLNLVVSGNVPQGAGLSSSASLEVAIGQAFKEALGLAITQAEIALNGQQAENQFVGCNCGIMDQMISASGKQDHALLLDCRSLETRLIPMPTDLAVLIVNSNVRRGLVDSEYNTRRQQCEAAARHYGVKALRDLDLAALEAGKAGLDEVCYRRARHVVGDNSRTLAAADALAQGDLVRLGELMADSHAAMRDDFEITVPAIDGLVEIIKARIGTEGGVRMTGGGFGGCVVSLLHPDKVAEVIAAVDAEYPARFGLKADSYVCRASAGAG

SEQ ID NO: 128349 - protein, 284 aa, Unknown
  Bacterial polypetide isolated from the Sargasso Sea
VVKHLQKRNNHFGGADLVISGNVPQGAGLSSSASLEVAVGTVFQQLYHLPLDGAQIALNGQEAENQFVGCNCGIMDQLISALGKKDHALLLDCRTLGTKAVSMPKGVAVVIINSNFKRTLVGSEYNTRREQCETGARFFQQPALRDVKIAEFNAVAHELDPVVAKRVRHVLTENARTLEAATALEKGDLKRMGELMAESHASMRDDFEITVPQIDTLVEIVKATIGDKGGVRMTGGGFGGCVVALVPEECVDPVKQAVAQQYEAKTGIKETFYVCKPSQGAGQC

SEQ ID NO: 128350 - protein, 389 aa, Unknown
  Bacterial polypetide isolated from the Sargasso Sea
AFIFLMRPQSNSRERVIEEFKNLYHTDPSFLVRAPGRVNLIGEHTDYNDGFVLPMALSQSIWIALSSQPNPEVELHSLDFEESVRVPLEENYEKSRGWQEFLKGVLDELKLEGYSLSGWKGVVTGNVPIGAGLSSSAAFELAIARAFTSVGNWEWQPLEMARLCQRAENEWVGMNCGIMDQTISALGQSGNALFLDCRSLETRQVAMPDNLQIAVMDTGTRHELVDSAYNERRLQCEKAAAFFEVKALRDLSLEKLLSSEKEMDPLVFRRARHVVTENQRVLSFIKALESGTPEKAGQLMNESHQSLRDDFEVSSEALDLISECARKSPGCYGARMTGGGFAGCGVALVDQLRSAEFSRELERKYKTIAGRAAKIYLCSPSEGAESFKI

SEQ ID NO: 128351 - protein, 384 aa, Unknown
  Bacterial polypetide isolated from the Sargasso Sea
MELVQQVQQAFAEHYQHQGEFAFRAPGRVNLIGEHTDYNDGYVLPCAINYDTVVVATPRNDKKVRVLALDYQQQVDEFELTFPLAKHPEYQWANYVRGVANSLMQKGFNLVGCDLAISGNVPQGVGLSSSASLEVALGLTYSTLAGVELSSRDNALNGQHAENHFVGCNCGIMDQLISAQGKVAHALLIDCRSLDSTPVSVPTDMAVMIINSNVKRGLVDSEYNTRRRQCEEAAAIFAVKALRDVSWDTFVARQDQLDPVVAKRARHVISENDRTELAAKALAAHDIKLLSRLMAESHLSMKNDFEITVPAIDALVEMIGNRLGDTGGVRMTGGGFGGCVVALVPQGRVDEIRALVEREYPAQTGLTAGIFVCTASQGAEQILA

SEQ ID NO: 128352 - protein, 208 aa, Unknown
  Bacterial polypetide isolated from the Sargasso Sea
DDDKNGFMTAINGMDTSKGLDLLIHTPGGEIAALESLGQYLRAKFGTNIRAFVPMIAMSAGTMLACCANEIFMGKQSNIGPFDPQMGGIPAHGILEEVEKAKQEILANPGTVAFWQFNLQKLHPTFIGDCEKAIQWASEIVSDWLISGMFAGEVDAEDKANSICRQLNNHSTTYAHSRHIHMDKARDIGLKISSLEDDQVLQDLVLTI

SEQ ID NO: 128353 - protein, 275 aa, Unknown
  Bacterial polypetide isolated from the Sargasso Sea
DEETTHTRDKVHELLMHNRLISTDFENIRILKKEKIEISAIIKLDPFSLGESVLAEIYYKVDKLLNPEIIFYDYDQMIELGYTEIEIFSGVETKLGFIDSKSLTQKTNSIYFGEIKELIDGITGVSEIEEIRIFKNGVQIFDDLITFSENSYPSLKKTILNYNEEQEKIVFQRNDSVYGIDSVILSQLYDSLTTDSKSTYKKTKNQFLKDSTARFEKSEIENYYSIQNELPSIYGLKKNELPKNAKKKRVAQVKQLRGFLYFFEQLMANYLSQLA

SEQ ID NO: 128354 - protein, 169 aa, Unknown
  Bacterial polypetide isolated from the Sargasso Sea
MGTYKKTVSVKGGRRRGRGRGRGKHELADEAAAQDGGIESKKEEEEKAAEEQQPQQQQQQQQQQQQQQQSRSARAESVLQAEDPTTGKTYYYNKFTMKTGWDAESVSRRAIDHKSKGNKEKERPVAKEDSWSAITKTRKESQFDFANPLRGGSVRGDGAGGDAETEAAL

SEQ ID NO: 128355 - protein, 275 aa, Unknown
  Bacterial polypetide isolated from the Sargasso Sea
LNYSLNNKPMQVTGVSLPGAPAIVVGTNNNVAWGFTNGYLDTADWIALNSDSKMWQVDEPIALPSGKVESYSLTLSEYGPVKYINEKPYALSWAAHQPYAVNMQLLQLEQAQSVDDALDIASDVGIPVQNLLVVDDQGNAAWKNMGGIPARTTPSELAVKEEDYSALWQQNEIDRPFIKNPENGRLWTGNSRVVSADDNVRFGNGGYALGARATQIRDRLFEKQRFNESDFYQLQLDNQARFLMPWHALLLEQLKKQPTRYKDHINALENWQQCA

SEQ ID NO: 128356 - protein, 249 aa, Unknown
  Bacterial polypetide isolated from the Sargasso Sea
MDRRTFLPKIYGCYSIKIDQFGPPRYFFVMENVFPAGETFPKQATKDVSQVVDESYDLKGSYIARNADSLKPGSSRKCMYCNEDMKIGVPQVCDSGVYTNCAPARLLKDSDLRMKAILSKEDDDTFRKGANADIAWLQSQEITDYSLLLGVQRRRVRSDTAMDRKYSGGKSEFSMLDGGAGSEESSFASFDGFNVPVFEGPAVYYVGIIDVLQQWTFWKRAERFYKVYIQMLDPDGVSCMRPGGLCAPL

SEQ ID NO: 128357 - protein, 72 aa, Unknown
  Bacterial polypetide isolated from the Sargasso Sea
MRSKKIQQKSFTKELIASFSKRNKIIPSKFHYDLKGSRYFEKITKTKEYYVTRVEKEILNKISDQINEIFGN

SEQ ID NO: 128358 - protein, 464 aa, Unknown
  Bacterial polypetide isolated from the Sargasso Sea
AFILCLLLVILNGCNNDSKPNIIWITIEDQSQYLLPFNGNQDVSLPNLEKIAKEGLIFQNMYAPYPVCAPARSSIITGMYPNSIGTHNMRALSYGTYKKTGEFGERNESEKVLGIPRYSSKIAESIKTFPTILRENGYFTFNKAKGDYNFIISDSTWSEYGTRKKFNKSDTPFFAVYNYNITHESSMWQRDKEPLMVDPNKLNVPPIFPDDSIVRHSLAVNYSNLIEMDKQVGKLVDDLKKEGLYDDSYIFFYSDHGGPFPRHKRAIYETGTKVPFFVKFPKGKYESIDKNQFLSFVDFAPTTLSIAGIEPPGFLQGKAFLGKYKDESQREHLFTASDRFDENPDRIRAVRDEKFKYIRNYFPENSHALNVAYRRQMVLMRHLTTLHLTGKLSEEQDLWFRVPKLKEELYDLENDPFELNNLSDNPEYSNKLKNLSDVLDNWIKEIDDLGRIPEKQLYKMISSD

SEQ ID NO: 128359 - protein, 1001 aa, Unknown
  Bacterial polypetide isolated from the Sargasso Sea
MITALQAQTEPVKDIHRNDPRVWALSHAMVHTEPGDSIKDATIIVRDGKIEKVGRYIQIPLDAYEIDMEGAHIYAGFIDGWLQIKKDEKTKSPDDHWNEKIRAEYRAKDDLKLKKKELKALHSIGITAAHVVPEKGIFKGKSDLVVLNDDMVSIAKDVSQVLEFKTTGWSDRGYPNSLLGVIAVMRQTFMDADWYLRSLEIFNKYPEENEVLPLNPSLSELGRYHANRLPILFMTKEEHGALRSLKIAEEFNLNPWLLGSGYEYRRLKEIAQFNPFIIFPLDFPNKPKVTDPHIALQFSNEQLKHWDMAPDNIKKAFDADLRFSLTSGTLKNKKDFRKNLQKIIDRGLSQDVALAALTTYPAEAMGAEKILGKIQPGYMANLVVTDGNYFDTRSRVTSIWLAGKEKYITDRHKPIIAGKWELEIDKNTYDLEFSVPSTYKKTSDLRQKALATNKLEGKVKIGDETLNLVDLRISNKVIEFKVKGTLLGVDAMLAFKGQIKKDQFKGKVNDGTKKGLTFKAKRTVDIKPIIRQKDIASDLELYHPEGAYGLDKDLLSPNAILIDNATIWTCGPKGIVEEWDILFVNGKVDKVAPDISVPMGSALLIDGTGKYVTPGLIDCHSHSAASSINEGAQAVTAEVRIKDVLFADDVNIYRQLGGGLTTANVLHGSANPIGGQNAVIKLKWGSTPEDLIFKNAPEGIKFALGENVKQANWAGTGRYPQTRMGVEQVIRDAFRAAQDYRHRHKTYDRNSKAQRKIIPPRRDLELEALAEILEGTRLLHCHSYRQDEIWMLTRIAEDFGFKIATFQHVLEGYKVAERLAEHGAGASTFSDWWQYKYEVIDAIPYNGTLMANNDVLVSFNSDDSELARRMNTEAMKAVKYGDLSEEEALHFVTINPAKQLKIDKWVGSLEEGKHADFVIWDGPPLSIYSKVQETWIEGTRYWSVDENAQLEDRDKTERRNLIQKILSSRTSSFGKDMKPNSGTPQHHNCLMDDDDLVESEF

SEQ ID NO: 128360 - protein, 190 aa, Unknown
  Bacterial polypetide isolated from the Sargasso Sea
MNIIIFGPPGAGKGTQSDYIVKKYNLFQVSTGKILREEIKNKTDLGQKISSLISSGSLVEDKIVNKLIEEIVSDKKYENRFIFDGYPRNLDQASNLDNLLHENKQKIDIVLKLSVSLETIKKRISERRSIEKRPDDNEEVAIKRYKTYEKSTEPIIHYYKKLNLLKVINGERSIDQINKEISGIIDILQA

SEQ ID NO: 128361 - protein, 285 aa, Unknown
  Bacterial polypetide isolated from the Sargasso Sea
IAVILLLSLMFRYAPASTSTFTISAACLPPNCAASISAVLLLLSLLFSCTASAFTSTLTISAAPNRAASISAVDPPLLSFALRSAPASTSTLTISAACLPPNRAASISAVDPPMSFASRFAPASTSTLTISAACSPPNCAASISAVDPPMSFASRFASASTSTLTISAACSPPNCAASISAVLLLMSFASRFAPASTSTLTISAACSPLNCAASISAVLLLMSFALRSAPASTSTLTISAACSPLNCAASISAVLLLMSFALRSASAFTSTRISSGVPFLTTSKI

SEQ ID NO: 128362 - protein, 246 aa, Unknown
  Bacterial polypetide isolated from the Sargasso Sea
KVDGALQDSVPEGFEMLYDNFSSGILGLGTAVVAYFGLSPILTAFSDGLGNFASGLVDSGLVPLADIPIEVAKVLFLNNAVNHGVLTPLGAAESAEMGKSIFFMLEANPGPGLGLLLAYWFAGSGMWKASAPGMIIIHFFGGIHEVYFPYVLAHPIMIIAMWAGGISADLWFVATDAGLVGPASPGSIFAFLAMTPRGGTGAVLGGIAIGAVASAVVGTLLLRVRPIKETDAGVEDAIDSSIPGLG

SEQ ID NO: 128363 - protein, 220 aa, Unknown
  Bacterial polypetide isolated from the Sargasso Sea
LDTCSSSLQRAFTNLQAITDGLGNFAASMVDNGLVPLADIPIEVAKVLFLNNAVNQGVLTPLGVADAAESGKSIFFLLETNPGPGLGLLLAYWVAGTGMWKQSAPGSIIIHFFGGIHEIYFPYVLGHPIMILAMWAGGISADIWFQITNAGLVGPPSPGSIFAYLAMLPRDGAANVLIGVAIGAVAAAVVGTILLRVRPIKETDAGVDEAIDTSIPGVDV

SEQ ID NO: 128364 - protein, 263 aa, Unknown
  Bacterial polypetide isolated from the Sargasso Sea
MVHGHRGGVMGVVVTQQMWVGSGGMDGPPQFLGAMMVGPASAWVQKKVDGVLQPATPEGFEMLVDNFSLGILGTGLSILGVTQVGKVLTGVTEALGSMAKGIVDAGLVPLADIPIEVAKVLFLNNAINHGVLGPLGAEEAAETGQSIWFLLETNPGPGLGLLLAYWFAGTGMWKQSAPGSIIIHFFGGIHEIYFPYVLGHPIMILSMWAGGICADLWFMVMNAGLVATPSPGSIFAYLLVTPKGGHLAVLGGVLIGAVASAVV

SEQ ID NO: 128365 - protein, 231 aa, Unknown
  Bacterial polypetide isolated from the Sargasso Sea
LYDNFSLGILGLGTSIVTNLGLSPILVAISDGLGNAAGSLVENGLVPLADIPIEVAKVLFLNNAVNHGVLTPLGAAESAEVGKSIYFMLEANPGPGLGLLLAYWFAGSGMWKASAPGSIIIHFFGGIHEVYFPYVLAHPIMIVAMWAGGISADLWFQATDAGLVGPASPGSIFAFLSMTPRGGAVGVLGGVAIGAVASAVVGTLLLRARPIQETDAGVEDEISTSIPGVDV

SEQ ID NO: 128366 - protein, 269 aa, Unknown
  Bacterial polypetide isolated from the Sargasso Sea
IVATSSPQFLGAMVMGPAAAWVMKQVDDRLQDSIPEGFEMLYDNFSLGILGWGLSVIAYNVISPVLDAITQALGDGAAALVDSGLVPLADIPIEVAKVLFLNNAVNQGVLTPLGAAESAEAGQSIYFLLETNPGPGLGLLLAYWFAGTGMWKESAPGSIIIHFFGGIHEIYFPYVLGHPIMIIAMWAGGISADLWFVATGAGLVGPPSPGSIFAYIAMLPRGGAFPVLAGVAIATAASAVVGVILLRARPIKETDAGVDTVIESNIPGV

SEQ ID NO: 128367 - protein, 355 aa, Unknown
  Bacterial polypetide isolated from the Sargasso Sea
MKEFIQRVGGAASGMVIPNIGAFIAWGLITSLYIGPGWAPNEDLSSMVGPMIVNLLPLLIGYTGGKMIYGHRGGVIGAVVTMAAIVGTDSPQFLGAMLVGPGAAKVLKELDARLRDNVPEGFEMLYDNFSSGILGWGLAVFVYSFLANILQAVADGLGNFAAGIVDAGLVPLADIPIEVAKVLFLNNAVNHGVLTPLGAAQAAEEGKSIYYMLESNPGPGLGLLIAYYIAGTGMWKQSAPGSIIIHFFGGIHEIYFPYVLGHPIMIVAMWAGGISADLWWVATDAGLVGPPSPGSIFAYLAMLPRSGGANVLIGVAIGAVAAAVVGTILLRVRPIQETDAGVDDAIDTSIPGVDV

SEQ ID NO: 128368 - protein, 353 aa, Unknown
  Bacterial polypetide isolated from the Sargasso Sea
MKESIQRVGGAMAGMVIPNIGAFIAWGLITALFIPTGWVPNEGLSEMVGPMIVSLLPILIGYTGGKMVHGHRGGVIGAVVTTAIVVGSTTPQFLGAMAMGPLAAWVQKKVDGALQPATPEGFEMLVDNFSLGILGTILAVVSKNVIGPILQGITDFLGNAAGALVDAGLVPLADIPIEVAKVLFLNNAINHGVLGPLGAAEAAETGQSIWFLLETNPGPGLGLLLAYWFAGTGMWKQSAPGSIIIHFFGGIHEIYFPYVLGHPIMILSMWAGGISADLWFQITGAGLVATPSPGSIFAYLAVTPKGGHFAVLGGVLIGAVAAAVVGTIILRARPITETDAGVEDTIDVNVPTA

SEQ ID NO: 128369 - protein, 476 aa, Unknown
  Bacterial polypetide isolated from the Sargasso Sea
MLKNAFSNLQKVGKALMLPVSVLPVAGILLGVGAAHFSWLPEIVSQLMEQAGGSVFGQMALLFAVGVALGFTNNDGVSGLSAIVGYGIMVATLKVMAPVMGVETIETGVLGGILAGGVAAWAFNRFYKIQLPEYLGFFAGKRAVPIITGFVSIGLGVILSVIWPPVGAAIGAFSDWAANQNPVLAFGIYGVVERSLIPFGLHHIWNVPFFYQAGTCVNAAGETVHGIMTCFLTADDASRAAGNGFGQLAGGYLFKMFGLPAAAFAIAHSAKPENRAKIVGIMASAALTSFLTGITEPIEFSFLFIAPVLYAIHAVLAGLAYVLTNSLGVVHGHTFSNGFIDFVVQSPRADHMLLLVGLGLVYAVIYYVVFTVVIRAMNLKTPGREDEAAEESVGQSKDEMSAALVSAFGGKENIASLDACITRLRVGVKDVAKVDQAGLKKLGAAGVVVAGSGVQAIFGTKSDNLKTDMDIWMKSN

SEQ ID NO: 128370 - protein, 370 aa, Unknown
  Bacterial polypetide isolated from the Sargasso Sea
MLSPDTKVKIQNFGRFLSNMVMPNIGAFIAWGFITALFIPTGWLPSETLAKLVGPMITYLLPLLIGYTGGKLMGGERGGVVGAITTMGVIVGTDIPMFMGAMMVGPLGGWAIKRFDKAMEGRVKSGFEMLVNNFSAGLIGMLLAILAFFVIGPFVKVLSGVLAGGVGFLVDNNLLPLTSIFVEPAKILFLNNAINHGIFSPLGIQQATEHGRSIFFLIEANPGPGMGVLLAYMVFGRGAAKQSAAGASIIHFFGGIHEIYFPYVLMNPRLILAVIAGGMTGVFTLTLFNAGLVSPASPGSIFAVLLMTPKASLIGVLLSIVASTTVSFLVAAVFVRAQQPEADEADALGEATRKMKAMKGAKPETAAAKK

SEQ ID NO: 128371 - protein, 163 aa, Unknown
  Bacterial polypetide isolated from the Sargasso Sea
MRLFIIGPMASGKSLLGRKLSEYLDLPYVDTDKEIELRAGAEISWIFEKEGEEGFRDRESAVLKESSELESFIISTGGGAILRNKNRELMRSRGKVIYLETPIEIQLSRTLNDKTRPLIENVDKKEVFSALSKERIPIYEELSDIKVPFKDRSKDELLNTVLK

SEQ ID NO: 128372 - protein, 167 aa, Unknown
  Bacterial polypetide isolated from the Sargasso Sea
MNIFIVGPMGSGKSTVGKIISDELFLNFFDTDDEIEARTGASIDWIFDLEGEDGFRKRESEMLDEMVKKNSIVLSTGGGIILSKSNRELLSSRGTVFYLSTPITTQVERTSKDKDRPLLKNGNPSEILAKLHDEREGFYKEVSDHIINTENKSSQEVASEIIQVIKI

SEQ ID NO: 128373 - protein, 63 aa, Unknown
  Bacterial polypetide isolated from the Sargasso Sea
MRLIIIGSMASGKSTVGRKLSKRLGLDFFDIDNEIEKKAGAKISWIFDVEGEEKFRDREYEAF

SEQ ID NO: 128374 - protein, 171 aa, Unknown
  Bacterial polypetide isolated from the Sargasso Sea
MANQSDNIILIGPMGSGKTSTGRILAKETGFDFIDTDEAIVESTGVSIAYIFDVEGEAGFRKREHKELMKFLDNDKIVIATGGGIITHNKSRAILQDHKRVVYLKTSIEKQIERATVSDKRPLLIDTDPASKLQELMLTREPLYEEISDIKIDTNERRPSEIALEIIDRLR

SEQ ID NO: 128375 - protein, 88 aa, Unknown
  Bacterial polypetide isolated from the Sargasso Sea
MNIYIVGPMGSGKSTVGKIVARSLFLDFLDSDEEIEKTTGASIDWIFDLEGEEGFRIRETAELEKIVQLNSHVVATGGGIFYLITIEI

SEQ ID NO: 128376 - protein, 169 aa, Unknown
  Bacterial polypetide isolated from the Sargasso Sea
MKKNLVLIGMMAVGKSTIGRLLSKKLGMEFADLDNTIERRESLTIKEIFDRKGEAYFRKIEENEGLNIIKNGAKIIALGGGTFINDKVREEVKKTCFSVWLDLSSTEIFKRVEKSKSRPLLLKAKSVGDIENIYSSRKKIYSLANYRLDCASKNTESIVNEIIEIYENI

SEQ ID NO: 128377 - protein, 116 aa, Unknown
  Bacterial polypetide isolated from the Sargasso Sea
MAGNAANLRLFMIGPMGSGKSTVGRHLADLLECPFIDSDAEIESRAGADIPWIFDVEGEAGFRRRETTVLKDLVEHPAAVIATGGGAILAAENREMMARAGVVVFLNVSVAQQLKR

SEQ ID NO: 128378 - protein, 120 aa, Unknown
  Bacterial polypetide isolated from the Sargasso Sea
MNIFIVGPMGSGKSTVGKIISDELFLNFFDTDDEIEARTGASIDWIFDLEGEDGFRKRESEMLEEMVKKNSIVLSTGGGIILSKLNRELLSSRGTVFYLSTPISTQVERTSKDKDRPLLK

SEQ ID NO: 128379 - protein, 172 aa, Unknown
  Bacterial polypetide isolated from the Sargasso Sea
MKNNIILIGPMGSGKTSIGKKLSKMMKFDFIDTDHLIENRTGVDISTIFAHEGEEGFRKRESNILKELSNIKNTVLGTGGGIIISHENREVIKNLGFVVYLTASIKELTYRTEQDKSRPLINSANTQEVIANLIKERQEYYEKTSNIKISTDNYDTVKISKIIIKDYEKNNS

SEQ ID NO: 128380 - protein, 163 aa, Unknown
  Bacterial polypetide isolated from the Sargasso Sea
MRLIIIGSMASGKSTVGRKLSKKLGLDFFDIDNEIEKKAGAKISWIFDVEGEEKFRDREHEAFSSLTTNESCVISTGGGIVLREENRELLNKGTVIYLEISIQTQLERTINDQDRPLLYGVDKEKTLRKIAEIRNPIYETYSDITIKETNDPNEAVDLIVTKL

SEQ ID NO: 128381 - protein, 158 aa, Unknown
  Bacterial polypetide isolated from the Sargasso Sea
MTNQSDNIILIGPMGSGKTSTGRILAKEMGFDFLDTDEEIVERTGVSIAYIFDVEGETGFRQREYQALMKFLDNDNVVIATGGGIITHDESRAIIQSHKRVVYLKTRIEKQIERATVSDKRPLLIGTDPASKLQELMLTREPLYEEISDIKIDTDERK

SEQ ID NO: 128382 - protein, 165 aa, Unknown
  Bacterial polypetide isolated from the Sargasso Sea
MIGMMAVGKSTIGRLLSKKLNLPFEDLDEKIKNKESLSIKDIFSFKGEDYFRKIEEIECLKIIQDTGKIIAFGGGTFMNETVRNKMKNTCFTIWLDLSPKKIFDRIKSNKDRPLLSNVKTIEEVDDIYLRRKKIYSLANYKIDCSSKTKEIIISEIENIYENIKN

SEQ ID NO: 128383 - protein, 130 aa, Unknown
  Bacterial polypetide isolated from the Sargasso Sea
TGASIDWIFDLEGEEGFRKRETAELEKIVQLNSHVVATGGGIILSDHNRNLLSARGVVIYLETPIKTQVERTSKDKDRPLLKDGDPETILTKLSSEREHLYREVSDYAIQTSDKSSQEVADQIINIIKNK

SEQ ID NO: 128384 - protein, 169 aa, Unknown
  Bacterial polypetide isolated from the Sargasso Sea
MILVGPMGAGKSTIGRLLAKELRLPFKDSDKEIELRTGANIPWIFDKEGELGFRDREQAMIAELCGCDGVVLATGGGAVMRDENRRALHAGGRVVYLHASVEQQVGRTARDRNRPLLRTADPAKTLRDLLALRDPLYREIADLVVETDERPPRMVVLDILERLQRLPPR

SEQ ID NO: 128385 - protein, 357 aa, Unknown
  Bacterial polypetide isolated from the Sargasso Sea
MAKTNKILCGDTVEELRNLPDNCIDLIFADPPYNLQLDQELLRPNNSKVSAVDDEWDQFESFEEYDNFSDLWLKEAKRVLKPTGSIWVIGSYHNIFRIGYIMQNLGFWILNDVIWQKANPMPNFRGKRFTNAHETMIWASKDKNSKKYTFNYEAMKSLNENMQMRSDWFLPICSGHERLKNKSGKKVHPTQKPEGLLHRIIVSSSNQGELVLDPFFGTGTTGAVAKRLGRKYIGIEKDKNYIKEAKNRIEKVSIYENNALTLTQSKKSEPRIPFGWLIERKLIEPGTILYDQKRKYSAKVRADGSVVSEKNSGSIHQIGAEVQSANACNGWTFWHFDVEGELKPIDILRQKIRSELN

SEQ ID NO: 128386 - protein, 167 aa, Unknown
  Bacterial polypetide isolated from the Sargasso Sea
MNIFIVGPMGSGKSTVGKIISDELFLNFFDTDDEIEARTGASIDWIFDLEGEDGFRKRESEMLEEMVKKNSIVLSTGGGIILSKLNRELLSSRGTVFYLSTPISTQVERTSKDKDRPLLKNGDPGEILTKLHNERKDFYKAVSDHVIDTENKSSQEVASEIIKVVKI

SEQ ID NO: 128387 - protein, 165 aa, Unknown
  Bacterial polypetide isolated from the Sargasso Sea
MRLIIIGSMASGKSTVGRKLSKKLGLEFFDTDDEIENKAGAKISWIFDVEGEEKFRDREYETFSNLTNKENCVISTGGGIVLREENRELLNKGTVIYLEISIQTQLERTINDQDRPLLYRANKEKTLRKIAEIRNPIYEACSDITIKETNDPNETVDLIVLKLTK

SEQ ID NO: 128388 - protein, 133 aa, Unknown
  Bacterial polypetide isolated from the Sargasso Sea
IELRTGASIDWIFDLEGEEGFRKRESDILLEMVQKNSIVLSTGGGIILSDNNRELLSSRGTVFFLSTPIYIQVERTSKDKDRPLLKKGDPTKILTKLHKKREGLYQSVADYMVDTENKSSQEVASEIVNLVKA

SEQ ID NO: 128389 - protein, 169 aa, Unknown
  Bacterial polypetide isolated from the Sargasso Sea
MNIFIVGPMGSGKTTVGKIVADELFLDFHDTDAKIELNTGVTIDWIFDIEGEEGFRKRETAILKEMVALNSIVLATGGGIIIEEENRELLASRGIVFYLHTPLNTQIERTAKDKDRPLLKDKDPKKVLTELQKSRQSLYEEVSDHIIDTDNKSGSDVANEIVKLVKNYG

SEQ ID NO: 128390 - protein, 167 aa, Unknown
  Bacterial polypetide isolated from the Sargasso Sea
MNIFIVGPMGSGKSTVGKIISDELFLDFYDTDEEIEERTGASIDWIFDLEGEDGFRKRESVMLEEMVEKNSIVLSTGGGIILSAFNRELLSSRGTVFYLSTPISVQIERTTKDKDRPLLKGGDPRDILTKLDVERKDFYESVSDHVVKTEDKTSQEVAKEIINLVKT

SEQ ID NO: 128391 - protein, 171 aa, Unknown
  Bacterial polypetide isolated from the Sargasso Sea
MANQSDNIILIGPMGSGKTSTGRILAKEMGFDFIDTDEKIVESTGVSIAYIFDVEGESGFRKREHKELMKFLGKDNMVIATGGGIITHDKSRMILQGQKKVVYLKTSIEKQIERATVSDNRPLLIDTDPASKLQELMLTREPLYEEISDIKIDTNERRPSEIALEIIDRLR

SEQ ID NO: 128392 - protein, 122 aa, Unknown
  Bacterial polypetide isolated from the Sargasso Sea
YIFDVEGEAGFRKREHKELMKFLDNDNMVIATGGGIITHDKSRVILQDQKKVVYLKTSIEKQIERATVSDNRPLLIDTDPESKLQELMLTREPLYEEISDIKIDTNERKPSEIALEIIDRLR

SEQ ID NO: 128393 - protein, 139 aa, Unknown
  Bacterial polypetide isolated from the Sargasso Sea
FDTDEEIENRTGASIDWIFDLEGEEGFRKRESVVLEEMVQKNSVVLSTGGGIILSENNRELLSSRGTVFYLATPISVQLERTAKDKDRPLLKNGDPGQILQELHEKRKNLYESVSDHIIETEDKSSQEVASEIINLVKG

SEQ ID NO: 128394 - protein, 167 aa, Unknown
  Bacterial polypetide isolated from the Sargasso Sea
MNIFIVGPMGSGKSTVGKIISDELFLDFYDTDEEIEERTGASIDWIFDLEGEDGFRKRESEMLEEMVQKNSIVLSTGGGIILALSNRELLSSRGTVFYLSTPISVQIDRTSKDKDRPLLKNGDPGKILKKLDNQRKELYKSVSDHVVETENKTSQEVAAEIIKLVKT

SEQ ID NO: 128395 - protein, 167 aa, Unknown
  Bacterial polypetide isolated from the Sargasso Sea
MNIFIVGPMGSGKSTVGKIISDELFFNFFDTDEEIETRTGASIDWIFDLEGEEGFRKRESEILIEMVDKNSIVLSTGGGIILSESNRELLSSRGTVFYLSTPISVQVERTAKDKDRPLLKNGDPKEILSRLHSERENLYEAVSDYIVKTENKSSHDVASEIINLVKG

SEQ ID NO: 128396 - protein, 101 aa, Unknown
  Bacterial polypetide isolated from the Sargasso Sea
MNIYIVGPMGSGKSTVGKIVARSLFLDFLDSDEEIEKTTGASIDWIFDLEGEEGFRKRETAELEKIVQLNSHVVATGGGIILSDHNRNLLSARGCCYLLRN

SEQ ID NO: 128397 - protein, 163 aa, Unknown
  Bacterial polypetide isolated from the Sargasso Sea
MRNVFLIGPMGAGKSTIGRLLAKELKFPFKDSDREIEVRTGADIPWIFDVEGEEGFRQREEAMIAELVQERGIVLATGGGVVMRPANRAALAANGLVVYLCTSVEQQLQRTAKDRQRPLLQTADPEAVLRDLMARRDPLYREIADLIIETDQRGPKVVVNTIL

SEQ ID NO: 128398 - protein, 167 aa, Unknown
  Bacterial polypetide isolated from the Sargasso Sea
MNIFIVGPMGSGKSTVGKIISDELFMNFFDTDEEIETRTGASIDWIFDLEGEEGFRKRESAILAEMVEKNSIVLSTGGGIILSEENRELLSSRGTVFYLATPIYVQIERTAKDKDRPLLKDGDPEEILTKLHNNRQNIYESVADHVVDTENKSSQEVASEIVKLIKS

SEQ ID NO: 128399 - protein, 167 aa, Unknown
  Bacterial polypetide isolated from the Sargasso Sea
MNIFIVGPMGSGKSTVGKIISDELFFNFFDTDEEIETRTGASIDWIFDLEGEEGFRKRESEILNEMVDKNSIVLSTGGGIILSENNRELLSSRGTVFYLSTPISVQFERTAKDKDRPLLKNGDPKEILSRLHDERENLYEAVSDYIVKTENKSSHDVASEIINLVKG

SEQ ID NO: 128400 - protein, 151 aa, Unknown
  Bacterial polypetide isolated from the Sargasso Sea
MNIYIVGPMGSGKSTVGKIVARSLFLDFLDSDEEIEKTTGASIDWIFDLEGEEGFRKRETAELEKIVQLNSHVVATGGGIILSDHNRNLLSARGVVIYLETPIKTQVERTSKDKDRPLLKDGDPESILTKLNSEREHLYKEVSDHAIQTSD

SEQ ID NO: 128401 - protein, 151 aa, Unknown
  Bacterial polypetide isolated from the Sargasso Sea
MGEKGNIFLIGLMGVGKSTIGRVLANIMNLRFFDSDQEIELNTGADIPWIFDVEGESGFRERERKVIRQLCKRQDIVLATGGGVILAKQNREMLCSNGTVVYLTAPIKKLVDRTRKDKNRPLLQANDPERKITELFNARNHLYKDTADIVI

SEQ ID NO: 128402 - protein, 167 aa, Unknown
  Bacterial polypetide isolated from the Sargasso Sea
MNIFIVGPMGSGKSTVGKIISDELFLNFFDTDEEIESRTGASIDWIFDLEGEEGFRKRESSILQEMVEKNSVVLSTGGGIILSSPNRELLSSRGTVFYLSTPISIQVERTSKDKNRPLLKNGDPAEILSKLHEERKTLYESVSDHVIETENKSSQEVAAEIINLVKS

SEQ ID NO: 128403 - protein, 155 aa, Unknown
  Bacterial polypetide isolated from the Sargasso Sea
MNIFIIGPMGSGKSTVGKILSDELFLNFFDTDEQIELRTGATIDWIFDLEGEEGFRKRESDILDEMVQKNSIVLSTGGGIVLSDKNRELLSSRGTVFFLSTPIYIQVERTSKDKDRPLLKNGDPTKILTKLHKEREALYQNVADFVVDTENKSSQ

SEQ ID NO: 128404 - protein, 85 aa, Unknown
  Bacterial polypetide isolated from the Sargasso Sea
MNIFIVGPMGSGKSTVGKIISDELFLNFFDTDEEIESRTGASIDWIFDLEGEEGFRKRESLILEELAEKNSIVLSTRRWNNIIKP

SEQ ID NO: 128405 - protein, 168 aa, Unknown
  Bacterial polypetide isolated from the Sargasso Sea
MNIYIVGPMGSGKSTVGKIVARSLFLDFLDSDEEIEKTTGASIDWIFDLEGEEGFRKRETAELEKIVQLNSHVVATGGGIILSDHNRNLLSARGVVIYLETPIKIQVERTSKDKDRPLLKNGDPETILTKLNSEREHLYKEVSDYAIQTSDKSSQEVADQIINIIKNK

SEQ ID NO: 128406 - protein, 167 aa, Unknown
  Bacterial polypetide isolated from the Sargasso Sea
MNIFIVGPMGSGKSTVGKIISDELFLNFFDTDEEIENRTGASIDWIFDLEGEEGFRKRESGVLEEMVQKNSVVLSTGGGIILSENNRELLSSRGTVFYLATPISVQLERTAKDKDRPLLKNGDPGQILQELHEKRKNLYKSVSDHIIETEDKSSQEVASEIINLVKG

SEQ ID NO: 128407 - protein, 168 aa, Unknown
  Bacterial polypetide isolated from the Sargasso Sea
MNIYIVGPMGSGKSTVGKIVARSLFLDFLDSDEEIEKTTGASIDWIFDLEGEEGFRKRETAELEKIVQLNSHVVATGGGIILSDHNRNLLSARGVVIYLETPIKIQVERTSKDKDRPLLKDGDPESILTKLNAEREHLYKEVSDYAIQTSDKSSQEVADQIINIIKNK

SEQ ID NO: 128408 - protein, 169 aa, Unknown
  Bacterial polypetide isolated from the Sargasso Sea
MNIFIVGPMGSGKSTVGKIISSELFLTFLDTDEEIETRTGASIDWIFDLEGEEGFRKRESKILDEMVKKNSIVLSTGGGIILSEHNRELLSSRGSVFYLETPIEIQLERTSKDKDRPLLKEGDPGKILKKLHEERQALYENVSDHIVKTENKSSQEVASEIIKLIKNYA

SEQ ID NO: 128409 - protein, 168 aa, Unknown
  Bacterial polypetide isolated from the Sargasso Sea
MNIYIVGPMGSGKSTVGKIVARSLFLDFLDSDEEIEKTTGASIDWIFDLEGEEGFRKRETAELEKIVQLNSHVVATGGGIILSDHNRNLLSARGVVIYLETPIKIQVERTSKDKDRPLLKDGDPESILTKLNTEREHLYKEVSDYAIQTSDKSSQEVADQIINIIKNK

SEQ ID NO: 128410 - protein, 83 aa, Unknown
  Bacterial polypetide isolated from the Sargasso Sea
MNIFIIGPMGSGKSTVGKILSDELFLNFFDTDEQIELRTGASIDWIFDLEGEEGFRKRESDILDEIVQKNSIVLSTGWRNSFI

SEQ ID NO: 128411 - protein, 74 aa, Unknown
  Bacterial polypetide isolated from the Sargasso Sea
MNIFIVGPMGSGKSTVGKIISDELFLNFFDTDEEIENRTGASIDWIFDLEGEEGFRKRESGVLEEMVRKIPLFF

SEQ ID NO: 128412 - protein, 171 aa, Unknown
  Bacterial polypetide isolated from the Sargasso Sea
MNIYIVGPMGSGKSTVGRIVASSLFLDFLDSDEEIEKKTGASIDWIFDLEGEEGFRKRETKVLEDIVKLNSHVVATGGGIILSQHNRDLLGARGIVIYLETPIEVQVERTNKDDDRPLLQNGDPKEILTRLHEERENLYKEVSDHIIPTKNKSSQSVADEIINVVKKKMYK

SEQ ID NO: 128413 - protein, 167 aa, Unknown
  Bacterial polypetide isolated from the Sargasso Sea
MNIFIVGPMGSGKSTVGKIISDELFLNFFDTDEEIELRTGASIDWIFDLEGEEGFRKRESLILEEMAEKNSIVLSTGGGIILSSPNRELLSSRGTVFYLSTPISIQVERTSKDKNRPLLKNGDPSEILSKLHEERKSLYEVVSDHIIETENKSSQEVAAEVINLVKG

SEQ ID NO: 128414 - protein, 165 aa, Unknown
  Bacterial polypetide isolated from the Sargasso Sea
YIVGPMGSGKSTVGKIVARSLFLDFLDSDEEIEKTTGASIDWIFDLEGEEGFRKRETAELEKIVQLNSHVVATGGGIILSDHNRNLLSARGVVIYLETPIKIQVERTSKDKDRPLLKDGDPETILTKLNTEREHLYKEVSDYAIQTSDKSSQEVADQIINIIKNK

SEQ ID NO: 128415 - protein, 170 aa, Unknown
  Bacterial polypetide isolated from the Sargasso Sea
FKTMNIFIVGPMGSGKSTVGKILSDELFLNFYDTDEEIELRTGASIDWIFDLEGEEGFRKRESKVLFEMVQKNSIVLSTGGGIILSDKNRELLSSRGTVFYLATPIYVQVERTSKDKDRPLLKKGDPTEILTKLDKERKDLYENVADYSIKTENKSSQEVASEIISLVKG

SEQ ID NO: 128416 - protein, 116 aa, Unknown
  Bacterial polypetide isolated from the Sargasso Sea
MAEKRNIFLVGPMGAGKSTIGRHLAQMLHLEFHDSDQEIEQRTGADIAWVFDVEGEEGFRRREAQVIADLSEKQGIVLATGGGSVQSKDIRNHLSARGIVVYLETTIDKPGCAHSK

SEQ ID NO: 128417 - protein, 171 aa, Unknown
  Bacterial polypetide isolated from the Sargasso Sea
MAEKRNIFLVGPMGAGKSTIGRHLAQMLHLEFHDSDQEIEQRTGADIAWVFDVEGEEGFRRREAQVIADLSEKQGIVLATGGGSVQSKDIRNHLSARGIVVYLETTIDKQVARTQRDKRRPLLQVDDPREVLENLAEIRNPLYEEIADVIVKTDDQSAKVVANQIIEQLGF

SEQ ID NO: 128418 - protein, 173 aa, Unknown
  Bacterial polypetide isolated from the Sargasso Sea
MAEKRNIFLVGPMGAGKSTIGRQLAQQLNMEFYDSDQEIEKRTGADVGWVFDVEGEDGFRDREEKVINELTEKQGIVLATGGGSVKSRETRNRLSARGVVVYLETTIEKQLARTQRDKKRPLLQVESPPREVLEALADERNPLYEEIADVTIRTDDQSAKVVANQIIHMLESN

SEQ ID NO: 128419 - protein, 171 aa, Unknown
  Bacterial polypetide isolated from the Sargasso Sea
MAEKRNIFLVGPMGAGKSTIGRHLADELHLDFFDSDQEIERRTGADIAWIFDLEGEDGFRKREENVINDLTDKQGIVLATGGGSIVTKAVRNRLSARGIVVYLQTTIDKQVARTQRDKRRPLLQNEDPEQVLRDLAEMRNPLYEEVADYIVDTDDQSARAVANQIISKIGL

SEQ ID NO: 128420 - protein, 172 aa, Unknown
  Bacterial polypetide isolated from the Sargasso Sea
MAEKRNIFLIGPMGAGKSTIGRHLAEQLHMEFFDSDHEIERRSGADIGWVFDVEGEEGFRIREEKVIGDLSEQQGIVLATGGGAIKSRETRNKLSARGIVVYLETTIEKQLARTQRDKRRPLLQTEEPPREVLERLAQERNALYEEVADFVIQTDDQSAKVVANQIVKLIGM

SEQ ID NO: 128421 - protein, 82 aa, Unknown
  Bacterial polypetide isolated from the Sargasso Sea
MAEKRNIFLVGPMGAGKSTIGRHLAQMLHLEFHDSDQEIEQRTGADIAWVFDVEGEEGFRRREAQVIADLSEKPGYCPCHWW

SEQ ID NO: 128422 - protein, 182 aa, Unknown
  Bacterial polypetide isolated from the Sargasso Sea
MSINKSKTIVIKIGSSLLIDENNQIRRKWLSAFALDIKELIKQKKDIIIVSSGAIALGCKKLKLKKSNLKIDKSQAVASIGQIELMNLLNKIFSIKKVNLSQMLLTLEDTEQRRRAINAKRTFQNLFQLGFVPVVNENDSIATSEIKYGDNDRLASRVAQISSADCLILLSDVNGLYTKNPK

SEQ ID NO: 128423 - protein, 270 aa, Unknown
  Bacterial polypetide isolated from the Sargasso Sea
MYLKKSKTIVIKIGSTILIDEKRTIRKKWLAEFAKDIKDLLDQKKNIILVSSGAIALGCKKLNLNKKNLKIDKSQAVASVGQIELMNLFNKIFSSKKINLSQILLTLEDTEQRRRAINAKRTFENLFELGFIPVVNENDSIATTEIKYGDNDRLASRVAQISGADCLVLLSDVDGLYTQNPKLFKNSKLIKEIKNIDADIEKIATKSISEHGTGGMKTKIEAAKICQLSGCMMVIANGLLERPIKKIIDKNKCTWFFPKVSKLDARKKWI

SEQ ID NO: 128424 - protein, 176 aa, Unknown
  Bacterial polypetide isolated from the Sargasso Sea
MYLKKSKTIVIKIGSTILIDEKRIIRKKWLAEFAKDIKDLLNQKKNIILVSSGAIALGCKKLNLNKKNLKIDKSQAIASVGQIELMNLFNKIFSSKKINLSQILLTLEDTEQRRRAINAKRTFENLFELGFIPVVNENDSIATTEIKYGDNDRLASRVAQISGADCLVLLSDVDGL

SEQ ID NO: 128425 - protein, 87 aa, Unknown
  Bacterial polypetide isolated from the Sargasso Sea
LPAPLVARGVQCVGRLDQDTTGLVLLSDDGQFVHAYTSPKRKAPKTYVATVRHPLDDTQLNALRAGVQLHGEPKPIAAVAADARDPQ

SEQ ID NO: 128426 - protein, 205 aa, Unknown
  Bacterial polypetide isolated from the Sargasso Sea
PAEWLLDNANVNGTWSLIHCTQMTEKETRDLASTNAVVGLCPITESSLGDGIFNGTDFHEAGGQFGIGSDSNIHIALWEELATLEYSQRLRNRSRAAMATPDRSTGRNLFEAATHAGAQAAGRQSGSISEGQFADLIAISTDNEFLCNRSGDKLLDSLIFSGRGRTCISDVWSAGRHMVQDGLHVEHERITKQFVRVSKQLGQEI

SEQ ID NO: 128427 - protein, 170 aa, Unknown
  Bacterial polypetide isolated from the Sargasso Sea
MEFDKILPLDGPSIDDAKEFLAKYKDEFIVIKIGGSVLNDKSLFKNLIQDICILKKIKFNPILIHGGGKELTNKLKDQNYKSEFINGLRVTDGKIIKIVEEVFINFNKLLIEEINNNSLKARTINSKENNCVIVDKINEKLGFVGKPIDIKDEMILKIIKSGEIPSNCSH

SEQ ID NO: 128428 - protein, 307 aa, Unknown
  Bacterial polypetide isolated from the Sargasso Sea
MYLNSAKTIVIKIGSSLLIDENMKIKTEWLDNFVKDMNLLKSLNKNLIIVSSGAIALGCKRLKLKKKDLKLDKSQAVASVGQIELMNLFKKKFDKKKIELSQILITLEDTEQRRRALNAKRTLENLFKMGIVPVVNENDSIATEEIKYGDNDRLASRVAQISSADCLVLLSDVDGLFSKDPKIYSDAKLIKEIKNIDEKIKNVASKNTSIFGSGGMATKIDAAKICQNSGCYMAIASGLVKRPINRIMKKNICTWFLPKISKLAARKKWIISSVSPKGELIVDDGAIAALKNGKSLLAAGIKKVNGK

SEQ ID NO: 128429 - protein, 370 aa, Unknown
  Bacterial polypetide isolated from the Sargasso Sea
MYFDKLNTIVIKIGSSLIIDEKKKIRSKWLDSFVKDIQGFKKAGKRIIIVSSGAIALGCKKLNLDKKNLKIDKSQAVASIGQIELMNLLKKNFSKKKMDISQILITLEDTEVRRRAINARRTLDNLFDIGFIPVVNENDSIATSEIKYGDNDRLASRVAQISNADCLILLSDVGGLYNKNPKVHKDAKLIKEVKKIDENVFKIANKTTGEYGSGGMLTKIEAAKICGLAGCKMVISSGLILNPLKHINLSKECTWFLPEISKLDARKKWIASSVSPKGELMIDNGAIIALKKGKSLLAAGIKNIKGNFDKGDHIKIVDEKNFELGRGLSSFSSEEISKIKGQHSDKINKILGYKTKSEVVHKDDMVGFSK

SEQ ID NO: 128430 - protein, 235 aa, Unknown
  Bacterial polypetide isolated from the Sargasso Sea
MYLKNSKIIVIKIGSSLLVDKNKKIRKKWLSSFAKDIKKLKDKNQKIVIVSSGAIALGCKKMNFNKKNIKLDKSQAIASIGQIELMNLFSQTFSKYKLNISQILLTLEDTEERRRSLNAKRTFENLFELGFIPVVNENDTIATTEIKYGDNDRLASRVTQITNADTLILLSDVDGLFTKNPKINKDAKLIKIVNDINKDLKEINIKGINEYGSGGMQTKIEAAKICQLAGSSMIM

SEQ ID NO: 128431 - protein, 368 aa, Unknown
  Bacterial polypetide isolated from the Sargasso Sea
MYLNKSKTIVIKIGSSIIIDKNKKIRNKWLTEFAKDIKDLLKQKKNVILVSSGAIALGCKKLNLSKQNIKIDKSQAVASIGQIELMNLFNKTFSSKKINLSQILLTLEDTEQRRRAINAKRTFENLFKLGFVPVVNENDSIATTEIKYGDNDRLASRVAQISSADCLVLLSDVDGLYTQNPKLFKNSKLIKEIKKVDLDVEKIATKSISEHGTGGMKTKIEAAKICQLSGCVMVIANGLLKRPIKKIIEKNKCTWFLPKVSKLDARKKWIISSVAPKGELVIDDGAINALKKGKSLLAAGIKKVIGKFNKGDHIKILDKNLNEYARGLSSFSSEETIKIQGQHSNKIYELLGYISKSEVVHKDDMVEV

SEQ ID NO: 128432 - protein, 218 aa, Unknown
  Bacterial polypetide isolated from the Sargasso Sea
YGDNDTLSALVALAINANKLILLTDIENLYSKDPRNNKDAQPIKEVHNSELKEIKDKNIQNSNNEWGTGGISTKLISAEIATKGGVEVQLVDGTNKKNLIEIFNDNKIGTLFYPVEKPIGNKKSWLSHAIQTVGKITLDDGASFAIKKKGASLLAVGVKNVEGNFTINQAVKIVNTNDKEVAKGLVSISSDKLRSILNNKENNNSSIIVVHRDVLALS

SEQ ID NO: 128433 - protein, 265 aa, Unknown
  Bacterial polypetide isolated from the Sargasso Sea
MKTWVVKIGTSILRGNEDQSTEQVIESLCKSLTSFILKGNKVILVTSGAVGLGCKKLNLNTRPKELSTLQAVAAVGQVNLMTLYEKTMKKLGHNIAQILITKTDFDSRESFNNASKTFQKLIDLNVIPIVNENDSIANEELKYGDNDTLSALVALAINANKLILLTDIENLYSKDPRNNEDAHPIKEVNSNQLKIIKDKNIQNYNNEWGTGGITTKLIAAEIATKGGVESSLADGRNENNLINIFNEKKIGTIFHPVDKPVGNKK

SEQ ID NO: 128434 - protein, 157 aa, Unknown
  Bacterial polypetide isolated from the Sargasso Sea
MSKPTNEELNVATWKIPNALGIIGSSANNEFNGMTASWITQVSMEPLLIAVGIDNKSITHGLMSASEYFSLNLFSENYTKVFVKFSKPAEYKEGFLNEEPITLTENNMPIFDNAIVWFEMRKKDTYDLGTHTLYIGEVTDCKTIKQKKGLHIWGIQE

SEQ ID NO: 128435 - protein, 207 aa, Unknown
  Bacterial polypetide isolated from the Sargasso Sea
KQAASFLKTPVNKLNLITIHLGNGASISAIKKGICVDTTMGMTPLEGLVMGTRPGDLDPGILTLLASKGWNQEALETMLNQDSGMKGLCGTNDFREILQNKEEGNEEAEMALELYCYRVRKTIGSFSTVIGPVDALVFTGGVGENVPWVRERSVRAMEWMNIQLDPDMNDQAEAPCAIHSKNSQTKILVLPSDEEWEMASQAAELIL

SEQ ID NO: 128436 - protein, 162 aa, Unknown
  Bacterial polypetide isolated from the Sargasso Sea
MSGSSSIKDRIFLLKNCYRIIFNSNWSKKRFLEKMSSDAINSEKLIVIHQSASKNKINIKKKQNIITFVGKLNRSKGYDLFGKAVIDILKKYNNWKVYIAGDEPRDKIDFNHDRLIKLGFRNHKEIINLYKLTSIAVVCSRWEEPFGRTSLEASANGCAVII

SEQ ID NO: 128437 - protein, 168 aa, Unknown
  Bacterial polypetide isolated from the Sargasso Sea
MPNPTNEELNVATWKIPNALGIIGSSANNEFNGMTASWITQVSMEPLLIAVGIDNKSITHGLMSASEYFSLNLFAENYTKVFVKFSKPAEYKEGFLNEEPITLTENNMPIFDNAIVWFEMRKKDTYDLGTHTLYIGEVTDCKTIETEERVAYMGDTRMKYGGVPRGGH

SEQ ID NO: 128438 - protein, 156 aa, Unknown
  Bacterial polypetide isolated from the Sargasso Sea
MPNPTNEELNVATWKIPNALGIIGSSANNEFNGMTASWITQVSMEPLLIAVGIDNKSITHGLMSASEYFSLNLFSENYTKVFVKFSKPAEYKEGFLNEEPITLTENDIPIFDNAIVWFEMRKKETHNLGTHTLYIGEVSDCKTIETEEKVAYMGHT

SEQ ID NO: 128439 - protein, 320 aa, Unknown
  Bacterial polypetide isolated from the Sargasso Sea
YRKTLIGSIVDDLRPEVLTKLDDTVLGEVVRQLGVEKIALALGDLETDEVVEVIDDLDPKFRNDVLQKMEISNRAGIEESLSYPEQSAGRLMQREHMAIPIFWNVGQVIDHLRETVELPDEFYELQVVDEKYHPVGIVPLNTLLRSKRPEAIKNIMISDIKLVPVDIDQEEVAYLFQQYDLVSASVINEDGRLIGVIMYDDIIDVIKEEAEDDILRLGRVGDAGINDSIFTITRDRFIWLMVNLMTAALASLVIFLFDATIEELVALAVLMPIVASMGGNAGTQTLTVTVRALASRDITSANAARYINKELIVSLLNGCL

SEQ ID NO: 128440 - protein, 239 aa, Unknown
  Bacterial polypetide isolated from the Sargasso Sea
NFHYSWCLPILIRNFILILLWFGFLHLRLYVKKSQSNLYKYNANYGEGSKEKFLFKNQIYDNMFLSLVSGSIFISFYEILALWCYSNNYFSNVNWNDNFIYCFILILLLPLYKDAHFYTGHRFLHSSVLYKYAHYVHHKNVNPGPWSGLAMHPIEHFIYFSFFIIFFIVPSHPFHFYFLYGIFLFAPAVHGHSGYEKLMVNKKSGVGTGGHAHYLHHKYFECNYGDGNLPLDRWFGTLH

SEQ ID NO: 128441 - protein, 168 aa, Unknown
  Bacterial polypetide isolated from the Sargasso Sea
MSKPTNEELNVATWKIPNALGIIGSSANNEFNGMTASWITQVSMEPLLIAVGIDNKSITHGLMSASEYFSLNLFSENYTKVFVKFSKPAEYKEGFLNEEPITLTENNMPIFDNAIVWFEMRKKDTYDLGTHTLYIGEVTDCKTIETEERVAYMGDTRMKYGGVPRGGH

SEQ ID NO: 128442 - protein, 271 aa, Unknown
  Bacterial polypetide isolated from the Sargasso Sea
FDYIGAAYAGFTAGIGESDRGPCQLPNALGDSVTGITAAMAVAFALLHREKTGEGQHIEASLVDSYFQTQEVNVPKIAMSGKKAVTQRSGSHHPDGGPTGNFRAGDGTYIAIMVMPYQWPQIVRALGQPELTEDPRFKSPRDRRANKEALGGIIETWMSELGTRDAALDALRAERVPCAPVLSLAEAIVHPHLVERGTVRAVNDPLLGDFAVPGMPAKFSAYAAPSDPKAPLLGQDNDEVLSGILGMDEAEITALYDAGTILQDRLIGAKK

SEQ ID NO: 128443 - protein, 168 aa, Unknown
  Bacterial polypetide isolated from the Sargasso Sea
MPNPTNEELNVATWKIPNALGIIGSSANNEFNGMTASWITQVSMEPLLIAVGIDNKSITHGLMSASEYFSLNLFSENYTKVFVKFSKPAEYKEGFLNEEPITLTENDIPIFDNAIVWFEMRKKETYNLGTHTLYIGEVTNCKTIETEERVAYMGDTRMKYGGVPRGGH

SEQ ID NO: 128444 - protein, 260 aa, Unknown
  Bacterial polypetide isolated from the Sargasso Sea
MLRDGRARPRGCLDHHRRGREHLTDTRRETRYRAERHRPRARLAFSGRESGDPLRHGNRQLQSAVHARRRRAVQNGRPQADYGRDSGRPARARQRDQRRGRENQGHLVACCRSCQRAGRTGSRSRQSARQKPVVSRRCGCRRHRAGREGADHPDQSRRFGDDAARVVRGRLARRARAAREAFRGHRLNAIVFTAGIGEYAAPVRKRVCRAAAWLGVSLDAQANAQHGPRISDPQSAVDVWVIPTNKEPTIARHAWHRLES

SEQ ID NO: 128445 - protein, 136 aa, Unknown
  Bacterial polypetide isolated from the Sargasso Sea
MPNPTNEELNVATWKIPNALGIIGSSANNEFNGMTASWITQVSMEPLLIAVGIDNKSITHGLMSASEYFSLNLFSENYTKVFVKFSKPAEYKEGFLNEEPITLTENNMPIFDNAIVWFEMRKKETYDLEHTPFISG

SEQ ID NO: 128446 - protein, 190 aa, Unknown
  Bacterial polypetide isolated from the Sargasso Sea
SGSIFISFYEILALWCYSNNYFSNVNWNDNFIYCLILILLLPLYKDAHFYTGHRFLHSSVLYKYAHYVHHKNVNPGPWSGLAMHPIEHFIYFSFFIIFFIVPSHPFHFYFLYGIFLFAPAVHGHSGYEKLMVNKKSGVGTGGHAHYLHHKYFECNYGDGNLPLDRWFGTLHDGSDEAQERMIKRMKERRG

SEQ ID NO: 128447 - protein, 130 aa, Unknown
  Bacterial polypetide isolated from the Sargasso Sea
LYKYAHYVHHKNVNPGPWSGLAMHPIEHFIYFSFFIIFFIFPSHPFHFYFLYGIFLFAPAVHGHSGYEKLMVNKKSGVGTGGHAHYLHHKYFECNYGDGNLPLDRWFGTLHDGSDEAQERMIKRMKERRG

SEQ ID NO: 128448 - protein, 333 aa, Unknown
  Bacterial polypetide isolated from the Sargasso Sea
MGRPVTLFTGQWADMPLENLARKAREFGYQGLELACWGDHFEVDKAIADDSYCATKRDLLEQHDLMVHAISCHLVGQAVCDRVDERHKTILPPYIWGDGEPEGVSQRAAEEVKQTARAAKKLGVSVVNGFTGSSIWHLLYSFPPVPESMIEAGFQDFADRWNPILDVFAESGVRFALEVHPTEIAFDIITAQRALEAVGHREEFGFNFDPSHLHWQGVDPVEFIRTFPDRIYHVHIKDAVVLLNGKGGILASHLNFGDPRRGWDFRSPGRGGVDFEEIIRALNEIGYSGPLSVEWEDCGMDREHGATEACEFVQNIDFAPSNRQFDAAFDKED

SEQ ID NO: 128449 - protein, 287 aa, Unknown
  Bacterial polypetide isolated from the Sargasso Sea
MAFPTHADYLIIGAGIHGLSTAWRLAERLSSKGEAVEGRIIVLDKSGIASGASGIACGVVRNNYYQPAMRRLMAHSVNIWESDPEGLSYHPVGYMQISCESMREDVASIYEQQKAIGYESVFIEGASASDAYMKDMFSDWQAQNITSVLHEKRGGYSNNTKSMYGLAKKVEDRGVRIISGVEVKGLNTENGSSSIKAVDTSHGVVSCDKLVVAPGPWARDFWEMLGMPKKISLKDLSGELHHDIDMWRFWQLEEGVLQLPPEVLQTNDGKTPPVVHVDTDAPLHSCV

SEQ ID NO: 128450 - protein, 458 aa, Unknown
  Bacterial polypetide isolated from the Sargasso Sea
MRQLVCVACALVMVGTCLKAEDTFEPYASDVPESAVALWEDYDPRHEPLNIEVVQEWENDGVVTRYVTFTVGTFKGKESRIAGYYCLPAGKAKLPAFVWAHGGGQRADRRRGEYFARQGYASIDINWLGRPLEDGIDINTDWGNVDPTQGPRFYGKALRQGWKRSLLPDEYTIDTVSSPRNSNWFLLAVAARRGITFLEQQPEVNADRIGLSGFSMGGMITALAAIDSRLKAVVPFVGGTGFKYVDFPGRIEGSSLQGHFQNLELYKATIDASAYWPFVRCPVCFISSTNDFHSVFDRIYQSMALVPHSDWRVSTNLHQNHGPGPEQWVMLNLWFDQYLKEIDQHIPVTPPSTFSVSDGIASFSVTPDDQDRLVATEIYFSYDPNPRTRFWERAQARQDGKTLSVTVPVFEDLPLYVFALCRYKIGHVQTLERGETSTYTLNSVEHSFVPEKVSLESL

SEQ ID NO: 128451 - protein, 133 aa, Unknown
  Bacterial polypetide isolated from the Sargasso Sea
MPTPAPKSQHVLVLNCGSSSLKFAIIDANTGHEIISGLAERLGAATPSVKYKYKGDKTLIDLAPEQAHAEAINTLVTLIKDHKLDEQLIAVGHRVVHGGEHFTKSVLINDQVIESITQAATLAPLHGHANLLG

SEQ ID NO: 128452 - protein, 168 aa, Unknown
  Bacterial polypetide isolated from the Sargasso Sea
MKKEVIVLNCGSSSVKFAIIDADTGEAGLSGIAEALGNSDASLSYKLNGKKEKRALPEKAGHTEALSAISEVIASTGVKPIAIGHRVVHGGEKFKQAALVDDSVLEAIEDYASMAPLHNMANLKGIVTAQEAYPDLPHVVVFDTSFFQTLPKKAFIYALPMSLYREHG

SEQ ID NO: 128453 - protein, 272 aa, Unknown
  Bacterial polypetide isolated from the Sargasso Sea
MGSSFFLGSSFFFSHGRFGFSSAGLSPGFFFHAGCFFSCLGSSGVFSHGFLGLEGAFFSSGLGFSSVLGASSGLAAGAGALSLGASLGAAGLLSAGFLATGAFSTASFMSSSTLGTESAGSSGISSDSKSCGSAGALSLGASLGAAGLLSAGFLATGAFSTASFMSSSTLGTESDGSSGISSDSKSCGSTGALSLGASLGAAGLSSVGFLATGAFSTASFISSVTLGRESTGSSGISSDSKSCASAGLVGLEGSSAFGCLAAGFDSSGLATG

SEQ ID NO: 128454 - protein, 266 aa, Unknown
  Bacterial polypetide isolated from the Sargasso Sea
CIEEISEHFPEIPQSVVFDTSFHQTLPEYAWRYALPRKISVQYAIRRYGFHGISHQSVVKQAASFLKTPVKKLNLITIHLGNGASISAIKKGICVDTTMGMTPLEGLVMGTRPGDLDPGILTLLASKGWNQEALETMLNQDSGMKGLCGTNDFREILQNKEEGNEEAEMALELYCYRVRKTIGSFSTVIGPVDALVFTGGVGENVPWVRERSVRSMEWMNIQLDPDMNDQAEAPCAIHSKNSQTKILVLPSDEEWEMASQAAELIL

SEQ ID NO: 128455 - protein, 199 aa, Unknown
  Bacterial polypetide isolated from the Sargasso Sea
ALPRKISDQYAIRRYGFHGISHQSVVKQAVSFLKTPVNKLNLITIHLGNGASISAIKKGICVDTTMGMTPLEGLVMGTRPGDLDSGILTLLAGEGWNQEALETMLNQDSGMKGLCGTNDFREILQNKEEGNEEAEMALELYCYRVRKTIGSFSAVIGPVDALVFTGGVGENVSWVRERSVRGMEWMNIQLDPDMNDHAE

SEQ ID NO: 128456 - protein, 129 aa, Unknown
  Bacterial polypetide isolated from the Sargasso Sea
MSARNILVINCGSSSIKFALVNETQETFMLSGLAERLGSPEAVLHWQQGEQKDSLVLPGADHRLALSHLLPVVQQAAAGELHGIGHRVVHGGEHFSGASRLDATSLQAIRQVAPLAPLHNPANLQGIEA

SEQ ID NO: 128457 - protein, 286 aa, Unknown
  Bacterial polypetide isolated from the Sargasso Sea
MVDSTGAFLWHSGRSIAADEPLEDVLHNWLEPDLDPHRQQVGLIGHRVVHGGERFTAPTQITEEVLATLELLTPNAPLHNPPALKGMAWATTWAPSLPQWACFDTAFHSSMPAAAYTYAIPAEFRTKGFRRFGFHGINHQHIAETVADRWRSQNKDPSTLRLVSAHLGAGASLAAIHGGRCIDTTMGFTPLEGLVMATRSGNLDPGLMLGLMREGYSADQMSAILQKESGLKGLSGFSGDMREIREAAAAGHIGAIAALDVFRHRLLQLLGSMAASLGGVDVLALT

SEQ ID NO: 128458 - protein, 220 aa, Unknown
  Bacterial polypetide isolated from the Sargasso Sea
MLIQVFNAGSSSIKFALYQHQSKLELLKGNLEKIGEASSILSYQTSSSPSQKNELPDGCKNHKEGIQKILDIFDQEKNNPGSVDLIVHRVVHGGTKYRHASLLDLEVKQFIRDMIPLARTHHPASLACIEEITEHFPEIPQAVVFDTSFHQTLPEYAWRYALPRKISDRYAIRRYGFHGISHQSVVKQAASFLKIPVNKLNLITIHLGNGASISAIKKGI

SEQ ID NO: 128459 - protein, 277 aa, Unknown
  Bacterial polypetide isolated from the Sargasso Sea
MREHLERRSPQRRHHLRCPLMSDLSLVINLGSSSLKAALVDSTGATPWYSSRSVAADESLETVLNSWLAPALEPHRQQVSLIGHRVVHGGERFTAPTRITPEVEATLAELIPLAPLHNPPALEGLAWARHWAPELPQWACFDTAFHSSLPAAAYTYAIPSEFRNKGFRRFGFHGINHQHVSETVAAQCRKQGKNPSQLRLISAHLGAGGSLAAVKEGRCIDTTMGFTPPGRAGDGHPIRQRRPRTPARTDAGGLQRRPDRHDPAKGIRPKGTVRPQR

SEQ ID NO: 128460 - protein, 46 aa, Unknown
  Bacterial polypetide isolated from the Sargasso Sea
MSHKIMAINAGSSSLKFQLLAMPQGEMICQGLIERIGLSDAQVTLK

SEQ ID NO: 128461 - protein, 236 aa, Unknown
  Bacterial polypetide isolated from the Sargasso Sea
MNEFPVVLVINCGSSSIKFSVLDAANCEVLMAGIADGINSENAFIAINGGEPAKLAHHSYEDALKAIAVELEKRNLMDSVALIGHRIAHGGNIFTESAIITDEVIDNIRRVSPLAPLHNYANLSGIESAQHLFPGRQQVAVFDTSFHQTMAPEAYLYGLPWKYFEELGVRRYGFHGTSHRYVSQQAHDLLDLQSDDSGLVVAHLGNGASICAVRNGQSVDTSMGMTPLEGLMMGTR

SEQ ID NO: 128462 - protein, 306 aa, Unknown
  Bacterial polypetide isolated from the Sargasso Sea
VAHRVVHGGAKYFAPVRVNAEVLSDLRSYIPLAPLHQPFALEAIEALLLGLSDVPQVACFDTAFHRTLPQVETMLPLPYMAWERGLRRYGFHGLSYEYMSIALPERHGDIARGRTIVAHLGSGASLCAMIELKSVATTMGFSALDGLMMGTRCGSLDPGAVLYMMETEHLSPAQVGHVLYHESGLLGVSGLSSDPRDLIPREADNPRVQAALALYVRRIVREIGALVAVLGGLDFLVFTAGIGEHNAVLRERVVGGLGYLGANLDGEANQAHAAIISSSASRIRVAVEPTNEEWVAARHAVQCNLQ

SEQ ID NO: 128463 - protein, 289 aa, Unknown
  Bacterial polypetide isolated from the Sargasso Sea
KGMKECSSLARLHNPAHLIGIRAAIASFPKLPQVAVFDTAFHQSMPERAFIYALPYKLYREHGIRRYGMHGTSHLFVSREAAKVLNKPLEETNVICAHLGNGASVTAVKGGKSVDTSMGLTPLEGLVMGTRCGDLDPSIIYHLVHQLGYTLEEVNNLMNKQSGLLGISELTNDCRGIEEGYADGHKGATLALEIFCYRLAKYIASYTVPLGRLDAVVFTGGIGENSDIIREKVLNMLQIFNFHVDSERNKAARFGKKGIITADNSTVAMVIPTNEEWVIAEDSIKLISK

SEQ ID NO: 128464 - protein, 195 aa, Unknown
  Bacterial polypetide isolated from the Sargasso Sea
MDVVLVVNAGSSSLKFQSFGLVDGGLQRRVRGQIDGIGLRPRLRIVDAAGAVLIDRSHDVDEVRDLPAAIGVLRDWLQTRQGITLRAIGHRVVHGGPDFDRAVLIDEDILNRLSRYQALAPLHQPNNLAPIRVAMAIAPDAPQVACFDTAFHRHHAEHVNCYALPRGLYDESIRRYGFHGLSYEYIAQALARNRA

SEQ ID NO: 128465 - protein, 154 aa, Unknown
  Bacterial polypetide isolated from the Sargasso Sea
DPAIIFFLHDKLGMSVADINTMLTKESGLQGLTEVTSDCRFVEDNYDSKEEAKRAMDVYCYRLAKYIGAYAAAMDGRLDAVVFTGGIGENSAPIREITLNKLGLLGFDVDHDANLKARFGKGGEITKAGSTKALVIPTNEEWVIAHDALELVGA

SEQ ID NO: 128466 - protein, 293 aa, Unknown
  Bacterial polypetide isolated from the Sargasso Sea
TAHREAVEFIVNKILATQPQLAAQIKAIGHRIVHGGEKFTRSVVITPEVIQGIEDCASLAPLHNPAHLIGIRAAIASFPDLPQVAVFDTAFHQSMPEKAYVYALPYKLYREHGIRRYGMHGTSHLFVSREAAKVLGKDIKDTNVICAHLGNGASVTAIKGGKSVDTSMGLTPLEGLVMGTRCGDLDPSIIFHLVKQLGYTLDEVNNLLNKQSGLLGISELTNDCRGIEEGYQDGHKGATLALDIFCYRLAKYIASYTVPLGRLDAIIFTGGIGENSDLIREKVLNLLEIFNFN

SEQ ID NO: 128467 - protein, 333 aa, Unknown
  Bacterial polypetide isolated from the Sargasso Sea
VTLKTPAQKWQETLPVADHREAVTLLLEKLLNHHIISSLEEIDGVGHRVAHGGESFKDSALVTDETLAEIERLAELAPLHNPVNALGIAVFRQLLPKTPAVAVFDTAFHQTLDEPSFIYPLPWRYYVELGIRRYGFHGTSHKYVSSQLAEKLGVPLSALRVVCCHLGNGSSICAIKGGQSVNTSMGFTPQSGVMMGTRSGDIDPSILPWIALREGKTPQQLNQLLNNESGLLGVSGISPDYRDVEHAADTGNHQAALALTLFAERIRATIGSYIMQMGGLDALVFTGGIGENSARARAAICRNLNFLGLAVDEEKNQHNATFIQTENAMVKVA

SEQ ID NO: 128468 - protein, 399 aa, Unknown
  Bacterial polypetide isolated from the Sargasso Sea
MSNKLVLVLNCGSSSLKFAVIDAQTGDDQISGLAECFGLEDSRIKWKINGEKHESSLGAFTAHREAVEFIVNKILAGQPELAAQIQAVGHRIVHGGEKFTRSVIIDEHVIKGIEECSSLAPLHNPAHLIGIRAAIASFPKLPQVAVFDTAFHQSMPERAFIYALPYKLYREHGIRRYGMHGTSHLFVSREAAKVLNKPLEETNVICAHLGNGASVTAVKGGKSVDTSMGLTPLEGLVMGTRCGDLDPSIIYHLVHQLGYTLEEVNNLMNKQSGLLGISELTNDCRGIEEGYADGHKGATLALEIFCYRLAKYIASYTVPLGRLDAVVFTGGIGENSDIIREKVLNMLQIFNFHVDGERNKAARFGKKGIITTDNSTVAMVIPTNEEWVIAEDSIKLITK

SEQ ID NO: 128469 - protein, 393 aa, Unknown
  Bacterial polypetide isolated from the Sargasso Sea
MKKEVIVLNCGSSSVKFAIIDADTGEAGLSGIAEALGNSDASLSYKLNGKKEKRALPEKAGHTEALSAISEVIASTGVKPIAIGHRVVHGGEKFKQAALVDDSVLKAIEDYASMAPLHNMANLKGIVTAQEAYPDLPHVVVFDTSFFQTLPQKAFIYALPMSLYREHGIRRYGFHGTSHKFILDSMAKILEKPVSDTSIISAHLGNGCSVSAIEKGVAVDTSLGFIPLEGLVMGTRCGDLDPSLPGTLQKKLGKTADEISDLLNKQSGLLGISELSNDCRTLEDAALEGHEGALLAIEIFCYRLAKYIAGYMVAVPTLDAIVFTGGIGENSSLIRETTMGYFAHFGISLDEQRNADARFGQGGKITADTASTAVYVVPTNEEWVIAAEAATFA

SEQ ID NO: 128470 - protein, 399 aa, Unknown
  Bacterial polypetide isolated from the Sargasso Sea
MRTLALLVVNAGSSSVKFAVFAYPPHGDPARRPLHEGEASETGNGVSLRFDAAPGGTLPLRMADPYRAVLAQVAMWIRVQLPHIALGAIAHRVVHGGARYVDPVVVDDAVLDALRTLTPLAPLHQPHSLDAIDALRDAFPDVPQVAVFDTAFHRTLPRAEQLLPLPHAWFDQGVRRYGFHGLSYEYLAAALDERFGARAHGRVIAAHLGSGASLCAMRDCRSVATTMGFSALDGLMMSTRCGTLDPGVVLHLLEAGKLSTAALGHMLYHESGLKGVSGASGDPRVLLACEAAGDAFARDALTLYVHRIVRETGALVALLGGLDMLVFTAGIGEHSAVLRERICAALAWLGIDIDVGANADHASVVSSASSAVTVVVEPTNEAWIAARAALGVLRANRDA

SEQ ID NO: 128471 - protein, 399 aa, Unknown
  Bacterial polypetide isolated from the Sargasso Sea
MSKLVLILNCGSSSLKFAVMDAETGEDMLSGLAECFNLDDARIKWKLHGVKGEAMLGAGAAHQEALDHIVGHILPQDPTLAEQLVAIGHRIVHGGEQFSCSVRIDDGVIAGIEAAIPFAPLHNPAHLIGIRAALKVFPALAEKNVAVFDTAFHQTLPEEAYLYALPYKLYKENGIRRYGAHGTSHRFIAEETAKALGKPLSELNIINCHLGNGASVCAIRGGESVDTSMGLTPLEGLAMGTRSGDIDPAVVFFMHDQLGYSVEQINHTLTRESGLLGMTEASSDCRYVTTNYATDAGAKRALDVFTYRVAKYVGAYAAAMDGRLDALVFTGGIGENAAMVREMVLARLALFGFKIDKEANNAAVLGGEGPITAEGSRLALVMPTNEELVIARDALSLVG

SEQ ID NO: 128472 - protein, 399 aa, Unknown
  Bacterial polypetide isolated from the Sargasso Sea
MSNKLVLVLNCGSSSLKFAVIDAQTGDDQISGLAECFGLEDSRIKWKINGEKHESSLGAFTAHREAVEFIVNKILAGQPELAAQIQAVGHRIVHGGEKFTRSVIIDEHVIKGIEECSSLAPLHNPAHLIGIRAAIASFPKLPQVAVFDTAFHQSMPERAFIYALPYKLYREHGIRRYGMHGTSHLFVSREAAKVLNKPLEETNVICAHLGNGASVTAVKGGKSVDTSMGLTPLEGLVMGTRCGDLDPSIIYHLVHQLGYTLEEVNNLMNKQSGLLGISELTNDCRGIEEGYADGHKGATLALEIFCYRLAKYIASYTVPLGRLDAVVFTGGIGENSDIIREKVLNMLQIFNFHVDSERNKAARFGKKGIITADNSTVAMVIPTNEEWVIAEDSIKLISK

SEQ ID NO: 128473 - protein, 89 aa, Unknown
  Bacterial polypetide isolated from the Sargasso Sea
MSSKLVLVLNCGSSSLKFAILDAVNGDEYLSGLAECFHLPEARIKWKMDGSKHEADLGAGAAHSEALNFIVNTILAQKPELSAQLTAIG

SEQ ID NO: 128474 - protein, 392 aa, Unknown
  Bacterial polypetide isolated from the Sargasso Sea
MADVILVLNAGSSSIKFSAFDVQGDTLGLIVHGQVDGLYTATVHFSAVDHHAERHEQQWAGGDTFGHQEGLEQIAAFLEAHQEGHRLAAVGHRVVHGGQRFSGPVRVTPEIVAELEKLTPLAPLHQPHNLTPIRILEAVQPGIEQVACFDTAFHCTQPAVTQAFALPESITSRGVRRYGFHGLSYEYIASVLPDVAPQAARGRTVVAHLGNGASMCALVAGKSVASTMGFTAVDGLPMGTRCGNLDPGVVLFLMDELGMDVRAVEDLIYRRSGLLGVSGLSSDMRTLLASDDPHARFAIELYIYRIARELGSLAAAMEGIDAIVFTAGIGEHAAAIREGVMRRAAWLGVEIDVDANNSGGPLVTTASSRVPVWVIPTNEEWMIAQHTRRLIR

SEQ ID NO: 128475 - protein, 313 aa, Unknown
  Bacterial polypetide isolated from the Sargasso Sea
LDDVKNRGFLKCGVTTGLAGFAAPDDSGEWAGLDADMCRAVAVAVFGDRSKVEFITTTGKSRFPTLASGEVDMLARNTTWTISRDVNLGFEFVGVNFYDGQGFMVPSALGVSSAKELDGATVCIQTGTTTELNLADFFRLNGISYEALPIETNDEGKENLFAGRCDVYTTDASGLSSTRAAAADPGKWVVLPEIISKEPLGPLVRHGDHQWGDVVRWSLNAMIIAEELGVTSENVDAQKSSNVPEVLRLLGVEGSYGEMLELAPDWAYQIIKQIGNYSESYEANVGPDTPLEIARGLNALWTQGGILYAPPFR

SEQ ID NO: 128476 - protein, 240 aa, Unknown
  Bacterial polypetide isolated from the Sargasso Sea
MKPQRLVLKIGTNVLQRPNGKLDYNQISEFTQLVAEIRSQKHEVLIISSGAVGAGRELCQFDSAENPLIQKQILASVGQARLMQIYTDFLREHHLTIAQVLLTRADFGNRASYLNIRNTLTHLLESGIVPIINENDVVATEELTLNFGDNDWLAVYVAGLVDANRLFYLTIAPGLLKLSDKNGTGEIIPEIRELNQEVLDHCFPNQSVGGRGGMESKARAAGLAMNFGIDCHILDGKEPT

SEQ ID NO: 128477 - protein, 211 aa, Unknown
  Bacterial polypetide isolated from the Sargasso Sea
MHLKDSKTVVIKIGSSLLIDDNKIIREKWLSEFAKDIKNLQNLKKNLIIVSSGAIALGCKKLKLNKKNLKLDKSQAVASIGQIELMNLFKKIFSPKKINLSQILLTLEDTEQRRRAINAKRTFENLFSLGFVPIVNENDSIATSEIKYGDNDRLASRVAQISNADCLILLSDVNGVYSKDPKLDKKAELIREVKNIDNKIETIATRSIGEH

SEQ ID NO: 128478 - protein, 189 aa, Unknown
  Bacterial polypetide isolated from the Sargasso Sea
MENKPKKSLSQNFLIDKNIINLIVDLGKINENDTVLEVGPGTGNLTKAILLKKPKKLILIEKDKDLAANLKKKFKKNTTIINEDILKVNENDIASEPLTIYGNLPYNISSQILVKWIKNNDFNNTIKKLILMFQKEVADRIIAETNKKTYGRLSILSCWKTKIKKILDIDPKCFYPSPKVKSTVLYFEP

SEQ ID NO: 128479 - protein, 229 aa, Unknown
  Bacterial polypetide isolated from the Sargasso Sea
MYIKNSKIVVIKIGSSLLIDNHMKIRQKWLSEFAKDIKELIKKNKKIIIVSSGAIALGCRKLKLNKKKLKLDKSQAIASIGQIELMNLFKKTFNEKKINLSQILLTLEDTEQRRRAINAKRTINNLFELNFVPIVNENDSIATSEIKYGDNDRLASRVAQISGADCLILLSDVNGLYTKNPKIFNDGILIKTIKNINKKIENIANKSTGFYGSGGMKTKIDAAKICQLS

SEQ ID NO: 128480 - protein, 247 aa, Unknown
  Bacterial polypetide isolated from the Sargasso Sea
GEPSLLGSIKMNLNKKNLKLDKSQAMASIGQIELMNLFSDTFSKYNLNISQILLTLEDTEERRRSLNAKRTFENLFNLNFIPIVNENDTIATSEIKYGDNDRLASRVAQITNADTLILLSDVGGLYTKNPKKFKNAKLIKRVENFNKDLKDINYRGMNEFGSGGMNTKIEAAKICQLSGCDMIISNGLHSNPIDKILKKNDYTIFVSKISKLDARKKWIISSISPKGDLIIDDGAKKALRNRKSLLA

SEQ ID NO: 128481 - protein, 276 aa, Unknown
  Bacterial polypetide isolated from the Sargasso Sea
IKPPGCADKTIEFIRANEGRPWFFSFNCFDPHHPFDPPAEYLERFPVEEMPLPSVHPAEAQRQTTFQKLDREWAHDNPGEFHTGAMTDDDRRQVYAAYMAMVSLIDDQVGRILEALRETGQDRDTLVVFMSDHGEMLGDHGIYFKGPHFYDCQMRVPLVIRWPGGSVNEGRRIEGLVELVDLAPTLLDAGELEIPQRMQGKSLLPMLRGEAETEFVHEQVFAEYYNAWTHEDAYGSMLRTQKEKIVVYHGTGQGEFYDLENDPQEFLNLWEEPLVR

SEQ ID NO: 128482 - protein, 268 aa, Unknown
  Bacterial polypetide isolated from the Sargasso Sea
SQILLTLDDTEERRRSINAKRTFENLFDLDFIPIVNENDTIATSEIKYGDNDRLASRVAQITNADTLILLSDVDGLYTKNPKKFKDAQLIKKVIDLDKVIKSINIKGMTELGSGGMNTKIEAAKICNLAGCNMVIANGLNLNPIDRIQSENNCTWFISKISKMHARKKWIISSISPKGELIIDDGAKKALHSGKSLLAAGIKKVVGRFSKGDHIKILDNKKKEFARGLSSFSSKEINLIMGCHSNEIQKILGYVSKSEVVHKDDMVEI

SEQ ID NO: 128483 - protein, 309 aa, Unknown
  Bacterial polypetide isolated from the Sargasso Sea
DKKTIRQKWLFEFTKDIKELLNSKKNVILVSSGAIALGCKKLNLNKKNLKLDKSQAVASIGQIELMNLFKKTFNTKKINLSQILLTLEDTEQRRRAINAKRTFDNLFKLGFVPIVNENDSIATSEIKYGDNDRLASRVAQISSADCLILLSDVDGLYTKNPKIYKEAKLIKEIKNIDLNIEQVAKKSIGEYGTGGMKTKIDAAKVCQISGCVMAIANGLSVRPIKKIFQKNNCTWFLPKLSKLDARKKWIISSIAPKGELIIDEGAINALKKGKSLLAAGIKQVNGKFNKGDHIKILDKNMMNMLEDLV

SEQ ID NO: 128484 - protein, 152 aa, Unknown
  Bacterial polypetide isolated from the Sargasso Sea
MYLKNSKIIVVKIGSSLIVDKNKKIRKKWLSSFAKDIKKLRDRNQKVVIVSSGAIALGCKKMNYNKKNIKLDQSQAIASIGQIELMNLFSQTFARFKLNISQILLTLEDTEERRRSLNAKRTFENLFDLGFIPIVNENDTIATTEIKYGDND

SEQ ID NO: 128485 - protein, 235 aa, Unknown
  Bacterial polypetide isolated from the Sargasso Sea
DAKGKFKKKWVMSLIKDIQKYGSGKKFVIVSSGAIALGQKYLKIKKKKIKLEMSQAIAAIGQIHLAGEFQKLFDKFKIKSGQILISPDDTEQRKRALNVRSTFENLFKLNAIPIVNENDTTATSEIKYGDNDRLAARVAQIIGADTLVILSDVDGLYDKSKNIVKVVNKIDEKINSLVETSKNKYGSGGISTKLDAAKICMNSGCHMFLSSGNKENPLKVMVKNKIFTHFLPKIS

SEQ ID NO: 128486 - protein, 110 aa, Unknown
  Bacterial polypetide isolated from the Sargasso Sea
RISKLDARKQWIIGSVAPKGEVIIDQGAIKAINNGKSLLPAGVKKINGSFEKGDHILVKDLSDNECARGLTSFSSIEIEKIKGSHSSKIKNILGYSSREEIIHKDDLVKV

SEQ ID NO: 128487 - protein, 145 aa, Unknown
  Bacterial polypetide isolated from the Sargasso Sea
MTDRGSLRNKERIVVKIGSSLLTEGGSGQLRWDWLRDLVIDVIELKKAGCDVLLVSSGAVALGQGHLGIRRSVLKLEEKQASAAVGQILLANAYTELFGSHHLTVAQLLLTLGDTEDRRQYLNARNTMETLLRLGAIPLINENDT

SEQ ID NO: 128488 - protein, 269 aa, Unknown
  Bacterial polypetide isolated from the Sargasso Sea
MYISNAKIVVIKIGSSNLVDSRGKLKEKWLKSFVQDIKKFKQKGKDFVIVSSGAIALGQNYLKVKKKKLKIEMSQALASIGQIHLTNIYRKMFEKNKIKIGQILISPDDTEQRRRAINIKRTFENLFKLGAIPIVNENDTTATSEIKYGDNDRLAARVSQIISANVLVNFSDVDGLYESSKNKKIIKEVKNINEKIYSFVENKRSSYGSGGMSTKLEAAKICMSSGCYMAIANGKHLNPFDKLIKKNICTWFLPKVSSLDARKKWIVSS

SEQ ID NO: 128489 - protein, 84 aa, Unknown
  Bacterial polypetide isolated from the Sargasso Sea
MSSGTHLTTSRRVIIKIGSALLVDQESGAVDRRWLAALADDVAQFRARGQEVVIVSSGAIAVGRRHLGLGAGQLRLEESQAAAA

SEQ ID NO: 128490 - protein, 243 aa, Unknown
  Bacterial polypetide isolated from the Sargasso Sea
MHIEKANTIVFKIGSSNIVDGKGKLKEKWLISLAKDLKALLKKNKNIVIVSSGAIALGQSYLKIGKKKIKLEMSQAVASIGQIHLTNVYRKIFEKNKMKIGQILISLDDTEQRRRAINAKRTFENLFKLKAIPIVNENDTTATSEIKYGDNDRLAARVAQIISADVLINLSNVDGLYNPVERKKIIKEVNNIDEKIYSLVENKKNNYGSGGMMTKLQAAKICMNSGCYMAIANGNTLRPINEL

SEQ ID NO: 128491 - protein, 141 aa, Unknown
  Bacterial polypetide isolated from the Sargasso Sea
MKSKKNIVLKIGTTSIIKDGELNKDLINSLASSIREHKQNGFNFIIVTSGAVQLGANELNLEQRPTALKSLQVASSVGQITLVNSFKEIFKTEDLRIAQVLMSKNVLEDRNQFINTSDALNELIAQDIIPVINENDIVATE

SEQ ID NO: 128492 - protein, 125 aa, Unknown
  Bacterial polypetide isolated from the Sargasso Sea
FKRLEDGANCSWFLPSSNPQTSRKLWIAGSLQSCGSIKVDAGATAALKDGSSLLPAGVLEVSGSFQRGDAITILDEKGIEIGRGLSAYSYADASKIKGHKTDEIASLLGFIGRLEMIHRDDLVIF

SEQ ID NO: 128493 - protein, 219 aa, Unknown
  Bacterial polypetide isolated from the Sargasso Sea
DNDRLASRVAQVFWSDCLILLSDVDGLFDKNPKLNKNAKLINNVEEINKNIEKYISKNISEHGTGGMKTKIEAAKICQISGCYMAIANGLINRPIKNIIENNNCTWFLPKVSKLDARKKWIISSISPKGELIIDEGAIQALKKGKSLLAAGIKSINGKFNKGDHVKILDKNMNEHARGLSSFNSDEILRIKGHHSSKISEILGYISKSEVIHKDDMVEV

SEQ ID NO: 128494 - protein, 186 aa, Unknown
  Bacterial polypetide isolated from the Sargasso Sea
MLVKNSKKIVLKLGSSTVVDNNGKFKKQWVTSLIKDIKKYSRGKSFVIVSSGAIALGQKYLKIKKRKIKLEMSQAIAAVGQIHLAGEFQKLFDKFKVKSGQILISPDDTEQRRRALNVRNTFENLFKLKAIPIVNENDTTATSEIKYGDNDRLAARVAQIIGADTLLIFSDVDGLYDRSKKIIKNI

SEQ ID NO: 128495 - protein, 292 aa, Unknown
  Bacterial polypetide isolated from the Sargasso Sea
MRLIKLCILKIQKIVAVKIGSSLLIDNNMKIRTKWLIEFSKDIKKLVDQGKKVIIITSGAIALGCKKLNLKKTNLKLDKSQAVASIGQIELMNLFKKNFNKVKLNLSQILLTLEDTEQRRRAINAKRTINNLFQLGFVPIVNENDSIATSEIKYGDNDRLASRVAQISSADCLVLLSDVNGLYTKNPKLFKDATLIKEINKIDERIERIASNESGIYGTGGMKTKIDAAKVCQKSGCQMAIANGLILRPLDQIQKKNNCTWFITEVSKLDARKKWIISSISPKGELIIDDGA

SEQ ID NO: 128496 - protein, 249 aa, Unknown
  Bacterial polypetide isolated from the Sargasso Sea
KRTLSNLFSLGYVPIVNENDSIATSEIKYGDNDRLASRVAQISDADCLILLSDVNGLYTKNPKIHKNTQLIKKITKINDEIEKIATKSISQHGTGGMKTKIDAAKIAQLSGCYMAIANGLVLNPINEIKKNNNCTWFLPKVSKLHARKKWIISSISPKGELIIDDGAINALKQGKSLLAAGIKKVNGKFYKGDHIKILNKSLKEYARGLSSFNSDEILKIKGHHSNKIKEILGYIAKSEVVHKDDMVGL

SEQ ID NO: 128497 - protein, 287 aa, Unknown
  Bacterial polypetide isolated from the Sargasso Sea
NNSKIIIIKIGSSLLVDKNQKVRKKWLSSFAKDIQKLKDKNQKIVIVSSGAIALGCKKMNFNKKNIKLDKSQAIASIGQIELMNLFSKTFAKYKLNISQILLTLEDTEERRRSLNAKRTFENLFNLGFIPIVNENDTIATSEIKYGDNDRLASRVAQITDADTLILLSDVDGLYTKNPKIFKDSKLIKKINDIKKDLKKINIKGVNEYGSGGMQTKIQAAKICQLAGCSMVIANGLYSNPISKIIEKNNCTWFTPKVSKLDARKKWIISSIAPKGSIIIDEGAKKAL

SEQ ID NO: 128498 - protein, 109 aa, Unknown
  Bacterial polypetide isolated from the Sargasso Sea
MYLKNSKIIVVKIGSSLLVDENKKIRKQWLSSFAKDIKKLRDKNQKIVIVSSGAIALGCKKMNYNKKNIKLDKSQAIASIGQIELMNLFSQTFAKYKLNISQILLTLED

SEQ ID NO: 128499 - protein, 267 aa, Unknown
  Bacterial polypetide isolated from the Sargasso Sea
AIALGCKKLGLNKKNLKLDKSQAVASIGQIELMNLFKKNFNSKKINLSQILLTLEDTEQRRRAINAKRTLDNLFELGFVPIVNENDSIATSEIKYGDNDRLASRVAQISSADCLILLSDVDGLYTKNPKIHKDVKLIKEIKNIDYKIEQVASKSVGMYGTGGMKTKIDAAKICQLSGCYMAIANGLSMRPIKNIYEKNSCTWFLPKISKLDARKKWIISSISPKGKLIVDEGAINALKKGKSLLAAGIINVEGKFNKGDHVKIIDKN

SEQ ID NO: 128500 - protein, 244 aa, Unknown
  Bacterial polypetide isolated from the Sargasso Sea
MKKYKQRWVIKAGSSLIASSKRGLDDSFISSLVKVVKELKDRDIEIVVVSSGAVAQGMYDLDLNTRPESLPLLQASAAVGQLGLINLYQNEFKKFSIQSAQVLISHSDIANRGRYLNARHSLNTLLSLNVVPIVNENDSVATDEISFGDNDSLAGAIAGLINASKLIILTDQEGVYTSDPNKDTSAKLIKEINLDEESFSLSQINLEGSGVLGRGGMITKIEAAKKASTTGCVTWILKGDKIDE

SEQ ID NO: 128501 - protein, 308 aa, Unknown
  Bacterial polypetide isolated from the Sargasso Sea
KELIKQKKDIIIVSSGAIALGCKKLKLKKSNLKIDKSQAVASIGQIELMNLLNKIFSIKKVNLSQMLLTLEDTEQRRRAINAKRTFQNLFQLGFVPVVNENDSIATSEIKYGDNDRLASRVAQISSADCLILLSDVNGLYTKNPKLFKDSKLIKEIKNIDSNIDKIAKKSLSNYGTGGMRTKIEAAKICQLSGCSMAIANGLIERPIKNILEKNNCTWFLPKISKLDARKKWIISSVSPKGDLIIDEGAINALKNGKSLLAAGIKKVNGIFKKGDHIRILDKNFSEYARGLSSFSSNEILKFKGHTQK

SEQ ID NO: 128502 - protein, 189 aa, Unknown
  Bacterial polypetide isolated from the Sargasso Sea
VIKIGSAVLADSDGRVNHTILSSISEDVAWLIKNGKEVLIVSSGAIALGRKKIKFSENLTLPESQALAAHGQIELMSAWKKHLNKFSIPISQILLTPRDTELKLSSKNAQQTVNKLLEVGCLPIINENDTTATDEIKFGDNDLLASKVAKLIGADLLIILSTVDGLYNSEKDMQTRKRGSLIKEVGKIT

SEQ ID NO: 128503 - protein, 253 aa, Unknown
  Bacterial polypetide isolated from the Sargasso Sea
CLMYLKNSKIIVVKIGSSLLVDQNKKIRRQWLSSFAKDIKKLRDKNQKVVIVSSGAIALGCKKMNYNKKNIKIDKSQAIASIGQIELMNLFSQTFAKYKLNISQILLTLEDTEERRRSLNAKRTFDNLFELGFIPVVNENDTIATSEIKYGDNDRLASRVAQITNADALILLSDVDGLYTKNPKIFKDAKLIKKIDDLKKDLKKIYIKGVNEYGSGGMHTKIEAAKICQLAGTNMVIANGLYSNPISKIIEKE

SEQ ID NO: 128504 - protein, 263 aa, Unknown
  Bacterial polypetide isolated from the Sargasso Sea
FKELIDQKKNIIIVSSGAIALGCKKLNLNKKNLKLDKSQAVASIGQIELMNLFKKNLSSKKINLSQILITLEDTEKRRRAINAKRTFENLFSLGFVPIVNENDSTATSEIKYGDNDRLASRVAQISGADCLILLSDVDGLYSKNPRLNKNVKLIKEIKNIDSNIEKIATKSTGQYGTGGMKTKIDAAKICQFSGCYMCIANGLNLRPIKEIIKKNFCTWFLPRLSKLDARKKWIISSISPKGELIIDQGAISALKKGKSLLAA

SEQ ID NO: 128505 - protein, 171 aa, Unknown
  Bacterial polypetide isolated from the Sargasso Sea
MHLKNSKIIVIKIGSSLLVDDQKKIRKKWLSSFAKDIQILKSKNKKIIIVSSGAIALGCKKMNYNKTNLKLDKSQAIASIGQIELMNLFSQTFLKFKLNISQILLTLDDTEERRRSINAKRTFENLFQLNYIPIVNENDTIATSEIKYGDNDRLASRVAQITNADTLILLS

SEQ ID NO: 128506 - protein, 159 aa, Unknown
  Bacterial polypetide isolated from the Sargasso Sea
MYLKNSKIIVVKIGSSLLVDQNKKIRKQWLSSFAKDIKKLKDKNQKVVIVSSGAIALGCKKMNYNKKNIKLDKSQAIASIGQIELMNLFSQTFAKYKLNISQILLTLEDTEERRRSLNAKRTFDNLFELGFIPVVNENDTIATSEIKYGDNDRLASRVA

SEQ ID NO: 128507 - protein, 116 aa, Unknown
  Bacterial polypetide isolated from the Sargasso Sea
IFYPLTSTNSSKKKWLLNHLKPSGSIIIDSGAKNAILKNKSLLPAGVIDIKGRFKRGDVISILVKNGQKIAIGISAYDFNDAKKIIGKKSEEIYKVLGFEGRDEVVHKDNLVRLSA

SEQ ID NO: 128508 - protein, 108 aa, Unknown
  Bacterial polypetide isolated from the Sargasso Sea
SKLDARKQWIIGSIAPKGEVIIDEGAIKAINNGKSLLPAGVKKINGTFEKGDHILIKDQNDNECARGLTSFSSIEIQKIKGSHSSKIKNILGYSSRDEVIHKDDLVKV

SEQ ID NO: 128509 - protein, 244 aa, Unknown
  Bacterial polypetide isolated from the Sargasso Sea
ASIGQIHLAEEFQNIFERNNFRVGQILISPDDTEQRKRALNVKRTFDNLFKLKAIPIVNENDTTATSEIKYGDNDRLAARVAQIIGADTLIIFSDVDGLYGREKKRKLIKEVKYLTNETYKLADAKINSYGSGGMITKLEAAKICMNAGCHMFIANGNKINPIKHMINKKIYTKFIPKISTLAARKKWIVSSLSSSGAIYVDKGASIALKNGKSLLAAGIKMIRGKFNKGENVLVMDEQNNKLA

SEQ ID NO: 128510 - protein, 88 aa, Unknown
  Bacterial polypetide isolated from the Sargasso Sea
MYLKNSKIIVVKIGSSLLVDQNKKIRKQWLSSFAKDIKKLRNKNQKVVIVSSGAIALGCKKMNYNKKNIKLDKSQAIASIGQIELMNY

SEQ ID NO: 128511 - protein, 269 aa, Unknown
  Bacterial polypetide isolated from the Sargasso Sea
MYLKNSKIVAVKIGSSLLIDNNMKIRTKWLIEFSKDIKKLVDQGKKVIIITSGAIALGCKKLNLKKKNLKLDKSQAVASIGQIELMNLFKKNFNKVKLNLSQILLTLEDTEQRRRAINAKRTINNLFQLGFVPIVNENDSIATSEIKYGDNDRLASRVAQISSADCLVLLSDVNGLYTKNPKLFKDATLIKEINKIDERIERIASNESGIYGTGGMKTKIDAAKVCQKSGCQMAIANGLILRPLDQIQKKNNCTWFITEVSKLDARKNG

SEQ ID NO: 128512 - protein, 159 aa, Unknown
  Bacterial polypetide isolated from the Sargasso Sea
MSLKNSKIIVIKIGSSLLVDKNKKIRKKWLSNFAKDIRKLKNKNKKIVIVSSGAIALGSIKLNYSKKNLKLDKSQAMASIGQIELMNLFSNIFSKYGLNISQILLTLEDTEERRRSLNAKRTFENLFNLDFIPIVNENDTIATSEIKYGDNDRLASRVA

SEQ ID NO: 128513 - protein, 161 aa, Unknown
  Bacterial polypetide isolated from the Sargasso Sea
KTKLEAARVAVSSGCHMVIASGTINNPLSNLRKGGLSTWFVSSGDPIKARKQWIFNTKPNGKIYVDAGAEKALLRGKSLLPAGVVACDGQFRRGDTVSILSAEGRPLANGLIGYSKKEVDLIRGFHSNQIASILGHPGRAVLVHRNDMAINEFFRDREVLP

SEQ ID NO: 128514 - protein, 115 aa, Unknown
  Bacterial polypetide isolated from the Sargasso Sea
PLGPLVRHGDHQWGDVVRWSLNAMIIAEELGVTSENVDAQKSSNVPEVLRLLGVEGSYGEMLELAPDWAYQIIKQIGNYSESYEANVGPDTPLEIARGLNALWTQGGILYAPPFR

SEQ ID NO: 128515 - protein, 129 aa, Unknown
  Bacterial polypetide isolated from the Sargasso Sea
MIKKFKKIVIKIGSNSIVDPKTKQIKSKWLDTLCKDIAQIHKISKIIIVCSGAIALGSKSISKSVLRKLEDKQAAASIGQIELAYQWRTKLKKFKINVSQILLTLEDSETRRRYLNARNTISSLQNKNI

SEQ ID NO: 128516 - protein, 212 aa, Unknown
  Bacterial polypetide isolated from the Sargasso Sea
MKIELKKSNKIVIKIGSSIINNDDGKDYLSDICDEISKFVNEGKEIIIVTSGAISQGMSILSITDRPRDIKKLQALAAIGQQKLMLGYERIFSQNNNHIAQLLITHNDINDRVRYLNIKGTIEELLSNKIIPIINENDVVSTEEIKLGDNDNLSSMIANLIGADLLLILTDQQGMYDKNPDCFKDAKLINFINVSDLKNMMLTLAHKVILVL

SEQ ID NO: 128517 - protein, 163 aa, Unknown
  Bacterial polypetide isolated from the Sargasso Sea
MLVNNSKKIVIKLGSTTVIDKKGKFKKSWVNSLIKDIKKYKKKKDIVIVSSGAIALGQNYLKIRKKKIKLDMSQAIASIGQIHLAEEFQKIFKRNNFRVGQILISPDDTEQRRRALNVRRTFDNLFKLKAIPIVNENDTTATSEIKYGDNDRLAARVAQIIGA

SEQ ID NO: 128518 - protein, 185 aa, Unknown
  Bacterial polypetide isolated from the Sargasso Sea
NINTKLIKTVKKIDENIKKYATKTESIFGSGGMKTKIEAAKICQLSGCFMLIANGNQNNPIKKIINTQKCTWFLPKVSKLDARKQWIIGSVAPKGEVIIDSGALKAINNGKSLLPAGVKKIKGNFEKGDHILVKDQSNYEHARGLSSFSSIEIEKIKGYHSSKIKNILGYSDREEVIHKDDLVKV

SEQ ID NO: 128519 - protein, 281 aa, Unknown
  Bacterial polypetide isolated from the Sargasso Sea
QIHLAGEFQKLFEKFKVKSGQILISPDDTEQRKRALNVRSTFDNLFKLKAIPIVNENDTTATSEIKYGDNDRLAARVAQIIGADTLIILSDVNGLYDKSKKIVKKVNRIDEKIYSLMENTKNLYGSGGISTKLDAAKICMNSGCHMFIANGKKNNPLNNMIKNRIYTHFMPKISRLDARKKWIISSLSSSGIIYIDQGAAQALSNGKSLLAAGITKIIGSFDKGENVLIMDENENQLARGLASFNSKEIEKIKGKQSKEIERILGYLSKSEIIHKDDMVKL

SEQ ID NO: 128520 - protein, 221 aa, Unknown
  Bacterial polypetide isolated from the Sargasso Sea
MLIKTANKIVLKLGSATVVDSKGIFKEKWVTSLIKDIKKYGKGKNFVIVSSGAIALGQKYLKIKKRKIKLEMSQAIASIGQIHLAGEFQKIFDKYKIKTGQILISPDDTEQRRRAINVRRTFDNLFKLKAIPVVNENDSTATSEIKYGDNDRLAARVAQIIGADMLILLSDVDGLYDKSKGKKIVRQVTSINEKIMSLMDNKKNKFGSGGIATKLDAAKKF

SEQ ID NO: 128521 - protein, 264 aa, Unknown
  Bacterial polypetide isolated from the Sargasso Sea
ALGCKKLKLNKKNLKLDKSQAVASIGQIELMNLFKKIFNSKKINLSQILLTLEDTEQRRRAINAKRTFENLFSLSFVPIVNENDSIATSEIKYGDNDRLASRVAQISNADCLILLSDVNGVYSKDPKLFKKAELIREIKNIDNKIERISTRSIGEHGTGGMKTKIEAAKICQLSGCYMAISNGLINRPIQKILKDNLCTWFLPKISKLDARKKWIISSVSPKGLLIIDAGALNALKNGKSLLAAGIKEVKGIFNKGDHVRILDE

SEQ ID NO: 128522 - protein, 140 aa, Unknown
  Bacterial polypetide isolated from the Sargasso Sea
MEILHASDLQAGVKQAVKEGNDEAVNSWMVQAREVGLAASLSSEDMDYLNSETAKDYVVFNAKRQLYNEAFEARYYALEEVETLKEQYPEAKDLFARTDALIEKRDDIIQQIAVAISGSEEPDEAALEEARKQWLAQAAN

SEQ ID NO: 128523 - protein, 140 aa, Unknown
  Bacterial polypetide isolated from the Sargasso Sea
MEILHASDLQEGVKQAVKDGNIEIVDSWMVQAREVGQAANLSSEDMDYLNSETAKDYVVFNAKRQLYNEAFEARYYALEEVETLKEQYPEAKDLFARTDALIEKRDAIIQQIAVAISGSEQPDEAALKEARKQWLAQAAN

SEQ ID NO: 128524 - protein, 365 aa, Unknown
  Bacterial polypetide isolated from the Sargasso Sea
MYIKNAKVIVLKIGSSNIVDSRGKLREKWLKSLVKDIKKLVNKDKKIVIVSSGAIALGQSYLKIKQKKMKLEMSQALASIGQIHLTNVYRKMFERGKIKIGQILISLDDTEQRRRAINAKRTFENLFKLNAIPIVNENDTTATSEIKYGDNDRLAARVAQIIGANVLINLSDVDGLYKSSEQKTIIKEVSNIDEKIYSFVNKKKNTYGSGGMETKLQAAKICMNTGCYMAIANGNHINPISKLVKDNFCTWFLPKVSRLHAREKWIVSSIGNSGKIYIDDGAVKALKNEKSLLPAGITKVEGKFLKGDNILIVDSNGKDCARGLTSFSADEIDKVKGLKSDQIEKVLGYSSKSEIVHKDDMVKLL

SEQ ID NO: 128525 - protein, 283 aa, Unknown
  Bacterial polypetide isolated from the Sargasso Sea
MNLFKKNFNKVKLNLSQILLTLEDTEQRRRAINAKRTINNLFQLGFVPIVNENDSIATSEIKYGDNDRLASRVAQISSADCLVLLSDVNGLYTKNPKLFKDATLIKEINKIDERIERTASNESGIYGTGGMKTKIDAAKVCQKSGCQMAIANGLILRPLDQIQKKNNCTWFITEVSKLDARKKWIISSISPKGELIIDDGAIKALKKGKSLLAAGIKKVNGKFNKGDHIKILNKNMIEYARGLSSFTSEEIIKIKGQHSNKIQELLGYTAKSEVVHKDDMVAI

SEQ ID NO: 128526 - protein, 311 aa, Unknown
  Bacterial polypetide isolated from the Sargasso Sea
MYLKDSKTVVIKIGSSLIINESKSIREKWLSDFALDIQNLQKLKKNVIIVSSGAIALGCKKLKLNKKNLKLDKSQAVASIGQIELMNLFIKKFNSKKINLSQILLTLEDTEQRRRAINAKRTFENLFKLKFVPIVNENDSIATSEIKYGDNDRLASRVAQISGADCLILLSDVNGFYSKNPKIDKNAKLIKEITNIDEKIEKIATKSIGEHGTGGMKTKIDAAKVCQLAGCHMAISNGLINRPIKNMLEKNICTWFLPKISKLDARKKWIISSISPKGDLIIDDGALNALKIGKSLLAPGIKEVRGKFNKG

SEQ ID NO: 128527 - protein, 296 aa, Unknown
  Bacterial polypetide isolated from the Sargasso Sea
KSQAVASIGQIELMNLFNEIFKKRKLNLSQILLTLEDTEIRRRAINAKRTFDNLFHLGFIPLVNENDSIATSEIKYGDNDRLASRVAQISGSDCLILLSDVDGLFDKNPKVNKNAKLISNVKEINNSIEKYISKNISEHGTGGMKTKIEAAKICQISGCYMAIANGLINRPIKSIINNNNCTWFLPKVSKLDARKKWIISSIAPKGELIIDEGAVQALKMGKSLLAAGIRNVNGKFNKGDHIKIVDKNMREHARGLSSFNSDEIFRIKGQHSSKINEILGYVSKSEVVHKDDMVEI

SEQ ID NO: 128528 - protein, 337 aa, Unknown
  Bacterial polypetide isolated from the Sargasso Sea
MYIDKAKKIVLKIGSSNLVDKQGKLKEKWLKSLVADIEKLRKKGKEFVIVSSGAIALGQNHLKVKKKRLKIEMSQALASVGQIHLTNIYKEIFKKKKINIGQILISPDDTEQRRRAINIKRTFENLFKLKAIPVVNENDTTATSEIKYGDNDRLAARVAQIISADVLINFSDVNGLYESSKTKKIINEVKNINNEIYALADSKKSVYGSGGMVTKLDAAKICMNSGCYMAIANGKQINPLDKLLKTNICTWFLPKVSSLDARKKWIVSSIGSNGKIYIDGGAVKALKNGKSLLPAGIIKIDGKFFKGDNILIVDLNGNDCARGITSFSSDEINKVKG

SEQ ID NO: 128529 - protein, 334 aa, Unknown
  Bacterial polypetide isolated from the Sargasso Sea
MKKLLSILAVTAFAFTANAGTLDDVKNRGFLKCGVTTGLAGFAAPDDSGEWAGLDADMCRAVAVAVFGDRSKVEFITTTGKSRFPTLASGEVDMLARNTTWTISRDVNLGFEFVGVNFYDGQGFMVPSALGVSSATELDGATVCIQTGTTTELNLADFFRLNGISYEALPIETNDEGKENLFAGRCDVYTTDASGLSSTRAAAANPNKWVVLPEIISKEPLGPLVRHGDHQWGDVVRWSLNAMIIAEELGVTSENVDAQKSSNVPEVLRLLGVEGSYGEMLELAPDWAYQIIKQIGNYSESYEANVGPDTPLEIARGLNALWTQGGILYAPPFR

SEQ ID NO: 128530 - protein, 310 aa, Unknown
  Bacterial polypetide isolated from the Sargasso Sea
GAIALGQKYLKIKKKKIKLEMSQAIAAIGQIHLAGEFQKLFDKFRIKSGQILISPDDTEQRRRALNVRSTFENLFQLKAIPIVNENDTTATAEIKYGDNDRLAARVAQIVGADTLIILSDVDGLYDKSKKIVKTVTKIDEKVYSLVNTSKNLYGSGGISTKLDAAKICINSGCHMFIANGKKENPLKKLLKNKICTHFIPKISSLDARKKWIISSLNSSGVIYVDDGAAKALLDGKSLLAAGIIKIKGSFDKGANVLIVDQNDKQLARGLASFNSVEIEKIKGKHSNEIEIILGYLSKSEIIHKDDMVKL

SEQ ID NO: 128531 - protein, 361 aa, Unknown
  Bacterial polypetide isolated from the Sargasso Sea
MLISNSKKIVIKLGSTTVVDSKGKFKKKWVTSLIKDIKKLGSGKDFVIVSSGAIALGQKYLKIQKKKIKLEMSQAIAAIGQIHLAGEFQKLFEKFKLKTGQILISPDDTEQRKRALNVRGTFDNLFKLKAIPIVNENDTTATSEIKYGDNDRLAARVAQIIGADTLIILSDVNGLYDKSKNIVKTVNRLDEKIYSLVENSKNSYGSGGILTKLDAAKICMNSGCHMFLANGSKEYPLKRMVKEKTFTHFTPKISSLDARKKWIIGSLSSSAVISVDAGAAKALLNGKSLLAAGIIKVKGSFDKGENVLIVDQNEKQLARGLASFNSEEIDKIKGKQSKEIEKILGYLSKSEIIHKDDMGKL

SEQ ID NO: 128532 - protein, 352 aa, Unknown
  Bacterial polypetide isolated from the Sargasso Sea
MSNKLIVLKIGTNTLFDNAEINFDMLDTLASSIKKYRKQNINFVIVTSGAVQSGANELNLSERPKNLKELQVASAVGQVSLINTYKEIFNKHDINIAQILISKNVLEDRSQFINTTEALNGLISKNILPIINENDVVATEELKFGDNDRLSAIVSIILKADKLVLITDKEGLYDSDPEISEEAQKIENIEYNSEELNELIPKSVSGKGIGGFSTKIMAAQMAGFSGIETQIISWSPNCVDDVIDDVKIGTIIKPSNKNIKLKKIWIGFGMTIDGEIIIDEGAEDALVKDASLLSKGVLKVNQTFEENTGVEIKNTKNTLIGRGVVNLSSKEIEDSKNSENTVVIHKDNLLIL

SEQ ID NO: 128533 - protein, 369 aa, Unknown
  Bacterial polypetide isolated from the Sargasso Sea
MKLEQTNRIIIKIGSALLFNETSGSLNKEWLNSLAEDVKYLRENDKEVIIVSSGAIAMGAKDLDLDMKNMKMDMNQAVSAVGQIHLMGSFKSAFEKNEIKISQILLTLDDTEQRRRSINARRTIDTLLKLGIVPVVNENDTIATSEIRYGDNDRLASRVAQITSADCLILLSNINGLYSADPSTDEDVKLINKVSEIDKDIEKMIGQSISDYGKGGMKTKIQAAKTAMLSGCHLAITNGSIMRPVKSLFEGRPCTWFEPTKTPLAARKQWIAGTMKPVGKIIIDDGAVDALKKGSSLLPAGVKSVEGNFERGDVIEVLSSDQNKIGIGLAGYAAEESIKIMGHKSDEIANILSYSYREEMIHKDDLVLI

SEQ ID NO: 128534 - protein, 267 aa, Unknown
  Bacterial polypetide isolated from the Sargasso Sea
KFYLLSEDTEERRRSLNAKRTFENLFELGFIPIVNENDTIATSEIKYGDNDRLASRVAQITNADTLILLSDVDGLYTKNPKIFKEAKLIKKVDDLKKDLRQINIKGVNEYGSGGMQTKIEAAKICQLSGCNMVIANGLYLNPISKIIEENNCTWFKSKVSKLDARKKWIISSIAPKGAIIIDDGAKKALRSGKSLLAAGIKKITGKFNKGDHIKILDKKNNECARGLSSFTSEEIIKIMGHHSNEIEKLLGYVSKSEVIHKDDMVEV

SEQ ID NO: 128535 - protein, 300 aa, Unknown
  Bacterial polypetide isolated from the Sargasso Sea
KKKRLKIEMSQALASVGQIHLTNIYKEIFKKKKINIGQILISPDDTEQRRRAINIKRTFENLFKLKAIPVVNENDTTATSEIKYGDNDRLAARVAQIISADVLINFSDVNGLYKSSKTKQVISEVKNINDEIYALADSKKSVYGSGGMVTKLDAAKICMNSGCYMAIANGKQINPLDKLLKTNICTWFLPKVSSLDARKKWIVSSIGSNGKIYIDSGAVKALKNGKSLLPAGIIKIDGEFFKGDNILIVDQNGNDCARGIVSFSSDEINKVKGLKSDQLESILGYPTKSEIIHRDDMVKL

SEQ ID NO: 128536 - protein, 363 aa, Unknown
  Bacterial polypetide isolated from the Sargasso Sea
MLINNSKKIVIKLGSTTVIDKEGNFKKAWVNSLIKDIKKYKKKREIVIVSSGAIALGQSYLKIKKKKIKLEMSQAIASIGQIHLAEEFQKIFEKNSFKVGQILISPDDTEQRRRALNVRRTFDNLFKLKAIPIVNENDTTATSEIKYGDNDRLAARVAQIIGADTLIIFSDVDGLYDKGNKKKIINVVKNLNNNIYKLADSKINSYGSGGMITKLEAASICMNAGCHMFIGNGNKKNPIKRMVEKGIFTKFIPKISTLAARKKWIVSSLSSHGTILIDKGAANALKNGKSLLAAGIKTISGKFNKGENVLIIDEYNNKLARGLASFSSVEISKIKGRQSAEIEKILGYISKTEVVHKDDMVKL

SEQ ID NO: 128537 - protein, 210 aa, Unknown
  Bacterial polypetide isolated from the Sargasso Sea
MYLENSKTIIVKIGSSLIIDDKKIIRKKWLLEFAKDIKDLRKKNKNIIIVSSGAIALGCKKLNIVKKKLKIDQSQAVASVGQIELMNLFKEVFAIQKINISQILLTLEDTEIRRRAINAKRTIENLFNLNFIPIVNENDTIATSEIKYGDNDRLASRVAQISDADCLVLLSDVDGLYTKNPKIHKHAKLINKIEKIDQNIIKLASGKTSE

SEQ ID NO: 128538 - protein, 195 aa, Unknown
  Bacterial polypetide isolated from the Sargasso Sea
VQLVCIQTGTTTELNLADFFRLNGISYEALPIETNDEGKENLFAGRCDVYTTDASGLSSTRAAAANPNKWLVLPEIISKEPLGPLVRHGDHQWGDVVRWSLNAMIIAEELGVSSENVDAQLSSNVPEVLRLLGVEGSYGEMLELAPDWAYQIIKQIGNYSESYEANVGPDTPLEIARGLNALWTQGGILYAPPFR

SEQ ID NO: 128539 - protein, 369 aa, Unknown
  Bacterial polypetide isolated from the Sargasso Sea
MYLKDSKTVVIKIGSSLIIDNNKLIREKWLSEFAKDIKNLQNFKKNIIIVSSGAIALGCKKLKLNKKNLKLDKSQAVASIGQIELMNLFKKVFSPKKINLSQILLTLEDTEQRRRAINAKRTFENLFSLGFVPIVNENDSIATSEIKYGDNDRLASRVAQISNADCLILLSDVNGVYSKDPKLDKKAELIREVKNIDNKIEIIATRSIGEHGTGGMKTKIDAAKICQLSGCHMAIANGLINRPIKNILKNNLCTWFLPKVSKLDARKKWIISSISPKGQLIIDSGALTALKSGKSLLAAGIKEVKGKFIKGDHIRILDEDMIEFARGLSSFTSDEISKIKGIHSNKISNLLGYISKSEVIHKDDMVKVE

SEQ ID NO: 128540 - protein, 353 aa, Unknown
  Bacterial polypetide isolated from the Sargasso Sea
SLTADSGEVNLAALSKLVSQVVSAREGEHEIIIVTSGAITAGVQRLGITRPDEPEILQAISAVGQIDLMRAYRDEFDAHKVATGQVLLAPHDFRDRNQYLHAEATFTHLLRLSVVPIVNENDAVADDAIRYGDNDRIAALVANLMRADLLVLLTDTPGLLTADPRLEPEATLIEEIAAIDESLQEVAGSAGLRGSGGMASKLAAARMASWSGVRTVIAAADRDNVLADAMAGISGIGTAVPARKIRVSARKLWIGFAVAANGRITVDDGAAKALRQSGGSLLTAGIVNVENTFGVGEAVEIVNLSGEVFAKGLSAFDSATANRWKGSRTEELPVGTSPVAIHRDDLVVLDDPE

SEQ ID NO: 128541 - protein, 106 aa, Unknown
  Bacterial polypetide isolated from the Sargasso Sea
SWISGSIRPSEIINIDDGANLALRNGKSLLSAGVINIDGEFDKGDTVIIKSQDVEIARGLTNFNSSDLFKIIGKKSEEIEEILGYLDKTEVIHRDNLFYSGDMDKN

SEQ ID NO: 128542 - protein, 84 aa, Unknown
  Bacterial polypetide isolated from the Sargasso Sea
MSSLTNKKILLGITGGIAAYKSAEIARGLKKVGAEVRVIMTESSKEFITPLTMQALSGNPVSTDLLDTETEAAMGHIEISKWAD

SEQ ID NO: 128543 - protein, 299 aa, Unknown
  Bacterial polypetide isolated from the Sargasso Sea
LQACAAVGQRGLIQIYQSEFDKYNHKTAQVLISHDDITNRVRYLNAKNAIEALLNLDVIPIVNENDCVAIEEISFGDNDRLGAALVGLIRADYFVMLTDQEGIFSDDPNKNIQAQLIQSIDLDDKQLDLSKLLNASAGVHGRGGMKTKLEAARTSVNSGAKTWVADGRRSDTLINLYEGKNEGTFLYSNKDRLQSRKLWLSSFGSSRGTLTLDEGAAEAITKKGKSILPVGITKVEGKFHRGDLIICNNSNSEELARGISNFSSEELKKIIGLNSKDLYGVLGYASEEEAIHRNNLVIS

SEQ ID NO: 128544 - protein, 92 aa, Unknown
  Bacterial polypetide isolated from the Sargasso Sea
MIIAEELGVSSENVDAQKSSNVPEVLRLLGVEGSYGEMLELAPDWAYQIIKQIGNYSESYEANVGPDTPLEIARGLNALWTQGGILYAPPFR

SEQ ID NO: 128545 - protein, 364 aa, Unknown
  Bacterial polypetide isolated from the Sargasso Sea
MYIDKAKKIVLKIGSSNLVDNKGKLKERWLKSLVVDIEKLRKKGKEFVIVSSGAIALGQSYLKVKKKRLKIEMSQALASVGQIHLTNIYKEMFKKKKINIGQILISPDDTEQRRRAINVKRTFENLFKLKAIPVVNENDTTATTEIKYGDNDRLAARVAQIISADVLINFSDVNGLYKSSKNKQIIKEVKNINDETYALADSKKSVYGSGGMVTKLDAAKICMNSGCYMAIANGKQINPLDKLLKTNICTWFLPKVSSLDARKKWIVSSIGSNGKIYIDGGAVKALKNGKSLLPAGIIKIDGKFFKGDNILIVDLDGNDCARGITSFSSDEINKVKGLKSDQLESILGYPTKSEIIHRDDMVKL

SEQ ID NO: 128546 - protein, 160 aa, Unknown
  Bacterial polypetide isolated from the Sargasso Sea
MYLKNSKKIVIKIGSSLLVDQEKKIRKKWLSSFAKDIKKLRSNNQKIIIVSSGAIALGCKKMNYNKKNLKLDKSQAIASIGQIELMNLFLETFSKYKLNISQILLTLDDTEERRRSINAKRTFENLFDLDFIPIVNENDTIATSEIKYGDNDRLASRVAQ

SEQ ID NO: 128547 - protein, 314 aa, Unknown
  Bacterial polypetide isolated from the Sargasso Sea
IALGCKKLELNKKNLKLDKSQAIASIGQIELMNLFKKTFNLMKINLSQILLTLEDTEQRRRAINAKRTFENLFKLGFVPIVNENDSIATSEIKYGDNDRLASRVAQISGADCLVLLSDVDGLYTKNPKIYKDARMIKEINNIDFQIEKVATKSVGEYGTGGMKTKIDAAKICQHSGCVMAIANGLTLNPIKKIIKKNSCTWFLPKISKLDARKKWIISSVSPKGELVIDDGAIKALTKGKSLLAAGIKKINGKFNKGDHIKILDKNMNEYARGLSSFSSDEISKIRGQHSNKINDLLGYITKSEVVHKDDMVEI

SEQ ID NO: 128548 - protein, 198 aa, Unknown
  Bacterial polypetide isolated from the Sargasso Sea
MYINKAKKIVLKIGSSNLVDKKGKLKEKWLRSLVKDIDKLRKKGKEFVIVSSGAIALGQNYTKVKKKRIKIEMSQALASIGQIYLANIYREIFQKKKIKIGQILISPDDTEQRRRAINVKRTFENLFKLKAIPIVNENDTTATTEIKYGDNDRLAARVAQIISADILINFSDVDGLYESSKNKRVIKEVKNIDEKIYS

SEQ ID NO: 128549 - protein, 278 aa, Unknown
  Bacterial polypetide isolated from the Sargasso Sea
LNFFKLKINISQILLTLHDTEERRRSINAKRTFENLFKLDYIPIVNENDTIATSEIKYGDNDRLASRVAQITNADTLILLSDVDGLFTKNPKLFKDAKLIKKVNNLDKDMKKIYIKGLTEFGKGGMNTKIEAAKICNLAGCNMIIANGLYLNPIQQIEKKNICTLFESKISKLHARKKWIISSVSPKGTLVIDDGAKKALVSGKSLLAAGIINLSGKFYKGDHIKILDTKNKEFARGLSSFSSEEINKIMGCHSNEIEKKLGYITKSEVVHKDDMVEV

SEQ ID NO: 128550 - protein, 279 aa, Unknown
  Bacterial polypetide isolated from the Sargasso Sea
MYLKNYKTIVIKVGSSLLIDAKKKVRRTWLEKFALDIKDLKNKKKNVIIVSSGAIALGCEKLKINKKSIKLDKSQAVASIGQIELMNLYKNIFNKYKINLSQILITLEDTEKRRRAINAKRTFENLFDLNYVPIVNENDSIATSEIKYGDNDRLASRVAQILGADCLILLSDVDGLYSSNPKINKNAKLINKINNIDTNIEKIATKSIGEHGTGGMTTKIEAAKICQNSGCNMVIANGLMNRPILNIDKTNKGTWFLQKFQSCMQGKSGLLAQFHLKEI

SEQ ID NO: 128551 - protein, 219 aa, Unknown
  Bacterial polypetide isolated from the Sargasso Sea
IKYGDNDRLAARVAQIISADILINFSDVNGLYESSKNKKIIKEVKNINDETYSFVENKKNSYGSGGMSTKLDAAKICMNSGCHMAIANGKHINPLDILVKKNICTWFLPKVSSLDARKKWIVSSIGSNGKIYIDDGASKALRNGKSLLPAGIIKVEGNFLKGDNILIVDESGKDCARGITSFTSEEINKVKGIKSDQIENILGYSSKSEIIHRDDMVKL

SEQ ID NO: 128552 - protein, 235 aa, Unknown
  Bacterial polypetide isolated from the Sargasso Sea
SIALGCKKLNLNKKKLKLDKSQAVASIGQIELMNLYQNVFKKFKIEISQILLTLDDTEQRRRSINARRTIDNLLTMGIVPIVNENDTTATTEIKYGDNDRLAARVSQIIGADCLILLSDVDGLYTDNPKKNKKTKLIKIVEKIDENIKKYASRAENIYGSGGMKTKIDAAKICQLSGCYMVIANGVNKNPIKKINESQKCTWFLPRISKLDARKQWIIGSVAPRGEVIIDYGATK

SEQ ID NO: 128553 - protein, 253 aa, Unknown
  Bacterial polypetide isolated from the Sargasso Sea
MYLKNSKIIVVKIGSSLLVDQNKKIRKQWLSSFAKDIIRLRNKNQKVVIVSSGAIALGCKKMNYNKKNIKLDKSQAIASIGQIELMNLFSQTFAKYKLNISQILLTLEDTEERRRSLNAKRTFDNLFELGFIPVVNENDTIATSEIKYGDNDRLASRVAQITNADTLILLSDVDGLYTKNPKIFKDAKLLKKIDDLKKDLKKIYIKGVNEYGSGGMHTKIEAAKICQLAGTSMVIANGLYSNPISKIIEKNNC

SEQ ID NO: 128554 - protein, 230 aa, Unknown
  Bacterial polypetide isolated from the Sargasso Sea
MNKKFLELAKKSKVIVIKVGSNILVNEKHVLRKKWLSSLIADVKELQKRGSKIIIVSSGAIALGRNILSKKKLTNLHEKQAAASIGQIQLSQQWQKAFAKLNIQSSQILITAEDLNERRKYLNIRNTIYSLMDLNVVPIINENDTTSTEEIRFGDNDKLSAMIANALSAELLILLSDVNGLYTANPKKSLQAKLITSVEEVDQQIEKYIDKDLSEFGSGGMLAKINAAKL

SEQ ID NO: 128555 - protein, 162 aa, Unknown
  Bacterial polypetide isolated from the Sargasso Sea
MIKKYKKVVVKIGSNSIVDSKTKKIKSKWLDNLCKDIAELNKTKKIVIVCSGAIALGAKSISNTKLRKLEDKQAAASVGQIELAHQWRNKLGKYKIGVSQILLTLEDSEERRRYLNARNTISSLQSKNIIPIINENDTVATEEIRYFDNDKLAARVAQMIEA

SEQ ID NO: 128556 - protein, 175 aa, Unknown
  Bacterial polypetide isolated from the Sargasso Sea
MYLKNSKKIVIKIGSSLLIDNKKNIRSKWLFEFSKDIKNLLKQNKKVIIVTSGAIAIGCKKLNLSKKNLKLEKSQAVASIGQIELMNLFNKSFNKNKINISQVLLTLDDTEQRRRALNAKRTFDNLFDLGFVPIVNENDTTATTEIKYGDNDRLASRVAQISSANILILLSDVDG

SEQ ID NO: 128557 - protein, 264 aa, Unknown
  Bacterial polypetide isolated from the Sargasso Sea
FNSHQLNIAQVLISKNVLEDRNQFINTTEALNGLISKDIIPVINENDVVATEELKFGDNDRLSAIVSILLKADKLVVITDKEGLFDSDPEKIEEAKKIENIEYNSEELNDLIPKSSSGKGMGGFSTKIMAAQMAGFSGIETQIISWSPNCINEVVKDSKIGTIIKPSKKNIKLRKLWIAFGMTIDGEIVIDDGAIEALKADASLLSKGVINVNKSFDENSGVEVKSSENELIARGVVNFSSKEIQDLKETENTVVIHKDNLLIL

SEQ ID NO: 128558 - protein, 180 aa, Unknown
  Bacterial polypetide isolated from the Sargasso Sea
ANAGDPALEAMAGGAGSSIGKGGMITKILAAKRAAGSGASTVIAWGREPDVLVRLVDGQALGTLLIAQTQKKQARKQWMADHLQLRGAVTVDAGAAAKLREEGKSLLPIGMTAVEGDFSRGDVIAVRDEAGAEIARGLANYAAAEARLLCRKPSSEFAKLLGYTAETEMVHRDNLVLSVA

SEQ ID NO: 128559 - protein, 208 aa, Unknown
  Bacterial polypetide isolated from the Sargasso Sea
IEADLLILLSDIDGLYQGNPKKDKNAKKISEIFKIDKKIEQLANYQSSELGSGGMATKILAAKICSVNGCTTIITNSDKNKPISNINKKNSTIFYPLTSTNSSKKKWLISHLKPSGSIIIDKGAKNAILKNKSLLPAGIIEINGRFKMGDVISILDENDQKVAIGISAYDISDAKKIIGKKSKEIYKVLGFEGRDEVVHKDNLVKLST

SEQ ID NO: 128560 - protein, 256 aa, Unknown
  Bacterial polypetide isolated from the Sargasso Sea
MLVKNSKKIVIKLGSSTVVDNKGKFKKKWVTSLIKDVKKYIGKYDLVIVSSGAIAMGQNYLKIKKKKIKLEMSQAIAAIGQIHLAGEFQKLFDNYRIKTGQILISPDDTEQRKRSLNVRRTFDNLFKLNAVPIVNENDTTATSEIKYGDNDRLAARVAQIIGADTLIILSDVDGLYDKSKKKKIIKTVTKIDANINSLIDNKKNFYGSGGISTKLDAAKICINAGCHMFIGNGKKNNPIKNMIKTKLYTHFIPKNF

SEQ ID NO: 128561 - protein, 128 aa, Unknown
  Bacterial polypetide isolated from the Sargasso Sea
MHLKNSKIIVIKIGSALLVDSNKKIRNKWFSIFAKDIKKLKSKNKKIIIVSSGAIALGCKKMKFNKSRLKLDKSQAIASIGQIELMNLFTKTFSKYKLNISQILLTLDDTEERRRSINAKRTFENLFQ

SEQ ID NO: 128562 - protein, 225 aa, Unknown
  Bacterial polypetide isolated from the Sargasso Sea
IKVGDNDNLSALVAILANADKLLLLTDQDGLFTSDPRTNADAKLIDEVTHINDELRQLAGGSGTSLGTGGMATKLQAADIARRAGVEVIIAKGAGSNVILKCMSEQLPGTRFLKLTAPKDGRKKWLLAGPKSNGQIVIDTGAISALQNNGASLLAKGVTCAFGDFERGDLIDLIDTNNQVIARGLTRFSRSEVNKIKGAHSKNIAQLLSYDAGAEVLHRDDLVLL

SEQ ID NO: 128563 - protein, 261 aa, Unknown
  Bacterial polypetide isolated from the Sargasso Sea
MGQNYLKVRKKRIKIEMSQALASIGQIYLTNIYRKMFEKNNIKIGQILISPDDTEQRRRAINIKRTFENLFKLGAIPIVNENDTTATSEIKYGDNDRLAARVAQIIGADVLINLSDVDGLYELKNNKKILKEVNNIDEKIYSLVDNKKNSYGSGGMSTKLEAAKICMNSGCFMAIANGKHAQPLSKLIKTNICTWFIPKVSRLDARKKWIVSSIESNGKIYIDNGACKALENGKSLLPAGITKVDGEFIKGDNVLVVDTNG

SEQ ID NO: 128564 - protein, 283 aa, Unknown
  Bacterial polypetide isolated from the Sargasso Sea
GKLKEKWLKSFVKDIKKFKKNGKNFVIVSSGAIALGQNYLKVKKKKLKIEMSQALASIGQIHLTNIYREMFEKNKIKIGQILISPDDTEQRRRAINIKRTFENLFKLGAIPIVNENDTTATSEIKYGDNDRLAARVAQIISADILVNFSDVDGLYESSKNKKIIKEVRKINEKIYSFVENKKNSYGSGGMSTKLEAAKICMNSGCYMAIANGKHLNPLEKLIKENHCTWFIPKVSSLDARKKWIVSSIGSNGKIYIDLGASKALENGKSLLPAGITKVEGDFL

SEQ ID NO: 128565 - protein, 245 aa, Unknown
  Bacterial polypetide isolated from the Sargasso Sea
MKRIVIKIGSQIILDDEEKEGSDLNNILSEIVLLRSKGYLFTIVSSGAVALAKKNISLTNGQEGTTSRKQALSSIGQVYLMNKYKSFFNSHNIECAQVLAGRDNFNSRLAYLNIRSALEELYSYNVIPIINENDVVSTMEIEGKFYGDNDRLAAIVSNAIDADQLILFGKTKGLYTSDPNKNTNSKIIKKVEKIDGEIISYASSPVDNIGSGGMKSKIEAAKICMESGINCSISSVDFDNTIFRI

SEQ ID NO: 128566 - protein, 213 aa, Unknown
  Bacterial polypetide isolated from the Sargasso Sea
INAKRTFENLFKLKAVPIVNENDTTATSEIKYGDNDRLAARVAQIISADVLINLSDVDGLYNPAERKKIIKEVNNIDEKIYSLVENKKNNYGSGGMMTKLQAAKICINSGCYMAIANGNILRPIHELLKNNKCTWFIPKVSTLHAREKWIVSSIGSDGKIFIDDGAVNALKNGKSLLPAGIIKIEGKFVKGDNVLIVDKNGRDCARGLNLLHQ

SEQ ID NO: 128567 - protein, 281 aa, Unknown
  Bacterial polypetide isolated from the Sargasso Sea
VFKKIFSKNNINISQILLTLEDTEQRRRAINAKRTFDNLFKLGYVPIVNENDSIATSEIKYGDNDRLASRVAQISSADCLILLSDVDGLYSKDPKIFKTAKLINEIKSINNDVEKYATRNSGKYGTGGMKTKLEAAKICQNSGCVMAIANGFKKRPLKNIDKKYNCTWFLPKISKLHARKKWIVSSISPKGNLIIDDGAVSALKKGKSLLAAGIKKVSGEFYKGDHVKILDKNLKEFARGLSSFSAEEIRKIQGEHSNKIKDILGYISKSEVVHKDDMVEV

SEQ ID NO: 128568 - protein, 201 aa, Unknown
  Bacterial polypetide isolated from the Sargasso Sea
MNSYKKVVIKIGSALINDKQTDSDEVINSLCSQISTGTDSGIKFAVVSSGAISQGLSYLEMSERPDKLDQLQALAAIGQQQLMQMYEKCFARDNKKIAQVLLTHDDMNNTTRYLNAKATFDNLLSLNVIPIINENDVVATEEIRFGDNDTLAAMVTNMIEADLMIILTNQDGYFDKNPDQHPNAKIIKKCNISEVDEDSFS

SEQ ID NO: 128569 - protein, 288 aa, Unknown
  Bacterial polypetide isolated from the Sargasso Sea
KNRKVIIVSSGAIALGCKRMNYKKNNLKIDKSQAIASIGQIELMNLFSQTFSKFRLNISQILLTLDDTEERRRSINAKRTFENLFQLDYIPIVNENDTIATSEIKYGDNDRLAARVAQITNADTLILLSDVDGLFTKNPKVFKDAKLIKKINNLEKEIKNINLKGTTEFGKGGMNTKIEAAKICNLSGCNMIIANGLHLNPINQIEKKGNCTLFVSKIPKLHARKKWIISSISPKGELIIDEGAKKALLNGKSLLAAGIKKVSGKFSKGDHIKILDTKRKEFARGLSS

SEQ ID NO: 128570 - protein, 175 aa, Unknown
  Bacterial polypetide isolated from the Sargasso Sea
MGKKRILLKIGSNTLTKETNHISRGKIEDLGVQIAALNDEYEFIIVSSGAIAAAKQFVKLDNQDKDVFVKQALASIGQPHLMRIYNENFKDLGLNTSQCLLSYSDFEKEQTKKNIVNTINVLVKNNYIPIINENDTVATDEIRFGDMTISGFNGGSFNVDILILCTNTNGIYTKI

SEQ ID NO: 128571 - protein, 138 aa, Unknown
  Bacterial polypetide isolated from the Sargasso Sea
MIKKRKIPILTTTRRLVVKIGSALLVDERTGEIRHEWLNKLADDIAYLKNAGKEVLIVSSGAIAVGSQHLGINQQILKLEEKQAAAATGQIRLAHAYETALAQHSITVAQILLSPGDTEERRRHLNARATLTTLLKFG

SEQ ID NO: 128572 - protein, 200 aa, Unknown
  Bacterial polypetide isolated from the Sargasso Sea
MKRIVIKIGSQIILDDEESNSNYLSNILNEIVSLKSKGFSFTIVSSGAVALAKKHITIKKSQEGTTSSKQALSSIGQIYLMNKYKSFFNLHNIECAQVLAGRDNFNSRLAYLNIRSALEELYSYNIIPIINENDVVSTMEIEGKFYGDNDRLAAIVANAIDADQLILFGKTKGLYTSDPSRNTNSKISKKVEKIDDEITS

SEQ ID NO: 128573 - protein, 293 aa, Unknown
  Bacterial polypetide isolated from the Sargasso Sea
IDNKGKLKEEWLKSFVKDIKKVKRKGKKFVIVSSGAIALGQSYLKIKKKKLKIEMSQALASIGQIHLTNIYRKIFEKNKIKIGQILISPDDTEQRRRAINIKRTFENLFKLDAIPIVNENDTTATSEIKYGDNDRLAARVAQIISANVLINFSDVNGLYDSSTKTKIVKEVKNIDKNIYSYVNNKKNSYGSGGMLTKLEAAKICMNSGCLMAIANGKYKNPLLKLIKTNICTWFLPKVSSLDARKKWIVSSIGSNGKIYIDNGASKALENGKSLLPAGITKVDGKFSKGDIIF

SEQ ID NO: 128574 - protein, 255 aa, Unknown
  Bacterial polypetide isolated from the Sargasso Sea
MYLKNSKVIVIKIGSSLLFDKNNWIRKKWLSSFAKDIKRLRSKNKKIIVVSSGAIALGCKKMNYNKKKLKIDKSQAVASIGQIELMNLFSKIFSKFRLNISQILLTLDDTEERRRSINAKRTFENLFDLNYIPIVNENDTIATSEIKYGDNDRLASRVAQITNADTLILLSDVDGLFTKNPKKFRDAKLIKKVDNIVKDIQNINVRGMTELGSGGMNTKIEAAKICNLAGCNMVIANGLHLNPLSQIEKKDNCTW

SEQ ID NO: 128575 - protein, 227 aa, Unknown
  Bacterial polypetide isolated from the Sargasso Sea
MYLKNSKIIVVKIGSSLLVDQNKKIRKQWLSSFAKDIKKLRDKNQKVVVVSSGAIALGCKKMNYNKKNIKLDKSQAIASIGQIELMNLFSQTFAKYKLNISQILLTLEDTEERRRSLNAKRTFDNLFELGFIPVVNENDTIATSEIKYGDNDRLASRVAQITNADTLILLSDVDGLYTKNPKIFKDAKLIKKIDDLKKDLNNIYIKGVNEYGSGGMHTKMKQQKYVS

SEQ ID NO: 128576 - protein, 230 aa, Unknown
  Bacterial polypetide isolated from the Sargasso Sea
MYLKNSKIIVVKIGSSLLVDQNKKIRKQWLSSFAKDIKKLRDKNQKVVIVSSGAIALGCKKMNYNKKNIKLDKSQAIASIGQIELMNLFSQTFAKYKLNISQILLTLEDTEERRRSLNAKRTFDNLFELGFIPVVNENDTIATSEIKYGDNDRLASRVAQITNADTLILLSDVDGLYTKNPKIFKDAKLIKKIDDLKKDLKKIYIKGVNEYGSGGMHTKIEAAKICQLAG

SEQ ID NO: 128577 - protein, 270 aa, Unknown
  Bacterial polypetide isolated from the Sargasso Sea
GKNIVIVSSGAIALGRSYLKIKQKKLKLEMSQALASIGQIHLTNVYRKMFEKNKIKIGQILISLDDTEQRRRAINARRTFENLFKLRAIPIVNENDTTATSEIKYGDNDRLAARVAQIIGANVLINLSDVDGLYKDSKEKKIVEEVSNIDEEIYSFVNKKKNTYGSGGMKTKLEAAKICMNSGCYMAIANGNHLNPISKLVKNNICTWFLPKVSRLHAREKWIVSSIGNNGKIYIDDGAVKALENGKSLLPAGIIKIEGKFLKGENIFNC

SEQ ID NO: 128578 - protein, 308 aa, Unknown
  Bacterial polypetide isolated from the Sargasso Sea
MPNIGSKEGVRQRWVIKLGSALLSHATEGLNQPLIASLADACVQLREQGIDPILVSSGAISQGMVRLEWKTRPHELHQLQVAAAVGQMGLIRAYQSAFEDYGVETAQVLLTSADLNNRNRYLNARSALRSMLEMGIVPVVNENDTVVTEEIQFGDNDSLGALVGNLIEADYLVILTDQEGLYEADPRHDPKAQLVREASAGDPLLEQYAGPSGALGRGGMLTKLQAAAKAARSGASTIICSGRNPQVLLGIPRGDVPGTFLKAASGRMAARKLWLAGRMQSLGRVYIDAGACNVLVGSGQESFACWRD

SEQ ID NO: 128579 - protein, 258 aa, Unknown
  Bacterial polypetide isolated from the Sargasso Sea
IVIKIGSNLITENENILNDSVIENLCNQISEVQDNGNEIIIVSSGAVAAGRQYLSTFNKEIKINDSYLVHKQVLASIGQPMLMKAYENFFSKNNKGISQALISREDFENRSGYLNVRNTLNELLAIQIIPIINENDVVSTDELENKAYGDNDRLSAMVANAVDADILILLGTIDGLYTSDPNLDNSAEKINFVEKISDDHINYASGPSDNTGSGGMVSKIQAANISVNSGTDMFIASGLEKNVIKRIVSGESIGTKFL

SEQ ID NO: 128580 - protein, 238 aa, Unknown
  Bacterial polypetide isolated from the Sargasso Sea
YLKIKKNGLKVDKSQAVASIGQIELMDFYKKTFDKNKIKISQILLTLDDTEQRRRSINAKRTIDNLLSMGIIPVVNENDTTATTEIKYGDNDRLAARVSQIIGADCLILLSDVDGLYTDNPKKNKETKLIKTVKEINESIKKYATKQQNLYGSGGMKTKIEAAKICQLSGCYMVIANGINKNPIKRIIEGQRCTWFLPRVSKLDARKQWIIGSVSPKGEVIIDLGAKKAINNGKSLLP

SEQ ID NO: 128581 - protein, 246 aa, Unknown
  Bacterial polypetide isolated from the Sargasso Sea
MYLKNSKIIVVKIGSSLLVDQNKKIRKQWLSSFAKDIKKLKDKNQKVVIVSSGAIALGCKKMNYNKKNIKLDKSQAIASIGQIELMNLFSQTFAKYKLNISQILLTLEDTEERRRSLNAKRTFDNLFELGFIPVVNENDTIATSEIKYGDNDRLASRVAQITNADTLILLSDVDGLYTKNPKIFKNAKLIKKIDDLNKDLKKIYIKGVNEYGSGGMHTKIEAAKICQLAGTSMVIANGLYSNPISK

SEQ ID NO: 128582 - protein, 185 aa, Unknown
  Bacterial polypetide isolated from the Sargasso Sea
SNAKHISLVENEITERIFAMAGSEISSDGSGGMVTKLEAGRIAMSAGTHMIISDGIRNSPISRIEAGALCTWFVPHANPKTARKSWISSSLNPAGVVIVDKGALIALGKGKSLLPAGVISVNGRFERGDLIIVKSPDGLEVARGLVAYSSEDAQKIIGHKTNEIGVILGYRGRDELIHRDDLVLS

SEQ ID NO: 128583 - protein, 249 aa, Unknown
  Bacterial polypetide isolated from the Sargasso Sea
MYIENCKTIVIKIGSSLLINNQREIRKKWLSEFAKDIKELIDKKKNVIIVSSGAIALGCKKLNLNKKTLKLDKSQAVASIGQIELMNLLKKNFNSKNVNLSQILLTLEDTEKRRRAINAKRTFENLFKLNFVPIVNENDSIATSEIKYGDNDRLAFRVAQISGADCLVLLSDVEGLFTKNPKIFKDAKLIHEIKNIDNNIEKFAEKSIGEHGTGGMKTKIDAAKVCQLSGCLMAISNGLSLRPIKKLYE

SEQ ID NO: 128584 - protein, 179 aa, Unknown
  Bacterial polypetide isolated from the Sargasso Sea
MHLKNSKIIVIKIGSSLLVNNEREIRKKWLSSFAKDIKKLKTKRKKIIIVSSGAIALGCKKMNYKKTNLKLDQSQAIASVGQIELMNLFTQTFSKFKLNISQILLTLEDTEERRRSINAKRTFENLFELDYIPIVNENDTIATSEIKYGDNDRLASRVAQITNADTLILLSDVDGLFTK

SEQ ID NO: 128585 - protein, 268 aa, Unknown
  Bacterial polypetide isolated from the Sargasso Sea
GFISECRQQGVEVVLVSSGSVAAGRAAIPFAHHPLPINVKQAMAAVGQTRMMQSWRNLLDFDCAQILLTHDDLQHRNRYLNIHNTLRTLLDHGVLPIVNENDTVATAELKVGDNDNLAALVATVVDADALIICSDVDGLYTANPRADSNALLIPEVHQITPEIYAMAGGSHHAIGTGGMTTKLQAASKATSQGIDTLIINGQKADSFAALLAGKACGTLFHKQQERLSAKKHWLLHSLKTRGELQLDSGAVQALLHKGASLLPKGISS

SEQ ID NO: 128586 - protein, 269 aa, Unknown
  Bacterial polypetide isolated from the Sargasso Sea
ITNEDGEISRESVAKICSEVAELKSFGNDVVIVTSGAIAAGLPFLGLTGGNRPHDPSTLQAISAIGQGSLIGIYREELASHQLLAGQVLLAPLDFFVRSQYLHARNTLIKLIDLGVIPVVNENDAIADDEIRFGDNDRIAALVAHLVEADLLVLLTDTSGLFTADPRMDSEASLIEEIIEIDQEMERYAGGTTSDRGSGGMASKLAAAKIASWSGVRTVIADASRSEILKDACNEVHGIGTVVHPRDIRLNARKLWIAFAVGSAGQIMV

SEQ ID NO: 128587 - protein, 257 aa, Unknown
  Bacterial polypetide isolated from the Sargasso Sea
NFTKKFFDKSKIKISQILLTLDDTEQRRRSINARRTIDNLLKMGIIPIVNENDTTATTEIKYGDNDRLASRVSQIIGADCLLLLSDVDGLYTDNPKKNKNTKLIKIVKNIDENIKRYATKKENLYGSGGMKTKIDAAKICQLAGCYMAIANGNYTNPIKKIINNKNCTWFLPKISKLDARKQWIIGSIDPKGDIVIDDGALKAISNGKSLLPAGVIKINGNFDKGDHIVVKNKNNIECGRGLASFSSLEIKKIKGFH

SEQ ID NO: 128588 - protein, 220 aa, Unknown
  Bacterial polypetide isolated from the Sargasso Sea
DNDRLAARVAQMIEADLLILLSDVDGLYQGNPKKDKDVKKISEVFKIDKKIEELGNYQSSELGSGGMATKILAAKICAGNGCATIITNSDKNRPISNINKNNSTIFYPLTSTNSSKKKWLLNHLKPSGSIIIDTGAKNAILKNKSLLPAGVIDIKGRFKRGDVISILVENGQKVAIGISAYDFNDAKKIIGKKSKEIYKVLGFEGRDEVVHKDNLVKLST

SEQ ID NO: 128589 - protein, 267 aa, Unknown
  Bacterial polypetide isolated from the Sargasso Sea
MHLKNSKIIVIKIGSSLLVDNNKKIRKKWLTSFAKDIKKLNSKNRKVIIVSSGAIALGCKKMNYKNKNLKLDKSQAIASIGQIELMNLFSETFSKFKLNISQILLTLDDTEERRRSINAKRTFENLFSLNYIPIVNENDTIATSEIKYGDNDRLASRVAQITNADTLILLSDVDGLFTKNPKIFKDAKLIQKVNNLDKDIKDINIKGMTKYGKGGMTTKIEAAKICNLAGCNMIIANGLYLNPLNRIEKTDNCTWFISKISKLHAQK

SEQ ID NO: 128590 - protein, 227 aa, Unknown
  Bacterial polypetide isolated from the Sargasso Sea
TKEIRFGDNDRLGARVAQMISADTLILLSDVDGLYERDPKKDPSAKHIENVERISPEIIAMADVAGTDYASGGMITKLEAAKIATSAGCRMAIVAGKIMNPLAALENGARCTWFQASSTPRGARKSWIASAINPNGAIFLDEGAMKALYSGRSILPAGILKVTGSFKRGDLVTVHSPNGDELAKGLVAYSASDAIMIKGHKSREIESILGYRGRDELIHRDDLVLNE

SEQ ID NO: 128591 - protein, 234 aa, Unknown
  Bacterial polypetide isolated from the Sargasso Sea
VDKTGKPKKIWLEDFAKDIKFLIGKKKQVVIVSSGAIAMGCEYLKINKKNLKVDESQAVASIGQIKLMDFYKKIFDKNKIKISQILLTLDDTEQRRRSINARRTVDNLLKMGIVPIVNENDTTATTEIKYGDNDRLAARVSQIISADCLILLSDVDGLYTDNPKKNKKTKFIKIVNEIDENIKRYATKTENFYGSGGMKTKIDAAKICQLSGCHMIIANGNVKKPISKIINNKK

SEQ ID NO: 128592 - protein, 129 aa, Unknown
  Bacterial polypetide isolated from the Sargasso Sea
HNSLAAIDKGIRCTWFLSTENHATARKRWIASALAPNGKVIIDDGAEKALGKGKSLLPAGVLSVSGTFNRGDAVIIENASNVRLGCGLIAYSADDANLIAGHKTGEIEALLGYRGRDEMIHRDDLVIDG

SEQ ID NO: 128593 - protein, 104 aa, Unknown
  Bacterial polypetide isolated from the Sargasso Sea
AVKKARAAAGQTEMIATWDRLFDFPSAQKLLTHADLRDRERYVSIRETIFSLLDNNILPIVNENDTVTTDKLKVGDNDNLSAMVASAAEADALIICSDIDGLYD

SEQ ID NO: 128594 - protein, 213 aa, Unknown
  Bacterial polypetide isolated from the Sargasso Sea
MYLKNSKIIVIKIGSSILVDNNRKIRSKWLSSFAKDIKKLKSNNKKVVIVSSGAIALGCKKMNYNKANLKLDKSQAIASIGQIELMNLFSQTFSKYKLNISQILLTLEDTEERRRSINAKRTFENLFQLDYVPIVNENDTIATSEIKYGDNDRLASRVAQITNADTLILLSDVDGLFTKNPKKFKDAKLIRNISNFNKDIKNINMRGITEFGS

SEQ ID NO: 128595 - protein, 219 aa, Unknown
  Bacterial polypetide isolated from the Sargasso Sea
MYLKNSEIIVIKIGSSLLIDDKMNIRNKWLTEFSKDVKELIKQNKKVILVSSGAIALGCKKLNLTMRNLKLDKSQAIASVGQIELMNLFKKIFNKMKINFSQILLTLEDTEQRRRAINAKRTIDNLLQMSFVPIVNENDSIATSEIKYGDNDRLASRVAQISNADSLILLSDVDGLHDKNPKLFKDAKLIKEIQDIDYKIENFATKTVNIYGKGGMKTK

SEQ ID NO: 128596 - protein, 253 aa, Unknown
  Bacterial polypetide isolated from the Sargasso Sea
GQIELMNLFKKTFSKRKINLSQILITLEDTEQRRRAINAKRTFENLFDLGYVPIVNENDSIATSEIKYGDNDRLASRVAQISGADCLILLSDVDGLYSKNPKLYKEAKLISEIKNLDNDIQKIATKSISEYGTGGMRTKIEAARICQNSGCVMVIANGLKNRPIQNILKKNKCTWFLPKVSKLHARKKWIISSVSPKGDIIIDDGAIAALRKGKSLLAAGIKKVNGKFYKGDHIKILSKDKIEFARGLSSFSS

SEQ ID NO: 128597 - protein, 215 aa, Unknown
  Bacterial polypetide isolated from the Sargasso Sea
MAARVSQIIGADCLILLSDVDGLYTDNPKKNKKTKLIKIVKKIDENIKKYASRGENIYGSGGMKTKIDAAKICQLSGCYMVIANGVNKNPIKKINKSEKCTWFLPKISKLDARKQWIIGSVAPKGEVIIDYGATKAIRNGKSLLPAGVKKINGNFEKGDHILVKDQDNVECARGLTSFSSIEIEKIKGSHSSKIKNILGYSSREEIIHKDDLVKV

SEQ ID NO: 128598 - protein, 268 aa, Unknown
  Bacterial polypetide isolated from the Sargasso Sea
MKRIVIKIGSQIILNDAQDNNYNHLNELLSEIVNLRSKGFEFTIVTSGAVALAKHHLLIKGLENSNQTSSKQAMASIGQTFLMEKYSKFFESHNIYCAQVLAGRDNFNSRIAYLNIKNTLEKLYELNVIPIINENDVVSTKEIEGRFYGDNDRLSSVVANAIDADLLILFGRMDGLYTENPDINGKGVLIKKVDVIDETIMSYAKDSEDKVGSGGMKSKLEAAKICMGSGIKCVITSPQNNVINKIIEGNSIGTQFVPNSSNLESKKR

SEQ ID NO: 128599 - protein, 261 aa, Unknown
  Bacterial polypetide isolated from the Sargasso Sea
DDTEQRRRSINARRTIDNLLAMGIIPIVNENDTTATTEIKYGDNDRLAARVSQIISADCLILLSDVDGLYTDNPKKNKETKFINIVNKIDENIKKYATKAENLYGSGGMKTKIDAAKICQLSGCYMVIANGNNKNPIKKILENKKCTWFLPKISKLDARKQWIIGSIAPKGEVIIDEGALKAINNGKSLLPAGIKKVNGFFKKGDHILVKDQNNNECARGLASFSSEEIEKIKGSHSSKIKNILGYSSREEIIHKDDLVKV

SEQ ID NO: 128600 - protein, 268 aa, Unknown
  Bacterial polypetide isolated from the Sargasso Sea
MYLKNSKIIVVKIGSSLLVDQNKKIRKQWLSSFAKDIKKLRDKNQKVVIVSSGAIALGCKKMNYNKKNIKLDKSQAIASIGQIELMNLFSQTFTKYKLNISQILLTLEDTEERRRSLNAKRTFDNLFELGFIPVVNENDTIATSEIKYGDNDRLASRVAQITNADILILLSDVDGLYTKNPKVFKDAKLIKKIDDLNKDIKKIYIKGVNEYGSGGMHTKIEAAKICQLAGTSMVIANGLYSNPISKIIEKNNCTWFSPKISKLDARKK

SEQ ID NO: 128601 - protein, 204 aa, Unknown
  Bacterial polypetide isolated from the Sargasso Sea
MHLKNSKIIVIKIGSSLIVDSKKKIRKKWLSTFAKDVQKLKSKNKKIIIVSSGAIALGCKKMNYNKSNLKLDKSQAIASVGQIELMNLFSQTFSKLKINISQILLTLDDTEERRRSINAKRTFDNLFKLDYIPIVNENDTIATSEIKYGDNDRLASRVAQITNADTLILLSDVDGLFTKNPKLFKDAKLVKKVNNLDKDIKKIT

SEQ ID NO: 128602 - protein, 277 aa, Unknown
  Bacterial polypetide isolated from the Sargasso Sea
MLLKNSKIIVIKIGSSLLVDKNREIRNRWLSSFAQDIKKLKSNNKKVIIVSSGAIALGCKKMNYNKTNLKLDKSQAIASIGQIELMNLFSQTFSKYKINISQILLTLEDTEERRRSINAKRTFENLFQLDYIPIVNENDTIATTEIKYGDNDRLASRVAQITNADLLILLSDVDGLFTKNPKIFKDAKLIKKISNFDKDIKNIYIKGKTEFGSGGMDTKIEAAKICNLAGSNMVIANGLHLNPIDRIDKKNNCTWFVSKVTKLDARKKWIISSILLR

SEQ ID NO: 128603 - protein, 264 aa, Unknown
  Bacterial polypetide isolated from the Sargasso Sea
QNGFNFIIVTSGAVQLGANELNLEQRPTALKSLQVASSVGQITLVNSFKEIFKTEDLRIAQVLMSKNVLEDRNQFINTSDALNELIAQDIIPVINENDIVATEELKFGDNDRLSAIVAIVVKAEKLVLITNQEGLFDSDPEKSNNAEKINYIEYDSEELAELIPLSATGEGVGGFSTKIMASQMAGFSGIPTQIITWSDDCIKKVVNSEDIGTLVRPSSKKVKLKKLWIAYGMPVIGKIIIDDGAKNALTKDASLLSIGIKEIK

SEQ ID NO: 128604 - protein, 343 aa, Unknown
  Bacterial polypetide isolated from the Sargasso Sea
MLLKNSKIIVIKIGSSLLVDEKKKIRKKWLSSFAKDIQKLKSKNKKIIIVSSGAIALGCKKMNYNKTNLKLDKSQAIASVGQIELMNLFSQTFSKLKINISQILLTLDDTEERRRSINAKRTFENLFQLDYIPIVNENDTIATSEIKYGDNDRLASRVAQITNADTLILLSDVDGLFTKNPKIFKDAKLIKKVNNLDRDIKDIYIKGVTEFGRGGMNTKIEAAKICNLAGCNMIIANGLYLNPIHHIEKKNNCTLFVSKISKLHARKKWIISSVSPKGELIIDDGAKKALVSGKSLLAAGIINISGKFNKGDHIKILDAKHKEFARGLSSFSSEEIYKIMGLS

SEQ ID NO: 128605 - protein, 368 aa, Unknown
  Bacterial polypetide isolated from the Sargasso Sea
MYLNNSKIIVIKIGSSLLINNEKKIRNKWLFEFSRDIKNLLNKNKKIIIVSSGAIAMGCKKLNLSKKNLKLEKSQAVASVGQIELMNLFNKNFLKSKINISQILLTLEDTEQRRRALNAKRTFENLFELGFVPIVNENDSTATTEIKYGDNDRLASRVAQISGADVLVLLSDVDGLYTSNPKLNKNVELIKEIKNIDKNIENIATKSIGEHGTGGMKTKIDAAKVCQLSGCKMVIANGLPLRPIREIINENNCTWFLPKISKLAARKKWIISSISPKGELVIDEGAKQALKKGKSLLAAGIKKVIGKFNKGDHIKIIDKNSKEYARGLSSFSSFEITKIMGHHSNEIEKLLGYISKSEVVHKDDMVEL

SEQ ID NO: 128606 - protein, 368 aa, Unknown
  Bacterial polypetide isolated from the Sargasso Sea
MYLKNSKIIVVKIGSSLLVDENKKIRKKWLSSFAKDIKKLRDRNQKVVIVSSGAIALGCKKMNYNKKNIKLDKSQAIASIGQMELMNLFSQTFARFKLNISQILLTLEDTEERRRSLNAKRTFENLFELGFIPIVNENDTIATTEIKYGDNDRLASRVTQITNADTLILLSDVDGLYTKNPKIFKDAKLIKIVKDLKKDLSNVNIKGMNEFGSGGMQTKIEAAKICQLAGSSMVIANGLNSNPITKIIEQNNCTWFSPKVSKLDARKKWIISSVAPKGEIIIDDGAKKALRSGKSLLAAGIKNISGKFNKGDHIKILDKKNIECARGLSSFTSDEIIKIMGHHSNQIEKLLGYVSKSEVIHKDDMVEV

SEQ ID NO: 128607 - protein, 271 aa, Unknown
  Bacterial polypetide isolated from the Sargasso Sea
VNSFKEIFKTKDLRIAQVLMSKNVLEDRNQFINTSDALNELIAQEIIPVINENDIVATEELKFGDNDRLSAIVAIVVKAEKLVLITNQEGLFDSDPEKSNNAEKINYIEYDSEELAELIPLSATGEGVGGFSTKIMASQMAGFSGIPTQIITWSDDCIKKVVNSEDIGTLVRPSSKKVKLKKLWIAYGMPIIGKIIIDDGAKNALTKDASLLSIGIKEIKVPFEINDGVEIFDGNDLLIAKGISKISSKEFSLGKEAEGKVVIHKDNLLIL

SEQ ID NO: 128608 - protein, 352 aa, Unknown
  Bacterial polypetide isolated from the Sargasso Sea
MSNKTIVIKIGTNTLFKEDVLRDDVIDSLAVSVNELRKEGINFAIVTSGAVQSGANELNLSERPKNLKELQVASAVGQVSLINKYKEIFNSHQLNIAQVLISKNVLEDRNQFINTTEALNGLISKNIIPVINENDVVATEELKFGDNDRLSAIVSILLKADKLVVITDKEGLFDSDPEKIEEAKKIENIEYNSEELNDLIPKSSSGKGMGGFSTKIMAAQMAGFSGIETQIISWSPNCINEVVKDSKIGTIIKPSKKNIKLRKLWIAFGMTIDGEIVIDDGAIEALKADASLLSKGVINVNKSFDENSGVEVKSSENELIARGVVNFSSKEIQDLKETENTVVIHKDNLLIL

SEQ ID NO: 128609 - protein, 368 aa, Unknown
  Bacterial polypetide isolated from the Sargasso Sea
MSLKNSKIIVVKIGSSLIVNNNKKIRKKWLLSFAKDIKTLKSKNRQVVIVSSGAIALGCKKMNYSKSGLKLDKSQAIASIGQIELMNLFSETFSKYKLNISQILLTLEDTEERRRSINAKRTFENLFQLDYIPIVNENDTIATSEIKFGDNDRLASRVAQITNADTLILLSDVDGLYTKNPKNFRDAKLIRNISNIKKDLKNVDIKGRTEFGSGGMDTKIEAARICNLAGCNMVIANGLYLNPINQIEKKKSSTWFISKVPKLDARKKWIISSVSPKGELIIDDGAKKALINGKSLLAAGIKKVNGDFKKGDHIKILDNKRKEFARGLSSFSSNEINKILGCHSNEIKKILGYVSKSEVVHKDDMVKI

SEQ ID NO: 128610 - protein, 168 aa, Unknown
  Bacterial polypetide isolated from the Sargasso Sea
MSSKTIVIKIGTNTLFEENVLRDDVIDSLAVSINELRKEGINFAIVTSGAVQSGANELNLSERPKNLKELQVASAVGQVSLINKYKEIFNSRQLNIAQVLISKNVLEDRNQFINTTEALNGLISKNIIPVINENDVVATEELKFGDNDRLSAIVSILLKADKLGSNYR

SEQ ID NO: 128611 - protein, 259 aa, Unknown
  Bacterial polypetide isolated from the Sargasso Sea
MNKKFTELAKKSKVIVIKVGSNILVNEKHVLRKKWLTSLIEDVQKLQKKGSKIIIVSSGAIALGRNILSKKKLTNLHEKQAAASIGQIQLSQQWQKAFAKFNIQSSQILITAEDLNERRKYLNIRNTIYSLMDLNVVPIINENDTTSTEEIRFGDNDKLSAMIANALSAELLILLSDVNGLYTANPKKSTDAKLITSVEEVDQEIEKYIDKDLSEFGSGGMLAKVNAAKLCIQSGSTMIISNGLVNNPLGNIHPTSSTW

SEQ ID NO: 128612 - protein, 302 aa, Unknown
  Bacterial polypetide isolated from the Sargasso Sea
NCTSGAVGLGAAKLNYKSRPKSLKRLQVASAVGQIELINQYEKIFKEKNLHIAQVLITKNLIDDREQFVNTTQALNELLSQGIIPVINENDVVATEELKFGDNDRLSAIVSIIVNAVKLIIITNKEGLYNFNPDQNKDAKKIDYIEYDSNQLNDLIPLSSAGDGMGGFSTKIMASQISGFSGIPTHIISWSKSNLSKAILNAKVGTYITASNEKIRLRKLWIAYGMASVSNVFIDEGAASALQKNASLLSKGVISFDNSFKIGEGLSIVSDKKIVAKGIAKINSNSIDESSLLVHKDDLIIL

SEQ ID NO: 128613 - protein, 169 aa, Unknown
  Bacterial polypetide isolated from the Sargasso Sea
MKLEDTKRIVIKIGSAILFDPISGSLNKDWLNSLAEDVKFLREREKEVIIVSSGAIAMGAKDLNLDMKNMKLDMNQAVSSVGQIHLMSSFKNAFEQNEIKISQILLTLDDTEQRRRSINARRTIDTLLKLGIVPIVNENDTIATTEIRYGDNDRLASRVAQISSSDCFI

SEQ ID NO: 128614 - protein, 362 aa, Unknown
  Bacterial polypetide isolated from the Sargasso Sea
MYIENAKTIVIKIGSSNIVDNRGKLKEKWLNSLVKDLKELANKKKNIVIVSSGAIALGLSYLKINKKKIKLEMSQAIASIGQIHLTNVYRKIFEKNKIKIGQILISLDDTEQRRRAINAKRTFENLFKLKAVPVVNENDTTATSEIKYGDNDRLAARVAQIISADVLINLSNVDGLYSNSSNKKNIISEVKNIDDKIYAFVENKKNNYGSGGMLTKLQAAKICINSGCYMAIANGSKNNPIKTLLKNNKCTWFIPKVSSLHAREKWIVSSIGSDGKIFIDDGAIKALKNGKSLLPAGIIKIQGNFVKGDNILVVDKNGNDCARGLTSFSSIEINKIKGLKTDQIEKVLGYASKSEIIHRDDM

SEQ ID NO: 128615 - protein, 229 aa, Unknown
  Bacterial polypetide isolated from the Sargasso Sea
VATEEIRYGDNDRLAARVAQMADADLLILLSDVDGLYDDNPFKNNNAKKIKVVTKIDKKIEQIANNQTSNLGSGGMATKILAAKICMNNGCTTIITNSSKKNPIIGTSSNNSTIFKSKITPSSSRKQWLLNHLHPTGTIKIDEGAYKAIINNKSLLPAGIIHVGGNFDRGDIITILTSKNIKIAIGISAYDVSDAKKIIGKNSKEIKNILGYEGRDEIVHKDDLVKVAL

SEQ ID NO: 128616 - protein, 265 aa, Unknown
  Bacterial polypetide isolated from the Sargasso Sea
MNKKFLELAKKSKVIVIKVGSNILVNEKHVLRRKWLNSLIEDVKELQKRGSKIIIVSSGAIALGRNILSKKKLTNLHEKQAAASIGQIQLSQQWQKAFAKLNIQSSQILITAEDLNERRKYLNIRNTIYSLMDLNVVPIINENDTTSTEEIRFGDNDKLSAMIANALSAELLILLSDVNGLYTANPKKSLQAKLITSVEEVDQQIEKYIDKDLSEFGSGGMLAKINAAKLCIQSGSTMIISNGLVNNPLSKIDPQSSTWFHPSKN

SEQ ID NO: 128617 - protein, 379 aa, Unknown
  Bacterial polypetide isolated from the Sargasso Sea
MATKNKLRIVIKIGSNLITENENILNYEVIKNLCNQIATIQKDHNQVIIVSSGAVAAGSQYLSKFEKEIKINNNSIVQKQLLASIGQPILMNAYEKYFSQSSIMISQALLSREDFENRLGYLNIRNTLSELLSLNVIPIINENDVVSTEELIDRAYGDNDRLSAMVSNAIDADLLILLGTIDGLYTSDPNIDKKATKIGIVENITDEIINYAQGSIDGIGSGGMASKIQAANISINSGTEMYIASGLENDVIKRIISGEIIGTKFLSKQSLNESRKRWLMTGYSSSKGDISLDDGAIRAIKNRSSILPPGIINTTGDFDRGDIIGIRNSNDKIIGWGISNYSSKEISKIKGINSSKIIEVVEKNYGSEVIHRNNLVLTL

SEQ ID NO: 128618 - protein, 158 aa, Unknown
  Bacterial polypetide isolated from the Sargasso Sea
MINKYKKIVIKIGSSSIINESNKKIKTSWLNSICKDIAFLHRTKKIIVVCSGAIALGSKIINNKKFLQRLEDKQAAAAIGQIELANHWQQTLKKNKINSAQILLTLNDSEVRRHYLNVKKTINALHKKNIIPIINENDTVATEEIRYGDNDRLASRVA

SEQ ID NO: 128619 - protein, 368 aa, Unknown
  Bacterial polypetide isolated from the Sargasso Sea
MYLKNSKIIVVKIGSSLIVDKNKKIRKKWLSSFAKDIKKLKDRNRKVVIVSSGAIALGCKKMNYNKKNIKLDQSQAIASIGQIELMNLFSKTFARFKLYISQILLTLEDTEERRRSLNAKRTFENLFDLGFIPIVNENDTIATTEIKYGDNDRLASRVTQITNADTLILLSDVDGLYTKNPKIFKDAKLLKIVKDLKKDLSNVNIKGMNEFGSGGMQTKIEAAKICQLAGSSMVIANGLHNNPITKIIERNECTWFSPKVSKLDARKKWIISSIAPKGEIIIDDGAKKALRSGKSLLAAGIKKISGKFNKGDHIKILDKQNVECARGLSSFTSDEIIKIMGHHSNQIEKLLGYVSKSEVIHKDDMVEV

SEQ ID NO: 128620 - protein, 209 aa, Unknown
  Bacterial polypetide isolated from the Sargasso Sea
MIDADLLILLSDVDGLYDKNPNKNKDAKKINEVFKINKTIEQMANAQTSSLGSGGMVTKIAAAKICMNNGCDTIITHSEKTYPLSSISQNNSSIFFANKNPSSSRKQWLLNHLHSSGFIRIDEGALKAVKNNKSLLPAGIIEVGGNFNRGDVISVYFTKKEKIAIGISAYDINEAKKIIGKKSKEIPNILGYEGRDEIIHKDDLVKIIL

SEQ ID NO: 128621 - protein, 313 aa, Unknown
  Bacterial polypetide isolated from the Sargasso Sea
MPLKNSKIVVIKIGSSLLVDRNKKIRKKWLSAFAKDVQKLNSSKKKVIIVSSGAIALGCIKMNYNKKSLKLDKSQAVASIGQIELMNLFSKIFLKHKLNISQILLTLEDTEERRRSLNAKRTIENLFDLNFIPIVNENDTIATTEIKYGDNDRLASRVAQITNADTLVLLSDVDGLYDKNPKLFKSAKLIKKVENLNQDLRNINFKGNNEFGSGGMNTKIEAAKICQLSGCNMIIANGLYSNPIDKILKNQNYTLFISKTSKLDARKKWIISSISPKGELIIDDGAKKALANGKSLLAAGIKNVIGKFKKGTI

SEQ ID NO: 128622 - protein, 368 aa, Unknown
  Bacterial polypetide isolated from the Sargasso Sea
MHLKNSKIIVIKIGSSLIVDSKKKIRKKWLSSFAKDIQKLKSKNKKIIIVSSGAIALGCKKMNYNKSNLKLDKSQAIASVGQIELMNLFSQTFSKLKINISQILLTLDDTEERRRSINAKRTFENLFKLDYIPIVNENDTIATSEIKYGDNDRLASRVAQITNADTLILLSDVDGLFTKNPKLFKDAKLIKKVNNLDKDMKKIYIKGVTEFGKGGMNTKIEAAKICNLAGCNMIIANGLYLNPIQQIEKKNICTLFESRISKLHARKKWIISSVSPKGTLVIDDGAKKALVGGKSLLAAGIINLSGKFNKGDHIKILDTKNKEFARGLSSFSSEEINKIMGCHSNEIEKKLGYITKSEVVHKDDMVEV

SEQ ID NO: 128623 - protein, 130 aa, Unknown
  Bacterial polypetide isolated from the Sargasso Sea
KGDVPNPITELESGANCTWFKPNVDPQTARKRWISSQKSVGKLIIDQGAVTALIDGKSLLPIGVTSIDGNFSRGDVVSIYSTNGRELAKGICAYPAVEAKLIIGQNSNEIETILGYAGRAAVIHRDDLAI

SEQ ID NO: 128624 - protein, 262 aa, Unknown
  Bacterial polypetide isolated from the Sargasso Sea
MKNNNSFNISKRLVVKIGSSLLTNQKGGVNKSVLKNVVSDIVWLIDKNKEVIVVSSGAIALGRGQLKLQQELTLNESQAVAARGQIELITAWKNEFRKHKLQVAQILLTPSDTENKKTSDNAVATIENLISFKCIPIINENDTTSTDEIKFGDNDILASKISKLIKADHLILLSNVDGLYKEPPRNKKNGVLISEIKSITKSIRDMAGTASRLGIGGMISKIKAAEICMKSKCSLIITSGLKKDPIKSLARKTSKSTRFIST

SEQ ID NO: 128625 - protein, 368 aa, Unknown
  Bacterial polypetide isolated from the Sargasso Sea
MYISRAKTIVIKIGSSLLINDKGVIRKKWLSEFGKDIKELIDQKKNVIVVSSGAIALGCKKLNLNKKNLKLDKSQAVASIGQIELMNLFKKNLSSKKINLSQILITLEDTEKRRRAINAKRTFENLFSLGFVPIVNENDSIATSEIKYGDNDRLASRVAQISGADCLILLSDVDGLYSKNPKLNKNVKLIREIKNIDNNIEKIATKSTGQYGTGGMKTKIDAAKICQFSGCYMCIANGLNLRPIKEIIKKNFCTWFLPRLSKLDARKKWIISSISPKGELIIDQGAISALKKGKSLLAAGVKKVNGKFSKGDHIKILDKNMKEYARGLSSFTSEEISKIQGQHSNKISELLGYISKSEVIHKDDMVIL

SEQ ID NO: 128626 - protein, 236 aa, Unknown
  Bacterial polypetide isolated from the Sargasso Sea
MKSKKNIVLKIGTTSIIKDGELNKDLINSLASSIKEHKQNGFNFIIVTSGAVQLGANELNLEQRPTALKSLQVASSVGQITLVNSFKEIFKTKDLRIAQVLMSKNVLEDRNQFINTSDALNELIAQDIIPVINENDIVATEELKFGDNDRLSAIVAIVVKAEKLVLITNQEGLFDSDPEKSNNAEKINYIEYDSEELAELIPLSATGEGVGGFSTKIMASQMAGFSGIPTTNYYLV

SEQ ID NO: 128627 - protein, 260 aa, Unknown
  Bacterial polypetide isolated from the Sargasso Sea
MYLKNFKTIVVKIGSSLLIDDKNIVRKKWLSEFTKDIKQLLKEKKNVIIVSSGAIALGCKKLGLNKKNLKLDKSQAVASIGQIELMNLFKKNFGSKKINLSQILLTLEDTEQRRRAINAKRTFDNLFELNFVPIVNENDSIATSEIKYGDNDRLASRVAQISNADCLILLSDVSGLYTKNPKIYKDGKLIKEVKNINSKIEQVASKSIGVYGTGGMKTKIDAAKICQLSGCYMVIANGLSNRPIKNIYEKNICTWFLPKI

SEQ ID NO: 128628 - protein, 368 aa, Unknown
  Bacterial polypetide isolated from the Sargasso Sea
MTDSPRKRIVVKVGSALIAPHKQGCSSHYLLGIAQFITYCRVQGIQVVLVSSGSVAAGWHHFEGQAQPSVTVKKAMAAAGQADMMATWNKLFDFPTAQLLLTHGDLRNRERYISIRDTIFSLLDHGLMPIINENDAVTADKLKVGDNDNLSAMVAAAADADTLIICSDVDGLYDQNPHEHPNAKLIKQVTEINAEIYAMAGGASSDVGTGGMRTKIQAAEKAISHGIETFIINGFNADSFSQLLKGQNPGTLFTPYEKPMQEHLHWMTHTSQAQGEVIVEDDFDLALDQHSEQLTSDDVVEVKGDFSVGDTILVRKGDGTKLAKAKSNYSSCLLSFITEQDDQAFASEFQQKTGPIISDKNIAILKSI

SEQ ID NO: 128629 - protein, 368 aa, Unknown
  Bacterial polypetide isolated from the Sargasso Sea
MTDSPRKRIVVKVGSALIAPHKQGCSSHYLLGIAQFITYCRVQGIQVVLVSSGSVAAGWHHFEGQAQPSVTVKKAMAAAGQADMMATWNKLFDFPTAQLLLTHGDLRNRERYISIRDTIFSLLEHGLMPIINENDAVTADKLKVGDNDNLSAMVAAAADADTLVICSDVDGLYDQNPHEYPNANLIKQVTEINADIYAMAGGACSDVGTGGMRTKIQAAEKAISHGIETFIINGFNADSFSQLLKGQNPGTLFTPYEKPMQEHLHWMTHTSQAQGEVIVEDDFDLALDQHSEQLTSDDVVEVKGDFSVGDTILVRKGDGTKLAKAKSNYSSCLLSFITEQDDQAFASEFQQKTGPIISDKNIAILKSI

SEQ ID NO: 128630 - protein, 276 aa, Unknown
  Bacterial polypetide isolated from the Sargasso Sea
YRKIFEKNKINIGQILISPDDTEQRRRAINIKRTFENLFKLDAIPIVNENDTTATSEIKYGDNDRLAARVAQIISANVLINFSDVDGLYESSKYKEVIKNVNDINEKIFSFVDNKKTAYGSGGMSTKLEAAKICMSAGCHMAIANGKHFNPLERLIKKNQCTWFIPKVSSLDARKKWIASSIGSNGKIFIDTGAHKALENGKSLLPAGIIKVEGKFSKGDNVLILDDGGKALARGLTSFSSIEIDKIKGLKTDQIESILGYFSKSEIIHRDDMVKL

SEQ ID NO: 128631 - protein, 224 aa, Unknown
  Bacterial polypetide isolated from the Sargasso Sea
MIKKYKKVVLKIGSNSIVDSKTKKIKSKWLDNLCKDIAELNKTKKIVIVCSGAIALGAKSISNTKLRKLEDKQAAASVGQIELAHQWRNKLGKYKIGVSQILLTLEDSEERRRYLNARNTISSLQSKNIIPIINENDTVATEEIRYGDNDRLAARVAQMIEADLLILLSDVDGLYQGNPKKDKDVKKISEVFKIDKKIEELGNYQSSELGSGGMATKILAAKIC

SEQ ID NO: 128632 - protein, 290 aa, Unknown
  Bacterial polypetide isolated from the Sargasso Sea
RPHGQTVAQVLLTRSDLASRRRFLQASRTLQQLLLWGVVPIVNENDTLATEELRFGDNDTLSALVAVAIKADELILLTDVDRLYSADPRSHADARPISVVRSLNELEALSKGAGDGGRWGTGGMTTKLAAARIATASGIAVRLADGRDPGLIEQLLQGASHGTRFLPSPEPISDRKGWLAHALVPQGQVQVDAGAERALLEQGASLLAVGVRSIEGDFDTQAPLRILGSGGQELARGLSSCSSSTLQRILGLRSGTISRTVDSELNGVVVHRDQLVITAPPGGPTIPPPL

SEQ ID NO: 128633 - protein, 204 aa, Unknown
  Bacterial polypetide isolated from the Sargasso Sea
MKTWVIKIGTSILRGTEETSTEEVIENLSRSFTSFLSKGNKLILVTSGAVGLGCQKLNIKTRPNDLSTLQATAAVGQVNLMSLYDKVFNKLGHNIAQILITKADFNSRESFNNASKTLKKLIDLNVIPIVNENDTVANEELKYGDNDTLSALVALAINANKLILLTDIENLYSKDPRNNKDAQPIKEVHNSELKEIKDKNIQNS

SEQ ID NO: 128634 - protein, 303 aa, Unknown
  Bacterial polypetide isolated from the Sargasso Sea
MSKKNKSIWIVKIGSAIITRKNPGLNRNLIKNLAEQVAKLNKKNIKFIFVSSGSIAEGMKKLKLSKRPKSITYLQVLASIGQMSLVQAYETEFKKHKIFTAQVLLTHDDLNFRERYLSIRSTVNDLIDRKIIPVINENDVTSSQEIKFGDNDTLAALVANLVAADKLIILTDQKGLYEDDPKLNKNAKLIKNIDLNDKKIQEYAKSSSSILGRGGMITKIEAAKKASKSGTETIIANGKTKDILFKIFEDKNYGTLIKNNSNKINNRKLWIINSAAAKGKIYIDDGAKEVLFSKGKSLLPIGI

SEQ ID NO: 128635 - protein, 316 aa, Unknown
  Bacterial polypetide isolated from the Sargasso Sea
IVVCSGAIALGSKIINNKKFLQRLEDKQAAAAIGQIELANHWQQTLKKNKINSAQILLTLNDSEVRRHYLNVRKTINALHKKNIIPIINENDTVATEEIRYGDNDRLASRVAQMIDADLLILLSDVDGLYTENPLKNKKAKKIQNIYNIDSSIEKMASKNYSLIGSGGMETKILAAKICMNAGCSTIITNSDKKSPLKNINKNNSTLFHASKSPKSNRKQWILNHLHPSGSIILDNGAIRAIKNNKSLLPAGVTEIKGRFNRGDVISIVNNQNKKFGIGVIAYSSSDAKKIIGKNSKEIKRILGYEGRDELIHKDD

SEQ ID NO: 128636 - protein, 193 aa, Unknown
  Bacterial polypetide isolated from the Sargasso Sea
MVVKVGTSLLRAGDEFLQALAANLSAERQRGTRLLLVTSGAVGLGCNELGLSQRPQLVEELQAAAAIGQGQLMARYDAVFRPHGQTVAQVLLTRSDLSSRRRFIKASRTLLQLLSWDVLPIINENDTLATEELRFGDNDTLSALVAVAIGADELLLLTDVDRLYSADPKANADARPIRGVRDLDELNALDAAA

SEQ ID NO: 128637 - protein, 250 aa, Unknown
  Bacterial polypetide isolated from the Sargasso Sea
RNTISSLQSKNIIPIINENDTVATEEIRYGDNDRLAARVAQMIEADLLILLSDIDGLYQGNPKKDKDVKKISEVFKIDKKIEELGNYQSSELGSGGMATKILAAKISAENGCATIITNSDKNKPISDINKKNSTIFYPLTSTNSSKKKWLLNHLKPSGSIIIDSGAKNAILKNKSLLPAGVIDIKGRFKRGDVISILVENGQKVAIGISAYDFNDAKKIIGKKSKEIYKVLGFEGRDEVVHKDNLVKLST

SEQ ID NO: 128638 - protein, 267 aa, Unknown
  Bacterial polypetide isolated from the Sargasso Sea
LLLTLDDSEIRRRYLNARKTITSLHKKNVIPVINENDTVATEEIRYGDNDRLAARVAQMIDADLLVLLSDVDGLYDSNPITNKKAKKIYEVFKIDKKIEDMGNTQSSDLGSGGMSTKIWAAKICMSNGCTTIITNNNRSKPITGISIKNSTIFHAKNTPTSSRKKWLLNHLHPSGSIFVDNGAEKAIMSNKSLLPAGVTDIKGKFNRGDIITVLSLKNNKIAIGVSAYDVNDAKKLIGKNTKDIKKILGYEGREEIIHKDDLVKLIK

SEQ ID NO: 128639 - protein, 178 aa, Unknown
  Bacterial polypetide isolated from the Sargasso Sea
MEYLNGAARVVVKIGSSLLVDDKTGSIRSDWLQSLSEDIRDMQSKGLEVVIVSSGSIALGRKVLSWSEKSLSLEQSQASAAVGQIQLAQAYQEALAQYGIRTAQILVTLEDSKDRRRYLNSQATVETLLEMGVVPIVNENDTVATDEIKYGDNDRLAAQVSVTIGADLLILLSDVDGF

SEQ ID NO: 128640 - protein, 271 aa, Unknown
  Bacterial polypetide isolated from the Sargasso Sea
NIAQVLITLEDSEVRRRYLNARKTINTLLNNKVIPVVNENDTVATEEIRYGDNDRLAARVAQMIDADLLILLSDVDGLYDKNPKKNKDAKKINEISVINKTIEKMANSQTSIIGSGGMTTKIAAAKICMNNGCDTLITDSEKNKPLSSITKDNSSIFLANRNPSSSRKQWVLNHLHPSGFIRIDDGANQAIKNNKSLLPAGVIEVGGNFNRGDVISVYFPKKEKIAVGISAYDINEVKKIIGKKSKEIPSILGYEGRDEIIHKDDLVKIIS

SEQ ID NO: 128641 - protein, 236 aa, Unknown
  Bacterial polypetide isolated from the Sargasso Sea
MALHSLIADARRLVVKVGSSLVTNDGRGLDQAAIARWAAQIAALRAAGKEVVLVSSGAIAEGMQRLGWAKRPKEIHELQAAAAVGQMGLAQVYESEFARHGIRTAQVLLTHGDLADRERYLNARSTLLTLLSLGVVPIINENDTVVTDEIKFGDNDTLGALVTNLIEGDALIILTDQRGLYTADPRKEPGARFVDEAQAGTPDLEQMAGGAGSSIGKGGMLTKFWRPSVLQNRART

SEQ ID NO: 128642 - protein, 231 aa, Unknown
  Bacterial polypetide isolated from the Sargasso Sea
DTVPTSEIKFGDNDRLAARVAQMSSSDLLILLSDIDGLYDQNPHHSKTAKHIPLVTEINEEIMNMAGSSHYEYASGGMVTKLEAAKISSLSGCNLIICNGESEHPILELSKGKKHTIFKANETPLTARKKWIAAGLNILGKLIVDNGASTALKNGSSLLPAGVIKVEGLFEKGDLVEILDQDRRNIGSGLSSYNSKEIEIISGKKTRDIKSYLGYEGRDELIHRDDLVLKK

SEQ ID NO: 128643 - protein, 184 aa, Unknown
  Bacterial polypetide isolated from the Sargasso Sea
MIISDQTGLVNKSQRLIIKIGSALLVDSDTGEIRYDWLEKMADDIANLRSRNKEVIIVSSGAVAFGSRHLGIHAKALKLQEKQAAAATGQIRLAHAYENALNKHGVTIAQILLSPDDTEQRRRHLNARATISTLLSLNVVPIINENDTVTTKELRFGDNDRLGARVAQMVSADTLILLSDVDGL

SEQ ID NO: 128644 - protein, 311 aa, Unknown
  Bacterial polypetide isolated from the Sargasso Sea
KISCFVRWCWQPGPVLLKRSFDIIFPNFEWQRIMSDSQTLVVKLGTSVLTGGSRRLNRAHIVELVRQCAQLHAAGHRIVIVTSGAIAAGREHLGYPELPATIASKQLLAAVGQSRLIQLWEQLFSIYGIHIGQMLLTRADMEDRERFLNARDTLRALLDNNIVPVINENDAVATAEIKVGDNDNLSALAAILAGADKLLLLTDQQGLFTADPRTNPQAELIKDVHGIDDALRAIAGDSVSGLGTGGMGTKLQAADVACRAGIDTIIAAGSKPGVIGDVMEGVSVGTRFHAQASPLENRKRWIFGAPPAGEI

SEQ ID NO: 128645 - protein, 273 aa, Unknown
  Bacterial polypetide isolated from the Sargasso Sea
MRDRGSIRNNERIVVKIGSSLLTEVGSGQLRWDWLRDLVVDVVELRKNGCDVLLVSSGAIALGQGHLGIKRSILKLEEKQASAAVGQILLANAYTEVFRAHHLTVAQLLLTLGDTEERRQYLNARNTMETLLHLSAIPLINENDTVATQEIRFGDNDRLAARVAEMANADLLILLSDIDGLYTNDPRLGASPEHIPLVEEISAEIESMAGPSRSDIGSGGMRTKIEAAKIATAAGCSVIIASGGSGRILSELDDPSVRCTWFAAQQSPVAARK

SEQ ID NO: 128646 - protein, 290 aa, Unknown
  Bacterial polypetide isolated from the Sargasso Sea
MNTWVIKIGTSILRGTEETSTEEVIENLSTSFTNFLSKGNKLILVTSGAVGLGCQKLNFKTRPKDLSTLQATAAVGQVNLMALYDKVFNKLDYNIAQILITKADFNSRESFKNASKTLKKLIDLNVIPIVNENDTVANEELKYGDNDTLSALVALAINANKLILLTDIENLYSKDPRNNKDAQPIKEVHNSELKEIKDKNIQNSNNEWGTGGISTKLISAEIATKGGVEVQLVDGTNKKNLIEIFNDNKIGTLFYPVEKPIGNKKSWLSHAIQTVGKITLDDGASFAIKK

SEQ ID NO: 128647 - protein, 181 aa, Unknown
  Bacterial polypetide isolated from the Sargasso Sea
MINNYKKIVIKIGSSSIINSKTKKINSKWMKKLCEDINNYHRDKKIIIVCSGAIALGSMLITKNKVLRKLEDKQAAASVGQIELAHQWRRHLKEHKINVAQVLITLEDSEVRRRYLNARKTINTLLDNKVMPVVNENDTVATEEIKYGDNDRLAARVAQMIDADLLILLSDIDGLYDKNPK

SEQ ID NO: 128648 - protein, 230 aa, Unknown
  Bacterial polypetide isolated from the Sargasso Sea
MKTWVIKIGTSILRGTEGRSTEEVIETLCKSFTSFILKGNKLVVVTSGAVGLGCKKLNIKTRPSDLSTLQATAAVGQVNLMSLYDKIFNKLGHNIAQILITKADFNSRESFNNASKTLKRLIDLNVIPIVNENDTVANEELKYGDNDTLSALVALAINANKLILLTDIENLYSKDPRKNKDAHPIKEVHNNELKEIKDKNKQNKNNEWGTGGISTKLISAEIAQRGGGWK

SEQ ID NO: 128649 - protein, 248 aa, Unknown
  Bacterial polypetide isolated from the Sargasso Sea
YKIGVSQILLTLEDSEERRRYLNARNTISSLQSKNIIPIINENDTVATEEIRYGDNDRLAARVAQMIEADLLILLSDIDGLYQGNPKKDREVKKISEVFKIDKKIEELGNYQSSELGSGGMATKILAAKICAGNGCATIITNSDKNKPISNINKKNSTIFYPLTSTNSSKKKWLLNHLKPTGSIIIDTGAQNAILKNKSLLPAGVIDIKGRFKRGDVISILVENGQKVAVGISAYDFNDAKKIIGKKK

SEQ ID NO: 128650 - protein, 249 aa, Unknown
  Bacterial polypetide isolated from the Sargasso Sea
MIKKYKKIVVKIGSNSIVDSKTKKIKSKWLNNLCKDIAELNKTKKIVIVCSGAIALGAKSISNTKLRKLEDKQAAASVGQIELAHQWRNKLGKYKISVSQILLTLEDSEERRRYLNARNTITSLQSKNIIPIINENDTVATEEIRYGDNDRLAARVAQMIEADLLILLSDIDGLYQGNPKKDKDIKKISEVFKIDKKIEKLGNYQSSELGRGGMATKILAAKICAGNGCATIITNSDKNKPISNINKKN

SEQ ID NO: 128651 - protein, 244 aa, Unknown
  Bacterial polypetide isolated from the Sargasso Sea
MLTLDDTEQRRRALNARRTIENLLSMGVVPIVNENDTTATTEIKYGDNDRLASRVAQIIGADCLILLSDVDGLYTDNPKKNKATRIIKTIKTIDEKINKYTFKNKNLYGSGGMKTKIEAAKICQLAGCHMVIANGNHINPIKKISSDHDCTWFLPKISKLDARKKWIIGSVAPKGEIIIDLGAVKAIKNGKSLLPAGVKKINGNFEKGDHVLIKDQKNIDRARGLSSFSSGEIEKIKGLHSKEI

SEQ ID NO: 128652 - protein, 288 aa, Unknown
  Bacterial polypetide isolated from the Sargasso Sea
MSTIEKPEIKRSSLSTAKRIVIKVGSSLLTDLELGLNRGRITDYSSQIVELIDDDREVVLVSSGAIAEGCVRLGWSERPEEIAKLQAAAAVGQMGLTQAYETALGQMDRKSAIVMLTHEDIADRQRYLNAKSTLVELMSLGVIPVINENDSVATEEIRFGDNDTLAAMVSSLIEADLLVLLTDVDGLFESDPKLGAAAELIDSAFAADAQLDNLPSKSKNAMGRGGMVSKIKAARIAAAGGAHTIIASGRAKDSIRNILHGQQVGDPTRGYNRPVNRQKKMDRESGSL

SEQ ID NO: 128653 - protein, 236 aa, Unknown
  Bacterial polypetide isolated from the Sargasso Sea
MNSLLANKIIPVINENDTVATEEIKYGDNDRLAARVSQMIDADLLILLSDIDGLYDQNPIKNKSAKKINEVFKINKAIESMANSQTSSLGSGGMVTKIWAAKICMNNGCNTIITNSNKPNPLISISNKNSTIFHAIKNRSSSRKKWLLNHLHESGFIKIDEGAHKAILNNKSLLPAGIIGVGGKFNKGDIISVYYEKKGKVAIGISAYDINEVKKIIGKKSKEISIILGYEGRDEL

SEQ ID NO: 128654 - protein, 161 aa, Unknown
  Bacterial polypetide isolated from the Sargasso Sea
MIKKYKKVVVKIGSNSIVDSKTKKIKSKWLDNLCKDIAELNKTKKIVIVCSGAIALGAKSISNTKLRKLEDKQAAASVGQIELAHQWRNKLGKYRIGVSQILLTLDDSEERRRYLNARNTISSLQSKNIIPIINENDTVATEEIRYGDNDRLAARVAQMIE

SEQ ID NO: 128655 - protein, 269 aa, Unknown
  Bacterial polypetide isolated from the Sargasso Sea
LCKDIALLQSSGKKIILVSSGSIAIGREILNLKFKSIKLEEKQAAAAVGQGQLMHLWAHYLAQHQITAAQILLAPEDTETRRRHLNARATIKTLLNLDVIPVVNENDTVTTYEIRFGDNDRLAARVAGMISADLLILLSDIDGLYTADPSRNVNAKHVPEINEITEDILAMGGSTNSTFASGGMITKLLAGQIATKAGADMIICDGRPKNPLNRLLNGDRASLFYSRIEPHTAREKWIAGSLKVSGSVTIDKGALKAISDGKSLLPVGI

SEQ ID NO: 128656 - protein, 228 aa, Unknown
  Bacterial polypetide isolated from the Sargasso Sea
VATEKIRYGDNDRLAARVAQMIDADLLILLSDVDGLYDKNPKKNKDAKKINEIFKINKFIEKMANSKTSLLGSGGMATKISAAKICMNNGCNTIITNSEKSNPLSSITKNNSSLFIANKNPTSSRKQWLLNHLHPSGFITIDEGAKNAVNNNKSLLPAGVTEVGGNFSRGDVISVYLTKKEKIAVGVSAYDMNEAKKIIGKKSKEIPNILGYEGRDEIIHKDDLVKII

SEQ ID NO: 128657 - protein, 242 aa, Unknown
  Bacterial polypetide isolated from the Sargasso Sea
RLGAVPLINENDTIATDEIRFGDNDRLASRVAVMVSADALVLLSHVDGLYDKDPIENSDANHISEVRGEISAAVQKMAGKSMSYDGSGGMVTKLEAARIAMAAGTRMAIADGTELNPLTRIEDGARCTWFLPDANPKTARKRWIASALKPAGTIVVDNGAIGALNGGKSLLPAGVTGIQGQFERGDAVLVAAQDGREIARGITAYSAIDALRIMGNKTSEIEDILGYRGRDEMIHRDDLVLS

SEQ ID NO: 128658 - protein, 254 aa, Unknown
  Bacterial polypetide isolated from the Sargasso Sea
MNSKDTLLTLIKYDVIPIINENDTVATEELRYGDNDRLAARVAQMTSADLLILLSDVDGMYTSNPKTNQTAKHIPVIDNLNEEIFSMADITDSNYGSGGMITKLKAAKIATSAGCATIVTDGSKKTPLTSLIEGGKCTYFPARSNSKSSRKQWLSGYLDTSGSFKIDDGAKVALEKGGSLLPVGLTEIEGVFERGDVVTIIDANNKELGKGMTAYSSVEAKQIIGCQSDSIKDKLGYKNSSEIVHRDDMALNEV

SEQ ID NO: 128659 - protein, 191 aa, Unknown
  Bacterial polypetide isolated from the Sargasso Sea
MINKYKKIVIKIGSSSIINSKTKKINSIWMNKLCKDIEKYHKEKKIIVVCSGAIALGSTIIRNNKVLRKLEDKQAAASVGQIELAHQWRTHLKKHKINIAQVLITLEDSEVRRRYLNARKTINTLLDNKVIPVVNENDTVATEEIRYGDNDRLAARVAQMIDADLLILLSDVDGLYNKNPKKNKQAKKINE

SEQ ID NO: 128660 - protein, 250 aa, Unknown
  Bacterial polypetide isolated from the Sargasso Sea
ATLEKLLHLKVIPVINENDTVSTQEIKYGDNDRLAARVAQMCNADLLILFSDIDGLYTSDPSKNKDSEFINIIDNITNEIELMAGPSNTLLSSGGMITKIEAAKIATNAGCNVIISNGTLEEPLSYLCSQIGKGSWFKAKKNPKNSRKQWISAALQVKGKIFIDEGAEKAISNGNSVLPAGIIKTEGSYDKGDLVSIVNKEGNLLGKGLSHYNNIEVNLVKGLKSEKIEKTLGYRGKDEIIHKDDFVLEE

SEQ ID NO: 128661 - protein, 279 aa, Unknown
  Bacterial polypetide isolated from the Sargasso Sea
KPLKKNKINSAQILLTFNDSEVRRHYLNVRKTINALHKKNIIPIINENDTVATEEIRYGDNDRLASRVAQMIDADLLILLSDVDGLYTDNPLKNKKAKKIQNIYNIDSRIEKMASKNYSLIGSGGMETKILAAKICMNAGCSTIITNSNKKNPLKNINKNNSTLFHASKSPKSNRKQWILNHLHPSGSIILDNGAIRAIKNNKSLLPAGVTEIKGRFNRGDVISIVNTQNKKFGIGVIAYSSSDAKKIIGKNSKEIKRILGYEGRDELIHKDDLVKINL

SEQ ID NO: 128662 - protein, 241 aa, Unknown
  Bacterial polypetide isolated from the Sargasso Sea
CQKLNIKTRPNDLSTLQATAAVGQVNLMSLYDKVFNKLGHNIAQILITKADFNSRESFNNASKTLKRLIDLNVIPIVNENDTVANEELKYGDNDTLSALVALAINANKLILLTDIENLYSKDPRNNKDAQPIKEVHNSELKEIKDKNIQNSNNEWGTGGISTKLISAEIATKGGVEVQLVDGTNKKNLIEIFNDNKIGTLFYPVENPIGNKKSWLSHAIQTVGKITLDDGASFAIKKKGAS

SEQ ID NO: 128663 - protein, 290 aa, Unknown
  Bacterial polypetide isolated from the Sargasso Sea
QISLAYAWKDIMGKYGLNIAQILLAPDDTETRRKHLNARATLLKLLELNVIPVINENDTVSTEEIRFGDNDRLAARVAQMCSADLLILLSDINGLYSSDPNINKNSVFIDEITEITKEIEFMAGPTHTSFSSGGMVTKIEAAKIATKAGCNMIICDGRPISPLLKLKQQEAKFSWFKANEKPLNSRKQWISGALQVKGKITIDQGASEAIKKGFSILSAGIIKTEGNYEKGDLIQIIDENETFVGKGLTHFNNSEVELIKGYKSNNIETILGYRGKDEVVHRDDLVFEKK

SEQ ID NO: 128664 - protein, 176 aa, Unknown
  Bacterial polypetide isolated from the Sargasso Sea
MKKENLIKDSKRIVIKIGSSLLIDKSKGNLKSEWLVSLAQDINKLIKQKKEIIIVSSGSIALGQKQLKLEGNLSLDEKQAAAATGQVSLAHAWKEVMEKFGLNIAQILLAPDDTEKRRKHLNARATLLKLIELQVIPVINENDTVSTEEIKFGDNDRLAARVAQMSSADLLILLSD

SEQ ID NO: 128665 - protein, 240 aa, Unknown
  Bacterial polypetide isolated from the Sargasso Sea
LIDLNVIPIVNENDTVANEELKYGDNDTLSALVALAINANKLILLTDIENLYSKDPRNNKDAQPIKEVHNSELKEIKDKNIQNSNNEWGTGGISTKLISAEIATKGGVEVQLVDGTNKKNLIEIFNDNKIGTLFYPVENPIGNKKSWLSHAIQTVGKITLDDGASFAIKKKGASLLAVGVKNVEGNFTINQAVKIVNKNDKEVAKGLVSISSDKLRSILNNKENINSSIIVVHRDVLALS

SEQ ID NO: 128666 - protein, 317 aa, Unknown
  Bacterial polypetide isolated from the Sargasso Sea
QVVLVSSGSVASGAHLFPEQEKSDIAVKKAMAAAGQTEMIATWDRLFDFPSAQMLLTHADLRDRERYVSIRETIFSLLDNNILPIVNENDTVTTDKLKVGDNDNLSAMVASAAEADALIICSDIDGLYDKNPHEHDDAQLLKSVNTIDQSIYDMAGGAVKGGVGTGGMRTKIEAAEKAVSHGIDTYIINGFTELSFNMLLAGENPGTHFKPHATPMQENVHWMRHTSNAQGEVIVEGDFDASLAGDAEQLTSSEIIDVKGEFSVGDTILVRKEDGTKLVKAKSNYSSCLLNFIANQENEEFAHEFEERLGPLFLIST

SEQ ID NO: 128667 - protein, 295 aa, Unknown
  Bacterial polypetide isolated from the Sargasso Sea
KQAAASVGQIELAKEYQQHFKKNKLISSQVLMTLDDTTDRRRYLNCRSTLNTLINLGVVPIVNENDTVATDEIRYGDNDRLAAQVASICDCDLLVLLSDIDGFYTKSPKKHKDAEHIPLITEITKDLELMAEDAESEYSNGGMKTKLEAGKIAISVGCNMVITSGLRNNPIGEMNLRKSTWFIASKSVKVARKKWILNMKSTGEIEIDENAKKALQAGNSLLPVGTISCKGNFNRGDVVIIKSKDSSVLAKGLVSYNHLETEQIIGLKSVDIAKTLRYNGRSVFGHRDDMAFYKE

SEQ ID NO: 128668 - protein, 251 aa, Unknown
  Bacterial polypetide isolated from the Sargasso Sea
GYARCFAGAMDRGDQVVLVTSGAVGLGCQKLALTNRPDTVVALQAAAAIGQGALMALYERAMERHGRSVAQVLLTRSDLADRRRYQNASGTLRQLLSWGVLPVINENDALSPAELRFGDNDTLSALVAAAVEAQQLILLTDVDRLYSSDPRVDANAEPISDVRHPRELESLEQGAGDGGRWGTGGMTTKLSAARIATASGITVQLADGRDPARLEALLLGERGGTVFHPHPEPLGNRRSWLAHVLRPEGEL

SEQ ID NO: 128669 - protein, 218 aa, Unknown
  Bacterial polypetide isolated from the Sargasso Sea
MQIDKFKKIVIKIGSSILIDEEGKPKRKWLKEFAQDIKNLIRKKKQVVIVSSGAIAMGCEYLKIRKNGLKVDKSQAVASIGQIELMDFYKKTFDKNRIKISQILLTLDDTEQRRRSINARRTIDNLLAMSIVPIVNENDTTATTEIKYGDNDRLAARVSQIISADCLILLSDVDGLYTDNPKKNKQTKLIKTVKNIDENIKKYATKTENIYGSGGMKT

SEQ ID NO: 128670 - protein, 264 aa, Unknown
  Bacterial polypetide isolated from the Sargasso Sea
MIKERKTPILTGTSRIVVKIGSALLVDERTGEIRHKWLNKLADDIAHLKNKDKEVLIVSSGAIAVGSQHLGINQKILKLEEKQAAAATGQIRLAHAYETALARHSITVAQILLSPGDTEERRRHLNARATLTTLLKLGVIPVINENDTVTTKEIRFGDNDRLGARVAQMISADTLILLSDVDGLYEQDPKKDPSAKHIENVERITPEIIAMAGVAGTGYASGGMITKLEAAKIATSAGCQMAIVAGKIMNPLAALENGARCTWF

SEQ ID NO: 128671 - protein, 270 aa, Unknown
  Bacterial polypetide isolated from the Sargasso Sea
QILLAPDDTETRRKHLTQRATLLKLLELSVIPVINENDTVSTEEIRFGDNDRLAARVAQMCSADLLILLSDINGLYSSDPNINKNSVFIDEITEITKEIEFMAGPTHTSFSSGGMVTKIEAAKISTKAGCNMIICDGRPMSPLLKLNQQKAKFSWFKANEKPLNSRKQWISGALQVKGKITIDQGASEAIKKGFSILSAGIIKTEGNYEKGDLIQIIDENKTFVGKGLTHFNNSEVELIKGSKSNNIETILGYRGKDEVVHRDDLVLEKK

SEQ ID NO: 128672 - protein, 285 aa, Unknown
  Bacterial polypetide isolated from the Sargasso Sea
DTTNRLKTSKRLVIKIGSALLVDEQTGRIRTGWLDRLGQDIADIRARGTRVIIVSSGAIAVGRTHLKLPAGDLPLEQKQAAAATGQIRLAHAWQEALAAQDVTVAQILLTLSDTEERRRHLNARATIETLLNLRAVPVINENDTVATEEIRYGDNDRLAARVAQMISADTLVLLSDVDGLYTADPRTDPSAELLKEVSELTPEIEAMAGAAPTGYSSGGMVTKLEAAKIAVAAGCAMAITDGKPSDALSRLENGAACTWFLAKSEPLTVRKRWIAGAVVSSGAIV

SEQ ID NO: 128673 - protein, 291 aa, Unknown
  Bacterial polypetide isolated from the Sargasso Sea
LTSGSKKLDKAHMVELARQMATLMRAGVEVVLCTSGAIAAGREHLQYPVFPDTMANKQLLAAVGQSQLILAWSQLFSIYGLHVGQLLLTRADLQDRERYLNARDTLNALLANNIVPIINENDAVATNEIKVGDNDNLSARAALLCDADLLILLTDQKGLFDADPRTNPDAQLIKQVANIDDSLRLLAGGSVSGLGTGGMATKLEAADIARRAGIEVVIASGHHPDVIAKVADRESVGTHFSAIENPLESRKQWILAGPAAQGKLIVDAGASSAVVANGRSLLSKGIIAVEG

SEQ ID NO: 128674 - protein, 250 aa, Unknown
  Bacterial polypetide isolated from the Sargasso Sea
FIKKPFDKSKIKISQILLTLDDTEQRRRSINARRTIDNLLKMGIIPIVNENDTTATTEIKYGDNDRLAARVSQIISADCLILLSDVDGLYTDNPKKNKKTKFINTVKEIDENIKKYATRAENLYGSGGMKTKIDAAKICQLSGCYMVIANGSNKNPIKKIIKNNKCTWFLPKISKLDARKQWIIGSIAPKGEVIIDEGAAKAINNGKSLLPAGVKKVNGLFKKGDHILVKDQNNNEYARGLASFSSNEIE

SEQ ID NO: 128675 - protein, 268 aa, Unknown
  Bacterial polypetide isolated from the Sargasso Sea
AIAVGRRHLGLGTGQLRLEESQAAAATGMVRLAHAYQEVLAEYDLTLAQVLITLDDSENRRRYINARNTLETLLKLGAVPLINENDTVATDEIRFGDNDRLASRVAVMVSADVLVLLSHVDGLYDKDPTENDDANHIAEVHGEISATVQSMAGTSMSYDGSGGMLTKLEAARIAMSAGTRMAIADGTEMNPLRLMEEGAVCTWFLPEANPKTARKRWIASALKPTGTIVIDEGALGALNGGKSLLPAGVTDIQGEFERGDAVVVAAQD

SEQ ID NO: 128676 - protein, 297 aa, Unknown
  Bacterial polypetide isolated from the Sargasso Sea
YINKFKKIVIKVGSSTIVDEKGIPKKIWLQEFAKDIKNLLSKKKQIVIVSSGAIALGCEYLEIKKNGLKVDKSQAVASIGQIELMDFYKKTFDKSKIKISQILLTLDDTEQRRRSINAKRTIDNLLKMQIVPIVNENDTTATTEIKYGDNDRLAARVSQIIGADCLILLSDVDGLYTGNPKKNKKTRLIKTVKEIDENIKRYASKTENFYGSGGMKTKIEAAKICQLSGCYMVIANGKYKNPIKEIYKNKKCTWFLPKISKLDARKQWIIGSIAPKGEVIIDQGAANAINNGKSLLP

SEQ ID NO: 128677 - protein, 276 aa, Unknown
  Bacterial polypetide isolated from the Sargasso Sea
MAVQNLNAERLAQARRLVVKIGSTLFVDQKTGNLQRAWLQALCADVAAMRASGQEVVIVSSGAIALGAQQLGVDPVRARLEESQAAAAVGQIQLAHAYQEILGAHGLAAAQVLLTLDDSESRRRYLNAANTLFTLLKRGAVPVVNENDTVATHEIRYGDNDRLAARVAQMVSADCLVLLSDVDGLYTADPSVDPQAKHISELTELQEEHWEMAGGPGSDHGSGGMRTKLDAARIAMGAGCRMLITSGHTERPIKALQAGAVATWFMPGSTPRAARK

SEQ ID NO: 128678 - protein, 273 aa, Unknown
  Bacterial polypetide isolated from the Sargasso Sea
MKTWVIKIGTSILRGTERKSTEEVIETLCRSFTNFLSKGNKLILVTSGAVGLGCHKLNIKTRPNDLSTLQATAAVGQVNLMSLYDRVFSKLGHNIAQILITKSDFNSRESFNNASRTLKKLIDLNVIPIVNENDTVANEELKYGDNDTLSALVALAINANKLILLTDIENLYSKDPRNNKDAHPIKEVHNSQLQEIKNKNIQNLNNEWGTGGISTKLISAEIATKGGVEVQLVDGTNNKNLIEIFNDNKIGTLFYPVEKPIGNKKSWLSYAIK

SEQ ID NO: 128679 - protein, 203 aa, Unknown
  Bacterial polypetide isolated from the Sargasso Sea
MKTWVIKIGTSILRGTEETSTEEVIENLSRSFTSFLSKGNKLILVTSGAVGLGCQKLNIKTRPNDLSTLQATAAVGQVNLMSIYDKVFNKLGLNIAQILITKADFNSRESFKNASKTLKRLIELNVIPIVNENDTVANEELKYGDNDTLSALVALATNANKLILLTDIENLYSKDPRNNKDAQPIKEVHNSELKEIKDKNIQN

SEQ ID NO: 128680 - protein, 161 aa, Unknown
  Bacterial polypetide isolated from the Sargasso Sea
MSGRSLAHYRRIVIKIGSALLVDGRTGLKRGWLEKLSADIAGLKAAGVEVLVVSSGAIALGRTVLGAPSGALKLEEAQAAAAVGQIGLAGAWTESLKTHGIIAGQILLTLQNTEERRQYLNARATLRQLLKVGAVPIINENDTIATSEIRYGDNDRLAARV

SEQ ID NO: 128681 - protein, 245 aa, Unknown
  Bacterial polypetide isolated from the Sargasso Sea
LLDLGAVPVVNENDTVATAEIRFGDNDRLAARVAAMIGADLLILLSDVDGLYTGNPNQNNGAAHLPRIDHITDSIMAMAGAANAQYASGGMITKLEAGRISTAAGCHMIICDGRDPEPLLRLENGARCTCFIATETPHAARKQWIAGALTPRGTIGVDAGAAEALRKGKSLLPAGVVAIDGQFDRGDLVAVEDQSGKVIGHGLSSYGAADAAKIKGYKSREIETMLGYRGRDEIIHADNLVVTDI

SEQ ID NO: 128682 - protein, 188 aa, Unknown
  Bacterial polypetide isolated from the Sargasso Sea
MGLINQSKRLVIKIGSALLVDEKSGHIRYGWLEQLADDIASLRSRNKEVIIVSSGAVAFGSRHLGIHGKALKLQEKQAAAATGQIRLAHAYENALTRHDITIAQILLSPDDTEQRRRHLNARATISTLLSLNVVPIINENDTVTTKELRFGDNDRLGARVAHMMSADNLILLSDVDGLYNRDPRLDKT

SEQ ID NO: 128683 - protein, 228 aa, Unknown
  Bacterial polypetide isolated from the Sargasso Sea
SDRKRYLNARSTLRALVELKVIPVINENDTVVTDEIRFGDNDTLAALVANLVEADLLVILTDRDGMFDADPRNNPDAQLIYEARADDPALDAVAGSVGGALGRGGMQTKLRAARLAARSGAHTIIVGGRLERVLDRLKTGERIGTLLSPERGMLAARKQWLAGHLQTRGTLVLDAGAVSALSQGNKSLLPVGVKLVQGSFRRGEMVVCVAPDGREIARGLANYSALEA

SEQ ID NO: 128684 - protein, 244 aa, Unknown
  Bacterial polypetide isolated from the Sargasso Sea
LHKNNIIPIINENDTVATEEIRYGDNDRLAARVAQMMDADLLVMLSDIDGLYTSNPNINRQAKKMNNIKIIDLTIENMAGKKHSAISSGGMKTKIWAAKICLNSGCSTVIANGHKLNPLKMISKSNSSWFIATRSPRTARKQWLLNHLHPSGTAIIDNGAVKALNNNKSLLPAGVIEIKGRFNRGDVITVNNKLNKRVAIGVVAYDSNDAKKIVGKKSKEIFSILSYETRSELIHKDDLVKVKL

SEQ ID NO: 128685 - protein, 197 aa, Unknown
  Bacterial polypetide isolated from the Sargasso Sea
MIISDQTGLVNKSQRLIIKIGSALLVDSETGEIRYNWLEKMADDIANLRSRNKEVIIVSSGAVAFGSRHLGIHAKALKLQEKQAAAATGQIRLAHAYENALNKHGVTVAQILLSPDDTEQRRRHLNARATISTLLSLNVVPIINENDTVTTKELRFGDNDRLGARVAQMVSADTLILLSDVDGLYNRDPRLDKTAYH

SEQ ID NO: 128686 - protein, 256 aa, Unknown
  Bacterial polypetide isolated from the Sargasso Sea
MTLWVVKLGTSLLRGDTAAAIQGYADCIASSIVRGDRVVLVSSGAVGLGCQKLQLDRRPDSVVALQAAAAIGQGHLMTLYNQSLHRHGISVAQVLLTRSDLIDRRRYNSASNTLTQLLDWGVLPVINENDALSPAELRFGDNDTLSALVASAVDADQLILLTDVDRLYSADPRVDADAQPIPDVRDPHELRALQAAAGNGGRWGTGGMTTKLAAARIATASGITVHLADGRDPMRLDALLKGGRGGTVFHPSPQPL

SEQ ID NO: 128687 - protein, 167 aa, Unknown
  Bacterial polypetide isolated from the Sargasso Sea
MIKKFKKIVIKIGSNSIVDSKTKKIKSKWLDKLCKDISELHKTKKIIIVCSGAIALGSSSISKSVIRKLEDKQAAASIGQIELAHQWRNKLKKFKINVSQILLTLEDSEVRRRYLNARNTISSLQNKNVIPIINENDTVATEEIRFGDNDKLAAQVAQMMKRIYLFY

SEQ ID NO: 128688 - protein, 197 aa, Unknown
  Bacterial polypetide isolated from the Sargasso Sea
MEPNLKKHSPDREKIYQQSKSIVIKVGSSLLVEDKLGAIKKEWFASFIEDVIDLRKKGKTVIIVSSGAINLGRKILNLKESELTLEQKQAAASVGQIELSKEYQEHFKLKGLICSQVLITLDDFTNRRRYLNCKSTLKTLLKFGVIPIVNENDTVATDEIRYGDNDRLAAQVASICDSDLLILLSDIDGLYTESPKK

SEQ ID NO: 128689 - protein, 263 aa, Unknown
  Bacterial polypetide isolated from the Sargasso Sea
MIKNFKKIVIKIGSSSIINEKTKKIKKQWLKIICKDVKELHQNSKIIIVCSGAIALGSKYISNKKINKLEDKQAAAAIGQIELANYWQNSLNKLKINSAQLLLTLEDSEVRRRYLNVRKTIQALHKKNVIPIINENDTVATEEIKFGDNDRLAARVAQMIDADLLILLSDVDGLYTESPIKNKKAVKIKNIFKIDSKIEKMADNKLSALGKGGMTTKIWAAKICINSGCSTIITKNEKFRPLLDINKNNSTWFHASKTPQSSR

SEQ ID NO: 128690 - protein, 170 aa, Unknown
  Bacterial polypetide isolated from the Sargasso Sea
MVAITARSALPKARRIVIKVGSALLVDETKNTINTAWLAGIAQDISRLKAAGKDVVVVSSGAIALGSRLLKIHNKTLSLQEKQAAAATGQVTLAHAWMDALGAYNVQTAQILLSPDDTETRRKHLNARATMAALLNLGAVPVVNENDTVATAEIRFGDNDRLAARVAAMV

SEQ ID NO: 128691 - protein, 372 aa, Unknown
  Bacterial polypetide isolated from the Sargasso Sea
MRSVIADSRRLVVKVGSSLVTNDGRGLDHAAIGRWAAQIAALRAQGKEVVLVSSGAIAEGMQRLGWTKRPREIDELQAAAAVGQMGLAQVYESRFAEHSIQTAQILLTHADLADRERYLNARSTLLTLLRLGVVPIINENDTVVTDEIKFGDNDTLGALVANLIEGDALVILTDQQGLFTADPRKDPHATLVQQADAGAPELEAMAGGAGSSLGRGGMLTKILAAKRAAHSGANTVIASGREADVLSRLASGEAIGTQLIARTARMAARKQWMADHLQVRGHVVIDDGAVEKLIEGGKSLLPIGIVGVQGAFARGEVIACLSAAGREVARGLTNYSSTETKLIQRRPSGEIESVLGYMLEPEVIHRDNLVLV

SEQ ID NO: 128692 - protein, 240 aa, Unknown
  Bacterial polypetide isolated from the Sargasso Sea
MESNRLISSNKNYSQILNAKTIVIKIGSSILIDPKKNILKNKWLNSLLDEIAFLKKNGKKIIIVSSGSIALGKSVLNLSSKKLKLDESQASAAIGQIKLAQAYDLILKKYNIYTAQILLTSDDSQNRRRYLNIRSTFKSLLKMGVIPIVNENDTIATEEIKFGDNDRLAAQVALITEANLLILLSDIDGLYDKDPNINPDAKHLALIKEVTRKMLNMASQTTSENSKGGMVTKLEAAKMQ

SEQ ID NO: 128693 - protein, 372 aa, Unknown
  Bacterial polypetide isolated from the Sargasso Sea
MRSIIADSKRLVVKVGSSLVTNDGKGLDHAAIGRWAAQIAALRAQGKEVVLVSSGAIAEGMQRLGWSKRPREIDELQAAAAVGQMGLAQVYESRFTEHDIRTAQILLTHADLADRERYLNARSTMLTLLRLGVVPIINENDTVVTDEIKFGDNDTLGALVANLIEGDALIILTDQSGLFTADPRKDPNATLVAEANAGAPELEAMAGGAGSSLGRGGMLTKILAAKRAAHSGANTVIASGREADVLVRLAAGEAIGTQLIARTARMAARKQWMADHLQVRGHVVIDAGAVEKLTAGGKSLLPIGVIDVQGAFARGEVIACVGPDGREVARGLTNYSSAETKLIHRKPSGEIESVLGYMLEPELIHRDNLVLV

SEQ ID NO: 128694 - protein, 258 aa, Unknown
  Bacterial polypetide isolated from the Sargasso Sea
MNNYRKVIIKIGSALINDDSSHNENSIENICAQISKGHSEGIKFAVVSSGAISQGISYLDMSEKPSKLEELQALAAVGQQQLMKMYESYFSKYDKKIAQVLLTHDDMNNPERYLNAKATFDNLLSLDVIPVINENDVVATEEIRFGDNDTLAAMVSNMMEADLMVILTNQDGYFDKNPDKHPDAKIIKKCNTKNLNEDDFNLDEKSSVGTGGFKTKIRSVKMATTRNCPSIIASGYRKDVIKQILSKKIIGTFFYSEE

SEQ ID NO: 128695 - protein, 368 aa, Unknown
  Bacterial polypetide isolated from the Sargasso Sea
MINKYKKIVIKIGSSSIINESNKKIKTSWLNSICKDIAFLHRTKKIIVVCSGAIALGSKIINNKKFLQRLEDKQAAAAIGQIELANHWQQTLKKNKINSAQILLTLNDSEVRRHYLNVRKTINALHKKNIIPIINENDTVATEEIRYGDNDRLASRVAQMIDADLLILLSDVDGLYTDNPLKNKKAKKIQNIYNIDSNIEKMASKNYSLIGSGGMETKILAAKICMNAGCSTIITNSDKKNPLKNINKNNSTLFHASKSPKSNRKQWILNHLHPSGSIILDTGAIRAIKNNKSLLPAGVTEIKGRFNRGDVISIVNNQNKKFGIGVIAYSSSDAKKIIGKNSKEIKRILGYEGRDELIHKDDLVKINS

SEQ ID NO: 128696 - protein, 311 aa, Unknown
  Bacterial polypetide isolated from the Sargasso Sea
MLWVVKLGTSLLRGDTAAVIEGYGAAIAAAMERGDQVVLVTSGAVGLGCQRQQLPRRPDTVMALQAAAAIGQGHLMALYERALSRHGRSVAQVLLTRSDLADRRRYQNASNTLRQLLSWGVLPVINENDAISPAELRFGDNDTLSALVAAAVDADQLILLTDVDRLYSADPRTVADARPISDVHHPHELQALEAGAGDGGRWGRGGMTTKLAAARIATASGITVHLADGRDPSRLDQLLQGDRGGTVFHPHPEPLGNRRSWLAHVLQAQGTLRLDPGACEALLERGASLLQVGITAVEGEFGASQAGTWST

SEQ ID NO: 128697 - protein, 386 aa, Unknown
  Bacterial polypetide isolated from the Sargasso Sea
MKKQFTLPKSDTECLKKFFLPYKRIIVKVGSSLLINKDFLKIRNEWLNALSEDISWLQSFKKEIIIVSSGAIALGRSSFGAENKTLNLEENQAAAAIGQIELAYSWKAALEKFNLKCAQILLSPDDTETRRKHLNARATIAKLIEANIIPVINENDTITTSEIKFGDNDRLAARVAQMSSSDLLILLSDIDGLYDKNPHLSEKANHIPKVKEINDDILKMAGSSHYKFSSGGMITKLEAAKISSLSGCKMIICNGEENHAILELAKKRKYTIFEVKDTPLSARKKWIAAGLNFSGRVTVDEGASKALKNGSSLLPAGVIKVDGSFEKGDLIEIFSHNGIKIASGLTSYNSQEIVTIAGKKTYDIETLLGYMGRDELIHRDDLVLGK

SEQ ID NO: 128698 - protein, 269 aa, Unknown
  Bacterial polypetide isolated from the Sargasso Sea
MILLTHEDFSNRERYLNARSTLTRLLDLGVIPLINENDTVATDEIRFGDNDTLSAFVTNLIDADLQIILTDVEGLMDKDPNIDDSAEVILKASADDKSLEGLSSDRTSALGRGGMLSKVRAARLASRSGADTVIASGKIPGVLARIVSGEEIGTHLFVDKKSLRSRKRWIADQLKPAGYVIIDSGASEALSKGGASLLAVGVLGVYGSFDRGDLIECRAEDTTVIAQGLVNYSSEDISNLKGLNSEKYSDKIEHVYENELVHCDNLVLV

SEQ ID NO: 128699 - protein, 335 aa, Unknown
  Bacterial polypetide isolated from the Sargasso Sea
CKDIEKYHKDKKIIIVCSGAIALGSSLIKKHKILRKLEDKQAAASVGQIELAHQWRLHLKKHRINIAQVLITLEDSEVRRRYLNARKTINTLLKNKVIPVVNENDTVATEEIRYGDNDRLAARVAQMVDADLLILLSDVDGLYDKNPKKNKDAKKINKISAINKTIEKMANSQTSIIGSGGMTTKIAAAKICMNNGCDTLITDSEKNKPLSSITNENSSIFLANKNPSSSRKQWLLNHLHPSGFIRIDDGANQAIKNNKSLLPAGVIEVGGNFNRGDVISVYFPKKEKIAVGISAYDINEVKKIIGKKSKEIPSILGYEGRDEIIHKDDLVKIIS

SEQ ID NO: 128700 - protein, 349 aa, Unknown
  Bacterial polypetide isolated from the Sargasso Sea
MTLWVVKLGTSLLRGDTAATIDGFAAGIAAAFARGDRVVLVSSGAVGLGCQRLQLPQRPETVVALQAAAATGQGQLMALYERALANHGIAVAQILVTRSDLADRRRYQNASGTLQQLLQWGVLPVVNENDAISPAELRFGDNDTLSALVAAAVGADQLILLTDVDRLYSADPRLVADARPISDVHHPRELDALEAVAGDGGRWGRGGMTTKLAAARIATASGITVHLADGRDPTRLDALLQGERGGTVFHPHPEPLGNRRSWLAHALQPQGSLTLDAGACDALHRRGASLLMVGITAVQGAFAANQPVRLQGPDGRELGRGLCQLSSAAVQRALDAAPAAGPSPVVVHR

SEQ ID NO: 128701 - protein, 279 aa, Unknown
  Bacterial polypetide isolated from the Sargasso Sea
MVSIKSIQLDSINNAKRIVLKVGSALIVNPKTGNINESWVKSLVQDILFLLKNNKEILIVSSGAIALGKSELNLQNKSLKLSEKQAAAATGQILLAKAWKSIFEKVNIKCGQILVGHSDLETRRNAMNTRATLSTLLKLKVIPIINENDTVATREIRYGDNDQLAARIAQLAEADILVLLSDIDGLYSEDPKTSSKAEFIKEIEDISSEIENMARNTKSNIASGGMITKIKAAKIATAGGCNLIIAHGKNKNSLLKLINGGKHSIFKANLSPINAKKKW

SEQ ID NO: 128702 - protein, 161 aa, Unknown
  Bacterial polypetide isolated from the Sargasso Sea
MIREKIKNAKRLVIKVGSSLVTNNGLGLHHDRILHWVEQISCLHDQGKKVVLVSSGAVAEGVSRLGLIKRPEEMHLQQAAAAVGQMGLVQIYESFFKNHDVHTAQILLSHEDLSDRTRYLNARTTFTTLLDMGVIPVVNENDTVATAELCFGDNDTLAALV

SEQ ID NO: 128703 - protein, 259 aa, Unknown
  Bacterial polypetide isolated from the Sargasso Sea
SDRTRYLNARTTLTTLLSMGVIPVVNENDTVATAELCFGDNDTLAALVANLVNAEAMIFLTDQDGVFDEDPRVNAASNLIPKISAHDESLVQVAGKGTTLGRGGMVTKISAARLAARSGTDTVIANGEIPDVLVKFAEGKLIGSLLYADSEPIAARKQWLAGQLSVKGTLQLDRGAIRVLKNSGTSLLAVGIEFVDGKFFRGDVVSCVDSKGREIARGLVNYDSKEVEVLRGQISEKIEDLIGYAGDEEIIHRDNLVLM

SEQ ID NO: 128704 - protein, 367 aa, Unknown
  Bacterial polypetide isolated from the Sargasso Sea
MENRTIVVKLGTSVLTGGSSQLNRAHMVELVRQCAALHRHGHRVVVVTSGAIAAGREHLGHPPLAPTLPNKQMLAAVGQTQLIRVWQDLFNLYGLHIGQMLLTRADLEDRERYLNARDTLRTLLDHRIIPVINENDAVATAEIKVGDNDNLSARAAILADADLLILLTDQKGLFTADPRTNPDAQLIEEVQTIDDTLRKLAGDSISGLGTGGMATKLQAADVARRAGVNVVIATGQMPEVVGRLAKGERIGTLFPALASPLEGRKSWILAGPPPHGEVQVDQGAVAAMQEKGSSLLPKGIVAVKGDFVRGDVVRILDPKGAELARGICRYNHLELDKLRGVHSDNIEQVLGYGYGAVAIHRDDMVLL

SEQ ID NO: 128705 - protein, 303 aa, Unknown
  Bacterial polypetide isolated from the Sargasso Sea
PSKINELQAIAAVGQMNLMQAYEEDIGRLGRTSAMILLTHEDFSNRQRYLNARSTLTRLLDLGVIPLINENDTVATDEIRFGDNDTLSALVTNLIDADLQIILTDVEGLMDKDPNIHGSAEVILKAPADDKSLEGLSSDRTSALGRGGMLSKVRAARLASRSGADTVIASGKVAGILTRIVSGEEIGTHLFVHKKSLRSRKRWIADQLKPAGYVVIDSGASEALSKGGASLLAVGVLGVYGNFERGDLIECRTEDATVVAQGLVNYSSVDISNLKGLNSEKYSDKIEHVYENELVHCDNLVLV

SEQ ID NO: 128706 - protein, 372 aa, Unknown
  Bacterial polypetide isolated from the Sargasso Sea
MNLSEIAYRRVVVKLGTSVLTSGSKQLDKAHMVELARQMAALMRSGVEVVLCTSGAIAAGREHLQYPVLPDTMANKQLLAAVGQSQLILAWAQLFSIYGLHVGQLLLTRADLHDRERYLNARDTLNALLAHNIIPIINENDAVATNEIKVGDNDNLSARAALLCDADLLILLTDQKGLFDADPRTNPNAKLISQVEKIDDSLRLLAGGSVSGLGTGGMSTKLEAADIARRAGIEVVIASGHHPDVIKKVVAKESIGTHFSAIENPLESRKQWILAGPAAQGSLVLDAGAVKAVTEKGRSLLSKGIIGVKGEFERGATLQLVDQNGKIIARGITRYCGEALGLIAGKHSDEIESVLGYDYGDAIVHRNDMVVL

SEQ ID NO: 128707 - protein, 158 aa, Unknown
  Bacterial polypetide isolated from the Sargasso Sea
MINKYKKIVIKIGSSSIVNPKSKKINTKWMIKLCKDIKKYHKEKNIIIVCSGAIALGSPLIKNKNLRKLEDKQAAASVGQIELAHQWKQHLKTHKIDIAQVLITIEDSEVRRRYLNARKTINTLLQNKVIPVINENDTVATEEIKYGDNDRLAARSAQ

SEQ ID NO: 128708 - protein, 372 aa, Unknown
  Bacterial polypetide isolated from the Sargasso Sea
MNLSEIAYRRVVVKLGTSVLTSGSKQLDKAHMVELARQMAALMRSGVEVVLCTSGAIAAGREHLQYPVLPDTMANKQLLAAVGQSQLILAWAQLFSIYGLHVGQLLLTRADLHDRERYLNARDTLNALLANNIIPIINENDAVATNEIKVGDNDNLSARAALLCDADLLILLTDQKGLFDADPRTNPNAKLISQVEKIDDSLRLLAGGSVSGLGTGGMSTKLEAADIARRAGIEVVIASGHHPDVIKKVVGKESVGTHFSAIENPLESRKQWILAGPAAQGSLVLDAGAVKAVTEKGRSLLSKGIIGVKGEFERGATLQLVDQKGKIIARGITRYCGDALGLIAGKHSDEIESVLGYDYGDAIVHRNDMVVL

SEQ ID NO: 128709 - protein, 367 aa, Unknown
  Bacterial polypetide isolated from the Sargasso Sea
MIKKYKKVVVKIGSNSIVDSKTKKIKSKWLDNLCKDIAELNKTKKIVIVCSGAIALGAKSISNTKLRKLEDKQAAASVGQIELAHQWRNKLGKYKIGVSQILLTLEDSEERRRYLNARNTISSLQSKNIIPIINENDTVATEEIRYGDNDRLAARVAQMIEADLLILLSDVDGLYQGNPKKDKDVKKISEVFKIDKKIEELGNYQSSELGSGGMATKILAAKICAGNGCATIITNSDKNRPISNINKKNSTIFYPLTSTNSSKKKWLLNHLKPSGSIIIDTGAQNAILKNKSLLPAGVIDIKGRFKRGDVISILVENGQKVAIGISAYDFNDAKKIIGKKSKEIYKVLGFEGREEVVHKDNLVKLST

SEQ ID NO: 128710 - protein, 371 aa, Unknown
  Bacterial polypetide isolated from the Sargasso Sea
MKIKEINRMVVKIGSSLLIDKDKGVNNNFLNNISEDILSLKKRGIETLVVSSGAIELGKIELDKTKEKFNLAESQAASSIGQIKLINSWKESLSKFDLNAAQILITAEDTENRKRFLNARSTIEELLREKYIPIINENDTVATSEIRYGDNDRLAARIAGMVAADCLILLSNVEGLYERDPSNEESRLVSNVEIIDKSVTDMAGEAGELGRGGMITKIEAAKIATKSGCQMIISSGRVKNPILSSLNDGIGTVFQSQNKNLSALKSWISGSIKPSGEINIDNGANLALKNGKSLLSAGIINFDGEFDKGDTVTIKSRDKEVARGLTNFNSNDLSKIIGKKSEEIEEILGYLTKTEVIHRNNLFYSGNMDED

SEQ ID NO: 128711 - protein, 138 aa, Unknown
  Bacterial polypetide isolated from the Sargasso Sea
ELRPIHWLLEKGAIVICAGGGGIPTAYNSEGSLEGVEVVIDKDKASALLARQLGSRLLILATDADGVYRDWGTESQELIQIATPEEISKMDFEPGSMGPKVEAACDFVMRTGERAVIGALTDIAEMVDGKAGTQITIE

SEQ ID NO: 128712 - protein, 174 aa, Unknown
  Bacterial polypetide isolated from the Sargasso Sea
EERVKNMGWVVKEQDPGEWRRVVPSPDPDFVMHGISIRTLVHAGIIVLAAGGGGIPVYINQEGKFEGIDAVIDKDLTAAKLGRVIRADEYYIVTDIDQVYLDYGTENQSPINQMTDIDAKKYQEEGHFQKGSMWPKIRSAIYFLKHHGKKVIITNIDHLQDAIDGKAGTTIVKG

SEQ ID NO: 128713 - protein, 92 aa, Unknown
  Bacterial polypetide isolated from the Sargasso Sea
MKQRIVLALGGNALGNNLPEQMKAVQSTAGTIADLIAQGHEVVVTHGNGPQVGMIQQAFEVAARHDPKAPHLPMSVCVALSQGYIGYDLQNA

SEQ ID NO: 128714 - protein, 168 aa, Unknown
  Bacterial polypetide isolated from the Sargasso Sea
MAKSILIALGGNALSPKEEAGTIYQQFAHTRESVDNIMHFVQLGYNICLTHGNGPQVGDELYRMELTHETIPPLPLGVCVAETQGSIGYMVQQSLQNVLKEKKIDREVVTLITQTIVDKNDPSINDPQKFIGRRYEKTKAQALASQFNWTIKEQEPGSWRQVVPSPFP

SEQ ID NO: 128715 - protein, 102 aa, Unknown
  Bacterial polypetide isolated from the Sargasso Sea
MENKPTLVVALGGNALLKRGEPLEADIQRKNIELAAKTIAQLTQQWRVILVHGNGPQVGLLALQNSAYASVTPYPLDILGAESQGMIGYMLQQALKNQLPQR

SEQ ID NO: 128716 - protein, 216 aa, Unknown
  Bacterial polypetide isolated from the Sargasso Sea
LNQEKIDKEVVTLVTQVVVDPKHPSLKNPTKFVGKRFSKKEAEKRAKNMGWIVKEQDPGEWRRVVPSPDPDFVMHGISIRTLVHAGIVVLAAGGGGIPVFIEDNGNFNGIDAVIDKDLTAAKLGRVIRADEYYIVTDIDQVYLNYGTKNQSPIDQMTDEEAKKYQEEGHFQQGSMWPKIRSAIHFLKHHGKKVIITNIDNLQNAIDGKAGTTIVKG

SEQ ID NO: 128717 - protein, 196 aa, Unknown
  Bacterial polypetide isolated from the Sargasso Sea
MEIWRRVVPSPKPIGIVEIDIIESCYLSGHIPITVGGGGIPVVKVPPQKNKNHETYECNYDISYKRSIAGGEPQANIYKGIEGVVDKDLSSSLLAKMILERSISRGNPIEVELVILTNVDSVKLNFQKTNEESLPILSLDEATSLYKSSQFQEGSMSPKIESILNFLNAGGKKAYITKVDLLEETFSGDAGTTFTN

SEQ ID NO: 128718 - protein, 267 aa, Unknown
  Bacterial polypetide isolated from the Sargasso Sea
DECNGRTGVTPEFPNGIYYYVVTDNFPFFTRCLKGDFSSAGGGGIPSCEDVPPGNPCCGDGVCGGPETEDNCPIDCGTIVTPPELNSIGFSADTINTNSNAVAVIYNLTATAYDNYLSSYTIRLILNGGPINGGEIFEDSGTFNMGVFESTKSGTFLFPIGTTEGQWNIRVILIDENNNETNLGPNELGQNNFQNFIIVDNSTMQIDGTQVPLEFSLGQNFPNPFNPITSIRYAIPNDSFVKITIYDVLGNVIKNLLQKHQSSGFKT

SEQ ID NO: 128719 - protein, 176 aa, Unknown
  Bacterial polypetide isolated from the Sargasso Sea
MIAMGGNSISPKSGTGRIEEQFERTREAFDGISHFIKRGYNLCINHGNGPQVGNEIMRMELTQDTVPPLPLGVCVASTQGSIGYMIQQCLQNKLREMEIDREVVTLVSQVIVDKNDDSFKEPTKYIGKRYTKQEADEMTTDFDWHFKEQEEGKYRRVVPSPMPEYIMHGKSIKALV

SEQ ID NO: 128720 - protein, 130 aa, Unknown
  Bacterial polypetide isolated from the Sargasso Sea
LEKGTVVICAGGGGIPTSYKDNGKLEGVEVVIDKDRASSLLAFELEADLLIMATDTDGVYLDWGSDSEKIISKTTPEEISKYSFDKGSMGPKVEAACSFVERSGQRAVIGSLKDIEKMVSGISGTQFLLK

SEQ ID NO: 128721 - protein, 242 aa, Unknown
  Bacterial polypetide isolated from the Sargasso Sea
SNPTKFIGPPLSKDQAQSLMNKNPDFTAKFYQMLENSNISDLGAGKNQEVWRRVVPSPKPIGIVEIDIIEACFLSGNIPITVGGGGIPVLQVTPQKNKNHETYICNYQISYKRPISEKNPVSIFKGVEGVVDKDLSSSLLGKMILERSITRGNPLEVELVILTNVDSVKINFQEKNEKSLSLLSIEEATTLFMSNKFQEGSMRPKIESILNFLNAGGKKAYITKVELLEKTFCGEAGTTFTN

SEQ ID NO: 128722 - protein, 148 aa, Unknown
  Bacterial polypetide isolated from the Sargasso Sea
MCIPEGRCSYRFTLGEYIVRLVVALGGNALLKRGEEQTSENQRRNVREACMELAPLAKEHQLVITHGNGPQVGLLALQSASYKEAEEYPLDVLGAQTEGMLGYAIQQELGNLLPTESSLATILTMVEVDPDNPAFENPTKPMARLQRA

SEQ ID NO: 128723 - protein, 76 aa, Unknown
  Bacterial polypetide isolated from the Sargasso Sea
MASTISASSACNSLKSSNTLHSSAIGTKSGFEERGHGLEKLEFALAFAEMRGETERCLKLRAQIAALGGNAEEPGT

SEQ ID NO: 128724 - protein, 181 aa, Unknown
  Bacterial polypetide isolated from the Sargasso Sea
MIALGGNSLSPKGVAGSIEQQFRYTRDTMDGLSIFIRSSYNICITHGNGPQVGDALHRMDLTSEQIPPLPLGVCVAGTQGQMGYMIQQSLQNKLREMEIDREVVTMVTQVIVDKNDESLKNPTKYIGPRYSKDEILKLSENFNWNIKEQEPGFWRRVVPSPMPEYIMHGKSIKALVDRGTM

SEQ ID NO: 128725 - protein, 121 aa, Unknown
  Bacterial polypetide isolated from the Sargasso Sea
VPVVEKADGYHGIEAVIDKDLSAALLARQLHADALLILTDADAVYLDWGKPTQRPLSQVTPELLGEMQFDAGSMGPKVTACAEFVSHCRGIAGIGSLADGSAILAGDKGTLIRLETTDANA

SEQ ID NO: 128726 - protein, 88 aa, Unknown
  Bacterial polypetide isolated from the Sargasso Sea
MEKTAIIALGGNALSDKSQAGTINDQFSNTRKSLTEIIKFLKEDYNICITHGNGPQVGDELLRMDLTQDEVSPLPLGVCVAGTTIVKG

SEQ ID NO: 128727 - protein, 242 aa, Unknown
  Bacterial polypetide isolated from the Sargasso Sea
KTCEILADFIKENQNFSYIITHGNGPQIGNILLRSEYSSKHLFPLPLDVCGADSQGALGYMLAQLSNSLSVRGLGINTAEIITQVIVDADDPAFQNPIKFIGPPLTKEEATQIMSENQDYCAKFYKNADTPELNSLITFSGKTKAPLEIWRRVVPSPKPIGIVEIDIIEACYLSGHIPITVGGGGIPVVKVSPKKNKNHETYECNYDISYKREVSKGESQAQIYKGIEGVVDKDLSSSLLAK

SEQ ID NO: 128728 - protein, 220 aa, Unknown
  Bacterial polypetide isolated from the Sargasso Sea
MREKDKLIIFALGGNEISPVEVDQSSGKLINQDLHAQWSRTANTCEILADFIKENQNYHYIITHGNGPQIGNILLRSEYSSKYLFTLPLDVCGADSQGALGYMLAQLSNSLHVRGLEKNTAEIITQVIVDQNDPAFQNPNKFIGPPLTKEEATRLMNENSEYCAKFYKNAENPKLNSHNRTSSVNRHDPLEIWRRVVPSPKPIGIVEIDMIEALLFIWPY

SEQ ID NO: 128729 - protein, 243 aa, Unknown
  Bacterial polypetide isolated from the Sargasso Sea
LALQNAAYKESPAWPLDILVAESQGMIGFAITQELASSAGNSPVTMLMTRVEVDPQDEAFSVPGKYIGPVYQPDQQAELEACYGWQMKTDGQYIRRVVPSPTPLKIIDSDAIRTLMDAGHTVICCGGGGIPVIAQGDGYQGTEAVIDKDLTAAVLAQSINADHLLILTDADAVYENWGTPQARALRHATVEELTPFAAPDGAMGPKAAAVMQFVKQTGNAAFIGALKDAPQILAGEKGTCVTK

SEQ ID NO: 128730 - protein, 249 aa, Unknown
  Bacterial polypetide isolated from the Sargasso Sea
MEKTAIIALGGNALSNKSQAGTINDQFSNTRKSLTEIIKFLKEDYNICITHGNGPQVGDELLRMDLTQDEVSPLPLGVCVAGTQGTIGYMIQQTFQNILNQENIDKEVVTLVTQVVVDPKHPSLKNPTKFVGQRFSKQEAEKRAKRMGWIVKEQDPGEWRRVVPSPDPDFVMHGISIRTLVEAGIIVLAAGGGGIPVFIGEDGKFEGIDAVIDKDLTAAKLGRVIRADEYYIVTDIEQVYLNYGTDNQS

SEQ ID NO: 128731 - protein, 268 aa, Unknown
  Bacterial polypetide isolated from the Sargasso Sea
EKNTAEIITQVIVDPNDPAFQNPNKFIGPPLTKNEATRLMNENPEYCAKFYKNAENPELNSHRASSVNTHESLEIWRRVVPSPKPIGIVEIDMIESCYLSGHIPITVGGGGIPVVQVSPQKNNNHETYECNYDISYKRSISGGESQVKIYKGIEGVVDKDLSSSLLAKMILERSLSRGNPIEVELVILTNIDSVKLNFQKTNEESIQKLSLEEATSLYKSSHFQEGSMSPKIESILNFLNAGGKKAYITKVDLLEETFSGNAGTTFIN

SEQ ID NO: 128732 - protein, 250 aa, Unknown
  Bacterial polypetide isolated from the Sargasso Sea
AHEREGLPLPPLAKCVADTQGGIGYLIQQALNNRLARRGEQKAVTVVTQVEVDKNDPGFANPTKPIGAFFSEVQRDELQRVNPGWRFVEDSGRGYRRVVASPEPKRIVEAEAIKTLTQQGFVVIGAGGGGIPVVRSDQGDYQSVDAVIDKDLSTALLAQEIRADILVITTGVEQVCIHFGKPNQQALDTVDVATMTRYMQEGHFPPGSMLPKIVASLAFLERGGKRVIITTPECLPAALRGETGTHIVHS

SEQ ID NO: 128733 - protein, 199 aa, Unknown
  Bacterial polypetide isolated from the Sargasso Sea
MEKTAIIALGGNALSNKSQAGTINDQFSNTRKSLTEIIKFLKEDYNICITHGNGPQVGDELLRMDLTQNEVSPLPLGVCVAGTQGTIGYMIQQTFQNILNQEKIDKEVVTLVTQVVVDPKHPSLKNPTKFVGKRFSKQEAEKRAKSMGWIVKEQDPGEWRRVVPSPDPDFVMHGISIRTLVHAGIVVIAAGGGGIPSFY

SEQ ID NO: 128734 - protein, 179 aa, Unknown
  Bacterial polypetide isolated from the Sargasso Sea
MNLQQKDLLMSKGWTIREEGDRGWRRVVPSPTPKSIVDISAIETLIDERFVVIACGGGGIPVYKDEKGMIQGIEAVIDKDFASGLLSRELSAELFIIATEVERVAIDFGTKNQRWLNKLTRSEAIKHLDEGQFPEGNMGPKVSAIIEFLEAGGSAGIITNPPNLGRALAQKNGTWIVPD

SEQ ID NO: 128735 - protein, 253 aa, Unknown
  Bacterial polypetide isolated from the Sargasso Sea
MNKSIIIALGGNALSPKEEAGTIYQQFAHTRESIDNIMHFVDLEYNICLTHGNGPQVGDELYRMELTHEIIPPLPLGVCVAETQGSIGYMIQQSLQNVLKQKKIDREVVTLITQTIVDKNDPTINDPQKFIGRRYDKVEAQSLARQFNWTVKEQEPGSWRQVVPSPMPQFIEHGRSIQTLVDSGTIVIASGGGGIPTFWNDDRKLEGLNAVVDKDLSAALLGRVIKANELWIITDLDQVCLNFGKPNEKPLLK

SEQ ID NO: 128736 - protein, 257 aa, Unknown
  Bacterial polypetide isolated from the Sargasso Sea
MRVRGKDLKTAEIITQVIVDHDDPAFQEPTKFIGPPMTKEEAEEHQKNQGYLCRFYKLNDQGQEVWRRVVPSPKPKEIIEIDIIESCLQSGNIPIAVGGGGIPVVAIEPQKAGELELYPCSYDITYQKSLDAPPAKVYCGVEGVIDKDLSSSLLATSLRERAHRRGEELEVVFVILTDVDGVKLNYQQPNQEDVRSLNLEKTRELQQSGIFPSGSMGPKVEAVINFLEAGGQQAFITNIQVLEQTFSGQAGTCFLTN

SEQ ID NO: 128737 - protein, 238 aa, Unknown
  Bacterial polypetide isolated from the Sargasso Sea
MKKRTAMIALGGNSLSPKGIGGSIKQQFRYTRDTMDGLSIFIESDYNICLTHGNGPQVGDALHRMDLTSEQIPPLPLSICVAGTQGQMGYMIQQSLQNKLRELDIDREVVTMVTQVIVDRNDESLKNPTKYIGPRYSKGEILKISENFNWNIKEQEPGFWRRVVPSPMPEYIMHGKSIKTLVDRGTIVIAFGGGGIPVFNTDKNRIQGLEAVIDKDFSAAKMGRIIRAEELWIISDIE

SEQ ID NO: 128738 - protein, 196 aa, Unknown
  Bacterial polypetide isolated from the Sargasso Sea
MIALGGNSLSPKGVAGSIGQQFRYTRDTIEGLSIFIETSYNICITHGNGPQVGDALHRMDLTSEQIPPLPLGVCVAGTQGQMGYMIQQSLQNKLREMKIDREVVTMVTQVIVDRNDESLKNPTKYIGPRYSKDEILKLSKNFNWNIKEQETGFWRRVVPSPMPEYIMHGKSIKALVDRGTIVIAFGGGGIPVLRQR

SEQ ID NO: 128739 - protein, 213 aa, Unknown
  Bacterial polypetide isolated from the Sargasso Sea
IRKTRVTSAGFYKLNDQGQEVWRRVVPSPKPKEIIEIDIIESCLQSGNIPIAVGGGGIPVVAIEPQKAGELEQYPCSYDITYQKSLDDPPAKVYCGVEGVIDKDLSSSLLATSLRERAHRRGEELEVVFVILTDVDGVKLNYQQPNQEDVRSLNLEETRQLQQSGIFPSGSMGPKVEAVINFLEAGGQQAFITNIQVLEQTFSGQAGTRFQSH

SEQ ID NO: 128740 - protein, 199 aa, Unknown
  Bacterial polypetide isolated from the Sargasso Sea
MHKKTIMIALGGNSLSPKGSSGKIGEQFLFTRRTMEHLSEFILQDYNICITHGNGPQVGNELLRMDLTNDVVPPLPLGMCVANTQGQIGYMVQQTLQNKLRDLEVDREVVTLVTQVLVDKNDKSIKNPTKFVGARYTKGEIDKLAKKLNWIVKEQEPGSWRRVVPSPMPEYIMHGKSIKALVDRGTIVIAFGGGGIPSF

SEQ ID NO: 128741 - protein, 240 aa, Unknown
  Bacterial polypetide isolated from the Sargasso Sea
LSVRGIGINTAEIITQVIVDAEDPAFQNPNKFIGPPLTKEEATQIMNENEGYCAKFYKNAENPEYNSFITSSGDIKAPLEIWRRVVPSPKPIGIVEIDIIESCYLSGHIPITVGGGGIPVVKVFPQKNKNHESYECNYEISYKRSIAVGEPQANIYKGIEGVVDKDLSSSLLAKMILERSISRGNPIEVELVILTNVDSVKLNFQKTNEESIPILSLEEATSLYKSSQFQEGSMSPKIES

SEQ ID NO: 128742 - protein, 187 aa, Unknown
  Bacterial polypetide isolated from the Sargasso Sea
MLVVAALGGNALLRRGEPLTAETQRTNVATAAASLAQIIEAGHQLVVTHGNGPQIGLLALQGAAYKPDEVFPLDVLGAETDGMIGYLIEQELENALGHDRPVATLLTQVEVDPKDPAFARPTKFIGPVYDKAEAERLAQARSWSIAADGAHWRRVVPSPMPMDIPDLRVLQLLLEQDVTLICAGGGG

SEQ ID NO: 128743 - protein, 259 aa, Unknown
  Bacterial polypetide isolated from the Sargasso Sea
MINQNFQARWSRTAKTYEIVANIIKENQNFSYIITHGNGPQIRNILLRSEYSSNHLHKIPLDVCGADPQGALGYMLAQLSNSLHVRGLEINTAEIITQVIVDAEDPAFQNPSKFIGPPLTKEQATSLMNEYPKYCAKFYKNAENPELNSLIVSSGNTHSPLEIWRRVVPSPKPIGIVEIDIIESCYLSGHIPITVGGGGIPVVKVSPQKNKNLETYECNYDISYKRFNSGGEPQANIYKGIEGVVDKDLSSSLLAKMIL

SEQ ID NO: 128744 - protein, 316 aa, Unknown
  Bacterial polypetide isolated from the Sargasso Sea
MGKLYLFALGGNEISPVITDPETGKMVNPDLPAQWRQAWKTCEILAQFIVDHPDSAYILTHGNGPQIGNILLRSEYAGEMIHKLPIDVCGADTQGALGYMLAQLSNSLRVRGKDLKTAEIITQVIVNHDDPAFQEPTKFIGPPMTKEEAEEHQKNQGYLCGFFKLNEQGKEVWRRVVPSPKPKEIIEIDIIESCLQSGNIPIAVGGGGIPVVAIEPQKAGELEQYPCSYDITYQKSLDAPPAKVYCGVEGVIDKDLSSSLLATFLRERAHRRGEELEVVFVILTDVDGVKLNYQQPNQEDVRSLNLEKPGKLSSQV

SEQ ID NO: 128745 - protein, 306 aa, Unknown
  Bacterial polypetide isolated from the Sargasso Sea
MTHGNGPQIGNILLRSEYAGEMIHKLPIDVCGADTQGALGYMLAQLSNSLRVRGKDLKTAEIITQVIVDHDDPAFQEPTKFIGPPMTKEEAEEHQKNQGYLCGFYKLNDQGQEVWRRVVPSPKPNEIIEIDIIESCLQSGNIPIAVGGGGIPVVAIEPQKAGELEQYSCSYDITYQKSLDAPPAKVYCGVEGVIDKDLSSSLLATSLRERANRRGEELEVVFVILTDVDGVKLNYQQPNQEDVRSLNLEETRELQQSGIFPSGSMGPKVEAVINFLEAGGQQAFITNIQVLEQTFSGQAGTRFQSH

SEQ ID NO: 128746 - protein, 313 aa, Unknown
  Bacterial polypetide isolated from the Sargasso Sea
MNKSIIIALGGNALSPKEEAGTIYQQFAHTRESIDNIMHFVDLEYNICLTHGNGPQVGDELYRMELTHETIPPLPLGVCVAETQGAIGYMVQQSLQNVLKEKKIDREVVTLITQTIVDKDDPSIHDPQKFIGRRYEEEEAKRLAKQFGWNVKEQEPGSWRQVVPSPMPQFIEHGRSIQTLVDNGTIVIASGGGGIPTFWNNKDRLEGLNAVVDKDLSAALLGRVIKANELWIITDLDQVCLNFGKPDEEPLLEMTFDQAKKYLNEGHFQAGSMGPKIQSALYFLNHHGEKVVITSIAGVLGAISGSTGTTITK

SEQ ID NO: 128747 - protein, 312 aa, Unknown
  Bacterial polypetide isolated from the Sargasso Sea
PDNSYILTHGNGPQIGNILLRAEYAGEMIHKLPIDVCGADTQGALGYMLAQLSNSLRVRGKDLKTAEIITQVIVDHDDPAFQEPTKFIGPPMTKEEAEEHQKNQGYLCRFYKLNDQGQEVWRRVVPSPKPKEIIEIDIIESCLQSGNIPIAVGGGGIPVVAIEPQKAGELEQYPCSYDITYQKSQDAPPAKVYCGVEGVIDKDLSSSLLATSLRERAHRRGEELEVVFVILTDVDGVKLNYQQPNQEDVRSLNLEETRELQQSGIFPSGSMGPKVEAVVNFLEAGGQQAFITNIQVLEQTFSGQAGTRFQSH

SEQ ID NO: 128748 - protein, 318 aa, Unknown
  Bacterial polypetide isolated from the Sargasso Sea
MQKKKLAVVAVGGNALIRSSDEVSLDQQYDAVVETARHVADLIAAGWQVVLTHGNGPQVGFILRRSELASAQVPTVPLEYAVGDTQGAIGFMFQNALGNELRRRGLADTKVITLVTQTLIDRCDPAFTHPDKPIGAHMSQPIAEQLAAEQGWQIAEDAGRGWRRVVASPAPLGIVETPTIRVLLEQDALVIACGGGGIPVVREKDGSLQAAQAVIDKDRASALLAIELQADMLLIPTGVEQVAIHFETPEQRWLETLNLAEATQLLADGHFGAGSMGPKVEAMLRYLKGCPDGVGLITNPPSMGKAVLGLAGTRFLGH

SEQ ID NO: 128749 - protein, 308 aa, Unknown
  Bacterial polypetide isolated from the Sargasso Sea
MIALGGNSLSRNGQTGTIQQQFEYTRDALTGISHFIEQDYNICINHGNGPQVGNELIRMELTQDIVPPLPLGVCVAGTQGTIGYMIQQSLQNKLREMNKDREVVSLISQVIVNDDDPSFKEPTKYVGPRYSKIESEKMAKKFNWIFKEQEKDKYRRVVPSPMPEYIMHGKSIKALVDRGTIVIASGGGGIPVYNNDAGKLEGLDAVIDKDYSAAKMGRIIRAQELWIITDIDNIYLNYGTDQQQKIDSINRIDLEDLYNNGEFQKGSIGPKIKAAIHFLKHHGHKVKITSIPCIKDAMNNLAGTEIRN

SEQ ID NO: 128750 - protein, 268 aa, Unknown
  Bacterial polypetide isolated from the Sargasso Sea
MMIALGGNALSPKDQTGSIKEQFERTRESLNGIMEFIKLGYNICLTHGNGPQVGNELLRMDLTYDQVPPLPLGLCVAGTQGTIGYMIQQSLQNKLRTLELDREVVTLVTQVRIDENDPAISNPTKFVGKTYTKETAESYANQLGWDIAEQNPGEWRRVVPSPLPHYVMHGKSIKALVNRGTIVLAAGGGGIPVYNDASYRLKGLDAVIDKDLTAAKLGRVIRAQELWIITDVDYVYLRFKKEGEKAITSMTTIEAENYLLEGEFKKGS

SEQ ID NO: 128751 - protein, 134 aa, Unknown
  Bacterial polypetide isolated from the Sargasso Sea
MRIVVALGGNALLKRGEPLTAENQRRNVRVACKALAPLAEKHQLVITHGNGPQVGLLALQSASFDEVEGYPLDVLGAQSEGMIGYMIEQELGNLMPTETAFATILTMVEVDPEDPAFQNPTKPIGPVYRREDAN

SEQ ID NO: 128752 - protein, 240 aa, Unknown
  Bacterial polypetide isolated from the Sargasso Sea
MKKPTVVVALGGNALLRRGEPLEADIQRKNIATAAKTIARIAEDYNVVLVHGNGPQVGLLALQNSAYTKVSPYPLDVLGAESQGMIGYMLIQELKNLMPSRNVTALLTQVQVDPQDPAFANPTKFIGPVYEEAEARTLAAEKHWVVKADGKFFRRVVPSPLPQRIVEGDAIETLIAQGHLIICTGGGGIPVTWDGQSLTGIEAVIDKDMSAAYLAKQIKADALLILTDADAVYLDWGKPT

SEQ ID NO: 128753 - protein, 241 aa, Unknown
  Bacterial polypetide isolated from the Sargasso Sea
MRKKIVLALGGNALGEDLAGQMQAVKITAQAIVDLIAQGHEVIVTHGNGPQVGMINQAFEAAAKTEAHSPMLPMSVCVALSQGYIGYDLQNALREELLSRGMHKPVATLVTQVEVDAHDPAFLNPTKPIGSFFTQQEAEQLEKQGYTLKEDAGRGYRRVVASPKPVDIIEKETVNALVEAGQVVITVGGGGIPVIREGNHLRGASAVIDKDWASARLAEMIDADMLIILTAVEKVAINFGK

SEQ ID NO: 128754 - protein, 127 aa, Unknown
  Bacterial polypetide isolated from the Sargasso Sea
GGGGIPGGGGFPGGGGIPGVGGIPGGGGIPGGGGIPGGGGIPGVGGIPGIGGIPAIFSRNAPLPPITAPALRRPLAGARLASPVTRPLPTGALAQSPALARPQSGALLQAPTRTTPRARTQTPGQTP

SEQ ID NO: 128755 - protein, 308 aa, Unknown
  Bacterial polypetide isolated from the Sargasso Sea
MKKPTVVVALGGNALLRRGEPLEADIQRKNIATAAKTIALIAQEYNVVLVHGNGPQVGLLALQNSAYTKVSPYPLDVLGAESQGMIGYMLIQELKNLMPSRNVTALLTQVQVDPKDPAFANPTKFIGPVYEEAEARTLAEEKHWVVKADGKFFRRVVPSPLPQRIVEGDAIETLIAQGHLIICTGGGGIPVTWDGQSLTGIEAVIDKDMSAAYLAKQIKADALLILTDADAVYLDWGKPTQRPLRITSPDELAGVKFDAGSMGPKVEASCEFVKATGGMVGIGSLEDGLAILKGEAGTNIVATRTVNA

SEQ ID NO: 128756 - protein, 319 aa, Unknown
  Bacterial polypetide isolated from the Sargasso Sea
QIKFLLNNNAKILILSHVGRPKGKTVDELSLRPICDFIKKKINQEIKLITKNIKKINSNELFINKAEKIIMFENIRFNKEEEDNDIDFAKHISNLGDIYVNDAFSCSHRAHSSIHKIPKFLPSYSGLQLDSELYALKKLTSTIKKPITCIIGGSKISTKINIIKNLISKFNNIVIVGGMANNILKYKGYEIGKSILEKNCSELIKEIFYLSKKKKCKIFFPEDVVVGKNLDDSSKVKLLDSVSSDEMILDIGPNTINTIKNIIKTSKTVLWNGPAGYFENLNFAHGSYEIGKEIAKKTEKEEIYSVVGGGDTIKVINQN

SEQ ID NO: 128757 - protein, 120 aa, Unknown
  Bacterial polypetide isolated from the Sargasso Sea
GTKHTKNKDNIEENEIILDIGPETIKNIKNTIDKSKTVLWNGPAGYFENKNFSKGTLEIAKKISDNTINKSLISILGGGDTISAINTSEEKFNFTYLSTAGGAFLEFLEGKDLPGLNVLK

SEQ ID NO: 128758 - protein, 90 aa, Unknown
  Bacterial polypetide isolated from the Sargasso Sea
KETKTTIWNGPLGVFEFSSFEEGTRALGHAVSSNDGFTIVGGGDTVAVVEELGIADSMSYISTGGGAFLDFVQNGTLPILDLLEKKRSDS

SEQ ID NO: 128759 - protein, 65 aa, Unknown
  Bacterial polypetide isolated from the Sargasso Sea
MQIPSMETLDLQGKRTMIRLDLNVPIKDGLVTSDARIMASLSTIEMALDKGAKVILLSHLGKTRS

SEQ ID NO: 128760 - protein, 288 aa, Unknown
  Bacterial polypetide isolated from the Sargasso Sea
MKSIEDKHLSKKNILVRVDLNVPVVNSKITDRSRIKSILPTLKKLKDSNNKIFLISHFGRPKGIKNKKYSLKFICSILEEELNIKKIYFLEDCDEKNIQNMINIINPGDICLLENIRFYSAEEKNDLDFAKNISKNFDAFVNDAFSCSHRKHASIVGLPTFLPSYLGYSFLKEINNLNSLLSNKDKPNLAIIGGSKISTKIELLFNLSYYFDAIVIGGAMANTFLYAKKINIGKSLIEKNYNEVVFSIINKAKENNCEIILPIDVVCANNLNEKETVKRCEIDNVSDS

SEQ ID NO: 128761 - protein, 259 aa, Unknown
  Bacterial polypetide isolated from the Sargasso Sea
MRKLSETNVLNKTIALRVDLNVPVENGKVLDDTRILAIIPTLEYLLDQNTKIILISHFGRPKSGVFDSKFSLLPVAKRLEEIMNKQIKLFSSINEVNFSSDISLIENIRFFPGELENDEGLGKKLSNIADVYVFDAFGTSHRPHASTYGAIKASEVSCAGLLLETETDALQQAISSKNSPMLSIVGGSKVSSKLKVIKNLSKISDDVLTGGGITNTILKAQGHNIGLSLHEDSMLNDAKELLDTGKILLPDEVVVSKEY

SEQ ID NO: 128762 - protein, 67 aa, Unknown
  Bacterial polypetide isolated from the Sargasso Sea
PFQKGTHQLAKTIAGSEAFSLAGGGETIAAINKFINKDEVSYCSTGGGAFLEYMEGKLLPSIEALGG

SEQ ID NO: 128763 - protein, 185 aa, Unknown
  Bacterial polypetide isolated from the Sargasso Sea
MKSILNEKNLKSKKILLRLDLNVPLENGKISDTTRIDKILPTLNFLIQQKTKIIILSHVGRPKGKAVKELSLKPIGEDLRKKLNTSVKLITENIYEIKNKDFFEKFDEEIFILENIRFYAEEEENDLKFAKHLAGFGDIYVNDAFSCSHRAHASIQQISKYLPSFSGLQLDLEVTALNKITTEIT

SEQ ID NO: 128764 - protein, 54 aa, Unknown
  Bacterial polypetide isolated from the Sargasso Sea
FSLAGGGETLSAINKYIKLDDVSYCSTGGGAFLEFMEGKILPSIKALNAKQTGS

SEQ ID NO: 128765 - protein, 68 aa, Unknown
  Bacterial polypetide isolated from the Sargasso Sea
MRLLKDQNLSNKNVVVRLDLNVPIQDKQIIDSTRIISSVPTIKYLVDKNCKVLLTSHLGRPEEGKLIK

SEQ ID NO: 128766 - protein, 227 aa, Unknown
  Bacterial polypetide isolated from the Sargasso Sea
MNYIKDQKNLDGKIALLRLDLNVPLKNGIITDDTRIVKILPTLEFLIRNNLKIIIISHIGRPKGEWNDIFSMKPVCEYINKKINKRAKLIKKNIFQLKKEQLFLNSEDQVLFLENIRFYKNEEENDMNFSKHLASLGDLFINDAFSCSHRAHASISEITKYIPSYAGIQFEAEVDALEKVTKNIKKPITCIIGGSKISSKISIIKNLIPRFDNIIIVGGMANNLLKY

SEQ ID NO: 128767 - protein, 121 aa, Unknown
  Bacterial polypetide isolated from the Sargasso Sea
NSPAKVFDIMNIDKDYEGMDAGPKSLLKFKEVVLNSKTILWNGPLGVFEFSNFSKGTKELGKYISESTQNGAFSLVGGGDSVAAVKSFKMQKNMSYVSTGGGAMLESLEGKNLPGINALLK

SEQ ID NO: 128768 - protein, 65 aa, Unknown
  Bacterial polypetide isolated from the Sargasso Sea
SHEIAKEIVKKNKDNSIYSVIGGGDTIALINQINLAEEFNFVSTAGGAFLEYLEGKELPGIKALN

SEQ ID NO: 128769 - protein, 180 aa, Unknown
  Bacterial polypetide isolated from the Sargasso Sea
MSFAKEYAKENPEEIAIQDVNQSLTWDEVDDVLSRCGSGLQALDLGPDNRVAVFAENSVQTALANLGGLIGGASVVPVNFHLTGDEVNYILQDSGARVLFVGPETWERGIEAIKNSSVHTLVSWNVPVKDGMVDWIDWLSKADPEGLDQTVPPKPNLLYTSGTTGRPKGTDLPPTMFAEE

SEQ ID NO: 128770 - protein, 196 aa, Unknown
  Bacterial polypetide isolated from the Sargasso Sea
MNNLLDQNLVIKDKKVLLRVDLNVPMKDGTITETSRIEKIIPTIKLLIEKQAKIIILSHIGRPKGKIVKGMSLEPISKKLASLLNKEVLFNKNIINENTLSEVNKIPNGSIMMLENIRFNEGEESNEDKFSKKLSNLGNIYVNDAFSCSHRAHASIEGITKHIPSYFGLQINEEINALKKITSEIKRPITLIIGGQ

SEQ ID NO: 128771 - protein, 88 aa, Unknown
  Bacterial polypetide isolated from the Sargasso Sea
VVMDSKTILWNGPLGVFEFPNFSNGTKMLGDFISKSTKEGAFSLVGGGDSVAAVKKFKIENKMSYVSTGGGAMLESLEGKDLPGINAL

SEQ ID NO: 128772 - protein, 274 aa, Unknown
  Bacterial polypetide isolated from the Sargasso Sea
NDSKFSKKISTLGDLYINDAFSCSHRSHASVEGITKYIPSYFGLQINEEINALKKITSEIKKPISLIIGGSKISTKIKIINNLIKKFNNIIIVGGMANTMLKHSGINVGSSICEYECGPLIKEIKENSKKYNCEITVPKDVIVSESLNGSGKQKNINNVEQNEMILDIGSETISMIKKIINKSETVLWNGPAGYFENPNFQNGTKEILELISQRTKNEKIFSVAGGGETVAAINKFKKFDSFTFVSTAGGAFLEYLEGKTLPAIKALNQNVSIK

SEQ ID NO: 128773 - protein, 104 aa, Unknown
  Bacterial polypetide isolated from the Sargasso Sea
MIRSIKSFDLKGQTILMRLDLNVPLHNEKIQDDFRIRSCIPTINYCLDEGASIVIMSHLGRPDSKYNKNQSLIPVGESLAAMLEIPIKFSEDCISQDAIDTSLS

SEQ ID NO: 128774 - protein, 130 aa, Unknown
  Bacterial polypetide isolated from the Sargasso Sea
MPDVKFLSNDISLKNKRVILRLDLNVPISNSKIDDDTRIKVIKPFLKRLIEKKAKVILLSHLGRPRGKVISKLSLKPIFKYLKKNLNSNVYFYYEKIDKKAIDATKKLKGGEVLLFENIRFFEEEEMMTK

SEQ ID NO: 128775 - protein, 177 aa, Unknown
  Bacterial polypetide isolated from the Sargasso Sea
MNSIKDHTDLNQKKILLRLDLNVPLKNGVIKDETRIDKIMPIIDFLIKKNSKIIVVSHVGRPKGKINNEFSLKPICENIEKKINKKIRLVYDNIFKLKKEDLFKDHNDQLVFLENIRFYKEEEKNDISFAKHLAGLADLYVNDAFSCSHRSHASVNKITEFLPSFAGFTLETEINAL

SEQ ID NO: 128776 - protein, 40 aa, Unknown
  Bacterial polypetide isolated from the Sargasso Sea
AIRQAGVVDQIDHVSTGGGASLEYLEGLSLPGLRALERQT

SEQ ID NO: 128777 - protein, 280 aa, Unknown
  Bacterial polypetide isolated from the Sargasso Sea
MKSIENIENIENKRVILRLDLNVPIKNGKITDTNRIDKVMPTLEFLLKKKAKIIIISHVGRPKGKIVKELSLELVSLYIKSKIKKEVSLLKKNIFNLNKEDIFKNSNDELVLLENIRFYPEEEANDDKFSKKLASLGEIYVNDAFSCSHRDHASVSKITKYIPSYSGIQINAEVNALNKITSEIKKPITCIIGGSKISSKINIIKNLIPKFNSIIIVGAMANNIFKYKGLKIGNSVYEKNIDYIIQEIFTYAEKNKCKIYFPKDVKIGKKLKDKSLEKDF

SEQ ID NO: 128778 - protein, 168 aa, Unknown
  Bacterial polypetide isolated from the Sargasso Sea
NILKYKGYNIGASLFEKNSEKIIEEIFSEIESNSCRIYFPEDVKVGKSLEDNSIQKSLNQIENDDMILDVGSKTIQNIKSVIDISSTILWNGPLGYFENPNFSKGSIEIAKYIGNKQGEIYSVIGGGDTVSVVNSMKIKNKFNFVSTAGGAFLEYLEGKILPGIRALS

SEQ ID NO: 128779 - protein, 280 aa, Unknown
  Bacterial polypetide isolated from the Sargasso Sea
LDGRVKTLHPKIHAGILHDRSNKKHLGEMKRKRFPPLDLIVVNFYPFQNIITRSKNEKSIIENIDIGGPTMVRAAAKNFKNVLIITNKKDYNLLNKELLSYKGKSSLKFREIMASKAFSLTAYYDSLISNWFNKKLKIIFPERLTIFGRKYENLRYGENPHQKGSIYLSDFNDKKMDLQKISGKKLSYNNYNDMLSAIEIVRSLKKLPSAVIIKHANPCGVSSNKSPIISYKNAFFSDPLSAFGGILAVNFKVNKKIAKEINKTFYEVVIADKFDKDAIK

SEQ ID NO: 128780 - protein, 233 aa, Unknown
  Bacterial polypetide isolated from the Sargasso Sea
GASHRKHSSVYGVSFLMDSYAGELMLKELSTITKINSTSSGKSVLIIGGAKIEDKSGILVNLIEKVDKIIIGGGMIANFLTKNLDKKLKEIYQTNKEKFYIPEDLLVSKNFSENSEKNLIHVSDYNDSLKIVDIGFKSIKSISELLKNIEIAIWNGSMGVFEWEQCSMGTKSLINLLKENNIKTYAGGGSTIEAINKFDHKSSFEHVSSGGGAFLELLEKETLPGIENLYEAR

SEQ ID NO: 128781 - protein, 286 aa, Unknown
  Bacterial polypetide isolated from the Sargasso Sea
EKLYAAGRIPGVFMRREGRPPERATLIARLIDRPMRPLFPSWMRDEIQIVASCLSLDERVPADVLAVTGASLATLLGEIPFYGPMAAVRVGLIGDDFILNPSYREIEKGDLDIVVAGSPDGIVMLEAGANQLSEQDTIEAIDFGYEAVSELIKSQEDLLKDLGIKQIKPSEPEEDKTLPSYLEKNCTKPIELVLKKFDLSKEERDLELEKIKVETQDKIESLKDGNQIKVLLLENDKLLSSDFKKLTKKLMRSQIINNNKRVDGRDLDEVRKISASAGILPKRVHG

SEQ ID NO: 128782 - protein, 126 aa, Unknown
  Bacterial polypetide isolated from the Sargasso Sea
MKTLENSEIIEKTILFRADLNVPVVDGKITDYSRIDSIIPSLKKLTERKNKIFIIAHFGRPNGSVVKTLSLSFLCEELRKKLNFSKIHFLNTINDKAVKIKQSQMDYGEICLLENIRFYKEEEETY

SEQ ID NO: 128783 - protein, 161 aa, Unknown
  Bacterial polypetide isolated from the Sargasso Sea
MNSIKDQKNLNKKKVLLRLDLNVPLKNGSITDETRINKIIPIIDFLIKEKSKIIIISHVGRPKGKVNSDLSLKPICESLAKKINIKIRLVKESIFELKKEDLFKDPNDQIVFLENIRFYKEEENNDANFAQHLAKLADLYVNDAFSCSHRAHASVSKITKF

SEQ ID NO: 128784 - protein, 88 aa, Unknown
  Bacterial polypetide isolated from the Sargasso Sea
CSTLIWNGPLGAFEVPPFDKATKEVAEFVAQLTKSKKIKSFAGGGDTVSALRSAGVFDDFTYVSNAGGAFLEWLEGKKLPGLKALESP

SEQ ID NO: 128785 - protein, 272 aa, Unknown
  Bacterial polypetide isolated from the Sargasso Sea
MNNIKDQENINQKIILLRLDLNVPLKNGVITDQTRIDKILPVINFLVKKNCKIVIISHVGRPRGKVNKELSLKPICENLEGKINQKIKLINENIFKIKKDKLFKNFDGRIIFLENIRFYEEEEKNDTNFSKQLASLADLYVNDAFSCSHRAHASISKITEFLPSFAGLQLETEINALKKVTSEIKTPVTCIIGGSKISTKINLIKNLIPKFDNIIVVGGMANNILSYKGNSIGKSIKEDNCENEIENIFKISNDHSCSIIYPKDVKIGKSHG

SEQ ID NO: 128786 - protein, 189 aa, Unknown
  Bacterial polypetide isolated from the Sargasso Sea
NLIKSSDNLIVVGAMANHFVKFQNKNVGKSIVEAGIESIIEKINNLAIRSNCRLIIPIDCSTSNNIKGNSVYKSLDELNDDDIILDIGKNTINLINKTIDDSNTVFWNGPAGYYENKNFSTGTLAIAKKISENTKTKSLISIVGGGDTIAAIKNTGLENSFTHLSTAGGAFLECLEGRELPGIKVLKKN

SEQ ID NO: 128787 - protein, 80 aa, Unknown
  Bacterial polypetide isolated from the Sargasso Sea
FRDEFLNNADHIIIGGGMAFTFLKSRGKSVGGSLVDEKMLETAKRIINKARVKGVKLSLPIDVICGSSPTESEARGTFLN

SEQ ID NO: 128788 - protein, 206 aa, Unknown
  Bacterial polypetide isolated from the Sargasso Sea
GSILMLENIRFNEGEETNNADFSKKISKLGDVYVNDAFSCSHRSHASVEGITKYIPSYFGLQITEEINALKKITSEIERPISLIIGGSKISTKIKIINNLIKKFNNIIIVGGMGNTMLKHTGSNIGKSICENDCGSLIKEILENSKKYNCKITIPQDALVSKDINGEGKEKKINEIEENEMILDIGTKTILSIEAIINNSKTILWN

SEQ ID NO: 128789 - protein, 91 aa, Unknown
  Bacterial polypetide isolated from the Sargasso Sea
SIIDQSNTVLWNGPAGYFENKNFLNGTLAIAKKISKSTASKSLISILGGGDTISAINNGEDKFVFTHLSTAGGAFLEFLEGKDLPGLNVLK

SEQ ID NO: 128790 - protein, 152 aa, Unknown
  Bacterial polypetide isolated from the Sargasso Sea
MNSIKDQKNLNKKKVLLRLDLNVPLKNGSITDETRINKIIPIIDFLIKEQSKIIIISHIGRPKGKVVTHLSLKPICENIEKKINRKIRLVKDDIFKLKKEELFEDANDQIVLLENIRFYKEEEKNDINFAQHLAKLADLYVNDAFSCSHRAH

SEQ ID NO: 128791 - protein, 149 aa, Unknown
  Bacterial polypetide isolated from the Sargasso Sea
DIRKYYKKAEENNCKIFIPEDCMVGTDFEGTGKNKNLDEIQENEIILDIGFNTIKKIQKKINESNTVMWNGPAGYFENKNFLNGTLSIAENISKNTIEKSLISILGGGDTLAAINKSDDKLTFSHLSTAGGAFLEYLEGKDLPGISVLK

SEQ ID NO: 128792 - protein, 123 aa, Unknown
  Bacterial polypetide isolated from the Sargasso Sea
EAEATIKSIDEVAEDDLILDIGPETTKSYCNIINETKTTIWNGPLGVFEFSSFAEGTRALGHAVSSNQGFTIVGGGDTVAVVEELGIADSMSYISTGGGAFLDFVQNGTLPILDLLEKKRGDS

SEQ ID NO: 128793 - protein, 209 aa, Unknown
  Bacterial polypetide isolated from the Sargasso Sea
MKSIKDQKNLNQKKVLLRLDLNVPLKNGSITDETRINKIIPIINFLIKEQSKIIIISHVGRPKGKVIMDLSLKPICENVEKKIRKKISLIKEDIFKLKKDDLFKDSNDQIVFLENIRFYEEEEQNDANFAKHLAKLADLYVNDAFSCSHRAHASVSKITEFIPSFAGLQLETEISALKKVTTEIKKPITCIIGGSKISTKIGIIKNLIS

SEQ ID NO: 128794 - protein, 166 aa, Unknown
  Bacterial polypetide isolated from the Sargasso Sea
DGIHVGASLVEDGMENQIEEILNYAKKKNGKIIKPIDFDTSLNMNGNATYKSVDAIGSKDIILDIGKKTVELISNVINNSNTVFWNGPAGYFENKNFIKGSLEIAKKIAENTKSKDLISIVGGGDTIASLKNTKLQNSFTHLSTAGGAFLEYLEGRELPAIRSLKR

SEQ ID NO: 128795 - protein, 63 aa, Unknown
  Bacterial polypetide isolated from the Sargasso Sea
AIAKKISENTEKKSLISVLGGGDTIAAINKNNDKFCFTHLSTAGGAFLEFLEGKDLPGLNVLK

SEQ ID NO: 128796 - protein, 295 aa, Unknown
  Bacterial polypetide isolated from the Sargasso Sea
IDKILPTLNFLVKKKAKIIIISHVGRPNGKIVEELSLEPISLCIKQKIKKQVSLLKENVFKLNKRDIFKSSNDEVVLLENIRFYPEEEANDDKFSEKLASLGEIYVNDAFSCSHRDHASVSKITKYIPSYCGIQINTEVNALNKITSKIKKPITCIIGGSKISSKINIIKNLIPKFNNIIIVGAMANNIFKYKGLKIGKSIYEKNIDNIIHEIFSYAKKNGCTIYFPEDVKVGKRLNDKSIEKNFENIEDEDMILDVGSKTLIEIKKIIDNSSTILWNGPLGYFENTNFSLGSSE

SEQ ID NO: 128797 - protein, 251 aa, Unknown
  Bacterial polypetide isolated from the Sargasso Sea
MRSIIKEKNLNNKKILLRLDLNVPLERDKITDTTRIDKILPTLNFLIKEKAKIIILSHVGRPKGKIVKDLSLKPICEELQNKLRKKVKLISENIKEIKTKNFFNNYNEDIFILENIRFYSEEEQNDNKFAEQLSNLGDIYVNDAFSCSHRAHASIYEIPKFLPSFSGLQLDLEVNALNKITSEITRPITCIIGGSKISTKINVIKNLIPKFDNIIIVGGMANNFIEYFGNSIGKSIKEKNCDKIVEEIISL

SEQ ID NO: 128798 - protein, 158 aa, Unknown
  Bacterial polypetide isolated from the Sargasso Sea
MKSLKNLNFEKIQNVGIRVDFNVPIDNNFRITDKTRLDRSRETIDFIKNKQCNIFLISHFGRPKENFDEEYSFIKLIDQFEDILKLKLNFISYDSFLDSGLNKIDSDKPTISLLENIRFFEGEIKNDLNFSKSITDKLDLYVNEAFSASHRYHSSVNQ

SEQ ID NO: 128799 - protein, 320 aa, Unknown
  Bacterial polypetide isolated from the Sargasso Sea
KVVPDLSLQPIFDYLKKKLKGKIYFYKDKIDNLAIQASKNLKPGEVLLVENIRFFKEETEDEEIFAKNLSKLGDIYVNEAFSCSHRKQASMHKITEFIDSYGGPLLEKEIQSINVLIKNRKKPVTCIIGGSKVSTKINILSSLLEKSDNLVIVGAMANNFLKFKGINVGASLVEKNSENFVKKVEILAKKNKCNIVMPVDCNTSLDSSGQATYKTIKDIGAKDMILDIGKKTIGLINRTIDNSNTVFWNGPAGYYENKNFSIGTLSIGKKIAENTKSKSLISIVGGGDTVAAIKNTYLKNVFTHLSTAGGCILRIAEGKD

SEQ ID NO: 128800 - protein, 247 aa, Unknown
  Bacterial polypetide isolated from the Sargasso Sea
VLFRADFNVPFVNGKITDFSRIEAVKKSIHKLIKQKNKIFIISHFGRPKGKINKKFSLEFLCPTLEKIFEINKIYFLKNLESENILNKLKELDYGEICLLENIRFNPSEEKIDLNFANLLSKHFDVYVNDAFSASHRNHTSITGLPHYLPAVAGYSFIDEMHNINLFLKKAKKPNIAVIGGAKISTKIELLNNFIQLFDTVVIGGAMANTFLLSNNINTGISLVEKDLLSVAKDIQDQAKKFNCNII

SEQ ID NO: 128801 - protein, 161 aa, Unknown
  Bacterial polypetide isolated from the Sargasso Sea
MKSLKNLNFEKIRNVGVRVDFNVPIDKNFIISDKTRLERSKETIDFIKNKQCNIFLISHFGRPKENFDEKYSFSNLIEQFEDILELKLNFISYDSFLDSGLNKLNVNKPTISLLENIRFFKGEIKNDLNFSKSITDKLDLYVNEAFSASHRFHSSVNQMAK

SEQ ID NO: 128802 - protein, 52 aa, Unknown
  Bacterial polypetide isolated from the Sargasso Sea
KYNEDIFVLENIRFYSEEEQNDNKFAEHLSGLGDIYVNDAFSCSHRAHASIC

SEQ ID NO: 128803 - protein, 232 aa, Unknown
  Bacterial polypetide isolated from the Sargasso Sea
PNGLKIFYLPPGLNFEKEIKVINEIKKSQKKKLAIIGGSKISTKINTLLSLTSSCSNIFIGGAMANNFLKYNKFNVSSSLIEERAETMIEMIYSSTKQTGCKIHLPVDVMLDSNKSVLVNELYKNSEFKILDIADSSHIVLENLVRKSDIILWNGPMGMIEDHKFSKGSINLSHLLAKSQADVVIGGGDTILAINMAKEKFEDFYFVSTAGGAFLEALEDKELPGIEALKSD

SEQ ID NO: 128804 - protein, 62 aa, Unknown
  Bacterial polypetide isolated from the Sargasso Sea
MNHLQNQKFNNKKAIIRVDLNVPLNEKKEVTDYTRIEAIKETVNFVIDNGGSCILLSHLGRP

SEQ ID NO: 128805 - protein, 293 aa, Unknown
  Bacterial polypetide isolated from the Sargasso Sea
VPLDNDFKITDFTRIEFSKKTIEEIISRGGKCVLLSHMGRPNGRELKYSLSHILDSVQEILGVPVKFCNDCIGDDAIEAVDSLKEGEVILMENVRFYPEETKGDIDFARQLSKLGDYFVNDAFGSAHRAHSSTTIIADFFKERKFVGMLLDKEVKSIDRVLKNGKKPITAIIGGAKISSKITVIENLLDRIDYLILGGGMVYTFIKAEGGEIGDSICEDDFCEYSKKINELAKQKGVKLLLPEDVVIGNEFSSKAKINLSSVYKIPPGWQGLDAGPDSIKIFSQIIQKSNTIL

SEQ ID NO: 128806 - protein, 249 aa, Unknown
  Bacterial polypetide isolated from the Sargasso Sea
MKAVVTAGNGGFEKLQYREVKRPRPGPSEVLLRVLAAGMNNTEINTRVGWYSDSVTRATSVTAKSEVREAEVRIDGGWNETTPFPFIQGTDCCGRVAEIGPGGDPELLGKRVLVRSCIRPDGFESMENLWMGSDFDGAFAQYVKVPQAEVFVLECDWSDAELATIPCAYGTAENMIQRSGITSGERVLITGASGGVGSAALQLVKWRRAEVIAVAASSKKQQMLEIGADRVIGRDQDLLGNLEEKSVDV

SEQ ID NO: 128807 - protein, 190 aa, Unknown
  Bacterial polypetide isolated from the Sargasso Sea
IKENIYNIKNKDFFKKFNEEILILENIRFYPEEERNDNKFAKHLASLGDIYVNDAFSCSHRAHASIHKIPKYLPSFSGLQLDLEVSALNKITTEITKPITCIIGGSKISTKINIIKNLIPKLDNIIIVGGMANNFIEYFGNNIGKSIKEKNCFQIIEEIISISKKKGCKIIYPDDVLVSKDINGSSTNKE

SEQ ID NO: 128808 - protein, 79 aa, Unknown
  Bacterial polypetide isolated from the Sargasso Sea
MKSLKNLNFEKIQNVGIRVDFNVPIDKHFKITDKTRLDRAKDTINFIKNKQCNILLLSHFGRPKENFDDKYSFTKLIDQ

SEQ ID NO: 128809 - protein, 86 aa, Unknown
  Bacterial polypetide isolated from the Sargasso Sea
MRLLKDQDLSNKNVVVRLDLNVPIQDKQIIDSTRIISSVPTIKYLVNKNCKVLLTSHLGRPEEGKFDQDFSMSPVAKKLSEILNHE

SEQ ID NO: 128810 - protein, 287 aa, Unknown
  Bacterial polypetide isolated from the Sargasso Sea
MPNLVDFESIKNKTVILRLDLNVPIENGKIINDFRLRKSLETIRALRLVGNKLIILSHLGRPEEGTIDESLSLEPIYAYLAKNLDEDIKFEREWLANLRDTIPTITLCENTRFLSGEKSNDEGLSRKISELGDIFVFDAFGVAHRKEASTYGVSNYIDYSAGPLLISEIKNAQKLLKNFSKPLCTIVSGAKISTKLTLLNTFLEKSDHVILGGGILNTFLEAQGYNIGTSLCEPSFLDESKKILNSENCKKIVFPDDVVCAEDGVLENPQTKDISMVKSDDKILDVG

SEQ ID NO: 128811 - protein, 205 aa, Unknown
  Bacterial polypetide isolated from the Sargasso Sea
MKSIQSKGLDLNNKKILIRLDLNVPLNGANIIDTNRIDKTIPTLQYLLKNKAKIIILSHIGRPKGKIVNELSLKPVCNELEKKLNQKISFITETINKIKIENFFSERNNIVMLENLRFFKEEESDDAIFAENLANLADIYVNEAFSCSHRKHASVHSITKFIPSYSGIQLEAEVNSLIKITSNIKRPISCIIGGSKISTKITVIK

SEQ ID NO: 128812 - protein, 246 aa, Unknown
  Bacterial polypetide isolated from the Sargasso Sea
MRSIINEKNLYNKKILLRLDLNVPLERNKIIDTTRIDKILPTLNFLIKEKAKIIILSHVGRPKGKIVKELSLKPICEELQNKLRKKVKLINENIKEIKSKNFFSDFNEDIFILENIRFYSEEEQNDNKFAELLSNLGDMYVNDAFSCSHRAHASIYEIPKFLPSFSGLQLDLEVNALNKITSEITRPITCIIGGSKISSKINVIKNLIPKFDTIIIVGGMANNFIEYFGNSVGKSIKEKNCYKIVE

SEQ ID NO: 128813 - protein, 271 aa, Unknown
  Bacterial polypetide isolated from the Sargasso Sea
MNSISNNNLDLKGKKVLLRVDLNVPMKNGAITETSRIEKIIPTIKLLLKKEAKIIIMSHIGRPKGKAVNGMSLKPISEKLSHLLQKNVFFSKDLISEKTLLEINKISNGSILMLENIRFNKGEEKNDNEFSKQLSSLGDIYVNDAFSCSHRSHASVEGITKHMPSYFGLQITEEINALKKITSEIEKPVSLIIGGSKISTKIKIINNLIKKFNNIIIVGGMGNTMLKHTGSNIGRSICENECGSLIKEILENSKNIIAKLLFPKMQLYLPI

SEQ ID NO: 128814 - protein, 287 aa, Unknown
  Bacterial polypetide isolated from the Sargasso Sea
SEDQIVFLENIRFYKEEEENDIFLAKHLASLGDLFVNDAFSCSHRAHSTISKITEFLPSFAGLQLETEINALKKVTTEIKKPITCIIGGSKISTKIGVIKNLIPKFDNIIIVGGMANNILNFKGNHIGKSIKEENCEKIIKEIFETSKYHSCNIIYPKDVMVGKNVDDKSQVKKLDKIENDELILDIGPDTVNEIKNIIKISKTVLWNGPAGYFENPNFANGSYEIAKAIIKKNKERSIYSVVGGGDTVALINQMNAIKNFNFVSTAGGAFLEYLEGKELPGIKALN

SEQ ID NO: 128815 - protein, 202 aa, Unknown
  Bacterial polypetide isolated from the Sargasso Sea
MNYIKDQENLNKKKILLRLDLNVPLKNGSITDETRINKIIPIINFLIKEKSKIIIISHVGRPNGKVNTNLSLKPICENVEKKINQKIRLIKDNIFKLKKEDLFKDKNDQVVFLENIRFYEEEEKNDSNFAQHLAKLADLYVNDAFSCSHRAHASVSKITEFLPSFAGLQLATEISALKKVTTEIKKPITCIIGGSKIQQKLE

SEQ ID NO: 128816 - protein, 238 aa, Unknown
  Bacterial polypetide isolated from the Sargasso Sea
MKYIKDQENLNEKIILLRLDLNVPLKNGIITDQTRIDKILPIINFLLKKKSKILIISHVGRPNGKENNLLSLKPICENIGKKINQKVNLIKDNIFKLKKEDLFKNTKDQVIFLENIRFYKEEEKNDKDFSKHLAKLADVFVNDAFSCSHRAHASISKITGFLPSYAGLQMENELDALKKVTTEIKKPITCIIGGSKISTKIGIIKNLIPKFDNIIIVGGMANNILYYKGNLIGKSIKE

SEQ ID NO: 128817 - protein, 159 aa, Unknown
  Bacterial polypetide isolated from the Sargasso Sea
MDEINFFPENLNIQGKKVLLRLDLNVPMQDKIIQDDTRIRLCLPFIKKLIEKKAKIIIITHLGRPKGVKSSDLSLMPIFKYLKKNLKTKIYFFTGEINDHSQEKFSHMKEGEIILIENIRFFKEETDDDIEFSRKLASLGNVFINDALSCSHRKQASIH

SEQ ID NO: 128818 - protein, 163 aa, Unknown
  Bacterial polypetide isolated from the Sargasso Sea
MKSIENLVNIVNRIVILRLDLNVPIKSGKITDTNRIDKIIPTLNFLIKKKAKIVIISHIGRPNGKIVNELSLEPVSIYLKNKLKKKISLIKENIFNLDKKDIFKDSNDKLVLLENIRFYPEEEANDEKFSQKLASLGEIYVNDAISCSHRKHASVSKITKYIP

SEQ ID NO: 128819 - protein, 287 aa, Unknown
  Bacterial polypetide isolated from the Sargasso Sea
LMKNIKDQENLSQKKVLLRLDLNVPLRSGFITDETRIDKIIPIIKFLIKKGSKIIIISHVGRPKGQINKILSLKPICKSLEKKLNKKIHLLDENIFELKKEDLFKNSQDEIVFLENIRFYKEEEKNDASFAKHLASFAELYVNDAFSCSHRSHASISKITEFLPSYAGLQLETEINALKKVTTEIKKPITCIIGGSKILTKIDIIKNLIPKFDNIIIVGGMANNIINYKGYNIGKSVKEVNCEKAIKEIFETSKNLSCDIIFPEDVLVGKSLSDDSKEKELKDIKDE

SEQ ID NO: 128820 - protein, 62 aa, Unknown
  Bacterial polypetide isolated from the Sargasso Sea
MIKSISKFDIKHKRVLIRADLNVPINRDKVQDDFRLKALLPTLHYCLKNNAKIVFNVSSRQT

SEQ ID NO: 128821 - protein, 220 aa, Unknown
  Bacterial polypetide isolated from the Sargasso Sea
LSMKPICESLENKINKKIKIIIDDVFKLKKQDLFRDTKDQIVFLENIRFYKEEEKNDISFAKQLAGLADLFVNDAFSCSHRAHASLCKITEFLPSFAGLQLEKEVNALKKVTTEIKKPITCIIGGSKISTKIGIIKNLIPKFNNIILVGGMANNIINHKGSQIGKSIKEENCEKTISQIFEIAKNHSCKIIYPEDVLVGKNMEDTSEIRELNNIEDEDII

SEQ ID NO: 128822 - protein, 97 aa, Unknown
  Bacterial polypetide isolated from the Sargasso Sea
TINTIKNTINTSRTVLWNGPAGYFENSNFANGSYEIGKEIAKKTKEGKLYSVVGGGDTTTVINKINLFNKYNFVSTAGGAFLEFLEGKDLPGIKALN

SEQ ID NO: 128823 - protein, 234 aa, Unknown
  Bacterial polypetide isolated from the Sargasso Sea
FIKYFQKTCKHLKYCENPVISAPSGLALGGGEEVLLQSNYVVSHTNIVMGLVETIVGLVPAGGGCKELLWRWTQTNESKNDPDFASLKVFDIIGYAKTASSPQEAKPLLFLDKNHEVIINRNNLFGVARKFIEKNKDFNPPIKCKFKLSGNQVRQKMQKKLDELYNNKKILDHGMVVGKELAYVLSGGDTEKNKEISEDQMYNLELNSFMKLLDTKSTQSRIAHTLKTGKPLIN

SEQ ID NO: 128824 - protein, 159 aa, Unknown
  Bacterial polypetide isolated from the Sargasso Sea
MINIKDQENLSQKKVLLRLDLNVPLKDGLVVDETRINKIIPVINFLIEKKSKIIIISHVGRPKGKVDKILSLKPICENLEKKIKKKIKLISENIFKLKKDDLFQDPDDQIVFLENIRFYKEEEENDTSFAKNLANFADFYVNDAFSCSHRAHASISKIT

SEQ ID NO: 128825 - protein, 104 aa, Unknown
  Bacterial polypetide isolated from the Sargasso Sea
MGTKTIYSIKEIIDKSNSILWNGPAGYFENENFQNGTKKILEIISNKTLNDKIFSIAGGGETVAAINKFKKFNSFTFVSTAGGAFLEFLEGKDLPGIKALNKNV

SEQ ID NO: 128826 - protein, 271 aa, Unknown
  Bacterial polypetide isolated from the Sargasso Sea
ENNLDLNQKKVILRLDLNVPLSDGIITDTTRIDKIIPTINYLLKKNSKIIILSHIGRPKGKIVNKLSLRPVCDEIKKKINIDVKLITKSIRDILPSDLFENSEEKVLMLENIRFYKEEENGDENFGKHISCFGDLYVNDAFSCSHRAHSSINQIPKFIPAYSGLQLNTEINALKKITTEIERPITCVIGGSKISSKINVIKNLVNKLDNLIIVGGMANNILEYKGFEIGNSIKEQNCKKIIEEIFNLSKKKKCKIFYPEDVVVAKKLNGSP

SEQ ID NO: 128827 - protein, 306 aa, Unknown
  Bacterial polypetide isolated from the Sargasso Sea
MKTFELTGKKILLRLDLNVPLKDKRITELDRINKIIPTIKYLLKKKSKIIILSHIGRPKGKIEPNLTLEPVSKKLSEILSLKVKFVKDEIDEKLNYKIDTIKNSSIIMLENIRFNKGEEKNDHNFAKKLSKLGEIYVNDAFSCCHRPHASIDAITQYIPSYFGIQIVEEISALKKITSEIKKPITCILGGSKISTKINIISNLIKKFDNIVIVGAMANTILKEKGLNIGKSINEENCNKVVFKIFENAKKYKCKVLYPSDVIVSKNLNSAGKNKLINEIETDDIILDIGKNTISSIETILSNSKTI

SEQ ID NO: 128828 - protein, 246 aa, Unknown
  Bacterial polypetide isolated from the Sargasso Sea
MKSIEKLENIENKNVILRLDLNVPIKNDKIIDTNRIDKIIPTLNFLVKKKAKVIIISHIGRPHGKIVKELSLKPVSLCIKDKIKRDVFLLKENIFNLSKKDIFKNSSDGVVLLENIRFYPEEEANDDKFSEKLASLGDIYVNDAFSCSHRDHASVTKITNYIPSYSGIQINTEVNALRKITTEIKKPVTCIIGGSKISSKINIIKNLIPKFNNIIIVGAMANNIFKYQGLKIGKSICENNIGRIIQ

SEQ ID NO: 128829 - protein, 298 aa, Unknown
  Bacterial polypetide isolated from the Sargasso Sea
VLLRVDLNVPMKNGAITETSRIEKIIPTIKLLLKKEAKIIIMSHIGRPKGKVVNGMSLKPISEKLSHLLKKNVFFSKDLISDKTLLEINKIPNGSILMLENIRFNEGEEKNDSEFSKQLSSLGDIYVNDAFSCSHRSHASVEGITKYIPSYFGLQITEEINALKKITSEIEKPVSLIIGGSKISTKIKIINNLIKKFNNIIIVGGMGNTMLKHTGSNIGKSICENECGSLIKEILENSKKYNCEITIPKDVIVSTDLNGKGKEKKINEIKENEMILDIGSKTISSIETIISNSRTILW

SEQ ID NO: 128830 - protein, 156 aa, Unknown
  Bacterial polypetide isolated from the Sargasso Sea
MSDERSFSGGCQCGAVRFRASHLGRPSICHCRMCQKAFGNFFGALVTADIAHLTWTRGKPKMFRSSAKVLRGFCENCGTPLTYQFSGGVELAIGAFDEPQHFEPQIQVNHDSRLPWIDTLFEKPGRPQTLEESEIISRQHPDHDTDQWPPEDGAEA

SEQ ID NO: 128831 - protein, 230 aa, Unknown
  Bacterial polypetide isolated from the Sargasso Sea
MIKKGIVLAGGTGTRMSPITKAVNKQLLPIYDKPLIYYPLSVLMLSGIRDILIIVNKGQLNQFKKILPNGNNLGIKITYAEQKYPRGLPDAFNIGKNFIGKNNVALILGDNFFYGQSLTEKLKKCVNLNKGAKVILHPVNNPALYGIASINKKNKIIKIAEKPKKTFSKLAITGLYFFDNKVIKYTEKLKPSKRKEIEIVDLLNKYKKNNSLSAEFLGRGGAWLDAGSIK

SEQ ID NO: 128832 - protein, 176 aa, Unknown
  Bacterial polypetide isolated from the Sargasso Sea
MEYIKNQENLDGKIVLLRLDLNVPIKNGIITDQTRIDKILPVIKFLLEKKSKILIISHVGRPKGKIKKNLSLKPICENLEKKINQKIELTKQDIFKIKKEDLFKGPNEKIIFLENIRFYKEEEKNDTNFSKHLAKLADIFVNDAFSCSHRAHASISKITKFLPSYAGLQLETEINA

SEQ ID NO: 128833 - protein, 273 aa, Unknown
  Bacterial polypetide isolated from the Sargasso Sea
MISIKEVPNLHKKKILLRLDLNVPLKDGKIIDTTRIDKILPTLKFLIKENSKIIILSHVGRPNGKVVEGLSLKPIVDELQKKLSKKVKIIKKNINEIQNKDFFDTFDEKIIVLENIRFYREEERNDVKFAKHLASLGDIYVNDAFSCSHRAHASVYEITKFLPSYSGLQLDLEINALNKITSEIIKPITCIIGGSKISTKIGLIKNLIPKFDNIIIVGAMANNIIEYMGNNIGRSLREVNAIEIIEEIISLSKKENCNLIFPEDIVVAKSFYD

SEQ ID NO: 128834 - protein, 130 aa, Unknown
  Bacterial polypetide isolated from the Sargasso Sea
MAIKTLNDYNIANKKILVRADLNVPLENGKISDISRLISATPTIKTIQSLGGITILISHFGRPNGSYKEELSLKQVVPELEKLLNCPIKFSSELVGKNVIKKIDNLIGGEILLLENTRFFAEEEMNDESF

SEQ ID NO: 128835 - protein, 222 aa, Unknown
  Bacterial polypetide isolated from the Sargasso Sea
MSDLKFFSSNTPVDGKRVIVRLDLNVPISNSKIDDNTRIKVVEPFINKLLENKAKVILLTHLGRPKGRVVSELSLKPIFDYLKKELNGKVYFYNKKIDLNAVDATNKLKSGEVLLFENIRFFKEEENDEETFAKNLSELGDIFINEAFSCSHRKQASIHNITKFIDSYGGPILEKEIRSIELITKNKKKPVTCIIGGSKVSSKINILTSLTEKSDNLVIVGA

SEQ ID NO: 128836 - protein, 270 aa, Unknown
  Bacterial polypetide isolated from the Sargasso Sea
SGSSGLIGKSLINFLESKKHEIFILTRNIKENSKNSIFWDPYKNIIDLNKIENFDVFINLNGSSIAKIMMLGRIKFGSKKSIYNSRIISTKFLRNCIEKLSTPPKLYITASACGYYGDRGNSLVEESSKPGLGFLSDTAKIWENIAIPDKKNVRVVNLRLGLVITKNGGIIKSSKFIYKSYLGGKYGNGNQWWPWISMKDTIRAVEHIIENKSINGPVNLVSPKLIRNKDFVKKLSLYFNKPAVLNLPSYIIKIFFGGIADEALLSSQKV

SEQ ID NO: 128837 - protein, 219 aa, Unknown
  Bacterial polypetide isolated from the Sargasso Sea
LDPISKKLSDLLNKKIIFNKNIINKNTFSEINNLSNGSIMMLENIRFNEGEETNDKEFSKKISGLGDIFINDAFSCSHRAHASIEGITKYIPSYFGLQITEEINALKKITSEIKKPVSLIIGGSKISTKIRIINNLIKKFNNIIIVGGMANTMLKHTGSNVGKSICEHDCGQLIKEILEKSKKFGCKITCPTDVVVASSLEGLGKNKEGDKIEEDEMIL

SEQ ID NO: 128838 - protein, 223 aa, Unknown
  Bacterial polypetide isolated from the Sargasso Sea
MKSIESLENIENKYVILRLDLNVPIKNGIITDTNRIDKIIPTLNFLVKRRAKIIIISHIGRPNGKIVNELSLEPLSLFIENKIKKKVSLIKKDIFNLNKKDIFKNASDEVVILENIRFYPEEEANDDRFSAKLASFGEIYVNDAFSCSHRNHASVSKITEYIPSYSGIQINNEVDALNKITSEIKKPVTCIIGGSKISSKINIIKNIIPKFNSIIIVGAMANN

SEQ ID NO: 128839 - protein, 126 aa, Unknown
  Bacterial polypetide isolated from the Sargasso Sea
NYKDSSQNKDINKIAKDDLILDIGSKTIRKIINLIKNSKTILWNGPAGYFENDNFATGSFELAKEISAQTKSGNIFSVIGGGDTVSVINKLKLFNDFNFVSTAGGAFLEYLEGKDLPGIKSLNYNE

SEQ ID NO: 128840 - protein, 195 aa, Unknown
  Bacterial polypetide isolated from the Sargasso Sea
IKIINNLIKKFNNIIIVGGMGNTMLKHTGSNIGKSICENDCGSLIKEILENSKKYKCEITIPKDAIVSTDLNGEGKEKKINEIEENEMILDIGSKTISSIETIISNSRTILWNGPAGYFENPNFQNGTKKILELISQKTSNDKIFSVAGGGETVAAINKFRKFDSFTFVSTAGGAFLEYLEGKTLPAIKALNQNV

SEQ ID NO: 128841 - protein, 55 aa, Unknown
  Bacterial polypetide isolated from the Sargasso Sea
ASRGNKIFSVVGGGDTVAVINSLKLNNKFDFVSTAGGAFLEYLEGKVLPGIKALN

SEQ ID NO: 128842 - protein, 118 aa, Unknown
  Bacterial polypetide isolated from the Sargasso Sea
MHKIKYLHSDLNIENKRIILRTDFNVPIEKGKILDCTRIDAVIPFLNELMKKKSKVVLISHLGRPSGKIEKKFSLKPVFEYLKKKIKNEVFFSNSNIIDAKEKSSKLEPSQILLLENI

SEQ ID NO: 128843 - protein, 126 aa, Unknown
  Bacterial polypetide isolated from the Sargasso Sea
MLRTLKAFDLKNKKVLMRVDFNTPLKDSKVSDNFRIKSTLPSIKTCIEGGAALTIMSHVGRPNGEYDKKLSLMPIGEELASLLQMPIKFSNDCISQDAFDTSFGLKPGEIHLLENLRFHDSEQLND

SEQ ID NO: 128844 - protein, 159 aa, Unknown
  Bacterial polypetide isolated from the Sargasso Sea
MNNIKDYGNLNQKKVLLRLDLNVPLSNGVIIDETRIDKILPVINFLIKKNSKIIVLSHIGRPKGKINNDLSLKPICENLEKKINKKIRLIGDDILKLKKDDLFKDLNDQIVFLENIRFYEGEEKNDYSFAKHLAGLADLYVNDAFSCSHRFHASVNKIT

SEQ ID NO: 128845 - protein, 241 aa, Unknown
  Bacterial polypetide isolated from the Sargasso Sea
KCNVVLLENLRFFEQEASNDDIFSKKLSSFADIYINESFSTCHRKHSSIVGIPKFLPSFPGMLLEKEVLNLKKLITNANYSSAVAVFGGSKVSTKIKVIEYYLKKFDKVLIGGAMANTFLYSKDINIGSSICEKSMKKTAKSLLDYYGDKIALPDDLVTIDKHKKNQLRSINDIKKDEKIFDIGPQTRMKYFNSIEECSCLLWNGPLGFYEQKPFDEGTNYVIKAVKNNNNKNFFSVAGGG

SEQ ID NO: 128846 - protein, 139 aa, Unknown
  Bacterial polypetide isolated from the Sargasso Sea
MRVDFNLSRDGAGQWILNKRLYGVLPVIKELLAMQFGVILVSHLGRPRSGVWEERFSLSSLCVELEKLLNKTVTFLSAWPYQKTYLAGGTVALAENTRFLKGERENDSDLAKKMVENVDLVVMEAFACSHRRHASTVGI

SEQ ID NO: 128847 - protein, 94 aa, Unknown
  Bacterial polypetide isolated from the Sargasso Sea
LDKAAERNVQFLIPTDNVVAEPTEMDGKFAFGDHRVNDDKNIPDDVEGVDIGPKSADTFSEVIKGAKTILWNGPMGIFEDDRFAGGTFAVARAV

SEQ ID NO: 128848 - protein, 47 aa, Unknown
  Bacterial polypetide isolated from the Sargasso Sea
MLKIKQLDNDLNVEGKRVLLRVDFNVPLSDGSISETSRIQKVLPTIK

SEQ ID NO: 128849 - protein, 137 aa, Unknown
  Bacterial polypetide isolated from the Sargasso Sea
IVFPEDVSVGKNFEDSSQNKDVNKIAKDDLILDIGSKTIRKIINLIKNSKTILWNGPAGYFENDNFATGSFELAKEISAQTKSGNIFSVIGGGDTVSVINKLKLFNDFNFVSTAGGAFLEYLEGKDLPGIKSLNYNE

SEQ ID NO: 128850 - protein, 62 aa, Unknown
  Bacterial polypetide isolated from the Sargasso Sea
IANSIVEATENGTFSLVGGGDSVAALNQFNLSKKVSHVSTGGGAMLKYLEGKQLPGISAILS

SEQ ID NO: 128851 - protein, 62 aa, Unknown
  Bacterial polypetide isolated from the Sargasso Sea
MAGKISENTEKKSLISVVGGGDTVSAINKSEKKYNFTHISTAGGAFLEFLEGKDLPGLNVLK

SEQ ID NO: 128852 - protein, 90 aa, Unknown
  Bacterial polypetide isolated from the Sargasso Sea
MRLLKDQDLSNKNVVVRLDLNVPIQDKQIIDSTRIISSVPTIKYLVNKNCKVLLTSHLGRPEEGKFDQDFSMFPVAKKLSEILNYEIDLI

SEQ ID NO: 128853 - protein, 75 aa, Unknown
  Bacterial polypetide isolated from the Sargasso Sea
MRLLKDQDLSNKNVVVRLDLNVPIQDKQIIDSTRIISSVPTIKYLVNKNCKVLLTSHLGRPEEGKFDQEFSMSPV

SEQ ID NO: 128854 - protein, 294 aa, Unknown
  Bacterial polypetide isolated from the Sargasso Sea
IKNKKYSLKFICNILEEEINIKKIYFLKDFDEKNIQNMINNIKPGDICLFENIRFYSAEEKNDLDFAKNISKNFDAFVNDAFSCSHRKHASIVGVPTFLPSYLGYSFLKEINNLNSLLSNKDKPNLAIIGGSKISTKIELLFNLSYYFDAIVIGGAMANTFLYAKKINIGKSLIEKNYNEVVFSIINKAKENNCEIILPIDVVCANNLNEKETVRRCEIDNVSDSQMILDIGSKTTQIISQYINKSKLILWNGPLGAFEYPSFAESSIKIANIIKSRSTNSEITSVAGGGDTNS

SEQ ID NO: 128855 - protein, 173 aa, Unknown
  Bacterial polypetide isolated from the Sargasso Sea
MANNFFVYKNFKVGKSLVEKDTNEIIKNIYKKAKENSCDILIPVDCIVSTDFQGEGKNKNLDEIQDNEIILDIGINTIDNIKKKIDESNTVLWNGPAGYFENINFSKGTLSIAENISKNTINKSLISVLGGGDTLAAINKSKSKLSFSHLSTAGGAFLEYLEGKDLPGISVLK

SEQ ID NO: 128856 - protein, 239 aa, Unknown
  Bacterial polypetide isolated from the Sargasso Sea
MTILTGGQAAIKSLEVENVKHVFGLIGSATMEMFDALYDSKEIKFIGVHDERSGVHMADGYARSSGKPGIFLAGQNGPGATNLTTGLAQSMAAYSPVISIAGSLSTEHIYRDAFQEVDQQSLFKPITKKTWTITQTERIPEIFREAFRVSMSPRQGPVQINIPRDILAKETNFANFQEPENYRLNTLPVASSKTIEKASKMIVSSKNPVIIIGGGIKNSEGHSEILNLAEKLNIPIIMS

SEQ ID NO: 128857 - protein, 275 aa, Unknown
  Bacterial polypetide isolated from the Sargasso Sea
GRVEVINMSLGGGGNNAIICEEIENLKNSGIFVVASAGNEGNSAIRFPASCEYSISVSSTKFDERKSSFSSYNNFVNLAAPGGQLSEDLDNNGRGDGIMAYTFRNSSQGGNDYKGLQQYQGTSMAAPHVSGYLALIKTIDPDITFEELDLLIKSKNLTKDVGYPGKDEFYGYGLIDMAVGIENLINGIPPEQLTFSEISPEKLFLGYALNEKVFSLSGNAEVESWNLEDSTNSLSLEQTSSVDINGYGEWKVKLDRTNLADGNYMGLAIIAFKND

SEQ ID NO: 128858 - protein, 277 aa, Unknown
  Bacterial polypetide isolated from the Sargasso Sea
MKSLKNLNFEKIQNVGIRVDFNVPIDKHFKITDKTRLDRAKDTINFIKNKQCNILLLSHFGRPKENFDDKYSFTKLIDQFQEILKLKLNFISYENFLENGLDQFNYNRPTTTLLENIRFFEGEIKNDLSFSKSITDNLDLYVNEAFSASHRLHSSVNQMAKNILSTPGFNFEKEINAINDIKKSQKKKLAIIGGSKISTKINTLLSLTTSCSDIFIGGAMANNFLKYNKFNVSSSLIEEGAERMIEMIYSSAKQTGCEIHLPVDVMLDSDQSVLVNE

SEQ ID NO: 128859 - protein, 52 aa, Unknown
  Bacterial polypetide isolated from the Sargasso Sea
KSLISIVGGGDTIAAIKNAEFRKVFTHLSTAGGAFLESIEGKELPGIKVLKK

SEQ ID NO: 128860 - protein, 186 aa, Unknown
  Bacterial polypetide isolated from the Sargasso Sea
MIKKIDNLIIVGAMANNFIKFKGYKIGKSLIEHGSEKIIKKIYDFAGKNKCEIIIPIDFAVSKTTFGNSNFKDLNKVTDNEIILDIGPQTINKIKNIIDISKTILWNGPAGYFENKNFSKGTISIAEKISNNTHSKSLISIVGGGDTISAIKNSTLDLNFTHLSTAGGAFLEYIEGKNLPGIEVLK

SEQ ID NO: 128861 - protein, 249 aa, Unknown
  Bacterial polypetide isolated from the Sargasso Sea
MVRCDFNVPVRDGEIVDDMRIRSAVPTVSWLLERDASVVICTHFGRPDGTFDPRYSIEVLRPRVEELMPGVEMLENLRFDSGEVDNSEKFSSFLTLGAGGSPFDGYVNDAFGVSHRAHASIVGPPSLLPSASGRLLEKEVGVLGSMRVQPKRPFLAVLGGAKISDKLGVIESLLDVVDNLAIGGGMCFTFLKALGHNIGDSLCEEEQVAACERLLSSGASILLPSDITALSGDGEVRQMGRSLPEGWRG

SEQ ID NO: 128862 - protein, 142 aa, Unknown
  Bacterial polypetide isolated from the Sargasso Sea
MDYKLRNINKKTVKDIDIYKKTILLRTDYNVPLENNGHISDDIRIKESIPTLQYLIKNKCKILICSHLGRPNGKIIPKLSLLPISTRLSELLNIPVKLKNIEDICTPKKETTQITMLENIRFNKEEEENNLKFAQHLSSLQI

SEQ ID NO: 128863 - protein, 70 aa, Unknown
  Bacterial polypetide isolated from the Sargasso Sea
NFENGSLQISKIIENNTKNNSLYSVVGGGDTIAVINKIGSLNNFNFVSTAGGAFLEYLEGKELPGIKALN

SEQ ID NO: 128864 - protein, 214 aa, Unknown
  Bacterial polypetide isolated from the Sargasso Sea
LVIKNKKRPVTCIIGGSKISTKINVITSLIKKVNNLIIVGAMANNFFLYKNLKIGKSLIEENKNKLIEDIYKKAELNNCEILIPEDCMVGTDFGGSGKNKNLNEILDNEIILDIGKNTIKNIQKKINESNTVLWNGPAGYFENENFSRGTFSIAENISKNTIEKSLISVLGGGDTLAALNKIKNKLSFSHLSTAGGAFLEYLEGKDLPGISVLK

SEQ ID NO: 128865 - protein, 164 aa, Unknown
  Bacterial polypetide isolated from the Sargasso Sea
MIKKIQDAKLRKQTVILRLDLNIPYSNGKSSDISRIEKTKKTIHHLIENENRVVILSHFGRPNGKVNKDLSLGKLLGYLNATLNFDIRFLPSLEIDLWSEEIETAPFPSIFLLENVRFSKLEELNDPDFSSKLASLGDIYCNDAFSVSHRAHASTQGITNYIPS

SEQ ID NO: 128866 - protein, 117 aa, Unknown
  Bacterial polypetide isolated from the Sargasso Sea
KKLSEMNAGQVCLFENVRFEEREEKNDLGFSKNLATNFDIYVNDAFSSSHRKHASIVGLTNYLPSLAGLSFIEEINNLQFFLNNTKKPNIAIIGGSKISTKIKVIFNLINLFDSIVI

SEQ ID NO: 128867 - protein, 397 aa, Unknown
  Bacterial polypetide isolated from the Sargasso Sea
MSDLKIFPKKISINGKRIIVRLDLNVPINNLKIDDDTRIKVIEPFINRLIENKAKVVLVTHLGRPRGKVVPDLSLGPIFNYLKKKLNGKIYFYKDKIDNAAIQASNKLKPGEVLLIENIRFFKQEEDDEEVFAKNLSKLGDIFINEAFSCSHRKQASIHKITKFIESYGGPVLEKEIQSINLITKNKKEPVTCIIGGSKISTKINILSSLSEKSENLVIVGAMANNFLKFKGINIGASLIEKGAENNVKNIYSTAEKNKCKIIIPLDCNTSTSLNGNPLYKSLQDISSKDIILDIGKKTIDLINKTIDNSNTVFWNGPAGYYENKNFSKGSLCIAKKISENTKSKSLISIVGGGDTVASIKNTGLENTFTHLSTAGGAFLESLEGKDLPGIKVLKKN

SEQ ID NO: 128868 - protein, 213 aa, Unknown
  Bacterial polypetide isolated from the Sargasso Sea
VINSKKEPVTCIIGGSKISSKIDVIISLIEKINNLIIVGAMANNFFIYKKFNVGKSLIENNKEEIIKQIYDKAKKSNCEIVIPEDCMVSTSLNGEGKNKNLKQIEDNEIILDVGINTLKNIKKIIDQSHTILWNGPAGYFENKNFLNGTMSIAEIISENTHKKTLISVIGGGDTLAAINKSKNKLYFSHLSTAGGAFLEYLEGKDLPGLSVLK

SEQ ID NO: 128869 - protein, 276 aa, Unknown
  Bacterial polypetide isolated from the Sargasso Sea
NIRFYPEEEKNDEIFSAKLASLGEIYVNDAFSCSHRDHASISKITKYIPSYCGIQINTEINALNKITEKITKPITCIIGGSKISTKIGILKNLIPKFDNVVIVGAMANNVFKYQGLKIGKSIYEENLDNLIQEIITFAKINNCKIHVPIDIKVGKKLNGLSTEKDFKDIEDDDIILDIGSRTLDEIRKIIDDSSTILWNGPLGYFENSQFSKGSSEIAKYIANKGDKIFSVVGGGDTVAVINSLNIERKFNFVSTAGGAFLEYLEGKILPGIKALN

SEQ ID NO: 128870 - protein, 209 aa, Unknown
  Bacterial polypetide isolated from the Sargasso Sea
MKSITDLENLNNQIVLLRLDLNVPILDGKITDTNRIDKIIPTVNFLLSKKAKIIIISHVGRPKGKFKNELSLQPIRDNLSLQVNENVKLEKTNIFNLKKNELFKSADEKLIILENIRFYPEEENNNEKFSEHLAKLGDIYVNDAFSCSHREHASVTSITKFIPSYSGLQINSEVEALKKITTEIKKPITCIIGGSKISTKIDIIKNLIP

SEQ ID NO: 128871 - protein, 122 aa, Unknown
  Bacterial polypetide isolated from the Sargasso Sea
MPNLVDFESIKNKTVILRLDLNVPIENGKIANDFRLRKSLETIRVLRSLDNKLIILSHLGRPAEGKTDESLSLEPIHAYLAENLDEHIRFEREWLANLRNNTPTITLCENTRFLSGEKSNDE

SEQ ID NO: 128872 - protein, 226 aa, Unknown
  Bacterial polypetide isolated from the Sargasso Sea
MRSIINEKNLNNKKILLRLDLNVPLERDKITDTTRIDKILPTLNFLIKEKAKIIILSHVGRPKGKIVKALSLKPICEELQNKLRKKVKLISENIKEIKSKNFFNDYSEDIFILENIRFYSEEEQNDNKFAELLSNLGDIYVNDAFSCSHRAHASIYKIPKFLPSFSGLQLDLEVNALNKITSEITRPITCIIGGSKISTKINVIKNLIPKFDNVIIVGGMANNFIE

SEQ ID NO: 128873 - protein, 81 aa, Unknown
  Bacterial polypetide isolated from the Sargasso Sea
GPVGVFESSPFHRGTLKIAKYIAEITMKNNLRSFAGGGDTISALDMAAVKEKFTYVSTGGGALLELIEGKKLPGLVALGVL

SEQ ID NO: 128874 - protein, 169 aa, Unknown
  Bacterial polypetide isolated from the Sargasso Sea
MVGGGIANTFLKASGYEIGKSLVEDNMLNMASNMLRTEKIIMPEKVYVAESIESKDISLVPVSNISKDKMILDIEFNDKEMKDYLSETIIWNGPLGMFEIDEFSNGTKSLINYLKQSDSKVIAGGGETIFAINKFSDTKHFHYVSTAGGAFLEYLGGSLLPSIEALKSK

SEQ ID NO: 128875 - protein, 178 aa, Unknown
  Bacterial polypetide isolated from the Sargasso Sea
GILSNLVDKTQRILIGGGMVSSFITNDFPKTFNRKIYETNIDKFFVPDDLVKIKEFSPKSKPEIVNAKLYNKSSFIIDIGPKTINKYSEIVKDSETVIWNGSMGIFEWKSGCQGTKGLIKSIENSKCKAYAGGGSTIEAINSFGSKDSFEHISSGGGAFLELLESGSLVGIDNLIKNE

SEQ ID NO: 128876 - protein, 126 aa, Unknown
  Bacterial polypetide isolated from the Sargasso Sea
NLREGGEFSEYSIENIPNDGLILDIGKKSIAIIDKEISKTKEVLWCGPLGLFEQSPFHVGTASVAKTLSKMTKNGKIISVAGGGDTVAAISQSNYVNDFTYISTAGGAFLEMIAGQKLPGIEALRK

SEQ ID NO: 128877 - protein, 96 aa, Unknown
  Bacterial polypetide isolated from the Sargasso Sea
IDSIRKIINESNTVLWNGPAGYFENPNFQNGTKQILEIIEQKTIKDNIFSVAGGGETVAAINKFNKLNSFTFVSTAGGAFLEFLEGKDLPGINALT

SEQ ID NO: 128878 - protein, 363 aa, Unknown
  Bacterial polypetide isolated from the Sargasso Sea
MYVAVKGGEKAINSSIELLDQKRKHISSNQDINISQLIEQLSFAVDRVVSEGSLYDKNLSALSIKQAQGDLVEAIFILRAYRTTLERFSYSVPIDTSSMTLKRRISATYKDIPGGQILGPTFDYTHRLLDFSLLNGKETSNKKNTPTSNDNVFFPRVMEFLNNEGLMEKEIEKLKSKPFDITREPMKFPASRDQWLQILSRSDEGFLLGLSYSAIRGFGSKGTHPFVGEIRYGFVEVKIYPEELGFEICVGEIEVSECEMVDQFEGSKKIAPQFTRGYGLTFGYNERKAMSISIIDRALKSEEYGEEIKFPIQDQEFVLYHSDNVEAQGFVSHLKLPHYVDFQGELNLIRELRKKILKENKDD

SEQ ID NO: 128879 - protein, 238 aa, Unknown
  Bacterial polypetide isolated from the Sargasso Sea
MSLLAATIRESKTKGEVKSLRSKGMVPGIIYGGEEPNQKISVSVKEVKNLLNKENILSNIISINIDGKEQKVLPRVIDFDTVTDEPIHLDFLRIVKGAKVILEIPVKFINHELSPGLKRGGVLNIVRRKVELRCPTENIPTELVVDLNNLDIGASIKISFINLPENVTPTIQGRDFVIATVAAPTVVKEPEKPAEAEGEGGEAAEAAADGDAKSEEGAEKAADGDKGKEEGKAPAEKK

SEQ ID NO: 128880 - protein, 205 aa, Unknown
  Bacterial polypetide isolated from the Sargasso Sea
MSDLKIFSSDISINDKRVIVRLDLNVPIKNTKVEDDTRLKVIKPFINKLIQNKAKVILITHLGRPKGKRVPELSLKPIFNYLEKELNGKVYFYKENIDDKTVGVTNKLKPGEVLLIENIRFFSEEENDEEVFAKKLSKLGDIYINEAFSCSHRKQASIHKITKFIDSYGGPTLDKEIKSINLIKNNRKKPVTCIIGGSKVSTKIN

SEQ ID NO: 128881 - protein, 163 aa, Unknown
  Bacterial polypetide isolated from the Sargasso Sea
NLNNLNKKNIFSNNDEKVLLLENIRFYPEEEKDDIEFAKKLASLGDIYVNEAFSCSHRAHASVSKITKFIPSYGGLHLSNEIDALYQITHNIKKPVSCIIGGSKISTKIKVITNLATKYDNIIVVGAMANNFIKYNNHNIGKSVFEKNSELIVKEIYESAKSK

SEQ ID NO: 128882 - protein, 391 aa, Unknown
  Bacterial polypetide isolated from the Sargasso Sea
MVRIKSIVGNNFSGKTCILRLDLNIPLSEDGEILDDTRILESIPTIDYLINQSAKVIIISHIGRPKGKFNKNYSFKPLIQDISKRINREIFFIEHKNQSKISTILDSQPSGTLFLLDNVRFNDGEENSNPDFIDFLSSFSDVFINDGFGTIHRNHSSITGITNKLPSFGGILLEKEIINITECISAKSSNSTAILGGSKISDKIPIIENLSNNFEKVIITGGMIRPFLIARDKLKQKNISEIKEEIFYAEKILQKHSQIYVPEQLVCSENINEEPIILHSSQINDSDLIFDIGPNSIDDIGKMILESDKIIWNGPPGVYENKNFSNGTKKLINFIVNSKSKLKVAGGGSTVASINYYKASDYFSHISTGGGAFLRLLEGKFLEGIEVLKDE

SEQ ID NO: 128883 - protein, 109 aa, Unknown
  Bacterial polypetide isolated from the Sargasso Sea
ICPDDIIYDVSIRSVKNLNKIISSCKTILWNGPLGFFEREEFSKGTLHLAKVISESDAYSVIGGGETLTAFNQSNLLDKVGYASTAGGAFLEYIEKGSLPSLDALKEKI

SEQ ID NO: 128884 - protein, 341 aa, Unknown
  Bacterial polypetide isolated from the Sargasso Sea
MSRVRRLEDARDLVDKIVLVRVDHNCVKRGVVKDVHRIESSLPTLYNIVERGGRPILMTHVNRPRTASGDIVRDDENDGVGAIVDVLRAKLGVTFAAPSFQRDGARGIRSVDTSINFLLDDLRARRIGGIYLPNTRWFEGEESTPGSDAYEAFTRQLAGLADVFVNDAFGSWQPHASTVGITKYLPCYAGLLMQKELRAVQAVLNPERPFVAIVAGAKVDTKLGTLRTVASRCDSLILGGVVYNAYLCAKYGVKIEGVSESDVEHAKTLLDPTVQAKIVELPVVVESTSLAGCGCVPREGECAAPKQDLGRTRAIRVCDLQPGANHAYFLDVAASSFEDER

SEQ ID NO: 128885 - protein, 490 aa, Unknown
  Bacterial polypetide isolated from the Sargasso Sea
VQVHQQDFIIPRGITTDGTYVYVGDFSNHKIRKIVISTGVVTTFAGNNSAGSTDATGTSATFNGPMGLTYEGSNIYVADYSNHKIRKISTRGTVTADVKLHNLDDDTDATVNLASSDTTEGTVSPATLTFKESNWNTAQTVTVTGVNDTDRDRNKSYKIRLTSEDQKTDSPEVSTFAGSPSGSTSSGSTNATGTSARFAYPAFITSDGTNLYVTDGSNHTIRKIVIATGAVTTLAGSPGSSGSTNATGTSARFKHPRGIITDGTNLYVADMGNHTIRKIQIATGAVTTFAGSPGSTGSTNATGTSARFYNPYAIATDGTNIYVADSSNNMIRKIVISTGAVTTLAGSTSSGSTDATGTSARFNSPQGITTDGTNLYVADNNNHRIRKIVIATGAVTTLAGSSQGSADGTGTSARFNGPIGIVIDGSNLYVAEFKSHMIRKIAIATGAVTTIAGSGSNGSIDSSGTWSTFNGPMGIGIDGTNLYVADYNNH

SEQ ID NO: 128886 - protein, 51 aa, Unknown
  Bacterial polypetide isolated from the Sargasso Sea
ALGGGGDTLAAIKKAKANDAFKYLSTAGGAFLEWLEGNKSPGFIALRENNF

SEQ ID NO: 128887 - protein, 162 aa, Unknown
  Bacterial polypetide isolated from the Sargasso Sea
KSICENECGSLIKKILENSKKHNCEITIPKDAIVSTDLNGEGKEKNINEIKDNEMILDIGSKTISSIETIISNSRTILWNGPAGYFENPNFQNGTKKILELISQKTNNDKIFSVAGGGETVAAINKFKKFDSFTFVSTAGGAFLEYLEGKTLPAIKALNQNV

SEQ ID NO: 128888 - protein, 147 aa, Unknown
  Bacterial polypetide isolated from the Sargasso Sea
MQYKSLYEVDLSNKTVLLRSDLNTPIENGLVVNNERILRSLPTLNFIIDAGARLVIMSHLGRPEENDIFQEEFSLLPVVNEMENLLNKKIMLYNLGEFEKLDKIPKISVIENTRFCIGEKSNDIDLSKRLAGLGDLIVMDAFATHIE

SEQ ID NO: 128889 - protein, 354 aa, Unknown
  Bacterial polypetide isolated from the Sargasso Sea
MKAVVTAGNGGFEKLQYREVKRPRPGPSEVLLRVLAAGMNNTEINTRVGWYSDSVTRATSDTATSEVREAEVRIDGGWNETTPFPFIQGTDCCGRVAEIGPGGDPELLGKRVLVRSCIRPEGFESMENLWMGSDFDGAFAQYVKVPQAEVFVLECDWSDAELATIPCAYGTAENMIQRSGITSGERVLITGASGGVGSAALQLVKWRRAEVIAVAASSKKQQMLEIGADRVIGRDQDLLGILEEKSVDVVIDLVAGSPFPKLLKLLKRGGRYVSAGAIGGPLVSFDTRTFYLKDLQLIGCTAWDEPVFPTLVSCIEQNRIRPLLAQTFLLEDIAEAQKEFLRKQFVGNFVLIPP

SEQ ID NO: 128890 - protein, 61 aa, Unknown
  Bacterial polypetide isolated from the Sargasso Sea
ISQKTKNDKIFSVAGGGETVAAINKFKKFETFTFVSTAGGAFLEYLEGKTLPAIKALNQNV

SEQ ID NO: 128891 - protein, 106 aa, Unknown
  Bacterial polypetide isolated from the Sargasso Sea
MILDVGEKTVELISNGIINSKTLLWNGPLGVFEIPPFDESTSSCALTAAMMTRAGGLVSVAGGGDTVAALNNAGASGGFSYISVAGGAFLEWIEGKVLPGIQVLND

SEQ ID NO: 128892 - protein, 52 aa, Unknown
  Bacterial polypetide isolated from the Sargasso Sea
MKNLNNFKIKNKKVLFRADLNVPYFNGLVTDKSRIFSIKKSIKKLLSQKNKI

SEQ ID NO: 128893 - protein, 219 aa, Unknown
  Bacterial polypetide isolated from the Sargasso Sea
SINLIIKNKKKPVTCIIGGSKVSTKINILSRLLENADNLVIVGAMANNFLKFKGVNVGASLVEKGSENIIKSINMLAEKNKCKVIIPIDCNTSSDVNGNSVYKSLEDIGSKDMILDVGKNTVDLINKTIDSSNTVFWNGPAGYYENKNFLIGSLSIAKKIARNTNSKSLISIVGGGDTVAAIKNTGLENSFTHLSTAGGAFLESLEGKELPGIKVLKKN

SEQ ID NO: 128894 - protein, 105 aa, Unknown
  Bacterial polypetide isolated from the Sargasso Sea
IGEKTINLISNEIIKCRSVLWNGPLGAFEFRPFDKSSLEIANQIKKSFKEFNIESLAGGGDTLSAINLANARDGFNYLSNAGGAFLEWLEGEKSPGYNALENNKI

SEQ ID NO: 128895 - protein, 76 aa, Unknown
  Bacterial polypetide isolated from the Sargasso Sea
NSPFDKSTNSVANIIKNYSSKSQLDALAGGGDTLAAIKKAKANDAFKYLSTAGGAFLEWLEGNKSPGFIALRENNF

SEQ ID NO: 128896 - protein, 164 aa, Unknown
  Bacterial polypetide isolated from the Sargasso Sea
VGKSICERDSGDLVKQIFENSKKYDCEIIIPNDVIVSKSLDGTGKEKDINDVMDDEMILDIGSKTILTIEKIINKSKTVLWNGPAGYFENPNFQNGTKKILELISSRTEHENIFSVAGGGETVAAINKFEKSNSFTFISTAGGAFLEYLEGKTLPGIKALNQNV

SEQ ID NO: 128897 - protein, 211 aa, Unknown
  Bacterial polypetide isolated from the Sargasso Sea
MLNVKALKTFDQKNKTVLIRFDLNIPLNKEVSTISDRITRIKNPIQNLLNKNNKVVILSHLGRPKGKRNDELSLNQIISSLENVLQKKIIFLSNCIGDEIEKKINSLSQDSIILLENCRFHEGEEQNDKFFASELSKLADVYINDAFACSHRAHASIEAITNFIPSYCGELLHEEILNLNDVVNNPKTPALTIIGGSKISTKITVIKNLLQ

SEQ ID NO: 128898 - protein, 62 aa, Unknown
  Bacterial polypetide isolated from the Sargasso Sea
NYASERTKNGDLISVAGGGDTVAALNKAGVTESFSYVSTAGGAFLEWLEGKELPGVACLTKN

SEQ ID NO: 128899 - protein, 165 aa, Unknown
  Bacterial polypetide isolated from the Sargasso Sea
MDLRNKRVLIREDFNVPLKDGKIQDAARLERALPTIQTMLESGAAVLLCSHLGRPIEGKFDKALSLAPVAEWLSDCLAIPVRLEKNYLDGVDINPGEVVLCENVRFNTGESQNDDQLSRKYAALCDVFVMDAFATAHRAQASTVGVVKHVKQAAFGPLMLQELEA

SEQ ID NO: 128900 - protein, 166 aa, Unknown
  Bacterial polypetide isolated from the Sargasso Sea
FFGNNVGKSIKEKNCNLIVEEINTLSKKEKCKIIYPEDVIVSNNLNGSPQKKNLNEISPDEMILDIGPKTINKIINIIDNSKTILWNGPAGYFENPNFANGSIQIAKKIIEDNKLKKIFSVVGGGDTVSLLNNMNAVDSFNFVSTAGGAFLEHLEGKNLPGITALN

SEQ ID NO: 128901 - protein, 302 aa, Unknown
  Bacterial polypetide isolated from the Sargasso Sea
MVGIRVDFNVPLDKHFKITDKTRLDRAKDTINFIKNKQCNILLLSHFGRPKENFDDKYSFKKLIDQFQEILKLKLNFISYENFLENGLDQFNINRPTTTLLENIRFFEGEIKNDLSFSKSITDNLDLYVNEAFSVSHRLHSSVNQMPKNILSTPGFNFEKEIKAINDIKKSQKKKLAIIGGSKISTKINTLLSLTTSCSDIFIGGAMANNFLKFNKFNVSSSLIEEGAERMIEMIYSSAKQTGCEIHLPVDVMLDSDQSVLVNELDKNTEIKILDISDSSHIVLENLVKKSDIIFVECPHGK

SEQ ID NO: 128902 - protein, 173 aa, Unknown
  Bacterial polypetide isolated from the Sargasso Sea
MANNFIEYFGNNIGKSIKEKNCYQIVKEIISLSEKNECKIIYPDDVLVSKNLNGTSKNKELDQILSDEMILDIGPKTIDKIIHIINNSKTILWNGPAGYFENPNFANGSINIAKKIVENNKSNKVFSVVGGGDTVSLLNSLKITDNFNFVSTAGGAFLEYLEGKKLPGITALN

SEQ ID NO: 128903 - protein, 179 aa, Unknown
  Bacterial polypetide isolated from the Sargasso Sea
AHLNSIADFIIVGGGIANTFLKSQGFNVGESLVENDMIEIAKELFNSGKIILPNKVIVADSIDSNSSTIKSIDSVSNSDKIFDINLRSNMSKILKNSKTILWNGPIGVFEKEPFQQGTHQLAKAIAESEAFSLAGGGETIAAINKFINKDEVSYCSTGGGAFLEYMEGKLLPSIEALGG

SEQ ID NO: 128904 - protein, 82 aa, Unknown
  Bacterial polypetide isolated from the Sargasso Sea
CGMVPQVIFENPNFALGSYEIAKKIVEKNKNNSIYSIAGGGDTIAVLNQLNAIDNFNFVSTAGGAFLEYLEGKELPGIKALN

SEQ ID NO: 128905 - protein, 254 aa, Unknown
  Bacterial polypetide isolated from the Sargasso Sea
FIQNLLKREAKLLLISHLGRPRGDKDKNLSLKPVFKYLEKKIKNKIYFFSEKITNKTKDKVHFINNGEMIFFENIRLNEGEIKNDENFAKNLSSLGEVYINDAFSCAHRKQTSIHKITKHIKNSYAGPLFMKEINSIDMVLKNKKRPTTCIIGGSKVSTKLGVITSLIKKVDNLIIVGAMANNFVKFKGNKVGKSLVETGSEKIIEEIYNKSNNSNCEIITPFDFAISDTADGEAKFKDLNSISDNEIILDIGP

SEQ ID NO: 128906 - protein, 226 aa, Unknown
  Bacterial polypetide isolated from the Sargasso Sea
MLNVKALKTFDQKNKTVLIRFDLNIPLNKEASTISDRITRIKNPIQNLLNKNNKVVILSHLGRPKGKRNDELSLNQIIGSLESVLQKKIIFLSNCIGDEIEKKINSLSQDSIILLENCRFHEGEEQNDKFFASELSKLADVYINDAFACSHRAHASIEAITNFIPSYCGELLHEEILNLNDAVNNPKTPALTIIGGSKISTKITVIKNLLQKMDTIVIAGGMANNF

SEQ ID NO: 128907 - protein, 246 aa, Unknown
  Bacterial polypetide isolated from the Sargasso Sea
MVIKTLNDYNIANKKILVRADLNVPIENGKISDTSRLISAIPTIKTIQSLGGITILISHFGRPDGSYKEELSLKQVVPELEKLLNFPVKFSSELVGKNVIKKIDNLIGGEILLLENTRFFAEEEMNDGSFSKELSKLGDIFCNDAFSSSHRAHASTVGVSKLLPNCAGNLMKKEIDTLENVLKKPQKPLTAVVGGAKISTKLNLLHNLIKKVDYLVIGGGMANTFLFAKGLQIGKSLCEKNLKETS

SEQ ID NO: 128908 - protein, 204 aa, Unknown
  Bacterial polypetide isolated from the Sargasso Sea
MKTIDDHNINNKKILFRADLNVPVVDGKITDYSRINAILPSLNKLRKNQNKIFIISHFGRPNGELNEKFSLRFLCDELRKKLEVPKIHFLKNYINSNISQMLSEMQEGEICLLENIRFHKGEISNDINFSKNLSSSFDFYVNDAFSASHRNHSSIVGLPKLLPSLAGQSFKKEVHNLNLFLNNTQKPNIAIIGGSKISTKIKVI

SEQ ID NO: 128909 - protein, 129 aa, Unknown
  Bacterial polypetide isolated from the Sargasso Sea
MNLLQNQKLNNKKAIIRVDLNVPLNEKKEVTDYTRIEAIKETVNFVIDNGGSCILLSHLGRPKGKDENLSLKNILGPVSKTLDKPVIFFQDCIGEEAEQATKKLQQGEIILMENVRFYKEETGEISVAE

SEQ ID NO: 128910 - protein, 159 aa, Unknown
  Bacterial polypetide isolated from the Sargasso Sea
CEYECGPLIKEILENSKKYNCKITIPKDAIVSTSLDGKGKEKKINEIEENEMILDIGSKTILSIETIINNSKTILWNGPAGYFENPNFQNGTKKILELITQKTKNDKVFSVAGGGETVAAINKFKKFDSFTFVSTAGGAFLEYLEGKTLPAIKALNQNV

SEQ ID NO: 128911 - protein, 107 aa, Unknown
  Bacterial polypetide isolated from the Sargasso Sea
MILDIGRNTIDLINKTIDNSNTLFWNGPAGYYENKNFSTGSLSIAKKIAENTKLKSLISIVGGGDTIAAIKNTGLENSFTHLSTAGGAFLESLEGKELPGIKVLKKN

SEQ ID NO: 128912 - protein, 143 aa, Unknown
  Bacterial polypetide isolated from the Sargasso Sea
MRLLKDQDLSNKNVVVRLDLNVPIQNKQIIDSTRIIYSVPTIKYLVDKNCKVLLTSHLGRPEEGKFDQDFSMSPVAKKLSEILNHEIDLIDSLDNSDIFNTTQIQLLENLRFLIGEKDNNEKLGNQLANKGDVYIFDAFGTAH

SEQ ID NO: 128913 - protein, 230 aa, Unknown
  Bacterial polypetide isolated from the Sargasso Sea
SFINEIDNLNKFFINNKKPNLAIIGGSKISSKIKVIFNLINSFDTIVIGGAMANTFLLSNNINIGNSLYEKDFIKTAKDILIKARNKKCKIILPIDAVCSKNLKNNADISKCNINSIPKDKMILDIGENTTNLVCNEINKCCSVLWNGPLGAFEFIPFEKSSIEIANQIKNSFKELNFFSLAGGGDTLSVINLAKAKDGFNYLSNAGGAFLEWLEGDKSPGYIALEKNKL

SEQ ID NO: 128914 - protein, 66 aa, Unknown
  Bacterial polypetide isolated from the Sargasso Sea
MGEINFFPDDLEIKDQKIILRLDLNVPIKDKVIKDDTRITLCLPFINKLIEKKAKIIIISHLGRPK

SEQ ID NO: 128915 - protein, 264 aa, Unknown
  Bacterial polypetide isolated from the Sargasso Sea
IEKLIATKNKIFILAHFGRPKGEVIEKFSLKFILSTLEEILEVKKIHFLRNLQEEKISKKFDEMNPGEVCLVENIRFEKREEKIDWDFAKNISSLFDVYVNDAFSASHRNHTSIIGFAKYIPAVAGNHLIKEIENINAFLENSKKPNLAIVGGSKISTKIKLLNNLIQQFNCVVIGGAMANTFLLSKDMIVGKSLVEKDLVDVAKDIQKKANKLNCKLILPLDVVCGKSIEDKEPIECDINDISQDYMILDLGTKTTTLINKEI

SEQ ID NO: 128916 - protein, 106 aa, Unknown
  Bacterial polypetide isolated from the Sargasso Sea
MKTLAEIDLNNKKVGIRVDLNVPIKDGKILSHEKLSAALPSILHILGRTENLCIISHLGRPTEGNFNSNYSLLPIKEWFDKKLKKELSFIDNLDAIPEGISFLENI

SEQ ID NO: 128917 - protein, 275 aa, Unknown
  Bacterial polypetide isolated from the Sargasso Sea
LASLINKKVLFNKKKINEKTKSEINKIPNGSIMMLENIRFYEGEELNDNEFSSKLSDLGDIYVNDAFSCSHRSHASIEGITKHMPSFFGLQITKEIDALKKLTSEIKKPITLIIGGSKISTKINIINNLIKKFDNIIIVGGMANTMLKHTGKKIGKSIVEDNYKNLIEEILKNSKKYNCNINCPVDVVVAKDIHSKGKNKSINEVDNDEMILDIGPKTVSSIKQIVNESKTVLWNGPAGYFENPSFQHGTKKILEIISKKTEIDKIFSVAGGGET

SEQ ID NO: 128918 - protein, 97 aa, Unknown
  Bacterial polypetide isolated from the Sargasso Sea
MIAKKTVLLRLDFNVPIINGKIQDASRIDLTIPLIKKLLQKKAKVIIFSHLGRPKNNNEKKFSLLPIFNYLNNKITNKIYFYTDKIDIETKKENFFN

SEQ ID NO: 128919 - protein, 143 aa, Unknown
  Bacterial polypetide isolated from the Sargasso Sea
MRLLSDLDIAKKKVGLRLDLNVPIKEGVVEDDTRILASLETLNYLIKAEAKIVIISHLGRPKEGTFDDQLSLRPVATHLSNELGISIPLINSMKEFHDTNAQICILENIRFFEGELKNSDSLARKIGAHIDVYVFDAFGTSHR

SEQ ID NO: 128920 - protein, 177 aa, Unknown
  Bacterial polypetide isolated from the Sargasso Sea
MANTFLLAQGKPIGASLAEPDMIQTAQRILKVAELNDCKILLPKDVVVAVEFKSDATHRIVKIDDVTNFEMILDAGPEAVIDAGSFLENCATIVWNGPMGAFEMPPFDAATNALAKIVAAKTQNNGVMSIAGGGDTMAALANAGVSHQFSYVSTAGGAFLEWLEGKRLPGVEALRKG

SEQ ID NO: 128921 - protein, 81 aa, Unknown
  Bacterial polypetide isolated from the Sargasso Sea
DTENKVSHVSTGGGASLELLEGKILPGLDALSDMTGDEEKREIAKKESLVVKIRSYLEENPVVAAGSVVLFLLLMRTVLKK

SEQ ID NO: 128922 - protein, 193 aa, Unknown
  Bacterial polypetide isolated from the Sargasso Sea
MQIPSMETLDLHGKRTMIRLDLNVPIKNGAVISDARIIASLPTIQMALDKGANVILLSHLGRPDPEKLDGSFSLEPVAERLKEILGIKVSFQSNWLDGIDHPFDGVTLCENVRYHAGEKKNDESLSQKIAGLCDVYVMDAFGASHRKHSSTYGALQYAKERCIGPLLSNEVNSIKKAIDGPKSPVTAIIGGAK

SEQ ID NO: 128923 - protein, 116 aa, Unknown
  Bacterial polypetide isolated from the Sargasso Sea
VRELNQIKSDEMILDIGPKTIENICNIIDNTNTILWNGPAGYFENPNFSNGSTEIAKKIIEKNKENKIYSVVGGGDTVSLINSLNAFKNFNFVSTAGGAFLEYIEGKELPGISALD

SEQ ID NO: 128924 - protein, 128 aa, Unknown
  Bacterial polypetide isolated from the Sargasso Sea
MKEIKFIEDVVLEGRRVLTRLDLNVPLDNNAQITDDSRIKSSLKTIRYIIDKGGKAILMSHLGRPNGERLENMSLKPVSEALSVNLGKNVIFAQDCVGNKVEKIIYDLRNGEILLLENLRFHKAETKN

SEQ ID NO: 128925 - protein, 338 aa, Unknown
  Bacterial polypetide isolated from the Sargasso Sea
IQKLSSFDLREKRVLLRVDFIFPIRDEEVLNDERMIRALPTIKHLLEKAKSLRIITHRGRPQESGEVQSEFSIKPIAKRLSQLLDIPIPIADSLDGLEQDEKIIMLENIRFFQGEKENSGNLSKKLGNFGDVYIMDAFGTAHRKQASTFGVIDSVAEAGVGFLVEDELEALKKILVNPKKPLIGIIGGSKISTKINVIDSLTSYVDKLIIGGALANTCYMAMGKNIGKSLFEEDYLDVAEKLVSNEKIVLPKNVVVLDTSNDSVAEKHIDDIASHEAICDVGKKSLEYFQKHINSAKTVFWNGPLGKFEDPRFSEGTSEVAKIMSESEAYSIIGGGRR

SEQ ID NO: 128926 - protein, 262 aa, Unknown
  Bacterial polypetide isolated from the Sargasso Sea
VKYLNGKVSDDERILRTLPTLTYILSKASSVTILSHLGRPEKAGEIDKDFSLKKVAEHLSNLLSEEIYFHGDLNLDYFSENQKKISMLENVRFFEGETDNNELFSKKLAQLADVFVMDAFGSAHRSHCSTEGVSHFIDSCVGRLVEEELNSLEGILNNPSKPMLGIIGGSKISTKINILESLLEKVDWLFVGGGIANTLHKSKGYEIGQSIVENDFLKEAKDLSKNNKIILPETFVVEQKDKSIVEKTFEGILPDDIIYDVS

SEQ ID NO: 128927 - protein, 225 aa, Unknown
  Bacterial polypetide isolated from the Sargasso Sea
EEEQNDTSFAKHLASFADLYVNDAFSCSHRAHASVSKITEFIPSFAGLQLETEINALKKVTTEIKKPITCIIGGSKISTKIGIIKNLIPKFDNIIIVGAMANNIISYKGNNIGKSIKEENCETIIREIFESTKNYSCKITIPEDVLVGKSLDDKSIIRDLDDIKNDDLILDIGPKTINKIKNIIETSETVLWNGPAGYFENSNFANGSREIAKIIIKKNQEGSIY

SEQ ID NO: 128928 - protein, 279 aa, Unknown
  Bacterial polypetide isolated from the Sargasso Sea
NIRFYKEESENEDNFAKKLASLGDIYINDAFSCSHRKQASIHKITKYIKESYAGPLLKKELAAINSIIKNKKRPITCIVGGSKISTKINVIVNLIKNVNNIIIVGAMANNFLIFKGFKVGKSLVEENSRKIVSNIYTEAKKHNCNIFVPEDYKVSTNFKGSGKTKKQDSVDDNEIILDIGPKTIKNIENVIDKSNTVLWNGPAGYFENENFFTGTAAIAKKISDNTRKKSLISILGGGDTISAINKSNNKFSFTHLSTAGGAFLEFLEGKDLPGLSVLK

SEQ ID NO: 128929 - protein, 276 aa, Unknown
  Bacterial polypetide isolated from the Sargasso Sea
LIKKNCKLVIISHVGRPKGKVNKELSLKPICENLESKINQKIKLINENIFKIKKDNLFRNFDGQIIFLENIRFYEEEEKNDTNFSKQLASLADLYVNDAFSCSHRAHASISKITEFLPSFAGMQLETEINALKKVTSEIKTPVTCIIGGSKISTKINLINNLIPKFDNIIVVGGMANNILSYKGNSIGKSFKEENCEKEIENIFKTSNDHSCSIIYPKDVKIGKSMDDKSQIKDLTEVSADDLILDIGPKTLKEIEDIIENSKTVLWNGPAGYLKI

SEQ ID NO: 128930 - protein, 248 aa, Unknown
  Bacterial polypetide isolated from the Sargasso Sea
SCSHRMQASVHKIVRFVKNSYAGPLLMKEVLAIDMVLNNKKNPTTCIIGGSKVSTKLGVITSLIKKVDNLIIVGAMANNFVKFEGNNVGKSLIENDSDKMIKEVFDKAKKNNCEVITPLDFAVSETMNGDAKFKDHDKIADNEIILDIGSKTIEKICNIIDISKTVLWNGPAGYFENKNFSKGTISIGEKISINTKSKSLISIVGGGDTVSAVKNNVINTNFTHLSTAGGAFLEYIEGKNLPGVEVLK

SEQ ID NO: 128931 - protein, 89 aa, Unknown
  Bacterial polypetide isolated from the Sargasso Sea
MNIADIVIWNGPFGVYEMEKFSKGTNQLLKNISNLTIENKITSIIGGGDTGTCAERLNLEDKLTHISTGGGACIELLEGKDLPGLKFLK

SEQ ID NO: 128932 - protein, 294 aa, Unknown
  Bacterial polypetide isolated from the Sargasso Sea
EGINDESDDIILCENVRYQAGEKKNDETLSQRIASLCDVYVMDAFGASHRKHSSTYGVLQYAKEGCIGPLLSNEVSSIKKAIDRPTAPVTAIIGGAKVSSKLGVIERFSSFCDHVIVGGGIANTFLLASGKQVGASLVEPEMIDAANKILQMENVNVPLPVDVRVAKEFSTEAEATIKSIDEVGEDDLILDIGPETTKSYCNIINETKTTIWNGPLGVFEFSSFAEGTRALGQAVSSNQGFTIVGGGDTVAVVEELGIADSMSYISTGGGAFLDFVQNGTLPILDLLEKKRGDS

SEQ ID NO: 128933 - protein, 111 aa, Unknown
  Bacterial polypetide isolated from the Sargasso Sea
EILFDEMILDIVPKTIDKITNIIDNSKTILWNGPAGYFENPNFAYGSIQIAKKIIENNKANKIFSVAGGGDTVSLLNNLKAVNEFNFVSTAGGAFLEYLEGKNLPGITALN

SEQ ID NO: 128934 - protein, 325 aa, Unknown
  Bacterial polypetide isolated from the Sargasso Sea
SDTTRIDKILPTLKFLNKQKAKIIILSHVGRPRGKALKELSLKPICKNLEEQLGLNVKLIKQNINEIKNRNFFDNFDEKILMLENIRFYAEEEKNDNKFAKHLASFGDIYVNDAFSCSHRSHASIVEISKFLPSFSGLQIDLEVDALTKITSKITKPISCIIGGSKISTKIDIIKNLLPRFDNIIIVGAMANNFIEYFGYNIGKSIKEKNCDKIIEEIILLSKKEKCQISYPEDVLVSKDLNGSYKKRKLNEVLNDEMILDIGPKTIDKITNIINSSKTILWNGPAGYFENPNFANGSIEIAKIIIKNNKSNKIFSVVGGGDTVS

SEQ ID NO: 128935 - protein, 138 aa, Unknown
  Bacterial polypetide isolated from the Sargasso Sea
VILPTDVIIAKELSKNTPTSVVSANECPENYMILDAGPSTVDNIKQCINSSKTLLWNGPLGAFEVFPFDKATSQAAKYASERTINGDLISVAGGGDTVAAFNKAGVTDSFTYVSTAGGAFLEWLEGKELPGVACLIEN

SEQ ID NO: 128936 - protein, 227 aa, Unknown
  Bacterial polypetide isolated from the Sargasso Sea
QISQEISALEKITNKIEKPVSLVIGGSKISTKFKIINNLIKKFDNIIIVGGMANTVLKHLGKNVGRSICENDSGPLVKQIFEDSKKYNCEIIIPNDVIVSKSLDGTGKKKEINAVMDDEMILDIGTKTIFTIEKIINRSKTVLWNGPAGYFENPNFQNGTKKILEFISARTKNENIFSVAGGGETVAAINKFEKSNSFTFISTAGGAFLEYLEGKTLPGIKALNQNV

SEQ ID NO: 128937 - protein, 125 aa, Unknown
  Bacterial polypetide isolated from the Sargasso Sea
MINLSSLDLNNKKLVIRVDMNVPIKDGDVLDSTRIKACLSTIEYALENNAKVLLISHLGRPIEGNFEEEFSLKPVANELSKIINMDVELIETLESNKIFKSSSNIQVLENIRFFEGEKENSQELG

SEQ ID NO: 128938 - protein, 163 aa, Unknown
  Bacterial polypetide isolated from the Sargasso Sea
GKSICENDCEHLIKEILENSTKYNCKITCPVDVVVSKNFEDTGVEKNIEAVNDDEMILDIGSKTISCINMIIAHSNTVLWNGPAGYFENPKFQNGTKKILEIIAQKTINDKIFSVAGGGETVAAINKFKKIDSFTFVSTAGGAFLEYLEGKTLPGIKALTQNV

SEQ ID NO: 128939 - protein, 83 aa, Unknown
  Bacterial polypetide isolated from the Sargasso Sea
MRTIDQFNFCNQKVIIRVDFNVPIDKNTVTDTSRIEAAKQTIDKICSDGGSCILVSHLGRPNGFQDDFSMKKIIDSVEKVLGK

SEQ ID NO: 128940 - protein, 243 aa, Unknown
  Bacterial polypetide isolated from the Sargasso Sea
LIISHVGRPKGKKNKDLSLKPICENLEKKINRKIEIINDDIFKIKKKDLFKEPNNQIIFLENIRFYEEEEKNDSSFAKHLAGLADLFVNDAFSCSHRAHASVSKITEFLPSFAGLQLETEINALKKVTTEIKKPITCIIGGSKISTKIGIIKNLIPKFDNIIIVGGMANNILSHKGNQIGKSIREENCETIINEIFETSKNHSCEITYPEDVLVGKKLEDSSKIKDISKIKEDDMVLDIGPKT

SEQ ID NO: 128941 - protein, 61 aa, Unknown
  Bacterial polypetide isolated from the Sargasso Sea
IIEKNKDNSIYSIAGGGDTIAVLNQINGTDNFNFVSTAGGAFLEYLEGKELPGIKALNSHV

SEQ ID NO: 128942 - protein, 262 aa, Unknown
  Bacterial polypetide isolated from the Sargasso Sea
AINNDAVNASKNLIPGEVLLIENIRFFKEEENDDENFAKNLSKLGDFYINEAFSCSHRKQASLHKITKYIDSYGGPLLEKEIQSINLILKNKKKPVTSIIGGSKVSTKINVLLNLIQNTNNLIIVGAMANNFLKFKGFNVGLSLLEKGVEKIINDIYAVAEKNNCNIIIPVDCIVSNNLNGSPKHKSINEITSEDMVLDIGKKTVDLINKTVENSKTVFWNGPAGYFENKNFSNGTIAIAKKIGENTQSKSLISIVGGGDTL

SEQ ID NO: 128943 - protein, 39 aa, Unknown
  Bacterial polypetide isolated from the Sargasso Sea
GGGDTLAAVDKYGIADKVSYISTGGGAFLESWKEKHYQR

SEQ ID NO: 128944 - protein, 44 aa, Unknown
  Bacterial polypetide isolated from the Sargasso Sea
TAIDHFSVRDKISYISTGGGAFLEYVQGIKLPAVQILEEKVIGM

SEQ ID NO: 128945 - protein, 291 aa, Unknown
  Bacterial polypetide isolated from the Sargasso Sea
TIKELRKNKCKIVILSHFGRPKGSFNKKMSLKHIIPKVEKITKSKIHFSKDHIGKNFENLLKKIPDGSIVVMENTRFHKGEERNFKYFAKDLAKNCDFFVNDAFSVAHRSHASVTGLTDYVPSYSGRSLEKEVITIGKFLSSKNKRKIAIIGGSKISTKINLINNLLKNVNAIVIGGAMANTFLLAQGRKIGKSLNEKSMVKIAKKILSNASKNKCKIILPVDAVVASNLREGGEFSEYSIENIPNDGLILDIGKKSIAIIDKEISKTKEVLWCGPLGLFEQSPFHVEQHQ

SEQ ID NO: 128946 - protein, 307 aa, Unknown
  Bacterial polypetide isolated from the Sargasso Sea
ITDKTRLDRSKETIDFIKNKQCNIFLISHFGRPKENFDEKYSFSKLIDQFEDILELKLNFISYDSFLNGGLNELDVNKPTISLLENIRFFEGEIKNDLNFSKSITDKLDLYVNEAFSASHRFHSSVNQMAKNILSAPGFNFEREISAIDNIKKSPKKKLAIIGGSKVSTKIKTLLSLTSSCSDIFIGGAMANNFLKYNSINVSNSLIEEGTESMIEMIYDSAKSTNCKVHLPSDVMLDSNENKLIDELPTSYDFKILDISVSSHTVLEKLIGNSDIVLWNGPMGMIEDNKFSKGSVNLAHLLAKSQA

SEQ ID NO: 128947 - protein, 54 aa, Unknown
  Bacterial polypetide isolated from the Sargasso Sea
MGVKVIVGGGDSIAALKKLGKEDWVSYISTGGGALLESLEGKTLPGVKALLNEN

SEQ ID NO: 128948 - protein, 138 aa, Unknown
  Bacterial polypetide isolated from the Sargasso Sea
NNCNVLIPEDCNVSTDFKGNGIIKERNLISKNEIILDIGPKTIKKIKNLIDQSRTVLWNGPAGYFENKAFSTGTLAIAKKISENTENNSLISVLGGGDTISALNKSDRKFFFTHLSTAGGAFLEFLEGKDLPGLEVLK

SEQ ID NO: 128949 - protein, 290 aa, Unknown
  Bacterial polypetide isolated from the Sargasso Sea
KIVLLRLDLNVPLKDGVITDTTRINKILPIFDFLIKNNTKIVVISHIGRPKGVLDNNLSLKPVCEYIKKKLNKKIKLIKESIFGLSKEKLFLNSENEILFLENIRFYEKEENNDSNFSKHLASLGDLFVNDAFSCSHRAHSSICKITEHIPSYAGIQFEAEINALKKVTSEIKKPVTCIIGGSKISTKISIIKNLIPKFDNIVIVGGMANNILKYKGCSIGKSIHEANSDSIIADIFKASKNYPCSIIFPEDVAVSKSREGNAEIKELNEIENDDLIIDIGPKTIVRLVL

SEQ ID NO: 128950 - protein, 203 aa, Unknown
  Bacterial polypetide isolated from the Sargasso Sea
MYNGGSKVSSKIGVISSLIKKVDNIAIVGAMANNFLMFKGFKVGKSIIEKDAHLIVKKIYNLSKDNNCKIIIPEDCSISQTMNGRSSIKDANQISTEDIILDIGPKSIKKILHLIDNSKTVLWNGPAGYFENENFALGTNSIANKISSNTINNSLLSIVGGGDTVSAIKNINFSLNFTHLSTAGGAFLEFLEGKNLPGIEVLK

SEQ ID NO: 128951 - protein, 288 aa, Unknown
  Bacterial polypetide isolated from the Sargasso Sea
KTFDQKNKTVLIRFDLNIPLNKEASTISDRITRIKNPIQNLLNKNNKVVILSHLGRPKGKRNDELSLNQIISSLENVLQKKIIFLSNCIGDEIEKKINSLSQDSIILLENCRFHEGEEQNDKIFASELSKLADVYINDAFACSHRAHASIEAITNFIPSYCGELLHEEILNLNDVVNNPKTPALTIIGGSKISTKITVIKNLLQKMDSIVIAGGMANNFLKYLGNDVKNSLIENDVDHLVKEIINFANEQNCKLILPLDVVTAEKVSETTEINECAVDAVKDNQMILD

SEQ ID NO: 128952 - protein, 210 aa, Unknown
  Bacterial polypetide isolated from the Sargasso Sea
NKKEPVTCIIGGSKISTKISVINNLIKNVNNIVVVGAMANNFLTFKGYKIGKSLVEENSRKIVENIYAEAKKYNCNIIIPEDSNVSTNFEGTGKTKKQDTVEENEIILDIGPKTIKNIESIIDHSNTVLWNGPAGYFENKNFSTGTTAIAKKISENTAKKSLISVLGGGDTISAINKSRDKFAFTHLSTAGGAFLEFLEGKDLPGLNVLK

SEQ ID NO: 128953 - protein, 143 aa, Unknown
  Bacterial polypetide isolated from the Sargasso Sea
FRKKEKCEISYPEDVLVSKELNGSCKKRRLNEIMNDEMILDIGPKTIDKITNIINSSRTILWNGPAGYFENPNFANGSIEIAKTIIKNNKLNKIFSVVGGGDTVSLLNSIKAVDDFNFVSTAGGAFLEYLEGKKLPGITALNQ

SEQ ID NO: 128954 - protein, 245 aa, Unknown
  Bacterial polypetide isolated from the Sargasso Sea
MDLNVPISNSSIDDDTRIKIVEPFVNNLIKKKAKVILLSHLGRPKGKIVPELSLKPVFEYLKKKLSGKIYFYQKKIDNEAIEASNKLKSGEVILFENVRFFKEEENDEENFAKNLAKLGDLFVNEAFSCSHREQASIHKITKFIDSYGGPLLEKEIQSINLIIKNKKKPVTCIIGGSKISTKINILLNLIKNVDNLVIVGAMANNFIRFKNINVGKSLVEKGTEDILKNIVELAKKNKCKIIVPI

SEQ ID NO: 128955 - protein, 121 aa, Unknown
  Bacterial polypetide isolated from the Sargasso Sea
MRLLKDQDLSNKNVVVRLDLNVPIQDKQIIDSTRIISSVPTIKYLVDKNCKVLLTSHLGRPEEGKFDHDFSMSPVAKKLSEILNHEIDLIDSLDSSDIFNTTQIQLLENLRFLIGEKDNNE

SEQ ID NO: 128956 - protein, 268 aa, Unknown
  Bacterial polypetide isolated from the Sargasso Sea
MSEIEGLDQVDHISIIENTRFNIGEKNNDIELSKRLAALADVFVMDAFATSHRAHASTTGVITFSDDACAGFLLDEELTALSKVKENAKSSIAVLGGAKISTKLSLIDSLSKTVDKVILGGGIANTCLAAKGCEVGKSLIEDSMLEEAKELIKNPKIIIPESVIVSISADEPGRIASANSIQENEAIFDIAPASLVDLEPIIMNAGTILWNGPIGFFEKENFFAGTAMIAEMIISSKGFSVAGGGDTISAAEKAGVLDSLDYVSTAGG

SEQ ID NO: 128957 - protein, 68 aa, Unknown
  Bacterial polypetide isolated from the Sargasso Sea
TQQVCRIIEELTNNGVISVLGGGDTASAAKRFSTANNFTHISTGGGASLELLSGKKLPALKALGYYDK

SEQ ID NO: 128958 - protein, 210 aa, Unknown
  Bacterial polypetide isolated from the Sargasso Sea
INSLNKALTFIENPFTAVIAGSKISTKLELIAHLNSKADFIVVGGGIANTFLKSQGFDVGESLVENDMIEIAKELFNSGKIILPNKVIVADSIDSNSSNTKNIDSVSGSDKIFDINLTSNMSEILKNSKTILWNGPIGVFEKETFQKGTYQLAKTIAGSEAFSLAGGGETIAAINKFINKDEVSYCSTGGGAFLEYMEGKLLPSIEALGG

SEQ ID NO: 128959 - protein, 77 aa, Unknown
  Bacterial polypetide isolated from the Sargasso Sea
MGEINFFPDNLEIKDQKIILRLDLNVPIKDKVIKDDTRITLCLPFINRLIEKKAKIIIISHLGRPKGINVPDLSLIP

SEQ ID NO: 128960 - protein, 182 aa, Unknown
  Bacterial polypetide isolated from the Sargasso Sea
FNNLIFVGGMVYNILKNKKFQIGKSIFEENCDHVVEEIFNLSKKKNCKIIYPVDVSVSKKIDGKGSVKKIAEVQKDDLILDIGPATLKIISKTIEESKTVLWNGPAGYFENENFKKGSLEIARKIVEKNKKNQIYSVAGGGDTVAALNSFNLTNHFNFVSTAGGAFLEFLEGKDLPGIKALY

SEQ ID NO: 128961 - protein, 188 aa, Unknown
  Bacterial polypetide isolated from the Sargasso Sea
MSNLKIFSENIKINSKRVIVRLDLNVPISKSSIEDSTRIEIIEPFIKKLIEKKAKIILISHLGRPKGKVVKELSLNPIFDYLQKSLNTKVYFYKDNIDQKAIDASNNLKQGEVLLIENIRFFKEEEDDNENFAKNLSKLGDFYINEAFSCSHRRQASLHKITNYIDSYGGPLLDKETQSINLIIKNKK

SEQ ID NO: 128962 - protein, 118 aa, Unknown
  Bacterial polypetide isolated from the Sargasso Sea
SINNIPNDQMILDVGEQTTKLISDEILKSKSILWNGPLGAFEYSPFDKSTISVANIIQNYSSKSQLDALAGGGDTLAAIKKAKANDAFKYLSTAGGAFLEWLEGNKSPGFIALRENNL

SEQ ID NO: 128963 - protein, 199 aa, Unknown
  Bacterial polypetide isolated from the Sargasso Sea
KIKVLENLVEIFDSLVIGGAMANTFLLSNNYNVGSSLVENDFIELSRKIQKKAELKNCKILLPIDAVCSKNIEDRVNVKTYSINNIPNDQMILDVGEQTTKLISDEILKSKSLLWNGPLGAFEYSPFDKSTISVANIIQNYSSKSQLDALAGGGDTLAAIKKAKANDAFKYLSTAGGAFLEWLEGNKSPGFIALRENNF

SEQ ID NO: 128964 - protein, 94 aa, Unknown
  Bacterial polypetide isolated from the Sargasso Sea
MSQIQYFNDAVSVENKRVILRLDLNVPIFDGSIKDHTRIDLSLPLINSLLKKQAKIIIISHLGRPKKDKKNDLSLLPIFNYLKEKIDTKFYFYT

SEQ ID NO: 128965 - protein, 289 aa, Unknown
  Bacterial polypetide isolated from the Sargasso Sea
MRLDLNVPISNNKITDETRIDKILPILNYLIKKKSKIVVISHIGRPNGKVVKELSLQPICENLENKINKKIKLIKEDIFKLTKKQLFDHTTNEIVFLENIRFYEQEESNDIDFSRHLASLGDLYINDAFSCSHRAHASVSHITEFIPSYAGLQLEMEIRALKKLTTEIKKPITCIIGGSKISTKITVIQNLIPKVDHIIIVGGMANNILKYKGHSIGKSTQESNCETIIENIFKLLNNSSCTITYPEDVVIGKHMEDIPTTKELNEIMNDDIILDIGPKTIEKINDIIE

SEQ ID NO: 128966 - protein, 238 aa, Unknown
  Bacterial polypetide isolated from the Sargasso Sea
AKYLPSCAGKLMEAELKALESVLGQPKRPVVTVVGGAKISTKIPLLENLIEKVDCMIIGGAMANTFLFSKGFNVGRSLVEESLKPTALKILNKAEKYSCKIILPTDVIIAKELSQNAPTSVVSADECPENYMILDAGPSTVDNIKQCIYSAKTILWNGPLGAFEVSPFDEATSQAAKYVSEKTKNGDLISVAGGGDTVAALNKAGVTKSFTHVSTAGGAFLEWLEGRDLPGVACLTEN

SEQ ID NO: 128967 - protein, 233 aa, Unknown
  Bacterial polypetide isolated from the Sargasso Sea
RASTHSAIQQAKLSCAGLLLEKEINSLNKALTSIENPFTAVIAGSKISTKLELIAHLNSKADFIIVGGGIANTFLKSQGFDVGDSLVENDMIEIAKELFNFGKIILPNKVIVADSIDSNSSTTKNIDAVSGSDKIFDINLTSNMSEILKNSKTILWNGPIGVFEKEPFQKGTHQLAKTIAGSEAFSLAGGGETIAAINKFINKDEVSYCSTGGGAFLEYMEGKLLPSIEALGG

SEQ ID NO: 128968 - protein, 181 aa, Unknown
  Bacterial polypetide isolated from the Sargasso Sea
MIIGGAMANNFLKSEGYKIGKSLFEKNVEDTINKIYDEAKKHSCDLILPIDVVCSKKFDQPGVNKQINEVNDDDIILDIGIDSTKKIDQILKDSRTVLWNGPFGLFEYDDFANGTNDISRSIARYSQKKGLISVAGGGDTFAAIKKSNQQKHFTYISTAGGAFLEWLEGKVLPGLKVLENK

SEQ ID NO: 128969 - protein, 143 aa, Unknown
  Bacterial polypetide isolated from the Sargasso Sea
MEKIKEFNENVDIENKKVILRSDFNVPILKDVIQDKTRIDLSIPFIKSLLKRKAKLLLISHLGRPKSDKDKNYSLKPVFEYLQKKIDNKIYFYSDKITNKTKEKISFLDNSEIIFFENIRLNDGEIKTMTTLHRIYPSLETYI

SEQ ID NO: 128970 - protein, 165 aa, Unknown
  Bacterial polypetide isolated from the Sargasso Sea
LSSTFIENNIKNYSEIVSNAKKLITNYKGKILYPTDVAINENGKRVGIPVENLPSKYPIHDIGLDTLVNYINLIESAGTIIANGPMGVFENQEFAIGTKEIFESISKSNGMTVVGGGETAMAFNQMGFSKSIEHISTGGGACIAFMADETMPALEAMRRSKIKFE

SEQ ID NO: 128971 - protein, 233 aa, Unknown
  Bacterial polypetide isolated from the Sargasso Sea
ITNFLPSYCGLQMDTEITALKKVTSDIERPITCIIGGSKISTKIGVINNLIPKFENIVIVGGMANNILEHQGYKIGKSIKEDNCKEIINKIFSLAKVHNCNIFYPIDVCVGKNFNDTPQIKNLTDIENDDLILDIGNETIKKIISLIKNSKTILWNGPAGYFENSNFAIGSIKIAQTIVNTENKIYSVVGGGDTIAVLNKINALKHFNFVSTAGGAFLEFLEGKEIPGIRALN

SEQ ID NO: 128972 - protein, 163 aa, Unknown
  Bacterial polypetide isolated from the Sargasso Sea
MNVQNKKIILRLDLNVPLKNKIILDMTRINMCLPFIKNLIKKKSKIIIISHLGRPKGIKDPALSLAPVYKYIKEKLQTKIYFFTGNLDEEIKKKISHLKKGEVVLIENIRYFKEETDDDESFSKKLASLGDIYINDAFSCSHRKQSSIHKITKFIDKCFAGPL

SEQ ID NO: 128973 - protein, 106 aa, Unknown
  Bacterial polypetide isolated from the Sargasso Sea
MILDIGPKTIDKIINIINSSKTILWNGPAGYFENPNFANGSIEIAKTIIKNNKLNKIFSVVGGGDTVSLLNSIKAVDGFNFVSTAGGAFLEYLEGKKLPGITALNQ

SEQ ID NO: 128974 - protein, 321 aa, Unknown
  Bacterial polypetide isolated from the Sargasso Sea
RLGRILGRPIRFVSDVCGKEAIDAIRSLQNGEILCLDNVRMHNEEISLKKAELEELRISQIVLNLAPEFDAYVTDAFAAAHRNSPTLTGFADDLPCIAGRLMQREINALQTAVTNPPRPYVAILGGAKADDSFRVAQNLINRGVVDTIAFVGVVGNMILWAQGIDIGEGNKEFIRGTLGDDFDIAWEMASTLVENHSDLLLVPTDVAVEIDQERVGLTVEDLPVPHPIYDIGVETLMQLRPILMQAGCILWNGPASYFEKPAFAFGTIEILNMCTETQAMTIVGGGHTSALVNSRGVADKVSHNSTGGGACCRCFVGIECR

SEQ ID NO: 128975 - protein, 258 aa, Unknown
  Bacterial polypetide isolated from the Sargasso Sea
DIYVNDAFSCSHRSHASVEGITRYIPSYFGLQITEEINALKKITSEIEKPVSLIIGGSKISTKIKIINNLIKKFNNIIIVGGMGNTMLKHTGSNIGKSICENECGFLIKEILENSKKYNCEITIPKDAIVSTDLNGEGKEKNINEIKDNEMILDIGSKTISSIETIISNSRTILWNGPAGYFENPNFQNGTKKILDLISQKTKNDKIFSVAGGGETVAAINKFKKFDSFTFVSTAGGAFLEYLEGKTLPAIKALNQNV

SEQ ID NO: 128976 - protein, 300 aa, Unknown
  Bacterial polypetide isolated from the Sargasso Sea
MSLVGINFKITDKTRLDRSKETIDFIRSKQCNIFLISHFGRPKENFDKKYSFSNLIEQFEDILELKLNFISYDSFLDSGLNKLDVNKQTISLLENIRFFEGEIKNDLNFSKSITDKLDLYVNEAFSASHRFHSSVNQMAKNILSVPGFNFEREIYAIDNIKKSPKKKLAIIGGSKVSTKIKTLLSLTSSCSDIFIGGAMANNFFKYNNINVSNSLIEEGTESMIEMIYNSAKSTNCKIHLPSDVILDSNENKLIDELPTNSDFKILDISVSSHTVLEKLIGNSDIVLWNGPMGMIEDNKF

SEQ ID NO: 128977 - protein, 64 aa, Unknown
  Bacterial polypetide isolated from the Sargasso Sea
LEAISVKTENDKIFSVAGGGETVAAINKFKKSNSFTFVSTAGGAFLEYLEGKTLPGIKALNQNV

SEQ ID NO: 128978 - protein, 90 aa, Unknown
  Bacterial polypetide isolated from the Sargasso Sea
MRTIDQFNFKNKKAIIRVDFNVPIDNSKVTDTSRIKAAKQTIDKVCNDGGSCILVSHLGRPIGFQKEFSMTNIINEVENVLERNVVLSKD

SEQ ID NO: 128979 - protein, 223 aa, Unknown
  Bacterial polypetide isolated from the Sargasso Sea
IQIKTEVNALNKITSKIKKPVTCIIGGSKISSKVNIIKNLIPKFNNIIIVGAMANNIFKYKGLKIGKSIHEKNIDNIIHEIFSYAEKNDCKIYFPKDVKVGKRLDSESNEKNFENIEDDDVILDVGSKTLIEIKKIIDNSSTLLWNGPLGYFENINFSIGSSEIAKYIASKGENIFSVVGGGDTVAVVNSLNINNKFNFVSTAGGAFLEYLEGKVLPGIKALN

SEQ ID NO: 128980 - protein, 241 aa, Unknown
  Bacterial polypetide isolated from the Sargasso Sea
MKNLLNYKIFNKNVLFRADLNVPVVNGKITDKSRMFAVKKSIKKLIVNKNKIFIIAHYGRPNGKFNKKYSLKFLSTEVQKIFEQDREHFIDNLDQKIVSNKIQEMKYGEVCLVENIRFNPEEEKLDLDFAKNVTSQFDVYVNDAFSASHRNHSSIIGFAKYLPAVAGDHFLNEIKNIDYFINNTKKPNLAIIGGSKISTKIKLLKNLVNQFSSIVIGGAMANTFLLANEFPIGISLVEKNL

SEQ ID NO: 128981 - protein, 78 aa, Unknown
  Bacterial polypetide isolated from the Sargasso Sea
AGYFENPNFQNGTKKILEIISQKTNNDQIFSVAGGGETVAAINKFKKFDSFTFVSTAGGAFLEYLEGKTLPGIKAINQ

SEQ ID NO: 128982 - protein, 244 aa, Unknown
  Bacterial polypetide isolated from the Sargasso Sea
HRSHASISKITEFLPSFAGLQLETEIDALKRVTTEIKKPITCIIGGSKISTKIGLIKNLIPKFNNIIIVGGMANNIISYKGNNIGKSIKERDCEMTVKEIFETSKNHSCQVSFPIDVLVGKNIDDKSKEKELSDIENDDIILDIGPKTIEKIKNIIENSTTVLWNGPAGYFENPNFARGSHEIAKQIVKKNKDNSIYSVIGGGDTVALINQMNVAQEFNFVSTAGGAFLEYLEGKELPGIKALN

SEQ ID NO: 128983 - protein, 31 aa, Unknown
  Bacterial polypetide isolated from the Sargasso Sea
MAKYFNFVSTAGGAFLEFLEGKELPGIKALE

SEQ ID NO: 128984 - protein, 198 aa, Unknown
  Bacterial polypetide isolated from the Sargasso Sea
ARLIIMSHLGRPEENNMFQEEFSLAPVVKEMEGLLNMQIPLYSLSEIEGLDQVDHISIIENTRFNIGEKNNDIELSKRLAALADVFVMDAFATSHRAHASTTGVITFSDDACAGFLLDEELTALSKVKENAKSSIAVLGGAKISTKLSLIDSLSKTVDKVILGGGIANTCLAAKGYEVGKSLIEDSMLEEAKELVAKS

SEQ ID NO: 128985 - protein, 91 aa, Unknown
  Bacterial polypetide isolated from the Sargasso Sea
MDKINFFPDNFNVQNQTIILRLDFNVPIKDRIITDDTRISLCLPFIKKLIDKKAKIIIISHLGRPKGMRDPNLSLSPIYKYLKKKLETNVY

SEQ ID NO: 128986 - protein, 89 aa, Unknown
  Bacterial polypetide isolated from the Sargasso Sea
MSDPGHQSRNTIDQIDVDGSTVLVRVDFNVPMQDGRISDDTRIRAAIPTIRSILDRGGSVVLMSQIGRPSGKGHEPEFSLEPVARRLGE

SEQ ID NO: 128987 - protein, 164 aa, Unknown
  Bacterial polypetide isolated from the Sargasso Sea
MENLFFEKNQENLLKDILKKGQTNNCKIIIPEDVIVAKNYNSDAELKSLNNIDDNDLILDIGEKTIKKIHNIINESNTILWNGPAGYFELEKFSNGSIKIAKKITENTKNKSLTSIAGGGDTIAAINKSGCSDGFTYISTAGGAFLELLEGKILPGIKVLEINE

SEQ ID NO: 128988 - protein, 265 aa, Unknown
  Bacterial polypetide isolated from the Sargasso Sea
GGGRRDVRRRPRTLLREPRDTLPGSHLGRPRRCCGNGARQGREGRRIEGQGPGGPSLGYDPHAVRDLRLVHLRKHGGQSGHVAHDGGTGSGTGVRVELEPAVGDVLQRPDDGLPQRRGGDPDLLRGALRVRDRGPAIPGQALAPRRRAGRARPRVLLDARLREGRRAGALRAGARRRAAGPGHDGRGVQDHHLPREGGHRAPQAQGGDGAAPGLPRGGGAGHGRAGHLDRHRRVPRAGGEARRLPEGDRRRDVGEREARYHPPDA

SEQ ID NO: 128989 - protein, 109 aa, Unknown
  Bacterial polypetide isolated from the Sargasso Sea
EDIILDIGKKTLSLIDNIIDNSNTVFWNGPAGYYENKNFSNGSITIAKKIAENTKSKSLISIVGGGDTVAAIKNTGLEKVFTHLSTAGGAFLESLEGKELPGIKVLKKN

SEQ ID NO: 128990 - protein, 265 aa, Unknown
  Bacterial polypetide isolated from the Sargasso Sea
DHKFSEKLASFGEIYVNDAFSCSHRNHASVSNITKYLPSYSGIQINAEVNALKKITSEIKKPITCIIGGSKISSKINIIKNLIPKFNNIIIVGAMANNILKYKGLNIGNSIYEKNIEKIIEEILSYAGANKCKIFFPSDVKVGKNLYDKSTNKELEDIEDDDMILDVGPKTLIEIKRIIDFSSTILWNGPLGYFENKNFCLGSSEIANYIANKGDKIFSVVGGGDTVAVINSLNMKNKFNFVSTAGGAFLEFLEGKDLPGIKALD

SEQ ID NO: 128991 - protein, 189 aa, Unknown
  Bacterial polypetide isolated from the Sargasso Sea
IKNLIPKFDNIIIVGGMANNIISYKGNKIGKSIKEQNCEVIIKEIFETSKKYPCKITFPSDVLVGKDMNDKSEIRGLDDIKNDDLILDIGPKTINEIKNIIEASKTVLWNGPAGYFENPNFANGSHEIAKSIIKKNKDGSIYSVVGGGDTVSLINKISAIKNFDFVSTAGGAFLEYLEGKELPGIKALN

SEQ ID NO: 128992 - protein, 158 aa, Unknown
  Bacterial polypetide isolated from the Sargasso Sea
MKNLRNYEIVNKKVLFRADLNVPVLDKVITDSSRILAIKSSIKDLILNKNKIFIIAHFGRPKGEVLKQYSLKFILSPLREMLGIDKIHFLENLQKGEVNKKFNDMQYGEVCLVENIRFQKNEEKIDLNFAKNISSLFDVYVNDAFSASHRNHTSITGF

SEQ ID NO: 128993 - protein, 172 aa, Unknown
  Bacterial polypetide isolated from the Sargasso Sea
SVCPRPDIGASLCEKELADKAREIMALADKIGCRIVLPSDVVIAAGLEEGIVTKVVPIAAVPPNQMILDVGPETCAALNLHLENCGTLLWNGPLGAFEVTPFDAGTNAVAQRAAELTAVGSLVSVAGGGDTVAALRRANAIDDFSYVSTAGGAFLEWMEGSELPGVAALNKY

SEQ ID NO: 128994 - protein, 118 aa, Unknown
  Bacterial polypetide isolated from the Sargasso Sea
MEDKSILNIDTRNTRLLIRADLNVPINNNKISDETRIERFCNGISKLLKKNTKIIIITHLGRPKGKEDLSLSNRILLKPLKKYLNKEIIFSSNPISTSAIESSKKLKNNQILLCENIR

SEQ ID NO: 128995 - protein, 202 aa, Unknown
  Bacterial polypetide isolated from the Sargasso Sea
MSDLKIFSQNIPVKGKRVIVRLDLNVPIKNSEIDDDARIRLVQPFLNDLIENKAKLILISHLGRPKGKVISEMSLKPIFNHLEKKLDGKIYFYNENIDEKAINASKKLKPGEVLLIENIRFFKEEEEDDEQFAKDLAKLGDIFINEAFSCSHRKQASMHKITKFIESYGGPCLEKEIQSIDLILKNKKKPITCIIGGSKVST

SEQ ID NO: 128996 - protein, 214 aa, Unknown
  Bacterial polypetide isolated from the Sargasso Sea
NKAKKPVSCIIGGSKISTKIGLLTNLVKKMQTVVIVGAMANNFIKHKGHNIGKSLFEKNQENLLTDIEKKCEINNCKLIIPEDVIVAKSYESEAKLKSLNKIDNTDLILDIGENTVKKINIIIDESKTILWNGPAGYFEIEKFSSGSNKIAKKISENTKKKSLISIAGGGDTVAAINKSNCSDGFTYISTAGGAFLELLEGKILPGIKVLEINE

SEQ ID NO: 128997 - protein, 113 aa, Unknown
  Bacterial polypetide isolated from the Sargasso Sea
ISDIKKDEKIFDIGPQTRMKYFSFVAECSCLLWNGPLGFYEQKPFDEGTNYVIKAVKNNNNKNFFSVAGGGDTISMLNHAKASDFFSFISTGGGAFLEFIQGSGLPGLDSLND

SEQ ID NO: 128998 - protein, 234 aa, Unknown
  Bacterial polypetide isolated from the Sargasso Sea
MGEINFFPDYLEIKDQKIILRLDLNVPIKNKIIEDDTRITLCLPFINRLIEKKAKIIIISHLGRPKGINVSDLSLMPIYKYLKDALKTNVYFFRGTFDDETKEKFSHLKGGEVILIENIRFFKEETEDGQDFSKKLGELGDIYINDAFSCSHRKQASIHSITKFVKKSYAGPLLKKEIAAIDLVIKNKKEPVTCIIGGSKISTKISVITNLLKKVNNLIIVGAMANNFFVYKNF

SEQ ID NO: 128999 - protein, 72 aa, Unknown
  Bacterial polypetide isolated from the Sargasso Sea
MLNVKALKTFDQKNKTVLIRFDLNIPLNKRTSTISDRITRIKNPIQNLLNKNNKVVILSHLGRPKGKRNDEL

SEQ ID NO: 129000 - protein, 117 aa, Unknown
  Bacterial polypetide isolated from the Sargasso Sea
MQIPSMETLDLHGKRTMIRLDLNVPLKNGAVISDARIMASLPTIQMALDKGANVILLSHLGRPDPEKLDGSFSLEPVAERLQEILGIRVSFQSNWLEGIDHPSDGVTLCENVRYHAG

SEQ ID NO: 129001 - protein, 79 aa, Unknown
  Bacterial polypetide isolated from the Sargasso Sea
GPAGYFENPNFANGSFEIAKEIIKKNKEKSFYSIAGGGDTIAVINQSNSINNFDFISTAGGAFLEYLEGKELPGIKALN

SEQ ID NO: 129002 - protein, 215 aa, Unknown
  Bacterial polypetide isolated from the Sargasso Sea
MKNINNFTFVNKKILLRVDLNVPVIKGKVSDLSKVHSIKSTILKLRENKNKIFLLSHFGRPKGKFNKKYSLEFLCDVIKENLNLNKIFFSPSVNEKDLNFTQSQMADGDICLIENIRFSEGEEKNDLDFSKYLSQFFDLYVNDAFSASHREHASIVGVLKFLPAFAGSAFIKEIKNLNIFIENPKKPTTCILGGSKISTKLSLIENLIEHSDYII

SEQ ID NO: 129003 - protein, 50 aa, Unknown
  Bacterial polypetide isolated from the Sargasso Sea
TPVAARLSELLGKPVIKTDSCIGPDAEAKVGAMANGDVELLENVRFFAEE

SEQ ID NO: 129004 - protein, 105 aa, Unknown
  Bacterial polypetide isolated from the Sargasso Sea
LILDIGPKTINKIKNIIRISETVLWNGPAGYFENPNFANGSYEIAKAIIKKNKDRSIYSVVGGGDTIALINKINAIENFNFVSTAGGAFLEYLEGKELPGIKALN

SEQ ID NO: 129005 - protein, 294 aa, Unknown
  Bacterial polypetide isolated from the Sargasso Sea
FVKVWEKKLTKKIELIKDDIYELSKINMFANSEYKIKFLENIRFYAEEEDNDNNFSKKLASLGDLFVNDAFSCSHRAHASLSKITKFLPSYGGLQLETEMNALKKLTLEIKKPITCIIGGSKISTKFPIIKNLIPKFDNIIIVGGMANNILKYKGYPIGKSIREDGCEAIINDIFKLSKNHSCSVIFPKDVLVGKKKEDKAKTKNLNEISDDDLILDIGPKTIQEINSIVDSSKTILWNGPAGYFENSHFAKGSFEIGKKIAEKNKLNQIFSVVGGGDTVALINKIGIFNSFNF

SEQ ID NO: 129006 - protein, 146 aa, Unknown
  Bacterial polypetide isolated from the Sargasso Sea
EIISLSKEKNCNLIYPQDVLVSKNLNGSAQNKELDQINSNEMILDIGPKTINKIRNIIDKSKTILWNGPAGYFENPDFANGSIEIAKKIIEKNKSNKIFSVVGGGDTVAFLNNLNVVNNFNFVSTAGGAFLEYLEGKKLPGITALD

SEQ ID NO: 129007 - protein, 202 aa, Unknown
  Bacterial polypetide isolated from the Sargasso Sea
GSKISTKIGVLLNLIKKMDNIIIVGAMANNFIRHKGFKIGTSLFEKNQENLLNDIIKKCEINNCNLILPNDVIVSKNVNSKGQLKNLDQINDDQSILDIGKKTIENISKIIDESKTVLWNGPAGYFEVKEFSTGSNEIAKKITENTKNKSLISIAGGGDTAAAIKMFKYENNFTYISTAGGAFLELLEGKILPGIKALELNE

SEQ ID NO: 129008 - protein, 249 aa, Unknown
  Bacterial polypetide isolated from the Sargasso Sea
KNINELSLKPISEDIKKKINLNIKLITKNIKEISSKDIFINPDEKILIFENIRFYKEEEENDNNFAKHISKLADIYVNDAFSCSHRAHSSIHKLPKFLPSYSGLQLNSELYALKRLTSEIKKPITCIIGGSKISTKINIIKNLISKFDNIIIVGGMANNILEYKGFEIGKSIKEKDCVKQVDEIFNFSKKKKCKIFFPEDALVGKSLNDSSKTKDLKDISNDEMILDIGPKTISTIKNIIKTSKTVLWN

SEQ ID NO: 129009 - protein, 108 aa, Unknown
  Bacterial polypetide isolated from the Sargasso Sea
MILDVGQKSIELFKQAINASKTILWNGPLGAFEIKPFDNSTNLLAKFTGQNTILEKCISVAGGGDTVSALNSVKVTKQFSYVSSAGGAFLEWLEGKRLPGIEAIKSSK

SEQ ID NO: 129010 - protein, 165 aa, Unknown
  Bacterial polypetide isolated from the Sargasso Sea
NSLVEENLAKEALIIQRKAKKFNCKLILPTDVVYGKNIEDKKPINCKIEKIKSNKMILDIGIDTINKINYEILKSKMVLWNGPVGAFEYKPYDNATNEIAKTLKLNAKKNNIITLAGGGDTIAAIKNSNAEDSFNYISNAGGAFLEWLEGNESPGVIALKENKLI

SEQ ID NO: 129011 - protein, 301 aa, Unknown
  Bacterial polypetide isolated from the Sargasso Sea
MEKNKTVLIRFDLNVPLNSIDDYISDRIIRIKKPILNLLNGNNKVIILSHLGRPKGKIRDELSLQQVVPQLERVLEKKINFLPDCIGNEVKDKINSLANGTIILLENCRFYKEEEENDHDFAKQLSELADVYINDAFACSHRAHASIEAISHFMPSYCGDLLEEEIVNLQEVIHEPLGPALTIIGGSKISTKITVLKNLSKKMDTIVIAGGMANNFLKYHGYNIQKSLHEENVDHLIGEILDFSSKNNCRLVLPIDAVTADKISNKADTKESDIDNIEEQNMILDIGKNTVKLIKNEISKS

SEQ ID NO: 129012 - protein, 160 aa, Unknown
  Bacterial polypetide isolated from the Sargasso Sea
MESGLKIFSNDIHINNKRVIVRLDLNVPINNSKIEDTTRIKIIEPFINKLIENKAKIILISHLGRPKGKMVPELSLSPIFNYLEKNLKGKIYFYKGKIDSKAVEASNRLKPGEVLLIENVRFFKEEESDDENFAKDLGKLGDLFVNEAFSCSHRKQASIH

SEQ ID NO: 129013 - protein, 238 aa, Unknown
  Bacterial polypetide isolated from the Sargasso Sea
TAHRKQASTYSAIQQASFSCAGLLLEKEINSLNKALTSIENPFTAVIAGSKISTKLELITHLNSKAKFIIVGGGIANTFLKSQGFNVGESLVENDMIEIAKELFNSGKIILPNKVIVADSIDSNSSTIKNIDSVSGSDKIFDINLTSNMSEILKNSKTILWNGPIGVFEKEPFQKGTYQLAKTIAGSEAFSLAGGGETLAAINKFINKDEVSYCSTGGGAFLEYMEGKLLPSIEALGG

SEQ ID NO: 129014 - protein, 257 aa, Unknown
  Bacterial polypetide isolated from the Sargasso Sea
YINDAFACSHRSHASVAAITNYLPSYCGNLLSEELLNLADVIQMPLSPSITIMGGSKISTKISILKSLSIKMDTIIIVGGMANNFIKYSGLNVKNSLIENDVDDLINQIYKFAEDNNCKIITPIDVITAKEVKKDIETVTSAIDEIKENNMILDIGPQTIELIKKELSYAKTVFWNGPAGVFEIPPFQVGTLEIAKYIADLSTKNLIKSFAGGGDTIAALEMANVKNEFSYISTGGGALLELLEGRKLPGLKALNIL

SEQ ID NO: 129015 - protein, 156 aa, Unknown
  Bacterial polypetide isolated from the Sargasso Sea
EMRVENIIKDIFELSITHDCRIYYPEDVMVSKEINGSPEEKRINEISDDDLILDIGPNSINTINSIIEKSKTILWNGPAGYFENPKFARGSLAIGKKIAEKNKSNNLFSVAGGGDTVFLLNKIGIFNNFNFVSTAGGAFLEYLEGKELLGIKALKQ

SEQ ID NO: 129016 - protein, 59 aa, Unknown
  Bacterial polypetide isolated from the Sargasso Sea
IIKRKKENKIYCVSGGGDTVAVLNNFGLVKDFDFVSTAGGAFLEFLEGKELPGIKALNS

SEQ ID NO: 129017 - protein, 214 aa, Unknown
  Bacterial polypetide isolated from the Sargasso Sea
KVTTEIKRPTTCIIGGSKISTKIGIIKNLISKFDNLIIVGGMANNIIKYKGNQIGKSIKEENCDLMIKEIFETLKSHSCKIFFPDDVLIGKNLDDEPQIKELNDIQDDDIILDIGPKTLDKIKKIIENSETVLWNGPAGYFENPNFANGSYEIAKAITKKNKNNSLYSVVGGGDTIALINKIKLIENFNFVSTAGGAFLEYLEGKELPGIKALN

SEQ ID NO: 129018 - protein, 208 aa, Unknown
  Bacterial polypetide isolated from the Sargasso Sea
TKPITCIIGGSKISTKIDIIKNLIPKFDNIIIVGGMANNFIEYFGNNIGKSIKEKNCNEIIEVILSLSKKKECKIIYPEDVLVSKDFNGSSINKELDQILPDEMILDIGPKTVNKIINIIDSSKTILWNGPAGYFENPNFANGSIKIAKKIIENNKSNKIFSVVGGGDTVSLLNSLKIVGNFNFVSTAGGAFLEYLEGKKLPGITALN

SEQ ID NO: 129019 - protein, 172 aa, Unknown
  Bacterial polypetide isolated from the Sargasso Sea
GAPMGNSLYEPNLKETANDILTYSKQKNCNILLPIDIVTARKLEQNTKTNTSNHDECPADQMILDVGQKSIELFKKAINSSKTILWNGPLGAFEIKPFDNSTNLLAKFTGKNTMQEKCISVAGGGDTVSALNSVKVTQQFSYVSSAGGAFLEWLEGKKLPGIEAIKSSKRII

SEQ ID NO: 129020 - protein, 301 aa, Unknown
  Bacterial polypetide isolated from the Sargasso Sea
IIPVINFLLKRKTKILVISHVGRPKGKKNNDLSLKPICLNIEKKIKKKIKLVTSNLYEITKDKLFMQEEEIIFLENIRFYREEEINDSKFAKQIASLGDFYVNDAFSCSHRDHASVSKITKFLPSYAGLQLQSEINALKKITSDIESPITCIIGGSKISTKIGLIKNLTNKLDNLVFVGGMANNILNFKGFKIGKSIKEDHCNNIIDDIFINAEKNFCKIYYPEDVCVGKNFDSHSEIKSLKDISKEDIILDIGPKTVEKIKKIIENSRTVFWNGPAGYFENENFENGSLQICKIMKIIQK

SEQ ID NO: 129021 - protein, 278 aa, Unknown
  Bacterial polypetide isolated from the Sargasso Sea
MGKWNEKLSLKPVCDYIKKKINKKIKLITENIFKLNKKKLFLNCDDEIVFLENIRFYENEEENDEIFSKHLASLGDLFVNDAFSCSHRSHASISKITKYIPSYVGMQFETEINALEKITESIKKPISCIIGGSKISTKISVLKNLIPKFDNIIIVGGMANNILKYKGYIIGKSIYEHNCEEMVKDIFNTSKNYSCSIIFPLDVSVGKKIDGNSKIKELNEVEDDDIILDIGPKTVRKIASIIDESKTILWNGPAGYFENPNFAKGSFEIGKKIAKKNK

SEQ ID NO: 129022 - protein, 104 aa, Unknown
  Bacterial polypetide isolated from the Sargasso Sea
ILDIGPKTLNKIKNIIENSETVLWNGPAGYFENPNFANGSYEIARAIIKKNKDNSIFSVVGGGDTVALINKIKVIENFDFVSTAGGAFLEYLEGRELPGIKALN

SEQ ID NO: 129023 - protein, 241 aa, Unknown
  Bacterial polypetide isolated from the Sargasso Sea
MGDIYINDAFSCSHRAHASICEIPKFLPSFSGLQLDLEVNALNKITSKITTPITCIIGGSKISTKINVIKNLIPKFDNIVIVGGMANNFIEFYGNNIGKSIKEKNCDQIVKEIIDFSKKEKCKIMYPEDVIVSKDLNGSPQKKELNEILSNEMILDIGPKTIKTITNIIDNSKTILWNGPAGYFENPNFANGSIQIAKKIIENNKANKIFSVIGGGDTVSLLNNLKVVNNFNFVSTAGGAF

SEQ ID NO: 129024 - protein, 88 aa, Unknown
  Bacterial polypetide isolated from the Sargasso Sea
MNNLLDKKLSLKDKKVLLRVDLNVPINNKTITETSRIKKILPTIKLLIEKQAKIIILSHLGRPKGRIVETMTLKPISEKLASLLNKEV

SEQ ID NO: 129025 - protein, 77 aa, Unknown
  Bacterial polypetide isolated from the Sargasso Sea
GEVLLLENIRFTKEEELNTASFAKKLSELGDIYVNEAFSCSHRAHASVCEITNHIDSYAGRLLKEEVNMIKMLTDKA

SEQ ID NO: 129026 - protein, 204 aa, Unknown
  Bacterial polypetide isolated from the Sargasso Sea
SKISTKINLLNNLVQHFNCVVIGGAMANTFLLSKDIKVGESLVEKDLVDVAKDIQKKANQFNCKLILPLDVVCGKSVEDKEQIECDINDILQNYMILDLGTKTTALINQEIKNSKMVLWNGPVGAFEYKPYDKATNEIALNIKNNAKKFGINTLAGGGDTFSSIKNANAEDGFDYISNAGGAFLEWLEGNQSPGVIALRENNLS

SEQ ID NO: 129027 - protein, 67 aa, Unknown
  Bacterial polypetide isolated from the Sargasso Sea
GTNAVASEAARLTQNGLLLSVAGGGDTVAALANAGAVDHFSYVSTAGGAFLEWLEGKILPGVAALEK

SEQ ID NO: 129028 - protein, 277 aa, Unknown
  Bacterial polypetide isolated from the Sargasso Sea
VNFILESGARLIIMSHLGRPEENNMFQEEFSLAPVVKEMEGLLNMQIPLYSLSEIEGLDQVDHISIIENTRFNIGEKNNDIELSKRLAALADVFVMDAFATSHRAHASTTGVITFSDDACAGFLLDEELTALSKVKENAKSSIAVLGGAKISTKLSLIDSLSKTVDKVILGGGIANTCLAAKGYEVGKSLIEDSMLEEAKELVANPKIIIPESVIVSISADEPGRITSANSIQENEAIFDIAPASFVDLEPIIMNAGTILWNGPLGFFEKENFFAGT

SEQ ID NO: 129029 - protein, 202 aa, Unknown
  Bacterial polypetide isolated from the Sargasso Sea
MSDLKFFSKDIPVNNKRVIVRLDLNVPINNSKIDDYTRIEVVEPFINQLIENKAKVVLLSHLGRPKGKVVSELSMRPIFNYLEKKLNGKVYFYQEKIDSKAIDASNKLKPGEVLLFENIRFFKEEESNDEVFAKNLSKLGDIYINEAFSCSHRKQASVHKVTKFIDSYGGPILEKEIQSINLIIKNKKKPVTCIIGGSKVST

SEQ ID NO: 129030 - protein, 212 aa, Unknown
  Bacterial polypetide isolated from the Sargasso Sea
TSEIKKPITCIIGGSKISTKINVINNLIKIFDNIIIVGGMANTILKYNGHNIGKSICENDKESLIKEIFEKSKKYNCKIISPVDVAVSNSFEGLPKYKDLYNVENDEMILDIGPKTISSIEETIKKSNTVLWNGPAGYFENPNFEKGTKKILNIISEKTIKDNIFSVAGGGETVAAINKFKKLDSFTFVSTAGGAFLEFLEGKSLPGIKAII

SEQ ID NO: 129031 - protein, 83 aa, Unknown
  Bacterial polypetide isolated from the Sargasso Sea
LWNGPMGLFEKNSFAEGTNAVAKMIVSSNGFSVAGGGDTISAASKAGVLDELDYVSTAGGAFLEFIEGRKLPSLEALQLKLKN

SEQ ID NO: 129032 - protein, 287 aa, Unknown
  Bacterial polypetide isolated from the Sargasso Sea
IQKLLLFLILGRPKGVLDNNLSLKPVCEHIKKKLNKNIKLIKENIFRLNKKKLFVNPQDEILFLENIRFYEKEENNDSNFSKHLASLGDLFVNDAFSCSHRAHASICKITENIPSYAGIQFETEINALKKVTSEIKKPITCIIGGSKISTKISIIKNFIPKFDNIIIVGGMANNILKYKGYTIGKSIHEANSDSIIEDIFKTSKNYPCSIIFPEDVAVSKTREGNAKIKELNDIENDDLILDIGPKTIYKISSIIDESKTILWNGPAGYFENPQFSKGSYAIGKKIA

SEQ ID NO: 129033 - protein, 282 aa, Unknown
  Bacterial polypetide isolated from the Sargasso Sea
MNKIKYFSENLDVQSKTIILRLDLNVPLNKKKIQDKSRVLASLPFLKDLIKKKAKIIIISHLGRPKGVKNNELSLAPIYKFLKEQLGTNVYFFMGNINEEIKSKFSYLKEGEIILLENIRFYKEESENDDNFAKKLASLGDIYINDAFSCSHREQASIHKITKYIKESFAGPLLKKEVTAINAIIENKKEPVTCIIGGSKISTKINVITNLIKKVNNIIIVGAMANNFLIFKGFKVGKSLVEKNSTKIIKSIYTEAKKHNCNIVIPEDCSVSNNFEGSGETK

SEQ ID NO: 129034 - protein, 252 aa, Unknown
  Bacterial polypetide isolated from the Sargasso Sea
IYVNDAFSCSHRDHASVSKITKYIPSYSGIQINEEVNALNKITSEIKKPITCIIGGSKISSKINIIKNLIPKFNSIIIVGAMANNILKYKGLKIGNSVYEKNIDYIIQEIFTYAEKNKCKIYFPKDVKIGKKLNDKSFEKDFKDIEDDDMILDVGSKTLVEIKRIIDDSSTILWNGPLGYFENKNFSLGSSEIAKHIANKGNKIYSVVGGGDTVAIINTLNMSNKFNFVSTAGGAFLEYLEGKVLPGIKALN

SEQ ID NO: 129035 - protein, 179 aa, Unknown
  Bacterial polypetide isolated from the Sargasso Sea
MANTFLLSKDISVGKSLVEKDLVDVAKDIQNKANRLNCKLILPLDVFCGKSTEDKDPIECDINDISQNYMILDLGTKTTALINQEIKNSKMILWNGPVGAFEYKPYDKATNKIAFNIKQNVKRFGINALAGGGDTVSSIKNVNAEDGFDYISNAGGAFLEWLEGNQSPGVLALRENNLS

SEQ ID NO: 129036 - protein, 232 aa, Unknown
  Bacterial polypetide isolated from the Sargasso Sea
EIDKIPNGSVIMLENIRFHKEEEANDNEFSKKISSLGDIYVNDAFSCSHRSHASVEGITKYIPSYYGLQITEEINALKKITSEIEKPVSLIIGGSKISTKIKIINNLIKKFNNIIIVGGMANTMLKHSGINVGKSICENECGSLIKEIVENSKKYNCEIITPKDVIVSESLDGKGLEKNINEIEENEMILDIGPKTISNIKEKINNSKTVLWNGPAGYFENPKFSTMELKKF

SEQ ID NO: 129037 - protein, 224 aa, Unknown
  Bacterial polypetide isolated from the Sargasso Sea
DACAGLLLDEELNALSKVKENSKNSVAILGGAKISTKLTLIDSLSKSMDKIILGGGIANTLIAAKGNEVGKSLIEESMLTEAAKLLENSKIIVPNFVIVSDNPDKPGRLTSIDSIEKNEAIFDISPESFADLETILMNAGTILWNGPLGFFEKENFDKGTIKIAKMISSSNGFSVAGGGDTIAAAQKAGVLGKLDYVSTAGGAFLEFMEGKKLPGVEALIDKVN

SEQ ID NO: 129038 - protein, 106 aa, Unknown
  Bacterial polypetide isolated from the Sargasso Sea
WILVQKQFSIIKKIVNTSNTVLWNGPAGYFENPNFQNGTKEILDMISEKTTNDKIYSVAGGGETVAAINKFKKIDSFTFVSTAGGAFLEYLEGKTLPGIKALNQDV

SEQ ID NO: 129039 - protein, 254 aa, Unknown
  Bacterial polypetide isolated from the Sargasso Sea
LRLKVDEAIKNQKSKIFLLENLRFDEGEINNSLDFAANVTKPFQTYIFDAFGAAHREHASVVSFGNYLDSYQGPLIDEELKELNKILDTNKSGYSVLLGGAKISDKLSLIENLLPKVEKLMIGGGMCFTFLKALGYEIGNSIFEESFVAKAKFLMDSKYGDKIVLPTDFGVTESIESNIRSNIKVEDFQENHIGVDIGNETLSEFSNILNASKYIFWNGPMGIFEIDEYSTGTREIQKLFQCQKHILSVEGETL

SEQ ID NO: 129040 - protein, 88 aa, Unknown
  Bacterial polypetide isolated from the Sargasso Sea
YQSKTILWNGPAGYFENPQFSKGSFEIGNQIANQNKLDKIFSVAGGGDTFALINNIDIFNNFNFVSTAGGAFLEYLEGKELPGIKALN

SEQ ID NO: 129041 - protein, 66 aa, Unknown
  Bacterial polypetide isolated from the Sargasso Sea
EIISKKTEKDKIFSVAGGGETVAVINKFKKFESFTFVSTAGGAFLEYLEGKTLPGIKALIQNVRVK

SEQ ID NO: 129042 - protein, 74 aa, Unknown
  Bacterial polypetide isolated from the Sargasso Sea
FEKEAFSYGTKEITEIISNSSAYTCIGGGDSVSAINKFSDKKNFNHISTGGGASLEYLEGKKLPGVNKYKSLII

SEQ ID NO: 129043 - protein, 218 aa, Unknown
  Bacterial polypetide isolated from the Sargasso Sea
IDLITKNKKKPVTCIIGGSKVSTKISILSNLSEKADNLIIVGAMANNFLKSQGINVGASMIEKGTENIIKNINALAKKNKCNIIIPVDCNTSSNVDGEPVHKSLKDLVSNDMILDIGKNTIELINKTIDRSNTVFWNGPAGYYENKNFSTGSLSIAKKIADNTKSRSLISIVGGGDTVAAIKNTGLEKVYTHLSTAGGAFLESLEGKELPGVKVLKKN

SEQ ID NO: 129044 - protein, 303 aa, Unknown
  Bacterial polypetide isolated from the Sargasso Sea
SSLEFDLNVPMKNGAITETSRIKKILPTIEFLIEKEAKIIILSHIGRPKGKMVKGMTLDPISKKLSDLLNKKIIFNKNIISKNTFSEIDNLSNGSIMMLENIRFNEGEETNDKEFSKKISGLGDIYINDAFSCSHRAHASIEGITKYIPSYFGLQITEEINALKKITSEIKKPVSLIIGGSKISTKIKIINNLIKKFDNIIIVGGMANTLLKHTGSKVGKSIYENDCGQLIKEILKKSKEFNCEITCPTDVIVAKSLEGMGKNKDIDKIEEDEMILDIGPKTIASIKKIIDNSNTVLWNGPAG

SEQ ID NO: 129045 - protein, 221 aa, Unknown
  Bacterial polypetide isolated from the Sargasso Sea
MGEINFFPDDLEIKDQKIILRLDLNVPIKDKVIKDDTRITLCLPFINRLIEKKAKIIIISHLGRPKGINVPDLSLIPIYKYLKDVLKTNVYFFRGTFDGETKEKFSHLKGGEVILIENIRFFKEETEDGQDFSKKLGELGDIYINDAFSCSHRKQASIHSITKFVKKSYGGPLLKKEITAINLVIKNKKEPVTCIIGGSKISTKINDITNLLKKVNNIVIV

SEQ ID NO: 129046 - protein, 88 aa, Unknown
  Bacterial polypetide isolated from the Sargasso Sea
KTILWNGPAGYFEIEKFSIGSNKIAKKITENTKNKSLVSIAGGGDTVAVINKTDSFNGFTYISTAGGAFLELLEGKNLPGIKALELNE

SEQ ID NO: 129047 - protein, 162 aa, Unknown
  Bacterial polypetide isolated from the Sargasso Sea
GNSICEPDYCIYALDLIDKAKKNNVSLHFPVDVVAGNTFSNNAKQKIFDVMEIEDGWEAMDAGPESIKKFHEVIIKCKTILWNGPLGVFEFPNFSAGTISAGKSIAEATINGSYSLVGGGDSVAAVKKFKMDNDMSYISTGGGAMLESLEGKILPGIASLNK

SEQ ID NO: 129048 - protein, 174 aa, Unknown
  Bacterial polypetide isolated from the Sargasso Sea
MDVQNKTVILRLDLNVPLNEKKILDNSRILTSLPFLKNLIKKKAKIIIISHLGRPKGMKINELSLTPIYKFLKEQLQTNVYFFMGDINEETKSKFSYLKEGEVILLENIRFFQEESENEDNFAKTLASLGDIYVNDAFSCCHRAQASIHKITKYIKESYAGPLLKTEVRAISFI

SEQ ID NO: 129049 - protein, 103 aa, Unknown
  Bacterial polypetide isolated from the Sargasso Sea
MLNVSNLKKITEKNKTVLIRFDLNVPLNSIDEYISDRIIRIKKPILNLLHENHKVIILSHLGRPKGEIKDDLSLQQVVPQLEKVLEKKINFLPDCIGNEIKNK

SEQ ID NO: 129050 - protein, 229 aa, Unknown
  Bacterial polypetide isolated from the Sargasso Sea
GIQLISEIEALEKVTNNIEKPVTCIMGGSKISTKIGIIKNLIPRFNNIIIVGGMANNILNYKNFQIGKSIQETKCGDIIKDIFNELKKFPCSLIYPKDVIVGKNFNDKPSVRDLNKIKNDEMILDIGPKTIEEINDLINKSKTVLWNGPAGYCENPDFAKGSIEIAKSIIRKSKTNSLYSVAGGGDTIALLNKLKAIENFDFVSTAGGAFLEYLEGKDLPGIKALKNHV

SEQ ID NO: 129051 - protein, 211 aa, Unknown
  Bacterial polypetide isolated from the Sargasso Sea
MNFKTLESINLHSKKVLLRVDLNVPTMNGKVIDTTRITSIIPTIKLILQKKGFPILLSHFGRPAGRIDGRLSLKMIAPVISKLLGHPVFFSDDTVGNRVQKLIEDCDSNAVVLLENLRFLPGEENNDPSFAKSLAKLGDIFCNDAFSVCHRAHASTVGLANCLPSCVGPSVVQELEALDKALTRPRKPIVAVVGGAKVSTKIKILKNLIKK

SEQ ID NO: 129052 - protein, 237 aa, Unknown
  Bacterial polypetide isolated from the Sargasso Sea
RGCKVIIMSHFDRPKGKVVPKMSLRALLPVLVEIFGGREIAFLENPLGDTAKTIVADLPNGSIALAENLRFFAGEESNDENFARALGKLGDVFVNDAFSVAHRAHASTQGLARIMPAAAGKSMQLELEALEKALANPERPVVAVIGGAKVSTKLEVLTNLTSKVDRLVVGGAMANTFLYAQGTTVGASLCEKDMAEAALVVMNNAAKVGCKLILPSDVVVAEQLKLGSIGETVHISA

SEQ ID NO: 129053 - protein, 291 aa, Unknown
  Bacterial polypetide isolated from the Sargasso Sea
IKLLIEKQAKIIILSHIGRPEGKIVKGMSLEPISKKLASLLNKEVLFNKNIINENTLTEINKIQNGSIMMLENIRFNKGEETNDSEFSKKLSNLGDLYVNDAFSCSHRFHASVEGITKHIKSYFGLQITEEVKALKKITSEIKKPVTLIIGGSKISTKIKIINNLIKKFNNIIIVGGMANTMLKHTGSKIGKSICENNSGPLIKEILENSIKYNCNIVCPIDAVVSKKLDGVGKNKNINEIDQDEMILDIGPKTISSIKNIIMDSNTVLWNGPAGYFENSNFQNGTNKLLK

SEQ ID NO: 129054 - protein, 171 aa, Unknown
  Bacterial polypetide isolated from the Sargasso Sea
MKSLDKIIIKNKKIIFRADLNVPVLNGKITDYSRINSIIPTIEILKKNENKIFIIAHFGRPKGKKNNKYSIKFLCEDLKKIFKIPNIHFLESFEKKIIQNKISEMKNGEICLFENIRFNPGEETNDLDFSKSLSSNFDIYVNDAFSASHRNHASITGITKYLPSYAGVSFS

SEQ ID NO: 129055 - protein, 180 aa, Unknown
  Bacterial polypetide isolated from the Sargasso Sea
MGEINFFPDDLEIKDQKIILRLDLNVPIKDKVIKDDTRITLCLPFINRLIEKKAKIIIISHLGRPKGINVPDLSLIPIYKYLKDVLKTNVYFFRGSFDGETKEKFSHLKGGEVILIENIRFFKEETEDGQDFSKKLGELGDIYINDAFSCSHRKTASVHSITKFVKKSYAGPLLKKEIRQ

SEQ ID NO: 129056 - protein, 129 aa, Unknown
  Bacterial polypetide isolated from the Sargasso Sea
MEDKSILNIDTHNKRLLIRADLNVPINNNKISDETRIERFCSGVSKLLKKNAKIIIITHLGRPKGKEDLSLSNRILLKPLQKYLNKEIIFSSNPISTSAIESSKRLKNNQILLCENIRFHPEEDEDDLI

SEQ ID NO: 129057 - protein, 284 aa, Unknown
  Bacterial polypetide isolated from the Sargasso Sea
MQIPSMETLDLQGKRTMIRLDLNVPIKDGLVASDARIMASLSTIEMALDKGAKVILLSHLGRPDPDHLDGSFSLEPVANRLKEILNKNISFQPDWLEGINDQSNDIILCENVRYQAGEKKNDETLSQKIANLCDVYVMDAFGASHRKHSSTYGVLQYAKEGCIGPLLSNEVSSIKKAIDRPTAPVTAIIGGAKVSSKLGVIERFSSFCDHVIVGGGIANTFLLASGKQVGASLVETEMVDAANKILQMENVNVPLPVDVRVAKEFSTEAEATIKSIDEVGEDDL

SEQ ID NO: 129058 - protein, 251 aa, Unknown
  Bacterial polypetide isolated from the Sargasso Sea
NEAFSCSHRKQASIHKITNFIESYGGPVLEKEIKSINLIIKNKKKPVTCIIGGSKVSTKINILNKLSENADNLVIVGAMANNFLKNKGINIGASLVESGVESAIKNLYTLVIRNKCKIILPVDCNTSGNFEGAPVYKTVENLSSQDMILDIGKKTIELIHKIIDESNTVFWNGPAGYFENKNFLNGSISIAKKIAENTKSKSLISIVGGGDTIATIKNSGLEKTFTHLSTAGGAFLESLEGKELPGIKVLK

SEQ ID NO: 129059 - protein, 248 aa, Unknown
  Bacterial polypetide isolated from the Sargasso Sea
MGKIKYFSEDIDVQNKTLILRLDLNVPLNDKKIQDENRILASLPFLKDLIKKKAKIIIISHLGRPKGVKNSELSLSPVYKYLKEKLETSVYFFMGEINQETKNKFSYLKEGEIILLENIRFFKEETENDDNFAKELASLGDVYINDAFSCSHRKQASIHKITKYVKESYAGPLLKQEVESINSIIQNKKEPVTCIIGGSKISTKINVITNLIKNVNNIIIVGAMANNFLTFKGFKIGKSLMKKTLKRQ

SEQ ID NO: 129060 - protein, 173 aa, Unknown
  Bacterial polypetide isolated from the Sargasso Sea
NFIEYFGHNIGRSIKEKNCDPIIEEIISLSKKEKCELSFPEDVLVSKDLNGSHKKRELNQIKIDEMILDIGPKTVESICNIINNTNTILWNGPAGYFENPNFAKGSTAIAKKIVEKNKENKIYSVVGGGDTVSLINSLNAVKDFNFVSTAGGAFLEYLEGKKLPGISALNKNV

SEQ ID NO: 129061 - protein, 205 aa, Unknown
  Bacterial polypetide isolated from the Sargasso Sea
GSKISTKINLLNNLIQQFNCVVIGGAMANTFLLSKDISVGKSLVEKDLVDVAKDIQNKANRLNCKLILPLDVFCGKSTEDKDPIECDINDISQNYMILDLGTKTTALINQEIKNSKMILWNGPVGAFEYKPYDKATNKIAFNIKQNVKRFGINALAGGGDTVSSIKNVNAEDGFDYISNAGGAFLEWLEGNQSPGVLALRENNLS

SEQ ID NO: 129062 - protein, 69 aa, Unknown
  Bacterial polypetide isolated from the Sargasso Sea
MSDLKIFSKDIPVNGKRVIVRLDLNVPINNSKIDDDTRIKVIEPFINELIENKAKVVLLSHLGRPKGKV

SEQ ID NO: 129063 - protein, 286 aa, Unknown
  Bacterial polypetide isolated from the Sargasso Sea
FGKNRITDTTRIDKILPTLNFLIKEKAKIIILSHVGRPKGKIVKELSLEPIRKELQKKLSKKVKLISENIKDIKNKNFFNNYSEEILILENIRFYSEEEENDNKFAEHISCLGDIYVNDAFSCSHRAHASIREMPKFLPSFSGLQLDLEVNALNKITSKITRPITCIIGGSKISSKINVIKNLITKFDNIVIVGGMANNFIEFFGNNIGISIKEKNCDQIVKEIIALSEKEKCKMIYPEDVVVSKNFNGSPTKKELNEILCDEMILDIGPKTIEKITNIIDNSKTI

SEQ ID NO: 129064 - protein, 213 aa, Unknown
  Bacterial polypetide isolated from the Sargasso Sea
MKNLNNYTIKNKKILFRADLNVPVIDGVITDTSRITAVKSSIEKLISNNNKIFLVAHYGRPNGEFIKKYSLNFILPSLKKILNLDKVYFLENLDQDSIERTYNEMQGNSVCLIENIRFLKEEEKIDFDFAKKISSLFDVYVNDAFSASHRNHTSITGFSKFLPAVAGDHMIKEINNINFFLKNGKKPNLAIVGGSKISTKIQLLNNLIEQFTA

SEQ ID NO: 129065 - protein, 128 aa, Unknown
  Bacterial polypetide isolated from the Sargasso Sea
MRLLSDLDIAKKKVALRLDLNVPIKEGVITDDTRILASLETLNYLIKAEAKIVILSHLGRPKEGTFDDQLSLRPVASHLSNELGISISLINSMKEFHDTNAQMCMLENIRFFEGESKNSDSLAREIGS

SEQ ID NO: 129066 - protein, 396 aa, Unknown
  Bacterial polypetide isolated from the Sargasso Sea
MKNVLNKNLDLVGKKVLLRVDLNVPMKNGAITETSRIEKIIPTIKLLLEKQAKIIIISHIGRPKGKVVEGMSLKPISEKLSFLLNKEVLFNKEPINKNTLLEINKISNGKIIMLENIRFNEGEELNNNEFSKKISDLGDIYINDAFSCSHRSHASVEGITKYMPSYFGLQITEEINALKKITSEIEKPVSLIIGGSKISTKIKIINNLIKKFNNIIIVGGMGNTMLKHTGSDIGKSICENDCGFLIKEILESSKKYNCEITIPKDAIVSTSLDGEGEEKNVNEIKDNEMILDIGPKTISSIETIISNSRTILWNGPAGYFENPNFQNGTKKILELISQKTKNDKIFSVAGGGETVAAINKFKKFDSFTFVSTAGGAFLEYLEGKTLPAIKALNQNV

SEQ ID NO: 129067 - protein, 235 aa, Unknown
  Bacterial polypetide isolated from the Sargasso Sea
MDLNVPLKNGSITDETRINKIIPIIDFLIKEQSKIIIISHVGRPKGKVITDLSLKPICENIEKKINRKIRLEKEDIFKLKKEDLFKDPNDQIVFLENIRFYKEEEKNDTDFAKHLAKLADLYVNDAFSCSHRAHASVSKITEFLPSFAGLQLETEISALKKVTSEIKKPITCIIGGSKISTKIGIIKNLISKFDNIIIVGGMANNIIKYKGNKIGKSIQEENCDSMIEEIFVTLK

SEQ ID NO: 129068 - protein, 392 aa, Unknown
  Bacterial polypetide isolated from the Sargasso Sea
MNNIKDYENLSGKRVLLRLDLNVPLKNGDIVDETRIIKIIPVIEFLIKRNAKVLIISHVGRPKGKFNKDLSLKPICDYIEKKIKTRINFISEDILKIKRDNLFKDPKEKVIFFENIRFYAEEENNETNFSKHLASFADLYVNDAFSCSHRTHASVCKITEFLPSFAGLQFETEVNALKKVTIEIKKPITCIIGGSKISTKIDIIKNLIPKFNNIIFVGGMANNILSFKGNKIGKSISEENCESIIQEIFEISKNALCEVTYPEDVLIGKSVDDDAQIKDLKDITDDDLILDVGPKTLKRIKNIIENSETVLWNGPAGYFENPNFAKGSIEIAKTIIKKNKNDSIFSVVGGGDTVAVVNQLNAIKDFNFVSTAGGAFLEYLEGKELPGIKALK

SEQ ID NO: 129069 - protein, 301 aa, Unknown
  Bacterial polypetide isolated from the Sargasso Sea
MRSIKNETNLRDKKILLRLDLNVPIVKGKISDTTRIDKILPTLKFLNKQKTKIIILSHVGRPKGKALNELSLKPICENLNEQLGLNVKLITQNINEIKNKDFFDNFNEEILMLENIRFYAEEEKNDNKFAEHLASFGDIYVNDAFSCSHRSHASIVEISKFLPSFSGLQIDLEIDALTKVTSEITKPISCIIGGSKISTKIDIIKNLIPKFDNIIIVGAMANNFIEYFGHNIGKSIKEKNCDPIIKEIISISKKEKCEISYPEDVIVSKELNGLYKKRKLNEILNDEMILDIGPKTIDKIT

SEQ ID NO: 129070 - protein, 394 aa, Unknown
  Bacterial polypetide isolated from the Sargasso Sea
MKKIRSFNNRINIKNKRIILRSDLNVPIKNKVIQDKTRINLSIPLIENLLKREAKVLLISHLGRPRDLKDHNLSLKPVYEYLKEKISNNIYFFSDKITNKTKDKISFLKNGEIIFFENIRLNDGEIQNDDNFAKNLSSLGDVYINDAFSCAHRKQTSIHKITKHISNSYAGPLLMKEIQSINMVLNSKKKPTTCIIGGSKISTKLGVITTLLKKVDYLIIVGAMANNFIKFKGNKIGKSLIESGSEKIIGEIYDKADKNSCEIVTPLDFAVSESIDGEANLKSFQDIQENDIILDIGQKTIKKINKVIDSSKTVLWNGPAGYFENRNFSKGTISIARKISENTKSNNLISIVGGGDTISAIKNNGIDVNFTHLSTAGGAFLEYIEGKNLPGIEV

SEQ ID NO: 129071 - protein, 306 aa, Unknown
  Bacterial polypetide isolated from the Sargasso Sea
MNNIKDHENLNKKKVLLRLDLNVPLKNGVITDQTRINKILPIIEFLLSKNCQIIIISHVGRPKGKINNDLSLKPICENLEKKIKKKIRMINDNIFKLKKEDLFKVPNDQIVLLENIRFYEEEEKNDTSFAKHLAGLADLFVNDAFSCSHRAHASVCKITEFLPSFAGLQLETEINALKKVTTEIKKPTTCIIGGSKISTKIGIIKNLIPIFNNIIIVGGMANNILSHKGNQIGKSIKEENCEMIIKEIFETSKNYSCEIIYPEDVLVGKKLDGAAEVKELNNIKNNDLILDIGPKTVNKIKNIMKL

SEQ ID NO: 129072 - protein, 273 aa, Unknown
  Bacterial polypetide isolated from the Sargasso Sea
MGAITENSRIEKVLPTIKFLIKQKAKIIIIAHLGRPKGKIIPELTLKPIAEKLSSYLDQNVMFLNESIGLPTIKNSKEIPNGRILLLENLRFHKEEELNSATFAKELSKNGDIYVNEAFSCSHRAHASVCEITKHINSFAGKQLLKEVSVIKMLTSSAKKPTTCIIGGSKISTKSGILVNLIKNIQNIVIVGAMANIFIKHKGYNIGQSIFEKNQENLIENIIKETKKNNCNLIVPEDVITSKNYNSKGVLKNLDQINDNDLILDIGEKPYKI

SEQ ID NO: 129073 - protein, 179 aa, Unknown
  Bacterial polypetide isolated from the Sargasso Sea
MANTFLLSNNYNVGSSLVENDFIELSKKIQKKAESKNCKILLPIDAVCSKTIEDRVNVKTYSINNIPNDQMILDVGEQTTKLISDEILKSKSILWNGPLGAFEYSPFDKSTISVANIIQNYSSKSQLDALAGGGDTLAAIKKAKANDGFKYLSTAGGAFLEWLEGNKSPGFIALRENNF

SEQ ID NO: 129074 - protein, 175 aa, Unknown
  Bacterial polypetide isolated from the Sargasso Sea
MLKEHQWGNSLYEPNLKETANDILTYSKQKNCNILLPIDIVTARKLEQNTKTNTSNHDKCPADQMILDVGQKSIELFKKTIDSSKTILWNGPLGAFEIKPFDNATSLLAKFTGKNTMQEKCISVAGGGDTVSALNSVKVTQQFSYVSSAGGAFLEWLEGKKLPGIEAIKSSKRII

SEQ ID NO: 129075 - protein, 237 aa, Unknown
  Bacterial polypetide isolated from the Sargasso Sea
MKSINEEVNLGNKKILLRLDLNVPIVDNKITDTTRIDKILPTLRFLVNQNTKIIIISHVGRPKGKIVNELSLKIICEELSKKLNQNVKLISKNIKEINSKELFSNNDQRIIMLENIRFHPEEEKNNQQFAKHLATLADIYVNDAFSCSHRAHASIHEITKFLPSYSGLQFDLEVNALKKITSEIKKPITCIIGGSKVSTKVNIIKNLIPKFDNIIIVGGMANNIIKYMGNNIGKIFI

SEQ ID NO: 129076 - protein, 280 aa, Unknown
  Bacterial polypetide isolated from the Sargasso Sea
MRSIINEKNLNSKKILLRLDLNVPLEKDKITDTTRIDKILPTLNFLIKEKAKIIILSHVGRPKGKIVKDLSLKPICEELQNKLKKKVKLISENIKDIKSKNFFSDYNEDIFILENIRFYSEEEQNDNKFAKLISNLGDIYVNDAFSCSHRAHASIYEIPKFLPSFSGLQLDLEVNALNKITSEITRPITCIIGGSKVSTKINVIKNLISKFDNIIIVGGMANNFIEYFGNSVGKSIKEKNCNKIVEEIISLSKKEECKIIYPEDVIVSKDLNGSPSKEKN

SEQ ID NO: 129077 - protein, 314 aa, Unknown
  Bacterial polypetide isolated from the Sargasso Sea
MIVKLLFLNDCIGIDVENKIKNADQEEIILLENCRFYKEEEDNDNNFAQSLSKLADVYINDAFACSHRSHASVAAITNYLPSYCGNLLSEELLNLADVIQMPVSPSVTIMGGSKISTKISILKSLSIKMDTIIIVGGMANNFIKFSGLNVQDSLIENDVDDLINQIYKFAEDNNCKIITPIDVITAKEVKKDIETVTSAIDEIKENNMILDIGPQTIELIKKELSSAKTVFWNGPAGVFETPPFQVGTLEIAKHIADLSTKNLIKSFAGGGDTIAALEMANVKNEFSYISTGGGALLELLEGRKLPGLKALNIL

SEQ ID NO: 129078 - protein, 363 aa, Unknown
  Bacterial polypetide isolated from the Sargasso Sea
MSDLKIFSDSIQIDNKRVIVRLDLNVPIKNFKIEDDTRIRVIIPFLNKLLKKKAKVILITHLGRPKGKVVPELSLNPIFDYFKKNLKEKIYFYQNDMDNNAVEASNKLATGEVLLFENIRFFKEEESNEESFAKKLAGLGDIFINEAFSCSHRKQASIHKITKFIDSYGGPTLEKETRSIDLILKNKKRPVTCIIGGSKVSTKINILSSLSINADNIVIVGAMANNFLKFNGLNIGASLVEKDSENIVKDIIATAEKNKCNIIIPVDCNTSTNAGGSSIYKSLDDVSSEDMILDIGKKTIELINKTIDNSNTVFWNGPAGYYENKNFSVGSELIAKKIAKNTKSKSLISIVGGGDTVAAIKNT

SEQ ID NO: 129079 - protein, 304 aa, Unknown
  Bacterial polypetide isolated from the Sargasso Sea
MKNISNFNFKNKKILLRVDLNVPVVDGKVSDLSRIHSIKSTIFKIRENKNKIFLLSHFGRPKGKYNQKYSLEFLCDIIKETLNLNKIFFSPSINEKDLKYIQSQMADDDVCLIENIRFCEGEEKNDLDFSKYLSQFFDLYVNDAFSASHREHASIVGIVKFLPAFAGISFSKEIKYLNSFIDDPKKPTTCILGGSKISTKLSLIENLIEYSDCIIIAGAMANTLLYNQGYNIGKSLIENNMSEVVDKIFQKAKKFNCKIILPTDVVCSRDLNEVLDIRHCHVKDILPNQMILDIGDKTIKNIKD

SEQ ID NO: 129080 - protein, 251 aa, Unknown
  Bacterial polypetide isolated from the Sargasso Sea
MSKPNNHTDLGDVLIRSDLNVPIINNEITDKFRISKSINIIKSIYESSRTITFTSHLGRPNNNDPNFSLIKIADAMSELLDNEKVMFIDAIHGSKVEEAIKNKKSKIFLLENLRFDEGEINNSLDFAANVTKPFQTYIFDAFGSAHREHASVVSFGNYLDSYQGPLIDEELKELNKILNTDESGYSVLLGGAKISDKLSLIENLLPKVEKLMIGGGMCFTFLKALDYEIGNSIFEESFVAKAKFFNGFKVW

SEQ ID NO: 129081 - protein, 325 aa, Unknown
  Bacterial polypetide isolated from the Sargasso Sea
MKDGLSFHPIKSEIEKALDREIDFKDIEKIEKPKIKKSKKKIFLLENIRFYPGEETNNEEFSKKLASIADVYINEAFSCSHRSHASINGVTKYIDSYAGETVIEEINALNKIITQTQKPVACLIGGSKISTKIDLIINLLPKMDYMIIGGAMANNFFKYDNVNIGKSYFEQVDISIVKSIHQVANRCGCKIILPTDVIVSQNQHTKGILKKLNEVNNDDFIFDIGNETIKIIDEKLSKCKTVLWNGPFGLFENDNFSNGTEKIAKSVANYTKKNNLISVAGGGDTFAAIKKSNLISDFSYISTAGGAFLEWLEGKVLPGLKVLEK

SEQ ID NO: 129082 - protein, 370 aa, Unknown
  Bacterial polypetide isolated from the Sargasso Sea
MKNILDENLTLKNKKVLLRVDLNVPMKNGSITESSRIEKIIPTIKILIEKQAKIIILSHIGRPKGKVVKEMTLEPISKKLSSLINKEIIFYKNKINKNTISEIDKIPNGSIMMLENIRFNEGEESNDNSFSKKLSKLGDIYVNDAFSCSHRSHSSVVGITKYIPSYFGIQITEEIEALTKITSEIKKPVTLIIGGSKISTKINIINNLIKKFNNIIIVGGMANTMLKHTGYKVGKSLCEKNCESLIKKILENSIKYKCNITLPMDVVVSNNIGGLGSNKNIKDVNNNEMILDIGPKTILLIKKIIEKSNTVLWNGPAGYFENPNFENGTKEILEMISKKTLNDDCFSVAGGGETVAAINKFKKTNSFKFV

SEQ ID NO: 129083 - protein, 175 aa, Unknown
  Bacterial polypetide isolated from the Sargasso Sea
GAMANNFIEYFGNNIGKSIKEENCVQIVEEILSLSKKKECKIIYPEDVLVSKNLNGSPKNKDLDQILPDEMILDIGPKTINKIVNIIGKSKTILWNGPAGYFENPNFANGSIKIAKTIIEDNKSKNIFSVVGGGDTVSLLNKLKVVHKFNFVSTAGGAFLEYLEGKKLPGITALN

SEQ ID NO: 129084 - protein, 89 aa, Unknown
  Bacterial polypetide isolated from the Sargasso Sea
MVLWNGPVGAFEYKPYNKATNKIALNIKQNVKKFGINALAGGGDTVSSIKNANAEDGFDYISNAGGAFLEWLEGNQSQGVIALRENNLS

SEQ ID NO: 129085 - protein, 76 aa, Unknown
  Bacterial polypetide isolated from the Sargasso Sea
MINLSSLDIANKNLVIRVDMNVPLKDSEILDATRINACFPTIEHALSNNARILLISHLGRPSEGNFEEKFSMQPVA

SEQ ID NO: 129086 - protein, 157 aa, Unknown
  Bacterial polypetide isolated from the Sargasso Sea
IEKGAETIIKDIYNSAKKNKCNIIIPTDCMVSSDLNGDAKHKKLNEITSKDIILDIGSSTVKLINETIENSKTVFWNGPAGYFENKNFASGTLSIAKKISENTRSSSLISIVGGGDTISAIKNGDFKNVFTHLSTAGGAFLESLEGKELPGIKVLKT

SEQ ID NO: 129087 - protein, 278 aa, Unknown
  Bacterial polypetide isolated from the Sargasso Sea
RFFNGEEDDDENFAKDLSKMGDLYINEAFSCSHRKQASLHKITKFIDSYGGPLLEKEMNSIRLIIENRKKPVTCIIGGSKISSKIKVISNLLKKSDNLVIIGAMANNFLKFKGINIGSSIYEKGTEDIVKEINSLAKKYNCKIIIPLDCNTATNIDGDKNYKTLENLGNKDMILDIGNKTIDVINKTIDISKTVFWNGPAGYYENKDFSVGTLSIAKKIAENTKSKSLISIVGGGDTLAAIKNAGLEKIFTHLSTAGGAFLESLEGKELPGIKVLTKK

SEQ ID NO: 129088 - protein, 332 aa, Unknown
  Bacterial polypetide isolated from the Sargasso Sea
MKTLSEIDLNNKKVGIRVDLNVPIKEGKILSHEKLSAALPSILHILERTENLCIISHLGRPIEGNFNSNHSLLPIKEWFDKKLKKELSFTDSLDAIPEGISFLENIRFFNGEKENNEELSQKIADAFDVYVMDAFATAHRKSASTFGAIKKSEIVCAGMLFSEEVTNIEYALKESASLNSIVGGSKISTKLKVIESLLEKSQKVLVGGGIANTFLKASGYEIGKSLVEDNMLNMASNMLRTEKIIMPEKVYVAESIESKDISLVPVSNISKDKMILDIEFNDKEMKDYLSETIIWNGPLGMFEIDEFSNGTKSLIDYLKQSDSKVIAGGGET

SEQ ID NO: 129089 - protein, 179 aa, Unknown
  Bacterial polypetide isolated from the Sargasso Sea
MNSIKDQKNLNKKKVLLRLDLNVPLKKGLITDETRINKIIPIIDFLIKEQSKIIIISHVGRPKGKVITDLSLTPICENVEKKINKKIRLVKEDIFKLKKEDLFKDPNDQIVFLENIRFYKEEEKNDTNFAQHLAKLADLYVNDAFSCSHRAHASVSKITEFLPSFAGLQLETECNALKK

SEQ ID NO: 129090 - protein, 62 aa, Unknown
  Bacterial polypetide isolated from the Sargasso Sea
MINLSSLDLNNKKLVIRVDMNVPIKDGDVLDSTRIKACLSTIEYALENNAKVLLISHLGRPI

SEQ ID NO: 129091 - protein, 247 aa, Unknown
  Bacterial polypetide isolated from the Sargasso Sea
CSHRKEASIHNITKFMKECFAGPLIEKELSAINLLIKDKKEPVTCIVGGSKISTKINILSNLIKNIDNIIVVGAMANNFIYYKGFEIGKSMVERDSKEIIKKIYLEAKKYRCNIIIPEDFLVSKNYDGEASSKNIDMVEKDEIILDIGPKTIQAINNKIDDSNTVMWNGPAGYFENKNFAIGTNSIAKKISKNTSEKSLISILGGGDTISAINNSKLSLSFTHLSTAGGAFLEYLEGKDLPGLSVLK

SEQ ID NO: 129092 - protein, 154 aa, Unknown
  Bacterial polypetide isolated from the Sargasso Sea
ENCKTIIDEIFETSKKYSCLIYYPEDVLIGKNLNDNSLAKELSDVTDDDLILDIGIKTINKIKNIIEKSQTVLWNGPAGYFENPNFANGSYEIAKAIIQKNKDKSIYSVAGGGDTIALINQINAIKDFNFVSTAGGAFLEYLEGKELPGIKALN

SEQ ID NO: 129093 - protein, 380 aa, Unknown
  Bacterial polypetide isolated from the Sargasso Sea
MKNIEDKNLSKKNILVRVDLNVPVVNDQITDRSRIKSILPTLNKLKDSNNKIFLISHFGRPNGIKNKKYSLKFICNILEEEINIKKIYFLEDFDEKNIQNMINEIKPGDICLFENIRFYSAEEKNDLDFAKNISKNFDAFVNDAFSCSHRKHASIVGLPTFLPSYLGYSFLKEINNLNSLLSNKDKPNLAIIGGSKISTKIELLFNLSYYFDTIVIGGAMANTFLYAKKINIGKSLTEKNYNEVVFSIINKAKENNCEIILPIDVVCANNLNEKESIRRCEIENISDSQMILDLGFKTTQMISQYINKSKLILWNGPLGAFEHPSFAESSIKIANIIKSRSINSEITSIAGGGDTNSVIKIAKAKDGFSYISNAGGAFLE

SEQ ID NO: 129094 - protein, 294 aa, Unknown
  Bacterial polypetide isolated from the Sargasso Sea
MITVKGISNQDFNGKKCLLRLDLNIPISESGQILDDTRIRESKPSIDYLLEQNTKVIIVSHMGRPKGKYSSELSFENLLSDFEKILKRKIVLVPFSDQEDALKIINSLDFGTLFLLDNIRFNKGEESSDSEFIKFLSSLADVFINDGFGTIHRNHSSITGVANLLPSFGGILLEKEIEKISQCIQEKAQNSTAILGGAKIQDKIPIIENLSKTFNKIIITGGMIRPFLIASEKIPNSKKINNDEINIAKKILIENEKIFVPDQLICSESIDGEPVLLNASQINESDNIFDIGPN

SEQ ID NO: 129095 - protein, 154 aa, Unknown
  Bacterial polypetide isolated from the Sargasso Sea
QTVIEEIFETSKNFSCSIIFPEDVLIGKNMNDKSQVKELNEIKDDDLILDIGPKTIKKIKDIIELSSTILWNGPAGYFENPNFADGSHEIAKMIIKKNKNKSIYSVVGGGDTIAFINQINALKNFDFVSTAGGAFLEYLEGKELPGIKSLKLYV

SEQ ID NO: 129096 - protein, 329 aa, Unknown
  Bacterial polypetide isolated from the Sargasso Sea
PKGKIVKELSLELVSMYIKSKIKKEVSLLKENIFNINKEDIFKNSNDELVLLENIRFYPEEEANDDTFSKKLASLGEIYVNDAFSCSHREHASISKITKYIPSYSGIQINAEVNALNKITYEIKKPITCIIGGSKISSKINIIKNLIPKFNSIIIVGAMANNILKYKGLNIGKSVYEKNIDYIIQEIFKYAEKNKCKIYFPKDVKIGKKLNDRSFEKDFKDIEDDDMILDVGSKTLVEIKRIIDDSSTILWNGPLGYFENENFSLGSSEVAKYIASRGNKIFSVVGGGDTVAVINSLNMKDKFNFVSTAGGAFLEYLEGKVLPGIKALH

SEQ ID NO: 129097 - protein, 362 aa, Unknown
  Bacterial polypetide isolated from the Sargasso Sea
MKFLNNIDLKNKKILFRADLNVPVLNGKVSDYSRIKSIVPSINQLLKNNNKVFILAHFGRPKGKINKNYSLKFLCNELATILNKEKIHFIEAFEDTVINKKIDEMHKGEICLFENIRFNPEEETNDLNFSKNLSLHFDYFINDAFSASHRNHSSIVGLPKFLPAAAGISFMNEIKNLDNFLNNAKKPNMAIIGGSKISTKIKVIYNLIDLFDTVIIGGAMANTFLLTSNIKIGKSLVEKDYIDIAKDILEKAKLSNCEIILPKDVVCSPDIKNTENIRICNIDDVFDDHMILDVGEKTTKLISEKILKSRSVLWNGPLGAFEYKPFDKSSIDVANIIYQYSKDLQIDTMAGGGDTIAAINLT

SEQ ID NO: 129098 - protein, 144 aa, Unknown
  Bacterial polypetide isolated from the Sargasso Sea
MSLQSLNDCKIIYPKDFLVGKKLTDFSNNRKINEIENDDIILDIGLETIQSIKNIINNSKTILWNGPAGYFENENFASGSYEIAKEISAKTKNSKLFSVIGGGDTVAVLNKLNLINNFSFVSTAGGAFLEYLEGKELPGIKSLN

SEQ ID NO: 129099 - protein, 397 aa, Unknown
  Bacterial polypetide isolated from the Sargasso Sea
MSDLKIFSNNISVENKRVIVRLDLNVPIKNSIIEDYTRIELVEPLINKLIENKAKIILLTHLGRPKGKVVNELSLEPVYKYLQKKLNINTYFYKKNIDSEAIDFTNKLKPGEVLLIENIRFFQEENNDDEIFAKNLSKLGDIYINEAFSCSHRKQASIHSITKYIDSYGGPLLEKEINSINLILKNKKKPVTCIIGGSKISTKINILSNLLKNSDNLVIVGAMANNFLNYKGIKIGKSLIEKGSENIIKNIYDLAKKNKCEVIIPVDVNTSSDLDGESFYKSFNNIGSNDIILDIGKETISLINNIINKSNTIFWNGPAGYYENKNFSKGSISIAKKIAENTISKSLVSIVGGGDTIAAIKNTGLEKVFSHLSTAGGAFLESLEGKELPGIKVLKRK

SEQ ID NO: 129100 - protein, 323 aa, Unknown
  Bacterial polypetide isolated from the Sargasso Sea
LDGSFSLEPVARRLQEILNKNISFQPNWLEGINDESDDIILCENVRYQAGEKKNDETLSQKIANLCDVYVMDAFGASHRKHSSTYGVLEYVKEGCIGPLLSNEVSSIKKAIDRPTAPVTAIIGGAKVSSKLGVIERFSSFCDHVIVGGGIANTFLLASGKQVGASLVEPEMVDAANKILQMENVNVPLPVDVRVAKEFSTEADATIKSIDEVGEDDLILDIGPETTESYCNIINETKTTIWNGPLGVFEFSSFAEGTRALGHAVSSNDGFTIVGGGDTVAVVEELGVSDSMSYISTGGGAFLDFVQNGTLPILDLLEKKRGDS

SEQ ID NO: 129101 - protein, 176 aa, Unknown
  Bacterial polypetide isolated from the Sargasso Sea
MLNVKALKTFDQKNKTVLIRFDLNIPLNKEASTISDRITRIKNPIQNLLNKNNKVVILSHLGRPKGKINDELSLNQIISSLENALQKKIIFLSNCIGDEIKKKITSLRQDSIILLENCRFHEGEEQNDKFFASELAKLADVYINDAFACSHRAHASIEAITNFIPSYCGELLHEEI

SEQ ID NO: 129102 - protein, 171 aa, Unknown
  Bacterial polypetide isolated from the Sargasso Sea
FIKFKGINIGNSLFEKGSENVVKNINETASKNKCKIIIPLDCCTSSSVDGDPTYKSLNNLGSEDMILDIGKKTIDLINKTIEESNTVFWNGPAGYYENKNFLTGSLSIAKKIAHNTKLKSLISIVGGGDTVAAIKNTGLENAFTHLSTAGGAFLESLEGKELPGVKVLRKN

SEQ ID NO: 129103 - protein, 105 aa, Unknown
  Bacterial polypetide isolated from the Sargasso Sea
MDAGPKTIMHVESVFADCKTLVWNGPLGAFEITPFDHATNTLAKTAAKLTSKGSLISVAGGGDTVSALNSKNLAKKFSYVSTAGGAFLEWMEGKKLPGIQALESR

SEQ ID NO: 129104 - protein, 100 aa, Unknown
  Bacterial polypetide isolated from the Sargasso Sea
MSNLKIFSEDLIVSNKRIIVRLDLNVPINNFKIEDNTRIKIIEPFINKLIEKKAKIIIISHLGRPKGKIVKEMSLKPIYDYLRKNLLGNISFYQGEINND

SEQ ID NO: 129105 - protein, 323 aa, Unknown
  Bacterial polypetide isolated from the Sargasso Sea
KPISEKLSSLLNKEVLFNKDLINKNTSLIINKIPNGSIIMLENIRFNVGEELNDSEFSKKMSDLGDVYINDAFSCSHRSHASVEGITKYIPSYFGLQITQEISALKKITAEIEKPVSLIIGGSKISTKIKIINNLIKKFNNIIIVGGMANTMLKHTGTNIGKSICEYECGPLIKEIIENSKKYNCEITIPKDVIVSKSLDGTGKEKNINQIEENEMILDIGTKTISSIKRIINNSKTILWNGPAGYFENPNFQNGTKKISELISEKTKNDKIFSVAGGGETVAAINKFNKFGSFTFVSTAGGAFLEYLEGKTLPAIKALNQNV

SEQ ID NO: 129106 - protein, 97 aa, Unknown
  Bacterial polypetide isolated from the Sargasso Sea
ELISKTIDNSNTVFWNGPAGYYENKNFSVGSELIAKKIAENTKSKSLISIVGGGDTVAAIKNTGLEKVFTYLSTAGGAFLESLEGKELPGIQVLKKN

SEQ ID NO: 129107 - protein, 334 aa, Unknown
  Bacterial polypetide isolated from the Sargasso Sea
MKNLQNYKITNKKVLLRADLNVPVVDGLITDNSRIMAVKSSIRKLISNNNKIFILSHFGRPNGKYEEKYSLQFILPSLKEVFQINKIHFLKNLNKENINTKVVEMKRGEVCLIENIRFYKSEEKIDLNFAKNLSDVFDVYVNEAFSVSHRNHTSIIGFPKFLPAVAGDHFVEEIKNINLFLNNVKKPNTAIIGGSKISTKINLLNNLVKNFSVVIIGGAMANTFLLANKINIGKSLVEEKFVGDAKKIQINAKKSNCKLIIPIDVVCGKSIKDKTPINSNIDEVPANSFILDIGKNTTSIICKQIIESKMILWNGPVGAFEYKPYNKATNQIAE

SEQ ID NO: 129108 - protein, 143 aa, Unknown
  Bacterial polypetide isolated from the Sargasso Sea
MVAFRKLNEIEVKDKKILLRVDLNVPIHEGIISDSHRIEKIIPTVNNILERGGYPILISHFGRPKGKFNSAMSLAPIAATISASMEKPVHFVKDCIGPNAETKIKGMNLGEIALLENLRFHPGEEQNDSEFASSLARLGDVYV

SEQ ID NO: 129109 - protein, 278 aa, Unknown
  Bacterial polypetide isolated from the Sargasso Sea
MQIPSMETLDLHGKRTMIRLDLNVPLKNGAVISDARIIASLPTIQMALDKGANVILLSHLGRPDPEKLDGSFSLEPVAERLQEILGIRVSFQSNWLEGIDHPSDGVTLCENVRYHSGEKKNDESLSQKIAGLCDVYVMDAFGASHRKHSSTYGALQYAKERCIGPLLSNEVNSIKKAIDGPKSPVTAIIGGAKVSSKLGVIEKFSSFCDHVIVGGGIANTFLLASGKEVGASLAEPEMVDAAKNILQMDNVHVPLPVDVRVAKEFSGEAVQQSNRSTR

SEQ ID NO: 129110 - protein, 194 aa, Unknown
  Bacterial polypetide isolated from the Sargasso Sea
LGGSKVSTKIKVLKYLVEIFDSLAIGGAMANTFLLSNNYNVGSSLIENDFINLSKEIQKKAKEKKCKILLPIDVVCSKDLQDKTNIKTYNINDIPKDQMILDIGEQSTKLISNEILKSQSVLWNGPLGAFEYSPFDKSTISVANIIKDYSNNTQINSLAGGGDTLAAIKKANANNAFNYLSTAGGAFLEWLEGR

SEQ ID NO: 129111 - protein, 392 aa, Unknown
  Bacterial polypetide isolated from the Sargasso Sea
MKKIKDLEDLNQKIVLLRVDLNVPIKNDKVLDNTRIKKVIPTISHLLYHNAKIIIITHIGRPKGKKIAELSLNPICKYLKDELSTGIRLITKNIKNLNKKEIFHNSDDKIALLENIRFYPEEENDDIEFAKNLASLGDIYVNEAFSCSHRAHASVSNITKFIKSYGGLHLISEIDALSQITHNIKRPISCIIGGSKISTKINVITNLVSKYDNIIIVGAMANNFIRFNGQNIGKSFFEKNADTIVKEIYDKAKKNKCEIVCPTDFSVGKNLNDISKNKKINEIEYDDLILDIGLETIVSIKKVIKNSKTILWNGPAGYFENENFATGSYEIAKEISDKTINNKLFSVIGGGDTVAVLNKLNIVKNFNFVSTAGGAFLEYLEGKKLPGIKSLD

SEQ ID NO: 129112 - protein, 139 aa, Unknown
  Bacterial polypetide isolated from the Sargasso Sea
MRLLKDQDLSNKNVVVRLDLNVPIQDKQIIDSTRIISSVPTIKYLVDKNCKVLLTSHLGRPEEGKFDQDFSMSPVAKKLSEILNHEIDLIDSLDSSDIFNTTQIQLLENLRFLIGEKDNNKKLGNQLANKGDVYIFDAF

SEQ ID NO: 129113 - protein, 441 aa, Unknown
  Bacterial polypetide isolated from the Sargasso Sea
MSGHSGKQFWVKHNQIFVHNGQNQTLGPVTVEGVLTLDDVDLSGRTVLYRVDVNSPLEPSTGRLLDDGRLKAIIPTLDALSSSRVVIMGHQSRPGKSDFTNMQKHCDRLSKLLGKQIRFVPDICEDVAVEAIKSLSDGEMIFLDNVRMNEEEYGTKYDSNKQTEDTSLVSRLSSVSDLLVTDAFAAAHRRSPTLTGFTNSIPCVAGTLMEKEIRNLRTALRNPPNPYLAILGGAKCDDSVRVALNLISKGQVDKIAFVGVTGNLMLWVAGNDIGDRNKEFIRTTLGRDFETAWETGKKIFSENPEKIFLPIDVAVESEGSRRPLLVSDLPTEDPIYDIGLQTLASLKPLVENAGCILWNGPASYFELPDFAFGTIEILNMCTETDAMTIIGGGHTSALVNSRGVSSLVSHNSTGGGSTMSFLSGEPMPVIASLKESFRKFG

SEQ ID NO: 129114 - protein, 213 aa, Unknown
  Bacterial polypetide isolated from the Sargasso Sea
IIIGGSKISTKLNTLHNIVMKANIVAIGGAMANTFLAAKNIEIGNSLFEKNMINNTQEILKIAKYHNCEIILPSDVVTADNLRDSITAKEFNVGNIPKNKMIFDIGKKSILNLISKIRESKSLVWNGPLGAFEFKPFDYSTRSVSNEVAKLTLEKKIISVAGGGDTVAALSQSNNDQKFSYLSTAGGAFLEWLEGKELPGITALKQDQIILKS

SEQ ID NO: 129115 - protein, 91 aa, Unknown
  Bacterial polypetide isolated from the Sargasso Sea
MINVENIKKFKTENKTVLIRFDLNVPLASGSPVSDRINRVIDSIAELKLLNSKIVILSHLGRPKGKINNELSLKQITPQLEQAFDSKITFS

SEQ ID NO: 129116 - protein, 221 aa, Unknown
  Bacterial polypetide isolated from the Sargasso Sea
MLNVKALKTFDQKNKTVLIRFDLNIPLNKEASTISDRITRIKNPIQNLLNKNNKVVILSHLGRPKGKRNDKLSLNQIISSLESVLQKKIIFLSNCIGDEIEKKINSLSQDSIILLENCRFHEGEEQNDKFFASELSKLADVYINDAFACSHRAHASIEAITNFIPSYCGELLHEEILNLNDVVNNPKTPALTIIGGSKISTKITVIKNLLQRMDSIVIAGG

SEQ ID NO: 129117 - protein, 293 aa, Unknown
  Bacterial polypetide isolated from the Sargasso Sea
MSDLKFFSNDIPVSGKRVVVRLDLNVPINNSKIDDDTRIKIVEPFINKLIENKAKIILLSHLGRPKGKIISELSLKPIFNHLETKLKSKIYFYQKKIDDKAVDASKQLKPGEVLLIENIRFFKEEENDDEAFAKTLSKLGDIYINEAFSCSHRKQASIHKVTKFIDSYGGPNLEKEIKSIDLIIKNKKKPVTCIIGGSKVSSKINILSKLLENADNLVIVGAMANNFLKFRGVNVGASLVENESENIVKNLNNLADKNKCNIIIPVDCNTSSSMGGKSFYKSLDEISSEDIIL

SEQ ID NO: 129118 - protein, 399 aa, Unknown
  Bacterial polypetide isolated from the Sargasso Sea
MKSIEDKNLSKKNILVRVDLNVPVVNDQITDRSRIKSILPTLNKLKDTNNKIFLISHFGRPKGIKNKKYSLKFICNILEEEINIKKIYFLNDFDEKNIQNMINDIKPGDICLFENIRFSSAEEKNDLDFAKNISKNFDAFVNDAFSCSHRKHASIVGLPTFLPSYLGYSFLKEIHNLNSLLSNKAKPNLAIIGGSKISTKIELLFNLSYYFDTIVIGGAMANTFLYAKKINIGKSLVEKNYNEVVVSIINKAKENNCEIILPIDVVCANNLKEKETVRRCEIDDVSESQMILDIGSKTTQIISQYINKSKLILWNGPLGAFEYPSFAESSIKIANIIKSHSVNSEIISIAGGGDTNSVIKIAKAKDGFSYISNAGGAFLEWLEGNGSPGFNAIEENNIN

SEQ ID NO: 129119 - protein, 106 aa, Unknown
  Bacterial polypetide isolated from the Sargasso Sea
MILDAGPSTVDNIKHCIASAETLLWNGPLGAFEVPPFDQATSQAAKFASERTKNGDLISVAGGGDTVAALNKAGVAESFTYVSTAGGAFLEWLEGKELPGVLCLTK

SEQ ID NO: 129120 - protein, 159 aa, Unknown
  Bacterial polypetide isolated from the Sargasso Sea
MSNLKIFSENIKIYNKRVIVRLDLNVPISKSRIEDSTRIEMIEPFINQLIEKKAKIILISHLGRPKGKVVKEMSLNPIFNYLQKSLNSKVYFYKDKIDQNAIDASNNLKQGEVLLIENIRFFKEEEDDNENFAKSLSKLGDFYINEAFSCSHRKQASYT

SEQ ID NO: 129121 - protein, 122 aa, Unknown
  Bacterial polypetide isolated from the Sargasso Sea
DENRPLKNYPEISNDDMILDIGPETIKMIKNIINNSNTILWNGPAGYFENPEFSKGSKEIAEQIVKRKKENKIYCVSGGGDTVAVLNYFGLVKDFDFVSTAGGAFLEFLEGKELPGIKALNS

SEQ ID NO: 129122 - protein, 101 aa, Unknown
  Bacterial polypetide isolated from the Sargasso Sea
IGPKTIDKITKIIDNSKTILWNGPAGYFENSNFANGSIQIAKKIIENNKANKIFSVAGGGDTVTLLNNLKAVNEFNFVSTAGGAFLEYLEGKNLPGITALN

SEQ ID NO: 129123 - protein, 283 aa, Unknown
  Bacterial polypetide isolated from the Sargasso Sea
CNFSSDISLIENIRFLPGELENDAELGKKLSNIADVYVFDAFGTSHRAHASTYGAIKASEVSCAGLLLENETNALQQAISSKSSPMLSIVGGSKVSSKLEVIKNLSKISDDVMTGGGITNTILKAQGHNIGLSLHEDSMLNEAKELLESGKILLPDEVIVSRDIKSNITRITKVNSVQDDEMILDQILSPAVLKKITQAKKIIWNGPIGVFERQAFSLGTKDLAEAIASSNAFSLAGGGETLLAIKMFIEKNNISYCSTGGGAFLEFMEGKELPSLSALGFKF

SEQ ID NO: 129124 - protein, 185 aa, Unknown
  Bacterial polypetide isolated from the Sargasso Sea
IKKVNNLVIVGAMANNFLLYKGYKVGKSLIEENSKSTIKKLYDLANENNCEIIIPLDCTVSESTSGKPFQIELNQIKENQIILDIGPKSINYISKKINQSNTVLWNGPAGYFENKNFASGTIALAQSISENTSKKNLLSIVGGGDTVSAINTYTSNLKFTHLSTAGGAFLEFLEGKNLPGIEVLK

SEQ ID NO: 129125 - protein, 84 aa, Unknown
  Bacterial polypetide isolated from the Sargasso Sea
MNKKKVISDFPKSYYKSKKVFVRVDFNVPINIETDSIREDYRIRRAIPTIDYLIDAGAKVILGSHLGRPKGKVVKNLSLRIVSR

SEQ ID NO: 129126 - protein, 392 aa, Unknown
  Bacterial polypetide isolated from the Sargasso Sea
NNSFLDDTRLKAVIPTINKLSKTKLIILTHQSRPGKKDFTSTSSHAREFQRLLGRTVKFVDDICGEKAFSAIEEMKIGDILMLNNVRMNQEELEYKTNDYESQSDTQFIQRLSSIADVFVNDAFACAHRNSPSITGFTYALPCIAGSLMIDEINSLESVMNNPKRPCIAILGGIKVDDSVKVAKNMLINNITEKIIVTGGVANLFLDISGTDIGEINRLFLKKELGKKWDKTCEDIHNILLHHSEKIILPVDVALNVNGKRIDQEISKLQNEFQIFDLGVQSTLKTSFEIKNAGTIILNGPAGVFELDDFKFGTMEIINACAESKAFVVVGGGHTATLISNLGLNNKISHVSTGGGACLELLAGGKLSGIESLEISAKRFGLTIKKLQRELL

SEQ ID NO: 129127 - protein, 276 aa, Unknown
  Bacterial polypetide isolated from the Sargasso Sea
QAGEKKNDETLSQRMPSLCDVYVMDAFGASHRKHSSTYGVLQYAKEGCIGPLLSNEVSSIKKAIDRPTAPVTAIIGGAKVSSKLGVIERFSSFCDHVIVGGGIANTFLLASGKQVGASLVESEMVDAANKILQMENVNVPLPVDVRVAKEFSAEADATIKSIDEVAEDDLILDIGPETTESYCNIINETKTTIWNGPLGVFEFSSFAEGTRALGHAVSSNDGFTIVGGGDTVAVVEELGIADSMSYISTGGGAFLDFVQNGTLPILDLLEKKRGDS

SEQ ID NO: 129128 - protein, 246 aa, Unknown
  Bacterial polypetide isolated from the Sargasso Sea
AFGASHRKHSSTYGALQYAKERCIGPLLSNEVNSIKKVIDGPKSPVTAIIGGAKVSSKLGVIEKFSSFCDHVIVGGGIANTFLLASGKEVGASLAEPEMVDAAKNILQMDNVNVPLPVDVRVAKEFSGEAVATIKSIDDIEKDELILDIGPQTAEAYCNIINETSTTIWNGPLGVFEFKAFSEGTEALGHAVSENQGFTIVGGGDTVAVVEALGITKKISYISTGGGAFLDFVQNGSLPILDLLGE

SEQ ID NO: 129129 - protein, 199 aa, Unknown
  Bacterial polypetide isolated from the Sargasso Sea
KIKLLNNIVKQFNCIVIGGAMANTFLLSNNIDVGKSLVEKDLVEEAKNIQIKANQYNCTIVLPTDVVCGKSIEDKNPFELSINEITSDFMILDLGKKTTETINQEIKKSRMVLWNGPVGAFEYKPYDKATSTIAIYIKENAKKFNISTLAGGGDTISSIKNANAEDGFDYISNAGGAFLEWLEGNQSPGVIAIKENNFI

SEQ ID NO: 129130 - protein, 444 aa, Unknown
  Bacterial polypetide isolated from the Sargasso Sea
QNGFQSEDIFIAKVVQFQELLDVRHSVMLLGPPGAGKSTIYQTLVACKNVDQPKPLCVYEAVNPKAVTSDELYGYMTLSKDWKDGCLSIVMRNMCKCWQPYTSAQTDQWVVLDGDIDAVWIESMNTVMDDNKVLTLVSNERIPLTPAMRMVFEIESLRNATPATVSRAGILFINETDIGWAPFATSWTERRDSDTEKSCLPGFFDKYIPQLIAMLKEKGVECLTPVMTISKVSALCHLLEGYLSAVPESEKDGHRIERLFLYACIWAFGGCAAADKTTDSRQLFNEVWRDVAKGGLKLPEAGLCFEYAVDPVSGDVCEWSELVPRYEPVGVVKFSNIVVATADLVALKTLTTNLQTNGHGVLFVGSAGTGKTVLVRDFLRSLPIEKYDTATINMNFYTDAVTTQGQLEAPIEKRSGKSYGPPAGKVLVYFIDDLNMPFVEEYGT

SEQ ID NO: 129131 - protein, 192 aa, Unknown
  Bacterial polypetide isolated from the Sargasso Sea
VSTKLELIKHIDNVADNIIIGGGIANTFILASGLNVGKSLVEETLVDIAKSILDKGKIILPKVAITSESFEGKNINKKLISDIKDNEMILDLYIEEETDQLINNANTILWNGPMGVFENKAFEKGTRDLSNAIAKSKAFSLAGGGETLSAINKYIKPDDVSYCSTGGGAFLEFMEGKALPAIKVLNSKGNGR

SEQ ID NO: 129132 - protein, 270 aa, Unknown
  Bacterial polypetide isolated from the Sargasso Sea
MKNLRNYQIVNKKVLFRADLNVPVVDKVITDSSRILAIESSIKDLILNKNKIFIIAHFGRPKGEVLKKYSLKFILSPLREILGIDKIHFLENLQKDKINKKVNDMMYGEVCLVENIRFQKSEEKIDLNFAKNISSLFDVYVNDAFSASHRNHTSITGFAKYIPAVAGNHLIKEIKKIDSFLENSKKPNMAIVGGSKISTKIKLLNNLIKQFNCIVIAGAMANTFLLSNNIDVGKSLVEKDLVEEAKNIQKKANQYNCTIVLPTDVVCGKS

SEQ ID NO: 129133 - protein, 103 aa, Unknown
  Bacterial polypetide isolated from the Sargasso Sea
SSDKIFDINLSSNMSEILKNSKTILWNGPVGVFEKEPFQKGTHQLAKTIAESDAFSLAGGGETIAAINKFIKKDEVSYCSTGGGAFLEYMEGKLLPSIEALGG

SEQ ID NO: 129134 - protein, 163 aa, Unknown
  Bacterial polypetide isolated from the Sargasso Sea
MIKLSSLDLNNKNLVIRVDMNVPIKDGNVLDSTRIKACLSTIEYALENNAKVLLISHLGRPIEGNFEEEFSLKPVANKLSKIINMDVELIDTLESNKIFNSSSNIQVLENIRFFEGEKENSQELGNKLGSLGDIYVFDAFGTAHREQASTHAAIMNAPIACSG

SEQ ID NO: 129135 - protein, 274 aa, Unknown
  Bacterial polypetide isolated from the Sargasso Sea
MAKQSVADLDPAGKTVLVRVDFNVPQDGDGTITDDRRIRMAVPTLRSILDRGGKAILMSHLGRPKGEVNPKLSLAPVAKRLGELLEKPVALATDTGGKDSTEKAHALSVGDVLVLENVRFNPGEKKGDDASYVAGIADLADAYANDAFGTCHRTEASMYAVPKAMKESGKPVVVGFLVEKEIQYLSDAVGQPKRPFVAILGGKKVSDKIAVITNLLKICDHILIGGAMAYTFSLAQGGKTGDSLVEPDKLELAKQLLRDGGEKLVSPCGYSVCG

SEQ ID NO: 129136 - protein, 312 aa, Unknown
  Bacterial polypetide isolated from the Sargasso Sea
MLDVGSIKKLEDRNKTVLVRFDLNVPLDEVSGKVNDRLTRIKNTINQLQELNSKIVILSHLGRPKGTNNKDLSLSKITDQLEEVLNSKINFINDCIGDEVKKKINSFNQSSIILLENCRFHKGEEENNLEFAKKLSELADVYVNDAFGCVHRSHASVDAITQYMPSYVGNLLDEELTNLHSITEDPQSPSITILGGSKISTKISVLKNLSIKMDSIVICGGMANNFLAYNGHDIKDSLIEKDVDNLIKEIILHAEKNNCKLITPIDVVTATEIRENTKVYISSVDQIKDGTMILDIGPKTIDIIENELNKSK

SEQ ID NO: 129137 - protein, 349 aa, Unknown
  Bacterial polypetide isolated from the Sargasso Sea
ISHVGRPKGMIDQKLSLKPIAERLDYILKNSPDSELLYGSEQNIRLINDDLKEVTKENLFINKNEKIVMLENIRFYEGEEKNDSEFAKKLSSLGDIYVNDAFSCSHRSHASIEKITNFLPSFSGFQFNEEINALKRLTSEIKKPITCIIGGSKISTKINIIKNLIPKFDNIIIVGAMANNIIKFKDYSVGKSIVEENCETIVDDIFKTTKKYDCCLTFPEDVAVGKNKEDLPKIKKIDEIEDDDLILDIGPKTIKIIKEIIENSKTVLWNGPAGYFENPDYRKGSFEIARKIMEKSKEKSFYSVAGGGDTIAVLNLSKTRKYLNFSSTAGGAFLEYLEGKELPGIKALN

SEQ ID NO: 129138 - protein, 182 aa, Unknown
  Bacterial polypetide isolated from the Sargasso Sea
MIGGGMIFTFYKARGLDVGKSLVEEDKLELAKDLEAKAKAKGVELLLPTDVVLADEFSPDANSKISQIDAISGNWMGLDIGPDSIKVFQNALAECKTIIWNGPMGVFEFDKFADGTNSIATTLADLSAFSEVCTIIGGGDSVAAVEKAGLAEKMSHISTGGGASLELLEGKTLPGVAALNNA

SEQ ID NO: 129139 - protein, 327 aa, Unknown
  Bacterial polypetide isolated from the Sargasso Sea
NEKMRLTPVAARLSELLEKNVSLTNSCIGDESIAESNSLNNGDVLLLENVRFFGEEEKNDLDFAKNLASHADMFVNDAFGAAHRAHASTQGVTNYLSPSVAGFLLEKELKYLQGAIDAPKRPLAAIVGGSKVSSKIGVLDSLLDKCDKIMIGGGMIFTFYKARGLDVGKSLVEEDKLELAKDLEAKAKAKGVELLLPTDVVLANQFSPDAESKISQIDSISGDWMGLDIGPDSIKVFQNALAECKTIIWNGPMGVFEFDKFAEGTNAIATTLADLSAFSEVCTIIGGGDSVAAVEKAGLAEKMSHISTGGGASLELLEGKTLPGVAA

SEQ ID NO: 129140 - protein, 260 aa, Unknown
  Bacterial polypetide isolated from the Sargasso Sea
MKFLGLNDFQFKDQRVLLRLDLNAPIEAGEVSNDERLIRSLPTIKHILNNEGRLVVISHLGRPEENGMHQPEFSLYPVVKKLEQLLGRSIELISDLEDLPSVNQGEMIVLENIRFLKGEKSNKPNLSKKLANIADIFVMDAFATSHRAHSSTTGVIEYSNKACAGFLLEEEIEALSKITNNKGNSLAVLGGAKISTKLDLINSLCEKMGNVILGGGIANTCLLAQGFPVGNSLVEESMLKEALELAERENVIVPKTVVTA

SEQ ID NO: 129141 - protein, 289 aa, Unknown
  Bacterial polypetide isolated from the Sargasso Sea
DVVLLENVRFFAEEEKNESGFAEKLAGLAEVYVNDAFGAAHRAHASTEGVTKYLSPSVAGYLMEKELQYLQGAVDDPKRPLAAIVGGSKVSSKIGVLEALIDKCDKVLIGGGMIFTFYKARGLSVGKSLVEEDKLELAKELEAKAKAKGVQLLLPTDVLLADNFAPDANSQVASIDAIPDGWMGLDIGPDSIKVFQDALGDCKTVIWNGPMGVFEFDKFAAGTNAIATTLADLSAKGCCTIIGGGDSVAAVEKAGLAAQMSHISTGGGASLELLEGKVLPGVAALDEAA

SEQ ID NO: 129142 - protein, 107 aa, Unknown
  Bacterial polypetide isolated from the Sargasso Sea
DDIILDIGPKTINKIKSIINKSKTILWNGPAGYFENPQFSKGSFEIGNQIANQNKLDQIFSVAGGGDTFALINNINILDNFNFVSTAGGAFLEFLEGKELPGIKALN

SEQ ID NO: 129143 - protein, 269 aa, Unknown
  Bacterial polypetide isolated from the Sargasso Sea
MSKLSLSSLDKTHLEGKKVLVRVDFNVPLNEDGQITDDTRIRAAVPTIEYLINHSAKVILAAHFGRPKGQVNEKMRLTPVAARLSELLGQNVALTNSCIGDEAVAQSNSLSNGDVLLLENVRFFGEEEKNDLEFAEKLASHADMYVNDAFGAAHRAHASTQGVTNYLSPSVAGFLLEKELKYLQGAVDSPNRPLAAIVGGSKVSSKIGVLDSLLDKCDKIMIGGGMIFTFYKARGLDVGKSLVEEDKLELAKDLEAKAKAKGVELLLPH

SEQ ID NO: 129144 - protein, 244 aa, Unknown
  Bacterial polypetide isolated from the Sargasso Sea
LPEGVTKFLKPAVAGFLMEKELQYLQGAVDEPKRPLAAIVGGSKVSSKIGVLEALIDKCDKVLIGGGMIFTFYKARGLSVGKSLVEEDKLELAKELEAKAKAKGVELLLPTDVVLADNFAPDANSQVADVTAIPDGWMGLDIGPDAVKVFQAALADCQTVIWNGPMGVFEFEKFATGTNAIATTLAELSGKGCCTIIGGGDSVAAVEKAGLAQKMSHISTGGGASLELLEGKVLPGVSALNDAA

SEQ ID NO: 129145 - protein, 303 aa, Unknown
  Bacterial polypetide isolated from the Sargasso Sea
NVLDLTRIKASIPTINYALNSNSKILLISHLGRPAEENFEEKFSLKPVALSLSKIINQSVEIIDNLDSKDIFKGASNIQMLENIRFFEGEKENCKNLGQKLGSLGDLYVFDAFGTAHREQASTHSAIENSNNACAGILLEKENEFLSKALNNFESPYVAIIGGAKVSTKLELIEHINSVADYIVVGGGIANTFLKATGKNIGNSLVEDSMLEKAKHIYHQGKIILPDRVVTSKTFEGDDIKERQANEIADDETILDLCLEQETISLINNAKTILWNGPMGVFENNFFEKGTKDLSVAIAKSAA

SEQ ID NO: 129146 - protein, 152 aa, Unknown
  Bacterial polypetide isolated from the Sargasso Sea
LIKQILDISKKFNCKIICPIDVVVSKDFEGLGKNKDITEINDDEMILDIGPKTISLIKKIINQSNTVLWNGPAGYFENPNFQTGTKEILEIISQKSIKDKIFSVAGGGETVAAINKFKKFDSFTFVSTAGGAFLEYLEGKTLPGIKALNQNV

SEQ ID NO: 129147 - protein, 197 aa, Unknown
  Bacterial polypetide isolated from the Sargasso Sea
KISTKINIIKNLMNKFDYIIFVGGMANNILEYKGHNIGKSLKENIAKKIIDEIFHLSDSVNCKIYYPEDVAVSKKINGSAITKNLNEILDDDLILDIGPKTINSINEIIENSETILWNGPAGYFENSNFAKGSFEIGKKIAEKNKLNQIFSVAGGGDTVALLNSIGFFKSFNFVSTAGGAFLEYLEGKELPGIKALN

SEQ ID NO: 129148 - protein, 149 aa, Unknown
  Bacterial polypetide isolated from the Sargasso Sea
ALSEKEKCKLIYPDDVVVSKNYNGSPKNKELNEILFDEMILDIGPKTIEKITNIIDNSKTILWNGPAGYFENPNFANGSIQIAKKIIENNKVKKIFSVAGGGDTVSLLNKLNLVSNFNFVSTAGGAFLEYLEGKNLPGIKALNLNDRTK

SEQ ID NO: 129149 - protein, 245 aa, Unknown
  Bacterial polypetide isolated from the Sargasso Sea
QITDDTRIRAAIPTIEYLINHSARVILAAHFGRPKGQVNEKMRLTPVAVRLSELLGKNVALTNSCIGDESFAESNSLNNGDVLLLENVRFFGEEEKNDLDFAKNLASHADMYVNDAFGAAHRAHASTQGVTNYLSPSVAGFLLEKELKYLQGAIDSPKRPLAAIVGGSKVSSKIGVLDSLLDKCDKIMIGGGMIFTFYKARGLDVGKSLVEEDKLQLAKDLEAKAKSKGVELLLPTDVVLANEFS

SEQ ID NO: 129150 - protein, 261 aa, Unknown
  Bacterial polypetide isolated from the Sargasso Sea
MIKTLRAFNLRGKNVLLRADFNVPMHEDQVANKFRIKAVLPTILTCMEAGAGVVIMSHMGRPNGKIDSKLSLIAVGEELASLLEMPIKFSEDCVSTDSIDTSISLKQGEVHLLENLRFHSGEEDNEMEFSSQLARHGQIYINDAFGTAHRSHASNVGVIPYFKNAGIGWLMDKELNYLQRIMSRPKTPLTIILGGAKINTKLELINQFLEKADNIIIGGGMAFTFLKAKGKNIGGSLLDKSMINTARDIMNNGMSKGTKII

SEQ ID NO: 129151 - protein, 277 aa, Unknown
  Bacterial polypetide isolated from the Sargasso Sea
RIIESGGKCILMSHLGRPKGERVESMSLKPAAEELSLLLDENVSLAPDCIGSEVEKMVSQMEEGELLLLENLRFHQGETKNDPQFCEALARLGEVYINDAFGTAHRAHASTAGVANLIEDRAVGYLIRKELEFLGAAVLDPQKPFTAILGGAKVSDKIKVIERLMEKVDALIIGGGMANTFLKAQGMEIGDSLLEEDALETAKDLLDEAKKSGVKIHLPVDVCSAPELLQEVETEFLNVADKVQAGWKILDIGPESVKQFGSVIQNSKTVLWNGPMG

SEQ ID NO: 129152 - protein, 218 aa, Unknown
  Bacterial polypetide isolated from the Sargasso Sea
SQVLDKPQRPLAAIVAGSKISTKIQILNNLSNKVDFLIIGGAMANTFLDAQGYGIGKSLTEKKMLKTAEEIIQEIIPKKCKLVLPVDVICADSLSDTAATKTFSVKCCPKDKMILDIGPLSQKNIMDIIKNSNTLIWNGPLGAFETAPFDLGTNNIAKYTGNRTLERKLISIAGGGDTLSALKASNSVSKFSYVSTAGGAFLEWLEGKTLPGIEVLKL

SEQ ID NO: 129153 - protein, 261 aa, Unknown
  Bacterial polypetide isolated from the Sargasso Sea
MAKRSLASLNAGDLSGKRVLVRVDFNVPLNDAGAITDDTRIRAALPTINDLISKGAKVILSAHFGRPKGQVNDAMRLTPVAARLSELLGKPVAKTDSCIGPDAEAKVGAMANGDVVLLENVRFFSEEEKNEAGFAEKLAGLAEVYVNDAFGAAHRAHASTEGVTKFLKPSVAGFLMEKELQYLQGAVDEPKRPLAAIVGGSKVSSKIGVLEALIDKCDKVLIGGGMIFTFYKARGLSVGKSLVEEDKLELAKELEAKAKAK

SEQ ID NO: 129154 - protein, 311 aa, Unknown
  Bacterial polypetide isolated from the Sargasso Sea
VNVSFCPTSVGKDAEEKAQALCPGEVLLMENLRYHQEEIAGEISFSEKLSKLGTIYINDAFGTAHRAHASTTIIAQFFQEKKCFGRLLEKEVVAIEKIMKSGNSPVLAILGGAKISSKITIIESLLHKVDHIIIGGGMVYTFTKALGGEIGDSICEPNYCEYALELLEKAKQKRVEIHLPIDVLAGDNFNNYAKQKEFGIMDIPDGWEGMDAGPKTIKKFHDIIKNCKTILWNGPMGVFEFSNFAKGTIAIGESIGMATQHGAFSLVGGGDSVAAVKLFGMQSKMSYISTGGGAMLESLEGKTLPGIAALS

SEQ ID NO: 129155 - protein, 324 aa, Unknown
  Bacterial polypetide isolated from the Sargasso Sea
DATRLIEALPTLRLLIDAGAKVVCCSHLGRPKKAKDEAEKARMKLAPIAERMSKELGFTVPAVEDCVGPAVEAAVANLKDGGVILLENTRFYKEEEKNGADFAEKLVKSCGATTFVNDAFGAAHRAHASTAGVVPHVQNAVAGILLEKELDFLYGAVAAAEKPFAAVVGGAKVSSKIAVLESLMEKVDTLVVGGGMAFTFLKARGLEVGKSLVEDDQLELAAKLEAMAKAKGVEMILPSDVIAADNFAADAKTATVTVDKIPADYLGVDNGPVTTKLIQDTLSKCKTVIWNGPMGVFEMEPFSKGTFAVAESLAEETDKGCVSI

SEQ ID NO: 129156 - protein, 327 aa, Unknown
  Bacterial polypetide isolated from the Sargasso Sea
VDFNVPQDDQLKVTDNTRIAAVKPTIDKILSDGGSVILMAHLGRPKGEAKDEFSLKHIVDEISDVLGNKVKFAEDCIGENAVKAAAELQPGEILLLENLRFHNEEEKGDVKFAEQLSKLGDAYVNDAFGTAHRAHASTAVIAQFFPSTKFFGILMTNELKAIDKVLKSGEKPVTAILGGSKVSTKITIIENILPAVDNLIIGGGMAFTFIKALGGKIGTSLVEDDKLSLALEILEKAKENNVKVYLPSDTIIAESFNNDAERKEVNIYEIPEGWMGLDAGTQSREQFNDVLLNSRTILWNGPIGVFEMSILHPELLHLVKVLQKPLS

SEQ ID NO: 129157 - protein, 248 aa, Unknown
  Bacterial polypetide isolated from the Sargasso Sea
HRAHASTEGVALAAKVACAGPLLCEELGALEKALNTPKKPVAAIVGGAKVSTKIKLIDSLLSKVDCLIVGGGIANTFLLAQGHEVGTSLVEKDCVSYASDALKKAQELGVSIPLPTDVVVAPGMDQGDKAEVRAVSEVKADEAIFDLGPETQRTYSSLLASMATILWNGPVGLFEEPAFSGGTQAVAQAVANSPAYTLAGGGDTLAAIDQFGFQAQMSYISTGGGAFLAWCEGEPLPAVNALIQAATR

SEQ ID NO: 129158 - protein, 330 aa, Unknown
  Bacterial polypetide isolated from the Sargasso Sea
LMRVDFNVPFDVMGNVSDDTRILGALPTIKYLVESKAKVILMSHLGRPKGQRIEKYSLRPVAVELEKLLGQPVSFANDCKGEVVQGLIEKAEPGAVVLLENLRFYKEEEANDLGFAKELASLGEVYVNDAFGAAHRAHASTVGITQFIEEKAGGLLMEKELNFLGHQTANPEHPFVVILGGAKVSDKINVINSLLDKADVMLIGGAMAYTFALAMGQDVGDSLVEIDKVGTAKAAIEKAKDRGVKLLLPVDHLVADSVDFKNGTLGETSVIAGGIESGWQGVDIGPDTVDLYKEEVTKAKTLLWNGPMGIFEIPESSKGTFAVAEAVAKR

SEQ ID NO: 129159 - protein, 295 aa, Unknown
  Bacterial polypetide isolated from the Sargasso Sea
CIPTIKLALENNAKVLLISHLGRPEEGKFEEKFSMKPVAKSLSSILNEEVGLIDRLDSEEIFKSSLSIQILENIRFFKGEKTNDKDLGNTLANLGDIYVFDAFGTAHREQASTHSAIEQSKIACAGLLLEREIDFLTKALNDYQNPYIAIIGGAKVSTKLELIKYINNVADNIIVGGGIANTFILASGLNVGKSLVEETMVDTAKSILDEGKIILPKVVITAESLEGKNINKKLISDVKDNEMILDLYIEEETTQLINGAKTILWNGPMGVFENKVFEEGTKDLSLAIAKSKAFS

SEQ ID NO: 129160 - protein, 290 aa, Unknown
  Bacterial polypetide isolated from the Sargasso Sea
AEINKIQSGSIIMLENIRFNKGEEINDIEFSKNLSNLGDIFVNDAFSCSHRSHASVEGITKFIPSYFGLQISQEIEALKKITSEIKKPVTLIIGGSKISTKINIINNLVKKFNNIIIVGGMANTILKHTGYKVGKSICEDNCESLIRKIFDFSKKYNCKIVCPEDVVVSKNIEGDGTNKNINEIGEDEMILDIGPKTIISIKKIINDSNTVLWNGPAGYFENPNFQNGTKEILESISNKTINDKIFSVAGGGETVAAINKFKKVKSFTFVSTAGGAFLEYLEGKTLPGIK

SEQ ID NO: 129161 - protein, 309 aa, Unknown
  Bacterial polypetide isolated from the Sargasso Sea
DHNNKLIIASHLGRPTEGSYDESLSLKPICEHLSSKLNKKIQFIKSINDNIDFIDYDIAMLENVRFNIGEKKCDPKLSQTIASLADIFVFDAFGVSHRSECTTTGVSNYLQTVAGLNIRYEIETINKLINDKSRPMTIIISGAKVSTKIVLINKLLSKCDHMILGGGILNTFLKAKGCEVGNSLLEEGSVRDAAKILESDFADKIIFPSDFTCETADGIANVESSRISRNDTIYDLGNDSINEIKNIVRKSVSVFWNGPLGYVEKEPFNKGTEELAKVIADHNCFSIVGGGDTLPIIENLNYRMTIVVC

SEQ ID NO: 129162 - protein, 213 aa, Unknown
  Bacterial polypetide isolated from the Sargasso Sea
SRKPVIPLTVVMGGAKIKGKIELIENFLNIADNLLIGGALSFSFLKVKGLDIHSPLINNESIDNANRLLDYANSIGKEIILPSDFVTAASIDDVDTIDIKTIENLNSDISCFDIGPETTMIFSELISQAKTILWNGPLGVSENPYFGTGTQQVCRIIEELTKNGVISVLGGGDTAAAARRFSHNNGFTHISTGGGASLELLSGKELPAIKVLK

SEQ ID NO: 129163 - protein, 288 aa, Unknown
  Bacterial polypetide isolated from the Sargasso Sea
RKISDTTRIDKILPTLSFLIQQKTKIIILSHIGRPKGKIVKELSLKPIGDELRKKLNVSVKLITKNIYEIKNKDFFEKFDEEILILENIRFYVEEEKNSYKFAKHLASFGDIYVNDAFSCSHRAHASIHQISKYIPSFSGLQLDLEVAALNKITAEITKPITCIIGGSKISTKIDIIKNLIPKFDNIIIVGGMANNFIEYFGNNIGKSIKEKNCNQIVEKIITLSKKKKCKIVYPEDVLVSKNLNGSPTNKQLDQILPDEMILDIGPKTISKIIDIIDNTKTILWNGP

SEQ ID NO: 129164 - protein, 120 aa, Unknown
  Bacterial polypetide isolated from the Sargasso Sea
ETPKIKELKLISSDEMILDIGPKTISKINKVIDESNTILWNGPAGYFENPNFANGSIEIAKKIIENNLANNIFSVAGGGDTVSLLNNLNVVNNFNFVSTAGGAFLEYLEGKELPGISALN

SEQ ID NO: 129165 - protein, 272 aa, Unknown
  Bacterial polypetide isolated from the Sargasso Sea
EGERESNTEFAQCLAKPFDTFILDAFGAAHRKHASIVEVGKYINSYQGPLMNKEINELQSLLKSPSSPYTVIMGGAKLSDKLNLINKLLPKVDNLILGGGMCFTFLKSQGYEIGDSLCENDFLNTATEVLNSTNGKKIILPNDFGVTNDLLSNHREDKPLEKIKTNDIGFDIGSKTVEMFNEIIYSSNTIFWNGPMGVFENEKFEYGTKEITKSVSQSNAYTIVGGGDSVSAINKYSKIQNFNHVSTGGGASMELLEGNKLPGVNIYEPLII

SEQ ID NO: 129166 - protein, 211 aa, Unknown
  Bacterial polypetide isolated from the Sargasso Sea
QPGEIILMENLRFYKEETDGDKLFAEKLSRLGDLYINDAFGTCHREHASTAVIAKYFPNEKYVGKLLQKELEAISQIAEHGEKPVLAILGGAKVSSKLNILYNLIKKVDKIIIGGGMAYTFIAAQGGKIGESLIEEDLIENAKEILEIAINLNKEIILPEDIKASTDFDQNDLIKTFDSNKIENGWMGLDIGTKTIEKFNQAILSSKTIFW

SEQ ID NO: 129167 - protein, 109 aa, Unknown
  Bacterial polypetide isolated from the Sargasso Sea
LSDEMILDIGPKTIDKITKIIDKSKTILWNGPAGYFENPNFAYGSIQIAKKIIENNKANKIFSVAGGGDTVSLLNKLNGVNEFNFVSTAGGAFLEYLEGKNLPGITALN

SEQ ID NO: 129168 - protein, 292 aa, Unknown
  Bacterial polypetide isolated from the Sargasso Sea
DGEENKKYSLKPMSEFLSKELNQTVIFSSSCVGEEAIKKKNSLKEGEVLLLENLRFHKSEEKNDIEFSKNLSLGCDMYVNDAFSCSHRNHSSITGVTDFLPSFFGIHLKKEIDALENVLVDPKTPVVSIIGGSKVSTKIGIISNLLKKMDYIVIGGAMANTFLATMGNKIGKSLYEKEAFGIANEILEKGSKNNCKFILPEDVILSKKLEKNSKTLNVDINSIPDDMMALDIGKKTVNNIKKVVDDCKTLLWNGPLGAFEVNPFDNGTNEVAKIVSTKTKEKSLISVAGGGD

SEQ ID NO: 129169 - protein, 167 aa, Unknown
  Bacterial polypetide isolated from the Sargasso Sea
FTFLKYFGTKIGSSLFDEEGYKLVPEILENALKYKTNIVLPQDFICNDKFENGGNIVYKNTSMGIPQNYMGLDIGINTVNNFKQVLCESDCIIWNGPLGVFELDDYADGSKQIMEHISELSATTIIGGGDTASCCEKFNLQNKMTHISTGGGASLELLEGKKLPGLF

SEQ ID NO: 129170 - protein, 217 aa, Unknown
  Bacterial polypetide isolated from the Sargasso Sea
VNALNRITKEIKKPVTCIIGGSKISTKINIIKNLIPKFNNIVIVGAMANNIFKYKGLKIGNSFHEKNLDKIIQEIFLLAKNNNCKIYFPIDVRVGKKLDDFSTDREFKNIEQDDIILDIGPKTLLDLRKIIDNSSTILWNGPLGYFENNNFSYGSKEVANYIVNKGDKIFSVVGGGDTVALINSLNIIDKFNFVSTAGGAFLEFLEGKVLPGIKALN

SEQ ID NO: 129171 - protein, 209 aa, Unknown
  Bacterial polypetide isolated from the Sargasso Sea
MAAIVGGSKVSIKIGVLDSLLDKCDKIMIGGGMIFTFYKARGLDVGKSLVEEDKLELAKDLEAKAKAKGVELLLPTDVVLADEFSPDANSKISQIDSISGNWMGLDIGPDSIKVFQNALAECKTIIWNGPMGVFEFDKFADGTNAIATTLADLSAFSEVCTIIGGGDSVAAVEKAGLAEKMSHISTGGGASLELLEGKTLPGVAALNDA

SEQ ID NO: 129172 - protein, 128 aa, Unknown
  Bacterial polypetide isolated from the Sargasso Sea
MIKIKQLEDNRNIEGKRVLLRTDFNVPINEGSITEASRIEKVLPTIKSLINKKAKVIIISHLGRPKGKVVPGLTLKPIAKKLSHYLNQNVTFVDTNIGESVVEKSKKMNPGTVLLLENLRFSREEELN

SEQ ID NO: 129173 - protein, 260 aa, Unknown
  Bacterial polypetide isolated from the Sargasso Sea
CDVFVMDAFGTAHRAQATTHGVAKFAPVACAGPLLAAELDALAAALKNPKRPLVAIVGGSKVSTKLTVLESLSGIVDQLIVGGGIANTFIAAQGYQVGKSLVETDLIPEAKRLMAQAKANGGSIPVPTDVVTGKAFAEDTPATTKSVADISADDMVFDIGPDSSAALVDILKNAGTIVWNGPVGVFEFASFEQGTKALALAIADSQAFSIAGGGDTLAAIDKYELADKISYISTGGGAFLEFLEGKTLPAVEILEQRAKA

SEQ ID NO: 129174 - protein, 205 aa, Unknown
  Bacterial polypetide isolated from the Sargasso Sea
MKTIDNVNFDSERVIIRVDYNVPFEGKRITDVTRIEASKETIDLVLKKGGSIILLTHIGRPNGHEPEFSCQLLINEVSKILGREVFFCNSTIGKDAEEKCKMLKSGEIMLMENVRFHSAETNGDTDFARKLSRLGTVYINDAFGTAHRAHASTCTIAKFFSKKYCGKLLEREVVSIQKVVKNGKKPILAIIGGAKISSKITIIES

SEQ ID NO: 129175 - protein, 135 aa, Unknown
  Bacterial polypetide isolated from the Sargasso Sea
FPEDVIVSNNLNGSPQKKDLNEISPDEMILDIGPKTINKISKIIDNSKTILWNGPAGYFENPNFANGSVQIAKKIIENNKINNIFSVAGGGDTVSLLNNLNAVNEFNFVSTAGGAFLEYLEGKNLPGITALNRNV

SEQ ID NO: 129176 - protein, 184 aa, Unknown
  Bacterial polypetide isolated from the Sargasso Sea
MAKRSLASLNAGDLSGKRVLVRVDFNVPLNDAGAITDDTRIRAALPTINDLIGKGAKVILSAHFGRPKGQVNDAMRLTPVAARLSELLSKPVAKTDSCIGPDAEAKVSAMANGDVVLLENVRFFAEEEKNEAGFAEKLAGLAEVYVNDAFGAAHRAHASTEGVTKFLKPSVAGFLMEKELQYLQ

SEQ ID NO: 129177 - protein, 216 aa, Unknown
  Bacterial polypetide isolated from the Sargasso Sea
LTKITSKIIRPITCIIGGSKISTKINVIKNLITKFDNIIIVGGIANNFVEFFGNNVGKSIKEKNCNLILEEIITLAKKEKCKIIYPEDVIVSNNLNGSPQKKDLNEISPDEMILDIGPKTIEKIINIIGNSKTILWNGPAGYFENPNFANGSIEIAKKIIENNKINKIFSVAGGGDTVSLLNNMNAVDNFNFVSTAGGAFLEYLEGKNLPGITALN

SEQ ID NO: 129178 - protein, 314 aa, Unknown
  Bacterial polypetide isolated from the Sargasso Sea
LEIKLKKKIKLIKDNIYDLNKKMISKKFVDQIIFLENIRFYKEEEDNNNDFSKQLASLGDLFVNDAFSCSHRAHASVSKITKFLPSYAGLQLETEINALKKVTTEIKKPITCIIGGSKISTKISVIKNLIPKFDNIVIVGGMANNILKYHGHPIGKSFQENNCEEIISDIFKLSKNHSCSVIFPNDVVVGKTIEDNPKIKELNEVNGDDLILDIGPKTIGKINNIIDSSKTILWNGPAGYFENSNFARGSFEIGKKIAEKNKFNEVFSVVGGGDTVALINNIGIFNSFNFVSTAGGAFLEFLEGRELPGIKALN

SEQ ID NO: 129179 - protein, 184 aa, Unknown
  Bacterial polypetide isolated from the Sargasso Sea
MNKKQFIEGLNLEGQRVLTRVDFNVPLNDELNITDNGRIKAALPTVNYIIENGGKAVLMSHLGRPGGERSESMSLKPAAVELSRLLGQIVTLAPDCIGEEVKTLVNGMQNGDVVLLENLRFHKAETKNDPSFCEALAENGDVYINDAFGTAHRAHASTTGVASYVKDSAVGYLMRREMQFLGEA

SEQ ID NO: 129180 - protein, 273 aa, Unknown
  Bacterial polypetide isolated from the Sargasso Sea
MINLTSLDITNKNLVIRVDMNVPIKDGIVADASRINACIPTIKFALENNAKVLLISHLGRPKEGNFEEKFSMKPVAKSLSNILNEEVGLIEELESKDIFKASSSIQILENIRFFEGEKSNDKDLGNKLANLGDIYVFDAFGTAHRKQASTHSAIEQSKIACAGLLLEREIDFLTKALNNYQNPYVAIIGGAKVSTKLELIKHINDVADSIIVGGGIANTFILASGLNVGKSLIEETMVDIAKSILDKGKIILPKIAITSESFEGKHINKKLIF

SEQ ID NO: 129181 - protein, 122 aa, Unknown
  Bacterial polypetide isolated from the Sargasso Sea
KTFEGEDIKETSISNIGNDEMILDLYLEQETKTLINNAKTILWNGPMGVFENSLFENGTKELSKEIAKSNAFSLAGGGETLSAINKYIKSDDVSYCSTGGGAFLEFMEGKVLPSIKALNSKK

SEQ ID NO: 129182 - protein, 249 aa, Unknown
  Bacterial polypetide isolated from the Sargasso Sea
HRAHASTQGVTNYLSPSVAGFLLEKELKYLQGAIDSPMRPLAAIVGGSKVSSKIGVLDSLLDKCDKIMIGGGMIFTFYKARGLDVGKSLVEEDKLELAKDLEAKAKAKGVELLLPTDVVLANEFSPDAESKISQIDSISGDWMGLDIGPNSIKVFQNALAECKTIIWNGPMGVFEFDKFAEGTNAIATTLADLSAFSEVCTIIGGGDSVAAVEKAGLAEKMSHISTGGGASLELLEGKTLPGVAALNEA

SEQ ID NO: 129183 - protein, 184 aa, Unknown
  Bacterial polypetide isolated from the Sargasso Sea
MIKTLKSFDFKNKNVLIRVDFNVPIKNNQIEDNFRIKSSLPTIRYLLDAGASLILMSHLGRPNGKIIANLSLQTVGEELAAMLEMPIKFSHSCVSEDSLDTSLGLKTGEIHLLENLRFHSEEEQNDFNFSSRLAKHGSIYINDAFGTLHRNHASNNGVVKHFKHKGIGKLVEKEISYLDKTFKK

SEQ ID NO: 129184 - protein, 276 aa, Unknown
  Bacterial polypetide isolated from the Sargasso Sea
MINLSSLDINNKNLVIRVDMNVPIKNGNILDSTRIEASLPTIEYALKNNAKILLISHLGRPIEGEYEESFSLKPVAKYLSKIVNEPCNVIDDLDSKSFFNKESNIQLLENIRFFEGEKANCKDLGAKLASLGDIYVFDAFGTAHREQASTHSAIECAPVACAGLLLQRENKFLSLALNNHESPYVAVIGGAKVSSKLELIKHINSEADHIIVGGGIANTFLKAKGFDVGKSLFEDSMIDIAYNLIEKGKIILPKKVITSTTFEGKNVKETLVSEVG

SEQ ID NO: 129185 - protein, 224 aa, Unknown
  Bacterial polypetide isolated from the Sargasso Sea
DAFGTAHRAQASTHGVIRFAPVAAGGPLLMAELDALAKALLAPAQPLLAIVAGSKVSTKLELLANLVGKVDQLIVGGGIANTFIAAAGHAVGKSLYEPDLLDTARRIVADAKARGAEIPLPTDVVVAKQFLPDAEATVKAVTDVAEDDLILDIGPDTAQHYAGLIAKAGTVVWNGPVGVFEFEAFSHGTQALAQAIAASSAFSIAGGGDTLAAVDKYDIADQVS

SEQ ID NO: 129186 - protein, 257 aa, Unknown
  Bacterial polypetide isolated from the Sargasso Sea
AARLGAGDVLMLENLRFHPGEEANDPAFAEALAGLGDIYVGDAFSCAHRAHASVEALPRQMAAAGKTVCAGRSMGAELAALGAALSNPERPVVAVVGGAKVSTKLQILENLVTRVDGIVLGGGMANTFLLAMGHDVGASLVELDMVKTATSIIAAAVANDCRLILPVDALVASEFAANASHRVVAIDAVSADEMILDVGPQSIAAVAAFIKGCRTVVWNGPMGAFETPPFDTGTNAVARAVAARTVAGELLSIAGGG

SEQ ID NO: 129187 - protein, 277 aa, Unknown
  Bacterial polypetide isolated from the Sargasso Sea
MRTIDQFSFKNKKAIIRVDFNVPIDNNKVTDTSRIKASKQTIDKVCNDGGSCVLVSHLGRPKGFQKEFSMTNIINEVENVLERNVVLSKDVIGPDAKKKSLDLKPNQVLLLENVRFHDEEKKGDIDFAKELSLLADCYINDAFGTAHRSHASTTTISTFFNDKFFGKCLEREVNSIKKVLSSGEKPILAILGGAKISSKIPILKNIIKIADHIIIGGGMSFTFIKAMGGQIGLSIHEDSMLDTAKEIIKKAEKNNVKIHLPIDVVCSKDFDNESERK

SEQ ID NO: 129188 - protein, 109 aa, Unknown
  Bacterial polypetide isolated from the Sargasso Sea
KIQNDDMILDIGPKTLNLICKILDNSKTVLWNGPAGYFENPNFAIGSKEIAKKIVELKNKIYSVAGGGDTIVVINKVNAFEKLNFVSTAGGAFLEYLEGKEIPGIRALK

SEQ ID NO: 129189 - protein, 233 aa, Unknown
  Bacterial polypetide isolated from the Sargasso Sea
MRLLKDQDLSNKNVVVRLDLNVPIQNKQIIDSTRIIYSVPTIKYLVDKNCKVLLTSHLGRPEEGKFDQDFSMSPVAKKLSEILNHEIDLIDSLDNSDIFNTTQIQLLENLRFLIGEKDNNEKLGNQLANKGDVYIFDAFGTAHRKQASTYSAIQQAKLSCAGLLLEKEINSLNKALISIENPFTAVIAGSKISTKLELIAHLNSKADFIVVGGGIANTFLKSQGFDVGESLVE

SEQ ID NO: 129190 - protein, 164 aa, Unknown
  Bacterial polypetide isolated from the Sargasso Sea
MSKLKALDENFNLSEKRVILRADLNVPIIDGNITDISRIKKIIPEINELKNKNAKVIIISHLGRPKGKVNDKLSLKPVVPILESLLDSKIHFLNECYGPAVIAKSQTIKSGEVLLLENLRFNEEEEQNTESFAKNLSKIGDIYINEAFSCSHRAHTSVCEITKH

SEQ ID NO: 129191 - protein, 209 aa, Unknown
  Bacterial polypetide isolated from the Sargasso Sea
MAKRSLAGLNSSDLSGKRVLVRVDFNVPLDDTGAITDDTRIRAALPTINDLIGKEAKVILSAHFGRPKGEVKESMRLTPVTARLSELLNKPVTKTDSCIGPDAEAKVAAMANGDVVLLENVRFFAEEEKNEAGFAEKLAGLADVYVNDAFGAAHRAHASTEGVTKFLKPAVAGFLMEKELQYLQGAVDEPKRPLAAIVGGSKVSSKIGV

SEQ ID NO: 129192 - protein, 67 aa, Unknown
  Bacterial polypetide isolated from the Sargasso Sea
MIKSISTFDIKHKRVLIRADLNVPINEGKVQDDFRLKALLPTLNYCLKNNAKIVLMSHLGRPKGKID

SEQ ID NO: 129193 - protein, 275 aa, Unknown
  Bacterial polypetide isolated from the Sargasso Sea
ETLGDILFAEELSKLGDIYVNDAFGTCHREHSSTALIAKYFKNKKFAGKLLEKELTAINQIANNGKKPVLAILGGAKVSSKLNILYNLIKKVDKIIIGGGMAYTFIKAKGGKIGNSLVEDELIINAKEILSLAEKLEKQIILPFDTKASKDFENNDQIKTFDSNKIEDDWMGLDIGKKSIEKFSKEIFLSNTIFWNGPMGVFEKELFSEGTSSICNSLREAKQKGVNVIVGGGDSIAALKKLGNKDWVSYISTGGGALLESLEGKTLPGVKALMQ

SEQ ID NO: 129194 - protein, 236 aa, Unknown
  Bacterial polypetide isolated from the Sargasso Sea
LKPAVAGFLMEKELQYLQGAVDEPKRPLAAIVGGSKVSSKIGVLEALIDKCDKVLIGGGMIFTFYKARGLSVGKSLVEEDKLELAKELEAKAKAKGVELLLPTDVVLADNFAPDANSQVADVTAIPDGWMGLDIGPDAVKVFQDALGDCQTVIWNGPMGVFEFEKFATGTNAIATTLAELSGKGCCTIIGGGDSVAAVEKAGLADKMSHISTGGGASLELLEGKVLPGVAALNDAA

SEQ ID NO: 129195 - protein, 262 aa, Unknown
  Bacterial polypetide isolated from the Sargasso Sea
LEGKKVLVRVDFNVPLNEGGQITDDTRIRAAIPTIKYLINHSAKVILAAHFGRPKGQVNEKMRLIPVAARLGELLGKNVALTKSCIGEESVAESNSLKNGDVLLLENVRFFAEEEKNDLDFAKKLALHADMYVNDAFGAAHRAHASTQGVTNYLSPSVAGFLLEKELKYLQGAIDSPKRPLAAIVGGSKVSSKIGVLDSLLDKCDKIMIGGGMIFTFYKARGLDVGKSLVEEDKLELAKNLEAKAKAKGVELLLPTDVVLAN

SEQ ID NO: 129196 - protein, 137 aa, Unknown
  Bacterial polypetide isolated from the Sargasso Sea
MCKITFPEDVLVGKNFNDKSEIKELNGIESDDLILDIGPKTINKIKNIIEMSKTILWNGPAGYFENSNFANGSYEIAKAIIKKNKNKSIYSVIGGGDTIAVINQINDIKNFDFVSTAGGAFLEYLEGKELPGIKALN

SEQ ID NO: 129197 - protein, 178 aa, Unknown
  Bacterial polypetide isolated from the Sargasso Sea
GMAYTFIAAQGGKIGESLIEEDLIENAKEILEIANSLNKEIILPDDIKASTDFDQNDLIKTFDSNKIENGWMGLDIGTKTIEKFNQAILSSKTIFWNGPVGVFEKEAFLEGTRSICNSLKEAKTIGVNIIVGGGDSIAALKKLGNEDWVSYISTGGGALLESLEGKTLPGVKALLNEN

SEQ ID NO: 129198 - protein, 319 aa, Unknown
  Bacterial polypetide isolated from the Sargasso Sea
LTLDDLDLKGKRVLIRFDYNVKYLNGKVSDDERILRTLPTLTYVLSKASSVTILSHLGRPEKVGEIDKDFSLKKVAEHLSTLLSEEIYFHDDLNLDHFSDNQKKISMLENVRFFEGETENNELFSKKLAQLADVFVMDAFGSAHRSHCSTEGVSHFIDSCVGRLVEEELNSLDGILNNPPKPMLGIIGGSKISTKINILESLLEKVDWLFVGGGIANTLHKSKGYEIGQSIVENDFLEEAKDLSKNNKIILPDTFLVEQKDKSTVEKTSEEILPDDIIYDVSINSIKNLNNIISSCKTILWNGPLGFFEREEFFKKVHC

SEQ ID NO: 129199 - protein, 274 aa, Unknown
  Bacterial polypetide isolated from the Sargasso Sea
ILRTLPTLTYILSKASSVTIISHLGRPEKVGEIDKDFSLKKVAEHLSTLLSEEIYFHDDLNLNHFSDNQKKISMLENVRFFEGETDNSEIFSKKLAQLADIFVMDAFGSAHRSHCSTEGVSHFIDSCVGRLVEEELNSLEGIFDNPSKPMLGIIGGSKISTKINILESLLEKVDWLFVGGGIANTLHKSKGYEIGQSIVENDFLKEAKDLSKNNKIILPEIFVVEQKDKSIVEKTFEEILPDDIIYDVSINSVKNLNKIISSCKTILWNGPLGF

SEQ ID NO: 129200 - protein, 287 aa, Unknown
  Bacterial polypetide isolated from the Sargasso Sea
NKNKIFIIAHFGRPKGEFLKKYSLKFILSSLRTILKIKKIYFLENLQKDQINKTVNEMQYGEVCLIENIRFQESEEKIDLNFAKNISSLFDVYVNDAFSASHRNHTSIIGFAKYIPAVAGNHLIQEIKKIDSFLENSKKPNIAIVGGSKISTKIKLLNNLIKQFNCIVIGGAMANTFLLSNNINIGKSLVEKDLVEEAKNIQKKANQYNCTIILPTDVVCGKSIEDKNPFELDLNEITSDFMILDLGKKTTEIINQEIKNSRMVLWNGPVGAFEYKPYDKATKEIAI

SEQ ID NO: 129201 - protein, 66 aa, Unknown
  Bacterial polypetide isolated from the Sargasso Sea
MKARQFIEDLDLKGRRVLIRVDFNVPLDENQKITDNDRIAAALPSIRRIIESGGKCILMSHLGRPQ

SEQ ID NO: 129202 - protein, 283 aa, Unknown
  Bacterial polypetide isolated from the Sargasso Sea
DAVAAIASADNGEVVVLENLRFHAGEEANDGTFAQAIADLADAYVNDAFSCAHRAHASTEAIACLLPAAAGRLMQMELEALSGALGNPERPVAAVVGGAKISTKMDVLGNLVSKVDQLIIGGGMANTFLFASGIDVGKSLSETDMANQAQAIMANAAAEGCEIILPVDAKVAQTFEAGARSQAVSVDSVPTDSMILDLGPASINDLVQRLGRCRTVVWNGPLGAFEISPFDAGTNAVARETARLTQDKFLLSVAGGGDTVAALANAGVVDHFSYVSTAGGAFL

SEQ ID NO: 129203 - protein, 133 aa, Unknown
  Bacterial polypetide isolated from the Sargasso Sea
MTVLKMTDLDLQGKRVLIREDLNVPVKDGVVTSDARILASLPTIKLALEKGAAVMVCSHLGRPTEGEFSAENSLKPVAEYLSKALGRDVPLVADYLGGVDVKAGDIVLFENVRFNKGEKKNSDELAQQYAALC

SEQ ID NO: 129204 - protein, 115 aa, Unknown
  Bacterial polypetide isolated from the Sargasso Sea
SRVCGIDDVQDDEMILDQILSPKAFEKIFKAKKIIWNGPVGVFEQELFSKGTQQLAEAIASSNAYSLAGGGETLLAIKMFIDKSNISYCSTGGGAFLEFIEGKALPSLSALGFKF

SEQ ID NO: 129205 - protein, 304 aa, Unknown
  Bacterial polypetide isolated from the Sargasso Sea
MINLSSLDLNNKNLVIRVDMNVPIKDGDVLDSTRIKACLSTIEYALKNNAKVLLISHLGRPIEGNFEEEFSLKPVANELSKIINMDVELIDTLESNKIFNSSSNIQVLENIRFFEGEKENSQELGNKLGSLGDIYVFDAFGTAHREQASTHAAIMNAPIACSGLLLEKEENFLSQALKKYERPYVAIIGGAKVSTKLELIKHINEVADHIIVGGGIANTFIKSSGLNVGNSLTEQSMLEIAKSILDKGKIILPNRVLTSKTFEGEDIKETSISNIGNDEMILDLILEQETKTLINNARTILWNG

SEQ ID NO: 129206 - protein, 191 aa, Unknown
  Bacterial polypetide isolated from the Sargasso Sea
MRLEEADIAEKRVFIRADLNVPMQDGQISNDARIRASLPTISRVLEKNCAVTVLSHLGRPEEGRFDEAFSLAPIAQRLSELLSVPVILLKDIEQSKTLSKGQIGLMENVRFFAGEKGNSDELGRRMAACCDVFIMDAFGSAHRAHASTNSIAKHVEVVVPGFLMESELEALNGVVQNAKTPVVAVLGGCKV

SEQ ID NO: 129207 - protein, 93 aa, Unknown
  Bacterial polypetide isolated from the Sargasso Sea
KTVINNAKTILWNGPMGVFENSLFENGTKELSIEIAKSNGFSLAGGGETLSAINKYIKSDDVSYCSTGGGAFLEFMEGKVLPSIEALNSKIGS

SEQ ID NO: 129208 - protein, 134 aa, Unknown
  Bacterial polypetide isolated from the Sargasso Sea
LPIDVCVAEEFSATAASRLCAVDAVAEQDRILDVGVETAQSYQDLLKGMQTVIWNGPVGVFEFPQFSHGTQALGEAIANSHAFSIAGGGDTLAALAKFHLSDRISYRSTGGGAFLELLEGKTLPVVAILEQRAQ

SEQ ID NO: 129209 - protein, 302 aa, Unknown
  Bacterial polypetide isolated from the Sargasso Sea
ILFRADLNVPVVEGIITDTSRIKAIKSSIKKLISKNNKIFLIAHFGRPKGEFVEKYSLNFILPSLKEIFNLDKIYFLENFDQDSIKKIDQEMQDGDLCLVENIRFLKEEENIDLQFAKKISDLFDVYVNDAFSASHRNHTSITGFPKFLTAVAGNHMINEINNINSFLDNAKKPNIAIVGGSKISTKIQLLSNLILQFSSVAIGGAMANTFLLANNHNIGNSLVEKDLVQEANNIQLKAKKVNCELILPSDALCGKNINDINPVHRSIHEILSDEMILDIGEQSTQFIKNKIINSKMVLWNG

SEQ ID NO: 129210 - protein, 209 aa, Unknown
  Bacterial polypetide isolated from the Sargasso Sea
KPVAAIVGGSILSTKIELLNNLSDKVDFLIIGGAMANTLLKAQGFEIGKSLTENKMLKIAENIIKEMKNKRCKLVLPRDIICAESMTNKAKTYSFSVDCCPIDKMILDIGPMTEKDIMTIIDKSKTLIWNGPLGAFETLPFDRGTNNIAKYAANRTLDRQLISIAGGGDTVSALKTSDSVSKFSYVSTAGGAFLEWLEGKTLPGIESLQ

SEQ ID NO: 129211 - protein, 212 aa, Unknown
  Bacterial polypetide isolated from the Sargasso Sea
MIKTLQAFDLRGKNILIRTDFNVPMDGEIVTNNFRIKAALPTIKTCIEAGAAVVLMSHLGRPKGKKNQSLSLIPVGEELAALLEMPIKFSEDCVSTDAIDTSISLKPGEIHLLENLRFHNGEESNDTEFSSQLARHGHIFINDAFGTAHREHASNVGVVPYFKNSGIGWLMDKELKYLDRLMNNPKRPLTLVLGGAKIDTKLDLIDNFLTNA

SEQ ID NO: 129212 - protein, 125 aa, Unknown
  Bacterial polypetide isolated from the Sargasso Sea
AGHRAEVKLAAEVANDDMILDVGPETAAGIAERVATSATILWNGPLGVFEQAAFAAGTRVLAEAIAASEGFSLAGGGDTLAAIDLLDVASGVSYISTGGGAFLEYVEGKELPAVAALRARADHAS

SEQ ID NO: 129213 - protein, 267 aa, Unknown
  Bacterial polypetide isolated from the Sargasso Sea
NDSKFSSSLAKLADVYVNEAFGTSHREHCSTHGMAKDFENKISGFLVDKELSFVSKMMRKPEHPFLVIIGGSKIKDKISALGNLLDSADKILVGGGAAYTFLKAQGVSIGKSIYEEEMLEWVQEVYVKYREKIVLPIDHVISQTLDKTSQSLISDVDIPKDYMALDIGPKTIELFNSIIKGPGYIFWNGPMGVFEFKQYSSGTIHVARAVALATWRGATSVVGGGETIAAIRKAEVLESEISHMSTGGGALLEYLGGGNLPGIEILD

SEQ ID NO: 129214 - protein, 285 aa, Unknown
  Bacterial polypetide isolated from the Sargasso Sea
MSDLEKQDLKNKKVIVRVDLNVPLDDNDNVTDTTRIMACKETVDLILEKGGTCILISHLGRPKGKENKFSLKKIVDTVSSVLNRPVFFYKDCIGQGAKEAISKLDQGSIILMENLRFYEEETSGDRVFAKNLSELGDIYVNDAFGTCHREHASTAVIAEFFKNKKFAGKLLQKELEAINQIAKNGKKPVLAILGGAKVSSKLSILYNLIKNVDKIIIGGGMAYTFIKAKGGQIGNSLVENELITNAQEILSLAQRLDKKIILPLDTKASKDFDNNEQISTYNSKE

SEQ ID NO: 129215 - protein, 229 aa, Unknown
  Bacterial polypetide isolated from the Sargasso Sea
ESMRRELDALDAALGNPQKPVLGVVGGSKVSTKLDLLKNLVGKLDRLAIGGGMANTFLYAQGVDIGGSLAEKDMADTARDILAEAEAKGCEILLPIDVVVATDVKPGADTRTVLAREEIGDEEKILDAGPLTVEKLIKAMALSKTLIWNGPLGVFEVPPFDAATVKAAKAAADLAKSGALVAVAGGGDTVAALNHAGVADDMTFVSTAGGAFLEWMEGKALPGVEALRA

SEQ ID NO: 129216 - protein, 171 aa, Unknown
  Bacterial polypetide isolated from the Sargasso Sea
MTGGGITNTFLKAQGNNIGISLCEDSMLSHAKELLETEKILLPNEVLVSKNIDSNESRVCKIDSVQDDEMILDQILSSAAGEKISIAKKIIWNGPVGVFEHKPFSKGTQDLANAIASSQAYSLAGGGETLLAIKMFIDKNNISYCSTGGGAFLEFMEGKELPSLSALGFKF

SEQ ID NO: 129217 - protein, 235 aa, Unknown
  Bacterial polypetide isolated from the Sargasso Sea
MRLLKDQDLSNKNVVVRLDLNVPIQDKQIIDSTRIISSVPTIKYLIDKNCKVLLTSHLGRPKEGKFDQDFSMSPVAKKLSEILNHEIDLIDSLDSSDIFNTTQIQLLENLRFLIGEKDNNEKLGNQLANKGDVYIFDAFGTAHRKQASTHSAIQQAKFSCAGLLLEKEINSLNKALTSIENPFTAVIAGSKISTKLELIAHLNSKADFIVVGGGIANTFLKSQGFDVGESLVEND

SEQ ID NO: 129218 - protein, 225 aa, Unknown
  Bacterial polypetide isolated from the Sargasso Sea
MKFLGLNDFQFKDQRVLLRLDLNAPIKDGAVTNDERLVRSLPTINHILNNEGKLIVISHLGRPKENGEIQPEFSLSLVVKRLEQLLNRPINLITDINNIPSIEAGEMIILENVRFLEGEKSNDSGLSKKLANIADIFVMDAFATSHRAHSSTTGVIEFSEKACAGFLLEEEINALSKITLKDKGDTLAVLGGAKISTKLDLINSLCDKMDAVILGGGIANTCLLA

SEQ ID NO: 129219 - protein, 232 aa, Unknown
  Bacterial polypetide isolated from the Sargasso Sea
KACAGPLLAAELYALGKALDNPKRPMVAIVGGSKVSTKLTVLKTLAEKVDQLIVGGGIANTFIAAQGHNVGKSLVEMDLTEQATQLMNEAQANGGNIPVPTDVVVGKAFDENTEATLKVVSDVADDDMIFDIGPDSSKALEDIIKNAGTIVWNGPVGVFEFEQFSAGTKALSEAIAASDAFSIAGGGDTLAAVDKYGIADKVSYISTGGGAFLEFLEGKTLPAVAVLEEKNK

SEQ ID NO: 129220 - protein, 295 aa, Unknown
  Bacterial polypetide isolated from the Sargasso Sea
KKEDLFKESKNQIVFLENIRFYEEEEKNDQNFSKHLSKLADIFVNDAFSCSHRAHASVSKITEFLPSYAGLQLETEMNALKKVTSEIKKPITCIIGGSKISTKIAVIKNLIPKFDNIIIVGGMANNILSYKGNPTGKSIREENCELIVDDIFKTAKTYSCSIIYPQDVVVGKSLKDKAHIKELNEVTNDDLILDIGPKTINKIKDIIENSKTVLWNGPVGYFENPNFANGCFEIAKKIIEKNKNNLIYSIVGGGDTIAVLNQINAINHFNFVSTAGGAFLEYLEGKELPGIKALN

SEQ ID NO: 129221 - protein, 287 aa, Unknown
  Bacterial polypetide isolated from the Sargasso Sea
KVAALSVGDVLVLENVRFNPSEKKGDDANYVAGIANLADAYVNDAFGTCHRTEASMYAVPKAMKESGKPVVVGFLVEKEIRYLSDAVGQPKRPFVAILGGKKVSDKIAVIKNLLMICDYVLIGGAMAYTFSLAQGGKTGDSLVESDKLELAKQLIQDGGEKLILPVDTQCADDFSSDANKKVVKAGEIPDGFEGLDIGPDTANKYAEIIRGAGTVVWNGPMGVFEMPPFDAGTKAVADAVASATASGAITIIGGGDSAAAVEQLGYAEKVSHVSTGGGASLEMLEGK

SEQ ID NO: 129222 - protein, 210 aa, Unknown
  Bacterial polypetide isolated from the Sargasso Sea
IKYLIDKNCKVLLTSHLGRPKEGKFDQDFSMSPVAKKLSEILNHEIDLIDSLDSSDIFNTTQIQLLENLRFLIGEKDNNEKLGNQLANKGDVYIFDAFGTAHRKQASTHSAIQQAKFSCAGLLLEKEINSLNKALTSIENPFTAVIAGSKISTKLELIAHLNSKADFIVVGGGIANTFLKSQGFDVGESLVENDMIEIAKELFNSGKIIL

SEQ ID NO: 129223 - protein, 161 aa, Unknown
  Bacterial polypetide isolated from the Sargasso Sea
IGKSIKEENCETIIDDIFKSSKYYSCSIILPDDVATGKKMEDHSTVKDLDEIENDDLILDIGPKTIKKINYIIESSKTILWNGPAGYFENPHFAKGSFEIGKKIEEKNKLNQIFSVAGGGDTAALLNKIGIFNSFNFVSTAGGAFLEYLEGKELPGIKALS

SEQ ID NO: 129224 - protein, 289 aa, Unknown
  Bacterial polypetide isolated from the Sargasso Sea
FNVPLDENQKITDNARIAAALPSIRRIIESGGKCILMSHLGRPKGQRVESMSLKPAAEELSLLLEKNVSLAPDSIGSEVEKMVSQMEEGELLLLENLRFHQGETKNDPQFCEALARLGEVYINDAFGTAHRAHASTAGVANLMEDRAVGYLIRKELEFLGAAVLDPQKPFTAILGGAKVSDKIIVIERLMEKVDALIIGGGMANTFLKAQGMEIGDSLLEEDALETAKNLLDEAKKCGVKIHLPVDVCSAPELLQEVETKFLKVEDKVQAGWKILDIGPESVKQFGSVI

SEQ ID NO: 129225 - protein, 56 aa, Unknown
  Bacterial polypetide isolated from the Sargasso Sea
GGGDSAAAVHQTALEKQITHISTGGGASLEFLEGKTLPGVQAIPYREAYLNKVSQS

SEQ ID NO: 129226 - protein, 270 aa, Unknown
  Bacterial polypetide isolated from the Sargasso Sea
MQIPLMQDLDLQGLRTIIRLDLNVPMKDGVITSDARIRAAIPTIEMALDKGARVILLSHLGRPDPDALDSSFSLEPVAKRLGDLMGRPVNFCANWLDGIPENEITLCENTRYFKGEKSNDDSLANKIASLCDVFVMDAFGASHRKHASTYGAAKASSQACIGPLLNREVEVLSQALVNPDKPLVAVIGGAKVSSKLGVIESLSKICDHIIVGGGIANTFLMASGFETGQSLSESDMVEPARQILDLKGINVPLPVDVITAKEFSSDAEAE

SEQ ID NO: 129227 - protein, 191 aa, Unknown
  Bacterial polypetide isolated from the Sargasso Sea
LNLIENLLPKVEYLMVGGGMCFTFLKALGHEIGRSLLEESFISKAEKLLNSKFGKKIVLPIDFGVSDSIDSSVREDLKLDDFKNNHIGVDIGPQTVSNFREILKKSNNIFWNGPMGIFEKEKFSYGTREITEIISNSSAYTCIGGGDSVSAINKFSDKKNFNHISTGGGASLEYLEGKKLPGVNKYKSLII

SEQ ID NO: 129228 - protein, 274 aa, Unknown
  Bacterial polypetide isolated from the Sargasso Sea
MSVIRALKDNINISNKRVILRSDLNVPIIKNEIQDTTRIKSCLPFLETLLKQGAKVLLISHLGRPKNSGDKNYSLEPVFEYLKKNIKNNIFFHSEKINSETKKKISFLKQGEIILFENIRFNDGEVQNDDGFAKNLSSIGDIYINDAFSCSHRKQASVHKITEYLKESYGGPSLIKEVDSLNLILNNKQKPVTCIIGGSKVSTKLGVIISLIQKVDNLVVVGAMANNFIKYKGLKFGRSLIEKDSEKTISKIYDQLNNSDCKIILPTDFVVQTI

SEQ ID NO: 129229 - protein, 264 aa, Unknown
  Bacterial polypetide isolated from the Sargasso Sea
KTFAEKLSKLADIFVNDAFGTAHRAHASTAVIADFFHDNKCFGYIMAKEITNLEKIVTEGERPITAIMGGAKVSSKITIINKLMNKVDKIIIGGGMSYTFAKALGGNVGNSLVEDDKMELALSLISQAKEIGVELLIPVDSLNADAFSKDANTNVSDIDKVEDGWMGLDIGEKTKAIYRNAISSSKTILWNGPMGVFEMDKFSGGTKYIADAIADATSQGSFSLVGGGDSVAAVKKFNLQDKVSYLSTGGGAMLEYLEGKELPG

SEQ ID NO: 129230 - protein, 107 aa, Unknown
  Bacterial polypetide isolated from the Sargasso Sea
MGLDIGPDAVKVFQAALADCQTVIWNGPMGVFEFEKFATGTNAIATTLAELSAKGCCTIIGGGDSVAAVEKAGLAEKMSHISTGGGASLELLEGKVLPGVAALNDAA

SEQ ID NO: 129231 - protein, 206 aa, Unknown
  Bacterial polypetide isolated from the Sargasso Sea
MRLEEADIAERRVFIRADLNVPMQDGQITNDARIRASLPTISEVLEKNCAVTVLSHLGRPEEGKFDEAFSLAPIAQRLTELLSVPVILLKDIEQSKTLSKGQIGLMENVRFFAGEKGNSDELGRRMAACCDVFIMDAFGSAHRAHASTNSIAKHVEVVVPGFLMESELKALNGVVQNAKTPVVAILGGAKVSSKLTLLERFPKSGQ

SEQ ID NO: 129232 - protein, 73 aa, Unknown
  Bacterial polypetide isolated from the Sargasso Sea
MSKLSLSSLDKSKLEGKKVLVRVDFNVPLNESGEITDDTRIRAAIPTINYLIDNSAKVILAAHFGRPKGKVNE

SEQ ID NO: 129233 - protein, 255 aa, Unknown
  Bacterial polypetide isolated from the Sargasso Sea
MIRSLKSFDLKGQTILMRLDLNVPMNDDKIEDDFRIRSSLPTIKYCLEEGASIVIMSHLGRPEGECISNYSLIPVGESLAGMLEIPIKFSEDCISQDAIDTSLSLKPGEVHLLENLRFYKEEQDNDSEFSNRLSRHGKLFINDAFGTAHRKHSSNFGVVDNFKYYGIGLLVERELQYLKDMMNKPKRPLAFLLGGAKVSTKIQLIKRYLHMADSIIIGGGMAFTFLKAMGYNIGKSLVEEKMLKNARSIIDLARA

SEQ ID NO: 129234 - protein, 220 aa, Unknown
  Bacterial polypetide isolated from the Sargasso Sea
EINALKKVTSEIKTPVTCIIGGSKISTKINLIKNLIPKFDNIIVVGGMANNILSYKGNSIGKSIKEDNCENEIENIFKISNDHSCSIIYPKDVKIGKSMDDKSQIKDLTEVSADDLILDIGPKTLKKIRDIIENSKTVLWNGPAGYFENPNFALGSYEIAKMIIKKNKDNSIYSVAGGGDTIAVLNQINAINDFNFVSTAGGAFLEYLEGKELPGIKALN

SEQ ID NO: 129235 - protein, 179 aa, Unknown
  Bacterial polypetide isolated from the Sargasso Sea
MRLLKDQDLSNKKVVVRLDLNVPIQDKQIIDSTRIISSVPTIKYLVNKNCRVLLTSHLGRPEEGKFDQDFSMSPVAKKLSEILNHEIDLIDSLDSSDIFNTTQIQLLENLRFLIGEKDNNEKLGNQLANKGDVYIFDAFGTAHRKQASTHSAIQQAKLSCAGLLLEKEINSLNKALTSI

SEQ ID NO: 129236 - protein, 289 aa, Unknown
  Bacterial polypetide isolated from the Sargasso Sea
ISEWADGFDLIEGEIVLLENIRFSEGEKDNSDNLSKKLADLCDIFVMDAFGSAHRKHASTYGVIEFSETACAGPLLSKELDSISRIYTDSKSPIIAIVGGSKISTKLEVIKSLSNFVDYLILGGGIANTILKAQGKEIGKSLYEESMLGTAKKMIETNSECQIMEIFDVVVAKEINDSSKSDVKDINSVSNDDLILDIGPKTSNSYEEIIKKSSTVIWNGPLGLFEIDQFSSGTERIAQAIAQCGGYSIAGGGDTVSAIEKFGVTDGISYISTGGGAFLDLSAIKHSPQ

SEQ ID NO: 129237 - protein, 155 aa, Unknown
  Bacterial polypetide isolated from the Sargasso Sea
MGKLKALDENLNLTNKRIILRVDLNVPMQGGKVTDKSRINKIIPIIKELTNKKAKIILISHLGRPKGKIDEKLSLQPIKPILENLLNSKVYFSNENYGSIVVEKSKKIKPGEVLLLENIRFNKEEEENGAIFAKELSKAGDIYVNEAFSCSHRAH

SEQ ID NO: 129238 - protein, 281 aa, Unknown
  Bacterial polypetide isolated from the Sargasso Sea
PKGKRVPELSLAPVAFRLAELLEQPVYMATDCVGEEVAEQVRNLEPGQILLLENLRYHREEEGNGEKFSHNLAALGEIYVNDAFGAAHRAHASTEGVTNHLAPSLSGLLMESEINYLQETLKQPDKPFVAILGGAKISGKIEVIDNLLDKVDTLIIGGGMSYTFFKSMGLEIGNSLLEADRLDVAKKVMEKCQDQQVDLLLPIDIVVADDLSESAQTRIVEREGIPVGWEGVDIGPETRKLYARKLASAGTVIWNGPLGVFEIPAFCTRYLCCRRSISFSH

SEQ ID NO: 129239 - protein, 313 aa, Unknown
  Bacterial polypetide isolated from the Sargasso Sea
PLNSKIQVTDRTRIEAAKPTIAYILSEGGSCILISHLGRPKGRDPKLSLENIYSTVSDTLGVQISFCKECIGEEAEAAASALKPGQVLMMENLRYHKQETEGDFNFSKQLSKLGTVYVNDAFGTAHRPHASTAIIAQFFENKKCFGKLLEKEVLAIDKIMKKGVAPILAILGGAKVSSKITIIESLLDKVNHLIIGGGMVYTFIKAIGGRVGDSICELDYCEYALHLLKKAKQKGVVIHLPLDVLAGDDFSNDANQKIFNIMEIDDGWEGMDVGPRTIKKFHDLILKCKTILWNGPMGVFEFSNFAKGTISIG

SEQ ID NO: 129240 - protein, 99 aa, Unknown
  Bacterial polypetide isolated from the Sargasso Sea
DSAKALADIIMNAKTILWNGPVGVFEFDQFAEGTKVIAEAIAASPAFSIAGGGDTLAAIDKFGIADKVSYISTGGGAFLEFVEGKVLPAVAILEQRAKA

SEQ ID NO: 129241 - protein, 237 aa, Unknown
  Bacterial polypetide isolated from the Sargasso Sea
MLKTLNTFDIKGKNILIRVDFNVPLSDGSIVDNFRIKAALPTIKSCIEGGAAIVLMSHLGRPNGKHDKDLSLMPIGEELASYLEMPIKFSHSCVSTDAIDTSISLKPGEIHLLENLRFHDGEIANDSKFSRDLSRHGQIYINDAFGTAHRSHASNLGILDYFKQSGIGWLIDKELKYLQRIFNKPKHPLTLILGGAKIKTKLGLIENFLNIADNIIIGGGMAFTFLKAMDKNIGGSM

SEQ ID NO: 129242 - protein, 255 aa, Unknown
  Bacterial polypetide isolated from the Sargasso Sea
MSSLRCEICLKHDGSASFLFLLWSHDINVLTLSKLPQAFFKDKRVIVRCDLNVPIRDGVITSEARIVASLPTIELVSKLANSVLVMSHLGRPKPGDQSRDFSLALVAKRLGELLGRDVPLLRSLDESVQERGIALLENVRLFPGETDNARELAEKLSSKGDIFVMDAFGSAHRQHASTFGVAELSDTACAGLLLEQELFAISEAMESPQVPMISIVGGSKTSTKLEVLNSLSHVSSRILVGGGILNTFLAASGFE

SEQ ID NO: 129243 - protein, 324 aa, Unknown
  Bacterial polypetide isolated from the Sargasso Sea
LKFLNKQKTKIIILSHVGRPKGKISRELSLKPICENLQDQLGLNVRLITENINEIEKKDFFDKFEEEILMLENIRFYPEEEKNDNNFAKRIANLGDLYVNDAFSCSHRSHTSIVKVSKFLPSFSGLQLDLEVDALTKITSEITKPVSCIIGGSKISTKIEIIKNLIPKFDNIIIVGGMANNFIQYFGHNIGKSIKEKNCDQIIQEIISLSEKEKCEITYPEDVLVSKDLNGSSKKKKVNEILSDEMILDIGPKTINKISSIINSSKTILWNGPAGYFENPNFANGSIEIAKTIINNNKLNKIFSVAGGGDTVSLLNSIKAVDSL

SEQ ID NO: 129244 - protein, 185 aa, Unknown
  Bacterial polypetide isolated from the Sargasso Sea
MSHLKMKDLDLNDKTILIRVDLNVPIKDGKVLNDDRVKAVLPTIRLAAKSAKKIILMSHLGRPIEGEPIDGQREASLLPVAKHLSSILGCDVPVIDNYLNAPELIEQNPAKTLLLENVRVNKGEKSNLDSLARKYAELCDLFVMDAFGTAHRAQASTHGVARYAPVACAGPLLAAELLALEKSLS

SEQ ID NO: 129245 - protein, 274 aa, Unknown
  Bacterial polypetide isolated from the Sargasso Sea
TETRGKNKNYSLFPIGETLASMLEIPIKFSQDCISQDAIDTSLSLKAGEIHLLENLRFYKEEQDNESEFSRRLSRHGKLFINDAFGTAHRKHASNFGVVDNFKYYGIGLLIEKELRYLKEMMNKPKRPLIVLLGGAKVSTKIELIKRYLHIADRIIIGGGMAFTFFKAMGYNIGKSLVESTMVKNARSIIDLARASGKELILPVDIICSESISSSPIINVVDIREIPDDFMGLDIGPKSIKLFNEIIDSASTVIWNGPMGVFENDDYSSGTRLI

SEQ ID NO: 129246 - protein, 228 aa, Unknown
  Bacterial polypetide isolated from the Sargasso Sea
GKLMEQELIALENILTKPQRPLVAIVGGSKVSTKIDLLNNLIHKVDTLIVGGGMANTFLLAQGFFIGASLAEHALTDSALNILNSAEKAGCRILLPTDVVVAKELNDNVESFVVPVNECPEDRMILDVGPQTVERIKESLLNTETLVWNGPLGAFEIGPFDRATTDLANFVSKLSNNNKLVSIAGGGDTLAALKNAEASNGFSYLSTAGGAFLEWMEGKKLPGITALQ

SEQ ID NO: 129247 - protein, 79 aa, Unknown
  Bacterial polypetide isolated from the Sargasso Sea
MTVLKMTDLDLAGKRVLIREDLNVPVKDGVVKSDARILASLPTIKLALEKGAAVLVCSHLGRPEEGVYSEEDSLAPVAA

SEQ ID NO: 129248 - protein, 162 aa, Unknown
  Bacterial polypetide isolated from the Sargasso Sea
KSICENDCEALIKKILENSNKYNCQIICPEDVVVAKNLENKGKDKNINEINDNEMILDIGPKTISLIEKIINDSNTVLWNGPAGYFENPYFQNGTKKILEIISQKTKKDKIFSVAGGGETVAAINKFKKLDSFTFVSTAGGAFLEYLEGKTLPGIKALNQNV

SEQ ID NO: 129249 - protein, 201 aa, Unknown
  Bacterial polypetide isolated from the Sargasso Sea
AKWEKTKHFSFNNILIEISKRLGREVDFINDCIGEIVEKKISQMKSGDILLLENLRFYKEEINGDEIFAKKLSRLGDYYINDAFGTCHREHASTYTIAKYFPKKKYAGKLLEKELNVIDEILEKGKAPILAILGGAKVSSKLKIINNLIEQVDKIIIAGGMAFTFIKAIGGEIGDSLYEPSLINEAKSILKKAKRFKTEVY

SEQ ID NO: 129250 - protein, 283 aa, Unknown
  Bacterial polypetide isolated from the Sargasso Sea
GERVESMSLRPAAVELSRLLGQPVVLAPDCIGEEVKNLVNGMGNGDVVLLENLRFHKAEAENTPSFNEALAENGDVYVNDAFGTAHRAHASTTGVASYIKDSAVGYLMRRELHFLGDAVSEPVSPFVAILGGAKVSDKIKVIEKLLDKVQTLIIGGGMACTFLKSQGFEIGASLLEENSLDLATNLTKEAEQKGVNFLLPVDAVIAERFDNNASTRIISVEEGVPEDWVILDVGPRSIEIFSHSILGSGTVLWNGPMGVFEMEKFSKGTYAIAVSLANATESG

SEQ ID NO: 129251 - protein, 265 aa, Unknown
  Bacterial polypetide isolated from the Sargasso Sea
VISDARIIASLPTIQMALDKGANVILLSHLGRPDPDNIDSSFSLEPVAERLKEILGIKVSFQSKWLEGIDHPSDGITLCENVRYHAGEKKNDESLSQKIAGLCDVYVMDAFGASHRKHSSTYGALQYAKERCIGPLLSNEVNSIKKTIDGPKSPVTAIIGGAKVSSKLGVIEKFSSFCDHVIVGGGIANTFLLASGKEVGASLAEPEMVDAAKNILQMDNVNVPLPVDVRVAKEFSGEAVATIKSIDDIEKDELILDIGPQTAEV

SEQ ID NO: 129252 - protein, 255 aa, Unknown
  Bacterial polypetide isolated from the Sargasso Sea
MFRTLKSFDIKGQTILIRLDLNVPIHDEVIQDDFRIKSCLPTINYCLEEGAAVVLMSHFGRPKGKYSKDFSLMPVGEHLASLLEIPIKFSSDCISQDAIDTSLSLKPGEVHLLENLRFYKEESDNDSFFSNKLSKHGRVYINDAFGTAHRAHASNHGVINNFKNYGIGFLFEKEMKYLREVINKPERPLVLILGGSKVSTKLELINKYLSQADKIIIGGGMVFTFFKAMGYNIGKSLVETKMIDQARNILGAAKL

SEQ ID NO: 129253 - protein, 176 aa, Unknown
  Bacterial polypetide isolated from the Sargasso Sea
MINLSSLDLNNKNLVIRVDMNVPIKNGDVLDSTRIRACLSTIEYALKNNAKVLLISHLGRPDEGNFEEDFSLKPVANELSKIINMDVEIIDTLESSKIFKSSSNIQVLENIRFFKGEKENSQELGKKLGSLGDIYVFDAFGTAHREQASTHAAIINAPIACSGLLLEKEENFLSKA

SEQ ID NO: 129254 - protein, 295 aa, Unknown
  Bacterial polypetide isolated from the Sargasso Sea
NPERPFCAIVGGSKVSSKIGVIESLLQKTDKIILGGGMIFTFYKALGKSVGASLVEDDKIDLAKELMAKAEAKGVKLLLPTDVVVADKFAADANTQVVSVDNIPEGWMGLDVGPDSVKSFQAELNECKSVIWNGPMGVFEMDAFAKGTFAIADTLANLDGITIIGGGDSVAAVEKAGLADKMSHISTGGGASLELLEGKVLPGVAALDEVRPRRRLRLELVFDSNSSRTRTRLVRSTDARLFLHDRRKHSFIRCDALASTLTFLINPQINLNLFHALIVARRSAWNPPPRGRRPR

SEQ ID NO: 129255 - protein, 271 aa, Unknown
  Bacterial polypetide isolated from the Sargasso Sea
MIPGVEIIENLRFDPGETDNSPEFVQYLVEGAGGTAFEGYVNDAFGVSHRSHASVVGPPGLVPSAAGRLLEKEVEVLGAMRSAPRRPFLAVLGGAKVSDKLGVIEALLGVVDRLVIGGGMCFTFLKALGNNVGDSLCEDDQVDACKRIIDSGAPILLPTDITALSPEGEIRQMGQSMPEGWKGLDIGPGSAAEFGDAIHEARTVFWNGPVGLFEDPRFAAGTRAIGQALADSRAFTVVGGGDSAAAVAEFGLSPYMDHISTGGGASLEYWN

SEQ ID NO: 129256 - protein, 244 aa, Unknown
  Bacterial polypetide isolated from the Sargasso Sea
MLKIKQLENNQNIEGKRVLLRIDFNVPLKDGSVTEISRIIKILPTIKWLINKKAKIIIISHLGRPKGKVTPKLTLEPISKKLSTYLSQNVFFLDACIGKNVIEKSKEISNGSVLLLENIRFHKEEEQNSENFAKELSKNGDIYINEAFSCSHRAHASIVGITKHIDSYSGPILSQEVNFIKMLTSGAKKPVTCIIGGSKISTKIGVLSNLIKKMENIVIVGAMANNFIKHKGYNIGKSLLKKIK

SEQ ID NO: 129257 - protein, 59 aa, Unknown
  Bacterial polypetide isolated from the Sargasso Sea
ADLSAFSEVCTIIGGGDSVAAVEKAGLAEKMSHISTGGGASLELLEGKTLPGVAALNEA

SEQ ID NO: 129258 - protein, 165 aa, Unknown
  Bacterial polypetide isolated from the Sargasso Sea
MKFHSLDHFDFRGKTVLVRLDLNCPLKNGKVFDDTRIRASLPVLEHLLSQTSRVIVMSHLGRPKEGDTKTLSLAPVGEVLASHLKREVILIDSYKEDGIKQILNELGQGLFLLENLRFHPEEKANEHEFAAKLAEGMDFYVNDAFGACHRLHTSVVELAKQFPFD

SEQ ID NO: 129259 - protein, 189 aa, Unknown
  Bacterial polypetide isolated from the Sargasso Sea
NLIPKFDNIIIVGGMANNILKHQGHEIGKSIQEDNCNSIVNEIFQTLKNNSCSLIFPEDVIVANGIERPPKVKELDQISQDDLILDIGPKTIETIKKIIEKSKTILWNGPAGYFENPDFANGSLEIGKKIAEKSNQKEIFSVAGGGDTVALLNKIGILNSFNFVSTAGGAFLEYLEGKELPGIKALKND

SEQ ID NO: 129260 - protein, 226 aa, Unknown
  Bacterial polypetide isolated from the Sargasso Sea
IACSGLLLEKEENFLSQALKKYERPYVAIIGGAKISTKLELIKHINDVADHIIVGGGIANTFIKSSGLNIGNSLTEESMLEIAKSILDEGKIILPNRVLTSKTLEGEDIKETTISNIGNDEMILDLYLEQETKTLISNAKTILWNGPMGVFENSLFENGTKELSREIAKSNAFSLAGGGETLSAINKYIKSDDVSYCSTGGGAFLEFMEGKVLPSIKALNSKKIGS

SEQ ID NO: 129261 - protein, 269 aa, Unknown
  Bacterial polypetide isolated from the Sargasso Sea
KRRTPTSWAQQYAALCDVFVMDAFGTAHRAQGSTHGVAKFAKVACAGPLLAAELDALAKALDKPARPMLAIVAGSKVSTKLDVLNALSEKCDQLIVGGGIANTFLAAAGYPVGKSLYEADLVDTAKAIAAKVSVPLPVDVVVAKEFAETATATIKAVADVAEDDMILDIGPQTAALFGEMLKASGTILWNGPVGVFEFDQFGEGTKALALAIAAGDGFSIAGGGDTLAAIDKYGVADQISYISTGGGAFLEFVEGKVLPAVEILEARAQ

SEQ ID NO: 129262 - protein, 221 aa, Unknown
  Bacterial polypetide isolated from the Sargasso Sea
ALHAALAAPRRPIGAVVVGAKVSSKLALLKNLVTKVDGLILGGGMANTFLLAQGIQIGASLAEPNMVSMARTIMAQADANGCRMILPTDHVVATAFAANAPHRVTDGGDIAHHEMILDAGPQSVATVMAFLSACQTVVWNGPMGAFELKPFDAATNIIAGAVARLTQDQQVMSVAGGGDTMAALANAGVNDHFSYVSTAGGAFLEWLEGKTLPGVDALQLR

SEQ ID NO: 129263 - protein, 162 aa, Unknown
  Bacterial polypetide isolated from the Sargasso Sea
NVGKSLIEKDTEQIVKKIFDKAENSNCQITTPIDCAVSTSLNGNPFFKNYGSVEENDIILDIGPKTIKKIHDIIDLSKTILWNGPAGYFENKNFSLGTISIAKKISNNTEKNSLISIVGGGDTLAAIKNNDLKLKYTHLSTAGGAFLEYIEGKNLPGIEVLK

SEQ ID NO: 129264 - protein, 161 aa, Unknown
  Bacterial polypetide isolated from the Sargasso Sea
VADSLVDDSFVDSALKCISLAQENNVNLLLPDEVVVTVGQGAENLIRTVSIDQIPAGWRVLDVGPSTIDKFMTGLSDAKTVIWNGPMGMFEQEQFAKGSLELANMIGDLHTPTSVIGGGETAAIANLAKIKNKVTHISTGGGASLMLLKGDPLPGIESLMD

SEQ ID NO: 129265 - protein, 108 aa, Unknown
  Bacterial polypetide isolated from the Sargasso Sea
WMGLDIGPDSIKVFQNALAECKTIIWNGPMGVFEFDKFAEGTNAIATTLADLSAFSEVCTIIGGGDSVAAVEKAGLAEKMSHISTGGGASLELLEGKTLPGVAALNDA

SEQ ID NO: 129266 - protein, 206 aa, Unknown; identical to SEQ ID NO: 129231
  Bacterial polypetide isolated from the Sargasso Sea

SEQ ID NO: 129267 - protein, 210 aa, Unknown
  Bacterial polypetide isolated from the Sargasso Sea
KSPLTLVLGGAKIDTKLELIDQFLDKADNIIIGGGMAFTFLKAKGRSVGGSLVDDSMIATAKNIINRAMSKDVKIILPSDAVCASSLKDGIEKDLHLIDSIPENVMGLDIGPDSIKRFNSILGNSETILWNGPMGVFEAKGFELGTREMAIHLVSCVTSGSKVIVGGGDTAAALEKFGLMNEMTHVSTGGGASLELLSGNPLPAITALEK

SEQ ID NO: 129268 - protein, 169 aa, Unknown
  Bacterial polypetide isolated from the Sargasso Sea
KANGGSIGKSLVEDDFLNTAISIQELAKNKNVNLYLPVDTTTADSFDNNAKKSIVDIEKIPVDLMGLDIGEKSEKLFSDVIENSKLILWNGPMGVFEFSNFEKGTKSAAYAIVKATQKGAFSLIGGGDSVAAINKFNLSKKVSYVSTGGGAMLEYLEGKTLPGIHAILN

SEQ ID NO: 129269 - protein, 258 aa, Unknown
  Bacterial polypetide isolated from the Sargasso Sea
KLADLGDIYVFDAFGTAHREQASTHSAIKSASKACAGLLLERETEFLSKALNNYDHPYIAVIGGAKVSTKLELIKHINSVADQIIVGGGIANTFLKASGLKIGKSLVEDSMLDIAKDLLVQGKIVLPNVIITSKTFEGEDIRETSAEDVKDEEMILDLHLSNEILTSLNQAKTILWNGPMGVFENKLFSKGTKDLSIAIANSSAFSIAGGGETLSAINKYIKSDDVSYCSTGGGAFLEFMEGKNLSSIDVLNSKEIGS

SEQ ID NO: 129270 - protein, 301 aa, Unknown
  Bacterial polypetide isolated from the Sargasso Sea
MSKRSLSSLGAEDLCGKRVLVRVDFNVPLGDEGQITDDTRIRAALPTINDLLDKSARVILSAHFGRPKGEVNETMRLTAVAQRLSELLGKTVVKTESCIGAEAKSKVDAMSNGDVVLLENVRFISGEEKNDTEFAKELASLAEVYVNDAFGAAHRAHASTEGVTKFLSPCVAGYLMEKELKYLQGAIEQPKSPLAAIVGGSKVSSKIGVLESLIDKCDKIIVGGGMIFTFYKARGLSVGNSLVEEDKLELASALEKKAQEKGVEFLLPTDVVLADNFSPDANSKLSKVDAISEGWMGLDIV

SEQ ID NO: 129271 - protein, 208 aa, Unknown
  Bacterial polypetide isolated from the Sargasso Sea
MTVLKMTDLDLQGKRVLIREDLNVPVKDGAVKSDARILASLPTIKLALEKGAAVLVCSHLGRPEEGVYSEEDSLKPVADYLSKALGREVPLVKDYLEGVEVQPGELVLLENVRFNKGEKKNTDELAQKYAALCDVFVMDAFGTAHRAQGSTHGVAKFAKVACAGPLLAAELDALGKALKTPAKPMVAIVAGSKVSTKLDVLTSLGDIC

SEQ ID NO: 129272 - protein, 276 aa, Unknown
  Bacterial polypetide isolated from the Sargasso Sea
MSKLSLSSLDKTHLEGKKVLVRVDFNVPLNEDGQITDDTRIRAAIPTIEYLINHSSKVILAAHFGRPKGQVNEKMRLTPVATRLSELLGQNVALTNSCIGDEAVAQSNSLSNGDVLLLENVRFFGEEEKNDLEFAKKLASHADMYVNDAFGAAHRAHASTQGVTNYLSPSVAGFLLEKELKYLQGAIDAPKRPLAAIVGGSKVSSKIGVLDSLLDKCDKIMIGGGMIFTFYKARGLDVGKSLVEEDKLELARDLEAKAKAKGVELLLPTDVVLANE

SEQ ID NO: 129273 - protein, 165 aa, Unknown
  Bacterial polypetide isolated from the Sargasso Sea
MDTIFGKSIKEKNCDLIIEEIISLSNKEKCEIIYPEDVLVSKDLNGSPNKKELNQILNDEMILDIGPKTIDKISNVINISKTILWNGPAGYFENPFFANGSIQIAKKIIENNKSNKFFSVVGGGDTVSLLNNINVVDRFNFVSTAGGAFLEFLEGKKLPGITALN

SEQ ID NO: 129274 - protein, 268 aa, Unknown
  Bacterial polypetide isolated from the Sargasso Sea
NKLRKKVKLISENIKEIKNKNFFSNYNENIFILENIRFYSEEEQNDNKFAEHLSNLGDIYVNDAFSCSHRAHASINEIPKFLPSFSGLQLDLEVNALNKITSEITRPITCIIGGSKISTKINIIKNLIPKFDNIIFVGGMANNFIEYFGNSVGKSIKEKDCDKIIEEIISHSKKEKCNIICPEDVIVSKYLNGSPQKKELNEVLPDEMILDIGPKTINKITKIIDNSKTILWNGPAGYFENPNFAHGSTQIAKKIIENNKANKIFSVA

SEQ ID NO: 129275 - protein, 246 aa, Unknown
  Bacterial polypetide isolated from the Sargasso Sea
MFHRAHSSICEIPKFLPSFSGLQLDLEVNALNKITSEITRPITCIIGGSKISTKINVIKNLIPKFDNIIIVGGMANNFIKYFGNSIGKSIIEKNCDKIVEEIISLSKKKKCKVIYPEDVVVSKHLNGSPQKKEIGKILSDEMILDIGPKTIDIISKIIDNSKTILWNGPAGYFENPNFSYGSIQIAKKIIENNKADKIFSVVGGGDTVSLINNLKAVNEFNFVSTAGGAFLEYLEGKNLPGITALN

SEQ ID NO: 129276 - protein, 284 aa, Unknown
  Bacterial polypetide isolated from the Sargasso Sea
SELLNKEIVFVTDYTEEPADQLLRQLGKNQIMLLENLRFHEAELNNNREFAENLSKGIDIYVNDAFGAAHRKHASIVALAKLLPTEKRSAGFLIQKEIKALDQLTKGTPPYTVVIGGAKVSDKIGVILHLLKHCNHLIIGGAMAYTFLKYQGIQVGSSKVEENADELIKTIYRNAASRKVSIHLPIDHLCSNEFNENGSVIETESQEIPNNLIGMDIGPKTITQYCSILRESQTIFWNGPMGVFEWAPFANGTTKIAQEISRCRGYSVVGGGDSVASVNQAGLA

SEQ ID NO: 129277 - protein, 263 aa, Unknown
  Bacterial polypetide isolated from the Sargasso Sea
MRTLKDIDLRNKRAVLRLDLNVPIQDNKISDDSRIIASLPTIHRVLKDAKNLLIISHLGRPEEGVIQKEFSMKPIADYLERVIDEKITIIDYLDSTGLFRASKVQILENIRFFKGEKENCEQLGKSLGELGDVYIFDAFGTAHRKQASTYSAIKHASQSCAGLLMEKEITMLSEILNEINHPFTAIIGGAKISTKINLISNLANKASCIVVGGGIANTFLKAAGFEIGESLFEKDFIQVAEKLLETGKIHLPNQVYVGSHINT

SEQ ID NO: 129278 - protein, 185 aa, Unknown
  Bacterial polypetide isolated from the Sargasso Sea
MRLLKDQNLSNKNVVVRLDLNVPIQDKQIIDSTRIISSVPTIKYLVDKNCKVLLTSHLGRPEEGKFDQDFSMSPVAKKLSEILNHEIDLIDSLDSSDIFNTTQIQLLENLRFLIGEKDNNEKLGNQLANKGDVYIFDAFGTAHRKQASTHSAIQQAKLSCAGLLLEKEINSLNKALTFMKTHSLL

SEQ ID NO: 129279 - protein, 153 aa, Unknown
  Bacterial polypetide isolated from the Sargasso Sea
MSELKALNKNLNLNNKKIIIRVDLNVPMLEGKVTDKSRIKKVIPIIKEFKNKNAKIILISHLGRPKGKIDKKLSLKSIAPILEDLLSSKVYFSDLSYGPEVIEKSNKINPGEVLLLENIRFNKEEEKNEISFAKELAKIGDIYINEAFSCSHR

SEQ ID NO: 129280 - protein, 306 aa, Unknown
  Bacterial polypetide isolated from the Sargasso Sea
RLDLNVPLSKSNIEDNTRIKIIEPFINQLIEKKAKIILVSHLGRPKGKIVKEMSLNPIFNYLQKYLNSKVYFYKGKIDQNAINASNNLKPGEVLLIENIRFFKEEEDDNENFAKSLSKLGDFYINEAFSCSHRKQASLHKITNYIDSYGGPLLDKETQSINLIIKNKKEPVTSIIGGSKVSTKINVLLNLSRNTDNLIIVGAMANNFLKFNKLNVGSSLIEKDTESVIKNIYSSANKNKCNIIVPIDCVVSDNLNGQPKPKSLSEINPNDIILDIGKKTIELIHKTIENSKTVFWNGPAGYLKIKI

SEQ ID NO: 129281 - protein, 157 aa, Unknown
  Bacterial polypetide isolated from the Sargasso Sea
LTEKDTKSIIDRIYNQAKKNNCKIVIPEDCGVAKNFEGTSTFKDQKYIDENEIILDIGPKTIKKIEKIIDDSKTVLWNGPAGYFENDNFSNGTNAIANKISQNTINKSLISVIGGGDTLAAINKIKKKLIFSHLSTAGGAFLEFLEGKDLPGLSILK

SEQ ID NO: 129282 - protein, 291 aa, Unknown
  Bacterial polypetide isolated from the Sargasso Sea
NDLTGKGAKVILSAHFGRPKGEVKEDMRLTPVAARLSELLGKPVAKTDSCIGADAEAKVGAMADGDVVLLENVRFFSEEEKNDAGFAEKLAALAEVYVNDAFGAAHRAHASTEGVTKYLTPSVAGYLMEKELQYLQGAVDDPKRPLAAIVGGSKVSSKIGVLEALIDKCDKVLIGGGMIFTFYKARGLSVGKSLVEEDKLELAKELEAKAKAKGVQLLLPTDVVLADNFAPDANSQVASVEAIPDGWMGLDIGPDSIKVFQEALADCRTVIWNGPMGVFEFDKFAAGTNGI

SEQ ID NO: 129283 - protein, 297 aa, Unknown
  Bacterial polypetide isolated from the Sargasso Sea
LKNGVITDETRIQASLPTLKLALEAGSDVLVMSHLGRPKEGHFDSTLSLKPVAELLSQMLQMPVHLVNNWLAPSAKKQPQITLFENVRFLEGETSNDPALAQKMATLCDIYVNDAFGSAHRAHASTHGVAGLAPLAAAGPLLWQEVNAMHQVLKNPRRPLVAVVGGSKVSTKLKVIEFLAKKVDYLLLGGGIANTLLLAAGQSVGSSLCEPELIDTAQRLLSSNANTPLPIDVRTAENFSENATGIVKMSGEINESDLILDLGPRSLDAIENIIMRAGTILWNGPVGVFEFPEFAYG

SEQ ID NO: 129284 - protein, 156 aa, Unknown
  Bacterial polypetide isolated from the Sargasso Sea
MRLLKDQNLSNKNVVVRLDLNVPIQEKQIIDSTRIISSIPTIKYLVDKNCKVLLTSHLGRPEEGKFDQDFSMSPVAKKLSEILNHEIDLIDSLDSSDIFNTTQIQLLENLRFLIGEKDNNEKLGNQLANKGDVYIFDAFGTAHRKQASTHSAINKQ

SEQ ID NO: 129285 - protein, 253 aa, Unknown
  Bacterial polypetide isolated from the Sargasso Sea
GTCHREHASTAIIAKYFPNDKYVGKLLQKELEAISQIAEHGEKPVLAILGGAKVSSKLNILYNLIKKVDKIIIGGGMAYTFIAAQGGKIGESLIEEDLIENAKEILEIANSLNKEIILPDDIKASRDFDQNDLIQTFDSNKIENGWMGLDIGAKTIEKFNQAILSSKTIFWNGPLGVFEKEAFTEGTKSICNSLKEAKTLGVNVIVGGGDSIAALKKLGKEDWVSYISTGGGALLESLEGKTLPGVKALLNEN

SEQ ID NO: 129286 - protein, 170 aa, Unknown
  Bacterial polypetide isolated from the Sargasso Sea
LKFQGINIGASVVEKDSYKIVKNIKLIAKKNKCNILIPVDCNVSQSLNGKSTYKDFKDLDSKDIILDIGKNTIAMISKTIDDSKTIFWNGPAGYYENKNFSIGSLAIAKKIKENTRNKSLISIIGGGDTVAAIKNTRLEKAFTHLSTAGGAFLESLEGKELPGIKALRRD

SEQ ID NO: 129287 - protein, 226 aa, Unknown
  Bacterial polypetide isolated from the Sargasso Sea
AAGPLMAAELDALGKALANPERPAVAIVGGSKVSTKLDVLTELANEVDQIVVGGGIANTFLAAAGFPAGKSLMEADLIDTAKALMSKVDIPLPVDVVVATEFSADATATVKRVEDVADDDMILDVGPETQASYHGIMAIAKTILWNGPVGVFEFPQFEGGTRALSMAIAASNGFSLAGGGDTLAAIGQFRIADQISYISTGGGAFLEFVEGKELPAVQMLKSRNDS

SEQ ID NO: 129288 - protein, 135 aa, Unknown
  Bacterial polypetide isolated from the Sargasso Sea
TEKILLPNEVLVSKNIDSNESRICKIDSVQDDEMILDQILSSAAAEKISIAKKIIWNGPVGVFEHKPFSKGTRDLANAIASSQAYSLAGGGETLLAIKMFIDKSNISYCSTGGGAFLEFIEGKELPSLSALGFKF

SEQ ID NO: 129289 - protein, 167 aa, Unknown
  Bacterial polypetide isolated from the Sargasso Sea
NILEISIGKSIKEKKCDKIIEEIISLSKKEECKIIYPEDVIVSKDLNGSPQMKELKEILSDDMILDIGPKTIGKIIKIIDNSKTILWNGPAGYFENPNFAYGSIQIAKKIIENNKANKIFSVAGGGDTVSLLNNLNAVNEFNFVSTAGGAFLEYLEGKNLPGITALN

SEQ ID NO: 129290 - protein, 255 aa, Unknown
  Bacterial polypetide isolated from the Sargasso Sea
TDTTRIERVAPTITELSGKGAKVILMAHFGRPKGQVVPEMSLKPIVHAVEEVLDHAVAFADDCVGEPAEKAIAAMRAGDILLLENTRFHKGEEKNDPDFVAALAANGDVYVNDAFSAAHRAHASTEGLGHHMPAYAGRTMQAELEALESGLGNPKHPVVAIVGGAKVSTKIDLLENLIDKVDALVIGGGMANTFVAAKGIDVGKSLCEHDLADTARTIMAKAEKTGCAIVLPVDGVVAGEFKANAANETVAIDAI

SEQ ID NO: 129291 - protein, 259 aa, Unknown
  Bacterial polypetide isolated from the Sargasso Sea
MRTIDQFNFKNKKAIIRVDFNVPIDNNKVTDTSRIKASKQTIDKVCNDGGSCVLVSHLGRPSGFKKEFSMTNIINEVENVLERNVVLSKDVIGPDAKKKSLDLKPNQVLLLENVRFHDEEKKGDIDFAKKLSLLADCYINDAFGTAHRSHASTTTIATFFNDKFFGKCLEREVSSIKKVLNSGEKPVLAILGGAKISSKIPILKNIIKIADHIIVGGGMSFTFIKAMGGQIGLSIHEDSMLDTAKEIIKKADKNNVKFT

SEQ ID NO: 129292 - protein, 242 aa, Unknown
  Bacterial polypetide isolated from the Sargasso Sea
MPQKTCFNVGNSKFLPSFPGMLLEKEVLNLKKLITNANYSSSIAVFGGSKVSTKIKVIEYYLKKFGKVIIGGAMANTFLFSKNINIGASIYEKSMQKIAKSLLDYYGDKISLPEDVVTIDKSKKIQLRLFDDIKKDEKIFDIGPKTRMKYYNFISDCSCLLWNGPLGFYEQKPFDEGTNYVIKAVKNNNNKNFFSVAGGGDTISMLNHAKASDYFSFISTGGGAFLEFIQGSGLPGLDSLNN

SEQ ID NO: 129293 - protein, 153 aa, Unknown
  Bacterial polypetide isolated from the Sargasso Sea
NAKEILEIANSLNKEIILPDDIKASTDFDQNDLIKTFDSNKIEKGWMGLDIGTKTIEKFNQAILSSKTIFWNGPVGVFEKEAFLEGTRSICNSLKEAKTLGVNVIVGGGDSIAALKKLGKEDWVSYISTGGGALLESLEGKTLPGVKALLNEN

SEQ ID NO: 129294 - protein, 232 aa, Unknown
  Bacterial polypetide isolated from the Sargasso Sea
FLPSYSGLQLDTEVGSLKKITSEIKRPITCIIGGSKISTKINLIKNLMPKFDNIIIVGAMANNIIKYMGYNIGKSLQEDKSELIIEEIFSLSKKNKCKIVYPEDIIVAKDLNGNPKIKELNEVLPDEMILDIGPKTIKIINNIIDESNTILWNGPAGYFENPSFANGSIKIAEKITKNNQDNKIYSVAGGGDTVSLLNNLNKVDNFNFVSTAGGAFLEYLEGKELPGIKALN

SEQ ID NO: 129295 - protein, 209 aa, Unknown
  Bacterial polypetide isolated from the Sargasso Sea
ALNGVVQNAKKPVVAVLGGAKVSSKLTLLERFSEISDKIFVGGGIANTFIAASGHGIGKSLYEETMLDAATKLLSKTDIPIPKDVMVAKSFDSSATAILRLIDEVHQDEMILDIGPVTAREWSSTIEESGTIIWNGPMGVFEFDQFGEGTREIAESIARSSAYSLAGGGDTIAAIDKYEVSDNVSYISTGGGAFMEYLEGKKLPGVDIL

SEQ ID NO: 129296 - protein, 71 aa, Unknown
  Bacterial polypetide isolated from the Sargasso Sea
DEYSTGTREITKVISMTQAYSSVGGGDSVSAINKFSDRKKFNHISTGGGASLEFLEGKKLPGVNIYKPLII

SEQ ID NO: 129297 - protein, 186 aa, Unknown
  Bacterial polypetide isolated from the Sargasso Sea
MAKRSLASLNAGDLKGKRVLVRVDFNVPLDDSGAITDDTRIRAALPTIQDLISKGAKVILSAHFGRPKGEVKESMRLTPVAARLSDLLSKTVTKTDSCIGADAESKVSAMNDGEVVLLENVRFFAEEEKNEPGFAEKLASLADVYVNDAFGAAHRAHASTEGVTKYLKPAVAGFLMEKELQYLQGA

SEQ ID NO: 129298 - protein, 285 aa, Unknown
  Bacterial polypetide isolated from the Sargasso Sea
ASKRVLIREDLNVPIKAGLVASDARIRAALPTIRIGVEAGAKVMLMSHLGRPTEGEFESVYSLAPVAEHLSTLLNQPVRLVPDWLDVVDIEAGEVVLCENVRFNVGEKADDDALAQKMAALCDVFVMDAFGTAHRAQASTHAVAHYAPLACAGPLLAAELHALGKALENPTRPMAAIVGGAKVSTKLTVLESLSKVVDQLIPGGGIANTFIAAAGYPVGNSLIETDLIDQAKALIDQAAAKGGEIPVPTDVVVGKAFSADTSAIIKPVTDVAEDDMIFDMDRKRP

SEQ ID NO: 129299 - protein, 161 aa, Unknown
  Bacterial polypetide isolated from the Sargasso Sea
MAKQSVADLDPAGKTVLVRVDFNVPQDSDGTITDDRRIRMAVPTIRSILDRGGKAVLMSHLGRPKGEVNPKLSLAPVAKRLGELLGKPVVLAADTGGKDSTEKAHALSTGDVLVLENVRFNSGEKKGDDASYVAGIADLADAYVNDAFGNCHRTEASMYAV

SEQ ID NO: 129300 - protein, 224 aa, Unknown
  Bacterial polypetide isolated from the Sargasso Sea
MKKKQFIEKLNLEGQRVLTRVDYNVPLNDKQKITDNGRIKATLPTVNYIIENGGRAVLMSHLGRPGGERIDSLSLKPAAVELSGLLGQNVKLAPDCIGEEVNNLVDTMQNGDVVLLENLRFHKAETNNDPSFCEALADNGDVYVNDAFGTAHRAHASTTGVVSFITDSAVGYLMRKELQFLGEAVAEPLRPFVAILGGAKVSDKIKVIEKLLDKVQTLIIGGGM

SEQ ID NO: 129301 - protein, 128 aa, Unknown
  Bacterial polypetide isolated from the Sargasso Sea
CSKSIEDESGKNIYDITKIPDDQMGLDIGPKTIESFSKHITESDTIIWNGPMGVFESSSYENGTKSLANHIATCTQNGLISIMGGGDTASALRKFNLEDRMSHLSTGGGASIELLSGKNLPAIFALEV

SEQ ID NO: 129302 - protein, 57 aa, Unknown
  Bacterial polypetide isolated from the Sargasso Sea
MLQVIVGGGSTAEAINKLGLVNAVTHISTGGGASLEFLEGKDLIGVSKIPEIDVVDL

SEQ ID NO: 129303 - protein, 209 aa, Unknown
  Bacterial polypetide isolated from the Sargasso Sea
MAAIVGGSKVSSKIGVLDSLLDKCDKIMIGGGMIFTFYKARGLDVGKSLVEEDKLELAKDLEAKAKAKGVELLLPTDVVLADEFSPDANSKISQIDAISGNWMGLDIGPDSIKVFQNALAECKTIIWNGPMGVFEFDKFADGTNAIATTLADLSAFSEVCTIIGGGDSVAAVEKAGLAEKMSHISTGGGASLELLEGKTLPGVAALNDA

SEQ ID NO: 129304 - protein, 262 aa, Unknown
  Bacterial polypetide isolated from the Sargasso Sea
LLLENLRFHSEEKAGDKTFAEQLSKLADIYVNDAFGTAHRAHASTAVIANFFHDNKCFGYVMANEITNLEKVVNEGERPITAIMGGAKVSSKITIINKLMDKVDKIIIGGGMSYTFAKALGGNVGNSLVEDDKMELALSSISQAKEKGVELLIPIDSLNADAFSNDANTNISDIDKVEDGWMGLDISEKTKAIYRQAILSSKTILWNGPMGVFEMDKFSSGTKFVANAITDATSRGSFSLVGGGDSVAAVKKFNLQDKVSYV

SEQ ID NO: 129305 - protein, 71 aa, Unknown
  Bacterial polypetide isolated from the Sargasso Sea
FATGTNAIATTLAELSGKGCCTIIGGGDSVAAVEKAGLAAKMSHISTGGGASLELLEGKVLPGVAALNDAA

SEQ ID NO: 129306 - protein, 292 aa, Unknown
  Bacterial polypetide isolated from the Sargasso Sea
EQMGASLFPIAKHLSTLLGCGVPLIDNYLNAPELIEQNPAQILLLENVRINKGEKSNLDSLAQRYAELCDLFVMDAFGTAHRAQASTHGVARYAPVACAGPLLVAELHALEKSLSNPSRPLMAIVGGSKVSTKLHVLESLANKVDKLILGGGIANTFLAACGANVGSSLYEKDFLESARKIMELTFVPLPSDVVTAKSFNKEAMAEEKVISDIEDDDIIMDVGPETRSHFGGLVREMNTLIWNGPLGVFEFPQFAKGTESIALAVAKNGGFSVAGEGETVTAIDHFSVRDKI

SEQ ID NO: 129307 - protein, 207 aa, Unknown
  Bacterial polypetide isolated from the Sargasso Sea
MRTIDQFNFKNKKAIIRVDFNVPIDNSKVTDTSRIKAAKQTIDKVCNDGGSCILVSHLGRPIGFQKEFSMTNIINEVENVLERNVVLSKDVIGPDAKKKSLDLKPSQVLLLENVRFHDEEKKGDIDFAKELSLLADCYINDAFGTAHRSHSSTTTISTFFNDKFFGKCLEREVNSIKKVLNSGEKPILAILGGAKISSKIPILKNII

SEQ ID NO: 129308 - protein, 202 aa, Unknown
  Bacterial polypetide isolated from the Sargasso Sea
IIGGSKISSKINVIKNLIFKFDNIIIVGAMANNIIEFMGNNIGKSLKEDNSETIIKEIFSISNQENCNLLYPEDVVVAKSFQDKPNTKDLNFISSDEMILDIGPKTIKKIKKIIDESNTILWNGPAGYFENPNFANGSIEIAEKIIENNKENKLYSVAGGGDTVSLLNSLNALNNFNFVSTAGGAFLEYLEGKELPGISGLN

SEQ ID NO: 129309 - protein, 168 aa, Unknown
  Bacterial polypetide isolated from the Sargasso Sea
QWGKIFGGSLLEESMVPVALDLINKARMKNVNLILPCDVICAESFESKSVKGCFAIDSIPKNFMGLDIGDNTIELFSSVISSSSIIVWNGPMGVFEKTNFSKGTKKLGKVLSDVVSEQVKVVVGGGDTAAALELFGLDSNMTHISTGGGASLELLSGNSLPAIESLEN

SEQ ID NO: 129310 - protein, 401 aa, Unknown
  Bacterial polypetide isolated from the Sargasso Sea
MAKRSLASLQAGDLSGKRVLVRVDFNVPLNDAGAITDDTRIRAALPTINDLISKGAKVILSAHFGRPKGQVNDAMRLTPVAARLSELLGKPVTKTDSCIGPDAEAKVGAMANGDVVLLENVRFFAEEEKNEAGFAEKLAGLADVYVNDAFGAAHRAHASTEGVTKFLKPSVAGFLMEKELQYLQGAVDEPKRPLAAIVGGSKVSSKIGVLEALIDKCDKVLIGGGMIFTFYKARGLSVGKSLVEEDKLELAKELEAKAKAKGVQLLLPTDVMLADNFAPDANSQIADINAIPDGWMGLDIGPDSIKVFQDALADCQTVIWNGPMGVFEFDKFAAGTNAIATTLADLSGKGCCTIIGGGDSVAAVEKAGLAEKMSHISTGGGASLELLEGKVLPGVAALDAA

SEQ ID NO: 129311 - protein, 373 aa, Unknown
  Bacterial polypetide isolated from the Sargasso Sea
MRELKDVVLVGKHVGLRVDLNVPIEDGAVMNDERLSATLPTILEILKSTKNLTIISHLGRPKEGEYSEELSLKPIVHWFEKRLNLEIPLVKSLDELPNGISFLENIRMFPGESRNDDLLSELLSKKFDIYIMDAFATAHREASSTYGAIVKSKDSVPGLLFSREINALSNILDDSKKLLSVVGGSKVSTKLEVITNLLSKSDKVLVGGGIANTFLKAKGFDIGNSLVEDDMISSAKKMLGTGKIILPERVCISKSTQSDDIDFVPIESVPEDKMILDIELNIKELSKKDYDAILWNGPLGIFEIKNFEKGTRDLVKYLTQSGSRVVAGGGETIFAISKYSDKKHFHYISTAGGAFLEFISGKKLPSVEALELK

SEQ ID NO: 129312 - protein, 388 aa, Unknown
  Bacterial polypetide isolated from the Sargasso Sea
MKSLKNLNFEKIRNVGIRVDFNVPTDKNFRITDKTRLDRSKETIDFIRNKQCNIFLISHFGRPKENFDEKYSFSKLIDQFEDILELKLNFISYDSFLNSGLNEIDVDKPTISLLENIRFFEGEIKNDLKFSKSITDKLDLYVNEAFSASHRFHSSVNQMAKNILSAPGFNFEREILAINNIKNSSKKKLAIIGGSKVSTKIKTLLSLTSSCSDIFIGGAMANNFFKYNNINVSNSLIEEGTESMIEMIYNSAKSTNCKIHLPSDVILDSNENKLIDELPTSSDFKILDISVSSHAVLEKLIGNSDIVLWNGPMGMIEDNKFSKGSINLAHLLAKSQADVVIGGGDTILAINMAEEKFENFYFVSTAGGAFLEALENKDLPGIQALMAD

SEQ ID NO: 129313 - protein, 399 aa, Unknown
  Bacterial polypetide isolated from the Sargasso Sea
MAKQSVADLDPTGKTVLVRVDFNVPQDSDGTITDDRRIRMAVPTIRSIIDRGGKAILMSHLGRPKGEVNPKLSLAPVAKRLGELLGKPVVLAADTGGKDSTEKAQALSTGDVLVLENVRFNPGEKKGDDASYVAGLADLADAYVNDAFGTCHRTEASMYAVPKTMKESGKPAVVGFLVEKEIQYLSDAVGQPKRPFVAILGGKKVSDKIAVITNLLKICDHVLIGGAMAYTFSLAQGGKTGDSLVEPDKLELAKQLIHDGGDKLVLPVDTQCADDFSPDANKKIVKAGEIPDGFEGLDIGPDTATRYVEIIRGAGTVVWNGPMGVFEMPPFDAGTKAVADAVASATASGAITIIGGGDSAAAVEQLGYAEKVSHVSTGGGASLEMLEGKAFKTVDILDE

SEQ ID NO: 129314 - protein, 403 aa, Unknown
  Bacterial polypetide isolated from the Sargasso Sea
MSILVKIADLDLSNKIVLVREDYNVPLENGEISDNTRITATLPTLKQIQEAGAKIIIVSHLGRPEEGKYDEKFSLAPVAKALSKNLEMEVPLIKDWVSGIDMSDKEIVLCENVRFEIGEISNNDDLSRKMAQLCQVYVNDAFATSHRAQSSTHGVAKYAAVSAAGPLLIKELKALTQALRDPEKPIIAVIGGAKVSTKLTVLEVLYKKIDKLILGGGIANTFLKAAGYEIGKSLFEKDLVKTAEKIIKEAEKNNCDIPLPIDVVTGESFDNNTIAKIKSLDEIQKNDMIMDVGPKTTKKLNEIITEAKTIVWNGPLGVFEFEQFAQGTKNLAEAIATSNAYSIAGGGDTIAAVSKFKVEKNISYISTGGGAFLEFLEGKKLPAIDILEEAARAWIAMEKGREL

SEQ ID NO: 129315 - protein, 365 aa, Unknown
  Bacterial polypetide isolated from the Sargasso Sea
MNVPIKDGNILDATRIESCIPTINYVLENNAKVLLVSHLGRPIEGNFDEKFSLKPVTEYLGTIINRPCELIASLESDEIFNGETDIQFLENIRFFKGEKENCQELGNKLASLGDIYVFDAFGTAHREQASTHSAIKNAPIACAGLLLERENEFLSQTLNNYESPYVAIIGGAKVSTKLELIKHISSVADYIIVGGGIANTFLKASGLNIGKSLAEDSMIDIAKEILGKGKIVLPNTVIISKTFEGEDIKEIPINKVLDEEMILDVYLSDETVALIDQAKTILWNGPMGVFENEAFSKGTKNLSEVIAKSKAFSLAGGGETLSAINKYIKSDDVSYCSTGGGAFLEFMEGKILPSIDVLNSKVTGG

SEQ ID NO: 129316 - protein, 398 aa, Unknown
  Bacterial polypetide isolated from the Sargasso Sea
MIKYRTLDDHDFSKDRVLLRLDLNLPTHNGAISDPTRLTKAIPTIARLASQGAKVIIISHFGRPKGKIVREMSMEQIFSSLREALNGFTVKFIPHSIGSGVAEDIRNMKNGEICLLENLRFHPGEEENDPEFSKSLALLGDCFVNDAFSVSHRAHASTAGIARHMPSFAGPLMDLELKALSNSLDSPKRPLTAIIGGAKISTKLDLLRNIVKLVDKMIVGGGMANTFLFARGVSIGNSLVEKDLTNLVQTIERLAAENSCEIILQNDALIATKLESGANYKAVELDDIPDNAMILDAGPNSIPVFSNHIKDSNTIIWNGPLGAFECPPFDTSTTAIAKLVGKLSQKGNLYSIAGGGDTLAALNQAGVVKKLNYVSTAGGAFLEWLEGKELPGVAALKP

SEQ ID NO: 129317 - protein, 297 aa, Unknown
  Bacterial polypetide isolated from the Sargasso Sea
MTSSIKSIINENVLDKTVLVRADLNIPMSNGNISDQSRVERVIPTINFLKSSGAKIVICSHLGRPNGKYNKNYTLRPLVEILSNILETNVRFSNSCLGQEALEIKTSLKAGEILLLENVRFHEEEINNSLSFAKKLSEGCDLFVNDAFSCSHRAHSSLHAITNFLPSYSGKLMDEEIKALTSVLSSPIKPVAALVGGAKISTKINIIEYLITKMDYLIIGGAMANTFLAAEGLDVGKSLFEKDSVNIAKSILKESKKINCEIILPIDVVVSKSFETNGNTKIVSSNMIPLDMMALDV

SEQ ID NO: 129318 - protein, 348 aa, Unknown
  Bacterial polypetide isolated from the Sargasso Sea
LLKKEASIIIISHIGRPKGKFVKEMSLEPISKKLSQFLNKEIFFNKIPISEKNINEINKTSKNPLTMLENIRFYEGEEKNDEKFSKLISSLGDFFVNDAFSCSHRSHASIDGITKYIPSYFGLQIIQEINALKKITSEIKKPITCIIGGSKISTKINVVKNLIRIFDNIIIVGGMANTILKFKGLNIGKSICEDNKEKLIEEIFKSSREHNCEINYPIDVVVSEKLDGFGKNKELSEIQKNEMILDIGPKTLFSIKKILDKSNTILWNGPAGYFENPNFENGTKEIAKMISLRSSKNDIFSVVGGGETVAAINKYSNINSYTFVSTAGGAFLEFLEGKTLPGIRALNS

SEQ ID NO: 129319 - protein, 396 aa, Unknown
  Bacterial polypetide isolated from the Sargasso Sea
MIRSLNSFDLKDKRVLIRVDYNVPVENGVVKDAYRIQCSIPTIKECLEAGASVVLMSHLGRPNGSTNDNYSMISVGEVLSDFLEIPIKFSHDCINEDSINVTIGLHPGEVHLLENLRFHTGEEENDFEFSRLLSKHGQIFINDAFGTSHRSHASNVGVTDNFMHKGMGLLMEKEIQYLMHKFKKPKEPLVLLLGGAKISDKIDMIERFIIKAKSILIGGGMTFTFLKAMGLNVGKSMIDESMISTAKTIIKKARQNRVKIKLPVDFVVSDAIDKPSKIETVSFDSIPDNMIGLDIGPETIKLFSNIILQSGTVLWNGPMGVFEKKEFENGTKSIANLLSDMKDQNIDTIVGGGDSASAIRKFSDIENITHVSTGGGASLELLGGKNLPAIAALEKL

SEQ ID NO: 129320 - protein, 296 aa, Unknown
  Bacterial polypetide isolated from the Sargasso Sea
SNNLSNGDVLLLENVRFFGEEEKNDLEFAKKLASHADMYVNDAFGAAHRAHASTQGVTNYLSPSVAGFLLEKELKYLQGAINSPKRPLAAIVGGSKVSSKIGVLDSLLDKCDKIMIGGGMIFTFYKARGLDVGKSLVEEDKLELAKDLEAKAKAKGVELLLPTDVVLADEFSPDANSKISQIDSISGNWMGLDIGPESIKVFQNALAECKTIIWNGPMGVFEFDKFADGTNAIATTLADLSAFSEVCTIIGGGDSVAAVEKAGLAEKMSHISTGGGASLELLEGKTLPGVAALNDA

SEQ ID NO: 129321 - protein, 246 aa, Unknown
  Bacterial polypetide isolated from the Sargasso Sea
RAHASLHAITKFLPSFSGLLLDEEVKALTSVLNSPVKPVAALVGGAKISSKINIIEYLLTKMDYLVIGGAMANTFLVAQGLNMGKSLYEKDCIDIAKSILKISETNNCQIILPLDLVVSEKFETYAKFEIVSSDAVPSEMMALDIGPKTINKISSVFQKINTLLWNGPVGAFETPPFGEGTYKLAREAAKLTVNKNLITVAGGGDTTSALNNANAVDDFTYVSSAGGAFLEWLEGIELPGISVLSK

SEQ ID NO: 129322 - protein, 398 aa, Unknown
  Bacterial polypetide isolated from the Sargasso Sea
MKNLNNYSIGMKKVLFRADLNVPVTNGIVTDTSRILAVKKSIKILLEQKNKIFIISHFGRPKEDNKMQYSLEFLCTYLEKIFEVKKVFFLKNIESKELNKTINETNYGEICLIENIRFYPGEEKNDQDFSKFFAGHFDVFVNDAFSASHRNHASITGFAKYLPAVAGNHLIKEINNIDLYLKKLKKPNLALIGGSKISTKIKLLNNLIELFDTIAIGGAMANTFLLSNNIEIGSSLVETELIEHCIKIKNKADKFNCKLILPIDVVCSININDKKNIRSCNIENILPNEMILDIGEKTTKIIYYEILKSKMLIWNGPFGAFETKPFDESSKKIANIIKNSSKNINLDALAGGGDTVSFIRNANAEDGFKYISNAGGAFLEWLEGKQSPGVVALKENKL

SEQ ID NO: 129323 - protein, 369 aa, Unknown
  Bacterial polypetide isolated from the Sargasso Sea
NGKVTDTTRIKSILPTIKELRKKKCKIVILSHFGRPKGSFNKKMSLKHIIPKVEKATKSKIHFSKDHFGKNFENLLKKIPDGSIVVMENTRFHKGEERNFKYFAKDLAKNCDYFVNDAFSVAHRSHASVTGLTDYVPSFSGRSLEKEVITIGKFLSSKNKRKIAIIGGSKISTKINLINNLLKNVNAIVIGGAMANTFLLAQGRKIGKSLNEKSMVKIAKKILSNASKNKCKIILPVDAVVASNLREGGEFSEYSIENIPNDGLILDIGKKSIAIIDKEISKTKEVLWCGPLGLFEQSPFHVGTASVAKTLSKMTKNGKIISVAGGGDTVAAISQSNYVNDFTYISTAGGAFLEMIAGQKLPGIEVLRK

SEQ ID NO: 129324 - protein, 107 aa, Unknown
  Bacterial polypetide isolated from the Sargasso Sea
MMGLDIGNETIKLFSKILSQSGTILWNGPMGVFEKKEFENGTKEIAISLSNLKDENITTIVGGGDSASAVKKFSNIEDITHVSTGGGASLELLSGRSLPAIEALGKL

SEQ ID NO: 129325 - protein, 395 aa, Unknown
  Bacterial polypetide isolated from the Sargasso Sea
MIRTLQAFDIKGKNVLIRADFNVPMSGETITNNFRIKSSLPTIKTCIEAGASIILMSHLGRPKGKEEQSLSLIPVGEELAGLLEMPIKFSANCISTDAIDTSISLKPGEIHLLENLRFYSEEEDNDTDFSSQLARHGNIYINDAFGTAHRSHASNVGVVPFFKNAGIGWLMDKELNYLDRLMNNPKRPLTLVLGGSKIDTKLSLIDKFLDNANHIIIGGGMAFTFLKARGKSVGGSLVDEKMLDTAKRIINKARVKGVKLSLPIDVICGSSPTESEVMGTFLIQDIPDDYMGLDIGPETLSMYNSILGNSNTILWNGPMGVFENRQFEQGTREMAIHLVSCISNGSKVIVGGGDTAAALESFGLLKEMSHVSTGGGASLELLSGNQLPALKSLER

SEQ ID NO: 129326 - protein, 376 aa, Unknown
  Bacterial polypetide isolated from the Sargasso Sea
MDQVVQLEEIRDKKVLVRLDYNVPIEDGVILNDFRIRQTYNTLNSLLDNNNKLIIASHLGRPTEGLYDESLSLKPICNHLSSKLNKKIQFIKDINDAIDFSNHDIAMLENVRFNIGEKKCDPRLSQTIASLADIFVFDAFGVSHRSECTTTGVVTYLETVAGLNIRYEIETINKLINEQSRPMTIIISGAKVSTKIVLIKKLLEKCDHMILGGGILNTFLKAKGYEVGNSLFEEEFVYDATKILESDFASKIIFPSDFSCETVNGIANVDLSRISTNDTIYDLGTESINEIKDIVRNSVSVFWNGPLGYVEKEPFNKGTEELAKVIADHNCFSIVGGGDTLPIIENLKLQNRYNCLSTGGGSLLTYLEGGSLPIID

SEQ ID NO: 129327 - protein, 403 aa, Unknown
  Bacterial polypetide isolated from the Sargasso Sea
MKARQFIEDLDLKGRRVLIRVDFNVPLDENQKITDNARITAALPSIRRIIESGGKCILMSHLGRPKGQRVESMSLRPAAEELSLLLEKNVSLAPDSIGSEVEKMVSQMEEGELLLLENLRFHQGEIKNDPQFCEALARLGEVYINDAFGTAHRAHASTAGVAALMGDRAVGYLIRKELEFLGAAVLDPQKPFTAILGGAKVSDKIIVIERLMEKVDALIIGGGMANTFLKAQGMEIGDSLLEEDALETAKNLLDEAKKCGVKIHLPVDVCTAPELHQEVETKFLKVEDKVQAGWKILDIGPESVKQFGSVIQNSKTVLWNGPMGVFEYSAFASGTRGVTEALAKATDAGAVSIIGGGDSAAAVNQFGMQDRITHISTGGGASLEFLEGKELPGVGVIPEKMNI

SEQ ID NO: 129328 - protein, 376 aa, Unknown
  Bacterial polypetide isolated from the Sargasso Sea
MRLDLNVPLKNRVITDETRINKILPIIDFLIKKNSKIIVLSHVGRPQGIIDNNLSLKPICENLEKKINQKVRLIGDNIFKLKKENLFKDPNDKIVFLENIRFYREEEENDTSFAKHLAELGDLYVNDAFSCSHRFHASINKITKFLPSFAGLQLETEINALKKVTSEIKKPITCIIGGSKISTKIGIIKNLLPKFDNIVIVGGMANNIINFKGNQIGKSIREENCEEVVKEIFEISKKYSCEITFPEDVLVGKNFNDGSKIKELNGVESDDLILDIGPKTIDKIKNIIESSKTILWNGPAGYFENSNFAKGSHEIAKAIIRKNKNNSIYSVVGGGDTIAVINQINDIKNFNFVSTAGGAFLEYLEGKELPGIKALN

SEQ ID NO: 129329 - protein, 398 aa, Unknown
  Bacterial polypetide isolated from the Sargasso Sea
MEDKSILNIDTRNKRLLIRADLNVPINNNKISDETRIERFCSGVSKLLKKEAKIIIITHLGRPKGKEDLSLSNRILLKPLNKYLNKEIIFSSNPISTSAIESSKRLKNNQILLCENIRFHPEEEDDDSIFAKKLSSLGDIYVNDAFSCCHRAHSSTHSITNFLPSYFGPMLCEEISALNRTLENPSKPSLAIIGGSKVSTKISVLKNLVLKLDSIIIGGGMANTFLFAKGAPMGNSLYEPDLKDKANEILTFSKQNNCNILLPVDIITANKLEKNIRTNTSNYDECPSNQMILDVGQKSIELFKQAIDSSKTILWNGPLGAFEIKPFDNSTNLLAKFTGKNTMQEKCISVAGGGDTVSALNSVKVTHQFSYVSSAGGAFLEWLEGKKLPGIEALKLSK

SEQ ID NO: 129330 - protein, 213 aa, Unknown
  Bacterial polypetide isolated from the Sargasso Sea
IPPRPVAAIVGGAKVSTKLQVLENLVRSVDILILGGGMANTFLLARGQGVGASLVEADMVDTARVIEAGAKANGCHIVLPADFLVAGEFAANVPYRVAGLGDVGEGEMILDAGPASAQDVAHQLETCRTVVWNGPMGAFEFQPFDSATNHVAKAVAMLTADGAMMSVAGGGDTLAALANAGVSDQFSYVSTAGGAFLEWLEGRVLPGVEVLRR

SEQ ID NO: 129331 - protein, 240 aa, Unknown
  Bacterial polypetide isolated from the Sargasso Sea
MRLLKDQDLSNKNVVVRLDLNVPIQDKQIIDSTRIISSVPTIKYLVNKNCKVLLTSHLGRPEEGKFDQDFSMSPVAKKLSEILNHEIDLIDSLDSSDIFNTTQIQLLENLRFLIGEKDNNEKLGNQLANKGDVYIFDAFGTAHRKQASTHSAIQQAKFSCAGLLLEKEINSLNKALTSIENPFTAVIAGSKISTKLELIAHLNSKADFIVVGGGIANTFLKSQGFDVGESLVENDMIEIA

SEQ ID NO: 129332 - protein, 248 aa, Unknown
  Bacterial polypetide isolated from the Sargasso Sea
MDAFATSHRAHSSTTGVIEFSEKACAGFLLEEEINALSKLTLKNKGGSLAILGGAKISTKLDLINSLCEKMDTVILGGGIANTCLLAQGFPVGDSLVEESMLKEALELSKKSNVIIPRIVVTAKNQYKECSIKHVGHVEEDESIFDIAPESFKEHQDIFDAAKTILWNGPMGLFEESAFSEGTIQVAKMIVSSKGFSVAGGGDTISAASKAGVLDKLDYVSTAGGAFLEFIEGRKLPSLEALQLKLVK

SEQ ID NO: 129333 - protein, 251 aa, Unknown
  Bacterial polypetide isolated from the Sargasso Sea
MPLKTIENLDVAGKIVLVRCDLNVPISEDGEISDTSRIERHAPTIITLVNKGAKVALLSHFGRPGGKFDENFSLGFVSESISEIFKASEIVVIPDCIGGVAKQVLNDLPNGGIALLENVRFYEGEEKNDDSFCKSLADLADIYINDSFSVCHREHASVHGITKFLPSFAGLALQLEIEMLEKVLENPEPPMMAIIGGSKVSTKLKLLSNMVEKMKFLAIGGGMANTFLAAQGTNIGSSFYEKDMIDEANKI

SEQ ID NO: 129334 - protein, 400 aa, Unknown
  Bacterial polypetide isolated from the Sargasso Sea
MIKIKNLDDLLTNDLKGKTVYLRADLNLPTINGKVTDTTRIKSILPTIKELRKKKCKIVILSHFGRPKGSFNKKMSLKPIIPKVEKITKSKIHFSKDHIGKNFENLLKKIPDGSIVVMENTRFHKGEEKNFKYFAKDLAKNCDFFVNDAFSVAHRSHASVIGLTDYVPSYSGRSLEKEVITIGKFLSSKNKRKIAIIGGSKISTKINLINNLLKSVNAIVIGGAMANTFLLAQGKKIGKSLNEKSMVKIAKKILSNASKNKCKIILPVDAVVASNLREGGEFSEYSIENIPNDGLILDIGKKSITIIDKEIAKTKEVLWCGPLGLFEQSPFHVGTASVAKTLSKMTKNGKIISVAGGGDTVAAISQSNYVNDFTYISTAGGAFLEMIAGQKLPGIEVLRK

SEQ ID NO: 129335 - protein, 383 aa, Unknown
  Bacterial polypetide isolated from the Sargasso Sea
MKRKKFIEELKLEGKRVLTRVDYNVPLNNKMEITDNGRIKATLPTVNYIIENGGRAVLMSHLGRPDGERVERMSLKPVSVELSELLGKPVKLASDCIGEEVYNMVDNMQNGDVVLLENLRFHKAEVKNEPWFCEALAVNGDVYINDAFGTAHRAHASNSGVVSYISDSAVGNLMRKELKFLGEAVSKPVRPFVAILGGAKVSDKIKVIEKLLEKVQSVIIGGGMASIFLKSQGYKIGASLIDEDSLNLAKNLIQDAEQRGVEFLLPVDVVIAENFDNNASTKIISIEEGVPEKWLILDVGPRSIEVFSDTIFGSGTVLWNGPMGVFEMEKFSKGTYDIAKCLAVATENGSVTIVGGGDSAAAIKKLGLIGNMTHVSTGGGASL

SEQ ID NO: 129336 - protein, 281 aa, Unknown
  Bacterial polypetide isolated from the Sargasso Sea
MLENLRFYNEEEQNNEEFAKILAGFGDLYVNDAFSCSHRKHASVFSITKFVPSYAGIQLMSEITALSKITKDITRPITCIIGGSKISTKIDVIKNLISKFDNLIFVGGMANNILKYKKFQIGKSIFEENCDHIIDDIFNLSKEQNCKIIFPVDVSVSKKIDGKGDIKKISEVREDDLILDIGPETLKILNNTIEESRTVLWNGPAGYFENENFKKGSLEIAKKIVEKNKKNEIYSVAGGGDTVAALNSFNLTKHFNFVSTAGGAFLEFLEGKDLPGIKALS

SEQ ID NO: 129337 - protein, 394 aa, Unknown
  Bacterial polypetide isolated from the Sargasso Sea
MIKPLKTFDLKNKRILLRVDFNVPIENDKVVDDFRIKQTLPTINYCLEAGAKVIIMSHLGRPNGKPDPSLSLMPVGEMLADHLEMPIKFSNDCISEDSHDVTLGLKPGEIHLLENVRFYYDEIKNDSEFCAQLAKHGDIFINDAFGTAHRTHASNVGIAKYFSIKGIGLLFEKELNFLSKILSKPSRPLTLVLGGAKIDTKIGLIDHYIGIADHILIGGGMAFTLLKARGIEIGKSIVDDSKLKAAIALIDKAKKKKNLFFPKDIVCAKSIDKDENYKTYDITKIPKNLTGLDIGQKTIDSYSKLISNSQTVIWNGPMGVFESENFQNGTQSLGKHIAACSQGEFVSIIGGGDTAAALRKFNLDNKMTHLSTGGGASIELLSGKNLPAIFALEV

SEQ ID NO: 129338 - protein, 384 aa, Unknown
  Bacterial polypetide isolated from the Sargasso Sea
MINLSSLEIKNKNLVIRVDMNVPILGGKVLDTTRITACIPTINYALENNAKILLVSHLGRPTESVFEDKFSLKPVAACLSEIIDESVEVVDQLDSKKIFNSASRVQILENIRFFKGEKDNSDELGSILGSLGHIYVFDAFGTAHRKQASTHSAIKHASIACAGLLMEKENSFLSQALNVDDRPYLAVIGGAKVSTKLELIKHISDVADHIIVGGGIANTFLKASGKNIGTSLVEDSMLDVAKNILNQKKIILPKRVVTSKTFEGENVNKKSIHDILESEMILDACLEQEVISLIHSAKTILWNGPMGVFENIYFEEGTRELAKAIATSEAFSIAGGGETLSAINKYIKSDDVSYCSTGGGAFLEFMEGKVLPSIEVLNSKEIGS

SEQ ID NO: 129339 - protein, 292 aa, Unknown
  Bacterial polypetide isolated from the Sargasso Sea
MINLSSLNIANKNLVIRVDMNVPIKDGRILDSTRIEACIPTINYALKNNAKVLLVSHLGRPLEGNFEESFSLKPVANFLGEVIKSSIDVIDKLDSVDFFKSSSNIQILENVRFFDGEKRNCEKLGKKLGCLGDIYVFDAFGTAHREQASTHSAIENAYIACAGLLLEKEEKFLSQALKKYDRPYLAIIGGAKVSTKLALLKQINEVADYIIVGGGIANTFLKSSGLNVGNSLVEDSMLETAKTILEKGKIVLPKKVVTSKTFEGENIKEATINEVNNDVMILDLFLEQESKA

SEQ ID NO: 129340 - protein, 392 aa, Unknown
  Bacterial polypetide isolated from the Sargasso Sea
MRSIINEKNLNNKKILLRLDLNVPLEKGKITDTTRIDKILPTINFLIKKKAKIIILSHVGRPKGKIVKDLSLKPICEELQNKLRKKVKLISENIKEIKSKNFFSDYNENIFILENIRFYSEEEQNDNKFAEMLSNLGDIYVNEAFSCSHRAHASICEIPKFLPSFSGLQLDLEVNALNKITSEITRPITCIIGGSKISTKINVIKNLIPKFENIIIVGGMANNFIEYFGNSVGKSIKEINCNKIVEEIISLSKKEKCKIIYPEDVIVSKNLNGSPQKKELNEILFDEMILDIGPKTIDKITKIIDNSKTILWNGPAGYFENLNFAYGSIQIAKKIIENNKANKIFSVAGGGDTVSLLNYLNAVNEFNFVSTAGGAFLEYLEGKNLPGINALN

SEQ ID NO: 129341 - protein, 386 aa, Unknown
  Bacterial polypetide isolated from the Sargasso Sea
MILPGLSDFQFKDQRVLLRLDLNAPIEDGLVSNDERLVRSLPTINHILQNQGKLIVISHLGRPKENGKLQTEFSLRPVVKRLEQLLNRSIILISDINKLPSIASGEMIILENVRFLEGEKSNDPVLSRKLADLADIFVMDAFATSHRAHSSTTGVIKFSKKACAGFLLQEEVDALLKFTSNNNGKSLAVLGGAKISTKLDLINSLCAKMDNVILGGGIANTCLLAQGFSVGNSLVEESMLEEALELSKRNNVILPKMVVTADNIKQKGTIKSVDNIREDESIFDIAPESFEEQQDIFRKADTILWNGPMGLFEEIAFAQGTNQIANMIVSSKGFSVAGGGDTISAADKAGVLKELDYVSTAGGAFLEFIEGRNLPSLEALQLKWAK

SEQ ID NO: 129342 - protein, 123 aa, Unknown
  Bacterial polypetide isolated from the Sargasso Sea
MKVIFRSNIKVEDFQENHIGVDIGNETLSEFSSILNASKYIFWNGPMGIFEIDEYSTGTKEITKVISMSKAYSSVGGGDSVSAINKFSDRKKFDHISTGGGASLEFLEGKKLPGVNIYKPLII

SEQ ID NO: 129343 - protein, 401 aa, Unknown
  Bacterial polypetide isolated from the Sargasso Sea
MAKRSLASLNAGDLSGKRVLVRVDFNVPLNDAGAITDDTRIRAALPTINDLTGKGAKVILSAHFGRPKGQVNDAMRLTPVAARLSELLGKPVIKTDSCIGPDAEAKVAAMADGDVVLLENVRFFAEEEKNEAGFAEKLAGLAEVYVNDAFGAAHRAHASTEGVTKFLKPAVAGFLMEKELQYLQGAVDEPKRPLAAIVGGSKVSSKIGVLEALIDKCDKVLIGGGMIFTFYKARGLSVGKSLVEEDKLELAKELEAKAKAKGVELLLPTDVVLADNFAPDANSQVADVTAIPDGWMGLDIGPDAVKVFQAALGDCQTVIWNGPMGVFEFEKFATGTNAIATTLAELSGKGCCTIIGGGDSVAAVEKAGLAEKMSHISTGGGASLELLEGKVLPGVAALNEA

SEQ ID NO: 129344 - protein, 402 aa, Unknown
  Bacterial polypetide isolated from the Sargasso Sea
MSKLSLSSLDKTHLEGKKVLVRVDFNVPLNENGQITDDTRIRAAIPTIEYLINHSAKVILAAHFGRPKGQVNEKMRLTPVAARLSELLGQNVALTNSCIGDEAVAQSNSLSNGDVLLLENVRFFGEEEKNDLEFAKKLASHADMYVNDAFGAAHRAHASTQGVTNYLSPSVAGFLLEKELKYLQGAVDSPNRPLAAIVGGSKVSSKIGVLDSLLDKCDKIMIGGGMIFTFYKARGLDVGKSLVEEDKLELAKDLEAKAKAKGVELLLPTDVVLADEFSPDANSKISQIDAISGNWMGLDIGPDSIKVFQNALAECKTIIWNGPMGVFEFDKFADGTNAIATTLADLSAFSEVCTIIGGGDSVAAVEKAGLAEKMSHISTGGGASLELLEGKTLPGVAALNDA

SEQ ID NO: 129345 - protein, 372 aa, Unknown
  Bacterial polypetide isolated from the Sargasso Sea
MRLLKDQDLSNKNVVVRLDLNVPIQDKQIIDSTRIISSVPTIKYLVDKNCKVLLTSHLGRPEEGKFDQDFSMSPVAKKLSEILNHEIDLIDSLDSSDIFNTTQIQLLENLRFLIGEKDNNEKLGNQLANKGDVYIFDAFGTAHRKQASTHSAIQQAKFSCAGLLLEKEINSLNKALTSIENPFTAVIAGSKISTKLELIAHLNSKADFIVVGGGIANTFLKSQGFDVGESLVENDMIEIAKELFNSGKIILPNKVIVADSIDSNSSTTKNIDSVSGSDKIFDINLTSNMSEILKNSKTILWNGPIGVFEKEPFQKGTHQLAKTIAGSEAFSLAGGGETIAAINKFINKDEVSYCSTRWRSFFRIYGRQITPV

SEQ ID NO: 129346 - protein, 378 aa, Unknown
  Bacterial polypetide isolated from the Sargasso Sea
MRLLKDQDLSNKNVVVRLDLNVPIQEKQIIDSTRIISSVPTIKYLVDKNCKILLTSHLGRPEEGKFDQDFSMSPVAKKLSEILNHEIDLIDSLDSSDIFNTTQIQLLENLRFLIGEKDNNEKLGNQLANKGDVYIFDAFGTAHRKQASTHSAIQQAKLSCAGLLLEKEINSLNKALTSIENPFTAVIAGSKISTKLELIAHLNSKADFIIVGGGIANTFLKSQGFDVGESLVENDMIEIAKELFNSGKIILPNKVIVADSIDSNSSTTKNIDSVSGSDKIFDINLTSNMSEILKNSKTILWNGPIGVFEKEPFQKGTHQLAKTIAGSEAFSLAGGGETIAAINKFINKDEVSYCSTGGGAFLEYMEGKLLPSIEALGG

SEQ ID NO: 129347 - protein, 336 aa, Unknown
  Bacterial polypetide isolated from the Sargasso Sea
MKKKQFIEKLNLEGQRVLTRVDYNVPLDDKQKIADNSRIKATLPTVNYIIENGGRAVLMSHLGRPGGEKIESLSLKPAAVELSKLLGQNVKLAPDCIGEEVNNLVEAMQNGDVVLLENLRFHKAETSNDPSFCEALAENGDIYVNDAFGTAHRAHASTSGVVSYIIDSAVGYLMRKELQFLGEAVAEPIRPFVAILGGAKVSDKIKVIEKLLDKVQTLIIGGGMACTFLKSQGYKIGASLLEKDSLDLAKNLIQEAEHKGVEFLLPVDVVISERFDNKSSTRTIPIEEGVPDNWLILDVGPRSIEIFSHSIFESGTVLWNGPMGVFEMEKFSKRYI

SEQ ID NO: 129348 - protein, 274 aa, Unknown
  Bacterial polypetide isolated from the Sargasso Sea
LLENVRFLEGEKSNNDKLAKTLSSLADVVVFDAFATSHRAHASTSGIISHSKEACAGYLIEEELYSLNKAFSDSKRPFVAVIGGSKVSTKLGLLDSLASKVDLLLLGGGIANTCLLSQGKSIGNSLAEESMLHEAKRLSENKKVIIPDKFMVLTENGMVIEKTTDEIEDTDQIFDVSENFFRENDDLFKEAKTIIWNGPIGMIEDDRFSIGTVRLAKIISSSNAFSVIGGGDTIAGAKKAKVLDKVGYVSTAGGAFLEFLEGKQLPAIACLENK

SEQ ID NO: 129349 - protein, 394 aa, Unknown
  Bacterial polypetide isolated from the Sargasso Sea
MFFLSNQSFKNQKVLIRLDLNVPLGDDLSVTDSTRIKASKETVDFVINKGGACILIAHLGRPKGKDKNLSMLNILKDISKCFGKKIQFVNDCIGDEVEQAISKMNNGDILLLENLRFHEEETNGDEGFAKKLSRLGDSYINDAFGTSHREHASTFTIAKHFPNKKYGGILLQRELDVIGKILDKGKPPILSILGGAKVSSKLKIINNLVEQVDKIIISGGMAFTFIKANGGEIGDSLYEPSLLNEARLILEKAKKLKTEIHLPLDVLAAKDKNNIGETEVFNIDKIEPGWMGMDISRKSIAAFEKVIMSSNTVFWNGPMGVFEKEKFSQGTMGICKILKRAKEDNKYVITGGGDSIAALKKFGKTSWVNYISTGGGAMLESLEGKELPGVKALN

SEQ ID NO: 129350 - protein, 226 aa, Unknown
  Bacterial polypetide isolated from the Sargasso Sea
MTDLHSIDLKNKYVGLRVDLNVPLESGEVLSPDRLSAALPTILHILEHTENLCLISHLGRPKEDDYDQALSLKPIKEWFEKRLNKKISLENEIKKSEGIKMLENIRFFKGENENSENLGQKLADIFDVYIMDAFATAHRKSASTYGAIIKSKIKSPGLLFSNEVRNLKEILNEPDRLVSIIGGSKVSSKLEVVENLLQKSEKIIVGGGIANTFLKAVGYEIGESIY

SEQ ID NO: 129351 - protein, 394 aa, Unknown
  Bacterial polypetide isolated from the Sargasso Sea
MSVIKMADIDLTGKRVLIREDLNVPVKNGKVTSDARLKAAIPTIELALKKGGKVMVCSHLGRPDEGVYAEEFSMAPVVDYLNAALSVPVRLVKEYLDGVEVNTGEVVVFENVRFNKGEGKNDETLSKKLAALCDVFVMDAFGTAHRAQATTHGVAQFAPIACAGPLLAAELDALAAALKNPKRPLVAIVGGSKVSTKLTVLESLSGIVDQLIVGGGIANTFIAAQGYQVGKSLVETDLIPEAKRLMAQAKANGGSIPVPTDVVTGKAFAEDTPATTKSVADISDDDMVFDIGPDSSAALVDILKNAGTIVWNGPVGVFEFASFEQGTKALALAIADSQAFSIAGGGDTLAAIDKYELADKISYISTGGGAFLEFLEGKTLPAVEILEQRAKTTA

SEQ ID NO: 129352 - protein, 156 aa, Unknown
  Bacterial polypetide isolated from the Sargasso Sea
MSVIKMTDLDLAGKRVLIRADLNVPVKDGKVTSDARIVATLPTIKLALKKGAKLMITSHLGRPTEGEYNEEFSLAPVVNYLKDALSCSVRLAKDYLDGVEVAEGELVVLENCRFNKGEKKNTEELAKKYAALCDVFVMDAFGTAHRAEGSTYGVAQ

SEQ ID NO: 129353 - protein, 398 aa, Unknown
  Bacterial polypetide isolated from the Sargasso Sea
MLDVSNLKKITEKNKTVLIRFDLNVPLNSIDEYISDRIIRIKKPILNLLHENHKVIILSHLGRPKGEIKNELSLKQVVPQLEKVLEKKINFLPDCIGNEIKDKINSLEDGTVILLENCRFYKEEEENDHDFAKQLSELADVYINDAFACAHRAHASIEAISHFMPSYCGDLLEEEINNLQEVIHEPLSPALTIIGGSKISTKITVLKNLSKKMDTIVIAGGMANNFLKYHGYNIQNSLLEENVDHLITEILDFSSKNNCRLVLPIDVVTADKISDKANTKESDIDNIEKQNMILDIGKNTLELIKNEISKSKTVFWNGPLGVFETSPFDKGTLEIANFIGTLTENNKIRSFAGGGDTISALDLARVKDKFSYVSTGGGALLELIEGKKLPGLVALGIL

SEQ ID NO: 129354 - protein, 200 aa, Unknown
  Bacterial polypetide isolated from the Sargasso Sea
GSKIDSKLSLIDRFLNIADRIIIGGGMVFTFLKAQGKNIGNSIYQENLVSAAFDILEKTKNSQKLVFPSDYLCNTSIESKKKPVIFSKNEIKDEYMGLDIGPRSIKRFQSILNDAETIFWNGPMGVFENKNYEEGTKALASSIAELTEKDVESIIGGGDSASALRKYNLTKNVTHLSTGGGASLELISGKTLPALQRLEI

SEQ ID NO: 129355 - protein, 372 aa, Unknown
  Bacterial polypetide isolated from the Sargasso Sea
MKYIKYQENLNGKIILLRLDLNVPLKDGVITDETRIDKILPIIKFLLANKAKILVISHVGRPKGKSINSLSLKPICENIENKINNKIKLINENIFKLRKNDFFKDPKDQIVFLENIRFYEQEEKNDIIFSEHLSKLADIYVNDAFSCSHREHASVSSITRFIPSFAGLQLQNEISALKKITSEIEKPISCIVGGSKVSTKIGLIKNLIPKFDNIILTGGMANNILNYKGHPIGKSIKEDNCNEIIDEIFKFAKIHSCSIIYPEDVAVGKNMEDKARVKKLNEVINDDIILDIGPKTIDKIKEIIDSSKTILWNGPTGYFENSNFANGSYEIAKKIVENNKKNLIYSVAGGGDTIAVLNKLGVVNNFNFVSTA

SEQ ID NO: 129356 - protein, 258 aa, Unknown
  Bacterial polypetide isolated from the Sargasso Sea
MQIPSMETLDLQGKRTMIRLDLNVPIKDGLVTSDARIMASLSTIQMALDKGAKVILLSHLGRPDPDHLDGSFSLEPVANRLKEILNKNISFQPDWLEGINDQSNDIILCENVRYQAGEKKNDETLSQKIANLCDVYVMDAFGASHRKHSSTYGVLQYAKEGCIGPLLSNEVSSIKKAIDRPTAPVTAIIGGAKVSSKLGVIERFSSFSDHVIVGGGIANTFLLASGKQIGASLGEPEMVDAANKILQMENVNVPLPVD

SEQ ID NO: 129357 - protein, 256 aa, Unknown
  Bacterial polypetide isolated from the Sargasso Sea
MINLSSLEIKNKNLVIRVDMNVPISGGKVLDATRITACIPTIIYALKNNAKILLVSHLGRPAESVFEDQFSLKPVAACLSEIIDESVEVVDQLDSKKIFNSTSRVQILENIRFFKGEKDNSDELGSTLGSLGHIYVFDAFGTAHRKQASTHSAIKHASIACAGLLMEKENSFLSQALNVDDRPYLAVIGGAKVSTKLELIKHISDVADHIIVGGGIANTFLKASGKNIGTSLVEDSMLDVAKNILNHKKIILPKRK

SEQ ID NO: 129358 - protein, 149 aa, Unknown
  Bacterial polypetide isolated from the Sargasso Sea
EIENIFKNSNDHSCSIIYPKDVKIGKSMDDKSQIKDLTEISADDFILDIGPKTLREIEDIIENSKTVLWNGPAGYFENPNFALGSYEIAKMIIKKNKDNSIFSVAGGGDTIAVLNQINAIRDFNFVSTAGGAFLEYLEGKELPGIKALN

SEQ ID NO: 129359 - protein, 384 aa, Unknown
  Bacterial polypetide isolated from the Sargasso Sea
MINLSSLDIANKNLVIRVDMNVPLKDSKVLDATRIKACLPTIEHALSNNARILLISHLGRPSEGNFEEKFSLQPVAEYISNLFNEKCELINSLESKDIFNGKFNVQLLENIRFFEGEKSDSAKLGKILASLGDIYVFDAFGTAHREQASTHSAIEQANIACAGFLLERENRNLTKVLNNYENPYIAVIGGAKVSTKLELIKSINNKAQNIIVGGGIANTFIKAAGFKIGQSLYEESMLDIAKSILEKNKIVLPDKVITSETFEGKNIQKKSLDEIEDNEMILDLLLKEETYSILDSAKTILWNGPMGVFENKLFEQGTRDLSETIAKSSAFSIAGGGETLSAINKYINTDDVSYCSTGGGAFLEFMEGKTLPSISALNAKNTER

SEQ ID NO: 129360 - protein, 326 aa, Unknown
  Bacterial polypetide isolated from the Sargasso Sea
INDLSLNQYVKNLGKKLNQNVKLISKNIKEIIIKNLFKNNDEKIIMMENIRFYFEEEANDYEFAKNLARFADIYVNDAFSCSHRAHSSICKIPNFLPSYSGLQLDKEVNALEKITSEIKRPITCIIGGSKISTKINLIKNLIPKFNNIIIVGAMANNIIKYMGHNIGKSLQEENSNLIIEEIFSLSKQEKCKIIYPEDIVVAKNFNGDPQVKKLNEISSDEMILDIGPKTIEIIKKIIDESNTILWNGPAGYFENPYFANGSIKIAEKLIEKNKANKIYSVAGGGDTVSLLNSLNAIYNFNFVSTAGGAFLEYLEGKELPGITALN

SEQ ID NO: 129361 - protein, 176 aa, Unknown
  Bacterial polypetide isolated from the Sargasso Sea
MRLLKDQDLSNKNVVVRLDLNVPIQDKQIIDSTRIISSVPTIKYLVNKNCKVLLTSHLGRPEEGKFDQDFSMSPVAEKLSEILNHEIDLIDSLDSSDIFKTTQIQLLENLRFLIGERDNNEKLGNQLANKGDVYIFDAFGTAHRKQASTYSAIQQAKFSCAGLLLEKEINSLNKAL

SEQ ID NO: 129362 - protein, 270 aa, Unknown
  Bacterial polypetide isolated from the Sargasso Sea
MINLTSLDITKKNLVIRVDMNVPIKDGIVQDTSRIIACIPTIKLAIKNNAKVLLISHLGRPEEGNFEEKFSMKPIVESLGKILNEEIDLLDSLDSEEIFNSASNIQILENIRFFQGEKVNDIDLGKKLADLGDIYVFDAFGTSHREQASTHSAIDQAKIACAGLLLEREIDFLTKALKNYKNPYIAIIGGAKVSTKLELIKHINNVADKIVVGGGIANTFIQASGLNIGKSLIEESMVDIAKSILDKGKIILPKIAITSESLKEKMLIKN

SEQ ID NO: 129363 - protein, 328 aa, Unknown
  Bacterial polypetide isolated from the Sargasso Sea
VTVLSHLGRPEEGKFDEAFSLAPIAQRLSELLSVPVILLKDIEQSKTLSKGQIGLMENVRFFAGEKGNSDELGRRMAACCDVFIMDAFGSAHRAHASTNSIAKHVEVVVPGFLMESELKALNGVVQNAKTPVVAVLGGAKVSSKLTLLERFSEISDKIFVGGGIANTFIAASGHGIGKSLYEETMLDAARKLLSKTDIPIPKDVMVAKSFDSSATAILRPIDEVYEDEMILDIGPVTAREWSSTIEESGTIIWNGPMGVFEFDQFGEGTREIAEAIARSSAYSLAGGGDTIAAIDKYEVSDNVSYISTGGGAFMEYLEGKKLPGVDIL

SEQ ID NO: 129364 - protein, 284 aa, Unknown
  Bacterial polypetide isolated from the Sargasso Sea
HQEEEENELKFSEKLSSLGDIYCNDAFSAAHRAHASTVGVAQFMQNCIGLLMLEELSILKTVLGDPKRPLVAVVGGAKVSTKLDLLTNLIHKVDHLVIGGGMANTFLYAQGNSIGKSLCEQTLKDKAISILEEAKRKGCDIHIPHDAIISSTFEAHAPFQVVDTRNVPDDSLILDIGPSTCKKICQVFKECKTLIWNGPMGAFELPPFDNGTNMTTACAAKLTLNKGLISVAGGGDTVSALRKAGVSKDFTYVSLAGGAFLEWMEGKKLPGISCLNNKITYRHS

SEQ ID NO: 129365 - protein, 396 aa, Unknown
  Bacterial polypetide isolated from the Sargasso Sea
MNSITNNNLDLKGKKVLLRVDLNVPMENGAITEISRIEKIIPTIKLLLKKEAKIIIMSHIGRPKGKVVSGMTLKPISEKLSLLLQKKIFFSEDLVSENTILEINKIPNGSILMLENIRFNEGEETNDSQFSKQISTLGDIYVNDAFSCSHRSHASVEGITKYIPSYFGLQITEEINALKKITSKIEKPISLIIGGSKISTKIKIINNLIKKFNNIIIVGGMGNTMLKHTGSNIGKSVCENECGHLIKEILENSKKYNCKITIPKDAVVSTSLNGNGKEKNLNEIDDDEMILDIGSKTISDIEATINNSKTILWNGPAGYFENPNFQNGTKKILELITQKTKNDKIFSVAGGGETVAAINKFKKFNSFTFVSTAGGAFLEYLEGKTLPGIKALNQNV

SEQ ID NO: 129366 - protein, 398 aa, Unknown
  Bacterial polypetide isolated from the Sargasso Sea
MSQVKRLTDLIAAGQLAGKRVFIRADLNVPQDDQGNITEDTRVRASVPAIQAALDAGAAVMVTSHLGRPTEGEFKPEDSLAPVAKRLAELLGRDVPLVSNWVENGVNVAPGQVVLLENCRVNKGEKKNSDELAQKMAKLCDVYVNDAFGTAHRAEATTHGIAKYAPVACAGPLLAAELDALGKALGNPARPLVAIVAGSKVSTKLTILKSLAGKVDQLIVGGGIANTFMLAAGLSIGKSLAEADLVDEAKAIIDEARERGASVPIPTDVVTAKEFSPTAVATVKQVADIEADDMILDIGPDTAKALASQLEKAGTIVWNGPVGVFEFDQFGNGTKTLAEAIAKSSAFSIAGGGDTLAAIAKYGIHDQVSYISTGGGAFLEFLEGKKLPAVEVLETRAA

SEQ ID NO: 129367 - protein, 381 aa, Unknown
  Bacterial polypetide isolated from the Sargasso Sea
MINLSSLDLNNKNLVIRVDMNVPIKDGDVLDSTRIKACLSTIEYALENNAKVLLISHLGRPVEGNFEEEFSLKPVANELSKIINMDVELIDTLESNKIFKSSSNIQVLENIRFFEGEKENSQELGNKLGSLGDIYVFDAFGTAHREQASTHAAIMNAPIACSGLLLEKEENFLSQALKKYERPYIAIIGGAKVSTKLDLIKHINEVADHIIVGGGIANTFIKSSGLNVGNSLTEESMLEIAKSILDKGKIILPNRVLTSKTFEGEDIKETSISNIGNDEMILDLYLEQETKTLINNAKTILWNGPMGVFENSLFENGTKELSKEIAKSNAFSLAGGGETLSAINKYIKSDDVSYCSTGGGAFLEFMEGKVLPSIKALNSKK

SEQ ID NO: 129368 - protein, 391 aa, Unknown
  Bacterial polypetide isolated from the Sargasso Sea
MAIINMSDLDLQGKRVLIREDLNVPVSNGVVTSDARLRASLPTIELALAKGAAVMVMSHLGRPTEGEYNSEFSMQPVVDYLAKALSCTVRLATDYLDGVEVAVGEVVVFENVRFNKGEKKNDEALSKKMAALCDVYVMDAFGTAHRAEASTNGVGLHAPIACAGPLLAQELDALGKALDNPARPLVAIVGGSKVSTKLTVLESLSGIVDQLVVGGGIANTFIAAAGHNVGKSLYEADLIDEAKRLVANAQSRGGDIPVPTDVVVAGEFSPTAAATLKAVSEVGDSDMIFDIGPDSAEALAKIIESAGTIVWNGPVGVFEFDQFGEGTKRIAQAIADSKAFSIAGGGDTLAAVDKYGIADKVSYISTGGGAFLEFLEGKELPAVAMLKKRGA

SEQ ID NO: 129369 - protein, 181 aa, Unknown
  Bacterial polypetide isolated from the Sargasso Sea
MIKTLNSFDLKDKRVLLRVDFNVPIVNDRITDNFRIVSSLPTIKYCLRHGAKIIIMSHLGRPKGNVIPEMSLISVGEALADLLEMPIKFSHDCVSEDAHDVTLGLRSGEIHLLENLRFHIDEEKNDKDFSKKLAKHGEIYINDAFGTAHRSHGSNSGITRYFLNKGMGLLFEKELEFLSKK

SEQ ID NO: 129370 - protein, 391 aa, Unknown
  Bacterial polypetide isolated from the Sargasso Sea
MAIINMSDLDLQGKRVLIREDLNVPVSNGVVTSDARLRASLPTIELALAKGAAVMVMSHLGRPTEGEYNSEFSMQPVVDYLAKALSCPVRLATDYLDGVEVAVGEVVVFENVRFNKGEKKNDEALSKKMAALCDVYVMDAFGTAHRAEASTNGVGLHAPIACAGPLLAQELEALGKALDNPARPLVAIVGGSKVSTKLTVLESLSGIVDQLVVGGGIANTFIAAAGHNVGKSLYEADLIDEAKRLVANAQSRGGDIPVPTDVVVAGEFSPTAAATLKAVNEVGDSDMIFDIGPDSAEALAKIIESAGTIVWNGPVGVFEFDQFGEGTKRIAQAIADSKAFSIAGGGDTLAAVDKYDIADKVSYISTGGGAFLEFLEGKELPAVAMLKQRGA

SEQ ID NO: 129371 - protein, 385 aa, Unknown
  Bacterial polypetide isolated from the Sargasso Sea
MINGIPTLDDLDLQGKRVLVRFDYNVKYLNGKVSDDERILRTLPTLTNILSKASSVIILSHLGRPEKVGEIDKDFSLKKVAEHLSTLLSEEIYFHNDLNLDHFSDNQKKISMLENVRFFEGETDNNELFSKKLAQLADVFVMDAFGSAHRSHCSTEGVSHFIDSCVGRLVEEELNSLEGILNNPSKPMLGIIGGSKISTKINILESLLEKVDWLFVGGGIANTLHKSKGYEIGQSIVENDFLEEAKDLSKNNKIILPETFVVEQKDKSIVEKTFEGILPDDIIYDVSINSIKSLNNVISSCKTILWNGPLGFFEREEFSKGTLHLAKVISESDAYSVIGGGETLTAFNQSNLLDKVGYASTAGGAFLEYIEKGSLPSLEALKEKI

SEQ ID NO: 129372 - protein, 129 aa, Unknown
  Bacterial polypetide isolated from the Sargasso Sea
MINLSSIDISKKNLVIRVDMNVPIKNGNVQDATRIQACIPTIKYALKNNARILLISHLGRPTEGNFEEKFSLKPIADYLSKITNKPCKLISHLESDEIFDGKTDIQLLENIRFFKGEKENCQDLGKKLA

SEQ ID NO: 129373 - protein, 343 aa, Unknown
  Bacterial polypetide isolated from the Sargasso Sea
KVILGVSHLGRPKGKIKSELSLKPVFEYLKKNLSKKIVFYDKNIDDNAVSCSKNLKTGEILFLENIRFFKEEEEDNEVFAKKLSNLADIFINEAFSCSHRKQASIHSITRFVESYGGPQLEKEIKSIDLIKRKKKKPVTCIIGGSKISTKINVLSSLIQNSDNLIVVGAMANNFLLFKGLKIGMSLIEKDVGNFIEKINYLAKKYSCKVFIPTDFQVSTSMNGKPIYRSKNDIRKTEIILDIGKNSLNSICKIIDSSNTVFWNGPAGFFENKNFTHGTISIAKSIAKNTKKRSLISIVGGGDTLAALNGGGFENSFTHLSTAGGAFLESLEGKELPAIKVLRK

SEQ ID NO: 129374 - protein, 397 aa, Unknown
  Bacterial polypetide isolated from the Sargasso Sea
MNKVLRLSDLIAEGKLSGKRVFIRADLNVPQDDQGNITEDTRIRASVPAIKAALDAGAAVMVTSHLGRPTEGDFKPEDSLAPVAKRLAELLGRDVPLVANWVENGVNVAPGQVVLLENCRVNKGEKKDSDELAQKMAKLCDIYVNDAFGTAHRAEATTHGIAKYAPVACAGPLLAAELEALGKALGAPKRPLVAIVAGSKVSTKLTILKSLADKVDQLIVGGGIANTFMLAAGLKIGKSLAEADLVNEAKAIIDAAKARGASVPIPTDVVTAKEFSPTAKAEVKAVADVQDDDLILDIGPETAKVLAAQLEKAGTIVWNGPVGVFEFDQFGNGTRTLADAIAKSSAFSIAGGGDTLAAIAKYGIHDKVSYISTGGGAFLEFLEGKTLPAVAVLESRA

SEQ ID NO: 129375 - protein, 118 aa, Unknown
  Bacterial polypetide isolated from the Sargasso Sea
SQIKDLTEVSADDFILDIGPKTLKKIEDIIENSKTVLWNGPAGYFENPNFALGSYEIAKMIIKKNKDNSIYSVAGGGDTIAVLNQINAINDFNFVSTAGGAFLEYLEGKELPGIKALN

SEQ ID NO: 129376 - protein, 91 aa, Unknown
  Bacterial polypetide isolated from the Sargasso Sea
KTLINNAKTILWNGPMGVFENSLFENGTKELSKEIAKSNAFSLAGGGETLSAINKYIKSDDVSYCSTGGGAFLEFMEGKVLPSIKALNSKK

SEQ ID NO: 129377 - protein, 305 aa, Unknown
  Bacterial polypetide isolated from the Sargasso Sea
MYGEEALAKSNSLNNGDVLLLENVRFYEEEEKNDLDFAKNLASHADMYVNDAFGAAHRAHASTQGVTQFLEPAVAGFLLEKELKYLQGAIDAPKRPLAAIVGGSKVSSKIGVLDSLLDKCDKIIIGGGMIFTFYKARGLDVGKSLVEEDKLELARNLEAKAKTKGVELLLPSDVLLANEFSPDAESKVSQIDSISGDWMGLDIGPQSIKVFQNALAECKTIIWNGPMGVFEFDKFAEGTNAIATTLADLSSFSEVCTIIGGGDSVAAVEKAGLAEKMSHISTGGGASLELLEGKTLPGVAALKDA

SEQ ID NO: 129378 - protein, 393 aa, Unknown
  Bacterial polypetide isolated from the Sargasso Sea
MRSIRNETSLRDKKILLRLDLNVPLDKEKISDTTRIDKILPTLKFLNEQKAKIIILSHVGRPRGKVLKELSLKPICENLQEQLGLSVKLISQNINEIKNKNFFDKFNEKILMLENIRFYAEEEKNDNKFARHLASLGDLYVNDAFSCSHRAHASIVEISKFLPSFSGLQLDLEINALTKITSEITKPITCIIGGSKISTKIEIIKNLIPKFDNIIIVGGMANNFIEYFGHNIGKSIKEKNCAPIIEEIISLSKKEKCEITYPEDVLVSKDLNGSCKKKELNEILDDEMILDIGPKTINKVTNIINSSNTILWNGPAGYFENPNFANGSIEIAKTIINNNKLNKIFSVVGGGDTVSLLNSINAVDSFNFVSTAGGAFLEYLEGKKLPGITALNQ

SEQ ID NO: 129379 - protein, 388 aa, Unknown
  Bacterial polypetide isolated from the Sargasso Sea
MSKPNNHTDLGDVLIRSDLNVPIINNEITDKFRISKSINIINSIYESSRTITFTSHLGRPNNSDPNFSLIKIADAMSELLDNEKVMFIDAIHGSKVEEAIKNQKSKIFLLENLRFDEGEINNSLDFAANVTKPFQTYIFDAFGAAHREHASVVSFGNYLTSYQGPLVSEELKELNKILDTNKSGYSVLLGGAKISDKLSLIENLLPKVEKLMIGGGMCFTFLKALGYEIGNSIFEESFVAKAKFLMDSKYGDKIVLPTDFGVTESIESNIRSNIKVEDFQENHIGVDIGNETLSEFSSILNASKYIFWNGPMGIFEIDEYSTGTREITKVISMSQAYSSVGGGDSVSAINKFSDRKKFNHISTGGGASLEFLEGKKLPGVNIYKPLII

SEQ ID NO: 129380 - protein, 392 aa, Unknown
  Bacterial polypetide isolated from the Sargasso Sea
MKSILKEKNLNNKKILLRLDLNVPLENGKISDTTRIDKILPTLNFLLKQKTKVIILSHIGRPKGKKVKELSLKPIGEDLGKKLKVRVKLITKNIYEIKNKDFFENFDEEILILENIRFYYEEEKNDYKFAKHIANLGDIYVNDAFSCSHRAHASIHQIPKYLPSFSGLQLDLELAALNKITAEIVKPITCIIGGSKISTKIDIIKNLIPKFDNIIIVGGMANNFIEYFGYNIGKSIKDKNCRQIVEEIISLSKKKNCKIIYPEDVLVSKNLNGSSKNKELDQILSDEMILDIGPKTIKNIIDIINNTKTILWNGPAGYFENPNFANGSIKIAKKIIENNKSNKIFSVVGGGDTVSLLNNLNVVNNFNFVSTAGGAFLEYLEGKKLPGISALN

SEQ ID NO: 129381 - protein, 396 aa, Unknown
  Bacterial polypetide isolated from the Sargasso Sea
MGEINFFPDDLEIKDQKIILRLDLNVPIKDKVIKDDTRITLCLPFINRLIEKKAKIIIISHLGRPKGINVPDLSLIPVYKYLKDALKTNVYFFRGTFDGETKEKFSHLKGGEVILIENIRFFKEETEDGQDFSKKLGELGDIYINDAFSCSHRKQASVHSITKFVKKSYAGPLLKKEITAINLVIKNKKEPVTCIIGGSKISTKINVISNLLKKVNNIVIVGAMANNFFVHKNLKVGKSLIEKNTKEIIANIYKKAEEHNCKILIPEDCIVGTDFEGTGKNKNIDEIQENEIILDIGFNTIKKIQKKINESNTVLWNGPAGYFENKNFLKGTLSIAENISKNTIEKSLISILGGGDTLAAINKSDDKLTFSHLSTAGGAFLEYLEGKDLPGISVLK

SEQ ID NO: 129382 - protein, 261 aa, Unknown
  Bacterial polypetide isolated from the Sargasso Sea
MINLSSLDLNNKNLVIRVDMNVPIKDGDVLDSTRIKACLSTIEYALKNNAKVLLISHLGRPIEGNFEEEFSLKPVANELSKIMKMDVELIDRLESNKIFNSPSNIQVLENIRFFEGEKENSQELGNKLGSLGDIYVFDAFGTAHREQASTHAAIMNAPIACSGLLLEKEENFLSQALKKYERPYVAIIGGAKVSTKLELIKHINEVADHIIVGGGIANTFIKSSGLNVGNSLTEQSMLEIAKSILDKGKIILPNRVFTSKT

SEQ ID NO: 129383 - protein, 111 aa, Unknown
  Bacterial polypetide isolated from the Sargasso Sea
VTDGDMIFDIGPDSAKALADIIMNAKTILWNGPVGVFEFDQFAEGTKVIAEAIAASPAFSIAGGGDTLAAIDKFGIADKVSYISTGGGAFLEFVEGKVLPAVAILEQRAKA

SEQ ID NO: 129384 - protein, 399 aa, Unknown
  Bacterial polypetide isolated from the Sargasso Sea
MRKISTIDFKSSNTTSGKTVLIRVDYNVPVENELVTDDYRILKSIPTIKYCLDQGAKVVLMSHMGRPKGKVNSNYSLIPAGEKLAELLEVPIKFSEDCISEDAIDVSKNLKDGEIHLLENLRFYNEEIENNSDFSSKLAKHGSIYINDAFGTAHRNHASNSGITKHFATKGIGLLVEQEIKFLSEKLSNPSKPLTLIIGGSKIDTKIAVIKKFLDLADNIIIGGAMANTFLLAMDNNIGMSLAEKDKINVAKNLLKEASKRGTNIILPVDLTGELDSFGSGNITYADAKDIPENMFCEDIGEKSIKLFTNIISSSQTLLWNGTVGVAENPNFAVGTNRIVDAIIENQLTSIVGGGDTVAAIRNYDNSLIEQFSHVSTGGGSCLEMLSGKTLPALEMLKK

SEQ ID NO: 129385 - protein, 372 aa, Unknown
  Bacterial polypetide isolated from the Sargasso Sea
MNHLEQTVIKDKKVGLRVDLNVPIENGEILSHERLSAALPTILYILKHTKKLCVITHLGRPREGEFDINQSVMPIKKWFEKRLNLDIELLNNFENIPENICFMENIRFFKGEKDNDKNLSMQIANVFDVYVMDAFATAHRSAASTFGAIELSKNACAGLLFSDEIKNLESALEENKQILSIVGGSKVSTKLKVIENLLTKSSSVVVGGGIANTFLKAAGKPIGNSLVEDNMLDTAKELLTTNKIILPKSVYVAESPQSNQVNLVSVEDVPKNKMILDIELNEEIIPVDHEYIIWNGPLGIFEIDQFSNGTKQLIGFLENSKSKVIAGGGETLFAINKFSETNKFHYVSTAGGAFLEYLSGNKLPSIEALRLK

SEQ ID NO: 129386 - protein, 291 aa, Unknown
  Bacterial polypetide isolated from the Sargasso Sea
MFKGTNDQIVFLENIRFYEEEEKNDTSFAKHLAGLADLYVNDAFSCSHREHASISKITEFLPSFAGIQLETEINALKKVTSEIKKPITCIIGGSKISSKIGIIKNLIPLFDNIIIVGGMANNILSHKGSRIGKSIKEENCEMIIKEIFESSKNHSCKIIYPEDVMVGKNLDSTSEVKELNNIKDNDLILDIGPKTVNKIKNIIEISETILWNGPAGYFENPNFANGSYEIAKAIIKKNKDRSIYSVVGGGDTIALINKINAFENFNFVSTAGGAFLEYLEGKELPGIKALN

SEQ ID NO: 129387 - protein, 150 aa, Unknown
  Bacterial polypetide isolated from the Sargasso Sea
LIQEAEQKGVELLLPVDAVIAERFDNNASTRIISIEEGAPEDWLILDVGPRSIDIFSHSILGSGTVLWNGPMGVFEMEKFSKGTYAIAESLANATDSGSVTIIGGGDSAAAIQNYGLSERITHVSTGGGASLEFLEGKELPGVRAIRKSK

SEQ ID NO: 129388 - protein, 313 aa, Unknown
  Bacterial polypetide isolated from the Sargasso Sea
MIKTLRAFDLRGKNVLLRADFNVPMHKDQVANNFRIKAVLPTILTCIEAGAGVVLMSHMGRPKGEIDSKLSLIAVGEELASLLEMPIKFSDNCISTDSIDTSISLKQGEVHLLENLRFHSGEEDNEMEFSSQLARHGQIYINDAFGTAHRSHASNVGVIPYFKNAGIGWLMDKELNYLQRIMSRPKTPLTIILGGAKIDTKLELINQFLEKADNIIIGGGMAFTFLKAKGKNIGGSLLDKSMIKIAKDIMNNAMSKGTKIILPIDAVCAASPKDISDKKTYPIDEIPSKMMGLDIGPDSVVRFNEILGNSETI

SEQ ID NO: 129389 - protein, 117 aa, Unknown
  Bacterial polypetide isolated from the Sargasso Sea
NITRITKVNSVQNDELILDQILSPAAIKKIIQAKKIIWNGPVGVFERQTFSSGTKALAEAIASSKAFSLAGGGETLLAIKMFIEKNNISYCSTGGGAFLEFMEGKELPSLSALGFKF

SEQ ID NO: 129390 - protein, 383 aa, Unknown
  Bacterial polypetide isolated from the Sargasso Sea
MTSKNLGNVLIRSDLNVPIRNGTVLDNFRIKKSIEYIEELQNISSSVTFISHLGRPKGVEDSLSLKPISDEMSKLLNQDVVFINNNLDEDIKNILKSKEKGIFLLENLRFNEGEIMNDEKFAKGISSPFDTYILDAFGASHREHASIVKIGNHLNSFQGPLMSKEIEELDKVLNESNQDFTIILGGAKVSDKLALIKNLLPRVNSLLIGGGMCFTFLKALGHNIGNSLCEDQFIESAKEILDSADGKKITLPVDFGVTKAIDSHARNNIDLSQFSDDDIGVDIGNETIKNFQEILSKSKTIFWNGPMGVFEVDEFSHGTKEITNAIAEMEVYSIVGGGDSVNAINRFSNVDKFNHVSTGGGASLEYLEGKALPGVNIYNQLII

SEQ ID NO: 129391 - protein, 335 aa, Unknown
  Bacterial polypetide isolated from the Sargasso Sea
MGRPKGVKDNKLSLTPVYKFLKENLNTNIYFFMGDIDNETKNKFAYLKGGEIILLENIRFFKEEGENDDNFAKRLAGLGEIYINDAFSCSHREQASIHKITKYIKDSYAGPLVKKEITAINTIIENKKEPVTCIIGGAKVSTKINVICNLIKKVDNIIIVGAMANNFLSFNGLKVGKSLIEENSRKVIDLIYSKAKKYNCNIFIPEDCNVSTDTQSSGKIKKNNLIDENEIILDIGPKTIQNIEKIIDQSNTVLWNGPTGYFENKEFSIGTLAVAKKISENTIKKSLISILGGGDTVSAVNKSADKFTFTHLSTAGGAFLEFLEGKDLPGLNVLK

SEQ ID NO: 129392 - protein, 396 aa, Unknown
  Bacterial polypetide isolated from the Sargasso Sea
MKNISNQDITFKDKKVLLRVDLNVPMKNGSITELSRIEKIIPTIKLLLDKKAKIIILSHIGRPKGKFIEGMSLRPISKKLESLLSEKILFYENIINENTLSEINKIQSESIIMLENIRFNKGEEKNDIKFSKNLSKLGDIYVNDAFSCSHRSHASIDGITKFIPSYFGLQISQEIDALKKITSEIKKPVTLIIGGSKISTKINIINNLVKKFNNIVIVGGMANTMLKHTGSKVGKSIYEDNCEFLIKEILDVSKKYNCTITCPVDVVVSQNIEGHGKNKNINQINEDEMILDIGPNTINNIKKIINESNTVLWNGPAGYFENPNFQNGTREILHAISNKTINDNIFSVAGGGETVAAINKFKKLDSFTFVSTAGGAFLEYLEGKTLPGIKAINKNV

SEQ ID NO: 129393 - protein, 396 aa, Unknown
  Bacterial polypetide isolated from the Sargasso Sea
MSDLKIFSENIPLNNKRVIVRLDLNVPLENFKIKDYTRIKVVQEFLIKLIEKKAKIILISHLGRPKGKIVNDMSLKPVLEYLEKKLGSKIYFFKEKIDHSAVDASKKLKGGEILLIENIRFFKEEENDDENFAKDLSKLGDLYINEAFSCSHRKQASLHNITKFIDSYGGPLLNKEIQSINLIIKNKKKPVTCIIGGSKVSTKINVILNLLKNANNLVIVGAMANNFLKFKGFNIGASLIEKGAETVIKDIYNSAEKNKCKILIPKDCMVSSDINGSAKYKILKEITSEDIVLDIGKSTVKLINETIENSKTVFWNGPAGYFENSNFSGGTLSIAKKISENTKSGSLISIVGGGDTISAIKNSEYKNVFTHLSTAGGAFLESLEGKELPGIKVLKK

SEQ ID NO: 129394 - protein, 119 aa, Unknown
  Bacterial polypetide isolated from the Sargasso Sea
MDDKSQIKELNQISDDDFILDIGPKTLNKIKHIIGNSETILWNGPAGYFENPNFANGSYEIAKEIIKKKSIYSVAGGGDTIAVLNQINATKDFDFISTAGGAFLEYLEGKELPGIKALN

SEQ ID NO: 129395 - protein, 346 aa, Unknown
  Bacterial polypetide isolated from the Sargasso Sea
TRIISSVPTIKYLVNRNCKVLLTSHLGRPEEGKFDQKFSMCPVAEKLSEILNHEIDLIDSIDSSDIFNTTQIQLLENLRFLIGERDNNEELGNQLANKGDVYIFDAFGTAHRKQASTYSAIQQAKLSCAGLLLEKEVNALNKALTSIENPFTAVIAGSKISTKLELIAHLNSKADLIIVGGGIANTFLKSQGFNVGESLVENDMIEIAKELFNSGKIVLPNKVIVADSIDSNSSAIKNIDSVSSSDKIFDINLSSNMSEILKNSKTILWNGPVGVFEKEPFQKGTHQLAKTIAESDAFSLAGGGETIAAINKFIKKDEVSYCSTGGGAFLEYMEGKLLPSIEALGG

SEQ ID NO: 129396 - protein, 388 aa, Unknown
  Bacterial polypetide isolated from the Sargasso Sea
DQKNKTVLIRFDLNIPLNKEASTISDRITRIKNPIQNLLNKNNKVVILSHLGRPKGKRNDELSLNQIISSLENVLQKKIIFLSNCIGDEIEKKINSLSQDSIILLENCRFHEGEEQNDKFFASELSKLADVYINDAFACSHRAHASIEAITNFIPSYCGELLHEEILNLNDVVNNPKTPALTIIGGSKISTKITVIKNLLQKMDSIVIAGGMANNFLKYLGNDVKNSLIENDVDHLVKEIINFANEQKCKLILPLDVVTAEKVSETTEINECAVDAVKDNQMILDIGKQTIELIKNEISNCETVFWNGPVGVFETKPFHKGTFEIAKFIAEITDKNSLRSFAGGGDTISALDMAAVKDKFSYVSTGGGALLELIEGKKLPGLVALGAL

SEQ ID NO: 129397 - protein, 397 aa, Unknown
  Bacterial polypetide isolated from the Sargasso Sea
MSDLKIFSDSVQVNNKRVIVRLDLNVPIKNFEIEDDTRIKVVIPFLNKLLKKKAKVILITHLGRPKGKVVPEFSLNPIFNYLQKNFKEKIYFYQNGFDENAVDASNKLASGEMLLFENIRFFKEEESNEETFAKKLADLGDIFINEAFSCSHRKQASIHKITKFIDSYGGPTLEKETNSIDLILKNKKGPVTCIIGGSKVSTKINILSSLSKNSDNIVIVGAMANNFLKFNGLNVGASLLEKDSENIVKHIIKMAEKNKCNIIIPVDCNTSINVDGSSTYKSLDDVESEDMILDVGKKTIELISKTIDNSNTVFWNGPAGYYENKNFSVGSELIAKKIAENTKSKSLISIVGGGDTVAAIKNTGLEKVFTYLSTAGGAFLESLEGKELPGIQVLKEN

SEQ ID NO: 129398 - protein, 400 aa, Unknown
  Bacterial polypetide isolated from the Sargasso Sea
MIKIKNLDDLLENNLKGKTVYLRADLNLPTINGKVTDTTRIKSILPTIRELKKNKCKIVILSHFGRPKGSYNKKMSLKHIIPKVEKVTRSKIYFSKDHSGINFEKLIKKIPDGSVVIMENTRFHKGEEKNFKYFAKDLAKNCDFFVNDAFSVAHRSHASVTGLTNYVPSFSGRSLEKEVITVSKFLSSKNKKKLAIIGGSKISTKINLINNLLKNVNAIVIGGAMANTFLLAQGKKIGKSLNEKTMIKTAKKIMSNASRKKCKIILPVDAVVASNLKKGGKFSEYNIDNIPDDGLILDIGKNSISIIDDEISKTKEVLWCGPLGLFEQSPFHVGTASVAKTLSKMTKNGKIVSVAGGGDTVAAISQSNYVNDFTYISTAGGAFLEMIAGQKLPGIEVLKK

SEQ ID NO: 129399 - protein, 202 aa, Unknown
  Bacterial polypetide isolated from the Sargasso Sea
GSKISTKINIINNLVKKFNNIIIVGGMANTILKHTGFKVGKSICEDNCEMLIKEIFDYSKKYNCKIICPEDVVVSQNIEGNGKNKNINEINKDEMILDIGPKTIFAIKKIINESNTVLWNGPAGYFENPNFQNGTREILESISNKTINDKIFSVAGGGETVAAINKFKKLESFTFVSTAGGAFLEYLEGKTLPGIKALNQNV

SEQ ID NO: 129400 - protein, 373 aa, Unknown
  Bacterial polypetide isolated from the Sargasso Sea
MKALSEIDLNNKKVGIRLDLNVPISAGKILDHEKLNAALPSIINILEKTSNLCVISHLGRPTEGSFDQELSLLPIKEWFEERMEKEIPLINDLDSVPEGLSFLENIRFFSGEKENNEDLAEEIANTFDLYVMDAFATAHRKSASTYGAIKKSKNVCMGMLFSYEIKKIDQALKESSKLNSIVGGSKISTKIKVLENLLEKSQKVLVGGGIANTFLKAMGYEIGKSLVEDNMLDMAEKMLKTDKIIVPENVYIAESSEVGEAILVPVEDVHKDKMILDIEFNIKEMDKLLTEMTIWNGPLGMFEHDKFSNGTKKLISYLEYTSSKVIAGGGETIFAIKKFSDIKNFDYVSTAGGAFLSYLGGDLLPAIEALKTK

SEQ ID NO: 129401 - protein, 123 aa, Unknown
  Bacterial polypetide isolated from the Sargasso Sea
GKGKEKNINEIDEDEMILDIGPKTILSIEEKINNSKTILWNGPAGYFENPNFQNGTKKILEIISQKTTEDKIFSVAGGGETVAVINKFKKFDSFTFVSTAGGAFLEYLEGKTLPAIKALNKNV

SEQ ID NO: 129402 - protein, 270 aa, Unknown
  Bacterial polypetide isolated from the Sargasso Sea
DIEFSKKLSSLGDIYVNDAFSCSHRSHSSIDGITKYIPSYYGLQITQEILALKKITSEIKKPVSLIIGGSKISTKINIINNLAKKFDNIIIVGGMANTMLKHTGLKIGKSICENDCETLVKEIISISKKFNCKITCPEDAVVSKSIEGDGKNKDLKDINDDDMILDIGPKTILMIKKIIYNSNTVLWNGPAGYFENPNFQNGTKEIVEIISQKTINDKIFSVAGGGETVAAINKFKKLDSFTFVSTAGGAFLEYLEGKNLPGIKALNQNV

SEQ ID NO: 129403 - protein, 235 aa, Unknown
  Bacterial polypetide isolated from the Sargasso Sea
THSAIKSASIACAGLLLERENEFLLKALKNYKNPYIAVIGGAKVSTKLELIKHICSVADQVIVGGGIANTFLKASGFNIGKSLVEDSMIDIAKEILKEGKIVLPTTVITSKTFEGDDIRETSINEVTDEEMILDLHLKNETITLIEQANTILWNGPMGVFENSSFSKGTKDLSEAIANSKAFSLAGGGETLSAINKYIKSDDVSYCSTGGGAFLEFMEGKILPSINMLNSKITGS

SEQ ID NO: 129404 - protein, 208 aa, Unknown
  Bacterial polypetide isolated from the Sargasso Sea
MRTIDQFNFKNKKAIIRVDFNVPIDNNKVTDTSRIKAAKQTIDKVCNDGGSCVLVSHLGRPKGFQKEFSMTNIINDVENVLERNVFLSKDVIGPDAKKKSLHLKPNQVLLLENVRFHDEEKKGDIDFAKELSLLADCYINDAFGTAHRSHASTTTIPTFFNDKFFGKCLEREVNSIKKVLSSGEKTILAILGGAKISSKIPILKTYLK

SEQ ID NO: 129405 - protein, 399 aa, Unknown
  Bacterial polypetide isolated from the Sargasso Sea
MRKISTIDFKSSNTTSGKTVLIRVDYNVPVENELVVDDYRILKSIPTIKYCLDQGAKVVLMSHMGRPKGKIDDKLSLIPAGEKLAELLEMPIKFSEDCISEDSIDVSRNLKDGEIHLLENLRFYNEETENSSDFSSQLAKHGSIYINDAFGTAHRNHASNSGITKHFATKGMGLLIEQEMKFLSDKLSNPSKPLTLIIGGSKIDTKIGVIENFLGLADNIIIGGAMANTFLLAMNHRIGISLAEKEKMNVAKNLLKKASKRGTKIILPIDFSGELETFGSGDICVADAKDIPNNMICEDIGEKSIKLFSDIISLSKTILWNGTVGVAENPNFAVGTNRIVDAIIENQLTSIVGGGDTVAAIRNYNEEYINDFSHVSTGGGSCLEMLSGKKLPALEMLKK

SEQ ID NO: 129406 - protein, 179 aa, Unknown
  Bacterial polypetide isolated from the Sargasso Sea
YYEVADHIIVGGGIANTFIKSSGLNVGNSLTEQSMLEIAKSILDKGKIILPNRVLTSKTFEGEDIKETSISNIGNDEMILDLYLEQETKTLINNAKTILWNGPMGVFENSLFENGTKELSKEIAKANAFSLAGGGETLSAINKYIKSDDVSYCSTGGGAFLEFMEGKVLPSIKALNSKK

SEQ ID NO: 129407 - protein, 390 aa, Unknown
  Bacterial polypetide isolated from the Sargasso Sea
MIINAVSDEKYLGDVLVRSDLNVPIVNNEISDDFRISKSLEIIDKIYDYSRSITFVSHLGRPKANDVDNSLRPIAENMSEKLKNEKVHFIKSIYGDDVKKSIKNLTSKIFLLENLRFDEGEMKNDIEFSKLVTSPFETYIFDAFGASHRQHASVVSFGNFLNSYQGPLMNKEISELDKLLNNEESGYSVLLGGAKISDKLGLIDKLLPKVEHLMIGGGMCFTFLKAMDYEIGKSLVENSFISKAKDLINSKYGKKIVLPTDFGVTESIQSNIRHEINSDNFSKTQIGIDIGPDTITKFSKIISSSKNLFWNGPMGIFELDQFSHGTKAITQAIAKADGYTSVGGGDSVSAINKFSNLNNFNHVSTGGGASLEYLEGKNLPGVNIYKPLII

SEQ ID NO: 129408 - protein, 337 aa, Unknown
  Bacterial polypetide isolated from the Sargasso Sea
VTFISHLGRPKGTEESLSLKPISDEMTKLLNQDVVFINNNLDEDIKNILKTKEKGIFLLENLRFNEGEIRNDEKFAKSLARPFDTYILDAFGASHREHASIVKIGDHLNSFQGPLMSKEIEELDKVLNVSNEDFTIILGGAKLSDKLALIKRLLPRINSLLIGGGMCFTFLKALGHNIGNSLCEDEFIESAKEILDSADGKKITLPIDFGITKIIDSHARNDIQLSQFSDDDIGVDIGKETVNKFQEILSKSRTIFWNGPMGVFEVDEFSYGTKEITKAIAEMEVYSIVGGGDSVSAINKFSSLEKFNHISTGGGASLEYLEGKALPGVNIYNQLII

SEQ ID NO: 129409 - protein, 236 aa, Unknown
  Bacterial polypetide isolated from the Sargasso Sea
FKSSVAGFLLEKELKYLQGAIDSPKRPLAAIVGGSKVSSKIGVLDSLLDKCDKIMIGGGMIFTFYKARGLDVGKSLVEEDKLELARDLEVKAKAKGVELLLPTDVVLANEFSPDAESKISQIDSISGNWMGLDIGPDSIKVFQNALAECKTIIWNGPMGVFEFDKFAEGTNAIATTLADLSAFSEVCTIIGGGDSVAAVEKAGLADKMSHISTGGGASLELLEGKTLPGVASLNEV

SEQ ID NO: 129410 - protein, 384 aa, Unknown
  Bacterial polypetide isolated from the Sargasso Sea
MINLSSIDIANKNLVVRVDMNVPMEDGHILDATRIEACIPTINYALKNNAKILLISHLGRPTEGSFEEKFSLKPVAKHLSNIINKTCKLISSLESDEIFDGESNVQLLENIRFFKGEKENCKDLGNKLASLGDIYVFDAFGTAHREQASTHSAIKSAPIACAGLLLEKENEFLFQALNKYEKPYIAVIGGAKVSTKLGLIKHISGVADHIIVGGGIANTFLKASGFNVGKSLIEDSMIDVAKEILKQGKIVLPTTVITSKTFKGDDIRETSINEVTDEEMILDLYLTDKTTALIEKASTILWNGPMGVFENSFFSKGTKDLSEAIANSKAFSLAGGGETLSAINKYIKSDDVSYCSTGGGAFLEFMEGKILPSIDILNSKVTGS

SEQ ID NO: 129411 - protein, 352 aa, Unknown
  Bacterial polypetide isolated from the Sargasso Sea
SNKNKIFIIAHFGRPKGEVLEKYSLKFILSSLREILEIKKIYFLENLQKDNINKTINDMNYGEVCLIENIRFHKGEEKIDLNFAKNISSLFDVYVNDAFSASHRNHTSITGFAKYIPAVAGNHLIQEIKKIDSFVENVKKPNMAIVGGSKISTKIKLLNNLIKQFNCIVIGGAMANTFLLSNNINIGKSLVEKDLVNEAKNIQKKAKKYNCKLILPTDVVCGKSLDDKKPIEFNINEIESHFMILDLGKTTTQIINQEIINSKIVLWNGPVGAFEYKPYDKATNAIAQNIKENGKKLNIDILAGGGDTVSAIKNANAEDGFNYISNAGGAFLEWLEGNQSPGVIAIKENNFI

SEQ ID NO: 129412 - protein, 291 aa, Unknown
  Bacterial polypetide isolated from the Sargasso Sea
MKTVVLKFGGTSVGNIDRIKKVCKIIATYKKKKYNVVVISSAMSGVTNELVNKSKSLSNNFDLAEYDALLSTGEQVSCALIAGRLNHIGLKSRSWLSWQLPIVTEGNHSGARINKININELNRYIKNGGIPVVTGFQGINKNYRITTIGRSGSDATAIMLAKYIKADECIIFTDVEGVYTTDPRQHKKAKKIKKIFYDEMLEMASLGSKVMQPTSIQDAKLNEIDIKVQSSFASKSGTLITNSKKSFSDQIITGISSTKNDAKITIVGVKDRPGVAASIFKPLSKNLINVD

SEQ ID NO: 129413 - protein, 120 aa, Unknown
  Bacterial polypetide isolated from the Sargasso Sea
MQQVIVQKFGGTSVGSGERIAAVAEIIKKEAERNTVVVVVSAMAGETDRLIELSKLFGNNSNKREFDALISTGEKVSASLLAMALDSLGLKAKSYSAAQVSLKTTSNFSKARILDIDKEK

SEQ ID NO: 129414 - protein, 288 aa, Unknown
  Bacterial polypetide isolated from the Sargasso Sea
SNSRIVNVNVKKINKYLDQGIAVVPGFQGVSKNGDITTIGRGGSDATAVAFAKLFNADTCEIYTDVDGVYSSDPNKIPVAKKIDKISYDEMLELSSLGAKVMQPSAVQTAMMYDISLEVKSTFTDRRGTKIFDQGKIDYSKSVTGVAYSKDDAKLTIIGVEDKPGVAADIFEPLNNAQINVDMVIQNVSSDYSTTDITFTVKRDDLLKTKGILKNNKKIKYKNITHNEKVAKVSIVGAGMVSTPGVTYKMFRALADDKINILAISTSEIKLSVIIEEENTLKAVKKLH

SEQ ID NO: 129415 - protein, 178 aa, Unknown
  Bacterial polypetide isolated from the Sargasso Sea
MKIVVLKFGGTSVGSVERIKKVVDIIISFIKKKYKVIVVSSAMSGVTNDLIKKSKELSSDFNTSEYDALVSSGEQMSCALIAGRLCHIGYKSRSWMSWQIPIVAEGKYTSAKIREIKQSNIKKYLKSGGVPIITGFQGINFDNRITTLGRGGSDATAIMLAKFFKAEKCIIFTDVVGV

SEQ ID NO: 129416 - protein, 179 aa, Unknown
  Bacterial polypetide isolated from the Sargasso Sea
MKIVVLKFGGTSVGNLNRIKIVSNIVSSYIKKRFKVIVISSAMSGVTNDLIKKARELSSDFNKSEYDVLLSTGEQVSCSLIAGRLNYLGYKSQSFMSWQIPIIANGPHGSSRINYINKNKILKYLKSGGTPIVTGFQGVNHSQRLTTLGRGGSDASAIMIAKFFNAEKCIIYTDVDGVY

SEQ ID NO: 129417 - protein, 289 aa, Unknown
  Bacterial polypetide isolated from the Sargasso Sea
NELIKLSNTVAKNFDKRELDVLLSSGEQITCALLAGALIELNINAKSWMNWQIPILTEGEHSNARIINMNTSKINDYLKTGVAIVPGFQGISKDGEITTIGRGGSDASAVAIAKLFETDTCEIYTDVDGVFSTDPNKIPVAKKIDKISYDEMLELSSVGAKVMQSSAVQTAMMYNIPLEVKSTFTNRIGTKIFDQQEIDYSKSVTGVAYSKDDAKITLIGVEDKPGVAANIFEPLNKSQINVDMVIQNISSEHKKTDITFTIKREDLSKTKEILQSNSKIKYKEITHND

SEQ ID NO: 129418 - protein, 190 aa, Unknown
  Bacterial polypetide isolated from the Sargasso Sea
MSITVMKFGGTSVANIERIKNVADIIKYKKKNNSKLVVVVSAMAGVTNDLVQKSKDISRNFSNEEYDVLLSSGEQVTSALLSACLLDKNIQARSMLAWQIPIVTEGQHKNSRILSVNSKAILNYLDMNYVVVIPGFQGLSEKMRVSTIGRGGSDASAVALAKALNADRCEIYTDVEGIFTTNPEICDKAK

SEQ ID NO: 129419 - protein, 287 aa, Unknown
  Bacterial polypetide isolated from the Sargasso Sea
GWQIPIITDSNHQKAKILNIDKNRIDQFLKNYDVIVVAGFQGVDMDGNITSLGRGGSDTTAVAVAAAVDADRCDIYTDVDGVYTTDPNLEPKAKKINKLAFEEMLEMSSTGAKVLHTRSVELAMKNNLTLQVLSSITKKTGTFVVDENKLIEKEIVSGVSYSNNESKLTLSGIADKPGISATIFGLLANNNINVDMIVQNTSQDGVTANITFTVPNSEIHNTKKLLEDNQKLIDFKSIKTDTNISKISVIGMGMMSQSGVAKKMFTTLAENSINILAISTSEIKISV

SEQ ID NO: 129420 - protein, 263 aa, Unknown
  Bacterial polypetide isolated from the Sargasso Sea
IKKSKNISHNFKDSEYDVLVSAGEQISCALIAGRLSHMGYKSESWMSWQIPILAEGKHAYSRITNINKKKIINYIKVGGIPIITGFQGINNNNRITTLGRGGSDASAIMCAKFFHAKKCIIYTDVEGVYTTDPNILKKAKKIKIISYEEMLEMASLGAKVMQPSSIQDARLNEIDINVKSSFANKKGTLITKRKNIFRNKIITGITSTKNDAKVTLVGVKDRPGVAASIFKPLSKNSINVDMVVQNISTDGRETDLTFTINSE

SEQ ID NO: 129421 - protein, 298 aa, Unknown
  Bacterial polypetide isolated from the Sargasso Sea
IVIVSAMAGKTNELISLANEISSNFNKRELDVLLSSGEQVTCSLLAGALIELKVNSKSWLNWQIPILTEGKHTNARIVNMNIDKINDFLKEGVAIIPGFQGISNQGEVTTIGRGGSDASAVAVAKLFKTDCCEIYTDVDGVYSTDPNKIPVAKKIEKISYDEMLELSSLGAKVMQSSAVQTAMMYDIPLEVKSTFTDRKGTKIFNQQNIDYSKSVTGVAYSKDDAKITLIGVEDKPGVAANIFEPLNNAEINVDMVIQNVSSDQQTTDISFTIKRVDLFKTNEILKNNKNIEYRKYYK

SEQ ID NO: 129422 - protein, 278 aa, Unknown
  Bacterial polypetide isolated from the Sargasso Sea
MAKKVLKFGGTSVGTTERILHVAQIIKKEHDSGNEVIAIVSAMSGKTNELLNQSKTISQDFNKRELDVLLASGEQVTSSLLSGALIELGVNSRSWLNWQIPILTEGENLNARIINMNVSKINKFLSKGGVAIIPGFQGVSKNGEVTTIGRGGSDATAVAVAKIFEADKCEIYTDVDGIYSTDPNKIPVAKKIDKISYEEMLELSSLGAKVMQSSAVQTAMMYNIPLEVKSTFTDRQGTKIFDQESIDYTKSVTGVAYSKDDAKVTLTRVQDKPGVAAN

SEQ ID NO: 129423 - protein, 234 aa, Unknown
  Bacterial polypetide isolated from the Sargasso Sea
MKIVVLKFGGTSVGTIKKIKKVAEIIADYKKKNYKVVVVSSAMSGVTNELVKKSFEISDNFSEAEHDVLVSSGEQMACSLIAGRLIHKGFKSRSWLSWQVPIITVGTHKNSRINQINKNKIIKYIKEGGIPIITGFQGVNNENRITTIGRGGSDASAIMFAKFLKAERCIIYTDVEGVYTTDPNKLNKAKKIKVISYEEMLEMASLGAKVMQPVSIQDARLNRIDIEVKSSFIK

SEQ ID NO: 129424 - protein, 301 aa, Unknown
  Bacterial polypetide isolated from the Sargasso Sea
AMSGVTNDLVKKSRNISSNFNFSEYDALVSAGEQISCALIAGRLNHIGYKSRSWTSWQIPILTEGEHKSSRISKINKRKIINYIKTGGIPIITGFQGINNNNRITTLGRGGSDASAIMCAKFFKAKKCVIFTDVDGVYTTDPNNLKNAKKIKIISYEEMLEMASLGAKVMQPHSIQDARLNRIEIDVKSAFVEKKGTIITKRKNIIRNRTITGLTSTKNDAKVSLVGVKDKPGVAAAVFKPLSQNYINVDMVVQTSSRNNKETDITFTIKLDDLPKTLKLIKQNKKIKYRDLIANKGVSKV

SEQ ID NO: 129425 - protein, 326 aa, Unknown
  Bacterial polypetide isolated from the Sargasso Sea
LFALQKQLSKGRNAQEYDVVVSSGEQVTAGLLSMALNSQEIQSRSFMGWQIPILTDNTFSKANIVKISIDVLMKALNRNEIVVIPGFQGVTDENKITTLGRGGSDTTAVAIASALKAKRCDIYTDVDGIYTADPRMVPKAKKLDKISYEEMLEMASQGAKVLQTRSVALAMKYKLKIKVLSSFENKDGTLVLHEDEIMEKKNVSGIAFSLDEAKLTVIGIPDKPGQASILFKSLGLKAINVDMIVQSSSANKSATDLSFTVPKNELDEAINTIKLVQKKIGFKSIISDSDVAKISVIGIGMKTQAGVAQKMFDVLAEKNINLKVIS

SEQ ID NO: 129426 - protein, 307 aa, Unknown
  Bacterial polypetide isolated from the Sargasso Sea
IVLGNKVIAVVSAMAGKTNELIKLSKEISNEFNKREFDVLLSSGEQVTSALLSGALIKLNIRAKSWLSWQIPILTSGEHINARIINMHVEQINKYLDEGGVPIIPGFQGISKEGDITTIGRGGSDATAVAVAKIFNSDSCEIYTDVDGVYSTDPNKIPVAKKIERISYDEMLELSSLGAKVMQSSAVQTAMMYDIPLEVRSTFTERKGTKIFSQENIDYTKSVTGVAYSKDDAKITLTGVQDKPGVAANIFEPLSKAQINVDMVIQNISSDQKTTDITFTVKRDEVIKTEQILRDNKNIKYKQNYSK

SEQ ID NO: 129427 - protein, 176 aa, Unknown
  Bacterial polypetide isolated from the Sargasso Sea
MSIIVMKFGGTSVANLDKISNVADIVEREQEKHKIIVVLSAMAGTTNHLQAYLDKIKSSPSPENDLVLTSGEQITVGLLSSILNQRKIKSMPILGWQVPIITDEYHEKAKILNINKEKILSHLKKFDVLVLAGFQGVSIKGHITSIGRGGSDTTAVAIASSVKAERCDIYTDVEGV

SEQ ID NO: 129428 - protein, 284 aa, Unknown
  Bacterial polypetide isolated from the Sargasso Sea
VIAGFQGIDDLNKLNTLGRGGSDTSAVAVAAAVGADECQIFTDVDGVYTTDPRVVKSARLLNKITFEEMLEMASLGSKVLQLRSVEFAGKYRVKLRVLSSLTDPNCNLEDEAKSGTLITYEEDINMEKAEVSGIAFNKDEAKVTIVGVPDEPGVAFKILEPVASANIEVDVIVQNVGRDGTTDFSFTVPRKDLAKTIDTLQDVSKEIRAREIIGDDKICKVGLVGVGMRSHVGIASKMFKALSNQNINIQMISTSEIKITIVIDENLMESAAQILHETFGLDKR

SEQ ID NO: 129429 - protein, 252 aa, Unknown
  Bacterial polypetide isolated from the Sargasso Sea
KIKNISDIVFKEAQSNKVIVVLSAMAGETNKLQSYLDEFESQYSAESDLVLTSGEQVTVGLLSAALKNRGAKSIPLLGWQIPIITDNNHEKAKILNINKKRIQKFFETNDVIVLAGFQGINQEGQITSLGRGGSDTTAVAIASAVKAERCDIFTDVDGVYTTDPNINQNAKKISKMSYEEMLEMASTGAKVLHTRSVELAMKNNLILQVLSSLTKENGTFIVDETELIEKEIVSGVSYSKNEAKVTISGILD

SEQ ID NO: 129430 - protein, 266 aa, Unknown
  Bacterial polypetide isolated from the Sargasso Sea
MKTVVLKFGGTSVGNIDRIKKVCKIIATYKKKKYNVVVISSAMSGVTNELVNKSKSLSNNFDLAEYDALLSTGEQVSCALIAGRLNHIGIKSRSWLSWQLPIVTEGNHSGARINKININELNKYIKNGGVPIVTGFQGINKNYRVTTIGRSGSDATAIMLAKYFKADECIIFTDVEGVYTTDPRQHKKAKKIKKIFYDEMLEMASLGSKIMQPTSIQDAKLNEIDIKVQSSFASKSGTLITNSKKSFSDQIITGISSTKNDAKITI

SEQ ID NO: 129431 - protein, 222 aa, Unknown
  Bacterial polypetide isolated from the Sargasso Sea
MSIIVMKFGGSSVADIDCIKNVAKKVVAQYKKNKKIVVVVSAMSGTTNNLIGLTKQLSKGRNAQEYDVVVSSGEQVTAGLLSMALNSQEIQSRSFMGWQIPILTDNTFSKANIVKISIDVLMKALNRNEIVVIPGFQGVTDENKITTLGRGGSDTTAVAIASALKAKRCDIYTDVDGIYTADPRMVPKAKKLDKISYEEMLEMASQGAKVLQTRSVALAMKY

SEQ ID NO: 129432 - protein, 273 aa, Unknown
  Bacterial polypetide isolated from the Sargasso Sea
LKFGGTSVGSVDRIKKVAKIIKRNIKNKKKVIVVSSAMSGVTNDLISKTKKISNNFSPSEYDVLVSAGEQMSCALISGRLNYLGIKSRSWLSWQIPIFTEGEHKKSRITNIFKKRILKYLISGGVPVITGFQGINSENRLTTLERGGSDSSAIMIAKFFNAEKCIIYTDVEGVYTTDPNFLKKAKKIKKISYEEMLEMSSLGAKVMQPASIQDARLNRVNVDVKSSFVNKSGTLITKRANISKEKIITGVSFTNNDSKITLIGVVDKPESGSF

SEQ ID NO: 129433 - protein, 221 aa, Unknown
  Bacterial polypetide isolated from the Sargasso Sea
VEGNITTLGRGGTDTSAVEIAAAIKADECQIYTDVDGVYTTDPRIEPNARRMSQVTFAEMLELASLGAKVLHIRSVEAAGKHNVPLRVLSSFNPDEGTLITFEEDDMPSKVVSGIAFNADECLIKVQGVQSGTQNLVKILKLFADNGIEIDMINQVNHIFEKIDYAFTVHSNDYPQALELLTEQKVSLGAENIIGLTTIAKVSAVGMGMKSHWGVASLFFD

SEQ ID NO: 129434 - protein, 171 aa, Unknown
  Bacterial polypetide isolated from the Sargasso Sea
MKLVVMKFGGTSVGSIDKINNVANIVEKQLNDKKLIIVLSAMSGVTNKMQEYIDEIKSKEIIENDLILTSGEAVSVGLLSAILKKRNIKSTPLLGWQIPIITDSNHQKAKILNIDKVRIDQYLKNYDVIVVAGFQGVDIDGNITSLGRGGSDTTAVAIAAAVDADRCDIYT

SEQ ID NO: 129435 - protein, 205 aa, Unknown
  Bacterial polypetide isolated from the Sargasso Sea
MKIVVLKFGGTSVGTIDRIRKVADLITNYAKKKYKIIVVSSAMSGVTNDLVNKSKKISKNFSNAEYDALVSSGEQVSCALIAGRLIHKGYKSRSWMGWQVPIITDNKHKFAKINQVYRSNIVKYLKSGGIPIIAGFQGVNHEGRVTTIGRGGSDSSAIMLAKFFKAERCIIYTDVEGVYTTDPKKLKKAKKIKVISYEEMLEMAS

SEQ ID NO: 129436 - protein, 262 aa, Unknown
  Bacterial polypetide isolated from the Sargasso Sea
ESEGISAKSYSASQVSLKTTSQFSKAKILDIDKQRMQKILEDDNVPIITGFQGITEGGDVTTLGRGGSDTTAVAIAAAVDAKRCDIYTDVDGIYTTDPNLVPSAKKLEQISMEGMLELSGQGAKVIQIRAVEFANKYRVPVRVLSSFSKGTGTMINLDDNNMEDAEISGIAFQKNQTKVTFTAVEDTPGIASKILGPLSDADIQVDVIVQNVGIEGKTDFTFTIDSDEKSLLDKVVPIIQESINYKDILIDNQIAQVSIVGV

SEQ ID NO: 129437 - protein, 277 aa, Unknown
  Bacterial polypetide isolated from the Sargasso Sea
MAKKVLKFGGTSVGSIDRVVHAAKIVKKEHDNKNKIIVVVSAMAGTTNNLIAYSEAVSKKFNKRELDVLLTSGEQVTSALMAGALNDIGVKSKSWMNWQIPILTEGEHTNSRIINMNVKVINDYLSEGGVAVIPGFQGISKSGDITSIGRGGSDATAVAIAKIFNTDSCEIYTDVDGVYSSDPNKIPVAKKINKISYEEMLELSSLGTKVMQSSAVQTAMMHDIPLQVKSTFTNRKGTEIINQENIDYTKVVTGVAYSKDDAKITLMGVEDKPRRSR

SEQ ID NO: 129438 - protein, 263 aa, Unknown
  Bacterial polypetide isolated from the Sargasso Sea
ISTLGRGGSDTTAVAISAAFNAKRCDIFTDVEGIFTTDPRIVKSARKLDKISYEEMLELASMGAKVLHTRSVELAMRYGVNLQVLSSFQEKIGTLVCREDKMLESRMISGVASSKDEAKVTLSGVLDKPGIAAAIFGPLSESGINVDMIIQNVSENETTDITFSCPMSQVSEAEEAINTASKKKDISFKACVIDTEVAKVSIVGIGMRSHAGIAKKMFESLANENINILVISTSEIKISILVEQKYMELAVQVLHDAFELDKV

SEQ ID NO: 129439 - protein, 263 aa, Unknown
  Bacterial polypetide isolated from the Sargasso Sea
KIKDIAKNIFTLIKKKKSVVVVVSAMAGETDRLHGLTRNIANVPNEREYDQVVSTGEKVSAGLVAIALSEVGVKAISLDPSKLGLMTNDLHTKATIISVGATKIKTYLRKGYVIVVPGFQGINSKNDITTLGRGGSDLTAVALASALNASHCELLKDDVSGIYTADPKLYKGAKKINYISYQEMLEMSSLGSKVLQAKAVEYANNLKIKLHVKSTKKAAQRGTWVMDEKLIPIKEKNVIRGITHDLKQSKITIVGIEDRPGIA

SEQ ID NO: 129440 - protein, 168 aa, Unknown
  Bacterial polypetide isolated from the Sargasso Sea
MKIIVLKFGGTSVGTTDRIKKVAKIIAKYKKNYSVIVLSSAMSGVTNNLINLSKKISKNFSESEYDVLVSSGEQMSCALISGELIDKGFNSRSWISWQVPIYTEGKYKFSRINKINKRQILNYLKKDGIPIITGFQGINSEKRITTIGRGGSDASAIKFAKYFNAEKC

SEQ ID NO: 129441 - protein, 253 aa, Unknown
  Bacterial polypetide isolated from the Sargasso Sea
MKIVVLKFGGTSVGSVERIKNIVKIVISYIKKRYKVIVVSSAMSGETNKLVKLTKEISNNFTPSEYDSIVATGEQASCSLIAGRLNHQGYPARSWLGWQIPIFTTGNHSNSRIVKINKLKILKFLKKGGTPIIAGFQGINSDHRITTIGRGGSDATAIMVAKFLKAKNCIIYTDVEGVYTTDPNVVPKAKKIKKISYEEMLEMASLGAKVMQPNSIQVARLNRIDIEVRSSFKNISGSLITKRKNISKNNVIR

SEQ ID NO: 129442 - protein, 290 aa, Unknown
  Bacterial polypetide isolated from the Sargasso Sea
DDKELDVLLASGEQASCSLLSGALIDLGIKARSWLGWQIPIITNMNHTSSQIIKIKTDEILNFISEKGVAVIAGFQGISKEMRITTLGRGGSDLSAVAVAKFFQTDSCEIYTDVEGVLTTDPSINEKAKKIEKISYEEMLEMASLGAKVMQPNAVQTSMIDNIPIHVRSTFSENSGTKIISENEIDRKKVVTGIAYSKGNAKVSIVGVVDKPGVAADVFEPIGKNNINIDMVIQNTSLDGKNANITFTIKQEDLNKTLGIIKKSKEKLNYNKITHDDKLAKISIIGAGMI

SEQ ID NO: 129443 - protein, 260 aa, Unknown
  Bacterial polypetide isolated from the Sargasso Sea
MAKKVLKFGGTSVGSIKRILHAAKIVKKEHDNGNKLIVVVSAMAGTTNNLIEHSKEISKKFNKRELDVLLTSGEQVTSALIAGALNDLGIKSKSWLNWQIPIITEGEHSNARIIHMNIKHINDYISSGGVAVVPGFQGVSKSGDVTSIGRGGSDATAVAIAKIFQTDSCEIYTDVDGVYSSDPNKIPLAKKIDKISYEEMLELSSLGAKVMQSSAVQSAMMGDIPIQVKSTFTEREGTEIINQDNIDYTKAVTGVAYQKM

SEQ ID NO: 129444 - protein, 266 aa, Unknown
  Bacterial polypetide isolated from the Sargasso Sea
TDVPGVLTTDPRKVPEAQLMTQVSCDEMLELASLGAAVLHPRAVEIARNYGVPLVVRSSWSDEPGTRLFSQPSRRIGSEGLELGKPVDRAELLEGQAVVALAHVPDEPGVAARLFEGLGAAGLNVDLIVQATHDGSSNDIAFTLAEAELPEAEAFCREHLSEGSQLQVQSGLAKLSIGGAGIMGRPGIAAQLFDGLSKVGISVRMIATSEVKVSCLMQGEQGAKALRTAAQVFELDDHQLQHNPFPGGEGEPDVRGVALDRDQAQL

SEQ ID NO: 129445 - protein, 186 aa, Unknown
  Bacterial polypetide isolated from the Sargasso Sea
MKIIVLKFGGTSVGTVNRIGKVAKIIISYLKKRFKVIVVSSAMSGVTNDLLKKSKLLSASFPKSEHDVLVSSGEQVSCSLLAGKLIDLGFRARSWMGWQIPILTSGEFSKSRIIYINKSKIIKFMKSGGIPVIAGFQGINSDSRITTLERGGSDLSAIMCAKFFGAEKCVIYTDVEGVYTTDPNII

SEQ ID NO: 129446 - protein, 59 aa, Unknown
  Bacterial polypetide isolated from the Sargasso Sea
MSLIVQKFGGTSVADTDSLRIVAERIIQCKKNGNDVVVVPSAMGSSTDELIQLASDLSE

SEQ ID NO: 129447 - protein, 294 aa, Unknown
  Bacterial polypetide isolated from the Sargasso Sea
MKIIVLKFGGTSVGTIDRIKKVAKIIAKYKKKYNVIVLSSAMSGVTNNLINLSKKISKNFSESEYDVLVSSGEQMSCALISGELINQGFNSRSWMSWQIPINTEGKYKFSRINKINKSKIISFLKKGGIPIITGFQGINDKNRITTIGRGGTDASAIMFAKFFNAEKCIIYTDVDGVYSTDPNKLKSAKKIKVISYEEMLEMASLGAKVMQPHSIQDARLNRVDIEVRSSFTDNEGTLITKRKNIINSKIITGISNTTNDAKVTLLGVRDKPGIAASIFKPLSENSINVDMVVQ

SEQ ID NO: 129448 - protein, 226 aa, Unknown
  Bacterial polypetide isolated from the Sargasso Sea
MKIVILKFGGTSVGSIDKIKKVAEIIEEYKKKNYKIIVVSSAMSGVTNELIKKSKGISKNFSDAEYDVLVSSGEQVACSLIAGRLIHKGFKARSWLAWQIPILTKGPQKNSKIHLVNKKKISDYLKKGGIPIITGFQGVNEEGRVTTIGRGGSDVSAIVLAKFFKAKRCVIYTDVEGVYTTDPNKLKKAKKIKIISYEEMLEMASLGAKVMQPVSIQDARLNRIDV

SEQ ID NO: 129449 - protein, 196 aa, Unknown
  Bacterial polypetide isolated from the Sargasso Sea
MIKKVLKFGGTSVGSIERIQHVANIIKKEHELGHQIIAVVSAMAGQTNELIGKSKAISDEFDKRELDVLLSSGEQVTSALLAGALKKIDVKSKSWLNWQIPILTEGDYNNSRIINMNVEKVNEFLNNNGVAVIPGYQGISKNGDVTTIGRGGSDATAVAVAKIFNADTCEIYTDVDGVFSTDPSKIPLAKKIEKIS

SEQ ID NO: 129450 - protein, 267 aa, Unknown
  Bacterial polypetide isolated from the Sargasso Sea
VDIDGKITSLGRGGSDTTAVAVAAAVDADRCDIYTDVDGVYTTDPNMEPKAKKIHKLAFEEMLEMSSTGAKVLHTRSVELAMKNNLTLQVLSSITKEDGTLVVDENKLIEKEIVSGVSYSNNESKLTLSGIADKPGISATIFGLLANKNINVDMIVQNTSQDGISANITFTVPNSEIRKTKKLLEDNQNLINFKSIEADTNISKISVIGMGMMSQSGVAKKMFRTLAENSINILAISTSEIKISVLIDKKFTKIAVKSLHEAYNLDN

SEQ ID NO: 129451 - protein, 200 aa, Unknown
  Bacterial polypetide isolated from the Sargasso Sea
MAKKVLKFGGTSVGSIKRILHAAKIVKKEHDNGNKLIVVVSAMAGTTNNLIEHSKGISKKFNKRELDVLLTSGEQVTSALIAGALNDLGVKSKSWMNWQIPIITEGEHSNARIIHMNIKNINDYISSGGVAVVPGFQGVSKSGDITSIGRGGSDATAVAVAKIFQTDSCEIYTDVDGVYSSDPNKIPLAKKLTKYPTRKC

SEQ ID NO: 129452 - protein, 295 aa, Unknown
  Bacterial polypetide isolated from the Sargasso Sea
DVADRIVSEHKQGHQLVIVCSAMHGETDRLIKLAKQMMPIPDPLAYDLLLSSGEQVTVSLLAMALRARGVDAKPMTGFQSGIKTDAQHKKARILDIDSDILHTILAEAVIPVVAGFQGMDSSGSITTFGRGGSDTTAVALAAALKADECRIYTDVDGVYTTDPRVVPTARRLDRVTFEEMLEMASLGAKVLQIRAVEFASKYNVSVRVLSSFEDGPGTLITDEDADMEQPLVSGIAFDRNQAQLTLVGVPNVPGHAKHILAAISEKGIEVDMIVQNMPNSSGTVDFSFTVQRDDS

SEQ ID NO: 129453 - protein, 251 aa, Unknown
  Bacterial polypetide isolated from the Sargasso Sea
SRITTLGRGGSDSSAIMCAKFFRAEKCVIYTDVEGVYTTDPNNLRKAKKIKVISYEEMLEMASLGAKIMQPNSIQDARLNRIEIDVRSSFVNKQGTSIKKRKDIFRSKVITGITSTKNDAKVTLVGVRDKPGVAASIFRPLSQNLINVDMVVQNISANGKETDLTFTIKSEDVIKTSKLIQQNKKIKFRKLIIDKNVSKVSIIGVGMITTPGVTYRMFQTLADKKINILVISTSEIKISVLIDKKNIKKAV

SEQ ID NO: 129454 - protein, 194 aa, Unknown
  Bacterial polypetide isolated from the Sargasso Sea
MAKKVLKFGGTSVGTTERILHVAEIIKKDYVAGNEIIAVVSAMSGKTNELVKHSQNISENFDKRELDVLLASGEQASSSLLAGALIKLGIKSKSWMNWQIPILTEGEHSNSRIVNMNVEKINKFLSEKGVAIIPGFQGISKSGDVTTIGRGGSDATAVAIAKIFNADMCEIYTDVDGVFSTDPNKIPVAKKIDK

SEQ ID NO: 129455 - protein, 256 aa, Unknown
  Bacterial polypetide isolated from the Sargasso Sea
MKIIVLKFGGTSVGTTERIKKVANIIISFVKQNYKVIVTSSAMSGVTNDLVKKSKSISNEFIPEEYDVLVSSGEQMSCSLIAGRLNHLGYKSRSWMGWQIPIFTEGKHSSSRIEKIYKKNIIKYLKTGGIPIVAGFQGINSENRITTIGRGGTDASAIMLSRFFNAIKCIIYTDVDGVYTTDPNTISKAKKIKVISYEEMLEMASLGAKVMQPHSIQDARLNRIDIDVRSSFKKSLGTLITKRKNIISNKIIRGVS

SEQ ID NO: 129456 - protein, 258 aa, Unknown
  Bacterial polypetide isolated from the Sargasso Sea
MAKKVLKFGGTSVGTTERIQLVAKIIKKECSLGNKIIAVVSAMSGKTNELISLSEKISDEFNKRELDVLLSSGEQVTCALLSGALTKLDIKAKSWLNWQIPIITEGEHANARIINMNIEKINNYLDAEGVAIIPGFQGISKNGDITTIGRGGSDATAVAVAKIFNADSCEIYTDVDGVFSTDPNKIPVAKKIDKISYNEMLELSSLGAKVMQSSAVQTAMIYNVPLEVKSTFTDRKGTKIFSQENIDYKKKCYWSSLF

SEQ ID NO: 129457 - protein, 291 aa, Unknown
  Bacterial polypetide isolated from the Sargasso Sea
LTSGEQVTIGLLSMLLKKEGIKSVPLLGWQIPIVTDDKHEKGRILNINNENLNKYFQSYDVIVLAGFQGVSTHGYITSLGRGGSDTTAVAIASSIKAERCDIYTDVEGVYTTDPNIEKNAKKIDKLTYEEMLEMSSTGAKVLQTRSVELAMKNNLTLQVLSSFTNQKGTYVVNENELIENEIVSGVSYSKNESKITISGIPDKPGISALVFGLMASNNINVDMIVQNISQDGINANITFTVPNNELEESKKIIEEKYNELNYSNLSTDSDIAKISVVGMGMMSQSGVAEKM

SEQ ID NO: 129458 - protein, 301 aa, Unknown
  Bacterial polypetide isolated from the Sargasso Sea
LDVLLSTGEQVTIALLTMALEVKGCQALSFTGGQVCIHTDSAHNKARIANIEVERVKKELQQGKVVVIAGFQGVNEDGDITTLGRGGSDTTAVAMATALAADECRIYTDVDGVYTADPRIVENAQRLPSLTYEEMLEMASLGSKVLQTRAVEFAGKYNINLRVLSSFEEGPGTLITNEGEIMEAALISGIAHNSDEAKLTVVGVPDKPGIASTILDPIAAANIEVDMIVQNVGLNNSTDFTFTVHRNDYDKAMSILKETAKDIDATDVTGDNRIVKISVVGVGMRSHAGVASTIFKALADE

SEQ ID NO: 129459 - protein, 192 aa, Unknown
  Bacterial polypetide isolated from the Sargasso Sea
MQIIVLKFGGTSVGTIDRIKKVSNIIATYVKKKYKVIVVSSAMSGVTNDLIIKSKKISNNFNPSEYDVLLSSGEQAACALIAARLNHLGYESRSWMSWQIPILAEGNHSYSRITYINKKKIIDYIKSGGIPIITGFQGINNLNRLSTLGRGGSDASAIMCAKFFNARKCVIYTDVEGVYTTDPKNLKKAKKI

SEQ ID NO: 129460 - protein, 246 aa, Unknown
  Bacterial polypetide isolated from the Sargasso Sea
FDDKELDVLLASGEQASCSLLSGALIDLGIKARSWLGWQIPIVTNDNHTSSQIIKIKTDEILNFISKKGVAVIAGFQGISKEIRITTLGRGGSDLSAVEIAKFFKTDSCEIYTDVEGVLTTDPSIDEKAKKIDKISYEEMLEMASLGAKVMQPNAVQASMVDNIPIHVRSTFSEKSGTKIISDSEIDYEKVVTGIAYSKNNAKISIVGVVDKPGVAADVFEPIGKNNINIDMVIQNTSLDGKTANI

SEQ ID NO: 129461 - protein, 209 aa, Unknown
  Bacterial polypetide isolated from the Sargasso Sea
MKKIVLKFGGTSLGSIEKIIHAAKIIKKRHEENNQVIAIVSAMAGVTNDLINKSNQVSKNFDSKELDVLLSTGEQVSCALLSAALIDLGVKARSWLSWQIPILTNDNHTSSQIIKIKTDEILNFISKKGVAVIPGFQGISSESRITTLGRGGSDLSAVAIAKFFNTDFCEIYTDVEGVLTTDPSINEKAKKIERISYEENVRNVLPLGA

SEQ ID NO: 129462 - protein, 185 aa, Unknown
  Bacterial polypetide isolated from the Sargasso Sea
MFKKVLKFGGTSVGSIERIQHVANIIKKEHETGNKIIAVVSAMAGKTNELINLSHSVSNDFDKREMDVLLASGEQITCSLLAGALINLKLKAKSWMNWQIPILTDGDHSNARIVNMNVEKINLFLKEKGIAVIPGFQGISKEGNITTIGRGGSDATAVAIAKLFKTDSCEIYTDVDGVFSTDPNK

SEQ ID NO: 129463 - protein, 283 aa, Unknown
  Bacterial polypetide isolated from the Sargasso Sea
MQQPEAVAAQIITLLADLRNLIETGGAVYSGAHKDLIQSFGERLSSVLFTQVLVERGAAAECFDVRRVLRTDSRFGKGEPQIHLIAELAQTHLQPLLREQIVVTQGFIGADEAGQTTTLGRGGSDYSAALLGEALNAHIVQIWTDVVGIFTTDPRLTSDARCINEISFDEAAEMATFGAKVLHPATLIPAMRRNIKVFVGSSREPEAGGTWIAKTVEHKPAYRAIALRKSQTLITVKSPEMLHAAGFLARVFDILSRHQISVDLVTTSEISVALTLDESAGSA

SEQ ID NO: 129464 - protein, 256 aa, Unknown
  Bacterial polypetide isolated from the Sargasso Sea
MKTVVLKFGGTSVGSIDRIKKVCKIIAFYKKKKNRIVVVSSAMSGVTNELVNKSKLISNNFDRAEYDALVSTGEQVSCALIAGRLKHNGFKSRSWTSWQLPILTDGPHSSARISSVGIKELNKYIKSGGIPIITGFQGISNDFRITTIGRSGSDATAIMLAKFIKADECIIYTDVDGVYTTDPRQYKKAKKIKKIFYDEMLEMASLGSKVMQPTSVQDAKLNKINIKVKSSFVSESGTLITGSKKTFSNQIITGIS

SEQ ID NO: 129465 - protein, 228 aa, Unknown
  Bacterial polypetide isolated from the Sargasso Sea
MKIIVLKFGGTSVGSIQRIKEVSKIIKSYSKKYKVIVLSSAMSGTTNKLINMSQKISKKFPDHEYDTLVSAGEQIACSLLAGQLLSNGLKSRSWMAWQIPILTEGKHKFSRIKYINKNKVLKFMKSGGIPIIAGFQGINKNLNITTIGRGGSDSSAIMVAKFFKAERCIIYTDVEGVYTTDPNKLNSAKKIKSISYEEMLEMASLGSKVMQPHSIQDARLNRIDIEVK

SEQ ID NO: 129466 - protein, 292 aa, Unknown
  Bacterial polypetide isolated from the Sargasso Sea
SELINKILKDKKVCVIPGFQGITSEGRVSTLGRGGSDTSAVAIAAAINADYCDIYTDVDGVYTTDPNKVPEAKRLDKVSYEEMLEMASLGAKVLQTRSVETAMTNNVALRVLSSFANENKEDVGTIVTEEDAINDQRVVTGVTSSLNDCKITLIGVRDKPGIAAKIFSSLSENNINVDMIVQNISESSRTTDITFTIPKDDLLNAEKIMEQIKDDVPYESLLTDSNIAKISIVGVGMRSNAGVAAKMFSILSENDINIDVISTSEIKISILISNEQAEKAVNMLHQSFILDR

SEQ ID NO: 129467 - protein, 97 aa, Unknown
  Bacterial polypetide isolated from the Sargasso Sea
MQQVIVQKFGGTSVGSGERIAEVAEIIKNEAAMNTVVVVVSAMAGETDRLIELSKLFGENTNKREFDALISTGEKVSASLLAMALNSLGLKAKSYSA

SEQ ID NO: 129468 - protein, 256 aa, Unknown
  Bacterial polypetide isolated from the Sargasso Sea
MKTVVLKFGGTSVGNIDRIKKVCKIIATYKKKKYNVVVISSAMSGVTNDLVNKSKSLSNSFDLAEYDALLSTGEQVSCALIAGRLNHIGLKSRSWLSWQLPIVTEGNHSGARINKININELNRYIKNGGIPVVTGFQGINKNYRITTIGRSGSDATAIMLAKYIKAEECIIFTDVEGVYTTDPRQHKKAKKIKKIFYDEMLEMASLGSKVMQPTSIQDAKLNKIDIKVKSSFAFKSGTLITNSKKSFSDQIITGNF

SEQ ID NO: 129469 - protein, 214 aa, Unknown
  Bacterial polypetide isolated from the Sargasso Sea
MSKKVLKFGGTSVGSIDRINHVAKIIKSHYEAGNELIVIVSAMAGTTNKLMEYSKSVSKSFDKRELDVLLASGEQVTASLLSGALINLGIKAKSWMNWQIPILTEGDANNSRIINMSVEKINQFLKSGGIAIIPGFQGVSKNNDITTIGRGGSDATAVAVAKIFETDTCEIYTDVDGVYSTDPNKIPLAKKIDKIAYEEMLELSSLGAKVMQPT

SEQ ID NO: 129470 - protein, 267 aa, Unknown
  Bacterial polypetide isolated from the Sargasso Sea
NREFDALISTGEKVSASLLAMALNSLGLKAKSYSAAQVSLKTTSNFSKAKILDIDKAKMEEILADGSIPIITGFQGITETGEVTTLGRGGSDTTAVAIAASLKANRCDIYTDVDGIYTTDPRIVPNAKKLDAISMEGMLELAGQGAKVIQIRAVEFANKFKVPVRVLSSFSSGTGTMITLENDTMENAEISGIAFQTDQTKVTFTAVEDTPGIASKILGPLSELDMKVDVIVQNVGIEGKTDFTFTIATEEKSLLDKAINNIQKSIN

SEQ ID NO: 129471 - protein, 214 aa, Unknown
  Bacterial polypetide isolated from the Sargasso Sea
MIKKVLKFGGTSVGSIKRIVHAANIVKKEHDNGNKVIVVVSAMSGTTNNLIAHSQSISKKFNKRELDVLLTSGEQVTSALMSGALNDLGVKSKSWMNWQIPILTEGEHSNARIVNINVKGINEYLSQGGVPVVPGFQGISKSGEITSIGRGGSDATAVAVAKIFDTDSCEIYTDVDGVYSSDPNKIPLAKKIDKISYEEMLELSSLGAKVMQSS

SEQ ID NO: 129472 - protein, 212 aa, Unknown
  Bacterial polypetide isolated from the Sargasso Sea
MKIVVLKFGGTSVGTIDRIKKVADIIAKYVKKKYKVIVVSSAMSGVTNDLVNKSNNISNDFSNAEYDVLVSSGEQVACALIAGRLIHKGYNSRSWMGWQIPIITDDDHKYSKINTIYKKNINQYLKSNGIPIIAGFQGINFDRRITTIGRGGSDATAIMLAKFFKAERCIIYTDVEGVYTTDPRKLKKARKIKVISYEEMLEMASLGAKVMQ

SEQ ID NO: 129473 - protein, 263 aa, Unknown
  Bacterial polypetide isolated from the Sargasso Sea
MSLIVMKFGGTSVANTEKIINVSDIIEKEAKGNKLIVVLSAMAGVTNKMQEYIDEIESINNLENDLILTSGESITIGLLSSCLKKKGIKSIPLLGWQVPIVTDNNYQKAKILNINTKRVNSYLDKYDVIVLAGFQGINLEGHITSLGRGGSDTTAVAIASAVNADRCDIYTDVDGVFRSDPNLVDKSKKIPKLAFEEMLEMSSTGAKVLHTRSVELAMKNNLVLQVLSSITKEPGTLILDEKKLIEKEIVSGVSYNKNESKIT

SEQ ID NO: 129474 - protein, 243 aa, Unknown
  Bacterial polypetide isolated from the Sargasso Sea
MKIVVLKFGGTSVGSIERIKKVCKIIAFYKKKKYRVAVVSSAMSGVTNELINKSKSISNNFDSAEYDSLVSTGEQASCALIAGRLKHDGFKSRSWLSWQLPILTDGPHSSARINSIGIKEISVYIKSGGIPVITGFQGINNDFRITTIGRSGSDATAIMLAKFIKADECIIYTDVDGVYTTDPRQYKKAKKIKKIFYDEMLEMASLGSKVMQPTSVQDAKLNKIDIKVKSSFISKAGNFNNRF

SEQ ID NO: 129475 - protein, 239 aa, Unknown
  Bacterial polypetide isolated from the Sargasso Sea
YKSQSWMGWQVPILTEGNYSSSRISQINKKKINKFLRSEGIPIIAGFQGINLNKRITTLGRGGSDATAIMCAKFFKAQKCIIYTDVNGVYTTDPKTLKNAKKIKVISYEEMLEMASLGAKVMQPTSIQDARLNRINIDVKSSFINKPGTLITKRKNIFNNKIITGLTSTKNDAKVTLLGVKDKPGVAASVFKPLSQNYINIDMVVQTSSDNKKETDITFTIKSDNLSKTLKLIKKNKKI

SEQ ID NO: 129476 - protein, 290 aa, Unknown
  Bacterial polypetide isolated from the Sargasso Sea
MKIVVLKFGGTSVGTIKKIKKVAKIIIDYKKKNYKVIVVSSAMSGVTNELIKKSFEISDSFSESEHDVLVSSGEQVACSLIAGRLVHEGHKSRSWLSWQIPILTKGSYKNSRINQINKNNIIKYLKKGGIPIITGFQGLNQENRITTIGRGGSDASAIMIAKFFKAERCIIYTDVEGVYTTDPNKLKKAKKIKVISYEEMLEMASLGAKIMQPVSIQDARLNRINIEVKSSFTKKSGTLITKRSNIINNKIVTGITSTQNDSKVSLIGVRDKPGVAAAIFKPLSKNFINV

SEQ ID NO: 129477 - protein, 299 aa, Unknown
  Bacterial polypetide isolated from the Sargasso Sea
EGEHTNARIVNMHISVINKFISDKGVIVIPGFQGISKKGDLTTIGRGGSDATAVAVAKIFEADSCEIYTDVDGVFSSDPNKVPVAKKIDKISYDEMLELSSLGAKVMQSSAVQTAMMYNIPLEVRSTFTDRQGTKIFSQENIDYSKSVTGVAYSKDDAKITLIGVEDKPGVAANVFEPLSNNQINVDMVIQNISSNHKVTDITFTVKRDDLKKTIDILKNNKNINYKELSHNEKVAKISIVGAGMVSTPGITYRMFEGLAKEQINILAISTSEIKLSVIIDEDETLKAVKKVHTIFDLD

SEQ ID NO: 129478 - protein, 255 aa, Unknown
  Bacterial polypetide isolated from the Sargasso Sea
ILHNALEKNIVPVITGFQGFDDENNITTLGRGGSDTSAVAIAVSLNAKECQIYTDVDGVFTTDPNIYDKARKLDHLTYEEMLELSSLGAKVLQIRSVEFASKYKLPLRVLSSFGSKGGTLINNNDNLEEAVVSGIAFTSNEAKITIRKVPDIPGVAAKILSPISDAGIEVDVIVQNVASDNTTDFTFTVHKDFADETSKILDKLRKELGSGEIEVDLDICKVSVVGNGMKSHAGVASKMFGALADEAINIEMIST

SEQ ID NO: 129479 - protein, 198 aa, Unknown
  Bacterial polypetide isolated from the Sargasso Sea
MAKKVLKFGGTSVGSIKRILHAAKIVKKEHDNGNKLIVVVSAMAGTTNNLIEHSKGISKKFNKRELDVLLTSGEQVTSALIAGALNDLGIKSKSWMNWQIPIITEGEHSNARIIHMNIKNINDYISSGGVAVVPGFQGVSKSGDITSIGRGGSDATAVAVAKIFQTDSCEIYTDVDGVYSSDPNKIPLAKKIDKISYE

SEQ ID NO: 129480 - protein, 200 aa, Unknown
  Bacterial polypetide isolated from the Sargasso Sea
MKKKVIKFGGTSVGSIERIMHAAKIIQEESNKGNKLIVVVSAMAGKTSELISMSKQISNKFVKRELDVLLSTGEQVSCALISGALNELGIKAQSFMNWQIPILTDGDHNNSRIINMNTTKINDYITNGGVAIVPGYQGISKLGEVTTIGRGGSDATAVAIAKIFDTDSCEIYTDVDGVYSTDPNKIPVAKKIDKISYEEM

SEQ ID NO: 129481 - protein, 293 aa, Unknown
  Bacterial polypetide isolated from the Sargasso Sea
RYEENSQIIVVVSAMAGVTNDLIDKSNQITKNFDKKELDVLLSSGEQVSCSLLAGALIDLGIKARSWLSWQIPIITNDNYTSSQIIKIKTDEVLNFISKKGVAVIPGFQGISSESRITTLGRGGSDLSAVAVAKFFNTDSCEIYTDVDGVFTTDPSINEKAKKIDKISYEEMLEMSSLGAKVMQPNAVQASMVNNIPVHVKSTFSKKSGTIIVSENEADYKKVITGIAYSKGNAKISIVGVVDKPGVAADVFEPIGKNNINVDMVIQNTSLDGKTANITFTIKQTDLKKTLSI

SEQ ID NO: 129482 - protein, 196 aa, Unknown
  Bacterial polypetide isolated from the Sargasso Sea
MSLIVQKYGGTSVADTDSLRIVAERIIDCKKNGNDVVVVPSAMGSSTDELIQLASDLSETPTPRELDMLLSAGERITMSLLSMHLNSLGHSSFSLTGSQAGIITTSRHGQAEIEEITGERVKEGLENGDIVIVAGFQGFNRDTKEITTLGRGGSDATAVALAAALGAERCEIFTDVEGVFTADPRIVSSAQLISEI

SEQ ID NO: 129483 - protein, 283 aa, Unknown
  Bacterial polypetide isolated from the Sargasso Sea
AKILQIDNNRIQRYFEKNDVIVLAGFQGINLDGKITSLGRGGSDTTAVAIASSVDAKRCDIYTDVDGVYTTDPNIEKNAKKISKMSYEEMLEMSSTGAKVLHTRSVELAMKNNLTLQVLSYLNKEPGTFIVDEKELIEKEIVSGVSYSKNEAKITISGILDKPGISAKIFSLLTKHNINVDMIVQNISQDGISANITFTINLKDYDLTKSVLKKSNKVLQYKSLSLDKNVSKISVIGMGMMSQSGVAEKMFKTLANNSINILAISTSEIKISVLIDEKHTNIA

SEQ ID NO: 129484 - protein, 266 aa, Unknown
  Bacterial polypetide isolated from the Sargasso Sea
MKTVVLKFGGTSVGSIDRIKKVCKIIAFYKKKKNRIVVVSSAMSGVTNELVNKSKLISNNFDRAEYDALVSTGEQVSCALIAGRLKHNGFKSRSWTSWQLPVLTDGPHSSARIRSVGIKELNKYIKSGGIPIITGFQGISRDFRITTIGRSGSDATAIMLAKFIKADECVIYTDVDGVYTTDPRQYKKAKKIKKIFYDEMLEMASLGSKVMQPTSVQDAKLNKINIKVKSSFVSKSGTLITGSKKTFSNQIITGISSTKNDAKITI

SEQ ID NO: 129485 - protein, 240 aa, Unknown
  Bacterial polypetide isolated from the Sargasso Sea
MKIVVLKFGGTSVGSTNRIKKVSKIIISYIKKKYKVIVATSAMSGVTNDLIKKSKEISNDFLKDEYDVLVSAGEQISCSLIAGRLNHLGYKSRSWLGWQIPILTSGKHASSRIESINKKKILKYIKSGGIAIVAGFQGVNSESRITTTGRGGTDSSAIMLARFFSAKKCIIYTDVDGVYSTDPNKIRKAKKIKVISYDEMLEMASLGAKVMQPHSIQDARLNKIDIDVKSSFKNVSGTFI

SEQ ID NO: 129486 - protein, 93 aa, Unknown
  Bacterial polypetide isolated from the Sargasso Sea
MKFGGTSVQTKESQQLVIKHIRRNVESRKKVVVVVSAMGRKGDPYATDTLISLLKDAGEPVNPSELDLVMSIGERLSSAYFSHLLSINGIPAV

SEQ ID NO: 129487 - protein, 193 aa, Unknown
  Bacterial polypetide isolated from the Sargasso Sea
MKIIVLKFGGTSVGTLDRITKISKIIISYVKKNYKVIVVTSAMSGVTNELIKKAEKISKKFPNSEKDVLLSTGEQMASALIAGKLCDLGLNSRSWMSWQIPIITRGNYSSARIVKIGTEQLKKYLKKGGTPIITGFQGLNKESRLTTLERGGSDASAIMLAKFFKAKRCIIYTDVDGVYTTDPNLMKKAKKIK

SEQ ID NO: 129488 - protein, 162 aa, Unknown
  Bacterial polypetide isolated from the Sargasso Sea
MKLIVMKFGGTSVGSIDKINNVANIVEKQINDKKLIVVLSAMSGVTNKMQEYIDEIESNEIVENDLILTSGEAVSVGLLSAILKKRNIKSVPLLGWQIPILTDSNHQKAKILNIDKVRIEKYLKNYDVIVVAGFQGVDIDGNITSLGRGGSDTTAVAVAAAV

SEQ ID NO: 129489 - protein, 238 aa, Unknown
  Bacterial polypetide isolated from the Sargasso Sea
MKTIVLKFGGTSVGTIDRIKKVCKIIAFYKKKKNKVVVVSSAMSGVTNELINKSKLISNNFDKAEYDALVSTGEQASCALIAGRLKHNGFKSRSWTSWQLPILTDGPHTSARISSVGIKELYKYISSGGIPIITGFQGVSNDFRITTIGRSGSDATAIMLAKFIKADECIIYTDVDGVYTTDPRQYKNAKKIKKIFYDEMLEMASLGSKVMQPTSVQDAKLNKIDIKVKSSFVSKSGT

SEQ ID NO: 129490 - protein, 274 aa, Unknown
  Bacterial polypetide isolated from the Sargasso Sea
MSGVTNDLIKKSKKLSNNFNLSEYDVLVSSGEQMSCALISGRLNHIGYKSQSWMGWQVPILTEGSHSSTRIVKIYKKRIINFLKNGGIPVIAGFQGINPDRRITTLGRGGSDASAIMIAKFFKAEKCVIYTDVEGVYTTDPKMIKNSKKIKTISYEEMLEMSSLGAKVMQPISIQDARLSRIDIDVKSSFKNKTGTLITKRKNIFRNKIITGISFTKNDAKISLVGVKDKPGVAASIFKPLSENFINVDMVVQNISANGKETDLTFTIKSEDIK

SEQ ID NO: 129491 - protein, 368 aa, Unknown
  Bacterial polypetide isolated from the Sargasso Sea
AMVGATDELITKIESMTKLYDAREFSAIVSSGENVTAGLLSLNLQKIGIHARSWQGWQIPILTSNEHSSARILEVKTERLNEKFSEGMEVAVVAGFQGIASDGRITTLGRGGSDTSAVALAAAIQAERCDIYTDVDGIYTTDPRVCRRARKLSRISYEEMLEMASLGAKVLQTRSVELATRYNVRLKVLSSFSDNSEGTLVCDEGDMMENNVISGVAFSREEAKLTLAGIEDRPGIAATIFGPLADIGVNVDMIVQNISDNGLTDLTFSCPIDQVFRAQEALKGAKDSGVLRYKNLLLDKEIAKISIVGIGMKTHAGIAKKMFEALASESINIIVISTSEIKISVLIERKYLELAVQTLHDTFELDKV

SEQ ID NO: 129492 - protein, 403 aa, Unknown
  Bacterial polypetide isolated from the Sargasso Sea
MTKKVLKFGGTSVGSIQRIVHAAKIAKKEHDSGNNVIVVVSAMAGTTNNLIAHSQSVSKKFNKRELDVLLTSGEQVTSALMAGALSDLGVKAKSWMNWQIPIITEGEHTNARIINMNVESINNYLSEGGIAVIPGFQGISKSGEITSIGRGGSDATAVAIAKIFETDSCEIYTDVDGVYSSDPNKIPLAKKIDKISYEEMLELSSLGAKVMQSSAVQAAMMNNIPIHVKSTFTERKGTDINNEENVDYNKAVTGVAYSKDDAKITLLGVEDKPGVAADIFEPLSKDQINVDMVIQNISTDGKRTDLTFTTKRQDSKNAISLIKANKKIKYEKMNMNDKVSKISIVGAGMVATPGITYKMFRSLAEEKINILAISTSEIKISVIIDEKSTIDAVKKLHKTFNLD

SEQ ID NO: 129493 - protein, 276 aa, Unknown
  Bacterial polypetide isolated from the Sargasso Sea
MKTVVLKFGGTSVGTLDRIKKVCKIIAFYKKKKNRVLVVSSAMSGVTNELVNKSKSISNNFDRAEYDSLVSTGEQVSCALIAGRLKHEGFKSRSWLSWQLPILTEGPHSSARINSIGIKELSRYIKSGGIPVVTGFQGISNDFRITTIGRSGSDATAIMLAKFVKADECMIYTDVDGVYTTDPRQYKKAKKIKKIFYDEMLEMASLGSKVMQPTSVQDAKLNNIDIKVKSSFVSKAGTLITDSKKAFSNQIITGISSTKNDAKITIIGVKDRPGVA

SEQ ID NO: 129494 - protein, 453 aa, Unknown
  Bacterial polypetide isolated from the Sargasso Sea
MTRIYPPSVVAKFGGTSVADFDAMNRSASIVLADQDVRLVVLSASAGVTNLLVELSEGLETHQQLDKFETLRAIQYNIISRLKQPSVISTEIDNLLNNIHRLAQTAMVSPSDALSDELVSHGELMSSLLFTEVLRERQAEAGWFDARSVMRTNANFGCAEPELGTLHHQVETHLRPRLEQAIMVTQGFIGRDAAGHTTTLGRGGSDYTATLLGEALHATRVDIWTDVAGIYTTDPRIAPRAKRIDHISFSEASDMAAYGAKVLHPATLLPAMRKSIPVFVGSSKDTAAGGTLVHNTTDNPPRYRALAVRRKQTLLRLHSLEKQPSCSFLAQSFAILARHAVTVDLVTTSENSIALALDATHATSGEDHVLTTALFTALSSHCRVEVETGLALVTLVGNQLTQATGVCKDVFAWLEEHTVRMICHGASNDNLCILLPADDADSAVRALHYRLFE

SEQ ID NO: 129495 - protein, 236 aa, Unknown
  Bacterial polypetide isolated from the Sargasso Sea
MKIVVLKFGGTSVGSTDRIKKVANIILSFVKKKYKVIATSSAMSGVTNDLVKKSKKISKEFIPEEYDVLVSAGEQMSCSLIAGRLNHLGYKSRSWMGWQIPILTEGKHSSSRIKTIYKKNILNYLKSGGIPIVAGFQGINSFERITTIGRGGTDASAIMLSRFFKAEKCVIFTDVEGVYTTDPNTISKAKKIKVISYEEMLEMASLGAKVMQPHSIQDARLNRIDIDVRSSFKKSS

SEQ ID NO: 129496 - protein, 229 aa, Unknown
  Bacterial polypetide isolated from the Sargasso Sea
MKIVVLKFGGTSVGSTDRIKKVAKIITSYLRKRYKVIVVTSAMSGVTNDLVRKSKEISNNFIAEEYDVLVSAGEQISCSLISGRLNHLGYKSRSWLGWQVPIFTSGNHASARIKNIYKKNIIKYLKSGGIPIIAGFQGINSSSRVTTIGRGGTDASAIMLARFFKAEKCIIYTDVDGVYTTDPNIIRKAKKIKKISYEEMLEMASSGSKVMQPHSIQDARLNRIDIEVR

SEQ ID NO: 129497 - protein, 188 aa, Unknown
  Bacterial polypetide isolated from the Sargasso Sea
MDQKYKKIVMKFGGTSMADMDCISKVADHIERELSNGTLIAVVVSAMAGETDRLISLADQAGNNMQQSERDVIISTGEQVSSAILSMILNRRNIDARSIQGWQIPLITRGIHGSARISNVKSNHLENLMKNGIVPIIAGFQGISEENRVTTLGRGGSDTTAVAIACGIHADLCDIYTDVDGVYTSDPR

SEQ ID NO: 129498 - protein, 410 aa, Unknown
  Bacterial polypetide isolated from the Sargasso Sea
MSRIVMKFGGTSVGSVDRIKNVSNIVQSVYDEGHEVVVVLSAMAGETDRLINLTKDISNDFNKEEYDVVISSGEQVSVGLLAAALHENGISAKSCLGWQIPIITSNDHKSARIEGIRSDLINKILEDKKVCVIPGFQGITSEGRVSTLGRGGSDTSAVAIAAAIKADFCDIYTDVDGVYTSDPNKIPDAKRLDKVSYEEMLEMASLGAKVLQTRSVETAMTNNVALRVLSSFEGADKENIGTIVEEEDKINDQRVVTGVTSSLNDCKITLIGVRDKPGIAAKIFSSLSENNINVDMIVQNISERSKTTDITFTIPKDDLSNAEKIMDLIKDDVPYESLLIDSNIAKISIIGVGMRSNAGVAAKMFSVLSDNDINIDVISTSEIKISILINKEQAEKATSMLHQYFINENE

SEQ ID NO: 129499 - protein, 332 aa, Unknown
  Bacterial polypetide isolated from the Sargasso Sea
MGEQVTCALLAGALIELKLKAKSWLNWQIPILTEGKHTNARIINIQTDKINKFLKEDGVVIIPGFQGISKNLDVTTIGRGGSDATAVAIAKLFKADSCEIYTDVDGVFSTDPNKIPVAKKIDKISYDEMLELSSLGAKVMQSSAVQTAMIYNIPLEVKSTFTDRGGTKIFNQESVDYSKSVTGVAYSKDDAKITLIGVEDKPGVAANIFEPLNKSQINVDMVIQNISSDQKTTDITFTIKRDDLQKTKHILENNKNLNYQEITYNDKVSKVSIVGAGMVSTPGVTFKMFKGLADEKINILAISTSEIKLSVIIDEKNTLPSIKKLHTIFNLD

SEQ ID NO: 129500 - protein, 407 aa, Unknown
  Bacterial polypetide isolated from the Sargasso Sea
MARIVQKFGGTSVADLDCIRNVARRVKIEVDAGHEVAVVVSAMSGTTNQLVGWASDIGALHDAREYDTVVATGEQVTVGLLAIALQNIGIDARSWLGWQIPIRSDNVHGAARIDTIDGKAIRDRLKNGQVAVIAGFQGIGPDGRITTFGRGGSDTSAVAVAAALEADRCDIYTDVDGVFTTDPRIAPKAMKLSRITFEEMLEMASSGAKVLQTRSVAMAMRHNVNLQVRSSFNDKTGTLVVNEDSIVEQETISGIAYSPDEAKITIIGLPDKPGIAASVFGALADQQVNVDMIVQSASSATKKTDISFSVGRDDIKKAVDIIHNIDVKLEFETVDASPNVAKISVVGTAMRTQPGVAKTMFETLASKGVNMHVISTSEIKISVLIDSEYTELAVRSLHTAYGLDDDS

SEQ ID NO: 129501 - protein, 404 aa, Unknown
  Bacterial polypetide isolated from the Sargasso Sea
MRSVVLKFGGTSVGTIKKIKKVAQIISDYKKKKYKVIVVSSAMSGVTNELIKKSKDLSENFSDTEYDVLVSSGEQAACSLIAGRLIHNGYKSRSWLAWQIPIITKGFNKNSRIDFINRNKILRYLKTGGIPIITGFQGINNDERVTTIGRGGSDASAIMLAKFFKAERCVIYTDVEGVYTTDPKKLSKAKKIKVISYEEMLEMASLGAKVMQPVSIQDARLNRIDIEVKSSFIKKPGTLITRKSNIINDKIITGISLTHNDSKVTLVGVKDKPGVAASIFKPLSKNLINVDMVVQNISANGRETDLTFTIKSDDLTKTKRIIRNNQSINFRKLLFEKDVCKISIIGVGMITTPGVTYRMFQALAKKNINILVISTSEIKISVLIEKKNNKRALAALHKEFKLEK

SEQ ID NO: 129502 - protein, 331 aa, Unknown
  Bacterial polypetide isolated from the Sargasso Sea
MKIIVLKFGGTSVGSIQRIKKVSKIIKSYSKNYRVIVLSSAMSGTTNKLINMSKKISENFPDNEYDTLVSAGEQISCSLLAGHLAANGLNSRSWMAWQIPIVTEGKHKYSRIKHINKTKILKFLKSGGIPIIAGFQGVDKNSNITTIGRGGSDSSAIMVAKFFKADRCVIYTDVEGVYTTDPNKLNSAKKIKNISYEEMLEMASLGSKVMQPDSIQDARLNRINIEVKSSFIDKSGTLITKRKNIINNKIITGISSTDNDAKVTLLGVKDRPGIAASIFKPLSQNSINVDMVVQNISADGKQTDLTFTIKSNDLNKTKKIINKNKNIVLKN

SEQ ID NO: 129503 - protein, 130 aa, Unknown
  Bacterial polypetide isolated from the Sargasso Sea
MSLIVQKFGGTSVADTDSLRIVAERIIDCKKNGNDVVVVPSAMGSSTDELIQLANNLSENPTPRELDMLLSAGERITMSLLSMHLNSLGYSSFSLTGSQAGIITTSRHGQAEIEEITGERVKEGLENGDI

SEQ ID NO: 129504 - protein, 350 aa, Unknown
  Bacterial polypetide isolated from the Sargasso Sea
METIILKFGGTSVGSTDRISAVANIIKAASDEATPVVVVSAMSGETNRLIDLANSFGSEPNKREFDALVSTGEKVSASLVAIALHQIGFKAKSLSAAQVGMKTTANFSRAKILDLDKEVIFKTIEDGYIPIITGFQGITSDGDTTTMGRGGSDTTAVAIAASMQAKRCDIYTDVDGIYTTDPRIVPNAKKLDSINIEEMLELSGQGAKVMQIRAVEFANKYKVLVRVLSSFEPGSGTLILQEEDGMEDAVITGIASQKDQTKFTLHGVGDTPGIASGILSPVSDAGIEVDVIVQNVSVSGKTDFTFTVGTPDRAEVESVLKEKMQGISYDELIIDEAIGKVSLVGVGMRS

SEQ ID NO: 129505 - protein, 403 aa, Unknown
  Bacterial polypetide isolated from the Sargasso Sea
MKTVVLKFGGTSVGNINRIKKVCKIIATYKKKRYNVVVISSAMSGVTNELVNKSKSLSNNFDLAEYDALLSTGEQVSCALIAGRLNHIGIKSRSWLSWQLPIVTEGNHSGARINKINIKELNKYIKNGGVPVVTGFQGINKSYRVTTIGRSGSDATAIMLAKYVKADECIIFTDVEGVYTTDPRQHKKAKKIKKIFYDEMLEMASLGSKVMQPTSIQDAKLNEIDIKVQSSFVSKSGTLITNSNKTFSDQIITGISSTKNDAKITIVGVKDRPGVAASIFKPLSKNLINVDMVVQNISQNGKNTDLTFTIKSEDLKKTERLIKENRSISYKKLSFDRNVSKVSIIGVGMITTPGITYRMFQALASKKINILVISTSEIKISVLVSAKHVKKAIASLHKEFKLD

SEQ ID NO: 129506 - protein, 404 aa, Unknown
  Bacterial polypetide isolated from the Sargasso Sea
MKIVVLKFGGTSVGSIEKIRNVSNIIQSYKKKGNNVIVVSSAMSGVTNDLIKKSRMISKSFSDAEYDVLVASGEQIACSLIAGRLIDKGYRSRSWLAWQIPILTTGHHKNSRINQINKIEIIKYLKKGGIPIIAGFQGVNNEKRLTTIGRGGSDASAIMLAKFFKAKKCVIYTDVEGVYTTDPNKLYNAKKIKVISYEEMLEMASLGAKVMQPVSIQDARLNRIDVEVKSSFKKNSGTLITKKSKISSNRIITGITSTMNDAKVTLVGVKDKPGVAASIFKPLSKNLINVDMVVQNISANGKETDLTFTIKRDDLKKTKKIILDNNNIVYRNLIFDQEVSKISIIGVGMVTTPGVTFRMFQKLADKKINILVISTSEIKISVLIEKKNVSKALKALHKEFGLDK

SEQ ID NO: 129507 - protein, 217 aa, Unknown
  Bacterial polypetide isolated from the Sargasso Sea
MELNIVTNALSIAKFGGTSVANYEVMQNCARIVAGNDKTRIVVVSAAAGVTNHLVSLAHTPMTQQQIEETCQAIINIELAILNKLKDKDAVEPKLNDLLDEMRSLAFHEEILHRDDLKDQLLSMGERMSSLMFSSVLAEQGVKTMNFDVRKVLRTDSEFGEGAPQIEEIEKLSKQLLAPEIKDAIVVTQGFVGADEEGRTTTLGRGGSDFTAALLAE

SEQ ID NO: 129508 - protein, 404 aa, Unknown
  Bacterial polypetide isolated from the Sargasso Sea
MKIIVLKFGGSSVGTVDRIKKIANIIAGYKKKGYKPIVISSAMSGMTNDLIKKSKAVSSNFNASEHDVLVSAGEQISCSLIAGRLNHLGYKSQSWMAWQIPILTEGMHSFSRITHIYKKKIINYLRSGGVPIITGFQGINSNNRITTLGRGGSDASAIMCSKFFKAKKCIIYTDVQGVYTTDPNTLKKAKKIKVISYEEMLEMASLGAKVMQPTSIQDARLNRIDIEVKSSFVKKDGTKITKRKNIITNKIIRGISCTKNDAKVTLIGVKDKPGIAASIFKPLSNNAINVDMVVQNISANGKETDLTFTIKSEDLIKTQKLIQKNSKISFRDLIVDKNVSKVSIIGVGMIATPGVTYRMFQALAKKNINILVISTSEIKISVLINKRNISKAILALHKEFKLEK

SEQ ID NO: 129509 - protein, 404 aa, Unknown
  Bacterial polypetide isolated from the Sargasso Sea
MSEIIVQKFGGTSLGSVERIDAVAEIIKKASKKNKIAVVVSAMSGETNRLIDLANSFGNNPDKREFDALVSTGETISSALLSMALHSKGIKARSFSASQIAIRTTSSYSKAKILDVDAKKILDVLENDTIPIITGFQGITEGGDITTLGRGGSDATAVAIAAQINANRCDIYTDVDGIFTTDPNIVSNAKKLDSITMEEMLELAGQGAKVVQTRAVEFANKYHVPVRVLSSFNDGSGTLISLKDESMENALVSGIASQKDQVKFTLHSVGDIPGTAFKILGPISEAEVEVDVIVQNVSIDGKTDFTFTVSNEDQEIVKKILSNIKDEINYKELIINPDIAKVSLVGAGMRSQSGVASKAFKALSENDVNIQIICTSEIKITMVIKEEEVEKAINVLHEEFELDK

SEQ ID NO: 129510 - protein, 403 aa, Unknown
  Bacterial polypetide isolated from the Sargasso Sea
MAKKVLKFGGTSVGSIKRILHAAKIVKKEHDNGNKLIVVVSAMAGTTNNLIEHSKGISKKFNKRELDVLLTSGEQVTSALIAGALNDLGIKSKSWLNWQIPIITEGEHSNARIIHMNIKNINDYISSGGVAVVPGFQGVSKSGDITSIGRGGSDATAVAIAKIFQTDSCEIYTDVDGVYSSDPNKIPLAKKIDKISYEEMLELSSLGAKVMQSSAVQSAMMGDVPIQVKSTFTEREGTEIINQDNIDYTKAVTGVAYSKDDAKITLLGVEDKPGVAADVFEPLSKNQINVDMVIQNISTDGKKTDITFTTKRQDVKNAISLIENNKKIKYEKMYMNDKVSKISIVGAGMVATPGITFKMFRSLADANINLLAISTSEIKISVIIDEKFTIDAVKKLHKTFKLD

SEQ ID NO: 129511 - protein, 403 aa, Unknown
  Bacterial polypetide isolated from the Sargasso Sea
MIKKVLKFGGTSVGTVERIQHIANIIKKEQLSGSKIIAVVSAMAGKTNELIKLSNEISEEFNKRELDVLLSSGEQVTCALLSGALLKLKIKAQSWMNWQIPILTEGDHANARIINMNVEKINQFLDDNGVAIIPGFQGISKKGDITTIGRGGSDATAVAIAKIFNADTCEIYTDVDGVFSTDPNKIPVAKKIEKISFEEMLELSSLGAKVMQSSAVQTAMMYDIPLEVRSTFTDRKGTKIFSQENIDYTKSVTGVAYSKNDAKITITGVQDKPGVAANIFEPLSKAQINVDMVIQNISSDQKTTDITFTVKRDDILITREILKNESKINYKQIIQNEKVAKVSIVGAGMVSTPGVTYRMFRALSDEGINILAISTSEIKLSVIIDEDKTLAAIKKLHTIFDLD

SEQ ID NO: 129512 - protein, 270 aa, Unknown
  Bacterial polypetide isolated from the Sargasso Sea
MKIIVLKFGGTSVGTLDRIVKISKIIVSYIKKKYKVIVVTSAMSGVTNELIKKAGKISKNFPNSERDVLLSTGEQMASALIAGKLYDLGFDSRSWMSWQIPIITRGNYSSARIQKIGIDQIKKYLKKGGTPIVTGFQGLNKENRITTLERGGSDASAIMLAKFFKAKKCIIYTDVEGVYTTDPNLSKKAKKLKILSYEEMLEMSSLGAKVMQPASIQDAKLNKVKIEVKSSFKNKLGTQIVGRKKIKDNNIIRGVSFTKNDAKVSLLGVK

SEQ ID NO: 129513 - protein, 403 aa, Unknown
  Bacterial polypetide isolated from the Sargasso Sea
MKTVVLKFGGTSVGNIDRIKKVCKIIATYKKKRYNVVVISSAMSGVTNELVNKSKSLSNNFDLAEYDALLSTGEQVSCALIAGRLNHIGIKSRSWLSWQLPIVTEGNHSGARINKINIKELNKYIKNGGVPVVTGFQGINKSYRVTTIGRSGSDATAIMLAKYIKADECIIFTDVEGVYTTDPRQHKKAKKIKKIFYDEMLEMASLGSKVMQPTSIQDAKLNEIDIKVQSSFASKSGTLITNSKKSFSDQIITGISSTKNDAKITIVGVRDRPGVAASIFKPLSKNLINVDMVVQNISQNGKNTDLTFTIKSEDLKKTEKLIKENKSISYQKLSFDRNLSKVSIIGVGMITTPGITYRMFQALASKKINILVISTSEIKISVLVSAKHVKKAIASLHKEFKLD

SEQ ID NO: 129514 - protein, 321 aa, Unknown
  Bacterial polypetide isolated from the Sargasso Sea
MKLIVMKFGGTSVGSIDKINNVANIVERQVNDKKLIVVLSAMSGVTNKMQEYIDEIESNEIIENDLILTSGEAVSVGLLSAILKKRNIKSIPLLGWQIPIITDSNYQKAKILNIDKVRVDKYLNDYDVLVVAGFQGVDIDGKITSLGRGGSDTTAVAVAAAVDADRCDIYTDVDGVYSTDPNLEPKAKKINKLAFEEMLEMSSTGAKVLHTRSVELAMKNNLTLQVLSSITKQGGTLIVDENKLIEKEIVSGVSFSNNESKLTLSGIADKPGISATIFGLLANNNINVDMIVQNTSQDGITANITFTVPNSEIHNAKKILE

SEQ ID NO: 129515 - protein, 348 aa, Unknown
  Bacterial polypetide isolated from the Sargasso Sea
MKIVVLKFGGTSVGTIERIKKAAKIIVSYAKKKYKVIVVSSAMSGVTNELVKKSQKISENFEPSEYDVLVSSGEQAACALIAGRLNHIGYKSRSWMGWQIPILTEGDHKVSKINQIKKDKIIGYLKSGGIPIIAGFQGINLNQRITTLGRGGSDLSAIMISKFFQAQKCVIYTDVEGVMTTDPRIYKKAKKIKIISYEEMLEMASLGSKVMQSNSIQDARLNRIDIDVKSSFVKTNGTLITKRKNIINNKIITGISSTKNDAKVTLVGVKDKPGIAASIFRPLSKNYINVDMVVQNISADGNETDLTFTIKSEDVKKTQKLLKQNKNIKFKNLIIDTRCIKRFLIIGV

SEQ ID NO: 129516 - protein, 290 aa, Unknown
  Bacterial polypetide isolated from the Sargasso Sea
RSNSKKNIVKFINSGGIPIITGFQGVNLDNRLTTLGRGGTDASAIMIAKFFKAHQCIIYTDVDGVYTTDPRFHKNAKKINKISYDEMLEMASLGAKVMQPTSVQDAKLNNINFTVRSSFVKKSGTLVTNYKRSFSNQIITGITSTQNESKVTIAGVKDKPGVAASIFKPLSLNNINVDMVVQNISLNGKETDLTFTIKTDDIKKTQKLIRNNKKISYRKLSYDNNVSKVSIIGVGMITTPGITYRMFQALAKKRINIMVISTSEIKISVLISSKHVKKAIPILHKEFKLD

SEQ ID NO: 129517 - protein, 203 aa, Unknown
  Bacterial polypetide isolated from the Sargasso Sea
MGLLVQKFGGTAVGDPERIRAVADHIARTVNSGNQVVVVVSAMGKETDELLRLAEDVSSKRPGREMDMLITAGERKAMSLLCMALHDLGVKADSFTGSQAGFLTDTNHQNAKILEVKPDRIEKALSEGRVPVVGGSQGVSVDNNITFLGRGGSDTTAVAIAHAVKADACELYTDVTGVFTTDPRVVPSARLMSNVSFDELLEM

SEQ ID NO: 129518 - protein, 228 aa, Unknown
  Bacterial polypetide isolated from the Sargasso Sea
MAKKVLKFGGTSLGTIERILHVAKIIKKEYDSGNEIIAIVSAMSGKTNELLKQSKAISENFNKRELDVLLSSGEQVTSSLLAGALIKYGVKSKSWLNWQIPILTEGDHSNSRIVNINIKEINKFLSDKGVAIIPGFQGISNNGDVTTIGRGGSDATAVAFAKIFDTDTCEIYTDVDGVYSTDPKKIPVAKKIDKISYDEMLELSSLGAKVMQSSAVQTAMMYNIPLEV

SEQ ID NO: 129519 - protein, 403 aa, Unknown
  Bacterial polypetide isolated from the Sargasso Sea
MKTIVLKFGGTSVGTIDRIKKVCKIIAFYKKKKNKVVVVSSAMSGVTNELVNKSKLISSNFDRAEYDALVSTGEQASCALIAGRLKHNGFKSRSWTSWQLPILTDGPHSSARISSVGIKELNRYINLGGIPIITGFQGVSKDLRITTIGRSGSDATAIMLAKFIKADECIIYTDVDGVYTTDPRQYKKAKKIKKIFYDEMLEMASLGSKVMQPTSVQDAKLNKIDVKVKSSFVSKSGTLITNSKKAFSDQIITGISSTKNDAKITIVGVKDRPGVAASIFKPLSKNLINVDMVVQNISLDGKETDLTFTIKADDLKKTEKLIKQNKKISFKKLSFDKGVSKVSIIGVGMITTPGITYRMFQALASKKINILVISTSEIKISVLVSVKHVKRAIAALHKEFKLD

SEQ ID NO: 129520 - protein, 403 aa, Unknown
  Bacterial polypetide isolated from the Sargasso Sea
MKLIVMKFGGTSVGSIDKINNVANIVEKQLNDKKLIVVLSAMSGVTNKLQEYIDEIESNEIIENDLILTSGEAVSVGLLSAILKKRNIKSIPLLGWQIPIITDSNHQKAKILNIDKVRIYKYLNDNDVLVIAGFQGIDIDGKITSLGRGGSDTTAVAVAAAVDADRCDIYTDVDGVYSTDPNLEPKAKKINKLAFEEMLEMSSTGAKVLHTRSVELAMKNNLTLQVLSSITKQSGTLVVDENKLIEKEIVSGVSFSNNESKLTLSGIADKPGISATIFGLLANNNINVDMIVQNTSHDGVTANITFTVPNSEIHNAKKILEENQNLIDFKSIETDSNISKISVIGMGMMSQSGVAKKMFTTLADNSINILAISTSEIKISVLINKKFTKIAVKSLHEAYNLDN

SEQ ID NO: 129521 - protein, 152 aa, Unknown
  Bacterial polypetide isolated from the Sargasso Sea
MQQVIVQKFGGTSVGSGERIAAVAEIIKNEAEMNTVVVVVSAMAGETDRLIELSKLFGDNPNKREFDALISTGEKVSASLLAMALNSLGLKAKSYSAAQVSLKTTSNFSKAKILDIDKAKMEEILADGSIPIITGFQGITETGEVTTLGRGG

SEQ ID NO: 129522 - protein, 140 aa, Unknown
  Bacterial polypetide isolated from the Sargasso Sea
MQQVIVQKFGGTSVGSGERIAAVAEIIKNEAEMNTVVVVVSAMAGETDRLIELSKLFGDNTNKREFDALISTGEKVSASLLAMALNSLGLKAKSYSAAQVSLKTTSNFSKAKILDIDKAKMEEILADDSIPIITRFSRNN

SEQ ID NO: 129523 - protein, 267 aa, Unknown
  Bacterial polypetide isolated from the Sargasso Sea
GINSHSRITTIGRGGTDASAIMLARFFKAQKCIIYTDVDGVYTTDPNSIKKAKKIKVISYDEMLEMASLGSKVMQPHSIQDARLNRIDINVKSSFKNLPGTIITKRKNILSDKIIRGVSFTKNDAKVTLIGVKDKPGVAASIFEPIYKNSINVDMVVQNISSNGKETDLTFTIKNEDLFKTQKLLKKNKKINFRKLIVDSKVSKVSIVGVGMITTPGVTYRMFNALAKKNINIIVISTSEIKISVLVNRKDLNNAIKVLHKEFNLEK

SEQ ID NO: 129524 - protein, 213 aa, Unknown
  Bacterial polypetide isolated from the Sargasso Sea
MKIVVLKFGGTSVGSIERIKKISKIILSYVKKKNKVIVVSSAMSGVTNDLLNKSKKISKVFSSTEHDVLVSAGEQISCALIAGSLNDLGYKSRSWLGWQIPILTTGEYSQSRIFKIKTSEIIKYLKLGGIPIITGFQGLNSENRVTTLGRGGSDASAIMCAKFFKAEKCVIYTDVDGVYTTDPKTYKKAKKIKVISYEEMLEMASLGSKVMQP

SEQ ID NO: 129525 - protein, 231 aa, Unknown
  Bacterial polypetide isolated from the Sargasso Sea
MALIVQKFGGTSVGDLEKIKGVADRISKYVNKGDKVVAVVSAMSGETNRLVALGTDISNGEPDPKEMDSLTASGEQVSTALLTLALQNLGIKASSLFGDQIKIHTDSAHGKARILEIDTDKLLSFVDSGVVPVIAGFQGVDVNNNITTLGRGGSDTSAVAVAAAIKADECEICTDVDGVYTADPRLVENARRLEQISFEEMLELASLGSKVLHPRSIEFAGRYKVPLRVVS

SEQ ID NO: 129526 - protein, 165 aa, Unknown
  Bacterial polypetide isolated from the Sargasso Sea
MSKIIVQKFGGTSVGSVERIDAVAEIIKNASKSNDIIVVVSAMGGETNKLIKLSKHFSEDPDKREFDALVSTGETVSSALLTMALHSKGIKAKSYSASQIAMKTTNSFSKAKILDVNAKKILEVVEDNTIPIITGFQGITEGGDITTLGRGGSDTTAVAIAAQVG

SEQ ID NO: 129527 - protein, 241 aa, Unknown
  Bacterial polypetide isolated from the Sargasso Sea
MKIVVLKFGGTSVGTIERIKKVANIIVGYVRKGFKPIIVSSAMSGETNHLIKKSRKISNNFNFSEYDVLVAAGEQISCALIAGRLNHIGYKSQSWMSWQIPILTKGEHKSSRISKINKKKIIDYLKSGGIPVVTGFQGINNNSRITTLGRGGSDASAIMFAKFFKAKKCVIFTDVEGVYTTDPNNLKNAKKIKVISYEEMLEMASLGAKVMQPNSIQDARLNRVEIDVKSSFVKKEGTLIT

SEQ ID NO: 129528 - protein, 207 aa, Unknown
  Bacterial polypetide isolated from the Sargasso Sea
MPFIIQKYGGSSIGTIEKIKKVANKIIESKKNGNDIVVVVSAMQGETNRLTELAKSINVDASGRELDTLLSTGEQVTIALLSLAISELGYKAISLTGAQAGIITSDIFNKARIKYINSEKIKKLLRNDNIVVIAGFQGMTEQGEITTLGRGGSDTSAVALSVALNADECQIYSDVDGVYTTDPKIAQGAKKIDKITNEEMLELASQG

SEQ ID NO: 129529 - protein, 320 aa, Unknown
  Bacterial polypetide isolated from the Sargasso Sea
MKIIVLKFGGTSVGTVDRIKSVANIISSYIKKKYKVIVVSSAMSGVTNDLIRKSEKISNDFDVQELDVLLSTGEQIACSLLAGRLRHLGYSSRSWLAWQIPIITSGDYNSSRIININKNKIYKYLKSNGIPIITGFQGINNKNRITTLGRGGSDTSAIMVAKFFKAKKCIIYTDVDGVMTTDPRVFNKAKKIKVISYEEMLEMSSLGSKVMQSSSVQEARLNRIDVDVKSSFQNNSGTLITKRKNIINNKIITGVSSTKNDAKITLIGVKDKPGIAASIFKPLSDNNINVDMVVQNISSNGKETDLTFTIKSGDVNTTRK

SEQ ID NO: 129530 - protein, 221 aa, Unknown
  Bacterial polypetide isolated from the Sargasso Sea
MSKLIVKKFGGTSVANPERIEAVAEIVEQTINEGNRVTVVLSAMGNNTDELISLAKEINPEPDLREYDALLSTGEQVSVALLAMALLKRGIQGKSYTAYQLGIKTNSSHSRARILDVDVNKITKELGEGVVPVITGFQGMNELGDITTLGRGGSDTTGVALAVALNADECQIYTDVDGVFTTDPRVYDKARLLKNVSFEEMLELSSMGAKVLQLRAVEYAS

SEQ ID NO: 129531 - protein, 279 aa, Unknown
  Bacterial polypetide isolated from the Sargasso Sea
KTNELIKFAKEIDNNFNKREFDVLLSSGEQVTCALLAGALIKLNLNAKSWLNWQIPILTEGEHTNARIINMNVNKINDYLKKGIAIVPGFQGISKLGEVTTIGRGGSDATAVAFAKIFEADSCEIYTDVDGVYSSDPNKIPVAKKIEKISYDEMLELSSLGAKVIQSSAVQTAMLYNIPLEVKSTFTDRKGTKIFDQQNIDYSKSVTGVAYSKDDAKVTLIGVQDKPGVAANIFEPLNKSQINVDMVIQNISSDQKTTDITFTVKRDDLNQTKEILKNN

SEQ ID NO: 129532 - protein, 268 aa, Unknown
  Bacterial polypetide isolated from the Sargasso Sea
MIMTRVVQKFGGTSVADIDRIKAVAQRVKAEVDRGNEVAVVVSAMSGTTNQLVDWTVKAAPLHDTREYDTVVAAGEQVTAGLLALSLQTLGVDARSWLGWQVPLRTDDAHSKARIKDIDTTDLESRIISGQVAVVAGFQGLGPNNRITTLGRGGSDTSAVALAAALKADRCDIFTDVDGIYTTDPRIVSKARKLDRITYEEMLEMASLGAKVLQSRSVELAMNHNVRVQVRSSFSDVNGTLVVDEGEIVEQEIVSGIAYSKDEAKITL

SEQ ID NO: 129533 - protein, 158 aa, Unknown
  Bacterial polypetide isolated from the Sargasso Sea
MKFGGTSVADVPQIKKIALKIKAEVKKGNKVIAVVSAMSGVTNNLIDQVKKTSENFPYSEYDTVVSSGEQVTSALLSIALEEVSIKARSWLGWQVPIFTDDIYGKAVIKNIETANISKSLENGFVAIVSGFQGVSNNNRITTLGRGGSDTSAVALAAA

SEQ ID NO: 129534 - protein, 301 aa, Unknown
  Bacterial polypetide isolated from the Sargasso Sea
LMSMSLRNNNVKAVSLTGQKAGIFTDELHGSARIASIDEKMILNELNNKDVVIVAGFQGVSGYGEVTTLGRGGSDTTAVAIASALNAEKCEIYTDVKGIFTADPRLVKDSKLIRNISYNEMLEMASLGAKMHPRSIEIAAINNIEMIIKHTMYESEGTKLNNNEIKMEIRNAVTGIPTSKGVSKVTINNIDDEPGIASSIFLPLSEMGISVDVIVQTAGNDGKTNLSFTLNDNDLESCVNELMKNNVSKKEFIKTQSGLGKISIVGTGIQNQPGYASRMFKTLSENKINIEMITTSEIRIT

SEQ ID NO: 129535 - protein, 265 aa, Unknown
  Bacterial polypetide isolated from the Sargasso Sea
MLLTAGERISMAVLAMAIHDLGAEARSYTGSQAGLITDSAHGAARIIDVSPGRISEALAEGAIPIVAGFQGVAQDSKDITTLGRGGSDTTAVALAAALNADVCEIYTDVDGVFSTDPRVVPAARRVPFITYEEMMELAAVGAKVLHLRCVEYARRFDLPIHVRSSFSSKEGTWVMSPEAITHAIGEGRAMEQPIISGVAADVNDAKVTVVGVPDKPGQASAIFRALADASINIDMIVQNVSAAATGRTDVTFTCPQGSVQQAMEA

SEQ ID NO: 129536 - protein, 268 aa, Unknown
  Bacterial polypetide isolated from the Sargasso Sea
MSIIVMKFGGTSVATVEKIRKVAKTVKAELVNNKIVVVLSAMAGVTNELQSLINEVNFKASKEADLILTSGEQVTIGLLSMMLKKEGIKSIPLLGWQIPIVTDDHHEKGRILNINNENLYKYFQSNDVIVLAGFQGISTHGYITSLGRGGSDTTAVAIASSIKAERCDIYTDVEGVYTTDPNIEKNAKKINKLTYEEMLEMSSTGAKVLQTRSVELAMKNNLTLQVLSSLTNQQGTYVVNENELIENEIVSGVSYSKNESKITISGIQ

SEQ ID NO: 129537 - protein, 212 aa, Unknown
  Bacterial polypetide isolated from the Sargasso Sea
MAKKVFKFGGTSVGTIERILHVANILKKEYVAGNEIIAVVSAMSGTTNNLLQQSESISKNFDKRELDVLLSSGEQITSALLTGALKEIGVKSKSWLNWQIPILTEGDHSNARIINMSVTEINKYLSEKGVVVIPGFQGISKSGDITTIGRGGSDATAVAIAKIFNADSCEIYTDVDGVFSTDPNKIPVAKKINKISYDEMLELSSLGAKVMQ

SEQ ID NO: 129538 - protein, 181 aa, Unknown
  Bacterial polypetide isolated from the Sargasso Sea
MALIVQKFGGTSVGSVDRINAVAKKVGEFRDRGDDVIVVVSAMSGETNRLTALAQGFISNPASREMDVLLSTGEQVTISLLAMALESRGYGAISYTGAQVKILTDSFHTKARIKEIDTTLLQNGIKAGKVVVVAGFQGVDSSGNITTLGRGGSDTTAVALAAALNAEECQIYTDVKGVYTT

SEQ ID NO: 129539 - protein, 186 aa, Unknown
  Bacterial polypetide isolated from the Sargasso Sea
GEPDPKEMDSLTASGEQVSTALLSLALKNLGIKASSLLGDQIKIHTDSAHGKARILEIDTDKLLSYVDSGVVPVIAGFQGVDVNNNITTLGRGGSDTSAVAVAAAIKADECEICTDVDGVYTADPRLVENARRLEQISFEEMLELASLGSKVLHSRSVEFAGRYRVPLRVVSTFSDGEGTLITDGE

SEQ ID NO: 129540 - protein, 274 aa, Unknown
  Bacterial polypetide isolated from the Sargasso Sea
TGFQGISNENNVTTIGRGGSDTSAVVLAAALGLSECDIYTDVDGVYTTDPRLVDDAKKLDEVAYHEMFELASMGAKVLHPRAVECAQENNIVLHVRSSFSVKDGTRIKELEHMELNRVVTGIALKKDEAKISISGISDEPGVAGKLFSELSHHNINIDMIIQSNEEANKTNTITFTVSEDSFEEAMSITRKIAEALGSGVVLGHTNIAKVSVVGVGMISKPGVAAKMFQILGDHSINIQLITTSEIKISCAIDSTQAEMAVQALHEGFQLDQAK

SEQ ID NO: 129541 - protein, 185 aa, Unknown
  Bacterial polypetide isolated from the Sargasso Sea
MGKLIVKKFGGTSVADAERIEAVADNIESEIHAGNKVTVVLSAMGDSTDDLIKLAKEINPEPDLREYDALVSTGEQISVALLAMALLKRGIKGKSYTAYQLGIKTNSSHSRARILDVEVSKITSEINEGVVPVITGFQGMNESGDITTLGRGGSDTTGVALAAALDADECQIYTDVDGIFTTDPR

SEQ ID NO: 129542 - protein, 276 aa, Unknown
  Bacterial polypetide isolated from the Sargasso Sea
MKNIIVQKFGGTSVGSVERILAVANIIKAAFKNEFPVVVVSAMGKETDRLVMLAKGISKNPEKRELDALLSTGEKVSASLLAMQLNEMGIKAKSFSAAQISMKTTSQYSKAKILDINYQIILDSIQSGFVPVITGFQGVTDSGDVTTLGRGGSDTTAVAVSAAIEASRCDIYTDVDGIYTTDPNLVNNAKKLESITMEEMLELSGQGANVLQIRAVEFANKYNVPLRVLSSFKSGSGTHILKEESSMEDAVITGIAYQKDQTKITLHGVVDTPGIA

SEQ ID NO: 129543 - protein, 270 aa, Unknown
  Bacterial polypetide isolated from the Sargasso Sea
MVKKVLKFGGTSVGTITRIQHVANIIRKEKDDGHQIIVVVSAMAGKTNELISLSKNLSQDFNKRELDVLLSSGEQITCALLAGALLDLNINAKSWLNWQIPILTDGEHANARIININVNRIEDFLKFGVAIVPGFQGISKNGDITTIGRGGSDATAVAFAKLFNADTCEIYTDVDGVYSSDPNKIPVAKKIDKISYDEMLELSSLGAKVMQSSAVQTAMIYDIPLEVKSTFTNRKGTKIFDKQNIDYSKSVTGVAYSKDDAKVTLMGVEG

SEQ ID NO: 129544 - protein, 281 aa, Unknown
  Bacterial polypetide isolated from the Sargasso Sea
TCKIFKEISEDFNKRELDVLLSSGEQVTCSLLAGALIEKKLIAKSWLNWQIPILTEGEHCNARIISMDIEKINNFLNKGVAIIPGFQGVSKNGDITTIGRGGSDATAVAVAKLFNADSCEIYTDVDGVFSSDPNKIPVAKKIKKISYDEMLELSSLGAKVIQSSAVQTALIYNIPLEVKSTFTDRKGTMISNQQDIDYTKSVTGVAYSKDDAKITLLDVEDRPGVAANIFEPLNKAQINVDMVIQNISSDQKTTDISFTIKRDDLIKTIEILKKNRVIKYK

SEQ ID NO: 129545 - protein, 207 aa, Unknown
  Bacterial polypetide isolated from the Sargasso Sea
MKTIILKFGGTSVGSIDRIKRIANIIIGYKKRRNKVIVISSAMSGTTNDLIKKSKLISNDFDKAEYDALVSTGEQVACALIAGRLNHLGFKSRSWTSWQIPIMTDGPNSGSRIDKISTKDLSRYIKSGGIPVITGFQGINKFLRITTLGRGGSDASAIMIAKFFKADECIIYTDVDGVYTTDPKLDKKAKKIKQIQYDEMLEMASLG

SEQ ID NO: 129546 - protein, 286 aa, Unknown
  Bacterial polypetide isolated from the Sargasso Sea
DISEDFDKRELDVLLSSGEQVTSSLLAGALIELGVKSKSWLNWQIPILTEGEHSNSRIININVQKINKFLSEKGVAIIPGFQGVSKKGDVTTIGRGGSDATAVAVAKIFNTETCEIYTDVDGVYSTDPKKIPVAKKIDKISYDEMLELSSLGAKVMQSSAVQAAMMYNIPLEVKSTFTDRQGTKIFDQESLDYTKSVTGVAYSKDDAKITLTGVEDKPGVAANIFEPLSKNQINVDMVIQNISSDHKITDITFTIKRDDLLKTIEILKSNKDIKYKNMSHNNKVAK

SEQ ID NO: 129547 - protein, 171 aa, Unknown
  Bacterial polypetide isolated from the Sargasso Sea
MQQVIVQKFGGTSVGSGERIAAVAEIIKKEAEMNTVVVVVSAMAGETDRLIELSKLFGDNPNKREFDALISTGEKVSASLLAMALNSLGLKAKSYSAAQVSLKTTSNFSKAKILDIDKAKMEEIIADGSIPIITGFQGITETGEVTTLGRGGSDTTAVAIAASLKANRCDI

SEQ ID NO: 129548 - protein, 198 aa, Unknown
  Bacterial polypetide isolated from the Sargasso Sea
SSVSNATKIKSVALRIAESKKQGHQLAVVLSAMGDSTDQLIELAESISTNPEPRELDTLLSTGELVSCTLMAMALRELGIPAISMSGAQAGIKTDTAHGRASIVGLDANRIISILNSGTVAIVAGFQGVSEDMDITTLGRGGSDTTAVALAAAIGAERCEVFTDVDGIYTADPRVVPNAKKIKEIGYEEMLELASYGA

SEQ ID NO: 129549 - protein, 210 aa, Unknown
  Bacterial polypetide isolated from the Sargasso Sea
MKIVVLKFGGTSVGKIERINKVANIIISYVKKKYRVIVISSAMGGVTNDLIKKSKKISRDFISSEQDVLVSSGEQISCALIAGRLNHLGYKSQSWQGWQIPIITTGIFGSSRIIKINTKKINNYLISGGIPVIAGFQGINMNNRITTLGRGGSDATAIMIAKFFKAHKCIIYTDVEGVYTTDPKKFNNAKKIKVISYEEMLEMASLGAKV

SEQ ID NO: 129550 - protein, 299 aa, Unknown
  Bacterial polypetide isolated from the Sargasso Sea
NWQIPILTEGENSNARIINMSTLSINKFLSEKGVAIIPGFQGISKAGDITTIGRGGSDATAVAIAKIFDADLCEIYTDVDGVYSTDPNKIPVAKKIDKISYDEMLELSSLGAKVMQSSAVQTAMMYNIPLEVKSTFTARQGTKIFDQDSIDYTKSVTGVAYSKDDAKITLVGVQDKPGVAANIFEPLSKNQINVDMVIQNISSDQKTTDITFTIKREDLLKTIEILKSNKTIQYESLNHNDKVSKISIVGAGMVSTPGITYRMFRSLADEKINILAISTSEIKLSVIIGEDDTLKAIKK

SEQ ID NO: 129551 - protein, 210 aa, Unknown
  Bacterial polypetide isolated from the Sargasso Sea
MALIIQKFGGTSVANPERINDVAERIARYHKSGHQIIAVVSAMSGETNKLISLADEMMQNPDPRELDMVMSTGEQITAGLTALSLIDKGVQAKSYTGHQLGISTDSSFGKARIVDIDTKILKKDLKQGFVVVVAGFQGLDKVGNITTLGRGGSDTTAVAIAAAIKADECQIYTDVDGIYTTDPRVVPEARKLNSITFEEMLEMASLGSKV

SEQ ID NO: 129552 - protein, 160 aa, Unknown
  Bacterial polypetide isolated from the Sargasso Sea
MALIVQKFGGTSVGDLEKIKGVADRISKYVNKGHKVVAVASAMSGETNRLVALGTDISNGEPDPKEMDSLTASGEQVSTALLSLALQNLGIKASSLLGDQIKIHTDSAHGKARILEIDTDKLMSFVDSGVVPVIAGFQGVDVNNNITTLGRGGSDTSAVA

SEQ ID NO: 129553 - protein, 274 aa, Unknown
  Bacterial polypetide isolated from the Sargasso Sea
NAEHDVIVSSGEQVTSGLLALYLNNIGINARSWMAWQMPFMTDNTFTKARITEIDATELKVSLDNNFVAVIPGFQGVTDNKRITTLGRGGSDTTAVALAAALSAERCDIYTDVDGVYTTDPRIVSKAQKIDAVTYEEMLEMASQGAKVLQTRSVALAMLHDVRLQVLSTFENKPGTLVLSEEEILEHETVTGIAYSPDEAKVTLRRVGDKPGVAASIFGSLAKASINVDMIVQNVSEDGKATDITFTINQTDSERASEVLHNLKDEIGFCDLNC

SEQ ID NO: 129554 - protein, 259 aa, Unknown
  Bacterial polypetide isolated from the Sargasso Sea
TLGRGGSDTSAVALAAALGADTCEIYTDVPGVLTTDPRKVLDAQLMREVSCDEMLELASLGAAVLHPRAVEIARNYGVPLVVRSSWTEGMGTRLFSQAERKISSEGLELGKTVDRAELVEEQAVIALAHVPDEPGVAANLFEGLGNAGLNVDLIVQATHDGVTNDIAFTLAESEIAVAEAFCRQKLGNDSHVEIQSGMAKLSIGGAGIMGRPGIAAQLFEALSKVGISIRMIATSEVQVSCLIRGEEAAKAMRTTAQVF

SEQ ID NO: 129555 - protein, 323 aa, Unknown
  Bacterial polypetide isolated from the Sargasso Sea
FRPNPTPRELDMIASTGEQVSVGLLAIALHAEGIDARSYTGWQVPVKTDSAYTKARIQSIDDERVRADLDAGRVVVITGFQGIDSEGHITTLGRGGSDTSAVAVAAALEAEECLIYTDVDGVYTTDPRVVDDARRLDKITFEEMLEMASLGSKVLQIRSVEFAGKYRVKTRVLSSLTDPLMPLDVEMNSGTLITFEEDSNMEAAAISGIAFARDEAKITVIGVPDKPGIAYQILGPVADANIDVDMIIQNQSVEGKTDFTFTVPRGEYQRALAILNDSVKAHIGAASVSGDPKVSKVSVVGVGMRSHVGIASKMFRTLSEEGI

SEQ ID NO: 129556 - protein, 173 aa, Unknown
  Bacterial polypetide isolated from the Sargasso Sea
MSLIVQKFGGTSVADTDSLRIVAERIIDCKKNGNDVVVVPSAMGSSTDELTQLANDLSESPTPRELDMLLSAGERITMSLLSMHLNSLGYSSFSLTGSQAGIITTSRHGQAEIEEITGERVKEGLENGDIVIVAGFQGFNRDTQEITTLGRGGSDATAVALAAALGAERCEIF

SEQ ID NO: 129557 - protein, 305 aa, Unknown
  Bacterial polypetide isolated from the Sargasso Sea
MSMSLREISVNAISLTGQKAGIFTDDLHGSARISSIDKKVILNELTERDVVIVAGFQGVSEYGEVTTLGRGGSDTTAVAIASALNAKRCEIYTDVKGIFTADPRLVNDSKLISNISYDEMLEMASLGAKMHPRSIEIASINKIEMIIKHTKYESEGTRMRNDEVKMEKRNAVTGIPTSTGVSKVTINNIDDKPGIASSIFLPLSKMGISVDVIVQTAGNDGKTNLSFTLEDKNLDVCVNELIKNNIAKKENINTQSGLGKVSIVGTGIQNQPGYASRMFETLSEKNINIEMITTSEIRITCIINS

SEQ ID NO: 129558 - protein, 292 aa, Unknown
  Bacterial polypetide isolated from the Sargasso Sea
GLALQNLGVDARSWLGWQVPIYTDDVHGAARINKVGAANIDQCLSEGHVAVIAGFQGIGLDHRITTLGRGGSDTSAVAVAAALNADRCDIYTDVDGVYTTDPRIAPKARKLDRITFEEMLEMASSGAKVLQTRSVAMAMRQNVNIQVRSSFNDAPGTFVVNEDSIMEQETISGIAYSPDEAKITIVGLPDRPGVAAAVFGQLADHHVNVDMIVQTASSTTKTTDISFSVGRLDNEKAVEIITKNRESLEFETVVSDPNVSKISIVGTAMRSQPGVAKKMFETLATKGVNIQV

SEQ ID NO: 129559 - protein, 190 aa, Unknown
  Bacterial polypetide isolated from the Sargasso Sea
MGKLIVKKFGGTSVANAERIEAVADNIEAEIHAGNKVTVVLSAMGDSTDDLIKLAKEINPEPDLREYDALVSTGEQISVALLAMALLKRGIKGKSYTAYQLGIKTNSSHSRARILDVEVSKISSELNEGVVPVITGFQGMNESGDITTLGRGGSDTTGVALAAALDADECQIYTDVDGIFTTDPRVYDKA

SEQ ID NO: 129560 - protein, 298 aa, Unknown
  Bacterial polypetide isolated from the Sargasso Sea
KAKSYSAAQVSLKTTSNFSKAKILDIDKAKMEEILADGSIPIITGFQGITETGEVTTLGRGGSDTTAVAIAASLKANRCDIYTDVDGIYTTDPRIVPNAKKLDVISMEGMLELAGQGAKVIQIRAVEFANKFKVPVRVLSSFSSGTGTMITLENETMENAEISGIAFQKDQTKVTFTAVEDTPGIASKILGPLSESDIKVDVIVQNVGIEGKTDFTFTIASEEKNLLDEAINRIQKSINYKEVIIDDEIAKVSIVGVGIRSHAGVAAKAFQALSENEINIGMISTSEIKLTLVIEEGR

SEQ ID NO: 129561 - protein, 249 aa, Unknown
  Bacterial polypetide isolated from the Sargasso Sea
VCPRVGCLIIAGFQGINEDQDTTTLGRGGSDTTAVALAAALSVGRCEIFTDVAGVFTSDPRICPRARSLIDISYDEMLEMATTGAKVMHPRAVEVGQDYGVEIHVRSTNHPNEPGTIIRKEAQMEKEKKARAVTHESNVAKITIRGLIDQPGIAASLFEPLAEAGVSVDTIVQNASEEGTTDLTFTVAPDLLVSAESVVTRMKTELLARDVVTNSDLGTVSVVGSGMTNSPGYAAQMFRTLTNAGVNID

SEQ ID NO: 129562 - protein, 214 aa, Unknown
  Bacterial polypetide isolated from the Sargasso Sea
MKIIVLKFGGTSVGTVDRIKNVANIITSYIKKKYRVIVVSSAMSGVTNDLIRKSEKISNDFDVQELDVLLSTGEQIACSLLAGRLRHLGYNSRSWLAWQIPIITSGDYNSSRIININKNKIHKYLKSNGIPIITGFQGINNKSRITTLGRGGSDTSAIMVAKFFKANKCIIYTDVAGVMTTDPRVFNKAKKIKVISYEEMLEMSSLGSKVMQIF

SEQ ID NO: 129563 - protein, 252 aa, Unknown
  Bacterial polypetide isolated from the Sargasso Sea
IITSNEHMKSRILSIEHEKIFNELQDYDVLLIPGFQGINAKNEITTLGRGGSDTSAVAVAAAINAECIIYTDVDGVYTTDPNLVKNAKKIPQISYEEMLELASQGAKVLQTRSVELAMRKKTKLSVRSSMKPKTAGTVVTEENSKLENNTVSGIAYSKDEAKITLSRVLDKPGVSSKIFGPLAKGNINVDMILQNVSQDGKFANLSFTLPRGDLEKALKILKKEKANIGYKKINASNSISKISVVGVGMRSH

SEQ ID NO: 129564 - protein, 252 aa, Unknown
  Bacterial polypetide isolated from the Sargasso Sea
ALLSLALEKIGVTAKSFLADQIPLRTDGEFGKARIVEIESKSLKEAIADGIVPVVAGFQGVTADSLITTLGRGGSDTSAVAVAAALDADECEICTDVDGVYTADPRIIKKANRLDQITFEEMLELASLGSKVLHPRSVELAGRHKVPLRVVSTFDEGPGTLISFDGDNMEGAVVSGIAHASDEAKITIEGVPDIPGVASKIISPVSAANIDVDMIVQNTSAEGLTDFTFTVKRPDFDEALALLRSVSEVIGA

SEQ ID NO: 129565 - protein, 278 aa, Unknown
  Bacterial polypetide isolated from the Sargasso Sea
DNTIPIITGFQGITEGGDVTTLGRGGSDTTAVAIAAQVGALRCDIYTDVDGIFTTDPKVVSNAKKLDSITMEEMLELAGQGAKVMQTRAVEFANKYKVPVRVLSSFNEGNGTLITLKDESMENASVSGIAFQKDQIKFTLHGVGDVPGTAFRILGPISDAEVEVDVIVQNVSVDGKTDFTFTVSSEDKDTVKKVLENVKNDISFKEFIVDSNIAKVSLVGVGMRSQAGVASKAFKALSENDVNIQIICTSEIKITMVVEKDLVDKAVSVLHKEFELEK

SEQ ID NO: 129566 - protein, 226 aa, Unknown
  Bacterial polypetide isolated from the Sargasso Sea
MSIIVMKFGGTSVADTDCINNVASKVVAQYKKNKKIVVVVSAMSGTTNNLIDLTKKLSKKRNPKEYDVVVSSGEQVTAGLLSMALTSHNIPSRSFMGWQIPVLTDNTFSKANIVEINVDILMSSLNRNEVAVVPGFQGVTNKNQITTLGRGGSDTSAVAIASALKAERCDIYTDVDGIYTADPRMVPKARKLEKISYEEMLEMASQGAKVLQTRSVALAMKYKLKI

SEQ ID NO: 129567 - protein, 326 aa, Unknown
  Bacterial polypetide isolated from the Sargasso Sea
VSTGEQVTIALLCMAIEALGLKARSYTGGQVPIITDSAFGKARIERIEPSNIKKDLDLGRVVVVAGFQGVDSDGSITTLGRGGSDTTAVALAATLKADECQIYTDVNGVYTTDPRIVMEARLLPEITFEEMLEMASQGSKVLQIRAVEFAGKYGVPLRVKSSFNEGEGTLITLEGQKDMEKPMVSGIAFNRDEAKLTIRGIPDQPGVAAKVLGPISDANIDIDVIVQNVAKDNSATITFTVNRSELESATEILSVIANDLGAEEIIADSKIAKVSIVGVGMKSHAGVATRMFECLASEGINIQLITTSEIKIAVVIEERYLELQLE

SEQ ID NO: 129568 - protein, 283 aa, Unknown
  Bacterial polypetide isolated from the Sargasso Sea
IDGLDDHSGLSDAESALILSRGEYLLTKMATRWLSKSYEDALWVDAKTVFRASSSNGLTHYLHATCEVIPDPQIQAMWAGQTRLLVVPGFYASNGNNEVVLLGRGGSDTSAAYLSVLLSAVLCEIWTDVPGVFTANPNRLPEARIIGRLDYGEAQELAHLGAKVIHPPALLPLKMHAIPMRVASTHHRHIAGTLVFKDESDSLPSLKAVMVRRDCLVVNISNPLLPYQSHHSAEIINAIVSTGLSIELMTASKTQLSFCLNRVDSIYASEFDACLQELERWGE

SEQ ID NO: 129569 - protein, 252 aa, Unknown
  Bacterial polypetide isolated from the Sargasso Sea
MVKKVLKFGGTSVGTIERIQHVANIIKKEHSLGNEVIVVVSAMAGKTNELLKFSNSISQKFDKRELDVLLASGEQVTSALLAGALIEIKIKAKSFQNWQIPILTEGEHSNARITNMSVKKINEFLNDKGVAIIPGFQGISKIGDITTIGRGGSDATAVAIAKLFQADNCEIYTDVDGVFSTDPNKIPVAKKIDKISYDEMLELSSVGAKVMQSSAVQTAMMYDIPLEVRSTFTDRQGTKIFDQEKILTIQRV

SEQ ID NO: 129570 - protein, 241 aa, Unknown
  Bacterial polypetide isolated from the Sargasso Sea
MSIIVMKFGGTSVASVEKIRKIAKTVKAESVNNKIVVILSAMAGVTNELQSFINKVDYKAPMEADLILTSGEQVTIGLLSMLLKKEGIKSIPLLGWQIPIVTDEHHEKGRILNINNENLNKYFQSNDVIVLAGFQGISTHGYITSLGRGGSDTTAVAIASSIKAERCDIYTDVEGVYTTDPNIETKAKKIEKLTYEEMLEMSSTGAKVLQTRSVELAMKNNLTLQVLSSFTNQQGTYVVNE

SEQ ID NO: 129571 - protein, 239 aa, Unknown
  Bacterial polypetide isolated from the Sargasso Sea
GLLALYLNNIGINARSWMAWQMPFMTDDTFTKARITEIDATELKVSLDKNFVAVIPGFQGITDNKRITTLGRGGSDTTAVALAAALSAERCDIYTDVDGVYTTDPRIVSKAQKIDAVTYEEMLEMASQGAKVLQTRSVALAMLHDVRLQVLSTFENKPGTLVLNEEEILEHETVTGIAYSPDEAKVTLRRVGDKPGVAASVFGSLAKASINVDMIVQNVSEDGKATDITFTINQTDSER

SEQ ID NO: 129572 - protein, 236 aa, Unknown
  Bacterial polypetide isolated from the Sargasso Sea
MKIVVLKFGGTSVGSINRIEKVADIIKQYKKKYKVIVLSSAMSGVTNDLVSKSKQISKNFSESEYDALVSAGEQMSCSLIAGQLIEKGQKARSWLAWQIPIITDGKHKFARINQINKKNILKYLKTGGIPIITGFQGINYQNRITTIGRGGTDASAIMFAKFFNAEKCIIYTDVEGVYTTDPNKLKSAKKIKEISYEEMLEMASLGAKVMQPHSIQDARLNRIDIEVKSSFKNKSG

SEQ ID NO: 129573 - protein, 279 aa, Unknown
  Bacterial polypetide isolated from the Sargasso Sea
MSKIIVQKFGGTSVGSVERIDAVAEIIKNASKSNEIIVVVSAMGGETNKLIKLSKHFSEDPDKREFDALVSTGETVSSALLAMALHSKGIKAKSYSASQIAMKTTNTFSKAKILDVNAKKILEVVEDNTIPIITGFQGITEGGDVTTLGRGGSDTTAVAIAAQVGALRCDIYTDVDGIFTTDPKVVSNAKKLDSITMEEMLELAGQGAKVIQTRAVEFANKYNVPVRVLSSFNEGNGTLITLKDESMENASVSGIAFQKDQINSLYMVLVMFLEPALRF

SEQ ID NO: 129574 - protein, 262 aa, Unknown
  Bacterial polypetide isolated from the Sargasso Sea
MKKKVLKFGGTSVGSIDRIQHVANIIKSEVEAGNKIIAVVSAMAGKTNELIEYSQAIDKNFDKRELDVLLSTGEQVTSSLLAGALVNLNIKSKSWLNWQIPILTEGEHTNARILNMNVSKINQYLKEGVAIVPGFQGVSKIGDITTIGRGGSDATAVAIAKLLNADTCEIYTDVDGVYSTDPNKIPVAKKIEKISYDEMLELSSLGAKVMQSSAVQTAMMYDIPLEVRSTFTNRKGTKIFDQQEIDYSKSVTGVAYSKDDAK

SEQ ID NO: 129575 - protein, 191 aa, Unknown
  Bacterial polypetide isolated from the Sargasso Sea
MALLVKKFGGTSVGDIKKIQNIASSIFQSKEAGNEIVVVVSAMGQTTDDLNCLAESISKNPNRRELDMLLSTGEQVTIALLSMALNEYGIPAISMTGSQVGIITESIHGKARILDIKTERIKNYINQGFVVVVAGFQGTTLSHTGSMEITTLGRGGSDTSAVALSTALGAETCEFTQTFQGFLLLIQECSL

SEQ ID NO: 129576 - protein, 300 aa, Unknown
  Bacterial polypetide isolated from the Sargasso Sea
MEGETNKLVGLANHFSQSPDKREFDALVSTGETVSSALLAIALHAKGINAKSYSASQISMKTTDSYSKAKILDIDANKIMEVVGQNTIPIITGFQGITETGDITTLGRGGSDTTAVAIAAQIGAKRCDIYTDVDGVFTTDPKVVPNAKKLDSITMEEMLELAGQGAKVMQTRAVEFANKYKVPVRVLSSFDEGDGTLISLKDDGMENALISGIAFQKDQVKFTLHGVGDIPGTAFKILGPISEKDIEVDVIVQNVSVDGKTDFTFTVSKDDESDVKDIIEEIKTEVEFKDLMINSDIAKV

SEQ ID NO: 129577 - protein, 279 aa, Unknown
  Bacterial polypetide isolated from the Sargasso Sea
MAKKVLKFGGTSVGTIERILHVAKIIKREHDAGNEIIAVVSAMSGETNSLIDRSKSISKNFDKRELDVLLSSGEQVTSSLLAGALINLGILSKSWMNWQIPILTEGDNSNARIINMNISKINKFLSEKGIAIIPGFQGVSKEGDITTIGRGGSDATAVAVAKIFNADTCEIYTDVDGVYSTDPNKIPVAKKIDKISYDEMLELSSLGAKVMQSSAVQTAMMYNIPLEVKSTFTDRQGTKIFDQANIDYNKSVTGVAYSKDDAKITLIGVQDKPGVAAKY

SEQ ID NO: 129578 - protein, 261 aa, Unknown
  Bacterial polypetide isolated from the Sargasso Sea
MKLVVMKFGGTSVGSIDKIYNVAKIVEKQLNDKKLIVVLSAMSGVTNKMQQYIDEIESNEIIENDLILTSGEAVSVGLLSAILKKRNIKSVPLLGWQIPIITDSNHQKAKILNIDKVRITQYLRDCDVIVVAGFQGIDIDGNITSLGRGGSDTTAVAVAAAVDADRCDIYTDVEGVYTTDPNLEPKAKKINKLAFEEMLEMSSTGAKVLHTRSVELAMKNNLTLQVLSSITKENGTLVVDENKLIEKEIVSGVSYSNNESK

SEQ ID NO: 129579 - protein, 259 aa, Unknown
  Bacterial polypetide isolated from the Sargasso Sea
MKTIVLKFGGTSVGSVERIKRVTQIISSYKSRKNRVIVVSSAMSGVTNDLVKKSKLISNNFDKAEYDVLVSTGEQAACSLIAGRLNHCGIKARSWMSWQLPIFTHGPHAGAKINRIFTKQLQKYLNSGGIPIITGFQGVNNNSRLTTLGRGGSDASAIMIAKFLKADECIIYTDVDGVYTTDPKLHRRAKKIKRIEYDEMLEMSSLGSKVMQPTSVQDAKLNNIDINVKSSFINRPGTLITKSFRKKDFSNQNYYWHII

SEQ ID NO: 129580 - protein, 191 aa, Unknown
  Bacterial polypetide isolated from the Sargasso Sea
MKIVVLKFGGTSVGTIKRIKKVSNIIVSYVKKGFKVIVVSSAMSGSTNDLIKKSKNISKNFNSSEYDVLVSSGEQISCALIAGRLNHIGYKSQSWMSWQVPIFAEGDHKTSRISKINKNKITDYLKSGGIPVITGFQGLNNNNRITTLGRGGSDASAIMFAKFFKAKKCIIFTDVEGVYTTDPNKIKNAKK

SEQ ID NO: 129581 - protein, 305 aa, Unknown
  Bacterial polypetide isolated from the Sargasso Sea
LKVRDEVNQGYKVIVVVSAMAGVTNNLIDLVKSTSDTPPDSEYDVVLSTGEQVTSALLAIALDYLNIKARSWLGWQVPIITDKSYGKSGIKKIKTEQILKFLKNNQVAIISGFQGISEENRITTLGRGGSDTSAVAIAASFSAERCDIYTDVDGVYTTDPRIVKRAKKLHQITYEEMLELASQGAKVLQTRSVALAMKYSVKLRVLSSFEDLPGTSIIKEEKNMEKSEISGIAHSLNEAKITLSDIPDQPGQAAEIFGALANHSINVDMIVQSSSINRDATDITFTIPETDLVIAESTIKKYKKK

SEQ ID NO: 129582 - protein, 239 aa, Unknown
  Bacterial polypetide isolated from the Sargasso Sea
MKKLVLKFGGTSVGTIEKIKKVANIIKKRLSEGNQIIVVVSAMSGVTDELKAKSELVSKNFDPKELDVLLSSGEQASCSLLSGALIDLGVKSRSWLGWQIPIVTNDNHTSSQIIKIKTDEILSFISKKGVAVIAGFQGISKDIRITTLGRGGSDLSAVALAKFFNTDSCEIYTDVEGVLTTDPSINENAKIIEKISYEEMLEMASLGAKVMQPVAVQKSMIDNIPINVRSTFSEKSGTK

SEQ ID NO: 129583 - protein, 404 aa, Unknown
  Bacterial polypetide isolated from the Sargasso Sea
MKIVVLKFGGTSVGSIDRIKKVTNIIISFAKKNYKVIVTSSAMSGVTNDLVKKSKSISNEFIPEEYDVLVSSGEQIACSLIAGRLNHLGYKSRSWMGWQIPILTEGSYSSSRIQKIDKKNIIKYLKSGGIPIVAGFQGINSINRITTIGRGGTDASAIMLSRFFKAEKCIIFTDVDGVYTTDPNTISKAKKIKVISYEEMLEMASLGAKVMQPHSIQDARLNRIDIDVRSSFKKSSGTLITKRKNIVSNKIIRGVSFTKNDAKVTLIGVKDKPGIAAAIFEPLYKNSINVDMVVQNISSNGKETDLTFTIKSENLSKTERLLKKNKKISFRKIIVDNKVSKVSIVGVGMVTTPGVTYRMFNALAKKNINIIVISTSEIKISVLVNRKNINKAVSALHKEFNLEN

SEQ ID NO: 129584 - protein, 235 aa, Unknown
  Bacterial polypetide isolated from the Sargasso Sea
MSLIVQKFGGTSVGSAERIVNVAKKVGEFRDRGHDVIVVVSAMSGETNRLTELAREISPHPKPREIDVLLSTGEQVTIALLAMALESEGYEAVSFTGGQIKILTDDFHTKARIKEIETTSIRNEISSGKVVIVAGFQGVDSKGNITTLGRGGSDTTAVALAAALDSDECQIYTDVKGVYTTDPRVVEDAKLLSNITFEEMLELSSLGAKVLQIRAVEFAGKYKVPLRVLSSFEAG

SEQ ID NO: 129585 - protein, 340 aa, Unknown
  Bacterial polypetide isolated from the Sargasso Sea
MKIKVLKFGGTSVGSVEAIKRSANIICDWSKKSKVIVVLSAMSGETDRLINLTKSFSKSPNPVDFDNAISTGENLSCALMSIYLNNQKTKSKSLHSWQIPIMTSSEHMKSRILSINKKFLLNELENLDVLVVPGFQGINERREITTLGRGGSDTSAVAVAAAIDAECIIYTDVEGVFTTDPNIVPNAKKINKISYEEMLELASQGAKVLQTRSVELAMRKNTKLSVRSSLKPKKIGTIITDEKSVLEKNTVSGIAYTKDEAKITLSRVLDKPGVSSKIFGPLAKGNINVDMILQNISQDGKFANLSFTLPRADLEKALKILKKEKFKIGYKKIISSNNIQ

SEQ ID NO: 129586 - protein, 370 aa, Unknown
  Bacterial polypetide isolated from the Sargasso Sea
MKIKVLKFGGTSVGSIEAIKRSADIIHDWSKKSKVIAVLSAMSGETDRLINLTKSFSKNPNPIDFDNAISSGENVSCALMSICLNNQKIKAKSLLSWQIPIITSSEHMKSRILSIDKKFLYDELKNFEVLLIPGFQGINNKGELTTLGRGGSDTSAVAVAAAMETECIIYTDVEGVFTTDPNIVPKAKKINKISYEEMLELASQGAKVLQTRSVELAMRKNTKLSVRSSFKPKKIGTMITDEKSVLENNTVSGITYSKDEAKITLSRVHDKPGVSSKIFGPLAKGNINVDMILQNISQDGKFANLSFTLPRLDLEKALKILKKEKSIIGYKKIISSNNISKISVVGVGMRSHAGVAQTLFDTLGKNKINI

SEQ ID NO: 129587 - protein, 326 aa, Unknown
  Bacterial polypetide isolated from the Sargasso Sea
MTKKVLKFGGTSVGSVKRILHAAEIVKKEHSKGNQIIVVVSAMSGKTNELISHSNSISEKFNKREMDVLLSSGEQVTSALMAGALNEIGIKSKSWMNWQIPILTEGEHTNSRIVNMSINKINSFLSEGGVAVIPGFQGISQNGEITTIGRGGSDASAVAIAKIFQTESCEIYTDVDGVYSTDPSNIPVAKKISKISYDEMLELSSLGAKVIQSSAVQTAMMYDIPLQVKSTFTDREGTEIFSQENIDYSKAVTGVAYSKDDAKVTIIGVEDKPGVAADIFEPLGKNQINVDMVIQNISPDGKTTDITFTIKRNDLNKTLKTLKSND

SEQ ID NO: 129588 - protein, 402 aa, Unknown
  Bacterial polypetide isolated from the Sargasso Sea
MTKKVLKFGGTSVGTIERIQHVAKIIGKERDLGNEIIVVVSAMAGKTNELIKLSSSITNNFNKRELDVLLSSGEQVTCALLAGALNQIKIDAKSWLNWQIPILTEGDHSNARIINMNINNINNYIKKGVAVIPGFQGVSKSGDITTIGRGGSDATAVAVAKIFDTDSCEIYTDVDGVFSTDPKKIPVAKKIDKISYDEMLELSSLGAKVMQSSAVQTAMMYDIPLEVKSTFTDRKGTKIFNQENIDYTKSVTGVAYSKDESKITLIGVEDKPGVAANIFEPLNKAQINVDMVIQNISSDQKTTDITFTIKRDDLLKTIELLKINNRINYKSISHNDKVAKVSIVGAGMVSTPGVTYKMFRGLADEKINILAISTSEIKLSVIIDEENTLNAVKKLHTIFDLD

SEQ ID NO: 129589 - protein, 282 aa, Unknown
  Bacterial polypetide isolated from the Sargasso Sea
MSKLIVKKFGGTSVANPERIEAVADIVEQTINEGNRVTVVLSAMGNNTDELISLAKEINPEPDLREYDALLSTGEQVSVALFAMALLKRGIQGKSYTAYQLGIKTNSSHSRARILDVDVNKIIKELGEGVVPVITGFQGMNELGDITTLGRGGSDTTGVALAVALNADECQIYTDVDGVFTTDPRVYDKARLLTNVSFEEMLELSSMGAKVLQLRAVEYASKFNMPVRVLSSFNQGEGTLVQEEKNIMERPIVSGISSIDTEAKLTIRGVPDIPGVAAKILG

SEQ ID NO: 129590 - protein, 403 aa, Unknown
  Bacterial polypetide isolated from the Sargasso Sea
MVKKVLKFGGTSVGTSERIQHVAKIIKKERSLGNKIIVVVSAMAGKTNELIKLSKEISEEFNKREMDVLLSSGEQVTSALLSGALTEIDVKAKSWLNWQIPILTEGEHTNSRIININVEKINEYLDENGVAILPGFQGISQKGEITTIGRGGSDASAVAIAKIFNTDSCEIYTDVDGVFSTDPNKIPVAKKIEKISYDEMLELSSLGAKVMQSSAIQTALMYDIPLEVKSTFTERKGTKIFSQENIDYSKSVTGVAYSKDDAKITIISVEDRPGVAANIFEPLSKAQINVDMVIQNISSDQKTTDITFTVKRDDVSKTKQILKDESKINYKEIIHNNKVAKVSIVGAGMVSTPGVTYRMFRALSDEKINILAISTSEIKLSVIIEEDDTLKAIKKLHTIFDLD

SEQ ID NO: 129591 - protein, 404 aa, Unknown
  Bacterial polypetide isolated from the Sargasso Sea
MKIVVLKFGGTSVGTIERIKKIADIIISHVKKRYKVIVVSSAMSGVTNELLKKSKKLCNNFILSEQDVLISSGEQMACALISGRLNYQGYKSRSWLSWQVPILTEGSYGSSRIVKINTKKITNFLKLGGIPVISGFQGINMDNRITTLGRGGSDASAIMIAKFFKAEKCIIYTDVDGVYTTDPKNYNKARKIKVISYEEMLEMSSLGAKVMQPNSIQDGRLNRINIDVKSSFSNKDGTLITKRKNIFINKIITGITSTKNDAKITLVGVKDRPGIAASIFKPLSENSINVDMVVQNISADGKETDLTFTTKSENLSKIERLIKKNTKIRFRDIIFDNNVSKLSIIGVGMITTPGVTYRMFQALAKRKINILAISTSEIKISVLINKKNIKKAISVLHKEFKLDR

SEQ ID NO: 129592 - protein, 353 aa, Unknown
  Bacterial polypetide isolated from the Sargasso Sea
MKLVVMKFGGTSVGSIDKINNVANIVEKRLNNKKLIVVLSAMSGVTNKMQKYIDEIESNEVIENDLILTSGEAVSVGLLSAILKKRKIKSVPLLGWQIPIITDSNHQKAKILNINKNRIDQFLKDYDVIVVAGFQGVDMDGNITSLGRGGSDTTAVAVAAAVDADRCDIYTDVDGVYTTDPNLEPKAKKINKLAFEEMLEMSSTGAKVLHTRSVELAMKNNLTLQVLSSITKEKGTLVVDENKLIEKEIVSGVSYSNNDSKLTLSGIADQPGISATIFGLLANNNINVDMIVQNTSQDGVTANITFTVPNSEINNAKKLLEENQKLIDFKSIETDINISKISVIGMGMMSQSG

SEQ ID NO: 129593 - protein, 404 aa, Unknown
  Bacterial polypetide isolated from the Sargasso Sea
MKIVVLKFGGTSVGSTDRIKKVASIIISYVRKNYKVIVTSSAMSGITNDLVKKSKSISNEFIPEEYDVLVSSGEQVSCSLIAGRLNHLGFKSRSWMGWQVPIITEGNHSSSRIQNIYKKNIVNYLKSGGIPIVAGFQGINSTNRITTIGRGGTDASAIMLSKFFNAEKCIIYTDVDGVYTTDPNTISKAKKIKVISYEEMLEMASLGAKVMQPHSIQDARLNRIDIDVRSSFKKSSGTLITKRKNILSNKIIRGVSFTKNDAKVTLIGVKDKPGIAAAIFEPLYKNTINVDMVVQNISSNGKETDLTFTIKSENLFKTERLLKKNKKISFRKIIVDNKVSKVSIVGVGMVTTPGVTYRMFNALAKKNINIIVISTSEIKISVLVNRKNINKAVSALHKEFNLEN

SEQ ID NO: 129594 - protein, 406 aa, Unknown
  Bacterial polypetide isolated from the Sargasso Sea
MENLIVQKYGGTSVGSFERIEAVADNIANTHKKGNDVVVVLSAMAGETDKLIQLAKSIQPEPEPREYDALISTGEQISVALMAMALTKRGIKSKSYTAYQLGIKTNDRHSQARILEVNVDRLKDDLSEGSVPVITGFQGMTEGGDITTLGRGGSDTTGVALAVALNANQCEIYTDVEGVFTTDPRICPKAKLIERISFEEMLELSSTGAKVLQLRSVEYASKNNMPIRVLSSFKEGNGTLVCEEGNDMEKPVVSGISSIDNEAKLTIRGVPDIPGVAAKILGPISDSDIDVDVIVQNISAENNTDFTFTVKQEDAPRAKEILENTSKSLGGGLIELDDDIAKISIVGRGMRGQSGIASKMFESLADNEINILMITTSEIKISVVIRKDLQEKAVNALHNAFELDKD

SEQ ID NO: 129595 - protein, 404 aa, Unknown
  Bacterial polypetide isolated from the Sargasso Sea
MSEIVVQKFGGTSVGTVDRIDSVAEIIKNASKSNKIVVVVSAMGGETNRLVDLAKAFGDDPDKREFDALVSTGETVSSALLTMALHSKGVKAKSFSASQISMRTTSSYSKAKILDVDAKKILDVVENDTIPIITGFQGVTEGGDVTTLGRGGSDTTAVAIAAQISAIRCDIYTDVDGIFTTDPSVVPNAKKLDSITMEEMLELAGQGAKVVQTRAVEFANKYKVPVRVLSSFNDGNGTLISLKDESMENALVSGIAFQKDQVKFTLHSVGDTPGTAFKILGPISDAEIEVDVIVQNVSIDDKTDFTFTVSNEDKESVEKILTDLKTEVDYKEVIINSDIAKVSLVGAGMRSQAGVASKAFKALSENDVNIQIICTSEIKITMVIDEALVDKAVNVLHEEFELEK

SEQ ID NO: 129596 - protein, 245 aa, Unknown
  Bacterial polypetide isolated from the Sargasso Sea
MKLIVQKFGGTSVANTSSLKIVAERIIDRKKEGYEVVVVPSAMGSSTDELIDLANELSEQPTPREMDMLLSAGERITMSLLSMHLNSLGHSSFSLTGSQAGIITTSRHGKAEIEEISGERVKEGIERGDIVIVAGFQGFNRDTREITTLGRGGSDATAVALAAALGAEKCEIFTDVEGIFTADPRIIESAKLIDEITYDEMLEMSSSGAGVLMARSVEFGRRYNVPIIVKSTFTNNKGTVGKKKQ

SEQ ID NO: 129597 - protein, 316 aa, Unknown
  Bacterial polypetide isolated from the Sargasso Sea
MGKLIVKKFGGTSVADAERIEAVADNVEAEIQKGNKVTVVLSAMGKSTDNLIDLAKEINPEPDLREYDALVSTGEQISVALLAMALLKRGIKGKSYTAYQLGIKTNSSHSRARILDVEVSKITSELDEGVVPVITGFQGMNELGDITTLGRGGSDTTGVALAVALKADECQIYTDVDGVFTTDPRVCDKARLLKEVSFEEMLELSSSGAKVLQLRAVEYASKFNLPLRVLSSFQEGEGTLVQEEKNIMERPIVSGISSIDSEAKLTIRGVPDVPGVAAKILSPISEAGIEVDVIVQNISADNNTDFTFTVDKSDAK

SEQ ID NO: 129598 - protein, 412 aa, Unknown
  Bacterial polypetide isolated from the Sargasso Sea
MPVLVMKFGGTSVASLDKIKSAAKSVALEVSAGHSVIVIVSAMAGRTNELVDWVNETSPLYDAREYDAIVSSGENVTAGLMALTLQEMDIPARSWQGWQVPVRTSSAHSSARIEEIPTENIMNEFNEGMRVAVVAGFQGMSETNRVTTLGRGGSDTTAVAFAAAFEAVRCDIYTDVDGIYTTDPRITEKARKLNKISFEEMLELASLGAKVLQTRSVELAMRFNVKLRVLSSFDKPESNAGTLVCSEEEIMESNIVSGIAHSKDEAKMTLISVADRPGIAAAIFGPLSEAGINVDMIIQNIAEEGRTDMTFSCPTDQVLRAEKALNTAKIEGDINFSQLVADTNVAKISAVGIGMRSQSGVAAKMFRTLSDEGINIKVIATSEIKISVLIDRKYMELAIQSLHDAFGLEKIT

SEQ ID NO: 129599 - protein, 404 aa, Unknown
  Bacterial polypetide isolated from the Sargasso Sea
MPEIIVQKFGGTSVGSVERIDSVAEIIKDASKKNNIVVVVSAMGGETNKLVDLAKHFGESPDKREFDALVSTGETVSSALLAMALQSKGIKAKSYTASQISMKTTNSFSKAKILDINAKKIMDEVDQNTIPIITGFQGITETGDITTLGRGGSDTTAVAIAAQIGAKSCHIYTDVDGVFTTDPKVVPNAKKLDSITMDEMLELAGQGAKVIQTRAVEFANKYKVPVRILSSFNKGDGTYISLEDDGMENALISGIAFQKDQVKFTLHGVGDTPGTAFKIIGPISDKDIEVDVIVQNVSVDGKTDFTFTVSKEDEIAVKDIIGEIKKEVKFKDLIINSDIAKVSLVGVGMRTHAGIASKAFKALSENDVNIQIISTSEIKITMVIDKNLVEKAVQVLHEEFDLDK

SEQ ID NO: 129600 - protein, 406 aa, Unknown
  Bacterial polypetide isolated from the Sargasso Sea
MDNLIVQKYGGSSLATLEQFEFVAKKVKNSLKNSNKIVIVVSAMGNTTDELVELGESFLKDSKNIENLRDFDQLLSTGEIISASLMSMSLRKNNVKAISLTGQKAGIFTDEFHGSARISSIDEKVILNELKKRDVVIVAGFQGVSEYGEVTTLGRGGSDTTAVALASALNAERCEIYTDVKGIYTADPRLVKGSKLISNISYNEMLEMASLGAKMHPRSIEIAAINNIEMIIKHTMYESEGTRLNNNEIKMEIRNAVTGIPTSKGVSKVTINNIDDKPGIASSIFSPLSDMGISVDVIVQTAGNDGKTNLSFTLNDNDLENCVNELIKNNVSKKEFIKTQSGLGKVSIVGTGIQNQPGYASRMFKTLSKNNINIEMITTSEIRITCIIKSSDLDLAAKSLHKEFIE

SEQ ID NO: 129601 - protein, 187 aa, Unknown
  Bacterial polypetide isolated from the Sargasso Sea
MALLVKKFGGTSVGDIKKIKNIASSICQSKEAGNEIVVVVSAMGQTTDDLNCLAESISKNPNRRELDMLLSTGEQVTIALLSMALNEYGIPAISMTGSQVGIITESIHGKARILDIKTERIQHYINQGFVVVVAGFQGTTLSHTGSMEITTLGRGGSDTSAVALSTALGAETCEIYTDVPGVLTTDP

SEQ ID NO: 129602 - protein, 403 aa, Unknown
  Bacterial polypetide isolated from the Sargasso Sea
MVKKVLKFGGTSVGTIERIRHVASIIKKEHSEKNKVIAVVSAMSGKTNELLKLSNEIAEDFNKRELDVLLSSGEQVTCALLSGALTRLNIKSKSFMNWQIPILTEGDHSNARIINIHVEKINDYLNNNGVAIVPGFQGISKNGDITTIGRGGSDATAVAIAKIFNAECCEIYTDVDGVFSTDPNKIPVAKKIDKISYDEMLELSSLGAKVMQSSAVQTAMMYDIPLEVKSTFTERKGTKIFSQENIDYTKSVTGVAYSKDDAKITVKEVEDKPGVAANMFEPLSKAQVNVDMVIQNISSDQKTTDITFTVKRDDISKTKQILKESTSINYKEIISNEKVAKVSIVGAGMVSTPGVTYKMFRGLSDENINILAISTSEIKLSVIIDEENTLKAVKKLHTIFDLD

SEQ ID NO: 129603 - protein, 251 aa, Unknown
  Bacterial polypetide isolated from the Sargasso Sea
MQQVIVQKFGGTSVGSGERIAAVAEIIKNEAEMNTVVVVVSAMAGETDRLIELSKLFGDNPNKREFDALISTGEKVSASLLAMALNSLGLKAKSYSAAQVSLKTTSNFSKAKILDIDKTKMEEILADGSIPIITGFQGITETGEVTTLGRGGSDTTAVAIAASLKAHRCDIYTDVDGIHTTDPRIVPNAKKLDAITMEGMLELAGQGAKVIQIRAVEFANKFKVPVRVLSSFSSGTGTMITLENDTMENAE

SEQ ID NO: 129604 - protein, 194 aa, Unknown
  Bacterial polypetide isolated from the Sargasso Sea
MSEIIVQKFGGTSVGSVERIDAVAEIVKNASQSNKIVVVVSAMAGETNKLVNLAKNFSENPNKREFDALVATGETISSALLAMALHSKGLKAKSYSASQISMRTTDSFSKARILDVDAKKILEVLEEDTIPIITGFQGITETGDVTTLGRGGSDTTAVAIAAQVKAERCDIYTDVDGIFTTDPKIVPNAKKLDF

SEQ ID NO: 129605 - protein, 437 aa, Unknown
  Bacterial polypetide isolated from the Sargasso Sea
MCFCAVVSSAPARFILQFRTTMALIVHKYGGTSMGSVERIKNVAKRVAKWHKAGHKMVVVPSAMSGETNRLLGLAKEITGQPSPRELDMIAATGEQVSSGLLAIALQEAGVDAVSYAGWQVPVKTDSAFTKARISEIDGERVLRDLEAGKVVVITGFQGIDPEGNITTLGRGGSDTSAVAVAAALKADECLIYTDVDGVYTTDPRVVDGARRLDRVTFEEMLEMASLGSKVLQIRSVEFAGKYQVKTRVLSSLTDPLIPLDAEMKSGTLITFEEDETMEKAVISGIAFQRDEARIAVMGVPDKPGIAYQILGPVADANIDVDMIIQNQSVEGKTAFTFTVGRGDYQRAMDILTSQVKGHVQAEQVLGDPKVSKVSVVGVGMRSHVGIASTMFRTLSEEGINIQMISTSEIKISVLIDEKYMELAVRALHKAFELDQA

SEQ ID NO: 129606 - protein, 231 aa, Unknown
  Bacterial polypetide isolated from the Sargasso Sea
MSEIIVQKFGGTSVGSVERIDAVAEIIKNASKTNSLVVVVSAMGGETNKLIELSKYFGEDPDKREFDALVSTGETVSSALLAMALNSKGIKAKSYSASQISMKTTDSYSKAKILDVNADKILEVVQNNTIPIITGFQGVTEGGDVTTLGRGGSDTTAVAIAAQVGAKRCDIFTDVDGIFTTDPKVVSNAKKLDSITMEEMLELAGQGAKVMQTRAVEFANKFSVPVRVLSS

SEQ ID NO: 129607 - protein, 415 aa, Unknown
  Bacterial polypetide isolated from the Sargasso Sea
MINNGLNRILVHKYGGSSVSDAKKIANVAKRIASAYEAGFQMVAVCSAMGDTTDDLLDLASQVTTNPQPRELDLLLSTGELVSATLLAMAIAELGHPAISLSGIQAGIHTDEMYGKARIDNIETDRINKELNEGNIVIVAGFQGININDDVTTLGRGGSDTTAVALAAALRADRCEVYTDVDGIYTADPRIAKQARKITHIGYEEMLELACYGAKMHPRSIELGSVYNVPIYVASSFNDDPGTLIDSYVQEQTMENRIKVTGIAYQRNIAKITLRDVPDKPGLAGALFEPLTNDGISVDTIVQNTSADKLTDISFTIDKNDLPATLLTLEKITSVLGSGQLLSEENLAMVSIVGSGMQNTPGYASKMFTILAKGSINIDMITTSEIRISCIISEDKLEDAVQLLHQGFELDRVVN

SEQ ID NO: 129608 - protein, 290 aa, Unknown
  Bacterial polypetide isolated from the Sargasso Sea
DIDKEKMDEILADGAIPIITGFQGVNESGEVTTLGRGGSDTTAVAIAASLKADRCDIYTDVDGVYTTDPRIVPNAKKLDTISMEGMLELAGQGAKVIQIRAVEFANKFKVPVRVLSSFSSGTGTMITLENETMENAEISGIAFQKDQIKVTFTAVEDTPGIASKILGPLSESDIKVDVIVQNVGIEGKTDFTFTIATDEKDLLDGAIEKIQKSINYKEVIIDDEIAKVSIVGVGIRSHAGVAAKAFQTLSENEINIGMISTSEIKLTLVIEKDDLEKAVKVLHDVFELAK

SEQ ID NO: 129609 - protein, 404 aa, Unknown
  Bacterial polypetide isolated from the Sargasso Sea
MTKIIVQKFGGTSVGSVERIDAVADIIADASKTAKIVVVVSAMAGETNKLVNLAKNFSENPDKREFDALVSTGETVSSALLSLALHSKGIKAKSYSASQISMKTTDTYSKAKILDVNSEKILQVIKEETIPIITGFQGVTEDGDITTLGRGGSDTTAVAIAAQIGAERCDIYTDVDGIYTTDPKIVPNAKKLDSITMEEMLELAGQGAKVMQTRAVEFANKYNVPVRVLSSFNEGSGTLITLEEESMENALISGIAFQKDQVKFTLHGVGDIPGTAFKILGPISDAEVEVDVIVQNVSVDGKTDFTFTVPYEDQETVIKIIDSIKDEVKFKQMMVDSDIAKVSLVGVGMRSQAGVASRAFKALSENEVNIQIICTSEIKLTMVIDKNLTDKAVKILHEEFDLEN

SEQ ID NO: 129610 - protein, 451 aa, Unknown
  Bacterial polypetide isolated from the Sargasso Sea
MSLVVAKFGGTSVADYGAMNRCADIVLGNPDCRLVVVSASSGVTNLLVELTQESMNDDGRLQRLKQIAQIQYAILDKLGRPNDVAAALDKLLSRMAVLSEALASQRSKATMDELLSLGEQCSSALFAAVLREKGANSSAFDVRRVLRTDSHFGRAEPQVEQIASLSREHLLPLLSEQVIVTQGFIGSDEAGQTTTLGRGGSDYSAALLAEALKASAVEIWTDVAGIYTTDPRLAPNAHPIAEISFNEAAEMATFGAKVLHPATILPAVRQQIQVFVGSSKEPEKGGTWIRHQVEDAPVFRAVALRRDQTLLNLHSLQMLHAQGFLAETFATLARHKISVDLITTSEVNVSLTLDKTGSDSSGQGLLSEALLQELSQHCRVRVEDGLALVAIIGNRIATTAGICRRVFEVLEPHNVRMICQGASPHNLCVLVAESEAAQVVKALHENLFEGA

SEQ ID NO: 129611 - protein, 332 aa, Unknown
  Bacterial polypetide isolated from the Sargasso Sea
MGKLIVKKFGGTSVADAERIEAVADNIESEILMGNKVTVVLSAMGDSTDELIKLAKEINPEPDLREYDALVSTGEQISVALLAMALLKRGIKGKSYTAYQLGIKTNSSHSRARILDVEVSKITSELNEGFVPVITGFQGMNESGDITTLGRGGSDTTGVALAAALDADECQIYTDVDGIFTTDPRVYDKARLLKEVSFEEMLELSSSGAKVLQLRAVEYASKFNLPIRVLSSFNDGEGTLVQEEKNIMERPIVSGISSIDSEAKLTIRGVPDIPGVAAKILSPISDAGIEVDVIVQNIGADNTTDFTFTVHKDDTKQAEEILKKTSTTPRWR

SEQ ID NO: 129612 - protein, 397 aa, Unknown
  Bacterial polypetide isolated from the Sargasso Sea
MTYIVQKFGGTSVADLDRIQRVASKVREEVSKGNKVAVVVSAMAGETNKLNEWANQLGGSNLNAEYDVIVSSGEQVTSGLLALHLNKIGINARSWMAWQIPFVTDSTYTKARIMEIRATELKASLDEKCVAVVPGFQGVTNNKRITTLGRGGSDTTAVALAAALNAERCDIYTDVDGVYTTDPRIVAKARKIDAVTYEEMLEMASQGAKVLQTRSVALAMLYDVRLQVLSSFENKPGTLVLNEEEILEHETVTGIAYSPDEAKITLRRVGDKPGVAANIFGSLAKASINVDMIVQNVSEDGNATDITFTVSQTDSERTSEVLHNLRNEIGFSDLIADQNVTKISVIGVGMRSQPGVATTMFRTLGEKGINIEVISTSEIKVSVLIRSEYTELAVRAL

SEQ ID NO: 129613 - protein, 329 aa, Unknown
  Bacterial polypetide isolated from the Sargasso Sea
MKIKVLKFGGTSVGSIEAIKRSADIIHDWSKKYKVIAVLSAMSGETDRLIGLTNSFSKTPNPIDFDNAVSSGENVSCALMSICLNNQKIKSKSLLSWQIPILTSSEHMKSRILSINKKFLYDELENFEVLVIPGFQGINNKGELTTLGRGGSDTSAVAVAAAMETECIIYTDVEGVFTTDPNIVPKAKKINKISYEEMLELASQGAKVLQTRSVELAMRKNTKLSVRSSFKPKKIGTMITDEKSVLENNTVSGITYTKDEAKITLSRVLDKPGVSSKIFGPLAKGNINVDMILQNISQDGKFANLSFTLPRQDLEKALKILKKEKSKIG

SEQ ID NO: 129614 - protein, 406 aa, Unknown
  Bacterial polypetide isolated from the Sargasso Sea
MNKIVVQKYGGTSIGDVEKLKSIAKKVSDKKEAGFFPIVVVSAMGKSTDELVRMSEEVTFNKKSPDLREKDTLLSTGELVSSTLLAISIKSLDKKVISLSGSQAGITTDDIHGSARISDINTSRILQEIKEDKIIIIAGFQGVNIDGDITTLGRGGSDTTAVALAAALNADVCEIYTDVEGIYTTDPRIVSNAKKLDKINYEDMLEMAVLGAKMHPRSIELASIYDVPVYVAGTFSKETGTLITKGVNMEKTKTVTGIAIDKNVSKITIKKIKNLPGTAASILKPLSDNSISIDVIVQNTPSDGLIDFSFSLSQEDLEKAYEILNNNNTLDFEEVVKGEDFAKVSLVGTGMQNAPGYATEMFNALGEKNISIDMITTSEIRITCLINQNDLDIAVNSLHETFELDK

SEQ ID NO: 129615 - protein, 275 aa, Unknown
  Bacterial polypetide isolated from the Sargasso Sea
MARIVMKFGGTSVANIERIRNVARHVKREVDAGHEVAVVVSAMAGKTNELVEWTREASPMHDAREYDVVVSSGEQVTSGLLAIVLQAMGVNARSWQGWQLPIKTDGTHGAARIVDIDGSDIIKRMGEGQVAVCAGFQGIGPDNRVATLGRGGSDTSAVAIAAAVHADRCDIYTDVDGVYTTDPRIEPKARRLKKVAFEEMLEMASLGAKVLQVRSVELAMVHKVRTFVRSSFDAPDAPGMGDFDNPPGTLICDEDEILEQEVVTGIAYAKDEAQI

SEQ ID NO: 129616 - protein, 344 aa, Unknown
  Bacterial polypetide isolated from the Sargasso Sea
MNLVVKKYGGTSVASIAKISKIAENLIDEYNSKKKLVVVLSAMGDSTDKLVNLSSKVSKYPNVRDFDMLLSSGEQVSVSLLSMILNERGIAAKSYTGWQAGIKTNIDHNNARILSIDTKRIRADLKKGFIIVVAGFQGINNRGDITTLGRGGSDTTAVALAAALKAQECQICTDVDGVYTTDPRICAKAKRIDVLTYEEMLEMAGLGSRVLQLRSVEFASKYNVPLRVLHAHNSNNIGTLIKKEEKNMEGALISGIAFTKDESEIIIKGVKDQPGVASKILGPIGDANIEVDMIVQNVGSDGLADFTFTVSRNSLNKAVKVIEKHKKIMGYQNIESKRNIVKVS

SEQ ID NO: 129617 - protein, 404 aa, Unknown
  Bacterial polypetide isolated from the Sargasso Sea
MSEIVVQKFGGTSVGTVDRIDSVAEIIKNASKSNKIVVVVSAMGGETNRLVDLAKAFGDDPDKREFDALVSTGETVSSALLAMALHSKGVKAKSFSASQISMRTTSSYSKAKILDVDAKKILDVVENDTIPIITGFQGVTEGGDVTTLGRGGSDTTAVAIAAQIEAIRCDIYTDVDGIFTTDPSVVPNAKKLDSITMEEMLELAGQGAKVVQTRAVEFANKYKVPVKVLSSFNDGNGTLISLKDESMENALVSGIAFQKDLVKFTLHSVGDTPGTAFKILGPISDAEIEVDVIVQNVSIDDKTDFTFTVSNEDKEAVEKILIDLKTEVNYKELIINSDIAEVSLVGAGMRSQAGVASKAFKALSENDVNIQIICTSEIKITMVIDEALVDKAVNVLHDEFELEK

SEQ ID NO: 129618 - protein, 355 aa, Unknown
  Bacterial polypetide isolated from the Sargasso Sea
METIVLKFGGTSVGSTDRISAVANLIKTACKEASPVVVVSAMSGETNRLIDLAKSFGAEPNKREFDALVSTGEKVSASLVSIALNQLGLKAKSLSAAQFGMKTTSNFSRAKILDLDKDIIFKTIQDGYIPIITGFQGVNNDGDTTTMGRGGSDTTAVAIAASIKSKRCDIYTDVDGIYTTDPRIVPNAKKLDSISMEEMLELAGQGAKVMQIRAVEFANKYKVLVRVLSSFEPGSGTLILQEEEGMEDAVITGIASQKDQTKFTLHGVGDTPGIASGILSPVSDAGIEVDVIVQNVSVFGKTDFTFTVGNNDRAEVESVLRTKMQGISYDELIIDEGIGKVSLVGVGMRSHAGIA

SEQ ID NO: 129619 - protein, 281 aa, Unknown
  Bacterial polypetide isolated from the Sargasso Sea
MLGENIIPIITGFQGITEGGDVTTLGRGGSDTTAVAIAAQVGASRCDIYTDVDGIFTTDPKVVSNAKKLDSITMEEMLELAGQGAKVIQTRAVEFANKYNVPVRVLSSFNKGKGTLITLEEDSMENALVSGIAFQKDQIKFTLHGVGDTPGTAFKILGPVSDAEVEVDVIVQNVSVDGKTDFTFTVASEDKDTVKEVLDKLKDDVSYTELIIDSNIAKVSIVGVGMRSQAGIASKAFKALSENGVNIQIICTSEIKITMVIEKELVDKAVTVLHKEFELEK

SEQ ID NO: 129620 - protein, 292 aa, Unknown
  Bacterial polypetide isolated from the Sargasso Sea
ILDVDAKKILEVLDNNTIPIITGFQGITESGDITTLGRGGSDTTAVAIASQVGACRCDIYTDVDGIYTTDPKIVSNAKKLDSITMEEMLELAGQGARVMQTRAVEFANKFKVPVKVLSSFSNSSGTLITLKEDGMENALVSGIAFQKDQIKYTLHGIGDTPGTAYKILGPISDAEIEVDVIVQNVSVDGKTDFTFTVSSEEKETVNKIIESIRYKVEFKELIVNSDIAKVSLVGVGMRSQAGVASRAFKALSENDVNIQIICTSEIKLTMVIDKSLTEKAVKVLHEEFELEK

SEQ ID NO: 129621 - protein, 197 aa, Unknown
  Bacterial polypetide isolated from the Sargasso Sea
MKFGGTSVADLNIMRNAILKIVEEVKNKKKVIVVVSAMGSTTDNLVTKVKEVSAIYDAREYDAILSTGENISASIMALLLQNEGINSRSWQGWQIPIITTDNHSNARILDINTKNLEQRFTNGMQVAIVAGFQGISNKNRITTLGRGGSDTSAVALAAAICAERCDIYTDVDGIYTTDPRITASAKKLDKISYEEML

SEQ ID NO: 129622 - protein, 270 aa, Unknown
  Bacterial polypetide isolated from the Sargasso Sea
MTEIIVQKFGGTSVGTVERIDAVAEIIKDASKSNNIIVVVSAMEGETNKLVGLANHFSQSPNKREFDALVSTGETVSSALLAIALHVKGINAKSYSASQISMKTTDSYSKAKILDIDANKILEVVEQNTIPIITGFQGVTETGDITTLGRGGSDTTAVAIAAQIGAKRCDIYTDVDGVFTTDPKVVSNAKKLDSITMEEMLELAGQGAKVMQTRAVEFANKYKVPVRVLSSFNKGDGTLISLKDDGMENALISGIAFQKDQVKFTLHGCK

SEQ ID NO: 129623 - protein, 314 aa, Unknown
  Bacterial polypetide isolated from the Sargasso Sea
MQQVIVQKFGGTSVGSGERIAAVAEIIKNEAEMNTVVVVVSAMAGETDRLIELSKLFGDNTNKREFDALISTGEKVSASLLAMALNSLGLKAKSYSAAQVSLKTTSNFSKAKILDIDKAKMEEILADGSIPIITGFQGITETGEVTTLGRGGSDTTAVAIAASLKANRCDIYTDVDGIYTTDPRIVPNAKKLDAISMEGMLELAGQGAKVIQIRAVEFANKFKVPVRVLSSFSSGTGTMITLENDTMENAEISGIAFQTDQTKVTFTAVEDTPGIASKILGPLSELDMKVDVIVQNVGIEGKTDFTFTIATEEK

SEQ ID NO: 129624 - protein, 404 aa, Unknown
  Bacterial polypetide isolated from the Sargasso Sea
MTEIIVQKFGGTSVGTIERIDAVAEIIKDASKSNNIIVVVSAMEGETNKLVGLANHFSQSPDKREFDALVSTGETVSSALLAIALHAKGINAKSYSASQISMKTTDSYSKAKILDIDANKILEVVGQNTIPIITGFQGVTETGDITTLGRGGSDTTAVAIASQIGAKRCDIYTDVDGVFTTDPKVVSNAKKLDYITMEEMLELAGQGAKVMQTRAVEFANKYKVPVRVLSSFNKGDGTLISLKDDGMENALISGIAFQKDQVKFTLHGVGDIPGTAFKILGPISEKDIEVDVIVQNVSVDGKTDFTFTVSKDDESDVKDIIEEIKKEVEFKDLMINSDIAKVSLVGVGMRTHAGIASKAFKALSENDVNIQIISTSEIKITMVIDKSLVEKAVQVLHEEFELDK

SEQ ID NO: 129625 - protein, 281 aa, Unknown
  Bacterial polypetide isolated from the Sargasso Sea
MGKLIVKKFGGTSVADAERIEAVADNIESEIHAGNKVTVVLSAMGDSTDDLIKLAKQINPDPDLREYDALVSTGEQISVALLAMALLKRGIKGKSYTAYQLGIKTNSSHSRARILDVEVSKITSELNEGVVPVITGFQGMNESGDITTLGRGGSDTTGVALAAALDADECQIYTDVDGIFTTDPRVYDKARLLKEVSFEEMLELSSSGAKVLQLRAVEYASKFNLPIRVLSSFNEGEGTLVQEEKNIMERPIVSGISSIDSEAKLTIRGVPDIPGVAAKIL

SEQ ID NO: 129626 - protein, 328 aa, Unknown
  Bacterial polypetide isolated from the Sargasso Sea
MTEIIVQKFGGTSVGTVERIDAVAEIIKDASKSNNIVVVVSAMEGETNKLVGLANNFSQSPDKREFDALVSTGETVSSALLAIALHAKGINAKSYSASQISMKTTDSYSKAKILDIDANKIMEVVGQNTIPIITGFQGITETGDITTLGRGGSDTTAVAIAAQIGAKRCDIYTDVDGVFTTDPKVVSNAKKLDSITMEEMLELAGQGAKVMQTRAVEFANKYKVPVRVLSSFNKGDGTLISLKDDGMENALISGIAFQKDQVKFTLHGVGDIPGTAFKILGPISEKDIEVDVIVQNVSVDGKTDFTFTVSKDDESDVKDIIEEIKKEV

SEQ ID NO: 129627 - protein, 432 aa, Unknown
  Bacterial polypetide isolated from the Sargasso Sea
MPSAPVRLLLQFRTTMALIVHKYGGTSMGSVERIKNVAKRVAKWHQAGHQMVVVPSAMSGETNRLLGLAKEISSQPSPRELDMIASTGEQVSVGLLSIALQEIGVEAVSYAGWQVPIKTDSAFTKARIHSIDDERVKADLNAGKVVIITGFQGVDPDGHITTLGRGGSDTSAVAVAAALGAEECLIYTDVDGVYTTDPRVVEEARRLDRVTFEEMLEMASLGSKVLQIRSVEFAGKYQVKTRVLSSLTDPLIALDEEMRSGTLITFEEDETMEKAVISGIAFQRDEARIAVMGVPDKPGIAYQILGPVADANVDVDMIIQNQSVQGKTDFTFTVGRGDYQKAMDILTNQVKGHVSAEHVQGDPKVSKVSVVGVGMRSHVGVASKMFRTLSEEGINIQMISTSEIKISVLIDEKYMELAVRALHKAFELDQAS

SEQ ID NO: 129628 - protein, 276 aa, Unknown
  Bacterial polypetide isolated from the Sargasso Sea
AQSIIQSKEAGNDIVVVVSAMGHSTDHLNKLAESISKNPNSRELDMLLSTGEQVTMALLSMSLNEYGIPAISLTGSQVGIVTESIHGKARILDIKTERIQNYINQGYVVVVAGFQGSTLSHTGSMEITTLGRGGSDTSAVALSTALGAETCEIYTDVPGVLTTDPRIVPNAKLLDIISCEEMLELASVGASVLHPRAVEIARNYGIKLYVKSSQTLSNGTLLHSKIKPLALKRGGLELTKTVNSLEVLEKQTVFSISKLPDRPGIAAQIFETLSEA

SEQ ID NO: 129629 - protein, 218 aa, Unknown
  Bacterial polypetide isolated from the Sargasso Sea
MALLVKKFGGTSVGDIKKIKNIASSICQSKEAGNEIVVVVSAMGQTTDDLNCLAESISKNPNRRELDMLLSTGEQVTIALLSMALNEYGIPAISMTGSQVGIITESIHGKARILDIKTERIQNYINQGFVVVVAGFQGTTLSHTGSMEITTLGRGGSDTSAVALSTALGAETCEIYTDVPGVLTTDPRIVPNAKLLDEISCEEMLELASVGASVLHPR

SEQ ID NO: 129630 - protein, 316 aa, Unknown
  Bacterial polypetide isolated from the Sargasso Sea
TTLGRGGSDTSAVALSTALGAETCEIYTDVPGVLTTDPRIVPNAKLLDKISCEEMLELASVGASVLHPRAVEIARNYGIKLCVKSSQSDSSGTLLESQIQPLPLKRGSLELTKTVNSLEVLENQAVFSLSNIPDRPGIAAQIFEKLSEASISVDLIIQATNDGNKNDITFTVSELEVKKTAEQCELITSQLGGEYNLKTNMTKLSIQGAGIMGRPSVSADLFDTLSQANINVRLIATSEIKVSCVIEINNIPKAIRFVAEKFKLSDTQIFVNPINKKQDQPEVRGIALDKNQVQVSFRKLPDRPGVAASICLALAE

SEQ ID NO: 129631 - protein, 204 aa, Unknown
  Bacterial polypetide isolated from the Sargasso Sea
MTLIVQKFGGTSVGSAERIVNVAKKVGEFRDQGHDVIVVVSAMSGETNRLTELAREISPQPKPREIDVLLSTGEQVTIALLAMALESQGYEAVSFTGGQIKILTDDFHTKARIKEIETTSIRNEISSGKIVIVAGFQGVDSKGNITTLGRGGSDTTAVALAAALNAGECQIYTDVKGVYTTDPRVVEDAKLLSNITFEEMLELS

SEQ ID NO: 129632 - protein, 239 aa, Unknown
  Bacterial polypetide isolated from the Sargasso Sea
MSDIIVQKFGGTSVGSVERIDAVAEIIKKTSRDNKVVVVVSAMSGETNRLIDLAKHFSKSPDKREFDALISTGETVSSALLTIALQSKGIQARSYSASQISMRTTSSFSKAKILDVDENKIKDVLDEGMIPIITGFQGITESGDITTLGRGGSDTTAVAIASKISAKRCDIYTDVDGIFTADPKVVPNAKKLDSITMEEMLELASQGAKVMQTRAVEFANKYKVPVKVLSSFNESSGTL

SEQ ID NO: 129633 - protein, 277 aa, Unknown
  Bacterial polypetide isolated from the Sargasso Sea
GGTSLGGIERIKAVAQRIKSSKEKGNDLVIVVSAMGHATDELTQLASEITIDPPQREMDMLLSTGEQVSISLLTMALNELGIQAISLTGTQAGIITESAHGRARILEIRTERIKNLLAQGNTIVIAGFQGTSLGIGGISEITTLGRGGSDTSAVALAASLEAVKCEIYTDVPGVLTTDPRIVKNAQLMKSISCDEMLELASLGAAVLHPRAVEIARNFGVTLVVKSSWDNLDGTTLTSKKNQVFSKGGIEHRSPVDGLELVENQAVVGLSNIPDRPG

SEQ ID NO: 129634 - protein, 284 aa, Unknown
  Bacterial polypetide isolated from the Sargasso Sea
QVGIMTESTHGRARILEIRTDRVRARLNDGHVVVVAGFQGTSSGSGGIAEITTLGRGGSDTSAVALAAALGADACEIYTDVPGVLSTDPRKVVDAQLMTTISCDEMLELASLGASVLHPRAVEIARNYGVPMVVRSSWSDEPGTRLTSRSGRAIGRDGLELGSPVDGVEQLDHQAVLALSHLPDQPGIAAGLFEALSTAGINVDLIIQSTHSGNSNDITFTVGDSDLQAARQVCSDVLETLGGELGFDGGMSKLSIRGAGIMGRPGIAATLFNCLSQQGINLRL

SEQ ID NO: 129635 - protein, 281 aa, Unknown
  Bacterial polypetide isolated from the Sargasso Sea
LLSMALQVKGVTATSMTGPQVGIVTESTHGRARILEIRTERIQRRLDEGHVVVVAGFQGTSTGSSGTPEITTLGRGGSDTSAVALAAALGAEACEIYTDVPGVLTTDPRKVPEARLMAEVSCDEMLELASLGASVLHPRAVEIARNYGVPLIVRSSWSDKPGTRLLSKPSRRIGSEGLELGKPVDQAELLEKQAVVALAHVSDEPGVAANLFEGLSDAGVNVDLIVQATHDGNSNDIAFTLAEAELPAAEAFCREHLGSGGQLQVESGLAKLSIGGAGIMG

SEQ ID NO: 129636 - protein, 311 aa, Unknown
  Bacterial polypetide isolated from the Sargasso Sea
AGPSVADPEKILRAAKKAASRHAAGDQVVVVVSAMGKQTDLLVRLAQQITETPSDREMDMLLSTGEQVSVSLFAMALQSMGHKAVSLTGGQIGIRTDSSHTKARIQSISTNHVQDLLEDGSIVIAAGFQGYDPDGNITTLGRGGSDTTAVALAAVLNADCCEIYTDVDGIYTTDPRVHSNAVRLATVSHDEMLELASLGAGVMHSRSIEFAKKFGVPIVVRSSFEDGPGTKILSGTTIKRTVSGVALAKNEARITVEDVPDQPGASHQLFAELASQGIAVDMIIQNAGTGGTADISFTVTDKDLPAAYRYR

SEQ ID NO: 129637 - protein, 257 aa, Unknown
  Bacterial polypetide isolated from the Sargasso Sea
MNLIVQKFGGTSVENPETLKIVAQKIINCKSKGNEVVVVVSAMGSSTDELIDLANELSDTPSPREMDMLLSAGERITMSLLAMHLNNLGYESFSLTGSQAGITTTSRHGMAEIENISGERVKEGINEGKIVIVAGFQGVNKETKEITTLGRGGSDATAVALAAALGAEKCEIYTDVEGVFTADPRIVKKAKLIEEITYDEMLEMASSGARVLMARSVEFGRRYNVPIIVKPTFSEGSGTIVKDKVMEQAIVSGVTHN

SEQ ID NO: 129638 - protein, 256 aa, Unknown
  Bacterial polypetide isolated from the Sargasso Sea
EKIVRAAKKAAVRHAAGDQVVVVVSAMGKQTDLLVRLAKQITDAPSDREMDMLLSTGEQVSVSLFAMALQSMGHKAVSLTGGQIGIRTDSSHTKARIQSISTDHVQDLLEDGSIVIAAGFQGYDPDGNITTLGRGGSDTTAVALAAVLNADCCEIYTDVDGIYTTDPRVHGNAVRLATVSHDEMLELASLGAGVMHSRSIEFAKKFGVPIVVRSSFEDGPGTKILSGATIKRTVSGVALAKNEARITVEDVPDQPG

SEQ ID NO: 129639 - protein, 363 aa, Unknown
  Bacterial polypetide isolated from the Sargasso Sea
IALLSMALNEYGIPAISMTGSQVGIITESIHGKARILDIKTERIQNYINQGFVVVVAGFQGTTLSHTGSMEITTLGRGGSDTSAVALSTALGAETCEIYTDVPGVLTTDPRIVPNAKLLDEISCEEMLELASVGASVLHPRAVEIARNYGIKLCVKSSQSDSSGTLLESQIQPLPLKRGSLELTKTVNSLEVLENQAVFSLSNIPDRPGIAAQIFEKLSEASINVDLIIQATNDGNNNDITFTVSELEVQKTAEQCDLITSQLGGEYNLKTNMTKLSIQGAGIMGRPSVSADLFDTLSQANINVRLIATSEIKVSCVIEINNIPKAIRFVAEKFKLSDTQIFVNPINAKQDQPEVRGIALDKT

SEQ ID NO: 129640 - protein, 372 aa, Unknown
  Bacterial polypetide isolated from the Sargasso Sea
MKFGGTSVADVPQIKKIALKVKNELKIGNKVIVVVSAMAGVTNNLIDLVNSTADRPSYSEYDVVLSTGEQITSALLAISLKNLNIKARSWLGWQVPIISDKSYGKAVIEEIKTDQILKFLKQNDVAIVSGFQGISNENRITTLGRGGSDTSAVAIAAAFSAERCDIYTDVDGVYTTDPRIVKSAKKLDLITYEEMLELASQGAKVLQTRSVALAMKYNVKLRVLSSFENVPGTSIIKEEKDMEKSEISGIAHSLNEAKITLSGVPDQPGQAAEIFGTLAKHSINVDMIVQSSSINYQATDITFTIPETDLLIAESTIKKVQKKIGFEKIITDTNVVKISVIGNAMRTQSGIAKTMFETLANNHINIHVISTQ

SEQ ID NO: 129641 - protein, 393 aa, Unknown
  Bacterial polypetide isolated from the Sargasso Sea
MALLMQKFGGTSVGSVERIKAVADRIGRCREEGHDVVVVVSAMGHTTDELTGLANAITAAPTQREMDMLLASGEQVSIALLAMALNAQGVSATSMTGPQVGIATESTHGRARILGIRTDRIRNRLAAGQVVVVAGFQGTSTSSDGLNEITTLGRGGSDTSAVALAAALSADACEIYTDVPGVLSTDPRKVSDAQLMETISCDEMLELASLGASVLHPRAVEIARNYGVNLVVRSSWSDAPGTRITSRSARPISSSGLELGSPVDGMEEVNGQAVLALSHIPDQPGIAARLFETLSKAGINVDLIIQATHEGSSNDITFTVAEADLELARAVSQKVLDQLGGDLASEAGLTKLSISGAGIMGRPGIAAGLFNCLCQQGINLRLIATSEVKVSCV

SEQ ID NO: 129642 - protein, 249 aa, Unknown
  Bacterial polypetide isolated from the Sargasso Sea
MVQKFGGTSLGSIERIKAVAQRIKSSKEKGDDLVVVVSAMGHRTDELTRLASEITVDPPHREMDMLLSTGEQVSISLLTMALNELGTPAISLTGTQAGIITESAHGRARILEIRTERITNLLVQGKTIVIAGFQGTTLGIGGIAEITTLGRGGSDTSAVALAASLQAEKCEIYTDVPGVLTTDPRIVKNAKLMKNISCDEMLELASLGAAVLHPRAVEIARNFGVTLVVKSSWDNLDGTTLTSNKKPEI

SEQ ID NO: 129643 - protein, 586 aa, Unknown
  Bacterial polypetide isolated from the Sargasso Sea
MALLVKKFGGTSVGDIKKIQNIAGSICQSKEAGNEIVVVVSAMGKTTDDLNCLAESISKNPNRRELDMLLSTGEQVTIALLSMALNEYGIPAISMTGSQVGIITESIHGKARILDIKTERIQNYINQGFVVVVAGFQGTTLSHTGSMEITTLGRGGSDTSAVALSTALGAETCEIYTDVPGVLTTDPRIVTNAKLLDEISCEEMLELASVGASVLHPRAVEIARNYGIKLCVKSSQSDSNGTLLESQIQPLPVKRGSLELTKTVNSLEVLENQAVFSLSNIPDRPGIAALIFEKLSEASINVDLIIQATNDGKNNDITFTVSELEVKKTEEQCELITSQLGGEYNLKTNMTKLSIQGAGIMGRPSVSADLFDTLSQANINVRLIATSEIKVSCVIEINNIPKAIRFVAEKFKLSDTQIFVNPIKRKQDQPEVRGIALDKNQVQVSFRKLPDRPGVAASICLALAENNLLFDTIVQSERISSLKTKDISLTMNKQDREKANLVFEALTKKLPGSFIEDGPAIAKVSAVGAGMAFKVGTAGKIFRALADQNINIEMIATSEIRTSCIVLEKDCDKAVNAIHNYFELEK

SEQ ID NO: 129644 - protein, 402 aa, Unknown
  Bacterial polypetide isolated from the Sargasso Sea
MNLIVQKFGGTSVENPETLKIVAQKIIECKEAGNEVVVVVSAMGSSTDELINLANELSETPSPREMDMLLSAGERITMSLLAMHLNNLGYESFSLTGSQAGITTTSRHGMAEIEDISGERVKEGIEDGKIVIVAGFQGVNKETKEITTLGRGGSDATAVALAAALDAEKCEIYTDVEGVFTADPRIVEKAKLIKEITYDEMLEMASSGAKVLMARSVEFGRRYNVPIIVKPTFSIGEGTIVKDNVMEQAIVSGVTHNDKEIKFTLFGVPDQPGIAGKVFGPLSEAGVIVDMIVQNVSKDSKTDISFTSPSEQKNDVETILDNLSSELNAEGSDSDSDIARVSLIGAGMKAESGIASKMFSILGKNKINIAMISTSPIRISCVVSKSDMQKAIDSLHKEFIEI

SEQ ID NO: 129645 - protein, 402 aa, Unknown
  Bacterial polypetide isolated from the Sargasso Sea
MSLIVQKFGGTSVSNPESLKTVANKIIACKESGNEVVVVVSAMGSSTDELIDLAGELSETPSPREMDMLLSAGERITMSLLAIHLNNLGYESFSLTGSQAGITTTSRHGMAEIENISGERVKEGIERGNIVIVAGFQGVNKETKEITTLGRGGSDATAVALAASLNAERCEIYTDVEGVFTADPRIIKNAQLIDEITYDEMLEMASSGARVLMARSVEFGRRYNVPIIVKSTFNNGEGTLVKEKVMEEAIVRGVTHNDKEMKFTLFGVPDQPGIAGKVFGPLSEGGIIVDMIVQNVSKDSKTDISFTAPTDQREDVVEILSSLSSDLDAEGTDSDENVARVSIIGAGMKAESGIASKMFSILGKNEINIGMISTSPIRISCVIPKNDMNKAIEALHEEFISQ

SEQ ID NO: 129646 - protein, 413 aa, Unknown
  Bacterial polypetide isolated from the Sargasso Sea
MSLLVMKFGGTSVANVDRIKRAAKRVALEVAHGKNVIVIVSAMSGKTNELVDWVNNTSQFYDAREYDAVVSSGENVTAGLMALTLQEMDIPARSWQGWQVPVRTTSAHSSARIESISPQIINEKFAQGMKVAVVAGFQGISNEDRITTLGRGGSDTTAVAFAAAFEAERCDIYTDVDGVYTTDPRVCDKAIKLDKISYEEMLELASLGAKVLQTRSVEMAMRFKVKLRVLSSFEEPNNKAGTLVCDEEEIMESNVVSGIAYSRDEAKMTLVSVADRPGIAAAIFGPLSDAGINVDMIIQNIAEAGRTDMTFSCPIDQVSRAEMALNTAKESELINFQDLLADTNVSKISAVGIGMRSQSGVAAKMFQTLSDEGINIKVIATSEIKISVLVDRKYLELAVQSLHDAFELHEVSS

SEQ ID NO: 129647 - protein, 404 aa, Unknown
  Bacterial polypetide isolated from the Sargasso Sea
MQQVIVQKFGGTSVGSGERIAAVAEIIKKEAEINNVVVVVSAMAGETDRLIELSKQFGDNQNKREFDALISTGEKVSASLLAMALNSLGLKAKSYSAAQVSLKTTSNFSKAMILDIDKTKMEEILSDDSIPIITGFQGITETGEVTTLGRGGSDTTAVAIAASIKADRCDIYTDVDGIYTTDPRIVPNAKKLDAISMEGMLELAGQGAKVIQIRAVEFANKFKVPVRVLSSFSPGTGTMITLENETMENAEISGIAFQKDQTKVTFTAVEDTPGIASKILGPLSESDIKVDVIVQNVGIEGKTDFTFTIATEEKALLDEAVNNIQKSINYKEVIIDDAIAKVSIVGVGIRSHAGVAAKAFQALSENEINIVMISTSEIKLTMVIEKDDLEKAVKVLHDVFELEK

SEQ ID NO: 129648 - protein, 586 aa, Unknown
  Bacterial polypetide isolated from the Sargasso Sea
MALLVKKFGGTSVGDIKKIKNIASSICQSKEAGNEIVVVVSAMGQTTDDLNCLAESISKNPNRRELDMLLSTGEQVTIALLSMALNEYGIPAISMTGSQVGIITESIHGKARILDIKTERIQNYLNQGFVVVVAGFQGTTLSHTGSMEITTLGRGGSDTSAVALSTALGAETCEIYTDVPGVLTTDPRIVPNAKLLDEISCEEMLELASVGASVLHPRAVEIARNYGIKLCVKSSQSDSSGTLLESQIQPLPLKRGSLELTKTVNSLEVLENQAVFSLSNIPDRPGIAAQIFEKLSEASINVDLIIQATNDGNKNDITFTVGELEVKKTAEQCELITSQLGGEFNLKTNMTKLSIQGAGIMGRPSVSADLFDTLSQANINVRLIATSEIKVSCVIEINNIPKAIRFVAEKFKLSDTQIFVNPINEKQDQPEVRGIALDKNQVQVSFRKLPDRPGVAASICLALAENNLLIDTIVQSERISSLKTKDISLTMNKQDREKANLVFEALTKKLPGSYIEDGPAIAKVSTVGAGMAFKVGTAGKIFRALADQNINIEMIATSEIRTSCIVLEKDCDKAVNAIHNHFELEK

SEQ ID NO: 129649 - protein, 402 aa, Unknown
  Bacterial polypetide isolated from the Sargasso Sea
MLKKVLKFGGTSVGTVERIQHVANIIRKEYDAGNQIIAVVSAMSGKTNELIKLSKEIAKDFNKRELDVLLSSGEQITCALLAGALLEKKLKAKSWLNWQIPILTEGEHNNARIVNMNIKKINEYLSQGVAIVPGFQGISRDGNITTIGRGGSDATAVAIAKLFNADTCEIYTDVDGVYSSDPNKIPFAKKIDKISYDEMLELATVGAKVMQSSAVQTAMMYDIPIDVKSTFTDRQGTKIFDQENIDYSKSVTGVAYSKDDAKITLIGVQDKPGVAANIFEPLNKAQINVDMVIQNISSDQKTTDITFTVKRNDLIKTKEILENNNNIKYKKITHNDKVSKISVVGAGMVSTPGVTYKMFRGLADIKVNILAISTSEIKISVIIDENNTLNAVKKLHTIFDLD

SEQ ID NO: 129650 - protein, 223 aa, Unknown
  Bacterial polypetide isolated from the Sargasso Sea
MYLKDSKTVVIKIGSSLLINDKKIIREKWLSEFAKDIQHLQKLKKNIILVSSGAIALGCKKLKLSKKKLKLDKSQAVASIGQIELMNLFKKTFNKSKINLSQILLTLEDTEKRRRAINAKRTFENLFSLGFIPIVNENDSIATSEIKYGDNDRLASRVAQISSADCLILLSDVSGLYSKDPKLDKKAKLIREIKNIDQNVEKLATNKSGEFGSGGMKTKIDAA

SEQ ID NO: 129651 - protein, 278 aa, Unknown
  Bacterial polypetide isolated from the Sargasso Sea
MDLEKILPKDGPPINEVTKYIEKYKNDLIVIKYGGNVLIDRNVFNNFITDLIVLNKLGLATVVIHGGGPRIKRELEKSNIQSKFIRGLRVTDKNIIDIVESVLIDFNNDIVNSLKDKGTEAISINTKNNNVIKIIPEVEELGFVGTPNEINNEQILNIIKQNKIPIISPLGLGKENQTYNINGDTAAMAIAKSLKSRRLLLMTNVDGVLDKNKKLIEEISSSEVLEMIKDETITEGMIPKINACLDAVNNGVTAVGIINGTKPHSCLWEIFSDKGSGT

SEQ ID NO: 129652 - protein, 70 aa, Unknown
  Bacterial polypetide isolated from the Sargasso Sea
SGTIAGGMIPKIEGCLSTLDQGVKKIHIIDGRLRHSLLLEIYTTSGVGTELVADSVTDAIRHPPEVIPAG

SEQ ID NO: 129653 - protein, 222 aa, Unknown
  Bacterial polypetide isolated from the Sargasso Sea
YGDNDRLASRVAQISSAYCLILLSDVSGLYSKDPKLNKKAKLIREIKNIDQNVEKLATNKTGEFGSGGMKTKIHAAKICQFSGCHMAIANGLINRPIQKILTKNICTWFLPKISKLDARKKWIISSVSPKGKIVIDEGALSALNNGKSLLAAGIKDVQGSFSKGDHIKILNNNMTEFARGLSSFSSEEILKIKGKHSNKINDILGYVSKSEVIHKDDMVLIK

SEQ ID NO: 129654 - protein, 113 aa, Unknown
  Bacterial polypetide isolated from the Sargasso Sea
LGMDKEKNIYNINADTAAGFIASELKANKLLLLTDVPGILDEKKQLISSLSLKEANKILDEDFVSGGMKPKILTCIEAMNKGVKKSTILDGRIPHSLILELFTEHGIGTQIYS

SEQ ID NO: 129655 - protein, 203 aa, Unknown
  Bacterial polypetide isolated from the Sargasso Sea
IKTNFIKGLRVTDQNTINVVENVLINFNNEIVNALKIQKCEAIGINSKKNNIIMVKQENNTLGFVGCPTKININVIKNMIKKTEVPVIAPLGLNESNQAFNINADTVAGAVSKALKARRLMMISDVEGVLDNKKKLIPEINSSKAKDLINRGIISEGMIPKINNCIDVASNGVKGVVIIDGRRAHAILFELLSDKGAGTLIRK

SEQ ID NO: 129656 - protein, 189 aa, Unknown
  Bacterial polypetide isolated from the Sargasso Sea
FTIKLVEEALLDLNDDLIDKLKKSKALGNSITPKKNNIIYVKPEREELGFVGIPTKINDDEILENIKQGKISIIAPLGLDESNCLYNINADIAAGAIAKKLEARRLLLMTDVEGVLDENGKLLTEINAKKTLELLKKKVITGGMIPKINTCLDAISNGVRGVVIVDGRKPHSILFELFSDKGAGTLIRK

SEQ ID NO: 129657 - protein, 137 aa, Unknown
  Bacterial polypetide isolated from the Sargasso Sea
VIRNFIESDFIPIIAPIGFGDSGQSFNINGDTAAGGLAASLNADRLLLLTDVEGVKSKEGSLVPQLNSDEARRLIDLEVITGGMIPKVNTALEAIENGVRASVIIDGRVNHACLLELFTDHGIGTLFKNHSSRKFPH

SEQ ID NO: 129658 - protein, 141 aa, Unknown
  Bacterial polypetide isolated from the Sargasso Sea
MSEEISLEEIKKFWPKDAPDVNNVPKYIKKYKKNLIVIKYGGNVLIERNIFNNFIQDISILNKLGLSIIIVHGGGPRIERELKKSNIQSKFINGLRITNKDVIDIVEKVLIDFNNDIVDSLNKKGSKAVSINTKKNNIINV

SEQ ID NO: 129659 - protein, 98 aa, Unknown
  Bacterial polypetide isolated from the Sargasso Sea
VAAAAIAKEINSRRLLLMTDVEGVLDKDKKLISEINSETANNMINDQSISGGMIPKINTCIDAVNNGVTGVVIVDGRKQNSLLFEIFSDKGAGTLIRK

SEQ ID NO: 129660 - protein, 177 aa, Unknown
  Bacterial polypetide isolated from the Sargasso Sea
MNRDWIATAETLSQALPYLQRYSGAIIVIKLGGHAMVSDEALETFARDVVLMRQVGINPVIVHGGGPMINSMLDKLNIESEFIDGKRVTDSETISVVEMVLSGNVNKKIVQAINKQDGRAVGLSGKDAKLINCVQDKPELGLVGTPKDVNPEVIFNLFENDMIPVVAPLGSSIDGET

SEQ ID NO: 129661 - protein, 102 aa, Unknown
  Bacterial polypetide isolated from the Sargasso Sea
INADIAAGSVAKELNSRRLLLMTDVEGVLDKDKKLISEINSSIAEKMLKDGDISGGMIPKIKTCLDSVNNGVTGVVIVDGRKPHSILFELFSDKGAGTLIRK

SEQ ID NO: 129662 - protein, 102 aa, Unknown
  Bacterial polypetide isolated from the Sargasso Sea
NINADTAAGAIARGIKSRRLILLTDVEGVMRDNKLIPEINTTQAKELINNQTIHGGMIPKMKTCIDAINNGVRAVVITDGRKPHSILFELFSDQGAGTLIRK

SEQ ID NO: 129663 - protein, 88 aa, Unknown
  Bacterial polypetide isolated from the Sargasso Sea
NSRRLLLMTDVEGVLDKNKKLIPEINSSIAEKMLKDKDISGGMIPKINTCLDAVNNGVTGVVIVDGRKPHSILFELFSDKGAGTLIRK

SEQ ID NO: 129664 - protein, 85 aa, Unknown
  Bacterial polypetide isolated from the Sargasso Sea
MEIEKIVPKDGPAIEEVKKYIDKYKNELIVIKYGGNVFIDRNIFNNFISDISILNKLGLSIIIVHGGGPRIKRELEKSNIQSKFY

SEQ ID NO: 129665 - protein, 194 aa, Unknown
  Bacterial polypetide isolated from the Sargasso Sea
VTDSKIINVVENVLIELNKEIVKAFNINSCKAKSVTSKDYNIITDVIVDNKELGFVGTPHKIRTDILKQIIEKNEIPIVAPLGLNSDNQVYNINADTTAGAIAKELKARRLLIVSDVEGVLDKNQNLISEINSLKANEMISNDIITGGMIPKINNCIDVASKGVKGVVIIDGRKAHSILFELLSDKGSGTLIRK

SEQ ID NO: 129666 - protein, 161 aa, Unknown
  Bacterial polypetide isolated from the Sargasso Sea
MDLEKILPKNGPPLNEVTKYIEKYKNDLIVIKYGGNVLIDRDVFNNFITDLSVLNKLGLATVVIHGGGPRIKRELEKSNIESKFIRGLRVTDKHIIDIVETVLIDFNDDIVNSLKDKGTEAISIHTKNNNIIKTIPESEELGFVGIPNEINNEQILNIINQ

SEQ ID NO: 129667 - protein, 127 aa, Unknown
  Bacterial polypetide isolated from the Sargasso Sea
GGKAVGVSGKDGNLIEADKISHEGGIDLGFVGKIKKVNPELLMVLLKQGFLPVVSPIGLSKDGVTYNINADTTASRIAVSLGAYKIIFMTDVNGVLEDGNLCAQLNSSELGIMIEKKFITGGMLPKS

SEQ ID NO: 129668 - protein, 95 aa, Unknown
  Bacterial polypetide isolated from the Sargasso Sea
GAIARSIKSRRLMLLTDIDGVLDNNEKLISEINTIEAKELVNNETIHGGMIPKVKTCIDAINNGVRAVVILDGRKPHSILFELFSDKGSGTLIRK

SEQ ID NO: 129669 - protein, 64 aa, Unknown
  Bacterial polypetide isolated from the Sargasso Sea
ALPYLQRYTEAIVVIKLGGHVMTSDQGMETFARDVALMRQVGINPVIVHGGGPMINAMLKKLKI

SEQ ID NO: 129670 - protein, 268 aa, Unknown
  Bacterial polypetide isolated from the Sargasso Sea
MNLEKILPIDGPPINEVTKYIEKYKNDLIVIKYGGNVLIDRNVFNNFITDLNVLNKMGLATVVIHGGGPRIKRELEKSNIQSKFIRGLRVTDKNIINIVETVLIDFNNDIVKSLKDKGTEAISIHSKKNNVIKIIPEAEELGFVGIPNEINNQQILNVINQDKIPIISPLGLDTENQTYNINGDTAAMAIAKSLKSRRLLLMTNVDGVLDKNKKLIEEISSSEIMEMIKDETITEGMIPKINACLDAVNNGVTGVGIINGTKPHSCLW

SEQ ID NO: 129671 - protein, 88 aa, Unknown
  Bacterial polypetide isolated from the Sargasso Sea
TNVEGVKDKTGNVLTGLTPIQASRLITNRTLKDGMVPKVQCAINAIKSGVTSAHIIDGRVEHAVLLEIFTDEGVGTLITKRAKKAHNL

SEQ ID NO: 129672 - protein, 100 aa, Unknown
  Bacterial polypetide isolated from the Sargasso Sea
MDLEKILPKNGPAINEVSKYIKKYKNELIVIKYGGNVFIDRDIFNNFISDLNLLNKMGLSVVVIHGGGPRIKRELDKSNIESKFLRGLRVTDEKLLKLLR

SEQ ID NO: 129673 - protein, 46 aa, Unknown
  Bacterial polypetide isolated from the Sargasso Sea
MIPKTECCIRALAQGVKAAHIIDGRIEHSLLLEIFTNSGIGTMIVA

SEQ ID NO: 129674 - protein, 128 aa, Unknown
  Bacterial polypetide isolated from the Sargasso Sea
MNEQVKYRKNSSITPSTAKILIEALPYIQKLSNKVIVIKFGGNAMIDEVLKNNFARDVVLLKQVGLHPVIIHGGGPQITSYLKKLGIESEFANGMRITSPESVHIIEMVLGGLVNKEIVNAITSHGGK

SEQ ID NO: 129675 - protein, 258 aa, Unknown
  Bacterial polypetide isolated from the Sargasso Sea
DEFKKYIDKYKDQLIVIKYGGNVFIDRNIFNNFISDISILNNLGLSIIIVHGGGPRIKRELDKSNIQSKFIRGLRVTNEKIINIVENVLIDFNEDIVNSLFEKGANAVSINTKKNNAIEVIPEAEELGFVGIPNKINVEIIKDIIKINAVPIISPLGLGKNNQTYNINGDTAAGAIAKSLKCRRLLLMTNVEGVLNKEKKLIDEISSSEILEMINNETITEGMIPKINTCLDAVMNGVTGVGIIDGRKKHSIFSNYFR

SEQ ID NO: 129676 - protein, 38 aa, Unknown
  Bacterial polypetide isolated from the Sargasso Sea
AIDAISSGVTSAHIIDGRVPHAVLLEVFTAEGVGTLIS

SEQ ID NO: 129677 - protein, 90 aa, Unknown
  Bacterial polypetide isolated from the Sargasso Sea
EIDARRLLLMTDVEGVLDENQKLISEINLNRANEMLKNNIISGGMIPKINTCLDAISNGVRGVVIVDGRKPHSILFELFSDKGAGTLIRK

SEQ ID NO: 129678 - protein, 174 aa, Unknown
  Bacterial polypetide isolated from the Sargasso Sea
MDLKKILPENGPPIDQVSKYIEKYKNDLIVIKYGGNVFIDRNIFNNFIEDISILNKLGLSIVVIHGGGPRIKRELDRSNITSKFIRGLRVTDAKIINIVEKVLIEFNEDIVSSLKEKGVKAISLNTKQNCVIEVIPEAKELGFVGIPDKINVHIIKDKIENNLIPNSISTWTWN

SEQ ID NO: 129679 - protein, 272 aa, Unknown
  Bacterial polypetide isolated from the Sargasso Sea
DVDPDELNEIYEKAWEIGGLQFRAVFNDLVTNIKANKTASDFIKKKIRETVSNKKFASILSDIDHPYAGKRPPIDSNYFETFNRDNVNLVDLRSEPIELIDRTGIKTKKNHFDLDIIVFATGYDAMTGPLINMNIIGKNGLKLNDVWKEGPKTFLGLQIPGFPNLFTITGPGSPSVLTNMPMAIEQHVEWIRDCINYMNKKDYSTIETDINSAEKWGDEVNSVANKTLLPTVKHSWYLGANIPGKPRVFMPYAGGLPRYTEVCNKIKNNKYK

SEQ ID NO: 129680 - protein, 126 aa, Unknown
  Bacterial polypetide isolated from the Sargasso Sea
AALGKNQIPVIAPLGYDTNKNTLNINADTAAAFVAETVKAERLLLLTDVEGVMDNNKKLIAELDRKKAFQYIKKGTIKSGMIPKIKACFNTLKNGAKGVALIDGRKQNAVVMELLTTKGAGTLIKK

SEQ ID NO: 129681 - protein, 282 aa, Unknown
  Bacterial polypetide isolated from the Sargasso Sea
MDLEKILPKNGPPINEVTKYIEKYKNDLIVIKYGGNVLIDRNVFNNFITDLSVLNKLGLATVVIHGGGPRIKRELEKSNIQSKFIRGLRVTDKNIINIVESVLINFNDDIVSSLKDKGTEAISIHTKNNNVIKTVPEAEELGFVGIPNEINNEQILDIINQKKIPIISPLGLGKENQTYNINGDTAAMAIAKSLKSRRLLLMTNVDGVLDKNKKLIEEISSSKVLEMIKDETITEGMIPKINACLDAVNNGVTAVGIINGTKPHSCLWEIFSDKGSGTLIRQ

SEQ ID NO: 129682 - protein, 126 aa, Unknown
  Bacterial polypetide isolated from the Sargasso Sea
MNDSQRVSILSEALPYIQSLSGRKIVIKYAGSVMENANLKNAFFRDIALLSTVGVCPIVIHGGGPEINNWSKKLEISLKLENGLRITDQKTMEIVEMVLMGRVNKQIVKGINKTGSLAVGISGLDG

SEQ ID NO: 129683 - protein, 81 aa, Unknown
  Bacterial polypetide isolated from the Sargasso Sea
MTDVEGVLDKNKKLIPEINSSIAKKMLKDGDISGGMIPKINTCLDAVNNGVTGVVIVDGRKPHSILFELFSDKGAGTLIRK

SEQ ID NO: 129684 - protein, 309 aa, Unknown
  Bacterial polypetide isolated from the Sargasso Sea
SSLLINDKKIVRKKWLSEFAKDILHLQKLKKNIILVSSGAIALGCKKLKLSKKKLKLDKSQAVASIGQIELMNLFKKTFNKSKINLSQILLTLEDTEKRRRAINAKRTFENLFSLGFIPIVNENDSIATSEIKYGDNDRLASRVAQISSADCLILLSDVSGLYSKDPKLDKKAKLIREIKNIDQNVEKLATNKSGEFGSGGMKTKIDAAKICQFSGCHMAIANGLINRPIKKILIENICTWFLPKISKLDARKKWIISSVSPKGEIIIDEGALLALNNGKSLLAAGIKDVQGSFSKGDHIKILNNNMTE

SEQ ID NO: 129685 - protein, 81 aa, Unknown
  Bacterial polypetide isolated from the Sargasso Sea
MTDVEGVLDKNKKLVSEITPDIAKKMMDEDTISGGMIPKINTCIDAISNGVKGVVIIDGRRHHSILFELLSDKGAGTLIRE

SEQ ID NO: 129686 - protein, 110 aa, Unknown
  Bacterial polypetide isolated from the Sargasso Sea
MSEIEKVNLKKILPNSGPSVDEVKKYLEKYTDENIVIKCGGSVLIDPKLFNLFISDIIIMKKLGLTPIIVHGGGKRINNQLKKLNITSTFIKGLRVTDKDTIKVVEEVLI

SEQ ID NO: 129687 - protein, 207 aa, Unknown
  Bacterial polypetide isolated from the Sargasso Sea
MCPAAAAPPPPPPHYPPPAFAHFPAGTPPHPHTVHAHHHAHVGVHPRPNATHQPPPDWPPPSTVVSGSGTSSALSGGGGGVVVHGGGVHGAGGGGGAGACTPPTTSADSDSVRSNGGVGGGGAAGHTRRAFVVLDKTVTQSRLESLFRETCEGVVAVELKTDGESGRSRGFAYVTFDAPARVRSACERLNGRELPEGSGVRCKVMPA

SEQ ID NO: 129688 - protein, 248 aa, Unknown
  Bacterial polypetide isolated from the Sargasso Sea
MDLEKILPKSGPPINEVTKYIEKYKNELIVIKYGGNVFIDRDIFNNFISDLSLLNKIGLSVVVIHGGGPRIKRELDKSNIESKFLRGLRVTDEKIIKIVEKVLIDFNDDIVSSLNEIGTQAISIHTQKNNIIEINPEEEELGFVGIPNKINIDIIKRIVEKNIIPIISPLGLGKKKQTYNINGDTAAGAIAKSLKSRRLLLMTNVRGVLDKEKKLIEEISSSEILEMIKDGTITEGMIPKINTLPRCC

SEQ ID NO: 129689 - protein, 104 aa, Unknown
  Bacterial polypetide isolated from the Sargasso Sea
YNINADVAAGAIAKELNARRLLLMTDVEGVLDKSKNLISEINSSMANEMLENKTIEGGMIPKIKTCLDAVNNGVTGVVIVDGRKQHSILFEIFSDKGAGTLIRK

SEQ ID NO: 129690 - protein, 161 aa, Unknown
  Bacterial polypetide isolated from the Sargasso Sea
MDLKNLWPNKDAPPIEKALKFIEKYKSKKIVLKYGGQVMASDQLSKAFAQDAAICNLIGLKNLVIHGGGPQIKKKLEAQNIKSKFILGLRVTDEKVIKIVEDVLLNDINPDLVNTISSFNAVAEPVTARNKNGILKVTKAKNPNLGFVADPEEIDDEKLNS

SEQ ID NO: 129691 - protein, 268 aa, Unknown
  Bacterial polypetide isolated from the Sargasso Sea
MDLEKILPKDGPPINEVTKYIEKYKNDLIVIKYGGNVLIDRNVFNNFITDLSVLNKLGLATVVIHGGGPRIKRELEKSNIQSKFIRGLRVTDKNIIDIVETVLIDFNNDIVNSLKDKGTEAISIHTKNNNIIKTIPEAEELGFVGIPDEINNQQILNIINQNKIPIISPLGLGKENQTYNINGDTAAMAIAKSLKSRRLLLMTNVDGVLDKNKKLIEEISSSEILEMIKDETIREGMIPKINACLDAVNNGVTAVGIINGTKPHSCLW

SEQ ID NO: 129692 - protein, 58 aa, Unknown
  Bacterial polypetide isolated from the Sargasso Sea
MSKVEFLSEVLPYMHQYNGSSLVIKYGGHAMIDKEMQTSFASDIALLQQVGTKPVCSW

SEQ ID NO: 129693 - protein, 86 aa, Unknown
  Bacterial polypetide isolated from the Sargasso Sea
RRLLLMTDVEGVLDENKKLISEINSEIALKMLQNGTISGGMIPKINTCLNAVKNGVTGVVIVDGRKQHSILFELFSDKGAGTLIRK

SEQ ID NO: 129694 - protein, 260 aa, Unknown
  Bacterial polypetide isolated from the Sargasso Sea
MAVLINNYGLGLFVDHELVIKYGGRPPEAKNPPWDGGFTWSRDKQGLAWLGVSCQSNGAHIWFPCVEHPSDKVEGAEIIVEVPDPLMAVSNGLLLSKQKEKDRWTRWHWKTSYPISAYNINFTIGGFEVLRKNGYVLDKPIKMEYYVLPEMVSGGTQLLEEAEKHLNFYASIFGQYPWIDEKFGIVHTPYLGMEHQTINAYGNKYKKTKLGYDFILFHEMGHEWFGNFISVKDWKDFWIHEGFVTYAEAMYVEKNHGLEI

SEQ ID NO: 129695 - protein, 64 aa, Unknown
  Bacterial polypetide isolated from the Sargasso Sea
MENGKKNTNTIVIKIGGSTLGESDSSLSDIIKFSKEDISPIIVHGGGKEINKWIAKQGIHPEFL

SEQ ID NO: 129696 - protein, 135 aa, Unknown
  Bacterial polypetide isolated from the Sargasso Sea
TKINEDEILENIKQGKISIIAPLGLDESNCLYNINADIAAGAIAKKLEARRLLLMTDVEGVLDENGKLLTEINADKTVELLKRKVITGGMIPKINTCLDAISNGVRGVVIVDGRKPHSILFELFSDKGAGTLIRK

SEQ ID NO: 129697 - protein, 213 aa, Unknown
  Bacterial polypetide isolated from the Sargasso Sea
MELAKIIPKDGPNINEVEKYINKYESEVIVIKCGGSVLLEKKLFNQFIEDISIINKIGLSAIVVHGGGKNIKKKLDENNIETRFVNGLRVSDERTIHYIEEALLDLNKEILQELKSKKSNVCSISPRDNNIINIVPEKEELGYVGIPNIINKNKILKLINNQQIPIVAPLGLGDDEKVYNINADVAAGSIAKELNARRLLLMTDVEGVLDENQ

SEQ ID NO: 129698 - protein, 278 aa, Unknown
  Bacterial polypetide isolated from the Sargasso Sea
MINDKKIVREKWLSEFAKDILHLQKLKKNIILVSSGAIALGCKKLKLSKKKLKLDKSQAVASIGQIELMNLFKKTFNKSKINLSQILLTLEDTEKRRRAINAKRTFDNLFSLGFIPIVNENDSIATSEIKYGDNDRLASRVAQISSADCLILLSDVSGLYSKDPKLDKKAKLIREIKNIDQNVEKLATNKSGEFGSGGMKTKIDAAKICQFSGCHMAIANGLINRPIQKILTENICTWFLPKISKLDARKKWIISSVSPKGKIIIDEGALLALNNGKS

SEQ ID NO: 129699 - protein, 87 aa, Unknown
  Bacterial polypetide isolated from the Sargasso Sea
MDKQTLVIKLGGALIENDEALTALFATLKTFLNEQHRPLVLVHGGGCLVDDLLKGLGLTSTKKNGLRVTPFEQIPFIAGALGGTANR

SEQ ID NO: 129700 - protein, 292 aa, Unknown
  Bacterial polypetide isolated from the Sargasso Sea
DKRVTSIEVRDVAYSVFSKTNKKIVDSLQAQGANAKSVTSDVFECVMDNDDLGYVGSIQSVNHQLINEILESDSIPVIAPIGFQDNEILNINADIATVELVKAINPYKAIFLSDTGGIFNQRGELMPNINLALEFDELMQQEWLHSGMKLKLEQIKSLLDFLPKTASVSITEPINLPKELFTDSGSGTLIKHGYSVLQHQLPEKDIQEQFTNIIEKSFSGKLVDDFFENPNDLDIFMTTCKRASIAISNDFKIPYMDKFGVIPEAKGEGLGAGIWHEMRKVYPASILAFSSK

SEQ ID NO: 129701 - protein, 142 aa, Unknown
  Bacterial polypetide isolated from the Sargasso Sea
MAASSHGSFLTWQLPYMAASLHGSFLTWQLPYMAASLHDSFLTWQLPYMAASLHGSFLTWQLPHMAASLHGSFLTWQLPYMTASLHDSFLTWQLPYMAAYHLACHHSHVLAGVVVHGGGQTQRDLDHCRPSTPLHVLHIHGA

SEQ ID NO: 129702 - protein, 220 aa, Unknown
  Bacterial polypetide isolated from the Sargasso Sea
MIDAENPVELKGNTLGLWQIVFLVISAAAPLTGMLGAVPPAISLGNGAGIPGAFVIAGVVLLIFSVGFASMSRHVVRAGAFYAYITAGLGRPLGMAGALVALMSYTFIQIALYGLFGFFCTVILSPLLHTAMPWYGYSLICVAVVQFTGIRGIDLNSRLLGVLMCLELGILLLLAIAIVVHGGGPNGLTLAPFTPEHVFSGHLGIAVMFAFASFIGLKRR

SEQ ID NO: 129703 - protein, 321 aa, Unknown
  Bacterial polypetide isolated from the Sargasso Sea
MFEILILMLDATIRTAPPLILAAMAGMFCERSGVVNIALEGKLLAAAFASAAAAAVSGSAWIGLGAGVGVSILFALMHGFATITHRGDQVVSGMAINILAAGLTVTLGRYWFDQGGQTPALSGAARFAPIDLPYAKELYDVPVVGQLYSELLSGHSLLEYVAFAAVPLAWWVLFRTRFGLRLRAVGEAPAAVDTAGISVVRMRYTALIIGGLLAGIGGTYLAVAQTAQFIPNMSAGKGFMALAALVFGKWRPWNAMAACLLFGFLDAVAIRLQGVSIGGFPIPVQAIEALPYILTVFLLAGFIGKAVAPKALGTPYVKERE

SEQ ID NO: 129704 - protein, 282 aa, Unknown
  Bacterial polypetide isolated from the Sargasso Sea
MERLNSIETARTLAEALPYLQRYDKSIVIIKLGGHAMTNKIAMTNFARDVVLMKQCNVNPIVVHGGGPMISTFLKKMNIESKFIKGKRVTSEEAITAVEMVLTGNINKSIVSAINRQGGKAVGLSGKDANLMICEPDDPELGFVGIPKTIDPSILRNFLESDFIPIIAPVGMGLDGRTYNVNADDVAGAIAGVMNADRLLLLTDVSGIQDKDGKLLTNLSTTEVKNLISEGTIVKGMIPKADTAIRALSDGVKAVVIMDGRAPNACLLELFTDHGAGTLVRN

SEQ ID NO: 129705 - protein, 45 aa, Unknown
  Bacterial polypetide isolated from the Sargasso Sea
MTPKLKAALNAKKRGVKTCHIIDGRVPHAVLLEVLTEEGVGTMIS

SEQ ID NO: 129706 - protein, 282 aa, Unknown
  Bacterial polypetide isolated from the Sargasso Sea
MNLEKILPKDGPPINEVTKYIEKYKNDLIVIKYGGNVLIDRNVFNNFITDLSVLNKLGLATVVIHGGGPRIKRELAKSNIQSKFIRGLRVTDKNIINIVESVLIDFNDDIVNSLKDKGTEAISIHTKNNNIIKTIPETEELGFVGIPNEINNEQILNIINQNKIPIISPLGLGKENQTYNINGDTAAMAIAKSLKSRRLLLMTNVDGVLDKNKKLIEEISSSDVLKMIKDETITEGMIPKINACLDAVNNGVTAAGIINGTKPHSCLWEIFSDKGSGTLIRQ

SEQ ID NO: 129707 - protein, 106 aa, Unknown
  Bacterial polypetide isolated from the Sargasso Sea
MNKVYTKETILKLLSGMSSEKEIRKYLERFSSDDFRFAVIKVGGAVIQNDLENLVSSISFLHEVGLKPIIVHGGGPSLSSELEANEIEFSFLDGQRITTSEVLDVA

SEQ ID NO: 129708 - protein, 281 aa, Unknown
  Bacterial polypetide isolated from the Sargasso Sea
MNLEKILPSDGPNNDEIQKYINKYRGEIIVIKCGGSVLTDQKLFNQFIQDVSILNKLGLSICLIHGGGIFINKKLKEKNISNKFINGLRITNEETIKIVEEALVELNLEIINNLKSKNCYSQSITTKNKLITVEPKNKELGFVGEPKYVNKDILIKILKKNEVPVIVPMGVGKDEKIYNINADIAAGFIAKNLKSRRLLLMTDVDGVLDKNKSLIPEINSEKAKEMIDQGTITGGMIPKINTCLDAVKNGVTGVVIVDGRKNHSILFELFSDIGSGTLIRK

SEQ ID NO: 129709 - protein, 107 aa, Unknown
  Bacterial polypetide isolated from the Sargasso Sea
KKIYNINVDIAAGSVAKKLSSRRLLLMTDVEGVLDKNKKLISEINSSIAEKMLKDGDISGGMIPKINTCLDAVNNGVKGVVIVDGRKPHSILFELFSDKGAGTLIRK

SEQ ID NO: 129710 - protein, 232 aa, Unknown
  Bacterial polypetide isolated from the Sargasso Sea
ISILNKLGLSIIIVHGGGPRIERELEKSNIQSKFIRGLRVTDEKIINIVEDVLIDFNEDIVNSLTEKGSNAVSINTKKNNVIEVIPETKELGFVGKPSKININIIKDIIKVSSVPIISPLGLDKNNQTFNINGDTAAGAIAKSLKCRRLLLMTNVEGVLDKEKKLIEEITSSEILEMINNEIITEGMIPKINTCLDAVMNGVTGVGIIDGRKKHSILFELFSDKGAGTLIRK

SEQ ID NO: 129711 - protein, 95 aa, Unknown
  Bacterial polypetide isolated from the Sargasso Sea
MPNDGPPINEVTKYIEKYKNDLIVIKYGGNVLIDRNVFNNFITDLSILNKLGLATVVIHGGGPRIKRELEKSNIQSKFIRGLRVTDKHIIDIVES

SEQ ID NO: 129712 - protein, 110 aa, Unknown
  Bacterial polypetide isolated from the Sargasso Sea
MDIKEEELKTILPLDGPSTDEVKKYLEKYNDEYIVIKCGGSVLIDQNLFDFFIQDISTLNKLGFTPIIVHGGGKRISNKLNEIGLESKFIKGLRVTDDETIKVVEKVLIN

SEQ ID NO: 129713 - protein, 296 aa, Unknown
  Bacterial polypetide isolated from the Sargasso Sea
SQAVASIGQIELMNLFKKTFNKSKINLSQILLTLEDTEKRRRAINAKRTFENLFSLGFIPIVNENDSIATSEIKYGDNDRLASRVAQISSADCLILLSDVSGLYSKDPKLDKKAKLIREIKNIDQNVEKLATNKSGEFGSGGMKTKIDAAKICQFSGCHMAIANGLISRPIQKILTENICTWFLPKISKLDARKKWIISSVSPKGKIIIDEGALLALNNGKSLLAAGIKDVQGSFSKGDHIKILNNNMTEFARGLSSFSSDEILKIKGKHSNKINDILGYISKSEVIHKDDMVLIK

SEQ ID NO: 129714 - protein, 127 aa, Unknown
  Bacterial polypetide isolated from the Sargasso Sea
MDLEKILPTNGPSTNEVKKYIEKYLEEVIVIKCGGSVLLDENLFKQFIEDISVIYKLGLSAVVVHGGGKNIKKKLDKLNIQSKFIDGLRVTNEITIKVVEEALLELNSQIINDLKNLQINVESVAPE

SEQ ID NO: 129715 - protein, 282 aa, Unknown
  Bacterial polypetide isolated from the Sargasso Sea
MDLEKILPKNGPPLNEVTKYIKKYKNDLIVIKYGGNVLIDRNVFNNFITDLSVLNKLGLATVVIHGGGPRIKRELEKSNIESKFIRGLRVTDKHIIDIVETVLIDFNDDIVNSLKDKGTEAISIHTKNNNIIKTLPEAEELGFVGIPNEINNEQILNIINQNKIPIISPLGLGKENQTYNINGDTAAMAIAKSLKSRRLLLMTNVDGVLDKSKKLIEEISSSEIMEMIKDQTITEGMIPKINACLDAVNNGVKAVGIINGTKQHSCLWEIFSDKGSGTLIRQ

SEQ ID NO: 129716 - protein, 369 aa, Unknown
  Bacterial polypetide isolated from the Sargasso Sea
MYLKDSKTVVIKIGSSLLINDKKIIREKWLSEFAKDIQHLQKLKKNIILVSSGAIALGCKKLKLSKKKLKLDKSQAVASIGQIELMNLFKKTFNKSKINLSQILLTLEDTEKRRRAINAKRTFENLFSLGFIPIVNENDSIATSEIKYGDNDRLASRVAQISSADCLILLSDVSGLYSKDPKLDKKAKLIREIKNIDQNIEKFATNKSGEFGSGGMKTKIDAAKICQFSGCHMAIANGLISRPIQKILTENICTWFLPKISKLDARKKWIISSVSPKGKIIIDEGALLALNDGKSLLAAGIKDVQGSFSKGDHIKILNSNMTEFARGLSSFSSDEILKIKGRHSNKINDILGYISKSEVIHKDDMVLIK

SEQ ID NO: 129717 - protein, 168 aa, Unknown
  Bacterial polypetide isolated from the Sargasso Sea
MPKDGPPIEQVKKYIEKYKNDLIVIKYGGNVFIDRNIFNNFIEDISILNKLGLSIVVIHGGGPRIKRELDKSNIVSKFIRGLRVTDAKVINIVEKVLIEFNEDIVSSLKEKGVKAISLNTKQNCAIEVIPEAKELGFVGIPDRIDVDTIKNKIENKLIPNNISSWTRK

SEQ ID NO: 129718 - protein, 128 aa, Unknown
  Bacterial polypetide isolated from the Sargasso Sea
MDLKKILPKDGPPLDEVSKYIEKYKNDLIVIKYGGNVFIDKEIFDNFITDINILNKLGISFTVVHGGGPRIKRELDKSNIQSKFIRGLRVTDEKIINIVESVLIDFNNDIVDSLKKLELMLSQPHKKK

SEQ ID NO: 129719 - protein, 199 aa, Unknown
  Bacterial polypetide isolated from the Sargasso Sea
EKSIDIIEMVLGGLINKDIVNTITSLGGKAVGLSGKDGGLIRAKKIEGEGEFKNIDFKNTGTVKSIDPGVVNLLDGSTFIPVIAPIGIGDDGKTYNINADIVAGKIAHILQASKYLILTNTQGILDSNGSLIQSINTDGVKKLVEKGILSQGMVPKVNSALEAVTSGVEHVQIIDGTIDHSVILELFTDEGIGTMIRRN

SEQ ID NO: 129720 - protein, 206 aa, Unknown
  Bacterial polypetide isolated from the Sargasso Sea
MEIEKIVPKDGPSIEEVKKYINKYKNELIVIKYGGNVFIDRNIFNNFISDISILNKLGLSIIIVHGGGPRIKRELEKSNIQSKFIRGLRVTDEKIINIVEDVLIDFNEDIVNSLIEKGSNAVSINTKKNNVIEIIPEAEELGFVGKPNKINTNIIKDIIKLNTVPIISPLGKGKNNQTYNINGDTAAGAIAKSLKCRRLLLMTNVE

SEQ ID NO: 129721 - protein, 233 aa, Unknown
  Bacterial polypetide isolated from the Sargasso Sea
DISILNKLGLSIIVVHGGGPRIERQLKKEKIQTKFINGLRVTDEKVIKIVEEVLVDFNNDIVNSLNKKGSSAVSINTKNKNIIGVVPDNKELGFVGIPDKINLDIIEDVLKKNQIPVVAPLGLDINDHTYNINGDTAASAIAKKIKSRRLLLMTNVEGVYDDRKDLISEIKPFDIENLIKLKIVQGGMIPKIKNCIDAVENGVRGVVILDGRKPHSILYEIFSDKGAGTLIRK

SEQ ID NO: 129722 - protein, 226 aa, Unknown
  Bacterial polypetide isolated from the Sargasso Sea
MKVIIVHGGGPQIESQLRKKKIKNEEYQGLRVTTKQILSVVKTVLANDLNKLISNEITKYGGKPKRFDGIRQKIINSKIAMNGNIGFVGEPKKINKSLIQAALGKNQIPVIAPLGYDANKNTLNINADTAAAFVAETVKAERLLLLTDVEGVMDNNKKLITELDRKKAFQYIKKGTIKSGMIPKIKACFNTLKNGAKGVALIDGRKQNAVVMELLTTKGAGTLIKK

SEQ ID NO: 129723 - protein, 110 aa, Unknown
  Bacterial polypetide isolated from the Sargasso Sea
MNDSQRVSILSEALPYIQSFSGRKIVIKYGGSVMENDNLKTAFFRDIALLSTVGVCPIVIHGGGPEINNWLKKLEISPKFENGLRITDQKTMDIVEMVLMGRVNKQIVKG

SEQ ID NO: 129724 - protein, 118 aa, Unknown
  Bacterial polypetide isolated from the Sargasso Sea
MEIEKIVPKDGPSIEEVNKYIDKYKNELIVIKYGGNVFIDRNIFNNFISDISILNKLGLSIIIVHGGGPRIKRELEKSNIQSKFIRGLRVTDEKIINIVEDVLIDFNEDIVNSLIKKG

SEQ ID NO: 129725 - protein, 124 aa, Unknown
  Bacterial polypetide isolated from the Sargasso Sea
MNDSQRVSILSEALPYIQSFSGRKIVIKYGGSVMEDNDLKNAFFRDIALLSTVGVCPIVIHGGGPEINNWLNKLEISPKFENGLRITDQKTMEIVEMVLMGRVNKQIVKGINKTGSLAVGNIRS

SEQ ID NO: 129726 - protein, 224 aa, Unknown
  Bacterial polypetide isolated from the Sargasso Sea
MEKFVQRAKTLIEALPYIKKFNSKTIVFKYGGSIGSKDFSNFARDIVLMKLVGINPVIVHGGGAEISKVLESLKIESNFIDGLRVTCPKTMEVVEMVLGGKVNKEIVSKIIMNGGKSVGISGKDGGFLRVKKVKASKKSQDLGRVGEITKVDIKLITELQDNGYIPVVAPIGSDNKGVSYNINADHAASKIASSLKAEKLIILTDVPGIQDEKRKLISSITKKT

SEQ ID NO: 129727 - protein, 121 aa, Unknown
  Bacterial polypetide isolated from the Sargasso Sea
ILSSTGSDESGQCYNINADTAAARVAMALGARRLVYLSDVPGLLRNPEDPDSLLSSLPVDQVQPLKDEGVIAKGMLPKVNSAVDALKSGVNRVHFIDGRLAHSILLEIFTDQGIGTEIVHA

SEQ ID NO: 129728 - protein, 153 aa, Unknown
  Bacterial polypetide isolated from the Sargasso Sea
ETDSNIEKILDIGFVGQPNKVKTDIINEQIKKGYIPVIAPLGIDENGNNYNINADTAAGFIAGEMKASKLLLLTDVAGILDEKKKLISSLELKQARELLDKDFIEGGMKPKILTCIKAMEKGVQKATILDGRIPHSLILELFTEHGIGTQIYS

SEQ ID NO: 129729 - protein, 149 aa, Unknown
  Bacterial polypetide isolated from the Sargasso Sea
MSKKNSLDEIRKFWPEKAPDISIVQKYVKKYEKEKIVIKYGGNVLIDRKVFNNFISDINVLDKLGFSVIVVHGGGPRIKRELDKKKIVSKFINGLRVTDKNIIDVVEEVLIDFNKDIVSSLKKLGSEAAAFHTKTENIIEVKPEREELG

SEQ ID NO: 129730 - protein, 163 aa, Unknown
  Bacterial polypetide isolated from the Sargasso Sea
NVCSISPKENNIINIVPESKELGYVGTPKKINKEKILNFINNKQIPIVVPLGLGDDGRIYNINADVAAGSIAKEIDARRLLLMTDVEGVLDENQKLLSEINLDRANKMLKNNTISGGMIPKINTCLDAISNGVRGVVIVDGRKPHSILFELFSDKGAGTLIRK

SEQ ID NO: 129731 - protein, 132 aa, Unknown
  Bacterial polypetide isolated from the Sargasso Sea
MDLNKILPEKGPPINEVSKYIEKYKNDLIVIKYGGNVFIDREIFNNFISDISILNRLGISIAVVHGGGPRIKRELDKSNIQSKFIRGLRVTDEKIINIVESVLIDFNNDIVNSLNKMSTEATSIHTKKNNII

SEQ ID NO: 129732 - protein, 238 aa, Unknown
  Bacterial polypetide isolated from the Sargasso Sea
YNFITDINILKKLGISIVIVHGGGPRIKRELEKSNIESRFIRGLRVTDEKIINIVENVLIDFNNDIVNSLIQKGSEAVSIHSKNNNIIEVVPEVEELGFVGIPNKVNSEFLINTIKKNKIPIISPLGLGKDNQTYNINGDTAAGAVAKSLKSRRLLLMTNVEGVLNKEKKLIEEISSLEILQMIENQTITEGMIPKINTCLDAVNNGVTAVGIIDGRKKHSILFEIFSDKGSGTLIRK

SEQ ID NO: 129733 - protein, 104 aa, Unknown
  Bacterial polypetide isolated from the Sargasso Sea
MAGLNNKKASVLLEALPYIKKFYGQTIVIKYGGSIMVDPNLKKKFAQDVVLLKYVGINPIVVHGGGKEISKWMSRMGKKAMFIDGFRITDSETLEITEMVLSGK

SEQ ID NO: 129734 - protein, 187 aa, Unknown
  Bacterial polypetide isolated from the Sargasso Sea
MPNNFSLNEIKKFWPEKAPDINIVQKYVSKYQNEKIVIKYGGNVLIDRNVFNNFISDINVLNKLGLSIIVVHGGGPRIKRELDKKNIVSKFINGLRVTDKSIIDIVEKVLIDFNKDIVNSLKKLGCEAISFHTQQNNTIDVEPEKEELGFVGIPKKININLIESSLNENKIPIIAPLGKGKNNQTFN

SEQ ID NO: 129735 - protein, 221 aa, Unknown
  Bacterial polypetide isolated from the Sargasso Sea
MSKNISLEEIKKFWPDKAPDINTVQKYIKKYKKEKIVIKYGGNVLIDRNVFNNFISDINVINKLGLSIIVVHGGGPRIKRELDRKKIVSKFINGLRVTDKNIIDTVEEVLIDFNKDIAISLKKLGSEAASFHTKTDNVIEVEPERKELGFVGRPNKINDNLIQNALNQNKIPIIAPLGLGKQNQTYNINGDTAASAIAKKLKSRRLILMTNVEGVYDDQKK

SEQ ID NO: 129736 - protein, 220 aa, Unknown
  Bacterial polypetide isolated from the Sargasso Sea
MPEDGPPLSEVYKYIEKYKNDLIVIKYGGNVLIDRNVFNNFITDLYVLNKLGLSTIVVHGGGPRIKRELEKSNIQSKFIRGLRVTDKNIINIVESVLIDFNDDIVENLDKKGSKGVSIHTRNSNIIEVIPEAKELGFVGIPTSVNNKIIFNILEQNKVPIVSPLGLDKNNQTYNINGDTAAMAIAKSLKARRLLLMTNVDGVLNKEKKLIEEISSTEILE

SEQ ID NO: 129737 - protein, 269 aa, Unknown
  Bacterial polypetide isolated from the Sargasso Sea
MFEITKEELKKILPSEGPSIEEVKKYLEKYNDEYIVIKCGGSVLDDQNLFNNFINDISILNKLGLIPIIIHGGGKRISSRLNDAGIKSNFINGLRVTDKKSINIVEDVLNNLNKEIIESLKKNKCDSEGLNSKNKNILMVEQGDKDLGFVGIPKEVKQSIIEQVVSEKKVPVIAPLGLNKINQVFNINADTAAGAIAKKLNARRLIIMSDVEGVLNNDKKLIPEINTEKINELINKQIISGGMIPKIKNSLDVANNGVKGVCIIDGRLN

SEQ ID NO: 129738 - protein, 258 aa, Unknown
  Bacterial polypetide isolated from the Sargasso Sea
MEIEKIVPKDGPSIDEVKKYIDKYKNELIVIKYGGNVFIDRNIFNNFISDINILNKLGLSIIIVHGGGPRIKRELEKSNIQSKFIRGLRVTDEKIINIVEDVLIDFNEDIVNSLIEKGSNAVSLNTKKNNVIEIIPEAEELGFVGKPNKININIIKDIIKLNSVPIISPLGLGKNNQTFNINGDTAAGAIAKSLKCRRLLLMTNVEGVLDKEKKLIEEITSSEILEMINNEIITEGMIPKINTCLDAVMNGVTGVGII

SEQ ID NO: 129739 - protein, 181 aa, Unknown
  Bacterial polypetide isolated from the Sargasso Sea
MEIEKIVPKDGPAIKEVKKYIDKYKNELIVIKYGGNVFIDRNIFNNFISDISILNKLGLSIIIVHGGGPRIKRELEKSNIQSKFIRGLRVTDEKIINIVEDVLIDFNEDIVNSLIEKGSNAVSINTKKNNVIEVIPEAEELGFVGKPSKININIIKDIIKVSSVPIISPLGLGKNNQTFKY

SEQ ID NO: 129740 - protein, 89 aa, Unknown
  Bacterial polypetide isolated from the Sargasso Sea
MDLKKILPTDGPPVEEVLKYVEKYKNEIIVIKYGGNVFIDRKIFDNFIKDLSVLSKLGLQVVVVHGGGPRIKRELSKQNIESKFVRGLR

SEQ ID NO: 129741 - protein, 169 aa, Unknown
  Bacterial polypetide isolated from the Sargasso Sea
ITGKDGQLIQARKLAGDWNREGVKDIGQVGEVASIDTDILTMLIGSDYIPVIAPVAGSTDGKTYNINADLVAGKLAEVLQAEKLMLLTNVAGLLDAEGNIVTGLNTHQVAKLIAQGVIHGGMLPKIQCALEAVQGGVSSAHIIDGRVAHAALLEIFSDEGIGTQISSRR

SEQ ID NO: 129742 - protein, 191 aa, Unknown
  Bacterial polypetide isolated from the Sargasso Sea
MNDSQRVSILSEALPYIQSFSGRKIVIKYGGSVMENDNLKNAFFRDIALLSTVGVCPIVIHGGGPEINNWLKKLEISPKFENGLRITDQKTMEIVEMVLMGRVNKQIVKGINKTGSLAVGISGLDGNLIQSRELGDGSHGLVGEVTKINPEILDPLISKGYIPIISSIGSTLEGISHNINADFVAGEIAAA

SEQ ID NO: 129743 - protein, 128 aa, Unknown
  Bacterial polypetide isolated from the Sargasso Sea
MEIEKIVPKDGPSIEEVKKYIDKYKNELIVIKYGGNIFIDRNIFNNFISDISILNKLGLSIIIVHGGGPRIKRELEKSNIQSKFIRGLRVTDEKIINIVEDVLIDFNEDIVNSLIEKGSNAVSLNTKK

SEQ ID NO: 129744 - protein, 122 aa, Unknown
  Bacterial polypetide isolated from the Sargasso Sea
EKKIPIVVPMGTSDDNKIYNINADIAAGAIAKELNSRRLLLMTDVEGVLDKNKKLIPEINSSIAEKMLKDSDISGGMIPKINTCIDAVNNGVMGVVIVDGRKPHSILFELFSDKGAGTLIRK

SEQ ID NO: 129745 - protein, 243 aa, Unknown
  Bacterial polypetide isolated from the Sargasso Sea
KRSFAQDIVLLQSLGMLPVIVHGGGPEVSHAMENLGQEVSFIDGLRVTSSENLKVAEMVLSGTINKEIITNLNTFGGKAVGVSGKDGLLIEAYKKEHNGGVDLGYVGEIKSVNPELLHVLLSKDFLPVVSPIGLGEDGITYNINADTIASHIAVSINAYKIIFMTDVDGVKKDGELIEQFSSDLAESMIKKNLISGGMRPKVNACLYSVRNGVQSAQIINGTVEHSVIAELFTDKGIGTKIIL

SEQ ID NO: 129746 - protein, 219 aa, Unknown
  Bacterial polypetide isolated from the Sargasso Sea
GGGPQIGAMLDKLKIESNFIDGLRVTDEATISVVEMVLAGGINKALVAAVASAGGRAVGVSGKDGRLITARKLLAKAKKTGSAIHDAVDLGFVGEPSDIDVTVLDALMQHHLIPVVAPVGCGKDGKTYNINADAAAGAIAAALHATRMLMLTDVAGVLDKNGDLIPALTVSEAEALIRDGTVKGGMIPKVETCIDAVRGGTEAAVIMDGRAPHALLVEL

SEQ ID NO: 129747 - protein, 86 aa, Unknown
  Bacterial polypetide isolated from the Sargasso Sea
MELEKILPKDGPPINEVTKYIEKYKNDLIVIKYGGNVLIDRNVFNNFITDLSVLNKLGLATVVVHGGGPRIKRELEKSNIQSRFIR

SEQ ID NO: 129748 - protein, 194 aa, Unknown
  Bacterial polypetide isolated from the Sargasso Sea
MEVEKYIKKYSKEKIVIKCGGKVLLDQSLLNNLIEDVVILKKLGLTPILVHGGGLGIKRKLDEQNIKSKFIMGLRVTDEKMINIVESVMTEFNKEIVDALEKKSCKAKSITIKKNNIIYVEQENKELGYVGKPKRVDAKLLKEIIKDDFVPIIVPMGLDEKGISYNINADTAAGAIARSIKSRRLMLLTDIDGV

SEQ ID NO: 129749 - protein, 89 aa, Unknown
  Bacterial polypetide isolated from the Sargasso Sea
MFTKENKNLLIEALSYIKRFNGKIVVVKYGGAAMIEEHLKQNFAQDIVLLQSLGMLPVIVHGGGPEVSKAMEQLGQEVLFIDGLRVTSS

SEQ ID NO: 129750 - protein, 185 aa, Unknown
  Bacterial polypetide isolated from the Sargasso Sea
SAGGRAVGVSCKDGGLINARKLMATAKQAGSATQDAVDLGFVGEPSSIDVTVLDALMQHHLIPVVAPVGSGEDGKTYNINADTAAGAIAAALHATRMLMLTDVGGVLNKNGTLIPALTVSEAEALIKDGTVRGGMIPKVETCVDAVRGGAEAAVIMDGRAPHALLVELFTEHGMGTMIKADEELS

SEQ ID NO: 129751 - protein, 209 aa, Unknown
  Bacterial polypetide isolated from the Sargasso Sea
DKETMKVVEMVLGGSVNAEIVSSINRSGGSAVGLTGKDGQLIRAKPVQVDHSYLHAENDKLSDMSCVGEVEQIDTAILNEMVDSHFIPIIAPIGVDSAGNTYNINADLVAGKLASVMEAEKLILLTNTKGLLDKKGSLLSGLSVKDVKALVGDGTITEGMLPKVKCATDAINSGVTSAHILDGRVPHAVLLEIFTSEGVGTLISNRNNN

SEQ ID NO: 129752 - protein, 144 aa, Unknown
  Bacterial polypetide isolated from the Sargasso Sea
DIGFVGEPIKLNKELILEHIKKGDIPVIAPLGIDTDNFTYNINADTAAGFIAGELKASKLLLLTDVAGIIDNKNNLISSLSFSEAQDIIKKKFISGGMKPKIQTCIKAMEKGVKKTTILDGRIPHSVILELFTEHGIGTQLISN

SEQ ID NO: 129753 - protein, 172 aa, Unknown
  Bacterial polypetide isolated from the Sargasso Sea
MSGEKSLDQIKKIWPKEAPDIKNVPKYIEKYKEDLIVIKYGGNVLIDRNIFNNFIEDISVINKLGLSIIVVHGGGPRIERELKKENIQTKFINGLRVTDKKVIKIVEEVLIDFNNDIVSSLKKKGSKAVSINSKINNVINVIPNKQELGFVGVPDKINSDTLKDMISQNQIP

SEQ ID NO: 129754 - protein, 94 aa, Unknown
  Bacterial polypetide isolated from the Sargasso Sea
MFTEENKNLLIEALSYIKRFNGKIVVVKYGGAAMIEEHLKQNFAQDIVLLQSLGMLPVIVHGGGPEVSKAMEQLGQEVSFIDGLRVTSSENLKV

SEQ ID NO: 129755 - protein, 102 aa, Unknown
  Bacterial polypetide isolated from the Sargasso Sea
MIDDSLRVSILSEALPYIQSFSGRKIVVKYGGSIMEDEKLKKAFFRDIALLSSVGVCPVVIHGGGPEINRWLNKLEISPKFKNGLRVTDEKTMEIVEMVLMG

SEQ ID NO: 129756 - protein, 156 aa, Unknown
  Bacterial polypetide isolated from the Sargasso Sea
MGISVKQARNISSVLSEGLPYIQKFKGKVIVVKYGGGAMSDQSLKRNFAKDIALMNLVGMKPVIVHGGGPQIAKELKKSGITSSFISGHRVTDKPTMSVVKKILGTKINHEIVNLIKQSGGDAISFNHIKHKIIKASQHAGKDKNNLGLVGKVDRI

SEQ ID NO: 129757 - protein, 243 aa, Unknown
  Bacterial polypetide isolated from the Sargasso Sea
YIEKYRDEIITIKYGGNVFIDRQIFNNFINDLSILQKLGLSVVVVHGGGPRIKRELDKSNINSKFVRGLRVTNEKIIDIVEKVLIEFNEDIVSSLKHIGSNGISINTKENNVLKIIPESKELGFVGIPNNINVKIIIDKIKKNLIPIISPLGLGPYNKTYNINGDTAAGAIAKSLKSRRLLLMTNVEGVLNKDKILIEEISSSKIMEMIDDKTITEGMIPKINTCLDAVNNGVAAVAIIDGRK

SEQ ID NO: 129758 - protein, 208 aa, Unknown
  Bacterial polypetide isolated from the Sargasso Sea
VTDKATVDVVEMVLAGSINKQIVAGISAAGGYAVGICGKDSNLIQADRLKRATRDPDSNIEKFLDLGLVGDPKQINPYVLEAFNEGGITPVIAPIGLGPDGETLNINADTVAGAIARAVGAARLYMLTDVAGVLGVDGNLISEMTMADAQGLIDDGIIQGGMIPKIETCMDVVNSGVDAATIIDGRVPHAILIELFTKGGVGTQIVRS

SEQ ID NO: 129759 - protein, 282 aa, Unknown
  Bacterial polypetide isolated from the Sargasso Sea
ATEEVNLKSILPSNGPSIDEVKKYIGKYSNEKIVIKCGGSVLINPNLFNIFISDIAIIKKLGLTPIIVHGGGKRINNQLKELNIESTFIKGLRVTNKDTIKVVEDVLIKLNKEIVDALNSKSCEAKSITTKENNIILVKSEKGELGYVGEPTEIKTNFLDKIINSKQVPVIAPMGLKNNQTFNINADTAAGAIAKGLRSRRLLLMTDIEGVMDNNNKLISEITTDLAKKMINKEVIKGGMLPKINTCIDAVNNGVRGVVIIDGRKAHSILFELFSDKGSGTL

SEQ ID NO: 129760 - protein, 238 aa, Unknown
  Bacterial polypetide isolated from the Sargasso Sea
MFTEENKNLLIEALSYIKRFKGKIVVVKYGGAAMIEKHLKQNFAQDIVLLQSLGMLPVIVHGGGPEVSKAMEQLGQEVSFIDGLRITSSENIKVTEMVLSGTVNKEIIAHINTFGGKAVGVSGKDGNLIQADKKSHDGGIDLGFVGEIKKVNPELLMVLLKQGFLPVVSPIGLGKDGVSYNINADTIASRIAVSLEAYKIIFMTDVDGILEKNKLCTQLTSNEVEKMIEKKVITGGMS

SEQ ID NO: 129761 - protein, 124 aa, Unknown
  Bacterial polypetide isolated from the Sargasso Sea
VPVISSVANSPDGRSHNINADTVAGELAAALGAEKLILLTDTPGILRNENDPSSLIEKIRLSEARELIDKGIVKAGMKPKVECCIRSLAQGVNAAHIIDGRTPHSLLLEVFTDAGIGTMVMGRG

SEQ ID NO: 129762 - protein, 165 aa, Unknown
  Bacterial polypetide isolated from the Sargasso Sea
MADTSSPVVIKVGGALLENPQIAGQLLAEIKTLQSQRPVILVHGGGPLVETLLAAMQLTSTKIDGLRVTPDEQMPFVCGALAGSANKSLCGLAIGAGITPVGLSLLDGGITDCKVLNEKYGAVGVPAAGNPELLNQLLSAGFLPVISSIGSNAKGRLLNVNADQA

SEQ ID NO: 129763 - protein, 248 aa, Unknown
  Bacterial polypetide isolated from the Sargasso Sea
RNVLIDRNVFNNFITDLSVLNKLGLATVVVHGGGPRIKRKLEKSNIKSKFIRGLRVTDKNIINIVESVLIDFNDDIVSSLKDKKTEAISIHTKNNNVIKTIPEAEELGFVGIPNEINNEQILDIINQNKIPIISPLGLGKENQTYNINGDTAAMAIAKSLKSRRLLLMTNVDGVLDKNKKLIEEISSSEIMEMIKDETITAGMIPKINACLDAVNNGVTAAGIINGTKPHSCLWEIFSDKGSGTLIRQ

SEQ ID NO: 129764 - protein, 175 aa, Unknown
  Bacterial polypetide isolated from the Sargasso Sea
QELIKLGGRAISLSGHKKNLIKAKKIQKKINQDFGFVGIPYKIEKKIINQQIKKNLIPVISPLGIDSKRNIYNINADTAAGSIASELKANKLLLLTDVPGILDQNKKLISSLSIIDAKKIINKKFISGGMRPKIQTCIDAIDKGVKQATILDGRIPHSLILELFTEHGIGTQIYS

SEQ ID NO: 129765 - protein, 144 aa, Unknown
  Bacterial polypetide isolated from the Sargasso Sea
DIGFVGEPQRLKKEIILDHINKGNIPVIAPLGIDNNQFTYNINADTAAGFIAGELKASKLLLLTDVAGILDNKEKLISSLSVEEAKEIIEKEFISGGMKPKIQTCIDAMKKGVKKSTILDGRIPHSVILELFTEHGIGTQLVSE

SEQ ID NO: 129766 - protein, 190 aa, Unknown
  Bacterial polypetide isolated from the Sargasso Sea
MPLSPSLEEIKKFWPEKAPDINIVKKYVSKYENEKIVIKYGGNVLIDRKVFNNFISDINVLNKLGLSIIVVHGGGPRIKRELEKKKIVSKFINGLRVTDKNIINTVEEVLIDFNNDIVDSLQKLGSDAASFHTKDKNLIEVTPERKELGFVGIPEKININVIEEALSKNRIPIIAPLGLDKNNQTYKYKW

SEQ ID NO: 129767 - protein, 78 aa, Unknown
  Bacterial polypetide isolated from the Sargasso Sea
MLLKEEDLKKILPEDGPPKEEVSKYIEKYKNDLIVIKYGGNVFIDRNIFNNFIEDITILNKLGISIVVVHGGGPRIKR

SEQ ID NO: 129768 - protein, 247 aa, Unknown
  Bacterial polypetide isolated from the Sargasso Sea
MFLSTEIFFNNFIQDISIINKLGLSVVIVHGGGPRIERELKKNNIQSRFINGLRVTDKDVINIVEKVLIDFNNDIVDSLNKKGSKAVSINTKINNIINVIPDQPELGFVGVPQEINIKIIKNIINQNQIPIVAPLGLDKDKQPYNINGDTAASAIAKKLKSRRLLLMTNVEGVYDDRKTLISEIKPFDMENLIKLKIIQGGMIPKIKNCIDAVENGVRGVVILDGRKPRSILKEIFSDQGAGTLIRK

SEQ ID NO: 129769 - protein, 99 aa, Unknown
  Bacterial polypetide isolated from the Sargasso Sea
VVAGKMAEILKAEKLVMMTNIPGVMDKQGNLLTDLSAREIDELFADGTISGGMLPKISSALDAAKSGVNSVHIVDGRIEHSLLLEILTEQAFGTMIRSH

SEQ ID NO: 129770 - protein, 114 aa, Unknown
  Bacterial polypetide isolated from the Sargasso Sea
NSKPTSDDQILNVNADSVAGEVAKSIKANKLIFITDVPGVLDISKRVIPKLLSSQVKKLVKNSFISGGMIPKLEACLNSVANVSEAHIIDGRKTGALFSAVTKSGFNKGTVIVK

SEQ ID NO: 129771 - protein, 135 aa, Unknown
  Bacterial polypetide isolated from the Sargasso Sea
MSEENSLEEIKKFWPKDAPDVTNVPKYVKKYKKDLIVIKYGGNVLIDRNIFNNFIQDISTLNKLGLSIIVVHGGGPRIERKLKKEKIQTKFINGLRVTDKNVINIVEDVLIDFNKDIVNSLKKKGSQAISINTKI

SEQ ID NO: 129772 - protein, 170 aa, Unknown
  Bacterial polypetide isolated from the Sargasso Sea
MPNNFSLDEIKKFWPEKAPDVNIVQKYVSKYQNEKIVIKYGGNVLIDRNVFNNFISDINVLNKLGLSIIVVHGGGPRIKRELDKKNIISKFINGLRVTDKSIINIVEKVLIDFNKDIVNSLKKLGCEAISFHTQINNAIEVEPEKEELGFVGVPKKININLIENILNENK

SEQ ID NO: 129773 - protein, 121 aa, Unknown
  Bacterial polypetide isolated from the Sargasso Sea
MDDSLRVSILSEALPYIQSFSGRKIVVKYGGSIMEDEKLKKAFFRDIALLSSVGVCPVVIHGGGPEINRWLNKLEISPKFENGLRVTDEKTMEIVEMVLMGRVNKQIVRGINKTGSLAVGI

SEQ ID NO: 129774 - protein, 251 aa, Unknown
  Bacterial polypetide isolated from the Sargasso Sea
MDLKKVLPLNGPPIKEVSKYIEKYKNDLIVIKYGGNVFIDRNIFNNFITDISILNKLGLSIVVVHGGGPRIERELEKSNIQSKFLRGLRVTTEQIINIVENVLIDFNNDIVRSLKKIGSEAVSINTKENNIIEVVPEAKELGYVGIPNKINNDILLNIINENKIPIVSPLGLQKNQTFNINGDVAAGKIAESLKCRRLLLMTNVEGVLDKNKKLIEEISSTEILEMIKNETITSGMIPKISTCLNAINNGV

SEQ ID NO: 129775 - protein, 264 aa, Unknown
  Bacterial polypetide isolated from the Sargasso Sea
MFTEENKNLLIEALSYIKRFNGKIVVVKYGGAAMIEEHLKQNFAQDIVLLQSLGMLPVIVHGGGPEVSKAMEQLGQEVSFIDGLRVTSSENLKVTEMVLSGTINKEIIAHINTFGGKAVGVSGKDGNLIEADKKSHEGGIDLGFVGKIKKVNPELLMVLLKQGFLPVVSPIGLSKDGVTYNINADTTASRIAVSLGAYKIIFMTDVDGVLEDGNLCAQLTSSELKKMIEKKVITGGMSPKVDSCLYCVKNGVESAQIINGTEPH

SEQ ID NO: 129776 - protein, 101 aa, Unknown
  Bacterial polypetide isolated from the Sargasso Sea
MQSIKEEDLKKILPENGPPINEIFKYIEKYKNDLIVIKYGGNVFTDINIFNNFIEDIAILNKLGISIIVVHGGGPKIKRELDKSNIQTKFIKGLRVTDEKV

SEQ ID NO: 129777 - protein, 112 aa, Unknown
  Bacterial polypetide isolated from the Sargasso Sea
MNDSQRVSILSEALPYIQSFSGRKIVIKYGGSVMENDNLKNAFFRDIALLSTVGVCPIVIHGGGPEINNWLKKLEISPKFENGLRITDQKTMEIVEMVLMGRVNKQIVKGIN

SEQ ID NO: 129778 - protein, 109 aa, Unknown
  Bacterial polypetide isolated from the Sargasso Sea
SKNNDYWNINADVVAGEVAQSLKAEKLILLTDVKGIGDSENKLISKISLKRGQKVLKEKFIKGGMTPKLTAALEAKKNGVKSCHIIDGRVPHAVLLEVLTEEGVGTMIS

SEQ ID NO: 129779 - protein, 205 aa, Unknown
  Bacterial polypetide isolated from the Sargasso Sea
MEIEKIVPKDGPSIDEVKKYIDKYKNELIVIKYGGNVFIDRNIFNNFISDISILNKLGLSIIIVHGGGPRIKRELEKSNIHSKFIRGLRVTDEKIINIVEEVLIDFNEDIVNSLIVKGSKAISLNTKKNNVIEVIPEAEELGFVGKPNKINTNIIKDIIKVNSVPIISPLGLGKNNQTFNINGDTAAGAIAKSLKCRRLLLMTNV

SEQ ID NO: 129780 - protein, 65 aa, Unknown
  Bacterial polypetide isolated from the Sargasso Sea
QIKISEVKKLIGNGTISGGMIPKVETCVEAVKNGVKAAVILDGRLEHSILLEIFTEHGVGTLITN

SEQ ID NO: 129781 - protein, 78 aa, Unknown
  Bacterial polypetide isolated from the Sargasso Sea
MIKDSKSAESLAKILSEALPYIQKFSGKIVVIKYGGSAMKENKLRQNFARDIALMRQIGIFPVLIHGGGPQIEENLKK

SEQ ID NO: 129782 - protein, 190 aa, Unknown
  Bacterial polypetide isolated from the Sargasso Sea
MVETLPYITRFAGRVVVVKFGGNAMESDELADQFAQDIVLMHSVGIKPVVVHGGGPQIGDLVERLGLSTEFKDGQRVTDKETLEIAQMVLIGKVNTDIVSSINVHSPIAVGLSGGDSNLIEATQRDSSLGYVGDVVKINPTILECLMEENLIPVISTIGTDSKGQAYNINSDTVAAALAGSLKAERLLYL

SEQ ID NO: 129783 - protein, 115 aa, Unknown
  Bacterial polypetide isolated from the Sargasso Sea
VPLGLGDDGRIYNINADVAAGSIAKEIDARRLLLMTDVEGVLDQNQKLISEINLNKANEMLKNNIISGGMIPKINTCLDAISNGVRGVVIVDGRKPHSILFELFSDKGAGTLIRK

SEQ ID NO: 129784 - protein, 220 aa, Unknown
  Bacterial polypetide isolated from the Sargasso Sea
MAAIEEVNLEKILPSNGPSIKEVKKYLEKYSDEKIVIKCGGSVLIDPNLFNLFISDITIMKKLGLTPTIVHGGGKRINIKLKELNIESTFIKGLRVTNKDTIKVVENVLVDFNKEIVNALKDKSCDAKSITTKEYNIITVKSERNELGFVGEPTEIKVNVLNEIIQAKEIPVIAPIGLKDNQAFNINADTAAGAIAKKLKSRRLLLMTDIEGVIDNNNKL

SEQ ID NO: 129785 - protein, 225 aa, Unknown
  Bacterial polypetide isolated from the Sargasso Sea
LKFGETLKAQGVESKFHNGLRITDRDTIKVVERVLYEIINTDIVKKIKKHGGKSISLSGNKDSIIFAKKLTNIYKTDSNIEKIMDLGFVGEPKKINPSTIIDHCKKGSIPVITPLGKDNNTTYNINADTAAGAIAGALKASRLLMLTDIAGVIDEKKELILELKVEKAEKLISDGVIVGGMIPKIKTCIDALKNGVDKAVILDGRVENAIILELFTEEGIGTLIN

SEQ ID NO: 129786 - protein, 106 aa, Unknown
  Bacterial polypetide isolated from the Sargasso Sea
MNDSQRVSILSEALPYIQSFSGRKIVIKYGGSVMENDNLKNAFFRDIALLSTVGVCPIVIHGGGPEINNWLKKLEISPKFENGLRITDQKTMEIVEMVLMGRVNKQ

SEQ ID NO: 129787 - protein, 113 aa, Unknown
  Bacterial polypetide isolated from the Sargasso Sea
MDLKKILPKNGPPINEVSKYIEKYKNDLIVIKYGGNVFIDRKIFDNFITDISILNKLDISFAVVHGGGPRIKRELDKSNIQSKFIRGLRVTDEKIIKIVESVLIDFNNDIVDS

SEQ ID NO: 129788 - protein, 202 aa, Unknown
  Bacterial polypetide isolated from the Sargasso Sea
MSKNISLDEIKKFWPEKAPDINIVQKYVKKYEKEKIVIKYGGNVLIDRNVFNNFISDINVLNKLGFSIIVVHGGGPRIKRELDKKKIVSKFINGLRVTDKNIIDTVEEVLINFNKDIVSSLKKLGSEAASFHTKTENVIEVEPERKELGFVGIPGNINDNLIQKALNENKIPIIAPLGLGKIIKLIILMVILQQVLLQKNLN

SEQ ID NO: 129789 - protein, 145 aa, Unknown
  Bacterial polypetide isolated from the Sargasso Sea
MDKQTLVIKLGGALIENDEALTALFATLKTFLDEQHRPLVLVHGGGCLVDDLLKGLGLTSTKKNGLRVTPFEQIPFIAGALAGTANKMMMAKAIATDIPAVGLCLADGGLCQVTQLDPALGAVGDCQPGNPALVAGILAQASCRW

SEQ ID NO: 129790 - protein, 217 aa, Unknown
  Bacterial polypetide isolated from the Sargasso Sea
EVSKAMEQLGQQVHFVEGLRVTSAENLKVTEMVLSGTINKEIIAHLNTCGGKSVGLSGKDGHLIEASKKDGGEGVDLGYVGEIDSTNPELLRVLLKEGYIPVISPIGLGKDGTSYNINADTAASHIAVSLQAMKLIFMTDVEGILEKGELCAELKHDQALSMIDSGVIEGGMKPKVQAALNAVTQGVESAQIILGTDPHSVITELFTDQGIGTKIVA

SEQ ID NO: 129791 - protein, 83 aa, Unknown
  Bacterial polypetide isolated from the Sargasso Sea
MFTEENKNLLIEALSYIKRFNGKIVVVKYGGAAMIEKHLKQNFAQDIVLLQSLGMLPVIVHGGGPEVSKAMEQLGQEVSFIDG

SEQ ID NO: 129792 - protein, 95 aa, Unknown
  Bacterial polypetide isolated from the Sargasso Sea
MKISKKNTKHVIDQASILSKALPFMQRYSGKNITIKFGGAVMGDKNLSTSFAKDIVLLKQVGINPVVVHGGGPKIKKMLDKLNVKTNFINGLRVT

SEQ ID NO: 129793 - protein, 106 aa, Unknown
  Bacterial polypetide isolated from the Sargasso Sea
MTTHSVLVLKVGGALLQTETGMANLMSAIKDMTAAGQKIVLVHGGGCLVDEQLTANGKDIIKLDGLRVTPADQIGIVVGALAGTSNKILQAAAAKAGVVSVGMSLG

SEQ ID NO: 129794 - protein, 83 aa, Unknown
  Bacterial polypetide isolated from the Sargasso Sea
MKFDFLSESDKAYYIHKASTLVEAIPYIREHAGQKFVIKYGGHAMGDTELSHSFSKDICLMKEIGILPIIVHGGGPTIGKVVK

SEQ ID NO: 129795 - protein, 232 aa, Unknown
  Bacterial polypetide isolated from the Sargasso Sea
MEIEKIVPKDGPSIEEVKKYIDKYKNELIVIKYGGNVFIDRNIFNNFISDISILNKLGLSIIIVHGGGPRIKRELEKSNIQSKFIRGLRVTDEKIINIVEDVLIDFNDDIVNSLIEKGSNAVSINTKKNNVIEVIPEAEELGFVGKPNKINTNIIKDIIKLKSVPIISPLGLGKNNQTFNINGDIAAGAIAKSLKCRRLLLMTNVEGVLNEEKKLIEEITSSEILEMINNKI

SEQ ID NO: 129796 - protein, 261 aa, Unknown
  Bacterial polypetide isolated from the Sargasso Sea
INKYKNDLIVIKYGGNVFIDRDIFNNFIEDISVLNKLGLSIVVIHGGGPRIKRELDKSNIQSNFIRGLRVTDEKIINIVEDVLIDFNNDIVDSLKKKNTKGISIHTKKNNVIEIIPESEELGFVGKPNKIDKEIIYNILEKKEVPIISPLGLKDNQTYNINGDTAAGAIAKSLGARRLILMTNIEGVLDKEKKLIEEVTSSEILQMIEDKTITGGMIPKINTCLDAVNNGVTGVVIVDGRKPHSILFEIFSDKGAGTLIRK

SEQ ID NO: 129797 - protein, 69 aa, Unknown
  Bacterial polypetide isolated from the Sargasso Sea
MDEIKKFWPEKAPDVNIVKKYVSKYEKERIVIKYGGNVLIDRNVFNNFISDINVLNKLGLSIVVVHGGG

SEQ ID NO: 129798 - protein, 103 aa, Unknown
  Bacterial polypetide isolated from the Sargasso Sea
LNINADVVAGEVAQSLKAEKLILLTDVKGIGDSENKLISKISLKKGQKVLKEKFIKGGMTPKLTAALEAKKSGVKSCHIIDGRVPHAVLLEVLTEEGVGTMIS

SEQ ID NO: 129799 - protein, 127 aa, Unknown
  Bacterial polypetide isolated from the Sargasso Sea
LNIIREKKIPVIIPMGIGIDKKIYNINADVAAGAIAKELNSRRLLLMTDVEGVLDKNKKLILEINSEVAKKMLEEEIISGGMIPKINTCIDAVENGVTGVVIVDGRKPHSILFELFSDKGSGTLIRK

SEQ ID NO: 129800 - protein, 209 aa, Unknown
  Bacterial polypetide isolated from the Sargasso Sea
MWPKDGPSSQEVEKYIKKYSKEKIVIKCGGKVLLDQSLLNNLIEDIVILKKLGLTPILVHGGGLGIKKKLDEQNIKSKFIMGLRVTDEKMINIVESVMTEFNKEIVNALEKKSCKAKSLTIKKNNIIYVEQENEELGFVGKPKRVDAKLLKEIIKEDFIPVIVPMGLDEKGIAYNINADTAAGAIARSIKSRRLMLLTDIDGVLDNNEK

SEQ ID NO: 129801 - protein, 182 aa, Unknown
  Bacterial polypetide isolated from the Sargasso Sea
MSKEVSLEEIKKFWPEKAPDVNIVQKYISKYEKEKIVIKYGGNVLIDRNVFNNFISDINVLNKLGLSIIVVHGGGPRIKRELEKKKIVSKFINGLRVTDKNIINIVEEVLIDFNKDIATSLEKLGTKSASFHTKTDNIIEVEPEKEELGFVGIPKKINVNLIQDAIDNNRIPIIAPLGLDKN

SEQ ID NO: 129802 - protein, 107 aa, Unknown
  Bacterial polypetide isolated from the Sargasso Sea
GRTYNINADVVAGSIAKEINARRLLLMTDVEGVLDQNQKLISEINLNKANEMLKNNIISGGMIPKINTCLDAISNGVRGVVIVDGRKPHSILFELFSDKGAGTLIRK

SEQ ID NO: 129803 - protein, 137 aa, Unknown
  Bacterial polypetide isolated from the Sargasso Sea
MSIKNNVSESSQLLQRYWPSGKKYYNSTDQFIKRYKNRIIVIKYGGYALTKPHLVKSFAKNIALLNQLGMKVIIVHGGGPQIENQLRKKKIKNEEYQGLRVTTKQILSVVKTVLASDLNKLISNEITKYGSKPKRLR

SEQ ID NO: 129804 - protein, 251 aa, Unknown
  Bacterial polypetide isolated from the Sargasso Sea
MEIEKIVPKDGPSIEEVKKYIDKYKNELIVIKYGGNVFIDRNIFNNFISDISILNKLGLSIIIVHGGGPRIKRELEKSNIQSKFIRGLRVTDEKIINIVEDVLIDFNDDIVNSLIEKGSNAVSINTKKNNVIEVIPEAEELGFVGKPNKINTNIIKDIIKLKSVPIISPLGLGKNNQTFNINGDIAAGAIAKSLKCRRLLLMTNVEGVLNEEKKLIEEITSSEILEMINNKIITEGMIPKINTCLDAVMNG

SEQ ID NO: 129805 - protein, 99 aa, Unknown
  Bacterial polypetide isolated from the Sargasso Sea
MPEDGPPLSEVNKYIEKYKNDLIVIKYGGNVLIDRSVFNNFITDLYVLNKLGLSIIVVHGGGPRIKRELEKSNIQSKFIRGLRVTDKNIINIVESVLID

SEQ ID NO: 129806 - protein, 200 aa, Unknown
  Bacterial polypetide isolated from the Sargasso Sea
DGETLAAVREVLVQQVGKKIVEAIITYGGSATALTGETEGLLTVKPKGDRFGFVGEVSKVNPDIISHLHGQGEVPVISTIGQDADGQAYNINADTAAGALAGALVAEKAIYLSDVPGLLIDKDDPTSIISSIQYKELYEMFETGVISDGMIPKVESCIHALEKGAKAAHLLDGRVSHVLLLEIFTDSGIGTMIKKGDEDV

SEQ ID NO: 129807 - protein, 105 aa, Unknown
  Bacterial polypetide isolated from the Sargasso Sea
GAFFDINADVVAGKVAESLKAEKLILLTDIKGIIEKNKVISRISAYKGRQLINNNTIQGGMTPKVTAALEAKKNGVRSCHIIDGRLPHAVLLEVLTAEGVGTMIS

SEQ ID NO: 129808 - protein, 148 aa, Unknown
  Bacterial polypetide isolated from the Sargasso Sea
MSQNISLEEIKKFWPEDAPDIHNVQKYVSKYIKEKIVIKYGGNVLIDRNVFNNFILDISILNKLGLSVIIVHGGGPRIKRELDKKKIESKFIDGLRVTDKNIINVVEEVLIDFNDDIVQNLKKLGSNAVSFHTKNNNIIEVKPERKEL

SEQ ID NO: 129809 - protein, 135 aa, Unknown
  Bacterial polypetide isolated from the Sargasso Sea
MDLKKILPENGPPINEVNKYIEKYKNDLIVIKYGGNVLIDRNIFDNFITDLSILNKLGLSVIVVHGGGPRIKRELDKSNIQSKFIRGLRVTDEKIINIVESVLIDFNNDIVSSLDKKNTEAVSIHTKKDNIIEVV

SEQ ID NO: 129810 - protein, 90 aa, Unknown
  Bacterial polypetide isolated from the Sargasso Sea
MELEKILPKDGPPIEGVHKYVQKYKNELIVIKYGGNVFIDREIFNNFISDLKILNELGLSVIVVHGGGPRIKRELDKSNIKSNFIRGLRV

SEQ ID NO: 129811 - protein, 62 aa, Unknown
  Bacterial polypetide isolated from the Sargasso Sea
EARQLIEDGVVAGGMTPKTECCIRALAQGVSAAHIIDGRVPHALLLEVFTDAGIGTMVVGRG

SEQ ID NO: 129812 - protein, 94 aa, Unknown
  Bacterial polypetide isolated from the Sargasso Sea
MDIENILPKNGPPTNEVNKYIDKYKNDLIVIKYGGNVLIDRNIFDNFITDLSILNKLGLSVIVVHGGGARIKRELDKSNIKSKFIRGLRVTDEK

SEQ ID NO: 129813 - protein, 112 aa, Unknown
  Bacterial polypetide isolated from the Sargasso Sea
GKGQDNKKYNINADTAAGAIAKKINARRLLLMTDVEGVLDKDKKLISEIKSDTANKMMDEKIITGGMIPKINTCIDSVNNGVTGVAIVDGRKPHSILFEIFSDKGAGTLIRK

SEQ ID NO: 129814 - protein, 161 aa, Unknown
  Bacterial polypetide isolated from the Sargasso Sea
MKFDFLSESDQAYFIHKASTLVEALPFIREHSGDTIVIKYGGHAMGDPKLAKSFARDIGLMKEVGIFPVVIHGGGPQIAENLKTKNITSKFVDGLRVTDAETVKVVEDVLANEINSEIVKAINDSGGKAVGLSGNKNNLLSATKLKVEVKDSDSNKKKLLI

SEQ ID NO: 129815 - protein, 245 aa, Unknown
  Bacterial polypetide isolated from the Sargasso Sea
MSTIVESNLKSILPSNGPSTNEVKKYLDKYNNEYIVIKCGGSVLIDPILFDIFISDVAVLKKLGLSPIIVHGGGKRINNKLNKLNIKSNFIKGLRVTDNETINIVEDVLIEFNKEIVDSLKSKTCEARRITSKEYNIINVKPESKELGFVGVPTEIKTNVLKEIIKNNEVPVIAPLGLNDKNQIFNINADTAAGAIAKKLKARRLLIISDVEGVLDQDKKLITEINSAKAKKLIDQEIISGGMIP

SEQ ID NO: 129816 - protein, 232 aa, Unknown
  Bacterial polypetide isolated from the Sargasso Sea
ISTLNKLGFTTIIIHGGGKRISNKLNEIGSESKFIKGLRVTDDETIKVVEEVLIDFNKEIINALDQQNCKSQSINSKENNILTVVQENEELGFVGSPINVDQSIIDKIIADKKVPIIAPLGLDKNDQTYNVNADTAAGYIAKKINARRLIILSDVEGVLDKNENLIPEINSESIKNLIGNETISGGMIPKINNCLDVASNGVKGVVIIDGRKSHSLLFELLSDEGSGTLIRQ

SEQ ID NO: 129817 - protein, 51 aa, Unknown
  Bacterial polypetide isolated from the Sargasso Sea
MKFDFLSESDQAYFIHKASTLVEALPYIRQHSGEIIVIKYGGHAMGDPKLS

SEQ ID NO: 129818 - protein, 247 aa, Unknown
  Bacterial polypetide isolated from the Sargasso Sea
MSKITEEEIQKILPEKGPSFEEVKKYLDKYNKEYIVIKCGGSVLIDPKLFKIFIEDVAVLKKLGFNPIVIHGGGKRINSKLDELNIKSDFINGLRVTDKNTINIVENVLIEFNKEIVNALKDQSCETRRITSKEYNIITVKPESERLGFVGTPTHIKTHVLEEIIKVNEVPVVAPLGLDENNQTFNINADTAAGAIAKKLKARRLIIMSDIEGVMDNDNKLISEINTDKVNKLIKNEIIFGGMIPKI

SEQ ID NO: 129819 - protein, 233 aa, Unknown
  Bacterial polypetide isolated from the Sargasso Sea
MDIKEEELKTILPLDGPSTEEVKKYLEKYNDEYIVIKCGGSVLIDQNLFDIFIKDISTLNKLGFTPIIVHGGGKRISNKLNEIGLESKFIKGLRVTDKEIIKVVEEVLIDFNKEIINALDQQNCESQSINSKENNILTVVQENEELGFVGSPTNVDQSIIDKIIADKKVPIIAPLGLDENDQTYNVNADTAAGFIAKKINARRLIILSDVEGVLDNNKNLIPEINSISIKNLI

SEQ ID NO: 129820 - protein, 237 aa, Unknown
  Bacterial polypetide isolated from the Sargasso Sea
MRKILPKNGPNIDEVSKYIKKYRDEIITIKYGGNVFIDRQIFNNFINDLYILQKLGLSVVVVHGGGPRIKRELDKSNINSKFVRGLRVTDEKIIDIVEKVLIEFNEDIVSSLKHIGSNGISINTKENNVLKIIPESKELGFVGIPNNINIEIIIDKIKKNLIPIISPLGLGPDNKTYNINGDTAAGAIAKSLKSRRLLLMTNVEGVLNKDKILIEEISSSKIMEMIDDKTITEGMIP

SEQ ID NO: 129821 - protein, 160 aa, Unknown
  Bacterial polypetide isolated from the Sargasso Sea
MFNEENKNLILEALSYIKRFKGKIVVIKYGGSAMIEDKLKRSFAQDIVLLQSLGMLPVIVHGGGPEVSYAMEKLGQEVSFIDGLRVTSSENLKVAEMVLSGTINKEIITNLNTFGGKAVGVSGKDGLLIEAYKKEHDGGVDLGYVGEIKSVNPELLNVLL

SEQ ID NO: 129822 - protein, 261 aa, Unknown
  Bacterial polypetide isolated from the Sargasso Sea
KKYNNGYIVIKCGGSVLIDQNIFDIFIQDISTLNKLGFTPIIVHGGGKRINNKLNEIGLESKFIKGLRVTDKETIKVVEEVLIDFNKEIINALDKQNCKSQSINSKENNILTVIQENEELGFVGSPINVDQSIIDKIVADKKVPIIAPLGLDKNDQTYNVNADTAAGYISKKINARRLIILSDVEGVLDNNKNLIPEINSESIKNLIDNETITGGMIPKINNCLDVASNGVKGVVIINGRKNHSVLFELLSDEGSGTLIRQ

SEQ ID NO: 129823 - protein, 200 aa, Unknown
  Bacterial polypetide isolated from the Sargasso Sea
MSERNNLEEIKKIWPADAPDIKNVPKYTKKYKNELIVVKYGGNVLIDREIFNNFIEDISLLNKLGLSIIIVHGGGPRIERELKKENIKTRFINGLRVTDENVISIVEKVLIDFNNDIVNSLTKKGTKAVPVNTKINNIIEVVPDQKELGYVGIPSSIDKDKLKNIINQKQIPVVAPLGLNKTKITYNINGDTAASAIAKK

SEQ ID NO: 129824 - protein, 189 aa, Unknown
  Bacterial polypetide isolated from the Sargasso Sea
MNDSQRVSILSEALPYIQSFSGRKIVIKYGGSVMENDNLKNAFFRDIALLSTVGVCPIVIHGGGLEINNWLKKLEISPKFENGLRITDQKTMEIVEMVLMGRVNKQIVKGINKTGSLAVGISGLDCNLIQSRELGDGSHGLVGEVTKINPEILDPLISKGYIPIISSIGSTLEGISHNINADFVAGEIA

SEQ ID NO: 129825 - protein, 233 aa, Unknown
  Bacterial polypetide isolated from the Sargasso Sea
MSGEKNLKEIKKFWPEKAPNINIVQKYVSKYEKEKIVIKYGGNVLIDRNVFNNFISDINVLNKLGLSIIVVHGGGPRIKRELDKKKIVSKFINGLRVTDKSIIDTVEEVLIDFNIDIVNSLKKLGSNATSFHTKSENIIEVEPGKEELGFVGIPKKINVNLIESALYNNQIPIIAPLGLGKNNQTFNINGDTAASAIAKKLKSRRLILMTNVEGVYDDQKKLISEIKPFDLEN

SEQ ID NO: 129826 - protein, 282 aa, Unknown
  Bacterial polypetide isolated from the Sargasso Sea
MEIDKIVPKDGPTIDEFKKYIDKYKDQLIVIKYGGNVFIDRNIFNNFISDISILNKLGLSIIIVHGGGPRIKRELDKSNIQSKFIRGLRVTDEKIINIVENVLIDFNEDIVNSLAEKGANAVSLNTKKNNAIEVIPEAEELGFVGIPNKINVDIIKDIIKINAVPIISPLGLGKNNQTYNINGDTAAGAIAKSLKCRRLLLMTNVEGVLNKEKKLIEEISSSEILEMINNETITEGMIPKINTCLDAVMNGVTGVGIIDGRKKHSILFELFSDKGAGTLIRR

SEQ ID NO: 129827 - protein, 260 aa, Unknown
  Bacterial polypetide isolated from the Sargasso Sea
MSTNNSVLVLKVGGALLQCEMGMARLMDTAAAMIANGQQVLMVHGGGCLVDEQLAANGMETVKLEGLRVTPPEQIPIIAGALAGTSNKILQGAATKAGIVSVGMSLADGNTVSAKIKDERLGLVGEVSPKDATYLKFILSQGWMPICSSIAMMDDGQMLNVNADQAATVLAKLVGGKLVLLSDVSGVLDGKGQLIPSLNGKQIADLVKQGVIEKGMKVKVEAALEVAQWMGQAVQVASWRDASQLVALAKGEAVGTQIQP

SEQ ID NO: 129828 - protein, 251 aa, Unknown
  Bacterial polypetide isolated from the Sargasso Sea
KYGGNVLIDRNIFNNFIEDISILNKLGLSIIVVHGGGPRIERELKKGKIQSKFINGLRVTNKEVISIVENVLIDFNNDIVNSLNKKGSKAVSINTKINNVMNVIPDKPELGFVGIPQEINLGIIKNMINQNQIPIVAPLGLDKNNQTYNINGDTAASAIAKKLKSRRLLLMTNVEGVYDDRKTLISEIKPYDMENLVNLKIVQGGMLPKIKNCIDAVENGVRGVVILDGRKPRSILKEIFSDQGAGTLIRK

SEQ ID NO: 129829 - protein, 299 aa, Unknown
  Bacterial polypetide isolated from the Sargasso Sea
MDTNAIIKNVSNLLKTDQKDIENYLKKFSKKIVVIKFGGHAMGDRKLSHTFAEDVTILQKLGIRPVVIHGGGPQIGSMLKKLNIESSFVNGLRITNEETVEIVEMVLSGSINKDIVNKIHSAGGISVGLSGKDAKIILANKLKDKFRDPDSNIEKFLDIGFVGKPEKIDPTIINIVTNNSMIPVIAPVGFGVNGETFNINADTAAGAIASALKAERILLLTDVEGVLDSEKKLISSISTTQAESMINEKIITGGMIPKIETCLETVAAGVKAAVIIDGRSPHAILREIFTTSGSGTMIE

SEQ ID NO: 129830 - protein, 351 aa, Unknown
  Bacterial polypetide isolated from the Sargasso Sea
MIDDKSVIRKKWLEEFSKDIKELLDQKKNVIVVSSGAIALGCKKLNINKKSLKLDKSQAIASIGQIELMNLFKKTFNKNKINLSQMLLTLEDTERRGRAINAKRTFDNLFKLGYVPIVNENDSTATTEIKYGDNDRLASRVAQISSADCLILLSDVSGLYSKNPKIFKDAKLISEINDINSTIKKISTKGISQLGSGGMETKIEAAKICQNSGCTMAIADGLKFRPIKRINTYNNCTWFLPKVSKLHARKKWIISSVSPKGEIIIDDGAVAALEKGKSLLAAGIKKVNGNFNKGDHIKVLNKDLKEYARGLSSFSSDEIRKIQGLHSNKIKDTLGYVSKSEVIHKDDMVEV

SEQ ID NO: 129831 - protein, 282 aa, Unknown
  Bacterial polypetide isolated from the Sargasso Sea
MDLKNILPEDGPPLSEVNKYIEKYKNDLIVIKYGGNVLIDRSVFNNFITDLYVLNKLGLSIIVVHGGGPRIKRELEKSNIQSKFIRGLRVTDKNIINIVESVLIDFNDDIVENLNKKGSKGFSIHTKNNNIIEVIPEAEELGFVGIPISVNNEIIFNILKQNKVPIVSPLGLDKNSQTYNINGDTAAMAIAKSLKARRLLLMTNVDGVLNKEKKLIEEISSTEILEMIKNETITEGMIPKINACLDAVNNGVTGVGIINGTKKHSCLWEIFSDKGAGTLIRK

SEQ ID NO: 129832 - protein, 282 aa, Unknown
  Bacterial polypetide isolated from the Sargasso Sea
MNLEKILPKDGPPINEVSKYIEKYKNDLIVIKYGGNVFIDRKIFDNFITDINILNKLGISFTVVHGGGPRIKRELDKSNIQSKFIRGLRVTDEKIINIVESVLIDFNNDIVDSLKKFGTDAVSIHTQKNNIIKVTPEAKELGFVGIPNQIDNNLIEKILNKKQVPIISPLGLGNDNRPYNINGDTAAGAIAKSLKSRRLLLMTNVEGVLDKNKKLINEISSSEILKMIEDNTITEGMIPKINTCLDAVNNGVTAVGIIDGRKQHSILFEIFSDKGSGTLIRR

SEQ ID NO: 129833 - protein, 282 aa, Unknown
  Bacterial polypetide isolated from the Sargasso Sea
MDLKKILPENGPPINEVNKYIEKYKNDLIVIKYGGNVLIDRNIFDNFITDLSILNKLGLSVIVVHGGGPRIKRELDKSNIQSKFIRGLRVTDEKIINIVESVLIDFNNDIVSSLDKKNTEAVSIHTKKDNIIEVVPEAKELGFVGLPNKINNDILLNIIQQNKIPIISPLGLDKNNQTHNINGDTAAMAVAKSVKSRRLLLMTNVDGVLNKEKKLIDEISSSEILEMVKDETITEGMIPKINACLDAVNNGVTAAGIINGTKQHSCLWEIFSDKGSGTLIRK

SEQ ID NO: 129834 - protein, 289 aa, Unknown
  Bacterial polypetide isolated from the Sargasso Sea
MSEENNLEEIKKFWPKDAPNVKNVPKYVKKYKKDLIVIKYGGNVLIDRNIFNNFIQDISILNKLGLSIIIVHGGGPRIERELKKSNIQTKFINGLRVTDKNVINIVEKVLIDFNNDIVVSLNKKGSKAVSVNTKINNVINVIPDKPELGFVGVPQEINVEIIKNIISQKQIPIVAPLGLDKDKQTYNINGDTAASAIAKKLKSRRLLLMTNVEGVYDDRKTLISEIKPYDMENLVNLKIVQGGMLPKIKNCIEAVENGVRGVVILDGRKPRAILKEIFSDQGAGTLIRK

SEQ ID NO: 129835 - protein, 195 aa, Unknown
  Bacterial polypetide isolated from the Sargasso Sea
MNRDWIATARTLSEALPYLQRYTEAIVVIKLGGHAMTSDQGMETFARDVALMRQVGINPIIVHGGGPMINAMLKKLKIESKFINGKRVTDEATMEVVEMVLSGSVNKKIVQAINDQGGRAVGLSGKDAKLIECEQADKDLGMVGSPSKINPSVINTLTENDTIPVIAPLGYGPNGETFNINADTAAGAIAAALKS

SEQ ID NO: 129836 - protein, 282 aa, Unknown
  Bacterial polypetide isolated from the Sargasso Sea
MEIEKIVPKDGPSIEEVNKYIDKYKNELIVIKYGGNVFIDRNIFNNFISDISILNKLGLSIIIVHGGGPRIKRELEKSNIQSKFIRGLRVTDEKIINIVEDVLIDFNEDIVNSLIEKGSNSVSINTKKNNVIEVIPEAEELGFVGKPSKININIIKDIIKESSVPIISPLGLGKNNQTFNINGDTAAGAIAKSLKCRRLLLMTNVEGVLDKEKKLIEEITSSEILEMINNEIITEGMIPKINTCLDAVMNGVTGVGIIDGRKKHSILFELFSDKGAGTLIRK

SEQ ID NO: 129837 - protein, 282 aa, Unknown
  Bacterial polypetide isolated from the Sargasso Sea
MEIEKIVPKDGPSIEEVKKYIDKYKNELIVIKYGGNVFIDRNIFNNFISDISILNKLGLSIIIVHGGGPRIKRELEKSNIQSKFIRGLRVTDEKIINIVEDVLIDFNEDIVNSLIEKGSNAVSINTKKNNVIEVIPEAEELGFVGKPNKINTNIIKDIIKVSSIPIISPLGKGKNNQTYNINGDTAAGAIAKSLKCRRLLLMTNVEGVLDKEKKLIEEITSSEILEMINNEVITEGMIPKINTCLDAIMNGVTGVGIIDGRKKHSILFELFSDKGAGTLIRK

SEQ ID NO: 129838 - protein, 164 aa, Unknown
  Bacterial polypetide isolated from the Sargasso Sea
GRTKTFNDVRESILICKKIKTQMDLGFVGDITKVDGNLIRKNIFNGKIPVIAPIGRDRFGMHYNINADHVACKVAEKLKAEKIIMMTDVKGVLTSTGKKISEMNINKAKKISKTIKGGMLPKLSSVIKSLESGVKSAHIVDGRVPHAVLVEILTDKGVGTWITK

SEQ ID NO: 129839 - protein, 147 aa, Unknown
  Bacterial polypetide isolated from the Sargasso Sea
MNDNQTNQTASVLIEALPYIQKFHGKTIVIKYGGNAMIDEVLKQSFAHDIVLMKLVGINPIIIHGGGPQINELLDKLEIQSKFIDGIRVTDEKTMEVVQMVLGGLVNKDVVTRLCQAGGKAVGLTGKDANLIQAKKLLIPSSDSAEN

SEQ ID NO: 129840 - protein, 132 aa, Unknown
  Bacterial polypetide isolated from the Sargasso Sea
MDLEKILPKDGPPIDEVSKYIEKYKNDLIVIKYGGNVFIDRKIFDNFITDINILNKLGISFTVVHGGGPRIKRELDKSNIQSKFIRGLRVTDEKIISIVESVLIDFNNDIVDSLKKFGTDAVSIHTKKNNII

SEQ ID NO: 129841 - protein, 222 aa, Unknown
  Bacterial polypetide isolated from the Sargasso Sea
MSKNISLDEIKEFWPDKAPNINTVQKYIKKYENEKIVIKYGGNVLIDRNVFNNFISDINVLNKLGLSIIVVHGGGPRIKRELDKKKIVSKFINGLRVTDKNIIDTVEEVLIDFNKDIASSLKKLGSQAAMFHSKADNIIEVEPEREELGFVGIPNKINDSLIQSALNENKIPIIAPLGLGKNEQTYNINGDTAASAIAKKLKSRKIILMTNVEGVYDDKKKL

SEQ ID NO: 129842 - protein, 282 aa, Unknown
  Bacterial polypetide isolated from the Sargasso Sea
MEIEKIVPKDGPTIDEFKKYINKYKDQLIVIKYGGNVFIDRNIFNNFISDISILNKLGLSIIIVHGGGPRIKRELDKSNIKSKFIRGLRVTDEKIINIVENVLIDFNEDIVNSLVEKGANAVSLNTKKNNAIEVIPEAEELGFVGIPNKINVGIINDIIKTNAVPIISPLGLGKNNQTYNINGDTAAGAIAKSLKCRRLLLMTNVEGVLNKEKKLIEEISSSEILEMINNETITEGMIPKINTCLDAVMNGVTGVGIIDGRKKHSILFELFSDKGAGTLIRK

SEQ ID NO: 129843 - protein, 152 aa, Unknown
  Bacterial polypetide isolated from the Sargasso Sea
MTITRKQAENIASVLTEGLPYIRKFKDKVIVIKYGGAAMIDESLKESFTRDIALMKLVGMKPVIVHGGGPQIGNELAKAGVESEFIGGLRVTTKSAMTVVKKVLGTAINNEIVKLLKKFGGNAISFNHTKYQIIRASKEISRGSIDLGYVGK

SEQ ID NO: 129844 - protein, 191 aa, Unknown
  Bacterial polypetide isolated from the Sargasso Sea
DQITIRVVEEALLELNYEIINNLKNFQISAESVTPHNKNIIKIKPEKKELGFVGSPKEINLKDILKIIKEKKIPIIVPMGTSDDKKIYNINADIAAGAVAKEFNSRRLLLMTDVEGVLDKNKKLIPEINSSIAEKMLKDGDISGGMIPKINTCLDAVNNGVTGVVIVDGRKPHSILFELFSDKGAGTLIRK

SEQ ID NO: 129845 - protein, 282 aa, Unknown
  Bacterial polypetide isolated from the Sargasso Sea
MELDKIIPADGPNINEVEKYINKYQSEVIVIKCGGSVLLDKKLFNQFIEDISVINKIGLSAIVVHGGGKNIKKKLDENNIETRFIKGLRVSDEKTIRYIEEALLELNLEILHELKSKNTNVCSISPKENNVINIIPESEELGYVGKPKKINKEKILNFINNKQIPIVVPLGLGDDGRIYNINADVAAGSIAKEIDARRLLLMTDVEGVLDQNQKLISEINLNKANEMLKNNIISGGMIPKINTCLDAISNGVKGVVIVDGRKPHSILFELFSDKGAGTLIRK

SEQ ID NO: 129846 - protein, 93 aa, Unknown
  Bacterial polypetide isolated from the Sargasso Sea
IHPNIVHGGGPQIGERLKLKNIKSEFVEGLRVTDEETIKVVEEVLSKDINKEIVDAINDSGAKAIGLSGHQNNLINANKLKVEVKDTDSNIEN

SEQ ID NO: 129847 - protein, 277 aa, Unknown
  Bacterial polypetide isolated from the Sargasso Sea
FWPKDAPDVTNVPKYIKKYKKNLIVIKYGGNVLIDRNIFNNFIQDVSILNKLGLSIVIVHGGGPRIERELKKSNIQSTFINGLRVTNKDVINIVEKVLIDFNNDIVDSLNKKGSKAVSINTKKNNIINVTPDKPELGFVGVPREINIEIIKNIISQNQIPIVAPLGLDKDKQAYNINGDTAASAIAKKLKSRRLLLMTNVEGVYDDRKTLISEIKPFDMENLVKLKIIQGGMIPKIKNCIDAVENGVRGVVILDGRKPRSILKEIFSDQGAGTLIRK

SEQ ID NO: 129848 - protein, 260 aa, Unknown
  Bacterial polypetide isolated from the Sargasso Sea
MSTNNSVLVLKVGGALLQCEMGMARLMDTAAAMIANGQQVLMVHGGGCLVDEQLAANGMETVKLEGLRVTPPEQMPIIAGALAGTSNKILQGAATKAGIVSVGMSLADGNTVSAKIKDERLGLVGEVSPKDATYLKFILSQGWMPICSSIAMMDDGQMLNVNADQAATVLAKLVGGKLVLLSDVSGVLDGKGQLIPSLNGKQIADLVKQGVIEKGMKVKVEAALEVAQWMGQAVQVASWRDASQLVALAKGEAVGTQIQP

SEQ ID NO: 129849 - protein, 282 aa, Unknown
  Bacterial polypetide isolated from the Sargasso Sea
MDLEKILPKDGPPIDEVSKYIEKYKNDLIVIKYGGNVFIDRKIFDNFITDINILNKLGISFTVVHGGGPRIKRELDKSNIQSKFIRGLRVTDEKIINIVESVLIDFNNDIVDSLKKFGTDAVSIHTKKNNIIKVTPEAKELGFVGIPNKIDNNLIEKILNKKQVPIISPLGLGNDNHPYNINGDTAAGAIAKSLRSRRLLLMTNVEGVLDKDKKLIDEISSSEIFKMIEDNIITEGMIPKINTCLDAVNNGVTAVGIIDGRKQHSILFEIFSDKGSGTLIRK

SEQ ID NO: 129850 - protein, 152 aa, Unknown
  Bacterial polypetide isolated from the Sargasso Sea
IIYVEPENKELGYVGKPKRVDAKLLKDIIKDDFVPVVIPMGIDEKGTSYNINADTAAGAIARSIKSRRLMLLTDIDGVLDDNNKLISEISTMQAKELIDKETIHGGMIPKIKTCIDAINNGVRAVAILDGRKPHSILFELFSDKGSGTLIRK

SEQ ID NO: 129851 - protein, 82 aa, Unknown
  Bacterial polypetide isolated from the Sargasso Sea
MKDNLKKAQTLIEALPYIQKFRGKTVVLKFGGSIGSKEFANFARDLVLFNYVGINPVVVHGGGKEISKALTSSGIKPILLMD

SEQ ID NO: 129852 - protein, 276 aa, Unknown
  Bacterial polypetide isolated from the Sargasso Sea
MPKDGPPINEVTKYIEKYKNDLIVIKYGGNVLIDRNVFNNFITDLGVLNKLGLATVVIHGGGPRIKRELEKTNIQSKFIRGLRVTDKNIIDIVETVLIDFNDDIVNSLKDKGIEAVSIHTKNKNVIKTIPEAEELGFVGIPNEINNEQILNIINQNKIPIISPLGLGKENQTYNINGDTAAMAIAKSLKSRRLLLMTNVDGVLDKNKKLIEEISSSGIMEMIKDETITGGMIPKINACLDAVNNGVTAVGIINGTKPHSCLWEIFSDKGSGTLIRQ

SEQ ID NO: 129853 - protein, 287 aa, Unknown
  Bacterial polypetide isolated from the Sargasso Sea
MDIKEEKLKTILPVDGPSTEEVKKYLEKYNNEYIVIKCGGSVLIDQNLFDIFIQDISTLDKLGITPIIVHGGGRRISNKLDDIGLESKFIKGLRVTDKETIKIVEEVLIDFNKEIINALDQQNCKSQSINSKENNILTVIQENEELGFVGSPINVDQSIMDKIIADKKVPIIAPLGLDKNDQTYNVNADTAAGYIAKKINARRLIILSDVEGVLDNNKNLIPEINSESIKNLIDNETITGGMIPKINNCLDVASNGVKGVVIIDGRKNHSLLFELLSDEGSGTLIRQ

SEQ ID NO: 129854 - protein, 194 aa, Unknown
  Bacterial polypetide isolated from the Sargasso Sea
MELKKILPKNGPPIEEVSKYIEKYKNELIVIKYGGNVFIDRNIFNNFIEDISLLNKLGLSIIVVHGGGPRIKRELDKSNIQSKFVRGLRVTDEKIINIVESVLIDFNVDIVSSLKKMGSEAISINTKKNNVIEVMPEAEELGFVGIPDKIDIDVIKNIVEKNIVPIISPLGLGKKNQVYNINGDTAAGAIAKSL

SEQ ID NO: 129855 - protein, 147 aa, Unknown
  Bacterial polypetide isolated from the Sargasso Sea
MSIKNNVSESSRLLQKYWPSGKKYFNSTDQFIKRYKNRIIVIKYGGYALTKPHLVKSFAKNIALLNQLGMKVIIVHGGGPQIENQLRKKKIKNEEYQGLRVTTKQVLSVVKTVLANDLNKLISNEITKYGGKPKRFDGIRQKIINSK

SEQ ID NO: 129856 - protein, 145 aa, Unknown
  Bacterial polypetide isolated from the Sargasso Sea
SKEFGYVGNQKKNDKEKILNFIKNKQIPIVVPLGLGDDGRIYNINADIAAGSIAKEIDARRLLLMTDVEGVLDENQKLISEINLNKANEMLKNNIISGGMIPKINTCLDAISNGVRGVVIVDGRKPHSVLFELFSDKGAGTLIRK

SEQ ID NO: 129857 - protein, 287 aa, Unknown
  Bacterial polypetide isolated from the Sargasso Sea
MSISKEELRKVLPKNGPNIDEVSKYIEKYKDEIITIKYGGNVFIDRQIFNNFISDLSILQKLGLSVVVVHGGGPRIKRELDKSHIDSKFVRGLRVTDEKIIDIVEKVLIEFNEDIVSSLKNIGSKGISLNTKENNVLKIIPESKELGFVGIPHKINIEIIMDKIKNDIIPIISPLGLGSDNKTYNINGDTAAGAIAKSLKSRRLLLMTNVEGVLNKDKILIEEISSSKIMEMIDDKTITEGMIPKINTCLDAVNNGVTAVAIIDGRKKHSILFEIFSDKGSGTLIRK

SEQ ID NO: 129858 - protein, 276 aa, Unknown
  Bacterial polypetide isolated from the Sargasso Sea
MPEDGPPLSEVNKYIEKYKNDLIVIKYGGNVLIDRNVFNNFITDLYVLNKLGLSTIVVHGGGPRIKRELEKSNIQSKFIRGLRVTDKNIINIVESVLIDFNDDIVENLNKKGSKGVSIHTKNSNIIEVIPEAEELGFVGIPTSVNNEIIFNILEQNKVPIVSPLGLDKNSQTYNINGDTAAMAIAKSLKARRLLLMTNVDGVLNKEKKLIEEISSTEILEMIKNETITEGMIPKINACLDAVNNGVTGVGIINGTKKHSCLWEIFSDKGAGTLIRK

SEQ ID NO: 129859 - protein, 65 aa, Unknown
  Bacterial polypetide isolated from the Sargasso Sea
MKFDFLSESDQAYFIHKASTLVEALPYIRQHSGDIIVIKYGGHAMGDKNLSSSFAKDIGLLKEIG

SEQ ID NO: 129860 - protein, 245 aa, Unknown
  Bacterial polypetide isolated from the Sargasso Sea
IENDEALTALFATLKTFLNEQHRPLVLVHGGGCLVDDLLKGLGLTSTKKNGLRVTPFEQIPFIAGALAGTANKMMMAKAIATDIPAVGLCLADGGLCQVTQLDPALGAVGDCQPGNPALVAGILGQGFLPVVSSIGITAEGQLMNVNADQAATAIAEALGADLVMLSDVSGILDGKGKLVPQLDKVTALDLMEKGVISDGMAVKVKAALHAAETLGKPVCVASWRYPDQLLKLLAGGAVGTQVTL

SEQ ID NO: 129861 - protein, 288 aa, Unknown
  Bacterial polypetide isolated from the Sargasso Sea
MKKIGEVNLETILPSDGPSFEEVKKYLDKYNKEYIVIKCGGSVLVDPKLFKIFIEDVAVLKKLGFNPIVIHGGGKRINNKLGELNIKSDFINGLRVTDKNTINIVEDVLIEFNKEIVNALKDQSCQTRRITSKEYNIITVKPESDKLGFVGSPTHIKINVIKENIKANEVPVVAPLGLDENNQTFNINADTAAGAIAKKLKARRLIIMSDIEGVLDNNNNLISEINTDKVNELIKNETIFGGMIPKIKNCLDVTNNGVKGVVIIDGRKSHSILFELLSDKGAGTLIRK

SEQ ID NO: 129862 - protein, 82 aa, Unknown
  Bacterial polypetide isolated from the Sargasso Sea
MQLESFLPQGGPRISEVKKYVEKYKNDLIVIKYGGNVLIDRNIFNNFISDICVLNKLGLSIVVVHGGGPRIKRELDKSNIKS

SEQ ID NO: 129863 - protein, 120 aa, Unknown
  Bacterial polypetide isolated from the Sargasso Sea
MSKEIVYREKDVEKLSTAKVLIEALPYIQQLSNKVIVIKFGGNAMTDDTLRNNFARDVVLLKQVGLHPVIVHGGGPQITSHLKKLGIESKFANGLRITDPESIHTIEMVLGGLVNKDIVN

SEQ ID NO: 129864 - protein, 202 aa, Unknown
  Bacterial polypetide isolated from the Sargasso Sea
IKVVEEVLSKDINSEIVNSISSTGGKPIGMAGNIENLIEATKLNIEVKDSDSNIEKIVDIGFVGKPINLRGEIIINHINNGEIPVIAPLGIDKENFTYNINADTAAGFIAGKLKASKLLLLTDVSGILDNNKKLISSLSLNEAKKIISEDFISGGMKPKIKTCIEAMEQGVKKSTILDGRIPHSVILELFTEHGIGTQLVSN

SEQ ID NO: 129865 - protein, 242 aa, Unknown
  Bacterial polypetide isolated from the Sargasso Sea
KNLFRQFIEDVSIIYKLGLSVIVVHGGGKNIKKKLDELNIESKFIDGLRITDDITIKVVEEALLELNSEIINNLKNLQTNAESVAPHNKDIIKIKPEKKELGFVGSPKEIDSKAILKIIKEKKIPIVVPMGTSDDKKTYNINADIAAGSVAKELNSRRLLLMTDVEGVLDKNKKIIPEINSLIAEKMLKDGDISGGMIPKINTCLDAVNNGVIGVVIVDGRKPHSILFELFSDKGAGTLIRK

SEQ ID NO: 129866 - protein, 131 aa, Unknown
  Bacterial polypetide isolated from the Sargasso Sea
MDLKKILPKNGPPINEVSKYIEKYKNDLIVIKYGGNVFIDRNIFDNFITDINILSKLGISFVVVHGGGPRIKRELDKSNIQSKFIRGLRVTDKKIINIVESVLIDFNNDIVDSLKRFGTDAISIHTKKNNI

SEQ ID NO: 129867 - protein, 284 aa, Unknown
  Bacterial polypetide isolated from the Sargasso Sea
MSPLLLPTNPEVVSSSVKKDLLIEALSYIKRFRDRIIVIKYGGAAMIENNLKQSFAEDIVLLQTLGMKPVIVHGGGPEVSKAMEQLGQQVHFVEGLRVTSAENLKVTEMVLSGTINKEIIAHLNTCGGKAVGLSGKDGHLIEASKKDGGEGVDLGYVGEIDSTNPELLRVLLKEGYIPVISPIGLGKDGTSYNINADTAASHIAVSLQAMKLIFMTDVKGIFVNGELCAELNHDQTLNMIDSGVIEGGMKPKIRAALNAVTHGVESAQIILGTDPHSVITVIVY

SEQ ID NO: 129868 - protein, 250 aa, Unknown
  Bacterial polypetide isolated from the Sargasso Sea
AMIDESLRESFTRDIALMKLVGMKPVIVHGGGPQIGNELAKAGIESEFIGGLRITTKSSMTVVKKVLGTTINNEIVKLIKKFGGNAISFNHAKYQIIKASKEVSQGNIDLGYVGKVDKIKTRDLKKIIEKGFIPVIAPIGISRKHNYLNINADVVAGEVAKALDAEKLILLTDVQGIGDSKNKLISKISLQKGQRILKQEYIKGGMTPKLKAALNAKKKGVKTCHIIDGRVPHAVLLEVLTEEGVGTMIS

SEQ ID NO: 129869 - protein, 191 aa, Unknown
  Bacterial polypetide isolated from the Sargasso Sea
MKFDFLSESDQAYFIHKASTLVEALPFIRQHSGDTIVIKYGGHAMGNSKLSKSFAKDIGLMKEVGIFPVIVHGGGPQIEEKLKSKDISSRFVEGLRVTDNETIKVVEDVLTNEINTEIVKAISESGGKAVGLAGNQNNLLSATKLKLEIKKSVSNIEKIVDIGFVGQPTNVNTDLIKNHIMKGEIPSYCSP

SEQ ID NO: 129870 - protein, 277 aa, Unknown
  Bacterial polypetide isolated from the Sargasso Sea
MDNIKKFWPEKAPDINIVQKYVSKYEKEKIVIKYGGNVLIDRKVFNNFISDIDVLNKLGLSIIVVHGGGPRIKRELDKKKIVSKFINGLRVTDKDIIDTVEEVLIDFNNDIVSSLKKLGTEAVSFHTKKDNIIEVEPERKELGFVGTPKKIKSNLIEKALNKNKIPIIAPLGLGKNNQTFNINGDTAASAIAQKLKARRLILMTNVEGVYDDKKNLISEIKPFDLDNLIKWKIVEGGMIPKIENCVDAVENGVRGVVILDGRKPHSILHEIFSDTGS

SEQ ID NO: 129871 - protein, 127 aa, Unknown
  Bacterial polypetide isolated from the Sargasso Sea
LQKALRSDYIPVIAPIGLNRKNDFLNINADSVAGKVAQALRAEKLILLTDVKGIGDSKNDLISKISLRKGQKLLKEDFIKGGMTPKLSAALEAKKNGVKSSHIIDGRVPHAVLLEVLTEEGVGTMIS

SEQ ID NO: 129872 - protein, 255 aa, Unknown
  Bacterial polypetide isolated from the Sargasso Sea
MSKNISLDEIKNFWPEKAPDINIVQKYVKKYEKEKIVIKYGGNVLIDRNVFNNFISDINVLNRLGLSIIVVHGGGPRIKRELDKRKIESKFINGLRVTDKNIIDTVEEVLIDFNKDIVSSLKKLGSEAASFHTKNENIIEVEPEREELGFVGIPNNINDNLIQNALNQNKIPIIAPLGLGKDNQTYNINGDTAASAIAKKLKSRRLILMTNVEGVYDDQKKLISEIKPFDLENLIKWKVVQGGMIPKIENCVDAV

SEQ ID NO: 129873 - protein, 100 aa, Unknown
  Bacterial polypetide isolated from the Sargasso Sea
GELAAALEAEKLILLTDTPGILRDRDNPDSLIRKLRLSEARQLIDDGAVAGGMTPKTECCIRALAQGVSAAHIVDGRVPHALLLEVFTDAGIGTMVVGRG

SEQ ID NO: 129874 - protein, 266 aa, Unknown
  Bacterial polypetide isolated from the Sargasso Sea
IKYGGHAMGDPKLAKSFARDIGLMKEVGIYPIVVHGGGPQIADRLKTKNITSQFIEGLRVTDIETVKVVEDVLGNEINGEIVRAISDSGGKAIGLSGNKNNLLTATKLKVEVKDSDSNIEKLVDIGFVGQPIDVNINLIREHINLGEIPVIAPLGIDEEGNSYNINADTAAGFIAGKLKASKLLLLTDVAGVLNKDKKLIPSLKIEDAISIMEEDFVVGGMKPKIKTCINAMKSGVTKSTILDGRIPHSLVLELFTEHGIGTQIYS

SEQ ID NO: 129875 - protein, 279 aa, Unknown
  Bacterial polypetide isolated from the Sargasso Sea
MNDSQRVSILSEALPYIQSFSGRKIVIKYGGSVMENDNLKNAFFRDIALLSTVGVCPIVIHGGGPEINNWLKKLEISPKFENGLRITDQKTMEIVEMVLMGRVNKQIVKGINKTGSLAVGISGLDGNLIQSRELGDGSHGLVGEVTKINPEILDPLISKGYIPIISSIGSTLEGISHNINADFVAGEIAAAINAEKLILLTDTKGILKEKDNKNSLVEKTNLKEARYFIDKKIVTEGMIPKTECCIRALAQGVKAAHIIDGRIEHSLLLEIFTNSGIGT

SEQ ID NO: 129876 - protein, 270 aa, Unknown
  Bacterial polypetide isolated from the Sargasso Sea
MIEALPYIQQLSGTTIVIKFGGNAMTDDALKNNFARDVVLLKQVGCHPVIIHGGGPQITKHLEKQGIESNFANGMRITDEKSIDIIEMVLGGLINKDIVNTITSLGGKAVGLSGKDGGLIRAKKIEGEGEFKNIDFKNTGTVKSIDPGVVKLLDGSTFIPVIAPIGIGDDGKTYNINADIVAGKIAHILQASKYLILTNTQGILDSNGNLIQSINTDGVKKLVEKGILSQGMVPKVNSALEAVTSGVEHVQIIDGTIDHSVILELFTDEG

SEQ ID NO: 129877 - protein, 165 aa, Unknown
  Bacterial polypetide isolated from the Sargasso Sea
MGISGLDGNLIQSRELGDGSHGLVGEVTKINPEILDPLISKGYIPIISSIGSTMEGISHNINADFVAGEIAAAINAEKLILLTDTQGVLKEKDNKNSLIEKTNLKEVRDFIDKKIVTEGMIPKTECCIRALAQGVKAAHIIDGRIKHSLLLEIFTNSGIGTMIVA

SEQ ID NO: 129878 - protein, 85 aa, Unknown
  Bacterial polypetide isolated from the Sargasso Sea
MKFDFLSESDQAYFIHKASTLVEALPFIREHSGDTIVIKYGGHAMGDPKLAKSFARDIGLMKEVGIYPIVVHGGGPQIADKLKTK

SEQ ID NO: 129879 - protein, 249 aa, Unknown
  Bacterial polypetide isolated from the Sargasso Sea
QAYFIHKASTLVEALPYIREHSGDTIVIKYGGHAMGDKKLSESFSRDIGLLKEVGVSPIIIHGGGPQIGERLKSKNISTQFVEGLRVTDKETIKVVEEVLSKDINSEIVESISASGGKAIGVSGNDNLVTATKLNVEIKDSDSNIEKIVDIGFVGQPKKLNKDMLTSFIENGQIPVISPLGKDENNFTYNINADTVAGFIAGELQASKLLLLTDVPGILDKDEKLISSITLEEAKGIANKEYISGGMKP

SEQ ID NO: 129880 - protein, 258 aa, Unknown
  Bacterial polypetide isolated from the Sargasso Sea
MDLEKILPENGPPIKEVSKYVEKYKNDLIVIKYGGNVFIDRNIFKNFISDISLLNKLGLSIVVVHGGGPRIKRELEKSNIKSNFIRGLRVTDKNIINIVENVLVDFNKDIVDSLKKEGTNAISINTKENNIIEVIPESKELGFVGIPNHININIVENNVRKNIIPIISPLGLGKNNQTYNINGDTAAGAIAKSLKSRRLLLMTNVEGVLDKEKKLIEEISSSKILEMINNGTITEGMIPKINTCLDAVNNGVTAVGII

SEQ ID NO: 129881 - protein, 154 aa, Unknown
  Bacterial polypetide isolated from the Sargasso Sea
MSSASRDPQVVVEVLSEALPYIQQFSGKTVVVKYGGNAMTEDTLIDSFARNIVLMKEVGINPVVVHGGGPQIGSLLEKLNIESRFVNGMRVTDSQTMDVVEMVLGGLVNKSIVNLINQSGGKAIGLTGKDGAQIRARQLKVEHQSPEMTAPEII

SEQ ID NO: 129882 - protein, 213 aa, Unknown
  Bacterial polypetide isolated from the Sargasso Sea
MNDSQRVSILSEALPYIQTFSGRKIVIKYGGSVMENDNLKNAFFRDIALLSTVGVCPIVIHGGGPEINNWLKKLEISPKFENGLRITDQKTMEIVEMVLMGRVNKQIVKGINKTGSLAVGISGLDGNLIQSRELGDGSHGLVGEVTKINPEILDPLISKGYIPIISSIGSTLEGISHNINADFVAGEIAAAINAEKLILLTDTQGILKEKDNK

SEQ ID NO: 129883 - protein, 269 aa, Unknown
  Bacterial polypetide isolated from the Sargasso Sea
PGKTFVIKFGGNAMTDAELQESFARDVVLMKLVGMNPIVVHGGGPQIGQLLERLNIETEFVDGMRVTDEHTMDVVEMVLGASVNKEIVDSIHRNGGRAIGITGKDGQLIQARKLAGVWQAEGVQDIGQVGEVASIDTDILTMLIGSDYIPVIAPVAGSTDGKTYNINADLVAGKLAEVLQAEKLMLLTNVAGLLDAEGNILTGLNTHQVEELIEQGVVHGGMLPKIHCALEAVQAGVSSAHIIDGRVAHAALLEIFSDEGIGTQISSRR

SEQ ID NO: 129884 - protein, 156 aa, Unknown
  Bacterial polypetide isolated from the Sargasso Sea
MQIDLLVKTGMLVEALPFMRRYSDKTILIKFGGHAMGKVEYINAFASDIALLDQVGARPVVVHGGGPQIGEMLKKLRIESKFIDGLRVTDEATMSVVEMVLAGGINKALVAAIASAGGRAVGVSGKDGGLITARKLMAVAKSSDSAIQKSVDLGFV

SEQ ID NO: 129885 - protein, 248 aa, Unknown
  Bacterial polypetide isolated from the Sargasso Sea
MSKNISLNEIKEFWPEKAPDVNIVQKYIKKYQNEKIVIKYGGNVLIDRNVFNNFISDVDVLNRLGLSIVVVHGGGPRIKRELDKKKIVSKFINGLRVTNKNIIETVEEVLIDFNKDIVGSLKKLGSEAAPFHTKTNNVIEVEPEREELGFVGIPNKINDNLIQDALDANKIPIIAPLGLGKNDQTYNINGDTAASAIAKKLKSRRLILMTNVEGVYDDQKKLISEIKPLDLENLIKWKVVQGGMIPKI

SEQ ID NO: 129886 - protein, 158 aa, Unknown
  Bacterial polypetide isolated from the Sargasso Sea
KYQIIRASKEVSQGSIDLGYVGKVNNIKTRDLKKTIEKGSIPVIAPIGISRQHKYLNINADVVAGEVAIALDAEKLILLTDVKGIGDSKNQLISKISLQKGQRILKEEYIKGGMTPKLRAALNAKKRGVKTCHIIDGRVPHAVLLEVLTEEGVGTMIS

SEQ ID NO: 129887 - protein, 288 aa, Unknown
  Bacterial polypetide isolated from the Sargasso Sea
MSKEKSLDEIKKFWPKELPDIKNIPKYIKKYKKDLIVIKYGGNVLIDRNIFNNFIEDINILNKLGLSIIVVHGGGPRIERELKKGNIQTKFINGLRVTDEKVIKIVEKVLIDFNNDIVSSLKKKGSKAVSINSKLNNIIDVIPDKQELGFVGVPDKINSDIIKDIVNQNQIPIVAPLGLDKNNQTYNINGDTAASAIAKKLKSRRLLLMTNVEGVYDDRKNLISEIKPYDMENLVNLKIVQGGMLPKIKNCIDAVENGVRGVVILDGRKPHSILREIFSDKGAGTLIR

SEQ ID NO: 129888 - protein, 201 aa, Unknown
  Bacterial polypetide isolated from the Sargasso Sea
VTDADTMDVVEMVLVGRVNKQIVNGLNQLGTRAVGLSGSDGSLVEARPWGNGSHGLVGDVARVNPDVLEPLLEKGYVPVISSVAATPDDGRAHNINADTVAGELAAALEAEKLILLTDTPGILEDRDDPDSLIRKLRLSKARQLIEDGVVAGGMTPKTECCIRALAQGVSAAHIIDGRVPHALLLEVFTDAGIGTMVVGRG

SEQ ID NO: 129889 - protein, 260 aa, Unknown
  Bacterial polypetide isolated from the Sargasso Sea
RIIVIKYGGAAMIEKNLKQSFAEDIVLLQSLGMNPVIVHGGGPEVSKAMEQLGQQVHFVEGLRVTSAENLKVTEMVLSGTINKEIIAHLNTCGGKAVGLSGKDGHLIEASKKDGGGGVDLGYVGEIDSTNPELLRVLLKEGYIPVISPIGLGKDGTSYNINADTAASHIAVSLQAMKLIFMTDVEGILENGKLCAELKHDQALSMIDSGVIEGGMKPKVQAALNAVTQGVESAQIILGTDPHSVITELFTDQGIGTKIVA

SEQ ID NO: 129890 - protein, 106 aa, Unknown
  Bacterial polypetide isolated from the Sargasso Sea
MSNLINKIAKQISVSKKEVNSNLRKYINEIIVIKYGGSAMLDKKLSLNFFQNIKALVDLDIKPIIVHGGGPQINEMLDKVNIKHKFFKGMRITDKKTFDIVEMVLS

SEQ ID NO: 129891 - protein, 199 aa, Unknown
  Bacterial polypetide isolated from the Sargasso Sea
MDLKKILPKDGPPIEEVTKYIEKYKNELIVIKYGGNVFIDRNIFNNFILDICLLNKLGLSIVVVHGGGPRIKRELDKSNIKSKFIRGLRVTDKKIINIVERVLIDFNNDIVSSLEKMGSKAISINTKKNNIIEVVPEAKELGFVGLPNKINNNILLDNIKQNRIPIVSPLGLDKNNQTHNINGDNAAMAVAKSLKSRRL

SEQ ID NO: 129892 - protein, 145 aa, Unknown
  Bacterial polypetide isolated from the Sargasso Sea
HGLVGEVTKINPEILDPLISQGYIPIISSIGSTLEGISHNINADFVAGEIAAAINAEKLILLTDTQGILKEKDNKNSLLEKTNLKEARDFIDKKIVTEGMIPKTECCIRALAQGVKAAHIIDGRIEHSLLLEIFTNSGIGTMIVA

SEQ ID NO: 129893 - protein, 287 aa, Unknown
  Bacterial polypetide isolated from the Sargasso Sea
PDALRVEVLSEALPYIQRFRGRRVVIKYGGAAMVREDLRDAVFRDVALLASVGVEPVVVHGGGPEINQWLNRLAIEPVFQEGLRVTCPDTMDVVEMVLVGRVNKQIVNGLNRVGGRAVGLSGADGALVQARTHGDGSLGLVGDVAQVDPSVIIPLLDQGYIPVISSVAPNHEGQPYNINADTVAGELAAAMDAEKLILLTDTPGILRDRDDPQSLIDQLSLSEARELIHSGVVAGGMVPKTQCCIRALAQGVRAAHILDGRVPHSLLLEVFTNSGIGTMVVGSRQQG

SEQ ID NO: 129894 - protein, 141 aa, Unknown
  Bacterial polypetide isolated from the Sargasso Sea
HVGEVASVNVDVIDMLTRSNVIPVIAPIGVGPDGASYNINADLVAGKVAEAMKAEKLILLTNVSGLKSKDDKVLTGLTAQQVNDLIEDGTIHGGMLPKIRCALSAVENGVRTSHIIDGRVAHACLLEIFTDEGVGTLISRN

SEQ ID NO: 129895 - protein, 108 aa, Unknown
  Bacterial polypetide isolated from the Sargasso Sea
MDLKKILPTDGPPIEEVLKYVEKYKNEIIVIKYGGNVFIDRKIFDNFIKDLSVLNKLGLQVVVVHGGGPRIKRELSKQNIESKFIRGLRVTDEKIINVVETVLIEFNE

SEQ ID NO: 129896 - protein, 129 aa, Unknown
  Bacterial polypetide isolated from the Sargasso Sea
MNNNIEELNKILPEKGPNINEVSKYIEKYKDDIIVIKYGGNVFIDRQIFNNFVSDLSVLQKLGLSVVVVHGGGPRIKRELDRSNISSKFVRGLRVTDERIINIVEKVLIEFNEDIVSSLSDLNAKAISL

SEQ ID NO: 129897 - protein, 223 aa, Unknown
  Bacterial polypetide isolated from the Sargasso Sea
SIIVVHGGGPRIERKLKEENIQTKFINGLRVTDEKVISIVEDVLIDFNKDIVNSLKKKGSEAVSVTSKLNNIINVVPDNKELGFVGIPADINIEFLKNVINKKQIPVIAPLGIDKNKNTYNINGDTAASAIAKRLKSRRLLLMTNVEGVYDDRKTLISEIKPFDIENLVKLKIVQGGMIPKIKNCIDAVENGVRGVVILDGRKPHSILDEIFSDKGSGTLIRK

SEQ ID NO: 129898 - protein, 232 aa, Unknown
  Bacterial polypetide isolated from the Sargasso Sea
MELEKILPKDGPPIEEVQKYVQKYKNELIVIKYGGNVFIDREIFNNFISDLKILNELGLSVIVVHGGGPRIKRELDKSNIKSKFIRGLRVTDKKIINIVENVLIDFNNDIVKSLKEKGTKGVSINTKNKNVIHVDPESSELGFVGVPKKIEYNVINKILNENFIPVISPLGLGKDLQTYNINGDTAAGAIAKSLKSRRLLLMTNVEGVLDKNKKLIQEISSSKILEMIKDET

SEQ ID NO: 129899 - protein, 230 aa, Unknown
  Bacterial polypetide isolated from the Sargasso Sea
MKHTEEELKRILPENGPTLNEVQKYIEKYKNDLIVIKYGGNVFIDRKIFNNFISDLSTLKKLGLSVVVVHGGGPRIKRELDKSNIQSKFIRGLRVTDEKIINIVEDVLIDFNKDIVESLKNLGTKGISIHTKKNNIIEVIPESKELGYVGRPSKIKVDVIKEILKNNMIPIISPLGLGENKQTYNINGDTAAGAIAKSLKSRRLILMTNIEGVLNKEKILIEEITSAEII

SEQ ID NO: 129900 - protein, 116 aa, Unknown
  Bacterial polypetide isolated from the Sargasso Sea
MSEENNLEEIKKFWPKDAPDVTNVPKYVKKYKKDLIVIKYGGHVLIDRNIFNNFIQDISILNKLGLSIVVVHGGGPRIERELKKENIQSKFINGLRVTDKDVINIVEKVLIDFNKD

SEQ ID NO: 129901 - protein, 273 aa, Unknown
  Bacterial polypetide isolated from the Sargasso Sea
MNLKKILPKNGPPINEVFKYVEKYKNDLIVIKYGGNVFIDRNIFDNFITDINILNKLGISFVVVHGGGPRIERELDKSNIQSKFIRGLRVTDEKIINIVESVLIDFNNDIVKSLKKFGTEAVSIHTKKNNIIEVIPETKELGYVGVPKKIDNSFIEKILSQKKVPIISPLGLGNDNHPYNINGDTAAGAIAKSLKSRRLLLMTNVEGVLDKDKKLINEIYSSEVLKMVEDNTITEGMIPKINTCLDAVKNGVTAVGIIDGRKQHSILFEIFSD

SEQ ID NO: 129902 - protein, 214 aa, Unknown
  Bacterial polypetide isolated from the Sargasso Sea
FVDGLRVTDEATISVVEMVLAGGINKALVAAITNAGGRAVGISGKDGGLIMARKLLAQAKSAESAIEKAVDLGFVGEPSKINTEVLDALGEKNLIPVVAPVGGGEDGMTYNINADTAAGAISAALGATRMLMLTDVPGVLDNAGNLMSELTVSEAESLIHDGTVSGGMIPKVETCIQAVLGGAEAAVIMDGRAPHALLVELFTEHGMGTFIKPD

SEQ ID NO: 129903 - protein, 288 aa, Unknown
  Bacterial polypetide isolated from the Sargasso Sea
MSKITEEEIKKILPKNGPPLKEVSKYIEKYKNELIVIKYGGNVFIDRNIFNNFIEDISLLNKLGLSIVVVHGGGPRIKRELDKSNIHSKFIKGLRVTDKKIIDIVESVLIDFNNDIVSSLNKIGSKAISINTKNNNIIEIIPEIEELGFVGIPNKININIIKDIIKDNIIPIVSPLGLGINNQTYNINGDTAAGAIAKSLKSRRLLLMTNVKGVLDKEKNLIEEISSFEILEMIKDGTITEGMIPKINTCLDSIKNGVTAVGIIDGREKHSILFEIFSDKGSGTLIRK

SEQ ID NO: 129904 - protein, 236 aa, Unknown
  Bacterial polypetide isolated from the Sargasso Sea
QVGLHPVIVHGGGPQITTHLEKLGIKSKFANGMRITDPESIHIIEMVLGGLVNKDIVNSITSHGGKAVGLSGKDGGLIRAKKIIGEGEFKNIDFKNTGTVQSIDPEVVSLLDGSPFIPVIAPIGIGDDGTTYNINADLVAGKIAHILQANKYLILTNTTGILDGDKHLIKSINAGKVKKLINQGVISKGMLPKVESALEAVSYGVEHVQIIDGTVDHAVLLELFTDEGIGTMIRRL

SEQ ID NO: 129905 - protein, 286 aa, Unknown
  Bacterial polypetide isolated from the Sargasso Sea
MGISVKQAKNISSVLSEGLPYIQKFKDKIIVVKYGGAAMSDQNLKGNFARDIALMSLVGMKPVIVHGGGPQIAKELKKSGVTSNFISGHRVTDKPTMSVVKKILGKKINNEIVNLIRNSGGDAVSFNHVKPKIIKASKFIGPDKNDLGLVGRVDKILVSELKNTISRGSIPVIAPIGINKQGNFLNINADVVAGKVAESLQAEKLILLTDIKGILNKNKIISKISAHKGMQLIKNRVIQGGMMPKLIAALEAKKKGVKSCHIIDGRLPHAVLLEVLTAEGVGTMIS

SEQ ID NO: 129906 - protein, 195 aa, Unknown
  Bacterial polypetide isolated from the Sargasso Sea
MKFDFLSESEQAYFIHKASTLVEALPYIRQHSGDIIVIKYGGHAMGDKKLSSSFARDIGLLKEIGISPVIVHGGGPQIGEKLKSKNINSKFIEGLRITDSQTIKVVEEVLSKEINSEIVNSISSTGGNAVGISGNINNLITATKINVEVKDNDSNIEKIVDIGFVGEPINLKSEVILSHINNGEIPVIAPLGIDD

SEQ ID NO: 129907 - protein, 269 aa, Unknown
  Bacterial polypetide isolated from the Sargasso Sea
MAITRKQAENIALVLSEGLPYIQKFKGKIIVVKYGGAAMTDESLKKSFARDIALMKLVGMNPVIIHGGGPQIGKELSKAGLESEFIGGLRVTTKSVMSVVKKILGTQINHEIVRLIKHFGGNAISFNHNKYSIIRATKRNNDEGPDLGYVGKVEKILTGEIKKKIDNGFIPVIAPIGKSKNNDYWNINADVVAGEVAQSLKAEKLILLTDVKGIGDSENKLISKISLKKGQKVLKEKFIKGGMTPKLTSALEARKNGVKSCHIIDGRVP

SEQ ID NO: 129908 - protein, 289 aa, Unknown
  Bacterial polypetide isolated from the Sargasso Sea
PAAIAPVLAEALPYIQHFHGRTIVIKYGGNAMTDESLKRSFARDVVLMKLVGMNPVVVHGGGPQIGQLLDRIGKKSEFVEGLRVTDSETIDVVEMVLGGLVNKDIVALINAHGGRAVGLSGKDGGLIRARKLVLRKEGASDEDETVELGFVGEIESINPAVVDTLDEGDFIPVIAPIGTGEDDKTYNINADTVAGKLAVTLGAEKLILLTNTPGVLNQQGELLTGLSESRVQELIQEGVITGGMLPKVRCALDAVSGGVRTATISDGRVPHATMLETLTDQGVGTQIGR

SEQ ID NO: 129909 - protein, 260 aa, Unknown
  Bacterial polypetide isolated from the Sargasso Sea
MTSDNGEYLVKQAKNISSVLSEGLPYIQKFKGKTIVVKYGGAAMSDHSLKRNFSRDIALMSLVGMKPVIVHGGGPQIGKELKKSGIVSNFNSGLRVTDKPTMAVVKEILGKQINREIVNLIKKSGGNSIGFNHIKPKIIKSSKYIGPDKLDLGLVGKVDRILITELKKALSLDLIPVIAPIGVSKDGSFLNINGDVVAGKVAESLKAEKLILLTDIKGILDDNNQLISKISPGKGTKLIKNNVIRGGMTPKLKAALEAKK

SEQ ID NO: 129910 - protein, 185 aa, Unknown
  Bacterial polypetide isolated from the Sargasso Sea
MDLEKILPENGPPIKEVSKYIEKYKNDLIVIKYGGNVFIDRNIFKNFIMDISILNKLGLSIVVVHGGGPRIQRELEKSNIKSNFIRGLRVTDKKIINIVENVLIDFNKDIVDSLKKEGTKAISINTKENNIIEVMPESKELGFVGIPHYINIDIIKNKIEKNIIPIISPLGLGENNQTYNINGDT

SEQ ID NO: 129911 - protein, 231 aa, Unknown
  Bacterial polypetide isolated from the Sargasso Sea
MSEEKSLDSIKKFWPKNAPDIKGVQKYIDKYKKEIIVIKYGGNVLIDRNIFNNFIEDISVLNKLGLSIIVVHGGGPRIERKLKKENIQTKFINGLRVTDEKVISIVEEVLIDFNIDIVNSLKKEGAQAISITSKLNNIISVIPDNEELGFVGIPNSINTEFLIKIINKKQIPVIAPLGIDKDKNTYNINGDTAASAIAKKLKSRKLLLMTNVEGVYDDRKNLISEIKPFDI

SEQ ID NO: 129912 - protein, 280 aa, Unknown
  Bacterial polypetide isolated from the Sargasso Sea
MSKNTSLDEIKKFWPEKAPDINIVQKYVKKYEKEKIVIKYGGNVLIDRNVFNNFISDINVLNKLGLSIIVVHGGGPRIKRELEKKKIDSKFINGLRVTDKNIIDTVEEVLIDFNKDIVSSLRKLGSEAASFHTKTDNIIDVEPEREELGFVGIPNKINDSLIEKALNENKIPIIAPLGLGKYDQTYNINGDTAASAIAKKLKSRRLILMTNVEGVYDDQKQLISEIKPIDLENLIKWKVVQGGMIPKIENCVDAVQNGVRGVVILDGRKPHSILHEIFSD

SEQ ID NO: 129913 - protein, 141 aa, Unknown
  Bacterial polypetide isolated from the Sargasso Sea
FVGDPSHIDPTVLNKFAAANIIPVIAPIGLGEEGQTFNINADTVAGAIASAVGAAKLVMMTDVEGLMDSSGKLVPKLTEIEAAAMLRDGTISGGMIPKIETCVAAIKGKTEAAHILDGRVPHVLLLEIFTEHGVGTMIKSE

SEQ ID NO: 129914 - protein, 93 aa, Unknown
  Bacterial polypetide isolated from the Sargasso Sea
MKFDFLSESDQAYFIHKASTLVEALPYIRQHSGEIIVVKYGGHAMGDKKLSDSFAKDMGLLKEVGIKPVIVHGGGPQIGDRLKSKNISSKFVE

SEQ ID NO: 129915 - protein, 263 aa, Unknown
  Bacterial polypetide isolated from the Sargasso Sea
YLKKYSKEKIVIKCGGRVLLDPILFENFIKDVVTLKKLGLTPLLVHGGGLGIKKKLDESNIKSNFIMGLRVTDEKMIKIVEDVMFEFNKEIVETLEKESCKAKSITIRENNVIYVRQKNKELGYVGSPTSIDDKLIKNFVDDDFIPVIAPMGVDEKNQAYNINADTAAGALAISLKSRRLLLMTDVEGVYDENNKLISEIKSAEAEKLIYNQTIHGGMIPKIRTCINAVNNNVRGVVIIDGRKPHSILFELFSDQGAGTLIRK

SEQ ID NO: 129916 - protein, 171 aa, Unknown
  Bacterial polypetide isolated from the Sargasso Sea
MEEIKKFWPEKAPDINIVQKYVSKYEKEKIVIKYGGNVLIDRKVFNNFISDIDVLNKLGLSIVVVHGGGPRIKRELDKKKIISKFINGLRVTDKNVINIVEEVLIDFNNDIVNSLKKLGTEATSFHTKQDNIIEVDPEKEELGFVGIPKKIKANLIEDALNKNKIPIIAPL

SEQ ID NO: 129917 - protein, 240 aa, Unknown
  Bacterial polypetide isolated from the Sargasso Sea
PVIVHGGGPQIGELLERLGKESKFVQGMRVTDRETMDVVQMVLGGLVNKDIVNLIQHNGGQAIGLTGKDGRLIKARKMVLKASDADSPALQASEIIDIGHVGEVQGIDTRIIDLLAGSDFIPVIAPIGVDDNGASYNINADLVAGKVAEVLRAEKLILLTNVPGLKDKQGQILTGLTTERVNSLIKDGTIYGGMLPKIGCALEAVQNGVHTAHIIDGRVSHAVLLEILTDKGIGTLISKD

SEQ ID NO: 129918 - protein, 272 aa, Unknown
  Bacterial polypetide isolated from the Sargasso Sea
ADLLTETLPFMKRYANKVIVIKFGGNAMGKKEYVNSFAKDIVLLQQVGMLPVVVHGGGPQIGEMLSKLQIKTEFINGLRITDAATIDVVEMVLSGVTNRSIVSAIANSGSKSVGISGKDGNLITARRLIKVDENSDSNVEKAVDLGYVGEPEKIDPQVIHALINEKMIPVIAPVGIGKDGLTYNINADTAAGSISAAMKASRMIMLTDVAGVLDQNGKLIPELTISEAQELIKNKIVVGGMIPKIKTCIDAVLGGAEASVIMDGRMSHSLLL

SEQ ID NO: 129919 - protein, 261 aa, Unknown
  Bacterial polypetide isolated from the Sargasso Sea
MNLEKIIPKDGPSIEEVNKYIKKYHNEIIVIKCGGSVLLDKNLFNQFIDDVCVINKLGLSAIVVHGGGKNIKKKLDQHYIESKFIDGLRVTDEKTIKIVEEALLELNTEILNNINNKEANAKSVTPKNGNVIKIIPEKKELGFVGAPKEINKEILLSIVREKIVPIIVPLGIGDDGKIYNINADVAAAAIAKEINSRRLLLMTDVEGVLDKDKKLISEINSETANNMINDQSISGGMIPKINTCIDAVKNGVTGVVIVDGR

SEQ ID NO: 129920 - protein, 209 aa, Unknown
  Bacterial polypetide isolated from the Sargasso Sea
MKNSQKTQKTAQLLAAALPYIQQYQGKTMVVKYGGNAMGDSLVETSFARDIVLMKLVGINPIVVHGGGPQIANLLEKIGKKTEFVNGMRVTDDETMDVVEMVLGGLVNKEIVNLINSNGGRAIGLTGKDGELLKAKKLSPSNGDSLTKVSEIIDLGHVGEVSSVNKDLLNFFTDGDFLPIIAPIGVGDEGRSYNINADLVAGKVAEAVQ

SEQ ID NO: 129921 - protein, 215 aa, Unknown
  Bacterial polypetide isolated from the Sargasso Sea
MNDSQRVSILSEALPYIQSFSGRKIVIKYGGSVMEEEHLKNAFFRDIALLSTVGVCPIVIHGGGPEINNWLKKLEISPKFENGLRITDQKTMEIVEMVLMGRVNKQIVKGINKTGSLAVGISGLDGNLIQSRELGDGSHGLVGEVTKINPEILDPLISEGYIPIISSIGSTMEGISHNINADFVAGEIAAAINAEKLILLTDTQGILKEKDNKNS

SEQ ID NO: 129922 - protein, 128 aa, Unknown
  Bacterial polypetide isolated from the Sargasso Sea
MKFDFLSESDQAYFIHKASTLVEALPFIREHSGDTIVIKYGGHAMGDPKLAKSFARDIGLMKEVGIYPIVVHGGGPQIADKLKTKNITTQFIDGLRVTDIETVKVVEDVLGNEINAEIVKAISDSGGK

SEQ ID NO: 129923 - protein, 274 aa, Unknown
  Bacterial polypetide isolated from the Sargasso Sea
MLIEALSYIKRFRDRIIVIKYGGAAMIEKNLKQSFAEDIVLLQSLGMKPVIVHGGGPEVSKAMEQLGQQVHFVEGLRVTSAENLKVTEMVLSGTINKEIIAHLNTCGGKAVGLSGKDGHLIEASKKDGGEGVDLGYVGEIDSTNPELLRVLLKEGYIPVISPIGLGKDGTSYNINADTAASHIAVSLQAMKLIFMTDVEGILENGKLCAELKHNKALSMIDSGVIEGGMKPKVQAALNAVTQGVESAQIILGTDPHSVITELFTDQGIGTKIVA

SEQ ID NO: 129924 - protein, 226 aa, Unknown
  Bacterial polypetide isolated from the Sargasso Sea
MDLKKILPENGPPINEVKKYIEKYKNDLIVIKYGGNVLIDRTIFNNFITDLSILNKIGLSIVVVHGGGPRIKRELEKSNIKSKFIRGLRVTDQKIIEIVESVLIDFNNDIVNSLKEKETEAISINTKNNNIIKVIPEAEELGFVGIPNIINNQILLNIIKQKKIPIISPLGLDEKNQAHNINGDTAAMAVAKSLKSRRLLLMTNVDGVLNKEKKLIEEISSSEILK

SEQ ID NO: 129925 - protein, 218 aa, Unknown
  Bacterial polypetide isolated from the Sargasso Sea
MTLSREAATQFAKVLSEALPYIRRFVGKTLVIKYGGNAMESEELKTGFARDIVLMKAVGINPVVVHGGGPQIGDLLKRLNIESHFIDGMRVTDSQTMDVVEMVLGGQVNKSIVSLINQHGGSAIGLTGKDAGLIRAKKLKATRQTPEMTKPEIIDIGHVGEVTGVNAELLEMLVQGNFIPVIAPIGVGENGESYNINADLVAGKVAEALKAEKLMLLT

SEQ ID NO: 129926 - protein, 289 aa, Unknown
  Bacterial polypetide isolated from the Sargasso Sea
IHAQDSLRVEVLSEALPYIQRFRGRRVVIKYGGAAMVRDDLRDAVFRDVALLASVGVEPVVVHGGGPEINQWLNRLSIEAVFQEGLRVTDPDTMDVVEMVLVGRVNKQIVNGLNRVGGRAVGLSGADGGLVQARTHGDGSLGLVGDVARVDPSVIIPLLEQGYIPVVSSVAPNHEGQSYNINADTVAGELAAALDAEKLVLLTDTPGILKDRNDPASLFRQLSLAEARALIDDAIVAGGMVPKTQCCIRALAQGVRAAHILDGRVPHALLLEVFTKTGIGTMLVGSCRN

SEQ ID NO: 129927 - protein, 289 aa, Unknown
  Bacterial polypetide isolated from the Sargasso Sea
MSEEKSLNEIKKFWPKEVPDINNVPKYIKKYKEDLIVIKYGGNVLIDRKIFNNFIEDISILNKLGLSIIVVHGGGPRIERELKKENIQTKFINGLRVTDEKVIKIVERVLIDFNNDIVSSLKKKGLKAISINSKINNAINVIPDKQELGFVGVPDKINSDIIKSIISQNQIPIVAPLGLDKNNQTYNINGDTAASAIAKKLKSRRLLLMTNVEGVYDDRKNLISEIKPYDMENLVNLKIVQGGMLPKIKNCIDAVENGVRGVVILDGRKPHSILKEIFSDKGAGTLIRK

SEQ ID NO: 129928 - protein, 135 aa, Unknown
  Bacterial polypetide isolated from the Sargasso Sea
MDLETILPKDGPAINEVKKYMDKYKDDLIVIKYGGNVFIDRQIFDNFITDLTILNKLGLSIVVVHGGGPRIKRELEKSKIESKFIRGLRVTDEKIINIVESVLIEFNEDIVSSLKERGFEGISLNTKENNVINVE

SEQ ID NO: 129929 - protein, 234 aa, Unknown
  Bacterial polypetide isolated from the Sargasso Sea
MKFNFLSESDQAYFIHKASTLVEALPYIRQHSGETIVIKYGGHAMGDSKLSSSFAKDIGLLKEVGISPIIVHGGGPQIGERLKSKNISSKFIDGLRVTDKETIKIVEEVLSKDINSEIVGSISSSGGKAIGISGNINNLITATKLHVETKDSDSNIEKVVDIGFVGQPVKLDKSIITNIINKGEIPVIAPLGIDHNNFTYNINADTVAGFIAGELKASKLLLLTDVSGILDNNK

SEQ ID NO: 129930 - protein, 237 aa, Unknown
  Bacterial polypetide isolated from the Sargasso Sea
MNDSQRVSILSEALPYIQSFSGRKIVIKYGGSVMEDDDLKNAFFRDIALLSTVGVCPIVIHGGGPEINHWLKKLEISPKFENGLRITDQKTMEIVEMVLMGRVNKQIVKGINKTGSLAVGISGLDGNLIQSRELGDGSHGLVGEVTKINPEILDPLISRGYIPIISSIGSTLEGISHNINADFVAGEIAAAINAEKLILLTDTPGILKEKDNKNILVEKTNLKEARDFIDKKIVTEG

SEQ ID NO: 129931 - protein, 216 aa, Unknown
  Bacterial polypetide isolated from the Sargasso Sea
SGRRIVIKYGGAAMAHAELREAVFRDLALLACVGVQPVVVHGGGPEINQWLKRLEIPAEFRDGLRVTDADTMDVVEMVLVGRVNKQIVNGLNQLGTRAVGLSGSDGRLVEARPWGDGSHGLVGDVARVNPDVLEPLLERGYVPVISSVAATPDDGRAHNINADTVAGELAAALEAEKLILLTDTPGILKDRDDPDSLIRKLRLSEARQLIDDGVVA

SEQ ID NO: 129932 - protein, 251 aa, Unknown
  Bacterial polypetide isolated from the Sargasso Sea
KSAESLAKILSEALPYIQKFSGKIVVIKYGGSAMKENKLRQNFARDIALMRQIGIFPVLVHGGGPQIERNLKKSNVRSVFIDGLRKTDENSIKIIVKTLREVNGDISELIKTWGAKTKTFNDVRESILICKKIKTKMDLGFVGDITKVDGDLIKKNISNGKIPVIAPIGRDRFGMHYNINADHVACKVAEKLKAEKIIMMTDVKGVLTNTGKKISEMNIKKAKRIAKTIKGGMLPKLASVIISLESGVKSA

SEQ ID NO: 129933 - protein, 237 aa, Unknown
  Bacterial polypetide isolated from the Sargasso Sea
MIKKNKKPSYIAEVLTEALPYIKRFRGKSIVIKYGGNAMSDESLKSGFARDVVLMKLVGMNPIVVHGGGPQIGATLEKLGKKSSFVDGMRVTDRETMSIVETVLAGEINQEIVSLINSFGGNAVGLSGKDEKLIIARKMVLKKNNIKLGTPEIIDIGYVGDIETVDKSAVNALAQNDTIPVIAPIGVDESGQTYNINADLVAGKIAQAIGAEKLIMLTNTQGLLDENGEVLTGVSMK

SEQ ID NO: 129934 - protein, 157 aa, Unknown
  Bacterial polypetide isolated from the Sargasso Sea
MTNNKKKITIDKRRWLRTANTISEALPYLRNFSGHTFVIKYGGHAMGDENLAENFARDVVLLKHVGINPIVVHGGGPQIGDMLQRLGIKTTFIDGLRVTDAETVKIAEMVLSGHINKEIVSQISSVGGNAIGLSGKDGNLITCKRIKKNKDLGFVGE

SEQ ID NO: 129935 - protein, 199 aa, Unknown
  Bacterial polypetide isolated from the Sargasso Sea
MNDEIKNNFQQTATTLAEALPYIQRYAGTTIVIKLGGHAMTSKSSMDNFARDIVLIKQCGVNPVIVHGGGPMINKVLSDLKIESVFSKGKRVTDRKTMEVVEMVLSGSINKSIVNAINNQGGKGVGLSGKDANMIQCEQDNPKLGFVGKVKKINTDIVQNFLESDFIPVIAPIGYGINGDTYNINGDTAAGAMASSLLA

SEQ ID NO: 129936 - protein, 214 aa, Unknown
  Bacterial polypetide isolated from the Sargasso Sea
MKKIHSSVRAKILAEALPYMQMYDSKYVVVKYGGHAMVNDNLADIFAQNIVMLQQAGMKPVVVHGGGPQIGETLKAQGVESKFHNGLRITDRDTIKVVERVLYEIINTDIVKKIRKHGGKSISLSGNKDSIIFAKKLTNIYKTDSNIEKIMDLGFVGEPKKIDPSTIINHCKKGSIPVITPLGKDNNTTYNINADTAAGAIAGALKASRLLMLT

SEQ ID NO: 129937 - protein, 277 aa, Unknown
  Bacterial polypetide isolated from the Sargasso Sea
MNKIEIREQSAKSSTANVLIEALPYIQKLANKTIVIKFGGNAMIDNTLKNNFARDVVLLKQVGLHPVIIHGGGPQITQYLEKMGIKSEFVDGMRVTDENSIDMIEMVLGGSINKEIVNLITSHGGRAVGLSGKDGGLIRAKKMIGEGKTKDFDFKNTGMVSSIDPSVVNLLDATSFIPVIAPIGIGEDYKTYNINADIVAGKIAKILQAGKFIVLTNTTGIFDENDNLIKSMNAQQVRDLIKKGIISSGMLPKVESALEAVSSGVQNVQIIDGTIDH

SEQ ID NO: 129938 - protein, 105 aa, Unknown
  Bacterial polypetide isolated from the Sargasso Sea
MKFDFLSESDQAYFIHKASTLVEALPYIRQHSGDIIVIKYGGHAMGDKKLSSSFAKDIGLLKEIGISPVIVHGGGPQIGERLKSKNISSKFVEGLRVTDIETIKI

SEQ ID NO: 129939 - protein, 243 aa, Unknown
  Bacterial polypetide isolated from the Sargasso Sea
KNSFTRDVALMSLVGMKPVIVHGGGPQIAKELKKSGISSNFISGHRVTDKVTMSVVKKILGTKINHEIVNLIKKSGGDSISFNHIKPKIIKASKYIDSHQNDLGLVGKVDKILVSELKKALTKGSIPVIAPIGVNRKGNFLNINADVVAGKVAESLKAEKFILLTDIKGILDNKKEIISKISSFKGRQLINNNVIKGGMTPKLTAALEAKKNGVRSCHIIDGRLPHAVLLEVLTAEGVGTMIS

SEQ ID NO: 129940 - protein, 136 aa, Unknown
  Bacterial polypetide isolated from the Sargasso Sea
MKFDFLSESDQAYYIHKASTLVEALPYIRKHAGQIVVIKYGGHAMGNPKLSKSFSEDIALIREIGIQPIIVHGGGPQIGKMLKKKNIETKFVQGLRITDKETVKIVEEVLANEINKEIVNSINETGGKAIGLAGNK

SEQ ID NO: 129941 - protein, 180 aa, Unknown
  Bacterial polypetide isolated from the Sargasso Sea
MKFDFLSESDQAYFIHKASTLVEALPYIREHSGDTIVIKYGGHAMGDKKLSESFSRDIGLLKEVGVSPIIIHGGGPQIGERLKSKNISTQFVEGLRVTDKEIIKVVEEVLSKDINSEIVESISASGGKAIGVSGNDNLVTATKLNVEIKDSDSNIEKIVDIGFVGQPKKLNKDMLTSFIK

SEQ ID NO: 129942 - protein, 235 aa, Unknown
  Bacterial polypetide isolated from the Sargasso Sea
VGCHPVIIHGGGPQISKHLEKQGIESNFANGMRITDEKSIDIIEMVLGGLINKDIVNTITSLGGKAVGLSGKDGGLIRAKKIEGEGEFKNIDFKNTGTVKSIDPGVVKLLDGSTFIPVIAPIGIGDDGKTYNINADIVAGKIAHILQASKYLILTNTQGILDSNGNLIQSINTDGVKKLAEEGILSQGMLPKVNSALEAVTSGVEHVQIIDGTIDHSVILELFTDEGIGTMIRRN

SEQ ID NO: 129943 - protein, 239 aa, Unknown
  Bacterial polypetide isolated from the Sargasso Sea
MNIEKILPNDGPSIQEVKKYIEKYSNETIVVKCGGSVLLEKKLFDQFVEDISIVNKLGLSAIVVHGGGKNIKRKLNEKNIESKFINGLRVTDENTINIVEEALLELNFEIIDQIKNCQAEAMSVTPKNGNIIKVIPEKKELGLVGYPSEINKKQILEIIKDKKVPVILPMGTGDDGKIYNINADTAAGSVAQELNSRRLLLMTDVEGVLDQNNNLITELNSKVAKNMLNDGTISGGMIP

SEQ ID NO: 129944 - protein, 107 aa, Unknown
  Bacterial polypetide isolated from the Sargasso Sea
MDLKNILPEDGPPLSEVNKYIEKYKNDLIVIKYGGNVLIDRSVFNNFITDLFILNKLGLSTVVVHGGGPRIKRELEKSNIQSKFIRGLRVTDKSIINIVESVLIDFN

SEQ ID NO: 129945 - protein, 221 aa, Unknown
  Bacterial polypetide isolated from the Sargasso Sea
MSTTENLDNKIKEFWPENGPPTQEIEKYVKKYSKEKIVIKCGGRVLLDPDLFNNFINDVIILKKLGLTPIVVHGGGPRIKNKLDELNIETKFIMGLRVTDEKVIKIVEEVMIKFNREIVDSLEKKACKAKSITIKENNAIYVEQKNKELGYVGKITKVNTQLIKNLIKENFIPVVSPMGLDEKKQTYNINADTAAGSLAISLKSRRLMLMTDVEGVYDKNK

SEQ ID NO: 129946 - protein, 124 aa, Unknown
  Bacterial polypetide isolated from the Sargasso Sea
SRAWPPNHEGQPYNINADTVAGELAAAMDAEKLILLTDTPGILRDRDDPESLIDQLSLSEARELIHAGVVAGGMVPKTECCIRALAQGVRAAHILDGRVPHSLLLEVFTNSGIGTMVLGSRQQG

SEQ ID NO: 129947 - protein, 180 aa, Unknown
  Bacterial polypetide isolated from the Sargasso Sea
VGVTGKDGGLIKARKLRIRKKLPKLTDEIVDIGHVGEVVNINTEILEVMKNSDFIPVIAPIGTDDSGASYNINADSVAGEIAKVMGAEKLILLTNVEGVKDKKGNVLTGLNPTQVSRLITNRTLKGGMLPKVKCAVEAVKGGVTGAHIIDGRVEHAVLLEIFTDKGVGTLITKTARKIRP

SEQ ID NO: 129948 - protein, 267 aa, Unknown
  Bacterial polypetide isolated from the Sargasso Sea
EVSKYIEKYKNELIVIKYGGNVLIDRSIFDNFITDLSILNKLGLSVVVVHGGGPRIKRELDKSNIQSKFIRGLRVTDKKIIDIVETVLIDFNNDIVSSLKKKDIKTFSIHSKKDNIIEVIPESEELGFVGLPNKINNNILLDAIKQNRIPIISPLGLDKNNQTHNINGDTAAMAIAKSVRSRRLLLMTNVDGVLNKEKKLIAEISSSEILEMVKDETITEGMIPKINACLEAVNNGVTAAGIINGTKQHSCLWEIFSDKGSGTLIRK

SEQ ID NO: 129949 - protein, 269 aa, Unknown
  Bacterial polypetide isolated from the Sargasso Sea
MAQSAQNNDDALRVSVLSEALPYIQRFAGRRIVIKYGGAAMAHAELRAAVFRDLALLACVGVQPVVVHGGGPEINQWLQRLEIPAEFRDGLRVTDADTMDVVEMVLVGRVNKQIVNGLNQLGTRAVGLSGSDGSLVEARPWGDGSHGLVGDVARVNPDVLEPLLEKGYVPVISSVAATPDDGRAHNINADTVAGELAAALEAEKLILLTDTPGILKDRNDADSLIRKLRLSEARQLIEDGVVAGGMTPKTECCIRALAQGVAAAHIMTA

SEQ ID NO: 129950 - protein, 123 aa, Unknown
  Bacterial polypetide isolated from the Sargasso Sea
MKFDFLSESDQAYFIHKASTLVEALPYIRQHRGDIIVIKYGGHAMGDKKLSESFAKDIGLLKEVGVLPIIVHGGGPQIGLRLKSKKISSKFVEGLRVTDTETIKVVEEVLSKDINSEIVKSIS

SEQ ID NO: 129951 - protein, 104 aa, Unknown
  Bacterial polypetide isolated from the Sargasso Sea
MSEENNLEEIKKFWPKDAPDVTNVPKYVKKYEKDLIVIKYGGNVLIDRNIFNNFIQDISILNKLGLSIVVVHGGGPRIERELKKGNIQSKFINGLRVTDKNVIN

SEQ ID NO: 129952 - protein, 211 aa, Unknown
  Bacterial polypetide isolated from the Sargasso Sea
MSNLITKTAKQISASKKEVGSNLQKYINEIIVIKYGGSAMLDKKLSLNFFQNIKALVDLGIKPIIVHGGGPQINLMLNKVNIKHKFFKGMRITDEKTFDIVEMVLSGVINKNISYCLSNNKVNALGLSGVDSKIIIAKKYRKKNISDPDLGLVGQPHSINKNLLLNLVSNKIVPVIAPIGANAKGTKFNINADLTAGFIASKIGARRLLML

SEQ ID NO: 129953 - protein, 301 aa, Unknown
  Bacterial polypetide isolated from the Sargasso Sea
MTLERDAAAQVAKVLSEALPYIRRFVGKTLVIKYGGNAMESEELKQGFARDIVLMKAVGINPVVVHGGGPQIGDLLKRLSIESHFIDGMRVTDTATMDVVEMVLGGQVNKSIVNLINQHGGSAIGLTGKDAGLIRAKKLTVSRQTPEMTQPEIIDIGHVGEVTGVNTDLLNMLVKGDFIPVIAPIGVGPGGESYNINADLVAGKVAEALKAEKLMLLTNIAGLMNKQGEVLTGLTTEQVNDLIADGTIYGGMLPKIKCALEAVQGGVTSSHIIDGRVPNAVLLEIFTDIGNGTMISNRKRP

SEQ ID NO: 129954 - protein, 303 aa, Unknown
  Bacterial polypetide isolated from the Sargasso Sea
MKFDFLSESDQAYFIHKASTLVEALPFIREHSGDTIVIKYGGHAMGDPKLAKSFARDIGLMKEVGIFPVVIHGGGPQIAEKLKTKNKTSKFVDGLRVTDAETVKVVEDVLVNEINTEIVKAISDSGGKAIGLSGNENNLLSATKLKVEIKDSDSNIEKIIDIGFVGQPTNANTELIKQHIDEGEIPVIAPLGIDNNGNSYNINADTAAGFIAGKLKANKLLLLTDVAGVLDKDKKLIPSLKLENAIEIVNEDFVVGGMKPKITTCIEAMKSGVTKSTILDGRIPHSLVLELFTEHGIGTQIYS

SEQ ID NO: 129955 - protein, 303 aa, Unknown
  Bacterial polypetide isolated from the Sargasso Sea
MKFDFLSESDQAYFIHKASTLVEALPFIREHSGDTIVIKYGGHAMGDTKLAKSFAQDIGLMKEVGIFPIVVHGGGPQIGEKLKNKNISSKFVEGLRVTDKDTVKIVEEVLANDINAEIVKSISESGGKAIGLSGNKNNLLNATKLKLEVKDSDSNIEKLVDIGFVGRPTKVNVNLIKEHIKEGKIPVIAPLGIDNEGNCYNINADTAAGFIAGEIKASKLLLLTDVAGILDQDKNLISSLKLDDACKIIDEDFIVGGMKPKIITCVEAMKKGVNKSTILDGRIPHSVILELFTEHGIGTQIYS

SEQ ID NO: 129956 - protein, 282 aa, Unknown
  Bacterial polypetide isolated from the Sargasso Sea
MDLKKYTPENGPPIKEVSKYIEKYKNELIVIKYGGNVFIDRNIFDNFITDICLLNKLGLSIVVVHGGGPRIKRELDKSNIQSNFIRGLRVTDKRIIDIVERVLIDFNNDIVSSLEKMGSKAVSINTKTNNIIEVIPEAKELGFVGLPNKINNKILLDIIKQDRIPIVSPLGLDKNNQTHNINGDTAAMAVAKSLKSRRLLLMTNVDGVLNKEKKLIAEISSSEILEMIKDETINSGMIPKVNACLTAVNNGVTAAGIINGTKQHSCLWEIFSDKGSGTLIRK

SEQ ID NO: 129957 - protein, 289 aa, Unknown
  Bacterial polypetide isolated from the Sargasso Sea
MSKNISLEEIKEFWPEKAPDINIVQKYIEKYKDEKIVIKYGGNVLIDRNVFNNFISDINVLNRLGLSVVVVHGGGPRIKRELDKKKIVSKFINGLRVTDKNIIDTVEEVLIDFNKDIANSLKKLGSHAAMFHTKADNVIEVEPEREELGFVGVPNKINDSLIQNALSENKIPIIAPLGLGKNEQTYNINGDTAASAIAKKLKSRRLILMTNVEGVYDDQKKLISEIKPFDLENLIKWKVVQGGMIPKIENCVDAVQNGVRGVVILDGRKPHSILHEIFSDKGSGTLIRE

SEQ ID NO: 129958 - protein, 267 aa, Unknown
  Bacterial polypetide isolated from the Sargasso Sea
MSVSPIIIKVGGALLDDAAAMTRLFLSVKDVQATRPVVVVHGGGPLVETLMASLGLKSTKIDGLRVTPDEHMPYICGALAGSANKQLCAAALASGLTPVGLSLLDGNMVVCEPLADQYGAVGVPSTADAAFLKSVLAQSTLPIISSIGSSPQGRLLNVNADQAATVIAELLNAELLLLSNVDGVLDGNKALISALNANSIAQYASEGVITDGMKVKVDAALASAESLSRPVYIASWAADITDILNKTTGTQIVPTTLAAENGNAGEI

SEQ ID NO: 129959 - protein, 266 aa, Unknown
  Bacterial polypetide isolated from the Sargasso Sea
VLKYIEKYSSDIIVIKYGGNVFIDRNIFNNFIEDISVLNKLGLSIVVVHGGGPRIKRELDKSNIETKFIRGLRVTDKKVINIVENVLIDFNQDIVNSLKEKGSEAVSINTKENNIIEVIPEKEELGFVGIPNKIDVSKLKDIIKNKKIPIISPLGLGKNNQTYNINGDTAAGAIAKSLKSRRLLLMTNVEGVLNKEKKLISEISSSKILEMIKDQTITEGMIPKINTCLDAVDNGVKGVVIIDGRKQHSILDEIFSDKGSGTLIRK

SEQ ID NO: 129960 - protein, 304 aa, Unknown
  Bacterial polypetide isolated from the Sargasso Sea
MSLNLRSAKNIAKVLTEALPYIQKFTGKTVVVKYGGNAMVDDGLKKSFARDIVLMKLVGINPIVVHGGGPQIGSVLKKLSIQSEFIDGLRVTDSQTMDVVEMVLGGLVNKEIVNLLNQNQGRAIGVSGKDGKLIKAKKLRLKQKEPRLTDEIIDIGHVGEVVSINTEILDVMKDSNFIPVIAPIGTDDSGTSFNINADSVAGEIAAVMGAEKLILLTNVEGVKDKTGNVLTGLTPIQASRLITNKTLKDGMVPKVQCAVNAVKSGVTAAHIIDGRVEHAVLLEIFTDEGIGTLITKRAKKAHHS

SEQ ID NO: 129961 - protein, 273 aa, Unknown
  Bacterial polypetide isolated from the Sargasso Sea
MVEILPYIQRWRGKVVVIKFGGNAMTDASLAERFAEDVVLMHQVGILPLIVHGGGPQIGELMERLGKEPEFKDGLRVTDAETLDIARMVLVGKVNREIVSSINVHGPLAVGVSGEDGGLITAAARNPELGFVGDVTAVDPTLLQKLFSEGLIPVMSTIGADETGQAYNINADTVAGAVAQAMEAEKVVYLTDVEGLYEDLSDETSLIRQISAADLSQKIQSGQITDGMIPKTEACVRAVQNGVTSAHLVDGRIPHVALLELFTDAGIGTMISD

SEQ ID NO: 129962 - protein, 300 aa, Unknown
  Bacterial polypetide isolated from the Sargasso Sea
KNKILEEKNSLLKKADLLMETLPFMRRYTDKIVVIKIGGNAMGKKEYIQSFAEDIALLQLVGILPIVVHGGGPQIGEMLKKLKIESNFVDGLRVTDEATIDVVEMVLCGVTNKSIVSAISLAGALSVGISGKDGNLIKAKRLSILDKNSDSNVEKAVDLGFVGEPSSINVDVLNALISQKMIPVISPVGIGNNGETYNINADTAAGAIASAMKASRMIMLTDVVGVLDAKQELITELKISEAKNLIQNKIVLGGMIPKLKTCISSVEEGVEASVILDGRLPHALLIELFTEHGIGTLIKK

SEQ ID NO: 129963 - protein, 315 aa, Unknown
  Bacterial polypetide isolated from the Sargasso Sea
MYNSPCFNCSVPEPAAMSELPDLSQIAPTLKAEILAEALPYIRQYHGKTVVIKYGGNAMTEERLKQGFARDVILLKLVGINPVIVHGGGPQIDQALKKIGKQGTFIQGMRVTDEETMEVVEWVLGGEVQQDIVTLINHFGGHAVGLTGKDGGLIHARKMQMPDRDNPGQYVDIGQVGEVEAINPAVVKALQDDAFIPVISPIGFGEDGLSYNINADLVAGKLAVVLNAEKLVIMTNIPGVMDKEGNLLTDLSAREIDGLFADGTISGGMLPKISSALDAAKSGVRSVHIIDGRIEHSVLLEILTEQPFGTMIRSH

SEQ ID NO: 129964 - protein, 271 aa, Unknown
  Bacterial polypetide isolated from the Sargasso Sea
MSEDENLNKFKKFWPKDAPDINNIPKYIKKYKNELIVIKYGGNVLIDRKIFNNFIEDISVLNKLGLSIIVVHGGGPRIERELKKANIQTKFINGLRVTDKNVIKIVEEVLIDFNNDIVNSLNKKGSKAISINTKSNNVINVIPDQQELGFVGIPDEINTDFIKEKVKKNEIPIVAPLGLSKNNQTYNINGDTAASAIAKKLKSRRLLLMTNVEGVYDDRKSLISEIKPYDMENLVNLKIVKGGMLPKIKNCIDAVENGVRGVVILDGRKPH

SEQ ID NO: 129965 - protein, 303 aa, Unknown
  Bacterial polypetide isolated from the Sargasso Sea
MKFDFLSESDQAYFIHKASTLVEALPFIREHSGDTIVIKYGGHAMGDPKLAKSFARDIGLMKEVGIYPIVVHGGGPQIAERLKTKNITSQFIEGLRVTDIETVKVVEDVLGNEINAEIVKAISDSGGKAIGLSGNKNNLLTATKLKVEVKDSDSNIEKLVDIGFVGQPTDVNTNLIREHINLGEIPVIAPLGIDEEGNSYNINADTAAGFIAGKLKASKLLLLTDVAGVLDKGRKLIPSLKIEDAITIMNEDFVVGGMKPKIKTCIEAMKSGVTKSTILDGRIPHSLVLELFTEHGIGTQIYS

SEQ ID NO: 129966 - protein, 298 aa, Unknown
  Bacterial polypetide isolated from the Sargasso Sea
MNDKVILRENSANIPSTANVLIEALPYIQKLANKIIVIKFGGNAMIDDRLKNNFARDVVLLKQVGLHPVIIHGGGPQITSYLEKMGIKSEFVDGMRVTDDKSIEMIEMVLGGSINKEIVNLITSHGGRAVGLSGKDGGLIRAKKMIGEGKNKNFDFKNTGMVSSIDPSVVNLLDATPFIPVIAPIGIGEDFKTYNINADIVAGKIAKILQAGKYVVLTNTTGIFDDNGNLIKSMNAEQVRQLVNKGIISSGMLPKVESALEAVSAGVQNVQIIDGTIDHAILLELFTDEGVGTMIRRT

SEQ ID NO: 129967 - protein, 298 aa, Unknown
  Bacterial polypetide isolated from the Sargasso Sea
MNKEIVLRKDTANIPSTADVLIEALPYIQRLSNKIIVIKFGGNAMIDDKLKNSFARDIVLLKQVGLHPVIIHGGGPQITSYLEKMGIKSEFVDGMRVTDEKSIDLIEMVLGGSINKEIVNLITSHGGRAVGLSGKDGGLIRAKKMISEGKNKNFDFKNTGMVASIDPSVVNLLDSTSFIPVIAPIGIGDDYKTYNINADIVAGKIAKILQAGKYVMLTNTAGVFDDDGNLIKSMNAEQVRQFVKKGTISSGMLPKVESALEAVSAGVHNVQIIDGTIEHALLLELFTDEGVGTMIRRT

SEQ ID NO: 129968 - protein, 282 aa, Unknown
  Bacterial polypetide isolated from the Sargasso Sea
MELEKILPKHGPSESEVQKYIDKYKDELIVIKYGGNVFIDRKIFDNFINDLTILSKLGLSFVVVHGGGPRIQRELDKSDIKSKFIRGLRVTDEKIINIVESVLIEFNEDIVLSLKNKGVESISLHTKKNSVIEVLPDSKELGFVGVPNKINVDLIKNIIKKKLIPIISPLGLGNNNQTYNINGDNAAGAIAQSLKSRRLLLMTNVTGVLDKDDNLIEEISSSEIVEMIKDGTITKGMIPKINTCLNSIDKGVTAVAIIDGRKKYSVLFEIFSDKGSGTLIRK

SEQ ID NO: 129969 - protein, 287 aa, Unknown
  Bacterial polypetide isolated from the Sargasso Sea
MNLNNEELKKILPNNGPALEEVQKYITKYKNDLIVIKYGGNVFIDRNIFNNFISDLSILKQLGLSIVVVHGGGPRIKRELDKSNIRTKFIRGLRVTDEKIINIVENVLIDFNIDIVDSLKEKGTEAISINTKKNNIIEVIPESEELGFVGKPSKINIDIIKNILAKNMIPIISPLGIGKNNQTYNINGDTAAGAIAKSLKSRRLILMTNINGVLDKEKKLIEEITSSEILKMINDEIITEGMIPKINTCLDAVNNGVTGVVIVDGRKPHSILFEIFSDKGAGTLIRK

SEQ ID NO: 129970 - protein, 282 aa, Unknown
  Bacterial polypetide isolated from the Sargasso Sea
MNLDTILPKDGPAIEEVKKYINKYNDELIVIKYGGNVFIDRQIFDNFITDLTILNKLGLSIVVVHGGGPRIKRELDKSNIESKFIRGLRVTDEKIINIVESVLIEFNEDIVSSLKKRGFNGISLNTKENNVIEVKPESEELGFVGIPNKINVDIIKDKISKNLIPIISPLGLGYNNRTYNINGDTAAGAIAKSLKSRRLLLMTNVEGVLDKNNKLIEEISSSEIIKMVKDGTITEGMIPKINTCLDAINNNVTAVAIIDGRKKHSVLFEIFSDKGSGTLIRK

SEQ ID NO: 129971 - protein, 247 aa, Unknown
  Bacterial polypetide isolated from the Sargasso Sea
MNLENIIPKDGPSIEEVKKYIKKYSNELIVIKCGGSVLLDVGLFNQFIEDISAINHLGLSVIVVHGGGKNIKKELDKHKIESKFIDGLRVTDENTMTIVEKALLELNTEILNNLTNKEANAKSVTPKSENIIKINPEKKELGFVGNPKKINKEALLNIVIEKKVPIVAPMGVGDDGKIYNINADVVSGSIAKELNSRRLLLMTDVEGVLDKDKNLISEIDSKLALKMLKDGDISGGMIPKINTCLDA

SEQ ID NO: 129972 - protein, 263 aa, Unknown
  Bacterial polypetide isolated from the Sargasso Sea
MDIEKILPKNGPSIDEVKKYIDKYLNEIVVIKCGGSVLLDENLFNQFIEDISVINKLGLSAIVVHGGGKNIKKKLDKYDIESKFIDGLRVTDEKTIKIVEEALLELNLEILKNINNKEAKAQSVTPKNENIIKIIPERKELGFVGIPKEINKKVLINIVKEKKVPIIVPMGLGDDGKIYNINADIVAGAIAKEINSRRLLLMTDVEGVLDKNNKLLLEINSEVTKKMLSEGTISGGMIPKINTCINAIENGVTGVVIVDGKKP

SEQ ID NO: 129973 - protein, 282 aa, Unknown
  Bacterial polypetide isolated from the Sargasso Sea
MELEKILPKDGPPIEEVHKYVQKYKNELIVIKYGGNVFIDREIFNNFISDLKILNELGLSVIVVHGGGPRIKRELDKSNIKSNFIRGLRVTDKKIINIVENVLIDFNNDIVKSLEDKGTKGVSINTKNNNVIHVDPESSELGFVGVPKKIESDVINKILNENFIPVISPLGLGKDLQTYNINGDTAAGAIAKSLKSRRLLLMTNVEGVLDKNKKLIQEISSSKILEMIKDETITEGMIPKINTCLDAINNGVTAVAIIDGRKKHSILFEIFSDKGSGTLIRK

SEQ ID NO: 129974 - protein, 219 aa, Unknown
  Bacterial polypetide isolated from the Sargasso Sea
MSLQKKQPESKELLEKYWISGKKFHTKTFSFIKKYQNKIIVIKYGGYALTKPALLKSFAKNISLLNQLGIKVIVVHGGGPQIEKELKKRKINNDEYQGLRVTTKSVLGVVKRILSHDLNKLISDEIKKNGGKTKRFNGVITRVLKAKIAMNGNIGFVGEPRGIDKNMIMKALKSNHIPIIAPLGIDTNKNTLNINADTAAAYIAESVKAERLLLLTDVA

SEQ ID NO: 129975 - protein, 97 aa, Unknown
  Bacterial polypetide isolated from the Sargasso Sea
MDLKKILPTDGPPVEEVLKYVEKYKNEIIVIKYGGNVFIDRKIFDNFIKDLSVLSKLGLQVVVVHGGGPRIKRELSKQNIESKFIRGLRVTDEKIIN

SEQ ID NO: 129976 - protein, 104 aa, Unknown
  Bacterial polypetide isolated from the Sargasso Sea
MLTEALPYMQKYADSIIVIKYGGHAMKDTKSIKSFCEDIALLKQSGLKPVIVHGGGPQIGNMLEKLGIETKFESGMRITDDKTLEIVEMGPLWRHKQRNSIKYQ

SEQ ID NO: 129977 - protein, 283 aa, Unknown
  Bacterial polypetide isolated from the Sargasso Sea
MNDSQRVSILSEALPYIQSFSGRKIVIKYGGSVMEDDDLKNAFFRDIALLSTVGVCPIVIHGGGPEINNWLKKLEISPKFENGLRITDQKTMEIVEMVLMGRVNKQIVKGINKTGSLAVGISGLDGNLIQSRELGDGSHGLVGEVTKINPEILDPLIAKGYIPIISSIGSTFEGISHNINADFVAGEIAAAINAEKLILLTDTQGILKEKDNKNSLVEKTNLKEARDLIDKKIVTEGMIPKTECCIRALAQGVKAAHIMMGRVQHSLLLEIFTNSGIGTMIVA

SEQ ID NO: 129978 - protein, 188 aa, Unknown
  Bacterial polypetide isolated from the Sargasso Sea
MSITRKQAENIASVLSEGLPYIQKFKDKVIVVKYGGAAMTEESLKQSFSRDIALMKLVGMKPVIVHGGGPQIGDELKKAGINSEFINGLRVTSKPAMTVVKKVLGTQINNEIVRLIKEFGANAISFNHNRYQIIRASKETNSQSVDLGYVGSVDKIITGELKKRINNGFIPVIAPIGKSKDNNYLNIN

SEQ ID NO: 129979 - protein, 289 aa, Unknown
  Bacterial polypetide isolated from the Sargasso Sea
MSKNISLNEIKEFWPEKAPDINIVQKYVKKYENEKIVIKYGGNVLIDRNVFNNFISDINVLNRLGLAVVVVHGGGPRIKRELDKKKIQSKFINGLRVTDKNIIETVEKVLIDFNKDIVNSLKQLGSDATSFHTKTDNVIEVEPEREELGFVGIPNKINNKLIQNALSENKIPIIAPLGLGKNDQTYNINGDTAASAIAKKLKSRRLILMTNVEGVYDDQKKLISEIKPFDLENLIKWKVVQGGMIPKIENCVDAVQNGVRGVVILDGRKPHSVLHEIFSDKGSGTLIRE

SEQ ID NO: 129980 - protein, 269 aa, Unknown
  Bacterial polypetide isolated from the Sargasso Sea
MPKRSLLFKGATMNPLIIKLGGVLLDSEEALERLFTALVNYRETHQRSLVIVHGGGCVVDELMKQLNLPVKKKNGLRVTPADQIDIITGALAGTANKTLLAWAKKHHIASVGLYLGDGDSVKVTPLDKELGHVGLAQPGSPKLINTLLESGFLPVVSSIGVTDDGLLMNVNADQAATALAATLGADLILLSDVSGILDGKGQRIAEMTAAKAEQLIEQGIITDGMIVKVNAALDAARTLGRPVDIASWRHAEQLPTLFNGTPIGTRILA

SEQ ID NO: 129981 - protein, 287 aa, Unknown
  Bacterial polypetide isolated from the Sargasso Sea
MTITRKQAENIASVLTEGLPYIRKFKDKVIVIKYGGAAMIDESLKESFTRDIALMKLVGMKPVVVHGGGPQIGNELAQAGVESEFIGGLRVTTKSAMTVVKKVLGTKINNEIVKLIKKFGGNAISFNHSKYQIIRASKEVIQGSIDLGYVGKVDKIKTRDLKKIIEKGFIPVIAPIGVSRENNYLNINADVVAGEVAEALDAEKLILLTDVKGIGDSKNKLISKISLQKGQRLLKEEYIKGGMTPKLKAALNAKKKGVKTCHIIDGRVPHAVLLEVLTEEGVGTMIS

SEQ ID NO: 129982 - protein, 283 aa, Unknown
  Bacterial polypetide isolated from the Sargasso Sea
MNDSQRVSILSEALPYIQSFSGRKIVIKYGGSVMENDNLKNAFFRDIALLSTVGVCPIVIHGGGPEINNWLKKLEISPKFENGLRITDQKTMEIVEMVLMGRVNKQIVKGINKTGSLAVGISGLDGNLIQSRELGDGSHGLVGEVTKINPEILDPLISKGYIPIISSIGSTLEGISHNINADFVAGEIAAAINAEKLILLTDTQGILKEKDNKNSLVEKTNLKEARDFIDKKIVTEGMIPKTECCIRALAQGVKAAHIIDGRIEHSLLLEIFTNSGIGTMIVA

SEQ ID NO: 129983 - protein, 282 aa, Unknown
  Bacterial polypetide isolated from the Sargasso Sea
MDLEKIIPKDGPSIEEVEKYVKKYSNELIVIKCGGSVLLDKNLFNQFIEDISIINKLGLSSIVVHGGGKNIKKKLDKNNIDSKFIDGLRVTDEKTIKIVEEALLELNAEILNSINNKEANAKSVTPKKGNIIKIIPEKKKLGFVGKPKKINKEVLLSIIREKKVPIVVPLGIGDDGNIYNINADVVAAAIAKEINSRRLLLMTDVEGVLDRDKKLIPEINSETANKMINAQSISGGMIPKIKTCIDAVNNGVTGVVIVDGRRQNSLLFEIFSDKGAGTLIRK

SEQ ID NO: 129984 - protein, 276 aa, Unknown
  Bacterial polypetide isolated from the Sargasso Sea
MKFDFLSESDQAYFIHKASTLVEALPFIREHSGDTIVIKYGGHAMGDPKLAKSFARDIGLIKEVGIFPVVIHGGGPQIADKLKTKNISSKFVDGLRVTDAETVKVVEDVLANEINTEIVKAISDSGGKAIGLSGNKNNLLNATKLKVEVKNSDSNIEKIIDIGFVGQPTNFNTDLIKQHIEKGYIPVIAPLGIDNEGNSYNINADTAAGFIAGKLKANKLLLLTDIAGVLDKNKKLIPSLKLEDAIEIVNEDFVVGGMKPKITTCIEAMKSGVAKS

SEQ ID NO: 129985 - protein, 298 aa, Unknown
  Bacterial polypetide isolated from the Sargasso Sea
MSYQNESNQWLKKVEFLSEFLPYMHQYNGSSIVIKYGGHAMTNKEMQSSFAKDIALLQQVGTKPVVVHGGGPQIETMLEKLNIKTDFVDGLRVTDKDTVNVVEMVLSGAINKSIVAAITSAGAKAVGISGKDGGLIKAEKIKSRRDPNSAIEKVVDLGFVGKPTNIENKVLNALMEGSLIPVVAPLGLGNDGQTYNINADTVAGAISSSLNAKRMLMLTDVPGVLDKNGKLIKELSSEEAKKLIDQKVITSGMIPKVETCIETVENGTDAAVILDGRAPHATLMELFTEHGGGTLIRK

SEQ ID NO: 129986 - protein, 298 aa, Unknown
  Bacterial polypetide isolated from the Sargasso Sea
MINKASTLAEALPYIRQHTGKNIVIKYGGHAMGDAALAKKFSQDIGLIKEVGINPIIVHGGGPQIGAMLKKKNIKTKFVEGLRITDKKTVKIVERVLSKDINKKIVSDINLTGGKAESFSGNVNNLIQAKKLKIAIKESDSNIERILDLGFVGEPTKINIKKILISIKNGKIPVIAPLGIDKNGNTYNINADTVAGAVAGALKASKLLLLTDVDGILDQNNKLISSLSYKEALKINKKKYISGGMKPKIATCIEAISKGVNEATILDGRISHALILELFTEHGIGTQIYSKINVKNKK

SEQ ID NO: 129987 - protein, 287 aa, Unknown
  Bacterial polypetide isolated from the Sargasso Sea
MGISVKQAKNISSVLSEGLPYIQRFKGKIIVVKYGGAAMSEQSLKRNFTRDISLMSLVGMKPVIVHGGGPQIANELKKKGVISKFISGHRITDKPTMNIVKKILGESINHEIVKLIKKAGGDAVSFNHIKPKIIKASKYLGPDKQDLGLVGKVDRILVSELKNIISSGSIPVIAPIGVNKDGSFLNINADVVAGKVAESLKAEKLILLTDIKGILDDNKQIISKISANKGRKLIKDNIIKGGMTPKLLAALEAKKNGVKSCHIIDGRLPHAVLLEVLTAEGVGTMIS

SEQ ID NO: 129988 - protein, 179 aa, Unknown
  Bacterial polypetide isolated from the Sargasso Sea
MSVSPIVIKVGGALLDDTAAMTRLFLSVKDVQATRPVVVVHGGGPLVETLMASLGLQSTKIDGLRVTPDEHMPYICGALAGSANKQLCAAALASGLTPVGLSLLDGNMVVCEPLADQYGAVGVPSTADASFLKSVLAQSTLPVISSIGSSPQGRLLNVNADQAATVIAELLNAELLLLS

SEQ ID NO: 129989 - protein, 260 aa, Unknown
  Bacterial polypetide isolated from the Sargasso Sea
MKFNFLSKSVQNYLINKASTLAEALPYIRQHTGKNIVIKYGGHAMGDAALAKKFSQDIGLIKEVGINPIIVHGGGPQIGAMLKKKNIKTRFVEGLRITDKKTVKIVEKVLSKDINKKIVSDINLTGGKAESFSGNVNSLIQAKKLKIAIKESDSNIERILDLGFVGEPTKINIKKILISIKKGKIPVIAPLGIDKNGNTYNINADTVAGAVAGALKASKLLLLTDVDGILDQNNKLISSLSYKEALKIYKKKIYIWWNEA

SEQ ID NO: 129990 - protein, 280 aa, Unknown
  Bacterial polypetide isolated from the Sargasso Sea
MKNIWPKDAPEIKDVPKYVEKYKNELIVIKYGGNVFIKREIFNNFIEDISLINKLGLSIVVVHGGGPRIERELKKENIKTRFINGLRVTDEKVIKIVERVLIDFNNDIVNSLNKKGTKAAPVNTKINNIIKVTPDKKELGFVGVPNEINTDILKNLIENKQIPIVAPLGLDKNKITFNINGDTAASSIAKKLKSRRLLLMTNVEGVYDDRKNLISEIKPFDMENLVKLKIVQGGMLPKINNCIDAVENGVRGVVILDGRRPRSILHEIFSDKGAGTLIRK

SEQ ID NO: 129991 - protein, 107 aa, Unknown
  Bacterial polypetide isolated from the Sargasso Sea
MDLKKILPKNGPPIEEVSKYIEKYKNELIVIKYGGNVFIDRNIFNNFIEDISLLNKLGLSIVVVHGGGPRIKRELDKSNIQSKFIRGLRVTDEKIINVVESVLIDFN

SEQ ID NO: 129992 - protein, 234 aa, Unknown
  Bacterial polypetide isolated from the Sargasso Sea
MEKILPKDGPNLEEVQKYINKYKNELIVVKYGGNVFIDREIFNNFITDLTILFQLGLSVVVVHGGGPRIKRELDKLNIKSKFIRGLRVTDEKIIDIVEKVLIEFNEDIVSSLKEKGTNGISLNTKQNNVIEVIQESEELGFVGIPTKINVDIIKDKIDKKLIPIISPLGIGKNNQTFNINGDSAAGFIAKSLKSRRLLLMTNVEGVLDKNRKLIQEISSSKILEMVKDETITEG

SEQ ID NO: 129993 - protein, 272 aa, Unknown
  Bacterial polypetide isolated from the Sargasso Sea
MPKIANIEKYISKYKKEIIVIKYGGNVLIDRNIFNNFIEDIGVLNKLGLSIVVVHGGGPRIERELKKENIESKFVKGLRVTDRKVIGIVEKVLIDFNKDIVNSLIKKGSKAIPINTDSNNIINVTPDREELGFVGIPDKINIDIINEAINQNQIPVVAPLGLDMNNQTFNINGDTAASAIAKKLRSRRLLLMTNVEGVYDDKKNLISEIKPFDLENLVKFKIVQGGMIPKIENCIDAVENGVRGVVILDGRKPHSILEEIFSDKGAGTLIRK

SEQ ID NO: 129994 - protein, 136 aa, Unknown
  Bacterial polypetide isolated from the Sargasso Sea
MKFDFLSESDQAYFIHKASTLVEALPYIREHSGDTIVIKYGGHAMGDKKLSESFSRDIGLLKEVGVSPIIIHGGGPQIGERLKSKNISTQFVEGLRVTDKETIKVVEEVLSKDINSEIVESISASGGKAIGVSGND

SEQ ID NO: 129995 - protein, 283 aa, Unknown
  Bacterial polypetide isolated from the Sargasso Sea
MNDSQRVSILSEALPYIQSFSGRKIVIKYGGSVMENDNLKNAFFRDIALLATVGVCPIVIHGGGPEINNWLKKLEISPKFENGLRITDQKTMEIVEMVLMGRVNKQIVKGINKTGSLAVGISGLDGNLIQSRELGDGSHGLVGEVTKINPEILDPLISKGYIPIISSIGSTLEGISHNINADFVAGEIAAAINAEKLILLTDTQGILKEKDNKNSLVEKTNLKEARDFIDKKIVTEGMIPKTECCIRALAQGVKAAHIIDGRIEHSLLLEIFTNSGIGTMIVA

SEQ ID NO: 129996 - protein, 259 aa, Unknown
  Bacterial polypetide isolated from the Sargasso Sea
MKFDFLSESDQAYFIHKASTLVEALPYIREHSGDTIVIKYGGHAMGDKKLSESFSRDIGLLKEVGVSPIIIHGGGPQIGERLKSKNISTQFVEGLRVTDKETIKVVEEVLSKDINSEIVESISASGGKAIGVSGNDNLVTATKLNVEIKDSDSNIEKIVDIGFVGQPIKLNKDMLTNFIKNGQIPVISPLGKDENNFTYNINADTVAGFIAGELQASKLLLLTDVPGILDKDEKLISSITLEEAKSIANKEYISGGMKP

SEQ ID NO: 129997 - protein, 295 aa, Unknown
  Bacterial polypetide isolated from the Sargasso Sea
MSLQNKQPESKQLLAKYWATGKKFHAKTLSFIKKYNNKIIVIKYGGYALTKPALLKSFAKNISLLNQLGIKVIVVHGGGPQIEKELKKRKINNEEYQGLRVTTKSVLGVVKRILSHDLNKLISDEIKKNGGKTKRLNGVSSKVLKAKIAMNGNIGFVGEPRGIDKNLIMKALKSNQIPIIAPLGIDTNKNTLNINADTAAAYIAESVKAERLLLLTDVAGVLDNNKKLITELDRKKAFQYIKKGTIKSGMIPKIKACFNTLKNGAKGVALIDGRKQNAVAMELLTTQGAGTLIKK

SEQ ID NO: 129998 - protein, 298 aa, Unknown
  Bacterial polypetide isolated from the Sargasso Sea
MIENDNSAKDWLNNADMLTEALPYMQKYAGSIIVIKYGGNAMKDSHSINSFCADIALLKQSGLKPVIVHGGGPQIGTMLEKVGIETKFESGMRITDEKTLEIVEMVLCGGINKEIASEINNCGCKAVGLSGKDASMIIARKHDGKIKDESNIEKIVDLGFVGVPEKINTGIIEILTSNDFIPVIAPLGINEEGKTFNINADTVAGAIAHSLNAKRLLVLTDVEGVIDDQKNVIAELSKSEAKNLINNDIISGGMIPKINTCIDAVENGVSAAVIVDGRVKHAVLLELFTEHGAGTLIR

SEQ ID NO: 129999 - protein, 264 aa, Unknown
  Bacterial polypetide isolated from the Sargasso Sea
KYFKKYSDELIVIKCGGSVLLDENLFNQFIENIAVINKLGLSAIVVHGGGKNIKKKLDQNNIETKFIDGLRVTDEKTIKIVEEALLELNTEILNKINDKEANAQSVTPKNENIIKIIPEKKKLGFVGTPKEINKEVLLSIVREKKIPIIVPLGIGDDEKIYNINADVAAAEIAKEINARRLILMTDVEGVLDKDKKLISEINSEKANSMINDQSISGGMIPKIKTCIDAVNNGVTGVVIVDGRRQNSILFEIFSDKGAGTLIRK

SEQ ID NO: 130000 - protein, 288 aa, Unknown
  Bacterial polypetide isolated from the Sargasso Sea
MPQKNLSFIKTIWPKEAKNFGNVLKYLEKYKNDLIVIKYGGNVLIDRNIFNNFINDINILNNLGLSIIVVHGGGPRIERELKKKKIQSNFINGLRVTDKNVISIVEKVLIDFNNDIVASLNKKGSRAVSINSKVNNIIKIIPDNKELGYVGIPQDININFLKNLIKENKIPVVAPLGLDENDNVFNINGDTAASAIAKKLKSRRLLLMTNVEGVYDDRKSLISEIKPFDIENLVKLKIVQGGMIPKIKNCIDAVENGVRGVVILDGRKPHSILDELFSDKGSGTLIRK

SEQ ID NO: 130001 - protein, 216 aa, Unknown
  Bacterial polypetide isolated from the Sargasso Sea
MIEALPYIQQLSGTTIVIKFGGNAMTDDALKNNFARDVVLLKQVGCHPVIIHGGGPQITKHLEKQGIESNFANGMRITDEKSIDIIEMVLGGLINKDIVNTITSLGGKAVGLSGKDGGLIRAKKIEGEGEFKNIDFKNTGTVKSIDPGVVKLLDGSTFIPVIAPIGIGDDGKTYNINADIVAGKIAHILQASKYLILTNTQGILDSNGSLIQSINT

SEQ ID NO: 130002 - protein, 269 aa, Unknown
  Bacterial polypetide isolated from the Sargasso Sea
MTVSRIDAEKIASVLVEGMPYIQRFSNKRIVIKYGGAAMLKNKLRQGFARDIALMKLVGMHPIVIHGGGPQIGAELERKNIETSFYEGYRVTNKATMTVVKKVLGKEINKEIVQLIKSFGGSAESLSWFNSDLIKASKLNEEKLGLVGKVNTVKISEITKLLKKNYIPIISPIGKDNEGNYLNINADLVAGKIASSLKAEKLILLTDVAGIKDEDGKFLSKITKRKAKQLIKTNVIKGGMSPKLSSSLNSIKKGTKSVTITDGRVPHAV

SEQ ID NO: 130003 - protein, 303 aa, Unknown
  Bacterial polypetide isolated from the Sargasso Sea
MKFDFLSESDQAYFIHKASTLVEALPYIREHSGDTIVIKYGGHAMGDKKLSESFSRDIGLLKEIGVSPIIIHGGGPQIGERLKSKNISTQFVEGLRVTDKETINVVEEVLSKDINSEIVESISASGGKAIGVSGNDNLVTATKLNVEIKDSDSNIEKIVDIGFVGQPKKLNKDMLTSFIKNGQIPVISPLGKDENNFTYNINADTVAGFIAGELQASKLLLLTDVPGILDKDEKLISSITLEEAKNIANKEYISGGMKPKINTCIDAMKKGVKKSTILDGRIPHSVILELFTEHGIGTQITSN

SEQ ID NO: 130004 - protein, 293 aa, Unknown
  Bacterial polypetide isolated from the Sargasso Sea
MADSKQSGDDALRVSVLSEALPYIQHFAGRRIVVKYGGAAMAHAELRDAVFRDLALLACVGVQPVVVHGGGPEINQWLKRLEIPAEFRDGLRVTDADTMDVVEMVLVGRVNKQIVNGLNRLGARAVGLSGSDGGLVEARPWGDGSHGLVGDVARVNPDVLEPLLERGYVPVISSVAATPEDGKAHNINADTVAGEVAAALEAEKLVLLTDTPGILRDRADPASLIRQLRLSEARQLIHDGVVAGGMTPKTECCIRALAQGVAAAHIIDGRVPHALLLEVFTDAGIGTMVVGRG

SEQ ID NO: 130005 - protein, 232 aa, Unknown
  Bacterial polypetide isolated from the Sargasso Sea
MPVIESKIMINSNSFKKNEEDHIELINEFRSLEKKIADNSERAKPKFEKRGQLLPRERLAALLDPDSYFIPLSTLAGYKMGDDDGDKNISGGGGISGIGYVSGVRCMVSASDSGIKGGSMTEMGVVKALRGAEIIKENKLPLISLVESAGANLFRQSEVFLPGGRSFANLAKMSAMGIPTIAVVHGNSTAGGAYTPGLSDQVIVVKNRSKIFLAGPPLLKAALGEIATDEEL

SEQ ID NO: 130006 - protein, 151 aa, Unknown
  Bacterial polypetide isolated from the Sargasso Sea
FIIWVGEEDHLRIMCMEKGSVLNTIFDRLKKALDKIDGIEGLAFAKSPDYGYVTSCPTNLGTGMRASLHIKLPKLTADGQGDPHGNSPAAKAIAKPLGLSVRGTGGEHTPIDAEGTVDISPSARFCIKESQIITNLYLGIKQMKEAEDAKA

SEQ ID NO: 130007 - protein, 350 aa, Unknown
  Bacterial polypetide isolated from the Sargasso Sea
MDFSIAATISLDEGIKELTAKYKSIIEKYNSSSREIEAEVLEAYILILNDPELINSLSELNEANLEKIYDVFLEQSEVFKQMDDEYFQQRSEDIEAIGKELIFTLQDISIEFDADVPQVIFANELTPNETSSMNLNLVKGFVVKEGGPTSHAVIVAKNYGIPCILGISIADFDIDNVEEVIINGSTGELTINPDESSLKIVEEYKATITKQLENYTEENLNKLGVELRANIGSTDEIKSFKDSLIKSIGLFRSEFLYIEESTEPELDSLINSNNLLNEKFEETIVYRTLDIGGDKQVDYLNLPQEENPFLGVRGVRLTLENRKLFETQISSILNSNISGKVKIMFPMVAT

SEQ ID NO: 130008 - protein, 292 aa, Unknown
  Bacterial polypetide isolated from the Sargasso Sea
MVDEDQNLTEIFQVFKDTSDQMLSFEDEYFKQRAEDIISIGKEIIFTMQDIVNDKNLTEDVIIFADDLTPNDTSSIDLTKVKGFVVSNAGPTSHAVIVAKNLGIPCVINFDISKIDTDFDKSVVLDGDTGEIFLDPTSDVLKKVEEGMNKINKLRESYNQDSIKDLGIELRANIGSSEEINAFNDDHIKSVGLFRSEFVYIDRASKPTLKEQIEINNELNTKFSNTIVFRTLDIGGDKQVPYLNLPKEENPFLGVRGIRYSLDEKDLFREQIISILSSDLIDKVKIMFPMVS

SEQ ID NO: 130009 - protein, 252 aa, Unknown
  Bacterial polypetide isolated from the Sargasso Sea
YPYRKPVIFRTLDVGADKAAPYMGFQEEENPFLGYRAVRRQLKQKTVLKEQLTALLMATEKRPNVRLLFPMITNVNEIVEAKELFQQCKMELELIGRPTSKIEIGMMFEVPSTLLICDKFMNEIDFCSIGSNDLTQYVLAVDRNNQHIADLYDPLHPAVLCLIDKLIKTAQEYHKPVEICGEMASDPDGCVILAGLGINSLSMNAPLIPVVKRRLSKISIVNARSLAEKALKATSPKEVRKMIKESLPASHS

SEQ ID NO: 130010 - protein, 163 aa, Unknown
  Bacterial polypetide isolated from the Sargasso Sea
IEVGMMVEVPSAALMAATFTREVNFFSIGTNDLIQYTVAVDRGNERVANLYSAANPAVVKLMKSVIRAARRGGIETSICGEIAGDPIYTMLLIGLGLRHLSMVPSQIPAVKQVIRKVSVPDCERLARKIGSLDSDRRILSTLRKELNEIVPEALRGWSAEQTS

SEQ ID NO: 130011 - protein, 293 aa, Unknown
  Bacterial polypetide isolated from the Sargasso Sea
VIATAPINTIREQKKNAEWALKLNADRLITFFEGIEDAYLRSKQNDVIQVVDRILLSLQQAPAEADNRLAHDLAGHIVVAADLTPADTVMLRHRHMAGFVTRFGGPISHTAILARSLRVPAVLGLHGTIDYIHNDDLLVIDAANNTVLVAPDETLLAEFRHRRDQAQARTLSLQSLQTKNAQTQDGLIVRLLANVELPEDLDVLPDAGADGIGLYRTEFLFMNAHQQPSESEQYNAYCQVLEHSPGPVAIRTLDLGADKQVDGGRSNSQNTVNPALGLRAIRLCLREPDLSNH

SEQ ID NO: 130012 - protein, 254 aa, Unknown
  Bacterial polypetide isolated from the Sargasso Sea
TSHAVIVAKNLGIPCVINFDISKIDTDFDKSVVLDGDTGEIFLDPTSDVLKKVEEGLNKINKLRESYNQDSIKDLGIELRANIGSSEEINAFNDDHIKSVGLFRSEFVYIDRSSKPTLKEQIEINNELNTKFSNTIVFRTLDIGGDKQVPYLNLPKEENPFLGVRGIRYSLDEEDLFRQQIISILSSDLIEKVKIMFPMVSILDDFLDAKKIVIDESKKLNVNPPPLGIMVETPSVTLNTDQYIQHVDFFSIGT

SEQ ID NO: 130013 - protein, 288 aa, Unknown
  Bacterial polypetide isolated from the Sargasso Sea
DNTRLEHSLATLAEQLNQQLRERDGESKTILSAHLSLIQDDEFAGNIRRLMLEQHLGLGAAIVANMELVCDKLSASGSDYLRERVSDIRDISEQLLHITWPERRPRNALVLNKPTILVAEDLTPSQFLSLDLQHLSGMILEKTGRTSHTLILARASAIPVLSGLPLAAINRYSGQHAILDARCGVLAINPDDAVRGYYAIAQKLADECQRRQALDAAQPALTKDNQRIDVAANIGTALEAPGAFANGAEGIGLFRTEMLFMDRDSAPDEQEQFEAYQQVLLAAGDKPV

SEQ ID NO: 130014 - protein, 250 aa, Unknown
  Bacterial polypetide isolated from the Sargasso Sea
ARCPNIYECWNRKTATLMILGDTCTRACGFCSVKTGKPTWNDPLEPLRVAQAVKKMGLRHVVITSVDRDDLKGDYGASIWADTIKQTKKVNPECTVEVLTPDFKGYEPALKIVFDAKPDIFSHNVECVERISKAVRAQANWKRSLGVLEKSIQYGLRTKTGIMVGLGEKTKEVKGTMKQVVDLGVQIFTIGQYLQPTKNHLKVQEYVSKEQFEAYKEYGYSIGFKVVESGPLVRSSYHADEQARMVFNNG

SEQ ID NO: 130015 - protein, 274 aa, Unknown
  Bacterial polypetide isolated from the Sargasso Sea
QQLSSKLSSQLRPEELALFDVYLMMLDDAALGNEVTRIIRSGQWAQGALREVVLAHVTRFELMDDPYLRERAADVKDLGRRILAYLQEVGRQELVFPDQTILVSEELSPVMLGQVPKEKLVGLVSVLGSGSSHVAILARAMGIPTVMGALDLPYTRLDGMELIVDGNRGEGYSNPSPELRRHYLELVREERELVQGLEKLRDVPCVTLDGFRMPLMVNTGLQADVARSLDRGAEGVGLYRTEVPFMIQDRFPSEKEQQATYREQLEAFHPLPVT

SEQ ID NO: 130016 - protein, 284 aa, Unknown
  Bacterial polypetide isolated from the Sargasso Sea
IVLLSLGLLYEWSSEKRGASIQKQLDLALEQASKNEEGIVSIESDELVVRVAVETGAIIETRLKKYPVENITGSLGFRVFGQSPDSAFNYYFKSGFTGTNPSFVVSSMGDDFVSLIDERLGIIKTISFLSSPYEISVYDRSLVGVDGKSFAGLYRTEGRSLDLKTDVLSGGMMNNSSFEGVAISTESDPYKTSRLRSIDEPIEALSRSGWIAFIQKYFFAAILGSDEYIYNYYVLPKESGLFRMGYTVESSAKSSVVFDHTHRLFVGPKIRKDLMQRAKNLELS

SEQ ID NO: 130017 - protein, 302 aa, Unknown
  Bacterial polypetide isolated from the Sargasso Sea
FRHGAEGIGLYRTEIFFLSLDRYPEIEEQVEVYQKVFDSIPQEQPLMIRTLDLGADKAAPYMGYPHEGNPYLGCRALRRQLRKPRVLKNQLKSILLASKNREKLSLIFPMVTDVHEIRQAKKLLHECAVDLGNQYNPAKLPEIGMMFEVPSSFMISERFMQVIDYCAIGSNDLTQYLLAVDRNNPQISHLYDPLHPAVLQMIKILIDNANRHQKPVELCGEMASDPDGCVILVGLGLKIFSMNAPLIPTVKERLSLITMPEAVKLAEKSLQSESALEVRNLVRAHFQEPLLQTDPIRPTVPS

SEQ ID NO: 130018 - protein, 257 aa, Unknown
  Bacterial polypetide isolated from the Sargasso Sea
INIIKNGDKLIMDPENQIIIVNLDEFELKHFKKIQLENNSLIKSFKKTTNKKAVTKDRIKIDVMCNLELSEEVKLLNDSSDGVGLFRTEYLYMNRNDLPTEQEQFQAYSKVFNKVKNKPVTLRTLDIGSDKEVSENMKVGQIVKNPALGLRGIRYSLYEKNLFKVQIKAMLRAAKNGKLRILIPMITTLDEINQAKELIDDAKVELIKEKQSFSHKYEVGIMIEVPASAIQSNVLSKHVDFMSIGTNDLVQYILAID

SEQ ID NO: 130019 - protein, 307 aa, Unknown
  Bacterial polypetide isolated from the Sargasso Sea
KIKLRIESGNTASWSIFKTVEDYLGAFAEIKDPYLSEKGADLKDVGYRLLHYLGHEVLSVTKKTGILIMRQLLPGDIARLDTTRIKGIILSKGGVVSHAAILARSLRIPAVCIEDQELEQIHDGDPLAINGDSGIAVAYPDKKILEEFKKLLVEQQNYFDHLDDFRDIPCKTTDGTRISLLANIALGSDEIQLPLYGAEGVGLFRTEFYFLSLDRYPSVSEQAQVYSDLLRNIPEDKPVIFRTLDVGADKAAPYMGFQEEENPFLGYRAIRRQLKQKTVLKEQLTALLIAAEQRQNVRLLFPMITKR

SEQ ID NO: 130020 - protein, 139 aa, Unknown
  Bacterial polypetide isolated from the Sargasso Sea
LLICEKFLNEIDFCSIGTNDLTQYVLAVDRNNQNIADLYDPLHPAVLKLIDKLVKAAKKYQKPVEICGEMASDPDGCVILAGLGIISLSMNAPLIPVIKKRLSEISITDARSLAERALEVNSPREVRNLIRKYLPDSHS

SEQ ID NO: 130021 - protein, 429 aa, Unknown
  Bacterial polypetide isolated from the Sargasso Sea
MNGTGIGRGIAIGRALVLDAPQHEVPHFQIDVKRIDDEILRFNQAISTVRQELQHLQSNLPPTAPPETGAFIDVHLLMLDDPLISKEPAESIRRKQINAEWALSNHAQTLIAFFDNISDPYLRTKKDDVAQVVGRIMNILTQQPERHPNLSSMEPALTDRIIVARDLSPADAVMLRHRSMAAFVTSLGGPISHTAILARSLGIPAIVGLHGVIDAIRDQDELIVDAASGTVLVSPDERLLKQFELLQARQHEERQALAKVGEKRAATLDDQEMTLLANIELPEDLDALAGSGAAGVGLYRTEFLFMNRTEPPGEEEQYQAYSQIIKAVNGPVTIRTLDLGADKQVDGGRDEPKAAMTAALGLRAIRLCLSEPSLFKPQLRAILRAAVHGDVQMMIPMLSSLSELEQSLSLIREVCAELEREGALFKPNI

SEQ ID NO: 130022 - protein, 550 aa, Unknown
  Bacterial polypetide isolated from the Sargasso Sea
SNPPEEELQDFHSALEHTINDTIKLVEKISSDVGPEEAAIFHVHLMFLEDQHFQEKIQNYILDGNSVSWSIYETIEEYLSAFSEIDDPYLSEKGADLKDVGYRLLHFLGHELLAETQKEGILVIDELLPGDMARLDPNRIKGIITSSGGIVSHAAILARSLRIPGICLEPELMKRIHEGDLIALDGKNGTAVVHPGEELMAAFKRRLVLEEQHQEHLDQFRDKPCKTKDGLRINVLANIAMENDLNQLFRHGAEGIGLYRTEIFFLSLDRYPEIEEQVEVYQKVFDSIPQEQPLMIRTLDLGADKAAPYMGYPHERNPYLGCRALRRQLRKPRVLKNQLKSILLASGNREKLSLIFPMVTDLHEIRQAKKLLHECAADLGNQYNPAKLPEIGMMFEVPSSFMISERFMEVIDYCAIGSNDLTQYLLAVDRNNPQISHLYDPLHPAVLQLIKILIDNANRYQKPVELCGEMASDPDGCVILVGLGLKIFSMNAPLIPTVKERLSLITMPEAVRLAEKSLQLESALEVRNLVRAHFQEPLLQTDSIRPTVPS

SEQ ID NO: 130023 - protein, 250 aa, Unknown
  Bacterial polypetide isolated from the Sargasso Sea
MSSGFSLEDGYASIENDDLIVVVSVPTGNIVETRLKKYPVENVQGSLGYRVFGESKESAFSYYFKSGFTNTSPVYSVRDFGKDYLVLIDDNLGLVKKISFSDSSYELSIHDESLVGVNGKIFAGLYRTEGRALDLKRNALDGGMMNNSSYEGVAISSEQDPYDTSRLSRIDDPKEVLTRSGWVAFVQKYFFAALIGSDEYIYNYYVLPKESGVYRMGYTVESSSTSNLSISHEHRLFVGPKIRKDLMQRA

SEQ ID NO: 130024 - protein, 270 aa, Unknown
  Bacterial polypetide isolated from the Sargasso Sea
MNIRNFYIVGIVLLSLGLLYEWSSEKRDASIQKQLDLALEEASGNKDGVVSIQSDELVLKIAVNTGAIIETRLKEYPVENIQGSLGFRVFGRSLDSSFNYYFKSGFTGVSPNFVISSMGDDYVVLVDEKLKITKTVSFLSSPYEVSIYDKSNTGVDGKSFAGLYRTEGRSLDLKTDALSGGMMNNSSFEGVAISTESDPYETTRLRSVDEPIEVLSRSGWVAFIQKYFFAAILGSDEHIYNYYVLPKESGFFRMGYTVEGAATNNKVFWS

SEQ ID NO: 130025 - protein, 311 aa, Unknown
  Bacterial polypetide isolated from the Sargasso Sea
MAQKQSQNDVDLSGQTVWVIDLFSRVYQLFHALPEMSSPEGTPVSVIFGLTRDLIDITEKKKPNYLFCGSDTPEPTFRHKQFEAYKATRSEMPADLVPQLPLVKKLLEVFGVPCIELAGYEADDVLATLAVQTVAAGGDCTLVTSDKDARQLLGPHVRLLNLRNNAFVGEAELLADWGIRPDQVVDYLSLVGDAVDNVPGIPGIGPKIASSLLQQFGTLEEILSRCDEVKGKKRQENIALHGDTARQGRSLIQLELNTPIEISWESAVVQRPDPEPLLQFLQQLGFKTLVKKVQSLSGGKTSVAKPIKSDG

SEQ ID NO: 130026 - protein, 842 aa, Unknown
  Bacterial polypetide isolated from the Sargasso Sea
MLSPLTGPIVALADVPDPVFSGGMFGDGIGVDPLAGQLVAPCAGVVSHLARTGHAVTITTPQGAEVLLHIGIDTVELNGQGFIAHVEAGARVEAGTLLIEFDQDAVARSAHSLVSVVAIANSDAFEVVDRASGFATAGKTPLLVLRGKGEAAVQAAQTGAAAQNEVRREIVLAQPGGLHARPAARAREAVRGFDATVDVLFDGRKASIASVVGLLGLGAGEGATVELVGRGAHAQQAVDAVEHELLREAHGEVEEQPARLKSPAPQTVARNVGAPVEPNTLAGVCAAPGIAVGTLVRLDDAEIVPPEQAAGTPATESRQLDQALKAVDAELAETVRNASARGAVGEAGIFAVHRVLLEDPTLIDAARDLISLGKSAGFAWRATIRTQIDTLSKLDDALLAERAADLRDIEKRVQRALGHTNGAARVLPDEAVLAAEEFTPSDLSSLDRQRVTALVMARGGATSHAAIIARQLGIPALVAVGDALYAIPDGTQVVVDASAGRLEHAPTALDVERARHERQRLDGVREANRQLAGEAAATVDGRAIEVAANIATLDDANTAVDNGADAVGLLRTELMFIHRQAAPTAVEHQQSYQSIVDALQGRTAIIRTLDVGADKEVDYLTLPPEPNPALGLRGIRLAQVRPDLLDDQLQGLLAVKPFGAVRILLPMVTDAGELVRLRKRIDEFARAQGRTEPIEVGVMIEVPSAALLADQLAQHADFLSIGTNDLTQYTLAMDRCQADLAAQSDGLHPAVLRLIDIAVRGAAKHGKWVGVCGALGGDPLAVPILVGLGVTELSVDPVSVPGIKARVRRLDYQLCRQRAQDLLALDSAQAVRAASREVWPLD

SEQ ID NO: 130027 - protein, 596 aa, Unknown
  Bacterial polypetide isolated from the Sargasso Sea
HVKRTRSRRKPARQSSPAPQAVAHAAGETLAPNTLAGVCAAPGVAVGKLVRWDDADIDPPEKANGTSAAESRLLDKAIATVDADLGTTVRDASQRGAVGEAGIFAVHRVLLEDPTLVDAARDLISLGKSAGFAWREAIRAQIAILTNIEDALLAERAADLRDIEKRVLRALGYTNAAARTLPDEAVLAAEEFTPSDLSTLDRSRVTALVMARGGATSHAAILARQAGIPALVAVGDALHAIPEGTQVVVNATTGRLEFAPTELDVERARLERSRLAGVREANRRTSQQAAVTADGRAIEVAANIATLDDAKTAVENGADSVGLLRTELLFIHRAAAPTTDEHRQSYQAIVDALSGRTAIIRTLDVGADKEVDYLTLPPEPNPALGLRGIRLAQVRPDLLDDQLRGLLAVQPLGAVRILLPMVTDVGELIRIRKRIDEFAREAGRTEPIEVGVMIEVPSAALLADQLSQHADFLSIGTNDLTQYTLAMDRCQADLAAQADGLHPAVLRLIAATVQGANKHGKWVGVCGALAGDPLAMPLLVGLGVTELSVDPVSVPGIKARVRNLDYQLCRQRAQDALALESAQAVRAVSRETWPLD

SEQ ID NO: 130028 - protein, 423 aa, Unknown
  Bacterial polypetide isolated from the Sargasso Sea
FRVFGQSNESAFNYYFKSGFTGVSPSYVVLERGNDFVTLYDEVLDITKAISFLPSPYEISIYDYSSKGVNGKSFAGLYRTEGRALDLKRDALSGGMMNNSSYEGVAISTESDPYETSRLRSIDEPVEVLSRSGWVAFIQKYFFAALLGSDEYIYNYYVLPKESGLYRMGYTVEGSSTNNVAFSHKHRLFVGPKVRKDLMQRAENLELSIDMGWFWFLAQPMVSFMAFLNSYLNNWGLTIIMFTLIIKLVFWPVTAKSFRSMAALRKITPELNEIKERYKDDRQKQGTETMKLMRQNGANPLGGCLPLLIQMPFFIGFFFALREMVELRHSSLGFWSDLSAPDPYFVLPALFCLTMVLTQKLNPQPAGMDQTQAQVMKYMPVMFSVLFILFPAALCLYTVVNSAIQLAQQSYLYKKLGALEGAK

SEQ ID NO: 130029 - protein, 298 aa, Unknown
  Bacterial polypetide isolated from the Sargasso Sea
RVLPQLRNETGGEREYPENAVLVADEITPDMLGEVPRHLLAGIVSLRGSSNSHVAILTEAMGVPSVMGTENLPLEVLEGKAVVVDGFNGIVITDPTEDQRRVYERIQKEEEQLAEGLSELKSEPPETLDGHLIRLSVNTGLTTDVTTSLDRGAEGVGLYRTEFQFMMKDRFPTEEEQYGIYREHLSAFAPNPVTMRTLDIGGDKSLTYFPIEETNPFLGWRGIRVSLDHPELFLSQVRAMIRACENTDAYLRIMLPMVSSVAEVDEAQRLISQCYQELIEEGIEVEMPDIGVMIEVPA

SEQ ID NO: 130030 - protein, 272 aa, Unknown
  Bacterial polypetide isolated from the Sargasso Sea
VGLVSVLGSGNSHVAILARAMGIPTVMGLVDLPYSKVDGIDMIVDGHRGEVFTNPSDVLRKQYAEVVEEEKQLAQGLDSLRELPCVTPDGHRVPLLVNTGLLADVARAQQRGAEGVGLYRTEVPFMINQRFPSEKEQLAIYREQLQAFHPLPVTMRSLDIGGDKSLSYFPIKEDNPFLGWRGIRVTLDHPEIFLVQTRAMLKASEGLNNLRILLPMISGTHELEEALHLIHRAWGEVRDEGADVPMPPIGVMIEIPAAVYQAKELARQVDFL

SEQ ID NO: 130031 - protein, 286 aa, Unknown
  Bacterial polypetide isolated from the Sargasso Sea
GPTSHAVIVAKNLGIPFVINFDISKIDTDFDKSVVLDGDTGEIFLDPTSDVLKKIEEGLNKINKLKESYNQDSIKDLGIELRANIGSSEEINAFNDDHIKSVGLFRSEFVYIDRSSKPTLKEQIEINNELNTKFSNTIVFRTLDIGGDKQVPYLNLPKEENPFLGVRGIRYSLDEKDLFREQIISILGSDLIEKVKIMFPMVSILDDFLGAKKIVTDESKKLNVKPPPLGIMVETPSVALNTDQYIQHVDFFSIGTNDLIQYTYAADRGLSTLNKYQDPLDVSVLR

SEQ ID NO: 130032 - protein, 289 aa, Unknown
  Bacterial polypetide isolated from the Sargasso Sea
FLDPTSDVLKKVEEGLNKINKLRESYNQDSIKDLGIELRANIGSSEEINAFNDDHIKSVGLFRSEFVYIDRSSKPTLKEQIEINNELNTKFPNTIVFRTLDIGGDKQVPYLNLPKEENPFLGVRGIRYSLDEKDLFREQIISILSSDLIEKVKIMFPMVSILDDFLDAKKIVTDESKKLNVNPPPLGIMVETPSVALNTDQYIQHVDFFSIGTNDLIQYTYAADRGLSTLNKYQDPLDVSVLRLISNVIDTGLKNDIEVSVCGDMASDKDSSIILYLLGLRVFSIAPSQ

SEQ ID NO: 130033 - protein, 245 aa, Unknown
  Bacterial polypetide isolated from the Sargasso Sea
VIFRTLDIGADKEIPENIKTGSVARNPALGLRGIRYSLSDKSIFINQIKAILRAGANHEVKIMLPMITTISEIKEAMKLIDIAKNELNRERKAYNKNVEIGIMIEVPSSAVLANRFAKYVDFFSIGTNDLVQYTLAIDRVDDEVNYLYDPTNSAVLTLIKMVIDAGIKGRIPVALCGEMAGDANYTKLLLGLGLKSFSMHPSAIPEIKNIIINSNIKNLKSLTRRIINCDSKTAKEKLLEKISNH

SEQ ID NO: 130034 - protein, 312 aa, Unknown
  Bacterial polypetide isolated from the Sargasso Sea
ILTKGAKKYYQKIQLDQSENKKELISIMHKDAITSDKKHIELMVNLELPEELKMLKAEHIDGIGLFRTEYIYSDRDDFPSELEQYNTYKKVVQKMLGKPVIFRTLDIGADKEVPENIKSGSIARNPALGLRGIRYSLNNQIIFLNQIKAILRAAHYGNVKIMLPMITTVSEVEDAKNLIAKAKEELNSKKKNFNDSVNIGIMIEVPSSAVNASQFAKHVDFFSIGTNDLVQYALAIDRVNDEVNYLYDPFNSAVLQLIHNVIKVGKKNNIPVSLCGEMAGDINFTRLLLGMGLQSFSMHPSAIPEIKKIILN

SEQ ID NO: 130035 - protein, 282 aa, Unknown
  Bacterial polypetide isolated from the Sargasso Sea
DNFEHLFLDSIGLFRSEFIYLDRQSPPTLEDQKKVLSELSEKFKGTIVFRTLDIGGDKQVKHLNLPVEENPFLGVRGVRLSLENKDIFYSQVRSILESECIDRLKVMFPMVSTIEDFLDAKNYVNEIAEELDLKTPPLGIMVETPSSALMSDQFAEVVDFISIGTNDLTQYIMAADRGNSNLSKYQNPLHPAVLRAISGVINNCKKNKIEVSVCGEMASDPMSALALYTLGLRTFSMSPSAAPFVFEILDKNHQSIPEQFEDKMLSALNAEEVTLLIEENIL

SEQ ID NO: 130036 - protein, 208 aa, Unknown
  Bacterial polypetide isolated from the Sargasso Sea
SEQTKVYRDLLVNVPEDMPVIFRTLDVGADKAAPYMGFQEEDNPFLGYRAVRRQLKQKTVLKEQLTALLIAAEIRPNVRLLFPMITNVNEIIQAKELFQQCRLEVEAKGISIAEIEIGMMFEVPSTLLICEKFLNEIDFCSIGTNDLTQYVLAVDRNNQNIADLYDPLHPAVLKLIDKLVKCAEKCQKPVEICGEMASDPDGCVILAG

SEQ ID NO: 130037 - protein, 249 aa, Unknown
  Bacterial polypetide isolated from the Sargasso Sea
KEQIEINNELNTKFSNTIVFRTLDIGGDKQVPYLNLPKEENPFLGVRGIRYSLDEKDLFREQIISILSSDLIEKVKIMFPMVSILDDFLNAKKIVTDESKKLNVNPPPLGIMVETPSVALNTDQYIQHVDFFSIGTNDLIQYTYAADRGLSTLNKYQDPLDVSVLRLISNVIDTGLKNDIEVSVCGDMASDKDSSIILYLLGLRVFSIAPSQGPNIINSLIHAKQNLSHIKKEEILSSTDSQSLRKLIS

SEQ ID NO: 130038 - protein, 99 aa, Unknown
  Bacterial polypetide isolated from the Sargasso Sea
HVSYLYQPINPGVVRLISWSVAAAKKLRKPVFLCGEMASDAKYLPLLLGLGLTQVSVRPSVVADIRTKIENTSVKNSRLLVERFMNSGDSNVLEELLAD

SEQ ID NO: 130039 - protein, 259 aa, Unknown
  Bacterial polypetide isolated from the Sargasso Sea
MEPANGRSIIIRTMDIGGDKPVAYLNIPAENNPFLGYRAVRIYEEYQTLFRTQLRAILRASAHGSLKIMIPMISSMEEILWVKDQLAEARQSLRDEHIPFDEKIPFGIMLEVPSVMFIIDQCCEEIDFFSIGSNDLTQYLLAVDRDNSKVTRHYNSLNPAFLRALDYAVQAVHRQGKWIGLCGELGAKGSVLPLLVGLGLDELSMSAPAIPATKARLARLDSRACRQLLNHAMQCRTSLEVEHLLAQFRMAQQDAPLIT

SEQ ID NO: 130040 - protein, 244 aa, Unknown
  Bacterial polypetide isolated from the Sargasso Sea
MGAVDLPYSKVDGIELIIDGYRGEIITNPGKVLREQYEVLAEQERQLSAGLDVLRELPCETTDGHRIPLWVNTGLLADVVRAQERGAEGVGLYRTEVPFMIKERFPSEKEQMAIYREQLEAFHPLPVTMRSLDIGGDKCLPYFPIKEENPFLGWRGIRVTLDHPEIFLLQTRAMLKASAGLNNLRILLPMISGIRELEEALHLIHRAWCEVRDEGLDVIMPPVGVMIEVPAAVYLTRELARMVD

SEQ ID NO: 130041 - protein, 113 aa, Unknown
  Bacterial polypetide isolated from the Sargasso Sea
NVPLFRTQLRAILRASALGKVQILFPLIMTLKELRQAKMLLSDVMEDLEESKIKFDRQIKVGIMAEVPATALLLERFLDEVDFVSIGTNDLIQYTLAVDRSNKDVAFHVHCRV

SEQ ID NO: 130042 - protein, 462 aa, Unknown
  Bacterial polypetide isolated from the Sargasso Sea
MLKLQGIAVSSGVTIGEALVLDSEGFRIPRRFVARSAVDTELQRLSNAIAESTDEIKRNRDAVREELGEQYAAIFDAHLAMLHDQRLQEELTSAVRERNWWPEYAVSRTLRRYAKVFQKLDNHIAQRAHDIYDIEKSLLRNLLGQRRETLASISEPVVILAHNLTPSETANLDRRFVKGFATELGGPGSHTAIVAEGLEIPAVVGIGPFLADVSGGEPVILDGNQGVVILQPDEETIARYRLEAEVAETVAASLGHLRDLPAETVDGVRVQIRGNIEFPEEVEQCKRRGSDGIGLYRTEFLYLTSQHEPSEEDHYRAYSKVIDAIDGKPMVVRTLDLGSDKMLTEKSPEEERNPCLGLRSIRLSLRQLPMFRTQLRAILRASSHGDVRVMFPLVSTIIELRQARLVLADVMEDLAEHDIDFNPKLKIGIMVETPAAAMMLDAFIKEVDFVSVGTNDLIQYTL

SEQ ID NO: 130043 - protein, 567 aa, Unknown
  Bacterial polypetide isolated from the Sargasso Sea
MSITGIIVSSGIAFGKALHLNHCENHLDYRPIPLSRIPQQQSKFLKALQTLKQQLSLSQTKLDPDSENYQLIEADLLLLDDEELIEQVKEAIRTLQLSASVAVERIFAHQANELESLDDPYLANRAQDVRCLGQRIVTAINGRLDQGLTHLSEPTILLAQDLTPAEFALLPKEHISGIVLKTGGLTSHTAILARAAGIPAILSCQFDAELIPNGIPLVLDAISGALYVNPEPEQQARLTVTLHHEQARRQALQAYRDVPAQTQDGHQVRLLANVGNLNEITHVKDEGADGIGLFRTEFMLMHTSTLPDEKAQYNLYCEALHALGGKTFTIRTLDIGADKELPCLCQDIEDNPALGQRGVRYTLAHPELFKTQLRAILRAANHGPIRLMFPMVNQVEELDEIFTLIAECQDALEDEEKGYGELSYGIVVETPAAVLNLASMLPRLDFVSIGTNDLTQYAMAADRTNPQLTRDYPSLSPAILSLINMTIIQAKAAEVTVSLCGELASSPHIAPLLVGMGLDELSVNLSSLLEVKAAICQGELAKFSALAHTAMQQNRISDLQQCITNCK

SEQ ID NO: 130044 - protein, 194 aa, Unknown
  Bacterial polypetide isolated from the Sargasso Sea
MLPMVTSIDEVDEARRLIERAGREVEEMIGYEIPKPRIGIMLEVPSMVFMLPHLTNRIDFISVGTNDLTQYILAVDRNNTRVASIYDSLHPGMLRALAMIAQEAERSGIDLRLCGEMAGDPMCVAILIGLGFRHLSMNGRSVARVKYLLRHIDFDEAQTLAQRSLEAQMAAEVRHQVAAFMERRGMGGLIRGGL

SEQ ID NO: 130045 - protein, 580 aa, Unknown
  Bacterial polypetide isolated from the Sargasso Sea
MNKLSPIILNGLSVSKGIAIGKCKIIEHGQRNIEKSILKKNEDIKKELLKFDNAHKSTLDELKKIKNKIKPSVQKNIILFLDTHILLINDKDFLLNIRKRIKESRYSAEWSVHQEYLNIKASFEDMTDNYIKQRIDDVQHVVNMIIKNLRRNKNIKNTSIKNVNKKIIITDDLSPADVLVAFHSKCSAIISEFGGRSSHSSILTRSMEIPSIVGVKNITKLIRDDDEIIIDGEKGIIIIHPDKGSKKYYQKIQLDQFENKKELISIMHRDAITKDKKQIELMVNLELPEELKMLKAEYIDGIGLFRTEYIYSDRDDFPSELEQYNTYKKVVQRMSGKTVIFRTLDIGADKEVPENIQSGAIARNPALGLRGIRYSLNNQIIFLNQIKAILRAAHYGNVKIMLPMITTLSEVEHAKNLIKKAKEDLSSKRNNFSDCVDIGIMIEVPSSAVNASQFAKHVDFFSIGTNDLVQYALAIDRVNDEVNYLYDPFNSAVLQLIHNVIKAGKKYNIPVSLCGEMAGDINFTRLLLGMGLQSFSMHPSAIPEIKKIILNSDTNKFRSIVKRIINNDAKKKELIDRINS

SEQ ID NO: 130046 - protein, 488 aa, Unknown
  Bacterial polypetide isolated from the Sargasso Sea
MDSFKGTGVSPGIGLGKFHFVNNEIDLSIPSKISFKASQQQLDLKYSNLIEKLKKDNRNSEAEVLDAYRLLINDPEISDMINEDHDLKEIFDIFKNTSDEMMKFEDEYFKQRAEDIISIGKEIIFSMQNIVLDQKLDEDVIIFAFDLTPNDTSSLDLTKVKGFVVTNSGPTSHAVIVAKNLGIPCVINFDISILDLSAEEQIVIDGDSGEIFINPDNKILNRVEESMDRSDKLKEIYNQESIDNLNLTLRANIGSNDEIQAFNDQLIKSVGLFRSEFIYIDKTTKPSLEDQIKINNELDSKFSETIVFRTLDIGGDKQVPYLKLPKEENPFLGVRGIRYSLEEEALFREQIVSILTSKLNNKVKIMFPMVSILDDFIKAKNIVIEESEKLNIKTPPLGIMVETPSAALNAELYVGHVNFFSIGTNDLIQYTYAADRGLASLNKYQDPLDTGVLKLINNVIKVGVENNIEVSVCGDMASDKEAAVVLYL

SEQ ID NO: 130047 - protein, 154 aa, Unknown
  Bacterial polypetide isolated from the Sargasso Sea
REEIEVRDLQIGIMIEVPSAALLAPVLAREVDFFSIGTNDLTQYCLAIDRGHPQLSAQADGLHPAVLRLIEMTVTAAHAQGKWVGICGELASDRLAVPLLVGLGVDELSVTPRSIALVKARVRELDSRQARTLADRALTLDSASAVRALVAEMH

SEQ ID NO: 130048 - protein, 567 aa, Unknown
  Bacterial polypetide isolated from the Sargasso Sea
MSITGIIVSSGIAFGQALHLTQAEHHLDYRPIPLSRIPQQQSKFVKALQALQQQLSHSQTKLDPQSENYQLIEADLLLLEDEELIDQVKEAIRTLQLSASVAVERIFAHQANELESLDDPYLANRAQDVRCLGQRLVTAINGRLDQGLAQLTEPTILLAQDLTPAEFALLPKEQISGIVLKTGGLTSHTAILARAAGIPAILSCQFDAEFIPNGTPLVLDALSGELFVNPAPEQQARLTVTLHHEQARRAALQAYRDVPAKTQDGHLVGLMANVGNLNDITHVGDVGADGIGLFRTEFMLMHTSTLPDEKAQYNLYCEALHALGGKTFTIRTLDIGADKELPCLCQEVEDNPALGLRGVRYTLAHPELFKTQLRAILRAANHGPIRLMFPMVNQVEELDQIFTLIAECQDALEEEEKGFGELSYGIVVETPAAVMNLASMLPRLDFVSIGTNDLTQYAMAADRTNPQLTRDYPSLSPAILGLIKMTVDQAKAAGVKVSLCGELASSPLMVPLLIGMGLDELSVNLSALLEVKAAVCQGQLMKFSALAHTAMQQNRISELQQCITSYK

SEQ ID NO: 130049 - protein, 543 aa, Unknown
  Bacterial polypetide isolated from the Sargasso Sea
MINVTGLGASLGIAIGSSFIYENEIDFNKQAVLSHSEASKQLIEKFSGQISEFRSKDRNDEADILDAYILILQDPEILQQLNQKQDLSIDNVYEIYTSTAQIFESMEDEYFKQRAEDIISVGKHLIFNMQNIDIKISLDENTILIASDLTPADTSSMDLSKVSGIILKEGGFTSHAVIVAKNLGIPCVIGVKELLDNITNGESLSIDGSSGDIIVSPNDNQISTLKKKQGKIEKLIQNFTEEKYKKLGLEFRVNIGSLEEINSFNHSFLNSIGLFRSEFIYLDNTTNPTLEQQSSVLEKITQKFTGTIVYRTLDIGGDKQVSYLNLPVEDNPFLGVRGIRLSLNNLDLFDSQIKSILNSDSLDKIKIMFPMISTIEDYLEAKEFVNKIAKDLNVESPPMGIMVETPSSAFIADKFSEIVDFISIGTNDLTQYIMAADRGNSNLSHYHDSLHPSVLRAISNVIDCCNANNIEVSVCGEMSSDPVSALALYILGLKTFSMAPSAAPFVFDILNTNSEINKQSAKELILSLNNAQQTRKTIQEIIN

SEQ ID NO: 130050 - protein, 343 aa, Unknown
  Bacterial polypetide isolated from the Sargasso Sea
MTISIQGVSVSRGIAIGRVHRIKDDQIDAPEYIIKSKQIDAEISRLNEAIKNAHGELRAIRDNIPSSTSKNIAEFINTHLLMLEDNALTEEPKTIIREKLCNAEWALKLQRDALVNVFDEMADTYLRTRKDDVDHVVNRILRVLLKQTPIIEKYPEKQLKNKLIVADDLTPADTVLMQHYGIAGFATEFGGSTSHTAILARNLRIPVVVGLHGAKKLIKNDDYAILDGDSGIILINPDETILNDYKKKQKEVKKYYVSLEKLKDSPAKSMDGIDITLMANIELPGDFERVRDVGADGVGLYRTEFLYMNRNNPPDEEEHYETYINVINALRGLPLTIRTVDLG

SEQ ID NO: 130051 - protein, 344 aa, Unknown
  Bacterial polypetide isolated from the Sargasso Sea
IDSDFNKSVVLDGDTGEIFLDPTSDVLKKVEEGLNKINKLRESYNQDSIKDLGIELRANIGSSEEINAFNDDHIKSVGLFRSEFVYIDRSSKPTLKEQIEINNELNIKFSNTIVFRTLDIGGDKQVPYLNLPKEENPFLGVRGIRYSLDEEDLFRQQIISILSSDLIEKVKIMFPMVSILDDFLDAKKIVIDESKKLNVNPPPLGIMVETPSVALNTDQYIQHVDFFSIGTNDLIQYTYAADRGLSTLNKYQDPLDVSVLRLINNVIDTGLKNDIEVSVCGDMASDKDSSIILYLLGLRVFSIAPSQGPNIINSLIHAKENLSHIKKEEILSSTDSQSLRKLIS

SEQ ID NO: 130052 - protein, 245 aa, Unknown
  Bacterial polypetide isolated from the Sargasso Sea
NIQKKFSGTIVYRTLDIGGDKQVDYLDLPEEENPFLGVRGIRLSLDKKELFETQIESILISENVERVKIMFPMISTIEDFLESNQIVETIADKLKINKPEVGIMIETPASTLLIEEFSKYVDFFSIGTNDLTQYIMAADRGNPNLVKYQDPLHPAVLRTLENVISTANKNNIEVSVCGEMSSDSTSALALYALGLRIFSMSPSSAPFVFQQLNKIKDMDLKKIKNNILALENSTEVREELKKLNI

SEQ ID NO: 130053 - protein, 288 aa, Unknown
  Bacterial polypetide isolated from the Sargasso Sea
HVDPDAAILQRATVERDSREQRLQAASAQRHEAALTRDGHAVEVFANIGESAGVASAVEQGAEGIGLLRTELIFMAHPQAPDEATQEAEYRRVLDGLNGRPLVVRTLDVGGDKPLPYWPIAEEENPFLGVRGIRLTLQRPQIMEAQLRALLRAADNRPLRIMFPMVGSVDEWRAARDMTQRLRLEIPVADLQLGIMIEVPSAALLAPVLAKEVDFFSVGTNDLTQYTLAIDRGHPTLSAQADGLHPAVLQLIDITVRAAHAHGKWVGVCGELAADPLAVPVLVGLGVD

SEQ ID NO: 130054 - protein, 265 aa, Unknown
  Bacterial polypetide isolated from the Sargasso Sea
ELPEDLNALKGSGAAGVGLYRTEFLFMNRTEPPEEEEQYQAYSQIIQAVNGPVTVRTLDLGADKQVDGGRDEPKAAVTPALGLRAIRLCLSEPSLFKPQLRAILRAAVHGDIQLMIPMLSSLPELEQSLSLIREVCAELEREGAAFNPNIPIGGMIEVPAAAIAADLFAQKLDFLSIGTNDLIQYTLAIDRVDDSVNYLYDPLHPSVLRLVRNIIQAGDQANIPVSMCGEMAGDPVFTRLLMGLGLRQFSMEPSQLLEIRQQIAT

SEQ ID NO: 130055 - protein, 247 aa, Unknown
  Bacterial polypetide isolated from the Sargasso Sea
MKIYKKKFSGTIVYRTLDIGGDKQVDYLDLPEEENPFLGVRGIRLSLDKKELFETQIESILISENVERVKIMFPMISTIEDFLESNQIVETIADKLKINKPEVGIMIETPASTLLIEEFSKYVDFFSIGTNDLTQYIMAADRGNPNLVKYQDPLHPAVLRTLENVISTANKNNIEVSVCGEMSSDSTSALALYALGLRIFSMSPSSAPFVFQQLNKIKDMDLKKIKNNILALENSTEVREELKKLNI

SEQ ID NO: 130056 - protein, 632 aa, Unknown
  Bacterial polypetide isolated from the Sargasso Sea
MRNAQCCGACSQRGVAEFIIANRGHKRIAAVCRGFTCTEEVRVSFTLHGIPVSRGIAIGRAYLIAPAALDVAHYLVEANQIDAEVERFRTALEVVHHELEALRADLTDDTPSEVGAFIDVHAMILSDEMLVQETIDLIRTRRYNVEWALTEQLELLTRHFDDIEDEYLRERKADIEQVVERVLKALAGAPSASQALDRAAKNGTNEMIVVAHDIAPADMMQFKSQSFQAFVTDLGGRTSHTAIVARSLGIPAAVGVQHASALIRQDDLIIVDGDQGIVIVDPAPIVLEEYSYRQSEKLLEQRKLQRLKFSPTQTLCGTKIELYANIELPDDAKAAVEAGAVGVGLFRSEFLFMHQKEMPEEEEQFAAYKRAVEWMKGMPVTIRTIDVGADKPLEALDEGYETAPNPALGLRAIRWSLSEPQMFLTQLRAILRASAFGQVKILIPMLAHAQEIDQTLDLIREAKRQLDDAGLSYDPNVRIGAMIEIPAAAIALPLFLKRFDFLSIGTNDLIQYTLAIDRADNAVAHLYDPLHPAVLHLIAYTLREAKRAGVSVSVCGEMAGDPALTRLLLGMGLTEFSMHPSQLLVVKQEILRAHLKALEKPTADVLAAFEPEEVQAALQRLSVAEPRADAAA

SEQ ID NO: 130057 - protein, 543 aa, Unknown
  Bacterial polypetide isolated from the Sargasso Sea
MKTVKGNGVSIGTAIGAAFIYENEVDLNIEAELTFEEAVKILTEKFNLQIKDFKKNNRKDEADVLDAYILIMQDPEVINGINENNNTSVVDVFEVFKTNAEILQSMDDEYFSQRAEDLLSVGKHLINTMQGIASSVELENNSIIVAVDLTPADTSSMNMSYINGIILKEGGTTSHAVIVAKNLGIPCIIGIGEEMNSIKNKDVMSIDGETGEININPDDATIKEINERSKLQEEIVSSFTQDIYEASDLEFRVNVGSNEEINSFDHPFLNSIGLFRSEFIYLDRSSIPTTEEQKTILENIQKKFSGTIVYRTLDIGGDKQVDYLDLPEEENPFLGVRGIRLSLDKKELFETQIESILISENVERVKIMFPMISTIEDFLESNQIVETIADKLKINKPEVGIMIETPASTLLIEEFSKYVDFFSIGTNDLTQYIMAADRGNPNLVKYQDPLHPAVLRTLENVISTANKNNIEVSVCGEMSSDSISASALYALGLRVFSMSPSSAPFVFQQLNKIKDMDLKKIKNNILALENSTEVREELKKLNL

SEQ ID NO: 130058 - protein, 543 aa, Unknown
  Bacterial polypetide isolated from the Sargasso Sea
MKTVRGNGVSIGIAIGSAFTYENEVDLSIKAEMPFEEAVKILTEKFSLQIKEFKENNRKDEADVLDAYILIMKDPEVINGINENNNNSIEEVFDIFKANAEILKSMDDEYFSQRAEDVLSVGKHLINTMQNITSSVELEENSIIVADDLTPADTSSMNMTNINGIILKEGGTTSHAVIVAKNLGIPCIIGVGDQISIIKNKDTLSIDGETGEINVNPDKETIKDINQRSKIQEDIVNEFTKEVYESSDVEFRVNVGSNDEINSFNHQFLNSIGLFRSEFIYLDRSNIPTTEEQKIILENIQKKFSGTIVYRTLDIGGDKQVDYLDLPEEENPFLGVRGIRLSLDKQELFETQIESILISQSVDRVKIMFPMISTIEDFLESNQIVETIAKRLKVNKPEVGIMIETPSSTLLIEEFCKYVDFFSIGTNDLTQYIMAADRGNPNLVKYQDPLHPSILRTLDKVISTANKNNIEVSVCGEMSSDSLSATALYILGLRVFSMSPSAAPFVFQQLNKIKEMDLNKIKQNILGLENSTEVRDELKNLSS

SEQ ID NO: 130059 - protein, 350 aa, Unknown
  Bacterial polypetide isolated from the Sargasso Sea
MISGILASPGIAFGKALLLKEDEIVINQGKIAAEQIDAEINRFLEARTKSAAQLEAIKEMAGRTFGEEKEAIFEGHIMLLEDEELEGDIRSFIKDNKATADKAIYEVIEQYAKMMAELDDPYLRERATDFRDIGTRLVKNVLGIAVVNLSTIDEEVILVAKDLTPSETAQINLKYVLGFVTDIGGRTSHTSIMARSLELPAIVGTNDITERVKNGDVLVLDAINNQIIINPTAEQLNEAKQFQAQFQAEKDELAKLKDLPAITLDGHQVEVCANIGTVKDTEGAIRNGAEGVGLYRTEFLFMDRDALPTEDEQFKAYKEVAEAMPDQPIIVRTMDIGGDKELPYMNSRKR

SEQ ID NO: 130060 - protein, 206 aa, Unknown
  Bacterial polypetide isolated from the Sargasso Sea
MHAQLRAILRASAFGKLRIMFPMIISVEEFRSLKATVETLKAELRAEGKAFDESIEVGIMIETPAAAVMAHHLAKEVDFFSIGTNDLTQYTLAVDRGNEMISAMYNPLSPSVLTLIKMVIDASHAEGKWTGMCGELAGDERATLLLLGMGLDEFSMSAISVPRIKKLIRNTNFEDVKAMADQALSFATAAEIEACVDNFIKQKAVC

SEQ ID NO: 130061 - protein, 119 aa, Unknown
  Bacterial polypetide isolated from the Sargasso Sea
VNERLGRPDCRNGYILDGFPRTLNQANGLEKIMDSFNHSLDRAISLYADEDALVERLVKRGENSGRSDDTSNIIRNRQKIYWQQTAPLLDFYEERGLLDNINGLGEIKEITERILTTIR

SEQ ID NO: 130062 - protein, 114 aa, Unknown
  Bacterial polypetide isolated from the Sargasso Sea
YNLSHIFTGDILRSQIAEKTKLGNAGKVFMDKGDLVPDNLLIDMVFSTSKTLQSILLDGFPRTINQAISLEDEMEKLGKKIVYVLYFDVPFEKLIDRLSQRLSCKKCSKTFSKS

SEQ ID NO: 130063 - protein, 278 aa, Unknown
  Bacterial polypetide isolated from the Sargasso Sea
MRPLADRLRPTALAEVVGQDHLLAANAPIGRMVESGRITSMILWGPPGSGKTTIAHLLASSGNMAFTSLSAVFSGVADLRKAFDEAKRVLQVGRGTLLFVDEIHRFNKSQQDGFLPYVEDGTVILVGATTENPSFELNAAILSRAQVLVLNRLEDMALEELLLRAEQDAERGLPVDADARRALRALADGDGRYLLNMAEELLNLPEEPILDTTALAGNIQRRMPLYDKSDDAHYNLISALHKSLRGSDTDAALYWLARMLEGGEDPHYIMRRLTRFAL

SEQ ID NO: 130064 - protein, 82 aa, Unknown
  Bacterial polypetide isolated from the Sargasso Sea
MIITVDGPAASGKGTLARRLAVEYGLAHLDTGLLYRAISKRVLDTGDDPSDEATAVAAARALDLGDIESNGLRSETIGEAAR

SEQ ID NO: 130065 - protein, 113 aa, Unknown
  Bacterial polypetide isolated from the Sargasso Sea
SHDDCLGGTILDGFPRTLPQAKSLEKINDKFPVVKVIVFEADQEELTKRILLRGETSGRGDDTEDSIRVRLEVYQKDTEPLITYYEDKEITTKINAVGNVDDIYKEISKEFIK

SEQ ID NO: 130066 - protein, 260 aa, Unknown
  Bacterial polypetide isolated from the Sargasso Sea
MAPVREIARVSAKTVEPVAKPVIGSTTLAAGAAVAAAAAALAIKRAKRGSGSSKQKRIVIAGAPASGKGTQCELIVKKFGLTHISAGDLLRAAVAAGTEAGLKAKEYMDRGDLVPNEVVVTMVKERLSQPDCAKGWLLDGYPRSEEQADALIESGIQPDLFLLLDVPDEILLDRVIGRRLDPVDGTIYHMTFFPPPTPEIAARLTQRSDDTEEKASNRLSVHHKNVDAVVGKYETIMKTVDGNRAKQDVFKDIESLIKKM

SEQ ID NO: 130067 - protein, 161 aa, Unknown
  Bacterial polypetide isolated from the Sargasso Sea
PLDWRELRAAIAQKTTEGKEASSYMEAGQLVPDQLVLGLVTRRLKGQDCRRGCLLDGFPRTINQAEMLDDLLERQAMSVDGVIELSVPQEELVRRMLARKREDDSPEVFARRIESFERQTAPLLEYYEFQGKLRTVNGLGSADDIFERVRQAIRAFRRAKR

SEQ ID NO: 130068 - protein, 149 aa, Unknown
  Bacterial polypetide isolated from the Sargasso Sea
TALDVTVQAQIIELLQDLQEQLGMAIMYITHDLGVICEIADVVHVMYLGKIVESASTKELFHNPLHPYTQRLLASIPKLGASGKGTKLDAIRGNVPVPLNLPPQCGFQSRCNEIIENVCDLKVPGLVDMGNEHYVRCFLHSEEEEKTYV

SEQ ID NO: 130069 - protein, 84 aa, Unknown
  Bacterial polypetide isolated from the Sargasso Sea
MNIILLGPPGSGKGTQSSHLAKKYSLNHLSTGDVLRSEIVSGSKLGKEASKYMNEGNLVPDEVIIGMVSQKLSAIDSVLLDGFP

SEQ ID NO: 130070 - protein, 188 aa, Unknown
  Bacterial polypetide isolated from the Sargasso Sea
MNLIIFGPPGAGKGTQSNFIAKKYNLFQLSTGEILREQIRNKTDLGIKISPVINSGSFVSDDIVSELIDKIIKDKNYHNRIIFDGYPRSLSQASNLDVLLKRYNQKIDLVLKLSVSLDTVIKRISERRTLEKREDDNEKIAIKRYKTYEKSTEPVIEYYKKLNLLKMIDGERSIDQINKEISDIISLI

SEQ ID NO: 130071 - protein, 87 aa, Unknown
  Bacterial polypetide isolated from the Sargasso Sea
MNIVIFGPPGAGKGTQSNFIVQKFNLYQLSTGELLRKEINNKTQLGKQISSIINTGNLVSDEIVGNLIEKFITNKEYKNRLILMDTH

SEQ ID NO: 130072 - protein, 68 aa, Unknown
  Bacterial polypetide isolated from the Sargasso Sea
MNLVIFGPPGAGKGTQSKFIAEKFKMFQLSTGEFLRKEITKNTEIGKKISSVINTGALVSDKIVSDLI

SEQ ID NO: 130073 - protein, 181 aa, Unknown
  Bacterial polypetide isolated from the Sargasso Sea
MKLLIMGPPGVGKGTQAEILKTEFNIAHLSTGEILRKEIARKSEVGIIAKHHIDKGQLVPDKVLLNIIRDRIIMSDCSNGYLLDGFPRTIEQAIGLEDIMVSLDHALDMAISLTADEEELIKRLKKRGVDSGRSDDTANIISKRQKIYWEQTAPLLDFYDNKGLLKNIDGIGTIDEITKRI

SEQ ID NO: 130074 - protein, 190 aa, Unknown
  Bacterial polypetide isolated from the Sargasso Sea
MNIVIFGPPGAGKGTQSKFIVEKYNLCQLSTGELLRREIKDNTSLGQKISSIINSGNLVSDEIVTDLIEKFISNNDYKNRLVFDGYPRNLSQAKKLDELLKNDNQKVDLALKLSVSLEIIKKRIVERRNQENRSDDSENIAIKRFQNYEDNIKPVIDFYKQANLLRVVDGEGSISKINNEIGVLIESIKG

SEQ ID NO: 130075 - protein, 213 aa, Unknown
  Bacterial polypetide isolated from the Sargasso Sea
MRLILMGAPGSGKGTQAEKLMDEYNCRQISTGVLLREAIESGSELGQEVQKIMSEGLLVSDGIVLDLIKNELSKIGENSFLLDGYPRNITQAKSLDDLLSNLNKPLDYTILIDVPSEILIKRLSGRRTCSLTGKTLNIYFSSETEIDECLSKGGELLQREDDNEQSITKRIEVYGQQTEPMIDYYKSAGLLEAIDGQGSINDVYGRLKKLMEL

SEQ ID NO: 130076 - protein, 188 aa, Unknown
  Bacterial polypetide isolated from the Sargasso Sea
MNLIIFGPPGAGKGTQSKFIVKKFQMFQLSTGEFLRNEISSNTTIGKKISSIINTGSLVSDDIVSNLIEKVVSNSKYHNNIIFDGYPRSLNQAKNLDNLLKKYNQKISLVLKLSVSLETIKKRISERRNLEKRSDDNEEIAVKRYQTYEKSTEPVIEFYKKLNLLKVVDGERSIDQINKEISDIIALI

SEQ ID NO: 130077 - protein, 190 aa, Unknown
  Bacterial polypetide isolated from the Sargasso Sea
MNLILFGPPGSGKGTQAKNLEKKLNNFQISTGEMLRDEIKKDTEIGKKIISNMNEGKFVNDEIINKLMKKIIFDPQKKDKLIFDGYPRTLEQAKNLDLLLTESNQKIDFIFFLNVNKETIIKRIERRKILEKRADDDLNIILKRYDVYIETTKPVLDYYSTKSNFKEINGGLKIDEITKEIEGLLESISH

SEQ ID NO: 130078 - protein, 171 aa, Unknown
  Bacterial polypetide isolated from the Sargasso Sea
MNLIIFGPPGAGKGTQSNFIVKKYNLFQLSTGEILREQIKKKTDLGIKISPVINSGSFVSDEIVSELIEKIIKDNQYNSRIIFDGYPRSLAQARNLDNLLDKYKQKIDIVLKLSVSLETVKKRISERLTLEKRPDDSEKIAIKRYKTYEKSTEPVIEHYKKLNLLKVIDGE

SEQ ID NO: 130079 - protein, 79 aa, Unknown
  Bacterial polypetide isolated from the Sargasso Sea
MRLILMGAPGSGKGTQAEKLMDEFNCRQISTGVLLRQAIESGSELGKKVQKIMSEGLLVSDDIVLDLINNELSEIGESG

SEQ ID NO: 130080 - protein, 80 aa, Unknown
  Bacterial polypetide isolated from the Sargasso Sea
MNIVIFGPPGAGKGTQSKFIAEKFKMFQLSTGEFLRKEITAATPTGKKISSVINSGALVSDQIVSDLIEKVISNIDYQIE

SEQ ID NO: 130081 - protein, 188 aa, Unknown
  Bacterial polypetide isolated from the Sargasso Sea
MNVIIFGPPGAGKGTQSNFISKKFNLLKLSTGEILRDQIKQKTDLGIKISPIINSGAFVSDEIVSELIEKVIKDKKNYNRIIFDGYPRSLAQAKNLDNLLVKYKQKIGIVLKLSVTLETIKKRISERRNLENRPDDSEEIAVKRYETYEKSTEPVIEYYKKLNLLKVINGERSIHQINNEISDIINLI

SEQ ID NO: 130082 - protein, 188 aa, Unknown
  Bacterial polypetide isolated from the Sargasso Sea
MNLVIFGPPGAGKGTQSSFIVKKFKLHQLSTGELLRNEIKNKSELGLKISSIIDSGNLVSDEIVSKLIEKFVSSEIYKNRLIFDGYPRNLNQAVNLDKLLKQYNQKIDLVLVLSVSLNTIKKRIMERKTLEKRSDDNEDVAVKRYDTYESNIKPVLDFYKKSNLIKVVNGETSISRINDEISDLIGTI

SEQ ID NO: 130083 - protein, 167 aa, Unknown
  Bacterial polypetide isolated from the Sargasso Sea
MVSVIIFLGSPGSGKGTQASKLSDAFGYEHISIGDMLRKNVEEKSDLGLKASEFIDSGRLVPDELIIEVVSSFFGDFVSNKEGRVILDGFPRTEPQAFALEKIIRELRINLSSVLYLDVDDDEVISRLSERGRKDDEPELVLNRLNVYRDQTEPLLKYYNDQGVLKE

SEQ ID NO: 130084 - protein, 279 aa, Unknown
  Bacterial polypetide isolated from the Sargasso Sea
IIDRVPNVYDTPNASELTIGEGTLKFENVSFSFTKDNRKVEVLRNINFSVGAGETLGIVGPPGSGKSTVAQLAPRFYDVDSGTIYINDQDIREISIESLRRFVCVIQQDSFLFTASIENNTAYGNPWVDDDEILSANQAAQFHEHIDQLPLKYKTLVGERGVSLSGGQRQRLSIARGLVTEPAIIIFDDSTASIDAVTERLIRKNLDESRHTRGTIIISHRLTSLMHAKEILFVDKGEIIERGSHKQLISLKGKYFELYQLQTRSGSNGVPLKKGGGDY

SEQ ID NO: 130085 - protein, 183 aa, Unknown
  Bacterial polypetide isolated from the Sargasso Sea
MIGPPGSGKGTQAKFLVEKLNNFQISTGNMLREEIKNNSEIGKKIINNMNDGKYVEDEIVNKLLEKVIFDSQKKNKLIFDGYPRTLNQAKNLKNLLHKSSQKLDYIFFLNVNKETIIKRIEKRKILEKRSDDDANIILKRYDRYMEITKPVLDYYSINANFHEVDGSMKISEISSKIDEIVSE

SEQ ID NO: 130086 - protein, 33 aa, Unknown
  Bacterial polypetide isolated from the Sargasso Sea
MKLILFGPPGSGKGTQASLIAKKINIPHFVTGD

SEQ ID NO: 130087 - protein, 213 aa, Unknown
  Bacterial polypetide isolated from the Sargasso Sea
MRLILMGAPGSGKGTQAEKLMDDFGCRQISTGVLLRQAIESGSELGKKVQKIMSKGLLVSDDIVLDLIKNELSEIVESRFLLDGYPRNINQAKSLNDLLENIDKPLDYSILIDVPSEILIKRLSGRRTCSLTGKTLNIYFSSENEIDECLSKGGELLQREDDNEESITKRIEVYEEQTEPMVDFYRSTGLLHTIDGQGSVDDVYIRLKKLMEL

SEQ ID NO: 130088 - protein, 213 aa, Unknown
  Bacterial polypetide isolated from the Sargasso Sea
MRLILMGAPGSGKGTQAEKLMDEYNCRQISTGVLLREAIESGSELGQEVQKIMSEGLLVSDGIVLDLIKNELSKIGENSFLLDGYPRNITQAKSLDDLLSNLNKPLDYTILIDVPSEILIKRLSGRRTCSLTGKTLNIYFSSETEIDECLSKGGELLQREDDNEQSITKRIEVYGQQTEPMIDYYKSAGLLETIDGQGSINDVYGRLKKLMEL

SEQ ID NO: 130089 - protein, 97 aa, Unknown
  Bacterial polypetide isolated from the Sargasso Sea
MKLLIMGPPGVGKGTQAEILKTEFNIAHLSTGAILRKEIARKSEVGIIAKHHIDKGQLVPDKVLLNIIRDRIVMSDCSNGYLLDGFPRTIEQAIGLE

SEQ ID NO: 130090 - protein, 186 aa, Unknown
  Bacterial polypetide isolated from the Sargasso Sea
MNLLIMGPPGVGKGTQAKIIKNELKIAHLSTGEILRKEIEMGTKVGLIAKDYIDKGQLVPDQILLDIINDRIVLPDCKNGYLLDGFPRTLGQANGLEKIMKSLKHSLDMAISLTADEDELINRLIKRGRKSGRTDDTPEVIRKRQKIYWVQTAQILDFYQNKNLLKNIDGLGEINEITNRILAVLK

SEQ ID NO: 130091 - protein, 209 aa, Unknown
  Bacterial polypetide isolated from the Sargasso Sea
MTAHDMAKVIFEGIKSLKPKEDRTLIAIAGPPGSGKSTVAEIVTDLMNENLMKTSLVPMDGFHLDNKILERKNLFDRKGAPETFDVKGFIELIKKLRYKRNSSVPLFDRTLDEVVNNARKISSEQEYIVIEGNYLLLDKDLWRDLHVYWDYKVFLSVDNNVLKSRLIERWLGENHTYSEAETRVIKNDLVNADVVNSNRLEATLELQTG

SEQ ID NO: 130092 - protein, 127 aa, Unknown
  Bacterial polypetide isolated from the Sargasso Sea
MNLVIFGPPGAGKGTQSGYIAKKFKLFQLSTGELLRNEIKNNTNLGKQISSIMNSGNLVSNELVSNLIEKYLSDKTYQNKIIFDGYPRNLIQAQTLNDSLIKYNQKIHIALRLTVSLDTIIKRIKER

SEQ ID NO: 130093 - protein, 96 aa, Unknown
  Bacterial polypetide isolated from the Sargasso Sea
MRLILMGAPGSGKGTQAEKLMDEYNCRQISTGVLLREAIESGSELGQEVQKIMSEGLLVSDGIVLDLIKYELSKIGENSFLLDGYPRNISQAKSLD

SEQ ID NO: 130094 - protein, 187 aa, Unknown
  Bacterial polypetide isolated from the Sargasso Sea
NIVIFGPPGAGKGTQSKFIVEKFNMFQLSTGEFLRKEISNNTELGKKISSVINSGALVSDLIVSDLIEKIVSNKEYQNRIIFDGYPRNLNQAKNLDNLLKKYKQKIDVVLKLSVKLKTIKKRISERKNLEKRTDDDEKIAIKRFETYEKSTEPVIEYYKKLNLLKVVDGERPIDQISNEISDIISPI

SEQ ID NO: 130095 - protein, 187 aa, Unknown
  Bacterial polypetide isolated from the Sargasso Sea
MNLILFGPPGSGKGTQAKNLEKKLNNFQISTGEMLRDEIKKDTEIGKKIINNMNEGKFVNDEIVNKLMKKVIFDPQKKDKLIFDGYPRTLEQAKNLDLLLTDSNQKIDFIFFLNVNKETIIKRIEKRKILEKRSDDDANTILKRYDTYMEITKPVLDYYSKNLNFHEVDGSMEINDISLKIQQILTL

SEQ ID NO: 130096 - protein, 85 aa, Unknown
  Bacterial polypetide isolated from the Sargasso Sea
MRVIFFGPPGSGKGTQAKLVADKYKITHISTGHILREKLNDEDELSLKLRDIISSGNLVVDDILNKIIAQKLLNNECKSGFILDG

SEQ ID NO: 130097 - protein, 160 aa, Unknown
  Bacterial polypetide isolated from the Sargasso Sea
MNLVIFGPPGAGKGTQSKFIVEKFNMFQLSTGEFLRKEISNNTKLGKKISTVINSGELVSDIIVSDLIEKIISDSKYQNRIVFDGYPRNLNQAKNLDNLLKKYKQKIDVVLKLSVSLETIKKRISERRDLEKRSDDNEEIAIRRFETYEKSTKPVIEYYK

SEQ ID NO: 130098 - protein, 41 aa, Unknown
  Bacterial polypetide isolated from the Sargasso Sea
MNLILLGPPGAGKGTQSDFISNKFNLKQISTGNLLREEIKK

SEQ ID NO: 130099 - protein, 90 aa, Unknown
  Bacterial polypetide isolated from the Sargasso Sea
MRIILIGPPGAGKGTQCERLVNFLRVPHLSTGEMLRAAIAQKTAEGKEASFYMQAGQLVPDQLVLGLVTRRLKDQDCRGGCLLDGFPRTK

SEQ ID NO: 130100 - protein, 61 aa, Unknown
  Bacterial polypetide isolated from the Sargasso Sea
MSKASFSENANISNQLINRELSWLQFNDRVLEESKDKTNPLFERVKFLSIAGTNLDEFFMV

SEQ ID NO: 130101 - protein, 257 aa, Unknown
  Bacterial polypetide isolated from the Sargasso Sea
HYHPVNAKIYTDLSLFSCDKKMASDVEKFFNYVTGYAKPKNLNKISISPVNMRQTLNENIDAEIKNSKNGKFAAIWAKMNSLVDPEIIDKFYEASNAGVKIHLFVRGVCCLRPGVKDRSENIVVKSIIGRFLEHSRIYCFSNGIKKMPNRNAKVYISSADLMPRNLNRRVELLVPIENETVHEQILDQIMLANYLDTSQSWELNADGNYKKIKYSKNDSFSAHEYFMNNPSLSGRGKAKLKMQPKQLHLRLIKSGSN

SEQ ID NO: 130102 - protein, 248 aa, Unknown
  Bacterial polypetide isolated from the Sargasso Sea
YTDLSLFSCNKKMSSDVEKFFNYVTGYAKPKNLNKISISPVNMRQTLNENIDAEIKNSKNGKFAAIWAKMNSLVDPEIIDKFYEASNAGVKIHLFVRGVCCLRPGVKDRSENIVVKSIIGRFLEHSRIYCFSNGSKKMPNRNAKVYISSADLMPRNLNRRVELLVPIENETVHEQILDQIMLANYLDTNQSWELNADGNYKKIKYSKIDSFSAHEYFMNNPSLSGRGKAKLKMQPKQLHLKLINSGSN

SEQ ID NO: 130103 - protein, 219 aa, Unknown
  Bacterial polypetide isolated from the Sargasso Sea
FFNYVTGYAKPKKLNKIFMSPLNSRNFFEEKIENEIVNANKGKPAEIWAKMNSLVDPGIIKKFYEASNAGVKINLSVRGVCCLRPGIKGQSENIKVKSLIGRFLEHSRIYCFANGSSMPSRENQVYISSADLMPRNLDRRIEIIIPIENNTVHEQILDQIMLANFKDKSETWYLDSLGNYHKEQEKGFSAHSYFMKNPSLSGRGKSILRAKPQNLRLVK

SEQ ID NO: 130104 - protein, 282 aa, Unknown
  Bacterial polypetide isolated from the Sargasso Sea
FFEFCDIQAFSLKLTKDAEYNLSDTLDQSLLDKMSRGIRQRLESEPVRLVYDATMPEHMLKILKKQLGASSFDSLIPGSRYRNFKDFISFPNIGHASLEYPPLPPLPSPDFEQHTTTFDAIRSNDVLLHYPYHNFTYFTEWVRQASFDPKVTAIKMTMYRVAKNSRVIHSLLDAVRNGKKVTVVVELKARFDEENNIHWARRMTQAGIQVVFGLTTLKIHSKLCLISRQEKGKVVKYAHIGTGNFNEKTARIYTDMSLFTCHPEVCDEVDQVFEFIEYSYKP

SEQ ID NO: 130105 - protein, 221 aa, Unknown
  Bacterial polypetide isolated from the Sargasso Sea
ITGYAKPLEMEKIFIAPLSLRSNLQKFIEREIEFAKVGRPANIWAKMNALVDPEIIDLLYKASDAGVYIDLIIRGMCCLRPNLEGLSENIRVRSIVGRFLEHSRIICFGNGDHLPSKSAEIFISSADWMGRNLDRRLEHFVPIENPTVRRQVLDEIMVANLKDERNSWLLDSNGTYHRIVVSDEPFSAHKYFMTNPSLSGMGSALEKISPENLISLDNRKE

SEQ ID NO: 130106 - protein, 172 aa, Unknown
  Bacterial polypetide isolated from the Sargasso Sea
IRREIEHAREGREGHIRAKMNSLVDPDIIALLYEAAAANVRVELIIRGMCSLYPGREGLSESISVVSIIGQFLEHSRIFWFGNGGSPEVYIGSADWMSRNLDRRVEAVTPVEDANLRGRLERLLELYLKDNRGAWDMQSDGSFIQRQPEDGGDVRNSQVQLIKQWSQGVPQS

SEQ ID NO: 130107 - protein, 183 aa, Unknown
  Bacterial polypetide isolated from the Sargasso Sea
GAGPLRSGTEALIRREIEHANAGRGGHIIAKMNSLVDPGVIALLYEASRAGVKIELVIRGICCLIPGLPNHSKTVSVISIIGRFLEHSRIFWFGNAGASEVFIGSADWMGRNLDRRVEAVTPIEDPMLRERIEQMLRTYLDDNRGAWEMQSDGHFMQRQPNDGERNSQLQLMYDWRAVQGQPV

SEQ ID NO: 130108 - protein, 247 aa, Unknown
  Bacterial polypetide isolated from the Sargasso Sea
EGMAVEQEDVYQISGPLGLDDLFALTGVPLPKFKDQPQKARIAAPLARAQKALLADGSIPEEEFESIFAVLKRGDVLLHHPYDLFSSSVEELINQSADDPDVLGIKMTLYRVSKDSAVISSLIRAAENGKQVMALVELKARFDEENNIQWARQLENAGVHVVYGVIGLKTHTKITLVLRREKEELRSYVHIGTGNYNSKTSRLYTDLGLLSARPELGQDLVELFNYLTGFSKQQTFRKLLVAPVSLR

SEQ ID NO: 130109 - protein, 261 aa, Unknown
  Bacterial polypetide isolated from the Sargasso Sea
SAIDPAHPFPFIINQGRAIVMKLRKKNKKRILNSIIVIPKALSRFIEIESSKNHKKFVILDDVISFFANEIFPDHDLEKRMIFRVIRDSDVEIQEEAEDLVRSFELALKRRRTGDIVRLEVLENSDNELVRFITNKLDINPDYIYDVSGLVGIQDIDQICKVKNPKLRFKHFTPREVERLKEYNDNFFETIKKKDLVVHHPFETFDSVIEFLNQAANDKKVIAIKQTLYRTTLDSPIVKALITAAENGKTVTALIEIKARF

SEQ ID NO: 130110 - protein, 226 aa, Unknown
  Bacterial polypetide isolated from the Sargasso Sea
MKYSKDLGAINPLINRELSWISFNWRVLQEANNKKVPLFERLRFLAISARNLDEFYTVRVAGFRQMVKNKIEVISADGLTPEEQLIQIEREAKALIEKQQELLPSILSHLKQKGVVLVKPKGILVSEKKNLEKQFMSKVFPALTPLALDPAHPFPFIPTEGSALALKLRTRDGKKFLNALVPIPGMLDRFQRLRDGSKGEKRFLSLEDFIVIFIYRLFPNYLLDEY

SEQ ID NO: 130111 - protein, 203 aa, Unknown
  Bacterial polypetide isolated from the Sargasso Sea
NTIGNEIGELFNSLTAYGKQREFQNLLVAPFQLRERMKELIKNEISYGEAGHIRMKMNALVDEELIDLLYQAAYEGTKVDLQIRGICCLTLRNEKIAERISVRSVLGRFLEHSRLYWFANGKGPDESSCYIGSADLMPRNLNRRVEVLAPVNDEIISNQLIEIFEHGFNDRHLSWDLDLYGNWVKNGTDPTSSSQNIEINKSR

SEQ ID NO: 130112 - protein, 308 aa, Unknown
  Bacterial polypetide isolated from the Sargasso Sea
SDGLTPEEQMDEVVLETKNLLKKQNKIFIQLIKELKKNNISLVKPVNLNTKDKKKLLEIFKEEIYPLLTPSAIDPAHPFPFIINQGRAIAMKLRKKNKKRILNSIIVIPKVLSRFIEIESSKNHKKFVILDDVISFFANEIFPDHDLENKMIFRVIRDSDVEIQEEAEDLVRSFELALKRRRTGDIVRLEVLENSDNELVRFITNKLDINPDYIYDVSGLVGIQDIDQICKVKNPKLRFKHFTPREVERLKEYNDNFFETIKKKDLVVHHPFETFDSVIEFLNQAANDKKVIAIKQTLYRTTLDSPIG

SEQ ID NO: 130113 - protein, 162 aa, Unknown
  Bacterial polypetide isolated from the Sargasso Sea
MLGVKVHLFVRGVCCLRPGVKDRSENIFVKSIIGRFLEHSRIYCFSNGTKKMPNRNAKVYISSADLMPRNLNRRVELLVPIENETVHEQILDQIMLANYLDTNQSWELEADGNYKKIKYSKSDSFSAHEYFMNNPSLSGRGKAKLRMQPKQLHLRLIKSGSN

SEQ ID NO: 130114 - protein, 226 aa, Unknown
  Bacterial polypetide isolated from the Sargasso Sea
LGQDVEKFFNYVTGYAKPKKLNKIFMSPLNSRNFFEEKIENEIVNASKGKPAEIWAKMNSLVDPGIIKKFYEASNAGVKINLSVRGVCCLRPGIKGQSENIKVKSLIGRFLEHSRIYCFANGSSMPSRENQLYISSADLMPRNLDRRIEIIIPIENNTVHEQILDQIMLANFKDKSETWYLDSLGNYHKEQEKGFSAHSYFMKNPSLSGRGKSILRVKPQNLRLVK

SEQ ID NO: 130115 - protein, 202 aa, Unknown
  Bacterial polypetide isolated from the Sargasso Sea
VKSIKITLYRLSRQSNVISSLINAAKNGKKVLVQIELQARFDEENNIKVSQQLKAAGIDLIFGVKGLKVHSKICLIERIENNKKRLYGFVSTGNFNETTARVYSDFTLFTSNQKILKEVSKVFDFLQVSYKIHDYKHLIVSPHHTTNKIFKLIDNEIDNAKKGIYSEIILKLNSFTSYKLVDKLYEASQYGVKKILLIRGIC

SEQ ID NO: 130116 - protein, 219 aa, Unknown
  Bacterial polypetide isolated from the Sargasso Sea
IFNYVTGYAKPKKLNKIFMSPLNSRNFFEEKIENEIVNASKGKPAEIWAKMNSLVDPGIIKKFYEASNAGVKINLSVRGVCCLRPGIKGQSENIKVKSLIGRFLEHSRIYCFANGSSMPSRENQLYISSADLMPRNLDRRIEIIIPIENNTVHEQILDQIMLANFKDKSETWYLDSLGNYHKEQEKGFSAHSYFMKNPSLSGRGKSILRAKPQNLRLVK

SEQ ID NO: 130117 - protein, 302 aa, Unknown
  Bacterial polypetide isolated from the Sargasso Sea
MDEVVLETKNLLKKQNKIFIQLIMELKKNNISLVKPVNLNTKDKKKLLEIFKEEIYPLLTPSAIDPAHPFPFIINQGRAIVMKLRKKNKKRILNSIIVIPKALSRFIEIESSKNHKKFVILDDVINFFANEIFPDHDLEKKMIFRVIRDSDVEIQEEAEDLVRSFELALKRRRTGDIVRLEVLENSDNELVRFITNKLDINPDYIYDVSGLVGIQDIDQICKVKNPKLRFKHFTPREVERLKEYNDNFFETIKKKDLVVHHPFETFDSVIEFLNQAANDKKVLAIKQTLYRTTLDSPIVKAL

SEQ ID NO: 130118 - protein, 185 aa, Unknown
  Bacterial polypetide isolated from the Sargasso Sea
AASLFNYMTCTARPTKMEKLAYSPVTLRKRLLKLIDEEISHAKEGKPAAIWAKMNAIVDGDIIDALYKASQAGVQIDLVVRGICCLRPGIKGLSENIHVKSIVGRFLEHGRIFCAGAGHGLPHDKAKVFISSADLMPRNLDRRVETLVPIENPTVHRQILNQIMIANLKDNEQSWEMDARGAYHR

SEQ ID NO: 130119 - protein, 100 aa, Unknown
  Bacterial polypetide isolated from the Sargasso Sea
KISISPINLRETLNKCIANEIANVKKGKKGEIWAKMNSLVDPAIIDKFYEASNAGVKIFLFVRGVCCLRPGVKDKSENIIVKSMIGRFLEHSRIYCFANG

SEQ ID NO: 130120 - protein, 280 aa, Unknown
  Bacterial polypetide isolated from the Sargasso Sea
AVEQEDLYRISGPLGLDDLFALTGVPLPQLKDQPQKARIAAPLARAQKALLADGSIPEEEFESIFDVLKRGDVLLHHPYDLFSSSVEELINQAAEDPDVLGIKMTLYRVSKDSAVISSLIRAAENGKQVMALVELKARFDEENNIQWARQLENAGVHVVYGVIGLKTHTKITLVLRREKEELRSYVHIGTGNYNSKTSRLYTDLGLLSARPELGEDLVELFNYLTGFSKQQTFRKLLVAPVSLRSGMEALIRREIDHAKAGRGGHIIAKMNSLVDPRIIA

SEQ ID NO: 130121 - protein, 77 aa, Unknown
  Bacterial polypetide isolated from the Sargasso Sea
MFLDRDHSILAFNERVFDWAVRTDVPLLERLRYLCIVSSNLDEFFEVRAAAHITAAKKGETKGIYTAASFEALSAQV

SEQ ID NO: 130122 - protein, 164 aa, Unknown
  Bacterial polypetide isolated from the Sargasso Sea
GQIKLLIRGMCSLIPQIPGISDNIEIYSIVDRFLEHSRVMLFHAGGENKLFISSADWMSRNIDNRVEVSVPIYDPRLKQMVMDILSLQFNDNTKARIINKEQSNPYRNRGNKRKVRSQIAIYQYLINYEKRLQQEFSAQREAAKLEAEHTAELAHNLELQAKAS

SEQ ID NO: 130123 - protein, 164 aa, Unknown
  Bacterial polypetide isolated from the Sargasso Sea
VKIKLLIRGMCSLIPQIPGISDNIEIYSIVDRFLEHSRVMLFHAGGENKLFISSADWMSRNIDNRVEVSVPIYDPRLKQMVMDILSLQFNDNTKARIINKEQSNPYRNRGNKRKVRSQIAIYQYLINYEKRLQQEFSAQREAAKLEAEHTAELAHNLELQAKAS

SEQ ID NO: 130124 - protein, 242 aa, Unknown
  Bacterial polypetide isolated from the Sargasso Sea
ASDKSVPILERLKYLCIADSNLDEFFEIKVAFIRKKLKYSDGLLTASDESNLRLFKDVRRKANSVIKLQYDLLQKSVFRALRTKNIIFLRRRELNSNQREWANKYFDEHILPIINPMILEGDSPEIVGSHPFPKIQNKSLNFMIKLKGTDDFGNSPKLAVVPAPRILSRYIQLPKKISNNKDCYMFLSSIIHENIDKLFPGLKVRGCHQFRVTMNSNLVFDDEDLNDIKKSLTRLLPDRKYS

SEQ ID NO: 130125 - protein, 264 aa, Unknown
  Bacterial polypetide isolated from the Sargasso Sea
PAGGGGTSALSYIETLLSLLPFGLAMADRDGRVLFLNNAFARVAGLKPGDKPSYPGDLVVREDQAAVADAVRRFAVGPQMSGDIAVRMRDQPDEPIALSLAGVRGLGEAAVLLSLKDNSEESKLKRQVAQATKMQAIGQLAGGVAHDFNNILTAIIGHCDLMLMRHTPGDSDYDDIQQIKSNSNRAAGLTRQLLAFSRQQTLRPQILQLPDIVADVSNLLKRLLGENVKLDVSHGRNLGAVRADPGQLEQVIVNLAVNARDAMP

SEQ ID NO: 130126 - protein, 159 aa, Unknown
  Bacterial polypetide isolated from the Sargasso Sea
VKIHLFVRGVCCLRPGIKDRSENIVVKSIIGRFLEHSRIYCFSNGTKKMPNRNAKVYISSADLMPRNLNRRVELLVPIENETVHEQILDQIMLANYLDNSQSWELNADGNYKKIKYSKNDSFSAHEYFMNNPSLSGRGKAKLKMQPKQLHLRLIKSGSN

SEQ ID NO: 130127 - protein, 245 aa, Unknown
  Bacterial polypetide isolated from the Sargasso Sea
HPINAKIYTDLSLFSSNQDLAKDVEKFFNYVTGYAKPKKLNKIFMSPLNSRNFFEEKIENEIVNASKGKPAEIWAKMNSLVDPGIIKKFYEASNAGVKINLSVRGVCCLRPGIKGQSENIKVKSLIGRFLEHSRIYCFANGSSMPSRENQVYISSADLMPRNLDRRIEIIIPIENNTVHEQILDQIMLANFKDKSETWYLDSLGNYHKEQEKGFSAHTYFMENSSLSGRGKSLLKAKPQNLRLVK

SEQ ID NO: 130128 - protein, 290 aa, Unknown
  Bacterial polypetide isolated from the Sargasso Sea
MPIPVNLSSIESIFLKDFKKLFFPKFKVRFPERIKDFKNDYFKAIANKDIVIHHPFESFEVVTQFIDQAADDPKVLSIKHTLYRTTDDSPIEASLVRAAQKGKLVTVIIELQARFDEERNLKWAKELELAGAQVVFGNINMKTHAKITLVTRKQMNSVINYAHYGTGNYHPRNAKIYMDLSYFTSDKTLTNDAAKMFNYLTSYSEQTTIKKIVYSPITARNKLNELIRNEITNVGKNKPSGIVCKCNALVDKQIIDEFYKASQKNVKIELLIRGICSLIPGKENLSENIV

SEQ ID NO: 130129 - protein, 162 aa, Unknown
  Bacterial polypetide isolated from the Sargasso Sea
MLGVKIHLFVRGVCCLRPGVKDKSENIVVKSIIGRFLEHSRIYCFSNGAKKMPNRNAKVYISSADLMPRNLNRRVELLVPIENETVHEQILDQIMLANYLDTSQSWALNADGNYKKIKYSKNDSFSAHEYFMNNPSLSGRGKAKLKMQPKQLHLRLIKSGSN

SEQ ID NO: 130130 - protein, 178 aa, Unknown
  Bacterial polypetide isolated from the Sargasso Sea
NSLVDPEIIDKFYEASNAGVKIHLFVRGVCCLRPGVKDRSENIVVKSIIGRFLEHSRIYCFSNGSKKMPNRNAKVYISSADLMPRNLNRRVELLVPIENETVHEQILDQIMLANYLDTNQSWELEADGNYKKIKYSKIDSFSAHEYFMNNPSLSGRGKAKLKMQPKQLHLRLIKSGSN

SEQ ID NO: 130131 - protein, 217 aa, Unknown
  Bacterial polypetide isolated from the Sargasso Sea
NLNKISISPVNMRQTLNENIDAEIKNSKNGKFAAIWAKMNSLVDPEIIDKFYEASNAGVKIHLFVRGVCCLRPGVKNRSENIVVKSIIGRFLEHSRIYCFSNGTKKMPNRNAKVYISSADLMPRNLNRRVELLVPIENETVHEQILDQIMLANYLDTNQSWELEADGNYKKIKYSKSDSFSAHEYFMNNPSLSGRGKAKLKMQPKQLHLRLIKSGSN

SEQ ID NO: 130132 - protein, 283 aa, Unknown
  Bacterial polypetide isolated from the Sargasso Sea
RDLIFQLKKANISIVKPENLSKSDQKRLFKIFNEEIYPLLTPSAIDPAHPFPFIANQGRALVMRLNKKNKKRVLNAIIVIPKALSRFIEIDGNKSFKKFLIIDDVISFFASEIFPDHDLDKKMLFRVIRDSDVEIQEEAEDLVRSFELALKRRRTGDIVRLEILKNSNNELIKFITNKLNVKSEYIYEIEGIVGIQDIDQVCKIKNSKLRFKNFNPREVERLKEFNNNFFDTIKKKDLIVHHPFETFDAVIEFLNQAAYDKKVIAIKQTLYRTTLDSPIVKAL

SEQ ID NO: 130133 - protein, 233 aa, Unknown
  Bacterial polypetide isolated from the Sargasso Sea
MRHSFFNREVSWLKFNERVLEEAENKKHPILERLKFLSISASNLDEFYMVRVAGLKSQIVAKVDELSDDGLTPSQQLQLVKGVASKLMARQQSCWKKIKSELKKDDVFVLDPKDVDPSQKITLADYFRSNVFPVLTPVAIDPVHPFPFIPNLGISLVLLLRRETDGEELRALLPLPNLMDRFVPIGRAEDTFIALEDLISLNLDLVFPDFSVLKSAWFRVIRDTEFEIDEEGE

SEQ ID NO: 130134 - protein, 336 aa, Unknown
  Bacterial polypetide isolated from the Sargasso Sea
KYHHRSDYMNFPDLGRTDLLYPKDKALDINNFKIDSNLLDQLVDRDYLMYTPYHSFSYLISILRQSAIDPTVKSIKITLYRLSKKSNVISCLINAAKNGKKVLVQIELQARFDEENNIKVSQELKAAGVDLIYGVKGLKVHSKICLIERFKSKKNKYYGFISTGNFNESTAKVYSDFTLFTSNQKILKEINKVFDFLQSNYKILDYKHLIVSPHHTSKKLFGLIDNEITNVKKGLKGGIILKLNSFTSYKFVDKLYEASRSGVKVKLLVRGICCLIPNKLGLSENIEVKSVVDKYLEHSRVYVFENGGDKKVYISSADLMTRNMKKELKLHVQYIK

SEQ ID NO: 130135 - protein, 280 aa, Unknown
  Bacterial polypetide isolated from the Sargasso Sea
FNDRVLEESKDKTNPLFERVKFLSIAGTNLDEFFMVRVAGLFNQIKDGFDELSADGLTAEDQLNMVVLKTKDLLKKQNEAFLELKKELSKEKIFIRKISELNKKDLMYLREYFQETIYPIITPTAIDPSHPFPFIPNKGQAILLRMTRIKKKRELNAIIVIPRALPKFISLNNSETINEFVTIDDVICKFANEIFPDHNIEASLQFKIIRDSEIEIDDEAADLVRYFEKAIKKRRRGNVVKLEVLTNSNKNLLNFISKKFKMDENDIYEAEGLVGIQDID

SEQ ID NO: 130136 - protein, 231 aa, Unknown
  Bacterial polypetide isolated from the Sargasso Sea
MKKKNTKIVYDEKIKNTPLRFINRELSWLNFNERVLSESENNQNPLMERLRFLSISGNNLDEFHMVRVAGLYRQIKEKVFTRTDDGRTTRQQFNDVTKSLKLLLKKQQTVWDKLKKELGLKKTKILESKSELKNEKKKIEEIFRKNVYASLTPLAIDPAHPFPFLPSQSITMVCALKNKMDKLSYSLVIFPPKLERFFKISKPNNFVKAEDIIKNNMKIIFPDFKLINFSL

SEQ ID NO: 130137 - protein, 231 aa, Unknown
  Bacterial polypetide isolated from the Sargasso Sea
LARDATKVFNYVSGYIEPGDFENISLAPLNLKKTILNNLANESRFASRGLRAMAWIKLNSLIEKDVIDAMYAASNAGVKIDLVIRGICGLRPGVKGLSENIRVKSVVGRFLEHSRIACFGNGNSLPSSNSKVYISSADWMDRNLNRRVEILVKINNPTVKAQIVSQIMAANLRDQAQSWVLQGDGSYLRDNMQIAEKFSCHDFLMQNPSLSGRGRALKKNPPQLLVDQKTV

SEQ ID NO: 130138 - protein, 181 aa, Unknown
  Bacterial polypetide isolated from the Sargasso Sea
RSGLERLIEREIEHARRGRPSGMIFKVNSVADQKVITKLYEASKAGVRQDLIVRGICCLKPGVEGVSEKIKVRSIIGRFLEHSRIYYFENGGNPEIYCGSADLMERNLSRRVEILFPLIDQEILDHLKQNLDLMLSDNTLAFNLQQDGSYRRISKKAQDPEINSQIKLLEWYAEENLFVSV

SEQ ID NO: 130139 - protein, 266 aa, Unknown
  Bacterial polypetide isolated from the Sargasso Sea
RFPERIKDFKNDYFKAIANKDIVIHHPFESFEVVTQFIDQAADDPKVLSIKHTLYRTTDDSPIEASLVRAAQKGKLVTVIIELQARFDEERNLKWAKELELAGAQVVFGNIDMKTHAKITLVTRKQMNSVVNYAHYGTGNYHPRNARVYMDLSYFTCDKTLTNDAAKMFNYLTSYSEPTTIKKIVYSPITARNKLNELIRNEITNAGKNKPSGIVCKCNSLVDKQIIDEFYKASQKNVKIELLIRGICSLIPGKENLSENIVVKSI

SEQ ID NO: 130140 - protein, 213 aa, Unknown
  Bacterial polypetide isolated from the Sargasso Sea
MIIAPLELKSSLINMIKNEIFLARKGKPAEMWVKLNALIDPEVIDMLYKASQSGVRINMIIRGICGLRPGLRGLSENIRVKSVIGRFLEHSRVCVFGNGSQLPSTKAKVFISSADWMGRNLNRRVESFVEIKNLTVKSQIVNQIMAANLADKEQSWVLQPDGQYKRHQFKPNEPSFNCHEYFIENPSLSGRGRAAQNAPPSLLNVSNKRKKAF

SEQ ID NO: 130141 - protein, 238 aa, Unknown
  Bacterial polypetide isolated from the Sargasso Sea
YVHIGTGNYNSKTSKLYTDLGLLSTRPELGQDLVELFNYLTGFSKQQSFRRLLVAPVTLRKGMESLIRREIEHAREGRDGHIRAKMNSLVDPDIIALLYEAAAANVRVELIIRGMCSLYPGREGLSESISVVSIIGQFLEHSRIFWFGNGGSPEVYIGSADWMSRNLDRRVEAVTPVEDPSLRGRLERLLELYLKDNRGAWDMQSDGSFIQRQPEDGEDVRNSQVQLIKQWSQGVPQS

SEQ ID NO: 130142 - protein, 128 aa, Unknown
  Bacterial polypetide isolated from the Sargasso Sea
WCGRRLDCKGNLLPQPGLKGVSENIRVISVVGRFLEHSRVYFFENSPNQVFCSSADWMERNLSNRIEVCFPIIKKKWANRIVNEMELYLSDKVQSWALTSDGAYNQKDLKNEEALGVQSILQKSLGRL

SEQ ID NO: 130143 - protein, 160 aa, Unknown
  Bacterial polypetide isolated from the Sargasso Sea
IKKFYEASNAGVKINLSVRGVCCLRPGIKGQSENIKVKSLIGRFLEHSRIYCFANGSSMPSRENQVYISSADLMPRNLDRRIEIIIPIENNTVHEQILDQIMLANFKDKSETWYLDSLGNYHKEQEKGFSAHSYFMKNPSLSGRGKSILRAKPQNLRLVK

SEQ ID NO: 130144 - protein, 302 aa, Unknown
  Bacterial polypetide isolated from the Sargasso Sea
SDGLTPEEQMDEVVLETKNLLKKQNKIFIQLIMELKKNNISLVKPVNLNTKDKIKLLEIFKEEIYPLLTPSAIDPAHPFPFIINQGRAIVMKLRKKNKKRILNSIIVIPKALSRFVEIESSKNHKKFVILDDVISFFANEIFPDHDLEKKMIFRLIRDSDVEIQEEAEDLVRSFELALKRRRTGDIVRCEVLENSDNELVRFITNKLDINPEYIYDVAGLVGIQDIDQICKVKNPKLRFKHFTPREVERLKEYNDNFFETIKKKDLVVHHPFETFDSVIEFLNQAANDKKVIAIKQTLYRTT

SEQ ID NO: 130145 - protein, 88 aa, Unknown
  Bacterial polypetide isolated from the Sargasso Sea
PTLYRTPPDSPIVKALSRAAENGKVVTAVVEIKARFDEEANIEFSRKLEKAGVQIVYGFAKYKTPAKASLVLRKEGVKTRSYVHLGTG

SEQ ID NO: 130146 - protein, 227 aa, Unknown
  Bacterial polypetide isolated from the Sargasso Sea
MRDNNFFTRELSLLEFNKRVIEQASDKSVPILERLKYLCIADSNLDEFFEIKVAFLRKKLKLSDKRFLSERENNLQLLKDIRRKVNAIIKLQYDLLQKSVFRALRTKNIVFLRRRELNSAQRDWASKYFDAHILPIINPMILEGNSPDIIGSHPFPKIQNKSLNFMVKLKGSDVFGNSPKLAVVPAPRILPRYIKLPKKISQDKDTYIFLSSLIHENVDKLFPGLKV

SEQ ID NO: 130147 - protein, 131 aa, Unknown
  Bacterial polypetide isolated from the Sargasso Sea
SIVGRFLEHSRIYCFGNGHGLPSENAHVYLGSADLMPRNLDRRVETIVPVTNPTVHEQVLSQIMLGNIIDNQQSYEILPDGTSRRTEPREGEEPFNAQEYFMTNPSLSGRGEALKSSAPKLIAGLLSGRTK

SEQ ID NO: 130148 - protein, 73 aa, Unknown
  Bacterial polypetide isolated from the Sargasso Sea
VGVKVSLFVRGVCCLRPGIKNKSENIIVKSIIGRFLEHSRIYCFANGKLMPNRNAKVYISSADLMPRNLDRRV

SEQ ID NO: 130149 - protein, 215 aa, Unknown
  Bacterial polypetide isolated from the Sargasso Sea
VTGYAKPKKLNKIFMSPLNSRNFFEEKIENEIVNASKGKPAEIWAKMNSLVDPGIIKKFYEASNAGVKINLSVRGVCCLRPGIKGQSENIKVKSLIGRFLEHSRIYCFANGSSMPSRENQVYISSADLMPRNLDRRIEIIIPIENNTVHEQILDQIMLANFKDKSETWYLDSLGNYHKEQEKGFSAHSYFMKNPSLSGRGKSILRAKPQNLRLVK

SEQ ID NO: 130150 - protein, 176 aa, Unknown
  Bacterial polypetide isolated from the Sargasso Sea
PAEIWAKMNSLLDPEIIKKFYEASNAGVKINLSVRGVCCLRPGIKGQSENIKVKSLIGRFLEHSRIYCFANGSSMPSRENQVYISSADLMPRNLDRRIEIIIPIENNTVHEQILDQIMLANFKDKSETWYLDSLGNYHKEQEKGFSAHTYFMENSSLSGRGKSLLKAKPQNLRLVK

SEQ ID NO: 130151 - protein, 296 aa, Unknown
  Bacterial polypetide isolated from the Sargasso Sea
VQFLQQAARDPNVVAIRQTLYRTSRESPIVQALCEAAEDGKSVTALIELKARFDEAANIRQSRALERAGAQVIYGFMDWKTHAKLSTVVRRERTGLVTYSHFGTGNYHPITAKFYTDLSLLTSDEALGRDATKVFNYVSGYVEPEKLENLSISPLNLKETLLKNLQNEIKHSSLGKPAMVWVKVNSLIDSEIIDALYDASCAGVKIDLIVRGICGVRPGIKSLSENIRVKSVIGRFLEHSRIVCFGNGKQLPSKRAKVYISSADWMERNLNRRVESLVEIKNETVHEQILEQIMAA

SEQ ID NO: 130152 - protein, 283 aa, Unknown
  Bacterial polypetide isolated from the Sargasso Sea
MPRRVEEFGGDYFSAISKKDFIVHHPYESFDTVVRFLLQSSKDKNVISIKQTLYRTSNNSPIIAALMQAAFNGKSVTALIELKARFEEKKNIQWARNLEKSGVQVVYGLPNLKIHSKISLVARKESGSIVTYCHFGTGNYHPQTAKIYTDLSLFTKDKDLTNDAAKVFSYMTSYVEPRGLKKLSVAPVMMRETFYQLIDQEIKNSKKGLSSGIWAKMNSLVDSGIISKLYEASNAGVSIKLIVRGICSLQPGIKNLSENIEVKSIVGRFLEHSRIYCFGNGQS

SEQ ID NO: 130153 - protein, 313 aa, Unknown
  Bacterial polypetide isolated from the Sargasso Sea
MKDYIFKNRELSWLDFNARVLQEAEDKKVPIIERLRFIGIFSNNLDEFFKVRYATVKRIALSGKKQKKLYKGPNATDLLQMITNKAIELQEKSDQVLGSIINDLKHENIFFVDEKSIPKEFIEYINTFFIEKIQPQLEVVILNKKSKFPNLSDTSSFLTIKIKTKDEKIKFALIKLPNQIDRFIVLSKSEKKYIILIDDIIRFHLNEIFEIFAPKKIVANMIKISRDAELDFAYDISKSYLEKISQSIKNRSIGEPVRFLYDQDIDKSTLKFLINKLNFDDNTDSIIPGSKYHNRRDYMNFPTIGNSTLVYKD

SEQ ID NO: 130154 - protein, 398 aa, Unknown
  Bacterial polypetide isolated from the Sargasso Sea
MDQALDERHPLLERVKFLAITGTNLDEFFMVRVATILRQIKNGSESLTSDGLTPKQQFSEIHGRTEKLLKDQHSAWSLLRPLLEKNGVKFLEMRSYNDGIKDYLNGRFMNEIYPVLTPMAFDPGHPFPHISSLSMNLAVVVRHNQETKFARVKIPDVLPRFLEIPESVSGQNKIVFVFLEDVIRSNIDELFPGTEIRDIRLFRIIRDTDLVIQEDEADDLLETVDKGLKQIRYGDVSLLQVEKSMPKRTLSVLADNCQVDEELVSRSEGRMNFADLMQLMKLPLPQLKDKPFFPPVLFEGLPSEQLFERIRYRDYLLHHPYQSFYPVEALVKAAAEDPQVLAVKMTLYRIGSNSPVIEHLINAAEVGKQVTVLVELKARFDERNNIVWARRLEAVGAH

SEQ ID NO: 130155 - protein, 194 aa, Unknown
  Bacterial polypetide isolated from the Sargasso Sea
LKILKMENLQLFWAKMNSLVDPEIIDKLYEASNAGVKIHLFVRGVCCLRPGVKDRSENIVVKSIIGRFLEHSRIYCFSNGTKKMPNRNAKVYISSADLMPRNLNRRVELLVPIENETVHEQILDQIMLANYLDTNQSWELNADGNYKKIKYIKSDSFSAHEYFMNNPSLSGRGKAKLKMQPKQLQLRLIKSGSN

SEQ ID NO: 130156 - protein, 355 aa, Unknown
  Bacterial polypetide isolated from the Sargasso Sea
NKYFNREISWLKFNERVNELSYDKNVPILERLNFISIAASNLDEFFSVRVAGLIEQLKLTPNKKSFDGMKIEDQIKIVDSLTRGLIKRQNESYGQIEKELKKNKIYILRDKFLKKHLSHIKNYYLNEIISILTPITVDSTHPLPFIPNLSLCLIAKIKNKKSKKEFISVMRVSDLKQRFLKIIDKQGIYFYPVESIINNYVGDVFHDFDVIDTNLFRVIRDSDLEVLEEADDLIREFKKLVRERKRGQVIRLDVQKSLNNNFKSFIINELNVSENEIFEYEDLLGFDQLSEVFGNIKNKNLNYKKFKPRFPQRINDFGGDCFAAIKKKDLVVHHPFESFNVVVSFLDQASNDKNV

SEQ ID NO: 130157 - protein, 88 aa, Unknown
  Bacterial polypetide isolated from the Sargasso Sea
MKKEPKFFSNMLSLLEFNKRVVAQALNKNVPILERLKFLCIASSNLDEFFEIKVAILRRQILSKSQKIGRDGYSHEERFKVTRRKVRS

SEQ ID NO: 130158 - protein, 173 aa, Unknown
  Bacterial polypetide isolated from the Sargasso Sea
MVRKNKNNIKKSPQRFINRELSWLNFNERVLKEAQNNKNPILERLRFLSISGNNLDEFHMVRVAGLFRQLKKKIFIRTSDGRTTRQQYQEVAKSMKILLKKQQLILTDLREKLEKEKIRIIDSPKNLKKKREITYTIFEKKIFSTLTPLAIDPAHPFPFLPNLSLSLVCSLKN

SEQ ID NO: 130159 - protein, 352 aa, Unknown
  Bacterial polypetide isolated from the Sargasso Sea
TQISKKDFLMYTPYHSFSYLVAFLRQSAIDPNVKSIKITLYRLSKNSNVISSLINAAKNGKKVLVQIELQARFDEENNIRIAEMLKLAGVELIFGVKGLKVHSKICLIERRDNNKKKFYGFISTGNFNESTAEVYTDYTLFTSDQGILKDVSKVFEFLKVNYKIQKYKHLIVSPHYTSSLLFSLIDKEIDNAVNGKKSQIILKLNSLTSHRFVDKLYEASNSGVKIKLIVRGICCLIPNIKNLSKNIEVISIVDKYLEHPRVYIFENGGNKKVYISSADLMTRNLDNRVEVACPIYQEDLKKQILDTIQISLNDNVKSRLINLNKQNEFVENKNKKVRSQWDTYDYFYRINT

SEQ ID NO: 130160 - protein, 224 aa, Unknown
  Bacterial polypetide isolated from the Sargasso Sea
MSKIDLTKALSSEQQLINREISWLQFNDRVLEESKNVKNPLFERVKFLSIAGTNLDEFFMVRVAGLYNQIKDDFDQLSADGLTSEEQLSRVVLKTKDLLIKQNDSFKQLLNELKKEKIYLKKIKDLDKKSIDFLRDYFNETVYPVITPTAIDPSHPFPFIANKGQAILMKLEKVKNKRNLNVIIVIPRALPKFIDIDGQSDQFITIEDLISYFSESIFPEHELV

SEQ ID NO: 130161 - protein, 241 aa, Unknown
  Bacterial polypetide isolated from the Sargasso Sea
QKIYTDLSLFSSNQDLAKDVEKFFNYVTGYAKPKKLNKIFMSPLNSRNFFEEKIENEIVNASKGKPAEIWAKMNSLVDPGIIKKFYEASNAGVKINLSVRGVCCLRPGIKGQSENIKVKSLIGRFLEHSRIYCFANGSSMPSRENQVYISSADLMPRNLDRRIEIIIPIENNTVHEQILDQIMLANFKDKSETWYLDSLGNYHKEQEKGFSAHSYFMKNPSLSGRGKSILRAKPQNLRLVK

SEQ ID NO: 130162 - protein, 133 aa, Unknown
  Bacterial polypetide isolated from the Sargasso Sea
MGTGGRALFAPGCPGVSETIRVRSIVGRFLEHSRAFCFTNGGNHSVWIGSADLMHRNLDRRVEALVSLEDPEHVAELYDLFDLAFSPTTAAWDLDVHGSWNRRLTDESGSALQDLQEYLIREKTKRTTALGSA

SEQ ID NO: 130163 - protein, 102 aa, Unknown
  Bacterial polypetide isolated from the Sargasso Sea
MTSVELAPELYLNRELAWIDFNQRVLAQAMDPRTPLLEQAKFSAIFSNNLDEFFMVRVASLKSQVEAGIETPSVDGLTPLEQMTAIQASCDHCLSSSSSTTA

SEQ ID NO: 130164 - protein, 155 aa, Unknown
  Bacterial polypetide isolated from the Sargasso Sea
LFVRGVCCLRPGVKDRSENIVVKSIIGRFLEHSRIYCFSNGSKKMPNRNAKVYISSADLMPRNLNRRVELLVPIENETVHEQILDQIMLANYLDTNQSWELNADGNYKKIKYSKIDSFSAHEYFMNNPSLSGRGKAKLKMQPKQLHLRLIKSGSN

SEQ ID NO: 130165 - protein, 319 aa, Unknown
  Bacterial polypetide isolated from the Sargasso Sea
TALKKRRRGEVVGLYVQGRVEKKLLNFLRKSLKVKDESIFRLKSILDVSSLNELIDEKKLSLCFKPFKSRYPQRILDFKGKCFSAIKKKDILIHHPFESFDVVVNFLQQASKDPKVISIKQTLYRTSSESPIIEALKTASNNGKSVTAVVELKARFDEEKNIQWAKDLERSGVNIVYGFLKWKTHAKISLISRQEDDDITSYVHFGTGNYHPINAKIYTDLSYFSCNEELVNDALKIFNFITGYTKPQKMQLVSYSPTLLRNFMIELIDNEIINSKKKLPAEIWIKVNSLIDDEIIDKLYEASQAGVKIFLIVRGICGL

SEQ ID NO: 130166 - protein, 237 aa, Unknown
  Bacterial polypetide isolated from the Sargasso Sea
IKRYVHLGTGNYHTKTTKLYTDYGLMTCEKSMGQDVHKIFQELTGMGKAARLKQLKHSPFTLHPSIIEWIDFETAQAQAGKPARIIAKFNSLTEKNIMQALYRASQAGVEIDLIIRGICCLRPGIPGLSENIRVRSIIGRFLEHTRIYHFHHGGDELVYCSSADWMERNLFNRVETCFPINDPALKAQILEQGLHIYLRDNSRAWELQPDGHYQRVQPQNGEEHFIAQQSLLDTLGG

SEQ ID NO: 130167 - protein, 64 aa, Unknown
  Bacterial polypetide isolated from the Sargasso Sea
MKSKYINRELSWLKFNDRVLLEAQNIENPLYERVKFLSIAGSNLDEFFMVRVAGLYSQIKQEVT

SEQ ID NO: 130168 - protein, 181 aa, Unknown
  Bacterial polypetide isolated from the Sargasso Sea
MSKALFSEKSNISNQLINRELSWLQFNDRVLEESKDEANPLFERVKFLSIAGTNLDEFFMVRVAGLFNQIKDGFDELSADGLTAEDQLNRVVLKTKDLLKKQNEAFLELKKELSKEKIFIRKISELNKKDLMYLREYFQETIYPIITPTAIDPSHPFPFIPNKGQAILLRMTRIKKKRELN

SEQ ID NO: 130169 - protein, 84 aa, Unknown
  Bacterial polypetide isolated from the Sargasso Sea
MLKKNTAYNYANRELSWLKFNERVLSQTSDSKIPLLERVRFLSIAFSNLDEFFMVRVAGLNVQKFSRNKSFDGYNTTTTTQADR

SEQ ID NO: 130170 - protein, 107 aa, Unknown
  Bacterial polypetide isolated from the Sargasso Sea
MSKASFSENANISNQLINRELSWLQFNDRVLEESKDKTNPLFERVKFLSIAGTNLDEFFMVRVAGLFNQIKDGFDELSADGLTAEDQLNRVVLKTKDLLKKQNEAFL

SEQ ID NO: 130171 - protein, 250 aa, Unknown
  Bacterial polypetide isolated from the Sargasso Sea
MKSQTDVFINRELSWIEFNKRVLLTGMEKEYKTLDKVKFCSIFSNNLDEFFMVRVASLKAQVEAEITKKSIDGLTPKEQLKKINNEIKKLTILQENYVNNELKNELKEKGVFLKKYKELRENQRNWCNNFFTTSIFPLLTPLVVDPAHPFPFISNLSLNLAALIKDEEDSKNQFVRVKIPTKNIPRFIRIPNEITQLNDESSHYFISVEDLIGNNINTLFNGMECINYSFFRVTRDADLELKELKQMIYF

SEQ ID NO: 130172 - protein, 259 aa, Unknown
  Bacterial polypetide isolated from the Sargasso Sea
AKTRSYVHLGTGNYHPINAKIYTDLSLFSSNQDLAKDVEKFFNYVTGYAKPKKLNKIFMSPLNSRNFFEEKIENEIVNAKKGKPAEIWAKMNSLVDPGIIKKFYEASNAGVKINLSVRGVCCLRPGIKGQSENIKVKSLIGRFLEHSRIYCFANGSSMPSRENQVYISSADLMPRNLDRRIEIIIPIENNTVHEQILDQIMLANFKDKSETWYLDSLGNYHKEQEKGFSAHSYFMKNPSLSGRGKSILRAKPQNLRLVK

SEQ ID NO: 130173 - protein, 319 aa, Unknown
  Bacterial polypetide isolated from the Sargasso Sea
YERVKFLSIAGSNLDEFFMVRIAGLYSQIKQEVDSLSSDGLTPEEQMDEVVLETKNLLKKQNKIFIQLIKELKKNNISLVKPVNLNTKDKKKLLEIFKEEIYPLLTPSAIDPAHPFPFIINQGRAIVMKLRKKNKKRILNSIIVIPKALSRFIEIESSKNHKKFVILDDVISFFANEIFPDHDLEKKMIFRVIRDSDVEIQEEAEDLVRSFELALKRRRTGDIVRLEVLENSDNELVRFITNKLDINPDYIYDVSGLVGIQDIDQICKVKNPKLRFKHFTPREVERLKEYNDNFFETIKKKDLVVHHPFETFDSVIEFL

SEQ ID NO: 130174 - protein, 109 aa, Unknown
  Bacterial polypetide isolated from the Sargasso Sea
MKSRYINRELSWLKFNDRVLLEAQNIENPLYERVKFLSIAGSNLDEFFMVRVAGLYSQIKQEVDSLSSDGLTPEEQMDEVVLETKNLLKKQNKIFIQLIMELKKNNISL

SEQ ID NO: 130175 - protein, 280 aa, Unknown
  Bacterial polypetide isolated from the Sargasso Sea
LNSIIVIPKALSRFIEIESSKNHKKFVILDDVISFFANEIFPDHDLEKRMIFRVIRDSDVEIQEEAEDLVRSFELALKRRRTGDIVRLEVLENSDNELVRFITNKLDINPDYIYDVSGLVGIQDIDQICKVKNPKLRFKHFTPREVERLKEYNDNFFETIKKKDLVVHHPFETFDSVIEFLNQAANDKKVIAIKQTLYRTTLDSPIVKALITAAENGKTVTALIEIKARFDEEANIQLSRSLEKVGVQIVYGFAKYKTHAKSSLVLRREQGKIQTYFHLG

SEQ ID NO: 130176 - protein, 102 aa, Unknown
  Bacterial polypetide isolated from the Sargasso Sea
MKSKYINRELSWLKFNDRVLLEAQNIENPLYERVKFLSIAGSNLDEFFMVRVAGLYSQIKQEVDSLSSDGLTPEEQMDEVVLETKNLLKKQNKIFIQLIMEL

SEQ ID NO: 130177 - protein, 289 aa, Unknown
  Bacterial polypetide isolated from the Sargasso Sea
MSKASFSENANISNQLINRELSWLQFNDRVLEESKDKTNPLFERVKFLSIAGTNLDEFFMVRVAGLFNQIKDGFDELSADGLTAEDQLNRVVLKTKDLLKKQNEAFLELKKELSKEKIFIRKMSELNKKDLMYLREYFQETIYPIITPTAIDPSHPFPFIPNKGQAILLRMTRIKKKRELNAIIVIPRALPKFVSLNNSETINEFVTIDDVICKFANEIFPDHNIEASLQFKIIRDSEIEIDDEAADLVRYFEKAIKKRRRGNVVKLEVLTNSNKKLLNFISKKFKMDE

SEQ ID NO: 130178 - protein, 254 aa, Unknown
  Bacterial polypetide isolated from the Sargasso Sea
NSIIVIPKALSRFIEIESSKNHKKFVILDDVISFFANEIFPDHDLENKMIFRVIRDSDVEIQEEAEDLVRSFELALKRRRTGDIVRLEVLENSDNELVRFITNKLDINPDYIYDVSGLVGIQDIDQICKVKNPKLRFKHFTPREVERLKEYNDNFFETIKKKDLVVHHPFETFDSVIEFLNQAANDKKVIAIKQTLYRTTLDSPIVKALITAAENGKTVTALIEIKARFDEEANIQLSRSLEKVGVQIVYGFAK

SEQ ID NO: 130179 - protein, 269 aa, Unknown
  Bacterial polypetide isolated from the Sargasso Sea
KRRRGNVVKLEVLTNSNKKLLNFISKKFKMDEDHIYEVEGLVGIQDIDEICKKKDPNLRFKKFNPREVERLKEFDDKFFSAIRSKDFVVHHPFETFDVVIQFLEAAAKDPKVIGIKQTLYRTTPDSPIVKALSRAAENGKVVTAVIEIKARFDEEANIELSRKLEKAGVQIVYGFAKYKTHAKASLVLRKEGAKTRSYVHLGTGNYHPINAKIYTDLSLFSSNQDLAKDVEKFFNYVTGYAKPKKLNKIFMSPLNSRNFFEEKIENEIV

SEQ ID NO: 130180 - protein, 331 aa, Unknown
  Bacterial polypetide isolated from the Sargasso Sea
FLELKKELSREKISFRKISELNRKDLMYLREYFQETIYPIITPTAIDPSHPFPFIPNKGQAILLRMSRIKKKRELNAIIVIPRALPKFISLNNSEKINEFVKVDDVICKFANEIFPDHNIEASLQFKIIRDSEIEIDDEAADLVRYFEKAIKKRRRGNVVKLEVLTNSNKSLLNFISKKFKMNEDRIYEVEGLVGIQDIDEICKKKDPKLRFKKFNPREVERLKEFDDKFFSAIRSKDFVVHHPFETFDVVIQFLEAAAKDPKVIGIKQTLYRTTPDSPIVKALSRAAENGKVVTAVIEIKARFDEEANIELSRKLEKAGVQIVYGSQNTK

SEQ ID NO: 130181 - protein, 280 aa, Unknown
  Bacterial polypetide isolated from the Sargasso Sea
SEIFPDHLLEKKMIFRVIRDSDVEIQEEAEDLVRSFELALKRRRTGDIVRLEILEKSDKELVKFITNKLEINPNYIYEVAGLVGIQDIDQICKIKNSKLKFKNFTPREVERLKEYNNNFFETIKKKDLIVHHPFETFDAVIEFLNQAAMDKKVIAIKQTLYRTTLDSPIVKALISASENGKTVTALIEIKARFDEEANIQLARSLEKAGVQIVYGFAKYKTHAKSSLIHRREGGKIQTYFHLGTGNYHPVNAKIYTDLSLFSSDKKMAADVEKFYNYVTG

SEQ ID NO: 130182 - protein, 246 aa, Unknown
  Bacterial polypetide isolated from the Sargasso Sea
MSAAVLPKNAYINRELSWIAFNQRVLAQALDERTPVLDQAKFSAIFSNNLDEFFMVRVASLKSQVEAGITSPSEDGKTPLEQLLTIREHLIPLLQQQQDHYRLHLKSELLKHKVHLLDYVQLNDAQKNWVDDTFHTSVFPLLTPLGVDPAHPFPFVSNLSLNVAAIIHDPETGERQFARVKVPQKNLPRFVAIPSELSDAEPAPIHTAIPLEQVIAFNLELLFPGMTVEGHYFFRVTRDADLELRD

SEQ ID NO: 130183 - protein, 298 aa, Unknown
  Bacterial polypetide isolated from the Sargasso Sea
NNISLVNPVNLNTKDKKKLLEIFKEEIYPLLTPSAIDPAHPFPFIINQGRAIVMKLRKKNKKRILNSIIVIPKALSRFIEIESSKNHKKFVILDDVISFFANEIFPDHDLEKKMIFRVIRDSDVEIQEEAEDLVRSFELALKRRRTGDIVRLEVLENSDNELVKFITNKLDINSDYIYNVSGLVGIQDIDQICKVKNPKLRFKHFIPREVERLKEYNDNFFETIKKKDLVVHHPFETFDSVIEFLNQAANDKKVIAIKQTLYRTTLDSPIVKALITAAENGKTVTALSEIKARFDEEA

SEQ ID NO: 130184 - protein, 159 aa, Unknown
  Bacterial polypetide isolated from the Sargasso Sea
ASAAGVKIELFIRGICCLRPGVKKLSENIVVKSIIGRYLEHARIFCFANESNIPSKNNTVLIGSADLMPRNLDRRVEILTPIKNSTVHEQILNQIMVANFLDNEQTWIMNDDGTYKRVKQKGKTFNAHKYFMSNPSLSGRGKLKGNRKPKKLLSLMHYE

SEQ ID NO: 130185 - protein, 317 aa, Unknown
  Bacterial polypetide isolated from the Sargasso Sea
KNKKRYKNSIIVIPKALSRFIEIDGGKNYKKYVILDDIISFFSSEIFPDHNLESKMIFRVIRDSDVEIQEEAEDLVRSFELALKRRRIGDIVRLEVIKNSNKDLIKFITNKLEVNPDYIYETEGLVGIEDIDQICKLKNSKLRFKNFNPREVERLKEFNNNFFDTIKQKDLVVHHPFETFDAVIEFLNQAAYDKKVIAIKQTLYRTTLDSPIVKALISAAENGKTVTALIEIKARFDEEANIQLARSLEKAGVQIVYGFAKYKTHAKSSLVLRRELGKIQTYVHLGTGNYHPVNAKIYTDLSLFSSNKKIAGDVEKI

SEQ ID NO: 130186 - protein, 115 aa, Unknown
  Bacterial polypetide isolated from the Sargasso Sea
MSIRQNTTESRVASSTRAPVKPKKNRKSALPLDHPSLYTNRELSWLEFNQRVLDQALDERHPLLERVKFLAITGTNLDEFFMVRVATILRQIKNGSESLTSDGLTPKQQFSEIHG

SEQ ID NO: 130187 - protein, 218 aa, Unknown
  Bacterial polypetide isolated from the Sargasso Sea
YGILSSNNKMAEDVQKFFMQLTGSNKKFNYNHLILSPFDASQEIIKKVNNEIKNCKKGREAIIKAKMNQLTEINIIKKLYQASSAGVKIELHIRGECRLIPGVKGISDNIKVYSTIGRFLEHSRVYYFYDVGKEQVYLSSADWMTRNMHNRVEIIFPILEKNHKSRIYHECFIYPLEDNSNLWKLKNNGSYDKVKIQRGSRRNLSQVVICNKYGEFID

SEQ ID NO: 130188 - protein, 257 aa, Unknown
  Bacterial polypetide isolated from the Sargasso Sea
VGIQDIDQICKVKNPKLRFKHFTPREVERLKEYNDNFFETIKKKDLVVHHPFETFDSVIEFLNQAANDKKVLAIKQTLYRTTLDSPIVKALITAAENGKTVTALIEIKARFDEEANIQLSRSLEKVGVQIVYGFAKYKTHAKSSLVLRREQGKIQTYFHLGTGNYHPVNAKIYTDLSLFSCDKKMASDVEKFFNYVTGYAKPKNLNKISISPVNMRQTLNENIDAEIKNSKNGQFAAIWAKMNSLVDPEIIDKFYEA

SEQ ID NO: 130189 - protein, 56 aa, Unknown
  Bacterial polypetide isolated from the Sargasso Sea
MKSKYINRELSWLKFNDRVLLEAQNIENPLYERVKFLSIAGSNLDEFFMVRVAGLY

SEQ ID NO: 130190 - protein, 59 aa, Unknown
  Bacterial polypetide isolated from the Sargasso Sea
MLKKNTTYNYANRELSWLKFNERVLSQTSDSKIPLLERVRFLSIAFSNLDEFFMVRVAG

SEQ ID NO: 130191 - protein, 199 aa, Unknown
  Bacterial polypetide isolated from the Sargasso Sea
MKSQADVFINRELSWIEFNKRVLLTGMEKEYKILDKVKFCSIFSNNLDEFFMVRVASLKAQVEAGITKKSVDGLTPKEQLTKINNEVKKLTTLQENYINNELNNELKEKGVILKKYNDLSENQKNWCNNYFISSIFPLLTPLVVDPAHPFPFISNLSLNLAALIRDGEDSKNQFVRVKIPTKNTNRFIQIPNEIIQHGD

SEQ ID NO: 130192 - protein, 105 aa, Unknown
  Bacterial polypetide isolated from the Sargasso Sea
MTALKKQHKEELKSKYINRELSWLKFNDRVLLEAQNIENPLYERVKFLSIAGSNLDEFFMVRVAGLYSQIKQEVESLSSDGLTPEEQMDEVVLETKNLLKKQNKI

SEQ ID NO: 130193 - protein, 232 aa, Unknown
  Bacterial polypetide isolated from the Sargasso Sea
ANIQLSRSLEKVGVQIVYGFAKYKTHAKSSLVLRREQGKIQTYFHLGTGNYHPVNAKIYTDLSLFSCDKKMASDVEKFFNYVTGYAKPKNLNKISISPVNMRQTLNENIDAEIKNSKNGKFAAIWAKMNSLVDPEIIDKFYEASNAGVKIHLFVRGVCCLRPGVKDRSENIVVKSIIGRFLEHSRIYCFSNGTKKMPNRNAKVYISSADLMPRNLNRRVELLVPIENETVHE

SEQ ID NO: 130194 - protein, 297 aa, Unknown
  Bacterial polypetide isolated from the Sargasso Sea
AEDLVRSFESALKRRRTGDIVRLEVLENSDNELIRFITNKLDINPDYIYDVAGLVGIQDIDQICKVKNPKLRFKHFTPREVERLKEYNDNFFETIKKKDLVVHHPFETFDSVIEFLNQAANDKKVIAIKQTLYRTTLDSPIVKALITAAENGKTVTALIEIKARFDEEANIQLSRSLEKVGVQIVYGFAKYKTHAKSSLVLRREQGKIQTYFHLGTGNYHPVNAKIYTDLSLFSCDKKMASDVEKFFNYVTGYAKPKNLNKISISPVNMRQTLNENIDAEIKNSKKWKICSYLGKNE

SEQ ID NO: 130195 - protein, 149 aa, Unknown
  Bacterial polypetide isolated from the Sargasso Sea
GVCCLRPGIKNKSENIIVKSIIGRFLEHSRIYCFANGKLMPNRNAKVYISSADLMPRNLDRRVELLVPIENQTVHEQVLDQIMMANYLDTNQSWELYPNGNYQKIKYSRKDSFSAHDYFMNNPSLSGRGKAKLKIKPKKLNLRLVKDGT

SEQ ID NO: 130196 - protein, 279 aa, Unknown
  Bacterial polypetide isolated from the Sargasso Sea
KKRELNAIIVIPRALPKFISLKNSETINEFVTIDDVICKFANEIFPDHNIEASLQFKIIRDSEIEIDDEAADLVRYFEKAIKKRRRGNVVKLEVLTNSNKNLLNFISKKFKMDEDHIYEVEGLVGIQDIDEICKKKDPKLRFKKFNPREVERLKEFDDKFFSAIRSKDFVVHHPFETFDVVIQFLEAAAKDPKVIGIKQTLYRTTPDSPIVKALSRAAENGKVVTAVIEIKARFDEEANIELSRKLEKAGVQIVYGFAKYKTHAKASLVLRKEGAKTLS

SEQ ID NO: 130197 - protein, 276 aa, Unknown
  Bacterial polypetide isolated from the Sargasso Sea
DNELVKFITNKLDINPDYIYDVSGLVGIQDIDQICKVKNPKLRFKHFTPREVERLKEYNDNFFETIKKKDLVVHHPFETFDSVIEFLNQAANDKKVIAIKQTLYRTTLDSPIVKALITAAENGKTVTALIEIKARFDEEANIQLSRSLEKVGVQIVYGFAKYKTHAKSSLVLRREQGKIQTYFHLGTGNYHPVNAKIYTDLSLFSCDKKMASDVEKFFNYVTGYAKPKNLNKISISPVNMRQTLNENIDAEIKNSKNGKFAAIWAKMNSLVDPGNY

SEQ ID NO: 130198 - protein, 273 aa, Unknown
  Bacterial polypetide isolated from the Sargasso Sea
AKYKTHAKSSLILRKEQGKIQTYIHLGTGNYHPVNAKIYTDLSLFSSDKKIATDVEKFFNYVTGYSKPRNLSKISISPINLRETLNKCIANEIANVKKGKKGEIWAKMNSLVDPAIIDKFYEASNAGVKIFLFVRGVCCLRPGVKDKSENIIVKSMIGRFLEHSRIYCFANGKTMPSRDAKVFISSADLMPRNLNRRVELLVPIENQTVHEQVLDQIMLANYLDKKQSWELDANGNYKKIKYSENDSFSAHDYFMNNPSLSGRGKAKLKMKPK

SEQ ID NO: 130199 - protein, 159 aa, Unknown
  Bacterial polypetide isolated from the Sargasso Sea
MKYEANNFINRELSWIDFNKRVLLTGMEKDYKVLDKIKFFSIFSNNLDEFFMVRVASLKAQVEAGVRKKSIDGHTPKEQLKKINKEVQKLTSLQEKYFNNELNEELKNKGIFIKKYSELNENQKDWCDSYFLSSIFPLLTPLVVDPAHPFPFISNLSLN

SEQ ID NO: 130200 - protein, 113 aa, Unknown
  Bacterial polypetide isolated from the Sargasso Sea
KKKDLIVHHPFETFDAVIEFLNQAAYDKKVIAIKQTLYRTTLDSPIVKALITAAENGKTVTALIEIKARFDEEANIQLSRSLEKAGIQIVYGFAKYKTHAKSSLILRKEQGKI

SEQ ID NO: 130201 - protein, 79 aa, Unknown
  Bacterial polypetide isolated from the Sargasso Sea
MKSKYLNRELSWLKFNDRVLLEAQNIENPLYERVKFLSIAGSNLDEFFMVRVAGLYSQIKQEVDSLSSDGLTPDEQMDE

SEQ ID NO: 130202 - protein, 282 aa, Unknown
  Bacterial polypetide isolated from the Sargasso Sea
DRVLLEAQNIENPLYERVKFLSIAGSNLDEFFMVRVAGLYSQIKQEVESLSSDGLTPEEQMDEVVLETKNLLKKQNKIFIKLIMELKKNNISLVKPVNLNTKDKKKLLEIFKEEIYPLLTPSAIDPAHPFPFIINQGRAIVMKLRKKNKKRILNSIIVIPKALSRFIEIESSKNHKKFVILDDVISFFANEIFPDHDLEKKMIFRVIRDSDVEIQEEAEDLVRSFELALKRRRTGDIVRLEVLENSDKELVRFITNKLDINPDYIYDVSGLVGIQDIDQICK

SEQ ID NO: 130203 - protein, 201 aa, Unknown
  Bacterial polypetide isolated from the Sargasso Sea
MKNTAPDYQEFYLNRELSQLEFNARVLEQARDENIPVLERLRYLCISSSNLDEFFEIRVAGLKEQEISLSSFGQDTEGESPALQLSAIARRARDLVKDQYNLYNQSVLPTMEDKKIFFLDKNKWNPTQRRWIRNYFHRELLPVLSPVSLDPSHPFPKVLNKNLCFAVNLDGVDAYGRQGNLAILQAPRALPRIVKIPNTSR

SEQ ID NO: 130204 - protein, 266 aa, Unknown
  Bacterial polypetide isolated from the Sargasso Sea
HIYEVEGLVGIQDIDEICKKKDPKLRFKKFNPREVERLKEFDDKFFSAIRSKDFVVHHPFETFDVVIQFLEAAAKDPKVIGIKQTLYRTTPDSPIVKALSRAAENGKVVTAVIEIKARFDEEANIELSRKLEKAGVQIVYGFAKYKTHAKASLVLRKEGAKTRSYVHLGTGNYHPINAKIYTDLSLFSSDQDLAKDVEKFFNYVTGYAKPKKLNKIFMSPLNSRNFFEEKIENEIVNASKGKPAEIWAKMNSLVDPGIIKKFYEAS

SEQ ID NO: 130205 - protein, 291 aa, Unknown
  Bacterial polypetide isolated from the Sargasso Sea
YEDIDKKNLKFPIYKPKPILSSLKNNKDYFNIIKNQDILLHHPYNDFDYINNFIKAAVKDKNTVAIKQTLYRTTIKSKIINTLVKAAKKDIAVTVVIELRAKFDEEKNIKIAKKLENAGVQVTYGLKNFKTHAKALLIVRKENGTLVNYFHLGTGNYHENTAKLYTDFSLISANKEIASDVHKFFLQLTGSNKDIKYNHLFLSPIDSSKKVLKLISNEIENKKNKHDAYINIKMNQLTERQIINKLYEASQVGVKIELFIRGECILKPGISGLSENIKVYSTIGRFLEHSR

SEQ ID NO: 130206 - protein, 161 aa, Unknown
  Bacterial polypetide isolated from the Sargasso Sea
MKSQADVFINRELSWIEFNKRVLLTGMEKEYKILDKVKFCSIFSNNLDEFFMVRVASLKAQVEAGITKQSIDGLTPKEQLETINKEVKKLTTLQESYVNNELKNELQEKGVILKKYNDLSENQRNWCNNFFTSSIFPLLTPLVVDPAHPFPFISNLSLNFG

SEQ ID NO: 130207 - protein, 165 aa, Unknown
  Bacterial polypetide isolated from the Sargasso Sea
MTESRVASSTRAPVKPKKNRKSALPLDHPSLYTNRELSWLEFNQRVLDQALDERHPLLERVKFLSITGTNLDEFFMVRVATILRQIKNGSESLTSDGLTPKQQFSEIHGRTEKMLQDQHSAWSFLRPLLEKNGVKFLEMRSYDDGIKDYLHGRFMNEIYPVLTPM

SEQ ID NO: 130208 - protein, 178 aa, Unknown
  Bacterial polypetide isolated from the Sargasso Sea
MKNRKSALPLDHSSLYTNRELSWLEFNQRVLDQSLDDRHPLLERVKFLAITGTNLDEFFMVRVATILRQIKNGSESLTSDGLTPKQQFSEIHGRTEKMLQDQHSVWSLLRPLLEKNGVKFLEMRSYNDGIKDYLHGRFMNEIYPVLTPMAFDPGHPFPHISSLSMNLAVVVRHNQETK

SEQ ID NO: 130209 - protein, 284 aa, Unknown
  Bacterial polypetide isolated from the Sargasso Sea
FRVIRDSDVEIQEEAEDLVRSFELALKRRRTGDIVRLEILEKSDKELIKFITNKLEINPNYIYEVAGLVGIQDIDQICKIKNSKLKFKNFTPRDVERLKEYNNNFFETIKKKDLIVHHPFETFDAVIEFLNQAAIDKKVIAIKQTLYRTTLDSPIVKALISASENGKTVTALIEIKARFDEEANIQLARSLEKAGVQIVYGFAKYKTHAKSSLIHRREGGKIQTYFHLGTGNYHPVNAKIYTDLSLFSSDKKMATDVEKFYNYVTGYSKPKNLNKISISPVNLR

SEQ ID NO: 130210 - protein, 147 aa, Unknown
  Bacterial polypetide isolated from the Sargasso Sea
MSKASFSENANISNLLINRELSWLQFNDRVLEESKDKTNPLFERVKFLSIAGTNLDEFFMVRVAGLFNQIKDGFDELSADGLTAKDQLNGVVLKTKDLLKKQNEAFLELKKELSKEKIFIRKMSELNKKDLMYLREYFQETIYPIIT

SEQ ID NO: 130211 - protein, 282 aa, Unknown
  Bacterial polypetide isolated from the Sargasso Sea
ELSWIEFNKRVLLTGMEKDYKILDKVKFCSIFSNNLDEFFMVRVASLKAQVEAGITKKSVDGLTPKEQLTKINEEVKKLTSLQENYVNNELSNDLKEEGVILKKYGDLTENQKNWCNNYFTSSIFPLLTPLVVDPAHPFPFISNLSLNLAALIRDGEDSKNQFVRVKIPTKNINRFIQIPNEIIQQGDENTYFFISVEDLIGNNINTLFNGMECINYSFFRVTRDADLELKELEADDLLLAVEQSLQKRRLGGDVVRLEVESDMPENILKLLIESISIQKEY

SEQ ID NO: 130212 - protein, 161 aa, Unknown
  Bacterial polypetide isolated from the Sargasso Sea
DAMYDASNAGVKIDLIVRGICALRPGINCLSENIRVKSIVGRFLEHSRIACFGNGSDLPSFESRVYISSADWMSRNLNRRVEVLVKINNNTVKAQIVNQIMAANLRDQAQSWVLQSDGSYIRDNITTQNKFSCHDFFMQNPSLSGRGRALRKNPPELLIEN

SEQ ID NO: 130213 - protein, 94 aa, Unknown
  Bacterial polypetide isolated from the Sargasso Sea
TRFFIFCSGGENKTYISSADWMTRNLDNRIEVTCPILDPSNKKEILEIFNIYWSDNLKSRKLNTLKINEYSKNNEEPLKSQDSIYNYYQKSLEK

SEQ ID NO: 130214 - protein, 265 aa, Unknown
  Bacterial polypetide isolated from the Sargasso Sea
IENPLYERVKFLSIAGSNLDEFFMVRVAGLYSQIKQEVDSLSSDGLTPDEQMDEVVLETKNLLKKQNKIFTQLIMGLKKNNISLVKPVNLNTKDKKKLLEIFKEEIYPLLTPSAIDPAHPFPFIINQGRAIVMKLRKKNKKRILNSIIVIPKALSRFIEIESSKNHKKFVILDDVISFFANEIFPDHDLEKKMIFRVIRDSDVEIQEEAEDLVRSFELALKRRRTGDIVRLEVLENSDNELVRFITNKLDINPDYIYDVSGLVGI

SEQ ID NO: 130215 - protein, 263 aa, Unknown
  Bacterial polypetide isolated from the Sargasso Sea
KALFSEKSNISNQLINRELSWLQFNDRVLEESKDEANPLFERVKFLSIAGTNLDEFFMVRVAGLFNQIKDGFDELSADGLTAEDQLNRVVLKTKDLLKKQNEAFLELKKELSKEKIFIRKISELNKKDLMYLREYFQETIYPIITPTAIDPSHPFPFIPNKGQAILLRMTRIKKKRELNAIIVIPRALPKFVSLNNSETINEFVTIDDVICKFANEIFPDHNIEASLQFKIIRDSEIEIDDEAADLVRYFEKAIKKRRRGNVV

SEQ ID NO: 130216 - protein, 153 aa, Unknown
  Bacterial polypetide isolated from the Sargasso Sea
SVADQKVITKLYEASKAGVRQDLIVRGICCLRPGVEGVSEKIRVRSIIGRFLEHSRIYYFENGGKPEIYCGSADLMERNLSRRVEILFPVIDQEILDHLKQNLDLMLSDNTLAFNLQQDGSYRRISKKAQDPEINSQLKLLEWYAEENLFGSV

SEQ ID NO: 130217 - protein, 175 aa, Unknown
  Bacterial polypetide isolated from the Sargasso Sea
VDPEIIDKFYEASNAGVKIHLFVRGVCCLRPGVKDRSENIFVKSIIGRFLEHSRIYCFSNGTKKMPNRNAKVYISSADLMPRNLDRRVELLVPIENETVHEQILDQIMLANYLDTNQSWELEADGNYKKIKYSKSDSFSAHEYFMNNPSLSGRGKAKLRMQPKQLHLRLIKSGSN

SEQ ID NO: 130218 - protein, 253 aa, Unknown
  Bacterial polypetide isolated from the Sargasso Sea
DIDQICKVKNPKLRFKHFTPREVERLKEYNDNFFETIKKKDLVVHHPFETFDSVIEFLNQAANDKKVIAIKQTLYRTTLDSPIVKALITAAENGKTVTALIEIKARFDEEANIQLSRSLEKVGVQIVYGFAKYKTHAKSSLVLRREQGKIQTYFHLGTGNYHPVNAKIYTDLSLFSCDKKMASDVEKFFNYVTGYAKPKNLNKISISPVNMRQTLNENIDAEIKNSKNGKFAAIWAKMNSLVDPEIIDKFYEA

SEQ ID NO: 130219 - protein, 208 aa, Unknown
  Bacterial polypetide isolated from the Sargasso Sea
MSKASFSENANISNQLINRELSWLQFNDRVLEESKDKTNPLFERVKFLSIAGTNLDEFFMVRVAGLFNQIKDGFDELSADGLTAEDQLNRVVLKTKDLLKKQNEAFLDLKKELSKEKIFIRKMSELNKKDLMYLREYFQETIYPIITPTAIDPSHPFPFIPNKGQAILLRMTRIKKKRELNAIIVIPRALPKFISLNNSETINEFVTI

SEQ ID NO: 130220 - protein, 65 aa, Unknown
  Bacterial polypetide isolated from the Sargasso Sea
MKSKYINRELSWLKFNDRVLLEAQNIENPLYERVKFLSIAGSNLDEFFMVRVAGLYSQIKQEVTH

SEQ ID NO: 130221 - protein, 57 aa, Unknown
  Bacterial polypetide isolated from the Sargasso Sea
MKSKYINRELSWLKFNDRVLLEAQNTENPLYERVKFLSIAGSNLDEFFMVRVAGLFS

SEQ ID NO: 130222 - protein, 285 aa, Unknown
  Bacterial polypetide isolated from the Sargasso Sea
ELQARFDEENNLNIADRLEKSGVQIIMGVRGLKVHSKICLVLRDEKNKIKKYGFISTGNFNEQTAKIYTDYTLFTSNQKILKDVSKVFNFLEVNYEFKRYKHLIVSPHYTYQRLVELIDNEIQNKNLGKKSKIKLKLNSITNYKIISKLYEASNAGVKIEMIVRGVCCLIPGVKDMSENIKVIGVVDKYLEHPRIYIFENAGKPNIYISSADWMTRNFENRIEVTCPIYDIDLQNQILDTFDISWRDNVKSRFINELKGNIKRKKNIINTRSPFETYRYFKNLSS

SEQ ID NO: 130223 - protein, 295 aa, Unknown
  Bacterial polypetide isolated from the Sargasso Sea
NKKNKKRVLNAIIVIPKALSRFIEIDGNKSFKKFLIIDDVISFFASEIFPDHDLDKKMLFRVIRDSDVEIQEEAEDLVRSFELALKRRRTGDIVRLEILKNSNNDLIKFITNKLNVKSEYIYEIEGIVGIQDIDQVCKIKNSKLRFKNFNPREVERLKEFNNNFFDTIKKKDLIVHHPFETFDAVVEFLNQAAYDKKVIAIKQTLYRTTLDSPIVKALITAAENGKTVTALIEIKARFDEEANIQLSRSLEKAGIQIVYGFAKYKTHAKSSLILRKEQGKIQTYIHLGTGNYHPS

SEQ ID NO: 130224 - protein, 294 aa, Unknown
  Bacterial polypetide isolated from the Sargasso Sea
YFQETIYPIITPTAIDPSHPFPFIPNKGQAILLRMTRIKKKRELNAIIVIPRALPKFVSLNNSETINEFVTIDDVICKFANEIFPDHNIEASLQFKIIRDSEIEIDDEAADLVRYFEKAIKKRRRGNVVKLEVITNSNKKLLNFISKKFKMDEDHIYEVEGLVGIQDIDEICKKKDPKLRFKKFNPREVERLKEFDDKFFSAIRSKDFVVHHPFETFDVVIQFLEAAAKDPKVIGIKQTLYRTTPDSPIVKALSRAAENGKVVTAVIEIKARFDEEANIELSRKLEKAGVQIVY

SEQ ID NO: 130225 - protein, 316 aa, Unknown
  Bacterial polypetide isolated from the Sargasso Sea
PSADGLSPSQQLSLIKKEVHALIDHQQMVWRNLLVELKAAKIAILDTNDLSNTDLKLLETVFFEQVFPVLTPLAIDPAHPFPFIPSGGFALALILQRKSDAFRLEALLPVPGQIARFYRISDGPKGLIRFLPLEKMLERFLDKLFPGYDIIAKSAFRILRDTYLEVEEEAEDLVREFETALKRRRRGDVIRMKVTADTSKELLKVICRSLDVPENEVIKVDGMVGMADLSELMLEERDDLLWPPFASRIPERLEDHNGDIFSAIRQKDLLLHHPYESFDTVVRFLQQAATDPHVVAIRQTLYRTSKDSPIVEALCE

SEQ ID NO: 130226 - protein, 71 aa, Unknown
  Bacterial polypetide isolated from the Sargasso Sea
MKSKYLNRELSWLKFNDRVLLEAQNTENPLYERVKFLSIAGSNLDEFFMVRVAGLYSQIKQEVDSLSSDGL

SEQ ID NO: 130227 - protein, 137 aa, Unknown
  Bacterial polypetide isolated from the Sargasso Sea
MTKQADIFINRELSWIKFNQRVLLTGMEKEYKILDKVKFFSIFSNNLDEFFMVRVASLKAQVEAGITKKSIDGLTPKEQLEKINKEVKNLTTLQENFVNSELNNELKKEGIILKKYKDLSENQKNWCDNFFTSSISP

SEQ ID NO: 130228 - protein, 172 aa, Unknown
  Bacterial polypetide isolated from the Sargasso Sea
MSKASFSENANISNQLINRELSWLQFNDRVLEESKDKTNPLFERVKFLSIAGTNLDEFFMVRVAGLFNQIKDGFDELSADGLTAEDQLNRVVLKTKDLLKKQNEAFLELKKELSKEKIFIRKISELGKKDLTYLREYFQETIYPIITPTAIDPSHPFPFIPNKGQAILLRRQ

SEQ ID NO: 130229 - protein, 281 aa, Unknown
  Bacterial polypetide isolated from the Sargasso Sea
IYDVAGLVGIQDIDQICKVKNPKLRFKHFTPREVERLKEYNDNFFETIKKKDLVVHHPFETFDSVIEFLNQAANDKKVIAIKQTLYRTTLDSPIVKALITAAENGKTVTALIEIKARFDEEANIQLSRSLEKVGVQIVYGFAKYKTHAKSSLVLRREQGKIQTYFHLGTGNYHPVNAKIYTDLSLFSCDKKMASDVEKFFNYVTGYAKPKNLNKISISPVNMRQTLNENIDAEIKNSKNGKFAAIWAKMNSLVDPEIIDKFYEASNAGVKVHLFVRGVCCL

SEQ ID NO: 130230 - protein, 112 aa, Unknown
  Bacterial polypetide isolated from the Sargasso Sea
MSKALFSEKSNISNQLINRELSWLQFNDRVLEESKDEANPLFERVKFLSIAGTNLDEFFMVRVAGLFNQIKDGFDELSADGLTAEDQLNRVVLKTKDLLKKQNEAFLELKKE

SEQ ID NO: 130231 - protein, 205 aa, Unknown
  Bacterial polypetide isolated from the Sargasso Sea
MKSQADVFINRELSWIEFNKRVLLTGMEKDYKILDKVKFCSIFSNNLDEFFMVRVASLKAQVEAELTKKSIDGLTPKEQLKKINNEIKKLTILQENYVNNELKNELKEKGVILKKYVDLSESQRNWCNNFFTTSIFPLLTPLVVDPAHPFPFISNLSLNLAALIKDEEDSKNQFVRVKIPTKNIPRFIRIPNEITQLSDESSTIS

SEQ ID NO: 130232 - protein, 251 aa, Unknown
  Bacterial polypetide isolated from the Sargasso Sea
KALSRFIEIESSKNHKKFVILDDVISFFANEIFPDHDLEKKMIFRVIRDSDVEIQEEAEDLVRSFELALKRRRTGDIVRLEVLENSDNELIRFITNKLDINPDYIYDVAGLVGIQDIDQICKVKNPKLRFKHFTPREVERLKEYNDNFFETIKKKDLVVHHPFETFDSVIEFLNQAANDKKVIAIKQTLYRTTLDSPIVKALITAAENGKTVTALIEIKARFDEEANIQLSRSLEKVGVQIVYGFAKYKTH

SEQ ID NO: 130233 - protein, 254 aa, Unknown
  Bacterial polypetide isolated from the Sargasso Sea
LRKKNKKRILNSIIVIPKALSRFIEIESSKNHKKFVILDDVISFFANEIFPDHDLENKMIFRVIRDSDVEIQEEAEDLVRSFELALKRRRTGDIVRLEVLENSDNELIRFITNKLDINPDYIYDVAGFVGIQDIDQICKVKNPKLRFKHFTPREVERLKEYNDNFFETIKKKDLVVHHPFETFDSVIEFLNQAANDKKVIAIKQTLYRTTLDSPIVKALITAAENGKTVTALIEIKARFDEEANIQLSRSLKKV

SEQ ID NO: 130234 - protein, 129 aa, Unknown
  Bacterial polypetide isolated from the Sargasso Sea
MSKASFSENANISNQLINRELSWLQFNDRVLEESKDKTNPLFERVKFLSIAGTNLDEFFMVRVAGLFNQIKDGFDELSADGLTAEDQLNRVVLKTKDLLKKQNEAFLELKKELSKEKIFIRKMSELNKK

SEQ ID NO: 130235 - protein, 308 aa, Unknown
  Bacterial polypetide isolated from the Sargasso Sea
NDRVLLEAQNAENPLYERVKFLSIAGSNLDEFFMVRVAGLFSQIKQEVDSLSSDGLNPEEQMNEVVSETKKLLKKQNKIYKELLSQLKKTNIILVKPESLSKSEKKKIFKIFYEEIYPLLTPSAIDPAHPFPFIINQGRALAMKLKKKNKKRILNSIIVIPKALPRFFEVSGTKNSKKYVIIDDLISFFASEIFPDHEVEFKMIFRVIRDSDVEIQEEAEDLVRSFELALKKRRTGDIVRLEILKNSNKELVKFITNKLNINADYIYYIEGLVGIQDIDQICKVKNQKLKFKSFNPRDVERLKENNYD

SEQ ID NO: 130236 - protein, 295 aa, Unknown
  Bacterial polypetide isolated from the Sargasso Sea
KIFPGLPAALEEGEDIFSAIEKEDQLLLHPFESFLPIIDWVRQAAKDPTVLSIKQTLYRTNESSELVEALSEAARNGKEVTVVIELRARFDEEENINFANLLQEAGAVVVYGVMGYKTHAKMLLFVRRVGTKLRRYAHLGTGNYHRKNSLTYTDYSLLTADKIVCADVHKVFQQITGMGKKIQPKELIHAPFNLKKSILKMIQAEKKAAAQGKPARILAKMNALTDPAVIQALYEASQAGVEVHLIIRGTCCLKPGIKGVSDNIRVISVVGRFLEHSRVYFFQNNPNQVFCSSAD

SEQ ID NO: 130237 - protein, 223 aa, Unknown
  Bacterial polypetide isolated from the Sargasso Sea
MVRQADLFINRELSWIEFNKRVLLTGMEKDYKILDQVKFCSIFSNNLDEFFMVRVASLKAQVEAGINKKSIDGLTPKEQLKKINTEVKKLTTLQENFVNNELNNELKKKGIVLTKYNDLNENQKNWCNNYFTSSIFPLLTPLVVDPSHPFPFISNLSLNLAALIKDEEHSKNQFVRIKIPTKNINRFIKIPNELVENAHNNTHCFITVEDLIGNNINTLFNGM

SEQ ID NO: 130238 - protein, 292 aa, Unknown
  Bacterial polypetide isolated from the Sargasso Sea
MVKSDTVFNAEMSWLAFNWRVLAMAANEEVPIFERLRFVAISARNLDEFFAKRVGAIKRQAAAGVENLVKRRGRDVWTPEETLQNVAVEVERQVDAQAALLEDHIVPRLREEHDVSLEQYDDLDSELQRKLEKYFEAQIEPVLDPRAIDPCHPFPFLGSLSLSIAVELEDAFKQDKFAIVSVPPSLERWIRIATEKNDPVQRFLPLEQLIEAHMEKLFRGCNIRDTHVFRVTRNADIERNEDEAEDLLEMMTDEVRERRFASFVRLEIQDTMPEYIRDKLIASLDGITQTDV

SEQ ID NO: 130239 - protein, 125 aa, Unknown
  Bacterial polypetide isolated from the Sargasso Sea
MTALKKQDKEILKSKYINRELSWLKFNDRVLLEAQNIENPLYERIKFLSIAGSNLDEFFMVRVAGLYSQIKQDVDSLSSDGLTPDEQMNEVILETNNLLNKQNKIYKDLILQLKKVNISIVKPEN

SEQ ID NO: 130240 - protein, 141 aa, Unknown
  Bacterial polypetide isolated from the Sargasso Sea
MSKALFSEKSNISNQLINRELSWLQFNDRVLEESKDEANPLFERVKFLSIAGTNLDEFFMVRVAGLFNQIKDGFDELSADGLTAEDQLNRVVLKTKDLLKKQNEAFLELKKELSKEKVFIRKMSELNKKNLIYLKEYFQET

SEQ ID NO: 130241 - protein, 258 aa, Unknown
  Bacterial polypetide isolated from the Sargasso Sea
RILNSIIVIPKALSRFIVIESSKNHKKFVILDDVISFFANEIFPDHDLENKMIFRVIRDSDVEIQEEAEDLVRSFELALKRRRTGDIVRLEVLENSDNELVRFITNKLDINPDYIYDVSGLVGIQDIDQICKVKNPKLRFKHFTPREVERLKEYNDNFFETIKKKDLVVHHPFETFDSVIEFLNQAANDKKVIAIKQTLYRTTLDSPIVKALITAAENGKTVTALIEIKARFDEEANIQLSRSLEKVGVQIVYGFAKY

SEQ ID NO: 130242 - protein, 292 aa, Unknown
  Bacterial polypetide isolated from the Sargasso Sea
TREIINVEKPTLKFVPFDARFPERVRELGGYCFEAIRQKEFIVHHPYESFDVVVQFIRQAARDPDVVAVKQTLYRTSNDSPTVAALVEAAEAGKSVTAMVELKARFDEEANIRWARDLERAGAQVVFGFLDKKTHAKISLVVRREGGKLRSYAHFGTGNYHPDTAKVYTDLSYFTCDQDLCRDAAQVFNFMTGYTEPKELMKISVSPLNLRETLEAQFDAEIAYAKAGRPATIWAKMNALVDTDIIDALYRASQSGVKIELIVRGICCLRPGVPGLSENIQVKSIIGRFLEH

SEQ ID NO: 130243 - protein, 89 aa, Unknown
  Bacterial polypetide isolated from the Sargasso Sea
MKSKADIFINRELSWIEFNKRVLLTGMEKEYKILDKVKFCSIFSNNLDEFFMVRVASLKAQVEAGITKKSIDGLTPKEQLKKINEEVKN

SEQ ID NO: 130244 - protein, 130 aa, Unknown
  Bacterial polypetide isolated from the Sargasso Sea
MLKKNTAYNYANRELSWLKFNERVLSQTSDSKIPLLERVRFLSIAFSNLDEFFMVRVAGLNVQKFSRNKSFDGLTPQQQLKLIDKETSKMISNIKSIWIDLLRELSENKIHIDVEKTLKTKDKTFIKNYL

SEQ ID NO: 130245 - protein, 247 aa, Unknown
  Bacterial polypetide isolated from the Sargasso Sea
KVKNPKLRFKHFTPREVERLKEYNDNFFETIKKKDLVVHHPFETFDSVIEFLNQAANDNKVIAIKQTLYRTTLDSPIVKALITAAENGKTVTALIEIKARFDEEANIQLSRSLEKVGVQIVYGFAKYKTHAKSSLVLRREQGKIQTYFHLGTGNYHPVNAKIYTDLSLFSCDKKMASDVEKFFNYVTGYAKPKNLNKISISPVNMRQTLNENIDAEIKNSKNGKFAAIWAKMNSLVDPEIIDKFYEA

SEQ ID NO: 130246 - protein, 159 aa, Unknown
  Bacterial polypetide isolated from the Sargasso Sea
DVVIQFLEAAAKDPKVIGIKQTLYRTTPDSPIVKALSRAAENGKVVTAVIEIKARFDEEANIELSRKLEKAGVQIVYGFAKYKTHAKASLVLRKEGAKTRSYVHLGTGNYHPINAKIYTDLSLFSSNQDLAKDVEKFFNYVTGYAKPKKLNKIFMSPIK

SEQ ID NO: 130247 - protein, 283 aa, Unknown
  Bacterial polypetide isolated from the Sargasso Sea
ETEYKTLDKVKFCSIFSNNLDEFFMVRVASLKAQVEAGINKKSIDGLTPKDQLKKINKEVKNLTTLQENFVNNDLNNELKKKGIVLKKYKELNENQKNWCNNLFQTSIFPLLTPLVVDPAHPFPFISNLSLNLAALIKDKEHSKNQFVRIKIPTKNINRFIKIPNEIIENSDESSHFFITVEDLIGNNINALFNGMECINYSFFRVTRDADLELKELEADDLLLAVEQSLQKRRLGGDVVRLEVEADIPEIILKLLIESIQIQEEYIYFCKSLLGLDDFNQLT

SEQ ID NO: 130248 - protein, 256 aa, Unknown
  Bacterial polypetide isolated from the Sargasso Sea
NELIRFITNKLDINPDYIYDVAGLVGIQDIDQICKVKNPKLRFKHFTPREVERLKEYNDNFFETIKKKDLVVHHPFETFDSVIEFLNQAANDKKVIAIKQTLYRTTLDSPIVKALITAAENGKTVTALIEIKARFDEEANIQLSRSLEKVGVQIVYGFAKYKTHAKSSLVLRREQGKIQTYFHLGTGNYHPVNAKIYTDLSLFSCDKKMASDVEKFFNYVTGYAKPKNLNKISISPVNMRQTLNENIDAEIKNSKN

SEQ ID NO: 130249 - protein, 76 aa, Unknown
  Bacterial polypetide isolated from the Sargasso Sea
MSKALFSEKSNISNQLINRELSWLQFNDRVLEESKDEANPLFERVKFLSIAGTNLDEFFMVRVAGLFNQIKDGLTN

SEQ ID NO: 130250 - protein, 265 aa, Unknown
  Bacterial polypetide isolated from the Sargasso Sea
IQTYIHLGTGNYHPVNAKIYTDLSLFSSDKKIATDVEKFFNYVTGYSKPRNLSKISISPINLRETLNKCIANEIANVKKGKNGEIWAKMNSLVDPAIIDKFYEASNAGVKIFLFVRGVCCLRPGVKDKSENIIVKSMIGRFLEHSRIYCFANGKTMPSRDAKVFISSADLMPRNLNRRVELLVPIENQTVHEQVLDQIMLANYLDKKQSWELDASGNYKKIKYSENDSFSAHDYFMNNPSLSGRGKAKLKMKPKKLNLRLIKSGN

SEQ ID NO: 130251 - protein, 249 aa, Unknown
  Bacterial polypetide isolated from the Sargasso Sea
AIIVIPRALPKFVSLNNSETINEFVTIDDVICKFANEIFPDHNIEASLQFKIIRDSEIEIDDEAADLVRYFEKAIKKRRRGNVVKLEVITNSNKKLLNFISKKFKMDEDHIYEVEGLVGIQDIDEICKKKDPKLRFKKFNPREVERLKEFDDKFFSAIRSKDFVVHHPFETFDVVIQFLEAAAKDPKVIGIKQTLYRTTPDSPIVKALSRAAENGKVVTAVIEIKARFDEEANIELSRKLEKAGVQIVY

SEQ ID NO: 130252 - protein, 108 aa, Unknown
  Bacterial polypetide isolated from the Sargasso Sea
MKSKYINRELSWLKFNDRVLLEAQNIENPLYERVKFLSIAGSNLDEFFMVRVAGLYSQIKQEVDSLSSDGLTPEEQMDEVVLETKNLLKKQNKIFIQLIMELKKNNIS

SEQ ID NO: 130253 - protein, 144 aa, Unknown
  Bacterial polypetide isolated from the Sargasso Sea
MKSQADVFINRELSWIEFNKRVLLTGMEKEYKILDKVKFCSIFSNNLDEFFMVRVASLKAQVEAGITKKSVDGLTPKEQLTKINKEVKKLTTIQENYINNELIDELQKRGIILKKYENLSENQKNWCNNFFISSIFPLLTPISC

SEQ ID NO: 130254 - protein, 246 aa, Unknown
  Bacterial polypetide isolated from the Sargasso Sea
KRILNSIIVIPKALSRFIEIESSKNHTKFVILDDVISFFANEIFPDHDLEKKMIFRVIRDSDVEIQEEAEDLVRSFELALKRRRTGDIVRLEVLENSDNELVKFITNKLDINSDYIYNVSGLVGIQDIDQICKVKNPKLRFKHFIPREVERLKEYNDNFFETIKKKDLVVHHPFETFDSVIEFLNQAANDKKVIAIKQTLYRTTLDSPIVKALITAAENGKTVTALIEIKARFDEEANIQLSRSLE

SEQ ID NO: 130255 - protein, 104 aa, Unknown
  Bacterial polypetide isolated from the Sargasso Sea
MKSKYINRELSWLKFNDRVLLEAQNIENPLYERVKFLSIAGSNLDEFFMVRVAGLYSQIKQEVDSLSSDGLTPEEQMDEVVLETKNLLKKQNKIFIQLIMELKK

SEQ ID NO: 130256 - protein, 288 aa, Unknown
  Bacterial polypetide isolated from the Sargasso Sea
LNTKDKKKLLEIFKEEIYPLLTPSAIDPAHPFPFIINQGRAIVMKLRKKNKKRILNSIIVIPKALSRFIEIESSKNHKKFVILDDVISFFANEIFPDHDLEKKMIFRVIRDSDVEIQEEAEDLVRSFELALKRRRTGDIVRLEVLENSDNELVRFITNKLDINPDYIYDVAGLVGIQDIDQICKVKNPKLRFKHFTPREVERLKEYNDNFFETIKKKDLVVHHPFETFDSVIEFLNQAANDKKVIAIKQTLYRTTLDSPIVKALITAAENGKTVTALIEIKARFDEEA

SEQ ID NO: 130257 - protein, 278 aa, Unknown
  Bacterial polypetide isolated from the Sargasso Sea
ANISNQLINRELSWLQFNDRVLEESKDKTNPLFERVKFLSIAGTNLDEFFMVRVAGLFNQIKDGFDELSADGLTAEDQLNRVVLKTKDLLKKQNEAFLELKKELSKEKIFIRKMSELNKKDLMYLREYFQETIYPIITPTAIDPSHPFPFIPNKGQAILLRMTRIKKKRELNAIIVIPRALPKFVSLNNSETINEFVTIDDVICKFANEIFPDHNIEASLQFKIIRDSEIEIDDEAADLVRYFEKAIKKRRRGNVVKLEVITNSNKKLLNFISKKFKM

SEQ ID NO: 130258 - protein, 277 aa, Unknown
  Bacterial polypetide isolated from the Sargasso Sea
FKRRRTGDIVRLEVLENSDNELVKFITNKLEINSDYIYDVAGLVGIQDIDQICKIKNPKLRFKHFTPREVERLKEYNDNFFETIKKKDLVVHHPFETFDSVIEFLNQAANDKKVIAIKQTLYKTTLDSPIVKALITAAENGKTVTALIEIKARFDEEANIQLSRSLEKVGVQIVYGFAKYKTHAKSSLVLRREQGKIQTYFHLGTGNYHPVNAKIYTDLSLFSSDKKMASDVEKFFNYVTGYAKPKNLNKISISPVNMRQTLNKNIDAEIENSKNGK

SEQ ID NO: 130259 - protein, 198 aa, Unknown
  Bacterial polypetide isolated from the Sargasso Sea
FLAISANNLDEFYMVRVAGLHGQVQAGVQQRSFDGLTPSEQLQRVIQATTGLIERQQEAWRDLRKELAVAGTTIVYPEDMTGSDRQWLESHFLKRIFPVLTPLAIDPAHPFPFIPNFGFGVVLALAHREDSTLRNALVRVPPQIGRFVKLPGSYDRYITVENTIEMFFDKLFPNYRVASRGLFRIIRDSDIEIEEEAD

SEQ ID NO: 130260 - protein, 271 aa, Unknown
  Bacterial polypetide isolated from the Sargasso Sea
EQGKIQTYFHLGTGNYHPVNAKIYTDLSLFSCDKKMASDVEKFFNYVTGYAKPKNLNKISISPVNMRQTLNENIDAEIKNSKNGKFAAIWAKMNSLVDPEIIDKFYEASNAGVKIHLFVRGVCCLRPGVKDRSENIFVKSIIGRFLEHSRIYCFSNGTKKMPNRNAKVYISSADLMPRNLNRRVELLVPIENETVHEQILDQIMLANYLDTNQSWELNADGNYKKIKYSNNDSFSAHEYFMNNPSLSGRGKAKLKMQPKQLHLRLIKSGSN

SEQ ID NO: 130261 - protein, 305 aa, Unknown
  Bacterial polypetide isolated from the Sargasso Sea
SEIVDALIDAARAGKAVTVLIELRARFDEANNIKLATRLQQAGANVVYGVVGYKVHGKALMIVRRVGDGIRRYVHLGTGNYHAGTARFYTDFGLMSSDPELGEDLHRLFLQVAGLGAAPRMKTLIQAPFHLADRLNDFIEDEIKAAEKGREAWIRARMNSLTDPGIIRALYRASQAGVRVELLVRGVCRLRPGIPGISENVVVRSLVGRFLEHSRVFQFCANGEGRAFFSSADWMERNLHRRVELCVPLTNPPIRERILHEGLNVYFQPGTATWELQPDGRWSRTDPGDDGYIDVQEQLLKELFG

SEQ ID NO: 130262 - protein, 210 aa, Unknown
  Bacterial polypetide isolated from the Sargasso Sea
MKSQADVFINRELSWIEFNKRVLLTGMEKEYKILDKVKFCSIFSNNLDEFFMVRVASLKAQVEAGITKKSVDGLTPKEQLTKINNEVKKLTTLQENYINNELNNELKEKGVILKKYKDLKENQRNWCNNYFISSIFPLLTPLVVDPAHPFPFISNLSLNLAALIRDGEDSKNQFVRVKIPTKNINRFIRIPNENIQHGDESTYFFISVKI

SEQ ID NO: 130263 - protein, 325 aa, Unknown
  Bacterial polypetide isolated from the Sargasso Sea
MYRTTDDSPIEKSLIKAANKGKLVTVIIELQARFDEERNLKWARELELAGAQVVFGSIEKKTHAKITLITRKEKSLTENYMHFGTGNYHPKNATVYMDLSYFTKNSVLARDSSKIFNYVTSYSIPRGIKKITYSPILAREKFNELINKEITNASKNKPAGFVGKMNSLVDKEMIDIFYRASTNNVKIQLIIRGICSLIPGLQNISENIYVKSIIGRFLEHSRIYCFYNGYKFPHKKNKIFISSADLMQRNLDRRVETFVPIENETVHEQILNQILIANILDNTNSWILNHEGNYLKKEISKKSKKFSSHTYFIKNPSFSGPRGPG

SEQ ID NO: 130264 - protein, 139 aa, Unknown
  Bacterial polypetide isolated from the Sargasso Sea
MAGVKIRIMVRGMCSLIPGIKGLSDNIHVTSVLDRFLEHARVYVFNNGGETDLYISSADWMTRNLDQRVEVGVPIYDAAIKQQILTTLDIQWHDNVKARIIDKDQSNHYVKRGNKRSIRSQQEIYDYFAVLQQSIQAGT

SEQ ID NO: 130265 - protein, 524 aa, Unknown
  Bacterial polypetide isolated from the Sargasso Sea
LPRFIKLPLELADSSDSLYTALPLEQLVAFNLGLLFPGMTIEGHYFFRVTRDADLELRELEADDLMIALQEGLRKRRMGGEVVRVEVTDEMPQDVVDLLMEGMAVEAEDLYRVNGPLGLDDLFGLMGVPLPQLKDEPQQARVAAPLARAQKALLTDGSVAEEEFESVFDVLRRGDVLVHHPYDLFPSSVEEFIMQAAEDPDVLAIKMTLYRVSKDSPVISSLITAAENGKQVMALVELKARFDEENNIQWARQLENAGVHVVYGVIGLKTHTKITLVLKREKEELRSYVHIGTGNYNSKTSRLYTDLGLLSARQDLGQDLVELFNYLTGFSKQQSFRKLLVAPVTLRSGMEALIRREIEHVNAGRSGHIIAKMNSLVDPRLIALLYEASRAGVKIELVIRGICSLIPGLPGLSENVTVISIIGRFLEHSRIFWFGNAGAAEVFIGSADWMGRNLDRRVEAVTPVEDSVLRERLEQLLRTYLDDNRGAWDMQSNGHFIQRQPEGNELNSQLQLMHEWCSIQGQPV

SEQ ID NO: 130266 - protein, 481 aa, Unknown
  Bacterial polypetide isolated from the Sargasso Sea
MTSPKINNETYINRELSWIDFNKRVLELAIEEETPLLEKIKFSSIFSNNLDEFFMVRVASLKSQVEGGISKRSQDGKSPEEQLIEIRNYLDPILKTQQSKTKQYMEDNFKKENIFILEYKELNERQKVWIDNYFTTAIFPILTPLAVDPSHPFPFISNLSLNLAAIIVDSESDKEQFTRIKIPGESISRFISIPVELHDNESTKYTGIAIEQIIANNLSMLFPGMCVKEYSFFRVTRDADLELRDLEADDLMSALEEGLRKRRKGGEVVRLEVSTNTPKVILDLLQEGMNIDKENLYQIEGLLALDELIELTNFNLPKLKFREHQGVTHNSLKNSQLREQEELDTRNNSNFKSIFSIIRRSDLLVHHPYNLFSTSVEEFINQAAEDKQVMGIKMTLYRISKDSLIIDALIRAAEKGKQVMALVELKARFDEDNNIQWAKQLEQAGVHVVYGVIGLKTHTKIALIIRKEKNRLRTILSYWDW

SEQ ID NO: 130267 - protein, 299 aa, Unknown
  Bacterial polypetide isolated from the Sargasso Sea
DVSEAEVFRLPGPLDMTGLWTIVSLDRDDLKQRKFVPKTSRQLSEVESAQAPDVLSVVRERDVLLHHPYDSFSTSVQLFLEQAALDPHVLAIKQTLYRTSGDSPIVDALIRAAEEGKQVLAIVEIKARFDEENNIEWARKLEQAGVHVVYGLVGLKTHSKLSMVVRDEGGQLRRYCHIGTGNYHPKTARLYEDFGLLTSKPDIGEDISNLFNVLSGYSRNTEYQRLIIAPHSVRSGLIERINREIDHHMAGRPSGIRIKCNSVVDEETIDALYRASAVGVPIDIWVPGDVRSSPRDARV

SEQ ID NO: 130268 - protein, 235 aa, Unknown
  Bacterial polypetide isolated from the Sargasso Sea
MSKASFSENANISNQLINRELSWLQFNDRVLEESKDKTNPLFERVKFLSIAGTNLDEFFMVRVAGLFNQIKDGFDELSADGLTAEDQLNRVVLKTKDLLEKQNEAFLELKKELSKEKIFIRKISELNKKDLIYLREYFQETIYPIITPTAIDPSHPFPFIPNKGQAILLRMSRIKKKRELNAIIVIPRALPKFISLSNSETINEFVTIDDVICKFANEIFPDHYIEASLQFKIIR

SEQ ID NO: 130269 - protein, 562 aa, Unknown
  Bacterial polypetide isolated from the Sargasso Sea
MIKKRNEINANFLNNLDYRSQFLNEVDKSSVKRFFNRELSWIAFNDRVLEEAGNNKVPLLERVRFLAISAENLDEFYSVRVAGLKELVRENLSRVSVDGLLPQEQIEKIEKLTRSLMEKQQIIWKELLNELKNSGICILSKHDLLTSDLKPLEKYFTEQVFPLITPLAIDPAHPFPFITSGGFTLAVRLKRLTDGSFFETLIPIPSQIPRFHRLTNSKKREIRFIPLEVILDRFLPIIFPGYSIFGKCTFRILRNSDLELEEEAEDLVREFETALKKRRRGDVVSLTISKDAPKELFDLVTGSLSVLPEEIIQVDGVIGMTKLSELVISDKPNLLWKPFKPRNPERVEENNGDIFATIKRKDMLLHHPYETFNVVVSFLQQAANDPNVVAIRQTLYRTSKNSPIVKALCEAAEAGKSVTALVELRARFDEAANIHQSRALERAGAHVVYGFLDLKTHAKISIVVRKEGRKLVSYTHFGTGNYHPITANFYTDLSFFTKEPDLARDATKVFNYVSGYIEPSKFENISLAPIDLKKTILQNLLNEVRLAKQGKPARAWIKLNSW

SEQ ID NO: 130270 - protein, 658 aa, Unknown
  Bacterial polypetide isolated from the Sargasso Sea
MTDIDLLDRESSWLEFNKRVLTLSKDSSVPFKDRLFLFGITHSNLDEFFQIRISGLLEKVYETINQKLDVSISKETFVYFIDILEEAKKEMINRNTVWKEYFVKDLEKHGVNFKRMKDLTESELDILEDYFDNNIKPLLTPLAADPTHPFPYISDLSLSIGVVIKNEFEDNQFIRIKIPASLGSFVNLNKEQLVWIHELVLHYIDKLFFPHTVIEKFWFRTTRDADLEFRASLKRNFLEVVKEGLENRKLGKIVRLEIQEGVSVTTQKYLKNNLEIDYDLQVELKDPLTRFQINSLIDHIEFSTSWKLHETEFEFSNDMFEIIKNNDVMVHHPYDSFEKTVLRFLEKACFDPYVRAIKMTQYRTGLTAENDKITSLLASAARGGKQVAVLVELRARFDEEQNISNAEYLEESGVHVTYGDPRYKAHTKMILVVREENNELVPYMHFGTGNYNVLTSKGYEDIGIFTSDKSIGNDCGIVFNSLTAYADRENLDELLVAPESLEKNINSLIEEQIDLGEEGKIVLKLNNLTDPLIIQKLYDAANAGNQINIIVRGICCLIPIKNINVISILGPFLEHSRIYKFGRSDIEKIYIGSADLMQRNLRHRIEVLVPIKSPIIKKKLSSLLEKYIKSDKYSWTLKNDGTWKKLDGNYNIQEKLNK

SEQ ID NO: 130271 - protein, 699 aa, Unknown
  Bacterial polypetide isolated from the Sargasso Sea
MSLNKITKKLINNQNDRYFDREISWLSFNERVLLQAYDKTIPYGERLRFVTISSENLDEFYMVRIAGLHQLISQGFNTVPETGMRADELLKTVLNASKDLKNKQQRCLNYLLNEKEDCDVSILFDNKWTKNELEWLKEYYKQNILPLLTPTTLDPAHPFPFIQNKGKCVLMEMKDTKNKNINCVVLLPDNIARFIRLPGENQRYAMLETLVTKFVHLIYPEYKLLKSGMFRVIRDAEIEIDDEADDLIGQFETAIKARKRGGIVSLTFSHDLSKSAQKLLTRELNIPDDHIYVAQGFVGINDFTEIINNLPKQNIFKPYKPRMPQRILDFKGDCFSAIKNKEIIVHHPYESFDVVLSLLQQAATDKNVLTIRQTLYRTTPDSPIVEALVSAAESGKSVIAVIELKARFDEENNVQLARILEQAGAQVAYGLVDLKVHAKLSLITRKEGKKLVSYAHCGTGNYHPHTAKIYTDFSLFTIDKNICDDARSVFNFLTSHVQPKRLNKMIISPNSSYDWLIEKIDNEIQNAKDGFESGIWIKCNAIVDQKIIEKFYEASNAGVRIHLMVRGICCLRPNVKGMSENITVTAIIGRFLEHGRIYVFANKGKFQSESNLVYIASADIMPRNLYHRVEAFIPLENKTVRSQVLDQVLPALINDTKNTWQLNKNGEYSKKENKDKSFCAHTYFMKNPSLSGQGSLAKI

SEQ ID NO: 130272 - protein, 271 aa, Unknown
  Bacterial polypetide isolated from the Sargasso Sea
MTDAGIRVVLGVPTLKIHSKLCIVTREERGSLVNYAHFGTGNFNEKTAKIYTDYSLFTRNQELADEGVAVFDLIQYPYRRYKFQHLQISPLNARTKIQSLIRQEIQHLNQGQKAQITFKINNLVDKELIDDLYRASQAGVKIRGIVRGMCSLNPGIKGISENIEIISIVDRFLEHPRVMIFEGGGDRKVYISSADWMTRNMDNRIEVGCPVYDKGLQQRIVDIMELQFKDTLKARVIDKDQSNKYVRRGNRKKLRSQIEIYDYLKKLEDTL

SEQ ID NO: 130273 - protein, 692 aa, Unknown
  Bacterial polypetide isolated from the Sargasso Sea
MKSQADVFINRELSWIEFNKRVLLTGMEKEYKILDKVKFCSIFSNNLDEFFMVRVASLKAQVEAGITKKSIDGLTPKEQLTKINKEVKSLTNLQENYINNELNNELKEKGVILKKYKDLSENQRNWCNNYFTSSIFPLLTPLVVDPAHPFPFISNLSLNLAALIRDGEDSKNQFVRVKIPTKNINRFIQIPNEIIQYGDESTYFFISVEDLIGNNINTLFNGMECINYSFFRVTRDADLELKELEADDLLLAVEQSLQKRRLGGDVVRLEVESNMPENILKPLIESISIQEEYIYFCKSLLGLNDLNQLTKINRDDLKENLLIGKTHPKLKNLELSSNKNLNSIFHILRKKNILLHHPYDLFRTSVEEFINKAADDPLVMAIKITLYRVSKDSPIIAALMRAAENGKEVMTLVELKARFDEDNNIQWAKQLEQAGIHVVYGIIGFKTHTKIALIVRKEKGRLRNYFHIGTGNYNSNTSKFYTDLGLLSTDPDIASDLLELFNYLSGFSKQKSYQKLLVSPSSMREKFIFLIKREIKNAEEGKKAEIIAKMNSLVDPEIIKLLYLASDSGVKISLIIRGICCLYPQRKNLSENIKVISIIGHFLEHSRIFWFCNNGDNEVFIGSADWMRRNLDRRIEAVTPIEDYELKSKIYTLLQTYIKDNYFSWIMKDDGSYSKYELDSSHNRSQIDLIEK

SEQ ID NO: 130274 - protein, 133 aa, Unknown
  Bacterial polypetide isolated from the Sargasso Sea
MLKKNTTYNYANRELSWLKFNERVLSQTSDSKIPLLERVRFLSIAFSNLDEFFMVRVAGLNVQKFSRNKSFDGLTPQQQLKLIDKETSKMISNIKSIWIDLLRELSENKIHIDVEKTLKTKDKTFIKNYLEEN

SEQ ID NO: 130275 - protein, 330 aa, Unknown
  Bacterial polypetide isolated from the Sargasso Sea
MVKNPDQNKRIQPQFEDIDLEEPRYFENRELSHFKFNLRVLSQAKNLSHPLLERLRFLLIFSSNLDEFFEIRISGLKKQLESGRQRPGPDGKFPDQILKIIHEQVREALDEQYRILNEDLLPDLAREHIHFLQRHEWSKHLQAWTKNYFTDEVLPVISPLGLDPAHPFPRLVNKSLNFILTLEGKDAFGRESGLAIVPAPRALPRLIKVPRDIIPEGDNFIFLSSIIHEYVEEFFPGMTVKGCHQFRVTRNSDLEMSKVEVEDVASALRGELHSRRFGAAAKLEVDKDCPPKLTEFLLDRFNLSKSELFTLDGPVNLQRLTAVFNMVERP

SEQ ID NO: 130276 - protein, 161 aa, Unknown
  Bacterial polypetide isolated from the Sargasso Sea
MKKPANNFINRELSWIEFNKRVLLTSMEEEYKILDKVKLCSIFSNNLDEFFMVRVASLKAQVEAGIAKKSIDGLTPKEQLKEINKEVKSLTSLQENYVNHELNIELKKKGIIIKKYDELCENQKNWCNNFFISSVFPLLTPLVVDPAHPFPFISNLYIPFR

SEQ ID NO: 130277 - protein, 690 aa, Unknown
  Bacterial polypetide isolated from the Sargasso Sea
ASFYQRVLDEANDTKVPLIERVNFLSISASNLDEFYMVRIPSLLEVVENKPDEVSNDGMTGQQQLKAAYNACAKIFKNQDVFFRKLVRELNGEKIIHITPNKLNLKLRKNLKKFFNEEILPILTPISIDPVHPFPFIPNEGLCISLNLKARGANKTFNSVIIVPRALKRIVFIQEGNKGYYLFVEDVIKYYFKDLFPNTKLLDSAVFRAIRDSDIDYEYEDDEDVIKYFEKALTKRRRGEIVRLEILKNTSSKKKNFLKKNLKLQDAQVITLSKYVGLQDLSLIHDLNKPKLKFKKYISRPVERLKQFDNNCFAAIRSKDFVVHHPYETFDVVVDYLNQAAVDPKVVAIKQTIYRTTIDSPIIKALTKAADNGKSVTAVVEIKARFDEEANLALANQMEKSGVQIVYGFAQLKTHAKASLIIRREADKLKSYAHVGTGNYHPKNAKTYEDLSLFTADEKICKDIEKIFNYMTGYASPANLNGILLSPLSMRNQLNAMIDTEIKNIKRGKPAGIWLKMNSLVDSQMILKLYEASEAGVKIELFIRGICCLRPGVKKLSENIVVKSIVGRYLEHARIFCFANESNIPSKDNIVLIGSADLMPRNLDRRVEILTPIMNPTVHEQILNQIMVANFLDNEQTWIMNDDGTYKKIKQKGKTFNAHKYFMSNPSLSGRGKIKGNRKPKKLLSLMTYE

SEQ ID NO: 130278 - protein, 713 aa, Unknown
  Bacterial polypetide isolated from the Sargasso Sea
MSIDKEISWLSFNERVLQEACDPNVPIVERVRFLGIFSNNMDEFFRVRVAAVRRSILLSALQEGRSNSRHLMAKIQTKVMALQERFDSIYVELMRELVRRNILLINEKQLSEFHSNWLKKHFRDHFKRHIAPLIVNNNRDLVKHINDDATYLCVCLFTKSRRQYALVEVPTKNVPRFIELPAEKSKAKKYLILLDNIIRHCVDDLFGPFFEYDAIEVYSMKLTRDAEFDITDELEQTQLEKMTKGLKKRLTAEPVRLVYDKEMPEHMLEMLKENLNISSTECLIPGGRYHSFKDFIGFPNPSRDYLENEKLPALNSSGFGRSANSFDAIKMGDIMVNYPYHKFSHFTEMVRQAAYDPAVRFIRINLYRVAKKSHVMQSLIDAVKNGKQVTAVIELRARFDEQSNIEWTRVLAEAGVKVHHGITSLKVHSKLCLIGREEQGEMKLYCHVGSGNFNEGTARVYTDLSLFTANQEIAREVEQVFDLIEHPYRRDNFQHLIVSPYDARQKLTHLIDNEIVNAQSHIKAAITLKLNNLLDESLVQKLYEASAAGVKIKLLIRGMCSLIPQIPGISDNIEIYSIVDRFLEHSRVMLFHAGGENKLFISSADWMSRNIDNRVEVSVPIYDPRLKQMVMDILSLQFNDNTKARIINKEQSNPYRNRGNKRKVRSQIAIYQYLINYEKRLQQEFSAQREAAKLEAEHTAELAHNLELQAKAS

SEQ ID NO: 130279 - protein, 208 aa, Unknown
  Bacterial polypetide isolated from the Sargasso Sea
MKSKADVFINRELSWIEFNKRVLLTGMEKEYKILDKVKFFSIFSNNLDEFFMVRVASLKAQVEAGITKKSIDGLTPKEQLTKINKEVKKLTNLQENYVNNELNNELKKQGIILKKYKELNENQRNWCDNFFTSSIFPLLTPLVVDPAHPFPFISNLSLNLAALIKDREASKNQFVRIKIPTKNINRFIQIPNEIIESNYESSHFFISV

SEQ ID NO: 130280 - protein, 377 aa, Unknown
  Bacterial polypetide isolated from the Sargasso Sea
MKKELSKEKIFIRKMSELNKKDLMYLREYFQETIYPIITPTAIDPSHPFPFIPNKGQAILLRMTRIKKKRELNAIIVIPRALPKFVSLNNSETINEFVTIDDVICKFANEIFPDHNIEASLQFKIIRDSEIEIDDEAADLVRYFEKAIKKRRRGNVVKLEVLTNSNKKLLNFISKKFKMDEDHIYEVEGLVGIQDIDEICKKKDPKLRFKKFNPREVERLKEFDNKFFSAIRSKDFVVHHPFETFDVVIQFLEAAAKDPKVIGIKQTLYRTTPDSPIVKALSRAAENGKVVTAVVEIKARFDEEANIELSRKLEKAGVQIVYGFAKYKTHAKASLVLRKEGTKTRSYVHLGTGNYHPINAKIYTDLSLFSSNQDLAK

SEQ ID NO: 130281 - protein, 270 aa, Unknown
  Bacterial polypetide isolated from the Sargasso Sea
MQSEDIDLNDSHYYENRELSHFKFNLRVLSQAKNLNHPLLERLRFLLIFSSNLDEFFEIRISGLKKQLESGRQRPGPDGKFPEQVLKIIHEQVREALDEQYRILNEDLLPDLAREHIHFLQRHEWSKNLQAWTKSYFTDEVLPVISPLGLDPAHPFPRLVNKSLNFILTLEGKDAFGRESGLAIVPAPRALPRLIKVPRDIMPEGDNFIFLSSIIHEYVEEFFPGMTVKGCHQFRVTRNSDLEMSKVEVEDVASALRGELHTRRFGAAAK

SEQ ID NO: 130282 - protein, 350 aa, Unknown
  Bacterial polypetide isolated from the Sargasso Sea
MSKAPFSENANISNQLINRELSWLQFNDRVLEESKDKTNPLFERVKFLSIAGTNLDEFFMVRVAGLFNQIKDGFDELSADGLTAEDQLNRVVLKTKDLLKKQNEAFLELKKELSKEKIFIRKMSELNKKDLMYLREYFQETIYPIITPTAIDPSHPFPFIPNKGQAILLRMSRIKKKRELNAIIVIPRALPKFISLNNSETINEFVTIDDVICKFANEIFPDHNTETSLQFKIIRDSEIEIDDEAADLVRYFEKAIKKRRRGNVVKLEVLTNSNKNLLNFISKKFKMDEDHIYEVEGLVGIQDIDEICKKKDPKLRFKKFNPREVERLKEFDDKFFSAIRSKDFVVHHPF

SEQ ID NO: 130283 - protein, 234 aa, Unknown
  Bacterial polypetide isolated from the Sargasso Sea
LGTGNYNYQTAKLYTDYGILSSNNKMAEDVQKFFMQLTGSNKKFNYNHLILSPFDASQEIIKKVNNEIKNCKKGREAIIKAKMNQLTEINIIKKLYQASSAGVKIELHIRGECRLIPGVKGISDNIKVYSTIGRFLEHSRVYYFYDVGKEQVYLSSADWMTRNMHNRVEIIFPILEKNHKSRIYHECFIYPLEDNSNLWKLKNNGSYDKVKIQRGSRRNLSQVVICNKYGEFID

SEQ ID NO: 130284 - protein, 137 aa, Unknown
  Bacterial polypetide isolated from the Sargasso Sea
MTALKKQDKEILKSKYINRELSWLKFNDRVLLEAQNIENPLYERIKFLSIAGSNLDEFFMVRVAGLYSQIKQDVDSLSSDGLTPDEQMNEVILETNNLLNKQNKIYKDLILQLKKVNISIVKPENLSKSDQKKLFKV

SEQ ID NO: 130285 - protein, 402 aa, Unknown
  Bacterial polypetide isolated from the Sargasso Sea
ALFSEKSNISNQLINRELSWLQFNDRVLEESKDKTNPLFERVKFLSIAGTNLDEFFMVRVAGLFNQIKDGFDELSADGLTAEDQLNRVVLKTKDLLKKQNEAFLELKKELSKEKIFIRKMSELNKKDLMYLREYFQETIYPIITPTAIDPSHPFPFIPNKGQAILLRMTRIKKKRELNAIIVIPRALPKFVSLNNSETINEFVTIDDVICKFANEIFPDHNIEASLQFKIIRDSEIEIDDEAADLVRYFEKAIKKRRRGNVVKLEVLTNSNKKLLNFISKKFKMDEDHIYEVEGLVGIQDIDEICKKKDPKLRFKKFNPREVERLKEFDNKFFSAIRSKDFVVHHPFETFDVVIQFLEAAAKDPKVIGIKQTLYRTTPDSPIVKALSRAAENGKVVTAVVEI

SEQ ID NO: 130286 - protein, 210 aa, Unknown
  Bacterial polypetide isolated from the Sargasso Sea
MEDEVKFFNRELSWLKFNQRVIAQSKSNSIPLGERLRFSAIAAENLDEFFMVRVAGLLQLRRSGVKFLQGEKRNLDELLDEIITKSHFLYLEIQKELSNIFLLLQKSNVFITDYDDLDDDDKAWISKHFKKSIEPLIVPTTIDPSHPFPFMPNKGSGLILNLKNKLGKRMRGVIMLSNLTRFIRLPGRNLRYISVEKVVLKFIEDLYPRV

SEQ ID NO: 130287 - protein, 527 aa, Unknown
  Bacterial polypetide isolated from the Sargasso Sea
MTKRYNNRELSWLEFNSRVLSEAGNTDLPLFERLRFLSIASNNLDEFYMVRVAGVYAQIKEKIKHETIDGLSPKEQLKKIKIKSSELLKKSNYIWSKLKKDLSKQRIFFKSFVEINQDEKSNLLNIFNTNIAPVLTPQAIDPSHPFPFLFNQGHFLLMEMQKKGKKRSIYSIIILPKNLKRFYNVSNIEAVKNYVSLEETVSSYASNLFPGYEIKNYISARVTRDSDIEVEDEAEDLVVFYEKALKKRKRGRIVRLELRKGSERHLKKFLIKKIKADPDTVDEIEEFVGTHEISQILEQGKKEFYFKKFNSRQVERVNQFNGDYFKAIKSKDMIVHHPYETFDAVIEFLNQAVNDPNVQAIKQTLYRTTLDSPIVKALKIAAENGKSVTAIVEIKARFDEEANISLAKSLERSGVQVVYGFVHLKTHAKSSLVVRLENGVLNKYVHIGTGNYHPINAKIYTDLSLFSADPDYANDIEKFFNFVTGYGDPGELENVILAPRFLRPKLNDLIDNEIENAKSGKPAEIWA

SEQ ID NO: 130288 - protein, 248 aa, Unknown
  Bacterial polypetide isolated from the Sargasso Sea
KIYTDLSLFSSDKKIATDVEKFFNYVTGYSKPRNLSKISISPINLRETLNKCIANEIANVKKGKKGEIWAKMNSLVDPAIIDKFYEASNAGVKIFLFVRGVCCLRPGVKDKSENIIVKSMIGRFLEHSRIYCFANGETMPSRDAKVFISSADLMPRNLNRRVELLVPIENQTVHEQVLDQIMLANFLDKKQSWELDVSGNYKKIKYSENDSFSAHDYFMNNPSLSGRGKAKLKIKPKKLNLRLIKSGN

SEQ ID NO: 130289 - protein, 120 aa, Unknown
  Bacterial polypetide isolated from the Sargasso Sea
MKSKYINRELSWLKFNDRVLLEAQNIENPLYERVKFLSIAGSNLDEFFMVRVAGLYSQIKQEVDSLSSDGLTPEEQMDEVVLETKNLLKKQNKIFIQLIMELKKNNISLVKPVNLNTKDK

SEQ ID NO: 130290 - protein, 108 aa, Unknown
  Bacterial polypetide isolated from the Sargasso Sea
MAKKPEITIGPEAFINRELSWLEFNLRVLEEAENEENPLLERMKFLAIFSSNLDEFFMVRVAGVREQAFGDGAPQDFAADGLTASEQLRAIAARSQELVARQYRCLRE

SEQ ID NO: 130291 - protein, 611 aa, Unknown
  Bacterial polypetide isolated from the Sargasso Sea
KFCSIFSNNLDEFFMVRVASLKAQVEAGITKKSIDGLTPKEQLTKINKEVKKLTTLQENYINNELNNELKENGVILKKYKDLNENQRNWCKNYFSSSIFPLLTPLVVDPAHPFPFISNLSLNLAALIRNGEDSKNQFVRVKIPTKNINRFIQIPNEIIQHDDEKTYFFISVEDLIGNNINTLFNGMECINYSFFRVTRDADLELKELEADDLLLAVEQSLQKRRLGGDVVRLEVESDMPENILKLLIESISIQKEYIYFCKSFLGLDDLNQLTKINRNDLKENLIIGKTHPKLKILDLPSNKNLNSIFNILRKKNILLHHPYDLFRTSVEEFINKAADDPLVMAIKITLYRVSKDSPIIAALMRAAENGKEVMTLVELKARFDEDNNIQWAKQLEQAGIHVVYGIIGFKTHTKIALIVRKEKGRLRNYFHIGTGNYNSNTSRFYTDLGLLSTDPDIASDLLELFNYLSGFSKQKRYQKLLVSPSSMREKFITLIKREIKNAEEGKKAEIIAKMNSLVDPEIIKLLYLASSAGVKISLIIRGICCLYPQRKNLSENIQVISIIGHFLEHSRIFWFCNNDYHEVFIGSADWMRRNLDRRIEAVTPMKIRIKDR

SEQ ID NO: 130292 - protein, 76 aa, Unknown
  Bacterial polypetide isolated from the Sargasso Sea
MSKASFSEKANISNQLINRELSWLQFNDRVLEESKDKTNPLFERVKFLSIAGTNLDEFFMVRVAGLFNQIKDGFDE

SEQ ID NO: 130293 - protein, 566 aa, Unknown
  Bacterial polypetide isolated from the Sargasso Sea
FDSRILPILTPVGLDSNKPGLSSRHPFPKVQNKSLNFMVKLSGKTAYGRSSQMAVVTAPRVLPRFVELPKELSKQKKYFMFLSSIIHENISKLFPGLKIRGCHQFRVTMNSNLEIDDEDLRDFKQSISLQLPDRKYNEAIRLEVVKDCPADIIKFLKAQYQLNDNDVYKVNGPVNLNRLVDFGKKIDDDSLKYKTYTPDGNYTLKGKPEEIFKQIKSEEFLLHHPYNSYDSVVNFLKAAVEDENVLAIKQTIYRTEKNSQIVKNLIDGVKKGKQVTAVIELSAKFDETHNIDISQKLEANGVQVTYGIIGLKTHAKAILVVRKEGKFLQRYAHLGTGNYNKKTASAYTDFGYITADKDITEDIHNFFIQLTGSSKKTKYKKVYVSPFDLGKKIKNKINREIMLAKKGKPALIMAKMNQLTESKIIEKLYEASKAGVKIDLFIRGECILKPGIQGLSENIRVFSTIGKFLEHTRAFYFFNNGKKDVYLSSADWMPRNIHNRIELMFPIKKDSFKNRIIKECFDMHLRDNYSLWQLDKNGNYKKRNIGKGRKKVSAQSILCNEHGDYL

SEQ ID NO: 130294 - protein, 686 aa, Unknown
  Bacterial polypetide isolated from the Sargasso Sea
VFINRELSWIEFNKRVLLTGMEKEYKILDKVKFCSIFSNNLDEFFMVRVASLKAQVEAGITKKSIDGLTPKEQLTKINKEVKNLTTLQENYINNELINELREQGILLKKYNDLSENQKNWCNNYFTSSIFPLLTPLVVDPAHPFPFISNLSLNLAALIRDGEDSKNQFVRVKIPTKNINRFIQIPNEIIKHGDEGTYFFISVEDLIGNNINNLFNGMECINYSFFRVTRDADLELKELEADDLLLAVEQSLQKRRLGGDVVRLEVESDMPENILKLLIESISIQKEYIYFCKSFLGLDDFNQLTKINRDDLKENLLIGKTHPKLKNLDLPGNNNLNSIFNILRKNNILLHHPYDLFKTSVEEFINKAADDPLVMAIKITLYRVSKDSPIIAALMRAAENGKEVMTLVELKARFDEDNNIQWAKQLEQAGIHVVYGIIGFKTHTKIALVVRKEKGRLRNYFHIGTGNYNSNTSMFYTDLGLLSTDPDIASDLLELFNYLSGFSKQKSYQKLLVSPSSMREKFIFLIKREIKNAKEGKKAEIIAKMNSLVDPEIIKLLYLASDSGVKINLIIRGICCLYPQRKNLSENIKVISIIGHFLEHSRIFWFCNNGNNEVFIGSADWMRRNLDRRIEAVTPIEDYELKCKIYSLLQTYIKDDYFSWIMKEDGSYSKYELDFSDNRSQIDLIEK

SEQ ID NO: 130295 - protein, 344 aa, Unknown
  Bacterial polypetide isolated from the Sargasso Sea
FKKFKMDEDHIYEVEGLVGIQDIDEICKKKDPKLRFKKFNPREVERLKEFDDKFFSAIRSKDFVVHHPFETFDVVIQFLEAAAKDPKVIGIKQTLYRTTPDSPIVKALSRAAENGKVVTAVIEIKARFDEEANIELSRKLEKAGVQIVYGFAKYKTHAKASLVLRKEGAKTRSYVHLGTGNYHPINAKIYTDLSLFSSNQDLAKDVEKFFNYVTGYAKPKKLNKIFMSPLNSRNFFEEKIENEIVNASKGKPAEIWAKMNSLVDPGIIKKFYEASNAGVKINLSVRGVCCLRPGIKGQSENIKVKSLIGRFLEHSRIYCFANGSSMPSRENQVYISSADLMPRN

SEQ ID NO: 130296 - protein, 357 aa, Unknown
  Bacterial polypetide isolated from the Sargasso Sea
DLALKRRRTGDIVRLEVLENSDKELVRFITNKLDINPDYIYDVSGLVGIQDIDQICKVKNPKLRFKHFTPREVERLKEYNDNFFETIKKKDLVVHHPFETFDSVIEFLNQAANDKKVIAIKQTLYRTTLDSPIVKALITAAENGKTVTALIEIKARFDEEANIQLSRSLEKVGVQIVYGFAKYKTHAKSSLVLRREQGKIQTYFHLGTGNYHPVNAKIYTDLSLFSCDKKMASDVEKFFNYVTGYAKPKNLNKISISPINMRQTLNKNIDAEIRNSKNGKFAAIWAKMNSLVDPEIIDKFYEASNAGVKIHLFVRGVCCLRPGVKNRSENIVVKSIIGRFLEHSRIYCFSNGTKKMP

SEQ ID NO: 130297 - protein, 298 aa, Unknown
  Bacterial polypetide isolated from the Sargasso Sea
MLQQAARDPDVVAIKQTVYRTGNESTVMEALIKAAHNGKEVTVVVELLARFDEETNINWADQLESAGAHVVYGVVGHKCHAKMLLVVRREVSGKGKAVRLRRYAHLGTGNYHPKTARLYTDFGLMTANEQICEDVHHVFQLLTGTGAQVKLHHLWHSPFTMHDNLIEHIRAEARAARAGKRARIIGKMNALLEPAIIDELYKASRAGVKVDLIVRGVCALKPGVPGLSENISVRSIVGRFLEHHRVYYFHAGGEEVVYLSSADWMDRNLFRRVEVAFPVLDRKLKARVIKESLQVHLR

SEQ ID NO: 130298 - protein, 308 aa, Unknown
  Bacterial polypetide isolated from the Sargasso Sea
KVIAIKQTLYRTTLDSPIVKALISASENGKTVTALIEIKARFDEEANIQLARSLEKAGVQIVYGFAKYKTHAKSSLIHRREGGKIQTYFHLGTGNYHPVNAKIYTDLSLFSSDKKMAADVEKFYNYVTGYSKPRNLNKISISPVNLRKTLNQNIDKEISNAKKGKHAEIWAKMNSLVDSQIIDKFYEASSVGVKVSLFVRGVCCLRPGIKNKSENIIVKSIIGRFLEHSRIYCFANGKLMPNRNAKVYISSADLMPRNLDRRVELLVPIENQTVHEQVLDQIMMANYLDTNQSWELYPNGNYQKIKYS

SEQ ID NO: 130299 - protein, 381 aa, Unknown
  Bacterial polypetide isolated from the Sargasso Sea
IDPAHPFPFIINQGRAIVMKLRKKNKKRILNSIIVIPKALSRFIEIESSKNHKKFVILDDVISFFANEIFPDHDLEKKMIFRVIRDSDVEIQEEAEDLVRSFELALKRRRTGDIVRLEVLENSDNELIRFITNKLDINPDYIYDVAGLVGIQDIDQICKVKNPKLRFKHFTPREVERLKEYNDNFFETIKKKDLVVHHPFETFDSVIEFLNQAANDKKVIAIKQTLYRTTLDSPIVKALITAAENGKTVTALIEIKARFDEEANIQLSRSLEKVGVQIVYGFAKYKTHAKSSLVLRREQGKIQTYFHLGTGNYHPVNAKIYTDLSLFSCDKKMASDVEKFFNYVTGYAKPKNLNKISISPVNMRQTLNENIDAEIKNSKNG

SEQ ID NO: 130300 - protein, 155 aa, Unknown
  Bacterial polypetide isolated from the Sargasso Sea
MKSKYINRELSWLKFNDRVLLEAQNIENPLYERVKFLSIAGSNLDEFFMVRVAGLYSQIKQEVDSLSSDGLTPEEQMDEVVLETKNLLKKQNKIFIQLIMELKKNNINLVKPVNLNTKDKKKLLEIFKEEIYPLLTPSAIDPAHPFPFIINQGRA

SEQ ID NO: 130301 - protein, 304 aa, Unknown
  Bacterial polypetide isolated from the Sargasso Sea
IFFETIKKKDLVVHHPFETFDSVIEFLNQAANDKKVIAIKQTLYRTTLDSPIVKALITAAENGKTVTALIEIKARFDEEANIQLSRSLEKVGVQIVYGFAKYKTHAKSSLVLRREQGKIQTYFHLGTGNYHPVNAKIYTDLSLFSCDKKMASDVEKFFNYVTGYAKPKNLNKISISPVNMRQTLNENIDAEIKNSKNGKFAAIWAKMNSLVDPEIIDKFYEASNAGVKIHLFVRGVCCLRPGVKDRSENIFVKSIIGRFLEHSRIYCFSNGTKKMPNRNAKVYISSADLMPRNLNRRVELLVPI

SEQ ID NO: 130302 - protein, 316 aa, Unknown
  Bacterial polypetide isolated from the Sargasso Sea
LYRTTLDSPIVKALITAAENGKTVTALIEIKARFDEEANIQLSRSLEKVGVQIVYGFAKYKTHAKSSLVLRREQGKIQTYFHLGTGNYHPVNAKIYTDLSLFSCDKKMASDVEKFFNYVTGYAKPKNLNKISISPANMRQTLNENIDAEIKNSKNGQFAAIWAKMNSLVDPEIIDKFYEASNAGVKIHLFVRGVCCLRPGVKDKSENIVVKSIIGRFLEHSRIYCFSNGAKKMPNRNAKVYISSADLMPRNLNRRVELLVPIENETVHEQILDQIMLANYLDTSQSWALNADGNYKKIKYSKNDSFSAHEYFMNNP

SEQ ID NO: 130303 - protein, 363 aa, Unknown
  Bacterial polypetide isolated from the Sargasso Sea
HKEELKSKYINRELSWLKFNDRVLLEAQNIENPLYERVKFLSIAGSNLDEFFMVRVAGLYSQIKQEVDSLSSDGLTPEEQMDEVVLETKNLLKKQNKIFIQLIMELKKNNINLVKPVNLNTKDKKKLLEIFKEEIYPLLTPSAIDPAHPFPFIINQGRALVMKLRKKNKKRILNSIIVIPKALSRFIEIESTKNHKKFVILDDIISFFANEIFPDHDLEKKMIFRVIRDSDVEIQEEAEDLVRSFELALKRRRTGDIVRLEILENSDNELIRFITNKLDINPDYIYDVSGLVGIQDIDQICKVKNPKLRFKHFTPREVERLKEYNDNFFETIKKKDLVVHHPFETFDSVIEFLNQAANDNKVI

SEQ ID NO: 130304 - protein, 307 aa, Unknown
  Bacterial polypetide isolated from the Sargasso Sea
KLRFKHFTPREVERLKEYNDNFFETIKKKDLVVHHPFETFDSVIEFLNQAANDKKVIAIKQTLYRTTLDSPIVKALITAAENGKTVTALIEIKARFDEEANIQLSRSLEKVGVQIVYGFAKYKTHAKSSLVLRREQGKIQTYFHLGTGNYHPVNAKIYTDLSLFSCDKKMASDVEKFFNYVTGYAKPKNLNKISISPVNMRQTLNENIDAEIKNSKNGKFAAIWAKMNSLVDPEIIDKFYEASNAGVKIHLFVRGVCCLRPGVKDRSENIFVKSIIGRFLEHSRIYCFSNGTKKMPNRNAKVYISSA

SEQ ID NO: 130305 - protein, 299 aa, Unknown
  Bacterial polypetide isolated from the Sargasso Sea
RAAENGKVVTAVIEIKARFDEEANIELSRKLEKAGVQIVYGFAKYKTHAKASLVLRKEGAKTRSYVHLGTGNYHPINAKIYTDLSLFSSNQDLAKDVEKFFNYVTGYAKPKKLNKIFMSPLNSRNFFEEKIENEIVNASKGKPAEIWAKMNSLVDPGIIKKFYEASNAGVKINLSVRGVCCLRPGIKGQSENIKVKSLIGRFLEHSRIYCFANGSSMPSRENQVYISSADLMPRNLDRRIEIIIPIENNTVHEQILDQIMLANFKDKSETWYLDSLGNYHKEQEKGFSAHSYFMKNPSL

SEQ ID NO: 130306 - protein, 281 aa, Unknown
  Bacterial polypetide isolated from the Sargasso Sea
KHFTPREVERLKEYNDNFFETIKKKDLVVHHPFETFDSVIEFLNQAANDKKVIAIKQTLYRTTLDSPIVKALITAAENGKTVTALIEIKARFDEEANIQLSRSLEKVGVQIVYGFAKYKTHAKSSLVLRREQGKIQTYFHLGTGNYHPVNAKIYTDLSLFSCDKKMASDVEKFFNYVTGYAKPKNLNKISISPVNMRQTLNENIDAEIKNSKNGKFAAIWAKMNSLVDPEIIDKFYEASNAGVKIHLFVRGVCCLRPGVKDRSENIVVKSIIGRFLEHSRI

SEQ ID NO: 130307 - protein, 260 aa, Unknown
  Bacterial polypetide isolated from the Sargasso Sea
NGKTVTALIEIKARFDEEANIQLSRSLEKVGVQIVYGFAKYKTHAKSSLVLRREQGKIQTYFHLGTGNYHPVNAKIYTDLSLFSCDKKMASDVEKFFNYVTGYAKPKNLNKISISPVNMRQTLNENIDAEIKNSKNGKFAAIWAKMNSLVDPEIIDKFYEASNAGVKVHLFVRGVCCLRPGVKDRSENIFVKSIIGRFLEHSRIYCFSNGTKKMPNRNAKVYISSADLMPRNLNRRVELLVPIENETVHEQILDQIMLAN

SEQ ID NO: 130308 - protein, 206 aa, Unknown
  Bacterial polypetide isolated from the Sargasso Sea
MKSKYINRELSWLKFNDRVLLEAQNIENPLYERVKFLSIAGSNLDEFFMVRVAGLYSQIKQEVDSLSSDGLTPEEQMDEVVLETKNLLKKQNKIFIQLIMELKKNNISLVKPVNLNTKDKIKLLKIFKEEIYPLLTPSAIDPAHPFPFIINQGRAIVMKLRKKNKKRILNSIIVIPKALSRFVEIESSKNHKKFVILDDVISFFAN

SEQ ID NO: 130309 - protein, 304 aa, Unknown
  Bacterial polypetide isolated from the Sargasso Sea
RRRTGDIVRLEILKNSNNDLIKFITNKLNVKSEYIYEIEGIVGIQDIDQVCKIKNSKLRFKNFNPREVERLKEFNNNFFDTIKKKDLIVHHPFETFDAVVEFLNQAAYDKKVIAIKQTLYRTTLDSPIVKALITAAENGKTVTALIEIKARFDEEANIQLSRSLEKAGIQIVYGFAKYKTHAKSSLILRKEQGKIQTYIHLGTGNYHPVNAKIYTDLSLFSSDKKIATDVEKFFNYVTGYSKPRNLSKISISPINLRETLNKCIANEIANVKKGKKGEIWAKMNSLVDPVIIDKFYEASNAGVK

SEQ ID NO: 130310 - protein, 184 aa, Unknown
  Bacterial polypetide isolated from the Sargasso Sea
MLGKTKYINRELSWLEFNQRVLEEAENSKIPLAERLNFLSISGSNLDEFFMVRVAGLKGQVDSEVFVETIDGLMPEQVLYEVIKKSKFIKKKQNECWENILKALSKNGIKVCETKQLNVNEKRWLKNYFVKEIFPLLTPVAIDPAHPFPFVPNLGLSIVLKLKSKNSKNIIRVVIPFPKGLKNL

SEQ ID NO: 130311 - protein, 287 aa, Unknown
  Bacterial polypetide isolated from the Sargasso Sea
FKNSNNDLIKFITNKLNVKSEYIYEIEGIVGIQDIDQVCKIKNSKSRFKNFNPREVERLKEFNNNFFDTIKKKDLIVHHPFETFDAVVEFLNQAAYDKKVIAIKQTLYRTTLDSPIVKALITAAENGKTVTALIEIKARFDEEANIQLSRSLEKAGIQIVYGFAKYKTHAKSSLILRKEQGKIQTYIHLGTGNYHPVNAKIYTDLSLFSSDKKIATDVEKFFNYVTGYSKPRNLSKISISPINLRETLNKCIANEIANVKKGKKGEIWAKMNSLVDPAIIDKFYEAS

SEQ ID NO: 130312 - protein, 263 aa, Unknown
  Bacterial polypetide isolated from the Sargasso Sea
IFSVVSKQDILLLHPFESFTPVVDLLRQAAKDPHVLAIKQTLYRSGANSEIVDALVEAARNGKEVTAVIELRARFDEESNLALASRLQAAGAVVIYGVVGFKTHAKMMLILRRENGEIVRYAHLGTGNYHAGNAKLYTDYSLLTADVALGEDVSKLFSQLIGMGKTLRMKKLLHAPFTLKKTLLDLIAKETTAAAEGKPAHIIAKFNSLTDPKVIRALYKASQTGVKIDLVVRGMCCLRPGIAGVSHNIQVRSIIGRFLEHTR

SEQ ID NO: 130313 - protein, 287 aa, Unknown
  Bacterial polypetide isolated from the Sargasso Sea
KTVTALIEIKARFDEEANIQLSRSLEKAGIQIVYGFAKYKTHAKSSLILRKEQGKIQTYIHLGTGNYHPVNAKIYTDLSLFSSDKKIATDVEKFFNYVTGYSKPRNLSKISISPINLRETLNKCIANEIANVKKGKKGEIWAKMNSLVDPAIIDKFYEASNAGVKIFLFVRGVCCLRPGVKDKSENIIVKSMIGRFLEHSRIYCFANGNTMPSRDAKVFISSADLMPRNLNRRVELLVPIENQTVHEQVLDQIMLANYLDKKQSWELDASGNYKKIKYSENDSFSAP

SEQ ID NO: 130314 - protein, 256 aa, Unknown
  Bacterial polypetide isolated from the Sargasso Sea
IVKALITAAENGKTVTAFIEIKARFDEEANIQLSRSLEKVGVQIVYGFAKYKTHAKSSLVLRREQGKIQTYFHLGTGNYHPVNAKIYTDLSLFSCDKKMASDVEKFFNYVTGYAKPKNLNKISISPVNMRQTLNENIDAEIKNSKNGKFAAIWAKMNSLVDPEIIDKFYEASNAGVKIHLFVRGVCCLRPGVKDRSENIFVKSIIGRFLEHSRIYCFSNGTKKMPNRNAKVYISSADLMPRNLNRRVELLVPIENE

SEQ ID NO: 130315 - protein, 331 aa, Unknown
  Bacterial polypetide isolated from the Sargasso Sea
AFTNHSSVFDAISEQDILLYYPYHTFNHLLEFVRQAAFDPDVTQIKVNIYRVASQSRLVSTLINAAKNGKHVTVMVELKARFDEQNNIEWAKTLSNAGIKVIFGIPALKVHSKLCVIHRKEKHNIVKYAHIGTGNFHEKTAKIYTDFSLFTKHEGITEESDSVFRFIESSYKPFQFDHLMISPVNARETITSLINKEITHAEQGKTGRITVKINNLVDKELVDHLYFAARRGVKIRIIVRGMCSLVPSSLSGNDNIRIISIVDRFLEHPRVMVFHNNGKEKVYISSADWMTRNLDHRVEVGTPIYDAKLKQLIIDISELQFKDRTKARIID

SEQ ID NO: 130316 - protein, 188 aa, Unknown
  Bacterial polypetide isolated from the Sargasso Sea
IKQTLYRTTLDSPIVKALITAAENGKTVTALIEIKARFDEEANIQLSRSLEKAGIQIVYGFAKYKTHAKSSLILRKEQGKIQTYIHLGTGNYHPVNAKIYTDLSLFSSDKKLATDVEKFFNYVTGYSKPRNLSKISISPINLRETLNKCIANEITNVKKGKKGEIWAKMNSLVDPAKIDKFYEASNAG

SEQ ID NO: 130317 - protein, 275 aa, Unknown
  Bacterial polypetide isolated from the Sargasso Sea
VAIKQTLYRTSNDSPIVKALIEAAENGKSVTALIELKARFDEEANIKWARDMEKAGVHVVYGFLQLKTHAKVSLVVRREKNKLRSYVHFGTGNYHPVTAKVYTDLSFFTVDESLCRDAAKLFNYLTGYAKPKKWEKLDISPINMRESLIKLIKQEVKFAKTGKNAEIWAKMNSLVDPEVIDELYLASQAGVKISLIIRGICCLRPGIKGFSENIFVKSIIGRFLEHSRIVCFGNGKKLPSLSSKVFISSADWMPRNLDRRVETLIPIENQTVHQQ

SEQ ID NO: 130318 - protein, 292 aa, Unknown
  Bacterial polypetide isolated from the Sargasso Sea
LIEIKARFDEEANIQLSRSLEKAGIQIVYGFAKYKTHAKSSLILRKEQGKIQTYIHLGTGNYHPVNAKIYTDLSLFSSDKKLATDVEKFFNYVTGYSKPRNLSKISISPINLRETLNKCIANEITNVKKGKKGEIWAKMNSLVDPAIIDKFYEASNAGVKIFLFVRGVCCLRPGVKDKSENIIVKSMIGRFLEHSRIYCFANGKTMPSRDAKVFISSADLMPRNLNRRVELLVPIENQTVHEQVLDQIMLANYLDKNQSWELDASGNYKKIKYSENDSFSAHDYFMNNPSLS

SEQ ID NO: 130319 - protein, 331 aa, Unknown
  Bacterial polypetide isolated from the Sargasso Sea
FRVIRDSDVEIQEEAEDLVRSFELALKRRRTGDIVRLEILKNSNNDLIKFITNKLNVKSEYIYEIEGIVGIQDIDQVCKIKNSKLRFKNFNPREVERLKEFNNNFFDTIKKKDLIVHHPFETFDAVVEFLNQAAYDKKVIAIKQTLYRTTLDSPIVKALITAAENGKTVTALIEIKARFDEEANIQLSRSLEKAGIQIVYGFAKYKTHAKSSLILRKEQGKIQTYIHLGTGNYHPVNAKIYTDLSLFSSDKKLATDVEKFFNYVTGYSKPRNLSKISISPINLRETLNKCIANEITNVKKGKKGEIWAKMNSLVDPAIIDKFYEASNAGVK

SEQ ID NO: 130320 - protein, 298 aa, Unknown
  Bacterial polypetide isolated from the Sargasso Sea
CKKKDPKLRFKKFNPREVERLKEFDDKFFSAIRSKDFVVHHPFETFDVVIQFLEAAAKDPKVIGIKQTLYRTTPDSPIVKALSRAAENGKVVTAVIEIKARFDEEANIELSRKLEKAGVQIVYGFAKYKTHAKASLVLRKEGAKTLSYVHLGTGNYHPINAKIYTDLSLFSSNQDLAKDVEKFFNYVTGYAKPKKLNKIFMSPLNSRNFFEEKIENEIVNASKGKPAEIWAKMNSLVDPGIIKKFYEASNAGVKINLSVRGVCCLRPGVKGQSENIKVKSLIGRFLEHSRIYCFANGN

SEQ ID NO: 130321 - protein, 214 aa, Unknown
  Bacterial polypetide isolated from the Sargasso Sea
MSRVPSRFINRELSWLEFNQRVMEEALDSTNPLLERLKFFCIANSNLDEFFEVRIAGLKQQIESAVVKRSLDGRTPTETYQAASLRIHRMVDDLCRCWRDDLQPQLNKKGFRFHEIEALSDSNRKWLEEFFDEKVRPVLTPLAVDPSKAFPLILNKSLNIITRVERQSKRGIEQRLCIVQVPRVIPRLVQLPHGDTSHEYVFLADIISHFIESL

SEQ ID NO: 130322 - protein, 280 aa, Unknown
  Bacterial polypetide isolated from the Sargasso Sea
EASNTAHPILERVRFLSISASNLDEFFMVRVAGLKGQVAAGIVEYSKEYLTPAQQLDAVKESVTQLVARQQQTWKELRAEMNKEGMEVLRTEELTTAETSWVETYFTEEIFPVLTPIAVDPAHPFPFMPNLGLAMVLKLSRTRNDVQLSGLIPIPAQLDRFVRLPGTLPRFIRIEQIIRMHFDRLFPRFEVMEYGMVRILRDSDIEVEDDAEDLVRLFESALKRRRRGDVIRLSINSNMGLALRNFLIHQLNVYRDDVFSEEGIVGLVDTKELIIDDKPD

SEQ ID NO: 130323 - protein, 276 aa, Unknown
  Bacterial polypetide isolated from the Sargasso Sea
RFDEEANIQLSRSLEKAGIQIVYGFAKYKTHAKSSLILRKEPGKIQTYIHLGTGNYHPVNAKIYTDLSLFSSDKKIATDVEKFFNYVTGYSKPRNLSKISISPINLRETLNKCIANEIANVKKGKKGEIWAKMNSLVDPAIIDKFYEASNAGVKIFLFVRGVCCLRPGVKDKSENIIVKSMIGRFLEHSRIYCFSNGKTMPSRDAKVFISSADLMPRNLNRRVELLVPIENQTVHEQVLDQIMLANYLDKKQSWELDASGNYKKIKYSENDSFSAP

SEQ ID NO: 130324 - protein, 241 aa, Unknown
  Bacterial polypetide isolated from the Sargasso Sea
DSPIVKALITAAENGKTVTALIEIKARFDEEANIQLSRSLEKAGIQIVYGFAKYKTHAKSSLILRKEQGKIQTYIHLGTGNYHPVNAKIYTDLSLFSSDKKLATDVEKFFNYVTGYSKPRNLSKISISPINLRETLNKCIANEITNVKKGKKGEIWAKMNSLVDPAIIDKFYEASNAGVKIFLFVRGVCCLRPGVKDKSENIIVKSMIGRFLEHSRIYCFANGKTMPSRDAKVFISSADLM

SEQ ID NO: 130325 - protein, 302 aa, Unknown
  Bacterial polypetide isolated from the Sargasso Sea
AENGKTVTALIEIKARFDEEANIQLSRSLEKVGVQIVYGFAKYKTHAKSSLVLRREQGKIQTYFHLGTGNYHPVNAKIYTDLSLFSSDKKMASDVEKFFNYVTGYAKPKNLNKISISPVNMRQTLNENIDAEIKNSKNGKFAAIWAKMNSLVDPEIIDKFYEASNAGVKIHLFVRGVCCLRPGVKDRSENIVVKSIIGRFLEHSRIYCFSNGTKKMPNRNAKVYISSADLMPRNLNRRVELLVPIENETVHEQILDQIMLANYLDTSQSWELNADGNYKKIKYSKNDSFSAHEYFMNNPSLS

SEQ ID NO: 130326 - protein, 243 aa, Unknown
  Bacterial polypetide isolated from the Sargasso Sea
EIVRYAHLGTGNYHAGNAKLYTDYSLLTADVALGEDVSKLFSQLIGMGKTLRMKKLLHAPFTLKKTLLDLIAKETAAAAEGKPAHIIAKFNSLTDPKVIRALYKASQTGVKIDLVVRGMCCLRPGIAGVSHNIQVRSIIGRFLEHTRVFYFLNGGDEKIYLSSADWMERNLDKRVETCFPVEGKKLITRVKKELESYLTDNTQAWVLQSDGRYLRQQPTGNQNPRSAQSGLLEKLTAPVIVTR

SEQ ID NO: 130327 - protein, 285 aa, Unknown
  Bacterial polypetide isolated from the Sargasso Sea
FELALKRRRTGDIVRLEILKNSNNDLIKFITNKLNVKSEYIYEIEGIVGIQDIDQVCKIKNSKLRFKNFNPREVERLKEFNNNFFDTIKKKDLIVHHPFETFDAVVEFLNQAAYDKKVIAIKQTLYRTTLDSPIVKALITAAENGKTVTALIEIKARFDEEANIQLSRSLEKAGIQIVYGFAKYKTHAKSSLILRKEQGKIQTYIHLGTGNYHPVNAKIYTDLSLFSSDKKLATDVEKFFNYVTGYSKPRNLSKISISPINLRETLNKCIANEITNVKKGKKGEI

SEQ ID NO: 130328 - protein, 263 aa, Unknown
  Bacterial polypetide isolated from the Sargasso Sea
MKSKYINRELSWLKFNDRVLLEAQNTENPLYERVKFLSIAGSNLDEFFMVRVAGLFSQIKQEVDSLSSDGLTPEEQMDEVVLETKNLLKKQNKIFMQLIMELKKNNISLVKPVNLNAKDKKKLLEIFKEEIYPLLTPSAIDPAHPFPFIINQGRAIVMKLRKKNKKRILNSIIVIPKALSRFIEIESSKNHKKFVILDDVISFFANEIFPDHDLEKKMIFRVIRDSDVEIQEEAEDLVRSFELALKRRRTGDIVRLEVLENSD

SEQ ID NO: 130329 - protein, 297 aa, Unknown
  Bacterial polypetide isolated from the Sargasso Sea
DVTPDYIYETEGLVGIEDIDQICKLKNSKLRFKNFNPREVERLKEFNNNFFDTIKQKDLVVHHPFETFDAVIEFLNQAAYDKKVIAIKQTLYRTTLDSPIVKALISAAENGKTVTALIEIKARFDEEANIQLARSLEKAGVQIVYGFAKYKTHAKSSLVLRRELGKIQTYVHLGTGNYHPVNAKIYTDLSLFSSNKKIAGDVEKFFNYVTGYSKPRNLNKLSISPINLRITLNKCIDIEISNAKKGKKAEIWAKMNSLVDPIIIDKFYEASNAGVKIYLFVRGVCCLRPGVKDKSEN

SEQ ID NO: 130330 - protein, 282 aa, Unknown
  Bacterial polypetide isolated from the Sargasso Sea
KQTLYRTTPDSPIVKALSRAAENGKVVTAVIEIKARFDEEANIELSRKLEKAGVQIVYGFAKYKTHAKASLVLRKEGAKTRSYVHLGTGNYHPINAKIYTDLSLFSSNQDLAKDVEKFFNYVTGYAKPKKLNKIFMSPLNSRNFFEEKIENEIVNASKGKPAEIWAKMNSLVDPGIIKKFYEASNAGVKINLSVRGVCCLRPGIKGQSENIKVKSLIGRFLEHSRIYCFANGSSMPSRENQLYISSADLMPRNLDRRIEIIIPIENNTVHEQILDQIMLANF

SEQ ID NO: 130331 - protein, 282 aa, Unknown
  Bacterial polypetide isolated from the Sargasso Sea
DIVRLEILKNSNNDLIKFITNKLNVKSEYIYEIEGIVGIQDIDQVCKIKNSKLRFKNFNPREVERLKEFNNNFFDTIKKKDLIVHHPFETFDAVVEFLNQAAYDKKVIAIKQTLYRTTLDSPIVKALITAAENGKTVTALIEIKARFDEEANIQLSRSLEKAGIQIVYGFAKYKTHAKSSLILRKEQGKIQTYIHLGTGNYHPVNAKIYTDLSLFSSDKKIATDVEKFFNYVTGYSKPRNLSKISISPINLRETLNKCIANEIANVKKGKNGEIWAKMNSLV

SEQ ID NO: 130332 - protein, 239 aa, Unknown
  Bacterial polypetide isolated from the Sargasso Sea
MKSKYINRELSWLKFNDRVLLEAQNTENPLYERVKFLSIAGSNLDEFFMVRVAGLYSQIKQEVDSLSSDGLTPEEQMDEVVLETKNLLKKQNKIFTQLIIELKKKNISLVKPVNLNTKDKKKLLEIFNEEIYPLLTPSAIDPAHPFPFIINQGRALVMKLRKKNKKRVLNSIIVIPKALSRFIEIESSKNHKKFVILDDVISFFANEIFPDHDLEKKMIFRIIRDSDVEIQEEAEDLVR

SEQ ID NO: 130333 - protein, 702 aa, Unknown
  Bacterial polypetide isolated from the Sargasso Sea
MNRELSWLKFNDRVLLEAQNTENPLYERVKFLSIAGSNLDEFFMVRVAGLYSQIKQEVDSLSSDGLTPEEQMDEVVLETKNLLKKQNKIFTQLIIELKKNNISLVKPVNLNTKDKKKLLEIFKEEIYPLLTPSAIDPAHPFPFIINQGRALVMKLRKKNKKRVLNSIIVIPKALSRFIEIESSKNHKKFVILDDVISFFANEIFPDHDLEKKMIFRVIRDSDVEIQEEAEDLVRSFELALKRRRTGDIVRLEILENSDNELVKFITNKLEINPDYIYDVSGLVGIQDIDQICKVKNPKLRFKHFTPREVERLKEYNDNFFETIKKKDLVVHHPFETFDSVIEFLNQAANDKKVIAIKQTLYRTTLDSPIVKALITAAENGKTVTALIEIKARFDEEANIQLSRSLEKVGVQIVYGFAKYKTHAKSSLVLRREQGKIQTYFHLGTGNYHPVNAKIYTDLSLFSCDKKMASDVEKFFNYVTGYAKPKNLNKISISPVNMRQTLNKNIDAEIENSKNGKFAAIWAKMNSLVDPEIIDKLYEASNAGVKIHLFVRGVCSLRPGVKDRSENIVVKSIIGRFLEHSRIYCFSNGTKEMPNRNAKVYISSADLMPRNLNRRVELLVPIENQTVHEQILDQIMLANYLDTSQSWELNADGNYKKIKYSKNDSFSAHEYFMNNPSLSGRGKAKLKMQPKQLHLRLIKSGSN

SEQ ID NO: 130334 - protein, 460 aa, Unknown
  Bacterial polypetide isolated from the Sargasso Sea
KRRRTGDIVRLEILKNSNNDLIKFITNKLNVKSEYIYEIEGVVGIQDIDQVCKIKNSKLRFKNFNPREVERLKEFNNNFFDTIKKKDLIVHHPFETFDAVVEFLNQAAYDKKVIAIKQTLYRTTLDSPIVKALITAAENGKTVTALIEIKARFDEEANIQLSRSLEKAGIQIVYGFAKYKTHAKSSLILRKEQGKIQTYIHLGTGNYHPVNAKIYTDLSLFSSDKKIATDVEKFFNYVTGYSKPRNLSKISISPINLRETLNKCIANEIANVKKGKKGEIWAKMNSLVDPVIIDKFYEASNAGVKILLFVRGVCCLRPGVKDKSENIIVKSMIGRFLEHSRIYCFSNGKTMPSRDAKVFISSADLMPRNLNRRVELLVPIENQTVHEQVLDQIMLANYLDKKQSWELDASGNYKKIKYSENDSFSAHDYFMNNPSLSGRGKAKLKMKPKKLNLRLIKSGN

SEQ ID NO: 130335 - protein, 708 aa, Unknown
  Bacterial polypetide isolated from the Sargasso Sea
MSKASFSENANISNQLINRELSWLQFNDRVLEESKDKTNPLFERVKFLSIAGTNLDEFFMVRVAGLFNQIKDGFDELSADGLTAEDQLNRVVLKTKDLLKKQNEAFLELKKELSKEKVFIRKMSELNKKNLIYLKEYFQETIYPIITPTAIDPSHPFPFIPNKGQAILLRMSRIKKKRELNAIIVIPRALPKFISLNNFETINEFVTIDDLICEFANEIFPDHNIEASLQFKIIRDSEIEIDDEAADLVRYFEKAIKKRRRGNVVKLEVLTNSNKKLLNFISKKFKMNEDHIYEVEGLVGIQDIDEICKKKDPKLRFKKFNPREVERLKEFDNKFFSAIRSKDFVVHHPFETFDVVIQFLEAAAKDPKVIGIKQTLYRTTPDSPIVKALSRAAENGKVVTAVVEIKARFDEEANIELSRKLEKAGVQIVYGFAKYKTHAKASLVLRKEGVKTRSYVHLGTGNYHPINAKIYTDLSLFSSNQDLAKDVEKFFNYVTGYAKPKKLNKIFMSPINSRNFFEKKIENEIANANKGRPAEIWAKMNSLVDPGIIKKFYEASNAGVKINLSVRGVCCLRPGIKAQSENIKVKSLIGRFLEHSRIYCFANGSSMPSRENQVYISSADLMPRNLDRRIEIIIPIENNTVHEQILDQIMLANFKDKSETWYLDSLGNYHKEQEKGFSAHTYFMENSSLSGRGKSLLKAKPQNLRLVK

SEQ ID NO: 130336 - protein, 716 aa, Unknown
  Bacterial polypetide isolated from the Sargasso Sea
MTALKKQDKEILRSKYINRELSWLKFNDRVLLEAQNIENPLYERIKFLSIAGSNLDEFFMVRVAGLYSQIKQEVDSLSSDGLTPDEQMSEVILETNNLLNKQNKIYRDLILQLKKANISIVKPENLSKSDQKRLFKIFNEEIYPLLTPSAIDPAHPFPFIANQGRALVMRLNKKNKKRVLNAIIVIPKALSRFIEIDGNKSFKKFLIIDDVISFFASEIFPDHDLDKKMLFRVIRDSDVEIQEEAEDLVRSFELALKRRRTGDIVRLEILKNSNNDLIKFITNKLNVKSEYIYEIEGIVGIQDIDQVCKIKNSKLRFKNFNPREVERLKEFNNNFFDTIKKKDLIVHHPFETFDAVVEFLNQAAYDKKVIAIKQTLYRTTLDSPIVKALITAAENGKTVTALIEIKARFDEEANIQLSRSLEKAGIQIVYGFAKYKTHAKSSLILRKEQGKIQTYIHLGTGNYHPVNAKIYTDLSLFSSDKKIATDVEKFFNYVTGYSKPRNLSKISISPINLRETLNKCIANEIANVKKGKKGEIWAKMNSLVDPAIIDKFYEASNAGVKIFLFVRGVCCLRPGVKDKSENIIVKSMIGRFLEHSRIYCFANGKTMPSRDAKVFISSADLMPRNLNRRVELLVPIENQTVHEQVLDQIMLANYLDKKQSWELDASGNYKKIKYSENDSFSAHDYFMNNPSLSGRGKAKLKMKPKKLNLRLIKSGN

SEQ ID NO: 130337 - protein, 718 aa, Unknown
  Bacterial polypetide isolated from the Sargasso Sea
MTALKKQQKEELKNKYINRELSWLKFNDRVLFEAQNLENPLYERVKFLSIAGSNLDEFFMVRVAGLYSQIKQEVDSLSSDGLTPDEQMEEVISETKKLLIKQNKIYIQLIAELKKNNISLVKPVNLNTKDKKKLLEIFKEEIYPLLTPSAIDPAHPFPFIINQGRALVMRLRKKNKKRILNSIIVIPKALSRFIEIESSKNHKKFVVLDDVISFFAKEIFPDHDLEKKMIFRVIRDSDVEIQEEAEDLVRSFELALKRRRTGDIVRLEVLENSDHELIKFITNKLDVNPDYIYNVFGLVGIQDIDQICKLKNPKLRFKNFVPRDVERLKEYNDNFFETIKRKDLVVHHPFETFDSVIEFLNQAANDKKVIAIKQTLYRTTLDSPIVKALITAAENGKTVTALIEIKARFDEEANIQLSRSLEKVGVQIVYGFAKYKTHAKSSLVLRREQGKIQTYFHLGTGNYHPVNAKIYTDLSLFSCDRKMASDVEKFFNYVTGYAKPKNLNKISVSPINMRQTLNKNIDAEIENSKNGKFAAIWAKMNSLVDPEIIDKFYEASNAGVNIHLFVRGVCCLRPGIKNRSENIVVKSIIGRFLEHSRIYCFSNGTKKMPNRNAKVYISSADLMPRNLNRRVELLVPIENETVHEQILDQIMLANYLDTNQSWELNADGNYKKIKYSKNDSFSAHEYFMNNPSLSGRGKAKLTMQPKKLHLRLIKSGSN

SEQ ID NO: 130338 - protein, 347 aa, Unknown
  Bacterial polypetide isolated from the Sargasso Sea
MKSKYINRELSWLKFNDRVLLEAQNIENPLYERVKFLSIAGSNLDEFFMVRVAGLYSQIKQEVDSLSSDGLTPDEQMDEVVLETKNLFKKQNKIFIQLIMELKKNNISLVKPVNLNTKDKKKLLEIFKEEIYPLLTPSAIDPAHPFPFIINQGRAIVMKLRKKNKKRILNSIIVIPKALSRFIEIESSKDHKKFVILDDVISFFANEIFPDHYLEKKMIFRVIRDSDVEIQEEAEDLVISFELALKRRRTGDIVRLEVLENSDNELVKFITNKLEINSDYIYDVAGLVGIQDIDQICKIKNPKLRFKHFTPREVERLKEYNDNFFETIKKKDLVVHHPFETFDSVIE

SEQ ID NO: 130339 - protein, 468 aa, Unknown
  Bacterial polypetide isolated from the Sargasso Sea
KIFLNLALKRRRTGDIVRLEILKNSNNDLIKFITNKLNVKSEYIYEIEGIVGIQDIDQVCKIKNSKLRFKNFNPREVERLKEFNNNFFDTIKKKDLIVHHPFETFDAVVEFLNQAAYDKKVIAIKQTLYRTTLDSPIVKALITAAENGKTVTALIEIKARFDEEANIQLSRSLENAGIQIVYGFAKYKTHAKSSLILRKEQGKIQSYIHLGTGNYHPVNAKIYTDLSLFSSDKKIATDVEKFFNYVTGYSKPRNLSKISISPINLRETLNKCIANEITNVKKGKKGEIWAKMNSLVDPAIIDKFYEASNAGVKIFLFVRGVCCLRPGVKDKSENIIVKSMIGRFLEHSRIYCFANGKTMPSRDAKVFISSADLMPRNLNRRVELLVPIENQTVHEQVLDQIMLANYLDKKQSWELDASGNYKKIKYSENDSFSAHDYFMNNPSLSGRGKAKLKMKPKKLNLRLIKSGN

SEQ ID NO: 130340 - protein, 699 aa, Unknown
  Bacterial polypetide isolated from the Sargasso Sea
MLKKNTAYNYANRELSWLKFNERVLSQTSDSKIPLLERVRFLSIAFSNLDEFFMVRVAGLNVQKFSRNKSFDGLTPQQQLKLIDKETSKMISNIKSIWIDLLRELSENKIHIDVEKTLKTKDKTFIKNYLEENNWGVLTPIIIDPSHPFPFIPNKETTLVCRLINNKKTFYGILRVPEGLEKFIKLPGKKTRFVSMETALLISLKEIFQCDRVLDKGVFRPIRNSELELGGEGEDLFLVFQKAIFERRRQEVIRIDFDESISSHLIKFINKKLNYKDVNTYKLPIPVNLSSIESIFLKDFKKLFFPKFKVRFPERIKDFKNDYFKAIANKDIVIHHPFESFEVVTQFIDQAADDPKVLSIKHTLYRTTDDSPIEASLVRAAQKGKLVTVIIELQARFDEERNLKWAKELELAGAQVVFGNIDMKTHAKITLVTRKQMNSVVNYAHYGTGNYHPRNARVYMDLSYFTCDKTLTNDAAKMFNYLTSYSEPTTIKKIVYSPITARNKLNELIRNEITNAGKNKPSGIVCKCNALVDKQIIDEFYKASQKNVKIELLIRGICSLIPGKENLSENIVVKSIIGRFLEHTRIYCFYNGHKFPHRKNILFISSADLMQRNLDRRVETFIPIENETVHEQILNQILIASMTDNTNSWQMLSNGNYQKKEISSKEKKFSSHNFFIKNPSLSGRGSAKLKSRAKSNLKI

SEQ ID NO: 130341 - protein, 370 aa, Unknown
  Bacterial polypetide isolated from the Sargasso Sea
MKSKYINRELSWLKFNDRVLLEAQNIENPLYERVKFLSIAGSNLDEFFMVRVAGLYSQIKQEVDSLSSDGLTPEEQMDEVVLETKNLLKKQNKIFIQLIMELKKNNINLVKPVNLNTKDKKKLLEIFKEEIYPLLTPSAIDPAHPFPFIINQGRAIVMKLRKKNKKRILNSIIVIPKALSRFIEIESSKNHKKFVILDDVISFFANEIFPDHDLENKMIFRVIRDSDVEIQEEAEDLVRSFELALKRRRTGDIVRLEVLENSDNELVRFITNKLDINPDYIYDVSGLVGIQDIDQICKVKNPKLRFKHFTPREVERLKEYNDNFFETIKKKDLVVHHPFETFDSVIEFFNQAANDKKVIAIKQTLYRTTL

SEQ ID NO: 130342 - protein, 488 aa, Unknown
  Bacterial polypetide isolated from the Sargasso Sea
MIFRVIRDSDVEIQEEAEDLVRSFELALKRRRTGDIVRLEILEKSDKELVKFITNKLEINPNYIYEVAGLVGIQDIDQICKIKNSKLKFKNFTPRDVERLKEYNNNFFETIKKKDLIVHHPFETFDAVIEFLNQAAIDKKVIAIKQTLYRTTLDSPIVKALISAAENGKTVTALIEIKARFDEEANIQLARSLEKAGVQIVYGFAKYKTHAKSSLIHRREGGKIQTYFHLGTGNYHPVNAKIYTDLSLFSSDKKMATDVEKFYNYVTGYSKPRNLNKISISPVNLRKTLNQNIDKEISNAKKGKHAEIWAKMNSLVDPQIIDKFYEASSVGVKVFLFVRGVCCLRPGIKNKSENIIVKSIIGRFLEHSRIYCFANGKFMPNRNAKVYISSADLMPRNLDRRVELLVPIENQTVHEQVLDQIMMANYLDTNQSWELYPDGNYQKIKYSRKDSFSAHDYFMNNPSLSGRGKAKLKIKPKKLNLRLVKGGT

SEQ ID NO: 130343 - protein, 449 aa, Unknown
  Bacterial polypetide isolated from the Sargasso Sea
MIKNNNSFNYINRELSWLKFNERVLSQTLDNKTPLLERVRFLSIAFSNLDEFFMVRVAGLNVQKYSRNKSFDGLTPQQQLKLIDKETSKMISDIKSIWIDLLKELSENKIHIDVEKTLKTKDKTFIKNYLEENNWGVLTPIIIDPSHPFPFIPNKETTLVCRLINNKKTFYGILRVPEGLEKFIKLPGKKIRFVSMETALLISLKEIFQCDRVLDKGVFRPIRNSELELGGEGEDLFLVFQKAIFERRRQEVIRIDFDENISSHLIKFINKKLNYKDVNTYKLPIPINLSSIESIFLKDFKKLFFPKFKVRFPERIKDFKNDYFKAIANKDIVIHHPFESFEVVTQFIDQAADDPKVLSIKHTLYRTTDDSPIEASLVRAAQKGKLVTVIIELQARFDEERNLKWAKELELAGAQVVFGNIDMKTHAKITLVTRKQMNSVVNYATLWNR

SEQ ID NO: 130344 - protein, 411 aa, Unknown
  Bacterial polypetide isolated from the Sargasso Sea
MSTDKQYEEKELSWLSFNERVLQEAMDKTVPLIERVRFLGIFSSNQDEFFKVRVSDVKRRILINEVHGGDDEAKVLLRAIQQKVMALGEAFDNTYKELLIALARHNIFLVNEYQLSESIQQWLRVFFKEKVLRHIIPILLNKEVNPVKFLKDEYTYLAIEMKKNGQVIQYALVEVPTDDLPRFFQLPPEGTRRKKQIIILDNVIRFCLDEIFKGFFDYDEIAAYAVKLTRDAEYDLSDQLDLSLVDKMSDGLKQRLTAMPVRFVYEREMPAAMISFLKLKLQISSYDAIMPGGRYHNFKDFIGFPNVGRDYLENPKLPALDCRDFDGFVNAFDAITKQDILLYYPYHKFHHFTELVRQAAFDPAVSAIRINIYRVAKKSRIIHSLIDAANNGKKVTVVVELRARFDEAANT

SEQ ID NO: 130345 - protein, 709 aa, Unknown
  Bacterial polypetide isolated from the Sargasso Sea
MIRKNTNSDNKFLNRELSWLLFNQRVLDEANDTKVPLIERVNFLSISASNLDEFYMVRIPSLLDEIENNPNKISHDGMTGHQQLKAAQNASAKIFKNQDVSFRKLVRELNAEKIIHITPNKLNIRLKKNLKKLFNEEILPILTPISIDPVHPFPFIPNEGLCISLSLVAGGSNKPFNSVIIVPRALNRLVFIQEGKKEYYLFVEDIIRYFFKDLFPNSKLLDSAIFRVIRDSDIDYEYEDDEDVIKYFEKALTKRKRGEIVRLEILKNISSKKKNFLKKNLNLKDAQVIALSKHVGLQDLSQIHNLNRPKLKFKKFISRPVERLKQFDNNCFAAIRSKDFVVHHPYETFDVVVDYLNQAAIDPKVVAIKQTIYRTTADSPIIKALTKAADNGKSVTAVVEIKARFDEESNLALANQMEKSGVQIVYGFAQLKTHAKASLIIRREAGKLKSYVHVGTGNYHPKNAKTYEDLSLFTADEKICKDIERIFNYMTGYASPMKLNDIVLSPPAMRNQINAMIDNEIKNAKKSKPSGIWLKMNSLVDPQMISKLYEASAAGVKIELFIRGICCLRPGVKKLSENIVVKSIIGRYLEHARIFCFANESNIPSKKNTVLIGSADLMPRNLDRRVEILTPIKNSTVHEQILNQIMVANFLDNEQTWIMNDDGTYKRVKQKGKTFNAHKYFMSNPSLSGRGKLKGNRKPKKLLSLMHYE

SEQ ID NO: 130346 - protein, 712 aa, Unknown
  Bacterial polypetide isolated from the Sargasso Sea
MSSAVLSPDRYINRELSWIAFNQRVLAQALDQRTPLLDQAKFSAIFSNNLDEFFMVRVASLKSQVEAGITTPSEDGKTPLEQLLTIRERLIPLLQQQQDHYRKQLRKQLLDHNVQLLDYSQLNKQQQQWVSDTFRHSVFPVLTPLAVDPAHPFPFVSNLSLNVAAVIHDPESGQRQFARVKVPQKNLPRFVSIPTELSESDPKPIHTAVPLEQVIAFNLDLLFPGMSVQGHYFFRVTRDADLELRDLEADDLMLALEQGLRKRRMGGEVVRLEVPNDMPEDVVEMLMNGLAVEEEDLYRIDGPLGLDDLFGLMALPLPKLKDKQHSGQTPAVLARTQQHLIDEGAIKPEEFENIFSVMRQQDILLHHPYDLFSTTVEEFINQAADDPQVMGIKMTLYRTSKDSPIIAALIRAAENGKQVMALVELKARFDEDNNIQWARQLERSGVHVVYGVLGLKTHTKIVLVVRKEQEKLRSYVHIGTGNYNSKTSKLYTDLGLLSTRPELGQDLVELFNYLTGFSKQQSFRRLLVAPVTLRKGMESLIRREIEHAREGRDGHIRAKMNSLVDPDIIALLYEAAAANVRVELIIRGMCSLYPGREGLSESISVVSIIGQFLEHSRIFWFGNGGSPEVYIGSADWMSRNLDRRVEAVTPVEDPNLRGRLERLLELYLKDNRGAWDMQSDGSFIQRQPEDGEDVRNSQVQLIKQWSQGVPQS

SEQ ID NO: 130347 - protein, 719 aa, Unknown
  Bacterial polypetide isolated from the Sargasso Sea
MTPLKKQQKQELKSKYINRELSWLKFNDRVLLEAQNIDNPLYERVKFLSIAGSNLDEFFMVRVAGLYSQIKQEVESLSSDGLNPEEQMSEVVQETKNLLVKQNLIYKNLISQLKKNYITLVKPQDLSKNEKIKLKNIFYEEIYPLLTPSAIDPAHPFPFIVNQGRAVVMKLKKKNKKRLLNSIIVIPKALSRFIEIDGGKNYKKYVILDDIISFFSSEIFPDHNLESKMIFRVIRDSDVEIQEEAEDLVRSFELALKRRRIGDIVRLEVIKNSNKDLIKFITNKLEVNPDYIYETEGLVGIEDIDQICKLKNSKLRFKNFNPREVERLKEFNNNFFDTIKQKDLVVHHPFETFDAVIEFLNQAAYDKKVIAIKQTLYRTTLDSPIVKALISAAENGKTVTALIEIKARFDEEANIQLARSLEKAGVQIVYGFAKYKTHAKSSLVLRRELGKIQTYVHLGTGNYHPVNAKIYTDLSLFSSNKKIAGDVEKFFNYVTGYSKPRNLNKISISPINLRITLNKCIDIEISNAKKGKKAEIWAKMNSLVDPIIIDKFYEASNAGVKIYLFVRGVCCLRPGVKDKSENIVVKSMIGRFLEHSRIYCFANGKEMPNRNAKVFISSADLMPRNLNRRVELLVPIENSTVHEQILDQIMLANYLDNKQSWQLDPTGNYKKIKYSKDDSFSAHEYFMNNPSLSGRGKAKLKIRPKKLNLRLIKNDTQSS

SEQ ID NO: 130348 - protein, 716 aa, Unknown
  Bacterial polypetide isolated from the Sargasso Sea
MTALKKQDKETLKSKYINRELSWLKFNDRVLLEAQNFENPLYERIKFLSIAGSNLDEFFMVRVAGLYSQIKQDVDSLSSDGLTPDEQMSEVILETNNLLNKQNKIYRDLILQLKKANISIVKPENLSKTEQKRLFKIFNEEIYPLLTPSAIDPAHPFPFIANQGRALVMRLNKKNKKRTLNAIIVIPKALSRFIEIDGNKSFKKFLIIDDVISFFASEIFPDHDLDKKMLFRVIRDSDVEIQEEAEDLVRSFELALKRRRTGDIVRLEILKNSNNDLIKFITNKLNVKSEYIYEIEGIVGIQDIDQVCKIKNSKLRFKNFNPREVERLKEFNNNFFDTIKKKDLIVHHPFETFDAVVEFLNQAAYDKKVIAIKQTLYRTTLDSPIVKALITAAENGKTVTALIEIKARFDEEANIQLSRSLENAGIQIVYGFAKYKTHAKSSLILRKEQGKIQTYIHLGTGNYHPVNAKIYTDLSLFSSDKKIATDVEKFFNYVTGYSKPRNLSKISISPINLRETLNKCIANEITNVKKGKKGEIWAKMNSLVDPAIIDKFYEASNAGVKIFLFVRGVCCLRPGVKDKSENIIVKSMIGRFLEHSRIYCFANGKTMPSRDAKVFISSADLMPRNLNRRVELLVPIENQTVHEQVLDQIMLANYLDKKQSWELDASGNYKKIKYSENDSFSAHDYFMNNPSLSGRGKAKLKMKPKKLNLRLIKSGN

SEQ ID NO: 130349 - protein, 546 aa, Unknown
  Bacterial polypetide isolated from the Sargasso Sea
KGQAILLRMTRIKKKRELNAIIVIPRALPKFISLKNSETINEFVTIDDVICKFANEIFPDHNIEASLQFKIIRDSEIEIDDEAADLVRYFEKAIKKRRRGNVVKLEVLTNSNKNLLNFISKKFKMDEDHIYEVEGLVGIQDIDEICKKKDPKLRFKKFNPREVERLKEFDDKFFSAIRSKDFVVHHPFETFDVVIQFLEAAAKDPKVIGIKQTLYRTTPDSPIVKALSRAAENGKVVTAVIEIKARFDEEANIELSRKLEKAGVQIVYGFAKYKTHAKASLVLRKEGAKTRSYVHLGTGNYHPINAKIYTDLSLFSSNQDLAKDVEKFFNYVTGYAKPKKLNKIFMSPLNSRNFFEEKIENEIVNASKGKPAEIWAKMNSLVDPGIIKKFYEASNAGVKINLSVRGVCCLRPGVKGQSENIKVKSLIGRFLEHSRIYCFANGNSMPSRENQVYISSADLMPRNLDRRIEIIIPIENNTVHEQILDQIMLANFKDKSETWYLDSLGNYNKEQEKGFSAHSYFMKNPSLSGRGKSILRAKPQNLRLVK

SEQ ID NO: 130350 - protein, 718 aa, Unknown
  Bacterial polypetide isolated from the Sargasso Sea
MTALKKQQKEELKNKYINRELSWLKFNDRVLFEAQNIENPLYERVKFLSIAGSNLDEFFMVRVAGLYSQIKQEVDSLSSDGLTPDEQMEEVISETKKLLIKQNKIYIQLLTELKKDNISLVKPVNLNTKDKKKLLEIFKEEIYPLLTPSAIDPAHPFPFIINQGRALVMRLRKKNKKRILNSIIVVPKALSRFIEIESSKNHKKFVVLDDVISFFAKEIFPDHDLEKKMIFRVIRDSDVEIQEEAEDLVRSFELALKRRRTGDIVRLEVLENSDPELIKFITNKLDVNPDYIYNVFGLVGIQDIDQICKVKNPKLRFKNFIPRDVERLKEYNDNFFETIKRKDLVVHHPFETFDSVIEFLNQAANDKKVIAIKQTLYRTTLDSPIVKALITAAENGKAVTALIEIKARFDEEANIQLSRSLEKVGVQIVYGFAKYKTHAKSSLVLRREQGKIQTYFHLGTGNYHPVNAKIYTDLSLFSCDRKMASDVEKFFNYVTGYAKPKNLNKISISPINMRQTLNKNIDAEIENSKNGKFAAIWAKMNSLVDPEIIDKFYEASNAGVKIHLFVRGVCCLRPGIKNRSENIVVKSIIGRFLEHSRIYCFSNGTKKMPNRNAKVYISSADLMPRNLNRRVELLVPIENETVHEQILDQIMLANYLDTNQSWELNADGNYKKIKYSKNDSFSAHEYFMNNPSLSGRGKAKLTMQPKKLHLKLIKSGSN

SEQ ID NO: 130351 - protein, 587 aa, Unknown
  Bacterial polypetide isolated from the Sargasso Sea
MSSAVLSPDRYINRELSWIAFNERVLAQALDQRTPLLDQAKFSAIFSNNLDEFFMVRVASLKSQVEAGITTPSEDGKTPLEQLLTIRERLIPLLQQQQDHFRKHLRKQLLDHDVELLDYDQLNKQQKQWVNDTFRHSVFPVLTPLAVDPAHPFPFVSNLSLNVAAVIHDPESGQRQFARVKVPQKNLSRFVSIPTELSESDPRPIHTAVPLEQVIAFNLDLLFPGMSVQGHYFFRVTRDADLELRDLEADDLMLALEQGLRKRRMGGEVVRLEVPNDMPEDVVDMLMSGLAVEEEDLYRVDGPLGLDDLFGLMALPLPNLKDKQHSGQTPAVLARTQQHLIDEGAIKPEEFENIFSVMRQQDILLHHPYDLFSTTVEEFINQAADDPLVMGIKMTLYRTSKDSPIIAALIRAAENGKQVMALVELKARFDEDNNIQWARHLERAGVHVVYGVLGLKTHTKIVLVVRKEQEKLRSYVHIGTGNYNSKTSKLYTDLGLLSTRPELGQDLVELFNYLTGFSKQQSFRRLLVAPVTLRKGMESLIRREIEHAREGRDGHIRAKMNSLVDPDIIALLYEAAAANVRIELIIR

SEQ ID NO: 130352 - protein, 699 aa, Unknown
  Bacterial polypetide isolated from the Sargasso Sea
MLKKNISYNYVNRELSWLKFNERVLSQATDSKIPLLERVRFLSIAFSNLDEFFMVRVAGLNVQKFSRIKSFDGLTPQQQLKLIDKETSKMISNIKSIWIDLLRELSENKIHIDVEKTLKIKDKTFIKNYLEENNWGVLTPIIIDPSHPFPFIPNKETTLVCRLINNKKTFYGILRVPEGLEKFIKLPSKKTRFVSMETALLISLKKIFQCDRVLDKGVFRPIRNSELELGGEGEDLFLVFQKAIFERRRQEVIRIDFDENISSHLIKFINKKLNYKDVNTYKLPIPINLSSIESIFLKDFKKLFFPKFKVRFPERIKDFKSDYFKAITNKDIVIHHPFESFEVVTQFIDQAADDPKVLSIKHTLYRTTDDSPIETSLVRAAQKGKLVTVIIELQARFDEERNLKWAKELELAGAQVIFGNINMKTHAKITLVTRKQMNSVINYAHYGTGNYHPRNAKIYMDLSYFTCDKTLTNDAAKMFNYLTSYSEPTTIKKVVYSPITARNKLNELIRNEITNAGKNKPSGIVCKCNSLVDKQIIDEFYKASQKNVKIELLIRGICSLIPGKENLSENIVVKSIIGRFLEHTRIYCFYNGHKFPHKKNILFISSADLMQRNLDRRVETFIPIENETVHEQILNQILIASMTDNTNSWQMLSNGNYQRKEISSKEKKFSSHNFFIKNPSLSGRGSAKLKSRAKSNLKI

SEQ ID NO: 130353 - protein, 705 aa, Unknown
  Bacterial polypetide isolated from the Sargasso Sea
MNCCKSSFVNNNLAKYINRELSWIKFNERVLYQALDKKIPLLERIRFLSICFSNLDEFFMVRVAGLFVQQKSQNRSFDGLTPAQQLRLIRVETSKMIENIKSIWLQLSNDLKKNNIIIESEKSLSNTNKKYIHNYLSRSAFEILTPIIIDPSHPFPFIPNNETTLVCKIENRGKEAYGILRVPDGLEKFIRLPGKKNRFVSLETALLISLKEIFQCKIVIDKGIFRPIRNSELELGEEGEDLYLVFQKAIAERRRQEVIRVDLNENISSDLEQFIKENLNFKSDYTYKLPIPINLQSIEELISKDFKKFLYPKFKVRFPERVRDCNYDYFKAISKKDFIVHHPFESFEVVTQFIDQAADDPHVISIKHTLYRTTDDSPIEKSLIKAANKGKLVTVIIELQARFDEERNLKWARELELAGAQVVFGSIEKKTHAKITLITRKEKSLTENYMHFGTGNYHPKNATVYMDLSYFTKNSVLARDSSKIFNYVTSYSIPRGIKKITYSPILAREKFNELINKEITNASKNKPAGFVGKMNSLVDKEMIDIFYRASTNNVKIQLIIRGICSLIPGLQNISENIYVKSIIGRFLEHSRIYCFYNGYKFPHKKNKIFISSADLMQRNLDRRVETFVPIENETVHEQILNQILIANILDNTNSWILNHEGNYLKKEISKKSKKFSSHTYFIKNPSFSGRGQAKLKSKAKMILLK

SEQ ID NO: 130354 - protein, 649 aa, Unknown
  Bacterial polypetide isolated from the Sargasso Sea
MTALKKQDKEELKSNYINRELSWLKFNDRVLLEAQNIENPLYERVKFLSIAGSNLDEFFMVRVAGLYSQIKQEVDSLSSDGLTPEEQMEMVINDTKNLLNKQNTIFNNLSNQLKRNNILLTKPENLNTKEKKKLLEIFKEEIYPLLTPSAIDPSHPFPFIINQGRALVMKLKKKKKKRILNSIIVIPKALSRFIEIDGGKSFKKFLVLDDVIGYFASEIFPDHLLEKKMIFRVIRDSDVEIQEEAEDLVRSFELALKRRRTGDIVRLEILEKSDKELVKFITNKLEINPNYIYEVAGLVGIQDIDQICKIKNSKLKFKNFTPREVERLKEYNNNFFETIKKKDLIVHHPFETFDAVIEFLNQAAMDKKVIAIKQTLYRTTLDSPIVKALISASENGKTVTALIEIKARFDEEANIQLARSLEKAGVQIVYGFAKYKTHAKSSLIHRREGGKIQTYFHLGTGNYHPVNAKIYTDLSLFSSDKKMAADVEKFYNYVTGYSKPRNLNKISISPVNLRKTLNQNIDKEISNAKKGKHAEIWAKMNSLVDSQIIDKFYEASSVGVKVSLFVRGVCCLRPGIKNKSENIIVKSIIGRFLEHSRIYCFANGKLMPNRNAKVYISSADLMPRNLDRRVELLVPIENQTVHEQVLDQI

SEQ ID NO: 130355 - protein, 246 aa, Unknown
  Bacterial polypetide isolated from the Sargasso Sea
MKSKYINRELSWLKFNDRVLLEAQNIENPLYERVKFLSIAGSNLDEFFMVRVAGLYSQIKQEVDSLSSDGLTPEEQMDEVVLETKNLLRKQNKIFIQLIMELKKNNINLVKPVNLNTKDKKKLLEIFKEEIYPLLTPSAIDPAHPFPFIINQGRAIVMKLRKKNKKRILNSIIVIPKALSRFIEIESSKNHKKFIILDDVISFFANEIFPDHDLEKKMIFRVIRDSDVEIQEEAEDLVRSFELALK

SEQ ID NO: 130356 - protein, 467 aa, Unknown
  Bacterial polypetide isolated from the Sargasso Sea
FELALKRRRTGDIVRLEVLENSDNELVDFITNKLDINPDYINDVAGLWKIQDIDQICKVKNPKLRFKHFTPREVERLKEYNDNFFETIKKKDLVVHHPFETFDSVIEFLNQAANDKKVIAIKQTLYRTTLDSPIVKALITAAENGKTVTALIEIKARFDEEANIQLSRSLEKVGVQIVYGFAKYKTHAKSSLVLRREQGKIQTYFHLGTGNYHPVNAKIYTDLSLFSCDKKMASDVEKFFNYVTGYAKPKNLNKISISPVNMRQTLNENIDAEIRNSKNGKFAVIWAKMNSLVDPEIIDKFYEASNAGVKIHLFVRGVCCLRPGVKDRSENIVVKSIIGRFLEHSRIYCFSNGTKNMPNRNAKVYISSADLMPRNLNRRVELLVPIENETVHEQILDQIMLANYLDTNQSWELNADGNYKKIKYSKNDSFSAHEYFMNNPSLSGRGKAKLKMQPKQLHLRLIKSGSN

SEQ ID NO: 130357 - protein, 368 aa, Unknown
  Bacterial polypetide isolated from the Sargasso Sea
MCAAALAPEHYINRELSWIAFNERVLAQALDPRTPLLDQAKFSAIFSNNLDEFFMVRVASLKSQVEAGVSKPSEDGKSPLEQLLAIRERLIPLLREQQVHYREHLKPKLLEHKVELLDYKQLNDDQRQWVDDTFQTSVFPVLTPLAVDPAHPFPFVSNLSLNVAAMVADPETGQRQFARVKVPQKNLPRFIDIPSHLNGQEHKPVHTAIALEQVIAFNLKELFPGMTIEGHYFFRVTRDADLELRDLEADDLMLALEQGLRKRRIGGEVVRLEVPNEMPQDVVEMLMTGLSVEEEDVYVIDGPLGLDDLLSLTALPLPQLKSQSHGGQTPTVLARSQQHLLDEGAIKPDEFRSIFSVIRRQDILLHHP

SEQ ID NO: 130358 - protein, 450 aa, Unknown
  Bacterial polypetide isolated from the Sargasso Sea
LEILKNSNNDLIKFITNKLNVNSEYIYETEGIVGIQDIDQVCKIKNSKLRFKNFNPREVERLKEFNNNFFDTIKKKDLIVHHPFETFDAVIEFLNQAAYDKKVIAIKQTLYRTTLDSPIVKALITAAENGKTVTALIEIKARFDEEANIQLSRSLEKAGIQILYGFAKYKTHAKSSLILRKEQGKIQTYIHLGTGNYHPVNAKIYTDLSLFSSDKKIATDVEKFFNYVTGYSKPRNLNKISISPINLRETLNKCIANEIANVKKGKNGEIWAKMNSLVDPVIIDKFYEASNAGVKIFLFVRGVCCLRPGVKDKSENIIVKSMIGRFLEHSRIYCFANGKTMPSRDAKVFISSADLMPRNLNRRVELLVPIENQTVHEQVLDQIMLANYLDKKQSWELDASGNYKKIKYIENDSFSAHDYFMNNPSLSGRGKAKLKMKPKKLNLKLIKSGN

SEQ ID NO: 130359 - protein, 714 aa, Unknown
  Bacterial polypetide isolated from the Sargasso Sea
MSSARHRTVRVSERPFESSPESPPTLPMSVRYPLLNRELGILGFNERVLAQAADPQVPLLERLRFICITSSNLDEFFEVRMAGLQEQIRDNPGALTPDGMSLQHAYDLVVERAQRLVHRQYTMLHETVLPALEQEGIYFHASDTWNDEQLEWARNYFLDELLPVLTPIGLDPAHPFPRVLNKSLNFVVELEGRDAFGRQAVMGIVQAPRALPRVVRMPHALSGFEHGFVLLSSFMQRFVGELFPQLSVKSCNQFRITRNSELFVDEDEITNLRVALQGELPARHLGNAVRLEVSADTPPHIVRRLLVESELSEKDCYRVSGSVNLVRLMQIPDLVDRPDLKFAPFTASTPSAITNAPTMFDAIDNGDILLHHPYESFQPVLELLQQAARDPSVVAIKQTIYRTGTDSPLMDALMEAARNGKEVTVVVELLARFDEETNINWASQLEAVGAHVVYGVVGHKCHAKMMLIVRRVVQAGKASLRRYVHLGTGNYHPRTARLYTDFGLMTADQKICEDVHHVFQQLTGIGGELTLHELWQSPFTLHPRIIDSIRAEIDNARAGKRARVVAKMNALLEPTVIAALYEASQAGVKVDLIVRGVCALKPGVPGLSENITVRSIVGRFLEHHRIYYFHANGTEDVYLSSADWMDRNLFRRVEVAFPIRDRKLKRRVIAEGLSVCLGDNQSAWQMQSDGHYRRRRAGKTIRNAQLGLLAKFCS

SEQ ID NO: 130360 - protein, 459 aa, Unknown
  Bacterial polypetide isolated from the Sargasso Sea
ENVLRQRKRGTIIRLMVEKTISKDLVNFLINELKLENESVVYSDGILALEDTKQIIKYKQNKMIYKNFYPRFPERIREFNGDCLAAISQKDIIVHHPYESFDVVIQFIKQAAEDPNVVAIKQTLYRTSEDSPIIKSLIEAAEKGKSVTALIELKARFDEEANIRWARDMEKAGVHVVYGFLQLKTHAKVSLVIRRENNKLKSYVHFGTGNYHPITAKIYTDLSFFTVDESLCRDATKLFNYLTGYAEPKSCEKLSISPISMRSNIINMIDDEIKLVRSGKSGGIWAKLNSLVDPEVIDKLYIASQEGVKIELIVRGICCLRPGIKDFSENISVRSIIGRFLEHSRIICFGNGEMLPSSKAKVFISSADWMQRNLDRRVEALVPIENTTVHQQILNQIMVANLKDNCQSWKLNEFGDYKRIYSNESEKFSAHNYFINNPSLSGRGSAVDEPDLLQLKLKN

SEQ ID NO: 130361 - protein, 360 aa, Unknown
  Bacterial polypetide isolated from the Sargasso Sea
MTPLKKQQKQELKSKYINRELSWLKFNDRVLLEAQNLENPLYERVKFLSIAGSNLDEFFMVRVAGLHSQIKQEVESLSSDGLNPEEQMREVVRETKNLLFKQNRIYKNLISQLKKNNVILVKPEDLSKNEKIKLKNIFSEEIYPLLTPSAIDPAHPFPFIVNQGRAVVMKLKKKNKKRLLNAIIVIPKALSRFIEIDGGKNFKKYVIIDDVISFFSSEIFPDHNLESKMIFRVIRDSDVEIQEEAEDLVRSFELALKRRRIGDIVRLEVIKKSNKDLIKFITNKLEVNSEYIYETEGLVGIQDIDQICKLKNSKLRFIKFNPREVDRLKEFNNNFFDTIKQKDLVVHHPFETFDAVIEFL

SEQ ID NO: 130362 - protein, 405 aa, Unknown
  Bacterial polypetide isolated from the Sargasso Sea
MKSKYINRELSWLKFNDRVLLEAQNIENPLYERVKFLSIAGSNLDEFFMVRVAGLYSQIKQEVDSLSSDGLTPEEQMDEVVLETKNLLKKQNKIFIQLIMELKKNNINLVKPVNLNTKDKKKLLEIFKEEIYPLLTPSAIDPAHPFPFIINQGRAIVMKLRKKNKKRILNSIIVIPKALSRFIEIESSKNHKKFVILDDVISFFANEIFPDHDLEKKMIFRVIRDSDVEIQEEAEDLVRSFELALKRRRTGDIVRLEVLENSDNELIRFITNKLDINPDYIYDVAGLVGIQDIDQICKVKNPKLRFKHFTPREVERLKEYNDNFFETIKKKDLVVHHPFETFDSVIEFLNQAANDKKVIAIKQTLYRTTLDSPIVKALITAAENGKTVTALIEIKARFDEEANIQ

SEQ ID NO: 130363 - protein, 410 aa, Unknown
  Bacterial polypetide isolated from the Sargasso Sea
FPGMKVKESYQFRVTRNSDLFIEEEAGDLLEALEGELSTRSYGDAVRLEIASNCPGDLVIFMASQFDLTMQEVYLCEGPVNLMRLAAVYDLVEREELKFQSLVPVMPAIFEDEQTVFDQITEKDILLHYPFESFDFYLAFLKQATEDPKVVSIRHTLYRTGSDSTVVDLLITAAKKGKEVFVVIELRARFDEEANIEVASKLQEAGVQVVYGVVGYKTHAKMCMVVRKEGRTLRRYVHLGTGNYHAGTSRLYTDYSYFTSDRDIGEDVHKLFQRIATMSKQAKLKKIEHAPFTLHPKVLSLIEREASNAKKGKPAAIYAKMNALTEPEVIKALYRASIAGVKIELIVRGICCLKPGVKGVSDNIRVRSIVGRFLEHTRVFCFENGGAREVYLSSADWMDRKLFTRVEILF

SEQ ID NO: 130364 - protein, 334 aa, Unknown
  Bacterial polypetide isolated from the Sargasso Sea
ANDKKVIAIKQTLYRTTLDSPIVKALITAAENGKTVTALIEIKARFDEEANIQLSRSLEKVGVQIVYGFAKYKTHAKSSLVLRREQGKIQTYFHLGTGNYHPVNAKIYTDLSLFSCNKKMSSDVEKFFNYVTGYAKPKNLNKISISPVNMRQTLNENIDAEIKNSKNGKFAAIWAKMNSLVDPEIIDKFYEASNAGVKIHLFVRGVCCLRPGVKDRSENIVVKSIIGRFLEHSRIYCFSNGSKKMPNRNAKVYISSADLMPRNLNRRVELLVPIENETVHEQILDQIMLANYLDTNQSWELNADGNYKKIKYSKIDSFSAHEYFMNNPSLSGRG

SEQ ID NO: 130365 - protein, 236 aa, Unknown
  Bacterial polypetide isolated from the Sargasso Sea
MTPLKKQQKQELKSKYINRELSWLKFNDRVLLEAQNLENPLYERVKFLSIAGSNLDEFFMVRVAGLHSQIKQEVESLSSDGLNPEEQMSEVVRETKNLLFKQNRIYKNLISELKKNNVILVKPEDLSKNEKVKLKNIFSEEIYPLLTPSAIDPAHPFPFIVNQGRAVVMKLKKKNKKRLLNSIIVIPKALSRFIEIDGGKNFKKYVIIDDVISFFSSEIFPDHNLESKMIFRVIRD

SEQ ID NO: 130366 - protein, 707 aa, Unknown
  Bacterial polypetide isolated from the Sargasso Sea
MKSKYINRELSWLKFNDRVLLEAQNTENPLYERVKFLSIAGSNLDEFFMVRVAGLFSQIKQEVDSLSSDGLTPEEQMDEVVLETKNLLKKQNKIFMQLIMELKKNNISLVKPVNLNTKNKKKLLEIFKEEIYPLLTPSAIDPAHPFPFIINQGRAIVMKLRKKNKKRILNSIIVIPKALSRFIEIESSKNHKKFVIIDDVINFFANEIFPDHDLEKKMIFRVIRDSDVEIQEEAEDLVRSFELALKRRRTGDIVRLEVLENSDNELIRFITNKLDINPDYIYDIVGLVGIQDIDQICKVKNPKLRFKHFTPREVERFKEYNDNFFETIKKKDLVVHHPFETFDSVIEFLNQAANDKKVIAIKQTLYRTTLDSPIVKALITAAENGKTVTALIEIKARFDEEANIQLSRSLEKVGVQIVYGFAKYKTHAKSSLVLRREQGKIQTYFHLGTGNYHPVNAKIYTDLSLFSCDKKMASDVEKFFNYVTGYAKPKNLNKISISPVNMRQTLNENIDAEIKNSKNGKFAAIWAKMNSLVDPEIIDKFYEASNAGVKIHLFVRGVCCLRPGVKDRSENIFVKSIIGRFLEHSRIYCFSNGTKKMPNRNAKVYISSADLMPRNLNRRVELLVPIENETVHEQILDQIMLANYLDTNQSWELEADGNYKKIKYSKSDSFSAHEYFMNNPSLSGRGKAKLRMQPKQLHLRLIKSGSN

SEQ ID NO: 130367 - protein, 706 aa, Unknown
  Bacterial polypetide isolated from the Sargasso Sea
MVFTELIHTVSDTNYFPRELSWLSFNGRVLQEAADERNPLIERLRFLGIYSNNMDEFFRVRVADVKRRILLKKYHANEQEDAEQLLHDIQHIVLKLGERFNKIYDDLQQELRKHNIELIDNFKLTDAQAQWVKRFYRTEVQRHLSPIILSAEEVKLAKHLQDNATYLMVEMTGSNKAEYAIVQVPTDAMSRFVELPLHLNKSKKRGRFRRQIILLDDIIVHCLKDLFDGFFEFCEIQAFSLKLTRDAEYNISDTLDQSLIDKMSKGIKQRLKSEPVRMVYDSHMPEHMLKMLKKLLGYSSYDSLIPGGKYRNFKDFIGFPNIGHPSLEFPVMPVLKSPEFERHTTSFEAIRTSDILLYYPYHSFGYFTEWVRQASFDPKVTAIKMTMYRVAKNSRVIHSLLDAVRNGKQVTVVVELKARFDEENNINWARRMTEAGIEVIFGLQTLKIHSKLCLITRLEKGKTVKFAHIGTGNFNEKTARVYTDMSLFTCHAEICHEVDQVFEFIQYSYKPFQFNHLVVSPTWSRPKLCALIERETNFAISGRKAEIILKINNLVDNQIVDLLYKASMAGVKVRIIVRGMCSLIPGVKGLSHNIHVVSVLDRFLEHARVYVFNNGGETDLYLSSADWMTRNLDQRVEVGVPIYDAAIKQQIMTTLDIQWHDNVKARIIDKDQSNHYVKRGNKRSIRSQQEIYDYFAQLQQSTQAGT

SEQ ID NO: 130368 - protein, 334 aa, Unknown
  Bacterial polypetide isolated from the Sargasso Sea
SNDRFINRELSWLEFNMRVLAEANNTANPLLERVRFLSISSTNLDEFFMVRAAGLMGQVAAGISERSQDGLTPNEQLNAIRGKVAELLQGQDECLERLLTECKMSDIEVVGGSEVGEQDKDWLASWFGKQVFPVLTPLAVDPAHPFPFIQNGSVVFALELRREADEREMKGLIIIPNQINRFVRLPGPRIRFIALEDVIDMNLGRLFPGFDVEGCGMFRIIRDSEVEIDEEAEDLVRTFESALKRRRRGHVIRLDFDASMPEEFRRFVMQEFDVAYTHVFLHRRMLGITDIAEIIVDERRDLQYGRMKVRFPERVREYGGDIFAAIRAKDLVVH

SEQ ID NO: 130369 - protein, 39 aa, Unknown
  Bacterial polypetide isolated from the Sargasso Sea
MVDIIAIDGPASSGKSTLAKKIAKYLNSPILHSGTLYRR

SEQ ID NO: 130370 - protein, 164 aa, Unknown
  Bacterial polypetide isolated from the Sargasso Sea
IFKSNTNSHQDVNINNYCVTEEIRSQKISSIVSKISSIKEVRKFLVKEQRKIGESGGLVAEGRDIGTTVFPHAELKIFLTASIDERAKRRKSDKNSKDSQEIDLHRLKELIKKRDFEDSNREISPLIKANDAIEIITDGYKINEVVDKIIDLYSDKIPKETEIK

SEQ ID NO: 130371 - protein, 162 aa, Unknown
  Bacterial polypetide isolated from the Sargasso Sea
MGIPVFFKTLVEDYHDLLLPMNHQRVNHNLFLDLNCLIHPCCNEVSKFDPKEDLMISNIIHKINELIQLVNPKKTIFIAIDGPAPKAKMVQQRTRRFKSSFEEKPWDTNAITPGTKFMNTLNSELKSYYEEDKRILLSDSTQAGEGEHKILQYMKKHSKKDN

SEQ ID NO: 130372 - protein, 113 aa, Unknown
  Bacterial polypetide isolated from the Sargasso Sea
LFKLQRDFYQDSGLVADGRDMGTVVFQDAKLKIFLTASPEVRAKRRYLELQNRKQEVNMPALIDDIKQRDLSDSTREISPLLPADDAHIIDSSDMSIKDVFSYAENLIRKEFI

SEQ ID NO: 130373 - protein, 81 aa, Unknown
  Bacterial polypetide isolated from the Sargasso Sea
ACRAERRYKQLISKGFSASIEDLRADLEARDARDSSRSVAPLKPAQDALVLDNSDLTIEQAVEQVLAWWQERQPFAASAQR

SEQ ID NO: 130374 - protein, 184 aa, Unknown
  Bacterial polypetide isolated from the Sargasso Sea
ENIDYKKEKKLLIIFKDISIVFKSNTNSHQDVYVNNYCVTEEIRSQKISSIVSKISSIKEVRKFLVEEQRKIGESGGLVAEGRDIGTTVFPHAELKIFLTASIDERAKRRKFDKNSKDLQEIDLNTLKELIKKRDFEDSNREISPLIKANDAIEIITDGYTINEVVDKIIDLYNAKIPKETEIK

SEQ ID NO: 130375 - protein, 200 aa, Unknown
  Bacterial polypetide isolated from the Sargasso Sea
SKKLANKYGYAYLDTGLLYRKVANELYIQKKNNSNDLETFSCKIAGDLDFLELEKEDLRSEKIANLASSIAIFPKLREILYLKQKEFVIFSKKNFSGCVLDGRDIGTKILPNANFKFFIDADVEIRAKRRLLEKNISFLHEKDEKCMLQSLIREMSSRDRLDANRSVSPLLPAVDAYIIDTSSINANQLFLKVMKIIEGR

SEQ ID NO: 130376 - protein, 77 aa, Unknown
  Bacterial polypetide isolated from the Sargasso Sea
MTLVIAIDGPAGSGKGTIAKKISSLYNFPHLDSGILYRSVAYLCETGGEKNLDENIVLKYAQNLNLDEIDTNNLRTK

SEQ ID NO: 130377 - protein, 226 aa, Unknown
  Bacterial polypetide isolated from the Sargasso Sea
LGMTQEFAHPLAGVLSAYGMGLADQTAMRERAVEAVLSDDSLPVLNAALDRLADEAAGALLEQGVPPERIATERRVHLRYQGTDSTLDVPAGSVEAMQQAFEAAYRQRYAFLMPGTPLVAELASVEAIGRSDAPVEIAPLAPRNEGDEAALRAHSAVRFYSGGRWHDAALYVRDTLLAGDAIDGPAIVAEQNGTTVVEPGWRAQMTARRRQGRTPAAAAPRPSLPP

SEQ ID NO: 130378 - protein, 196 aa, Unknown
  Bacterial polypetide isolated from the Sargasso Sea
AHRFGFDILDSGLLYRLYAFLSHLKIGIDHISEVITKDISFVVEDDSVHVIYEGNKITNQLRSEDIAKIASEHSAKKEVRELLFDIQRDFYNENGLVADGRDMGTVVFKDAKIKIFLTASPEIRAKRRYLELQNRGQEVNMPALIADIEKRDLKDSSRELSPLFPAEDAHIIDSSEMSLEEVFSFTENLISNEEFI

SEQ ID NO: 130379 - protein, 154 aa, Unknown
  Bacterial polypetide isolated from the Sargasso Sea
IKFTLRKTSSIFVNNHDVMSKLFLPKIDLSVSKFSSISSIRKFLVTKQRLLTKNKNIIMIGRDIGTVVVPNAKFKFYLNASSYVRAKRRYDQTKTKYKSIEEIKKSIDLRDKIDSTRKDSPLIPAKDAMIIDTDNLSLLEVVDKMYNVFIGENL

SEQ ID NO: 130380 - protein, 168 aa, Unknown
  Bacterial polypetide isolated from the Sargasso Sea
PKMLINSLSQIKIKFKHTKKGQLIFLNNKEVTDAIRQSEVTSHVSNVAKIPEVRSFLVAQQKKFGSEKGIVMDGRDIGSFVFPEAECKFFLIASSEIRAKRRHIEQLQNGINESYGKVLENIITRDKLDSSRETSPLKKASDAIEIDVSYLSIDDVFQRLWFHISKKL

SEQ ID NO: 130381 - protein, 187 aa, Unknown
  Bacterial polypetide isolated from the Sargasso Sea
MIIAIDGTAGSGKGTLSKRLSKKLNLPYLDTGILYRKVAFELFKKEKKTTFNFDKDTIKLMIEIIKSNNFVNIKKNDFLRDDKIGLLASEIGKVKTIRTHLNSMQIKFVNDSVVLKKGCILDGRDIGTIILPNADIKFFITASPEVRAKRKLKEKVNANLQPHEQKCMFNKYLFKINERDDNDFNRK

SEQ ID NO: 130382 - protein, 96 aa, Unknown
  Bacterial polypetide isolated from the Sargasso Sea
MVEIIAIDGPASVGKSTLAKKISNYYEAPLLNSGRLYRAVALKIINKKININNRYKILQCAKSLTGENIKSVNLFSSKIDKVASEISSKKYLRKQL

SEQ ID NO: 130383 - protein, 157 aa, Unknown
  Bacterial polypetide isolated from the Sargasso Sea
MNNLIISVDGPAGSGKEKIAKYISKKYNLFHLDSGILYRRVAKYLIEKKISYKNVKKIKIILKSIKKISHRRHIALRSENISNLTSLIAIYPFVRKFVNNQQKLAVSNILKKNKGCVIDGRDIGTKVFKNAKIKLFIDANREIRAKRRHKQLMNKAK

SEQ ID NO: 130384 - protein, 212 aa, Unknown
  Bacterial polypetide isolated from the Sargasso Sea
MKKIVITIDGPAGSGKGRIAKYIAKKYNFIHIDSGLLYRKTAKLLIENKINLNKLDQIKQTLIKNNNFSLRNNNNLRNEHIGKISSIIAKINFVRIHVNKQQIFHTKQKTKKKGFVIDGRDIGSVVFKNADLKLFIEVNPAVRAKRRHKQLIDLGEKSIYAEILKEIKLRDKQDIIRKNSPLVVPKGAHIIDNSNSFRKTLIKINQLIGQIK

SEQ ID NO: 130385 - protein, 72 aa, Unknown
  Bacterial polypetide isolated from the Sargasso Sea
MTIVIAIDGPAGSGKGTIAKKISSFYNFPHLDSGILYRSVAYLCHKSGEKIFDEKNVLRYAQNLNLDNIDID

SEQ ID NO: 130386 - protein, 215 aa, Unknown
  Bacterial polypetide isolated from the Sargasso Sea
MNKSAQLVVTLDGPAGSGKSTTAKEVARRLGFRHLDSGGLYRALTLALLEEGIPLTLWADLTDEDMNGLPVRVSSEDAEFLIEVAGRRVQAELRSPRVTAHVAFLASLPAARRRLLRLQHIAGEKGGLVADGRDMGSVVFPDADVKVYLVADLHERARRRLEESGISPSNVEVERESKVIAERDRQDSERELSPLREPSNAHLIDTTRLNFIEQV

SEQ ID NO: 130387 - protein, 113 aa, Unknown
  Bacterial polypetide isolated from the Sargasso Sea
MVEIIAIDGPASVGKSSLAKKISNYYDVPLLNSGRLYRAVALKIINKKINTNDKYKVLQCAKSLKDEDIKSENLFSSKIDKIASEISSKKYLRKQLMFYQKRFPRKYARGKKF

SEQ ID NO: 130388 - protein, 212 aa, Unknown
  Bacterial polypetide isolated from the Sargasso Sea
MIKKIITIDGPAGSGKGKIAKYVSKKWNLKHLDSGIFYRRIAYLIYKKKINPINKKHIENLINNIDQISSRINKMLRTEKISKIASKIAEYNSVRDFVNTQQKLSVKKTNNKKGFVIDGRDIGSVVFKNAYIKLYIEVDVNIRAKRRHKQLIDMGEKSIYPKILKDMKLRDKKDKTRKNSPLVIPAGAYIIDNSSNFNLTRNQIKKIIGKVY

SEQ ID NO: 130389 - protein, 213 aa, Unknown
  Bacterial polypetide isolated from the Sargasso Sea
MIIAIDGTAASGKGSLAKNLSKSLNLHHLDSGIFYRVLAYQAIKLKINNKIDLIELSNNLSINKIIEIKKLKNVNLRSTLISKKSSQIAPDKNIRKALVKLQREYVNQFLIFHDGVVIDGRDIGTIVFPNADFKFYLDADIKIRAERRTQELIHLNYEVIYQDVLNDLICRDKRDKNRIEGPLIIAKDAFYIDTGNKSEEFVLQKALKFIKSF

SEQ ID NO: 130390 - protein, 204 aa, Unknown
  Bacterial polypetide isolated from the Sargasso Sea
MIWSKIIQPRLISLGCTSKPIRKQRSKVVPQAEGRVLEIGFGSGHNLPFYNDKKITNLIGLEPSVSMQKLSKKRLNDSKVNFEFLTASAEEIPIKTNSIDTVVCTYTLCSIPNPDIALSEISRVLKKDGKFLFTEHSKSPDVKVSKFQKRLAPIWKILGDGCHLTRDIRGILSDSGFNIDSTEDMYIPGTPKFIGYHVWGLIRK

SEQ ID NO: 130391 - protein, 213 aa, Unknown
  Bacterial polypetide isolated from the Sargasso Sea
MIIAIDGTAASGKGSLAKNLSKSLNLHHLDSGIFYRVLAYQAIKLKINNKIDLIELSNNLSINKIIEIKKLKSENLRSTLISKKSSQIAPDKNIRKALVKLQREYVNQFLISHDGVVIDGRDIGTIVFPNADFKFYLDADIKIRAERRTQELIHLNYEVIYHDVLNDLICRDKRDKNRIEGPLIIAKDAFYIDTGNKSEEFVLQKALKFIKSF

SEQ ID NO: 130392 - protein, 100 aa, Unknown
  Bacterial polypetide isolated from the Sargasso Sea
MVEVPVISIDGPSGSGKGTIASRLARELGFNYLDSGAIYRTLGIALHKEDIGFENITKISEIYSKSVIVFDPDEPGKVILNGEDVSVSIRSELGSDSASK

SEQ ID NO: 130393 - protein, 219 aa, Unknown
  Bacterial polypetide isolated from the Sargasso Sea
MKKINVVAIDGPSASGKGALSRSIAHRFGFDILDSGLLYRLYAFLSHLKFDIDEINKKISKDISFISDEDSVHVIYEGKEITNHLRSENIAKIASEHSAKKEVRRSLFEIQRNFYNEKGLVADGRDMGTVVFKDAKIKIFLTASKEIRAKRRYLELQNRGQEVNMPALIADIEKRDLKDSSRELSPLLPAEDAHIIDSSEMSLEEVFSLTENLIKKEFI

SEQ ID NO: 130394 - protein, 175 aa, Unknown
  Bacterial polypetide isolated from the Sargasso Sea
TTINFDNETVERVIKVIRTINFTNIEDTNSLRDDKIGLLASEISKIKAIRNILNLKQTQFVEDSIKLKEGCILDGRDIGTIILPNADIKFFITASPEVRAKRKLKEEGRANLQPHEQNCMFNDYLLKINQRDENDFNRENSPLKKAIDAYEIDTSLLTPKEVEEIAINKIYKKKT

SEQ ID NO: 130395 - protein, 101 aa, Unknown
  Bacterial polypetide isolated from the Sargasso Sea
MNTTPPVIAIDGPVGSGKGTISRILARTLGWHLLDSGALYRLVALRMIQEKVSVDDSSAMVGIATIMDISFANTAKEQKIFLDSVDVTLDLRTEECGSVAS

SEQ ID NO: 130396 - protein, 212 aa, Unknown
  Bacterial polypetide isolated from the Sargasso Sea
MKHKIITIDGPAGSGKARIASYIAKKWKYYHLDSGILYRRLAYLILKNNIKLSDKKQIEKFLAKTNTISPRNSIKLRTEKISKAASKIAIYIKIRNYINMQQKNIIKKELKNRGCVIDGRDIGSVVFKKANIKIFVIVNAKIRAKRRYKQLIDIGEKSIYAKILEEIKLRDNKDKKRKNSPMRVPYQAHIIDNSESFSNTIIQINKIIQKNN

SEQ ID NO: 130397 - protein, 37 aa, Unknown
  Bacterial polypetide isolated from the Sargasso Sea
MTNVITIDGPSGVGKGTISEYLSDELKWNYLNSGAFI

SEQ ID NO: 130398 - protein, 88 aa, Unknown
  Bacterial polypetide isolated from the Sargasso Sea
MKKINVITIDGPSASGKGALARGIAHKFGFNILDSGVLYRLYAYLLDMSFSSNEIANQIERHVEFIKSKEKLLVIYKKNDVTSELKSE

SEQ ID NO: 130399 - protein, 121 aa, Unknown
  Bacterial polypetide isolated from the Sargasso Sea
MIIAVDGSAASGKGTLAKRLAAHYDLAHLDTGALYRCLALHLITEGRTATNVTESEAAGAVGSIDLLMAGSAAIRTDAVAGMASVVAAMPAVRQNFVSLQRQFATQTPNRRGAVLDGRDIG

SEQ ID NO: 130400 - protein, 209 aa, Unknown
  Bacterial polypetide isolated from the Sargasso Sea
MTFVIAVDGHAASGKGTISKGVAKHFDFSYLDTGLIYRAVARIALKRSKTFLSAKELVQIANKFKVEYLQLDGLRSQTVGVYASKIAALPEVRAALVNFQRSFVLNSEGAILDGRDIGSVIFPDAQLKIFVTARLNIRAERRFQELLTQNMDVTFDGVVRDLAGRDDLDSNRQHAPLKISSDAHLIDTSELSIEASIAKVINFVNILKD

SEQ ID NO: 130401 - protein, 94 aa, Unknown
  Bacterial polypetide isolated from the Sargasso Sea
MNAPVITVDGPSGSGKGTLCALLAKQLGWNLLDSGALYRLLAFAAGNHGIDLTNEESLKQLAAHLDVQFIDKRIILEGEEVTDAIRNEQIGAGA

SEQ ID NO: 130402 - protein, 227 aa, Unknown
  Bacterial polypetide isolated from the Sargasso Sea
MKKKVIVAIDGPSSSGKSTIAKLVAKHFNFTYIDSGSIYRAITYVAIKNNLIKTGNIDVVSLIDLLNNCSISFSFNSNNQNVIKIDDVSVENEIRTFEISNNVSLIAEKNEIRKYVLKIQKDISNNKSVVMDGRDIGSVVFPNADFKFFLDASIDVRALRRWNELKLTEKDLKFEEVKKDLLKRDKKDINRKFSPLIRPKYSILINSDRLDISEVVEHIIGIIKTEI

SEQ ID NO: 130403 - protein, 167 aa, Unknown
  Bacterial polypetide isolated from the Sargasso Sea
SNDLEYYIYDIAKNLNLLELKKEDLRSEDTAKLASAIATNSRLREILNFKQKEFVEINKKEFSGCILDGRDIGTKILPNADFKFFINASIEVRAKRRLLEKNISFLHENDEKCMLQSLIKQMNDRDSLDTNRSISPLVPAKDAYVIDSTLIDADELLLKVTKIIDGI

SEQ ID NO: 130404 - protein, 44 aa, Unknown
  Bacterial polypetide isolated from the Sargasso Sea
MSLKNNNIITIDGPSASGKGSLAMALAKELNFILLDSGLLYRAY

SEQ ID NO: 130405 - protein, 118 aa, Unknown
  Bacterial polypetide isolated from the Sargasso Sea
MKNKIITIDGPAASGKEKISKYISKKWKLRHLDSGILYRRLAYTFLKDKIDTNKITEIKKKIIQINSISYRKNKQIRTQEISILASKIAVYSFVRNYINKLQHNFVNKNKNKHGFVIR

SEQ ID NO: 130406 - protein, 71 aa, Unknown
  Bacterial polypetide isolated from the Sargasso Sea
MIVAIDGLAGSGKSTTARNVASKLDFLYLDTGAMYRAVTMAMLSDSIDLKDNKAIKSCVASIEIDFDRTGS

SEQ ID NO: 130407 - protein, 205 aa, Unknown
  Bacterial polypetide isolated from the Sargasso Sea
MSKTLITLDGPSGVGKTTIGKRLASELNLDFFSSGLLYRVIALHNEKTNTFNLHEFQIVSSDPVVCKIDANVYEEKNLYTPQINTKSSEIAQLSEIRMIVSNVLQSIYDNSNAGLVVEGRDMGSVVFKNAKLKIYLDASEVTRSERRIAQSGNKESVKDLRARDSRDINRKISPLIIPADAIVINNENKSIDEVINIIKENLKLQ

SEQ ID NO: 130408 - protein, 123 aa, Unknown
  Bacterial polypetide isolated from the Sargasso Sea
KKIKNHKLYSPEVSKLSSIIAKKPFVRKELKNFQKDFIKKSKLVVVEGRDIGTKIMVYADLKLFFKCSIKEKAKRRLKEFKKLNNRITLNEVKKALIQRDKEDTKRKISPLIMTKNSVLVDTT

SEQ ID NO: 130409 - protein, 224 aa, Unknown
  Bacterial polypetide isolated from the Sargasso Sea
MGIPLFFRYLVNNYDNIITNKKHYPQIDNLYLDLNCAIHYCCREILKDITFSKANQYRIEGKMINNVIKYIEILLDYSNPQKLLYIAIDGPAPKAKMIQQRQRRFKKYYEKNAIEKIKRENGVEIIKQEEWDTNAITPGTVFMQNLSIKLKTALKTNSKCKHLNIIISDSNVPGEGEHKLLHHLKENNSINNSNVNVIYGLDADLIMLCISSKLNNILLLRGSG

SEQ ID NO: 130410 - protein, 101 aa, Unknown
  Bacterial polypetide isolated from the Sargasso Sea
LIADGRDMGSVVFPNANLKFFLDASPEVRAKRRHLELQKRGQEVNMHDLINDIVERDKKDRTRDLSPLIKTEDSILLDSTNLDQESILTEALQHIKERNIL

SEQ ID NO: 130411 - protein, 222 aa, Unknown
  Bacterial polypetide isolated from the Sargasso Sea
MQTKNQITIDGPAASGKSVVGKLLSKKLDYLFLDTGLMYRAATKIITESNILFSDLKNIKQLIKKASFELNSISHEPRLFVNSKDLTDSLKTSQIDKDVSTVSKIPEVREILVNHQRKIAKHTNIVMVGRDIGSIVLPNATLKIYLDASVEVRTNRRLNDSQQNFSHNDFDIIKRDLIQRDNSDSNREHSPLIIPKGSVVIDTSDLKITEVIDSILKELENL

SEQ ID NO: 130412 - protein, 52 aa, Unknown
  Bacterial polypetide isolated from the Sargasso Sea
MKLDKKIITIDGPSASGKGVLSSSLANYLNYSLLDSGLLYRAYAYCYESSLD

SEQ ID NO: 130413 - protein, 209 aa, Unknown
  Bacterial polypetide isolated from the Sargasso Sea
VSIDGPSGSGKEKIARYISKKYDFFHLDSGILYRRITSIIIKKKIEIDNKKNLTNFLNSIKYLSSRKHKSLRKEDVSNQTSLVAKSAIIRNFINSQQKIIVKKMLKNHAGCVIDGRDIGSKVFKNAKIKLFIRVKPRIRAERRHKQLIEQGEKSIYSRIFKDINLRDKTDKNRRESPLIVPKKAYIIDNSKSFKNTTSQINLIFKKVVK

SEQ ID NO: 130414 - protein, 110 aa, Unknown
  Bacterial polypetide isolated from the Sargasso Sea
MKNKIITIDGPAASGKEKISKYISKKWKLKHLDSGILYRRLALILYNQKIDINSKSEIKKKIGLIKSLSYRKNKKIRTQNISRLASKIAVYNFVRLYINKLQHEFVKKNK

SEQ ID NO: 130415 - protein, 111 aa, Unknown
  Bacterial polypetide isolated from the Sargasso Sea
ESGGLVAEGRDIGTTVFPYAELKIFLTASIDERAKRRKSDKNCKDSQEIDLHTLKEMIKKRDFEDSNREISPLIKASDAIEIITDGYSINEVVDKIIDLYNDKIPKETEIK

SEQ ID NO: 130416 - protein, 161 aa, Unknown
  Bacterial polypetide isolated from the Sargasso Sea
INNDISFILKEDNFKILNQSDDITNYLRSEDIAKVASMLSSQKEVRESLFQIQRNFYDKNGLVADGRDMGTVVFKDAKLKIFLTASPEVRAKRRYLELQNRGQEVNMPALIADIKERDLKDSSRELSPLLPADEAHIIDSSDMSLEEVFSITKNLVKKEFI

SEQ ID NO: 130417 - protein, 129 aa, Unknown
  Bacterial polypetide isolated from the Sargasso Sea
MIIAIDGTAASGKGSLAKNLSRSLILQHLDSGIFYRVLAYQAVKLNINNKRDLIEFSKKLSINKIIKTKKLEGENLRSTLISEKSSQIAAEKNIRKSLIKLQREYVNQLLYSHKGVVIDGRDIGTIVFP

SEQ ID NO: 130418 - protein, 223 aa, Unknown
  Bacterial polypetide isolated from the Sargasso Sea
MTEVLTIDGPSGVGKWTISEYLSDELKWNYLNSGALYRSIAWVAKNDSIELNDITELENASKNILFSLQNKKLHVSYKDIEIGSLLYNEEVAKIASKISSEQKVRESILNIQRSFKKEPGLVAEGRDMGSVIFPEAQVKLFLTASIETRAQRRFKQLKDRKFNVSLPALIKDLDARDKRDKNRESSPLVIPEGAFVIETDDLTVIEVKNIAKDKVNKTYGTNI

SEQ ID NO: 130419 - protein, 221 aa, Unknown
  Bacterial polypetide isolated from the Sargasso Sea
MKQLNKKIVFKIAADGSSASGKTTGSKLIAKKFKMNFLSSGTLYRYCALKTLENKNICNPKFINKISKTITLKKLKNHKLYSPEVSKLSSIIAKKLFVRKALKNFQKDFIKKSRLVVVEGRDIGTKIMVYADLKLFFKCSIKEKAKRRLKEFKKLNNRITLKEVKKALIQRDKEDTKRKISPLIMAKNSVLVDTTKLTIKQMEAKLINLVQRSISKKYGDI

SEQ ID NO: 130420 - protein, 210 aa, Unknown
  Bacterial polypetide isolated from the Sargasso Sea
MKKIVTIDGPAASGKEKIAKFISRKWKLKHLDSGILYRRLAYILIKKNVKLDDKNEIQKKIKEITKISYRKSKQIRTQNISKLASKIAIYDFVRNYINKLQYDFVKNFKNTRGFVIDGRDIGSVVFKKADIKLYIEVNPEIRAKRRYKQLIDSGEKSIYPKILKDIKLRDKKDRFRKNSPLVIPKDAHIVNNDGNFRNTIKQLDNLLSKL

SEQ ID NO: 130421 - protein, 61 aa, Unknown
  Bacterial polypetide isolated from the Sargasso Sea
MSKLIITIDGPAASGKEKIAKYISKTRKLKHLDSGILYRRIALIFLVENIDIKNINMGKKK

SEQ ID NO: 130422 - protein, 54 aa, Unknown
  Bacterial polypetide isolated from the Sargasso Sea
NDILSNIQARDKRDMERAVAPLKPADDAYIIDSSNIGINEVFQLMVDYIDSRIQ

SEQ ID NO: 130423 - protein, 202 aa, Unknown
  Bacterial polypetide isolated from the Sargasso Sea
DTGAMYRSVTWLVRSHWVDPADGAAIEPLLDGLDLQLKSLPAGGQQVLVNGEDVSTVIRSPEVTASVSAVAAHRCVRQALTNQQQAMGAKGGLVAEGRDIGTAVFPDAELKVFLTATVAERARRRALDLEQRGFPVPERSELEGQIAERDRLDSTREEAPLIKAADAVELITDGMSIDAVIDELVGQFRSRVAEEVWPTPGN

SEQ ID NO: 130424 - protein, 105 aa, Unknown
  Bacterial polypetide isolated from the Sargasso Sea
YTEKGLVADGRDMGTVVFKDAKLKIFLTASPEVRAKRRYLELQNRGQEVNMPALIADIKQRDLKDTSRDLSPLLQAEDSYLIDSSEMSPEDVFSIAKNFIKKDYL

SEQ ID NO: 130425 - protein, 73 aa, Unknown
  Bacterial polypetide isolated from the Sargasso Sea
MKKIIITIDGPAASGKGRIAKYIAKKYNFLHIDSGLLYRKIAKLLIDNKIDTKSITQIKKFLVKNKRLSLRNN

SEQ ID NO: 130426 - protein, 150 aa, Unknown
  Bacterial polypetide isolated from the Sargasso Sea
MSKTLITLDGPSGVGKTTIGRRLASELNFEFFSSGLLYRVIALHNEKTNSFNLNEFEILSNNPVVCKVDGNVYKEENLYTPQINKKSSEIAQLSEIRMLVSNVLKFLFDNSNTGLVVEGRDMGSVVFKNANLKIYLDASETTRSERRIAQ

SEQ ID NO: 130427 - protein, 214 aa, Unknown
  Bacterial polypetide isolated from the Sargasso Sea
MIVTIDGPAGAGKSTVARRLAAQLGYVFLDTGAMYRAVTYAALQAKIVMEDAAARLALVRGTAIEPKGAAVNVNGEDVSEPIRTAEVTASIHHMADDPAVRELLVLRQREWAVGRNVVTEGRDQGTVVFPDAECKIFLTASAGERARRRQAEREIAGETVSIDEIRAAQDLRDERDRSRTVGPLQKAADAIEVVTDGMTIDDVIASLEALVQKK

SEQ ID NO: 130428 - protein, 68 aa, Unknown
  Bacterial polypetide isolated from the Sargasso Sea
MKKINVITIDGPSASGKGALARGIAHRFGLNILDSGVLYRLYAYLSNKTFSSDQIANKIEKHAEFKKT

SEQ ID NO: 130429 - protein, 123 aa, Unknown
  Bacterial polypetide isolated from the Sargasso Sea
MKRKIITIDGPAASGKGKIAKYISRKWKFKHLDSGILYRKIAYFLIENKINYKSHSKIKDSIKKINFISFRNDKKLRYRNVSKLASKIATFKFIRMHVNKFQRDFVRKDVKNDCFVIDGRDMA

SEQ ID NO: 130430 - protein, 223 aa, Unknown
  Bacterial polypetide isolated from the Sargasso Sea
MTKVVTIDGPSGVGKGTISEYLSDKLAWNYLNSGALYRAIAWVVKNDSIRLSDITTLENASKNIHFTIQENKLHIEYENKEISSLIYNEEVAKVASKVSSVPKVRESILSIQRSFKKEPGLIAEGRDMGSVIFPEAQVKIFLTASIETRAQRRFKQLKDRKFNVSLPALIKDLDARDKRDESRESSPLVIPEGAFVIETDDLNVIEVKNIVKDKVNKTYGTNI

SEQ ID NO: 130431 - protein, 160 aa, Unknown
  Bacterial polypetide isolated from the Sargasso Sea
MDRINVITVDGPSASGKGSLARKIAQIFDLAILDSGSLYRLYAFFLQEGINLTSIPKIIKTNIEFTITQDDLRITHLKDDITDKLRSEKIAVKASELSTSAEVRDALFGIQRAFYTHKGLVADGRDMGTVVFKDAKLKIYLTATVEVRARRRYLELQKRD

SEQ ID NO: 130432 - protein, 204 aa, Unknown
  Bacterial polypetide isolated from the Sargasso Sea
MEKFLLTIDGPSGVGKTSVGKSIATILNSCFFSSGSIYRSVAKFLLNNKNVQIEDLKIEIVSEQCNVNGVIFNEEDLYDNEVSVKSSEIAKKVGLRILVKDCLISYFENLDKPLVIEGRDMGSVVFPDAEHKVYLDADLETRGKRREGQSNMEETVSDVKRRDFEDKNRVFSPLTIPEGALVVDNSNLTIDETIKLIIENLKLQ

SEQ ID NO: 130433 - protein, 223 aa, Unknown
  Bacterial polypetide isolated from the Sargasso Sea
MTKILTIDGPSGVGKGTISEYLSNELKWNYLNSGALYRAIAWVAINDSIEINDIIELEKASKNILFSLQNKKLHISYKNIEIVSLIYNEEVAKIASKISSETKIRESIHSIQRSFKKEPGLVAEGRDMGSVIFPEAQVKFFLTASIETRAQRRFKQLKDRGFNVSLPALIKDLDARDKRDKSRESSPLVIPEGAFVIETDDLSVIKVKKIAKDKVNKTYGTNI

SEQ ID NO: 130434 - protein, 212 aa, Unknown
  Bacterial polypetide isolated from the Sargasso Sea
MTIVIAIDGPAGSGKGTIAKEISSFYNFPHLDSGVLYRSVAYLCHQGGEKVFDEKIVLKYAQNFNFETIDVDKLRTEEIDQISSKISSFSSVRETLKIFQLNFKKIHSDKRGIVVDGRDITTVIFPDAEIKFYITASLKDRANRRFEELVLNNPKIDKKLVIKELQKRDQRDMERSTAPLKIAKDAIIIDTSDLTIEEVNSIVRREIEKVIK

SEQ ID NO: 130435 - protein, 117 aa, Unknown
  Bacterial polypetide isolated from the Sargasso Sea
RIRNDMISFQRNFLKKPGLIADGRDMGTVVFSDSKIKIFLTADVDVRAKRRYKELKEKGINVSLAAVLSDMKIRDKQDKERKHGPLTMAHDSILVDSTNKSIDIVVSEILKYYENMY

SEQ ID NO: 130436 - protein, 204 aa, Unknown
  Bacterial polypetide isolated from the Sargasso Sea
MKKFVVTIDGPSGVGKTSVGKSIATILNSCFFSSGSIYRSVAKFLLNNKNVKIEDLKIEIVSEQCNVNGVIFDEEDLYDNEVSVKSSEIAKKVGLRILVKDCLISYYENLDKPLVIEGRDMGSVVFPDAEHKVYLDADLETRGKRREGQSNMEETISDVKKRDFEDKNRLFSPLTIPEGALVIDNSNLSIDETIDLIIKNLKLQ

SEQ ID NO: 130437 - protein, 212 aa, Unknown
  Bacterial polypetide isolated from the Sargasso Sea
MTLVIAIDGPAGSGKGTIAKKISLFYNFPHLDSGILYRSVAYLCEIGGEKNLDENIVLKYAQNLNLDEIDTNNLRTKEIDEISSKISSYSSVRESLKSFQINFKKIHSDKKGIVVDGRDITTVIFPNADLKFYITASLKDRANRRFKELMLINPKIDEKLVIKELQKRDQRDMERSTAPLKIADDAIIIDTSDLTIEEVMVKVHREIEEIIK

SEQ ID NO: 130438 - protein, 148 aa, Unknown
  Bacterial polypetide isolated from the Sargasso Sea
SVLFDNEDISRHLRTEETAIQASKISSVPSTRETLLPIQRSFSETSNLIADGRDMGSVVFPSANLKFFLDAAPEVRAKRRHLELQKRGQEVNMHDLINDIVERDKKDRTRDLSPLIKTDDSILLDSTNLDQESILNEALQHIKERNIL

SEQ ID NO: 130439 - protein, 86 aa, Unknown
  Bacterial polypetide isolated from the Sargasso Sea
RDSHSSIENKLFVINKRNTFFQYKDSFSETSNLIADGRDMGSVVFPNANLKFFLDAAPEVRAKRRHLELQKRGQEVNMHDLINDIG

SEQ ID NO: 130440 - protein, 657 aa, Unknown
  Bacterial polypetide isolated from the Sargasso Sea
HCRFSEIPYVYPVKIYGIQSRVENCLFTNMDWWANPYGGAANMGQICRYVTFENSKIGGVGGGSLMEYCRIEDFKDPCDCSGINRGAHGAPRSMTRYNWIINGPGANGIRIDGGQNGAGNRRGDIHNIITIGNNRGMRLKGDFHDVHHVTAYDNRMLDVDLFVGKYGEPDEFNQGFHLNYTPGNINTEISNSFIEASFTCPSPDCWTYPESETGINQPMDASHLLDLGIWFGRSLGHSAIHREMADPWYLNLYNDESSGEHPTDRSQDYDFRPRKGSSLIDAGKIIPGINDGQDLQFNWPPSFPGQNRRYVGDAPDIGAYEYGDSVYWIPGYRYPHPSFPIPRNNAVDVIPDYSVVWNYPYKKDYAGTTATVTINGPGVNRTELFHYPNNVCFQPFQPSGNYTWSVMVDGKSGGLWTFQVDDDIYPLNDRSIDTTMQDTILPTKQPFLDVKHNHVAFIKFEVPPSVQGDWDTNLNLFVNEVHQLDSGIVIYRYDHEGWGESKNEMNIGVVDHDLGTALDTIFPLDPSSSVLIDMNDVITGPGEYSFALGVIDSSDHVSFYSNEANNFSKFTPYPIYYPSLSFMPSIDLVDIVLTAPVNDTTIAMNSSSDDSIHFEWNFSHGVDVNIQEYHLVIGLPIFNRNGRDMGYILHRVIYPRQ

SEQ ID NO: 130441 - protein, 219 aa, Unknown
  Bacterial polypetide isolated from the Sargasso Sea
MNKINVLTIDGPSASGKGELARGIAKHFDFKLLDSGVLYRLFAYFNQLEFSNNEITAKIKNEISFKLMENKLNVLEGNQDITEHLRSEEIAKIASKLSSKKEVRVSLFDIQRNFYDKKGLVADGRDMGTVVFKDAKLKIFLTASPEIRAQRRYLELQKYGQEVNMPELIADIEKRDLKDSSRELSPLLPDEEAYVIDSSDMSLEEVFSFTENLVKKELI

SEQ ID NO: 130442 - protein, 166 aa, Unknown
  Bacterial polypetide isolated from the Sargasso Sea
MAKFDLVIAIDGTAASGKGTISKKIAQNYSVPHLDTGLLYRFVGYKVLKGFDPVSAADQLSMSEMEVLDLKTLKVSNAASEVAKNPLVRAKLLEFQRSFASQPGGAILDGRDIGTVICPNADIKFFISASAEIRARRRYEELLGLGHSISLDKVLKDIQERDERDS

SEQ ID NO: 130443 - protein, 196 aa, Unknown
  Bacterial polypetide isolated from the Sargasso Sea
MKKINVVTIDGPSASGKGALSRSIAHRFGFDILDSGLLYRLYAFLSHSKFDIDEINKRIIKDISFISGEDSVHVIYQGKEITNHLRSENIAKIASKHSAKKEVRRSLFDIQRNFYNEKGLVADGRDMGTVVFKDAKIKIFLTASKEIRAKRRYLELQNRGQEVNMPALIADIEKRDLKDSSRELSPLLPAEDAHII

SEQ ID NO: 130444 - protein, 112 aa, Unknown
  Bacterial polypetide isolated from the Sargasso Sea
RNLIKDTQRSFYDPNIGLIADGRDMGSVVFPEAGIKIYLDASIEERAKRRQIQLKEKGMEVNMRNLISSLEDRDFKDKNRDVSPLLIPRGAKVIDSTNLSIDEVVNKIMDLT

SEQ ID NO: 130445 - protein, 150 aa, Unknown
  Bacterial polypetide isolated from the Sargasso Sea
MKKINVITIDGPSASGKGALARGIANSMGFNILDSGVLYRLYAYLSNMNKSSDEIATQIQKHAVFKKSKEKLSVIYKNNDVSSELRSEIIAKSASDHSSKKEVRDALFNIQRSFYNGNGLVADGRDMGTVVFKDAKLKIFLTASPKERAK

SEQ ID NO: 130446 - protein, 152 aa, Unknown
  Bacterial polypetide isolated from the Sargasso Sea
PIAAAQSLERSDLDKYDLQKPEIAQAASEIASIPEVRAALLEFQRNFSQKLPGAVLDGRDIGTVVCPDARIKIFLTASLEARAKRRYLELYKHNKKISFDTILKQIKERDERDQTRTSSPMVAASDAKIFDTSELSINEVVDKVLGYIQTKI

SEQ ID NO: 130447 - protein, 167 aa, Unknown
  Bacterial polypetide isolated from the Sargasso Sea
MVCSVIAIDGPAGVGKTTIAKKLSKKMNAPVLFSGQLYRAVAYEMIKNKISISQENKIIQIAKKLDMSIYSEGALYTAKIDLISSKISSNKLLRKALINYQRSFPKIQKKRIKYVIIEGRDIGTVIFPRAKVKFFMWASSKIRAKRRYDQVKKTSKKAKLLSIHKEI

SEQ ID NO: 130448 - protein, 164 aa, Unknown
  Bacterial polypetide isolated from the Sargasso Sea
QKKINKEIKFVLKNMNIEVIYKKKDISNEIRSEDIAGLASQLSLKSIVRETLFNIQRNFYFKKVLVADGRDMGTVVFKDARLKLFLTASIEERAKRRYLELQNRGQEVNMLDLMTDIEKRDFKDTSRDLSPLFPADDAHIIDSSNMSAEEVFLYTKDIYEKEFF

SEQ ID NO: 130449 - protein, 227 aa, Unknown
  Bacterial polypetide isolated from the Sargasso Sea
MGFKIIAIDGPSGVGKSTIARKLAFELGCVYVDTGAMFRCLALNWGKQGCPESDLSLAKLGEQTRIYFEDDKTFCNEIDVTDEIRSEDISSLASRISLFPSIREVMKKTQRALVKIEREAGNFKGAVLEGRDIGTVVFPFADYKFYIDASPEIRAERRYLQLRSKHVDANFQEILSAIVERDYQDKNRSLAPLKAAEDAMIIDTGNMKIDEVMKHLLDNVDRTKIYA

SEQ ID NO: 130450 - protein, 85 aa, Unknown
  Bacterial polypetide isolated from the Sargasso Sea
MIPVITIDGPSGAGKGTIAQMLAIELNWNILDSGALYRTLAYFMKENSIGIENFEENQNMLKTRFKVSFDPGTPGEPVKVLFENQ

SEQ ID NO: 130451 - protein, 169 aa, Unknown
  Bacterial polypetide isolated from the Sargasso Sea
MTTEAKVIAIDGSSASGKGTLAKIIAEKLNWRILDSGSIYRVIGLVAKRYNLLEKEQLLIKKIGDIEIQFLKHGCFVDDEDVSEQIRTEEVGKLASTIAAYPNLRSEVLDLQRGFRKAPGLVADGRDMGTVVFPEAEVKFFLEASADTRAQRRYNELKNKGFDVTLPLL

SEQ ID NO: 130452 - protein, 154 aa, Unknown
  Bacterial polypetide isolated from the Sargasso Sea
MIIAIDGEASTGKSTQAKKIAKKLNINYRDSGAYYRAITLSLLRNQIKPKEKLGNDFFSKIDITQKFENDSFSIFLNGEDVTSEIRGYKVSVNVSEYAKKPEIRNFVYKLLRRSSESTSIVVDGRDIGTVVFPDADHKFFLYAIPEIRAQRRHK

SEQ ID NO: 130453 - protein, 212 aa, Unknown
  Bacterial polypetide isolated from the Sargasso Sea
MIYKSIAIDGPAASGKSAVGKLLADKLSYSFLDTGIMYRAVTYLVEEINMSPENASNYFKNKQISISLSKLRNQIFYKNSDITDKLFTDKIDSKVSDYSKIKLVRENLVLQQKKISEGTNIVMVGRDIGTKVLPNSDLKVYLDASLEIRAQRRVKDQDELTLEEVKKSLESRDVIDKNRDNSPLIIDKNAYVINTDKLDILEVVDQIITIYK

SEQ ID NO: 130454 - protein, 84 aa, Unknown
  Bacterial polypetide isolated from the Sargasso Sea
MIIAIDGPAASGKSTAAIGVAKCLGITYLDTGAMYRAVTFGLIDNNIDFRDSLNIEKFLEKIEIKFSESPYGLLLDLNGRDITK

SEQ ID NO: 130455 - protein, 203 aa, Unknown
  Bacterial polypetide isolated from the Sargasso Sea
MKKIITIDGPSGVGKTTIGQEIALNLNYSFFSSGKLYRYVSKYSYDEKTTNYDEFNLSIDISGKCLINNISYSDDELYNKNINKHSSENAKDPLVRELVKNTLLTFYNDIPSGLVIEGRDMGSVVFPNAEFKIYLDADENIRGKRREDQSGSQETIEEIKERDHKDMNREESPLVIPENAIIIDNTNKTKEETIEEIIEKLKL

SEQ ID NO: 130456 - protein, 207 aa, Unknown
  Bacterial polypetide isolated from the Sargasso Sea
MDSGALYRLVGVAAREAGFNLDGQLFDEMALSEFSRQLDVSFSLTGDLENPLVVRLSGEDVTRRVRSDKAAADASVVAAIQGVREGLMTLQKSFRREPGLVADGRDMGTAIFPDAIVKIYLTASAETRAERRYKQLKDKDIGVSLHDLFQSIRARDERDTNRSASPLKPADDAHVIDSTHMTIDEVLRVVESVVTKSLGCSSAPSSR

SEQ ID NO: 130457 - protein, 162 aa, Unknown
  Bacterial polypetide isolated from the Sargasso Sea
MRKNILITIDGPAASGKGEISSYISKKWKLKHLDSGILYRALAFRLLKNDINLESANDIKKSLRFINKISFRKYKQLRNENISKAASKIAIYQSVRNFINKIQQNYVKENIKSNGFVVDGRDIGSKVFKNADLKLYIEVNEENRAKRRYKQLIDTGEKSIYP

SEQ ID NO: 130458 - protein, 191 aa, Unknown
  Bacterial polypetide isolated from the Sargasso Sea
ALHLTLAYLDTGLIYRAVAKKVLIAGADPEDAVVAEAEARAMKPAALQLEGLRTDEVAQAASMVSAVPGVRAALLEFQRDFAISPPDGKAGAVLDGRDIGTVVCPWATLKLFVTASTEIRAKRRVKELQDRGLKAIYARVLEDMRERDARDSERAVSPLQPAEDARTLDTSDLDANQVFQAALNLIGSPNA

SEQ ID NO: 130459 - protein, 228 aa, Unknown
  Bacterial polypetide isolated from the Sargasso Sea
TNNQNTNNGKILTIAIDGPVASGKSTVGQLVAQKLNFQYLDTGIMYRAITWLAYFSKTNIENHDEIKNQIISNPIKILNKMGTQISLGGKILESELRNPLIDQLVSDVSKINIVRELLVEQQRSIAANSSGIVMVGRDIGTVVLKDAGLKIYLEASLQNRAQRRVVDRMKMGSPTTLPDMIEEIKKRDLIDSTRENSPLIAANDALIIDTDELDQNAVAELISNHAKK

SEQ ID NO: 130460 - protein, 146 aa, Unknown
  Bacterial polypetide isolated from the Sargasso Sea
MIPVITIDGPGGTGKGSLSLRLKRTLGWFMLDSGALYRALAFSVSERDVSSQDEKGLLEVARSINVEFLDDGLQSSVLLNGQDISNLIRTEDIGTLASKLAASASIRAVLLQKQRDFLKSPGLVADGRDMGTTVFPGCSSEDFPYR

SEQ ID NO: 130461 - protein, 128 aa, Unknown
  Bacterial polypetide isolated from the Sargasso Sea
SKAAALPAVRAALLDKQRQFAKQPPCGSGAILDGRDIGTVILPDADRKIFVDAAADIRAQRRFNELKAAGEKCDFADVLANIIKRDRRDKNRTIAPMTVAPDAFIIDSSDKNADEVFRIAMDYLKQRS

SEQ ID NO: 130462 - protein, 134 aa, Unknown
  Bacterial polypetide isolated from the Sargasso Sea
VEISSKVSMISAIPEIRRKMVDIQRSIAGKSDCVLEGRDIGTVVFPNADYKFFLIADIDIRAQRRLIELKQTNELITIEEIISSIKIRDELDSKRSHSPLKQALDAIEIDTSLLTINQQIEKIVEIVKQNKKET

SEQ ID NO: 130463 - protein, 68 aa, Unknown
  Bacterial polypetide isolated from the Sargasso Sea
MNKVITIDGPSASGKGTLAILLAERLNWKILDSGALYRAFAYFSISENDERLIEQDLRKISFNIVNNS

SEQ ID NO: 130464 - protein, 114 aa, Unknown
  Bacterial polypetide isolated from the Sargasso Sea
VRSRMVEIQRSIAKGKDCVLEGRDIGTVVFPNADFKFFLTADILVRAKRRLKDLEKIGEESTLNDLMSDIEKRDVSDSSRDVSPLVQARDAIAINTSNLTINEQVEKIVQIINN

SEQ ID NO: 130465 - protein, 165 aa, Unknown
  Bacterial polypetide isolated from the Sargasso Sea
EVVKSLDSIKLNIDFSSESEMQIFLDEDDISLKIRSQEVTSKVSAVSALKDVREMMVNIQRSFTANGNFVVEGRDIGTVVFPDAKYKFYLQADYDIRAERRLADFEKLNEAKNINEIKEDLEKRDKYDSSRKLSPLKKPDNAIIIDTTLCTFEEQVDKILKYIEK

SEQ ID NO: 130466 - protein, 170 aa, Unknown
  Bacterial polypetide isolated from the Sargasso Sea
DNNIYEKSIEEGINELKINFDSFSNALTLNKRDITNQIRSKLVSSHVSQIAKLPFVRYYLLKQQRQMGSIRGLVMDGRDIGTKVFPDADFKFFLTAKPEVRAQRRWEEMEANGYLLGYNEVLKNILDRDKIDTERKVSPLIKADDAIEIDSTYLSLQQVFEICIAKINGK

SEQ ID NO: 130467 - protein, 183 aa, Unknown
  Bacterial polypetide isolated from the Sargasso Sea
ILENNIDISNKDSLTKFLKNFEIDLKKTNNNLSFFVNGKNVTNKIRKSDVSQKVSEVSAIPIIREYMVRIQRSFTKNNSCVMEGRDIGTVVFPDAEFKFFFIASDEVRAKRRQLELESLGEKKSLVNLMYEIKKRDKFDSERGHSPLRKAFNAIEVDTTNMTIDEQVNFMLSKIKLKIGKNNK

SEQ ID NO: 130468 - protein, 219 aa, Unknown
  Bacterial polypetide isolated from the Sargasso Sea
MNKINVLTIDGPSASGKGELAKSIAHQFNFKLLDSGILYRLFAYFFNLKLSNEEIASKINNDISFELKEDNFKILNQSDDITNYLRSEDIAKVASMLSSQKEVRESLFQIQRNFYDKKGLVADGRDMGTVVFKDAKLKIFLTASPEVRAKRRYIELQNRGQEVNMPALIADIKERDLKDSSRELSPLLPADEAHIIDSSDMSLEEVFSITKNLVKKEII

SEQ ID NO: 130469 - protein, 141 aa, Unknown
  Bacterial polypetide isolated from the Sargasso Sea
RDITKEIRSKIVTDNVSEVSALKSVRKSMVLIQRKMGEADDCVLEGRDIGTVVFPNAEFKFFLIADEKARAERRLKDLKTIGEQSSIENVMKDLINRDHKDSTRMHSPLKKSDDAIIIDTSNLGINEVIDKIVNIVNYKGH

SEQ ID NO: 130470 - protein, 170 aa, Unknown
  Bacterial polypetide isolated from the Sargasso Sea
NHFHAAELFSNLNIKSIDHEMHVFENEKDITSILRREGVAKSASELSSLKETRENLINFQRDLASDRGLVADGRDMGTVVFPDAGTKIFLVADAEVRAERRFLELQNAGQEVNMRDLIDDIRLRDEADKAREISPLIPADDSIELNSSNLTLQEVLIIVLKIYKEKIKEV

SEQ ID NO: 130471 - protein, 168 aa, Unknown
  Bacterial polypetide isolated from the Sargasso Sea
MKKINVITIDGPSASGKGALARGIANSLGFNILDSGVLYRLYAYLSTMINSSDEIATQIQNHVRFKKSEEKLSVMYKNNDVTNELRSEIIAKSASEHSSKKEVRDALFNIQRNFYDGNGLVADGRDMGTVVFKDAKLKIFLTASPKERAKRRYIELQNLGQEVNMPAL

SEQ ID NO: 130472 - protein, 126 aa, Unknown
  Bacterial polypetide isolated from the Sargasso Sea
KSMMKINVITIDGPSASGKGALALRIANIFGFKILDSGALYRLYAYFFKMNFSPDEIISQINMNIIFNNHKNRLSIIYKEDDIASELRSESIAKLASELSSKKEVRDTLFNIQRNFYDGDILVADG

SEQ ID NO: 130473 - protein, 153 aa, Unknown
  Bacterial polypetide isolated from the Sargasso Sea
KVPNGVLLSLNVFDIPKEIRSAIVTTNVSEVSALKSVRKAMVSIQRKMAEIDDCILEGRDIGTVVFPNANYKFFLIANKKARAERRLEDLKAIGEQSSFEKVMKDLMNRDYKDSTREHSPLKKSDNAIIIDTSELGINEVIDKIVNTVNQKGH

SEQ ID NO: 130474 - protein, 118 aa, Unknown
  Bacterial polypetide isolated from the Sargasso Sea
MKKVITIDGPSASGKGTLAILLAERLNWKILDSGALYRAFAYFSISENDQRLIEQNLRKISFDINDSSIQVLFENEDISGHLRTEETAIQASKISSLPSTREILLPIQRFFSGTSNLI

SEQ ID NO: 130475 - protein, 162 aa, Unknown
  Bacterial polypetide isolated from the Sargasso Sea
EDPAVVVAAAQALSFSDLEQDGLRREEAGAAASKVAALPEVRAVLLAFQRNFAACPPNGKSGAVIDGRDIGTVVCPEAPFKLFLVASAHVRASRRHKELQARGAEAIYARILRDIKDRDTRDMSRSVAPLEPAKDAFVLDTSDLDADAVFAAALQYINSQNQ

SEQ ID NO: 130476 - protein, 170 aa, Unknown
  Bacterial polypetide isolated from the Sargasso Sea
NQINPKEIIGSDIFSKIDISQKFENNIFSIFLNGQDVTSKIRGHKVSLNVSEYAKKPEIRKFVYNLLRKSSESNSIIVDGRDIGTVVFPDADFKFFLFAIPEIRAQRRHKEINDESVKIESIEKEILIRDDIDSNRDIAPLKKATDAFGIDVSYLSIEEVFEKILQKIII

SEQ ID NO: 130477 - protein, 210 aa, Unknown
  Bacterial polypetide isolated from the Sargasso Sea
MVEIIAIDGPASVGKSTLAKKIAYNYESPILSSGRLYRAVAVEVINRKISPNDEKAIANCVKLIDQDKLKSKKLFSSEVDKISSIISANKFLRNRLKSYQRNFPKYNSKNNKYVVIEGRDIGTIIFPNAKYKIFMWADAKTRAKRRFAQILKNGKNPSLQRIYKEIVTRDMNDLTRSIAPLKPAVNSVLLDTTYLDIEQAFNIVRKLIKP

SEQ ID NO: 130478 - protein, 99 aa, Unknown
  Bacterial polypetide isolated from the Sargasso Sea
ADGRDMGTVVFPDADLKIYLDANIEIRAKRRQLELQKRGQEVNIHDLMTDILERDNKDMRRDISPLRKADDAFTIDSSNLSSEQVLNNAIDEIKKRGLI

SEQ ID NO: 130479 - protein, 191 aa, Unknown
  Bacterial polypetide isolated from the Sargasso Sea
MSFIIIAIDGPSGVGKSTIARKLAAKLSYLYVDTGAMFRCLALSWGKQGCPESDLSLHELGENTKIDFKDKNIFCDEIDVTDKIRSEKISSLASRISLFPSIREVMKKKQQAMVKEEREAGNYKGAILEGRDIGTVVFPSADYKYYLDASPEIRAERRYLQLHRQNVDLDFKKILSASRERDHQDKNRTLA

SEQ ID NO: 130480 - protein, 171 aa, Unknown
  Bacterial polypetide isolated from the Sargasso Sea
MKKTTIIAIDGPSSSGKSTIAKLIAQHFNYTYIDSGSIYRAITYIAVKNNLIDNLKVNTSAIIEILKKTSISFSFNSKDQNIISVDGVDLDNEIRTFKISSLVSLIAEKNEIRQYVVKIQKDISINKSIVMDGRDIGSVVFPSADVKFYLDASLEKRAERRWMELQKIRRS

SEQ ID NO: 130481 - protein, 182 aa, Unknown
  Bacterial polypetide isolated from the Sargasso Sea
MSFKIIAIDGPSGVGKSTIARKLADELGCVYVDTGAMFRCLALNWGKQGCPESDLSLEELGEQTRIYFEDDKTFCNEIDVTDEIRSENISSLASRISLFPSIREVMKKTQRALVKKEREAGNFKGAVLEGRDIGTVVFPFADYKFYIDASPEIRAERRYLQLRSKNVDADFQEILSAIVERD

SEQ ID NO: 130482 - protein, 91 aa, Unknown
  Bacterial polypetide isolated from the Sargasso Sea
MNGDHLHSPNSVRPAIAIDGPAASGKSSAGKMFASQLGYRFLDTGLMYRAATWDVMNNGIDINESEAVSRVVGKMEFSVIDGESGENLILV

SEQ ID NO: 130483 - protein, 100 aa, Unknown
  Bacterial polypetide isolated from the Sargasso Sea
RSIVIDGRDIGTVVFPDAEYKFFITASIESRAQRRFDELKDSDSSLTLEKIKEEIKNRDDYDSSRENSPLKKANDAIVIDTTHLNISGQVNEILEIINNN

SEQ ID NO: 130484 - protein, 216 aa, Unknown
  Bacterial polypetide isolated from the Sargasso Sea
SGVGKSTIARKIAAEFSYVYVDTGAMFRCLALSWGKQGCPENDLSLQELGEKTRINFKNEKIFCDEIDVTDEIRSEEISLLASKISLFPSIREVMKKKQRAMVKEVCEIGKHKGAVLEGRDIGTVVFPSADHKFYIDASPEIRADRRYMQLLKQDIDVDFQDILSAILERDNQDKNRILAPLKAAEDAIIIDTGNMRIDEVMEYLIKSLDRSKIYV

SEQ ID NO: 130485 - protein, 153 aa, Unknown
  Bacterial polypetide isolated from the Sargasso Sea
MKLDVAIKSIPTQRDFDGIPLSSRNVHLSKNERKLISFFSSELLEAKKKFQQDKKINLNQIIKKLSAKKISIEYLEHLHPHTLQKARLEDNISLLAGAIKCGETRLIDHVFLMKRRPIIAIDGPAGSGKSTVTKLIAKKLKLLYLDTGAMYRA

SEQ ID NO: 130486 - protein, 127 aa, Unknown
  Bacterial polypetide isolated from the Sargasso Sea
EEIAKKTSDLATEPSIRDFIKPCQRDFMQPPGLIADGRDMGTVIFKDARTKIFLTASLEERAKRRKVQLKRQGSEVNMRLLLQELEERDKKDIEREHSPLKPAADSVIIDTSNLEPDGVIEKIKKNL

SEQ ID NO: 130487 - protein, 119 aa, Unknown
  Bacterial polypetide isolated from the Sargasso Sea
MPSKVITIDGPSASGKGTLAKLLSKQINFDLLDSGALYRAFAFFTNQGLSHEVITKKLSSISFILKHAKVQIVSDNEDITNELRMERISILASELSSKSLTRKCCCRFKEVWSKFKFGC

SEQ ID NO: 130488 - protein, 189 aa, Unknown
  Bacterial polypetide isolated from the Sargasso Sea
KILDSGALYRAFAYFSISENDERLIEQNLRKISFNIVDNSIQVIFEDEDISRHLRTEETAIQASKISSLTSTREILLPIQRFFSETSNLIADGRDMGSVVFPNANLKFFLDAAPEVRAKRRHLELQKRGQEVNMHDLINDIVERDKKDRTRDLSPLIKTEDSILLDSTNLDQESILTEALQHIKERNIL

SEQ ID NO: 130489 - protein, 217 aa, Unknown
  Bacterial polypetide isolated from the Sargasso Sea
MSYNIKIAIDGTAASGKGTLAKRLCEEFKFAYLDTGKLYRLVAYITITENIDYTNSELVAEQFLNYDLNRISSLGTELKGDEIGKIASVVASYQSLRKILLKYQQDFANKKHHNKKGVILDGRDIGTVVLPNAHIKFYVDASIEIRAERRWKELISLGQSTIKRNVLEDLRSRDKRDSQRKISPLLPASDAILLDTTNLDADEVFDLARKYIVNYLN

SEQ ID NO: 130490 - protein, 135 aa, Unknown
  Bacterial polypetide isolated from the Sargasso Sea
MKKILITIDGPAASGKGRIAKYIAKNYNFIHIDSGLLYRKVAKLIIDNKIDLKKIKEIKEILIKHKNLSLRNSNQLRNEHIGKVTSIVAKMNFVRNHVNKQQILHSKQKTIKKGFVIDGRDIGSVFSKMQISSYI

SEQ ID NO: 130491 - protein, 105 aa, Unknown
  Bacterial polypetide isolated from the Sargasso Sea
RRPGGTVLDGRDTGTVICPEADVKLFVTASVEERARRRHAELVERGEAISLEEVTADVQRRDYRDRNRSASPLQRAPGAYLLDTSNLSIDSAFAKAKAFISKHLG

SEQ ID NO: 130492 - protein, 220 aa, Unknown
  Bacterial polypetide isolated from the Sargasso Sea
MKKIIITIDGPAASGKGRIAKYISKKYNFIHIDSGLLYRKIAKLLIDNKINVKNINQIKKILMRNNNFSLRNNNNLRNEHIGKVSSIIAKMNFVRNHVNKQQILHTKQKNKKRGFVIDGRDIGSVVFKNADLKLFIEVNPVVRAKRRHKQLIDLGEKSIYAEILKEIKLRDRQDIIRSNSPLVVPKGAHVIDNSGLFKQTLNKINHLIGQLNNGKNCTKK

SEQ ID NO: 130493 - protein, 128 aa, Unknown
  Bacterial polypetide isolated from the Sargasso Sea
MRKIIITIDGPAASGKGRIAKYIAKKYNFFHIDSGLLYRKIAKLLFDNKIDIKSIKQIKQFLAKNKKLSLRNNKNLRNEQIGKASSIIAKMNLVRDYVNKQQILYTTQKTSKKGFVIDGRDIGSVVFK

SEQ ID NO: 130494 - protein, 247 aa, Unknown
  Bacterial polypetide isolated from the Sargasso Sea
LSAAGLEVEYVERVDPITLQPCGSETAISLLAAAVRCGTTRLIDHVFLMTRQPLVAIDGPAGAGKSTVTRAFAERMGLIYLDTGAMYRSVTWLVQKSGVDPTDAAAITPLLQSLDLQLRSLPGSGQQVLVNGEDVSEAIRSPEVTGLVSVVAAHRCVRQALTAQQKAMGAKGGLVAEGRDIGTAVFPDADLKVFLTATVGERARRRALDLEQRGFPVPERSELEAQIAERDRLDSTREEAPLVKAAD

SEQ ID NO: 130495 - protein, 177 aa, Unknown
  Bacterial polypetide isolated from the Sargasso Sea
YFIKNNLNINEIDIASVMNSIKLEVLISNGEQSVLLNGDDVTSMLRSNEVSKLVSRVSSIREVRQKMVNIQREISQDRSIVIDGRDIGTVVFPDAEYKFFITASIESRAQRRFDELKDSDSNLTLEKIKEEIKNRDHYDSTRENSPLKKANDAIVIDTTHLNISGQVNEILEIINNN

SEQ ID NO: 130496 - protein, 200 aa, Unknown
  Bacterial polypetide isolated from the Sargasso Sea
YVDTGAMYRAITYYYLSNGLLQNNLFIEGWESHLDSIVLSFEKHKNYNTNVIFLNGECVEHKIRTMQVSSLVSYVSKQAIIREKLVDFQQSIGKNSGVVMDGRDIGSVVFPNAEIKFWVTASARVRAQRRYEEIINSGLSVDFEDVLQNLKDRDFEDSNRKISPLKRPEDSFLVDSSNLTIQQTLNYSMDFITSYFENKN

SEQ ID NO: 130497 - protein, 113 aa, Unknown
  Bacterial polypetide isolated from the Sargasso Sea
MSNSTNEKIIAIDGPAGSGKSTIAKALAKKLNLDYLDTGAMYRAVSFISIQQNIDVLDEKKVLAIAKEMDFNFEDGICVVNGFDATRDIRGSEVTRVVSVVAAMPTVRQEMVD

SEQ ID NO: 130498 - protein, 182 aa, Unknown
  Bacterial polypetide isolated from the Sargasso Sea
MINNLKSIAIDGPAASGKSAVGKKLSELLNYDFLDTGIMYRAVTYISISELLDPVLVSAYFAKSLLKVKLKGEKNKIYYKNKDITSFLFSDSVDKNVSDISKITRVRKNLVKEQINISKINNIVMVGRDIGTIVLPNSNLKIYLDASIDIRAKRRSKELGLNSFDVEKKIKLRDVVDSNRKN

SEQ ID NO: 130499 - protein, 115 aa, Unknown
  Bacterial polypetide isolated from the Sargasso Sea
MTNNFRSIAIDGPAASGKSVVGKKLSELINYEFLDTGIMYRAVTYVSKTESIDPILVSNYFKEKIIEVIFDDKNNKIYYKKNEITNSLFSDLVDTNVSEISKIIEVRKNLVIEQR

SEQ ID NO: 130500 - protein, 149 aa, Unknown
  Bacterial polypetide isolated from the Sargasso Sea
MGFIIIAIDGPSGVGKSTIARKLAIELSCVYVDTGAMFRSLALSWGRQGCPESDLFLQELGEQTRIYFEDEKTFCNEIDVTDEIRSEDISSLASRISLFPSIREVMKKKQRALVKEECESGNYKGAVLEGRDIGTVVFPYADHKFFIDA

SEQ ID NO: 130501 - protein, 214 aa, Unknown
  Bacterial polypetide isolated from the Sargasso Sea
MIIAIDGEASTGKSTQAKKIAKKLNINYRDSGAYYRAITLYLIRNHINPKEILGEDIFSTIDISQKFENDSFSIFLNGEDVTSKIRARKVSLNVSAYAKKSEIRNFVYNLLRKSSKSNSIVIDGRDIGTVVFPDADFKFFLYAIPEIRAQRRHKEINDETVKIESIEREIKERDDIDSTRDIAPLIKAEDAYGIDVSYLAIDEVFEEILEKITT

SEQ ID NO: 130502 - protein, 220 aa, Unknown
  Bacterial polypetide isolated from the Sargasso Sea
MKNNNIITVDGPSASGKGSLAKALAKELDFILLDSGLLYRAYSYCYYQSKNHSAAKGLFSNLRIESVDHEMHVLENNKDITSVLRHENIAKSASQLSSLKETRDNLISFQRDLASDNGLVADGRDMGTVVFPDAGTKIFLVADAEVRAKRRFLELQNAGQDVNMRDLIEDIRLRDEADKVREISPLMPADDSIEVNSSNLTPQEVLKIVLKIYKEHTKEV

SEQ ID NO: 130503 - protein, 179 aa, Unknown
  Bacterial polypetide isolated from the Sargasso Sea
EHDVSPDDITGLERLIRTVDIGFSRTVAGLNIVADGRDITDHVRSERGGKRASIYAKIPSVRQGLLARQRQMRAAPGLVADGRDMGTVVFPDAFLKIFLDASASIRAQRRYNQLKEKGFSVTLRRLEKEIADRDAQDRNRSVSPLIPAVDAVVLDTSEKGIVEVFSEVVTLMEDRLPTC

SEQ ID NO: 130504 - protein, 180 aa, Unknown
  Bacterial polypetide isolated from the Sargasso Sea
YRAIPYFFKKKGITTANRIDKNDLNRISLNSKYDDGKNSIYLNDEDVSNDIRSTDISEIVSDFAKEKTVREHVYKHLREFSENRSTVIDGRDIGTVVFPNADFKFFLYAKPEIRAKRRFSEINKDDINYDSVLDNLNYRDITDSTRKIAPLKKAYDAHSIDVSDLSIDQVFEKLLSIIEK

SEQ ID NO: 130505 - protein, 76 aa, Unknown
  Bacterial polypetide isolated from the Sargasso Sea
IFLTASAEERAKRRQTQLKRQGLEVNMPTLLRELEERDRKDTEREHSPLIPAEDSVLIDTSNLNPEGVVKEIKTYL

SEQ ID NO: 130506 - protein, 215 aa, Unknown
  Bacterial polypetide isolated from the Sargasso Sea
MTNNFRSIAIDGPAASGKSVVGKKLSELINYEFLDTGIMYRAVTYVSKTESIDPILVSNYFKEKIIEVIFDDKNNKIYYKKNEITNSLFSDLVDTNVSEISKIIEVRKNLVIEQRKISESNSIVMVGRDIGTIVLPKSELKVYLDASIAVRAKRRSEELGLDSSDIEKKLKSRDITDSSRKNSPLRIDEDAHLINTDNLNIGQVVMMIKDLIPND

SEQ ID NO: 130507 - protein, 218 aa, Unknown
  Bacterial polypetide isolated from the Sargasso Sea
MDTVIIAIDGQASTGKSTQAKKLAENLKYDYRDSGAYYRAITLYLLDNDIKFDLNISDKILDKINIKQTYQEGQFSIYLNDDDVTDKIRGHKVSINVSNYAKKPEIRKFVFNQLRKSSESNSLVVDGRDIGTVVFPYADFKFFLVAEPKIRAERRHKQINDDSVKVDIIEEEIKQRDKTDSTREIAPLKKAVDAFKIDVSTLTINQVFNKILQKIKSD

SEQ ID NO: 130508 - protein, 1214 aa, Unknown
  Bacterial polypetide isolated from the Sargasso Sea
MTDRHLSPVPSDAARWQFWIDRGGTFTDIVARRPDGTLVTHKLLSENPEQYRDAAVAGIRHLLGLAAGEPITPERVDMVKMGTTVATNALLERKGERTALATTRGFRDVLRIAYQNRPRLFDLDIVLPDALYETVVEIDERVGAHGEVVVPLDVQGAEASLRRVFDSGVRALAIVLIHGYRYTAHERMLAELARRIGFTQVSVSHEVSPLMKMVSRGDTTVVDAYLSPILRRYVEQVAHEMPGVNLQFMQSSGGLTRADAFQGKDAILSGPAGGIVGMVRAAQAAGFERVIGFDMGGTSTDVSHYHGEFERVFETQVAGVRMRAPMMSIHTVAAGGGSVLGFDGARLRVGPESAGANPGPAAYRRGGPLTVTDCNVMLGKIQPDHFPRVFGPHADEPLDRDGVVAKFAALADEIHAATGRRETPEALAEGFLEIAIGSMANAIKKISVQRGHDVSRYVLTTFGGAGGQHACGVADALGMTQVFAHPLAGVLSAYGMGLADQTAMRERAVEAVLSDDSLPVLNAALDRLADEAAGALLEQGVPPERIATERRVHLRYQGTDSTLDVPAGSVEAMQQAFEAAYRQRYAFLMPGTPLVAELASVEAIGRSDAPVEIAPLAPRNEGDEAALRAHSAVRFYSGGRWHDAALYVRDTLLAGDAIDGPAIVAEQNGTTVVEPGWRAQMTAQGNLVLTRTTPLPTRRSLGTDADPVRLEIFNNLFMSIAEQMGLRLQNTAYSVNIKERLDFSCAIFDGDGNLIANAPHMPVHLGSMGESIRTVIERNRGRMRDGDVFMLNDPYHGGTHLPDVTVITPVFADGSDAPLFYVGSRGHHADIGGTTPGSMPPDSTHIDEEGVLIDNWQLVSAGTLRDAQTRALLASGRYPARNVEQNMADLRAQVAANQKGVDELRRMVAQFGRDVVLAFMGHVQDNAEEAVRRVIGALQDGAYRYPLDNGAEIRVAIRVDRAARRAEIDFTGTSAQLDNNFNAPKAVCMAAVLYVFRTLVGDDIPLNAGCLKPLTVIVPARSMLNPEYPAAVVSGNVETSSAITNALYGALGCVASSQGTMNNFTFGNDQYQYYETIAGGSGAGDGFAGVGAVQTHMTNSRLTDPEVLEWRYPVRLDSHRIRAGSGGGGRWRGGDGAVRRIRFLAPMTASILSNNRIHAPFGAAGGEAGALGRNTIERADGTVEALDHIGRAQMAPGDVFVVETPGGGGYGAAG

SEQ ID NO: 130509 - protein, 204 aa, Unknown
  Bacterial polypetide isolated from the Sargasso Sea
MEKFILTIDGPSGVGKTSIGKHLADILKCNFFSSGNVYRSLAMFINKNIDEDYGKYDIEILDGICYVNRETYSSEDLYSNEITIISSKIAKEEKIRNYVKESLLKYYQTLDKSLVIEGRDMGSVVFQNAKYKIYLDADLITRGKRREDQSKMNETVFDLKKRDLEDSNRLISPLKVPDGALVINNTDLTLQETIDLIIKKLRLQ

SEQ ID NO: 130510 - protein, 181 aa, Unknown
  Bacterial polypetide isolated from the Sargasso Sea
FYRAITLFFKKKGITTANRIDKNDLNKISLNSKYNDGKNLIYLNDEDVSNDIRSIDISEIVSDFAKEKTVREHVYKHLREFSKNHSTVIDGRDIGTVVFPNADFKFFLYAKPEIRAKRRFSEINKDDINYDSVLDNLNYRDITDSTRKIAPLKKAYDAHSIDVSDLSIDQVFEKLLIIIEK

SEQ ID NO: 130511 - protein, 93 aa, Unknown
  Bacterial polypetide isolated from the Sargasso Sea
ADGRDMGTVIFKDARTKIFLTASLEERAKRRKVQLKRQGSEVNMRLLLQELEERDKKDIEREHSPLKPATDSVIIDTSNLEPDGVIEKIKKNL

SEQ ID NO: 130512 - protein, 211 aa, Unknown
  Bacterial polypetide isolated from the Sargasso Sea
MIFVVAIDGTAASGKGTLGKKIAEHFDFHYLDTGILYRVVAYNLKYNSDFSKISKQKVQNSLKLLNNKNFNITNLRNEQITLRASEISKNKIVRDNLLLHQRRFALQNGGAVLDGRDIGTVVCPDADVKIFIDADVKIRAKRRYDQLVKNNKDLNLKNIINDLSKRDNLDKNREFSPMVPAKDAFLLDTSNLTVEEALKKLIVIISKKFKK

SEQ ID NO: 130513 - protein, 212 aa, Unknown
  Bacterial polypetide isolated from the Sargasso Sea
MKKIIITIDGPAASGKEKIAKYISKKWNLYHLDTGTLYRQVAFNFLEKKVNIKSIKDIKKYLINQNFLTFRQNKKLRTEKISKLASKIAVFKYIRKYVNNFQIEFVQKHIKYKGFVIDGRDIGSVVFKNAELKLYIDVNEENRAKRRYKQLIDSGEKSIYPQILKEIKLRDKKDKSRKNSPLVVPKGSFVINNNGSFKETKKQIDFLISKIS

SEQ ID NO: 130514 - protein, 219 aa, Unknown
  Bacterial polypetide isolated from the Sargasso Sea
MKKINVVTIDGPSASGKGELAKGIANHFNFKLLDSGILYRLFAYFFNLNLSNEEIAAKINNEISFKLEEESFKIFNQSDDITTYLRSEDIAKVASKLSSQKEVRKSLFQIQRDFYDKRGLVADGRDMGTVVFKDAKLKIFLTASPEVRAKRRYLELQNRGQEVNMPALMADIEKRDLKDSSRELSPLLPADEAHIIDSSEMSLEEVFSITKNLIKKELI

SEQ ID NO: 130515 - protein, 119 aa, Unknown
  Bacterial polypetide isolated from the Sargasso Sea
MNTKPVSVITIDGPSGAGKGTIAQMLALELKWNILDSGALYRTLAYFMMEQNISLDNFEQKKSFVKENFIVNFDPGVVGEPVKVIFKDEDITNKVRTEEIAKKTSDLATEPLIRDFIKP

SEQ ID NO: 130516 - protein, 113 aa, Unknown
  Bacterial polypetide isolated from the Sargasso Sea
MIIAIDGPAASGKSTTAKLVAKKLKVTYLDTGAMYRAVTLQLLRSKIDFVDIDKVSAILDDLIIDMFDHKGVNIVKINDEDVTGEIRSSNVTKYVSEVSALLSVRESMVVMQT

SEQ ID NO: 130517 - protein, 214 aa, Unknown
  Bacterial polypetide isolated from the Sargasso Sea
MIIAIDGEASTGKSTQAKKIAKKLNINYRDSGAYYRAITLFLMKNQINSKETIGNDLFSKIDISQKFENESLFIFLNGENVTSKIRGHKVSVNVSEYAKKPEIRNFVYKLLRKSSELTSIVVDGRDIGTVVFPDADYKFFLYAIPEIRAKRRHKEINDESVKIESIAREIKERDDTDSNRDIAPLKKAEDAHGIDVSYLTIDQVFEEILQKIII

SEQ ID NO: 130518 - protein, 203 aa, Unknown
  Bacterial polypetide isolated from the Sargasso Sea
MKKVITIDGPSGVGKTTIGQEIALNLNYSFFSSGKLYRYISKYSYDVKTSNYDEINLVIDISGNCLINNISYSDDELYNKNINNHSSEIARDPLVRELVKNTLLTFYNDIPGGLVIEGRDMGSVVFPNAEFKIYLDADENIRGERREHQSGSQETIEEIKQRDHKDMHREESPLVIPENAVVIDNTNKTKEETIKEIIEKLKL

SEQ ID NO: 130519 - protein, 162 aa, Unknown
  Bacterial polypetide isolated from the Sargasso Sea
MNKINVVTIDGPSASGKGELAKSIAHQFNFKILDSGILYRLFAYFFNLKLSNEEIASKINNDISFELKEDNFKILNQSDDITNYLRSEDIAKVASMLSSQKEVRESLFQIQRNFYDKKGLVADGRDMGTVVFKDAKLKIFLTASPEVRAKRRYLELQNRGQE

SEQ ID NO: 130520 - protein, 223 aa, Unknown
  Bacterial polypetide isolated from the Sargasso Sea
MTNVITIDGPSGVGKGTISEHLSDQLKWNYLNSGALYRAIAWVARNDLINLNDAKGLEKASKNIIFSLENKKLKIQYKNKDIGSLIYDEEVAKIASKVSSKPKVRESIIAIQRSFKKAPGLVAEGRDMGSVIFPESQLKIFLTASIETRAQRRFKQLKDREFNVSLPALIKDLDARDRRDKERVNSPLVIPKGAFVIETDNLTVIEVKNTVNEKVNKTYGTNI

SEQ ID NO: 130521 - protein, 186 aa, Unknown
  Bacterial polypetide isolated from the Sargasso Sea
ALYRLVGLVSQRMDSKDSEIIEKEIGSKKIAMNLNPKLMETEIFFGTENVTKLLKSDEIANEASNFAADKKIREILKNYQKKFYDPELGLVADGRDMGTVIFPEAKWKFFLIASIEERAKRREEQLKDIGLEVNIANLIDSIMARDSRDTNRDVSPAIPAEDAITIDSSNLSIEELKKKILGIVKT

SEQ ID NO: 130522 - protein, 227 aa, Unknown
  Bacterial polypetide isolated from the Sargasso Sea
MRFIIIAIDGPSGVGKSTIARKLATELSCLYVDTGAMFRCLALSWGKQGCPESDLSLQELGENTKIDFKNENIFCDEIDVTDEIRSEEISLLASRISLFPSIREVMKKKQQAMVKEECEAGNYKGAVLEGRDIGTVVFPSADYKYYLDASPEIRAERRYLQLQVQNIDLDFKKILSAIRERDHQDKNRILAPLKAAEDAITIDTGNMNIDEVMKHLLKDIDRKKIYT

SEQ ID NO: 130523 - protein, 220 aa, Unknown
  Bacterial polypetide isolated from the Sargasso Sea
MKRIKVITIDGPAASGKGSLAISIANKFSFKLLDSGSLYRLFALFERRNIDHIEIVETIKNRVEFELTKDSQNIILDKNVDITNELKSEEVAKSASILSSQKEVRNHLFKLQRDFYQGSGLVADGRDMGTVVFKDAKLKIFLTASPEVRAKRRYLELQNRKQEVNMPALIDDIKQRDLSDSTREISPLLPADDAQIIDSSDMSLEDVFSYAENLIRKEFI

SEQ ID NO: 130524 - protein, 212 aa, Unknown
  Bacterial polypetide isolated from the Sargasso Sea
MIYKSIAIDGPAASGKSAVGKLLADKLSYSFLDTGIMYRAVTYLVEEINMSPENASTYFKNKQISISLSNLRNQIFYKNTDITDKLFTDKIDSKVSDYSKIKLVRENLVLQQKKISEGTNIVMVGRDIGTKVLPSSDLKIYLDASLEIRAQRRVKDQDELTLEEVKKSLESRDVIDKNRDNSPLIIDKNAYVINTDKLDILEVVDQIITIYK

SEQ ID NO: 130525 - protein, 105 aa, Unknown
  Bacterial polypetide isolated from the Sargasso Sea
MNKIITIDGPSASGKGTLAILLANRLDWKILDSGALYRAFAYFSICENDHKLIEENLRKISFNIVDNSIQVLFENEDISRHLRTEETAIQASKISSLLSTREILS

SEQ ID NO: 130526 - protein, 154 aa, Unknown
  Bacterial polypetide isolated from the Sargasso Sea
MTDVITIDGPSGVGKGTISEYLSDDLKWNYLNSGALYRSIAWVAINDSINLSDIIGLEEASKNIQFSLRNKKLKIEYKNLEINSLIYNEEVAKIASKVSSKSEVRQSIITIQRAFKKEPGLVAEGRDMGSVIFPEAKLKIFLTASIETRAQRRF

SEQ ID NO: 130527 - protein, 219 aa, Unknown
  Bacterial polypetide isolated from the Sargasso Sea
MKKINVVAIDGPSASGKGTLSRSIAHRFGLDILDSGLLYRLYAFLSHSKFDTDEISEKISKDISFIPEEDSLHVIYEGNEITNHLRSEDIAKIASEYSTKKEVRKSLFDIQRNFYNEKGLVADGRDMGTVVFKDAKIKIFLTASTEIRAKRRYLELQNRGQEVNMPALIDDIEKRDLKDSSRELSPLLPAEDAHIIDSSEMSLEEVFSFTENLIKKEFI

SEQ ID NO: 130528 - protein, 100 aa, Unknown
  Bacterial polypetide isolated from the Sargasso Sea
MSQTVIAIDGPAASGKGTISKAISEKLGFNYLDTGKLYRAIGAKYLDGYQPIAAAQSLESNDLEKYDLEKPEIAQAASEIASIPEVRAALLEFQQKFSQK

SEQ ID NO: 130529 - protein, 103 aa, Unknown
  Bacterial polypetide isolated from the Sargasso Sea
REFSKNQSTVIDGRDIGTVVFPNADFKFFLYAKPEIRAKRRFSEINKDDINYDSVLDNLNYRDTTDSTRKIAPLKKAYDAHSIDVSDLSIDQVFEKVLSIIEK

SEQ ID NO: 130530 - protein, 215 aa, Unknown
  Bacterial polypetide isolated from the Sargasso Sea
NVVTIDGPSASGKGELAKSIAHHFDFKLLDSGILYRLFAYFFNLKFSNKEIVEKINNEVSFKLDRDSFKVFIQKKDITIHLRSEDIAKVASKLSSKKEVRESLFQLQRSFYDERGLVADGRDMGTVVFKDAKLKIYLTASPEVRAKRRYLELQNRGQEVNMPALIADIEKRDLKDSSRELSPLLPADEAHIIDSSDMSLEEVFSLTENLVKKEFI

SEQ ID NO: 130531 - protein, 131 aa, Unknown
  Bacterial polypetide isolated from the Sargasso Sea
MNKVITIDGPSASGKGTLAILLAERLNWKILDSGALYRAFAYFSINENDERLIEQNLRKISFNIVDNSIQVLFKNEDISRHLRTEETAIQASKISSLSSTREILLPIQRFFLQTSNLIADGRDMGSVVFPN

SEQ ID NO: 130532 - protein, 229 aa, Unknown
  Bacterial polypetide isolated from the Sargasso Sea
MNGEWPVLAIDGPSGSGKGTVAGLLAKRLGWNLLDSGALYRLLAFAAGNHGIDLTNEEALKVLAAHLDVQFTHAKGGQGQHIILEGEDVTDTIRTEQVGAGASQVAALPAVRDALLQRQRAFLEAPGLVADGRDMGTVVFPSAPLKIFLTASAEERARRRYLQLKGKGIDSDQAQLAEEISARDERDSQRAVAPLKPAEGAILVDSTSMSIEEVVDSILAEVSRRGLAD

SEQ ID NO: 130533 - protein, 218 aa, Unknown
  Bacterial polypetide isolated from the Sargasso Sea
MVITIDGAAGVGKTSTAKELAKRLGYQYFDTGAMYRAVTFFFINQNVDLTSESEVDNSLKSIKLRIDFSSESDMRIFLDEDDISLKIRSQEVTSKVSAVSAIKEVREMMVQIQRSFTKKGNFVVEGRDIGTVVFPDAKYKFYLQADYDIRAKRRLADFEKINEAKNINEIKEDLETRDKYDSTRKLSPLKKPVDAIIIDTTLCSFEEQVNQILKHIEK

SEQ ID NO: 130534 - protein, 220 aa, Unknown
  Bacterial polypetide isolated from the Sargasso Sea
MKKISVITIDGPSASGKGSLAKNIANHFDYNLLDSGVLYRLFAMLESKQKDYFEIINIIKHQVDFALKEEGLKIILDQKVDITHDLRSEEIAKSASQLSSKKQVRELLFGLQRDFYDGGGLVADGRDMGTVVFKDAKLKIFLTASPEVRAKRRYLELQNRGQEVNMPALIADIEARDLKDSSRELSPLLPADDAIIIDSSDMTLEEVFSFTENLIKKEFI

SEQ ID NO: 130535 - protein, 209 aa, Unknown
  Bacterial polypetide isolated from the Sargasso Sea
MNSKIITIDGPSGVGKGTLAKNLSDELGWIVLDSGSLYRMVGYLSLKSDTKDFSEISNIINKEEISFKFLKKNSNISLFLGEENLSEFIRNEEVAKLASEFAVMPEVREYLFKIQRSFLDKGKGLIADGRDMGTILFPEAKHKFFITASVEERARRRENQLKESGLSVNMRNLQERIEERDKKDSSRVISPLVPAEDAVVIDSSNIGIY

SEQ ID NO: 130536 - protein, 150 aa, Unknown
  Bacterial polypetide isolated from the Sargasso Sea
MKNNIITIDGPSASGKGTLAKAISKEFNFHLLDSGLLYRAYAFLKLKGIDTLDLVNEIKNKFIFDASESETIIFYENIEITSEIRSEKIAKFASKISTFDKTRKDLLTIQRSFYKLPGLVADGRDMGTVVFPEAKIKIFLDASATERANR

SEQ ID NO: 130537 - protein, 208 aa, Unknown
  Bacterial polypetide isolated from the Sargasso Sea
MKKINVITIDGPSASGKGALARGIADKFDFNILDSGVLYRLYAYLSKKSFSPDEIANEIEGYVEFKKNKEKLLVSYKSNDVTSKLRSEIIAKSASEHSSKKEVRDALFNIQRNFYDGDGLVADGRDMGTVVFKDAKLKIFLTASPEERAKRRFIELQNLGQEVNMPALIADIEQRDKKDSSRKLSPLLPAEDAHIIDSSNMKLDEVFS

SEQ ID NO: 130538 - protein, 207 aa, Unknown
  Bacterial polypetide isolated from the Sargasso Sea
MIIAIDGPAASGKSTAAIGVAKRLGITYLDTGAMYRAVTFGLIENNIGFEDSYRIDSFLEKIEIKFSESPTGVLLTLNGRDITKEIRSALITNNVSEISALKTVRRSMVIIQRKMAEVDDCVLEGRDIGTVVFPKADFKFFLIANKKTRAERRLEDLKAIGEEGSIEKVMIDLKNRDHKDSTRMHSPLKKSDDAIIIDTGDLGINEV

SEQ ID NO: 130539 - protein, 164 aa, Unknown
  Bacterial polypetide isolated from the Sargasso Sea
MIIAIDGPAGAGKTTVSERVAEALGFIRLDTGALYRAVAYAALAAELTPGSSGLGQFVKGLDISFVDGDVCLNGVNIAKSIRTPAVSAAASAFSAVGDVRAGLLELQRSIGSKQNSVVDGRDIGTVVFPEAELKIYLTASVEARAERRWRELQGKGQDADLEVI

SEQ ID NO: 130540 - protein, 194 aa, Unknown
  Bacterial polypetide isolated from the Sargasso Sea
MKFIVAIDGTAASGKGTLAKKTANHFGFKYLDTGILYRVVAYYLKFAEKHSEISKQNVQDSLRLLIDKDFQLSHLRNEEISLKASIISKNKIVRDNLLTYQREFAMQEGGTVLDGRDIGTVVCPKADVKIFVDADIEIRAKRRYNQYLKNNSNLNLSDIIDDLKKRDYFDRNRQLSPLVSAKDAYLLDTSNIYF

SEQ ID NO: 130541 - protein, 224 aa, Unknown
  Bacterial polypetide isolated from the Sargasso Sea
MIIAIDGPAASGKSTSAKLLAKELGYLYLDTGAMYRCIAFSILENKIDISNQDSLTKFLKNFEIDLKKTNNNLSFFVNGKNVTNKIRKSDVSQKVSEVSAIPIIREYMVRIQRSFTKNNSCVMEGRDIGTVVFPDAEFKFFFIANDEVRAKRRQLELESLGEKKSLVNLMYEIKKRDKFDSERGHSPLRKAFNAIEVDTTNMTIDEQVNFMLSKIKLKIGKNNK

SEQ ID NO: 130542 - protein, 221 aa, Unknown
  Bacterial polypetide isolated from the Sargasso Sea
MNSKIITIDGPSGVGKGTLAKNLSDELDWIVLDSGSLYRMVGYLSLKNDTKDFSEISSKINKEEISFKFLKKNSNISLFLGEDDLSEFIRNEEVARLASEFAVIPEVREYLFKIQRSFLDKGKGLIADGRDMGTILFPEAKHKFFITASAEERARRRENQLKELGLSVNMRNLQERIEERDKKDSSREISPLIPAEDAVIIDSSNIGIYELKDKVLELIRS

SEQ ID NO: 130543 - protein, 202 aa, Unknown
  Bacterial polypetide isolated from the Sargasso Sea
MSQTVIAIDGPAASGKGTVSKIISKKMRFNYLDTGKLYRAIGAKYLEGHQPIAAAKNLNINDLDKYDLKKPEIAQAASEVAAIPEVRAALIEFQRNFSQKLPGAVLDGRDIGTVVCPDAKIKIFLTASLEARAKRRYVELYKHDKKISFDTILEQIRERDKRDQTRRSSPMVAARDAKIFDTSKLSINEVVDKVLSYIHTKI

SEQ ID NO: 130544 - protein, 178 aa, Unknown
  Bacterial polypetide isolated from the Sargasso Sea
MSDVNIITIDGPSGTGKGTVCIYLTKLLNWHFLDSGALYRVLAYAAETLGVNYENEVELVKLVKRLNIEFKLLNPESVVDVFLDGKNVTNKIRTETCGKAASLIAPKASIRKALLVLQRGFLKKPGLIADGRDMGTVVFPGAQLKIYLTASIEVRAKRRFKQLKDAGFSVNLRRLHAE

SEQ ID NO: 130545 - protein, 192 aa, Unknown
  Bacterial polypetide isolated from the Sargasso Sea
MKKINVITIDGPSASGKGALARGIANKFDFNILDSGVLYRLYAYLSNMNFSSDEITNQIEKYVEFKINKDKLLVSYKSNDVTSELRSEIIAKSASEHSSKKEVREALFNIQRDFYNGEGLVADGRDMGTVVFKDAKLKIFLTASPEERAKRRFIELQNLGQEVNMPALIADIEQRDKKDSYRKLSPLLPDED

SEQ ID NO: 130546 - protein, 197 aa, Unknown
  Bacterial polypetide isolated from the Sargasso Sea
MNKINVITIDGPSASGKGELAISIANHFNFKLLDSGALYRIFAFLSDLKFNSLEIAQKIKNEISFKLEKDNLRILYKNKDITSQLRYEDLAKVASKLSSKKEVRAALFQIQRSFYHKKGLVADGRDMGTVVFKDAKLKIFLTASSEVRAQRRYLELQNRGQEVNMPALIADIEQRDLKDSSRELSPLVPDDEAYIID

SEQ ID NO: 130547 - protein, 216 aa, Unknown
  Bacterial polypetide isolated from the Sargasso Sea
GPSGAGKGTLCKAMAEALQWHLLDSGAIYRVLALAALHHHVDVTSEEVLVPLAAHLDVRFVSTDGNLEVILEGEDVSSEIRTQEVANAASQVAAFPRVREALLRRQRAFREAPGLIADGRDMGTVVFPDAPVKIFLDASSEERANRRMLQLQEKGFSVNFERLLAEIKERDDRDRNRPVAPLVPAADALVLDSTSLSIEQVIEKALQYARQKLALA

SEQ ID NO: 130548 - protein, 236 aa, Unknown
  Bacterial polypetide isolated from the Sargasso Sea
HVFLMKRRPIIAIDGPAGSGKSTVTKLIAKKLKLLYLDTGAMYRALSWLMIKESIDFKKEKKLQNILKDISIVFKSNKNSHQDVFINNYCVTEEIRSQEISSIVSKISSIKEVRKFLVEEQRKIGKSGGLVAEGRDIGTTVFPNAELKIFLTASIDERAKRRKSDEQSKDSQEIDLDTLKELIKKRDFEDSNREISPLIKANDAIEIITDRYSIHEVVDKIIDLYNDKIPKEIEIK

SEQ ID NO: 130549 - protein, 211 aa, Unknown
  Bacterial polypetide isolated from the Sargasso Sea
MIIAIDGPSASGKSTTAKGVAERLGITHLDTGAMYRAVTLGIIEHSIDLNNHERICEFLEELEINFDSLNDIWKNGQNVTGKIRTTEVSSNVSAVSAIPQVREKMVAIQRAIAEGFDCVLEGRDIGTVVFPNADYKFFLIADLEIRVKRRLIELEKIGEISSLNELKSDIQNRDRLDSSRDISPLVQAEDAITIDTGNLTIDEQIEKIVAI

SEQ ID NO: 130550 - protein, 219 aa, Unknown
  Bacterial polypetide isolated from the Sargasso Sea
MKKINVITIDGPSASGKGALARGIAHKFGFNILDSGVLYRLYAYLSKMSYTPNEIANQIAEYVDFKENKEKLLISYKSNDVTSELRSEIIAKSASEHSSKKEVREALFNIQRNFYDGAGLVADGRDMGTVVFKDAKLKIFLTASPEERAKRRLIELQNLGQEVNMPDLIADIEQRDMKDSSRKLSPLLPAEDAHIIDSSNMKLEEVFSLTEKLIKKEFI

SEQ ID NO: 130551 - protein, 154 aa, Unknown
  Bacterial polypetide isolated from the Sargasso Sea
MNHQLVPVITIDGPSGAGKGTIAQMLALDLNWNILDSGALYRTLAYFMLIEQINSNDFDKNQEYIKENFKVKFDPGIIGEPVKVIFNDRDITKKVRTEEIARETSNLAADPLIRSFIKPCQREFMALPGLIADGRDMGTVIFNDAKHKFFLTAS

SEQ ID NO: 130552 - protein, 212 aa, Unknown
  Bacterial polypetide isolated from the Sargasso Sea
MIIAIDGPSASGKGTLAKRLAAHLSFAHLDTGKIYRAVGHEVIRQGGDPEDERIALLVAQTLNPTALSDPELSGDEAALAASKVARMNDVRDVLLKFQRDFAENPPGGEAGAVLDGRDIGTVVCPDAAVKLYLVASAEVRAKRRHKELLERGEASIYARVLQDMKDRDDRDTNRSVSPLKQADDAFILDTSGLNADKAFEAALVEVEKFGHR

SEQ ID NO: 130553 - protein, 218 aa, Unknown
  Bacterial polypetide isolated from the Sargasso Sea
MVITIDGAAGVGKTSTAKELAKRLGYQYFDTGAMYRAVTFFFINQNVDLTSVSEVNNSLKSIKLHIDFSSESDMKIFLDEDDISLKIRSQEVTSKVSAVSAIKEVREMMVQIQRSFTKKGNFVVEGRDIGTVVFPDAKYKFYLQADYDIRAKRRLADFEKINEAKNINEIKEDLETRDKYDSTRKLSPLKKPVDAIIIDTTLCSFEEQVNQILKHIEK

SEQ ID NO: 130554 - protein, 219 aa, Unknown
  Bacterial polypetide isolated from the Sargasso Sea
MSTKPVSVITIDGPSGAGKGTIAQMLALELKWNILDSGALYRTLAYFMLEQNISLDNFEQNKSFIKENFIVNFDPGVVGEPVKVIFQDEDITNKVRTEEIAKKTSDLATEPSIREFIKPCQRDFMQPPGLIADGRDMGTVIFKDARTKIFLTASLEERAKRRKVQLKRQGSEVNMRLLLQELEDRDKKDIEREHSPLKPAPDSVIIDTSNLEPDGVVEK

SEQ ID NO: 130555 - protein, 158 aa, Unknown
  Bacterial polypetide isolated from the Sargasso Sea
MNPLAPVLTIDGPSGAGKGTISRIIARRLGWHYLDSGALYRAVGVAASWADIDTSDASALVRCTFDTHVQFVEQGDAMRVMVNGTDATDELRLETTGALASAIAAIPEVRAALKERQRAFRELPGLVADGRDMGTVIFPDAPYKVFLTASAEERAERR

SEQ ID NO: 130556 - protein, 220 aa, Unknown
  Bacterial polypetide isolated from the Sargasso Sea
MIIAIDGPAASGKSTAAVGVAKRLGITYLDTGAMYRAVTFGLIDNQIGFKNSLEIENFLEKIEIKFSENQIGTFITLNGRDITNVIRSEAVTKNVSEVSALNSVRKSMVLIQRKMAEVDDCILEGRDIGTVVFPNADFKFFLTADKKSRAERRLNDLKAIGEKSSVEKVMYDLISRDHKDSTRSHSPLKKSDDAIIIDTSELGINKVIDKIVNIVKHKGH

SEQ ID NO: 130557 - protein, 205 aa, Unknown
  Bacterial polypetide isolated from the Sargasso Sea
MNKVITIDGPSASGKGTLAILLAERLNWKILDSGALYRAFAYFSISENDERLIEQNLRKISFNIVDNSIQVIFEDEDISRHLRTEETAIQASKISSLTSTREILLPIQRFFSETSNLIADGRDMGSVVFPNANLKFFLDAAPEVRAKRRHLELQKRGQEVNMHDLINDIVERDKKDRTRDLSPLIKTEDSILLDSTNLDQESILT

SEQ ID NO: 130558 - protein, 149 aa, Unknown
  Bacterial polypetide isolated from the Sargasso Sea
MIIAIDGPSASGKTTTAKGIAERLGITHLDTGAMYRAVTLEIIEYGINLSEDERICEFLEELEIKFDSSNGIWSNGHNVTDKIRTIEVSSNVSAVSAIPQIREKMVTIQRAIAEGSDCVLEGRDIGTVVFPNADYKFFLVADLEIRVKR

SEQ ID NO: 130559 - protein, 223 aa, Unknown
  Bacterial polypetide isolated from the Sargasso Sea
MQISKIIAIDGPAASGKSTVSKAVAKELSYIYVDSGALYRAVAWIALQLNLDGSDEEKVLNAINNKKWNFFVDEGEVKFSVDDLILKKVLRGTFITEAVSNFAKLPNVRTFVRNKLRSYASLGSLVVEGRDIGSIVFPDATLKFYLDADPNERALRRHGDLLKMGESEKAEEVLFSLRKRDDMDSKRMHNPLQVAEGALLIDSTDIGIDEVVNLIVRKIKEST

SEQ ID NO: 130560 - protein, 213 aa, Unknown
  Bacterial polypetide isolated from the Sargasso Sea
MNKVITIDGPSASGKGTLAILLAERLNWKILDSGALYRAFAYFSISENNQKLIEENLRKISFDIVDNSIQVLFKNVDISRHLRNEEIAIQASKLSSLSSTREILLPIQRFFWETSNLIADGRDMGSVVFPDANLKFFLDAAPEVRAKRRHLELQKRGQEVNMHDLINDIVERDKKDRTRDLSPLIKTEDSILLDSTNLDQESILNEALQHIKE

SEQ ID NO: 130561 - protein, 192 aa, Unknown
  Bacterial polypetide isolated from the Sargasso Sea
MNKVITIDGPSASGKGTLAILLAERLNWKILDSGALYRAFAYFSISENDERLIEQNLRKISFNIVDNSIQVIFEDEDISRHLRTEETAIQASKISSLTSTREILLPIQRFFSETSNLIADGRDMGSVVFPNANLKFFLDAAPEVRAKRRHLELQKRGQEVNMHDLINDIVERDKKDRTRDLSPLIKTEDSIL

SEQ ID NO: 130562 - protein, 289 aa, Unknown
  Bacterial polypetide isolated from the Sargasso Sea
LIEEKQLNIKIIPVPTERDSDGVPFSSRNKHLSKNERKTLKFFSNELENAKIIFKKDKKIDLKQLTKKLKSKNISIEYLEHLHPYSLKKVQANDNISILAGAIKCGKTRLIDHVFLMKRKPIIAIDGPAGSGKSTITKLIAKELNLLYLDTGAMYRAISWLFKKEKIDYEEESELKKTLNNISIIFKSNSISQQDVFINNFCVTEEIRSQEISAIVSKISSIKKVREFLVYEQRKIGQSGGLVAEGRDIGTTVFPNAELKIFLTASIDERAKRRKSELDLRGNEEIDFN

SEQ ID NO: 130563 - protein, 161 aa, Unknown
  Bacterial polypetide isolated from the Sargasso Sea
MIIAIDGPAASGKGTIARKLAKHFNLGYLDTGILYRAVALQMLQGGINIDDPKCAEKIAREFTVSFIDKKNIRTEAVSVLASKIAAFPGVRHELLHYQKTFAKNPGPDKYGAILDGRDIGTIVCPNADFKIFITADLKIRAKRRWKQLLQSDQTVIYSDIL

SEQ ID NO: 130564 - protein, 169 aa, Unknown
  Bacterial polypetide isolated from the Sargasso Sea
MIDNLHIAIDGPAASGKTASAKKLSQELKIPYIDTGIMYRGLSYYLLTKIEDFNSKNVIENFDFDNNVTMLVDEDQKILINDCDITQYLYTEEVTKLVSFFASIEAVRVFLVKEQRLMAKNKDLIMIGRDIGTVVLPNAKYKFFLDCNIQTRANRRIDQEKKHYGNNVD

SEQ ID NO: 130565 - protein, 172 aa, Unknown
  Bacterial polypetide isolated from the Sargasso Sea
MQQAPVITIDGPGGSGKGTICRLVSQKLGWHLLDSGAIYRVLALAAIHHQIAPSDEEALQPLAAHLDVQFSCDEQGNTRITLEGENVTHTIRTEEVGSVASKIASLPRVREALLRRQRAFKEAPGLVADGRDMGTVVFPQAEVKIFLTADASERARRRYLELKEKGHELTSA

SEQ ID NO: 130566 - protein, 221 aa, Unknown
  Bacterial polypetide isolated from the Sargasso Sea
MIIAIDGPAGSGKSTIAKYIAKNLNYRYIDTGAMYRAVAWSANNEGIDLDDENAVGQWVADLEIEFVADPAGQQVKVNGENAAGLLKNEIVGRGAAKVAAQKRVREILVAKQKEIGQSGNVVMDGRDIGTQVFPNAELKFFMDADAEERGKRRYLELKEKNMNVDLENIIAEIKLRDHEDKTRTISPLHPAEDAIEVDTTKFTIEEVIDQVMKQINLKQKS

SEQ ID NO: 130567 - protein, 219 aa, Unknown
  Bacterial polypetide isolated from the Sargasso Sea
MKKINVITIDGPSASGKGALARGIAHKFGFNILDSGVLYRLYAYLSNMSFSPDEIANQIEGYVEFKKNKKKLLISYKSNDVTSELRSEIIAKSASEYSSKKEVREALFNIQRNFYDGEGLVADGRDMGTVVFKDAKLKIFLTASPEERAKRRFLELQNLGQEVNMPALIADIEKRDMRDSSRDLSPLLPAEDAHVIDSSDLTLDEVLSFTESLIKKEFI

SEQ ID NO: 130568 - protein, 202 aa, Unknown
  Bacterial polypetide isolated from the Sargasso Sea
MSQTVIAIDGPAASGKGTVSKVLSKKLRFNYLDTGKLYRAIGAKYLEGIQPIAAAQSLEKNDLDKYDLQKPEIAQAASEIASIPEVRAALLEFQRNFSKKPPGAVLDGRDIGTVVCPDARIKIFLTASLEARAKRRYVELCKHDEKISFDTILEQIRERDERDQTRTSSPMVAASDAKIFDTSKLSIPEAVDKVFRYIQTKI

SEQ ID NO: 130569 - protein, 230 aa, Unknown
  Bacterial polypetide isolated from the Sargasso Sea
MSERAPVVTIDGPSGAGKGTISQLLAKHLGWQLLDSGAIYRVLALAAIHHDVELENEESITLLASHLDVKFLTGNEKDPVQVILEGEDVTTAIRTQECSNAASKVAAFPRVREALLRRQRAFRTAPGLIADGRDMGTVVFPTASAKLYLTASAQERAQRRYNQLQDKGFDVNIERLLAEIIERDDRDMNRPVAPLVPAEDALVIDTSDKGIDEVLELALNFIKQKLSSTN

SEQ ID NO: 130570 - protein, 216 aa, Unknown
  Bacterial polypetide isolated from the Sargasso Sea
MDKLITIDGPGGSGKGTVAKILAAKLGWNILDSGALYRLIALISENIKETDPDLIGKELKDKSIFFELAKDQYHLFFDGKDVTNFIRREEIGVKASDLAHNQNIRNLIKDTQRSFYDPNIGLIADGRDMGSVVFPEAGIKIYLDASIEERAKRRQIQLKEKGMEVNMPYLISSLQNRDLKDKNRDVSPLLIPQGAKVIDSTNLSIDEVVNKIMDLI

SEQ ID NO: 130571 - protein, 220 aa, Unknown
  Bacterial polypetide isolated from the Sargasso Sea
MIIAIDGPAATGKSTTAKALAKRLGFTYLDTGAMYRAITLLILQKKVQISENFALISLLKKFDLKIQQHEKQILVILNGEDVSNEIRRLDVTKYVSEVSALPAVRKSLVKIQRKIAKDQNCVVEGRDIGTIVFPDAEVKFYVVADYDVRAKRRLLDFKKLGEEKSIDELIEELKNRDKYDSEREHSPLLKANDAIEVDTTNLTIEEQVNFMFKKVKLIKG

SEQ ID NO: 130572 - protein, 228 aa, Unknown
  Bacterial polypetide isolated from the Sargasso Sea
MKSTRPFHPTPVITIDGPTASGKGTVAALVAAHLGFHLLDSGALYRLAALASVRYGIEAEDIDALVKLIDDLHITFREGCAQLDGVDVSNDIRAEAVGNRASAIAVHGPVRTALVARQRAFRKTPGLVADGRDMGTVIFPDAVLKVFLTASAEARATRRHKQLMQKGFSANIDDLLRDLRERDARDSNRAAAPLKPAADAKLLDTSALSVDEAVDQVLQWYRALGQPA

SEQ ID NO: 130573 - protein, 227 aa, Unknown
  Bacterial polypetide isolated from the Sargasso Sea
IIAIDGPAGSGKSTVTKLIAKKLKLLYLDTGAMYRALSWLVIEESIDYKKEKKLQNILKDISIVFKSNINSHQDVYVNNYCVTKEIRSQKISSIVSKISSIKEVRKFLVEEQRKIGQSGGLVAEGRDIGTTVFPHAELKIFLTASIDERAKRRKSDKNSKDSQEIDLHTLKELIKKRDFEDSNREISPLIKANDAIEIITDGYSINEVVDKIVDLYNDKIPKETQIK

SEQ ID NO: 130574 - protein, 217 aa, Unknown
  Bacterial polypetide isolated from the Sargasso Sea
MNKVITIDGPSASGKGTLAILLAERLNWKILDSGALYRAFAYFSISENDKRLIEKDLRKISFNIVDNTIQVLFENEDISRHLRTEETAIQASKISSLLSTREILLPIQRFFSETSNLIADGRDMGSVVFPDANLKFFLDAAPEVRAKRRHLELQKRGQEVNMHDLINDIVERDKKDRTRDLSPLIKTEDSILLDSTNLDQESILTEALQHIKERNIL

SEQ ID NO: 130575 - protein, 218 aa, Unknown
  Bacterial polypetide isolated from the Sargasso Sea
MVITIDGAAGVGKSSTAKELAKRLEYKYFDTGAMYRAVTFYFLAENVDLSSNSQVIESLDSIKLHIDFSSENEMKIFLDEDDISLKIRSQEVTSAVSIVSAIKEVREMMVQIQRSFTENGNFVVEGRDIGTVVFPDAEHKFYLQADYDIRAKRRLADFEKINEAKNINEIKEDLEKRDKYDSTRKLSPLKIPDGAIIIDTTYCSFDDQVNQILKHIEK

SEQ ID NO: 130576 - protein, 226 aa, Unknown
  Bacterial polypetide isolated from the Sargasso Sea
MNSSTPVITIDGPSGAGKGTIAQMLALELNWNILDSGALYRTLAFLLHQENISLNQFAEKKEKIQKDFKVQFDPGVIGEPVRVIFNNTDITNKVRNEEIAKKTSMLAADPSIREFIRPCQREFMKHPGLIADGRDMGTVIFPDADLKIFLTASLEERAKRREQQLKRQGMEVNMRVLLEELEDRDQKDREREHSPLVAAKDSVELDTTNIKPEGVIKKIKALPFFN

SEQ ID NO: 130577 - protein, 218 aa, Unknown
  Bacterial polypetide isolated from the Sargasso Sea
MIIAIDGPAASGKSTTAKLVAEKLNIIYLDTGAMYRTVTLQLLRSNVNFDNTYKVSTILDNMIIDMYDYNGKIVVKLNNEDVSELIRSTDVTKHVSEVSSLSEVRKSMVAMQREIGNKSDCVVEGRDIGTIVFPNAEYKFYIVADIKMRAQRRLKEQEQIGIIKSLEDVMSDLKVRDHKDSNRDNSPLRKANDAVQIDTSNLSIDEQVNFIINHIKNN

SEQ ID NO: 130578 - protein, 220 aa, Unknown
  Bacterial polypetide isolated from the Sargasso Sea
MIPVITIDGPSGAGKGTIAQMLALELDWNILDSGALYRTLAYFMRENTINLDNFEENQHLLKERFKVSFDPGIPGEPVRVLFEDEDITSKVRTEEMAKLTSTLAAEPLIREFIKPCQRDFMKLPGLIADGRDMGTVIFSDAKHKIFLTASLEERAKRRQTQLKRQGLEVNMRSLLQELMDRDNKDMEREHSPLIPAKDSVLIDTSNLNPEGVVKEIKTYL

SEQ ID NO: 130579 - protein, 191 aa, Unknown
  Bacterial polypetide isolated from the Sargasso Sea
MALVIAIDGPAAAGKGTLARKLAAHYGLPHLDTGLTYRATAKALINAGKPLDDEAIAAEMAGAIDLGGLDRAVLSAHEIGEAASKVAAMPRVRTALVAAQRRFAETGAGAVLDGRDIGTVVCPDATVKLYVTADAELRARRRYDEIVAGGGAADFDEIFEDVKRRDARDMGRKDSPLRPADDAHLLDTSKM

SEQ ID NO: 130580 - protein, 170 aa, Unknown
  Bacterial polypetide isolated from the Sargasso Sea
KKALIKDLPHINLQFHFNDSLGFAEIYVNGTNVKKEIRTLEVSRCVSKVAEISEVRSKLVASQQEMGKNKAIVMDGRDIGTVVFPDAELKIFMNSSAETRAERRFKELIEKGQHVTYEEVLQNVQERDYIDTHREDSPLEKAVDAIEIDNSAMSKQEQFDLVMELVGERV

SEQ ID NO: 130581 - protein, 224 aa, Unknown
  Bacterial polypetide isolated from the Sargasso Sea
MNELTVPVITIDGPSGAGKGTIAQMLALELSWNILDSGALYRTLAYFMKENQISLAEFEARADEIRDNFKVSFDPGIPGEPVKVIFNNEDITASVRTEEMAKLTSTLAAEPVIRDFIKPCQRDFMIPPGLIADGRDMGTVIFSDAKYKIFLTASAEERAKRRQSQLKRQGLEVNMRSLLQELEERDRKDTEREHSPLVPAEDSVVIDTSNLNPGGVVKKIKTYL

SEQ ID NO: 130582 - protein, 222 aa, Unknown
  Bacterial polypetide isolated from the Sargasso Sea
MVEVPVISIDGPSGSGKGTIATRLARVLGFNYLDSGAIYRTLGIALHKENIGFENIAQISEIYSKSVIFFDPDEPGKVILNGEDVSVSIRSQLGSDSASKLGQIPEIRKILLKGQREYRVKPGLVADGRDMGTVVFPSANLKIFLTASIEERAKRRHKQLISKGIGAMLPDLLRDLGERDKRDTERSISPLKPANDAVILDSTNLDIDEVVDKILQRFQSCA

SEQ ID NO: 130583 - protein, 220 aa, Unknown
  Bacterial polypetide isolated from the Sargasso Sea
MKNNNIITIDGPSASGKGSLAKALAKELDFILLDSGLLYRAYSYCFEQSQNHVNAKNLFSNLQINSIDHQMHVFESNKDITPILRDENVAKSASILSSLKETRDNLISFQRDLASNRGLVADGRDMGTVVFPDAGTKIFLVADSEVRAKRRFLELQNAGQDVNMRDLIDDIRLRDEADKAREISPLMPADDSVEVNSSNLTPQEVLEIVLKIYKEKIRED

SEQ ID NO: 130584 - protein, 230 aa, Unknown
  Bacterial polypetide isolated from the Sargasso Sea
MSERAPVVTIDGPSGAGKGTISQLLAKHLGWQLLDSGAIYRVLALAAIHHDVELENEESITLLAAHLDVKFLTGNEKDPVQVILEGEDVTTAIRTQECSNAASKVAAFPRVREALLRRQRAFRTAPGLIADGRDMGTVVFPTASAKLYLTASAEERAQRRYNQLQDKGFDVNIERLLAEIIERDDRDMNRPVAPLVPAEDALVIDTSDKGIDEVLELALNYINQKLSNTN

SEQ ID NO: 130585 - protein, 155 aa, Unknown
  Bacterial polypetide isolated from the Sargasso Sea
MFGEFGFLLDGLATPFAIIIYVLCTVLALYSKPYMVHKFEELFKEHYHQNTTTDGQTTAVVDSAALKKYVNHQSGLYFAMFLVFAMGMLGTVLATNLIEFYIFFEVMLIPSFFLVAFYGDGNRRRIALQFLFWTHVGAVVLLLGFLAIGLSVEAL

SEQ ID NO: 130586 - protein, 149 aa, Unknown
  Bacterial polypetide isolated from the Sargasso Sea
KTKLGIEAKSYLDSGDLVPDSVTIKMLENEVLQNKKVKGYIFDGFPRTLAQAKSLDTFLNSINLKINATIALDVDENELIIRLLDRGKTTNRSDDQDLEKIQNRFNEYNNKTSILIDFYDKQGKFYSVDGKGSVDDITIRLFDLVESLI

SEQ ID NO: 130587 - protein, 280 aa, Unknown
  Bacterial polypetide isolated from the Sargasso Sea
MQKEIEAMWEVSARFFSQTIEEKRKLYRTVSNPLGYFDKELTKKKRDKKEVFDYMQPRADSTDFNQWPLKDKTFRIVSENFFNAASETAEKTLGLVYKAYLSTSPSNLHLPGGDKRTSTVRFNFYPEVDPLTEKERSEEMPLGELALNYHTDPGILTLLFQDMVGGLQALSKSRGWIDVRPEEDAIVVNLGDSLQVWTNDNYRAAVHRVLLMDEVPRYSSPYFFNPARDAVLEPLSALSKDPPIYRPFTWQEYIRGRVDDNFAELDEDDIQISKYRFKAI

SEQ ID NO: 130588 - protein, 175 aa, Unknown
  Bacterial polypetide isolated from the Sargasso Sea
QSKFIVERYNLYQLSTGDLLRNEIKNKTELGFKISSIMASGELVSDSIVGSLIEKFISNDTYKNKIIFDGYPRTLKQAKNLDNLLNKYNQQIDLVLKLSVSLETIKKRISERLMQENRADDNEEIALRRFKTYEISSEPVIEYYKQSNLVKEINGEGSITEISAEISGLIETIKG

SEQ ID NO: 130589 - protein, 167 aa, Unknown
  Bacterial polypetide isolated from the Sargasso Sea
KQYFDIYHLSTGKFLRNEINKKTKIGLKSSVFIDRGELVPDDILLEIVEKHISEREYLNGYIIDGFPRTLPQAEGFNKILIDSGQKLDAVVSLYAEENELVDRLILRSKNSGRSDDNLDIIKNRQKIYWQQTSPLLEYYRSKQILKEINGVGEISQITKLIIQSIID

SEQ ID NO: 130590 - protein, 71 aa, Unknown
  Bacterial polypetide isolated from the Sargasso Sea
DRDDETGEELVQRDDDNEETVRARLNTYNEQTAPLSDHYRKQNLLKAIDGMGSPDEVYERLRQSLEDLNPV

SEQ ID NO: 130591 - protein, 213 aa, Unknown
  Bacterial polypetide isolated from the Sargasso Sea
PEVFKKIYAASRVYLDGNNVVIEVDGAPDHKSPYYSRNHELYEPYNGSNTNFNQNPNSIKTFDFKFKIPLNPKEASNKVSTQLGSIGVSLNGVAFYNQYAGPNNQPLTNEINSFDQYAGHPQNQGVYHYHLEPTYLTSNKGQDALLGFLLDGFPVYGPYENDVKITNENLDEYHGHSHITADYPNGIYHYHITDTDPYINGNGYYGSPGTVSQ

SEQ ID NO: 130592 - protein, 202 aa, Unknown
  Bacterial polypetide isolated from the Sargasso Sea
MQPQWVLDLPTRVTGVVGSGARSGAAGKAGGAGSAGGAAGASSSQQQQQHQQQQQQQQQQQQTLRQQQQTQRKPGAPTEVAKKGAAAADAALNAALAKMSPAQVGALLSKYGGGPRPHPALTTAQRVLGGPTGPPAAGASPSLDATLRGVEATMKALGTRLGQLEDSALRPPLGASQAPAKPPRSTAASSPLLGAPGALAGG

SEQ ID NO: 130593 - protein, 69 aa, Unknown
  Bacterial polypetide isolated from the Sargasso Sea
NLDDVTGEPLIQRKDDLPETVKHRLAVYHDETLPLANFYKALSLQYFKVDGNQAVDSVFNQIKDGALIH

SEQ ID NO: 130594 - protein, 39 aa, Unknown
  Bacterial polypetide isolated from the Sargasso Sea
MKLILFGPPGSGKGIQASILAKKNKIPHLSTGDILRSKL

SEQ ID NO: 130595 - protein, 101 aa, Unknown
  Bacterial polypetide isolated from the Sargasso Sea
LIQAKNLDDLLKKYKQKIDIVLKLSVSLETVKKRILERQIQEKRADDNEETAIKRYKTYEKSSEPVIDYYKQSNLLKFVNGEAGISQINTEISGLIDAIKG

SEQ ID NO: 130596 - protein, 137 aa, Unknown
  Bacterial polypetide isolated from the Sargasso Sea
MGFIFDGFPRTLAQADALGNLLDSIGQSLDHVVELYVDDEKLVQRIIGRFTCSSCGELYHKITKPPENAGICDVCGSKDKFNFRQDDNEDSFKIRLLAYYRDTSPLIGYYHVLNKLRKINGLGSVDEIQNNIRNIIK

SEQ ID NO: 130597 - protein, 115 aa, Unknown
  Bacterial polypetide isolated from the Sargasso Sea
ESDNGFILDGYPRTLNQSQFLNNFLLQTSNSINFIFNIQISFEILRSRILKRSSEESRDDDNIDVIETRYNEYINSTQKVSNYYKDSLQSIFYELDGSLQIDEITEKIKQILKKP

SEQ ID NO: 130598 - protein, 97 aa, Unknown
  Bacterial polypetide isolated from the Sargasso Sea
RRIAGRRFHLASGRSYHIEFNPPKVADRDDDTGEELVQRDDDNEQTVRARLNTYNEQTAPLSDHYRKQKLLKAIDGMGSPDEVYERLRQSLEDLNPA

SEQ ID NO: 130599 - protein, 130 aa, Unknown
  Bacterial polypetide isolated from the Sargasso Sea
PDSVTIKMLQSEVLKNPDANGFIFDGFPRTNAQADALDVFLSQMNTSISLMLSLDVNEEELKNRLLKRAEVSGRADDADESIIKNRIAVYNAETAPVKDFYATQNKLISIDGQGSITDITNRLFKAIDSL

SEQ ID NO: 130600 - protein, 127 aa, Unknown
  Bacterial polypetide isolated from the Sargasso Sea
NVIKERVSENDCDQGFILDGYPRNIIQAKSLNIVLKDIDRNIDRILFLDVDFSILQSRIEARSKENNEEKRVDDTSEVLIKRLEEYKAQTEPLSEYYRNNKKFKKINGMKSISEVSLDIENFLDNGI

SEQ ID NO: 130601 - protein, 221 aa, Unknown
  Bacterial polypetide isolated from the Sargasso Sea
SSNRPEHESVYWQASNALYEAFDYATNLYKYATTKTATGYTGTPASAGPNKIEEQCITMKMPISPAEASSKTNTSYSTIGLSLNGISFFNENAAPGDDITNELFTFDQCSGHPQNDGVYHYHVDPVCLIRDLGGSVTDNSTTVDGTTYSWIEDNGSNGGLLLGFLLDGFPVYGPVGNNHTDYSGSSTPSIDSYNGHTHSTTEFQSGIYHYHVKTGNIGGTK

SEQ ID NO: 130602 - protein, 125 aa, Unknown
  Bacterial polypetide isolated from the Sargasso Sea
GSLLQSYAGGGAPLSNEINSFDQYNGHPAPGRGGGGGRYHYHMEPFWLTQNYGKNTLLGFLLDGFPIYGPEENGSDLKSSDLDSHHGHSHPTSDFPGGVYHYHITSDAPYLNGIGYYGAPGTVNE

SEQ ID NO: 130603 - protein, 162 aa, Unknown
  Bacterial polypetide isolated from the Sargasso Sea
MGDILRKKLLEKDSLSIKLKNIIDGGTLVSDEIINEIVLQRLQETDCSNGFILDGYPRTKMQAEFLNSYFQKINLQIDYIIEILLSDNDIKKRIKSRSAIENRQDDKEEVINIRLKKYLSETKPLFQYFREKNRDKYNVVDGNQNIEKITSDIIEIVKNDDL

SEQ ID NO: 130604 - protein, 166 aa, Unknown
  Bacterial polypetide isolated from the Sargasso Sea
MVPHSFQREIYLRKKLLEKDNLAIELKKIMASGNLVSDDILNSIVSSRLSKESGKGFILDGYPRTLHQSEFLNNFLSKTSSSINYLFNIQINFETLKNRILKRSSEESREDDNVDVIETRYNEYLNSTQKVTNSYKDKYRPNFYELDGSLEIEEITQNIKEILKKS

SEQ ID NO: 130605 - protein, 124 aa, Unknown
  Bacterial polypetide isolated from the Sargasso Sea
PALLLAVERGRPDMVIFLLQKGARVDQRDDDKRTALSIASRKNNFNLVSELIKFGANPDRTGPNKETPLIIASRFGNFESVKALLEGGAYPDDTDLTGRTALQWAKIKHYKKIQEILIEYGSYD

SEQ ID NO: 130606 - protein, 60 aa, Unknown
  Bacterial polypetide isolated from the Sargasso Sea
RDDDKEGTVRNRLAVYHEQTEPLVNFYTELSSAGNNVHVIKVNGVASVEQIKSEIIASLN

SEQ ID NO: 130607 - protein, 85 aa, Unknown
  Bacterial polypetide isolated from the Sargasso Sea
MNLILLGPPGCGKGTQAVNLVKKYDYYQLSTGDMLREAVANDTQTGKIVKNVLASGKLVDDDLIIKIMEDKLIATRSNPGRIFDG

SEQ ID NO: 130608 - protein, 147 aa, Unknown
  Bacterial polypetide isolated from the Sargasso Sea
MSDLLHSIQVGGSPSELDFDEVPALLLAVERGRLDMVRFLLQKGARVDQRDDDKRTALSLASRKNNFNLVSELIKFGANPDRSGPNKETPLIIASRFGNFESVKALLEGGAYPDDTDLTGRTALQWAKIKHYKKIQEILIEYGSYDY

SEQ ID NO: 130609 - protein, 149 aa, Unknown
  Bacterial polypetide isolated from the Sargasso Sea
QKDELALKVKNIIDAGKLVSDDILNAIVSEKITKDCKDGFILDGYPRTLDQSNFLENLLVKNNQILNFIINIDIEFNVIEKRILKRSKEENREDDNINIIKTRYLEYKNSTQKVSEFYRSNYSNIFHDLDGSLEISEITNKIVKIIENR

SEQ ID NO: 130610 - protein, 270 aa, Unknown
  Bacterial polypetide isolated from the Sargasso Sea
MFGEFGFLLDGLATPFAIIIYVLCTVLALYSKPYMVHKFEELFKEHYHQNTTTDGQTTAVVDSTALKKYVNHQSGLYFAMFLVFAMGMLGTVLATNLIEFYIFFEVMLIPSFFLVAFYGDGNRRRIALQFLFWTHVGAVVLLLGFLAIGLSVGSFDFVDISEAAIDPDILVISAVAIILGLGVKLAAFIFHVWLPYAHGAAPTPISALLSPAMIGIGAYGLFRLIVEFLPQTYGDISIMLNIWGVVTMFYGGAMALMQDDFKRMLAYSSI

SEQ ID NO: 130611 - protein, 141 aa, Unknown
  Bacterial polypetide isolated from the Sargasso Sea
KNLKEIMSSGGLVSDEILNKIVNEKLNDCNNGFILDGYPRTLDQSNFLNNNLLQSRRSLDFIFNIDINFDLLKDRILKRSQEEDRDDDNIDALETRYTKYMDETKPVSEEYKHNNSSIFYEINGGNQIQEITSEIIKILEK

SEQ ID NO: 130612 - protein, 112 aa, Unknown
  Bacterial polypetide isolated from the Sargasso Sea
MFLPIVFFIFLVGAFYVGLQRDDDKSLPSVLIGELAPDITKNELYSGSEVTPELMKSPGIKLVNFWASWCPPCRAEHEKLLEIAETGTVIFGVKIKDDKENALSYLQRYGNP

SEQ ID NO: 130613 - protein, 139 aa, Unknown
  Bacterial polypetide isolated from the Sargasso Sea
MFGEFGFLLDGLATPFAIIIYVLCTVLALYSKPYMVHKFEELFKEHYHQNTTTDGQTTAVVDSTALKKYVNHQSGLYFAMFLVFAMGMLGTVLATNLIEFYIFFEVMLIPSFFLVAFYGDGNRRRIALQFLFGLTSVQS

SEQ ID NO: 130614 - protein, 518 aa, Unknown
  Bacterial polypetide isolated from the Sargasso Sea
MDFALLQAVFLPLLLSPVAYIIGRNYGPTPATWFTFGLLLYCSVILINASLGGTYEEHYPWTTMFGEFGFLLDGLATPFAIIIYVLCTVLALYSKPYMVHKFEELFKEHYHQNTTTDGQTTAVVDSVALKTYVNRQSGLYFAMFLVFAMGMLGTVLATNLIEFYIFFEVMLIPSFFLVAFYGDGNRRRIALQFLFWTHVGAVVLLLGFLAIGLSVGSFDFVDIVEAEIDPDILVVSAVAIILGLGVKLAAFVFHVWLPYAHGAAPTPISALLSPAMIGIGAYGLFRLIVEFLPQTYGDISIMLNIWGVVTMFYGGAMALMQDDFKRMLAYSSISQMGYLLFAIGSFSTYGLAGAEMMYISHGLGKGLLFMTAGVIIVQVGTRSFKKLGGLASKMPITAVCAVIGGLTIMGIPPTSGFMGEWMVFYGALETAVSEGNDIRSLMFALGLIATALTMSYILWMLKRVFFGKLPENLQNVKEGSWYMLAPMMVLAGFTIVVGIYPDVFLGQIMPYMQGVMGV

SEQ ID NO: 130615 - protein, 92 aa, Unknown
  Bacterial polypetide isolated from the Sargasso Sea
MSGRRVHLPSGRSYHIAHNPPKVEGKDDLTGETLIQREDDHPDVIKKRLEVYYDETEPLLSFYRQKDISFYEIDASKTLEEVTEDIRKVISH

SEQ ID NO: 130616 - protein, 95 aa, Unknown
  Bacterial polypetide isolated from the Sargasso Sea
KLLDKLMSELKDKISCVIQLDVDEKHLKDRILSRAKEEGRSDDNEETLLKRLETYFNETMPLIKYYDEAKLLKKVSGVGEIMHINQSINTIIDHL

SEQ ID NO: 130617 - protein, 96 aa, Unknown
  Bacterial polypetide isolated from the Sargasso Sea
AKLLNKLMLELEEKIFCVIQLDVEEKHLKERIISRSKEEGRSDDNEETLLKRLETYFHETMPLIKYYDELGLLKKVSGVGEIMHINQSINLIIDHL

SEQ ID NO: 130618 - protein, 152 aa, Unknown
  Bacterial polypetide isolated from the Sargasso Sea
LKVQSIVNKGGFVNDDIILSMVSNRILMKDCKSGFILDGFPRNVKQAKIFDQILKERKIKINFVIELKVNKESLFERIKNRAFESNEAREDDKDDVLENRLKIYEEQTEPLVPYYQDLGLHFEVNGMKKVYEIAEDIENIIKIKFKTNKEII

SEQ ID NO: 130619 - protein, 144 aa, Unknown
  Bacterial polypetide isolated from the Sargasso Sea
VKNVMAKGELVSDELVLQIIKERISQNDCDKGFILDGYPRNIAQAESLKEVLKDINRNIDRIIFLDVDFKVLQSRIETRSKENNDEIRADDTSEVLIKRLDEYKLQTAPLAEYYSRDKKFKKINGMNTISDVSHDIENFLDISI

SEQ ID NO: 130620 - protein, 518 aa, Unknown
  Bacterial polypetide isolated from the Sargasso Sea
MEFVLLQAVFLPLLLSPVAYLIGRNYGATPATWFTFGLLLYCTVILINAALGGTYEEHYPWTTMFGEFGFLLDGLATPFAIIIYVLCTVLALYSKPYMVHKFEELFKEHYHQNTTTDGQTTAVVDSTALKKYVNHQSGLYFAMFLVFAMGMLGTVLATNLIEFYIFFEVMLIPSFFLVAFYGDGNRRRIALQFLFWTHVGAVVLLLGFLAIGLSVGSFDFVDISEAAIDPDILVISAVAIILGLGVKLAAFIFHVWLPYAHGAAPTPISALLSPAMIGIGAYGLFRLIVEFLPQTYGDISIMLNIWGVVTMFYGGAMALMQDDFKRMLAYSSISQMGYLLFAIGSFSTYGLAGAEMMYVSHGLGKALLFMTAGVIIVQVGTRSFKKLGGLASKMPITAVCAVIGGLTIMGVPPTSGFMGEWMVFYGALETAVSEGNDIRSLMFALGLVATVMTMSYILWMLKRVFFGKLPENLQNVKEGSWYMLAPMMVLAGFTIVVGIYPDVFLGQIMPYMQGVMGV

SEQ ID NO: 130621 - protein, 120 aa, Unknown
  Bacterial polypetide isolated from the Sargasso Sea
MSEAGVILDAVVEIQVGDEELVKRATGRRVHPGSGRVYHILYNPPKVEGKDDESGEALVHREDDMEETVRERLSVYYQETYPLVEYYKALVSKGLKYIEVDGQGHDLKEIQENISKELSS

SEQ ID NO: 130622 - protein, 235 aa, Unknown
  Bacterial polypetide isolated from the Sargasso Sea
DEATEAAVIALQTKTGLVDDGIAGPKTLAALATGRRDPKHLSICDLVAAADKLGVPLASVRAVNEVESTGSGFLLDGRPKILFERHIFWKSLQARGIDPAPIAAKYPNICSQTRGGYMGNAAEYTRLATAELIDPVASYESASWGALQVMGYHWQRLGYSCVDEFVARMENSEADQLDAFVRYVAADAGLLAALKARKWAAFAKGYNGPDYASNLYDAKLARAWLKYADTDKAAA

SEQ ID NO: 130623 - protein, 171 aa, Unknown
  Bacterial polypetide isolated from the Sargasso Sea
NLICEKYNLSHLSTGDLLRTEIANKSEIGVKAKQIIDEGKLVSNDIIIDVIKSFFNNNKNLNGYLLDGFPRNTEQAKLLDKLMLELKDKISCVIQLDVGEKYLKDRILSRGKEEGRSDDNEETLFKRLETYFSETMPLIKYYDEAKLLKKVSGVGEIMHINQSINTIIDHL

SEQ ID NO: 130624 - protein, 179 aa, Unknown
  Bacterial polypetide isolated from the Sargasso Sea
GTQANLLVSSLNIPHLSTGDILRSKLKEQDSLSDSLRQIISSGNLVSDEITNKIISEKLLSSDCKSGFILDGYPRTLSQSNFLISFFENNNIDLDLIVYFKLDQKNVENRIISRSKIEKRSDDNIDVIKTRIKKYNEETAPLVQIYRQKFPEIFIEINAAQDISKIQDEIKNMLKNAIF

SEQ ID NO: 130625 - protein, 209 aa, Unknown
  Bacterial polypetide isolated from the Sargasso Sea
MIGPPASGKGTQAKYIVKKYNYFQLSTGDLLRDEIKKQTKLGEEISKKIDKGEFVNDQIVNTLLNNVITDKSKRNKIIFDGYPRNLSQAKNLEVLLKGDKQTVGSIIYLNLSKDEISKRISGRYICEKCNRTLNEFTDNEEFTTHKCDKKYLKKRPDDNKDTILKRYDTYVLQTKPVLDYYSLNPNFNEIDGSLKIDQIMSKIDEIVNV

SEQ ID NO: 130626 - protein, 121 aa, Unknown
  Bacterial polypetide isolated from the Sargasso Sea
AKELAKMNINFTHVIEIFVEDQIIVNRMSGRRVHPASGRNYHIEFNPPKNKGFDDETNEPLIQREDDKPETVLKRLNVYHEQTKPLAVFYENLSSKGYLSFFKVDGSNSVDDVFKEISSQI

SEQ ID NO: 130627 - protein, 99 aa, Unknown
  Bacterial polypetide isolated from the Sargasso Sea
IVERMSGRRVHPASGRVYHVSYNPPKVDGKDDLTGEDLVIREDDKEETVRKRLGIYHEQTELLVGYYRKEAEQGRTQYHYMVGTLPVEQVSAKLEALLG

SEQ ID NO: 130628 - protein, 190 aa, Unknown
  Bacterial polypetide isolated from the Sargasso Sea
MNIVILRPPGAGKGTQSKFIVNKFNLFQLSTGDLLRNEINKKTQLGSEISSIINSGELVSDKIVNNLIEKIVSNNIYKNKIIFDGYPRTLTQAKNLDNLLNRFDQKIDIVLKLSVSLETVKKRILERQNQENRADDNEEVAIKRYKTYEKSSEPVIDYYKQSNMLKVVNGEAGISEINSEISGLIDAIKG

SEQ ID NO: 130629 - protein, 61 aa, Unknown
  Bacterial polypetide isolated from the Sargasso Sea
MNPKIIILLGAPGSGKGTQSELLSKESNLDIICMGDIVRHELSQETDLGKQMKTYISNGDL

SEQ ID NO: 130630 - protein, 75 aa, Unknown
  Bacterial polypetide isolated from the Sargasso Sea
MIIILLGPPGSGKGTQANFIQNKLSIPHLSTGDILRQSVKNETDLGNKVKNIMAKGELVSDDLVLDVIKERVSQS

SEQ ID NO: 130631 - protein, 165 aa, Unknown
  Bacterial polypetide isolated from the Sargasso Sea
VEDILNSGKLVSDDIIIELINDRIHQSDCKSGYLFDGVPRTLGQANLFLQNDIEVKKVIDISLDDELIIKRMSGRRFHIASGRSYHIEFNPPKAEGLDDETGEPLIQREDDFPETVKKRLEVYYAQTKPLTDFYKSKASEGIMSFISINGNQSVDEVFSEIKSYL

SEQ ID NO: 130632 - protein, 213 aa, Unknown
  Bacterial polypetide isolated from the Sargasso Sea
MQIILLGPPGCGKGTQAQKLINEFGFVQLSTGDMLREAISKGTEIGLQAKSIIEKGDLVSDEIVIGIVRERIFSKECERGYMLDGFPRTFAQAKRLDQILLDRNEKIDVVIRLCVPDEMLIRRIAGRRFHVKSGRSYNIETNPPKVQGKDDITGEKLVQREDDKEGIAESRLKTYYELTEPLVGYYKKKKLLKEIDGTKSPENIYIEIKKTLK

SEQ ID NO: 130633 - protein, 192 aa, Unknown
  Bacterial polypetide isolated from the Sargasso Sea
HKPGRIVELPSKPQVSTGDMLRAAVKLGSPMGLAAKEYMDAGLLVPDEVIIGLIQERLQEDDAGQGVLFDGFPRTIPQAESLEKIATVSSVISIEVPDDAIVDRIVGRRMDPETGEIFHVQFKPAPPEIEGRLIQRPDDTEETVRSRLEAYHNQTAPLADWYSDRGLLIRIDGNASINQVGVSVERAISRIL

SEQ ID NO: 130634 - protein, 133 aa, Unknown
  Bacterial polypetide isolated from the Sargasso Sea
MIGPPGSGKGTQAKFLAEKLNNFQVSTGDMLREEIKNNTEIGKKIINNMNDGKYVEDEIVNKLLEKIIFDTKKINKLIFDGYPRTINQAKNLENLLNKSSQKLDHIFFLNVNKETIIKRIEKRKILEKRSDDD

SEQ ID NO: 130635 - protein, 68 aa, Unknown
  Bacterial polypetide isolated from the Sargasso Sea
MKLIIFGPPGSGKGTQASILAKKNKIPHLSTGDILRSKLEEGDDLGKELSKIMSVGNLAPDSIINPIV

SEQ ID NO: 130636 - protein, 270 aa, Unknown
  Bacterial polypetide isolated from the Sargasso Sea
YLAFAAASSLRPAVAQPYAGEGTGLGTFENPKHPIPAFVLLGAPGGGKGTISKKIVDHAANHGFGSGDKGRGKCSIIHLSVGDLLRAETVKKTPLGIRVQEFIDAGKLAPEDLVRQVLEKGIVESVGAAKQNAMSQTAADADNMPIIVMLDGYPRNLAQAEYLDTLLPIKQAVSLNVPAKEIVTRVSARWIHPESGRVYNYLFNPPKVEGVDDITGEKLERRKDDSPEVVQKRLELFREETEPILEYYRKTGNRLAEFNGESFRKGKVLV

SEQ ID NO: 130637 - protein, 177 aa, Unknown
  Bacterial polypetide isolated from the Sargasso Sea
GTQASLLAKKYKIPHLSTGDILRFRLKQDDKFAQDLSKIMSGGNLVPDTIINPIVADKLLSNDCKNGFILDGYPRNKCQSDFLIDFLNKNNLDIDLIIDFIADNNTVKKRIMERSKIENRSDDNLEVIKTRLEKYFAETLPLAAMFKEKFKDKFFEINATHEITKIQYDIENVLKNA

SEQ ID NO: 130638 - protein, 79 aa, Unknown
  Bacterial polypetide isolated from the Sargasso Sea
MNLILLGMPGAGKGTQAEIIQREQGIANVSTGAMMREVSRAETDLGKKVQEYLSTGKLVPDDIIIQMLVERISQSDCEN

SEQ ID NO: 130639 - protein, 76 aa, Unknown
  Bacterial polypetide isolated from the Sargasso Sea
PPKVADRDDDTGEELIQRDDDNEETVRARLNTYNEQTAPLSDHYRKQKLLKAIDGMGSPDEVYERLRQSLEDLNPA

SEQ ID NO: 130640 - protein, 187 aa, Unknown
  Bacterial polypetide isolated from the Sargasso Sea
PKISTGDMLRSAVASKSDLGNRVEDILNSGKLVSDNIIIELINDRINQSDCESGYLFDGVPRTLGQANLFLQNDIEVNKVIDISLDDELIIKRMSGRRFHMASGRSYHIEFNPPKAEGLDDETGEPLIQREDDFPETVKKRLEVYHSQTKPLTDFYKSKASEGIISFISINGNQSVDEVFSEIKSYL

SEQ ID NO: 130641 - protein, 126 aa, Unknown
  Bacterial polypetide isolated from the Sargasso Sea
MNLIFLGPPGVGKGTQAGLVCNHFGILHLSTGDILRTEINRKSDIGKTAKSFIDQGALVPDDVLLNIIEARLSESDIQKGYLLDGFPRTMPQANGLNSFLEKKSQKIDTVISLTANEDELIQRLIK

SEQ ID NO: 130642 - protein, 134 aa, Unknown
  Bacterial polypetide isolated from the Sargasso Sea
LMVFHRTIPQAEGLENLKVSIDIVIELVVEDDEIVKRMSGRRVHMGSGRTYHVIYNPPSVTDKDDLTGEPLVQRADDMEETVRKRLDVYSHQTKPLIAWFKNYEQRNSATKFVEVKGVGSVESIRDIIIRELKK

SEQ ID NO: 130643 - protein, 78 aa, Unknown
  Bacterial polypetide isolated from the Sargasso Sea
MIIILLGPPGSGKGTQANFIQNKLSIPHLSTGDILRQSVKNETDLGNKVKNIMAKGELVSDDLVLDVIKERVSQSDCN

SEQ ID NO: 130644 - protein, 155 aa, Unknown
  Bacterial polypetide isolated from the Sargasso Sea
MLRMEIANKSEIGVKAKQIIDEGKLVSNDIIINVIKSFFNNNKNLSGYLLDGFPRNTEQAKLLDKLMSELKDKISCVIQLDVDEKHLKDRILSRGKEEGRSDDNEETLIKRLETYFKETMPLIKYYDEAKLLKKVSGVGEIMQINQSINTILDHL

SEQ ID NO: 130645 - protein, 213 aa, Unknown
  Bacterial polypetide isolated from the Sargasso Sea
MRLIFIGPPGVGKGTQAKLIKQYFGIVHLSTGDILREEISQATSLGIKAKQYIDKGYLVPDGELLNIMGKRLNQDDTKKGYLLDGYPRTIPQAEGLDSFINKMNQKIDSVISIELDDQSIIKRLSSRRTCKGCGNITNLLFNPPKIEGKCNKCSGKLLQRSDDGNQVIIKRLEVYNKQTAPLLKYYQKKDLIKRIDGSGNIDSVYQQIVKVLE

SEQ ID NO: 130646 - protein, 221 aa, Unknown
  Bacterial polypetide isolated from the Sargasso Sea
MKKHIQIILLGPPGCGKGTQAQKLINEFGFVQLSTGDMLRAAISKGTEIGVEAKSIIDKGELVSDEIVIGIVRERIFSKECERGYMLDGFPRTLAQAEKLNQILSDRNQKIDVVIRLCVPEEMLVRRIAGRRFHIKSGRSYNIEFNPPKIEGKDDITGEKLVQREDDKEEIVESRLKTYYELTEPLVEYYKKEGLLKEIDGTGSPENIYTEIKQTLNAVPA

SEQ ID NO: 130647 - protein, 92 aa, Unknown
  Bacterial polypetide isolated from the Sargasso Sea
MFNIVIFGKPGSGKGTQADFLKDKYDLHHISTGDLFRKNILNKTDLGIEAKSFLDNGDLVPDIVTIKMLENEVLVNKDAKWFIFDGFPRNTN

SEQ ID NO: 130648 - protein, 50 aa, Unknown
  Bacterial polypetide isolated from the Sargasso Sea
MKLILFGPPGSGKGTQASLLAKKINIPHLSTGDILRSKLNDNDNLAPRTV

SEQ ID NO: 130649 - protein, 194 aa, Unknown
  Bacterial polypetide isolated from the Sargasso Sea
ISANLGIPKISTGDMLRSAVASKSDLGNRVEDILNSGKLVSDDIIIELINDRINQSDCKSGYLFDGVPRTLGQANLFLQNDIEVKKVIDISLDDELIIKRMSGRRFHIASGRSYHIEFNPPKAEGLDDETGEPLIQREDDFPETVKKRLEVYHSQTKPLTDFYKSKASEGIISFISINGNQSVDEVFSEIKYYL

SEQ ID NO: 130650 - protein, 184 aa, Unknown
  Bacterial polypetide isolated from the Sargasso Sea
STGDMLRSALASKSDLGNRVEDILNSGKLVSDDIIIELINDRINQSDCKSGYLFDGVPRTLGQANLFFKNDIEVKKVIDISLDDELIIKRMSGRRFHIASGRSYHIEFNPPKAEGLDDDTGEPLIQREDDFPETVKKRLEVYHAQTKPLTDFYKSKASEGIMSFISINGNQSVDEVFSEIKSYL

SEQ ID NO: 130651 - protein, 95 aa, Unknown
  Bacterial polypetide isolated from the Sargasso Sea
MNLILLGMPGAGKGTQAEIIQREQGIANVSTGAMMREVSRAETDLGKKVQEYLSTGRLVPDEIIIQMLVERIHQSDCENGFLLNGFPRNLDQAKA

SEQ ID NO: 130652 - protein, 183 aa, Unknown
  Bacterial polypetide isolated from the Sargasso Sea
TGDMLREAVASGSELGKKVSNILDTGGLVSDEIIGALIDNRLSKPDCEQGALFDGVPRTIGQAKQLSQMGIIFTHVIEIFVNDEEIVNRMSGRRVHPGSGRNYHIVHNPPQIEGIDDVTGESLVQREDDKPETVLKRLEVYHDQTKPLTDFYNSLSKKDNIKFFRVDGSKHVEEVFKSISKEI

SEQ ID NO: 130653 - protein, 134 aa, Unknown
  Bacterial polypetide isolated from the Sargasso Sea
GSLFDGVPRTIGQAEQLAAMGIDFTHVIEIQVADETIVNRMSGRRVHPGSGKNYHIEFNPPMNEGIDDDTGEPLIQREDDKPETVLKRLNVYQEQTKPLTDFYMNLANSGTLKFIKVDGSNSVENVFKSISDNL

SEQ ID NO: 130654 - protein, 163 aa, Unknown
  Bacterial polypetide isolated from the Sargasso Sea
NILDSGRLVSDDIIGSLIKDRLTKPDCINGSLFDGVPRTIGQAEQLAKMNIDFTHVIEIHVEDQIIVDRMSGRRVHPKSGRNYHIDFNPPDKEGVDNETGDPLIQREDDKPETVLKRLHVYHEQTKPLTDFYINLSNAGDLKFFTIDGSKSVESVFQQISIQL

SEQ ID NO: 130655 - protein, 34 aa, Unknown
  Bacterial polypetide isolated from the Sargasso Sea
MKKHLLFLGAPGAGKGTQAELLSKTNSYLHLSIG

SEQ ID NO: 130656 - protein, 110 aa, Unknown
  Bacterial polypetide isolated from the Sargasso Sea
NNVIDISLDDELIIKRMSGRRFHIASGRSYHIEFNPPKAEGLDDETGEPLIQREDDFPETVKKRLEVYHSQTKPLTDFYKSKASEGIISFISINGNQSVDEVFSEIKSYL

SEQ ID NO: 130657 - protein, 213 aa, Unknown
  Bacterial polypetide isolated from the Sargasso Sea
MRLIFIGPPGVGKGTQAKLVKEYFQIVHLSTGDILRKEISRGSNLGNKAKSFIDRGHLVPDNELLKIMSKRLNEKDVKKGFLLDGYPRTIPQAQGLDVFLHQKNQKIDAVISIELDNKNIIKRLSSRRSCEKCGNITNLLFSLPKMEGVCDKCDGKLLQRSDDSEDVIIERLEVYNKQTSPLLTYYQKKEIIKKVDGSGNIDNVHKIILKVLK

SEQ ID NO: 130658 - protein, 50 aa, Unknown
  Bacterial polypetide isolated from the Sargasso Sea
MKNFVLFGKPGSGKGTQAEHLSEKYKLYHISTGDLFRNKYISEHKPRTLS

SEQ ID NO: 130659 - protein, 134 aa, Unknown
  Bacterial polypetide isolated from the Sargasso Sea
MNLILLGPPGAGKGTQAKLLEQKLNMLQLSTGDMLRAAKDKKSEIGKKIKLIMAEGNLVTDEIVIELISENIDKSSKCAGFIFDGFPRTLYQADALSELMSSKKQSIDLVIEMRVDNSQLIERIVGRYSCKECG

SEQ ID NO: 130660 - protein, 150 aa, Unknown
  Bacterial polypetide isolated from the Sargasso Sea
MRIVLLGAPGAGKGTQAQFIMEKHGIPQISTGDMLRAAIKAGTELGLKAKAVMDAGQLVSDDIIIGLVKERIAQPDCANGFLLDGFPRTIPQAQAMKDAGVAVDFVLEFDVPDEEIVKRMSGRRVHSGSGRTYHVVFNPPKVEGKDDVTG

SEQ ID NO: 130661 - protein, 213 aa, Unknown
  Bacterial polypetide isolated from the Sargasso Sea
MRLILMGAPGSGKGTQAEKLMDDFGCRQISTGVLLRQAIESGSELGKKVQKIMSEGLLVSDNIVLDLIKNELSEIGESGFLLDGYPRNINQAKSLNDLLENIDKPLDYSILIDVPSEILIKRLSGRRTCSLTGKTLNIYFSSENEIDECLSKGGELLQREDDNEESITKRIEVYEEQTEPMIDFYRSTGLLHTIDGQGSVDYVYIRLKQLMEL

SEQ ID NO: 130662 - protein, 101 aa, Unknown
  Bacterial polypetide isolated from the Sargasso Sea
MNTFILLGPPGAGKGTQADLISADLGIPKISTGDMLRSAVASKSDLGNRVEDILNSGKLVSDDIIIELINDRINQSDCKSGYLFDGVPRTLGQANLFLQND

SEQ ID NO: 130663 - protein, 25 aa, Unknown
  Bacterial polypetide isolated from the Sargasso Sea
MNIILLGPPGAGKGTQARHLVEKGI

SEQ ID NO: 130664 - protein, 213 aa, Unknown
  Bacterial polypetide isolated from the Sargasso Sea
MRLILMGAPGSGKGTQAEKLMDDFGCRQISTGVLLRQAIESGSDLGKKVQKIMSEGLLVSDDIVLDLIKNELSEIGEGGFLLDGYPRNINQAKSLNDLLENIDKPLDYSILIDVPSEILIKRLSGRRTCSLTGKILNIYFSSENEIDECLSKGGELLQREDDNEESISKRIEVYEEQTEPMVDFYRSTGLLHTIDGQGSVDDVYIRLKKLMEL

SEQ ID NO: 130665 - protein, 211 aa, Unknown
  Bacterial polypetide isolated from the Sargasso Sea
MNIILLGPPGAGKGTQARHLVEKRNMIQLSTGDMLREAKNSGSEMGNLVAEVMARGDLVTDEIVIGLIKEKISGEKGGGFIFDGFPRTLKQADALGRLLEECGEDLDLVIEMKVDDDALVSRISGRSSCGNCGEVFHDVTNPWPASGECPKCSSTEVVRRADDNEDSLRQRLMEYYKKTSSLIGYYYAKGDHVSVNGLASVEGVEKSIAAV

SEQ ID NO: 130666 - protein, 189 aa, Unknown
  Bacterial polypetide isolated from the Sargasso Sea
MIFIFFGPPGAGKGTQAAILSKKFKIPHLSTGEILRNNLLGTTTESIKIRKILNKGDLVSDEILNKIIKQKLDSPECINGYILDGYPRTLSQNEWLENYLNSKNLAITKIFDINLEKDIIVKRIKNRAILEKRKDDTEEVIKNRVNKYIEETKPLSKYYLEKYPKNYHLINGNQEIEMIESDILKIVKK

SEQ ID NO: 130667 - protein, 178 aa, Unknown
  Bacterial polypetide isolated from the Sargasso Sea
MGPPGAGKGTQAKILSDQYNLVHLSTGDILRNEIDNQTTIGLDAKNYMDQGLLVPDEVLLSMMENTLTNLKGSGIILDGFPRTIPQAEGLDAIFKKLDLTIDMVINIYVDKEILINRLIKRAEDSGRSDDTKEVIVNRQNVYLELTAPLLEFYKNEVINVDGDGTIEEVTQRVLAAIK

SEQ ID NO: 130668 - protein, 190 aa, Unknown
  Bacterial polypetide isolated from the Sargasso Sea
MKIILFGPPGAGKGTQAKLLIEKYNIVQISTGDMLRDCVAKGTEIGKKVKSIMEKGELVSDDIIISLISDRISEEDCSNGFILDGFPRTITQAQSLDAMFDEREISIDHVLEIDVDFDLLLGRIEKRASENEEARQDDNSSVLSKRLLVYKEQTMPVLTYYQEMNKLKKINGMLNIEDVFKEILNVVESE

SEQ ID NO: 130669 - protein, 216 aa, Unknown
  Bacterial polypetide isolated from the Sargasso Sea
MNIILLGPPGSGKGTQAQELNRRHGLIHLSTGDMLRAAIVSGSELGQDVKNIMEAGALVPDDTMIRMISERIEQPDCANGFILDGFPRTPAQAEALDIMLRKKNMKIDHVIEMSVHIEILTKRIAGRYSCAGCGAGYHDEFQQPAQAGVCDYCGETEFSRRSDDKPETVRARLDAYDSQTAPLLPYYQKSNCLITVDAMAEIANVTAEIEAVLGGV

SEQ ID NO: 130670 - protein, 182 aa, Unknown
  Bacterial polypetide isolated from the Sargasso Sea
MKKHLLFLGAPGAGKGTQAELLSQTNSYLHLSTGELLRKEIEMNTTLGIQVKDIMNRGELVSDELVLKIVRQNLVKDNSGWILDGYPRNLSQANSLNEVLNEINQPLELVFYLDIPEEVLIKRLLLRGRKDDTEETIRTRVDIYKKTTEPLIQYFKDLSLLEYIDADRDLKTISSDIKQKMA

SEQ ID NO: 130671 - protein, 84 aa, Unknown
  Bacterial polypetide isolated from the Sargasso Sea
MNIVIFGPPGAGKGTQSKFIVNKYGLHQLSTGDLLRNEIKNKTELGSKITRIMNNGELVSDEIVGNLISKFISNDIYRHKIIFD

SEQ ID NO: 130672 - protein, 183 aa, Unknown
  Bacterial polypetide isolated from the Sargasso Sea
MFGPPGAGKGTQAKYLVKKLNSFQISTGELLREEIYKNSDIGKKITNDMKNGKFVSDEIVNKLIENLVSDPQKKNRLIFDGYPRSLSQAKNLDILLEASNQKIDLILYLKVDKDTVVKRLEKRKIIENRSDDETSTILKRFDTYMNTTKPVLNYYSENPKFRQIEGSLEIDEITSKIDTFINV

SEQ ID NO: 130673 - protein, 192 aa, Unknown
  Bacterial polypetide isolated from the Sargasso Sea
MIIILLGPPGSGKGTQASFIQNKLSIPHLSTGDILRQSVKNKTELGNIVKNIMAKGELVSDELVLKIIKERISQNDCDKGFILDGYPRNIKQAESLKEVLKGVNRNIDRIIFLDVDFKVLQSRIETRSKENNEEIRADDTSEVLIKRLEEYKLQTAPLSEYYSISKKFKKINGMNKISDVSHDIENFLDISI

SEQ ID NO: 130674 - protein, 190 aa, Unknown
  Bacterial polypetide isolated from the Sargasso Sea
MNLVIFGPPGAGKGTQSKFIVKKFNLFQLSTGEILRNEIEKKTELGNEISSIINSGKLVSDNIVSNLIEKYVSNEKFKNKLIFDGYPRNLSQAKNLDILLKKYNQKIDIVFKLSVSLETIKKRISERLSQEKRADDNEEVVINRFKTYEKSTEPVIDYYEQSNLLKVVNGEAGISEINTEISRIIDTIKG

SEQ ID NO: 130675 - protein, 182 aa, Unknown
  Bacterial polypetide isolated from the Sargasso Sea
MKKHLLFLGAPGAGKGTQAELLSQTNSYLHLSTGELLRKEIEMNTTLGIQVKDIMNRGELVNDELVLKIVRQNLVKDNKGWILDGYPRNLSQANSLNEVLTEINQPLEVVFYLDIPEEVLIKRLLLRGRKDDTEETIRTRVDIYKKTTEPLIQYFKDLSLLKYIDANRDLKTISSDIKQKMA

SEQ ID NO: 130676 - protein, 216 aa, Unknown
  Bacterial polypetide isolated from the Sargasso Sea
MNIILLGPPGAGKGTQSKLLEDKFGMQQLSTGDMLRAAKNSDSDMGKIVAGVMARGELVTDDIVIGLIAERLESEKKGPRFIFDGFPRTLAQADALQKLLEKKKIELKLVIEIKVEDDDLIKRVTGRFSCRNCGAVYHKDSNKPKKPNICDNCNGVDVFVQRADDNEESFKTRLMAYYRDTAPLIGYYHAKEKLSSVAGSFGIEATHEKISEVLSE

SEQ ID NO: 130677 - protein, 183 aa, Unknown
  Bacterial polypetide isolated from the Sargasso Sea
MFGPPGAGKGTQSKYLVKKLNAFQISTGDLLREEMNKNSSIGKIIKNDMKEGSFISDDIVNSLIENLVFDPLKKGKLIFDGYPRTLRQAENLGSLLKNSDQVIDLILFLNVDKETIIKRLEKRKILENRSDDEEHTILKRYDTYMETTQPVLNFYSKNPNFKEIDGRLEISEITRKIDTFINV

SEQ ID NO: 130678 - protein, 183 aa, Unknown
  Bacterial polypetide isolated from the Sargasso Sea
LFGPPGAGKGTQAKYLVKKFNSFQISTGDMLRDEIQKNTEIGKKIINNMSEGKFVDDQIVNKLIENAIFDPKKKEKLIFDGYPRSLKQAKNLDLLLNKSNQKIDFVFFLNVKKDVIIKRIEKRKLLEKRTDDDLDTILKRYDTYMETTKPVLDFYSKNSNFFELDGNSKIDEITAKIESFINV

SEQ ID NO: 130679 - protein, 215 aa, Unknown
  Bacterial polypetide isolated from the Sargasso Sea
MRVILLGAPVPGKVPQAGFITKKFGIPQISTGDMLRAAVKAGTELGLKAKSVMDAGGLVSDDLIINLVKERIAQPDCANGFLFDGFPRTIPQAEALKEAGVRIDNVIEIAVDDEEIVGRIAGRRVHPASGRVYHTEHNPPKVDGKDDETGDELIQREDDKEETVRHRLSVYHAQTKPLVDFYQSLAAAEGTPKYSCIEGVGSVDEITAKVFAALS

SEQ ID NO: 130680 - protein, 215 aa, Unknown
  Bacterial polypetide isolated from the Sargasso Sea
MNIILLGPPGAGKGTQAQFLVESLGMVQLSTGDMLREAKDSGTEMGKVVAEVMSRGDLVTDDIVIGLIKEKLDGDKGAGFIFDGFPRTLAQADALGALLDDCNIDLDSVIEIQVDDKALIKRITGRSTCGGCGQVYHDETKPWPTDGKCSTCGSNDVKRRTDDNEESLKQRLMEYYKKTSPLLGYYFAKGNLVSIDGLLSMNEVRDSLKKVINKE

SEQ ID NO: 130681 - protein, 135 aa, Unknown
  Bacterial polypetide isolated from the Sargasso Sea
MQLIVFGPPGAGKGTQAKLLSSYLSIPHLSTGDILRSKLNEKDEISIKLQSIMSSGNLVSDNILNQIVSEKIISKECNRGFILDGYPRTIDQMNYLNNYILNNNIAINLIINIFVDDLTIQKRILNRSKIENRED

SEQ ID NO: 130682 - protein, 208 aa, Unknown
  Bacterial polypetide isolated from the Sargasso Sea
MKIILLGPPGAGKGTQAKLLCQKFSLPQISTGDMLRSLIRKENHPLASQIKKTIDSGSLISDSLMMEILEARLKEDDCQKGFLLDGFPRTLEQGKMLHERKIIIDLVLEMDLPEEVLIERMAGRLIHEPSGRTYHRTYNPPKETGYDDITREALITRQDDEEQTVRHRLLVYQKQTAPLIAYYQNLCKQKDHYIVSFSQISGDAPVEK

SEQ ID NO: 130683 - protein, 186 aa, Unknown
  Bacterial polypetide isolated from the Sargasso Sea
THLVVFLGPPGAGKGTQAIKIASDFNLAHISTGDMLRQHVKEQTDLGKIAKSLLDEGKLVPDDLVIQMLIERLGDDDCLGGTILDGFPRTLPQAKSLEKINDKFPVIKVIVFEADQEELTKRILLRGETSGRGDDTEDSIRVRLEVYQKDTEPLITYYEDKGITTKINAVGNVDDIYAEISKEFIN

SEQ ID NO: 130684 - protein, 182 aa, Unknown
  Bacterial polypetide isolated from the Sargasso Sea
PGAGKGTQAKFLIEKYNIVQISTGDMLRDSVSKGSDLGKQVKSVMDKGELVSDKLIMSLISERIDNEDCSNGFILDGFPRTIAQAIALDELLKNKNILIDHVIQIDVNENLLLDRIKKRASDNQSIRDDDNSKILENRILVYNEQTMPVLRHYDDLNMLKKVNGMLSVEAVSEEILNILENH

SEQ ID NO: 130685 - protein, 160 aa, Unknown
  Bacterial polypetide isolated from the Sargasso Sea
MFGPPGAGKGTQAKNLEKKLNNFQLSTGDMLRDEINKDTEIGKKIINNMNEGKFVDDEIVNKLMKKVIFDPQKKNKLIFDGYPRAIDQAKNLDILLAESDQKVDFIFFLNVNKDVIIKRIEKRKLLEKRSDDDLETILRRYDAYMATTKPVLDYYSSHNN

SEQ ID NO: 130686 - protein, 63 aa, Unknown
  Bacterial polypetide isolated from the Sargasso Sea
MRIILLGPPGAGKGTQANHLIRDFGLVQLSTGDMLRAAVKSGSEIGKKAKAVMDAGELVSDEI

SEQ ID NO: 130687 - protein, 213 aa, Unknown
  Bacterial polypetide isolated from the Sargasso Sea
MVLFGPPGCGKGTQAGIIAKDIDIPHLSTGDMLRDAVKSETETGLKAASIMEEGKLVSDEIVIDIIKDRICNNDCKNGFILDGFPRTVSQAKELDVMLTSENMKLDLVVDFSVNDEALISRIEGRFSCGDCGAGYNDHTKLPIKEGICDECGSSNFIRRKDDNRETVSKRLEAYYKDTLPILPYYKEKKVLHSIDGLADIDSVTNELMSLIKK

SEQ ID NO: 130688 - protein, 190 aa, Unknown
  Bacterial polypetide isolated from the Sargasso Sea
MKLILFGPPGSGKGTQASLLAKKNNIPHLSTGDILRFKLQKDDNFAKELSQIISGGNLVPDSIINPIVADKLLSNDCKNGFILDGYPRNKFQSNFLIDFLEKNNLEIDLIIDFIADTTTVKKRIIERSKIENRSDDNIEVIKTRLDKYFTETQPLASIFKEKFKDKFFEINATQEIAKIQSDIENRLKNA

SEQ ID NO: 130689 - protein, 185 aa, Unknown
  Bacterial polypetide isolated from the Sargasso Sea
MNILFLGAPGCGKGTQSKILIKEYGIPQISTGDLLREEIKAGSNLGKELQDIMSSGKFVSDELVLSLVSKKIMQDECKSGFILDGYPRNISQAKSLDDLFVEKNINLEYVFLIDVPFETLIKRCTGRLLCTTCDYIGNMDRGEKVGDKCEKGELYQREDDKEETVKNRLNVYQEQTAPIIDFYES

SEQ ID NO: 130690 - protein, 221 aa, Unknown
  Bacterial polypetide isolated from the Sargasso Sea
MKKHIQIILLVPPGCGKGTQAQKLINEFGFVQLSTGDMLRAAIRKGTEIGTQAKSIIEKGELVSDEIVIGIVKERIFSKECERGYMLDGFPRTLAQAENLNQILSERNQNIDVVIRLCVPDEMLIRRIAGRRFHTKSGRSYNIEFHPPKNEGKDDITGEKLVQRGDDKEEIVESRLKTYYELTEPLVGYYKKKGVLKEIDGTGSPENIYSEIKHTLNEVPA

SEQ ID NO: 130691 - protein, 182 aa, Unknown
  Bacterial polypetide isolated from the Sargasso Sea
MKKHILFLGAPGAGKGTQAELLSQTNSYLHLSTGELLRKEIEMNTILGIQVKDIMNRGELVSDELVLKIVRQNLEKNNKGWILDGYPRNLSQANSLNDVLTEINQPLEVVFYLDIPEEVLIKRLLLRGRKDDTEETIRTRVEIYKKTTEPLIQYFRDQSLLEYIDADRDLKTISSDIKRKMA

SEQ ID NO: 130692 - protein, 162 aa, Unknown
  Bacterial polypetide isolated from the Sargasso Sea
DAGGLVSDDLIINLVKERIAQADCANGFLFDGFPRTIPQAEALRDAGVALDHVVEIAVEDEEIVKRLSGRRVHPASGRVYHTEYNPPKVAGKDDISGEELVQREDDKEETVRHRLSVYHSQTKPLVDFYQKLSAASGTPKYSHIPGVGSVEEITAKTLAALD

SEQ ID NO: 130693 - protein, 46 aa, Unknown
  Bacterial polypetide isolated from the Sargasso Sea
MKNIILLGPPGAGKGTQADLICDLFDIPKISTGDMLREAVTSGSEL

SEQ ID NO: 130694 - protein, 183 aa, Unknown
  Bacterial polypetide isolated from the Sargasso Sea
MKSRLLFLGPPGAGKGTQAARLCNANGMSHLSTGDLLRSEVAAGTALGQEAEAVMNRGELVSDALVLAIVESQLKGLSSGGWLLDGFPRTVPQADALEPLLDELKQPIEAVVLLELDDAVLIERLLARGRDDDNEAVIRNRLEVYREKTSPLISFYRDKGLLVSVEANGSVEEITQRITKVLS

SEQ ID NO: 130695 - protein, 120 aa, Unknown
  Bacterial polypetide isolated from the Sargasso Sea
MKIIFFGPPGSGKGTQAKLIAEKLNILHLSTGDILREKLEDADELSLKLKEIMSSGNLVSDNILNQIISEKLNSDECKRGFILDGYPRTLAQSEFLLSFFEKNNINLDIIFNFNIDFKIV

SEQ ID NO: 130696 - protein, 182 aa, Unknown
  Bacterial polypetide isolated from the Sargasso Sea
MKKHILFLGAPGAGKGTQAELLSKTNSYLHLSTGELLRKEIELNTILGRQVKDIINRGELVSDELVLKIVRHNLDKDNDGWILDGYPRNLSQANSLNEVLIEINQPLEIVFYLDIPEEVLIKRLLLRGRKDDTEETIRTRVDIYKKTTEPLIQYFKDLSLLEYIDADRDLKTISSDIKQKMA

SEQ ID NO: 130697 - protein, 214 aa, Unknown
  Bacterial polypetide isolated from the Sargasso Sea
MRIILLGAPGAGKGTQAQFLMGKYGIPQISTGDMLRAAIKAGTELGLKAKQVMDEGKLVSDDIIIGLVKERIAMDDCKDGFLLDGFPRTIPQADAMKEAGVKVDHCIEFDVADDVIVERMGGRRVHPASGRVYHVVYNPPKEAGKDDATGEDLIVREDDKEDTVRKRLAIYHEQTKPLVNYYMAEADAGNCEYHKLDGNRPVDDVSADLEKRLS

SEQ ID NO: 130698 - protein, 122 aa, Unknown
  Bacterial polypetide isolated from the Sargasso Sea
MNTFILLGPPGAGKGTQADLISADLGIPKISTGDMLRSAVASKSDLGNRVEDILNSGKLVSDDIIIELINDRINQSDCKSGYLFDGVPRTLGQANLFLQNDIEVNKVIDISLDDKLIIKRMS

SEQ ID NO: 130699 - protein, 117 aa, Unknown
  Bacterial polypetide isolated from the Sargasso Sea
MKNIILLGPPGAGKGTQADLICDLFDIPKISTGDMLREAVASGSELGIKVSEILDSGALVSDEIIGSLIEDRLTKPDCVNGSLFDGVPRTIGQAEQLAAMGIDFTHVIEIQVADETI

SEQ ID NO: 130700 - protein, 98 aa, Unknown
  Bacterial polypetide isolated from the Sargasso Sea
MKLILFGPPGSGKGTQASLLSKKNNIPHLSTGDILRFKLKQDDNLAEELSKIISDGNLVPDSIINPIVADKLLSDDCKNGFILDGYPRNKYQCDFLIN

SEQ ID NO: 130701 - protein, 177 aa, Unknown
  Bacterial polypetide isolated from the Sargasso Sea
MFGPPGAGKGTQAKYLVKKLNGYQISTGDILREEIKKDSDIGKKIISNMNEGKFVSDEIVNNLLKNHVFDPNKKEKLIFDGYPRSLDQAKNLDELLANSNQKINYIFFLNVDKQTIIKRIEKRKILEKRSDDDLDTILKRYDTYIETTKPVLDYYSQNSNFHEIDGTLEIDQITSKI

SEQ ID NO: 130702 - protein, 75 aa, Unknown
  Bacterial polypetide isolated from the Sargasso Sea
MFGPPGAGKGTQAKYLVKKLNGHQISTGDILREEIKKDTDIGKKIINNMNEGKFVSDDIVNSLLKNHVFDPNKRE

SEQ ID NO: 130703 - protein, 192 aa, Unknown
  Bacterial polypetide isolated from the Sargasso Sea
MINIVLFGKPGAGKGTQANFLKIKYSLVHISTGDLFRYNLKNKTELGKLAKSFMDKGDLVPDQVTIKMLEEEVKQNTNAKGFLFDGFPRTKSQAEALDNFLENNKMQINATISLEVEDNVIIKRLLERGKSSGRIDDQNESKIINRFKEYNKKTAPLKTYYNDQNKFYSVSGIGSIDIITNRLVQVIDSLQI

SEQ ID NO: 130704 - protein, 113 aa, Unknown
  Bacterial polypetide isolated from the Sargasso Sea
MNTFILLGPPGAGKGTQADLISADLGIPKISTGDMLRSAVASKSDLGNRVEDILNSGKLVSDDIIIELINDRINQSDCKSGYLFDGVPRTLGQANLFLQNDIEVNKVIDISLD

SEQ ID NO: 130705 - protein, 180 aa, Unknown
  Bacterial polypetide isolated from the Sargasso Sea
PPAAGKGTQAKRLVEERGLVQLSTGDMLRAAIASGSELGLKVKDVLARGDLVTDEIVIALIEARLPEAEAAGGAIFDGFPRTVAQAEALDAMLAKRGAQIDSVIRLKVDDAALTDRIGKRFAEQGRADDNPETFKDRLAVYNRQTAPLLPYYTDQGKLTEVDGMGDIASVAAAIDAALDA

SEQ ID NO: 130706 - protein, 183 aa, Unknown
  Bacterial polypetide isolated from the Sargasso Sea
MKSRLLFLGPPGAGKGTQAARLCIANGMSHLSTGDLLRSEVAAGTALGQEAEAVMNRGELVSDALVLAIVESQLKGLSSEGWLLDGFPRTVPQADALEPLLDELKQPIEAVVLLELDDAVLIERLLARGRDDDNEAVIRNRLEVYREKTSPLISFYRDKGLLVSVEANGSVEEITERITKVLS

SEQ ID NO: 130707 - protein, 190 aa, Unknown
  Bacterial polypetide isolated from the Sargasso Sea
MNIIIFGPPGAGKGTQSKFIVNKYKLYQLSTGDLLRNEIKNKTELGEKISSIINSGELVSDEIVNSLIEKFVSNDSYKNKIIFDGYPRNLIQAKNLDNLLKKYNQKIDVVLKLSVSLETIKKRISTRQTQEKRADDKSEVAIKRYETFEQSTKPILEYYDKQNLIKEVNGEQKIDVINKEIGDIIDLIEG

SEQ ID NO: 130708 - protein, 214 aa, Unknown
  Bacterial polypetide isolated from the Sargasso Sea
MKNIILLGPPGAGKGTQADLICDLLSIPKISTGDMLREAVASGSELGIKVSEILDSGALVSDEIIGSLIEDRLTKSDCANGSLFDGVPRTIGQAEQLATMGINFTHVIEIQVSDDTIVNRMSGRRVHPGSGKNYHIEFNPPINEGLDDETGEPLIQREDDKPETVLRRLNVYHEQTKPLTDFYINLSDTGNLKFIKVDGAESVETVFQNISENI

SEQ ID NO: 130709 - protein, 215 aa, Unknown
  Bacterial polypetide isolated from the Sargasso Sea
MKIILLGPPGAGKGTQAESICENYGIPHISTGNMLREAVEGGTKLGLEAKSLMDAGILVSDDVIVGLVEERISSDDCSEGFLFDGFPRTIPQAEALIERDIHIDAVVEIAVPDQDIIDRMAGRRMHPASGRNYHIIFNPPKNEGKDDITGEDLILREDDKPETVKDRLKVYADQTSPLVVFYSNLSASSQLKYIKVSGTETPSNVTQQILKDLEI

SEQ ID NO: 130710 - protein, 190 aa, Unknown
  Bacterial polypetide isolated from the Sargasso Sea
MNNIIFFGPPGAGKGTQAKIISKFLNVPHLSTGDILRKKLQDEDKLANELKNIMSSGNLVSDDILNSIVASRLENEINRGFILDGYPRTLNQSQFLDNFLLETSNSINYIFNIQINFQILKGRILKRSSEESRDDDNIDVIETRYNEYLNSTQKVSNFYRDKYPSFFYEIDGSLQIEEITREITKVLKRS

SEQ ID NO: 130711 - protein, 140 aa, Unknown
  Bacterial polypetide isolated from the Sargasso Sea
MSHRLLFVGPPGAGKGTQAERLAASHGLLHLSTGDLLRAEVKAGSDLGKEAEAVMNRGELVSDALVLAIVRSRLQNHSGGWLLDGFPRNLAQAEALDELLSKLNQPLQSVLLMELDDEELVQRLLARGRADDNEEVIRHR

SEQ ID NO: 130712 - protein, 120 aa, Unknown
  Bacterial polypetide isolated from the Sargasso Sea
MFGPPGAGKGTQAKKLANKLNLFQLSTGDLLRNEIKNKTDIGKEIDNIISKGDFATDKIVNKLLNKIITNQNYRNRIIFDGYPRNLKQAKNLEIMLNSDNQSKSFILFLKVSREIIEKRI

SEQ ID NO: 130713 - protein, 145 aa, Unknown
  Bacterial polypetide isolated from the Sargasso Sea
MNIVIFGPPGAGKGTQSRFIVQKYKLHQLSTGDLLRNEIKKKTDLGNKISTIMNSGELVSDEIVGELIEKFVSNDVFKHKIIFDGYPRTILQAQNLDNVLKKYNQKIDIVLKLSVSLETVKKRIIERQSQENRADDNEDIAIKRY

SEQ ID NO: 130714 - protein, 62 aa, Unknown
  Bacterial polypetide isolated from the Sargasso Sea
MNIILLGPPGAGKGTQARYLVEKKNMIQLSTGDMLREAKDSGSEMGNRVSEVMARGDLVTDD

SEQ ID NO: 130715 - protein, 181 aa, Unknown
  Bacterial polypetide isolated from the Sargasso Sea
MILFGPPGAGKGTQAKFLVEKLNSFQVSTGDILRDEIKKDSEIGKKIINNMNDGKFVEDEIVNKLLEKIIFDPKKKNKLIFDGYPRTINQAKNLENLLSKSNQKINYIFFLNVSKDSIIKRIEKRKILEKRSDDDSNIILKRYDIYMKETKPVLDFYSSKKGFYEIDGSLNIEQITNKIDD

SEQ ID NO: 130716 - protein, 204 aa, Unknown
  Bacterial polypetide isolated from the Sargasso Sea
MNIILLGPPGSGKGTQAQELNRRHGLIHLSTGDMLRAAIGSGSELGQNVKNIMEAGSLVPDDIMIRMISERIEQPDCANGFILDGFPRTPAQAEALDIMLSKKNIKIDHVIEMSVHIEILTKRIAGRYSCVGCGAGYHDEFQQPARPGICDYCGETEFSRRSDDKPETVRARLDAYESQTAPLLPYYQNSNCLITVDAMAEIAN

SEQ ID NO: 130717 - protein, 48 aa, Unknown
  Bacterial polypetide isolated from the Sargasso Sea
MIVIFFGPPGAGKGTQAELFSKEFNIPHLSTGDILRKKILENNPLSNN

SEQ ID NO: 130718 - protein, 189 aa, Unknown
  Bacterial polypetide isolated from the Sargasso Sea
MILIFFGPPGAGKGTQAKILSKNLNIPHLSTGDILRNKLLDKDSLSIKLKNTIDSGNLVSDEILNGIIFERLQKKDCNNGFILDGYPRTIFQKNFLENYFKENNLKIFAIFDLVIDENFIIERIKSRSNIEKRGDDKLSIVKNRITKYLKETKPLSDYYKKKYKNNYHLINGNQEIEKIREDLGKIVKK

SEQ ID NO: 130719 - protein, 196 aa, Unknown
  Bacterial polypetide isolated from the Sargasso Sea
MRLILMGAPGSGKGTQAEKLMDDFGCRQISTGVLLRQAIESGSELGKKVQKIMSEGLLVSDDIVLGLIKNELSEIGESGFLLDGYPRNINQAKSLNDLLENIDKPLDYSILIDVPSEILIKRLSGRRTCSLTGKTLNIYFSSENEIDECLSKGGQLLQREDDNEESITKRIEVYEEQTEPMVDFYRSTGLLYTIDG

SEQ ID NO: 130720 - protein, 190 aa, Unknown
  Bacterial polypetide isolated from the Sargasso Sea
MNIVIFGPPGAGKGTQSKFIVDKYGLHQLSTGDLLRNEIKNKTELGSKIDSIMNKGELVSDEIVSNLISKFISNDIYKNKIIFDGYPRTLSQANNLNNLLKAHKQKINIVLKLSVSLETVKKRILDRQSIENRADDNEEIAIKRYQTYEKSSEPVLSYYKQSNLLKVVNGEATISEINTEISYLIDTIKG

SEQ ID NO: 130721 - protein, 192 aa, Unknown
  Bacterial polypetide isolated from the Sargasso Sea
MVNNKVNIIIFGPPGAGKGTQAKHLVKKLDSFQVSTGDMLREEINNDTEIGKKIVSNMNEGKFVDDVIVNKLLEKIIFDPNKVNRLIFDGYPRTISQAKNLDNLLDQSNQKINFVFFLNVEKETIIKRIKKRKILEKRLDDNTDTILKRYDTYMKITKPVLDYYLKNQNFYEVDGSMNKEKIAQKIEEILKV

SEQ ID NO: 130722 - protein, 129 aa, Unknown
  Bacterial polypetide isolated from the Sargasso Sea
MNIVLFGPPGAGKGTQAKLICEKYFLNHLSTGDLLRKESSKETSLGIQIKNTINDGKLVSDETTIELIKQFINENKNNKKGFLFDGFPRNKKQAELLDHLMVSINEKILCVILLNVNEDVLKERIRIEV

SEQ ID NO: 130723 - protein, 148 aa, Unknown
  Bacterial polypetide isolated from the Sargasso Sea
MKLILFGPPGSGKGTQASLLAKKIKIPHLSTGDILRSKLNDNDKLAQELSEIMSSGNLVPDSILNPIVTEKLLSSECKNGFILDGYPRNKSQSDFLLNFLTKNKITINLIIDFKADTNTITNRIIERSKIENRSDDNLEVIKTRLEKY

SEQ ID NO: 130724 - protein, 183 aa, Unknown
  Bacterial polypetide isolated from the Sargasso Sea
MKLLIMGPPGAGKGTQAKILAKKFNLVHLSTGDILRKEIDKSSELGLKAQTYMNAGNLVPDDVLLEMMQSTLTELEDSGVILDGFPRTIPQAIGLSKIFQSLNQAIDSIINIEVDKEVLITRLVQRAKNSGRADDTEEVIVNRQNVYIELTAPLIEFYQSNIIHVDGDGSIEEVTERILKRIP

SEQ ID NO: 130725 - protein, 186 aa, Unknown
  Bacterial polypetide isolated from the Sargasso Sea
NLILFGPPGAGKGTQAKYLVKKLNAFQISTGDILRDEIQKNSEIGKKILNDMNVGKFVNDEIVNELIKNAIFDPQKKNKLIFDGYPRSLKQAKNLDLLLNSSNQKIDFIFFLNVNKNTIIKRIEKRKIIEKRSDDDLNTILKRYDTYVETTKPVLDFYSKNPNFYEIDGNLKIEQITAKIDVFLNV

SEQ ID NO: 130726 - protein, 127 aa, Unknown
  Bacterial polypetide isolated from the Sargasso Sea
RTIPQADAMKANGVVVDHVIEFDVPDDVIVERMSGRRVHPASGRVYHVSYNPPKVEGKDDLTGEDLVIREDDKEETVRKRLGIYHEQTELLVGYYRQEAEQGRTQYHHMMGTLPVEQVSAQLEALLG

SEQ ID NO: 130727 - protein, 180 aa, Unknown
  Bacterial polypetide isolated from the Sargasso Sea
MFNIVIFGKPGSGKGTQADFLKGKYDLYHISTGDLFRKNISNKTDLGIEAMSFLDNGDLVPDVVTIKMLENEVLANKDVNGFIFDGFPRTLNQAESLDTFLESNNQKINATIALEVDENELINRLIDRGKATNRSDDQDIEKIKNRFNEYNNKTSILINFYQKQSKFYSVNGHGSVDDIT

SEQ ID NO: 130728 - protein, 136 aa, Unknown
  Bacterial polypetide isolated from the Sargasso Sea
NGYILDGFPRTIPQAKGLDILLEQLNSPLDKAVVIDVDDNSIVERMGGRRVHPSSGRVYHIKFNPPKDKDKDDITGEPLIIRQDDKKETVLKRLEIYHEITSPLIKYYTKKNILITINGVNSIDGVYDDILENLNA

SEQ ID NO: 130729 - protein, 192 aa, Unknown
  Bacterial polypetide isolated from the Sargasso Sea
MKLILFGPPGSGKGTQASIISKKYNIPHLSTGDILRSKLNDNDELSKELSNIMSSGNLVTDSILNPIVTEKLLGNDCKRGFILDGYPRNKTQSNFLLDFMEKNHINLDLVIDFKADEKTVTNRIIERSKTENRSDDNIDVIKTRLEKYFEETQPLAFIFREKMKEKFFEIDAMQEISKIKYEIENRLKNAEF

SEQ ID NO: 130730 - protein, 79 aa, Unknown
  Bacterial polypetide isolated from the Sargasso Sea
MRIILLGPPGAGKGTQANHLIRDFGLVQLSTGDMLRAAVKSGSEIGKKAKAVMDAGELVSDEIVVGIVEERIKEPDCEK

SEQ ID NO: 130731 - protein, 110 aa, Unknown
  Bacterial polypetide isolated from the Sargasso Sea
LSEDSGKGFLLDGFPRTISQAEALDEMLSLNNLKVNHVVSLEVEDSILIERLLSRGRSDDNEETIKNRLDVYKNQTLPIKEYYRSSNILVEIKGDDSIEVVSANIFNAIG

SEQ ID NO: 130732 - protein, 149 aa, Unknown
  Bacterial polypetide isolated from the Sargasso Sea
MKKHLLFLGPPGAGKGTQAALLSEANSYLHLSTGELLRKEIDLDTDLGKQVKDIMNRGELVSDQLVLEIVKKNLDKDNNGWILDGYPRNLSQVNSLNDVLININQPLEIVFYLDIPDEVLIKRLLIRGRKDDNEKTIKTRLKIYKETTE

SEQ ID NO: 130733 - protein, 177 aa, Unknown
  Bacterial polypetide isolated from the Sargasso Sea
MRIVLLGAPGAGKGTQAQFIMEKHGIPQISTGDMLRAAIKAGTELGLKAKAVMDAGQLVSDDIIIGLVKERIAQPDCANGFLLDGFPRTIPQAQAMKDAGVTVDFVLEFDVPDEEIVKRMSGRRVHSGSGRTYHVVFNPPKVEGKDDVTGEDLVIRADDEETTVRKRLDVYHQQTAP

SEQ ID NO: 130734 - protein, 190 aa, Unknown
  Bacterial polypetide isolated from the Sargasso Sea
MKNIIFFGPPGAGKGTQAKIISNKYNIPHLSTGDILRSKIEEKDQLGLQVKQIIASGKLVSDDILNSIVSERLKNEKKNGFILDGYPRSSEQAQFLNNFLTNNSLKIDYIINIELNFETLKKRIIKRSEEEGREDDNISVIQTRYSEYMKTTKQVTEYYSENKKEIFHQINGQLEIDEITYKIEKILKIQ

SEQ ID NO: 130735 - protein, 196 aa, Unknown
  Bacterial polypetide isolated from the Sargasso Sea
MRLILMGAPGSGKGTQAEKLMDDFGCRQISTGVLLRQAIESGSELGKKVQKIMSEGLLVSDDIVLDLINNELSEIGESGFLLDGYPRNINQAKSLNDLLENIDKPLDYSILIDVPSEILIKRLSGRRTCSLTGKTLNIYFSSENEIDECLSKGGELLQREDDNEESITKRIEVYEEQTEPMVDFYRSTGLLHTIDG

SEQ ID NO: 130736 - protein, 86 aa, Unknown
  Bacterial polypetide isolated from the Sargasso Sea
MNIILLGPPGSGKGTQSNNLVEKYKLSHISTGDILRSQIAGKTKLGNAAKVYMDKGDLVPDNLIIDMVSSTTKTLQSILLDGFPRT

SEQ ID NO: 130737 - protein, 150 aa, Unknown
  Bacterial polypetide isolated from the Sargasso Sea
MNIILFGPPGCGKGTQASYISDFLSIPHLSTGDMLRSAVSSKSDIGLQVQEIMHKGGLVSDEVVLSIVKERVSKEDCLEGFILDGFPRTINQAKGLDLLLKENQRIEFVLRIKVDEENIIKRLIDRGRSDDKPEIIKNRFKSYNSQTQPL

SEQ ID NO: 130738 - protein, 121 aa, Unknown
  Bacterial polypetide isolated from the Sargasso Sea
MKILLIGPPGGGKGTQAKVLIEKYKIPQISTGDMLREHVKKLTPLGQKAKNYMENGELVPDSLILDMMELRLNDKDCINGYILDGFPRTIPQAEGLDFLLEKLNHNLDNVIIIDVPDDRIV

SEQ ID NO: 130739 - protein, 142 aa, Unknown
  Bacterial polypetide isolated from the Sargasso Sea
MNIVIFGPPGAGKGTQSKFIVNKFNLYQLSTGDLLRKEIKNKTKLGSEISSIINSGELVSDNIVSNLIEKFVSNDNYKNKIIFDGYPRTLTQAKDLDNILKKYNQKIDIVLKLSVSLETVKKRILERQTQEQRADDNEEIAI

SEQ ID NO: 130740 - protein, 58 aa, Unknown
  Bacterial polypetide isolated from the Sargasso Sea
MVNVIIFGPPGAGKGTQANNLVKKYNLYQISTGDLLRNEVANKTDIGRNIENIISKGD

SEQ ID NO: 130741 - protein, 72 aa, Unknown
  Bacterial polypetide isolated from the Sargasso Sea
MKKIILLGPPGAGKGTQADLICNYLKIPKISTGDMLREAISSGSSLGKRVNDVMNSGALVSDDIIIELILER

SEQ ID NO: 130742 - protein, 294 aa, Unknown
  Bacterial polypetide isolated from the Sargasso Sea
MRIVLLGAPGSGKGTQAKQLSTHYRIPQISTGDILRAAVDADNELGKRVSASLKAGQLVSDGIVIDAVTDSLRAPDSRRGFILDGFPRNIPQAQELDTRLSWMDRPVQLALNFCIEPERLLKRVTGRITCSECGAIYNRYFIPTEKRGVCDQCGSADLTRRSDDQAKTFSKRLDAYFVESEPLIDYFRAQQKLRTVQVEEDTTQVFEVICSVIDAEIRPFDKKVSAGDITTRSTSLTSRVISGGAVERAKAKKKPATAKAKLKAVTKKKVVKKPVVAKAKAKTITKKKIAKKPV

SEQ ID NO: 130743 - protein, 125 aa, Unknown
  Bacterial polypetide isolated from the Sargasso Sea
MFGPPGAGKGTQAKYLIKKLNSFQISTGELLREEIYKNSDIGKIITNDMKNGKFVSDEIVNSLIEKFISDPKKKNKLIFDGYPRSLSQAKNLDVLLEASNQKVDLILYLKVDKETVVKRLRKEKL

SEQ ID NO: 130744 - protein, 214 aa, Unknown; identical to SEQ ID NO: 130708
  Bacterial polypetide isolated from the Sargasso Sea

SEQ ID NO: 130745 - protein, 104 aa, Unknown
  Bacterial polypetide isolated from the Sargasso Sea
MFNIVIFGKPGSGKGTQADFLKDKYDLYHISTGDLFRKNILNKTDLGIEAKSFLDKGDLVPDIVTIKMLENEVLANKDANGFIFDGFPRTHNQAESLDIFLESI

SEQ ID NO: 130746 - protein, 112 aa, Unknown
  Bacterial polypetide isolated from the Sargasso Sea
MLNIVLFGPPGAGKGTQSDRLIDKYKLVHLSTGDIFRSNIKGETDLGLMAKKFMNKGELVPDSVTIKMLRDVVLKNPEANGFIFDGFPRTNNQAIALDEFLSELNTSITVML

SEQ ID NO: 130747 - protein, 189 aa, Unknown
  Bacterial polypetide isolated from the Sargasso Sea
MTNIIFFGPPGAGKGTQAKKISDFFKLQHLSTGEILRLKISQKDELGLKLKDIIASGKLVSDDVLNEIVAEKIVTCKDTGFILDGYPRTLNQSRFLEKILKNNFLKLNFIFNINITFDKLKNRIINRSKEEGREDDNLDAIKTRYDAYLQTTTEVSNYYSSENPEIFFDIDGSDQIEEITNKIKKIIVK

SEQ ID NO: 130748 - protein, 185 aa, Unknown
  Bacterial polypetide isolated from the Sargasso Sea
MILFGPPGAGKGTQAKFLVEKLNNFQISTGDMLRDEIKKDTEVGKKIINNMNDGKFVEDEIVNKLLEKIIFDSNKKNKLIFDGYPRTLNQAKNLENLLTNSNQKIDYIFFLNVNKDSIIKRIERRKIIEKRSDDDANTILKRYDFYMKETKPVLDFYSSKKGFYEIDGSLNIEQISNKIDDIIKV

SEQ ID NO: 130749 - protein, 93 aa, Unknown
  Bacterial polypetide isolated from the Sargasso Sea
MRIILLGPPGAGKGTQANMVRKKFDIPQISTGDMLRTAIRQGSKLGISAKKVMDVGALVSDDLILNLVKERINQNDCKNGYLFDGFPRTLTQA

SEQ ID NO: 130750 - protein, 192 aa, Unknown
  Bacterial polypetide isolated from the Sargasso Sea
MNIVLFGPPGAGKGTQAKLICEKYFLNHLSTGDLLRKESSKETSLGIQIKNTINDGKLVSNETTIELIKQFINENKNNKKGFLFDGFPRNKKQAELLDYLMESINEKILCVILLNVNEDVLKERIINRSTTEGRSDDNLEILSKRLHTYSSETEPLIEYYSSQNLVRKVHGIGEISDINQGISSHIEASLNA

SEQ ID NO: 130751 - protein, 164 aa, Unknown
  Bacterial polypetide isolated from the Sargasso Sea
MGLQAKAVMDSGALVSDDIIIGLVKERITQPDCANGFLFDGFPRTIPQADAMKAAGVKLDYVLEIDVPFDAIIERMSGRRSHPASGRTYHVKFNPPKVEGKDDVTGEELIQREDDKEETVKKRLQVYSDQTRPLVDYYSNWAKAEPAAAPKYRAISGTGSVDEI

SEQ ID NO: 130752 - protein, 134 aa, Unknown
  Bacterial polypetide isolated from the Sargasso Sea
MNTFILLGPPGAGKGTQADLISADLGIPKISTGDMLRSAVASKSDLGNRVEDILNSGKLVSDDIIIELINDRINQSDCKSGYLFDGVPRTLGQANLFLQNDIEVNKVIDISLDDKLIIKRMSGRRFHIASGRSY

SEQ ID NO: 130753 - protein, 163 aa, Unknown
  Bacterial polypetide isolated from the Sargasso Sea
MNLIIFGPPGAGKGTQADFIVNKFNLFKLSTGEVLRNEIKSKTQLGKEISSIINSGSLVSDNIVERLVETFINDKKYKDRLIFDGYPRNLTQAKTLQKLLIKHGQEISLVLKLSVSLETITKRILERRAIEKRKDDSKEIAIKRYQTYEKSTEPVIEYYKKLN

SEQ ID NO: 130754 - protein, 70 aa, Unknown
  Bacterial polypetide isolated from the Sargasso Sea
MNIILIGPPGAGKGTQAAFLENNFSLKQLSTGDMCRVTMKENTDLGNKVRVIVEAGDLVPDDIMVQRYQS

SEQ ID NO: 130755 - protein, 66 aa, Unknown
  Bacterial polypetide isolated from the Sargasso Sea
MNIVIFGPPGAGKGTQSDKIVEKYNLFKLSTGDLLRKEINKKSDIGKKIQEIVNSGKLVSDELINN

SEQ ID NO: 130756 - protein, 99 aa, Unknown
  Bacterial polypetide isolated from the Sargasso Sea
MNIIIFGPPGAGKGTQSKFIVNKFNLYQLSTGDLLRKEIKNKTKLGSEISSIINSGELVSDEIVSNLIEKFVSNDTYKNKIIFDGYPRTLNQAKNLDKS

SEQ ID NO: 130757 - protein, 143 aa, Unknown
  Bacterial polypetide isolated from the Sargasso Sea
MNKILLLGPPGAGKGTQADLICKSLAIPKISTGDMLRSSIASGSELGKKVTNIMNSGALVSDQIIIELILDRISQPDCNQGFLFDGGIRTVGQADLCVENNIEFSHVIEIKVEDNVIVDRMSGRRVHPGSGRNYHLVYQPPKK

SEQ ID NO: 130758 - protein, 183 aa, Unknown
  Bacterial polypetide isolated from the Sargasso Sea
MFGPPGAGKGTQAKYLVKKLNGYQISTGDILREEIKKDSNIGKKIINNMNEGKFVSDEIVNSLLKNHVFDPNKKGKLIFDGYPRSLSQAKNLDLLLNNSNQSINHIFFLNVNKDTIVERIKKRKILEKRSDDDLNTILKRYDTYIATTRPVLDHYSKNSNFHEIDGSMEINQITSKIETFLNV

SEQ ID NO: 130759 - protein, 71 aa, Unknown
  Bacterial polypetide isolated from the Sargasso Sea
MIGPPGAGKGTQAKYLVKKLKNFQVSTGDMLREEIQKNSEIGKKILDDMSSGKFVHDNKVNKLIENILLDP

SEQ ID NO: 130760 - protein, 199 aa, Unknown
  Bacterial polypetide isolated from the Sargasso Sea
MKKIILLGPPGAGKGTQADLICEVLDIPKISTGDMLRAAIASQSSLGKKVENILSSGALVSDDVIIELINDRLLADDCAIGYLFDGVPRTLGQAELFDQSNIGIDGVIQIDLPDDVIVERMSGRRFHIESGRSYHINFNPPKQEGIDDVTGEPLIQREDDLPETVLKRLQVYHDQTHPLIDFYTAKANQQNLEYILCRW

SEQ ID NO: 130761 - protein, 217 aa, Unknown
  Bacterial polypetide isolated from the Sargasso Sea
MILLGPPGAGKGTQAEAICEKYDIPQISTGDMLRSEIKSESQLGMSAKKIMDAGKLVDDQLIIKLVLSRISKPDCSNGYLFDGFPRTIPQAEALKTAKVLLNAVVEINVLDDEIVTRVSGRRVHPGSGRVYHIVNKPPKKNGLDDITGEPIIQREDDNEKTVKKRLDVYHHQTKPLISFYKSWYQNDDQSPKFISVSGTGSIADIKTSILNSLENLN

SEQ ID NO: 130762 - protein, 150 aa, Unknown
  Bacterial polypetide isolated from the Sargasso Sea
MRIILLGPPGAGKGTQANHLIRDFGLVQLSTGDMLRAAVKSGSEIGKKAKAVMDAGELVSDEIVVGIVEERIKEPDCEKGFLLDGFPRNIVQAEKLDEMLRRSAQKIDCVLEIEVDEEAVVRRIAGRRFHLASGRSYHIEFNPPKVPTET

SEQ ID NO: 130763 - protein, 182 aa, Unknown
  Bacterial polypetide isolated from the Sargasso Sea
MKKHLLFLGAPGAGKGTQAELLSQTYSYLHLSTGELLRKEIEMNTTLGIQVKDIMNSGELVSDELVLKIVRHNLLKDNKGWILDGYPRNLSQASSLNEVLTEINQPLELVFYLDIPEEVLIKRLLLRGRKDDTEETIRTRVDIYKKTTEPLIQYFKDLSLLEYIDADRDLKTISSDIKQKMA

SEQ ID NO: 130764 - protein, 183 aa, Unknown
  Bacterial polypetide isolated from the Sargasso Sea
MKNRLLFLGPPGAGKGTQAARLCAANSMKHLSTGDLLRSEVAAGSELGKEAEAVMNRGELVSDALVLAIVESQMKALTSDGWLLDGFPRTVPQAEALEPLLTELQQPIQAVVLLELDDAVLIERLLSRGRADDNEAVIRNRLEVYREKTAPLIRFYSDKELLVSVPAQGSVEEITKRIESVLD

SEQ ID NO: 130765 - protein, 188 aa, Unknown
  Bacterial polypetide isolated from the Sargasso Sea
MIFIFFGPPGAGKGTQAALLSKKYNIPHLSTGEILRNNLLGDSPESIKIKKILEKGDLVSDEILNEIIKQKLDSPECIHGYILDGYPRTLSQNDWLQNYLNFKNLEITKIFDINLEKDIIVKRIKNRAILEKRKDDTEEVIKNRVSKYIEETKPLSKYYLKRNPKNYHLINGNQEIEMIKNDILKIVK

SEQ ID NO: 130766 - protein, 40 aa, Unknown
  Bacterial polypetide isolated from the Sargasso Sea
MKNIILLGPPGAGKGTQADLICDLCSIPKISTGDMLREAV

SEQ ID NO: 130767 - protein, 122 aa, Unknown
  Bacterial polypetide isolated from the Sargasso Sea
MKIILLGPPGAGKGTQAEVLCETFSIPHISTGNMLREAVEEETDLGLEAKALMDAGILVSDEVIVGLVEDRILKDDCNNGFLFDGFPRTIPQAQALVDRDINIDSVVEIHVPDEDIIERMSG

SEQ ID NO: 130768 - protein, 215 aa, Unknown
  Bacterial polypetide isolated from the Sargasso Sea
MKIILLGPPGAGKGTQAETLCEAFTIPHISTGNMLREAVDEETELGLEAKALMDAGILVSDEVIVGLVEDRISKGDCKNGFLFDGFPRTIPQAQALVQRDIPIDAVIEIHVPDQDIIERMSGRRMHPGSGRNYHVIYNPPKIDGKDDLTGEDLVQREDDEPETVKDRLKVYEDQTAPLIDFYSEMSKQEKLKYIKVSGTSTPEEVSSEILSMLNI

SEQ ID NO: 130769 - protein, 218 aa, Unknown
  Bacterial polypetide isolated from the Sargasso Sea
MRIILLGPPGAGKGTQANHLIRDFGLVQLSTGDMLRAAVKSGSEIGKKAKAVMDAGELVSDEIVVGIVEERIKEPDCEKGFLLDGFPRNIVQAEKLDEMLQRSGQKIDCVLEIEVDEEAVVRRIAGRRFHLASGRSYHIEFNPPKVADRDDDTGEELVQRDDDNEETVRARLNTYNEQTAPLSDHYRKQNLLKAIDGMGSPDEVYERLRQSLEDLNPS

SEQ ID NO: 130770 - protein, 43 aa, Unknown
  Bacterial polypetide isolated from the Sargasso Sea
MKNLILLGPPGAGKGTQARTLCEKYGFVQLSTGDMLREAKKDE

SEQ ID NO: 130771 - protein, 108 aa, Unknown
  Bacterial polypetide isolated from the Sargasso Sea
MRILLLGPPGAGKGTQAQFIKETLGIPQISTGDMLRAAVKSGSELGLKVKQVMESGSLVSDEIVIELVQERISRADCQNGFLFDGFPRTIPQAKAMNEAGVILDAVVE

SEQ ID NO: 130772 - protein, 78 aa, Unknown
  Bacterial polypetide isolated from the Sargasso Sea
MFGPPGAGKGTQADNIVKSFDLFKVSSGDLLRDEISRKTDLGNQINSIITKGSFVSDDVINKLIEKILSDMKYFNKLV

SEQ ID NO: 130773 - protein, 215 aa, Unknown
  Bacterial polypetide isolated from the Sargasso Sea
MNIILLGPPGAGKGTQAQFLVESLGMVQLSTGDMLREAKDSGTEMGKVVAEVMSRGDLVTDDIVIGLIKEKLDGDKGAGFIFDGFPRTLAQADALGALLNDCNIDLDSVIEIQVDDKALIKRITGRSTCGGCGQVYHDETKPWPKDGKCSTCGSNDVKRRTDDNEESLKQRLMEYYKKTSPLLGYYFAKGNLVSIDGLLSMNEVRDSLKKVINKE

SEQ ID NO: 130774 - protein, 118 aa, Unknown
  Bacterial polypetide isolated from the Sargasso Sea
MRLILMGAPGSGKGTQAEKLMDDYGCRQISTGVLLRQAIESGSKLGKKVQKIMSEGLLVSDDIVLGLIKNELSEIGESGFLLDGYPRNINQAKSLNNLLENIDKPLDYSILINVPSEI

SEQ ID NO: 130775 - protein, 62 aa, Unknown
  Bacterial polypetide isolated from the Sargasso Sea
MKTRLLFLGPPGAGKGTQAARLCETHGMKHLSTGDLLRSEVAAGSDLGKEAEAVRTGANWSA

SEQ ID NO: 130776 - protein, 49 aa, Unknown
  Bacterial polypetide isolated from the Sargasso Sea
MNIVIFGPPGAGKGTQSKFIVKKFGMYQLSTGDLLRNEIKNKTDLGKKI

SEQ ID NO: 130777 - protein, 186 aa, Unknown
  Bacterial polypetide isolated from the Sargasso Sea
MSNLVIFLGPPGAGKGTQAVSIAKEKNLAHISTGDMLREHVGNETELGKTAKTLLEEGKLVPDSLVIEMLQERLLSKDCVNGAILDGFPRTIAQAESLDNISAEFKISKVIVFEADRDELIKRILNRGETSGRSDDTEESLSVRLEVYENDTAPLIEYYELKNLVAKINAVGEVENIYNLILKEFK

SEQ ID NO: 130778 - protein, 112 aa, Unknown
  Bacterial polypetide isolated from the Sargasso Sea
MFGPPGAGKGTQAKYLVKKINGYQISTGDILREEIKKDTDIGKKIINNMNEGKFVSDEIVNNLLKNHVFDPNKKEKLIFDGYPRSLSQAKNLNILLNDSNQKIDFIFFLNVN

SEQ ID NO: 130779 - protein, 209 aa, Unknown
  Bacterial polypetide isolated from the Sargasso Sea
MRLILMGAPGSGKGTQAEKLMDDFGCRQISTGVLLRQAIESGSDLGKKVQKIMSEGLLVSDDIVLDLIKNELSEIGEGGFLLDGYPRNINQAKSLNDLLENIDKPLDYSILIDVPSEILIKRLSGRRTCSLTGKTLNIYFSSENEIDECLSKGGELLQREDDNKESITKRIEVYEEQTEPMVNFYRSTGLLHTIDGQGSVDDVYIRLKQ

SEQ ID NO: 130780 - protein, 100 aa, Unknown
  Bacterial polypetide isolated from the Sargasso Sea
MINIVLFGKPGAGKGTQANFLKKKYSLIHISTGDLFRYNIKNKTELGKLAKSFMDKGDLVPDKVTIKMLEEEVKRNTNAKGFLFDGFPRTKSQAEALDNF

SEQ ID NO: 130781 - protein, 51 aa, Unknown
  Bacterial polypetide isolated from the Sargasso Sea
MRIILLGPPGAGKGTQANHLIRDFGLVQLSTGDMLRAAVKSGSEIGKKAKA

SEQ ID NO: 130782 - protein, 190 aa, Unknown
  Bacterial polypetide isolated from the Sargasso Sea
MNNIIFFGPPGAGKGTQAKLISNKLNIPHYSTGDILRSKIKEKDSLAIKLKEIMSSGKLVSDEILNSIVASRLINSFDDGFILDGYPRTLTQSVYLNNFLLNHSQKIDFIFNIEISFNFLKERILKRSIEDGRDDDKIEILETRYSEYLSSTSKVSQNYKTLYPQIFIELDGTLEIDTITEKILGIIKKS

SEQ ID NO: 130783 - protein, 183 aa, Unknown
  Bacterial polypetide isolated from the Sargasso Sea
MKNRLLFLGPPGAGKGTQAARLCNANSMKHLSTGDLLRSEVAAGSDLGQEAEAVMNRGELVSDALVLAIVESQMKALTTDGWLLDGFPRTVPQAEALEPLLAELQQPIQAVVLLELDDAVLIERLLARGRADDNEAVIRNRLEVYREKTAPLIRFYSDKGLLVSVPAQGSVEEITKRIESVLG

SEQ ID NO: 130784 - protein, 182 aa, Unknown
  Bacterial polypetide isolated from the Sargasso Sea
MKKHLLFLGAPGAGKGTQAELLSQTNSYLHLSTGELLRKEIEMNTTLGIQVKDIMNRGELVSDDLVLKIVRQNLVKDNKGWILDGYPRNLSQANSLNEVLTEINQPLELVFYLDIPEEVLIKRLLLRGRKDDTEETIRTRVDIYKKTTEPLIQYFKNLSLLEYIDANRDLKTISSDIKQKMA

SEQ ID NO: 130785 - protein, 203 aa, Unknown
  Bacterial polypetide isolated from the Sargasso Sea
GTQRLSLYSKKFNIPQISTGDMLRAAVKEGTEVGLKAKKLMDAGELVSDEIILDLVQERISQADCKNGFLFDGFPRTINQAKELSNRGITIDFVVEINVDDDEIITRMSGRRVHQASGRTYHVKFNPPKIENVDDETGEPLIQRDDDQEETVKKRLKIYHESTFPLVEYYESMSSEGKTKYVKIDGVGQINEIQEKITENLAK

SEQ ID NO: 130786 - protein, 188 aa, Unknown
  Bacterial polypetide isolated from the Sargasso Sea
MNLVLFGPPGAGKGTQANDLKIKYNLRHLSTGDILRSEIEKGSELGELAQSFMNKGELVPDEVVIDMIENCLNEETNTNGFIFDGFPRTTEQAQALDNLLQKHDTEIDKMLSLEVDDEELVARIILRGRDSGREDDKNESVIFNRIITYNKKTAPLKKYYEDQGKYNRIEGVGDVEQVFERLVSAIEG

SEQ ID NO: 130787 - protein, 184 aa, Unknown
  Bacterial polypetide isolated from the Sargasso Sea
MRIILLGAPGAGKGTQAQFLMGKYGIPQISTGDMLRAAIKAGTELGLEAKRVMDEGKLVSDEIIIGLVKERIAQDDCKDGFLLDGFPRTIPQADAMKEAGVSVDHCIEFDVPDDVIVERMGGRRVHPASGRVYHVVYNPPKVEGKDNETGDDLIVRDDDKEETVRKRLAIYHEQTKPLVNYYSA

SEQ ID NO: 130788 - protein, 76 aa, Unknown
  Bacterial polypetide isolated from the Sargasso Sea
MNVIIFGPPGAGKGTQSNNIVKKFNLHQISTGDLLRNEVKNQTDLGKDIENIISKGDFATDEIVNELIKKAIFDPN

SEQ ID NO: 130789 - protein, 164 aa, Unknown
  Bacterial polypetide isolated from the Sargasso Sea
MIIILLGPPGSGKGTQANFIQNKLSIPHLSTGDILRQSVKNKTELGNIVKNIMAKGELVSDELVLQIIKERISQNDCDKGFILDGYPRNITQAESLKEVLKDVNRNIDRIIFLDVDFKVLESRIETRSRENNDEIRADDTSEVLIKRLDEYKLQTAPLAEYYCR

SEQ ID NO: 130790 - protein, 182 aa, Unknown
  Bacterial polypetide isolated from the Sargasso Sea
GNMLREAVEEETNLGLEAKALMDAGILVSDEVIVGLVEDRISKADCNKGFLFDGFPRTIPQAQALVDRDIHIDSVVEIHVPDEDIIERMSGRRMHPGSGRNYHIVYNPPKIDGKDDLTGEDLIQREDDKPETVKDRLIVYKNQTSPLVNFYSEMSEKNKLEYFKVLGTSSPEDVSTEILSKL

SEQ ID NO: 130791 - protein, 189 aa, Unknown
  Bacterial polypetide isolated from the Sargasso Sea
MTNIIFFGPPGAGKGTQAKNISDFLKLHHLSTGEILRLKILQKDELGLKLKDIMASGKLVSDDILNEIVAEKIVACKNIGFILDGYPRTLNQLQFLEKILKKNSLKLNYIFNINISFDTLKNRIINRSKEEGREDDNLDAIKIRYDAYLQTTTEVSNYYSLENREIFFDIDGSDQIEEITNKIKKIIVK

SEQ ID NO: 130792 - protein, 56 aa, Unknown
  Bacterial polypetide isolated from the Sargasso Sea
MRILLLGPPGAGKGTQAQFIKETLGIPQISTGDMLRAAVKSGSELGLKVKQVMESG

SEQ ID NO: 130793 - protein, 182 aa, Unknown
  Bacterial polypetide isolated from the Sargasso Sea
MKKHLLFLGAPGAGKGTQAELLSQTYSYLHLSTGELLRKEIEMNSILGIEVKDIMNRGELVSDELVLKIVKQNLDNNNKGWILDGYPRNLSQANSLNEVLTEINQPLDVVFYLDIPEEVLIKRLLLRGRKDDTEETIKTRVDIYKKTTEPLIQYFKNLSLLEYIDADRDLKTISSDIKQKMA

SEQ ID NO: 130794 - protein, 192 aa, Unknown
  Bacterial polypetide isolated from the Sargasso Sea
MNIVLFGPPGAGKGTQAKLICEKYFLNHLSTGDLLRKESSKETSLGIQIKNTINDGKLVSNETTIELIKQFINENKNKKKGFLFDGFPRNKKQAELLDHLMVSIDEKILCVILLNVNEDVLKERIMNRSATEGRSDDNLETLSKRLHTYSSETEPLIEYYSSQNLVRKVHGTGEISDINQGISSHIEASLNA

SEQ ID NO: 130795 - protein, 190 aa, Unknown
  Bacterial polypetide isolated from the Sargasso Sea
MKNIVLFGPPGAGKGTQADRIKNKYNLFHISTGDVFRFNIRNNTKLGVLAKQYMDKGDLVPDEVTIQMLNNVVENNLEVNGFIFDGFPRTKSQANALDDLLLKYNSSISAMIALEVADEVLIERLLERGKQSGRADDSNKSIIENRIKEYYSKTAILKEFYQKKNCYFGIDGVGKIDEITERIVKVINQL

SEQ ID NO: 130796 - protein, 41 aa, Unknown
  Bacterial polypetide isolated from the Sargasso Sea
MNLIIFGPPGAGKGTQADFIVDKFNLYQLSTGEVLRNEIKN

SEQ ID NO: 130797 - protein, 190 aa, Unknown
  Bacterial polypetide isolated from the Sargasso Sea
MKLILFGPPGSGKGTQASLLAKKINIPHLSTGDILRAKLNDNDELAQELSKIMSSGNLVPDSVLNPIVSEKLLSNECKNGFILDGYPRNISQSDFLINFLEKNKIELDLIIDFTADTETVKQRILERAKIENRSDDNLDVISTRLEKYFNETQPLADLFKLKFTGKFIEINAMQEISKIQSEIQNRLENA

SEQ ID NO: 130798 - protein, 212 aa, Unknown
  Bacterial polypetide isolated from the Sargasso Sea
MDSSIVLFGPPGAGKGTQAGRIVEVTGKPQVSTGDMLRAAVAAGTELGRIAKGHMESGGLVPDDVIIGLIEERVKESDAKNGLLFDGFPRTVAQAEALAEIAPVSLVIAIEVEDESIVGRITGRFTCGECGSVYHDLFRPCKLEGICDECGSSNFKRRADDSEETVRARLAAYHEQTSPLASWYEQRGLLHRIDGNASIDEVGSRISKILDE

SEQ ID NO: 130799 - protein, 178 aa, Unknown
  Bacterial polypetide isolated from the Sargasso Sea
MNIVIFGPPGAGKGTQSKFIVNKFNLYQLSTGDLLRNEIKNKTQLGSEISSIINSGELVSDKIVGNLIEKFISNDTYKHKIIFDGYPRTLIQAKNLDNLLKKYKQKIDIVLKLSVSLETVKKRILERQTQEKRADDNEEIAIKRYKTYEKSSEPVIDYYKQSNVLKVVNGEAGISEIN

SEQ ID NO: 130800 - protein, 214 aa, Unknown
  Bacterial polypetide isolated from the Sargasso Sea
MNIILLGPPGAGKGTQARFLVEKRNMIQLSTGDMLREAKNSGSEMGNLVAEVMARGDLVTDEIVIGLIKEKISGEKGGGFIFDGFPRTLKQADALGNLLEECGENLDVVVEMKVDDDALVSRICGRSSCGNCGEVFHDVTNPWPTSGKCPKCSSNEVVRRADDNEESLRQRLMEYYKKTSSLIGYYYAKGDHVSVNGLASVEEVKKSIAGVLDG

SEQ ID NO: 130801 - protein, 191 aa, Unknown
  Bacterial polypetide isolated from the Sargasso Sea
MTNIVLFGKPGAGKGTQADFLKIKYNLFHISTGDLFRFNISNKTSLGNLAKTYIDNGDLVPDKVTIEMLKECVEKNFKSEGFIFDGFPRTISQAKVLDKFLHEKKVSISAMISLEVDEEILIKRLIDRGKISGRTDDMDELKIRNRFREYNMKTSILQDYYKKQSKFHSISGIGSIEEINSRLTRLIDSFL

SEQ ID NO: 130802 - protein, 169 aa, Unknown
  Bacterial polypetide isolated from the Sargasso Sea
MNLMLLGPPGAGKGTQAKRLEDARGLIQLSTGDMLRAAVASGSETGQKAREIMERGELVSDEIMIAMIRDRIQQPDCVHGFILDGFPRTTVQAEVLDAMLANMDVKIDHVIEMTVDDTALVERITGRYSCVKCGAGYHDKFQQPEADGVCDKCGSTEFSRREDDNEETV

SEQ ID NO: 130803 - protein, 177 aa, Unknown
  Bacterial polypetide isolated from the Sargasso Sea
MNKILLLGPPGAGKGTQADLICKSLAIPKISTGDMLRSAIASGSELGKKVTDIMNSGALVSDQIIIELILDRISQPDCTQGFLFDGGIRTVGQADLCVENNIEFSHVIEIKVEDNVIVDRMSGRRVHPGSGRNYHLVYQPPKKEGVDDITGEPLIQRDDDMPETVMHRLKVYQNETK

SEQ ID NO: 130804 - protein, 218 aa, Unknown
  Bacterial polypetide isolated from the Sargasso Sea
PGAGKGTQANFLKTALAIPQIASGDMLRAAMESGSALGKEIRATMDSGSLVSDAIIIELIKARIAEPDCKDGFLLDGFPRTVEQAKSLRDAGVFVDYVVEIRVHEEGIVERMAGRWIHRASGRVYHSVFNPPKVPFFDDETGEALVQRSDDNADTVRHRLHVYEKQTLPVIEYYSDLIHMGEKCAPRYVSINGMESVEEVRTHIFKAIKQTALLEQFA

SEQ ID NO: 130805 - protein, 128 aa, Unknown
  Bacterial polypetide isolated from the Sargasso Sea
MFGPPGAGKGTQAQIIVNKFNLFQVSTGKMLREEINKDTEIGKKIINNMNDGKFVEDEIVNKLLEKIIVDTKKMNKLIFDGYPRTINQAKNLEILLKKSNQKIEYVFFLNVNKDAIVKRIERRKILEK

SEQ ID NO: 130806 - protein, 72 aa, Unknown
  Bacterial polypetide isolated from the Sargasso Sea
MYNIIFFGPPGAGKGTQAKIISDFLKISHLSTGDILRKKLLDNDNLALELKQIMSSGNLVSDENLNTIVASK

SEQ ID NO: 130807 - protein, 189 aa, Unknown
  Bacterial polypetide isolated from the Sargasso Sea
MILIFFGPPGAGKGTQAFFIAKKFNIPHLSTGDILRGKLFDKDELSKKLKRIIDSGNLVSDEVLNEIIANRLALTDCKKGFILDGYPRTIAQKDFLENYLKLNNLQILSIFDLKLDESIIIERIKSRSNIEQRGDDKLSIIKTRIKKYLKETAPLSEYYRAKYPENYYSIDADREVEKIKEELLKILKK

SEQ ID NO: 130808 - protein, 49 aa, Unknown
  Bacterial polypetide isolated from the Sargasso Sea
MIIIFFGPPGSGKGTQASLLAKKFKIPHISTGDILRKKIKENDDLSKDL

SEQ ID NO: 130809 - protein, 184 aa, Unknown
  Bacterial polypetide isolated from the Sargasso Sea
MYNIIFFGPPGAGKGTQAKIISQYLHISHLSTGDILRKKLLDDDDLAFELKKIMSSGNLVSDEILNSIVSSRLINESNKGFILDGYPRTLKQSEFLNKFLLDSSNEINYIFNIHINFEILRDRILKRSKEESRDDDNIDVIETRYNEYINSTQKVSNFYKDKNPESFYELDGSLQIEEITKKIK

SEQ ID NO: 130810 - protein, 61 aa, Unknown
  Bacterial polypetide isolated from the Sargasso Sea
MFGPPGAGKGTQAKNLEKKLNNYQVSTGDMLRDEIKKDSEIGKKIINYMNDGKFVDDTIVN

SEQ ID NO: 130811 - protein, 190 aa, Unknown
  Bacterial polypetide isolated from the Sargasso Sea
MNIVIFGPPGAGKGTQSKFIVNKFNLYQLSTGDLLRNEIKNKTNLGSKISSIINSGELVSDKIVSNLIEKFISNNIYKNQIIFDGYPRTLTQAKNLDDLLKKYKQKIDIVLKLSVSLETVKKRISERQVQEKRADDNEEIAIKRYKTYEISSEPVINYYKQSNLLKVVNGEAGISEINSEISALIDTIKG

SEQ ID NO: 130812 - protein, 106 aa, Unknown
  Bacterial polypetide isolated from the Sargasso Sea
MKNIILLGPPGAGKGTQADLICNLLEIPKISTGDMLREAVASGSELGAKVSDILDSGALVSDEIIGSLINARLSMPDCQKGSLFDGVPRTLGQASILNEMNINFSD

SEQ ID NO: 130813 - protein, 205 aa, Unknown
  Bacterial polypetide isolated from the Sargasso Sea
MGMPGSGKGTQSEILKQKFSIANISTGAILRQASREQGKQAELIRSFIDKGQLVPDKIIIQMLVNRIHQKDCSKGYILDGFPRNLAQGESLDNTGIKVDFVIYLEISEQAIISRMAGRRIHPASGRSYHLQHNPPQKDGLDDISGEPLIQRDDDTPEVIKKRVASFNKETRPLLEFYKTKKVKFVEVDASKELNDVSCSILGQIN

SEQ ID NO: 130814 - protein, 190 aa, Unknown
  Bacterial polypetide isolated from the Sargasso Sea
MNIVIFGPPGAGKGTQSKFIVNKFNLYQLSTGDLLRNEIKNKTKLGSEISSIINSGELVSDKIVSNLIEKFISNDNYKNKIIFDGYPRTLIQAKNLDDLLKKYKQKIDIVLKLSVGLETVKKRISERQAQEKRTDDNEEIAIKRYKTYEKSSEPVIDYYKQSNLLKVVNGEAGISEINSEIRGLIDAIKG

SEQ ID NO: 130815 - protein, 176 aa, Unknown
  Bacterial polypetide isolated from the Sargasso Sea
MFGPPGAGKGTQAKYLVKKLNGFQISTGDILREEIKKDTEIGRKIINNMNEGKFVSDEIVNNLLKKYVFDQNKKEKLIFDGYPRSLSQAKNLDLLLNGSNQKIDHIFFLNVNKETIIERIKKRKIIEKRSDDDLDTILKRYDTYIETTRPVLDYYSKNSNFHEIDGSMEITKLPAK

SEQ ID NO: 130816 - protein, 183 aa, Unknown
  Bacterial polypetide isolated from the Sargasso Sea
MFGPPGAGKGTQAKYLVKKINGYQISTGDMLRDEIKKNSEIGQNIIHDMNDGKFISDEIVNKLIRTFVFDTKKKNKLIFDGYPRTLSQAKNLDTLLDESNQYIDYIFYLNVNKDTIIERIQKRKTEENRSDDELDTILKRYDTYMETTKPVLNFYSKNPNFHEIDGSQKIDEITSKIDTFINV

SEQ ID NO: 130817 - protein, 212 aa, Unknown
  Bacterial polypetide isolated from the Sargasso Sea
MFGPPGAGKGTQANNLVNEYNLYKVSTGDLLREEIKNKTPLGTKIQSIIDKGSFVSDNTINDLIHNILSNNKLNNRLIFDGYPRNLLQAKDLDAFIKNNNLKISCVLSLNVDKDLIIKRILGRQTCAKCGLIFNEFFYPANKNNHKCDEKFLIKRSDDNEKTITNRYNAYTQKTLPILDFYKQQKLLHEINGTAEISQIFEEIRGIIASLDT

SEQ ID NO: 130818 - protein, 44 aa, Unknown
  Bacterial polypetide isolated from the Sargasso Sea
MNIIIFGPPGAGKGTQSKFIVKKFKLYQLSTGDLLRNEINTKQN

SEQ ID NO: 130819 - protein, 178 aa, Unknown
  Bacterial polypetide isolated from the Sargasso Sea
MNVIIFGPPGAGKGTQSHYISKKYNLYQLSTGDLLRNEIKNKTEIGQEIEHIISRGDFATDDVVNRLLKKIITSNEYRNRIIFDGYPRNISQAQNLELILNSDNQSIQFILFLKVSRNIIEERILGRITCSKCNKTFNEFNLDDEIKLHSCGKEYLQKRKDDNKDSILNRYEEYMKKT

SEQ ID NO: 130820 - protein, 213 aa, Unknown
  Bacterial polypetide isolated from the Sargasso Sea
MNILFLGAPGSGKGTQSKNIEEKFNIPQISTGDLLRAETASESKMGQELKNIMSSGKFVSDDIVLKLVSKKITSNDCKNGFILDGFPRNLAQASSLDSLLSTLNLSLEYVFLIDVPADLIIKRCVGRITCNTCGKIENEYFSEFREGDKCGEGIFVKRADDDEETVSNRLKVYAEQTEPIIDFYEEKGVLHRIIGGEDGPQRLTDEIISIIKN

SEQ ID NO: 130821 - protein, 68 aa, Unknown
  Bacterial polypetide isolated from the Sargasso Sea
MNIVIFGPPGAGKGTQSKYIVDKYKLYQLSTGDLLRNETRNKTKLGLKISSIINSGELVSDKIVGDLI

SEQ ID NO: 130822 - protein, 182 aa, Unknown
  Bacterial polypetide isolated from the Sargasso Sea
MRIILLGPPGAGKGTQANHLIRDFGLVQLSTGDMLRAAVKSGSKIGKKAKAVMDAGELVSDEIVVGIVEERIKEPDCEKGFLLDGFPRNIVQAEKLDEMLQRSGQKIDCVLEIKVDEEAVVRRIAGRRFHLASGRSYHIEFNPPKVADRDDDTGEELVQRDDDNEETVRARLNTYNEQTAPL

SEQ ID NO: 130823 - protein, 212 aa, Unknown
  Bacterial polypetide isolated from the Sargasso Sea
MNNIILLGPPGAGKGTQADLICDLCDIPKISTGDMLREAVASGSDLGARVSEILDSGGLVSDDIIGSLIQERLQKPDCENGSLFDGVPRTIGQAEQLSDMKINFTHVIEIFVEDEIIVKRMSGRRVHPASGRNYHIDHNPPKNSGLDDETGEPLVQREDDKPDTVLKRLDVYHEQTKPLTTFYKGQSDSGLLKFIKVDGSNSVNKVFRAISS

SEQ ID NO: 130824 - protein, 83 aa, Unknown
  Bacterial polypetide isolated from the Sargasso Sea
MNKILLLGPPGAGKGTQADLICKSLAIPKISTGDMLRSAIASRSELGKKVTDIMNSGALVSDQIIIELILDRISQPDCTQGFL

SEQ ID NO: 130825 - protein, 159 aa, Unknown
  Bacterial polypetide isolated from the Sargasso Sea
MFGPPGAGKGTQAKYLVKKLNSFQISTGELLREEIYKNSAIGKTITNDMKNGKFVSDKIVNKLIENLVFDPQKKNRLIFDGYPRSLSQAKNLDILLESSNQKIDLILYLKVDKDAVVKRLEKRKIIENRSDDETSTILKRFDTYMNITAPVLNYYSENP

SEQ ID NO: 130826 - protein, 216 aa, Unknown
  Bacterial polypetide isolated from the Sargasso Sea
MNTFILLGPPGAGKGTQADLISADLGIPKISTGDMLRSAVASKSDLGNRVEDILNSGKLVSDDIIIELINDRINQSDCKSGYLFDGVPRTLGQANLFLKNDIEVKKVIDISLDDELIIKRMSGRRFHIASGRSYHIEFNPPKAEGLDDDTGEPLIQREDDFPETVKKRLEVYHAQTKPLTDFYKSKALEGIMSFISINGNQSVDEVFSEIKSYLYK

SEQ ID NO: 130827 - protein, 215 aa, Unknown
  Bacterial polypetide isolated from the Sargasso Sea
MKIILLGPPGAGKGTQAETLCEAFNIPHISTGNMLREAVDEETELGLEAKALMDAGILVSDEVIVGLVEDRISKGDCKNGFLFDGFPRTIPQAQALIDRDIPIDAVIEIHVPDQDIIERMSGRRMHPGSGRNYHVIYNPPKIDGKDDLTGEDLVQREDDEPKTVKDRLKVYEDQTAPLIDFYSEMSKQEKLKYIKVSGTSAPEEVSSEILSMLNI

SEQ ID NO: 130828 - protein, 218 aa, Unknown
  Bacterial polypetide isolated from the Sargasso Sea
MRVILLGAPGAGKGTQAQFIKEQFNIPQISTGDMLRAAVKAGTPLGLEAKKVMDAGGLVSDDIILGLVKERITENDCANGFLFDGFPRTIPQAQSLVEQGVDIDFVVEIDVDDEEIIERLSGRRVHPASGRVYHTKYNPPKVEGKDDETGDELVQRDDDQEETVRKRLEVYQAQTRPLVDFYQDLAKQGEANAPRYVRVAGVGSVDDIRDRVLSALKG

SEQ ID NO: 130829 - protein, 214 aa, Unknown
  Bacterial polypetide isolated from the Sargasso Sea
MNKILLLGPPGAGKGTQADLICKSLAIPKISTGDMLRSSIASESELGKKVTNIMNSGALVSDQIIIELILDRISQSDCNQGFLFDGGIRTVGQADLCVENNIEFSHVIEIKVEDNVIVDRMSGRRVHPGSGRNYHLVYQPPKIEGVDDITGEPLIQRDDDMPETVMHRLEVYQNETKPLVAYYKSLESKSSLKYVAVDGSQAVEKVFEDIERSF

SEQ ID NO: 130830 - protein, 174 aa, Unknown
  Bacterial polypetide isolated from the Sargasso Sea
MKIILLGPPGAGKGTQAESICENYGIPHISTGNMLREAVEAGTKLGLEAKSLMDAGILVSDDVIVGLVEERISADDCSEGFLFDGFPRTIPQAEALIERDINIDAVVEIDVPDQDIIDRMAGRRMHPASGRNYHIIFNPPKNEGKDDITGEDLILREDDKPETVKDRLKVYADQ

SEQ ID NO: 130831 - protein, 203 aa, Unknown
  Bacterial polypetide isolated from the Sargasso Sea
MKNIILLGPPGAGKGTQADLICDLFDIPKISTGDMLREAVASGSELGIKVSEILDSGALVSDEIIGSLIEDRLTKPDCVNGSLFDGVPRTIGQAEQLAAMGIDFTHVIEIQVADETIVNRMSGRRVHPGSGKNYHIEFNPPMNEGIDDDTGEPLIQREDDKPETVLKRLNVYQEQTKPLTDFYMNLANSGTLKFIKVDGSDSV

SEQ ID NO: 130832 - protein, 210 aa, Unknown
  Bacterial polypetide isolated from the Sargasso Sea
MNLILLGMPGAGKGTQADLIKNKFHIPTISTGAILREVSNSNSPLAKKVRGFLDAGTLVPDEIIVEMLVQRVEEDDCKDGFILDGFPRNLDQAKALENAGIAISNVIFLKISESEIISRMSGRRVHLPSGRSYHIVHNPPKNEGRDDETGEELVLRDDDKPEVIKKRLEVYFQETEPLLDFYIKSEIIFDEVDASKSVEDLTNEIFKILT

SEQ ID NO: 130833 - protein, 214 aa, Unknown
  Bacterial polypetide isolated from the Sargasso Sea
MNTFILLGPPGAGKGTQADLISAHLGIPKISTGDMLRSAVASKSDLGNRVEDILNSGKLVSDDIIIELINDRIHQSDCKSGYLFDGVPRTLGQANLFLQNDIEVKKVIDISLDDELIIKRMSGRRFHIASGRSYHIEFNPPKAEDLDDETGEPLIQREDDFPETVKKRLEVYYAQTKPLTDFYKSKASEGIMSFISINGNQSVDEVFSEIKSFL

SEQ ID NO: 130834 - protein, 207 aa, Unknown
  Bacterial polypetide isolated from the Sargasso Sea
MTGSIVLFGPPGAGKGTQADKIVELTGKPQVSTGDMLRLALSNETELGLEAKKYMESGQLVPDNVIIGLIKDRMNESDASNGVLFDGFPRTIPQAEALESITEVSTVISIEVPDEDIVNRIVGRRMDPETGEIYHVSFKTPPPEIAHRLIQRKDDNEETVRMRLSSYHEQTKPLGDWYLEKGILYAVEGTGSIDEVARSISKILTYL

SEQ ID NO: 130835 - protein, 213 aa, Unknown
  Bacterial polypetide isolated from the Sargasso Sea
MRLILMGAPGSGKGTQAEKLMDDFGCRQISTGVLLRQAIESGSDLGKKVQKIMSEGLLVSDDIVLDLIKNELSEIGEGGFLLDGYPRNINQAKSLNDLLENIDKPLDYSILIDVPSEILIKRLSGRRTCSLTGKTLNIYFSSENEIDECLSKGGELLQREDDNKESITKRIEVYEEQTEPMVNFYRSTGLLHTIDGQGSVDDVYIRLKQLMEL

SEQ ID NO: 130836 - protein, 165 aa, Unknown
  Bacterial polypetide isolated from the Sargasso Sea
MKIILLGPPGAGKGTQAESICQNYAIPHISTGNMLREAVEAGTKLGLEAKSLMDAGILVSDEIIVGLVEERISEDDCSEGFLFDGFPRTIPQAEALIDRDIEINAVVEIDVPDQDIIDRMAGRRMHPASGRNYHIIFNPPKKEGKDDITGEDLILREDDKPETVR

SEQ ID NO: 130837 - protein, 164 aa, Unknown
  Bacterial polypetide isolated from the Sargasso Sea
MNLILLGPPGAGKGTQSARIVTVYNLVQISTGDILRAEVKSSTELGKIAKSLMDDGKLVPDNLIIDMISGYIEKEAGSSGFILDGFPRTEEQAKALDVMLLEKDLKIDYVIKLEVDEKALIERVVGRFSCGDCGQGYHDKFAPTKLDNICDVCGSKNFVRRADD

SEQ ID NO: 130838 - protein, 212 aa, Unknown
  Bacterial polypetide isolated from the Sargasso Sea
MRIVMLGAPGSGKGTQAKKLMNDKRISHISTGDMLRSAVEEGTHLGLEAKDVMESGKLVSDNLMIGLIKECLSSKELENGFILDGFPRTTKQAIDLKDLLEDMNMPLDSALLMDVDFEILMKRLVGRRTCSVTGKLLNVYFSSPEELEECENLGGELIKREDDNEHTIRNRLDVYKEKTEPLISYYENENLLKRVNAEGSMEEVYRGLLAAI

SEQ ID NO: 130839 - protein, 220 aa, Unknown
  Bacterial polypetide isolated from the Sargasso Sea
MRLILLGAPGAGKGTQANFIKEKFGIPQISTGDMLRAAVKAGTPLGVEAKGYMDAGKLVPDALIIGLVKERLKESDCANGYLFDGFPRTIAQADAMKEAGVAIDYVLEIDVPFSEIIERMSGRRTHPASGRTYHVKFNPPKVEGHDDVTGEPLIQRDDDKEETVKKRLEVYEAQTKPLITYYGDWAQRGEENGLKAPQYRKISGLGSVEEIRERAFGALK

SEQ ID NO: 130840 - protein, 213 aa, Unknown
  Bacterial polypetide isolated from the Sargasso Sea
MNILFLGAPGSGKGTQSKNIEEKFSIPQISTGDLLRAETASESKMGQELKKIMSSGKFVSDDIVLKLVSKKITSEDCKNGFILDGFPRNLSQASSLDSLLNNLNLSIEYVFLIDVPTDLIIKRCVGRITCNTCGKIENEYFSDFREGDKCGEGVFVKRADDNEETVTNRLKVYAEQTEPIIDFYRGKGILHRIIGGEDGPQRLTDEIISIIKK

SEQ ID NO: 130841 - protein, 213 aa, Unknown
  Bacterial polypetide isolated from the Sargasso Sea
MKILFLGAPGCGKGTQSKKIIKKYNIPQISTGDLLREEIKSGSAIGEEIKNIMSTGQFVNDDLVVSLVSKKIDSQECENGFILDGFPRNISQANNLDRMFEEKNLCLDHVILIDVPDEDLVARCTGRLLCDTCDYIGNTDKGEKVGDKCPVAEGTLYQRDDDKEETVRNRLKVYHEQTSPIIDFYEKKGILKKFVGGNDPDALASKIEAVLIA

SEQ ID NO: 130842 - protein, 191 aa, Unknown
  Bacterial polypetide isolated from the Sargasso Sea
MLNIVIFGKPGSGKGTQASLVKDNYDLVHISTGDVFRKNTSQGTELGKVAVQFMSKGELVPDEITISMLKDEIKSFMPCNGFIFDGFPRTILQAESLDDLLKSMELKIDLVVALDVDNKKLIERLLKRGKTSGRSDDQSEEKINKRLEEYDNKTKPLINFYKIQEKFISINGVGEFNEVTNRLISTIDSKI

SEQ ID NO: 130843 - protein, 182 aa, Unknown
  Bacterial polypetide isolated from the Sargasso Sea
MKKHILFLGAPGAGKGTQAELLSQTYSYLHLSTGELLRKEIEMNTALGIQVKDIMNRGELVSDELVLKIVRQNLLKDNKGWILDGYPRNLSQANSLNEVLNKINQPLELVFYLDIPEEVLIKRLLLRGRKDDTEETIKTRVDIYKKTTEPLIRYFKDLSLLEYIDADRDLKTISSDIKLKMA

SEQ ID NO: 130844 - protein, 187 aa, Unknown
  Bacterial polypetide isolated from the Sargasso Sea
MTHLVVFLGPPGAGKGTQAIKIASDFNLAHISTGDMLRQHVKEQTDLGKIAKSLLDEGKLVPDDLVIQMLIERLGDDDCLGGTILDGFPRTLPQAKSLEKINDKFPVIKVIVFEADQEELTKRILLRGETSGRGDDTEDSIRVRLEVYQKDTEPLITYYEDKGITTKINAVGNVDDIYTEISKEFIN

SEQ ID NO: 130845 - protein, 66 aa, Unknown
  Bacterial polypetide isolated from the Sargasso Sea
MNTFILLGPPGAGKGTQADLISADLGIPKISTGDMLRSAVASKSDLGNRVEDISYSGKLVSDDIIY

SEQ ID NO: 130846 - protein, 187 aa, Unknown
  Bacterial polypetide isolated from the Sargasso Sea
MTHLVVFLGPPGAGKGTQAIKIASEFNLAHISTGDMLRQHVKEQTDLGKIAKSLLDEGKLVPDDLVIQMLIERLSHDDCLGGTILDGFPRTLPQAKSLEKINDKFPVVKVIVFEADQEELTKRILLRGETSGRGDDTEDSIRVRLEVYQKDTEPLITYYEDKGITTKINAVGNVDDIYKEISKEFIK

SEQ ID NO: 130847 - protein, 214 aa, Unknown
  Bacterial polypetide isolated from the Sargasso Sea
MRIILLGAPGAGKGTQAQFLMGKYGIPQISTGDMLRAAIKAGTELGLEAKRVMDEGKLVSDEIIIGLVKERIAQDDCKDGFLLDGFPRTIPQADAMKEAGVTVDHCIEFDVPDDVIVERMGGRRVHPASGRVYHVVYNPPKVEGKDNETGDDLIVRDDDKEETVRKRLAIYHEQTKPLVNYYSAEAEAGNCEYHKLDGTRPVEEVSAELAERLG

SEQ ID NO: 130848 - protein, 221 aa, Unknown
  Bacterial polypetide isolated from the Sargasso Sea
MRLILLGAPGAGKGTQANFIKEKFGIPQISTGDMLRAAVKAGTPLGIEAKRFMDAGELVTDELIINLVKERLQQPDCANGYLFDGFPRTIPQAEAMKQAGVAIDYVLEIDVPFDEIIVRMSGRRSHAASGRTYHVKFNPPKVEGVDDVTGEPLIQRDDDKEETVKKRLDVYVAQTKPLIEYYNNWAQNGDPTTPLKAPQYRRISGLGTVEEIRNRAFDALK

SEQ ID NO: 130849 - protein, 214 aa, Unknown
  Bacterial polypetide isolated from the Sargasso Sea
MNTFILLGPPGAGKGTQADLISADLGIPKISTGDMLRSAVASKSDLGNRVEDILNSGKLVSDDIIIELINDRINQSDCKSGYLFDGVPRTLGQANLFLQNDIEVNKVIDISLDDELIIKRMSGRRFHIASGRSYHIEFNPPKAEGLDDETGEPLIQREDDFPETVKKRLEVYHSQTKPLTDFYKSKASEGIISFISINGNQSVDEVFSEIKSYL

SEQ ID NO: 130850 - protein, 214 aa, Unknown
  Bacterial polypetide isolated from the Sargasso Sea
MKNIILLGPPGAGKGTQADLICDLLSIPKISTGDMLREAVASGSELGIKVSEILDSGALVSDEIIGSLIEDRLTKSDCANGSLFDGVPRTIGQAEQLATMGINFTHVIEIQVSDDTIVSRMSGRRVHPRSGKNYHIEFNPPINEGLDDETGEPLIQREDDKPETVLRRLSVYHEQTKPLTDFYINLSDTGNLKFIKVDGAESVETVFQNISENI

SEQ ID NO: 130851 - protein, 183 aa, Unknown
  Bacterial polypetide isolated from the Sargasso Sea
MKLLIMGPPGAGKGTQAKILAKKFNLVHLSTGDILRKEIDKSSEVGLKAQTYMNAGNLVPDEVLLEMMQSTLTELKDSGVILDGFPRTIPQAIGLSKIFQSLNQAIDSIINIEVDKNVLITRLVERAKKSGRADDTEEVIVNRQNVYLELTAPLIEFYQSNIIHIDGDGSIDEVTERILNHIP

SEQ ID NO: 130852 - protein, 214 aa, Unknown
  Bacterial polypetide isolated from the Sargasso Sea
MRIILLGAPGAGKGTQAQFLMNKYGIPQISTGDMLRAAIKEGSALGLAAKQVMDAGQLVSDDLIIGLVKERISKEDCAKGFLLDGFPRTIPQADAMKANGVVVDHVIEFDVPDDVIVERMSGRRVHPASGRVYHVSYNPPKVDGKDDLTGEDLVIREDDKEETVRKRLGIYHEQTELLVGYYRKEAEQGRTQYHYMVGTLPVEQVSAKLEALLG

SEQ ID NO: 130853 - protein, 211 aa, Unknown
  Bacterial polypetide isolated from the Sargasso Sea
MNLILLGMPGAGKGTQAEIIQREQGIANVSTGAMMREVSRAETDLGKKVQEYLSTGKLVPDDIIIQMLVERIGQSDCENGFLLDGFPRNLDQAKALDEAKVEINLILFLKISEKEIIERMSGRRVHLPSGRSYHIVHNPPKVEGKDDLTGETLIQREDDHPDVIKKRLEVYYDETEPLLSFYRQKDISFYEIDASKTLEEVTEDIRKVISH

SEQ ID NO: 130854 - protein, 182 aa, Unknown
  Bacterial polypetide isolated from the Sargasso Sea
MKKHLLFLGAPGAGKGTQAELLSQTNSYLHLSTGELLRKEIEMNTTLGIRVKDIMNRGELVSDELVLKIVRQNLVKDNKGWILDGYPRNLSQANSLNEVLNEINQPLELVFYLDIPEEVLIKRLLLRGRKDDTEQTIRKRFDIYKKTTEPLIKYFEDLSLLEYIDADRDLKTVSSDIKQKMA

SEQ ID NO: 130855 - protein, 210 aa, Unknown
  Bacterial polypetide isolated from the Sargasso Sea
MSSIVLFGPPGAGKGTQAQRITDSTGLPQISTGDMLRAAVKAETPTGMEAKKFMDAGKLVPDEIIIDLIRDRILQDDALNGVMFDGFPRTVPQAEALDSITTVSHVIAIEVPDSRIVERICGRYTCAVCDAVFHDTFNPTSVPGICDSCSSTEFKRRADDNADTVLMRLGAYHEQTSPLAEWYEQKGIFHRINGDRPIDTISQDILSALN

SEQ ID NO: 130856 - protein, 183 aa, Unknown
  Bacterial polypetide isolated from the Sargasso Sea
MFGPPGAGKGTQAKFLVKQLNNFQISTGDMLRDEIQKNSEIGKKIVEDMSEGRFVSDEIVNSLIENVVFDPKKKNRLIFDGYPRSLTQAKNLEKLLEKTNQKIDFVFFLNVNKETIIKRIEQRKSIENRSDDDLNIIVKRYDKYMETTKPVLDFYSKNSNFYELDGSSKIEEITAKINSFLNV

SEQ ID NO: 130857 - protein, 71 aa, Unknown
  Bacterial polypetide isolated from the Sargasso Sea
MKNIILLGPPGAGKGTQADLICELCHIPKISTGDMLREAVASGSDLGNKVSNILDTGGLVSDEIIGALNKR

SEQ ID NO: 130858 - protein, 214 aa, Unknown
  Bacterial polypetide isolated from the Sargasso Sea
MNNIILLGPPGAGKGTQADLICDLCDIPKISTGDMLREAVASGSDLGARVSEILDSGGLVSDDIIGSLIQERLLKPDCENGSLFDGVPRTIGQAEQLADMKINFTHVIEIFVEDEIIVKRMSGRRVHPASGRNYHIDHNPPKNSGLDDETGEPLVQREDDKPDTVLKRLDVYHEQTKPLTTFYKGQSDSGLLKFIKVDGSNSVDDVFRAISSQI

SEQ ID NO: 130859 - protein, 211 aa, Unknown
  Bacterial polypetide isolated from the Sargasso Sea
MNLILLGMPGAGKGTQAEIIQREQGIANVSTGAMMREISRAETDLGKTVQEYLSSGTLVPDSIIIQMLVERISQSDCDNGFLLDGFPRNLDQAKALDEANVEINLILFLKISEEEIINRMSGRRVHLASGRSYHIAHNPPKVDGKDDLTGETLIQREDDHPDVIKKRLQVYYDETEPLLSFYRQKDISFYEIDASKTLEEVTEDIRTVISH

SEQ ID NO: 130860 - protein, 214 aa, Unknown
  Bacterial polypetide isolated from the Sargasso Sea
MRIILLGAPGAGKGTQAQFIMEQYGIPQISTGDMLRAAVKAGTPLGLEAKKVMDAGQLVSDDLIIGLVKERIAQDDCVKGFLLDGFPRTIPQADAMAANGISIDHVIEIDVPDEEIVKRMSGRRVHPGSGRVYHVVFNPPKVEGKDDVTGEDLAIRPDDEEATVRKRLGIYHEQTKPLVEYYGKVAAAGNTQYHKFDGTQSVAAVSAQLASVLK

SEQ ID NO: 130861 - protein, 214 aa, Unknown
  Bacterial polypetide isolated from the Sargasso Sea
MKNIILLGPPGAGKGTQADLICDLCDIPKISTGDMLREAVASESDLGLKVSNILDSGGLVSDEIIGSLIKDRLNMPDCENGSLFDGVPRTIGQAEQLANMGIDFTHVIEIHVDDQDIVNRMSGRRVHPGSGRNYHIEFNPPENEGIDDISGEPLIQREDDKPETVLKRLNVYHEQTKPLTDFYKNLADKGILIFYKVDGSESVETVFKNISDNL

SEQ ID NO: 130862 - protein, 140 aa, Unknown
  Bacterial polypetide isolated from the Sargasso Sea
MKLLIMGPPGAGKGTQAKILAQKFNLVHLSTGDILRKEIDRNSEVGLKAQTYMNAGNLVPDEVLLEMMNSTLTELKDNGVILDGFPRTIPQADGLSKIFQSLNQDIDAIINIEVDKDVLIRRLVERAKNSGRADDTGRSY

SEQ ID NO: 130863 - protein, 172 aa, Unknown
  Bacterial polypetide isolated from the Sargasso Sea
MRKHLLFLGAPGAGKGTQAELLSQTYSYLHLSTGELLRKEIEMNTTLGIQVKDIINSGELVSDELVLKIVRHNLVKDNKGWILDGYPRNLSQASSLNEVLTEINQPLEVVFYLDIPEEVLIKRLLLRGRKDDTEETIRTRVDIYKKTTEPLIQYFKDLSLLEYIDADRDLKT

SEQ ID NO: 130864 - protein, 208 aa, Unknown
  Bacterial polypetide isolated from the Sargasso Sea
MRIILLGPPGAGKGTQAEKIIQALNIPHISTGNMLREAIEEGSPLGIEAKKVMDKGALVSDDIIVGLVVERLKKPDCSNGVLFDGFPRTIPQAQALDDANIGIDLIIEIQLDDENIIERMSGRRVHISSGRNYHVKFNPPKKEGFDDLTGEELIQRDDDKREVVEERLVVYRNQTEPLISFYKAKQTNNDLDYLTVDGSGSVESISQL

SEQ ID NO: 130865 - protein, 189 aa, Unknown
  Bacterial polypetide isolated from the Sargasso Sea
MNILLFGPPGAGKGTQAKLICKKFSLEHVSTGDILRNEILKGSKLGATAKQIIDSGHLVSDEIIIDIIKIRLSEIKKNNTSFLLDGFPRSINQANLLSSIMEELDVKLKAAILIDVEQHVLINRIINRKNTEGREDDSVEVLASRLKVYYDQTAPLIQFYKDLNLLKWINGVGEISEVNQQINSIMEQL

SEQ ID NO: 130866 - protein, 189 aa, Unknown
  Bacterial polypetide isolated from the Sargasso Sea
MKRIVFFGPPGAGKGTQAKLISKYLNIPHLSTGDILRKKISGDDYIADEIKNILASGDLVPDNILNKIVTENLFNNFDNGFILDGYPRTVDQSNYLNIFLENNNIELTQIFSIVIDDDTIEKRIIKRSHIENREDDSVEVINNRIDNYNNTTLTVSKMYKSKNPNIFHEIDGNQDIDKIQSEILKILKK

SEQ ID NO: 130867 - protein, 211 aa, Unknown
  Bacterial polypetide isolated from the Sargasso Sea
MKIILLGMPGAGKGTQAELIKVNCSIPSISTGAILRDISNTNSDLGAKVQNYLQSGRLVPDEIIIEILVNRISEDDCSNGFLLDGFPRNIDQAKALEKANIDIDFVVFLNIEEQEIIKRMSGRRMHLKSGRSYHIDFNPPKNFNKDDLTGEDLIQREDDKPEVIKKRLEVYYKETFPLLDFYRKESNNFFEIDGSLPVEEVAKAIDHIFSS

SEQ ID NO: 130868 - protein, 182 aa, Unknown
  Bacterial polypetide isolated from the Sargasso Sea
MKKHLLFLGAPGAGKGTQAELLSQTNSYLHLSTGELLRKEIEMNTNLGIQVKDIMNRGELVSDELVLKIVRQNLVKDNKGWILDGYPRNLSQANSLNQVLNEINQPLELVFYLDIPEEVLIKRLLLRGRKDDTEDTIRTRVDIYKRTTEPLIQYFKDLSLLEYIDADRDLKTISSDINKKIA

SEQ ID NO: 130869 - protein, 214 aa, Unknown
  Bacterial polypetide isolated from the Sargasso Sea
MNIILLGPPGAGKGTQARHLVEKRNMIQLSTGDMLREAKTSGSEMGNLVAKVMARGDLVTDEIVIGLIKEKISGEKGGGFIFDGFPRTLKQADALGRILEECGENLDIVVEMKVDDDALVSRISGRSSCGNCGEVFHDVTNPWPASGECPNCSSTEVVRRADDNEDSLRQRLMEYYKKTSSLIGYYYAKGNHVSVNGLASVEEVQKSIAAVLDG

SEQ ID NO: 130870 - protein, 150 aa, Unknown
  Bacterial polypetide isolated from the Sargasso Sea
MIFLFFGPPGAGKGTQAAILSKQYNIPHLSTGEILRNNLLGTSTQSKKIKKIIEKGNLVSDEILNEIIEQKLNSYECSKGYILDGYPRTLSQNDWLQSYLNSKNLKITKIFDINLEKNIIVERIKNRAKLEKRNDDTEEVIKNRVNKYIE

SEQ ID NO: 130871 - protein, 185 aa, Unknown
  Bacterial polypetide isolated from the Sargasso Sea
MKKHLLFLGAPGAGKGTQAELLSQNYSYLHLSTGELLRKEIEINTILGRQVKDIINSGALVSDELVLKIVRQNLDSDHNKKGWILDGYPRNLSQANSLNEVLNEINQPLEVVFYLDIPEEVLIKRLLLRGRKDDTEETIRTRVDIYKKTTEPLIQYFKDLSLLEYIDADRDLKTISSDIKQKMAR

SEQ ID NO: 130872 - protein, 192 aa, Unknown
  Bacterial polypetide isolated from the Sargasso Sea
MIIILLGPPGSGKGTQANFIQNKLSIPHLSTGDILRQSVKNETDLGNKVKNIMAKGELVSDDLVLDVIKERISQSDCNLGFILDGYPRNITQAESLNIVLKDIDRNIDRILFLDVDFEVLESRIESRTKENNEEKRADDTSEVLIKRLEEYKIQTAPLGEYYSNNKKFKKINGMKSISEVSLDIENFLDNGI

SEQ ID NO: 130873 - protein, 215 aa, Unknown
  Bacterial polypetide isolated from the Sargasso Sea
MKIVLLGPPGAGKGTQAESICENYGIPHISTGNMLREAVEAGTKLGLEAKSLMDAGILVSDDVIVGLVEERILEDDCSEGFLFDGFPRTIPQAEALIERDINIDAVVEIDVPDQDIIDRMAGRRMHPASGRNYHIIFNPPKNEGKDDITGEDLILREDDKPETVKDRLKVYADQTSPLVVFYSNLSVSSQLKYIKVSGTATPSNVTQQILKDLEI

SEQ ID NO: 130874 - protein, 181 aa, Unknown
  Bacterial polypetide isolated from the Sargasso Sea
MTDITIFLGPPGAGKGTQAEKISEKFNIPHISTGVMLREHVENETELGLVAKEILNKGNLVSDELVTSMLIERLENDDCEKGAILDGFPRTITQAESLNIEGLNIKTVILFEVNETELIKRMVERGREDDTEESIKVRLDVYRDETLPLIKFYDDKDVLKTVDAFGDIDEIFNHISGLIKT

SEQ ID NO: 130875 - protein, 214 aa, Unknown
  Bacterial polypetide isolated from the Sargasso Sea
MNNIILLGPPGAGKGTQADLICDLCDIPKISTGDMLREAVASGSNLGARVSEILDSGGLVSDDIIGSLIQERLLKPDCENGSLFDGVPRTIGQAEQLSDMKINFTHVIEIFVEDEVIVKRMSGRRVHPPSGRNYHIDHNPPKNSGLDDETGEPLVQREDDKPDTVLKRLDVYHEQTKPLTTFYEGQSDSGLLKFIKVDGSKSVDEVFRLISSQI

SEQ ID NO: 130876 - protein, 183 aa, Unknown
  Bacterial polypetide isolated from the Sargasso Sea
MKLLIMGPPGAGKGTQAKILAEKFNLVHLSTGDILRKEIDKASKTGLKAQTYMNAGNLVPDEVLLEMMNTTLTELKNQGVILDGFPRTIPQAVGLSKIFQSLSQAIDGIINIEVDKNVLIKRLVERAKNSGRADDTEEVIINRQNVYSELTAPLIEFYQSDIISIDGDGSIEKVTERILKRIH

SEQ ID NO: 130877 - protein, 215 aa, Unknown
  Bacterial polypetide isolated from the Sargasso Sea
MKIILLGPPGAGKGTQAESICKNYKIPHISTGNMLREAVDAGTELGLEAKSLMDAGILVSDEVIVGLVEERISQSDCSDGFLFDGFPRTIPQAEALIERNINIDAVVEIDVPDQDIIDRMSGRRMHPASGRNYHVIYNPPKIEGKDDITGEDLILREDDKPETVKDRLKVYADQTSPLISFYSELSSQAKLDYIKVSGTASPIEVTEEILKNLNS

SEQ ID NO: 130878 - protein, 189 aa, Unknown
  Bacterial polypetide isolated from the Sargasso Sea
MNLIFLGPPGVGKGTQAGHVCEHYGIIHLSTGDMLRSEIKESSEVGRIAKSYIDKGALVPDNVLLDIINLRLGKDDAKNGYLLDGFPRTIPQAEGLDDIMNSKKHKLDVVVSLVAEENELIQRLINRGQDSGRTDDTPEIIKQRQEVYWNQTAPLIDFYSNKNVLVEVDGIGSIPEIKNKIFVALDSYA

SEQ ID NO: 130879 - protein, 192 aa, Unknown
  Bacterial polypetide isolated from the Sargasso Sea
MNIVLFGPPGAGKGTQAKLICEKYFLNHLSTGDLLRNESSKKTSLGIQIKNTINDGKLVSNETTIELIKHFIDENKNNKKGFLFDGFPRNKKQAELLDHLMVSINEKILCVILLNVNEDVLKERIMNRSTTEGRSDDNLETLSKRLHTYSSETEPLIEYYSSQNLVRKVLGTGAISDINQGINSHIEASLNA

SEQ ID NO: 130880 - protein, 82 aa, Unknown
  Bacterial polypetide isolated from the Sargasso Sea
MNIILFGPPGAGKGTQSDKLIEEYKLTHLSTGDLFRLHLNNNTPLGIEAKRYMDEGELVPDTVVIEMVKNKIEENPSSSGFI

SEQ ID NO: 130881 - protein, 182 aa, Unknown
  Bacterial polypetide isolated from the Sargasso Sea
MKKHILFLGAPGAGKGTQAELLSQSNSYLHLSTGELLRKEIEMNTALGIQVKDIMNRGELVSDGLVLKIVRQNLVKDNKGWILDGYPRNLSQANSLNEVLNEINQPLELVFYLDIPEEVLIKRLLLRGRKDDTEETIRTRVDIYKKTTEPLIQYFKDLSLLNYIDADRDLKTISSDIKQKMA

SEQ ID NO: 130882 - protein, 192 aa, Unknown
  Bacterial polypetide isolated from the Sargasso Sea
MIIILLGPPGSGKGTQANFIQSKLSIPHLSTGDILRQSVKNETNLGRKVKDIMAKGKLVSDDLVLDVIKERVSQSDCDQGFILDGYPRNIIQAESLNIVLKDINRNIDKILFLDVDFTVLHSRIESRSKENNEEKRADDTSEILIKRLDEYKSQTAPLGEYYSNDKKFKKINGMNSISQVSLDIENFLDNDV

SEQ ID NO: 130883 - protein, 194 aa, Unknown
  Bacterial polypetide isolated from the Sargasso Sea
MNIILIGPPGAGKGTQAVFIEEEFGLKQLSTGDMCRATMKEDTDLGHKVREIVEAGDLVPDDIMLQMISERIVSPDCVNGVILDGFPRTVPQAEALMKVLDDNKLNIDHVLYFSVDSEILLERIRNRIAETPLEERRKDDNEETLNHRLKVYEDQTAPLLPFYKRHGILSTIDGMLPVEEVSFKLRGILGSKKA

SEQ ID NO: 130884 - protein, 180 aa, Unknown
  Bacterial polypetide isolated from the Sargasso Sea
MLRAAVAAKSPNGVKAKQAMESGALVSDDIVVGIIEEAIKAPECRNGFILDGFPRTVPQAVKLDEMLGAKGVAIDSVLNFEVPDEVLVERVEGRWIHQASGRSYHTKFAPPKVPGKDDFTGEPLMKRKDDNAETLKSRLSAFHTQTAPVIDYYNKKEKVTGIDANKPAATVEAQIAKALA

SEQ ID NO: 130885 - protein, 188 aa, Unknown
  Bacterial polypetide isolated from the Sargasso Sea
MNNIIFFGPPGAGKGTQAKIISNHLNVPHLSTGDILRTRILQEDDLSKKLKEIMSSGGLVSDEILNKIVNEKLNDCNDGFILDGYPRTLDQSNFLNNYLVQSHYSLDFIFNIDISFDVLKDRILKRSQEEDRDDDNIDALETRYSKYTEETKPVSEEYKHNNSSIFYEINGRNQIQEITSEIIKILEK

SEQ ID NO: 130886 - protein, 186 aa, Unknown
  Bacterial polypetide isolated from the Sargasso Sea
DPFSSFLGPPGAGKGTQAIKIASDFNLAHISTGDMLRQHVKEQTDLGKIAKSLLDEGKLVPDDLVIQMLIERLGDDDCLGGTILDGFPRTLPQAKSLEKINDKFPVIKVIVFEADQEELTKRILLRGETSGRGDDTEDSIRVRLEVYQKDTEPLITYYEDKGITTKINAVGNVDDIYTEISKEFIN

SEQ ID NO: 130887 - protein, 62 aa, Unknown
  Bacterial polypetide isolated from the Sargasso Sea
MNLIIFGPPGAGKGTQSDLIAKDFKLKKISTGDLLRLEISKKTHLGNKIKSIIDEGKFVQII

SEQ ID NO: 130888 - protein, 214 aa, Unknown
  Bacterial polypetide isolated from the Sargasso Sea
MKIILLGPPGAGKGTQAEVLCKNFNIPHISTGNMLREAVEAETDLGLEAKALMDAGILVSDEVIVGLVEDRISKEDCKSGFLFDGFPRTIPQAQALVDRDIFIDAVVVIHVPDEEIIERMSGRRMHQGSGRNYHIVYNPPKIDGKDDITGEDLIQREDDKPETVKDRLKVYENQTSPLINFYTEMSEQGKLDYVSVSGTASPEEVSTEILSWLS

SEQ ID NO: 130889 - protein, 191 aa, Unknown
  Bacterial polypetide isolated from the Sargasso Sea
MNLILLGPPGCGKGTQAVNLVKKYDYCQLSTGDMLREAVANETQTGKIVKDVLASGKLVDDELIIKIMEEKLIATKSKPGRIFDGFPRTLIQANELESLLKRNQMKLDLVIELVVDQHSLFERILKRAQDSEEKRDDDNSVIVKKRLEVYNKETKPIVDFYSSKYNLNKIDGMQSIQEVSNTIENLIENKH

SEQ ID NO: 130890 - protein, 214 aa, Unknown
  Bacterial polypetide isolated from the Sargasso Sea
MNNIILLGPPGAGKGTQADLICEMCDIPKISTGDMLREAVASGSDLGVKVSNILDSGGLVSDDIIGSLIKERLTKPDCAKGSLFDGVPRTIGQAEQLADMGINFTHVIEIFVEDETIVNRMSGRRVHPSSGRNYHIDFNPPKNEGIDDETGEPLILREDDKPDTVLKRLSVYHEQTKPLTDFYASLSNDGSLKFFKVDGSKKVDEVFNSISSQI

SEQ ID NO: 130891 - protein, 191 aa, Unknown
  Bacterial polypetide isolated from the Sargasso Sea
MFNIVIFGKPGSGKGTQADFLKDKYDLYHISTGDLFRKNILNKTDLGIEAKSFLDNGDLVPDIVTIKMLENEVLANKDANGFIFDGFPRTHNQAESLDIFLESINQKINATIALEVDEDELITRLLDRGKTTNRSDDQDIEKIKNRFNEYNNKTSILIDFYQKQSKFYSVNGHGSVDDITSRLFNLVDSLI

SEQ ID NO: 130892 - protein, 192 aa, Unknown
  Bacterial polypetide isolated from the Sargasso Sea
MKNLILLGPPGAGKGTQARTLCEAFGFVQLSTGDMLREAKSDHSELGKKVANIMARGELVTDDIVIGLIEKKLTNEKNSKGFIFDGFPRTLAQADVLGDLLETIGQKLDHVVELYVDDEKLVQRIIGRFTCSACGELYHKTTKIPKNPNICDICGSRDTFNYRQDDNEDSLKIRLLAYYRDTSPLIGILSFT

SEQ ID NO: 130893 - protein, 214 aa, Unknown
  Bacterial polypetide isolated from the Sargasso Sea
MRIILLGAPGAGKGTQAQFIMEQYGIPQISTGDMLRAAVKAGTPLGLEAKKVMDAGQLVSDDLIIGLVKERIAQDDCAKGFLLDGFPRTIPQADAMAANGISIDHVIEIDVPDEEIVKRMSGRRVHPGSGRVYHVVFNPPKVEGKDDVTGEDLAIRPDDEEATVRKRLGIYHEQTKPLVEYYGKVAAAGHTQYHKFDGTQSVAAVSEQLASVLK

SEQ ID NO: 130894 - protein, 183 aa, Unknown
  Bacterial polypetide isolated from the Sargasso Sea
MKLLIMGPPGAGKGTQAKILAQKFNLVHLSTGDILRKEIDKASKTGLKAQTYMNAGNLVPDKVLLAMMNSTLTELKDHGVILDGFPRTIPQAMGLSKIFQSLNQTIDGIINIEVDKNVLINRLVERAKNSGRADDTEEVIINRQNVYLELTAPLIEFYQSDIITINGDGSIEKVTERILKRIH

SEQ ID NO: 130895 - protein, 190 aa, Unknown
  Bacterial polypetide isolated from the Sargasso Sea
MKLIIFGPPGSGKGTQASILAKKNKIPHLSTGDILRSKLEDVDDLGQELSKIMSVGNLVPDSIINPIVADKLLSNDCKNGFILDGYPRNKYQSDFLIDFLKKNNLDIDLIIDFIADTTTVKKRIMERSRIENRSDDNLEVIKTRLDKYFAETQPLAVMFKAKFKDKFFEINATQEITKIQYDIENKLKNA

SEQ ID NO: 130896 - protein, 181 aa, Unknown
  Bacterial polypetide isolated from the Sargasso Sea
MTNITIFLGPPGAGKGTQAEKLSETFKLPHISTGVMLRDHVENETELGLIAKDILNKGNLVSDDLVTAMLIERIGKPDCDNGAILDGFPRTIAQAESLEIDDLKIKNVILFEVNEEELVKRMLDRGREDDTEESIKVRFEVYKKETAPLVDYYSNKGVLNSVNAFGEIDDIFNEISKFMKL

SEQ ID NO: 130897 - protein, 294 aa, Unknown
  Bacterial polypetide isolated from the Sargasso Sea
KKISRIERKSAIIAFSAEEVYAIAELIRRQKGGSAIVMGSLSPKTRNAQVSLYQSGDVDYLVATDAIGMGINMDLDNVYFSSLKKFDGKKLRRLKLPEIGQIAGRAGRHLNDGYFGVTGDCDPLNSEEVDLLEGHNFPELNSIFWRNSNLNFSNSESLIRSLEEKPNESWLRRIHECEDEKVLKYFLKDNKLYDLSNDSNKLKILWECCQIPDFVKKTYGHHYEVVKKVFEFLISKNNRIPNQYLKQQLTYLDKLDGNVDSISNRIANVRTWSYVTNKANWVENQDYWIERTNF

SEQ ID NO: 130898 - protein, 111 aa, Unknown
  Bacterial polypetide isolated from the Sargasso Sea
MSTKTFAMIKPDAMLNGYMGKILDDTISAGFNILAAKLIRMTKAEAEGFYAIHKDRSFFDELTTFMSSSQTMVFVLQKENAVSAWRKTIGATNPEEADEGTIRKKFATSLS

SEQ ID NO: 130899 - protein, 38 aa, Unknown
  Bacterial polypetide isolated from the Sargasso Sea
QKKGTIRKKYGISIDKNSVHGSDSPENAKIEIDFFFKD

SEQ ID NO: 130900 - protein, 70 aa, Unknown
  Bacterial polypetide isolated from the Sargasso Sea
MAIERTFSMIKPDATERNLTGKICAMLEKNGLKIIASRRTRMTPEKAAQFYSVHSERPFFQSLCDFMCSG

SEQ ID NO: 130901 - protein, 84 aa, Unknown
  Bacterial polypetide isolated from the Sargasso Sea
MSNIEQTLSIIKPDAMERSLDAEIKLMFEQDGFRITKEKKIQLAKHEAEQFYKVHETKPFYNDLCEYLSSGPITVMILEKKTLY

SEQ ID NO: 130902 - protein, 295 aa, Unknown
  Bacterial polypetide isolated from the Sargasso Sea
KTLQEVPVAVSVISADEIDKANVVDAFDLMQVVASLDTRQYQSSKNAAFFIRGFGNGSNNNGVEPSVALFVDGVYRSKMQSRINDLPMVERVEVLRGPQSTLFGKNATAGVINIITKKPSFEKFGKISTSIGNYNSRIVKAYYTAPLSETMAFSLNANTNQADGHAKNTVTGNDTNNRDRYSLRADLLIETADDLEIRITADYDEYDEFCCQVGNVSAGPAKELAYALGAQAAPNNPFTDQVHFNFDSFAKGENSGISVNIVKEMENMTFTSITSSRDSDSLESQDIDFDSSRIL

SEQ ID NO: 130903 - protein, 131 aa, Unknown
  Bacterial polypetide isolated from the Sargasso Sea
MNNTLALIKPDAMQKGFKDEIREDIMNNGFIIAEEKTLHLSVEQAKGFYSIHKDKPFFEELVEFMTSSETHIMKLEKANAVSEWRNLMGATNPAEAEAGTIRAKYGTDISMNATHGSDSNENAEIEINFFF

SEQ ID NO: 130904 - protein, 106 aa, Unknown
  Bacterial polypetide isolated from the Sargasso Sea
AKLLRMTKTQAEGFYAIHKDRPFFDELTSFMSSIKTMVIVYKKENAVLAWRKTIGATNPENAEEGTIRKKFATSLSENAVHGADSDENAIKEIGFFFTEHELISNN

SEQ ID NO: 130905 - protein, 89 aa, Unknown
  Bacterial polypetide isolated from the Sargasso Sea
MIEKTLSIIKPDAIERNLVKDIKDIFTKNNLTIKNSRKIHISKEEASEFYKVHQSKPFYNDLCAYLSSGPIVVMILEGDNAVSEIEKLW

SEQ ID NO: 130906 - protein, 57 aa, Unknown
  Bacterial polypetide isolated from the Sargasso Sea
MRFQHIESLWGATNPEEAEEGTLRARFAESLSKNAVHGSDSADSAIREIDIMSKIFD

SEQ ID NO: 130907 - protein, 36 aa, Unknown
  Bacterial polypetide isolated from the Sargasso Sea
MALEQTLSIIKPDGVRRNLVGKILSRFEENNLRIVA

SEQ ID NO: 130908 - protein, 47 aa, Unknown
  Bacterial polypetide isolated from the Sargasso Sea
PKEAAENTIRKDFATNVQENAVHGSDSNENAQKEIAFFFTDSELLSN

SEQ ID NO: 130909 - protein, 49 aa, Unknown
  Bacterial polypetide isolated from the Sargasso Sea
MKQTLVLCKPDAVERGLVGEIISRFEQKGMKIIALRMLAIGPDLAEKHY

SEQ ID NO: 130910 - protein, 219 aa, Unknown
  Bacterial polypetide isolated from the Sargasso Sea
AVDATGEPHLVHIAAPGTIRDTHHNLAGEPRDTLDLTGCTVSTGEVRAAPGWATGAGVPAVEAVGAWVRAQQMVGALESCLGSALDHAQERQQFGRPLAKFQAIQHMLAEAAGHVAAASAAADLAAACWGDPRFVLATAIAKARCGEAAGHVAAIGHQIHGAMGFTQEHPLHRATRRLWSWRDEFGSDALWQERIGRAVCAGGGAALWPMLVRLRGGAG

SEQ ID NO: 130911 - protein, 43 aa, Unknown
  Bacterial polypetide isolated from the Sargasso Sea
MERTLSIIKPDATKRNITGSINNIIENSGLRIIAQKRIHLNKE

SEQ ID NO: 130912 - protein, 87 aa, Unknown
  Bacterial polypetide isolated from the Sargasso Sea
MNNIEKTLSIIKPDAIERNLDNEIKEIFKNKGFSIAKEKKIQIEKSEAEKFYKVHETKPFYNDLCLYLSSGPILVMVLERENAVLAN

SEQ ID NO: 130913 - protein, 128 aa, Unknown
  Bacterial polypetide isolated from the Sargasso Sea
MSEQTLFIVKPDGVKRKLIGEIVSRFEKKGFTILKLKMFTFTKELATEFYSVHKDKPFFGELLEYMTSGPVVVTVVEGNNAVATTRQMVGATKSFEAEPGSIRGDFGLGFTENIIHASDSTESFDKEV

SEQ ID NO: 130914 - protein, 33 aa, Unknown
  Bacterial polypetide isolated from the Sargasso Sea
IRADFATKLEENVVHGSDSEESAERELGLFFNN

SEQ ID NO: 130915 - protein, 88 aa, Unknown
  Bacterial polypetide isolated from the Sargasso Sea
MDKTFSIIKPDATKRNLTGSINKIIEENGLRIIAQKRIKLDIEKARGFYSVHQDKSFFNELIDYMISEPIVVQVLKGENAVNKYRDIM

SEQ ID NO: 130916 - protein, 60 aa, Unknown
  Bacterial polypetide isolated from the Sargasso Sea
ILEGNDAVAENRRIMGSTDPKNANDGTLRKSYGLSIDKNTVHGSDSLENAKKEIDFFFKE

SEQ ID NO: 130917 - protein, 45 aa, Unknown
  Bacterial polypetide isolated from the Sargasso Sea
ADAAAGTIRAEFAESIEANSVHGSDAPETAAEEIKFFFTDEEIVG

SEQ ID NO: 130918 - protein, 56 aa, Unknown
  Bacterial polypetide isolated from the Sargasso Sea
MSNNERTLSIIKPDAIERNLSEQIKLIFTKNNLTIIDSKKLHISKDEAAEFYKVHQ

SEQ ID NO: 130919 - protein, 711 aa, Unknown
  Bacterial polypetide isolated from the Sargasso Sea
EMSKNKVTAVLGPTNTGKTFLAIETMLSFESGMIGFPLRLLAREVYDKIIKKIDPLKVALITGEEKIIPINAKYFLCTVESMPIDKNLEFVGVDEIQMCSDNERGHIFTDRLLNLRGEKLTMLMGSNTIKPILQKLSDDIEFINKERFSKLSFGGHKKISRIERKSAVIAFSTEEVYAIAELIRRQKGGAAIVMGSLSPKTRNAQVSLYQSGDVDYLVATDAIGMGINMDLDQVFFSNIKKFDGKKLRRLNISEIGQIAGRAGRYLNDGSFGITGECGEINPEEIEALEQHKFPEIQQIFWRNSKLNFSSKLNLIKSLEEKPDKEWLRRIYECEDEKALKYFLKDATDFQILENSYDLKILWECCQIPDFVKKTYGNHLEIISKVFKFLTSKNKRIPNQYMKEQLASLDKIEGNVDSISNRIANVRTWSYVANKANWVENQDYWVERAKNLEDKLSDRLHEELTKTFIDKRASVLARGLKQDITLRTEIIEDEKVMINNQYIGNLKGLKLHLDLKVDALDADIKSLKKAARQNVSPEIIKRIKQIIDTGLIELKKDFKIYWKNNQIAKLLPGEDYLNPKVHLLIDDMIENDERSKLDLFIQGWIQKKINTELKSLVDLKNTQEKNSDLRALAYHLYENNGVVKRENVLSYLKKLDQNERKKLRNLGVRFGRYHIFLFKLFKPSTVSLRTLLWKNYNEKNEKLEPPNVWIEF

SEQ ID NO: 130920 - protein, 102 aa, Unknown
  Bacterial polypetide isolated from the Sargasso Sea
MNRIEQTLSIVKPDAVERNLTENIKKIFLENNLKIVQEKKIQISKEEAAEFYKVHQTKPFYERLCSYLSSGPITVMILEGEDAVKTNRRIMGATDPKNATKA

SEQ ID NO: 130921 - protein, 131 aa, Unknown
  Bacterial polypetide isolated from the Sargasso Sea
MNNTLALIKPDAMQKGFKNEIRKDIIDNGFVIAEEKTLHLSVEQAEGFYSIHKDKPFFEELVEFMTSSETHIMKLEKVNAVSEWRNLMGATNPAEAEAGTIRAKYGTDISMNATHGSDSNENAEIEINFFF

SEQ ID NO: 130922 - protein, 27 aa, Unknown
  Bacterial polypetide isolated from the Sargasso Sea
MAIERTLSIIKPDATSRNIHRKDNKQI

SEQ ID NO: 130923 - protein, 317 aa, Unknown
  Bacterial polypetide isolated from the Sargasso Sea
MDKDQNTKGILYIMTGMAFFSIQDSLIKFIYNDIALFELYLIRTIIQASLLLALVLVTKRNVSFKTHYPFLTLLRVVCFFFGFSFFYISLTFMTLAMTSALFFSCPFFMSMFAKFFLKEQIGIRRWSAIVVGFIGVIVVLNPTLEEFNYLKLAPVACAICYAISMTITKYTSDKDDIYTQMSWLYVFAISAGIIIFLVSGDGKFNTFSDPTFQFITREWFTNPSEAWPYVVVMGIVAFISFLCVFSAYSIASPSIISLFEYSYIIWAMLAGYILFETIPLPRTFFGAAIIIAAGVYIYYREKVKGQMIATDTPTVNR

SEQ ID NO: 130924 - protein, 141 aa, Unknown
  Bacterial polypetide isolated from the Sargasso Sea
MNNKTFAIIKPDAVKNGHSGQIIDRIIINDFKILGLKLIRMTKSQAEGFYKVHSDKPFFTELTEFMSSGKCIVMALEKVDAVNQWRNLIGATNPDEAADGTIRKDFASSLGENAVHGADSDENANREIGFFFSNVELIANH

SEQ ID NO: 130925 - protein, 454 aa, Unknown
  Bacterial polypetide isolated from the Sargasso Sea
LQLFDPLTGRVKQKIPRFTVYPSSHYVTPRDKVLAAVETIKLELAERLQQLVADGKLVEAQRLEQRTRFDLEMLSEVGHCKGIENYTRHLSGAAPGDPPSTLTDYMPKDALMFLDESHQMIGQLSAMYNGDRARKTTLVEYGFRLPSALDNRPLKFEEFEQRMRQVIFVSATPADYEKTHSGQVVDQVVRPTGLVDPVVEVRPATHQVDDVLQEIRIRVEKRERVLITTLTKRMAEQLTDYLTDNGVKVRYLHSDVDTVERVEIIRDLRLGAFDVLVGINLLREGLDIPEVSLVAILDADKEGFLRAERSLIQTIGRAARNLSGHAILYADRITDSMKKAMGETERRRIKQIAYNEANGITPRSIVKRVRDLIDGVYSEKAGKDAERLEQEALQRAQVEDMSEKDVAREIKRLEKLMLEHARNLEFEQAARVRDQLTRLKDQAFGAHGSDSVAL

SEQ ID NO: 130926 - protein, 131 aa, Unknown
  Bacterial polypetide isolated from the Sargasso Sea
MNNTLALIKPDAMQKGFKDKIRKDIMDNGFVIAEEKTLHLSVEQAEGFYSIHKDKTFFGELVEFMTSSETHIMKLEKANAVLEWRNLMGATNPAEAEPGSIRAKYGTDISTNATHGSDSNENAEIEINFFF

SEQ ID NO: 130927 - protein, 316 aa, Unknown
  Bacterial polypetide isolated from the Sargasso Sea
MDTNQNTKGIFFIMTGMAFFSIQDGLIKFIFEDIALFELYFGRTLIQAIFLLCFIIITKKSISLKTHYPMLTLVRVVCFFFGFSFFYISLTFMTLAMTSALFFSCPFFMSMFAKFFLKEKIGIRRWSAIVVGFIGVLIVLNPTLEEFNFFKLAPVACALCYSISMTITKYTSDKDSIYTQMTWLYIFALLASLLIFAVSGDGKFNTFTDPTLQFIVREWFTNPSEAWPYVLIMGTVASISFFCVFTAYSIASPSVVSLFEYSYIVWAILAGYILFETIPVPRTLFGACIIIGAGVYIYFREKVRGQMIATDTPPNK

SEQ ID NO: 130928 - protein, 823 aa, Unknown
  Bacterial polypetide isolated from the Sargasso Sea
KITAVLGPTNTGKTFLAFETMLSFDSGMIGFPLRLLAREVYDKIIKKIDPSKVALITGEEKIIPMNAKYFLCTVESMPLDKSLEFVGIDEIQMCNDHERGHIFTDRLLNMRGEKLTMLMGSNSIKKIIQKLDDDIEFKNRERLSKLSFGGHKKISRIERKSAVIAFSTEEVYAIAELIRRQKGGAAIVMGSLSPKTRNSQVSLYQSGDVDYLVATDAIGMGINMDLDNVYFSNLKKFDGKKLRNLNIPEIGQIAGRAGRYLNDGMFGTTGECKEVGPEEIEALESHSFPDIQTIFWRNSKLNFSNKVSLLKSLEERPQKEWLKRINECQDEKVLKYFLKESSSIKIQDNSEVLQILWECCQIPDFVKKTYGHHFEVVSKIFNFLTLGEKKVPNHYMKEQLSLLDKLDGNVDSLSNRIANVRTWAYVSNKSNWVENQDYWIERTKNLEDKLSDRLHEELTKTFIDKRASVLARGLKQDITFETEIINDEEVMINEQFIGRLKGLKLELDLKVDTLDADVKSLKKAARQNVVPEIIKRINQIIDTGLIELKDDFKIYWNNNQIAKLIPGSDYLNPQIQIIIDEMIENTEKSRLNFYLQSWLNDKIETELQSLIDLKNVKDNNSELRALAYHLYENNGVVKRDEVINYLNKLNQDERKKLRNLGVKFGRYHIFLFKLFKPSSVSLRILLWKNFYERNFDFLPPTFGLNFLEEKKTLNKNLMLLCGFEKFENLYVRIDILERLFLMIFNTKSEDKIKEIKLIPEMLNLLGCNKENFVKLIKKMNYKTYEKDNNLHFRYIPLRKIIKKDTKKNINDNPFNVLSQLNLK

SEQ ID NO: 130929 - protein, 352 aa, Unknown
  Bacterial polypetide isolated from the Sargasso Sea
MRTDCSHLTVEAYYAAAEAAWNAIWSAPESPAVVEDATNAYGDALVGLLQTAREQGRLQPEGLWIGSRYRPIRIPIVLKGLPISASTIESIEPFQPPKDKRLSRRHYRPGFGLPVTIRVKPGPEGTIRGDFDPPRLSLVATAVLRFQVPGNEKPIRKFVGPLTRERAPAVLDLVEPLSVSGVHIGVAHPPVAADLSMPMLDMLEGMPKSGLEGFIMPFEGGVTEPRLEFLQPHVKGRIPVVFIHGLASDEGTWFDLINDLRACPFFQRYYEPWVYHYPTGASFLPASAILRQSLRRIVKELDPDGEEKQLQNLVLIGHSMGGLHAKLQVVASGDHMWNAMATVPFDTVRMPR

SEQ ID NO: 130930 - protein, 142 aa, Unknown
  Bacterial polypetide isolated from the Sargasso Sea
MLKNITFSMIKPDGVENGQIGSIISKIDSAGFNIIALKMTQLSRKRAESFYSIHRQRPFFQDLINFITRGPIVAMVLEKVDAVNDFRTLIGSTDPNEAADGTIRKLYATSKGENVIHGSDSDENAQIECFFHFSNCELFNEK

SEQ ID NO: 130931 - protein, 131 aa, Unknown
  Bacterial polypetide isolated from the Sargasso Sea
MNNTLALIKPDAMQKGFKDEIRKDIMDNGFVIAEEKTLYLSVEQAEGFYSIHKDKPFFEELVEFMTSSETHIMKLEKANAVSEWRNLMGATNPAEAEAGTIRAKYGTDISMNATHGSDSNENAEIEINFFF

SEQ ID NO: 130932 - protein, 748 aa, Unknown
  Bacterial polypetide isolated from the Sargasso Sea
MTKNKITAVLGPTNTGKTFLAIETMLSFDSGMIGFPLRLLAREVYDKITKKIDPSKVALITGEEKIIPINAKYFLCTVESMPLDKNLEFVGIDEIQMCNDHERGHIFTDRLLNMRGERLTMLMGSNSIKKIIQKLDDDIEFKNRERLSKLSFGGHKKISRIERKSAVIAFSTEEVYAIAELIRRQKGGAAIVMGSLSPKTRNAQVNLYQSGDVDYLVATDAIGMGINMDLDNVYFSNLKKFDGKKLRNLNISEIGQIAGRAGRYLNHGIFGTTGECKEIQPEEIEALETHGFPDIQTIFWRNSSLNFSNKVSLLKSLEDKPQKDWLRRISECQDEKVLKYFLKEAQNIEIQDNTETLKILWECCQIPDFVKKTYGHHFEVVSKIFNFLTTGNKSVPNHYMKEQLSLLDKLDGNVDSLSNRIANVRTWAYVSNKSNWVENQDYWIERTKNLEDKLSDRLHEELTKTFIDKRASVLAKGLKQDINFETEIVNDEEVMINQQYIGRLKGLKLELDLKVDTLDADVKSLKKAARQNVGPEIVKRIGQIITTGLIELKNDFKIYWNGNQIAKLIPGSDYLNPEIYLIIDEMIENSEKLRLNSYLQNWINVKIETELKSLIDLKNIKDNNTELRALAYHLYENNGVVKRDEVLKYLTKLNQEERKKLRNLGVKFGRYHIFLYKLFKPSSVSLRILLWKNFNEKNFEFLPPTFGLNFLEEKKVLNKNLMLLCGFEKFENLYVRIDILERLFLMIF

SEQ ID NO: 130933 - protein, 676 aa, Unknown
  Bacterial polypetide isolated from the Sargasso Sea
FGGHKKISRIERKSAVIAFSTEEVYAIAELIRRQKGGAAIVMGSLSPKTRNSQVSLYQSGDVDYLVATDAIGMGINMDLDNVYFSNLKKFDGKKLRNLNISETGQIAGRAGRYLNDGKFGTTGECKEIGPEEIEALETHNFPDIQTIFWRNSKLNFANKVWLLKSLEERPQKDWLRRISECQDEKVLKYFLKDAPNIKIEDNTEILQILWECCQIPDFVKKTYGHHFEVVSKIFNFLTNVNKKVPNHYMKEQLSLLDKLDGNVDSLSNRIANVRTWAYVSNKSNWVENQDYWIERTKNLEDKLSDRLHEELTKTFIDKRASVLARGLKQDIMFETKIVNDEEVMINEQYIGRLKGLKLELDLKVDTLDADIKSLKKAARQNVVPEIIKRITQIIDTGLIELKDDFKIYWNKNQIARLIPGPDYLNPQIQLIIDEMIESSEKSRLNSYLQNWTNGKIETELKSLIDLKNVKDNNSELRALAYHLYENNGVVKRDEVLNYLNKLDQDERKKLRNLGVKFGRYHVFLFKLFKPSSVSLRILLWKNFNENNLDFLPPTFGLNFLEEKKMLNKNLMLLCGFEKFDNFYVRIDILERLFLMIFNTKSEDKIKDIKLIPEMLNLLGCNKENFVKLIKKMNYKTYEKNNNIHFKYIPIRKIVKKNTNKNVNDNPFNVLSQLNLK

SEQ ID NO: 130934 - protein, 451 aa, Unknown
  Bacterial polypetide isolated from the Sargasso Sea
MNKKPVRNSIVITIILLLIQSFLITEMVFGIERRKKQVSDEISYFIYPLIYQVPGLGSGNGAGATFVNLVGDGSTLSLLKIKGEIEVDSIVASDIPLFTQHITLSAAYADGKKGGFAFYDRGPDSPEDPEFTLKFKHSWARAADLGLNFFERQLEFYYGGAFAFPEIDLERSDLADFDDWENMTTTEQEDSIADFIKNFLLYIDLVNIFVTRQGLRIDLTDDRIDPRDGYRFQYEKYGFEGEGLKNFDVEDHSLTAYYPNEDLSSVLVANLFFSKSNVKKRLSIFGDSDVEDTEKAVSECIEESKKEERDSSISIETSCRGFVRGVQDFNLEGNNSNATSLGGPNRLRSYPISRFYDKYSFFAGLEFRTYYLESSTPFNFIFEKGVFEAVQSAVFYEIGQVSPTNNSELYSNFKYSTGIGLRLVFSSVVLRADYATGKEGQETTVFIGYGF

SEQ ID NO: 130935 - protein, 78 aa, Unknown
  Bacterial polypetide isolated from the Sargasso Sea
PFYNDLCAYLSSGPIVVMSLQKENAVLENRKFMGATNPKDAEEGTLRKKYGISIDKNSVHGSDSVENAKIELDFFFKD

SEQ ID NO: 130936 - protein, 58 aa, Unknown
  Bacterial polypetide isolated from the Sargasso Sea
AILKNREIMGATNPDDAEEGTIRKQFALSIEANSVHGSDSSETAIEEIKYFFDESEII

SEQ ID NO: 130937 - protein, 59 aa, Unknown
  Bacterial polypetide isolated from the Sargasso Sea
ILSVRGPGTIRGDFAVDIGRNVVHGSDGPETAERELNIFFKPEELVNYEKNADTWVRES

SEQ ID NO: 130938 - protein, 57 aa, Unknown
  Bacterial polypetide isolated from the Sargasso Sea
LEAEPGTIRGDLAIDIGRNIIHGSDGEDTAKFEIDLWFNEEELCEWETSDAKWRSEN

SEQ ID NO: 130939 - protein, 42 aa, Unknown
  Bacterial polypetide isolated from the Sargasso Sea
NPKDAEEGTIRKKYGISIDKNSVHGSDSVENAKIEIDFFFKD

SEQ ID NO: 130940 - protein, 60 aa, Unknown
  Bacterial polypetide isolated from the Sargasso Sea
VLEGNNAVAENRRIMGATDPKNAGEGTLRKLYGISIDKNSVHGSDSTDNAKKEISFFFKD

SEQ ID NO: 130941 - protein, 87 aa, Unknown
  Bacterial polypetide isolated from the Sargasso Sea
HQDKSFFNDLISYMTSEPVIVQILESDDAVNKYRNIMGATNPENAEKGTIRNEYALNVQENSVHGSDSLENAKIEINFFFSNDEIVG

SEQ ID NO: 130942 - protein, 112 aa, Unknown
  Bacterial polypetide isolated from the Sargasso Sea
KNEFRNNNFDILKEKKVKISKSEAEKFYQVHQSKPFYNDLCEYLSSGPIVVMVLEKNDAILENRKLMGATDPIKAEEGTLRKKYGISIDKNSVHGSDSLDNAKIEIDFFFKD

SEQ ID NO: 130943 - protein, 46 aa, Unknown
  Bacterial polypetide isolated from the Sargasso Sea
PEEADEGTIRKKFALSLEKNSVHGSDSPENAEIEINHFFDEADIIS

SEQ ID NO: 130944 - protein, 80 aa, Unknown
  Bacterial polypetide isolated from the Sargasso Sea
MSDAQQTLSIIKPDAVERNLGDTIKNEFLKNDFKIIKEKKIKLEKQEAEKFYQVHQTKPFYNELCSYLASGPIIVMLLEK

SEQ ID NO: 130945 - protein, 97 aa, Unknown
  Bacterial polypetide isolated from the Sargasso Sea
IDQAENFYDIHREKPFFRDLIVYMTSEPVVVQVLSGNNAVEKYRSIMGATNPENAEDGTIRKLFALNVQENSVHGSDSDENAKKEIDFFFKSEEIVG

SEQ ID NO: 130946 - protein, 126 aa, Unknown
  Bacterial polypetide isolated from the Sargasso Sea
TGRCERKLVGEIIRRLEEANLTIVAAELRNLNPELLSRHYEEHVGKPFYDELVTFMSRSPAMLMVLEGEGEAFAVARELMGATDPAQAAAGTIRGDLGTEMPENLIHGSDSEESAAREIGIFFPEL

SEQ ID NO: 130947 - protein, 70 aa, Unknown
  Bacterial polypetide isolated from the Sargasso Sea
YLSSGPIVVMVLEKNNAVLENRTLMGSTNPKEAQEGTIRKKYGLSIDKNSVHGSDSVENARIEIDFFFKD

SEQ ID NO: 130948 - protein, 93 aa, Unknown
  Bacterial polypetide isolated from the Sargasso Sea
MSKIENTLSIIKPDAVERNLQDQIKNEFMNKGFKILQEKKIHISKEEAEKFYKVHESKPFYNDLCAYLSSGPIVVMNLQRENAVLENRKFMGA

SEQ ID NO: 130949 - protein, 79 aa, Unknown
  Bacterial polypetide isolated from the Sargasso Sea
MSNIEQTLSIIKPDAVERNLENEIKNIFLENKFKIIKDKKIHITKAEAEEFYKVHQTKPFYNDLCSYLSSGPIVVMILE

SEQ ID NO: 130950 - protein, 94 aa, Unknown
  Bacterial polypetide isolated from the Sargasso Sea
MSNIEHTLSIIKPDAVERGLQDKIKNEFKNKGFEILNEKKIHITKAEAEKFYKVHESKPFYNDLCTYLSSGPIVVMKLQRDNAVIENRKLMGAT

SEQ ID NO: 130951 - protein, 102 aa, Unknown
  Bacterial polypetide isolated from the Sargasso Sea
MSNAEQTLSIIKPDATERNLQDEIKKEFKKNGFLIVKEKKIHISKTEAEQFYKVHQTKPFYNDLCAYLSSGPILVMVLEKDNAVLDNRQLMGATNPKEADEG

SEQ ID NO: 130952 - protein, 58 aa, Unknown
  Bacterial polypetide isolated from the Sargasso Sea
HSKNREIMGATNPDEADEGTIRKKFALSLEKNSVHGSDSSENAAIEIKHFFSEDDIIS

SEQ ID NO: 130953 - protein, 72 aa, Unknown
  Bacterial polypetide isolated from the Sargasso Sea
MSNFEQTLSIIKPDAVERNLVEEIKGIFTSNNLKIKESKKIQISKEEAAEFYKVHQSKPFYENLCSYLSSGP

SEQ ID NO: 130954 - protein, 111 aa, Unknown
  Bacterial polypetide isolated from the Sargasso Sea
MSSVEQTLSIIKPDAVERNLADKIQKKFIQEKLKILKTKKIQISKEEASEFYKVHQTKPFFERLCSYLSSGPIVVMVLEGNNAIAENRRIMGATDPNNAEEGTLRKLYGIS

SEQ ID NO: 130955 - protein, 94 aa, Unknown
  Bacterial polypetide isolated from the Sargasso Sea
MSNIEQTLSIIKPDAVERNLENEIKEMFKNNGFSILKQKKIQIEKSEAENFYKVHETKPFYNDLCEYLSSGPIVVMVLEKENAVLGNREFDGRT

SEQ ID NO: 130956 - protein, 69 aa, Unknown
  Bacterial polypetide isolated from the Sargasso Sea
MSNIEKTLSIIKPDAVERNLQDQIKNEFKNNGFEILKEKKIHISKEEAEKFYKVHESKPFYNDLCAYLS

SEQ ID NO: 130957 - protein, 140 aa, Unknown
  Bacterial polypetide isolated from the Sargasso Sea
MNSNRTFTMLKPDSIEQGYMLSILNIIKEAGFKIIALKYKKMTKEEAEQFYSVHSDKPFFKDLIQFMTRGPIVAAALEKSNAVVDFRKLIGSTDPKEAKEGTIRKRYAKSIGENAVHGSDSDENASMEISFHFSDSEIFS

SEQ ID NO: 130958 - protein, 75 aa, Unknown
  Bacterial polypetide isolated from the Sargasso Sea
MTYARIYHLGPILVMVLEKENAIIENRKLMGSTDPSKAEEGTIRKKYGISIDKNSVHGSDSLENAKIEINFFFKD

SEQ ID NO: 130959 - protein, 110 aa, Unknown
  Bacterial polypetide isolated from the Sargasso Sea
EFKKNDFIITKEKKIHITKEEAEKFYKVHETKPFYDDLCAYLSSGPIIVMILQKENAVLENRKLMGATNPNEAEEGTIRKKYGISIDKNSVHGSDSIENAKLEIEFFFKD

SEQ ID NO: 130960 - protein, 68 aa, Unknown
  Bacterial polypetide isolated from the Sargasso Sea
SSGPIIVMALEKQNAVLDNRKLMGATNPKEAEDGSLRKKYGISIDKNSVHGSDSIENAKIEINFFFKN

SEQ ID NO: 130961 - protein, 61 aa, Unknown
  Bacterial polypetide isolated from the Sargasso Sea
DVVSRYRKLMGATNPANADDDTIRKLYGLSVEENSVHGSDSSENARIEINFFFAEREVYKT

SEQ ID NO: 130962 - protein, 91 aa, Unknown
  Bacterial polypetide isolated from the Sargasso Sea
MSVENTLSIIKPDAVKRDLTGKIIAMFEEKGLRVVAQKKIWLSKEQAGSFYDIHRDRPFFGELCEFMSSGTIVVQVLQGNSAIELNREIME

SEQ ID NO: 130963 - protein, 31 aa, Unknown
  Bacterial polypetide isolated from the Sargasso Sea
KYGENSVHGSDAPETAAIEIAYFFSGIELVG

SEQ ID NO: 130964 - protein, 118 aa, Unknown
  Bacterial polypetide isolated from the Sargasso Sea
QLVGLKQIYPTEDIAKKHYDVHSDKPFFPGLIKFITSGPVVCMAWSGKDAISVARNLIGPTNGREASPGTIRGDYGMDIGYNMIHGSDAAETAEFELNLWFPDGLNEWTQDSQSWVYE

SEQ ID NO: 130965 - protein, 39 aa, Unknown
  Bacterial polypetide isolated from the Sargasso Sea
MATERTLSIIKPDAVSKNIIGKIISRFEDNGLHIVAGKL

SEQ ID NO: 130966 - protein, 67 aa, Unknown
  Bacterial polypetide isolated from the Sargasso Sea
MSNIEQTLSIIKPDAVERNLESEIKEMFIRNGFKIVNDKKIKIEKSEAEKFYKVHETKPFYDDLCNY

SEQ ID NO: 130967 - protein, 88 aa, Unknown
  Bacterial polypetide isolated from the Sargasso Sea
MSNIEQTLSIIKPDAVERNLENEIKEMFKNNGFSILKEKKIQIEKSEAENFYRVHETKPFYNDLCEYLSSGPIVVMVLEKENAVLGNR

SEQ ID NO: 130968 - protein, 50 aa, Unknown
  Bacterial polypetide isolated from the Sargasso Sea
NPAEAAEGTIRKDFAQSIGENTVHGSDSLENAAIEIAYFFAQTELVNGKA

SEQ ID NO: 130969 - protein, 69 aa, Unknown
  Bacterial polypetide isolated from the Sargasso Sea
MSNIEQTLSIIKPDAVERNLENEIKTIFKKNGFKIVNEKKLKLEKMEAEQFYKVHETKPFYNDLCTYLS

SEQ ID NO: 130970 - protein, 110 aa, Unknown
  Bacterial polypetide isolated from the Sargasso Sea
MSNIEQTLSIIKPDAVERNLQDQIKNEFKNNGFEILKEKKIHISKDEAEKFYKVHASKPFYNDLCAYLSSGPIVVMNLQKDNAVLENRKLMGATNPKDAEEGTLRKKYGI

SEQ ID NO: 130971 - protein, 90 aa, Unknown
  Bacterial polypetide isolated from the Sargasso Sea
EAEKFYKVHETKPFYKDLCAYLSSGPIVVMSLQKDNAVLENRKFMGATNPQDAEEGTLRKKYGISIDKNSVHGSDSVENAKIELDFFFKD

SEQ ID NO: 130972 - protein, 68 aa, Unknown
  Bacterial polypetide isolated from the Sargasso Sea
VVQVLGGENSIEKYRSVMGATNPENADNGTIRKLFGLNVQENSVHGSDSKENAEIEINFFFKEEEIVG

SEQ ID NO: 130973 - protein, 119 aa, Unknown
  Bacterial polypetide isolated from the Sargasso Sea
LIEKNKMRIIAQKMLHLSLIDAKGFYFVHKERAFFNDLCEYMTSGPIVVQVLMGKNVINNYRKLMGATNPTNADDGTIRKKYGLSVEANSVHGSDSKENSAIEINYFFSKREIFNQLGG

SEQ ID NO: 130974 - protein, 117 aa, Unknown
  Bacterial polypetide isolated from the Sargasso Sea
MSNLEKTLSIIKPDAVERNLSDEIKNIFKKNKLSIIDSKKIHINKDEASEFYKVHQSKPFYNDLCSYLASGPIVVMILEGENAIKLNREIMGSTNPKDAKDGTIRKLYGISIDKNSV

SEQ ID NO: 130975 - protein, 59 aa, Unknown
  Bacterial polypetide isolated from the Sargasso Sea
MNNIEQTLSIIKPDAVERNLQDQIKNEFKNNGFEILKEKKIHISKNEAKKFYKVHESKP

SEQ ID NO: 130976 - protein, 108 aa, Unknown
  Bacterial polypetide isolated from the Sargasso Sea
INKGFEIIKEKKIHISKEDAEKFYKVHESKPFYNDLCNYLSSGPIVVMTLQRENAVMENRKLMGATNPVDADEGTLRKKYGISIDKNSVHGSDSLENAKIELDFFFNH

SEQ ID NO: 130977 - protein, 39 aa, Unknown
  Bacterial polypetide isolated from the Sargasso Sea
MQRKVLFRKKYGISIDKNSVHGSDSVENAKIEIDFFFKD

SEQ ID NO: 130978 - protein, 61 aa, Unknown
  Bacterial polypetide isolated from the Sargasso Sea
MNLQKDNAVLENRKLMGATNPKDAEEGTLRKKYGISIDKNSVHGSDSVENAKIELDFFFKD

SEQ ID NO: 130979 - protein, 81 aa, Unknown
  Bacterial polypetide isolated from the Sargasso Sea
ETKPFYNDLCEYLSSGPVVVMVLEKEDAILANRRIMGATDPKKAEDGTIRKQFGISIDKNSVHGSDSIDNAKIEIDFFFKN

SEQ ID NO: 130980 - protein, 77 aa, Unknown
  Bacterial polypetide isolated from the Sargasso Sea
MNNVEQTLSIIKPDAVERSLESQIKEMFKSNGFKILKEKKIQIEKSEAEKFYKVHETKPFYYDLCDYLSSGSIVVMI

SEQ ID NO: 130981 - protein, 64 aa, Unknown
  Bacterial polypetide isolated from the Sargasso Sea
IVVMVLERENAILENRKLMGATDPIKAEEGTIRKKYGISIDKNSVHGSDSPENAKVEIDFFFKD

SEQ ID NO: 130982 - protein, 98 aa, Unknown
  Bacterial polypetide isolated from the Sargasso Sea
TKEQAEQFYEVHNDKSFFSELIEFMTSEPVVVQVLSADGAVNKYREVMGATNPDNANEGTIRKLFALNVQENSVHGSDSDVNAKKEIDFFFKNEEIVG

SEQ ID NO: 130983 - protein, 117 aa, Unknown
  Bacterial polypetide isolated from the Sargasso Sea
MSNIEQTLSIIKPDAVERNLQEEIKKIFLDNNFKINDEKKIHISKNEAEEFYKVHQSKPFYEELCNYLSSGPIVVMILEKDNAVTENRKLMGATDPAKAEEGTLRKKYGISIDKNSV

SEQ ID NO: 130984 - protein, 44 aa, Unknown
  Bacterial polypetide isolated from the Sargasso Sea
AAGTIRADFAQSIDANSVHGSDSPTSAEREINFFFADGGICPRD

SEQ ID NO: 130985 - protein, 54 aa, Unknown
  Bacterial polypetide isolated from the Sargasso Sea
REVMGATNPENAEQGTIRKEFALNIQENSVHGSDSLENAKIEISYFFEDNEITR

SEQ ID NO: 130986 - protein, 158 aa, Unknown
  Bacterial polypetide isolated from the Sargasso Sea
MQLTRFSWVRRPNVALEKTLGIIKPDAVAKKCIGKILAHAEENGLHIIACKMTRLSKEDAEEFYSEHVGQSFYTPLVNYMTSGPIIIQVFEGENAIKTLRNIMGSTIPNKADIGTIRNLYGNHKPVNGTYENAIHGSDSKESAEREISFFFTDSEINI

SEQ ID NO: 130987 - protein, 91 aa, Unknown
  Bacterial polypetide isolated from the Sargasso Sea
LVDYIISGPVVCMIWQGPTGTVAAARKMIGETNPLESLPGSIRGDFAVEVGRNIIHGSDSVESAEREINLWFADGNGVVDWEMTNNGWIRE

SEQ ID NO: 130988 - protein, 51 aa, Unknown
  Bacterial polypetide isolated from the Sargasso Sea
SYRELMGATDPIQAKEGTIRKKYGISIDKNSVHGSDSEENAEKEINFFFKN

SEQ ID NO: 130989 - protein, 60 aa, Unknown
  Bacterial polypetide isolated from the Sargasso Sea
NAIDKYRKVMGATNPENAEAGTIRKLHALNVQENSVHGSDSIENAKKEISFFFEPDEIVG

SEQ ID NO: 130990 - protein, 66 aa, Unknown
  Bacterial polypetide isolated from the Sargasso Sea
GPIVVMSLQKDNAVLENRKLMGATNPQEAEEGTLRKKFGISIDKNSVHGSDSLENAKIEIDFFFKD

SEQ ID NO: 130991 - protein, 114 aa, Unknown
  Bacterial polypetide isolated from the Sargasso Sea
MSNIEQTLSIIKPDAVERNLQEEIKNEFKKKGFSIVKEKKIHISKSEAEQFYKVHQTKPFYNDLCAYLSSGPIIVMALEKDNAVLDNRQLMGATNPKVAEEGTLRKKYGISIDK

SEQ ID NO: 130992 - protein, 78 aa, Unknown
  Bacterial polypetide isolated from the Sargasso Sea
PFYNDLCNYLSSGPIVAMILEKVDAVSENRKVMGATDPAKADEGTIRKKYGISIDKNSVHGSDSIENANKEINFFFKT

SEQ ID NO: 130993 - protein, 85 aa, Unknown
  Bacterial polypetide isolated from the Sargasso Sea
MSNIEQTLSIIKPDAVERNLIDEIKKIFTKNNLNIKEDKKIHLTKEEAAEFYKVHQSKPFYDDLCTYLSSGPIVVMILEGENAVL

SEQ ID NO: 130994 - protein, 53 aa, Unknown
  Bacterial polypetide isolated from the Sargasso Sea
MSSLEQTLSIIKPDAVERNLEVEIKEMFKNKGFQILKEKKIQIEKSEAEKFYK

SEQ ID NO: 130995 - protein, 137 aa, Unknown
  Bacterial polypetide isolated from the Sargasso Sea
MERTFAILKPDAVERNLIGKILERVESNGFKIAALKKVQLTKSQAEGFYYVHKERPFFGSLTDFMCSGPVILLVLEKENAIKAWRDLMGATNPEEAGEGTIRKDFAVNIEKNSTHGSDSAENAAFEISYFFSETEIL

SEQ ID NO: 130996 - protein, 140 aa, Unknown
  Bacterial polypetide isolated from the Sargasso Sea
MNSNRTFTMLKPDSIEQGNMLPILNMIQSSGFKIIALKYKRMSRDEAEKFYSIHSDKPFFNDLVSFMTRGPIVAAALEKDNAVEAFRTLIGSTDPNDAEEGTIRKKFAKSKGENAVHGSDSDENAEIEISFHFNTDEIFS

SEQ ID NO: 130997 - protein, 42 aa, Unknown
  Bacterial polypetide isolated from the Sargasso Sea
AEGTIRKKYALSLEKNSVHGSDSPENAEIEINHFFDEADIIS

SEQ ID NO: 130998 - protein, 71 aa, Unknown
  Bacterial polypetide isolated from the Sargasso Sea
MSSLEKTLSIIKPDAVERNLTKNIQEYFLKNNFKILKEKKIQITKDEAAEFYKVHQTKPFYDRLCNYLASG

SEQ ID NO: 130999 - protein, 143 aa, Unknown
  Bacterial polypetide isolated from the Sargasso Sea
MRKEKTLSIIKPDGVRRNLIGKILSRFEENNLRIVCTKMIHMSKSEAEGFYMVHKDRPFFEELTEFMSSGSVLVSILEGENAILLHREIMGATNPSDAKPGTIRSDFAESLGENTVHGSDNAENAVIECSYFFSKTEMVNGSS

SEQ ID NO: 131000 - protein, 84 aa, Unknown
  Bacterial polypetide isolated from the Sargasso Sea
MNKIEQTLSIIKPDAVERNLDNDIKEIFKNNGFNIVKDKKNQVSKSEAEQFYNVHQNKPFYNDLCNYLSSGVHCSYDTRRKKML

SEQ ID NO: 131001 - protein, 100 aa, Unknown
  Bacterial polypetide isolated from the Sargasso Sea
KLSNDQAEEFYSVHKDKPFFRDLIEYMTSEPVIVQVLSGDNSVENYRKIMGATNPENAEKGTIRKLFGLNVQENSVHGSDSSENANIEIDFFFNSEEIVG

SEQ ID NO: 131002 - protein, 94 aa, Unknown
  Bacterial polypetide isolated from the Sargasso Sea
AEGFYSVHKDKPFFNDLIEYMTSGAVIIQVLKGDNAVDQYRKIMGATNPDNAEAGTIRKEFALNIQENSVHGSDSEKNAEIEIKYFFDEGEIID

SEQ ID NO: 131003 - protein, 68 aa, Unknown
  Bacterial polypetide isolated from the Sargasso Sea
MIEQTLSIIKPDAVERDLVSKIKQKFLDEKLKIVKSKKIQISKEEAAEFYKVHQTKPFYENYAPTFLL

SEQ ID NO: 131004 - protein, 83 aa, Unknown
  Bacterial polypetide isolated from the Sargasso Sea
MNNVEQTLSIIKPDAVERNLIEEIKKIFTKNNLIIKEDKKIHITKEEAAEFYKVHQTKPFYDDLCSYLSSGPIVVMILEGKNA

SEQ ID NO: 131005 - protein, 139 aa, Unknown
  Bacterial polypetide isolated from the Sargasso Sea
MSNITFIMIKPDAVERGLIGNILKDINDAGFNIRALKLTKLSIDEAKTFYSVHSERPFFDELTKYMSRSPIVAAVLEKENAVSEFRKLIGDTDPSTAKKGTIRSKYAISKGENSVHGSDSDENAKIEAQFHFSGREILF

SEQ ID NO: 131006 - protein, 188 aa, Unknown
  Bacterial polypetide isolated from the Sargasso Sea
MIKKVKKAVFPVGGMGTRFLPATKALPKEMLPIVDKPLIQYAVEEAVSAGIEEFVFITGRGKTAIEDHFDQSTELVNLLKKRNKNKELKNIIDSMPKPGAVAYTRQQEPLGLGHAIWCARNLIGEDNFAVLLADDIFMSRKSCLKQMIDQYDGRGGMVAVEEIEGEEISNYGVLDVDYNEGDKIKIKG

SEQ ID NO: 131007 - protein, 56 aa, Unknown
  Bacterial polypetide isolated from the Sargasso Sea
MSNIEQTLSIIKPDAVERNLEGEIKKMFKSNGFQIIKEKKIQIEKTEAEKFYKVHE

SEQ ID NO: 131008 - protein, 143 aa, Unknown
  Bacterial polypetide isolated from the Sargasso Sea
VLIKPDGVNRALIGKVIEKLESTGLKITGMKLILIDKDLASKHYEEHKDKPFFSSLVNFITSSPVVALALNGENAIQKTRTMMGSTNPLESNPGTIRGDFGLSLEKNIIHGSANENDALREIKLYFSEEEIINYDRSVDNWVS

SEQ ID NO: 131009 - protein, 71 aa, Unknown
  Bacterial polypetide isolated from the Sargasso Sea
MSNLEQTLSIIKPDAVDRNLENEIKEMFKSNGFTILKEKKIQIEKSEAEKFYKVHETKPFYNDLCAYLSSG

SEQ ID NO: 131010 - protein, 134 aa, Unknown
  Bacterial polypetide isolated from the Sargasso Sea
MSGNKTFTIIKPDAFEEGYTGPIIQKIEEAGFNLKNMRLIRLDQESAGKFYAIHKEKPFFGRLCDYMCSGPIIVIQLEKENAVEDFRKLIGATNPEDAEEGTIRKLYATSIEANAIHGSDSDENAEIEINFFFS

SEQ ID NO: 131011 - protein, 68 aa, Unknown
  Bacterial polypetide isolated from the Sargasso Sea
SSGPIVVMSLQRDNAVLENRKLMGATNPQEAEEGTLRKKFGISIDKNSVHGSDSLENAKIEIDFFFKD

SEQ ID NO: 131012 - protein, 59 aa, Unknown
  Bacterial polypetide isolated from the Sargasso Sea
LEKNDAILENRKLMGATDPIKAEEGTLRKKYGISIDKNSVHGSDSLGNAKIEINFFFKD

SEQ ID NO: 131013 - protein, 66 aa, Unknown
  Bacterial polypetide isolated from the Sargasso Sea
GPIIVMILEKENAIIANRELMGSTNPKDAKEGTIRKKYGISIDKNSVHGSDSIDNAKIEIDFFFKD

SEQ ID NO: 131014 - protein, 100 aa, Unknown
  Bacterial polypetide isolated from the Sargasso Sea
MEQTLSIIKPDAVERNLSVEIKNMFLNNGFKIINEKKIQISKAEAEQFYIVHQTKPFYDELCKYLSSGPIVVMILEKENAILANRELMGSTNPHEAREGT

SEQ ID NO: 131015 - protein, 117 aa, Unknown
  Bacterial polypetide isolated from the Sargasso Sea
WRDIRRLEEANLTIVAAEFRSLNSELLSRHYEEHVDKPFYDELVTFMSRSPAMLMVLEGEGETFAVARGLMGATDPAQAAAGTIRGDLGTAMPENLIHGSDSEESAAREIEIFFPEL

SEQ ID NO: 131016 - protein, 76 aa, Unknown
  Bacterial polypetide isolated from the Sargasso Sea
FFNELVAFMTFGPLVVMELEGEEAINTNRKIMGATNPAEALEGTIRAKYGDGMTENAVHGSDGLESASREIKFFFG

SEQ ID NO: 131017 - protein, 93 aa, Unknown
  Bacterial polypetide isolated from the Sargasso Sea
MSSIEQTLSIIKPDAVERNLTKEIKSIFLKNDLIVKDSKKIHITRDEAAEFYKVHQSKPFYNDLCNYLASGPIVVMILEGQNAVMSNRKLMGA

SEQ ID NO: 131018 - protein, 145 aa, Unknown
  Bacterial polypetide isolated from the Sargasso Sea
MGIERTLGIIKPDAVAKNFANKILAQIKKNNLQIITSKMTHLSKAEAEEFYSEHAERSFYQSLIDYMTSGPVMIQIFEGENAITVLRNIMGSTIPSEAKEGTIRNLYGNFEAVNGTYQNAIHGSDSKKNAEREINFFFSKNEINK

SEQ ID NO: 131019 - protein, 67 aa, Unknown
  Bacterial polypetide isolated from the Sargasso Sea
VQVLEAENAITLYRNTMGATNPKEADQGTIRAEHAESIEANSVHGSDSPENAVIEINFFFEEKEIVG

SEQ ID NO: 131020 - protein, 160 aa, Unknown
  Bacterial polypetide isolated from the Sargasso Sea
MQLTGFSWVRRPNVALEKTLGIIKPDAVAKKCIGKILAHVEENGLYIIACKMTHLSKEDAEEFYNEHVGQSFYAPLVNYMTSGPIIIQVFEGENAIKTLRNIMGSTIPNKADRGTIRNLYGNHKPVNGTYENAIHGSDSKESAEREISFFFTDNEINKWA

SEQ ID NO: 131021 - protein, 132 aa, Unknown
  Bacterial polypetide isolated from the Sargasso Sea
AKNYAGKILAQIEANGLKIVASKMTHLTRKKAEKFYSEHVDQIFYKPLIKYMSSGPIIVKVFEGDHAISNLRKIMGATIPSNAKEGEIRKLYGNHEPVNGTYENAIHGSDSLESAEREINFFFTNDELCERI

SEQ ID NO: 131022 - protein, 140 aa, Unknown
  Bacterial polypetide isolated from the Sargasso Sea
MNSNRTFTMLKPDSIEQGYMLPILSMIKEAGFKIIALKYKKMTKEEAEEFYSIHSDKPFFKDLIQFMTRGPIVAAALEKNNAVDDFRKLIGSTDPSEAEDGTIRKRYAKSKGENAVHGSDSDENASIEINFHFSDKEIFT

SEQ ID NO: 131023 - protein, 122 aa, Unknown
  Bacterial polypetide isolated from the Sargasso Sea
MSSIEQTLSIIKPDAVERNLNENIKKFFLKNKLKIVKEKKIQITKEEAAEFYKVHQTKPFYERLCSYLSSGPITVMILEGVNAIQENRKIMEQQTQRMLKMELFEKNMEFLLIKTQSTDLTQ

SEQ ID NO: 131024 - protein, 137 aa, Unknown
  Bacterial polypetide isolated from the Sargasso Sea
MGNQTFAIIKPDAVSKGYTGKIYDRIIQAGFNILSAKLIKLDNEQAEGFYMVHKKRPFFNDLINFMTSGPCMVLVLSKPNAVQDWRETIGSTNPDEAEEIQFVKILHLMFRRMRCMVQIAMKMQKKKLPFSLQIVNF

SEQ ID NO: 131025 - protein, 99 aa, Unknown
  Bacterial polypetide isolated from the Sargasso Sea
SKKIQISKEEASDFYKVHQTKPFYDRLCSYLSSGPIVVMILEGENVIQENRKIMGATDPKNADAGTIRKLYGISIDKNSVHGSDSIENAKKEIDFFFKD

SEQ ID NO: 131026 - protein, 153 aa, Unknown
  Bacterial polypetide isolated from the Sargasso Sea
MDQTFVMFKPDCIERGLLTKVMSRFEDKGLRLVALKLLRVTPALAKQHYAEHVEKPFYPSLESFITAAPVVAAIYEGLDVVRVVREMLGATSGLKAAAGTIRGDFSASRQMNLVHASDSAESAAREIGIYFTETEIVAWEPRCDDMLRAADEA

SEQ ID NO: 131027 - protein, 58 aa, Unknown
  Bacterial polypetide isolated from the Sargasso Sea
VDAFRTLIGSTDPNEAEEGTIRKKYAKSKGENAVHGSDSDENAEIEISFHFDNKEIFN

SEQ ID NO: 131028 - protein, 133 aa, Unknown
  Bacterial polypetide isolated from the Sargasso Sea
MSEQTLFIVKPDGVQRKLIGEIISRFEKKGFTILKLKMFTFTKELATEFYSVHKDKPFFGELLEYMTSGPVVVTVVEGNNAVATTRQMVGATKSFEAEPGSIRGDFGLGFTENIIHASDSTESFDKEVSVVFK

SEQ ID NO: 131029 - protein, 133 aa, Unknown
  Bacterial polypetide isolated from the Sargasso Sea
MTNKTLAIIKPDAVKRNLIGKIISIIEENDFVVSQIKSYHLNAVEAETFYEIHKGKPFFEALIDYMTSGKIIVLLLHKNNAVSQFRKLIGNTNPELANSGTIRKLYAVNQTQNSIHGSDSDINANVEINFFFK

SEQ ID NO: 131030 - protein, 67 aa, Unknown
  Bacterial polypetide isolated from the Sargasso Sea
AAVLEKDNAVEAFRMLIGSTDPNEAEEGTIRKKYAKSKGENAVHGSDSDENADIEISFHFDTNEIFS

SEQ ID NO: 131031 - protein, 105 aa, Unknown
  Bacterial polypetide isolated from the Sargasso Sea
MNNIEQTLSIIKPDAVERNLQDQIKNEFKNNGFEILKEKKIHISKDEAEKFYKVHESKPFYNDLCAYLSSGPIVVMSLQKENAVLENRKLMGATNPKDAEEGTLR

SEQ ID NO: 131032 - protein, 150 aa, Unknown
  Bacterial polypetide isolated from the Sargasso Sea
MERTLILIKPDGVQRSLSGEILSRLEKSGLKITGLKLLHVDENLAKEHYAEHVDKPFFGDLVSYICSAPIIALALSGPNAVEKSRSLIGTTNPLESPPGTIRGDYGLEISRNLIHGSASVDDANREVSIFFDKSEIIDYEKSTDGWVLEL

SEQ ID NO: 131033 - protein, 88 aa, Unknown
  Bacterial polypetide isolated from the Sargasso Sea
MSNLEQTLSIIKPDAVERNLENGIKEMFKNNGFSILKEKKIQIEKSEAEKFYKVHETKPFYNDLCDYLSSGPIVVMVLEKENAVLGNR

SEQ ID NO: 131034 - protein, 117 aa, Unknown
  Bacterial polypetide isolated from the Sargasso Sea
MNNLQQTLSIIKPDAVERNLDKEIKEMFKNNGFLILKEKKIQLEKSEAEKFYKVHETKPFYNDLCAYLSSGPIIVMILEKENAVLANRELMGSTNPKEAKEGNIRKKYGISIDKNSV

SEQ ID NO: 131035 - protein, 138 aa, Unknown
  Bacterial polypetide isolated from the Sargasso Sea
MQKTLILLKPDCLERKVAGEVITRFEKKGYDILASKMIQLDEELLNEHYSHVAHLPFFPEIASFMSSRPVLALVLEGEDVIQGIRDLLGPTDSTTAPSGTIRGDLGTDRMRNVVHASDSPESALAEIDRFFDADQICG

SEQ ID NO: 131036 - protein, 140 aa, Unknown
  Bacterial polypetide isolated from the Sargasso Sea
MKTNRTFTMLKPDSIEDGYMLPILNKISESGFKIIALKYKKMNREEAQEFYSIHSEKPFFNDLINFITRGPIVAAVLEKDNAVQDFRKLIGSTDPNEAEEGTIRKSFARSKGENAVHGSDSDENANVEISFHFDKTEIFS

SEQ ID NO: 131037 - protein, 133 aa, Unknown
  Bacterial polypetide isolated from the Sargasso Sea
MSEQTLFIVKPDGVKRKLVGEIISRFEKKGFTILKLKMFTFTKELATEFYSVHKDKPFFGELLEYITSGPVVVTVVEGNNAVATTRQMVGATKSFEAEPGSIRGDFGLGFTENIIHASDSTESFDKEVNVVFK

SEQ ID NO: 131038 - protein, 141 aa, Unknown
  Bacterial polypetide isolated from the Sargasso Sea
MNNRTFAIIKPDAVKNGNTGKIYDRILKAGFKILCAKLLRMTVDQAEGFYAIHRERPFFNELTEFMSSGACMVLALEKDDAVNEWRKTIGATNPDDAELGTIRKDFAINVQENAVHGSDSNENAEKEIGFFFSQSELIANK

SEQ ID NO: 131039 - protein, 47 aa, Unknown
  Bacterial polypetide isolated from the Sargasso Sea
PEEAASGTIRSDFAESIDANAVHGSDSPESAEREISYFFTESEIFKS

SEQ ID NO: 131040 - protein, 127 aa, Unknown
  Bacterial polypetide isolated from the Sargasso Sea
MSNLEQTLSIIKPDAVERNLENEIKEVFKSNGFTILKEKKIQIEKSEAEKFYKVHETKPFYNDLCAYLSSGPIIVMALEKENAVLGNRELMGATNPKDAEEGTIRKKYGISIDKNSVHGSDSVENAK

SEQ ID NO: 131041 - protein, 132 aa, Unknown
  Bacterial polypetide isolated from the Sargasso Sea
MKTFFMVKPDGVKRNIVGQVIDRVEQEGFKITKMKMMTITTDLAEQHYGEHKDKPFFQDLVSFITSGPVVAMEVEGENAVSEVRRIMGATNPADADPGTIRADFATKLEENVVHGSDSEESAERELGLFFNN

SEQ ID NO: 131042 - protein, 136 aa, Unknown
  Bacterial polypetide isolated from the Sargasso Sea
MSNVEQTLSIIKPDAVERNLDNEIKQMFKDKGFQIVKEKKIQIEKSEAEIFYKVHETKPFYNDLCSYLSSGPIVVMVIEKVNGILANRELMGATNPKDALDGTIRKKYGISIDKNSVHGSDSPENAKIEINFFFKD

SEQ ID NO: 131043 - protein, 136 aa, Unknown
  Bacterial polypetide isolated from the Sargasso Sea
MSNKEQTLSIIKPDAVERNLIEKIKDIFTENGLQIKESKKIHVTKDEAAEFYKVHQSKPFYNDLCQYLSSGPIFVMVLEGENAVSNNRKLMGATDPKNAEENTIRKLFGISIDKNSVHGSDSIDNAKKEINFFFKN

SEQ ID NO: 131044 - protein, 152 aa, Unknown
  Bacterial polypetide isolated from the Sargasso Sea
MAAERTFIAIKPDGVQRGLVGEILGRFERKGFKLVGLKQLTPSRELAEQHYGVHKERPFFAGLVDFITSGPVVAMVWEGDGVIASARKLIGATKPLEAEPGTIRGDLAVNIGRNVIHGSDAPETAEFEIGLWFGATELNDWTPSDQSWRVEG

SEQ ID NO: 131045 - protein, 136 aa, Unknown
  Bacterial polypetide isolated from the Sargasso Sea
MAIQQTLSIIKPDAVSKNVIGEIISRFEKNNLKIIAAKLITLSAFDAGGFYAEHEGKPFYNDLIEFMTSGPVFIQVLEGEDAISKNRELMGNTDPSKANPGTIRADFAQTIDANAVHGSDSEKSAEREIAFFFSDL

SEQ ID NO: 131046 - protein, 132 aa, Unknown
  Bacterial polypetide isolated from the Sargasso Sea
MGNHTFAIIKPDAVKNKDTGLILDRILKADFQIMGGKLIHMSIEQAQGFYAIHKGKPFYDELIEFMSSGQCMVLALKKENAVEEWRNTIGATNPDEAAEGTIRKDFATNVGLNAVHGSDSDDNAQKEIAFFF

SEQ ID NO: 131047 - protein, 136 aa, Unknown
  Bacterial polypetide isolated from the Sargasso Sea
MSSIEQTLSIIKPDAVERNLDNEIKDIFRNNGFKIIKDKKIQIEKSEAEKFYKVHETKPFYDDLCSYLSSGPIVVMVLEKENSVLANREIMGATNPKEAKDGTIRKKYGISIDKNSVHGSDSVENAKIEIDFFFKD

SEQ ID NO: 131048 - protein, 136 aa, Unknown
  Bacterial polypetide isolated from the Sargasso Sea
MSNIEQTLSIIKPDAVERNLQDQIKNEFKNNGFEILKEKKIHISKEEAEKFYKVHESKPFYNDLCAYLSSGPIVVMKLQKDNAVLENRKFMGATNPKDAEEGTLRKKYGISIDKNSVHGSDSVENAKIELDFFFKD

SEQ ID NO: 131049 - protein, 136 aa, Unknown
  Bacterial polypetide isolated from the Sargasso Sea
MSNLEQTLSIIKPDAVERNLEKEIKEMFKSKGFSILKEKKIQIEKSEAEKFYKVHETKPFYNDLCDYLSSGPIVVMVLEKENAVLGNRELMGATNPKDAEEGTIRKKYGISIDKNSVHGSDSVENAKIEIDFFFKD

SEQ ID NO: 131050 - protein, 143 aa, Unknown
  Bacterial polypetide isolated from the Sargasso Sea
MALEQTLSIIKPDGVKRNLVGEILGRFEQKGLRIVATRMLHLSKREAEGFYAVHRERPFFEELKTFMSSGPVVISVLEGENVVAYHREIMGATNPTEAVEGTIRKDFAQSIGENTVHGSDSLENAAIEIAYFFAQTELVNGKA

SEQ ID NO: 131051 - protein, 91 aa, Unknown
  Bacterial polypetide isolated from the Sargasso Sea
MAERTFIAIKPDGVQRGLVGEILGRFERKGFKLVGLKQITPSRALAEQHYGVHKERPFFAGLVDFITSGPVVAMVWEGDGVIASARKLIGA

SEQ ID NO: 131052 - protein, 137 aa, Unknown
  Bacterial polypetide isolated from the Sargasso Sea
MTIQRTLSIIKPDAVAKNVIGQIISRFESNGLKIIEGQLLQLSRSQAEDFYKEHIGKPFFEKLLDFMTSGKVFIQVLEGEDAIEKNRALMGATNPQLAEKGTIRADFAETIDANAVHGSDSPESALREIEWFLSNKG

SEQ ID NO: 131053 - protein, 145 aa, Unknown
  Bacterial polypetide isolated from the Sargasso Sea
MHERTLAIIKPDAVSSRYSGEILRRIEESELRLIAVKMMTLSGDDAGGFYAVHKERPFFRELVNFMSSGPIVVCVLEGENSILRWRELMGPTNSEDAPKGTIRGDLGIDIERNAVHGSDAPGTAKLEIDYFFNATEICAPVEALP

SEQ ID NO: 131054 - protein, 149 aa, Unknown
  Bacterial polypetide isolated from the Sargasso Sea
MSMKQENRMALERTFSIIKPDAVKRNLIGEIYSRFEKAGLAIVGARMLKLTAEQAGGFYAEHDGKPFYEDLCSYMMSGPVMVQVLEGEDAISVNRRIMGATDPKEAAPGTIRADFAESIDANAVHGSDSPDSAKREIAFFFDDEELLTR

SEQ ID NO: 131055 - protein, 152 aa, Unknown
  Bacterial polypetide isolated from the Sargasso Sea
MTKERTFIAIKPDGVQRGYVADIIGRFEKKGFKLVGLKQLVPSKDLAQNHYGVHRERPFFGDLVDFISSGPVVAMVWEGKGVILSARKLIGATKPLEADPGTIRGDLAIDIGRNIIHGSDGEDTAKFEINLWFNKEELCEWETSDSEWRSEN

SEQ ID NO: 131056 - protein, 128 aa, Unknown
  Bacterial polypetide isolated from the Sargasso Sea
MQPLANKTGAITALIEQSGLRIIAQRRIRMTKAQAQQFYAVHSERPFYDELVEFMMSGPVVVQVLEGENAIAKYREVMGATNPADAAEGTIRKLYAKSVGENSVHGSDAAATAAEEIPQFFSEDDIVG

SEQ ID NO: 131057 - protein, 136 aa, Unknown
  Bacterial polypetide isolated from the Sargasso Sea
MNNLEQTLSIIKPDAIERNLTEEIKKLFITNGFSIIKEKKVQISKTEAQQFYQVHQAKPFYNELCNYLSSGPIYVMILEKNGAILANRELMGATNPIEAKEGTIRKKYGISIDKNSVHGSDSVDNAKIEIDFFFKN

SEQ ID NO: 131058 - protein, 136 aa, Unknown
  Bacterial polypetide isolated from the Sargasso Sea
MSKVEQTLSLIKPDAVERNLEEEIKQFFIKSGFKITKQKKVKLEKKDAEIFYKVHETKPFYSDLCNYLSSGPIVAMILEKVDAVSENRKVMGATDPTKADEGTIRKKYGLSIDKNSVHGSDSIENANKEINFFFKT

SEQ ID NO: 131059 - protein, 136 aa, Unknown
  Bacterial polypetide isolated from the Sargasso Sea
MSKVEQTLSLIKPDAVERNLEEEIKQFFIKSGFRIAKQKKVKLERKDAEIFYKVHETKPFYNELCNYLSSGPIVALILEKIDAVSENRKVMGATDPAKADEGTIRKKYGLSIDKNSVHGSDSIENAAKEINFFFKT

SEQ ID NO: 131060 - protein, 135 aa, Unknown
  Bacterial polypetide isolated from the Sargasso Sea
MSDIEQTLSIIKPDAVERNLQEEIKNEFKKKNFSIVKEKKIHISKSEAEQFYKVHQTKPFYNDLCAYLSSGPIIVMVLEKDNAVLDNRQLMGATNPKEAEEGTIRKKYGMSIDKNSVHGSDSVENAKIEINFFFK

SEQ ID NO: 131061 - protein, 132 aa, Unknown
  Bacterial polypetide isolated from the Sargasso Sea
EQTLSIIKPDAVERNLENEIKDFFIRNNLKISKIKKVKISKEEASEFYKIHQTKPFFEDLCNYLSSGPIVVMVLEGDNAVSKNRELMGATDPSKANEGTLRKMYGLSIDKNSVHGSDSVANGKIEIDFFFKK

SEQ ID NO: 131062 - protein, 47 aa, Unknown
  Bacterial polypetide isolated from the Sargasso Sea
PKEAAPGTIRADFANSIDANAVHGSDSAESAKREIEYFFNTEEILNK

SEQ ID NO: 131063 - protein, 134 aa, Unknown
  Bacterial polypetide isolated from the Sargasso Sea
MSSLEETLSIIKPDAVERNLEKEIKAFFQKNGLKIKQSKKVKISKEEAADFYKVHQTKPFYDALCSYLSSGPIVVMVLEGEDGVSKNRQLMGATDPLKAENGTLRKMYGISIDKNSVHGSDSVENAKVEINFFF

SEQ ID NO: 131064 - protein, 82 aa, Unknown
  Bacterial polypetide isolated from the Sargasso Sea
FNDLKKFMTSGPVFVQVLEGENAVQKNRDLMGSTNPKEAAPGTIRADFANSIDANAVHGSDSAESAKREIEYFFNTEEILNK

SEQ ID NO: 131065 - protein, 69 aa, Unknown
  Bacterial polypetide isolated from the Sargasso Sea
QVLEGENAVLATREIMGATNPADAAAGTLRSDYAASIDENAVHGSDAPESAAREIAYFFSEEEICPRTR

SEQ ID NO: 131066 - protein, 131 aa, Unknown
  Bacterial polypetide isolated from the Sargasso Sea
MERTLSIIKPDGVEKNIIGKIYSRFEKAGLKIVEAKMLHLSREQAEGFYAVHKERPFFNDLVDYMTSGPVMVQVLEGEDAINLNRKLMGATNPEDAEEGTIRKDFAESIERNAVHGSDGPDTAAVEIEYFF

SEQ ID NO: 131067 - protein, 136 aa, Unknown
  Bacterial polypetide isolated from the Sargasso Sea
MSNIEQTLSIIKPDAVERNLENEIKEIFKNNGFSILKEKKIQIEKFEAEKFYKVHETKPFYSDLCNYLSSGPIVVMILQKENAVKGNRELMGATDPKNAEDGTIRKRYGISIDKNSVHGSDSVDNAKIEIDFFFKD

SEQ ID NO: 131068 - protein, 139 aa, Unknown
  Bacterial polypetide isolated from the Sargasso Sea
MGDTVEKTLSIIKPDAVQRNYIGNILSRFENAGLKIVAMRMQKMTKQEAETFYAVHKERPFFAELVDYISSDKVVILVLEGPNAITANRDIMGATNPDDAKAGTIRHDISLSIGENSVHGSDSAENALLEIKQFFPELV

SEQ ID NO: 131069 - protein, 136 aa, Unknown
  Bacterial polypetide isolated from the Sargasso Sea
MTTQRTLSIIKPDAVAKNVIGQIISRFEENNLKVVAAKLITLSASDAGGFYAEHKGKPFYDDLIEFMTSGPVFIQVLEGEDAISKNRELMGNTDPSKANPGTIRADFAQTIDANAVHGSDSEKSAEREIFYFFNNL

SEQ ID NO: 131070 - protein, 129 aa, Unknown
  Bacterial polypetide isolated from the Sargasso Sea
MALERTFSIIKPDAVAKNVIGAIYNRFESAGLRIVAAKMLHLSKEQAEGFYAEHKERPFFAALVSFMTSGPVMVQVLEGEDAVRKNREIMGATNPKDALAGTLRADYAASIDENAVHGSDAAASAAREI

SEQ ID NO: 131071 - protein, 138 aa, Unknown
  Bacterial polypetide isolated from the Sargasso Sea
MTRTLSIIKPDATKRNVTGAINKIIEDSNLKIIAQKRIKLTKEKAEGFYFIHRDKPFFTDLIDYMTSGPVIIQVLEGNNAVDSYRKIMGATNPENAEQGTIRKEFALNIQENSVHGSDSDENAEIEIKYFFDHSEIVI

SEQ ID NO: 131072 - protein, 136 aa, Unknown
  Bacterial polypetide isolated from the Sargasso Sea
MSNIEQTLSIIKPDAVERNLENEIKEIFKNNGFSILKEKKIQIEKSEAENFYKVHETKPFYNDLCEYLSSGPIVVMVLEKDNAVLGNRELMGATNPKDAEEGTIRKKYGISIDKNSVHGSDSVENAKIEIDFFFKD

SEQ ID NO: 131073 - protein, 136 aa, Unknown
  Bacterial polypetide isolated from the Sargasso Sea
MSNLEQTLSIIKPDAVERNLEDKIKTVFKNEGFKIVKEKKIKLEKKDAEKFYKVHETKPFYNDLCEYLSSGPIVVMVLEKNGAVLDNRKLMGATDPKKAEDGTIRKEFGLSIDKNTVHGSDSLDNAKVEIDFFFAH

SEQ ID NO: 131074 - protein, 136 aa, Unknown
  Bacterial polypetide isolated from the Sargasso Sea
MSKIEQTLSIIKPDAVERNLGEEIKSEFLKNNFKVIKEKKIKLEKQEAERFYQVHQTKPFYNDLCSYLSSGPIIVMVLEKEGAVAENRKLMGATDPKNAEDGTLRKKYGLSIDKNSVHGSDSFENAKIEIDFFFKD

SEQ ID NO: 131075 - protein, 132 aa, Unknown
  Bacterial polypetide isolated from the Sargasso Sea
MSNIEQTLSIIKPDAVERNLGDEIKSEFLKNNFKILKEKKIKLEKQEAEKFYQVHQTKPFYNDLCSYLSSGPIIVMVLEKEDAIAGNRKLMGATDPKKAEDGTLRKKHGLSIDKNSVHGSDSLENAKIEIDF

SEQ ID NO: 131076 - protein, 139 aa, Unknown
  Bacterial polypetide isolated from the Sargasso Sea
MTIQRTLSIIKPDATSRNIIGKIIDRFESNGLKVVAGKLIHMDQDKAAGFYAEHDGKPFFANLVEYMTSAPVFVQVLEGENAILKNRDLMGATNPSEAKSGTIRADFAETIDANAVHGSDSVESASREISYFFDDSEIF

SEQ ID NO: 131077 - protein, 62 aa, Unknown
  Bacterial polypetide isolated from the Sargasso Sea
RRRNAVAKYRKIMGATNPAEAEEGTIRKLYAESIEANSVHGSDSEENAKIEISFFFSGSELA

SEQ ID NO: 131078 - protein, 140 aa, Unknown
  Bacterial polypetide isolated from the Sargasso Sea
MKKITNSVEQTLSIIKPDAVERDLVEKIKKNFIDKHFKIVKSKKIQISKEEAAEFYKIHQTKPFYDRLCSYLSSGPIVVMILEKDSAVIENRRIMGATDPKNAEDGTLRKLYGISIDKNSVHGSDSVDNAKKEISFFFKD

SEQ ID NO: 131079 - protein, 136 aa, Unknown
  Bacterial polypetide isolated from the Sargasso Sea
MSNIEQTLSIIKPDAVERNLDNEIKQLFINKGFKIVKEKKIQLEKSEAEKFYKIHETKPFYNDLCTYLSSGPIVALVLEKENSIFENRSLMGATNPKEAIEGTIRKKYGISIDKNSVHGSDSVENAKIEIDFFFNN

SEQ ID NO: 131080 - protein, 136 aa, Unknown
  Bacterial polypetide isolated from the Sargasso Sea
MSSVERTLSIIKPDAVERNLTENIKQYFVNNKLRIVKEKKIQVTKDEAAEFYKVHQTKPFYDKLCNYLSSGPITVIILEGNNAIKENRRIMGATDPIKAEDGTIRKKYGISIDKNSVHGSDSIENAKKEIEFFFKN

SEQ ID NO: 131081 - protein, 136 aa, Unknown
  Bacterial polypetide isolated from the Sargasso Sea
MSNIEQTLSIIKPDAVERNLDNEIKEMFKSKGFSILKEKKIQIEKSEAEKFYKVHETKPFYNDLCEYLSSGPIVVMVLEKENAVLANRELMGATNPKDAEEGTIRKKYGISIDKNSVHGSDSAENAKIEIDFFFKD

SEQ ID NO: 131082 - protein, 137 aa, Unknown
  Bacterial polypetide isolated from the Sargasso Sea
MQKTFSIIKPDAVKRNLIGHINQIIESSGLRILASKKIYLNINHAKIFYEVHKERPFFNSLVEYMTSGPVQVQVLEGEDAVSKYRKIMGATNPVEAEDGTIRKLYAESIEANSVHGSDSEENAKIEISFFFSESELI

SEQ ID NO: 131083 - protein, 92 aa, Unknown
  Bacterial polypetide isolated from the Sargasso Sea
NFYKIHKDKPFFNDLIEYMTSEPVVLQVLESENAVNKYREIMGATNPKEAKEGTIRNLHALNVQENSVHGSDSIENANIEINFFFHDNEITG

SEQ ID NO: 131084 - protein, 136 aa, Unknown
  Bacterial polypetide isolated from the Sargasso Sea
MSNIEQTLSIIKPDAVERNLQDQIKNEFKNNGFEILKEKKIHISKDEAEKFYKIHESKPFYNDLCTYLSSGPIVVMSLQKDNAVLENRKLMGATNPKNAEEGTLRKKYGISIDKNSVHGSDSVENAKIELDFFFKD

SEQ ID NO: 131085 - protein, 136 aa, Unknown
  Bacterial polypetide isolated from the Sargasso Sea
MSKVEQTLSIIKPDAIERNLEDKIKLVFLKNDFKIIKEKKLKLEKMEAEQFYKVHQTKPFYNDLCEYLSSGPILAMILEKEDAIQANRNIMGATDPKKAEEGTIRKSFGISIDKNSVHGSDSVENAKIEIDFFFKS

SEQ ID NO: 131086 - protein, 128 aa, Unknown
  Bacterial polypetide isolated from the Sargasso Sea
METTLAIVKPDAYKNGYAGKIIDRIIEEGFAIDQMKQILMTKEKAEGFYEVHKERPFFGELVDFMSSGNCVVLSLKRENAVAKWREVIGATNPEEADGETIRALYGTNTGNNAVHGSDSAENGIIESN

SEQ ID NO: 131087 - protein, 65 aa, Unknown
  Bacterial polypetide isolated from the Sargasso Sea
PIIVMILEGENAIKENRRIMGATNPKEAEEGTIRKLYGISIDKNSVHGSDSLENAKKEINFFFKD

SEQ ID NO: 131088 - protein, 51 aa, Unknown
  Bacterial polypetide isolated from the Sargasso Sea
ENRKLMGATNPKEAADGTIRKKYGISIDKNSVHGSDSVENAKIEIDFFFKD

SEQ ID NO: 131089 - protein, 138 aa, Unknown
  Bacterial polypetide isolated from the Sargasso Sea
MEKTFSIIKPDATKRNLTGAINKIIEQNNLRIIAQKRILLTKSKAEGFYSIHKDKPFFNDLIEYMTSGPVVLQVLEGNDAIKNYRKVMGATDPKKADSGSIRNEFALNIQENSVHGSDSIENAINEIKYFFDENEIVG

SEQ ID NO: 131090 - protein, 95 aa, Unknown
  Bacterial polypetide isolated from the Sargasso Sea
NQAQIFYEVHKERPFFNSLVDYMTSGPVQVQVLEGEDAVIKYRKIMGATNPDEAEEGTIRKQYAESIEANSVHGSDSEENAKIEINFFFSGSELV

SEQ ID NO: 131091 - protein, 64 aa, Unknown
  Bacterial polypetide isolated from the Sargasso Sea
IVVMVLEKENAVIENRRLMGATDPVKAEEGTIRKKYGISIDKNSVHGSDSVENAKTEIDFFFKS

SEQ ID NO: 131092 - protein, 140 aa, Unknown
  Bacterial polypetide isolated from the Sargasso Sea
MTTEKTFSIIKPDAVERNKIGEITAMLESAGLRIVASKRIKLDQEKAAAFYSVHADKPFFQSLCDFMCSGPIVVQVLEGENAIQKNREVMGATNPDEAAQGTIRKKFALSLEKNSVHGSDSPENAVIEINHFFSDEDIIS

SEQ ID NO: 131093 - protein, 131 aa, Unknown
  Bacterial polypetide isolated from the Sargasso Sea
MSNERTLSIIKPDATKRNIIGKILSRFEEKGLRVIALKKLHLTLDQARKFYSIHSDKPFFDELCNFMTSGPVVVQVLEGENAIIKNREIMGSTNPSDAEEGTIRKDFALSLTENSVHGSDSKENAKIEIGF

SEQ ID NO: 131094 - protein, 67 aa, Unknown
  Bacterial polypetide isolated from the Sargasso Sea
VQVLEGENAVLKNREVMGATNPEDAGEGTIRKKFAVSLEKNSVHGSDSLENAKIEIDQFFTEEEILS

SEQ ID NO: 131095 - protein, 136 aa, Unknown
  Bacterial polypetide isolated from the Sargasso Sea
MSNIEQTLSIIKPDAVERNLQDEIKKEFRNKGFEIKKEKKIHISKQEAEQFYKVHETKPFYNELCSYLSSGPIVVMELSRENAIFENRKLMGATNPKDAEEGTIRKKYGISIDKNSVHGSDSSENAKIELDFFFKD

SEQ ID NO: 131096 - protein, 140 aa, Unknown
  Bacterial polypetide isolated from the Sargasso Sea
MSIEQTLSIIKPDATKRDLTGKINSKLEESGLKIIAQKRILLSKTQAEDFYKVHQERPFYNDLVKFMISGPVVVQVLEGENAVSKNRQIMGATNPAEAEDGTIRKEFAVSLEANSVHGSDSLENAKIEISFFFSQIELVH

SEQ ID NO: 131097 - protein, 135 aa, Unknown
  Bacterial polypetide isolated from the Sargasso Sea
SNKEQTLSIIKPDACERNLSDKIKAIFSKNNLSILNSKKLHISKDEAAEFYKVHQSKPFYDQLCNYLSSGPIEVMILEGENAILKNREIMGATDPKNAKDGTIRKLYGISIDKNSVHGSDSAENAKIEINFFFNK

SEQ ID NO: 131098 - protein, 135 aa, Unknown
  Bacterial polypetide isolated from the Sargasso Sea
MSNLEQTLSIIKPDAVERNLEKKIEDHFIKNDFKIVKKKKVKISKEEAAEFYKVHQTKPFYNDLCSYLSSGPIVVMILERDNAVSKNREIMGATDPNKSEEGTLRKMYGLSIDKNSVHGSDSVDNAKLEINFFFK

SEQ ID NO: 131099 - protein, 56 aa, Unknown
  Bacterial polypetide isolated from the Sargasso Sea
VNAVLDNRQLMGATNPKEAEEGTLRKKYGISIDKNSVHGSDSVENAKIEIDFFFKD

SEQ ID NO: 131100 - protein, 96 aa, Unknown
  Bacterial polypetide isolated from the Sargasso Sea
TLSASDAGGFYAEHEGKPFYNDLIEFMTSGPVFIQVLEGENAISKNRELMGNTDPSKADPGTIRADFAQTIDANAVHGSDSEKSAKREIAFFFSDL

SEQ ID NO: 131101 - protein, 136 aa, Unknown
  Bacterial polypetide isolated from the Sargasso Sea
MSKVEQTLSLIKPDAVERNLEDEIKQFFIKSGFKITKQKKVKLEKKDAEIFYKVHETKPFYNDLCNYLSSGPIVAMILEKVNAVSENRKVMGATDPTKADEGTIRKKYGLSIDKNSVHGSDSIENANKEINFFFKT

SEQ ID NO: 131102 - protein, 118 aa, Unknown
  Bacterial polypetide isolated from the Sargasso Sea
KIIDRFEENGLKVVAGKLIHMDQAKAAGFYAEHEGRPFFPNLVEYMTSAPVFVQVLEGENAVLKNRELMGATNPSEADPGTIRADFAETIDANAVHGSDSSDSAAREISYFFDDSEIF

SEQ ID NO: 131103 - protein, 136 aa, Unknown
  Bacterial polypetide isolated from the Sargasso Sea
MSNLEQTLSIIKPDAVERNLENEIKEIFRNTGFNIRKEKKIQITKSEAEQFYKVHETKPFYNDLCAYLSSGPIVVMILEHENAVLRNRDLMGATNPKDAEEGTIRKKYGISIDKNSVHGSDSVENAKIEIDFFFKD

SEQ ID NO: 131104 - protein, 61 aa, Unknown
  Bacterial polypetide isolated from the Sargasso Sea
MVLEKNNAVLGNRELMGATNPEDAEEGTIRKKYGISIDKNSVHGSDSVENAKIEIDFFFKD

SEQ ID NO: 131105 - protein, 136 aa, Unknown
  Bacterial polypetide isolated from the Sargasso Sea
MSNTEQTLSIIKPDAVERNLENEIKEMFKNDGFSILKEKKIQIEKSEAEKFYKVHETKPFYNDLCSYLSSGPIVVMVLEKENAILANRELMGATNPNDAKEGTIRKKYGISIDKNSVHGSDSVENAKIEIDFFFKY

SEQ ID NO: 131106 - protein, 136 aa, Unknown
  Bacterial polypetide isolated from the Sargasso Sea
MSNIEQTLSIIKPDAVERNLQDQIKQEFTNKGFKIIKEKKIHISKEEAERFYKVHESKPFYNDLCAYLSSGPIIVMTLQKENAVMDNRKLMGATNPVDAEEGTLRKKYGISIDKNSVHGSDSLENAKIELDFFFNN

SEQ ID NO: 131107 - protein, 152 aa, Unknown
  Bacterial polypetide isolated from the Sargasso Sea
MTKERTFIAIKPDGVQRGYVSEIIGRFEKKGFKLVGLKQLIPSKELAQNHYGVHRERPFFGDLVDFISSGPVVAMVWEGEGVILSARKLIGATKPLEAEPGTIRGDLAIDIGRNIIHGSDGEDTAKFEIDLWFNEEELCEWETSDSKWRSEN

SEQ ID NO: 131108 - protein, 54 aa, Unknown
  Bacterial polypetide isolated from the Sargasso Sea
YRKIMGATNPAEAEEGTIRKLYAESIEANSVHGSDSEENAKIEISFFFSGSELA

SEQ ID NO: 131109 - protein, 110 aa, Unknown
  Bacterial polypetide isolated from the Sargasso Sea
MFEKSGFKIAKEKKIQLAKNEAEQFYKVHETKPFYNDLCEYLSSGPIMVMILEKENAVLANRKLMGATNPKEAEEGTIRKKFGISIDKNSVHGSDSVENAKIEIDFFFKN

SEQ ID NO: 131110 - protein, 136 aa, Unknown
  Bacterial polypetide isolated from the Sargasso Sea
MSNLEQTLSIIKPDAVERNLENEIKEMFKSKGFSILKEKKIQIEKSEAEKFYIVHETKPFYNDLCDYLSSGPIVVMVLEKENAVLENRELMGATNPKDAEEGTIRKKYGISIDKNSVHGSDSVENAKIEIDFFFKD

SEQ ID NO: 131111 - protein, 142 aa, Unknown
  Bacterial polypetide isolated from the Sargasso Sea
MAIEKTLSIIKPDAVQKKLIGKIYSRFEDGGLRVVATKMLHLNDEMAGGFYVEHKGRPFYEALIGFMTSGPILVQVLEGEDAVALNRKLMGATDPREAEAGTIRADFASSIDANAVHGSDSIESAQREIYYFFEDREICSFN

SEQ ID NO: 131112 - protein, 105 aa, Unknown
  Bacterial polypetide isolated from the Sargasso Sea
MKTFFMIKPDGVQRNLVGEIISRVEAKGFSITKIKMMTISKELAEQHYGEHKDKSFFNDLVSFITSGPVVAMQVEGENVVLQIRNLMGATNPSESTPGSIRGDLA

SEQ ID NO: 131113 - protein, 140 aa, Unknown
  Bacterial polypetide isolated from the Sargasso Sea
MAIERTLSIIKPDATRRNLTGLINARLEAAGLRIVGQKRKQLTGPEAMAFYAVHKERPFYKDLVAFMTSGPVVLQVLEGENAVATNREVMGATNPTDAADGTIRKDFAESIEANSVHGSDSPENAAIEISYFFAGCEITS

SEQ ID NO: 131114 - protein, 102 aa, Unknown
  Bacterial polypetide isolated from the Sargasso Sea
MSNIEQTLSIIKPDAVERNLTDEIKNIFVKNNLKISDSKKLEITKEEAAEFYKVHQSKPFFDALCNYLSSGPIVVMILEGTDAIKQNRDLMGATDPKNAAPI

SEQ ID NO: 131115 - protein, 136 aa, Unknown
  Bacterial polypetide isolated from the Sargasso Sea
MSNIEQTLSIIKPDAVERNLQDEIKQEFINKGFDIKKEKKIHISKQEAEQFYKVHETKSFYNELCSYLSSGPIVVMELSRENAILENRKLMGATNPKDAEEGTLRKKYGISIDKNSVHGSDSPENAKTELDFFFKD

SEQ ID NO: 131116 - protein, 136 aa, Unknown
  Bacterial polypetide isolated from the Sargasso Sea
MSNIEQTLSIIKPDAVERNLQNQIKNEFKNKGFEILNEKKIHITKEEAENFYKVHESKPFYSDLCAYLSSGPIIVMKLQKENAVTENRKLMGATNPKDAEEGTLRKKFGISIDKNSVHGSDSLENAKVELDFFFKD

SEQ ID NO: 131117 - protein, 79 aa, Unknown
  Bacterial polypetide isolated from the Sargasso Sea
KPFYNDLCSYLSSGPIIVMILERENAILENRELMGATDPTKAKEGTIRKKYGISIDKNSVHGSDSPDNAKIEIDFFFKD

SEQ ID NO: 131118 - protein, 139 aa, Unknown
  Bacterial polypetide isolated from the Sargasso Sea
MSNIEQTLSIIKPDAVERNLKDEIKQEFINKGFEIKKEKKIHISKQEAEQFYKVHETKPFYNELCSYLSSGPIVVMELSKENAVLENRKLMGATNPKDAEEGTLRKKYGISIDKNSVHGSDSPENAKIELDFFFKDKTF

SEQ ID NO: 131119 - protein, 135 aa, Unknown
  Bacterial polypetide isolated from the Sargasso Sea
MSSIEQTLSIIKPDAVERNLTEQIKEKFLKNKLTIKNQKKIQISREEAAEFYKVHQTKPFYERLCSYLSSGPIVVMILEGENAIAINRKIMGATNPEKAEKGTIRKDFGISIDKNSVHGSDSKDNAKKEIDFFFN

SEQ ID NO: 131120 - protein, 136 aa, Unknown
  Bacterial polypetide isolated from the Sargasso Sea
MSNVEQTLSIIKPDAVERNLIDNIKAIFIKNSLMIKEDKKIHLTKEEAAEFYKVHQSKPFYEDLCTYLSSGPIVVMVLEGENAVILNRKLMGNTDPKNAEENTIRKLYGISIDKNSVHGSDSLENAKKEINFFFKN

SEQ ID NO: 131121 - protein, 136 aa, Unknown
  Bacterial polypetide isolated from the Sargasso Sea
MNNIEQTLSIIKPDAVERNLVENIKSIFTKNKFKIKENKKIHITKDEAAEFYKVHQSKPFYDNLCGYLSSGPIVVMILEGEDAVKRNRDLMGATDPKNAEENTIRKLYGVSIDKNSVHGSDSVENAKKEIEFFFKN

SEQ ID NO: 131122 - protein, 140 aa, Unknown
  Bacterial polypetide isolated from the Sargasso Sea
MKNITFAIIKPDAVKNGSTGKIYDRIISSGFKIKSAKLLRMTESQAQGFYAVHKERPFFGELTEFMSSGPCMVLALEKENAVEEWRKTIGATNPEEAESGTIRKDFATNIQENAVHGSDSDENAKKEIGFFFSDSELIAN

SEQ ID NO: 131123 - protein, 137 aa, Unknown
  Bacterial polypetide isolated from the Sargasso Sea
MNNKIEQTLSIIKPDAVERNLENEIKEMFKNTGFNILKEKKVQIEKSEAEKFYKVHETKPFYKDLCAYLASGPIVVMILEKQNAVLDNRDLMGATNPKEAKEGTIRKKYGISIDKNSVHGSDSLENAQIEIDFFFKD

SEQ ID NO: 131124 - protein, 152 aa, Unknown
  Bacterial polypetide isolated from the Sargasso Sea
MSTERTFIAIKPDGVQRGLVGEILGRFERKGFKLVGLKQLTPSRELAEQHYGVHKERPFFAGLVDFITSGPVVAMVWEGDGVIASARKLIGATKPLEAEPGTIRGDLAVNIGRNVIHGSDAAETAQFEIGLWFQPSELNDWNPSDQGWRVED

SEQ ID NO: 131125 - protein, 122 aa, Unknown
  Bacterial polypetide isolated from the Sargasso Sea
ASSWWVSSKSPRPRELAEQHYGVHKERPFFAGLVDFITSGPVVAMVWEGDGVIASARKLIGATKPLEAEPGTIRGDLAVNIGRNVIHGSDATETAQFEIGLWFQPSELNDWMPSDQGWRVEG

SEQ ID NO: 131126 - protein, 133 aa, Unknown
  Bacterial polypetide isolated from the Sargasso Sea
MNQESTLGIIKPDAVSRNLIGSIIKMIEENNITISKMKMITLSNDQAEAFYKVHKGKVFYDKLIEYMTSGPIVIMVLQGIDVIKRYRDLMGKTNPDDAEDGTIRKLFGLNTTHNSVHGSDSQDNAIIEINLFF

SEQ ID NO: 131127 - protein, 136 aa, Unknown
  Bacterial polypetide isolated from the Sargasso Sea
MSNLEQTLSIIKPDAVERNLTEEIKKIFNKNSLNIKDSKKLHVTKDEAAEFYRVHQSKPFYNDLCAYLSSGPIVVMILEGENAISTYRKLMGATDPKDAEENTIRKLYGLSIDKNSVHGSDSLENAKKEINFFFKN

SEQ ID NO: 131128 - protein, 56 aa, Unknown
  Bacterial polypetide isolated from the Sargasso Sea
MTKERTFSIIKPDATRRNLIGKIITKLEDGGLCIIAQKKIHLTKEQAEQFYSVHKE

SEQ ID NO: 131129 - protein, 97 aa, Unknown
  Bacterial polypetide isolated from the Sargasso Sea
MSNLEQTLSIIKPDAVERNLENEIKEMFKSNGFTILTEKKIQIEKSEAEKFYKVHETKPFYNDLCSYLSSGPIVVMVLEKDNAVLANRELMGATNPE

SEQ ID NO: 131130 - protein, 133 aa, Unknown
  Bacterial polypetide isolated from the Sargasso Sea
MEQTLSIIKPDAVERNLGENIKNIFLKNNFKIKDSKKIHLSKDEAAEFYKVHQSKPFYNDLCAYLSSGPIIVMILEGENAVFANRKLMGATNPKDADENTIRKLYGISIDKNSVHGSDSAENAKKEIEFFFKS

SEQ ID NO: 131131 - protein, 75 aa, Unknown
  Bacterial polypetide isolated from the Sargasso Sea
MPYVHIYLSGPIIVMILQNENAVKANRELMGATNPKEAQEGTIRKKYGISIDKNSVHGSDSLENAKKEIEFFFKN

SEQ ID NO: 131132 - protein, 136 aa, Unknown
  Bacterial polypetide isolated from the Sargasso Sea
MTLSIIKPDAVAKNVIGKIEQRFEDAGLKIVASKMLHLSVEKAQGFYAEHEGKPFFNALVEFMTSGPVIVQVLAGENAIMLNRELMGNTNPKEADAGTIRADFAESIDANAVHGSDSSVSAKREIAYFFKSTEIFG

SEQ ID NO: 131133 - protein, 136 aa, Unknown
  Bacterial polypetide isolated from the Sargasso Sea
MSNIEQTLSIIKPDAVERKLENEIKEMFKNTGFNIHKEKKIQITKSEAEQFYKVHETKPFYNDLCAYLSSGPIVVMILEHDHAVLRNRDLMGATNPKDAEEGTIRKKYGISIDKNSVHGSDSVENAKIEIDFFFKD

SEQ ID NO: 131134 - protein, 136 aa, Unknown
  Bacterial polypetide isolated from the Sargasso Sea
MSDKEQTLSIIKPDAVQRNLENEIKEMFINKGFSIQKEKKIQIEKSEAEKFYKVHETKPFYNDLCEYLSSGPIVVMILEKENAVLANRELMGATNPNDAEVGTIRKKYGISIDKNSVHGSDSVENAKIEIDFFFKD

SEQ ID NO: 131135 - protein, 136 aa, Unknown
  Bacterial polypetide isolated from the Sargasso Sea
MNNLEQTLSIIKPDAVERNLENEIKEMFKNNGFSIMKEKKIQIEKSEAEKFYKVHETKPFYNDLCDYLSSGPIIVMVLEKKNAVLGNRELMGATNPEDAVEGTIRKKYGISIDKNSVHGSDSVENAKIEIDFFFKD

SEQ ID NO: 131136 - protein, 116 aa, Unknown
  Bacterial polypetide isolated from the Sargasso Sea
EENNLKIVASKMVHLTKEKAEGFYSIHKDKPFFPKLVEFMTSGPVMVQVLEGENAILKNREIMGATNPNDAAEKTIRKDFATSIDENAVHGSDAEDTAKIEIAFFFNENEIFKRTR

SEQ ID NO: 131137 - protein, 101 aa, Unknown
  Bacterial polypetide isolated from the Sargasso Sea
HLNDEMASGFYAEHDGKPFFDALKSFMTSGPVFVQVLQGEDAIHKNRELMGATNPQEASAGTIRADFAQSIDANAVHGSDSAESAKREIEYFFSSEEILNK

SEQ ID NO: 131138 - protein, 117 aa, Unknown
  Bacterial polypetide isolated from the Sargasso Sea
MERTLSIIKPDGVEKNIIGKIYSRFEKAGLRIIEAKMLHLSREQAEGFYAVHKERPFFNDLVDYMTSGPVMVQVLEGEDAINLNRKLMGATNPEDAEEGTIRKDFAESIERNAVHGS

SEQ ID NO: 131139 - protein, 133 aa, Unknown
  Bacterial polypetide isolated from the Sargasso Sea
MEETLSIIKPDAVERNLQDQIKNEFKNNGFEILKEKKIHISKEEAEKFYKVHESKPFYNELCAYLSSGPIVVMNLQRDNAVLENRKLMGATNPEDAEEGTLRKKYGISIDKNSVHGSDSIENAKIELEFFFKD

SEQ ID NO: 131140 - protein, 138 aa, Unknown
  Bacterial polypetide isolated from the Sargasso Sea
MSRTFSIIKPDATKRNLTGSINKKIEESNLKIIAQKRIKLSKDKAQGFYAVHKEKPFFNDLIEYMTSAPVVVQVLEGENAVTLYRELMGATNPNEAKVGTIRNEFAIDIQENSVHGSDSDENAKIEIDYFFNNEEIVG

SEQ ID NO: 131141 - protein, 136 aa, Unknown
  Bacterial polypetide isolated from the Sargasso Sea
MSNIEQTLSIIKPDAVERNLDNEIKQMFKKNGFSILKEKKIQIEKSEAESFYKVHETKPFYDDLCTYLSSGPILVMVLEKENAIIANRELMGATNPQDAEEGTIRKKYGISIDKNSVHGSDSVENAKIEIDFFFKV

SEQ ID NO: 131142 - protein, 136 aa, Unknown
  Bacterial polypetide isolated from the Sargasso Sea
MSKIEQTLSIIKPDAVERNLHDQIKNEFKNNGFEILKEKKIHISKDEAEKFYKVHESKPFYNDLCAYLSSGPIVVMSLQKENAVLENRKLMGATNPKDAEEGTLRKKYGISIDKNSVHGSDSAENAKIELDFFFKD

SEQ ID NO: 131143 - protein, 136 aa, Unknown
  Bacterial polypetide isolated from the Sargasso Sea
TFAIIKPDAVKNEFTGKIYDRIQKAGFNILAAKLLKMTSEEAGGFYNVHKDKPFFNELIDFMTSGPCMVLALEKENAVLAWRETIGATNPKDALENTIRKDFATSVQENAVHGSDSDENAEKEIAFFFADSELLGK

SEQ ID NO: 131144 - protein, 145 aa, Unknown
  Bacterial polypetide isolated from the Sargasso Sea
MKIKEINMSRTFSIIKPDATKRNLTGSINKKIEESNLKIIAQKRIKLSKDQAQGFYAVHKEKPFFNELIEYMTSAPVVVQVLDGENAVNIYRELMGSTNPKDAKVGTIRNEFAIDIQENSVHGSDSDENAKIEIDYFFNNEEIVG

SEQ ID NO: 131145 - protein, 122 aa, Unknown
  Bacterial polypetide isolated from the Sargasso Sea
ITGKINAMIEDAGLSIIAQKRILLSEAQAEEFYGVHKERPFFRDLVKFITSGPVVVQVLEAENAISLYRNTMGATNPKEADQGTIRAEHAESIEANSVHGSDSPENAIIEINFFFEKKEIVG

SEQ ID NO: 131146 - protein, 123 aa, Unknown
  Bacterial polypetide isolated from the Sargasso Sea
NLVGAITAMIEDSDLRIIASRRTRMTQEKAAAFYGVHYDKPFFKSLCDFMCSGPIIVQVLEGKNAVKKNREIMGATNPEDAEEGTIRKKYALSLEKNSVHGSDSLENAAIEIAHFFSENEIHP

SEQ ID NO: 131147 - protein, 140 aa, Unknown
  Bacterial polypetide isolated from the Sargasso Sea
MALERTFSIIKPDATRRNLTGQITARLESAGLRIVAQKRKRLSELEARAFYAVHKERPFYNDLVAFMTSGSVVLQVLEGENAVSVNREVMGATNPDDAADGTIRKDFAESIEANSVHGSDSLENAKIEISFFFAGCELSG

SEQ ID NO: 131148 - protein, 136 aa, Unknown
  Bacterial polypetide isolated from the Sargasso Sea
MSKIEQTLSIIKPDAVERNLIEEIKNIFTKNKLIIKDSKKIHINKDEAAEFYKIHQSKPFYNDLCSYLSSGPIVVMILEGENAVITNRKLMGATNPKDAEENTIRKLYGISIDKNSVHGSDSPDNAKKEISFFFKN

SEQ ID NO: 131149 - protein, 133 aa, Unknown
  Bacterial polypetide isolated from the Sargasso Sea
MEQTLSIIKPDAVERHLEHEIKQMFLEKGFKIIKEKKIQIEKTEAELFYQVHQTKPFYNDLCTYLSSGPIVVMIIEKENAIKENRNLMGATNPKDAEEGTIRKKFGISIDKNSVHGSDSVENAKKEIDFFFKD

SEQ ID NO: 131150 - protein, 100 aa, Unknown
  Bacterial polypetide isolated from the Sargasso Sea
MSNIEQTLSIIKPDAVERNLENEIKQMFKDKGFSIIKEKKIQIEKSEAEKFYKVHETKPFYNDLCTYLSSGPIVVMVLEKDNAVLGNRELMGATNPKRRS

SEQ ID NO: 131151 - protein, 133 aa, Unknown
  Bacterial polypetide isolated from the Sargasso Sea
MEETLSIIKPDAMERNLEGKIKNIFIKNNFEIIKEKKVKLEKKDAEIFYKVHETKPFYNDLCNYLSSGPVLVMILKKENAIADNRKIMGATNPKEADVGTIRKEFGISIDKNSVHGSDSKENAEKEINFFFKE

SEQ ID NO: 131152 - protein, 132 aa, Unknown
  Bacterial polypetide isolated from the Sargasso Sea
MERTLSIIKPDGVEKNIIGKIYSRFEKAGLKIVEAKMLHLSREKAEGFYAVHKERPFFNDLVDYMTSGPVMVQVLEGEDAINLNRKLMGATNPEDAEEGTIRKDFAESIERNAVHGSDGPDTAAVEIEYFFG

SEQ ID NO: 131153 - protein, 152 aa, Unknown
  Bacterial polypetide isolated from the Sargasso Sea
MTQERTFIAIKPDGVQRGYISEIIGRFEKKGFKLVGLKQLIPSKELAQNHYGVHRERPFFGDLVDFISSGPVVAMVWEGEGVILSARKLIGATKPLEAEPGTIRGDLAIDIGRNIIHGSDGEDTAKFEIDLWFNEEELCEWETSDSKWRSEN

SEQ ID NO: 131154 - protein, 136 aa, Unknown
  Bacterial polypetide isolated from the Sargasso Sea
MSNLEQTLSIIKPDAVERNLENEIKGIFKNNGFSILKEKKIQIEKFEAEKFYKVHETKPFFSDLCAYLSSGPIVVMILEKDNAVIGNRQLMGATNPKEAKEGTIRKKYGISIDKNSVHGSDSVENAKIEIDFFFKD

SEQ ID NO: 131155 - protein, 78 aa, Unknown
  Bacterial polypetide isolated from the Sargasso Sea
MAERTFIAIKPDGVQRGLVGEILGRFERKGFKLVGLKQITPSRALAEQHYGVHKERPFFAGLVDFITSGPVVAMVWEG

SEQ ID NO: 131156 - protein, 136 aa, Unknown
  Bacterial polypetide isolated from the Sargasso Sea
MSNLEQTLSIIKPDAVERNLSEEIKNIFKNKGFKISKEKKIKLEKHEAEKFYQVHQTKPFYNDLCSYLSSGPILVMILEKENAILDNRRLMGATDPTKAEDGTIRKKYGISIDKNSVHGSDSLDNAKIEIDFFFKD

SEQ ID NO: 131157 - protein, 141 aa, Unknown
  Bacterial polypetide isolated from the Sargasso Sea
MNIERTLSIIKPDAVGKNIIGKIISRFEDNGLNLVAGKLIHLSDKEASGFYAEHDGKPFFSDLKKFMTSGPVFVQVLEGENAVQKNRELMGSTNPKEAAAGTIRADFAMSIDANAVHGSDSIDSAKREIEYFFNTEEILNK

SEQ ID NO: 131158 - protein, 119 aa, Unknown
  Bacterial polypetide isolated from the Sargasso Sea
MSIERTLSIIKPDATKRNITGKIISCFEESGLNIIAQKKILLTKELAEGFYSVHSEKPFFQDLVTFMTSAPIIVQVLEGENAILKNREIMGATNPDDAEEGTIRKQFALSIEANSVHGS

SEQ ID NO: 131159 - protein, 136 aa, Unknown
  Bacterial polypetide isolated from the Sargasso Sea
MSDIEKTLSIIKPDAVERNLQEEIKNEFKNNGFEILQEKKIHISKQEAETFYKVHQTKPFYNDLCTYLSSGPIIVMELQKDNAILDNRKLMGATNPELAEEGTLRKKYGISIDKNSVHGSDSLENARIEIDFFFKD

SEQ ID NO: 131160 - protein, 132 aa, Unknown
  Bacterial polypetide isolated from the Sargasso Sea
MERTLSIIKPDGVEKNIIGKIYSRFEKAGLRIIEAKMLHLSREQAEGFYAVHKERPFFNDLVNYMTSGPVMVQVLEGEDAINLNRKLMGATNPEDAEEGTIRKDFAESIERNAVHGSDGPDTAAVEIEYFFG

SEQ ID NO: 131161 - protein, 136 aa, Unknown
  Bacterial polypetide isolated from the Sargasso Sea
MSNIEQTLSIIKPDAVERNLQDQIKNEFRNNGFEILKEKKIHISKEEAEKFYKVHESKPFYNDLCAYLSSGPIVVMNLQKDNAVLENRKLMGATNPKDAEEGTLRKKYGISIDKNSVHGSDSIENAKIELDFFFKD

SEQ ID NO: 131162 - protein, 136 aa, Unknown
  Bacterial polypetide isolated from the Sargasso Sea
MSNIEQTLSIIKPDAIERNLENEIKNIFKENKFVINKEKKVQISKSEAEKFYKIHETKPFYNDLCNYLSSGPIVVMVLEKENAVLENRNLMGATNPKEAAAGTIRKKYGISIDKNSVHGSDSVENAKIEIDFFFKD

SEQ ID NO: 131163 - protein, 102 aa, Unknown
  Bacterial polypetide isolated from the Sargasso Sea
LSEREAAGIYAEHSERGFFKDLVAFMTSGPVIVQVLEGEDAVLKNRELMGATNPKEAAPGTIRADFAVSIDENAVHGSDSEASAAREIAYFFSATELCARIR

SEQ ID NO: 131164 - protein, 127 aa, Unknown
  Bacterial polypetide isolated from the Sargasso Sea
MALEKTLSIIKPDAIAKGYAEEICKRLENAGLRIVSKKSLHLSEAEAEGFYIEHKGKPFFPDLITFMTSGPIQVQILEGENAISKYREVMGNTNPKEANPGTLRADFADSIDANAVHGSDSETSAER

SEQ ID NO: 131165 - protein, 136 aa, Unknown
  Bacterial polypetide isolated from the Sargasso Sea
MSSIEQTLSIIKPDAVERNIGNEIKEIFVKNGFNILKEKKIQLTKSEAELFYKVHETKPFYNDLCTYLSSGPIIVMILEKENAIAKNRELMGATNPNDAKDGTIRKKYGISIDKNSVHGSDSSENAKIEINFFFKS

SEQ ID NO: 131166 - protein, 98 aa, Unknown
  Bacterial polypetide isolated from the Sargasso Sea
MTKERTFIAIKPDGVQRGYVAEIIGRFEKKGFKLVGLKQLIPSKDLAQNHYGVHRERPFFGDLVDFISSGPVVAMVWEGEGVILSARKLIGATKPLET

SEQ ID NO: 131167 - protein, 89 aa, Unknown
  Bacterial polypetide isolated from the Sargasso Sea
EHEGKPFFEKLVNYMISGPVIVQVICGENAILKNRELMGNTDPSKADPGTIRADFADSIDANAVHGSDSEESAKREISYFFKDDELFLR

SEQ ID NO: 131168 - protein, 136 aa, Unknown
  Bacterial polypetide isolated from the Sargasso Sea
MSNIEQTLSIIKPDAVERNLQDEIKQEFINKGFEIKKEKKIHISKQEAEQFYKVHETKPFYNELCSYLSSGPIVVMELSRENAVLENRKLMGATNPKDAEEGTLRKKYGISIDKNSVHGSDSPENAKIELDFFFKD

SEQ ID NO: 131169 - protein, 132 aa, Unknown
  Bacterial polypetide isolated from the Sargasso Sea
MTIENTLSIIKPDATRRNLTGSINAKFEQAGLNIIAQKRLQLTKDMAQRFYEIHKDRPFFNDLVDFMISGPVITQVLRGENAVKVNREVMGATNPKDAEKGTIRKEFAESIESNSVHGSDSLENAKSEISFF

SEQ ID NO: 131170 - protein, 138 aa, Unknown
  Bacterial polypetide isolated from the Sargasso Sea
MNNRTFAIIKPDAVKNKYTGLIYDEILKADFKILSSKLIKMTKKQAEHFYMIHKDRPFYGELTDFMSSGQCMVLALEKVNAVLEWRTLIGATNPEEAADNTIRKKFATSLGENAVHGSDSDENAIIEIKFFFTETELI

SEQ ID NO: 131171 - protein, 119 aa, Unknown
  Bacterial polypetide isolated from the Sargasso Sea
LRLEGLRQVIPPLELAEAHYEVHNERPFYSGLIEFITSGPVVAMAWTGVDAISVARNLIGPTDGRNASPGTIRGDFAMDIGHNVIHGSDGEDTAAFELGLWFPDGLVKWTLDAENHIYE

SEQ ID NO: 131172 - protein, 136 aa, Unknown
  Bacterial polypetide isolated from the Sargasso Sea
MSNTQKTLSIIKPDAVERNLTEEIKNIFKKNGFEIISEKKIKISREEAEKFYIVHQTKPFYEDLCNYLSSGPIVVMILSRENAVLANRELMGATNPEDAKEGTIRKKYGLSIDKNSVHGSDSEENAKKEIDFFFDS

SEQ ID NO: 131173 - protein, 134 aa, Unknown
  Bacterial polypetide isolated from the Sargasso Sea
MGNIEKTLVFIKPDGVERGLTGDILNRFEQRGIQLRKLELKQLTAEQVDAHYAEHIDKPFYPNLKTYILSGPIALMVLEAENVISIVRTMVGVTNSAEAAPGTIRGDYALNTQNNIIHASDSVTSAEREIANFF

SEQ ID NO: 131174 - protein, 122 aa, Unknown
  Bacterial polypetide isolated from the Sargasso Sea
MSIERTLSIIKPDAVGKNVIGKIISRFEENNLYLVAGKLVHLSDEMASGFYAEHEGKPFFNDLKKFMTSGPVFVQVLEGENAVQKNRDLMGSTNPQEAAPGTIRADFANSIDANAVHGSDSV

SEQ ID NO: 131175 - protein, 125 aa, Unknown
  Bacterial polypetide isolated from the Sargasso Sea
EKKGFKLVGLKQLIPSKELAQNHYGVHRERPFFGDLVDFISSGPVVAMVWEGEGVILSARKLIGATKPLEAEPGTIRGDLAIDIGRNIIHGSDGEDTAKFEIDLWFNEEELCEWETSDSKWRSEN

SEQ ID NO: 131176 - protein, 131 aa, Unknown
  Bacterial polypetide isolated from the Sargasso Sea
MSSIEQTLSIIKPDAVERNLENEIKQIFKDKGFAIVKEKKIQIEKSEAEVFYKIHETKPFYNDLCAYLSSGPILVMVLQKENGVHSNRELMGATNPKDAKDGTIRKKYGISIDKNSVHGSDSVEMLKLKLI

SEQ ID NO: 131177 - protein, 139 aa, Unknown
  Bacterial polypetide isolated from the Sargasso Sea
PSEKTLSIIKPDATKRNLTGLINAKFENVGLKIIAQKRLQLTRSMAEKFYEIHKDRPFYMDLVNFMVSGPVIVQVLEGENAVELNRSVMGATNPEEAEEGTIRKEFAISIEANSVHGSDSLENAKIEISFFFANIELLA

SEQ ID NO: 131178 - protein, 140 aa, Unknown
  Bacterial polypetide isolated from the Sargasso Sea
MPVQRTFSIIKPDATRRNLTGAINSKIESSGLRIIAQKRIHMSAAEAKEFYSVHAERPFYNGLVSFMTSGPVIVQVLEGENAISTYREVMGATNPSEAADGTIRKEFAENIEANSVHGSDSDENAAIEIAHFFNDDEIVG

SEQ ID NO: 131179 - protein, 133 aa, Unknown
  Bacterial polypetide isolated from the Sargasso Sea
MPNQKTLSIIKPDAVKAGHANAINLMIENAGLKILKKKELNLTTEQAKEFYSIHSDKPFYNELCNFMTSGPIIVQMLEGENAIELYRKVMGATNPDDAEENTIRKKFATSIQENAVHGSDSEENALKELNFFF

SEQ ID NO: 131180 - protein, 136 aa, Unknown
  Bacterial polypetide isolated from the Sargasso Sea
MSNLEQTLSIIKPDAVERNLQEEIKEEFKKNSFKILKEKKIKLDKSEAEKFYQVHQSKPFYNDLCSYLSSGPIVVMILEKENAILENRKLMGATDPTKAEEGTIRKKYGISIDKNSVHGSDSPENAKIEIDFFFKD

SEQ ID NO: 131181 - protein, 138 aa, Unknown
  Bacterial polypetide isolated from the Sargasso Sea
MERTLSIIKPDATRRNITGQINAIIEANNLKIVAQKKIKLTREKAEKFYEVHNEKPFFADLIDYMISDSIVVQVLESDNAISKYREIMGSTNPDNAADGTIRKMHALSVQENAVHGSDSLENANKEIDFFFESQEIVG

SEQ ID NO: 131182 - protein, 137 aa, Unknown
  Bacterial polypetide isolated from the Sargasso Sea
MQKTFSIIKPDAVKRNLIGHINQMIESSNLKILASKKMYLTKNQAEIFYEVHKERPFFRSLVEYMTSGPVQVQVLEGEDAVAKYRKIMGATNPAEAEKGTIRRLYAESIEANSVHGSDSEENAKIEISFFFSGSELA

SEQ ID NO: 131183 - protein, 136 aa, Unknown
  Bacterial polypetide isolated from the Sargasso Sea
MSDTEQTLSIIKPDAVERSLQDEIQNEFKKNGFTILKEKKIQISKQEAEQFYKVHETRPFYNDLCTYLSSGPIVVMVLQKVNAILDNRKLMGSTNPKEAEEGTLRKKYGISIDKNSVHGSDSIENAKIEIDFFFNN

SEQ ID NO: 131184 - protein, 113 aa, Unknown
  Bacterial polypetide isolated from the Sargasso Sea
MSIERTLSIIKPDATKRNITGKIISCFEESGLNIIAQKKILLTKEQAEGFYSVHSEKPFFHDLVTFMTSAPIIVQVLEGENAILKNREIMGATNPDDAEEGTIRKQFALSIEA

SEQ ID NO: 131185 - protein, 136 aa, Unknown
  Bacterial polypetide isolated from the Sargasso Sea
MSNQERTLSIIKPDAVERNLVEKIKDVFLKNNFSILEIKKLHITKDEAAEFYKVHQSKPFYSDLCTYLSSGPIVVMILESEDAVVKNRKLMGATDPKKADDNTIRKMFGISIDKNSVHGSDSLENAKKEINFFFKN

SEQ ID NO: 131186 - protein, 136 aa, Unknown
  Bacterial polypetide isolated from the Sargasso Sea
MSNIEQTLSIIKPDAVERNLQEQIKQEFTNKGFEIIKEKKIHISKEEAERFYKIHESKPFYNDLCTYLSSGPIVVMTLQRENAVAENRKLMGATNPIDAEEGTLRKKYGISIDKNSVHGSDSPENAKIELDFFFNH

SEQ ID NO: 131187 - protein, 75 aa, Unknown
  Bacterial polypetide isolated from the Sargasso Sea
MELTLSIIKPDAVKRNLIGEINSLIEKNNIKIVAQKMLHLSTKDAEGFYFVHKERAFFGDLCEYMTSGPIVVQVL

SEQ ID NO: 131188 - protein, 141 aa, Unknown
  Bacterial polypetide isolated from the Sargasso Sea
MAVERTLSIIKPDAVAKNVIGEILTRFEKAGLRVVAAKMVQLSQADAEGFYAEHKERPFFKDLVGFMTSGPVVVQVLEGEGAVLKNRDLMGATNPKEAAAGTIRADFAESIDANAVHGSDSTTSAAREVAYFFAETELCPR

SEQ ID NO: 131189 - protein, 136 aa, Unknown
  Bacterial polypetide isolated from the Sargasso Sea
MSNVEQTLSIIKPDAVERDLIDEIKAIFTKNNLKIKEDKKIHLTKEEAAEFYKVHQSKPFYDDLCSYLSSGPIVAMILEGENAVLFNRELMGATDPKKAEDKTIRRLYGISIDKNSVHGSDSVENAKKEIDFFFKN

SEQ ID NO: 131190 - protein, 62 aa, Unknown
  Bacterial polypetide isolated from the Sargasso Sea
MAIQRTLSIIKPDATRRNLTGKINARFEEKGLTIIAQKRIHLTHAQAEGFYAVHADRAFLAT

SEQ ID NO: 131191 - protein, 136 aa, Unknown
  Bacterial polypetide isolated from the Sargasso Sea
MSNTEQTLSLIKPDAVERNLTEKIKEIFISKNLKIKDTKKIHISKDEAAEFYKVHQSKPFYNDLCSYLSSGPIVAMILEGENAVENNRKIMGATDPKKAEKNTIRQLFGISIDKNSVHGSDSKQNALKEIEFFFKN

SEQ ID NO: 131192 - protein, 131 aa, Unknown
  Bacterial polypetide isolated from the Sargasso Sea
MNRTFSIIKPDATKRNITGSINKIIEDNNLVIIAQKRTKLSKEKAEGFYSIHKDKPFFNDLIEYMTSGPVIVQVLHGDNAVENYRKIMGATNPENAEEGTIRKEYALNIQENSVQRSDSEENAKIEINYFL

SEQ ID NO: 131193 - protein, 107 aa, Unknown
  Bacterial polypetide isolated from the Sargasso Sea
EDAGLSITEKKSIHMDDALAEGFYIEHKGKPFFEDLIKFMTSGPIQVQVLEGDNAIFNYREVMGSTNPKEATPGTIRADFAESIDANAVHGSDSPESAKREIDYFFG

SEQ ID NO: 131194 - protein, 136 aa, Unknown
  Bacterial polypetide isolated from the Sargasso Sea
MSNIEQTLSIIKPDAVERNLENEIKQMFNNKGFSILKEKKIQIEKSEAEKFYKVHETKPFYNDLCAYLSSGPIVVMVLEKDNAVLGNRELMGATNPKDAEEGTIRKTYGISIDKNSVHGSDSVENAKIEIDFFFKD

SEQ ID NO: 131195 - protein, 135 aa, Unknown
  Bacterial polypetide isolated from the Sargasso Sea
MSNLEQTLSIIKPDAVERNLIEEIKNIFLSNNFTISQEKKIQISKSEAEEFYKVHQSKTFYNELCEYLSSGPIYVMILEKDNAVIDNRKLMGSTNPKEAEEGTIRKKYGLSIDKNSVHGSDSVDNAKIEINFFFK

SEQ ID NO: 131196 - protein, 122 aa, Unknown
  Bacterial polypetide isolated from the Sargasso Sea
MDRTFSIIKPDATKRNLTGSINSLIEKNGLRIIAQKRIKMSTEQAEKFYAVHNDKPFFSDLVKYMTSEPVVVQVLYGENAVKKYREVMGATNPDNAEEGTIRKLFALNVQENSVHGSDSDEN

SEQ ID NO: 131197 - protein, 64 aa, Unknown
  Bacterial polypetide isolated from the Sargasso Sea
VLEGENAILKNRDLMGATNPSEAESGTIRADFAETIDANAVHGSDSVESASREISYFFDDSEIF

SEQ ID NO: 131198 - protein, 136 aa, Unknown
  Bacterial polypetide isolated from the Sargasso Sea
MSNKEQTLSIIKPDAVERNLDNEIKEMFRNKGFEIVNEKKIQIEKSEAEKFYKVHETKPFYNDLCTYLSSGPIIVMILEKEDAILANRELMGSTNPKDAKEGTIREKYGISIDKNSVHGSDSVENAKIEIDFFFKD

SEQ ID NO: 131199 - protein, 131 aa, Unknown
  Bacterial polypetide isolated from the Sargasso Sea
IKPDATRRNITGSINVKFEESGLEIIAQKRLQLTKEMAQKFYEVHKDRPFFNDLIDFMISGPVIAQVLRGENAINLNRQVMGATNPEEAEIGTIRNEFGESIEANSVHGSDSSENAKSEITFFFSEIELIH

SEQ ID NO: 131200 - protein, 136 aa, Unknown
  Bacterial polypetide isolated from the Sargasso Sea
MSNTEQTLSIIKPDAVERNLENEIKEIFKNKGFIIVKEKKIQIEKSEAEKFYKVHETKAFFSDLCSYLSSGPIVAMVLEKDNAILANRELMGATNPKDAEEGTIRKKYGISIDKNSVHGSDSAENAKIEIDFFFKD

SEQ ID NO: 131201 - protein, 81 aa, Unknown
  Bacterial polypetide isolated from the Sargasso Sea
ETKPFYSDLCAYLSSGPIVVMVLEKESAVIGNRELMGATNPGDAKEGTIRKKYGISIDKNSVHGSDSVENAKIEIDFFFKD

SEQ ID NO: 131202 - protein, 137 aa, Unknown
  Bacterial polypetide isolated from the Sargasso Sea
MQKTFSIIKPDAVKRNLIGHINQMIESSSLKILASKKIYLTKKQAEIFYGVHKDRPFFTSLVEFMTSGPVQVQVLEGEDAVIKYRKIMGATNPAEAEDGTIRKLYAESIEANSVHGSDSEENAKLEINFFFSESELV

SEQ ID NO: 131203 - protein, 136 aa, Unknown
  Bacterial polypetide isolated from the Sargasso Sea
MNKIEQTLSIIKPDAVERNLENEIKEMFKNNGFTISKEKKIQIDKSEAEKFYEVHETKPFYNELCSYLSSGPIVVMVLEKDNAIVANRELMGATNPKDAIDGTIRSKYGLSIDKNSVHGSDSPENAKKEIDFFFNT

SEQ ID NO: 131204 - protein, 139 aa, Unknown
  Bacterial polypetide isolated from the Sargasso Sea
MSNIQHTLSIIKPDAVERNLQDEIKQELINKGFEIKKEKKIHISKQEAEQFYKVHETKPFYNELCSYLSSGPIVVMELIRENAVLENRKLMGGTNPKDAEEGTLRKKYGISIDKNSVHGSDSPENARIELDFFFKDRHF

SEQ ID NO: 131205 - protein, 136 aa, Unknown
  Bacterial polypetide isolated from the Sargasso Sea
MSNIEQTLSIIKPDAVERNLDNEIKQMFIENGFNISQEKKIQIEKSEAEKFYKVHETKPFYDDLCSYLSSGPIIAMILEKENAVADNRKLMGATNPNDATEGTIRKKYGISIDKNSVHGSDSVENAKIEIDFFFKD

SEQ ID NO: 131206 - protein, 89 aa, Unknown
  Bacterial polypetide isolated from the Sargasso Sea
SERPFFNELTQFMSSGPVVVSILEGENAVSHHREIMGATNPAEAVEGTIRSDYAESLGENTVHGSDSLENAAIEIAYFFSQTEIVNSTS

SEQ ID NO: 131207 - protein, 131 aa, Unknown
  Bacterial polypetide isolated from the Sargasso Sea
MSNIEQTLSIIKPDAVERNLQEEIKNEFKKNGFLIVKEKKIHISKLEAEQFYKVHQTKPFYNDLCAYLSSGPIVVMALEKGNAVLDNRQLMGATNPKEAEEGTLRKKYGISIDKNSVHGSDSVENAKIEID

SEQ ID NO: 131208 - protein, 136 aa, Unknown
  Bacterial polypetide isolated from the Sargasso Sea
MSNIEKTLSIIKPDAVERNLDNEIKQMFIKNGFNISKEKKIQIEKSEAEKFYKVHETKPFYDDLCSYLSSGPIVAMILEKANAVADNRKLMGATNPIDAEDGTIRKKYGISIDKNSVHGSDSVDNAKIEIDFFFRD

SEQ ID NO: 131209 - protein, 71 aa, Unknown
  Bacterial polypetide isolated from the Sargasso Sea
MQKTFSIIKPDAVKRNLIGHINQMIESSDLKILASKKIYLTKNQAEIFYEVHKDRPFFSSLVEYMTSGPVQ

SEQ ID NO: 131210 - protein, 142 aa, Unknown
  Bacterial polypetide isolated from the Sargasso Sea
MANERTFSIVKPNAVHDNNIGNILSRFEAEGLRLAASKFASLSKEKAEGFYIEHKERPFFGSLVNFMTSGPVLLIVLEGEDAVARCREIMGATNPAEAAEGTLRKLYAKSIEENAVHGSDSKASAEREISYFFEAHEISPRF

SEQ ID NO: 131211 - protein, 85 aa, Unknown
  Bacterial polypetide isolated from the Sargasso Sea
KPFYDNLVSYMISGPVVVQVLKGENAIDLNRKIMGATNPEDAEEGTIRKEFAINIEENSVHGSDSLENAKKEISFFFSDCEIFEN

SEQ ID NO: 131212 - protein, 136 aa, Unknown
  Bacterial polypetide isolated from the Sargasso Sea
MSNIEQTLSIIKPDAVERNLDNDIKAMFKNKGFSIHKEKKIQIEKSEAEKFYKVHETKPFYNDLCSYLSSGPIVVMVLEKENAVLANRELMGATNPNDAEEGTIRKKYGISIDKNSVHGSDSVENAKIEIDFFFKD

SEQ ID NO: 131213 - protein, 138 aa, Unknown
  Bacterial polypetide isolated from the Sargasso Sea
MDRTFSIIKPDATKRNITGEINSIIEKNGLRIIAQKRIILSQENAKEFYSIHKDKPFFNDLIKYMTSHPVVLQVLQSNDAVNKYREVMGSTNPKEAKEGTIRSKFGLNIQENSVHGSDSKENADIEISFFFNENEIVG

SEQ ID NO: 131214 - protein, 95 aa, Unknown
  Bacterial polypetide isolated from the Sargasso Sea
PFFAGLVDFITSGPVVAMVWEGDGVIASARKLIGATKPLEAEPGTIRGDLAVNIGRNVIHGSDAPETAEFEIGLWFGASELNDWSPSDQSWRVEG

SEQ ID NO: 131215 - protein, 136 aa, Unknown
  Bacterial polypetide isolated from the Sargasso Sea
MSNLEQTLSIIKPDAVERNLTDKIKLIFTKNNLHITDNKKIHISKEEAAEFYKVHQSKPFYNDLCEYLSSGPIVVMILEGKDAVVKNRKIMGATDPKNADENTIRKLYGISIDKNSVHGSDSVDNAKKEIEFFFKN

SEQ ID NO: 131216 - protein, 78 aa, Unknown
  Bacterial polypetide isolated from the Sargasso Sea
MCDFMCSGPIVVQVLEGEDAVKRNREIMGATNPEEAADGTIRKKYAISLEKNSVHGSDSLENAKIEMSHFFSEEDIIS

SEQ ID NO: 131217 - protein, 136 aa, Unknown
  Bacterial polypetide isolated from the Sargasso Sea
MSNAERTLSIIKPDAVERNLSEKIKSIFLKNNLLVKDTKKLHISKDEAAEFYKVHQSKPFYDQLCNYLSSGPIEVMILEGENAVLKNRELMGATDPKNAKDGTIRKLFGVSIDKNSVHGSDSVDNAKNEINFFFNK

SEQ ID NO: 131218 - protein, 139 aa, Unknown
  Bacterial polypetide isolated from the Sargasso Sea
MSIERTLSIIKPDATKRNITGKIISCFEESGLNIIAQKKILLTKEQAEGFYSVHSEKPFFQDLVTFMTSAPIIVQVLEGENAILKNREIMGATNPDDAEEGTIRKQFALSIEANSVHGSDSSETAIEEIKYFFDESEII

SEQ ID NO: 131219 - protein, 136 aa, Unknown
  Bacterial polypetide isolated from the Sargasso Sea
MSNKEQTLSIIKPDAVERNLDNEIKEIFKNNGFQIVKEKKIQIEKLEAEKFYKVHETKPFYNDLCTYLSSGPIIVMILEKENAVLANRELMGATNPKEAKEGTIRKKYGISIDKNSVHGSDSTENAKIEINFFFKD

SEQ ID NO: 131220 - protein, 130 aa, Unknown
  Bacterial polypetide isolated from the Sargasso Sea
NFINFKPDAVERNLQDEIKEEFKKNGFSIVKEKKIHINKSEAEQFYKVHQTKPFYNDLCAYLSSGPIVVMALEKDNAILDNRQLMGATNPKEANEGTLRKKYGISIDKNSVHGSDSVENAKIEIDFFFKD

SEQ ID NO: 131221 - protein, 64 aa, Unknown
  Bacterial polypetide isolated from the Sargasso Sea
IVVMVIEKVNAVIGNRELMGATNPNDAEDGTIRKRYGISIDKNSVHGSDSVENARIEIDFFFKD

SEQ ID NO: 131222 - protein, 140 aa, Unknown
  Bacterial polypetide isolated from the Sargasso Sea
MPIQRTFSIIKPDATKRNLTGAINARLESAGLSIIAQKKIHLTKQQAESFYAVHRERPFYEELCEFMASYPIVVQVLEGENAIKKNREVMGATNPVDAAEGTIRKEFALSMSENSVHGSDAEETAREEISYFFSGLELVG

SEQ ID NO: 131223 - protein, 136 aa, Unknown
  Bacterial polypetide isolated from the Sargasso Sea
MSNIEQTLSIIKPDAVERNLENEIKEIFKSNGFSILEEKKIQIEKSEAENFYRVHETKPFYNDLCEYLSSGPIVVMVLSKENAVLANRELMGATNPKDAEEGTIRKKYGISIDKNSVHGSDSIENAKIEIDFFFKD

SEQ ID NO: 131224 - protein, 140 aa, Unknown
  Bacterial polypetide isolated from the Sargasso Sea
MGLERTFSIIKPDATRRNLTGKINAKFEEAGLRVVAQKRIHMTKEQAGKFYEVHSERPFYDELCDFMSSEPVIVQVLEGESAISKNREVMGATNPADAAPGTIRAEFAESMGENSVHGSDAPETAAIEIAYFFSGIELVG

SEQ ID NO: 131225 - protein, 152 aa, Unknown
  Bacterial polypetide isolated from the Sargasso Sea
MTKERTFIAIKPDGVQRGYVSEIIGRFEKKGFKLVGLKQLIPSKELAQNHYGVHRERPFFGDLVDFISSGPVVAMVWEGEGVILSARKLIGATKPLEAEPGTIRGDLAIDIGRNIIHGSDGEDTAKFEIDLWFNEEELCEWETSDAKWRSEN

SEQ ID NO: 131226 - protein, 140 aa, Unknown
  Bacterial polypetide isolated from the Sargasso Sea
MTKERTFSIIKPDATRRNLIGKIITKLEDGGLRVIAQKKIHLTKEQAEQFYSVHKERPFYNDLVQFMTSGPVVVQVLEGDNAVLRNRELMGATNPAEAEPGTIRREYAESLEANSVHGSDSLENAKIEIDFFFGADEIVG

SEQ ID NO: 131227 - protein, 122 aa, Unknown
  Bacterial polypetide isolated from the Sargasso Sea
KIYERFESGGLRILAARMIHLTRAQAQEFYAVHRERPFYNDLVEYMISGPVMVQVLEGENAIACNREIMGATNPADAAPGTIRADFAESVEANAVHGSDGPDTAREEIAFFFDDADLCPRAD

SEQ ID NO: 131228 - protein, 143 aa, Unknown
  Bacterial polypetide isolated from the Sargasso Sea
MAIERTFSIIKPDAVAKNHIGAIYNRFETAGLKIVAAKMLHLTKEQAEGFYAEHSERGFFGALVAFMTSGPIMVQVLEGENAVLAHREILGATNPAQAAPGTIRADFAQSIDENAAHGSDSLASAEREIAYFFSAEELCPRTR

SEQ ID NO: 131229 - protein, 132 aa, Unknown
  Bacterial polypetide isolated from the Sargasso Sea
MKTFFMVKPDGVKRNIVGQVIDRVEQEGFKISKMKMMTISSELAEEHYGEHKDKPFFQDLVSFITSGPVVAMEVEGEDVVSEVRRIMGATNPSDADPGTIRADFATKLEENVVHGSDSEESAERELGLFFNN

SEQ ID NO: 131230 - protein, 139 aa, Unknown; identical to SEQ ID NO: 131218
  Bacterial polypetide isolated from the Sargasso Sea

SEQ ID NO: 131231 - protein, 131 aa, Unknown
  Bacterial polypetide isolated from the Sargasso Sea
MKTFFMIKPDGVKRNLIGEIISRVEEKGFKITKIKMMTISQDLAEEHYGEHKDKPFFGDLVSFITSGPVVAMQVEGENVVAQIRNLMGATNPSDATPGSIRGDLSTELDKNVVHGSDSDESAERELNLFFS

SEQ ID NO: 131232 - protein, 141 aa, Unknown
  Bacterial polypetide isolated from the Sargasso Sea
MAIERTLSIIKPDAVAKNVIGQIYSRFEGAGLKIVASRMAHLSRADAEKFYAVHAARPFFKDLVDFMISGPVMIQVLEGEGAILKNRDLMGATDPKKAEKGTIRADFADSIDANAVHGSDAAETAAVEIAFFFPEMNVYSR

SEQ ID NO: 131233 - protein, 143 aa, Unknown
  Bacterial polypetide isolated from the Sargasso Sea
MALEHTLSIIKPDGVRRNLVGKIISRFEENNLRIVATKMIHMTISESEGFYAVHCERPFFSELTQFMSSGPVVVSILEGENAVSHHREIMGATNPAEAVEGSIRSDYAESLGENTVHGSDSLENAAIEIAYFFSQTEIVNSTS

SEQ ID NO: 131234 - protein, 143 aa, Unknown
  Bacterial polypetide isolated from the Sargasso Sea
MALEQTLSIIKPDGVKRNLVGEILGRFEQKGLRIVATRMLHLSKREAEGFYAVHRERPFFEELTNFMCSGPVVVSVLEGENAVAYHREIMGATNPAEAAEGTIRKDFAQSIGENTVHGSDSLENAAIEIAYFFAQTELVNGKA

SEQ ID NO: 131235 - protein, 46 aa, Unknown
  Bacterial polypetide isolated from the Sargasso Sea
MGATNPKDAEEGTIRKKYGISIDKNSVHGSDSVENAKKEINFFFKD

SEQ ID NO: 131236 - protein, 136 aa, Unknown
  Bacterial polypetide isolated from the Sargasso Sea
MAIERTLSIIKPDAVAKNVIGEIISRFEKNNLKIIAAKLVTLSASDAGGFYAEHKGKPFYDDLIKFMTSGPVFIQVLEGEDAISKNRELMGNTDPSKADPGTIRADFALTIDANAVHGSDSEKSAEREIAFFFSDL

SEQ ID NO: 131237 - protein, 141 aa, Unknown
  Bacterial polypetide isolated from the Sargasso Sea
MSIEKTLSIIKPDAVSKNIIGKIITRFEDNGLYLVAGKLLHLSDDDAGGFYQEHKGKPFYEDLIKFMTSGPVFIQVLEGEDAIRKNRELMGDTDPKKAKKGTIRADFANSIDANAVHGSDSQTSAIREIEYFFKAEEVLNK

SEQ ID NO: 131238 - protein, 142 aa, Unknown
  Bacterial polypetide isolated from the Sargasso Sea
MAIERTFSIIKPDAVSKNLIGAIYNRFESAGLKVIAAKMLHMSSEQAAGFYAEHQGKPFYDGLVSFMTSGPVMIQVLEGEEAIRRHREIMGATNPKEALAGTLRACFAESIDRNAVHGSDAPASAAREIAYFFSDAEICPRG

SEQ ID NO: 131239 - protein, 140 aa, Unknown
  Bacterial polypetide isolated from the Sargasso Sea
MGIERTFSIIKPDATLANKTGAINALIEQSGLRIIAQRRIRMTKAQAQQFYAVHSERPFYDELVEFMMSGPVVVQVLEGENAITKYREVMGATNPAEAAEGTIRKLYAKSVGENSVHGSDAAATAAEEIPQFFSEDDIVG

SEQ ID NO: 131240 - protein, 148 aa, Unknown
  Bacterial polypetide isolated from the Sargasso Sea
METTYIMVKPDGVQRGLVGEIIGRFEQKGLQLVGLKQVVPSEEIAKEHYAVHAERPFFPGLIKFVTSGPVVCMAWTGRDAISVARNLIGPTNGREAAPGTIRGDFGMDIGFNMIHGSDAAETAEFELGLWFPEGLNEWTLDSQNWVYE

SEQ ID NO: 131241 - protein, 148 aa, Unknown
  Bacterial polypetide isolated from the Sargasso Sea
MQTTFVMIKPDGVQRGLVAEIIGRFENKGLRLVGLRQLTPPMELAEAHYEVHNERPFYSGLIEFITSGPVVAMAWTGVDAISVARNIIGPTDGRTAAPGTIRGDFAMDIGHNVIHGSDGEDTASFELGLWFPDGLVEWARDAEAHIYE

SEQ ID NO: 131242 - protein, 140 aa, Unknown
  Bacterial polypetide isolated from the Sargasso Sea
MAIERTFSIIKPDAVERNKIGEITAMLESAGLRIVASKRILLDQNKAASFYGVHSDKPFFQSLCDFMCSGPIVVQVLEGENAIQRNREVMGATNPEEADEGTIRKKFALSLEKNSVHGSDSPENAEIEINHFFDEADIIS

SEQ ID NO: 131243 - protein, 136 aa, Unknown
  Bacterial polypetide isolated from the Sargasso Sea
MSNIEQTLSIIKPDAVERNLIDEIKSIFTKNNLKIKEDKKIHITKEEAAEFYKVHQTKPFYDDLCSYLSSGPIVVMVLEGENAVLFNRQLMGATDPKQAKENTIRKLYGLSIDKNSVHGSDSVDNAKKEIAFFFKN

SEQ ID NO: 131244 - protein, 139 aa, Unknown
  Bacterial polypetide isolated from the Sargasso Sea
MEKTLSIIKPDAVSKNVLGKILDRFESSGLKIVAIKMLHLDQDMAEGFYAEHKGKPFFDKLITFMTSGPVIVQVLSGENAIKTNRELMGNTNPEEAASGTIRSDFAESIDANAVHGSDSSESAEREISYFFTESEIFGS

SEQ ID NO: 131245 - protein, 128 aa, Unknown
  Bacterial polypetide isolated from the Sargasso Sea
MQLLEIFIGKIISRFEDNNLKVVAAKLIQLDQAKAGGFYAEHDGKPFFQNLIEYMTSAPVLVQVLEGESAIAKNRELMGATNPQDAAPGTIRADFAESIDANAVHGSDSESSALREINYFFEPEEIVS

SEQ ID NO: 131246 - protein, 108 aa, Unknown
  Bacterial polypetide isolated from the Sargasso Sea
MSIERTLSIIKPDATKRNITGKIISCFEESGLNIIAQKKILLTKEQAEGFYSVHSEKPFFQDLVTFMTSAPIIVQVLEGENAILKNREIMGATNPDDAEEGTIRKPVA

SEQ ID NO: 131247 - protein, 136 aa, Unknown
  Bacterial polypetide isolated from the Sargasso Sea
MSNIEQTLSIIKPDAAERKLSEKIKSIFLKNNLKILETKKLHISKDEAAEFYKVHQSKPFYDQLCSYLSSGPIEVMILEGDNAVLKNRELMGATDPKNAKDGTIRKLYGISIDKNSVHGSDSVENAQIEINFFFKK

SEQ ID NO: 131248 - protein, 137 aa, Unknown
  Bacterial polypetide isolated from the Sargasso Sea
MEKTLSIIKPDAISKNVIGKIVQRFEDADLKVVAMKMIHLSDEDAKGFYKEHEGKPFFNPLVEFMTSGPVVVQVLRGENAILKNRELMGNTNPQEAEPGTIRSDFAQSIDANAVHGSDSVESAKREIAYFFNDSEIF

SEQ ID NO: 131249 - protein, 136 aa, Unknown
  Bacterial polypetide isolated from the Sargasso Sea
MSNIEQTLSIIKPDAVERNLDDQIKKIFQNNGFKIIKEKKLKLEKSEAEQFYKVHETKPFYNDLCNYLSSGTIVAMVLEKENAIKSNRDLMGATDPAKAEEGTLRKLFGKSIDKNSVHGSDSPATAKLEIEFFFKD

SEQ ID NO: 131250 - protein, 141 aa, Unknown
  Bacterial polypetide isolated from the Sargasso Sea
MSIERTLSIIKPDAVGKNVIGKIISRFEENNLYLVAGKLVHLSDEMASGFYAEHEGKPFFNDLKKFMTSGPVFVQVLEGENAVQKNRDLMGSTNPKEAAPGTIRADFANSIDANAVHGSDSVESAKREIEYFFNTEEILNK

SEQ ID NO: 131251 - protein, 140 aa, Unknown
  Bacterial polypetide isolated from the Sargasso Sea
MSIEQTLSIIKPDATKRNLTGKINSKLEDSGLKIIAQKRILLSKTQAEDFYKVHQEKPFYNDLVKFMISGPVVVQVLEGENAVSKNREVMGATNPDEAEDGTIRKEFAVSLEANSVHGSDSLENAKIEISFFFSQIELVN

SEQ ID NO: 131252 - protein, 136 aa, Unknown
  Bacterial polypetide isolated from the Sargasso Sea
MSNLEQTLSIIKPDAVERNLEVKIKTMFKNEGFKIVKEKKIKLEKIDAEKFYKVHETKPFYNDLCEYLSSGPIVVMILEKNGAVLENRRLMGATDPKNAEDGTIRKEFGLSIDKNSVHGSDSIDNAKVEINFFFNN

SEQ ID NO: 131253 - protein, 141 aa, Unknown
  Bacterial polypetide isolated from the Sargasso Sea
MTTERTLSIIKPDAVGKNVIGKIISRFEDNNLYLVAGKLVHLSDEMASGFYAEHEGKPFFNDLKKFMTSGPVFVQVLEGENAVQKNRDLMGSTNPKEAAPGTIRADFANSIDANAVHGSDSVESAKREIEYFFNTEEILNK

SEQ ID NO: 131254 - protein, 136 aa, Unknown
  Bacterial polypetide isolated from the Sargasso Sea
MSNLEQTLSIIKPDAVERNLENEIKEMFQSNGFTILKEKKIQIEKSEAEKFYKVHETKPFYNDLCEYLSSGPIVVMILEKENAVLVNRELMGATNPEDAEKGTIRKKYGISIDKNSVHGSDSVENAKIEIDFFFKD

SEQ ID NO: 131255 - protein, 134 aa, Unknown
  Bacterial polypetide isolated from the Sargasso Sea
FDNKTRCRLSEIKFGEITAMLESAGLRIVASKRILLDQNKAASFYGVHSDKPFFQSLCDFMCSGPIVVQVLEGENAILRNREVMGATNPEEADEGTIRKKFALSLEKNSVHGSDSPENAEIEINHFFDEADIIS

SEQ ID NO: 131256 - protein, 136 aa, Unknown
  Bacterial polypetide isolated from the Sargasso Sea
MSDIEQTLSIIKPDAVERSLEKEIKEIFIKNGFSIIQEKKIQIEKNEAEKFYKVHETKPFYNDLCSYLSSGPIVVMILEKINAVKSNRELMGSTNPKDAKEGSIRKKYGISIDKNSVHGSDSIENAKLEIDFFFKD

SEQ ID NO: 131257 - protein, 136 aa, Unknown
  Bacterial polypetide isolated from the Sargasso Sea
MSNLEQTLSIIKPDAVERNLENVIKEMFKSNGFSILKEKKIQIEKTEAEQFYKVHETKPFYNDLCEYLSSGPIVVMVLEKENAVLGNRDLMGSTNPKDAEEGTIRKKYGISIDKNSVHGSDSVENAKIEIDFFFKD

SEQ ID NO: 131258 - protein, 137 aa, Unknown
  Bacterial polypetide isolated from the Sargasso Sea
MEKTLSIIKPDAVSKNVLGKILDRFESSGLKIVAIKMLHLDQDMAEGFYAEHKGKPFFDKLINFMTSGPVVVQVLSGENAIKANRELMGNTNPEEAASGTIRSDFAESIDANAVHGSDSSESAEREISYFFTESEIF

SEQ ID NO: 131259 - protein, 134 aa, Unknown
  Bacterial polypetide isolated from the Sargasso Sea
MALEQTLSIIKPDAVAKGHVDEICRRLEESGLSIVDKQSLHLDEQKAEGFYAEHKGKPFFEDLIKFMTSGPIQVQILEGENAILRYREVMGSTNPQEAAPGTIRADFADSIDANAVHGSDSPESAKREISYFFG

SEQ ID NO: 131260 - protein, 139 aa, Unknown
  Bacterial polypetide isolated from the Sargasso Sea
MSTERTLSIIKPDATKRNITGKIISCFEESGLNIIAQKKILLTKERAEGFYSVHSDKPFFADLVNFMTSAPIIVQVLEGENAILKNREIMGATNPEEAEEGTIRKQFALSIEANSVHGSDSAETAIEEINYFFDESEIL

SEQ ID NO: 131261 - protein, 132 aa, Unknown
  Bacterial polypetide isolated from the Sargasso Sea
MEETLSIIKPDGVSKKIIGTIFKRFEDAGLEIVNIKRLTLTTEKAGEFYYMHKDRPFYPELVKFMTSGPCVPFVIKGENAILKVRELMGATDPSEADAGTIRADFADSIDKNIIHGSDSKESAEREVSFFFD

SEQ ID NO: 131262 - protein, 136 aa, Unknown
  Bacterial polypetide isolated from the Sargasso Sea
MSNIEQTLSIIKPDAVERNLENEIKEMFKNNGFLILKEKKIQIEKSEAEKFYKVHETKPFYNDLCAYLSSGPIVVMVLEKENAVLGNRELMGATNPKDAEEGTIRKKYGISIDKNSVHGSDSVENSKIEIDFFFKD

SEQ ID NO: 131263 - protein, 143 aa, Unknown
  Bacterial polypetide isolated from the Sargasso Sea
MALEQTLSIIKPDGVKRNLVGEILGRFEQKGLRIVATRMLHLSKREAEGFYAVHRERPFFEELTTFMCSGPVVVSVLEGENAVAYHREIMGATNPAEAAEGTIRKDFAQSIGENTVHGSDSLENAAVEIAYFFAQTELVNGKA

SEQ ID NO: 131264 - protein, 136 aa, Unknown
  Bacterial polypetide isolated from the Sargasso Sea
MSGIEQTLSIIKPDAVERNLDNEIKNIFLKKGFKIIKEKKIKIEKLEAEKFYKVHETKPFYNDLCSYLSSGPIVVMILEKNNAVLANRELMGATNPKDALEGTIRKKYGISIDKNSVHGSDSVENAKIEIDFFFKD

SEQ ID NO: 131265 - protein, 141 aa, Unknown
  Bacterial polypetide isolated from the Sargasso Sea
MERTLSIIKPDAVSKNVIGEIYTFFEKNNLKIIAAKMMHLSEEEAGGFYSIHKEKPFFKNLVSFMTSGPILVQVLEGDDAVKKNREIMGATNPEDASDNTIRKLYATSIDENAVHGSDSIDNAKIEIDYFFQENEICSRTR

SEQ ID NO: 131266 - protein, 131 aa, Unknown
  Bacterial polypetide isolated from the Sargasso Sea
MEQTLSIIKPDAVERNLENEIKEMFKNKGFTIFKEKKIQIEKSEAEKFYKVHETKPFYNDLCAYLSSGPIVVMVLEKDNAVLGNRELMGATNPKDAEEGTIRKKYGISIDKNSVHGSDSVENAKIEIDFFF

SEQ ID NO: 131267 - protein, 136 aa, Unknown
  Bacterial polypetide isolated from the Sargasso Sea
MSNLEQTLSIIKPDAVERNLENEIKEMFKNKGFSILKEKKIQIEKSEAEKFYKVHETKPFYNDLCAYLSSGPIVVMVIEKVNAVFGNRELMGATNPNDAEEGTIRKKYGISIDKNSVHGSDSVENAKIEIDFFFKD

SEQ ID NO: 131268 - protein, 136 aa, Unknown
  Bacterial polypetide isolated from the Sargasso Sea
MNNIEQTLSIIKPDAVERNLQDEIKNEFKKNGFEIIREKKIHITKAEAEKFYKIHESKPFYNDLCAYLSSGPIVVMNLQRDNAVSENRKLMGATNPDDAEEGTLRKKYGISIDKNSVHGSDSIENAKIELDFFFKD

SEQ ID NO: 131269 - protein, 136 aa, Unknown
  Bacterial polypetide isolated from the Sargasso Sea
MSNIEQTLSIIKPDAVDRNLSDEIKKIFEKNDLIVKESKKIHITKEEASEFYKVHQSKPFYNDLCAYLSSGPIVVMILEGKNAVLANRKLMGATNPKEAEENTIRRLYGISIDKNSVHGSDSVENAKKEIDFFFNN

SEQ ID NO: 131270 - protein, 152 aa, Unknown
  Bacterial polypetide isolated from the Sargasso Sea
MIKERTFLAIKPDGVQRGYVSEIIGRFEKKGFKLVGLKQLIPSKQLAQDHYGVHRDRPFFKDLVDFISSGPVVAMIWEGEGVILSARKLIGATKPLEAEPGTIRGDLAIDIGRNIIHGSDGEETAKFEINLWFDQDEICDWETSDSEWRAEN

SEQ ID NO: 131271 - protein, 134 aa, Unknown
  Bacterial polypetide isolated from the Sargasso Sea
MALERTLSIIKPDAVAKGHVDEICKRLEDAGLSITEKKSIHMDDALAEGFYIEHKGKPFFEDLIKFMTSGPIQVQVLEGENAIFNYREVMGSTNPKEATPGTIRADFAESIDANAVHGSDSPESAKREIDYFFG

SEQ ID NO: 131272 - protein, 149 aa, Unknown
  Bacterial polypetide isolated from the Sargasso Sea
MSMKQENRMALERTFSIIKPDAVKRNLIGEIYSRFEKAGLAIVGARMLKLTGEQAGGFYAEHDGKPFYEDLCSYMMSGPVIVQVLEGEDAISVNRRIMGATDPKEAAPGTIRADFAESIDANAVHGSDSPDSAKREIAFFFDDEELLTR

SEQ ID NO: 131273 - protein, 132 aa, Unknown
  Bacterial polypetide isolated from the Sargasso Sea
MERTLSIIKPDGVEKNIIGKIYSRFEKAGLKIVEAKMLHLSREQAEGFYAVHKERPFFNDLVDYMTSGPVMVQVLEGEDAINLNRKLMGATNPEDAEEGTIRKDFAESIERNAVHGSDGPDTAAVEIEYFFG

SEQ ID NO: 131274 - protein, 141 aa, Unknown
  Bacterial polypetide isolated from the Sargasso Sea
MAIEQTLSIIKPDAVKKNVIGKIITRFEENGLHLVAGKLIHLTDELASGFYAEHDGKPFFNDLKNFMTSGPVFIQVLEGDNAIQKNRELMGATNPQEAAEGTIRADFAKSIDANAVHGSDSLVSAKREIEYFFSTKEILNK

SEQ ID NO: 131275 - protein, 136 aa, Unknown
  Bacterial polypetide isolated from the Sargasso Sea
MSDLEQTLSIIKPDAVERNLTEKIKEIFISKNLKIKDTKKIQISKDEAAEFYKVHQSKPFYNDLCSYLSSGPIVAMILEGENAIANNRKIMGATDPKKAEKNTIRQLFGISIDKNSVHGSDSKENALKEINFFFKN

SEQ ID NO: 131276 - protein, 136 aa, Unknown
  Bacterial polypetide isolated from the Sargasso Sea
MAIQRTLSIIKPDAVAKNVIGEIISRFEKNNLKIIAAKLITLSASDAGGFYAEHKGKPFYDDLIEFMTSGPVFIQVLEGEDAISKNRELMGNTDPSKADPGTIRADFAQTIDANAVHGSDSEISAEREIAFFFSDL

SEQ ID NO: 131277 - protein, 136 aa, Unknown
  Bacterial polypetide isolated from the Sargasso Sea
MSDVEHTLSIIKPDAVERNLEKNIKKMFFDKGFKIVNEKKIQIEKNEAERFYKVHETKPFYNDLCSYLSSGPIIVMVLEKKNAVLDNRKLMGATNPKDADEGTIRAKYGISIDKNSVHGSDSVENAKIEIDFFFKD

SEQ ID NO: 131278 - protein, 139 aa, Unknown
  Bacterial polypetide isolated from the Sargasso Sea
MENTLSIVKPDAVSKNVLGKILDRFESSGLKIIAIKMLHLDKGMAEGFYAEHKGKPFFEKLINFMTSGPVVVQVLSGENAIKTNRELMGNTNPEEAASGTIRSDFAESIDANAVHGSDSPESAEREISYFFTESEIFKS

SEQ ID NO: 131279 - protein, 122 aa, Unknown
  Bacterial polypetide isolated from the Sargasso Sea
LTGQNNARFETAVLRIVAQRRLQLTLQQAEGFYEVHRERSFFADLCSFMISGPVVVQVLEGENAVSLNRELMGATNPANADEGTIRKDFAESIEANSVHGSDSPENASIEISYFFNKLDIVG

SEQ ID NO: 131280 - protein, 140 aa, Unknown
  Bacterial polypetide isolated from the Sargasso Sea
MSIEQTLSIIKPDATKRNLTGKINSKLEDSGLKIIAQKRILLSKTQAEDFYKVHQERPFYNDLVKFMISGPVVVQVLEGENAVSKNREIMGATNPDEAEDGTIRKEFAVSLEANSVHGSDSLVNAKIEISFFFSQIELVN

SEQ ID NO: 131281 - protein, 81 aa, Unknown
  Bacterial polypetide isolated from the Sargasso Sea
MERTLSIIKPDGVEKNIIGKIYSRFEKAGLKIVEAKMLHLSREKAEGFYAVHKERPFFNDLVDYMTSGPVMVQVLEGEDAI

SEQ ID NO: 131282 - protein, 134 aa, Unknown
  Bacterial polypetide isolated from the Sargasso Sea
MENTLCIIKPDAVKNGFIEEINEKIKESGIKITKSKRLTLDREIAENFYAEHSERPFYGELVDFMTSGDCVIQILEGDDVVSKYRELMGATNPAEADEGTLRKSFATSLGENAVHGSDSLQSAEREIAIMNDLF

SEQ ID NO: 131283 - protein, 124 aa, Unknown
  Bacterial polypetide isolated from the Sargasso Sea
MSNIEQTLSIIKPDAVERNLENEIKEMFRHKGFSILKEKKIQIDKSEAEKFYKVHETKPFYNDLCAYLSSGPIVVMVLEKDNAVLGNRELMGATNPKDAEEGTIRKKYGISIDKNSVHGSDSVE

SEQ ID NO: 131284 - protein, 136 aa, Unknown
  Bacterial polypetide isolated from the Sargasso Sea
MAIQRTLSIIKPDAVAKNVIGEIISRFEKNNLKIIAAKLITLSASDAGGFYAEHEGKPFYNDLIEFMTSGPVFIQVLEGEDAISKNRELMGNTDPSKADPGTIRADFAQTIDANAVHGSDSEKSAQREIAFFFSDL

SEQ ID NO: 131285 - protein, 152 aa, Unknown
  Bacterial polypetide isolated from the Sargasso Sea
MTKERTFIAIKPDGVQRGYVAEIIGRFEKKGFKLVGLKQLIPSKDLAQNHYGVHRERPFFADLVDFISSGPVVAMVWEGEGVILSARKLIGATKPLEAEPGTIRGDLAIDIGRNIIHGSDGEDTAKFEIDLWFNDEELCEWETADSKWRYEN

SEQ ID NO: 131286 - protein, 136 aa, Unknown
  Bacterial polypetide isolated from the Sargasso Sea
MSNLEQTLSIIKPDAVERNLIEEIKQEFKKNNFTILKEKKIKLEKHEAEKFYKVHQTKPFYNDLCSYLSSGPIVVMVLESENAVLKNRELMGATDPTKAEEGTLRKKFGLSIDKNSVHGSDSLENAKIEIDFFFKD

SEQ ID NO: 131287 - protein, 141 aa, Unknown
  Bacterial polypetide isolated from the Sargasso Sea
MTIEKTLSIIKPDAVGKNVIGKIISRFEENGLYLVAGKLLYLSDEMASGFYAEHDGKPFFEDLKKFMTSGPVFVQVLEGENAIQKNRELMGNTNPQEALPGTIRADFADSIDANAVHGSDSTVSAKREIEYFFSEEEILNK

SEQ ID NO: 131288 - protein, 136 aa, Unknown
  Bacterial polypetide isolated from the Sargasso Sea
MSNLEQTLSIIKPDAVERNLAEEIKNEFKKNGFEIKNEKKIQLTKADAEQFYKVHETKPFYKDLCEYLSSGPVVVMILEKDNAIAANRELMGATDPKKANEGTIRKKYGISIDKNSVHGSDSIENAKIEIDFFFKS

SEQ ID NO: 131289 - protein, 136 aa, Unknown
  Bacterial polypetide isolated from the Sargasso Sea
MSNKEQTLSIIKPDAVERNLENEIKEIFKSKGFSILKEKKIQIEKSEAEKFYKIHETKPFYNDLCAYLSSGPIVVMILEKENAVLGNRELMGSTNPEEAEEGTIRKKYGISIDKNSVHGSDSVDNAKIEIDFFFKV

SEQ ID NO: 131290 - protein, 131 aa, Unknown
  Bacterial polypetide isolated from the Sargasso Sea
QHFFIIKPDAISKGFAEQICERLEDAGLKIISKKSLHLSEKEAEGFYIEHKGKPFFPDLITFMTSGPIQVQILEGDDAISKYREVMGNTNPKEASPGTLRADFADSIDANAVHGSDSEVSAAREISYFFSD

SEQ ID NO: 131291 - protein, 86 aa, Unknown
  Bacterial polypetide isolated from the Sargasso Sea
MQKTFSIIKPDAVKRNLIGHINQMIESADLKILASKKIYLTKNQAQIFYEVHKERPFFNSLVDYMTSGPVQVQVLEGEDAVIKYRK

SEQ ID NO: 131292 - protein, 113 aa, Unknown
  Bacterial polypetide isolated from the Sargasso Sea
MEKTLSIIKPDAVRKGHIDEICKRIEDSGLNILEKKKMDLTQEEAEGFYIEHKGKPFFDALIEFMTSGTIQVQVLEGEDAIIRYRDLMGSTNPKEAEEGTLRRDFAESIDGKC

SEQ ID NO: 131293 - protein, 132 aa, Unknown; identical to SEQ ID NO: 131041
  Bacterial polypetide isolated from the Sargasso Sea

SEQ ID NO: 131294 - protein, 102 aa, Unknown
  Bacterial polypetide isolated from the Sargasso Sea
MTTQRTLSIIKPDAVAKNVIGQIISRFEENNLKVVAAKLITLSASDAGGFYAEHKGKPFYDDLIKFMTSGPVFIQVLEGEDAISKNRELMGNTDPSKADPGT

SEQ ID NO: 131295 - protein, 152 aa, Unknown
  Bacterial polypetide isolated from the Sargasso Sea
MAAERTFIAIKPDGVQRGLVGEILGRFERKGFKLVGLKQITPSRELAEQHYGVHKERPFFAGLVDFITSGPVVAMVWEGDGVIASARKLIGATKPLEAEPGTIRGDLAVNIGRNVIHGSDAEETAAFEIGLWFQPSELNDWSPSDQSWRVEG

SEQ ID NO: 131296 - protein, 113 aa, Unknown
  Bacterial polypetide isolated from the Sargasso Sea
MERTLSIIKPDGVEKNIIGKIYSRFEKAGLRIVEAKMLHLSQEQAEGFYAVHKERPFFNDLVDYMTSGPVMVQVLEGQDAINLNRKLMGATNPEEADEGTIRKDFADSIERNT

SEQ ID NO: 131297 - protein, 139 aa, Unknown
  Bacterial polypetide isolated from the Sargasso Sea
MTERTLSIIKPDAVSKSVIGEIYSRFEKAGLKIVAAKMVQLDEDSAGGFYAEHQGKGFYSDLIKFMTSGPVMLQVLEGTNAIMLNRELMGATNPAEAASGTIRADFASSIDANAVHGSDSPKSASREIEYFFTDNEICS

SEQ ID NO: 131298 - protein, 98 aa, Unknown
  Bacterial polypetide isolated from the Sargasso Sea
MTIQRTLSIIKPDATSRNIIGKIIDRFESNGLKVVAGKLIHMDQDKAAGFYAEHDGKPFFTNLVEYMTSAPVFVQVLEGENAILKNRDLMGATNPSEA

SEQ ID NO: 131299 - protein, 109 aa, Unknown
  Bacterial polypetide isolated from the Sargasso Sea
GLNIIAQKKILLTKEQAEDFYSVHSEKPFFQDLVAFMTSAPIIVQVLEGENAILKNREIMGATNPDDADEGTIRKQFALSIEANSVHGSDSSETAIEEINYFFDESEII

SEQ ID NO: 131300 - protein, 136 aa, Unknown
  Bacterial polypetide isolated from the Sargasso Sea
MSNIEQTLSIIKPDAVERNLNEDIKQEFKKNGFTISKEKKIKLEKAEAENFYQVHQSKPFYNDLCTYLSSGPIIVMVLEKENAISENRKLMGATDPTKADEGTIRKKYGISIDKNSVHGSDSPENAKIEIDFFFKD

SEQ ID NO: 131301 - protein, 121 aa, Unknown
  Bacterial polypetide isolated from the Sargasso Sea
MPNEKTLILVKPDGVQRGLIGDVIGRLEKTGLKIIGIKFIQISEELAGKHYAEHKDKPFFSGLVKFITSSPVVALVLEGNNAISITRKTMGATNPVDSPPGTIRGDFAIDLGRNIIHGSAK

SEQ ID NO: 131302 - protein, 149 aa, Unknown
  Bacterial polypetide isolated from the Sargasso Sea
METTLILIKPDGVQRSLSGEILSRLEKSGLKICGLKLLHVDEKLAKQHYAEHEGKPFFNDLVEYICSAPIIALALTGPNAVQKSRSLIGKTNPLESEPGTIRGDFGLEISRNLIHGSASIEDAEREVNIFFAKDEIINYSKATDSWVVE

SEQ ID NO: 131303 - protein, 132 aa, Unknown
  Bacterial polypetide isolated from the Sargasso Sea
MERTLSIIKPDGVEKNIIGKIYSRFEKAGLRIVEAKMLHLSQEQAEGFYAVHKERPFFNDLVDYMTSGPVMVQVLEGQDAINLNRKLMGATNPEEADEGTIRKDFADSIERNTVHGSDGPDTAAVEIEYFFG

SEQ ID NO: 131304 - protein, 141 aa, Unknown
  Bacterial polypetide isolated from the Sargasso Sea
MAIEKTLSIIKPDAVAKNVIGKIIARFEENGLHLVAGKLIQLNDEIASGFYAEHDGKPFFNDLKKFMTSGPVFVQVLEGENAVQLNRDLMGSTNPQEASPGTIRADFANSIDANAVHGSDSINSAKREIEYFFSPEEILNK

SEQ ID NO: 131305 - protein, 139 aa, Unknown
  Bacterial polypetide isolated from the Sargasso Sea
MGTKTFAIIKPDAVKNGYTGKIYDRILQAGFNILSAKLLKMTNEQAEGFYNVHRERPFFNDLVEFMTSGPCMVLALEKSNAVAAWRETIGSTNPNEAKENTIRKDFASNVQENAVHGSDSDENAEKEIAFFFTDAELLT

SEQ ID NO: 131306 - protein, 136 aa, Unknown
  Bacterial polypetide isolated from the Sargasso Sea
MNNVEQTLSIIKPDAVERNLDNEIKQMFISKGFKIVQEKKIQIEKSEAEKFYKVHETKPFYNDLCSYLSSGPIVAMILEKENAVLANRDLMGATNPKDAAEGTIRKKYGISIDKNSVHGSDSLENARIEIEFFFKD

SEQ ID NO: 131307 - protein, 141 aa, Unknown
  Bacterial polypetide isolated from the Sargasso Sea
MGIEKTLSIIKPDATKRNITGKINSKLEDSGLEIIGQKRILLTKQRAEEFYFVHRERPFYNSLVNYMISGPVVVQVLMGENAVTQNREIMGATDPKEAKVGTIRKEFAKSIEENSVHGSDSLENAKKEIEFFFTNEEIIEN

SEQ ID NO: 131308 - protein, 136 aa, Unknown
  Bacterial polypetide isolated from the Sargasso Sea
MSNIEQTLSIIKPDAVERNLIDEIKAIFIKNNLNIKEDKKIHLTKEEAAEFYKVHQSKPFYDDLCSYLSSGPIVAMILEGKNAVLFNRQLMGATDPKKAEDKTIRKLYGISIDKNSVHGSDSIENAKKEIDFFFKN

SEQ ID NO: 131309 - protein, 143 aa, Unknown
  Bacterial polypetide isolated from the Sargasso Sea
MAIERTFSIIKPDAVAKNHIGAIYNRFETAGLKIVAAKMLHLTKEQAEGFYAEHSERGFFGALVAFMTSGPIMVQVLEGENAVLAHREILGATNPAQAAPGTIRADFAESIDENAAHGSDALESAAREIAYFFSAEELCPRTR

SEQ ID NO: 131310 - protein, 141 aa, Unknown
  Bacterial polypetide isolated from the Sargasso Sea
MAIEKTLSIIKPDAVGKNLIGKIISRFEDNGLCVVAAKLIHLSDDMASGFYAEHEGKPFFDDLKKFMTSGPVFVQVLEGENAVQKNRELMGSTNPQEAESGTIRADFANSIDANAVHGSDSISSAKREIEYFFNTEEILIK

SEQ ID NO: 131311 - protein, 83 aa, Unknown
  Bacterial polypetide isolated from the Sargasso Sea
MKIKSKILIIAGSDSSGGAGIQADIKTVTSLGSYAMTAITAITSQNTTGVKSIIPLNSKEISSQIEFTAKDIKPDAVKIGMLH

SEQ ID NO: 131312 - protein, 164 aa, Unknown
  Bacterial polypetide isolated from the Sargasso Sea
MKPKSKVLIIAGSDSSGGAGIQADIKTVTALGSYAMTAITAVTSQNTTGVISIASISEKEVSKQIEFTSKDIKPDAVKIGMLHSTKIINSVLKSLKKIKLKKIILDPVMVAKGGTKLINNHSIKILKFKLMKIVSLITPNIPEAEILTNIKIKTVEDMIYASKI

SEQ ID NO: 131313 - protein, 196 aa, Unknown
  Bacterial polypetide isolated from the Sargasso Sea
MKKNIPIVLSIAGSDSSGGAGIQADIKTLNTMNVFAATAVTCVTAQNTQEVSSITKIPPSLVEAQILSVKKDFKISAIKLGMLYDKEIMAIVVKSLKSLSKVPIIVDPVMVSKSGDKLLKSNAIEFFKNEIIPIAYILTPNLDEALKLTGMREINSKEDINKCCVKLRNLGAKNILLKGGHIQNPKKSIDYLLYNK

SEQ ID NO: 131314 - protein, 107 aa, Unknown
  Bacterial polypetide isolated from the Sargasso Sea
MKIKSKILIIAGSDSSGGAGIQADIKSVTSLGSYAMTAITAVTAQNTLGVKSIMPIPVKEISNQIEFTSKDIKPDSVKIGMLHSTQVINSVLKSIKKSKLKKIILDP

SEQ ID NO: 131315 - protein, 189 aa, Unknown
  Bacterial polypetide isolated from the Sargasso Sea
MKIKSKILIIAGSDSSGGAGIQADIKTITSLGSYAMTAITAITSQNTTGVKSIIPMNSKEISNQIEFTAKDIKPDAVKIGMLHSKEVINSVIKSLKKINAKKIILDPVMVAKGGKKLINDPAIKILKNKLLSKADLITPNIPEAEVLTNFKISTIQDVILAGKYLIKLGAKNVLIKGGHLNYKNIQDVF

SEQ ID NO: 131316 - protein, 259 aa, Unknown
  Bacterial polypetide isolated from the Sargasso Sea
GSDSSGGAGIQADIKTVTSLGSYAMTAITAITSQNTTGVKSIIPVNGKEISNQIEFTAKDIKPDAVKIGMLHSKEVINSVIKSLKKIKAKKIILDPVMVAKGGKKLINDPAIKILKYQLLSEADLITPNIPEAEVLTNLKISTIEDVILAGKYLIELGAKNVLIKGGHLNYKNIQDVFINKKEFLIFKNKKINTKNSHGTGCTLSSAITTYFSCGKTLKKSCEMAIKYVNHSLRTQPNLGKGHGPVNHLNSIQIKKNFR

SEQ ID NO: 131317 - protein, 168 aa, Unknown
  Bacterial polypetide isolated from the Sargasso Sea
MKPDGKILPICMTIAGSDSGGGAGIQADLKTFASLNCYGVSAITSVTAQNTLGVNDIHVIPNSVLKNQIDSIKNDIGFNSVKTGMLPEESSVISIANSLKKTSKLRLVIDPVIVATSGDVLISSKAIEALKKKLFPLASIITPNLSEAEELTKMKITDKDDVYEACKI

SEQ ID NO: 131318 - protein, 214 aa, Unknown
  Bacterial polypetide isolated from the Sargasso Sea
MIIAGSDSSGGAGIQADIKTVTALGGYAMTAVTAITAQNTTGVKSVIPIKPKEIEKQIIFTSKDIKPDAVKIGMLHSSKVIFSVLKSLRKIKTKKIILDPVMIAKGGFKLINEKAIKTLREKLIIKAHLITPNIPEAEVLTKTKIKTLKDMVNAAKILIKLGAKNVLVKGGHRNTKTMNDVFISKKKIKIFKNKKIKTKNTHGTGCTLSTAITT

SEQ ID NO: 131319 - protein, 76 aa, Unknown
  Bacterial polypetide isolated from the Sargasso Sea
MKPKSKILIIAGSDSSGGAGIQADIKTVTSLGSYALTAITAVTIQNTLGVKSVISLPLNDVKDQIIYTTKDISLMP

SEQ ID NO: 131320 - protein, 149 aa, Unknown
  Bacterial polypetide isolated from the Sargasso Sea
MKPKSKILIIAGSDSSGGAGIQADIKTVTALGGYAMTAITAVTSQNTTGVNSVIAIPPKEIEKQILFTSKDIKPDAVKIGMLHSSDIILSVSKSLKKLQTKKIILDPVMVAKGGFKLINNKAIKVLKERLIKKAFLITPNIPRSQGGFN

SEQ ID NO: 131321 - protein, 138 aa, Unknown
  Bacterial polypetide isolated from the Sargasso Sea
MKLKSKILIIAGSDSSGGAGIQADIKTATCLGVYSMTAVTAVTVQNTKRVKSVISIPANEIYNQIIYTTKDIKPDAVKIGMLHSTQVINKVFKSLNKIKVKKIILDPVMIAKGGSKLITDEAIQLMKKKLLKKISLIT

SEQ ID NO: 131322 - protein, 108 aa, Unknown
  Bacterial polypetide isolated from the Sargasso Sea
MKIKSKILIIAGSDSSGGAGIQADIKTATSLGVYAMTAVTAVTVQNTKGVQSVVPIPANETYNQIVYTINDIKPDAVKIGMLHSTQVINKVYKSLNKFKIEKVILDPV

SEQ ID NO: 131323 - protein, 280 aa, Unknown
  Bacterial polypetide isolated from the Sargasso Sea
IAGSDSGGGAGIQADLLTMKDLDCHGCSVITSITAQNSVAVELVEPVSEHMLISQLDALWSDLPPRAIKIGLLVSQQQVNCVAKWLTHLAQQDLLPFVVLDPVMVASSGHGFGQCSIDFKPMAGLMSLLTPNQHELSHLCANLLLSRQQDTSPVNDEHTMASAATWLANEYQCHVVAKGGDASWQQQDAIDMYVTQKVANASDIHNHRVFKLSSPRVNTQDNHGSGCTFSAAIACFIAHQFVLHDAIVMAKAYVNNGLTNSYQVGQGPGVLARTGWPDTL

SEQ ID NO: 131324 - protein, 241 aa, Unknown
  Bacterial polypetide isolated from the Sargasso Sea
MKIKSKVLIIAGSDSSGGAGIQADIKTVTTLGSYAMTAVTAVTTQNTTGVQSIVSIPPSEISKQIEFVSKDIRPDAIKIGMLNNEKVINAVIKSLKKIKVQKIILDPVMIAKSGTRLINNKSIKNLKQKMIKKVTLITPNIPEAEVLAGRKIYSKNDMIIAGKKLLKLGAKNVLIKGGHLKSSLSYDILLEKNKIFIYKNKKIKSKHTHGTGCTLSSAIATYYSCGKSLNKSCENAIKYVN

SEQ ID NO: 131325 - protein, 270 aa, Unknown
  Bacterial polypetide isolated from the Sargasso Sea
MKIKSKILIIAGSDSSGGAGIQADIKTITSLGSYAMTAITAITSQNTTGVKSIIPINSKEISNQIEFTAKDIKPDAVKIGMLHSKEVINSVMKSLKKIKAKKIILDPVMVAKGGKKLINEPAIKILKNKLLSKSDLITPNIPEAEVLTNSKISTIQDVILAGKCLIKLGAKNVLIKGGHLNNKNIQDVFINKKEITIFKNKKINTKNSHGTGCTLSSAITTYFSCGKTLKKSCEMAIKYVNHSLRTQPNLGKGHGPVNHLNSIQIKKNFR

SEQ ID NO: 131326 - protein, 270 aa, Unknown
  Bacterial polypetide isolated from the Sargasso Sea
MKLNSKILIIAGSDSSGGAGIQADIKTVTALGGYAMTAVTAITAQNTTGVSSVVPIPPKEIEKQILFTSKDIKPDAVKIGMLHSSEVILSVINALNKLKTKKIILDPVMVAKGGFKLINDKAIKTLREKLIRKAYLLTPNIPEAEVLTKIKIKTAEDMIQAANILLKFGVKNILVKGGHRNSNIMNDIFLNSKKLIIFKNKKIKTKNTHGTGCTLSSAITTFFGCGKTLNKSCELGIKYVNQSIRSNLNYGKGNGPINHLSSIKIDRKFN

SEQ ID NO: 131327 - protein, 173 aa, Unknown
  Bacterial polypetide isolated from the Sargasso Sea
MKIKSKILIIAGSDSSGGAGIQADIKTITSLGSYAMTAITAITSQNTTGVKSIISVNSKEISDQIEFTAKDIKPDAVKIGMLHSKEVINSVIKSLKKIKAKKIILDPVMVAKGGKKLINDPAIKILKNKLLSKVDLITPNIPEAEVLTNLKISTIQDVILAGNYLIKLGAKKC

SEQ ID NO: 131328 - protein, 256 aa, Unknown
  Bacterial polypetide isolated from the Sargasso Sea
GSDPSGGAGIQADIKTVTSLGSYALTAITALTVQNTLGVHSVIPVLPNNIKKQIIYSSSDIRPDAIKIGMLHSKDVIKKVLESLETLKVKKIVLDPVMVAKGGARLIDEDAIMILKKDLINKVDLVTPNIPEAEVLTGIKIKNKEDMILAGNELIKFGVKNVLIKGGHLKSKKVEDIFLNKTDFQIFTSSRYKTKNTHGTGCTLSSAITTFYSCGKSIKKACGLGIKYVNSAILTNPNYGKGKGPINHLKLNEIYK

SEQ ID NO: 131329 - protein, 222 aa, Unknown
  Bacterial polypetide isolated from the Sargasso Sea
MKIKSKILIIAGSDSSGGAGIQADIKTITSLGSYAMTAITAITSQNTTGVKSIIPVNSKEISNQIEFTAKDIKPDAVKIGMLHSKEVINSVIKSLKKIKAKKIILDPVMVAKGGKKLINDSAIKILKNKLLSKADLITPNIPEAEVLTNSKISTIQDVILAGNFLIKLGAKNVLIKGGHLNYKNIQDVFINKKEITIFKNKKINTKNSHGTGCTLSSAITTY

SEQ ID NO: 131330 - protein, 164 aa, Unknown
  Bacterial polypetide isolated from the Sargasso Sea
MTGRVLIIAGSDSGGGAGIQADLKTVMALKGYAATAITALTAQNTLGVRNVLSVETGFIQEQMQVVLKDIGADCLKTGMLHSAEVIDSICAVIEKEAPDIPLVVDPVMVAKGGASLLDIDSVGALRERLLPLARIITPNIPEAETLLGSTISSLDDMQRSAEML

SEQ ID NO: 131331 - protein, 191 aa, Unknown
  Bacterial polypetide isolated from the Sargasso Sea
MKIKSKILIIAGSDSSGGAGIQADIKTVTSLGSYAMTAITAITSQNTTGVKSIIPLNSKEISNQIEFTAKDIKPDAVKIGMLHSKEVINSVIKSLKNIKAKKIILDPVMVAKGGKKLINDPAIKILKNKLLSEADLITPNIPEAEVLTNSKISTIQDVIFAGNNLIELGAKNVLIKGGHLNYNNIQDIFMN

SEQ ID NO: 131332 - protein, 270 aa, Unknown
  Bacterial polypetide isolated from the Sargasso Sea
MKIKSKILIIAGSDSSGGAGIQADIKTVTSLGSYAMTAITAITSQNTTGVKSIIPVNSKEISNQIEFTAKDIKPDAVKIGMLHSKEVINSVIRSLKKIKAKKIILDPVMVAKGGKKLINDPAIKILKKKLLSEADLITPNIPEAEVLTNSKISTIQDVILAGNHLIELGANNVLIKGGHLNYKNIQDVFINKKEMIIFKNKKINTKNSHGTGCTLSSAITTFFSCGKTIKKSCEMAIKYVNHSLRTQPNLGKGHGPVNHLNSIQIKKKFR

SEQ ID NO: 131333 - protein, 270 aa, Unknown
  Bacterial polypetide isolated from the Sargasso Sea
MKIKSKILIIAGSDSSGGAGIQADIKTITSLGSYAMTAVTAITSQNTTGVKSIIPVNSKEISNQIEFTAKDIKPDAVKIGMLHSKEVINSVIKSLKKIKAKKIILDPVMVAKGGKKLINDPAIKILKNKLLSKADLITPNIPEAEVLTNSKISTIQDVILAGNHLIELGAKNILIKGGHLNYKNILDVFISKKEITIFKNKKINTKNSHGTGCTLSSAVTTYYSCGKTLKKSCEMAIKYVNHSLRTQPNLGKGHGPVNHLNSIQIKKIFR

SEQ ID NO: 131334 - protein, 266 aa, Unknown
  Bacterial polypetide isolated from the Sargasso Sea
MKPDAKPLPICMTIAGSDSGGGAGIQADLKTFGSLDCYGVSAVTSVTAQNTVGVSDIHIIPNTVLKNQINSIIKDIGFDAVKTGMLPEESTVIDIANLLGESSNLRLVIDPVIVATSGDVLISLKAIKALKQKLFPLATIITPNLSEAEELTEMKIKTKEDIYKACKILKNYGPKSVVIKGGHFFKSDVSEDVFYDGNKFESFSVKRIDTTSTHGTGCTFSAAITAFLARGEDLKDSVKLSKEYVTKAINKAYKIGKGNGPLNHFF

SEQ ID NO: 131335 - protein, 266 aa, Unknown
  Bacterial polypetide isolated from the Sargasso Sea
MKRINALTIAGTDPSGGAGIQADLKTFSALGVYGCSVITALVAQNTRGVQSVYRIEPDFVAAQLDSVLSDVRIDTTKIGMLAETDIVEAVAERLRRHRVQNVVLDTVMLAKSGDPLLSPSAVETLRTRLLPQVSIITPNLPEAAALLGASHAQTEQEMLEQGRALRALGCEAVLMKGGHLDDAQSPDWLFTREGEQRFTAPRVMTKNTHGTGCTLSAALAALRPRHNNWADTVQEAKLWLSAALAQADTLEVGEGIGPVHHFHAWW

SEQ ID NO: 131336 - protein, 270 aa, Unknown
  Bacterial polypetide isolated from the Sargasso Sea
MKIKSKILIIAGSDSSGGAGIQADIKSVTSLGSYAMTAITAVTVQNTTGVKSIIPIPIKEISNQIEFTSKDIKPDAVKIGMLHSTKVINSVLKSIKKSKLKKIILDPVMVAKGGAKLIDNKAILVLKKKLIKKVDLITPNIPEAEILTKIKIKSKMDMKNAAKILLDLGAKNVLIKGGHLSSKTLKDIFVNKKETAIFTNKKIKTKNTHGTGCTLSTAIATYYGCGKTLKKSCELGIRYVNNAIRTRPNFGKGNGPINHLNSFIIEKKFR

SEQ ID NO: 131337 - protein, 129 aa, Unknown
  Bacterial polypetide isolated from the Sargasso Sea
MIKPVCDKFIPNALTIAGSDPSGGAGIQADLKSFSANRVYGMSILTALTAQNTLGVSGIHKVPKKFIENQLNTIFQDIKVDAIKIGMIVNSGIATVIFNNLENRDIDHIVIDPVMVAKGGAKLLENEAI

SEQ ID NO: 131338 - protein, 99 aa, Unknown
  Bacterial polypetide isolated from the Sargasso Sea
MKQKKIPTILIIAGSDSGGGAGIQADIKAASYFKVFATTAVTAVTAQNTLGVQSIFPIPEIEIQKQLRSVISDLAPDLIKIGMLGTKEVVDCVHRKFYP

SEQ ID NO: 131339 - protein, 167 aa, Unknown
  Bacterial polypetide isolated from the Sargasso Sea
MKIKSKILIIAGSDSSGGAGIQADIKTITSLGSYAMTAITAITSQNTTGVKSIVPVTSKEISNQIEFTAQDIKPDAVKIGMLHSKEVINSVIKSLKKIKAKKIILDPVMVAKGGKKLINDQAIKILKNKLLSKADLITPNIPEAEVLTNSKISTIQDVILAGNFLIN

SEQ ID NO: 131340 - protein, 270 aa, Unknown
  Bacterial polypetide isolated from the Sargasso Sea
MKLKSKILVIAGSDSSGGAGIQADIKTITSLGSYAMTAITAITSQNTTGVLSISKVPINEIKRQIEFTSKDIRPDAIKIGMLHSKKVIETVINSLKKIKVKKIILDPVMVAKGGTKLVDDKSIEIIKTKLMNRVSLITPNIPEAEILAKIKIKTTDDMIIAGKKLLSFGAKNVLIKGGHLKAKYVYDLYLNKGEKEFFKSKKIKTKNTHGTGCTLSSAIATYFSCGKTLKKSCKMAIDYVNHSIGSGPNFGKGHGPINHISVFNIKNKFK

SEQ ID NO: 131341 - protein, 69 aa, Unknown
  Bacterial polypetide isolated from the Sargasso Sea
MNDLKKGELIVFAAPSGAGKSSLIKEIITNNENIELSVSATTRSPREGETHGKDYFFITDNEFNDLKKK

SEQ ID NO: 131342 - protein, 139 aa, Unknown
  Bacterial polypetide isolated from the Sargasso Sea
MEYAKVFNNYYGTTRTPIIDNLNKGKNVLFDIDWQGADQIKNKKLDYKLITFFILPPSKKILFDRLSNRDMKDKLIAEERMQQFERDVLHWINYDYVVINDDLEKCYFKIKNLINAEINDGSKDYDLDFIRNHVEKLTS

SEQ ID NO: 131343 - protein, 190 aa, Unknown
  Bacterial polypetide isolated from the Sargasso Sea
MKVSYNKRIIIVISSPSGAGKTSVCQKLIERDKSIALSISDTTRSPRDNEIDGVDYNFIKEEEFKNKIINKSYVEHANVFGNFYGSQYKNVINHFKNGRDVLFDIDWQGAKQLKSSSFKNIVSIFIIPPSKDAIYQRLKSRAIKSGDNEDAIESRMNKYETEMRHRNDYDHIVINDKLETCVDELERIIN

SEQ ID NO: 131344 - protein, 115 aa, Unknown
  Bacterial polypetide isolated from the Sargasso Sea
MDKQNINIFVISSPSGGGKTSLIKKLLEDPRSEGTVLSISHTTREKRLNEKDGVDYFFTDKKNFEDKIKKNDFLEYATVFDNYYGTSQETVNTLLSQDKTVILELDWQGAKQVKS

SEQ ID NO: 131345 - protein, 207 aa, Unknown
  Bacterial polypetide isolated from the Sargasso Sea
MKEITGKLIVISAPSGTGKTTVVKKLLQQSTNLEASVSFTTRKMRENEKEGLDYFFVSEKTFTSMIQNHDFLEHATVFGNFYGTEKKSVSENLKKGVNLILEIDWQGALQIKSSMPSCVMIFLIPPSKEVLLARLKNRGTDSDQEIAYRFNQAVLDLEQSNKFDHVLVNDQLEKVVTEIALCIEGKANKINQSKKVAESLKSFFETN

SEQ ID NO: 131346 - protein, 114 aa, Unknown
  Bacterial polypetide isolated from the Sargasso Sea
NVIFDIDWQGTQQIKNIKLKYKIITIFILPPSKEELFNRLLKRDKKDQRIASERMKQFKTDITHWKDYDYTVINDKIEKCYKQIISFIANQSKNKKKLKYNMRPIKNHIKKLLN

SEQ ID NO: 131347 - protein, 104 aa, Unknown
  Bacterial polypetide isolated from the Sargasso Sea
QGTQQLYQSKPSNLVSIFILPPSKDEIENRLRQRKVDSGDDESIINKRMSKFKDEISHWVEYDYVVINNKLKTCVDEILNIIHVERKKRRRQLNLVNKVRELTS

SEQ ID NO: 131348 - protein, 83 aa, Unknown
  Bacterial polypetide isolated from the Sargasso Sea
MKNQKKLIVLTGPSGVGKGTVVKEILGKEKNFWLSISATTREPREGEKEGENYYFLNQDKFKEMIEQNLFLEWAQFAGNYYGT

SEQ ID NO: 131349 - protein, 207 aa, Unknown
  Bacterial polypetide isolated from the Sargasso Sea
MKDITGKLIVISAPSGTGKTTVVKKLLQQSANLEASVSFTTRKIRENEKEGLDYFFVCEKTFTNMIQNDDFLEHATVFGNFYGTEKKSVSENLKKGVNVILEIDWQGALQIKSGMPECVMIFLIPPSKEVLLARLKNRGTDSDQEIAYRFNQAVLDLEQSNKFDHVLVNDRLDKVVTEIALCIEGKANRINQSKKVAESLKSFFETN

SEQ ID NO: 131350 - protein, 100 aa, Unknown
  Bacterial polypetide isolated from the Sargasso Sea
IKQKNLKYKIITIFILPPSREELFNRLLNRDLNDEKNAKERMKQFDKDVMHWKNYDLVVINDNFNKCYNNIIKFINLEIKNIAEIYNRNDIENHVLGLLK

SEQ ID NO: 131351 - protein, 87 aa, Unknown
  Bacterial polypetide isolated from the Sargasso Sea
MSVNHEGIIVILSSPSGAGKTSLVKEICLKNNYSISISHTTRKPRAKEINGIDYFFVNQEEFKKLISKNKFLEYAKVFNNFYGSSKD

SEQ ID NO: 131352 - protein, 168 aa, Unknown
  Bacterial polypetide isolated from the Sargasso Sea
SRNMRLNEVNGKDYYFVTKKRFIQLEKNNYFIETSSNFNNLYGSPIKNIRKSNSVNKNILFDIDWKGARKIRKNFRKKDVIDIFILPPSVKELRKRLIKRGRDSKNEIKLRLSYALEEIKHYNEYNYVLINQNIHNTANDIIKIIKYHDLIKNNDKILNKNLKKIVNF

SEQ ID NO: 131353 - protein, 141 aa, Unknown
  Bacterial polypetide isolated from the Sargasso Sea
MNRNKLIVFSAPSGAGKTTLVKHILSQFSNTSFSISATSRSPRGNEKDGVDYHFLSKSEFKKKINNNEFIEFEEVYGGVHYGTLKSEVENIWTNNEVALFDIDVVGGFNIKKMYPMNTLSIFVMPPSIDTLKKRLISRGDI

SEQ ID NO: 131354 - protein, 191 aa, Unknown
  Bacterial polypetide isolated from the Sargasso Sea
MEKQTVVKKLLQQSTNLEASVSFTTRKMRENEKEGLDYFFVREKTFTNMIHNDDFLEHATVFGNFYGTEKKSVSEKLKKGVNVILEIDWQGALQIKSSMPSCVMIFLIPPSKEVLLARLKNRGTDSDQEIAYRFNQAVLDLEQSKKFDHVLVNDQLDKVVREIALCIEGKANKINQSKKVAESLKSFFETN

SEQ ID NO: 131355 - protein, 116 aa, Unknown
  Bacterial polypetide isolated from the Sargasso Sea
MAEKKAGVIVILSSPSGAGKTTLVKKISFRKKFKISISHTTRKPRANEKNGRDYFFVNKKKFLKLIKNNKFLEYAKVFKNYYGSLKETVIQNLVNGENVIFDIDWQGTEQIKKKKL

SEQ ID NO: 131356 - protein, 52 aa, Unknown
  Bacterial polypetide isolated from the Sargasso Sea
MPLNNDGTMVILSSPSGAGKTTLVKLLSKRKNFKVSISHTTRKPRESEIQNK

SEQ ID NO: 131357 - protein, 91 aa, Unknown
  Bacterial polypetide isolated from the Sargasso Sea
MLNDLKKGELIVFAAPSGAGKSSLIKEIISNNENIELSVSATTRSPREGETHGKDYFFITDNEFNDLKKKNAFIESADVHGHQYGTLKSFC

SEQ ID NO: 131358 - protein, 105 aa, Unknown
  Bacterial polypetide isolated from the Sargasso Sea
MAEKKAGVIVILSSPSGAGKTTLVKKISKRKNYKISVSYTTRKPRANESNGKDYYFINNTQFKKLIKEKKFLEYAKVFKNYYGSLRDSVITKLSKGKNVIFDIDW

SEQ ID NO: 131359 - protein, 196 aa, Unknown
  Bacterial polypetide isolated from the Sargasso Sea
MEGALIILSSPSGAGKTTLVKKLSSLYNFEVSISYTTRIPRINEINGKDYFFISEDDFKKLINKSELLEHAKVFNNYYGSSKKKVFKHLENGKNVLFDIDWQGTDQIKKNDLKFKLITFFILPPSKKTLLNRLAERENNKDEIINERMKKFEEDVKHWKDYDYVVINDNLELCVHEIKDIIDSELKKQKKFFDKSK

SEQ ID NO: 131360 - protein, 61 aa, Unknown
  Bacterial polypetide isolated from the Sargasso Sea
FNNYYGTTRTPVIDSLDKGKNVLFDIDWQGADQIKNKGLDYKLITFFILPPSKEVLFKRLS

SEQ ID NO: 131361 - protein, 173 aa, Unknown
  Bacterial polypetide isolated from the Sargasso Sea
MNISQKNKIIIISSPSGAGKTTLCKLLLKKMNDVNLSVSYTSRNQRLNEIHGKDYFFVSKNKFLQLKKKNYFIETALNFGNYYGSPYKNLKQIKNKNKILFDIDWKGARKIRNTIGKNAIIDFFILPPSIKELKKRLIKRGRDNKKDINLRLSYAIKEIGHYNEYSYVLINQN

SEQ ID NO: 131362 - protein, 126 aa, Unknown
  Bacterial polypetide isolated from the Sargasso Sea
MVISDNEIKRKGLMFVLSSPSGAGKTSLSRKLLELDKELFLSISYTTRPPRPGEIDGEDYFFVNNDDFADMQEQNEFLEYAKVFDYYYGTPKKPVKNILDKGRDILFDIDWQGTQQLMNNSKDDLV

SEQ ID NO: 131363 - protein, 209 aa, Unknown
  Bacterial polypetide isolated from the Sargasso Sea
MNTEDQNKLVIISSPSGAGKTTLCKMLLKKMKNIELSISYTSRNKRLNEKNGKDYFFVTKDKFNKLAKKNFFIETAKNFNNYYGSPYSNIKKAKKNKNILLFDIDWKGARKIRKNYNSNNILDFFILPPSKNELKKRLIRRGRDNMNEISLRLSYAINEMKHFNEYKYILINENVHKTVKDIIKIIEYNKLIQKNQMLLNKNLKKIIKI

SEQ ID NO: 131364 - protein, 183 aa, Unknown
  Bacterial polypetide isolated from the Sargasso Sea
MNTEKKLNKIIIISSPSGAGKTTICKELLKTSKDINLSISYTTRQKRVNEKDGKDYYFVTNKEFNNLKKNHFFIETAKVFNHYYGSPYKNIINSFKKNKNILFDIDWQGANKLRKKYSNEDIIDFFILPPNKKELRKRLNKRGRDNKKEIQMRLSLALSEISHHNDYKYVLINDKLNETISNI

SEQ ID NO: 131365 - protein, 184 aa, Unknown
  Bacterial polypetide isolated from the Sargasso Sea
MKNQKKLIILTGPSGVGKGTVVKKILGEEKNFWLSISATTRQPREGEKEGENYYFLNREKFKEMIEQNLFLEWAQFAGNYYGTPLSSVNEKIKKGFTVLLEIEVEGARQIKNKFPNSLSIFLLPPDKEELERRIRSRGTEKEEAIKKRLLRANYEISVSNQFDFALTNHHVDETAKKIIKLIKT

SEQ ID NO: 131366 - protein, 151 aa, Unknown
  Bacterial polypetide isolated from the Sargasso Sea
LSISATTREPRDGENEGENYYFLNEEKFKQMIEQNLFLEWAQFAGNYYGTPLSSVNKKIKQGFTVLLEIEVEGAKQIKEKFPNSLSIFLLPPDIPELERRIRNRGTEKEEAIKKRLLRANYEISVSNQFDFALTNRNVDETAKKIIKLIKT

SEQ ID NO: 131367 - protein, 60 aa, Unknown
  Bacterial polypetide isolated from the Sargasso Sea
MFVLSSPSGAGKTSLSRKLLELDKELFLSISYTTRPPRPGEIDGEDYFFVNNDDFALMQE

SEQ ID NO: 131368 - protein, 118 aa, Unknown
  Bacterial polypetide isolated from the Sargasso Sea
YGVPRTQVSDALADGKHVIIRVDVQGAKRLKEIIPEALLIFILPPSLDVLRSHLEKRGVDTENEMKKRLLAAKQEITQTDLFDFTVTNKEHQLDQAVNRVIQIIETESLKKPTREIRL

SEQ ID NO: 131369 - protein, 161 aa, Unknown
  Bacterial polypetide isolated from the Sargasso Sea
MRQRHPELWLSVSATTRAPRPGEENGIHYFFHSQDSFQQLVDQSGLLEWASFAGNCYGTPRQPVEERLAAGVPVLLEIELEGARQVRQSSPDAFQIFLRPPSFEELERRIRGRGTDSEEAIQKRLARAKDELNAEAEFDATVVNDDLEHALEQLIGLIFSS

SEQ ID NO: 131370 - protein, 99 aa, Unknown
  Bacterial polypetide isolated from the Sargasso Sea
MSEKGVLVILSSPSGAGKTSIARALVEENESFLFSVSATTRKSRPGEVNGREYHFLTVDEFREKINDGKFLEHAKVFGNLYGTPLEPVMESINDGKDLI

SEQ ID NO: 131371 - protein, 92 aa, Unknown
  Bacterial polypetide isolated from the Sargasso Sea
MSSTKIGLMIVLSSPSGAGKTTLVKLLSKKENFFVSISHTTRKPRDQEISGKDYHFVKNDDFKNSIKNDEFLEYAKVFNNYYGSPKKTVIEK

SEQ ID NO: 131372 - protein, 59 aa, Unknown
  Bacterial polypetide isolated from the Sargasso Sea
MSEKGVLVILSSPSGAGKTSIARALVEENKNFLFSVSATTRKSRAWGSNGQRVLLFNYP

SEQ ID NO: 131373 - protein, 192 aa, Unknown
  Bacterial polypetide isolated from the Sargasso Sea
MNTEIKNKLIIISSPSGAGKTTLCKLLLKKMKNIKLSISYTSRNKRLNEIDGKDYFFIDKKEFKDLKNKKFFIETANNFNNYYGSPYKNIIKANRNNEYLLFDIDWKGARKIRKNYNKINIIDFFILPPSKSELKKRLIKRGRDNKKEINLRLSYALEEMKHFNEYKHVLINENVHKTVDQIKKIIEYNQLI

SEQ ID NO: 131374 - protein, 190 aa, Unknown
  Bacterial polypetide isolated from the Sargasso Sea
GAGKTSISKQLIKKDKSIALSISCTTRPKRTKEINKKDYIFLNEYQFNARIKKNDFLESANVFGYRYGTLKQTVNSFFKKKKDVLFDIDWQGFQQLKQTNLEVVGIFILPPSKKELVLRLKTRARDTKKEMKKRMNLVQNEISHFPEYDYVVINENLDNCVNQILNIIKSERLKKSRLINLTKFVNKFRT

SEQ ID NO: 131375 - protein, 208 aa, Unknown
  Bacterial polypetide isolated from the Sargasso Sea
MNIEKKLNKIIIISSPSGAGKTTICNELLKTLKNINLSISYTTRQKRINEKHGKDYFFVSQKEFIELKKNDFFIETAKVFNHYYGSPYKNVINSFKKNKSILFDIDWQGANKLRKKYSKNDIIDFFILPPNKKELRLRLNKRGRDNKKEIQMRLSLALSEISHHNDYKYVIINDKLNETISNIKSIIKYNQLKSNLLDKVNKNLLSKK

SEQ ID NO: 131376 - protein, 64 aa, Unknown
  Bacterial polypetide isolated from the Sargasso Sea
MTKSTKPLMLVLSSPSGAGKTTLSKKIQQSDNSFEISVSHTTRNPRPNEVDGVDYHFVTKENLK

SEQ ID NO: 131377 - protein, 150 aa, Unknown
  Bacterial polypetide isolated from the Sargasso Sea
MNIKEECFLLILSSPSGAGKTSLSKKIKEEIKNFEISISHTTRKPRNDEVNGKDYHFISKEEFLKKIDNNEFYEYAKIYDNYYGTSKKAVNDLLEKNKNIIFDIDWQGTQQLVKFSNLNFLKIFLLPPNKNELEKRLNNRNKDSDKSLSK

SEQ ID NO: 131378 - protein, 103 aa, Unknown
  Bacterial polypetide isolated from the Sargasso Sea
MSELNEGIIVVLSSPSGAGKTTLVKRISLNKNFSISISHTTRKPRRNEINGKDYFFVSGAEFEKLINSQKFLEYAKVFKNYYGSSKENVIKMLKNGENVIFDI

SEQ ID NO: 131379 - protein, 203 aa, Unknown
  Bacterial polypetide isolated from the Sargasso Sea
MSLNSGGIMIILSSPSGAGKTTLVKLLSENRDFYTSISHTTRKPRNNEEEGKDYYFVNNDQFQNLIKKKEFLEYANVFSHLYGTTKTPIIKNLENNKNVVFDIDWQGTEQIKKKNLEYKLLTFFVLPPSKKVLFNRLSNRDMKDKLIVDDRMKEFNKDILHWKNYDYVVINDDLQKCFNEICELIDSFINESKNNYDKKLIEK

SEQ ID NO: 131380 - protein, 221 aa, Unknown
  Bacterial polypetide isolated from the Sargasso Sea
MNLIIYNILPFNLIVNDITGKLIVISAPSGTGKTTVVKKLLKQNANLVASVSFTTRKIRDNEKEGLDYFFVDEKTFGNMIRNNDFLEHATVFGNFYGTERKSVSQNLEKGMNVILEIDWQGALQIKSRMPLCVMIFLIPPSREVLLSRLKSRGTDSDQEIEYRFNQAVLDLEQSNKFDHVLVNDQLDKVVSEISLCIEGKANKIDDTRGVSESIKSFYETD

SEQ ID NO: 131381 - protein, 157 aa, Unknown
  Bacterial polypetide isolated from the Sargasso Sea
MSLKTDGSIFIFSSPSGAGKTTLVKLVSRKKNFITSISHTTRKPRSNEIDGQDYHFVNDKKFQDLINKKEFLEYAKVFNNFYGTTKRPVFQNLLDGKNVLFDIDWQGSSQIKAQNIKFKIFSFFVLPPSRKVLQKRLSNRDMKDKLIASERMKEFYD

SEQ ID NO: 131382 - protein, 107 aa, Unknown
  Bacterial polypetide isolated from the Sargasso Sea
MKTITNDIWVITAPSGTGKTTLNRRLINDLDRLKGAVSYTSRSKRAHEVHGDHYWFVTVKEFEQHLQKGNMLEWAKVFGNYYGTSVEEIKRLESANYDVLLEIDVQG

SEQ ID NO: 131383 - protein, 184 aa, Unknown
  Bacterial polypetide isolated from the Sargasso Sea
MKNQKKLIILTGPSGVGKGTVVKEILGKEKNFWLSISATTREPREGEKDGENYFFLNQEKFKEMIEQNLFLEWAQFAGNYYGTPLSSVNEKIKKGFTVLLEIEVEGARQIKNKFPNSQSIFLLPPDKQELERRIRNRGTEEEEAIQKRLSRANYEISVSNEFDFALTNHNVDETAKKIIKLIKT

SEQ ID NO: 131384 - protein, 57 aa, Unknown
  Bacterial polypetide isolated from the Sargasso Sea
MIILSSPSGAGKTTLVKKISKEKKYKISISHTTRESRPNEINGVDYFFISEPGIPKS

SEQ ID NO: 131385 - protein, 153 aa, Unknown
  Bacterial polypetide isolated from the Sargasso Sea
MSEEKKGMMFVLSSPSGAGKTTLTKKLVKNNSNFRLSISHTTRKPRSSEIEGKDYYFVDENEFNTLISRDEFFEHAKIFDNFYGTLKKPVIDFLSSGKDVLFDIDWQGTQQLKKIKNLSIVTFFILPPNIKTLRARLLNRHEGQENVINQRMK

SEQ ID NO: 131386 - protein, 179 aa, Unknown
  Bacterial polypetide isolated from the Sargasso Sea
MLNDLKKGELIVFAAPSGAGKSSLIKEIITNNENIELSVSATTRSPREGETHGKDYFFITDNEFNDLKKKDAFIESADVHGYQYGTLKAFVEEKLENNISVVLDIDVQGFIQISNSIKQVISIFIIPPSLDELKKRLILRGLDADDVINRRMENAIKELKHAKYFDYIVLNDDFNRAFN

SEQ ID NO: 131387 - protein, 105 aa, Unknown
  Bacterial polypetide isolated from the Sargasso Sea
MDKQNINIFVISSPSGGGKTSLIKKLLEDPRSEGTVLSISHTTREKRLNEKDGVDYFFTDKKSFEDKIKKNDFLEYATVFDNYYGTSQETVNTLVSQGKTVILEL

SEQ ID NO: 131388 - protein, 99 aa, Unknown
  Bacterial polypetide isolated from the Sargasso Sea
SKKLKYKIITIFILPPSKEELFKRLLKREQKDKNIANERMKQFKEDVLHWKDYDFTVINDRIEKCYKSIIHFIKINKKNKFIKKYNKTFIKKHIQYLVN

SEQ ID NO: 131389 - protein, 102 aa, Unknown
  Bacterial polypetide isolated from the Sargasso Sea
WQGAQKLANFSKTDIVSIFILPPSNSILKERLKKRNEDSPQIVNKRMSKAKSEISHWIEYDYVLINEDLAKCSDEVVTILKAERKKRDRQKFTFGFIEKLLE

SEQ ID NO: 131390 - protein, 188 aa, Unknown
  Bacterial polypetide isolated from the Sargasso Sea
EKTSISKMLLKKDKLLSLSISCTTRPIRKGEVNKKDYIFLNQEQFSDSLKKNKFLESAYVFGYKYGTLKDTVNNFFNKKKDVLFDIDWQGYQQLKQSNMDVIGIFILPPSKKELIKRLRTRGRDTQDEMKKRMDLVQNEISHFPEYDYVVVNKDLKECVNKIKNIIDSERSKKSRLINLTNFVNKFRN

SEQ ID NO: 131391 - protein, 97 aa, Unknown
  Bacterial polypetide isolated from the Sargasso Sea
MINSEKPLMLVLSSPSGAGKTTLTKKIQQSDNSFKASVSHTTRKARANEVDGVDYHFVSKERFQKLIEEKAFYEHAKIFDNYYGTSKLSIKKIIDNK

SEQ ID NO: 131392 - protein, 184 aa, Unknown
  Bacterial polypetide isolated from the Sargasso Sea
MKNQKKLIILTGPSGVGKGTVVKEILGKEKNFWLSISATTREPREGEKDGENYYFLNQEKFKEMIEQNLFLEWAQFAGNYYGTPLSSVNEKIKKGFTVLLEIEVEGARQIKNKFPNSLSIFLLPPDKEELERRIRNRGTEKEEAIKKRLSRANYEISVSNQFDFALTNHNVDETAKKIIKLIKT

SEQ ID NO: 131393 - protein, 117 aa, Unknown
  Bacterial polypetide isolated from the Sargasso Sea
MIILSSPSGAGKTTLVKKISSKKKYKISISHTTREPRPNEIDGLDYFFISKEKFQMLINENAFLEYANVFKNLYGSTKEQVFSNLDSGQNVLFDIDWQGARQIKNKTLNYKLISFFI

SEQ ID NO: 131394 - protein, 182 aa, Unknown
  Bacterial polypetide isolated from the Sargasso Sea
SETNNYIISISHTTRTPRANEINGRDYYFVSKGEFEKLKNEDEFLEHAEVFKNLYGSSKGNVIKNLQEGKSVIFDIDWQGADQIKKKKLNYKIISFFILPPSKEVLFQRLLNRDIKNKLIVEERMKQFSKDILQWKNYDFVVINDQLKKCYKEIMYFIDTKIRNLDNNYNSKNIEKHIKTLI

SEQ ID NO: 131395 - protein, 96 aa, Unknown
  Bacterial polypetide isolated from the Sargasso Sea
MAAKKAGIIVILSSPSGAGKTTLVKKISKRKKYKISISHTTRKPRANEKNGKDYYFINSSKFKKLIKAKKFLEYAKVFKNYYGSLKENVITKLTNG

SEQ ID NO: 131396 - protein, 198 aa, Unknown
  Bacterial polypetide isolated from the Sargasso Sea
MAINDNEIKRKGFMFVLSSPSGAGKTSLSRKLLELDKELFLSISYTTRPPRPGEIDGEDYFFVNNGDFADMQEQNEFLEYAKVFDYYYGTPKKPVKNILDKGKDILFDIDWQGTQQLMNNSKDDLVKVFVLPPSIEELERRLKERKQDKDEIIQKRMSRASDEISHYAEYDYILVNDNFDETVEEIISILNAERLKKS

SEQ ID NO: 131397 - protein, 100 aa, Unknown
  Bacterial polypetide isolated from the Sargasso Sea
MVNTIMKTAAKGMLFVLSSPSGAGKTTLTKKISENNSNFKISISHTTRKPRPNEIDGKDYHFVNQTQFSELIKNNSFFEHANIFNNLYGTLKKPSIRPYI

SEQ ID NO: 131398 - protein, 98 aa, Unknown
  Bacterial polypetide isolated from the Sargasso Sea
IRKKFNKKDIIDIFILPPSVKELKKRLIKRGRDSNKEINLRLSYALDEIKHYNEYNYVLINQNIHETATDIIDIIKYHELIKKNEKVLNKKLKTLINF

SEQ ID NO: 131399 - protein, 210 aa, Unknown
  Bacterial polypetide isolated from the Sargasso Sea
MSIEKNSKLIIISSPSGAGKTTLCKLLIKKMKNINLSISYTSRSKRLNEVHGKDYYFVNKKKFELLKKKNYFIETATNFNNLYGSPFKNIVLSKKRNKHILFDIDWKGARKIRRNYTKDDIIDFFILPPSKSELKRRLVKRGRDNKKEIDLRLSYAIDEMKHYNEYQYVLINEKVHKTVNEIKKIIEYHQLIINQKKVLRSKLKKIINRN

SEQ ID NO: 131400 - protein, 122 aa, Unknown
  Bacterial polypetide isolated from the Sargasso Sea
CRVCSSKLSTGVNLILEIDVQGFRQINDLSLNYDSIFILPPSIDSLEERIKSRGDEDLESINLRLKNAKDELAHAKEYNHIIINDSFEEAEMELFNIISQEKPLNKQNIEEVQQFLAQLLSY

SEQ ID NO: 131401 - protein, 180 aa, Unknown
  Bacterial polypetide isolated from the Sargasso Sea
KGFVTSISHTTRAPRSNEVNGKDYHFVSIEKFEKMISNKDFLEYAKVFKNFYGTTKSNVYAELNKGRDVVFDIDWQGTSQIISQKLRNKLLTFFILPPSRQELFKRLSNRDMKDKLIAEERMKQFDKDVLHWKDYDYVIINNDLEVCYKQISEYIDFEISNKKCDYDVNSIKEHIKKLTS

SEQ ID NO: 131402 - protein, 172 aa, Unknown
  Bacterial polypetide isolated from the Sargasso Sea
SISATTRQIRPSEREGVHYFFMDPDGFMKKRDEGAFLEWAEVHGNYYATPKAAVEQSLAAGRDVLFDIDVQGAEQLKQAMPGDVVGIFVLPPSMEALRARLLARAEDSKAAMEVRLKNATGEISHWRDYEYVVINDDLDDAYDLVRSILRAERAKRERETAIPRHVESLLGQ

SEQ ID NO: 131403 - protein, 46 aa, Unknown
  Bacterial polypetide isolated from the Sargasso Sea
MSSFKRGGIFILSSPSGAGKTTLVKKISKNKNFQVSVSHTTRLPRP

SEQ ID NO: 131404 - protein, 67 aa, Unknown
  Bacterial polypetide isolated from the Sargasso Sea
MSNEKGQLIVISAPSGAGKTSIIKNVIKKLNDENKKSTFSISHTTRLPRDGDIDGSDYFFVSNEIFD

SEQ ID NO: 131405 - protein, 115 aa, Unknown
  Bacterial polypetide isolated from the Sargasso Sea
LKHGKNIVFDIDWQGTRQIKNKKLNYKLITIFILPPSKNELLARLTKRENKNMKTVKKRMKEFKKDLSRWKEYDYVVINDNLQKCYKNIMKIIRRKNKIVYDKNFISMHVKRLLN

SEQ ID NO: 131406 - protein, 161 aa, Unknown
  Bacterial polypetide isolated from the Sargasso Sea
MNIHKSSNLYVISAPSGAGKTSLVKELCKKVSFISPSVSYTTRKIRKSEVEGKDYFFTNRTNFKKMASNNEFIEFQSVYGNLYGSSKTYVEQKLKDGDDVILEIDYKGMMKIKSMYPSAITMYIVPPSIDSLRKRLICRGQDDIEVVEKRISSAKFELSFS

SEQ ID NO: 131407 - protein, 170 aa, Unknown
  Bacterial polypetide isolated from the Sargasso Sea
TRKPSPNEISNKDYFFVSEDEFKRLIKNQEFLEYAKVFNNFYGSTRTPVINNLDNGKNVLFDIDWQGADQIKNKKLDYKLITFFILPPSKEVLFERLSNRDMKDKLIVDERMKQFEHDVLHWINYDYVVINNNLEDCYKKILNLIQAEIRNTSKDYDKDFIRNHVEKLTS

SEQ ID NO: 131408 - protein, 89 aa, Unknown
  Bacterial polypetide isolated from the Sargasso Sea
MSSNIDGIMIILSSPSGAGKTTLVKKISSIKNFEISISYTTRKPRSNEEDGKHYFFINKKKFEKLIIDGELIEYANVFNNYYGTSKNKV

SEQ ID NO: 131409 - protein, 174 aa, Unknown
  Bacterial polypetide isolated from the Sargasso Sea
AGKTTLSKKIQQSDSSFKISVSHTTRKARPNEVDGVDYHFVSKDEFKEMIKKSAFYEHSQIFGNFYGTSKSSVNKIIKDKFNVLFDIDWKGAQQLSNYKQLNLLKIFILPPNKDELEKRLVARNQDDKESIKNRLLAYSQDIKHSNEYDHVIVNDNVDSCFNSIKKIISNRINI

SEQ ID NO: 131410 - protein, 200 aa, Unknown
  Bacterial polypetide isolated from the Sargasso Sea
MLVLSSPSGAGKTALANKLLESDSSFELSVSLTTRTPRNGEVDGKDYFFVNEYEFSSMIENNELLEFANVFSNKYGTKTNLVMNALNNGKNVLFDIDWQGVKQLKENVKLSRQLVTVFILPPSISELNRRLKNRALDSEETLKNRMFQAEKEISHWVDYDYVIVNDDFQKCFDELYAIVKAEKLKKIRQIYLDEFTKYSS

SEQ ID NO: 131411 - protein, 117 aa, Unknown
  Bacterial polypetide isolated from the Sargasso Sea
NKGKNVLFDIDWQGADQIKNKKLDYKLITFFILPPSKEILFKRLSNRDMKDKLIADERMKKFSRDVLHWINYDYVVINDDLNKCYSKIYNLIQAELTNDSKDYDLDYVRKHVQKLTN

SEQ ID NO: 131412 - protein, 61 aa, Unknown
  Bacterial polypetide isolated from the Sargasso Sea
MRIQRRGLMFVLSSPSGAGKTTISRAILERDPEIVMSISMTTRPKRPGKVAARDYHFVKTA

SEQ ID NO: 131413 - protein, 191 aa, Unknown
  Bacterial polypetide isolated from the Sargasso Sea
MSIEIKNKLIIISSPSGAGKTTLCKLLLKKMKNISLSISYTSRNKRLNEINGKDYFFVSKDKFLKLNKSNFFIETAKNFNNLYGSPYKNVIDSRKKNTHLLFDIDWKGARKIRNKYSKNEIIDFFILPPSKYELKKRLVKRARESSKEINLRLSYAIDEMKHFKEYKYVLINENVHKTVNEIKKIIEFNDL

SEQ ID NO: 131414 - protein, 108 aa, Unknown
  Bacterial polypetide isolated from the Sargasso Sea
FKKSNWDSEELILFDVDVKGAMSIKKKYPNNTLTIFILPPSLEDLKMRLMKRGTDSIEIINKRLERTNKEMKFKDKFDTFMINDDLSNAIKKLNEIISNQNQGVINGS

SEQ ID NO: 131415 - protein, 167 aa, Unknown
  Bacterial polypetide isolated from the Sargasso Sea
PRPNETSNKDYFFIDENEFERLIKNEEFLEYAKVFNNLYGTSRTPVIDKLDKGKNVLFDIDWQGADQIKNKKLDYKLITFYILPPSKNELFERLSNRDMRDKLIAEERMKQFERDVLHWINYDYVVVNDNLDTCFTKIKNLIDAEVSNGSKDYDLKFIRNHVKKLTS

SEQ ID NO: 131416 - protein, 120 aa, Unknown
  Bacterial polypetide isolated from the Sargasso Sea
MDNSNKPLMLVLSSPSGAGKTTLTKKIQESDSTFRVSISHTTRKARANEVDGVDYHFVKKAEFEKLIKDKAFYEHAKIFENLYGTSKSSIKKITEKGYNVLFDIDWQGAEQLSRHKELNC

SEQ ID NO: 131417 - protein, 80 aa, Unknown
  Bacterial polypetide isolated from the Sargasso Sea
MQNSDRPLMLVLSSPSGAGKTTLTKKIQESDSSFKVSVSHTTRKARPNEVNGVDYHFVSKEKFQQLINEKAFYEYAKILT

SEQ ID NO: 131418 - protein, 121 aa, Unknown
  Bacterial polypetide isolated from the Sargasso Sea
YKLERNENVIFDIDWQGTKQIKNQKLRYQIITIFILPPSKKELYKRLLKRDQKDKKIASERMKQFKKDVLHWKDYDFAVINDKLEKCYKLIIKYINKQKKQKATLKYNKNIIKNHILKLIK

SEQ ID NO: 131419 - protein, 76 aa, Unknown
  Bacterial polypetide isolated from the Sargasso Sea
MVIKKKGMMFVLSSPSGAGKTTLTKKLAGSNKNFSISISHTTRKPRPDEVNKKDYYFVDEKELKSLIKKNSFLSSK

SEQ ID NO: 131420 - protein, 90 aa, Unknown
  Bacterial polypetide isolated from the Sargasso Sea
DIIDFFILPPSVKELKKRLVKRGRDNSDDINLRLSYALKEISHYNEYSYVLINKNVIQTVNDIIHIIKYNYILDKNQKLTDRKLKSLINF

SEQ ID NO: 131421 - protein, 94 aa, Unknown
  Bacterial polypetide isolated from the Sargasso Sea
KKLNYKIITIFILPPSKKELFRRLLKRDKKDKKIASERMKQFKFDIKHWKDYDYTVINDKIEKCYKQIISYIKKRKKTQTNLKFKKKIIKNHIN

SEQ ID NO: 131422 - protein, 195 aa, Unknown
  Bacterial polypetide isolated from the Sargasso Sea
KRIVLGFNIVLSSPSGAGKTTITKKLSQKYPNIKISISHTTRKPRQNEIDGVDYHFVSKEEFEKLIKQNSFYEHAKIFDNYYGTSKNSVNKLHKENYDVVFDIDWQGTKKLSEFKELNLIKIFILPPDKTELKNRLIKRNQDNEKIVEKRVKQFENDVQHWFDYDYVVINKDLESCFGQIEKIIKTHKKEKKSFI

SEQ ID NO: 131423 - protein, 122 aa, Unknown
  Bacterial polypetide isolated from the Sargasso Sea
VIQNLEKNQNVIFDIDWQGADQIKNKKLNYKLITFFILPPSKKVLFERLSNRDMRDKLIAEERMRQFDRDVLHWINYDYVVINDSLEQCFLKIETLINAEINNGSKDYDREFIKKHIENLIS

SEQ ID NO: 131424 - protein, 221 aa, Unknown
  Bacterial polypetide isolated from the Sargasso Sea
VIEGFLPPNPIEAEGPFAEFQGYQGPQIPNPIVEVSCITRRKDAIYHDCGSGLPDHLVPDNMGMEGYVYSLARQVSPSLINVHVPVSGRRFHAYLQFKDPRPGEVRDAMMAAIAFRRLKAVYAFDDDIDIFDDRQAMWALATRVQWHRDVMQLNGLTLAPLDPSAPASGNTITKAAIDATLPSAARPGQPKPVAPRNRVSDEALASAHAALDGIDISDWPS

SEQ ID NO: 131425 - protein, 110 aa, Unknown
  Bacterial polypetide isolated from the Sargasso Sea
FDIDWQGTEQIKEKKLKYKIITIFILPPSRKELFNRLLNRDQNDEKNAMLRMKQFDKDVVHWKNYDFVVINDDFNKCYEKIIKYINLKQNNTSESYDKNEISKHVLDLLK

SEQ ID NO: 131426 - protein, 185 aa, Unknown
  Bacterial polypetide isolated from the Sargasso Sea
ELSKLDNYEISISHTTREPRSNENKDEHYFFVNNREFKRLINNGEFLEYAKVFNNFYGTTRSPVIDKLNKGKNVLFDIDWQGADQIKNKKLDYRLITFFILPPSKEVLFDRLSNRHKNDKLIADERIKQFERDVLHWINYDYVVINDNLENCYTKIKNLIDAEMKNGSKDYDENFIRNHVEKLTI

SEQ ID NO: 131427 - protein, 294 aa, Unknown
  Bacterial polypetide isolated from the Sargasso Sea
RDPSGQSLSTVDPLTDESKIVRDVEETRGHVFAKGVYYLDSDWLAGMDIKLASDHYYLGNFGFSPVYDATDIVSRYRGQSHLTSQLFFERAAGRNYTNVAAVGFQSLNPATGSRSLPYLLPVASFSYRGQPGLSGDYWLLDANLRFLGREEGIQSRRLIVKGGWRIPYTSAFGAKYSFNLGLRADGYYVSDRPGSVQPGVRSDSYEGRLLPESYMDWRLPLARPLGRGLLIVEPIGQVVWRPNGGDSNKIPNEDSLAFEFDDLNLFSVDRFPGLDRYEGGGRLNYGLRSEINST

SEQ ID NO: 131428 - protein, 129 aa, Unknown
  Bacterial polypetide isolated from the Sargasso Sea
KTEEFLINGKDIIFDVDWQGGTKIRNSYLAPSVVSIFILPPSIKTLQERLLNRNKDDDKTVKLRMKEARSEISHWSEYDYILVNDNFEKVKKNILKIIEIEKIKRNRQNILPDFISKLNTEFDDFINNT

SEQ ID NO: 131429 - protein, 62 aa, Unknown
  Bacterial polypetide isolated from the Sargasso Sea
MTKSDKQFLIIISSPSGAGKTTICKRLLKMDKFLKVSISDTTRPPRSNEVEGKDYNFIDEKE

SEQ ID NO: 131430 - protein, 181 aa, Unknown
  Bacterial polypetide isolated from the Sargasso Sea
IKNYQISISHTTRKPRENEANGKDYFFINEKEFKDLINKEDFLEYAKVFNNFYGTTLKPVKDNLDNGKNVIFDIDWQGAQQIKNKGLKYKLITFFVLPPSKEVLFNRLSNRDMKDKVIVEERMKEFNKDILHWKNYDYVVINDKLDNCFKEISALIDSEINKTKNNYNLKSIENHVNSLID

SEQ ID NO: 131431 - protein, 181 aa, Unknown
  Bacterial polypetide isolated from the Sargasso Sea
MEQSANLLASVSFTTRKIRENEKEGLDYFFVCEETFTNMIHNDDFLEHATVFGNFYGTEKKSVLENLEKGVNVILEIDWQGAQQIKSRMPLCVMIFLIPPSRDVLLRRLKNRGTDSDQEIEYRFNQAVLDLEQSDKFDHVFVNDKLDKVVTEIALCIEGKANNTNQSNNVTESLKSFFETN

SEQ ID NO: 131432 - protein, 139 aa, Unknown
  Bacterial polypetide isolated from the Sargasso Sea
MGFNIVLSSPSGAGKTTITKKISQKYPNIKISISHTTRKPRPNEIDGVDYHFISKDKFKKLIKENSFYEHAKIFDNYYGTSKKSVNTLHEKNYDVIFDIDWQGTKQLSKFKELNLIKIFILPPDKKELKKRLIKRNQDN

SEQ ID NO: 131433 - protein, 204 aa, Unknown
  Bacterial polypetide isolated from the Sargasso Sea
MSNSGKLIIFAAPSGAGKSSLIKKIIEISENKLELSVSATTRLPREGETHGKDYFFITDEEFNDLKNNKAFIECANVHGNQYGTLKSFVDEKLEEGIHVILDIDVQGFTQIRNTLENTVSIFIIPPSFDELKKRLTLRGLDLDEVIKKRLENAKEELKQAESFDYIILNDNFDKAIEELSSIILDGNYDHNSQVNHNILKDLLD

SEQ ID NO: 131434 - protein, 205 aa, Unknown
  Bacterial polypetide isolated from the Sargasso Sea
MSNSGKLIIFAAPSGAGKSSFIKKIIKDSKNNLQLSVSATTRLPRGGEIHGKDYFFISEKEFNELKNNQAFLEFANVHGHQYGTIKSFVDERLGEGIHVILDIDVQGFTQIQRAITKDIVSIFIIPPSFDELKRRLILRGLDSNDAIDKRLENARKELEQAENFDYLVLNDDFNMAYNEITSIIFDKDYEYNVTNNKNILKDLLN

SEQ ID NO: 131435 - protein, 184 aa, Unknown
  Bacterial polypetide isolated from the Sargasso Sea
MKNQKKLIILTGPSGVGKGTVVKEILGKDKNIWLSISATTREPREGEKEGENYYFLNQEKFKEMIEQNLFLEWAQFAGNYYGTPLSSVNEKIKKGFNVLLEIEVEGAKQIKKKFPESLSIFLLPPDKSELERRIRNRGTEKEEAIKKRLLRASYEISVSNQFDFELTNHNVDETAKRIIKLIQT

SEQ ID NO: 131436 - protein, 206 aa, Unknown
  Bacterial polypetide isolated from the Sargasso Sea
MLNDLKKGELIVFAAPSGAGKSSLIKEIISNNENIELSVSATTRSPREGETHGKDYFFITDNEFNDLKKKDAFIESADVHGNQYGTLKSFVEEKLENNISVVLDIDVQGFIQISNSIKEVISIFIIPPSLDELKKRLILRGLDADDVINRRMENAIKELKHAKYFDYIVLNDDFNRAFNDITSIIFDKNYEYNETYNKNILKDLLD

SEQ ID NO: 131437 - protein, 103 aa, Unknown
  Bacterial polypetide isolated from the Sargasso Sea
MKNQKKLIILTGPSGVGKGTVVKEILGKEKNFWLSISATTREPRDGEKDGENYYFLNQEKFKEMIERNLFLEWAQFAGNYYGTPLSSVNEKMKKDSPYYLKLK

SEQ ID NO: 131438 - protein, 177 aa, Unknown
  Bacterial polypetide isolated from the Sargasso Sea
MIIIFSGPSGVGKSTIINELINHKKLYFSVSHTTREKRHNEENGVDYFFISEDEFNNLINKNYFIEYEKYGTDFYGTGKDQLSTSNPITVLDVEVNGATKLLNENKSFIGIFIDIENDELIERLKDRGHDNEFINKRMNLANEQRNKISEFDFIVKNVDINTTVKEILDIICNLEES

SEQ ID NO: 131439 - protein, 204 aa, Unknown
  Bacterial polypetide isolated from the Sargasso Sea
MSNSGKLIIFAAPSGAGKSSLIKKIIEISENKLELSVSATTRLPREGETHGKDYFFISDKEFNELKNNKAFIEFANVHGHKYGTLKSFVDEKLEEGIHVILDIDVQGFNQIKNAIEDTVSIFIIPPSFDELKKRLTLRGLDLDEVIKKRLENAKEELKQAEFFDYIVLNDKFDKAVEEISSIIFSENYEYNSQDNLNILKDLLD

SEQ ID NO: 131440 - protein, 214 aa, Unknown
  Bacterial polypetide isolated from the Sargasso Sea
METNDNKIKRKGLMFVLSSPSGAGKTSLSRKLLELDDELFLSISYTTRPPRPGEIDGEDYFFINNDDFALMQEKNEFLEYAKVFDYYYGTPKKPVEKILNKGKDILFDIDWQGTQQLMNNSKDDLVKVFVLPPSIEELERRLKKRKQDDDEIIQKRMSKASDEMSHYPEYDYILVNDEFDKTIQEILNILNAERLKNHRQIKTQKIVKNLRGSL

SEQ ID NO: 131441 - protein, 150 aa, Unknown
  Bacterial polypetide isolated from the Sargasso Sea
MIVLSSPSGAGKTTLVKLLSKRDNYFVSISHTTRKPRENEKNGRDYFFVSNNDFEKSIKNSEFLEYAKVFKNYYGSPKLPVIEKLKKGSNVVFDIDWQGTQQIKKHKMDFELLTIFVLPPSKKELLDRLSNRDMKDKLIVNERMKEFEKD

SEQ ID NO: 131442 - protein, 62 aa, Unknown
  Bacterial polypetide isolated from the Sargasso Sea
MIILSSPSGAGKTTLSNLLSKQDNFEISISHTTRKPRPNEVPNKDYFFVNSDEFNRLIKNEE

SEQ ID NO: 131443 - protein, 214 aa, Unknown
  Bacterial polypetide isolated from the Sargasso Sea
MEINDNKITRKGLMFVLSSPSGAGKTSLSRKLLELDKELFLSVSYTTRPPRPGEIDGEDYFFVNSNDFASMKEKNEFLEYAKVFDYYYGTPKKPVKKTLDKGRDILFDIDWQGTQQLMNNSKDDLVKVFVLPPSLDELERRLKERKQDQDEIIQKRMSKASDEMSHYAEYDYILVNDDFDKTVEEIISILNAERLKNHRQIKTQKIVKNLRGSL

SEQ ID NO: 131444 - protein, 111 aa, Unknown
  Bacterial polypetide isolated from the Sargasso Sea
LLFDIDWKGARKIRKKYNKDDIIDIFILPPSKSELKKRLIKRGRDNSKEINLRLSYAISEMKHYREYKYVLINEKVKKTVQDIKKIIEFNEFVEKNNLILKKSLKKIVDNQ

SEQ ID NO: 131445 - protein, 194 aa, Unknown
  Bacterial polypetide isolated from the Sargasso Sea
MLSDKQDQLFIITAPSGAGKTSLIKNILSHAESNGYKVHLTLSHTTRTPREGEIDGVDYCFIDEETFKENINNEIYVEYAMVHGNLYGTPKDSIDSFLEDDFIVIMEIDWQGALNILKAYPKAESVFISPPSIEDLRQRLLDRGLDSEDVINQRVSGAEKEILQKTNFKHEIINFSLDTATKKLINIIFRENHG

SEQ ID NO: 131446 - protein, 153 aa, Unknown
  Bacterial polypetide isolated from the Sargasso Sea
MIFEFKRLINNQEFLEYAKVFNNYYGTTRTPIIDNLNKGKNVLFDIDWQGADQIKNKKLDYKLITFFILPPSKETLFKRLSNRDMKDKLIVEERMQQFERDVLHWINYDYVVINDELNNCYMKIKNLIDAEINNGSKDYDPKYIRNHVEKLTT

SEQ ID NO: 131447 - protein, 131 aa, Unknown
  Bacterial polypetide isolated from the Sargasso Sea
KEKFTLLLKEKAFYEHAQIFGNFYGTSKASIKKITNNNHNVLFDIDWQGSEQLSKFKELNLVKVFILPPSKEELEKRLISRNQDDKEAINRRMLAYSKDISHKKDYDYVLINDNVENCFNELKKIVSKHLN

SEQ ID NO: 131448 - protein, 411 aa, Unknown
  Bacterial polypetide isolated from the Sargasso Sea
MPLEGIRVIDFSRVLAGPLCSALLSDLGAEVIKIEPPGGDDYRAIGPFSAGESGLFSAMNRNKQSVVIDLKRDEGRELAQALCAQADVVVENFRPGVAERLGIGYAQLAAHNPGLVYASVSGFGQTGPESHRPAYDIILQAMCGLMDATGSPDGAPTLVGDSVSDVVSGIFASWGVLAALLARERTGKGTHVDVAMFDATLSLTTALVARYATTGIAPQRVGNRHPSSAPFGAYRARDGYFVVAVLNNRLFERLAHAMNQPLLIDDARFANDAARCENEAALRACIESWSGVRSIAEVNALLSEAGIPVAPIQNISEALESEQARARGVLVEAPAGGGGVVRLPKQPVHFSAWPTTRTTRAPRLGEHTLAVLQQQLGVDTAYVATLVAAGVLRVDEATDLRSETNQETNNA

SEQ ID NO: 131449 - protein, 711 aa, Unknown
  Bacterial polypetide isolated from the Sargasso Sea
MTIFQLRAPRASRNACARRLPRVLKLTVPALAVSALAASAAAAETTTRAPRAPTDESAAPLPAIEVVASPLSTPLVVVTDPKTPRQPLPASDGADYLKTIPGFTSIRSGGTNGDLVLRGMFGSRLNILANGMSTLGACPGRMDAPTSYIAPESYDKVTVVKGPQTVLYGPGASAGTVMFERVTPRFDKPGMRFEGSLVGGSFGRNDQNVDVTAGTPDVYGRVTANHAHSQDYKDGNGNTVPSQWDKWNADAALGWTPDDHTRVELTAGTGDGYARYAGRGMDGAHFRRETFGLSFDKQYLGDVLDRIEARVYYNEADHVMDNYTLRQPDPTSSMPMRMASEVRRRTLGARAAATFRFADDFKLVTGVDAQSNRLDSRSAMGRQNYGDKPWDAQATMWNAGVFGELTWYANDVSRVIGGARIDYASARDKRATASGMMKSKPNPTFDDDRTRVLPSGFLRYERDLASLPVTWYAGVGHTERYPDYWELFSAKRGPAGSVNAFSAVQPEKTTQLDIGAQYKSERLDAWVSAYAGYVQDFILFNYAAGMMGPTTQATNVNAQIMGGEAGVSWKPVSPLRVETSLAYAWGRNVATGDPLPQMPPLEARIGLEYTRGAWSAGGLWRIVAPQHRYALNEGNVVGKDFGPSAGFGVLSLHAQYNVSKTVQISVGVDNVLNKAYTEHLNLAGNAGFGYPANSPVMEPGRTAWLRVSAKL

SEQ ID NO: 131450 - protein, 116 aa, Unknown
  Bacterial polypetide isolated from the Sargasso Sea
MKKLTVGKDIILDIDVQGYEQIKKSFVDTISIFILPPSLEELEQRLKDRGLDSENVIKKRLVNAKSELMYAENFDHILVNDNFEKTIEYLKLIIFDEKKSYDSRKSNNILKDLLDK

SEQ ID NO: 131451 - protein, 192 aa, Unknown
  Bacterial polypetide isolated from the Sargasso Sea
MNIHKSSNLYVISAPSGAGKTSLVRELCKRVAFMRPSISYTTRKIRKSEIDGKDYFFTSREHFESMISKDQFIEYQSVYGNLYGSTRENVLNQLDEGYDVILEIDYKGMMKIKSIYPEAITIYIVPPSIDSLRERLISRAQDDLETVEKRISSARFELCYAKFADYVIINGNFRSAFVDLVKIILVNKLTKL

SEQ ID NO: 131452 - protein, 116 aa, Unknown
  Bacterial polypetide isolated from the Sargasso Sea
MAEKKAGIIVILSSPSGAGKTTLVKKISLRNSYNISISHTTRKPRVNEKNGKDYFFINNKKFKNLIKKKKFLEHAKVFKNYYGSLKETVIENLEKGENVIFDIDWQGTKQIKNKKL

SEQ ID NO: 131453 - protein, 196 aa, Unknown
  Bacterial polypetide isolated from the Sargasso Sea
MLNDLKKGELIVFAAPSGAGKSSLIKEIISNNENIELSVSATTRSPREGETHGKDYFFITDNEFNDLKKKDAFIESADVHGHQYGTLKAFVEEKLENNISVVLDIDVQGFIQISNSIKEVISIFIIPPSLDELKKRLILRGLDADDVINRRMENAIKELKHAKYFDYIVLNDDFNRAFNDITSIIFDKNYEYNGNL

SEQ ID NO: 131454 - protein, 125 aa, Unknown
  Bacterial polypetide isolated from the Sargasso Sea
RNVVEKLEKSENVIFDIDWQGTQQIKNIKLKYKIITIFILPPSKEELFNRLLKRDKKDQRIATERMKQFKKDITHWKDYDYTVINDKIEKCYKQIIIFIANQSKNKKKLKYNKQPIKNHIKKLLN

SEQ ID NO: 131455 - protein, 127 aa, Unknown
  Bacterial polypetide isolated from the Sargasso Sea
YNHQYGTLRSYVEKKINANINLILDIDTQGFEQIKESNIVSTSIFILPPSIIELEKRLIERNLDSNDVIKLRLENAKKELDIAYEYDCMVLNDDFNRAFEALKSIIFFKKEIQDDTQNKKILRDLLS

SEQ ID NO: 131456 - protein, 172 aa, Unknown
  Bacterial polypetide isolated from the Sargasso Sea
MELNDNEIKRKGLMFVLSSPSGAGKTSLSRKLLELDKELFLSISYTTRPPRPGEIDGEDYFFVNNDDFAFMQEENEFLEYAKVFDYYYGTPKKPIKKILDKGRDVLFDIDWQGTQQLMNNSKDDLVKVFVLPPSIEELERRLKERKQDDDAIIQKRMSRASDEMSHYAEYDY

SEQ ID NO: 131457 - protein, 209 aa, Unknown
  Bacterial polypetide isolated from the Sargasso Sea
MNIEIKNKLIIISSPSGAGKTTLCKLLLKKLKNISLSISYTSRNKRLNEINGRDYHFVTQDKFKILKNKNFFIETAKNFNNFYGSPYKNVKIANKKNEHLLFDIDWKGARKIRKSYKKDDIIDFFILPPSKSELKKRLLKRGRDNLNEINLRLSYAINEMKHYNEYKYVLINENVNKTVERIKNIIEYHNLINNNKALLKNKLKKIINI

SEQ ID NO: 131458 - protein, 207 aa, Unknown
  Bacterial polypetide isolated from the Sargasso Sea
MKDITGKLIVISAPSGTGKTTVVKKLLQQSTNLEASVSFTTRKMRENEKEGLDYFFVSEKTFTNMIQNNDFLEHATVFGNFYGTEKKSVSENLKEGVNVILEIDWQGALQIKSSMPSCVMIFLIPPSKEVLLARLKNRGTDSDQEIAYRFNQAVLDLEQSNKFDHVLVNDQLDKVVTEITLCIEGKANKINQSKKVADSLKSFFETN

SEQ ID NO: 131459 - protein, 72 aa, Unknown
  Bacterial polypetide isolated from the Sargasso Sea
MSDNHEGIIVILSSPSGAGKTSLVKEISLKNNYFISISHTTRKPRSNEIDGKDYFFINQNEFKELISKRKFL

SEQ ID NO: 131460 - protein, 103 aa, Unknown
  Bacterial polypetide isolated from the Sargasso Sea
MNKSKKPLMLVLSSPSGAGKTTLSKKIQQSNSSFEISVSHTTRKPRPNEVDGVDYHFVSKEKFSLLLKERAFYEHAQIFGNFYGTSKTSIKKITNNNHNVLFD

SEQ ID NO: 131461 - protein, 145 aa, Unknown
  Bacterial polypetide isolated from the Sargasso Sea
MSGSRGGLTVITGPSGVGKGTLVSRLLERHPSVWLSVSATTRAPREGEQDGVNYFFHTRDQFDALVTQGGLLEWAEFARQLLRHPSRACRGAAGEWPGGAAGDRTGGGPSGAAQFPERVSDLSGAAKLLGTGTSHPWPRHGCRGC

SEQ ID NO: 131462 - protein, 81 aa, Unknown
  Bacterial polypetide isolated from the Sargasso Sea
MSSFKKGGIYILSSPSGAGKTTLVKKIAKNKNFLISVSHTTRPPRSKEKNGVDYYFTSKNNFKKLIKKKKFLEHAKVLIIT

SEQ ID NO: 131463 - protein, 210 aa, Unknown
  Bacterial polypetide isolated from the Sargasso Sea
MPIENDGVMIILSSPSGAGKTSLVGLLSKLDNFEVSISHTTREPRLNETPNKDYYFISETEFKRLIKNQEFLEYAKVFNNLYGTTRTQVINHLNDGKNVLFDIDWQGADQIKNKKLDYKLITFFILPPSKEILFERLSSRDMKDKLIVDERMKQFEHDVLHWINYDYVVINDDLESCYLKIKKLIEAEIKDSSKDYDKEFIRRHIEKLTS

SEQ ID NO: 131464 - protein, 204 aa, Unknown
  Bacterial polypetide isolated from the Sargasso Sea
MSTRRRGILLVVSAPSGGGKTTLVKSAMAAEPSLQLSVSCTTRKPRDGEVDGVDYRFVSQQNFRECLDEGEFVEWAEVFDHAYATPRTPLDVAIGEGRDILLDVDIQGARSLRKAYPKDAVGIFVMPPSAAVLETRLRARGTDDEAQIARRLARVREEVSAAREVGVYDYLIVNDDRDKAADDLLSIIRAERCRQGRLAPPDLE

SEQ ID NO: 131465 - protein, 198 aa, Unknown
  Bacterial polypetide isolated from the Sargasso Sea
MPSEKDGVMIILSSPSGAGKTTLVKMLSKLDNFEISISHTTRKPRPNEKPNEDYFFVDEKEFKRFIKNEEFLEYAKVFSNFYGTTRTPVIDKLNKSKNVLFDIDWQGADQIKNKNLDYKLISFFILPPSKEILFERLSNRDMKDKLIAEERMKQFGRDVLHWINYDYVVINDNIETCYFKIKSLINAEINNGSKDYDS

SEQ ID NO: 131466 - protein, 191 aa, Unknown
  Bacterial polypetide isolated from the Sargasso Sea
MKNLIVISAPSGAGKSTLCEEIRRINPNIKFSISCTTRPKRDYEIEGVNYYFLTNNEFMDKVNNNELVEYEQVHGYYYGTLSNTLKKAIDSEELILFDVDVKGAMSIKKKYPNNTLTIFILPPSLDDLKMRLMKRGTDSIEIINKRLERTNKEMKFKDKFDTFMINDDLSNAIKKLNEIISNQNQGVIHGS

SEQ ID NO: 131467 - protein, 111 aa, Unknown
  Bacterial polypetide isolated from the Sargasso Sea
MKNQKKLIILTGPSGVGKGTVVKEILCKEKNFWLSISATTRKPREGEKDGENYYFLNQEKFKEMIEQNLFLEWAQFAGNYYGTPLSSVNEKIKKGFTVLLEIEVEGARQIK

SEQ ID NO: 131468 - protein, 122 aa, Unknown
  Bacterial polypetide isolated from the Sargasso Sea
FYEHAKIFDNYYGTSKKSIKKITEKGCNVLFDIDWQGAEQLSKYKELNLLKIFILPPSVEELEKRLVSRNQDDKKAIKRRLSAYEKDVTHSKDYDHVIINDKVEMCFKQIKDIILNHLKKNN

SEQ ID NO: 131469 - protein, 174 aa, Unknown
  Bacterial polypetide isolated from the Sargasso Sea
MSNNLYIITAPSGAGKTTLIKRVLEHAQEYNKKVSLSISHTTRAPRDGEKHGIDYFFVSEEEFKENIVKGEYIEHATVHGNYYGTPKSQIDSDLNKDLKILLEIDWQGALQIMDHYPDAESIFISPPSVDELRIRLMERGLDSEDVINRRIAGAQIEMDKSSHFKHQITNISLD

SEQ ID NO: 131470 - protein, 121 aa, Unknown
  Bacterial polypetide isolated from the Sargasso Sea
MLSSKDGKMIILSSPSGAGKTTLVKKISKEKKYKISISHTTREPRQDEIDGVDYFFISINRFKKLIEEKAFLEHANVFKNLYGSTKEQVFKDLQKGYNVLFDIDWQGSQQIKKKTLDFHLI

SEQ ID NO: 131471 - protein, 209 aa, Unknown
  Bacterial polypetide isolated from the Sargasso Sea
MSNDKGQLIVISAPSGAGKTSIIKNVIKKLNNENKESKFSVSHTTRLPREGDIDGNDYFFVSNERFAELYEAGNFIETAEVHDYKYGTSKDFIDKNINQGINVFLEIDVQGFQELRSKNIEFRSVFILPPSIEELRARIQKRGLDSTGVIEKRMKNALKELGEAEEYDYLVINDIFEHAIEELLEMVINKGFKDQTRDKKLKILKDLLS

SEQ ID NO: 131472 - protein, 202 aa, Unknown
  Bacterial polypetide isolated from the Sargasso Sea
MVVLSSPSGAGKTTLASMLSKLDNFEVSISHTTRQPRPTEINEKDYYFVNETEFKRLIKNEEFLEYAKVFNNYYGTTRTPVINKLDKGKNVLFDIDWQGADQIKNKRLDYKLVTFFILPPSKEILFKRLSNRHMKDKLIVEERMKQFGRDVLHWINYDYVIINDNLENCYSKIFNLIEAEINNGSKDYDVEYVRDHVEKLVS

SEQ ID NO: 131473 - protein, 210 aa, Unknown
  Bacterial polypetide isolated from the Sargasso Sea
MPPMSEGIMIILSSPSGAGKTTLVKLLSERKGFITSVSHTTRTPRFNEVDGKDYHFVSNEKFEKMINNKEFLEFAKVFKNFYGTTKSNIFKELNSGNNVIFDIDWQGTNQIISQKLENRLLTFFILPPSREELFKRLTNRDMKDKLIAEERMKQFDNDVLHWKDYDYVIINNDLEACYNQISEYIDCEINKKKSSYDINLIKNHIKKLIF

SEQ ID NO: 131474 - protein, 175 aa, Unknown
  Bacterial polypetide isolated from the Sargasso Sea
FETSISYTTRKPRPKEKNGIDYFFVNSQKFKKQIKKKEFLEHAKVFKNYYGSLRSTVINKLKSGKNVIFDIDWQGTRQIKNKKLKYKIITIFILPPSKKELFNRLLKRDQKDKKTASERMKQFKTDVMHWKDYDYSVINDKVEKCYKQIMKFIKYKKKFKKHNKFIQDHIEKLIN

SEQ ID NO: 131475 - protein, 103 aa, Unknown
  Bacterial polypetide isolated from the Sargasso Sea
MFYSLLEKEIIKLSKLIPAGGLLIIISSPSGAGKTSISKKILENDSRVMFSISATTRAPRVGETEGIEYYFKSNDEFETMIESGEMLEYATVFGINMEHRENQ

SEQ ID NO: 131476 - protein, 211 aa, Unknown
  Bacterial polypetide isolated from the Sargasso Sea
MPEKKAGVIVILSSPSGAGKTTLVKKISTRKNYKISISHTTRKPRYNEKDGRDYFFVNSNEFRKLIRNNKFLEYAKVFKNYYGSLKETVIKKLLKGENVIFDIDWQGTEQIKRKKLKYKIITIFILPPSKKELFERLLKRDQKDKKIAKERMKQFKHDVKHWKNYDFTVINDKVEKCYKLIINFINKQKKLKSKLKYNKKSIKDHVDYLIN

SEQ ID NO: 131477 - protein, 141 aa, Unknown
  Bacterial polypetide isolated from the Sargasso Sea
MKNQKKLIILTGPSGVGKGTVVKEILGKEKNFWLSISATTREPREGEKDGENYYFLNQGKFKEMIEQNLFLEWAEFAGNFYGTPFSSVNEKIKKGFTVLLEIEVEGARQIKKKFPNSLSIFLLPPNKEELERRIRNRGTEK

SEQ ID NO: 131478 - protein, 149 aa, Unknown
  Bacterial polypetide isolated from the Sargasso Sea
MIILSSPSGAGKTTLVKKLSENDNFEISISHTTRQPRPNENQNEDYFFVNELEFKRLINNEEFLEYAKVFNNLYGTTRTPVIDKLNKGKNILFDIDWQGADQIKNKKLDYKLITFFILPPSKEVLFERLTKRHKDEKLIAEERMKQLKE

SEQ ID NO: 131479 - protein, 189 aa, Unknown
  Bacterial polypetide isolated from the Sargasso Sea
MAEKKAGIIVILSSPSGAGKTTLVKKISIRKKYKISISYTTRKPRINEKNGKDYYFINNSQFKKLIKEKKFLEYAKVFKNYYGSLRENIITKLEKGKNVIFDIDWQGTKQIKNNKLNYKIITIFILPPSKKELFERLLKREKKDKKIAAERMKQFKYDVMHWKDYDFTVINDKVEKCYKLISNFINSQK

SEQ ID NO: 131480 - protein, 132 aa, Unknown
  Bacterial polypetide isolated from the Sargasso Sea
NEFKKLIQKNEFYEYAEIFGNYYGTSKKSVLDLVKKKNDILFDIDWQGTKQLSKFKELNLLKIFILPPSKEELRKRLIQRNQDKPNVVSERLDAYERDSAHQKDYDFVVINDNLEDCFREVEKIVISKKGKI

SEQ ID NO: 131481 - protein, 184 aa, Unknown
  Bacterial polypetide isolated from the Sargasso Sea
MPLEKHGVMIILSSPSGAGKTTLVKMLSDLDNFEVSVSHTTRQPRPNETTNKDYFFIDENEFERLIKNEEFLEYAKVFNNLYGTSRTPVIDKLDKGKNVLFDIDWQGADQIKNKKLDYKLITFYILPPSKNELFERLSNRDMKDKLIAEERMKQFERDVLHWINYDYVVVNDNLDTCFAKIKNL

SEQ ID NO: 131482 - protein, 211 aa, Unknown
  Bacterial polypetide isolated from the Sargasso Sea
MAEKKAGIIVILSSPSGAGKTTLVKKISSRKNYQISISHTTRKPRSTEKNGRDYFFIKKKEFKKLIQEKKFLEYAKVFKNFYGSLKEKVINKLKNGENVIFDIDWQGTRQIRNKKLKYKIITIFILPPSKEELFKRLLKREKKDKKIANERMRQFKDDVMHWKDYDFAVINDNIEKCYKLIVNFINSRKNKKSKLLSNRKFIKNHIDYLLN

SEQ ID NO: 131483 - protein, 178 aa, Unknown
  Bacterial polypetide isolated from the Sargasso Sea
MKSLKKHKGVMLVLSSPSGAGKSSICRALLDLDRNLYLSISTTTRKKRPNEVSGIDYNFVTLDEFEYKLSQNNFIEHAKVFNNFYGTDKSIVENKINEGKDLLFDIDWQGAQQLREKMREDIVSVFILPPSKKELERRLKERGQDTDEVVKERMSEATAEITHWAEYDYVIINEDLNL

SEQ ID NO: 131484 - protein, 150 aa, Unknown
  Bacterial polypetide isolated from the Sargasso Sea
RKPRPNEVEGIDYFFLSNDQFKDKIKNNEFYEHAKIFGNYYGTSKKSVIDLLKNKNDVLFDIDWQGTQQLSKHSELKLTKIFILPPSKEELKKRLIQRNQDKPEIVLERLDSYENDLKHKNDYDYVVINDNLEICFKKVEEIILFEKSKV

SEQ ID NO: 131485 - protein, 208 aa, Unknown
  Bacterial polypetide isolated from the Sargasso Sea
MIVNASRGQLLIVSAPSGAGKTSLIKALMKQDQRVEVSVSHTTRPQRSGEVEGVNYFFISTETFHEMREAGAFFESAEVFGHFYGTSLTQLEARLSDGADVILEIDWQGAQQVRKLLPDSAWLFLLPPSLEALKSRLQARGQDDEDTIEIRMRAARDEMSHWDEADYLIINDQFDSALEALQALVRSLRLRTGQQQSALQNHIEDLLN

SEQ ID NO: 131486 - protein, 205 aa, Unknown
  Bacterial polypetide isolated from the Sargasso Sea
GVIVILSSPSGAGKTTLVKKLSKRNNFKISISHTTRNPRPSEKNGKDYFFIKDKEFKTLIKKRKFLEHAKVFKNFYGSLKETVIKKLEKGENVVFDIDWQGTQQIKAKKLKYKIITIFILPPSKKELFNRLLKRDQKDKKIASVRMRQFKKDVLHWKDYDFAVINDKIELCYNQILNFIKKQKNSLKKLKYDKKIVKNHIKNLIN

SEQ ID NO: 131487 - protein, 129 aa, Unknown
  Bacterial polypetide isolated from the Sargasso Sea
EKFQSLVKNDSFYEYCKIFGNFYGTSRSSVNEITDQGLNVLFDIDWQGSQQLRKFKELNLVTIFILPPSKAELEKRLIARNQDQKASIKKRLLAYTEDIKHSKEYDHVLVNDNVEDCYNEIKKIISKSN

SEQ ID NO: 131488 - protein, 203 aa, Unknown
  Bacterial polypetide isolated from the Sargasso Sea
LLIVISSPSGAGKTSVCRKILENNESIQISISATTRKPRKNEVDGIDYNFISRDDFQNKIKNNEFLEYAEVFDNFYGSLIKDVEKIAKSKKDVLFDIDWQGTQQLYQSKPDKLISIFILPPTRSEIENRLKQRELDTGDNDSIIDQRMSKFKDEISHWVEYDYVVINKNLDVCVQEVLNIINVERKKRHRQIALIDKVRELTS

SEQ ID NO: 131489 - protein, 173 aa, Unknown
  Bacterial polypetide isolated from the Sargasso Sea
SHTTRKPRSNEIDGSDYFFVKEEEFKELIYNKKFLEYAKVFNNYYGSSKDVVFKKLDNGENVIFDIDWQGTEQIIQKKLKYKIITIFILPPSREELFNRLLNRDLNDEKNAKERMKQFDKDVMHWKNYDLVVINDDFRKCYNNIIKYINLETKNITEIYNKTDIENHVLALLK

SEQ ID NO: 131490 - protein, 98 aa, Unknown
  Bacterial polypetide isolated from the Sargasso Sea
MNNISSKPLMLVLSSPSGAGKTTLSKKIQQSDSTFRISVSHTTRKARPNEVDGVDYHFVSEEEFKILLKKEAFYEHSIIFGNYYGTSKNSVDEIIKKK

SEQ ID NO: 131491 - protein, 211 aa, Unknown
  Bacterial polypetide isolated from the Sargasso Sea
MSSNNDGIIVILSSPSGAGKTTLVNLLLQKKDFTNSVSHTTRKPRSNEVNGKDYFFVSGEEFQNLIKNNEFLEYATVFNNLYGSTKKPVLENLERGNNVIFDIDWQGTKQIISQNIKYKIITFFVLPPSKEILYERLTNRDMKDKLIASERMKEFYKDIKHWIDYDYVVINDELNKCYEEISKIIDSSYNDSKKIKYDNNLIKEHIKKLTS

SEQ ID NO: 131492 - protein, 210 aa, Unknown
  Bacterial polypetide isolated from the Sargasso Sea
MSLGKDGIVVVLSSPSGAGKTTLVKKISQEQNFKISISYTTRKPRTNEVNGKDYYFISKEEFENLIKNSELLEHAKVFENYYGSSRDQVFEKLNRGENVIFDIDWQGTEQIKKQKLKYQLITFFILPPSKTELFNRLKNRDMKDKNIVDERMKQFNKDIEHWEDYDFVVINDDLEKCYDEIIKFIDSKIKNIDIDYNKNNILDHIKKLRA

SEQ ID NO: 131493 - protein, 212 aa, Unknown
  Bacterial polypetide isolated from the Sargasso Sea
MSDKKEGIVVILSSPSGAGKTTLVKKISKSNNFLISISHTTRKPRSNEVDGSDYFFISSEEFKNLISKDKFLEYAKVFNNYYGSSKDLVIEKLEKGHDVIFDIDWQGTEQIKNQKLRQKIITIFILPPSRDELYQRLMNREIKDKNIAEERMKQFDNDLLHWVNYDFVVINDDLDKCYKQIVDFINLKKLNNNSITFDKEAIEIHVKKLLLK

SEQ ID NO: 131494 - protein, 193 aa, Unknown
  Bacterial polypetide isolated from the Sargasso Sea
DSVMLVLSSPSGAGKTTISKKIQQKYPDFKISVSHTTRKPRPNEIDGVDYHFVDEKKFKELINENQFYEYAKIFDNYYGTSRKSIKVLQEKNYNILFDIDWQGTQQLAKFKDLDLLKIFILPPDKDELKNRLAQRNQDKEEVIEQRLQHYSKDIMHWADYDYVVTNDNLENCFKQIEKIIAEKSSSPITNLFK

SEQ ID NO: 131495 - protein, 153 aa, Unknown
  Bacterial polypetide isolated from the Sargasso Sea
MVILSSPSGAGKTTITKKIQQKYQSFKISVSHTTRKPRPNEVDGIDYHFVTNEEFNKLIKEGQFYEYAKIFDNYYGTNKKNVDELFKKNDVIFDIDWQGNKQLSKFKNLKLIKIYLIPPNKDELKKRLISRNQDSTEEVQRRFKAFDKDIKYW

SEQ ID NO: 131496 - protein, 93 aa, Unknown
  Bacterial polypetide isolated from the Sargasso Sea
MFSTKDGKMIILSSPSGAGKTTLVKKISKEKNYKISISHTTRAPRSNEIDGVDYFFITQENFQKLIKNDAFLEYANVFKNLYGSSKEQVFKSL

SEQ ID NO: 131497 - protein, 161 aa, Unknown
  Bacterial polypetide isolated from the Sargasso Sea
MIILSSPSGAGKTTLVKLLSEKNNFFISTSHTTREPRPNELNGKDYFFVKHDEFKRLIQNDEFLEYAKVFNNYYGTSRTPVIQNLENNKNVIFDIDWQGADQIKNKGLNYKLITFFILPPSKKVLFERLSNRDMKDKLIADERMKQFDRDVLHWINYDYVV

SEQ ID NO: 131498 - protein, 157 aa, Unknown
  Bacterial polypetide isolated from the Sargasso Sea
MIIISSPSGAGKTTIVKLLSEKFNYRISISHTTRKPRIDELDAKDYFFISKLEFNNLIKKKYFIEHAQVFENLYGTSKDQVISNLKKGKNILFDIDWQGAKQIRNKNFKYKLLTFFILPPSKKELLNRLYKRESNNSEIVMQRMKNFKEDAITLGRL

SEQ ID NO: 131499 - protein, 110 aa, Unknown
  Bacterial polypetide isolated from the Sargasso Sea
MFSSKDGKMIILSSPSGAGKTTLVKKISLQKKFKISISHTTREPRSNEIDGVDYFFTSQDKFHEMIKEKAFLEYANVFKNLYGSTKDQVFKNLDMGNNVLFDIDWQGAQQ

SEQ ID NO: 131500 - protein, 211 aa, Unknown
  Bacterial polypetide isolated from the Sargasso Sea
MKSLKKHKGVMLVLSSPSGAGKSSICRALLDLDKNLYLSISTTTRKKRPNEVSGIDYNFVTLDEFEYKLSQNNFIEHAKVFNNFYGTDKSFVENKINKGKDLLFDIDWQGAQQLREKMREDIVSVFILPPSKKELERRLKERGQDTDEVVKERMSEATSEITHWAEYDYVIINEDLNISVKTVLGILHSERMKRIRQIGLGEFVRTISLDN

SEQ ID NO: 131501 - protein, 95 aa, Unknown
  Bacterial polypetide isolated from the Sargasso Sea
MPGIKKGGMFILSSPSGAGKTTLVKKISRNRNYIVSVSHTTRPPRPSEKNGKDYFFISKNNFKKLIKKKEFLEHAKVFDNYYGSSKKIIIKKLMQ

SEQ ID NO: 131502 - protein, 211 aa, Unknown
  Bacterial polypetide isolated from the Sargasso Sea
MSDNHEGIIVILSSPSGAGKTSLVKEISSKNNFSISISHTTRKPRSNEKDGIDYYFVTLEEFKKIISEQKFLEYAKVFKNYYGSSKDIVIEKLDNGENIIFDIDWQGTEQIKQKNLKYKIITIFILPPSREELFKRLLNRDSNDEKNAKERMKQFDKDVLHWKNYDLVVVNDNLEECYKKIIKYINLKKDNNILENYDKNLISKHVSSLLN

SEQ ID NO: 131503 - protein, 171 aa, Unknown
  Bacterial polypetide isolated from the Sargasso Sea
TTRKPRNNEIDGIDYYFVEEEKFKELISKNKFLEYAEVFNNYYGSSKDVVIQKLEKGQNVIFDIDWQGTEQIKQKKLNYKIITIFILPPSRKELFNRLLNRDLNDEKNAIERMKQFDKDVLHWKNYDLVVINDNFDKCYNKIIQYINLVLENKSENFSKSEIENHVLSLLK

SEQ ID NO: 131504 - protein, 202 aa, Unknown
  Bacterial polypetide isolated from the Sargasso Sea
MVILSSPSGAGKTTLVNLLSKQKNFEISISHTTRQPRAGEVPDKDYFFVNDAEFKRLINNQEFLEYAKVFNNYYGTTRTPIIDNLNKGKNVLFDIDWQGADQIKNKKLDYKLITFFILPPSKEILFERLSNRDMKDKLIVEERMQQFERDVLHWINYDYVVINDNLDKCFLKIKNLINAEISNGSKDYDSDYVRNHIEKLTS

SEQ ID NO: 131505 - protein, 59 aa, Unknown
  Bacterial polypetide isolated from the Sargasso Sea
MSYDSNNIMVILSSPSGAGKTTITKKIQQKYQSFKISVSHTTRKPRPNEVDGVDYHFVS

SEQ ID NO: 131506 - protein, 198 aa, Unknown
  Bacterial polypetide isolated from the Sargasso Sea
SPSGAGKTTLVKKISLRKNFKISVSHTTRKPRLNEKNGRDYFFIDNKKFQFLIKNRKFLEHAKVFKNYYGSLKDTVIEKLKKGENVIFDIDWQGTRQIKSKKLKYKIITIFILPPSKKELFNRLLKRDQKDKKIASERMKQFKADVMHWKDYDYTVINDKVEFCYKEIINFIEKRKKSSFNLGYNKKKIKNHIKNLIN

SEQ ID NO: 131507 - protein, 177 aa, Unknown
  Bacterial polypetide isolated from the Sargasso Sea
SVSATTRDPRPGESDGVEYFFKSRAEFEKMVDQGDMLEHAEVFGNFYGTPKGPVEAAMGEGRDTLFDVDWQGGQHIRNSSLGKDVVSIFILPPSIAALEERLRSRAQDSDAVINGRMEKSLAEISHWSEYDYVLVNDDLDRAEEQLRTILTAERSRRDRQTGLNEFVRKLNREFETR

SEQ ID NO: 131508 - protein, 210 aa, Unknown
  Bacterial polypetide isolated from the Sargasso Sea
MPSKKEGVMIILSSPSGAGKTTLVKMLSKLDNFDISISHTTRQPRHNEKFNEDYFFIHEAEFKRLINNQEFLEYAKVFNNLYGTTRTPVINKLNKGKNVLFDIDWQGADQIKNKKLDYKLITFFILPPSKKVLFERLSNRDMKDKLLVEERMKQFERDVLHWINYDYVIINEDLDSCFSKIKKLIFAEIDNGSKDYDLEYIRKHVESLTS

SEQ ID NO: 131509 - protein, 200 aa, Unknown
  Bacterial polypetide isolated from the Sargasso Sea
MIILSSPSGAGKTTLVKMLSEKDNFEISISHTTRKPRQNENQDQDYFFVNETEFKRLIKNEEFLEYAKVFNNFYGTTRTPVIDKLNKGKNVLFDIDWQGADQIKNKNLDYKLITFFILPPTKEVLFERLSKRHVNDKLIAKERMDQFGRDVLHWINYDYVVINNDLNKCFSKITNLIDAEMNDGSKDYDLEYIRNHVGKL

SEQ ID NO: 131510 - protein, 199 aa, Unknown
  Bacterial polypetide isolated from the Sargasso Sea
MTASKSGTIFVLSSPSGAGKTTLTKKLEKNNTNFVISISHTTRKARPGEVNGKDYYFVNEQEFNSLVENNNFYEFAKIFGNYYGTLKKPVIKHLSEGKDVLFDIDWQGTQQLKKISNLSLVTFFIVPPNIEVLKKRLLNRHKGQESLIKPRMMKFHEELSHWKEYDYVVVNDDLEICYTKILKIITNTKNGINEKQDLS

SEQ ID NO: 131511 - protein, 140 aa, Unknown
  Bacterial polypetide isolated from the Sargasso Sea
KNGIDYHFITINKFEEFILNEKFVEWENVHGNYYGTAKDALEAAIVSEKTLLLEMDVKGSMSIKKLYPHNTFSIFILPPSLEHLRARLKKRGTDSDETIEIRLKRYQQEIEFQDRFDAVMINEDLESAKLELINIVNELK

SEQ ID NO: 131512 - protein, 209 aa, Unknown
  Bacterial polypetide isolated from the Sargasso Sea
MVAPSGTGKTTLASRLIDGSGPYVFSVSATTRKPRDGERDGIDYHFLQPKEFDDRIDEGWFAEWALVHDHMYGTPRSELDAASARGEHVVMDIDVQGASQIRASVAQAKLIFVLPPSVDIMLARLIKRGTEDPESIARRLESAVVELQAVPDFDYVVVNDDLDECVSEIRNIVEGQEPTVSHEQDAEQMRREIVKLLEGYYNMYQKDSE

SEQ ID NO: 131513 - protein, 202 aa, Unknown
  Bacterial polypetide isolated from the Sargasso Sea
MIILSSPSGAGKTTLVKMLSKLDNFETSISHTTRKPRPNEKPNKDYFFVDENEFKRFIKNEEFLEYAKVFSNFYGTTRTPVINKLNKGKNVLFDIDWQGADQIKNKNLDYKLISFFILPPSKETLFERLSNRDMRDKLIAEERMKQFGRDVLHWINYDYVVINDRIETCYSKIKNLIYAEINNGSKDYDLEYIRNHIEKLTS

SEQ ID NO: 131514 - protein, 170 aa, Unknown
  Bacterial polypetide isolated from the Sargasso Sea
MPSETDGVMIILSSPSGAGKTTLVKKLSDYDNFEVSISHTTRKPRPNENQNKDYFFVNELEFERLIKNQEFLEYAKVFNNLYGTTRTPVIDKLNKGKNVLFDIDWQGADQIKNKKLDYKLITFFILPPSKEILFDRLSSRHINDKSMAEERMSQFERDVLHWINTIMLLL

SEQ ID NO: 131515 - protein, 135 aa, Unknown
  Bacterial polypetide isolated from the Sargasso Sea
FLESANVHGYHYATLKSFVDEKTSSGISVILDIDVQGFKQVKQTSQDNVSIFILPPSLEELEQRLFNRGSESAESIKKRLKNALIELRSAEIFDYVVVNDEFDNTIKILSSILFDENIEYNDENAKNILKELLDN

SEQ ID NO: 131516 - protein, 93 aa, Unknown
  Bacterial polypetide isolated from the Sargasso Sea
MSSKEDGAMIVLSSPSGAGKTTLTKLLSKNNDYLISVSHTTRKPRINEIDAKDYFFVNENQFKSLIKKDEFLEHAEVFNHLYGTSKTFVINSL

SEQ ID NO: 131517 - protein, 196 aa, Unknown
  Bacterial polypetide isolated from the Sargasso Sea
MSHGSSNIMVVLSSPSGAGKTTLTKKIQQKYSSFRISVSHTTRKPRSNEVDGVDYNFVSEKKFQELITKGEFYEYAKIFGNYYGTSKKTVNELIKKNDIIFDIDWQGTKQLSKFKELNLIKIYLLPPNKDELKERLIKRNQDSTQEVQKRFKAFDEDIKHWADYDYVIINKDLENCYQQIEKIISSNKNKQSISFK

SEQ ID NO: 131518 - protein, 178 aa, Unknown
  Bacterial polypetide isolated from the Sargasso Sea
MPTHTHGMMIIISSPSGAGKTTIVKLLKKKFNYRISISYTTRKPRKVETNRKDYFFINKSRFLKLIKENHFIEYANVFDNLYGTSKEQITNMLEKGENVLFDIDWQGAKQIRKKKLKFKLISFFILPPSKDELLKRLKKREGNNDNIVKQRMKNFKKDVLHWDEYDFVVINKDKNKCF

SEQ ID NO: 131519 - protein, 210 aa, Unknown
  Bacterial polypetide isolated from the Sargasso Sea
MSLKKDGIMIILSSPSGAGKTTLTNLLSRKFRFHISVSHTTRKPRPREIHSKHYFFVKKKEFNGLILNNKFLEYAKVFNNFYGTSKDYVFKMLKNGKDVLFDIDWQGTKKIKNKKLKFKILTIFVLPPSRGVLFKRLSNRDMRDKLIAEERMKQFNKDILHWKNYDYVVINDKLDRCIQEIKKIIFSKKKSKKYPQDKKKIKQHVKYLLS

SEQ ID NO: 131520 - protein, 167 aa, Unknown
  Bacterial polypetide isolated from the Sargasso Sea
MSSKKDGIIVILSSPSGAGKTTLVKKISKENKFKISISHTTRKPRTNEVNGKDYFFTSEEDFKNLIKNEDFLEYAKVFGNYYGSSRKQVLENLKKGENVIFDIDWQGTEQIKKQKLNYKLITFFILPPSKSELFSRLKNRDMKDKNIVEERMKQFNEDIKQWEGYDF

SEQ ID NO: 131521 - protein, 211 aa, Unknown
  Bacterial polypetide isolated from the Sargasso Sea
MAEKKAGIIVILSSPSGAGKTTLVKKISSRKNFKISISHTTRKPRANEKHGRDYFFISNQKFRNLIKNKKFLEHAKVFKNYYGSHKESVIKKLINGENVIFDIDWQGTRQIKSKKLSYKIITIFILPPSKKELFKRLLKRDKKDKKIARVRMKQFKSDIMHWKDYDYAVINDQIEKCYRLIIKFIRESIRHKNKPIYNKILIKKHVRKLIS

SEQ ID NO: 131522 - protein, 177 aa, Unknown
  Bacterial polypetide isolated from the Sargasso Sea
MIILSSPSGAGKTTLVKELSKLDNYEISISHTTRGPRSNESRDEHYFFVNDEEFKRLINNGEFLEYAKVFNNFYGTTRTPVIDKLNKGKNVLFDIDWQGADQIKNKKLDYKLITFFILPPSKEVLFERLSIRHKSDKFIAEERINQFERDVLHWINYDYVVINDNLESCYLRIKNLI

SEQ ID NO: 131523 - protein, 199 aa, Unknown
  Bacterial polypetide isolated from the Sargasso Sea
MIIFSAPSGAGKSSLIKEIIDLSPNKIELSISATTRDARDGELNGKDYFFISDEEFNDLKDRDAFIENANVHGFQYGTLKSFIDEKTESGINIILDIDVQGFNQIKALNVDNLSIFIIPPSFDELKNRLLLRGSDSDDAIEHRLVNAKKELKSAELFDYIVLNDNFNETLKELSSIIFNINHEYNKQDNLNILRDLLDK

SEQ ID NO: 131524 - protein, 198 aa, Unknown
  Bacterial polypetide isolated from the Sargasso Sea
MIIFSAPSGAGKSSLIKEVISRSSGNIQLSISATTRSPRNGEEHGRDYFFISDEEFDELKKQNSFVEHANVYGYQYGTLKSFVDEKIKNDINIILDIDVQGFDQIRNSIENSISIFIIPPSILELEKRLFSRGLDSDEVIKKRLKNVKTELKYAELYDHIVLNDQFKNAINELTSIIYDKNFIYNKETNINLLKDLLD

SEQ ID NO: 131525 - protein, 178 aa, Unknown
  Bacterial polypetide isolated from the Sargasso Sea
MVILSSPSGAGKTTLVNLLSKQENFKISISHTTRKPRDGEIQDKDYYFVNDKEFKRLINNQEFLEYAKVFKNYYGTTRTPVIDNLNKGKNVLFDIDWQGADQIRNKKLDYRLITFFILPPSKKILFDRLSNRDMKDKLIAEERMQQFERDVLHWINYDYVVINDDLEKCYLKIKNLIN

SEQ ID NO: 131526 - protein, 201 aa, Unknown
  Bacterial polypetide isolated from the Sargasso Sea
MRCRTVKNIDETIKRRGLLLVLTAPSGCGKSTITRKIMGDDPSIVVSVSATTRDPRPGETDGEDYFFMKTEEFRQKVNAGEFLEWAEVFGRHYGTPKSAVEAALVSGKDVFFDIDWQGAEQLRKNAPDDLVWICILPPTIESLENRLRARGQDSDEVIARRMLEAESEASHWADADYVVVNDDLDKATRQVRAILDAERIK

SEQ ID NO: 131527 - protein, 115 aa, Unknown
  Bacterial polypetide isolated from the Sargasso Sea
MVILSSPSGAGKTTISKKLQQKYQNFKISVSHTTRTPRPNEVDGIDYFFVSHDEFKKLIEKNEFYEYAEIFGNYYGTSKKSVLDLVKKKNDVLFDIDWQGTKQLSKFKELNLLKI

SEQ ID NO: 131528 - protein, 131 aa, Unknown
  Bacterial polypetide isolated from the Sargasso Sea
EEFKILLKKDAFYEHSVIFGNYYGTSKASVDDIIKKKFNVLFDIDWKGAKQLSAFKELNLLKIFILPPSKEELEKRLIARNQDGKESIKKRVLAYSQDIKHANEYDHVITNDNVENCFNKILRIIKKHLNN

SEQ ID NO: 131529 - protein, 210 aa, Unknown
  Bacterial polypetide isolated from the Sargasso Sea
MSDNREGIIVILSSPSGAGKTSLVKEISLKNNYSISISHTTRKPRANENDGIDYFFVNQEKFKKLISNKKFLEYAKVFNNYYGSSEDDVFEKLDKGQNVIFDIDWQGTEQIKEKKLKYKIITIFILPPSRKELFNRLLNRDLNDEKNAKERMKQFDKDVVHWKNYDLVVINDDFNKCYEKIMKYINSSKKNILINYDKNEISKHITELLK

SEQ ID NO: 131530 - protein, 198 aa, Unknown
  Bacterial polypetide isolated from the Sargasso Sea
MNHDNQNIMVVLSSPSGAGKTTITKKIQQKFSSFKISVSHTTRKPRSNEVNGVDYNFVSHEIFEKLIKEKKFYEYAKIFDNYYGTLKDTVDKLIKNNDVIFDIDWQGTKQLSKFKNLNLIKIFISIIDKKELRMRLVKRNQDSTTEVEKRFKSYDEDIKHWTDYDYIVINKDLENCFKQIEKIILSFKRKVNFPRTIE

SEQ ID NO: 131531 - protein, 201 aa, Unknown
  Bacterial polypetide isolated from the Sargasso Sea
MSDSGSTGLLLVLSGPSGVGKTTIAHRVQERFDGIFSVSVTTRPRSSDEVDGEDYTFVDPDTFQTMLDAGEFLESAEVFGKHAYGTPRAPVRRRLDEGRLVILDIDVQGARQVRDSMPESFMLFILPPSEEELQRRLESRGRDDDEAIQRRFAEARHEIELATTSDLYDAFVVNADLEAAIHETCELIAARMQHGPRESTA

SEQ ID NO: 131532 - protein, 110 aa, Unknown
  Bacterial polypetide isolated from the Sargasso Sea
MIILSSPSGAGKTTLVKMLSGIDNFEVSISHTTRQPRPEETSNKDYFFVNEHEFKRLINNQEFLEYAKVFGNFYGTTRSPVIDKLSKGRNVLFDIDWQGADQIKNKKLDY

SEQ ID NO: 131533 - protein, 135 aa, Unknown
  Bacterial polypetide isolated from the Sargasso Sea
MPSLNKGSMIILSSPSGAGKTTLVKKISKNKNFSVSISHTTRLPRPNEKNGKDYYFISKNYFKRLIKKGEFLEHAKVFDNYYGSSKGLVTEKIKKGKNIVFDIDWQGTRQIRNKNLIYRLLTIFILPPSKKELYT

SEQ ID NO: 131534 - protein, 189 aa, Unknown
  Bacterial polypetide isolated from the Sargasso Sea
MKSTETQGFMMILSSPSGAGKTTLTKLLAKNFSNFTISVSHTTRKPRSNETDGKDYFFVNEDQFQKLIKEGFFLEFAKIFNNHYGTAKKSVLEKINKGLNVIFDIDWQGTEQVKKKIKNIKLITVFILPPDIQTLKQRLVNRDQSGKQVAEQRMKKFKEELSHWSDYDYVVVNKDLNDCYNEILEIIKG

SEQ ID NO: 131535 - protein, 59 aa, Unknown
  Bacterial polypetide isolated from the Sargasso Sea
MINNNTVSRNSFMLVISSPSGAGKTALANKLLNVDNGFALSVSVTTRPPRPGEIDGKDY

SEQ ID NO: 131536 - protein, 198 aa, Unknown
  Bacterial polypetide isolated from the Sargasso Sea
MIILSSPSGAGKTTLVSLLSKLDNFEISISHTTRKPRTNEIQDQDYYFVTEEKFKRLIKNEEFLEYAKVFNNLYGTTRTPVIDKLNKGKNVLFDIDWQGADQIKNKKLDYKLITFFILPPSKEVLFERLKNRHMNEKLLAEERMKQFSHDVLHWINYDYVVINENLENCYSKILNLIKAEMEGGSKDYDSEFIRSHVK

SEQ ID NO: 131537 - protein, 145 aa, Unknown
  Bacterial polypetide isolated from the Sargasso Sea
MSKSIKPLMLVLSSPSGAGKTTLSKKIQQSDNSFEISVSHTTRNPRPNEVDGVDYHFVTKENFLKLLDQGLFYEHAKIFGNYYGTSKSSIKKITDNNHNVLFDIDWQGSQQLSKFKELNLVKVFILPPSREELEKRLIARNQDDQ

SEQ ID NO: 131538 - protein, 94 aa, Unknown
  Bacterial polypetide isolated from the Sargasso Sea
MNNISSKPLMLVLSSPSGAGKTTLSKKIQQSDCTFRISVSHTTRKARPNEVDGVDYHFVSEEEFKILLKKESFYEHSIIFGNYYGTSKNSVDEI

SEQ ID NO: 131539 - protein, 209 aa, Unknown
  Bacterial polypetide isolated from the Sargasso Sea
MSSSKDGAMIVLSSPSGAGKTTLVKKISKLSNFVTSVSHTTRKPRINEKNGEDYYFISKTKFKNLIQKREFLEHAMVFKNFYGTSKKFVFTNLKKGKNVLFDIDWQGSDKIKKKKLNFKLLTFFILPPSKKILKERLLNRQKKDNKLVAERMKQFEKDVKRWKNYEFIVINDNLSKCYNEIVSIIKTKLSRKKILINKKKIEKHIKKLI

SEQ ID NO: 131540 - protein, 210 aa, Unknown
  Bacterial polypetide isolated from the Sargasso Sea
MPTTNDGVMIILSSPSGAGKTTLVSLLSKLDNYVVSVSHTTRQPRQNEIQNKDYYFVEKNEFKRLINNQEFLEYAKVFDNFYGTTRTPVIDNLNKGKNVLFDIDWQGADQIKNKKLDYKLITFFILPPSKEVLFERLSNRDMKDKLIVEERMKQFGRDVLHWINYDYVVINDDLKSCYSKIINLINAEIKNDSKDYDLEFVRSHVEKLTT

SEQ ID NO: 131541 - protein, 202 aa, Unknown
  Bacterial polypetide isolated from the Sargasso Sea
MPVTANASLFVIAAPSGAGKTTLVKKLIEKNPSLTFSISYTTRKQRSTEEHGRDYFFVDKDTFNALKEQGELLESAIVFDNHYGTSRSQVEEHMAGGNHVLLEIDWQGAEQVRTSMPDCVTIFILPPSRPELERRLRGRKTDSDEVIERRLRDALGDMSHWHEFDHVIVNDDLDQAVEDLQAIIEGEGRNSRVSNSVLEERV

SEQ ID NO: 131542 - protein, 208 aa, Unknown
  Bacterial polypetide isolated from the Sargasso Sea
IKEKPMMFVLSSPSGAGKTTLTKKLAKDNSNFTISISHTTRKPRPMETNGKDYYFVSEKEFNTLEKNNDFFEHAKIFDNFYGTLKKPVIDFLKSGKDVLFDIDWQGTQQLKNIKNLSLVTFFILPPDIKTLKERLLNRHEGQEELIKKRMEKFSEEVSHWNEYDYVVVNDDLDICNKKILEIITSEKKGLRQNQNVEEIKMKISELTG

SEQ ID NO: 131543 - protein, 180 aa, Unknown
  Bacterial polypetide isolated from the Sargasso Sea
KKFKISISFTTRKPRTNETNGKDYFFVEESEFKRLIKDQDLLEHAKVFENYYGSSKSQVLNHLKKGNSVIFDIDWQGAEQIKNQKLNYKLITFFILPPSKEELFKRLKNRDMKDKNIVDERMKQFNEDINHWKNYDFVVINDNLEKCYKEIINLIDKKSNNLKIDRDSLKIEDHIKKLRN

SEQ ID NO: 131544 - protein, 210 aa, Unknown
  Bacterial polypetide isolated from the Sargasso Sea
MPINNDGVMIILSSPSGAGKTTLVKLLSKLENFEVSISHTTRQPRDNEIPNKDYYFVNEDEFQRLIKNQEFLEYAKVFSNLYGTTRTPVIDNLNKGKNVLFDIDWQGADQIKNKKLDYKLLSFFILPPSRDVLFERLTNRDMKDKVIVEERMKQFSRDVLHWINYDYVVINDELNNCYNKIYNLIKAELNEGSKDYDLEYIRNHIEKLTS

SEQ ID NO: 131545 - protein, 167 aa, Unknown
  Bacterial polypetide isolated from the Sargasso Sea
KYNSFRISVSHTTRKPRTNEVDGVDYNFVSEKKFQKLINNGEFYEYAKIFGNYYGTSKKTVNELIKKNDIIFDIDWQGTKQLSKFKELNLIKIYLLPPNKNELKERLIKRNQDSPQEVQKRFKAFDDDIKHWADYDYVIINKDLENCYQQIEKIISTNKNKQLISFK

SEQ ID NO: 131546 - protein, 163 aa, Unknown
  Bacterial polypetide isolated from the Sargasso Sea
MSLTGDGLIIILSSPSGAGKTTLVKKLSKLNNFITSVSHTTRPPRTNETNGKDYFFISKKKFKSLIKKKNFLEYAKVFDNYYGSSKNFVLKNLKKGKNVLFDIDWQGTEKIKKQKFNFKLITFFILPPSRKILFKRLSNRDMKDKLIASQRMKQLIKMFAWKK

SEQ ID NO: 131547 - protein, 187 aa, Unknown
  Bacterial polypetide isolated from the Sargasso Sea
MSDNHEGIIVILSSPSGAGKTSLVKEISLKNDYSISISHTTRKPRLKEINGKDYFFVNQEEFKKLIFTNKFLEYAKVFNNYYGSSEEVVFEKLNKGQNVIFDIDWQGTEKIKKKKLKYKIITIFILPPSREELFNRLLNRDQNDEKNAMERMRQFDRDVVHWENYDLVVINDDFNKCYEKIIKFIKL

SEQ ID NO: 131548 - protein, 118 aa, Unknown
  Bacterial polypetide isolated from the Sargasso Sea
FVDEKTCSGVSVIFDIDVQGFKQVKQTSQDNVSIFILPPSLEELEKRLFNRGSESSESIKKRLENALIELRSAEIFDYVVVNDEFDNTIKILSSILFDENIEYNNENAKNILKELLDN

SEQ ID NO: 131549 - protein, 207 aa, Unknown
  Bacterial polypetide isolated from the Sargasso Sea
MSIKKDGTMVILSSPSGAGKTTLVKLLSEQKKFQISISHTTRKPRINEIDGKDYYFVNHEYFQQSIKNLEFLEYAEVFKNFYGTKKDPVIKFLKDGKNVIFDIDWQGAQQIKSRKLKYKLITFFVLPPSKEILFQRLSNRDMKDKLIVDERMKEFEKDILHWKDYDYVVVNNKLDECYDEISTLIECEIMNKKIIYDKKKIESHMKL

SEQ ID NO: 131550 - protein, 149 aa, Unknown
  Bacterial polypetide isolated from the Sargasso Sea
MHDNKNIMVVLSSPSGAGKTTITKKIQQKFSSFKISVSHTTRKPRPNEVNGVDYHFVNSEKFKLLINENKFYEYAKIFDNYYGTSKEIVDNLIKTNDIIFDIDWQGNQQLSKYKNLSLIKIFITTKNKEEVKSRLMKRNQDSKEEVKKR

SEQ ID NO: 131551 - protein, 207 aa, Unknown
  Bacterial polypetide isolated from the Sargasso Sea
NKDGIIIVLSSPSGAGKTTLVKKIAKEKKFKISISYTTRKPRTSESNGRDYFFIEENEFKSLIQNQEFLEYAKVFENYYGSSKSQVLEHLKNGDSVIFDIDWQGTEQIKKQKLNYNLITFFILPPSKEELFKRLKNRDMKDKNIVEERMKQFNEDINHWKNYDFVVINDNLEKCYNEIVNLINKKVINSEINYDLSKINEHIKKLRD

SEQ ID NO: 131552 - protein, 210 aa, Unknown
  Bacterial polypetide isolated from the Sargasso Sea
MSDNNEGIIVILSSPSGAGKTSLVKEISLKNNYSISISHTTREPRANEIDGIDYFFINQEEFKKLIHKKKFLEHAKVFNNYYGSSKDVVFEKLETGQNIIFDIDWQGTEQIKEKKLQYKIITIFILPPSRKELFKRLLNRDIDDEKNAMERMKQFDKDVVHWKNYDLVVINDDFNMCYEKIIKYINSRKNNIIENYDKKEISKHVLELLK

SEQ ID NO: 131553 - protein, 209 aa, Unknown
  Bacterial polypetide isolated from the Sargasso Sea
MSSDKGQLIVISAPSGAGKTSIIKNVIKKLNDENRKSKFSVSHTTRLPREGDIDGSDYFFVSNEIFDELYEAGNFIETAEVHDYKYGTSKDFIDENINQGINVFLEIDVQGFQKLRNRNIEFRSMFILPPSIEELRKRIQKRGLDSEDVIEKRMKNALKELGEAEEYDYLVINDVFEQAIEELLEIVINKDFKDQTHDKKLKILQDLLS

SEQ ID NO: 131554 - protein, 206 aa, Unknown
  Bacterial polypetide isolated from the Sargasso Sea
MKDKTGKLVVISAPSGTGKTTVVKKLLEKIPNIVASVSFTTRPMRENEREGIDYFFVNKRKFEAMVDNDQFIEHATVFGNYYGTQKENLFSNLKKGKNVILEIDWQGAQQVKEKMPSCIMIFLIPPSKEVLLSRLKNRGTDSEGEIENRFNQAVSDLNESNKFDHVLVNDQIEVAVENISHCIDGNLNQLKKSQLVDKALESFYET

SEQ ID NO: 131555 - protein, 207 aa, Unknown
  Bacterial polypetide isolated from the Sargasso Sea
MKDKTGKLIVISAPSGTGKTTVVKKLLEKIPNIIASVSFTTRPMRENEREGVDYFFVDKRKFETMVDDNQFIEHATVFGNYYGTQKESLTSNLKKGKDVILEIDWQGAQQVKEKMPSCIMIFLIPPSKEVLLSRLKNRGTDSEGEIENRFNQAVSDLNESNKFDHVLVNDQIEVAVENIAHCIEGNFNQLNQSELVDNALKSFYETN

SEQ ID NO: 131556 - protein, 210 aa, Unknown
  Bacterial polypetide isolated from the Sargasso Sea
MTDNHEGIIVILSSPSGAGKTSLVKEISSKNNYSISISHTTRKPRSNEIDGKDYFFVDQDEFKMLISQGKFLEYANVFNNYYGSSADVVFDKLNNGQNIIFDIDWQGTEQIKEKKLNYKIITIFILPPSRKELFNRLLNRDKNDKKNATERMKQFDKDVIHWKNYDLVVINDDFNKCYDKIIKYINSKKNNNSINYDKNEISEHVLDLLK

SEQ ID NO: 131557 - protein, 209 aa, Unknown
  Bacterial polypetide isolated from the Sargasso Sea
MSNEKGQLIVISAPSGAGKTSIIKNVIRKLNDENKKSTFSISHTTRLPRDGDIDGSDYFFVSNEIFDELYEAGNFIETAEVHDYKYGTSKDFINENINQGINVFLEIDVQGFQKLRSKNVEFRSMFILPPSINELRERIQKRGLDSEVVIEKRMKNALKELGEAEEYDYLVINDVFEHAIKELLEMVVNNEFIDNSRDKKLKILQDLLS

SEQ ID NO: 131558 - protein, 80 aa, Unknown
  Bacterial polypetide isolated from the Sargasso Sea
MSNSKLIIFSAPSGAGKSSLIKKLIELSESTIELSVSVTTREPRDGEVHGVDYFFISKQEFLKLEKQNAFLESANVHGFH

SEQ ID NO: 131559 - protein, 165 aa, Unknown
  Bacterial polypetide isolated from the Sargasso Sea
MSGNNEGIIVILSSPSGAGKTTLVNEISKRNNFQISISHTTRKPRPNETEGKDYYFVSKPEFKNLIDENKFLEYAKVFQNYYGSSKDVIFKKLNNAQNVIFDIDWQGTEQIKSQKLNYKIVTIFILPPSRDELYTRLLNRDRNDEKIAKERMTQFNEDVLHWKDY

SEQ ID NO: 131560 - protein, 209 aa, Unknown
  Bacterial polypetide isolated from the Sargasso Sea
MKDAKLFLVSAPSGAGKSSLIDAVLARANKSDLPLELSVSYTTRLPRKGESNANEYFFVSKKDFLDKKNSNFFLEFAEVHGNLYGTSVDFVESKLSLGVNLILEIDVQGFRQINDLSMNYESIFILPPSIHSLEERIRNRGDEDLNAIDLRLKNAKDELTYASEYKHLIVNDSFNKAADELFNIIAQNESLNEINNEEVQQFLAQLLSY

SEQ ID NO: 131561 - protein, 207 aa, Unknown
  Bacterial polypetide isolated from the Sargasso Sea
MNDKTGKLIVISAPSGTGKTTVVKRLLEKIPNIIASVSFTTRPMRENEREGIDYFFVDKRKFETMVDDNQFIEHATVFGNYYGTQKESLSSNLKKGKNIILEIDWQGARQVKEKMPSCIMIFLIPPSREVLLSRLKKRGTDSEGEIESRFNQAVSDLNESNKFDHVLVNDQIEVAVENIAHCIEGNLSLLNQSGLVDKALKSFYETN

SEQ ID NO: 131562 - protein, 206 aa, Unknown
  Bacterial polypetide isolated from the Sargasso Sea
MSSRAKARLIIFSAPSGAGKSSLIQEVISQSSGNIQLSISATTRPPRTGEEHGRDYFFISDEEFNELKKQNSFVEHANVYGYQYGTLRSFVDEKIENNINVILDIDVQGFDLIRNSIKDDISIFIIPPSISELEKRLVSRGLDSDEVIKKRLKNVKTELKYAELYDYIILNDQFEDTLNELTSIIYNENYNYNKETNVNLLKDLLD

SEQ ID NO: 131563 - protein, 111 aa, Unknown
  Bacterial polypetide isolated from the Sargasso Sea
SGISVILDIDVQGFKQVKQTSQDNVSIFILPPSLEELEQRLFNRGSESAESIKKRLKNALIELRSAEIFDYVVVNDEFDKTIKILSSILFDKNIEYNDENAKNILKELLDN

SEQ ID NO: 131564 - protein, 184 aa, Unknown
  Bacterial polypetide isolated from the Sargasso Sea
MINFITISAPSGSGKTTLCKALRKVKSDIEWSVSYTTRLKRDNEKNGIDYHFITINKFEEFILNEKFVEWENVHGNYYGTAKDTLKAAIAIEKTLLLEMDVKGSMSIKKLYPDNTFSIFILPPSLEDLRARLKKRGTDSDERIEIRLKRYQQEIEFQDRFDAVMINEDLESAKFELINIVNQLN

SEQ ID NO: 131565 - protein, 210 aa, Unknown
  Bacterial polypetide isolated from the Sargasso Sea
MPSKKEGVMIVLSSPSGAGKTTLVNMLSELDNFEISISHTTRQPRPNETANKDYFFVKDEEFKKLIKNQEFLEYAKVFNNFYGTTRTPVINRLDQGKNILFDIDWQGADQIKNKKLDYKLITFFILPPSKKELFERLSNRDMKDKLIVEERMKQFERDVLHWINYDYVVINDNLKKCFSRIKNLIEAEISNGSKDYDLEYIRSHINKLTS

SEQ ID NO: 131566 - protein, 209 aa, Unknown
  Bacterial polypetide isolated from the Sargasso Sea
MKDPKLFLVSAPSGAGKSSLIDAVLAKANQSHLLLELSVSYTTRSPRKGESNGNQYFFISEEEFIEKKNSNFFLEHAKVHDNWYGTSLDFVQLKLGSGVNLILEIDVQGFRQINDLSFSYDSIFILPPSMHSLEERIKSRGDEDLESINLRLRNAKDELAYANEYRHIIINDSFDDAENELFGIIAQEKSFNRQNTEEVQQFLAQLLSY

SEQ ID NO: 131567 - protein, 202 aa, Unknown
  Bacterial polypetide isolated from the Sargasso Sea
MIILSSPSGAGKTTLVKKLSEKDNFEISISHTTRQPRPNENQNKDYFFVDELEFRRLIKNEEFLEYAKVFNNFYGTTRTPVIDKLNKGKNVLFDIDWQGADQIKNKKLDYKLINFFILPPSREVLFERLSKRHASDKLIAEERMKQFERDVLHWINYDYVVINNDLNECHNKITNLIDAVINNGSKDYDLDYIRGHVDKLTS

SEQ ID NO: 131568 - protein, 212 aa, Unknown
  Bacterial polypetide isolated from the Sargasso Sea
MAERKAGIIVILSSPSGAGKTTLVKKISSRNNFKISISHTTRKPRINEKDGKHYFFVKNKQFKKLIKQKKFLEYAKVFKNYYGSLKENVVEKLEKSENVIFDIDWQGTQQIKNIKLKYKIITIFILPPSKEELFNRLLKRDKKDQRIASERMKQFKTDITHWKDYDYTVINDKIEKCYKQILKFYSQQNHKLKKNPNINKQLYKNHIKKLLN

SEQ ID NO: 131569 - protein, 206 aa, Unknown
  Bacterial polypetide isolated from the Sargasso Sea
MVIKSNNFCIVLSSPSGAGKTTISKMLLKKDPSISLSISCTTRPKRKGEINKKDYIFVSDAEFKESIKLNKFIEHAQVFGFKYGTLKKTIKNFFIKKKDVLFDIDWQGYQQLKQSNMEVVGIFILPPSKKELIKRLKIRDRDTKDEMKKRMSLVQNEISHFPEYDYVVVNKNLNKCVDQIKNIIDSERLKRSRLSNITNFVNKFRS

SEQ ID NO: 131570 - protein, 209 aa, Unknown
  Bacterial polypetide isolated from the Sargasso Sea
MSSDKGQLIVISAPSGAGKTSIIKNVIKKLNDENRKSKFSVSHTTRLPREGDIDGSDYFFVSNEIFDELYEAGNFIETAEVHDYKYGTSKDFIDENINQGINVFLEIDVQGFQKLRNRDIEFRSMFILPPSIEELRKRIQKRGLDSEDVIEKRMKNALKELGEAEEYDYLVINDVFENAIEELLEIVLNMGFKDHIHDKKLKILQDLLS

SEQ ID NO: 131571 - protein, 178 aa, Unknown
  Bacterial polypetide isolated from the Sargasso Sea
MIILSSPSGAGKTTLVKMLSKLDNFEISISHTTRQPRHNETPNKDYFFVDEKEFKRFIKNEEFLEYAKVFSNFYGTTRTPVINKLNKGKNVLFDIDWQGADQIKNKNLDYKLISFFILPPSKEILFERLSNRDMKDKLIAEERMKQFSRDVLHWINYDYVVINDSIETCYSKIKNLIH

SEQ ID NO: 131572 - protein, 209 aa, Unknown
  Bacterial polypetide isolated from the Sargasso Sea
MSNEKGQLIVISAPSGAGKTSVIRNVIKKLNDENIKSTFSVSHTTRLPRDGDIDGSDYFFVSNEIFDELYEAGNFIETAEVHDYKYGTSKEFIDNNINEGINVFLEIDVQGFQKLRSKNVEFRSMFILPPSINELRERIQKRGLDSEGVIEKRMKNALKELGEAEEYDYLVINDVFEHAIEELLEMVTNNDYLDHSRDKKLKILQDLLS

SEQ ID NO: 131573 - protein, 198 aa, Unknown
  Bacterial polypetide isolated from the Sargasso Sea
MSSKDGIMIILSSPSGAGKTTLVKLLAENKNYKISISHTTRKPRENEVSGEDYFFTNEKNFQDLIKKNEFLEHAKVFNNFYGTSLKPVSESLDKGLNVIFDIDWQGAQQIKNKKLKYKLITFFVLPPSKEVLFNRLSNRDMKDKVIVEERMKEFNKDILHWKDYDYVVINDKLEDCFEQISLLVDSELNNTKNNYNFK

SEQ ID NO: 131574 - protein, 158 aa, Unknown
  Bacterial polypetide isolated from the Sargasso Sea
MIILSSPSGAGKTTLVKKISKEKNFKVSISHTTREPRENEINGVDYYFTSLDNFKKLVEENAFLEYAKVFQNLYGSTKKQVFNYLENGYNVLFDIDWQGAQQIKNQTLNHQLISYFILPPSREILYKRLISRGETNDETIQMRMKQFDRDVLHWIDYD

SEQ ID NO: 131575 - protein, 203 aa, Unknown
  Bacterial polypetide isolated from the Sargasso Sea
MVILSSPSGAGKTTLVKKIALKKNFNISISHTTRKPRSNEKDGKDYHFVNHNQFKKLIKNNKFLEYAKVFKNYYGSLKETVIKKLKKGENVIFDIDWQGTRQIKRKKLKYKIITVFILPPSKKELFKRLLKRDQKDKKIAKERMKQFKDDVLHWKDYDFTVINDKLDKCYESINDFINQQKKNNKTFKYDRKFIKKHINYLIN

SEQ ID NO: 131576 - protein, 220 aa, Unknown
  Bacterial polypetide isolated from the Sargasso Sea
MNINLARQKGVMIIISSPSGAGKTTLTRKLVSDLKNAVLSISVTTRKKRDNEEDGLHYYFVDDEVFNKMVDEGNLLEHANVFGFNYGTPKERVIENIQIGNDVIFDIDWQGALQLKNNYEDNIISVFILPPTATELMGRLIKRDQDSIDTIKNRLNAAYDEIKHWNEYDYVIINDDLDVAYSELKSIVTSEKMKITKANTTNISKHVDHLLEELSDRLKD

SEQ ID NO: 131577 - protein, 210 aa, Unknown
  Bacterial polypetide isolated from the Sargasso Sea
MSAEKDGIIVVLSSPSGAGKTTLVKKISIENNFKISISHTTRKPRTNEVNGKDYFFVNKEEFKNLVDKGEFLEHAKVFENYYGSTKSKVIERLKKGENVIFDIDWQGTEQIKKKNLNYKLITFFILPPSKTELFNRLKNRDMKDKNIVEERMKQFNEDINHWENYDFVVINDNIDRCYKEIIEFINKKIEKSDHTFDKKNIQNHIVNLRG

SEQ ID NO: 131578 - protein, 194 aa, Unknown
  Bacterial polypetide isolated from the Sargasso Sea
MSNDLAENLFIITAPSGAGKTTLIKNVIEFAQINDEKVFMSVSHTTRTPRSNELDGTDYSFISEEEFKSKINDQVYLEHAIVHGNLYGTPKQPIEQHLHDGFKVLLEIDWQGAVEILKTYPDAQSIFISPPSIEELHKRLHDRGLDSEEVIAERIDGAKLEMEKSSEFKYQIINNSLETAFKNLLNIIFREKHG

SEQ ID NO: 131579 - protein, 207 aa, Unknown
  Bacterial polypetide isolated from the Sargasso Sea
MSNNAKSAKLFIFAAPSGAGKSSIIKKIISKDKDNIQLSVSVTTRPPRDGEIHTKDYFFVDEKEFSELKEKNAFIEFADVHGHQYGTLRNFVNEKLKSGISIILDIDVQGYTQIKDSIQDTISIFIIPPSLEELKNRLIARGLDSKEVIEKRMINAKKELNHAFSFDYVVLNDNFNKALDDISNIIFIDDFEYANDKNLNILKDLLD

SEQ ID NO: 131580 - protein, 211 aa, Unknown
  Bacterial polypetide isolated from the Sargasso Sea
MAENNVGVIVILSSPSGAGKTTLVKKISKRRKYKISISHTTRNPRLNEKNGRDYFFVNNNKFKKLIEDKKFLEYAKVFKNYYGSLRENVVKKLEKGENVIFDIDWQGTRQIKKKKLKYKIITIFILPPSKKELFKRLLKRDHKDKKIASERMKQFKNDVKHWNEYDFTVINDKLEKCYELIINFINSKTKSPKSINYNKKFIRDHIKQLLN

SEQ ID NO: 131581 - protein, 194 aa, Unknown
  Bacterial polypetide isolated from the Sargasso Sea
MSNNLAENLFIITAPSGAGKTTLIKNIIEFAETNNEKVFFSVSHTTRSPRGNESDETDYFFISEEEFKSNIDEGVYLEHALVHGNLYGTPKKAINDHLQRGYKVLLEIDWQGAVEILKTYPDAQSIFISPPSIEELHKRLHERGLDSEEVIANRIEGAKLEMEKSSKFKYQIINNSLETALKNLLNIIFREKHG

SEQ ID NO: 131582 - protein, 211 aa, Unknown
  Bacterial polypetide isolated from the Sargasso Sea
MAEKKAGIIIILSSPSGAGKTTLVKKISLRKKYNISISHTTRKPRLNEKNGNDYFFVKNKDFRKLIKDKKFLEYAKVFKNYYGSLKETVINKLKKGENVIFDIDWQGTKQIKSKKLKFKIITIFILPPSKKELFKRLLKRDQKDKKIAIERMKQFKDDVMHWKDYDYAVVNNKIEECYQSIIKFINIQKKQKKVFRYDRKLIKNHIKYLIN

SEQ ID NO: 131583 - protein, 217 aa, Unknown
  Bacterial polypetide isolated from the Sargasso Sea
MDSNLLSSEGTLFIISSPSGAGKSSVSKRILENDIKVTFSISATTRPARAGEIDGREYYFKSHAQFDQMIQSGELLEYAEVFGQRYGTPKIPVEKSLEKGLDVLFDVDWQGGIKIRNSHLRKFVVSIFILPPSISELESRLISRGLDSNEVVNSRMLKSKEEISHWSEYDYILINKDLEKVHWDISSIIRAERLKRVNRQSLVEFVNKLNSEFEGRY

SEQ ID NO: 131584 - protein, 202 aa, Unknown
  Bacterial polypetide isolated from the Sargasso Sea
MIILSSPSGAGKTTLVKMLSKLDNFEISISHTTRQPRPNETPDKDYFFVDENEFKRFIKNEEFLEYAKVFSNFYGTTRTPVIDKLNKGKNVLFDIDWQGADQIKNKNLDYKLISFFILPPSKEILFERLSNRDMRDKLIADERMKQFGRDVLHWINYDYVVINDSIETCYLKIKNLIDAEINDGSKDYDAEYVRNHIEKLTS

SEQ ID NO: 131585 - protein, 207 aa, Unknown
  Bacterial polypetide isolated from the Sargasso Sea
MSSFKRGGMFVLSSPSGAGKTTLVKKIARNKKFSISISHTTRTPRPNEINGKDYFFIKKNHFKKLIKKGKFLEHARVFENYYGSSKDIVINKLKSGKNIIFDIDWQGTRQIRNKKLKYKLLTIFILPPSKKELLKRLIKREKKNMSTVKKRMKGFKKDLSKWREYDYVVINDDLNACYKKILKVINNKNKNTFDSNLISNHVKKLLS

SEQ ID NO: 131586 - protein, 211 aa, Unknown
  Bacterial polypetide isolated from the Sargasso Sea
MAEKKAGIIVILSSPSGAGKTTLVKKISSRNSYNISISHTTRKPRVNEKNGKDYFFINNQKFKNLIKKKKFLEHAKVFKNYYGSLKETVIENLEKGENVIFDIDWQGTKQIKNKKLNYKIITIFILPPSKKELFKRLLKRDKKDKKIASERMKQFKDDVLHWKDYDFTVINDKIEKCYRQIISYIKKQKKTKKTLKLKKEHIKNHINKLIN

SEQ ID NO: 131587 - protein, 209 aa, Unknown
  Bacterial polypetide isolated from the Sargasso Sea
MDHPGNLFVVSAPSGAGKSSLVRALREFDARVYPSVSHTTRAPRGQEKHGREYYFISDAEFDAMVANNGFVEWANVHSRRYGTAKRSLEERIQSGTDVLLEIDYQGALQVKQAFPNAVLIFILPPSWDELRARLENRGEDAPEVIEMRLKNAEEEMAQVAKFDFVIINELFESALFDLKAIIHAQRLKYAAQRRLRADTFESLNIPESN

SEQ ID NO: 131588 - protein, 208 aa, Unknown
  Bacterial polypetide isolated from the Sargasso Sea
MEELNRSGIPFILSSPSGAGKTSIARNIISKDKNIQLSVSYTTRKKRKNENDGLDYKYISKNSFKEKIEKNYFLEWAIVFENYYGTSREKVQKVIAEGKDVLFDIDWQGAQQLSNNKSFDVVKIFILPPSNNSLENRLNARAQDTLIEVKKRMSQANDEISHYMEYDYIIINNDLEVSSNEVLNIINAERMKKKRLINLDKFISYLRS

SEQ ID NO: 131589 - protein, 190 aa, Unknown
  Bacterial polypetide isolated from the Sargasso Sea
MKTSSKPLMLVLSSPSGAGKTTLSKKIQQSDNTFKISVSHTTRKPRPNEVNGVDYHFVNEEKFKSLLKENAFYEHTKIFDNLYGTSKNSVNEITKKDFNVLFDIDWKGAKQLSEFKELNLIRIFILPPSKEELEKRLISRNQDDKDSIKKRLQAYSEEIQHSKDYDFVLVNDNVENCFKKIKKIISDRLK

SEQ ID NO: 131590 - protein, 190 aa, Unknown
  Bacterial polypetide isolated from the Sargasso Sea
MLIVSAPSGAGTTSLIKALMEQDQRVEVSVSHTTRPQRPGEVEGVNYFFVSTETFPEMREAGAFFESAEVFDHWYGTSLTQLEARLSDGADVILEIDWQGAQQVRKLLPDSAWLFILPPSLEALKSRLQARGQDAEDTIDLRMRAARDEMSHWDEADYLIINDQFDVAVEALQALVRSLRLRTGQQQSAL

SEQ ID NO: 131591 - protein, 183 aa, Unknown
  Bacterial polypetide isolated from the Sargasso Sea
MIVLSSPSGAGKTTLSKKIQQSDNSFKISVSHTTRKARANEVDGVDYHFVTKEKFKQLLSEDAFYEHSEIFGNYYGTSKSSVNKIIKDKYNVLFDIDWKGAQQLSGYKELNLLKIFILPPSKEELEKRLVARNQDDKESIKNRLLAYSKDIEHSNEYDHVIINDNVENCFNSIKKIISIRLNT

SEQ ID NO: 131592 - protein, 189 aa, Unknown
  Bacterial polypetide isolated from the Sargasso Sea
MIILSSPSGAGKTTLVKKISKEKNYKISISHTTREPRNNEIDGVDYFFVKQENFETLIQENAFLEHANVFENMYGSTKEQVFKNLKNGFNVLFDIDWQGAQQIKKQTLDYKLISFFILPPSKEILLERLVTRGETNNEIIQMRMKQFDKDVLHWEEYDYVVINQDLDKCYNEIIGYLENTLKYDKSKIE

SEQ ID NO: 131593 - protein, 183 aa, Unknown
  Bacterial polypetide isolated from the Sargasso Sea
MLVLSSPSGAGKTTLSKKIQQSDSSFEISVSHTTRKPRPNEVDGLDYHFVSKEKFESLLKTNAFYEYAQIFGNYYGTSKSSINKITGNKHNVLFDIDWQGSQQLSKYKELNLVKVFILPPSKEELEKRLIARNQDDKDAIRRRMFVYSQDIAHQKDYDYVLINDNVEKCFLEIKNIIDKHLKK

SEQ ID NO: 131594 - protein, 194 aa, Unknown
  Bacterial polypetide isolated from the Sargasso Sea
MNNLSSKALMIVLSSPSGAGKTTISKKIQQSDNSFKISVSHTTRKARANEVDGVDYYFVSEEEFKDLLKKGHFYEHTKIFGNFYGTSKSSVNDIINKKLNVLFDIDWIGAQQLSKFKELNLLKIFILPPSKEELKKRLIARNQDGDESIKKRLLAYSQDIQHSKEYDHVIINDNVEDCFNKIKKIISDRLKIKF

SEQ ID NO: 131595 - protein, 210 aa, Unknown
  Bacterial polypetide isolated from the Sargasso Sea
MQDLLGNLFIISAPSGAGKSTLINALLKQDADMQLSVSHTTRSPRPGETNGVQYHFTDVSSFKQLIAEDQFIEWAEVFGNYYGTSKAALADKLAQGIDVFLDIDWQGARQIKQQLPFVTSIFILPPSVGALEQRLNQRGQDSAEVIAGRMAKARDEISHANEYDYWVVNDDLELAVQQFSGIIQSQRLKQQKQAIRQHKLLSGLLANETK

SEQ ID NO: 131596 - protein, 209 aa, Unknown
  Bacterial polypetide isolated from the Sargasso Sea
MSNEKGQLIVISAPSGAGKTSIIKNVIKKLNDESKKSTFSVSHTTRLPRDGDIDGSDYFFVSNEIFDELYEGGNFIETAEVHDYKYGTSKEFIDNNINQGINVFLEIDVQGFQKLRSKNVEFRSMFILPPSIDELRERIQKRGLDSEGVIEKRMKNALKELGEAEKYDYLVINDVFEHAIEELLEMVINNDYLDHSRDKKLKVLQDLLS

SEQ ID NO: 131597 - protein, 213 aa, Unknown
  Bacterial polypetide isolated from the Sargasso Sea
MALQLGNLFILAAPSGAGKSSLIKALMEKYEGNTHSPMQVSVSHTTRQPRPGEVDGVHYHFVSREEFEALIEQGVFFEYAEVFGNYYGTSRVTIEQTLHRGIDVFLDIDWQGARQVKALMPDTCGIFILPPSLEVLEQRLTNRGQDSEEVIAGRMSQAVSEMSHFNEFDYVIVNDDFATALNDLEAIVTSQRLRSIKQQMRFQPLLDELLGTA

SEQ ID NO: 131598 - protein, 185 aa, Unknown
  Bacterial polypetide isolated from the Sargasso Sea
MNDSKLIIFSAPSGAGKSSLIKKLIELSESTIELSVSVTTREPRDGEVHGVDYFFISEQEFLKLEKQDSFLESANVHGFHYATLKSFVDEKTSSGISVILDIDVQGFKQIKQTSQDNVSIFILPPSLEELEQRLFNRGSESSESIKKRLENALIELRSVEIFDYVVVNDEFDKTIKILSSILFDK

SEQ ID NO: 131599 - protein, 189 aa, Unknown
  Bacterial polypetide isolated from the Sargasso Sea
KDEGILVILSSPSGAGKTTISKKIQQKHQNFKISVSHTTRKPRPNEVEGIDYFFISQEEFQDKIKKGEFYEYAKIFGNYYGTSRKAVLDLLEKKNDILFDIDWQGTQQLSKFKELKLIKIFILPPSKEELKKRLIQRNQDKPEVVSERLKAYDKDASHQKEYDYVVVNDNLDNCFKEVEKIIIKSKKKN

SEQ ID NO: 131600 - protein, 209 aa, Unknown
  Bacterial polypetide isolated from the Sargasso Sea
MSLNKRGIMVVLSSPSGAGKTTLVKLLSKKKNFYTSISHTTRKPRVNEVDGVDYFFVKEKKFKNLIKNNKFLEYATVFKNLYGTTKEQVIMKLSNGENVLFDIDWQGTEQIKSQKLNFKLITFFILPPSKKVLFQRLSNRDMKDKLIVEERMRQFDKDILHWKKYNYTVVNDNLQKCLRKITNIINKEIKNKKYKYNKLTIEKYIQKLI

SEQ ID NO: 131601 - protein, 204 aa, Unknown
  Bacterial polypetide isolated from the Sargasso Sea
MNDSKLIIFSAPSGAGKSSLIKKLIELSESTIELSVSVTTREPRDGEVHGVDYFFISEQEFLKLEKQDAFLESANVHGFHYATLKSFVDEKTSSGVSVILDIDVQGFKQVKQTSQDNVSIFILPPSLEELEKRLFNRGSESSESIKKRLENALIELRSAEIFDYVVVNDEFDNTIKILSSILFDENIEYNDENAKNILKELLDN

SEQ ID NO: 131602 - protein, 172 aa, Unknown
  Bacterial polypetide isolated from the Sargasso Sea
MVILSSPSGAGKTTISKKIQQKHQNFKISVSHTTRKPRPNEIEGIDYYFTNKNDFENKIKNNEFYEHAKIFGNYYGTSKDSVINLLNNKNDVLFDIDWQGTQQLSKFKELNLLKIFILPPSKEELKKRLIQRNQDKPNVVEERLKAYDRDSAHKKDYDFVVINDNLENCFKE

SEQ ID NO: 131603 - protein, 158 aa, Unknown
  Bacterial polypetide isolated from the Sargasso Sea
MRILSSSNQIFVISAPSGAGKTSLVDALLNKDTNIVGCTSHTTRPIREGEIDGENYHFVNESEFVNLIKNNYFVEHANVFGYRYGTSELELENTLNAGLDVILEIDWQGAEQVRKVYDNCSSIFILPPSLSELEERLRSRGKDTPEVIKARSQEAVKE

SEQ ID NO: 131604 - protein, 151 aa, Unknown
  Bacterial polypetide isolated from the Sargasso Sea
MNNLSSKPLMLVLSSPSGAGKTTLSKKIQQSDSTFRISVSHTTRKARPNEVDGVDYHFVSEEEFKILLKKETFYEHSIIFGNYYGTSKTSVDEIIKKKFNVLFDIDWKGAKQLSLFKELNLLKIFILPPSKKELEKRLIARNQDGKESIKR

SEQ ID NO: 131605 - protein, 155 aa, Unknown
  Bacterial polypetide isolated from the Sargasso Sea
MNNISSKPLMLVLSSPSGAGKTTLSKKIQQSDSTFRISVSHTTRKARPNEVDGVDYHFVSEEEFKILLKKKAFYEYSIIFGNYYGTSKNSVDEIIKKNFNVLFDIDWKGAKQLSGFKELNLLKIFILPPSKEELEKRLVARNQDGKESIKKKGFG

SEQ ID NO: 131606 - protein, 207 aa, Unknown
  Bacterial polypetide isolated from the Sargasso Sea
MAQGTLYIVSAPSGAGKSSLIQALLKTQPLYDTQVSVSHTTRAPRPGEVHGEHYFFVNHDEFRTMIGRDAFLEHAEVFGNYYGTSRETIEQVLASGVDVFLDIDWQGAQQIREKMPHARSIFILPPSKIELDRRLRGRGQDSEDVIAKRMAQAVAEMSHYAEYDYLIVNDDFDTALGDLKTIIRAERLRMSRQKQRHDALISKLLAD

SEQ ID NO: 131607 - protein, 194 aa, Unknown
  Bacterial polypetide isolated from the Sargasso Sea
MIQRTLFIVTAPSGAGKTTLVKEVLQRITDLSVSVSYTTRPIRPGEIEGENYHFVDEKKFLNMYSNNDFLEVAEVYGHKYGTSRLFVTRAFEQGNDVILEIDWQGAEQIKRLFQKACSIFILPPSLRALTDRLYKRQQDDSETIEVRMAEAKEVISHFTDADYVVVNDKFDETVEDIVTIIRSQRLRVQTQREN

SEQ ID NO: 131608 - protein, 190 aa, Unknown
  Bacterial polypetide isolated from the Sargasso Sea
MNNLSSKPLMLVLSSPSGAGKTTLSKKIQESDTSFRISVSHTTRKSRVNEVDGIDYHFVNHEKFKKLVKENSFYEHTKIFGNYYGTSRLSVDKIIKNNCNVIFDIDWKGAQQLSNYKELNLLKIFILPPSKEELEKRLIARNQDGKDSIKNRLLAYTEDIKHSDEYDHVIVNDNVEKCFNDIKEIISKRQ

SEQ ID NO: 131609 - protein, 184 aa, Unknown
  Bacterial polypetide isolated from the Sargasso Sea
MLILSSPSGAGKTTITKKIQQKYKNFRISVSHTTRKPRTNEIDGVDYYFIDKKTFEKKIKDNEFYEYANIFGNYYGTSKISINQLKEKYDIVFDIDWQGTKQLTKFKELNLVKIFILPPSKKELERRLIERNKGKNEKISERLAAFEKDATHWNDYDYVIINDNLENCFKQIEKIIESHQIKSF

SEQ ID NO: 131610 - protein, 207 aa, Unknown
  Bacterial polypetide isolated from the Sargasso Sea
MTARGNLFIVSAPSGAGKSSLISALLKDKPADMQVSVSHTTRAPRPGEVNGQHYHFVNVEEFKALIEQNAFFEWAEVFGNYYGTSRHVIEHTLTQGIDVFLDIDWQGAQQVKAVMPEAVGVFILPPSRDELERRLTGRGQDSADVIASRMAQAVSEMSHYKEYDFIIVNDDFDTALADLQAIIRSQRLTGASQIHAQNDMLNDLLAG

SEQ ID NO: 131611 - protein, 205 aa, Unknown
  Bacterial polypetide isolated from the Sargasso Sea
MIILSSPSGAGKSTLAQRIKSWGENCVFSISATTRKPREGEQDGKDYYFISQEEFSSKVSNGEMLEHAEVFGNWYGSPVSPVLSSIDNGNDVLFDVDWQGSQQIKNSSLGKYVLSIFILPPSIKELESRLKLRNQDSDEVISNRMAKSVEEISHWPEYDYVVVNDDVDKTEEKLKIIITAERLRLSQQPGIVEFVRSLNNEFGER

SEQ ID NO: 131612 - protein, 210 aa, Unknown
  Bacterial polypetide isolated from the Sargasso Sea
MQDLLGNLFIISAPSGAGKSTLINALLKQDADMQLSVSHTTRSPRPGETDGVQYHFTDVSSFKQLIAQDQFIEWAEVFGNYYGTSKAALADKLAQGIDVFLDIDWQGARQIKQQLPFVTSIFILPPSVEALEQRLNQRGQDSAEVIAGRMAKARDEISHANEYDYWVVNDDLELAVQQFSGIIQSQRLKQQKQAIRQHKLLSGLLANETK

SEQ ID NO: 131613 - protein, 187 aa, Unknown
  Bacterial polypetide isolated from the Sargasso Sea
MTDHTRETSAPRNPYAGAYPGNLFMVVAPSGAGKSTLVNALLAGDDAIRLSISYTTRPPRPKEQDGEHYHFTTVDDFLTRHAAGEFLESAEVHGNYYATSRVWIEEQMKSGHDVLLEIDWQGAQQVKKQFHNAVEIFILPPSLDALEERLKKRGQDEPNVITRRLLAAGSEMAHAAEAEYVVINDSS

SEQ ID NO: 131614 - protein, 193 aa, Unknown
  Bacterial polypetide isolated from the Sargasso Sea
MNNVRNSEKKLVVLSAPSGAGKSSLLNNVISQHHDIGLTISHTTRDIRPNEKNNIDYYFISKEKFQAMINEEEFIEFAEVHGNFYGTTKKEIDEKLMNFEIVILEIDTNGAKQVLSNIANCRSIFILPPSYSSLEKRLLARKTENEEQLEKRLRAAKTEIKEATGFDYVMINDIFEESVTNLTEILYDVDMRL

SEQ ID NO: 131615 - protein, 208 aa, Unknown
  Bacterial polypetide isolated from the Sargasso Sea
MAQQGTLYIISSPSGAGKSSLLNALLTQHNSAGKMQLSVSHTTRATRPGEEHGVHYHFVKVEEFKALIERGDFLEWAEVFGNYYGTSRAAIEACLAQGIDVFLDIDWQGARQIREQMPTKSIFILPPSREELERRLIGRGQDSAEVIKGRMEKAIAEMVHYDEYDYVIINEDFEQALFQLRAVIECQRLELRQQQQAQQNLLQQLLAE

SEQ ID NO: 131616 - protein, 168 aa, Unknown
  Bacterial polypetide isolated from the Sargasso Sea
KIQESDSSFKVSVSHTTRKARVNEVDGVDYHFVSEHVFKNLIKNNAFYEHAKIYGNYYGTSKSSINKITQKGNNVLFDIDWQGAEQLSAYKELNLLKIFILPPSAEELKKRLISRNQDNQEAIKRRLDAYNTDISHSKNYDHVLINDKVEVCYNKIKDIISMYLANKT

SEQ ID NO: 131617 - protein, 191 aa, Unknown
  Bacterial polypetide isolated from the Sargasso Sea
MSDRFKPLLLVLSSPSGAGKTTLSKKIQQSDNTFKISVSHTTRKPRANEVDGVDYYFINKEKFEKLISSNSFFEYCKIFGNYYGTSKSSVNQITRKGLNVLFDIDWQGSKQLGKFKELNLVRIFILPPSKEELEKRLIERNQDDQESIKKRLLAYSEDIKHTKEYDHVIVNDNVEDCFKKIKKIISERIRS

SEQ ID NO: 131618 - protein, 205 aa, Unknown
  Bacterial polypetide isolated from the Sargasso Sea
MAEKKVGVIVILSSPSGAGKTTLVKKISLRNNYKISVSHTTRKPRINERNGRDYFFVNHHEFKKLIKNKKFLEYAKVFKNYYGSLKETVIKKIKKGENVIFDIDWQGTQQIKKKRLNYKIITIFILPPSKKELYKRLLKRDQKDKKNVNERMKQFKEDVKHWKDYDFTVINDKIEKCYKLIINYINLQKKQKQTLKYNKALIKKH

SEQ ID NO: 131619 - protein, 153 aa, Unknown
  Bacterial polypetide isolated from the Sargasso Sea
MSNEKGQLIVISAPSGAGKTSVIKNVIKKLNDENIKSTFSVSHTTRLPRDGDIDGSDYFFVSNEIFDELYEAGNFIETAEVHDYKYGTSKEFIDNNINQGINVFLEIDVQGFQKLRSKNVEFRSMFILPPSIDELRERIQKRGLDSEGVMKKG

SEQ ID NO: 131620 - protein, 213 aa, Unknown
  Bacterial polypetide isolated from the Sargasso Sea
MTSLLGNLFILAAPSGAGKSSLIKALMEKYESNTATPMQVSVSHTTRQPRPGEVDGVHYHFVSREQFEALIEQGVFFEYAEVFGNYYGTSRVTIEQTLHRGIDVFLDIDWQGARQVKKLMPDTCGIFILPPSLDVLEQRLNNRGQDSEEVIAGRMAQAVAEMSHFNEFDSVIINDDFATALNDLEAIVTAQRLRTGKQQMRHQVLLDELLGSA

SEQ ID NO: 131621 - protein, 125 aa, Unknown
  Bacterial polypetide isolated from the Sargasso Sea
MSSNLFIITAPSGAGKTTLIKKVLEYAQEHNKNVVLSVSHTTRPPRDGEEDGVDYLFISEDDFKQNIENGEYIEYANVHGNYYGTPRSELDKNQNINSKILLEIDWQGALQIMNHYPDAESVFIS

SEQ ID NO: 131622 - protein, 208 aa, Unknown
  Bacterial polypetide isolated from the Sargasso Sea
MDKLKRRGILFVLSSPSGAGKTSIARYILDKDKNIKLSVSLTTRKKRKNEKAGIDYDFISKDVFEKKIKNNFFLEWATVFGNYYGTSREKVKKTLQDGNDVLFDIDWQGTQQLSDNKDFDLVTIFILPPSKTVLEKRLNNRAQDSKIEVIKRMSQASDEISHYMEYNYIVINNNLEESSNQVLSILKAERLKRKRLINLNEFITFLRS

SEQ ID NO: 131623 - protein, 207 aa, Unknown
  Bacterial polypetide isolated from the Sargasso Sea
MTARGNLFIVSAPSGAGKSSLISALLKDKPADMQVSVSHTTRAPRPGEVDGQHYHFVNVEEFKALIAQNAFFEWAEVFGNYYGTSRHVIEHTLTQGIDVFLDIDWQGAQQVKALMPEAVGVFILPPSRDELERRLTGRGQDSQDVIASRMAQAVSEMSHYKEYDFIIVNDDFDTALADLRAIIRSQRLTGASQIHAQNDMLNDLLAG

SEQ ID NO: 131624 - protein, 205 aa, Unknown
  Bacterial polypetide isolated from the Sargasso Sea
MNKGLLILISAPSGAGKTSLVNEIIARDDRLIKSVSHTTRAKRPGEEESIDYFFTTEKEFKQMVSNSDFIEHAEVFGNYYGTSKNYVEENLDSGLDVILEIDWQGARQIQSLKREAISIFIAPPAKQELENRLRKRGKDSEETISIRMSQATSDIKKAQSYNYVVVNDSFETATNQLLTIISAERLRTSHQIKRNEALAFLLSPK

SEQ ID NO: 131625 - protein, 227 aa, Unknown
  Bacterial polypetide isolated from the Sargasso Sea
MTESHRDGHASHSLHGGVYPGNLFMVVAPSGAGKSTLVNALLSKDSDICLSISYTTRKPRPGEQDGQHYHFTTVEDFRARHAAHEFLESAEVHGNYYGTSRVWIEEQMKNGHDVLLEIDWQGALQVKKQFRNAVGIFILPPSLDALEERLKKRGQDEPNVITRRLLAAGSEIAHASEAEYVVINENFERALAELECIVAATRLRFASQYARHTELFIDLGVHLPHAE

SEQ ID NO: 131626 - protein, 275 aa, Unknown
  Bacterial polypetide isolated from the Sargasso Sea
MKKIISMLFAVAMVFGFISNANAAKTLKCQTVLNTKADEVKMLKDFTDTVTTLTAGSLKFEILPAGAVVGVKETLDAVDKGLIDCGFAWTHYWSGDHPAAMLFGSPVAGGGVGIDNIAFLSWFQYGGGKELYDQLWKEMGRDIKGFMIQPVGPEALGWFPKPIKDMADFRKYKFRTPPGIPGQTYKDIGIASVAMGGGDILPALEAGTIDAAEWCCPKPDLTFGFQKVLKHYYLQGLHQVVVNADFYITGKTYNAMSDHEKKSLEVAANASLAKS

SEQ ID NO: 131627 - protein, 212 aa, Unknown
  Bacterial polypetide isolated from the Sargasso Sea
MKGKFIVIEGIDGCGKTTQIDELSKWLPNSGLIKKGSKLITTREPGGSLLGKKLRGLILDNNENNKPSSLAELLLYSADRAEHVSKIISPALNNNDWVISDRFSDSTLAYQGYGRNINLEIIKNIESIVCQGVSPDLTFFLEISPEESIFRRKNEIPDRIESEGIRFLEKVNEGFKLIAKQKNWKVISASQNIKTISNQIKETLLNNFSNNK

SEQ ID NO: 131628 - protein, 229 aa, Unknown
  Bacterial polypetide isolated from the Sargasso Sea
MVFGFISNANAAKTLKCQTVLNTKADEVKMLKDFTDTVTTLTGGSLKFEIMPAGAVVGVKETLDAVDKGLIDCGFAWTHYWSGDHPAAMLFGSPVAGGGVGIDNIAFLSWFQYGGGKELYDRLWKEMGRDIKGFMIQPVGPEALGWFPKPIKDMADFRKYKFRTPPGIPGQTYKDIGIASVAMGGGDILPALEAGTIDAAEWCCPKPDLTFGFQKVLKHYYLQGLHQVV

SEQ ID NO: 131629 - protein, 135 aa, Unknown
  Bacterial polypetide isolated from the Sargasso Sea
MFITFEGIEGSGKTTQINFLKDFFKEKSIKAVFTKEPGSSKIGGEIRNILLNKNLDLSPYAELFLIFADRSQHVEEIIKPNLSADFLVISDRYIDSTFAYQGEGRSIGHEEISKIIKKMNLPLPDKTFLLDLPVT

SEQ ID NO: 131630 - protein, 218 aa, Unknown
  Bacterial polypetide isolated from the Sargasso Sea
MLQPVGPEALGWFPKPIKNMADFRQYKFRTPPGIPGQTYKDIGIASVAMGGGDILPALEAGTIDAAEWCCPKPDLTFGFQKVLKHYYLQGLHQVVVNADFYITGKTYKAMTAHEKKSLEVAANASLAKSLSYRIYENGKALQELTTKHGVILEDTPTDYFKEYMAAAKATLNKNAEKNAFFKKVYDSMKEFADVAVPFWSGAQMSNAKLGMAHAATLK

SEQ ID NO: 131631 - protein, 155 aa, Unknown
  Bacterial polypetide isolated from the Sargasso Sea
MKFNSNGLFISFEGPEASGKSTQIKLLAYFLKKNKIPFLITREPGGTKIAEKLRRIILDKKANITATEEILLLMSARMNHINNIIKPALKEGKIVISDRFADSTFVYQGHVNKYGMKKTIDLHRILLNNFLPIKTFLFILPVNQIIKRLKKRNVT

SEQ ID NO: 131632 - protein, 209 aa, Unknown
  Bacterial polypetide isolated from the Sargasso Sea
MRGRFIVLDGLDGCGKSTQMQHLSQWLPASRLMPPGARLIGTREPGGTELGRAVRELLLQTSRERAPAPTAELLLYAADRAQHVETLIRPALERGDWVLSDRFSGSTMAYQGYGRGLDRRLIEQLEAIATTGLQPDLTLWLSLPLAQSIQRREGSRQDRIEAEGQAFLGRVADGFAAVARQRGWSAVAADGTVEQVSRSLEQLLQDRFG

SEQ ID NO: 131633 - protein, 162 aa, Unknown
  Bacterial polypetide isolated from the Sargasso Sea
MKIISFEGIEGVGKSTQIKLLTNYFQSTGISYEQFREPGSSDAGEKIRELLLDKSLQLSSSTELLLMFAARSELINQKINNSSAEFVILDRYFHASVAYQGYGRGIYLDSIYQLIEITECPTPSLTIILDIDVETGFKRKAADKKDRIESAGDDFFEKVRTG

SEQ ID NO: 131634 - protein, 242 aa, Unknown
  Bacterial polypetide isolated from the Sargasso Sea
MKKIISMLFAVAMVFGFISNANAAKTLKCQTVLNTKADEVKMLKDFTDTVTTLTAGSLKFEILPAGAVVGVKETLDAVDKGLIDCGFAWTHYWSGDHPAAMLFGSPVAGGGVGIDNIAFLSWFQYGGGKELYDQLWKEMGRDIKGFMIQPVGPEALGWFPKPIKDMADFRKYKFRTPPGIPGQTYKDIGIASVAMGGGDILPALEAGTIDAAEWCCPKPDLTFGFQKVLKHYYLQGLHQVVV

SEQ ID NO: 131635 - protein, 212 aa, Unknown
  Bacterial polypetide isolated from the Sargasso Sea
MKYFITFEGGEGSGKSTQATLLSRSLSKVKEKNILTREPGGTIFSEKIRRLLVNKNKYDISSDTELLLIYASRHEHLREKVIPSLKKKTVICDRFIHSTLSYQINIKNFRQKINFVHKNFAYNLNPDLTFLLDISPEEGIKRSLRIKKSETRFEEKSKNFHIKVRNTLLTLSKKDKKILKIDASQSKKTVHYSIIDHINSKSFFKKLIPYSV

SEQ ID NO: 131636 - protein, 218 aa, Unknown
  Bacterial polypetide isolated from the Sargasso Sea
MIQPVGPEALGWFPKPIKDMADFRKYKFRTPPGIPGQTYKDIGIASVAMGGGDILPALEAGTIDAAEWCCPKPDLTFGFQKVLKHYYLQGLHQVVVNADFYITGKTYKAMSAHEKKSLEVAANASLAKSLSYRIYENGKALRELTTKHGVILEDTPSDYFTEYMAAAKASLNKNAKDNKFFNEVYTSMKEFADIAVPFWSGAQMSNAKLGMAHAETLK

SEQ ID NO: 131637 - protein, 239 aa, Unknown
  Bacterial polypetide isolated from the Sargasso Sea
GGGKELYDQLWKEMKRDIKGFMLQPVGPEALGWFKEPINSMDDFRKYKFRTPPGIPGQTYKDIGVASVAMGGGDILPALEAGTIDAAEWCCPKPDMTFGFQKVLKHYYLQGLHQVVVNADVYINGKVYRSLTDLQKKAFEVASNASLSKSMSYRIYENGKALAELTGKHGVILHDTPADYFPAYMAAAKKSLETNAAKNKFFAKVWQSQKDFADIAVPFWSGAQMSNAKLGMAHAATLK

SEQ ID NO: 131638 - protein, 280 aa, Unknown
  Bacterial polypetide isolated from the Sargasso Sea
MKKIISMLFAVAMVFGFISNANAAKTLKCQTVLNTKADEVKMLKDFTDTVTTLTGGSLKFEIMPAGAVVGVKETLDAVDKGLIDCGFAWTHYWSGDHPAAMLFGSPVAGGGVGIDNIAFLSWFQYGGGKELYDRLWKEMGRDIKGFMIQPVGPEALGWFPKPIKDMADFRKYKFRTPPGIPGQTYKDIGIASVAMGGGDILPALEAGTIDAAEWCCPKPDLTFGFQKVLKHYYLQGLHQVVVNADFYITGKTYEAMSAHEKKSLEVAANASLAKSLSYRI

SEQ ID NO: 131639 - protein, 214 aa, Unknown
  Bacterial polypetide isolated from the Sargasso Sea
MERIKTVSTSKGLFISFEGIDGCGKSTQIKMLCSYLKDRNKEFLMVREPGGTDISEQIRKILLHSHDQEISDRTEALLMTGSRAQLIDEKILPFLNQGKIVIADRFLDSTLAYQGGGRELNLNWLIDLNNFATNNTFPDITFFIDIEPEVGAKRSGSSKDRIESAGLEFQSRVRKSYIKLSTLFNDRYLTLDGNQEKKIIHKKIVSHLLEKDSW

SEQ ID NO: 131640 - protein, 251 aa, Unknown
  Bacterial polypetide isolated from the Sargasso Sea
MNAKSDEARLLKEEFTDRVTLLTGGSLEFEIMPAGTVVGGKETLDAIDKGLIDCGFAWTHYWSGEHPAAMLFGSPVAGGGVGIDNLAFLSWFNAAGGKELYEQLWDEMGRDIKGFMLQPVGPEALGWFKEPINSMEDFRKYRFRTPPGIPGQTYKDIGIASVAMGGGDILPALEAGTIDAAEWCCPKPDSVFGFQKVLKHYYLQGLHQVVVNADFYMNGTLYDSLTDHEKASLQVAADASLMLTLSDRIYE

SEQ ID NO: 131641 - protein, 207 aa, Unknown
  Bacterial polypetide isolated from the Sargasso Sea
VSKNQLKDMADFRKYKFRTPPGIPGQTYKDIGIASVAMGGGDILPALEAGTIDAAEWCCPKPDLTFGFQKVLKHYYLQGLHQVVVNADFYITGKTYNAMSDHEKKSLEVAANASLAKSLSYRIYENGKALQELTTKHGVKLEDTPSDYFTEYMAAAKATLNKNAAKNKFFNEVYTSMKNFADVAVPFWSGAQMSNAKLGMAHAATLK

SEQ ID NO: 131642 - protein, 189 aa, Unknown
  Bacterial polypetide isolated from the Sargasso Sea
YKKLKKLKLASILTREPGGTKNAERIRKLILEDYFDQNSGEKFDKYTDTLLYLAARNEHILKVIKPALTKKKIVICDRFIDSTLAYQVYGKKVDKKLVNEIHKHILNNINPNITFILKVNINAALKRLNKRKIKNRYDKFSKNFYINVQKAFLNIAKKNKRKYFVLDNSEDTKETENVILKKTMKLLGV

SEQ ID NO: 131643 - protein, 252 aa, Unknown
  Bacterial polypetide isolated from the Sargasso Sea
TDTVTTLTAGSLKFEILPAGAVVGVKETLDAVDKGLIDCGFAWTHYWSGDHPAAMLFGSPVAGGGVGIDNIAFLSWFQYGGGKELYDQLWKEMGRDIKGFMIQPVGPEALGWFPKPIKDMADFRKYKFRTPPGIPGQTYKDIGIASVAMGGGDILPALEAGTIDAAEWCCPKPDLTFGFQKVLKHYYLQGLHQVVVNADFYITGKTYNAMSDHEKKSLEVAANASLAKSLSYRIYENGKALQELTTKHGVIL

SEQ ID NO: 131644 - protein, 249 aa, Unknown
  Bacterial polypetide isolated from the Sargasso Sea
VKETLDAVDKGLIDCGFAWTHYWSGDHPAAMLFGSPVAGGGVGIDNIAFLSWFQYGGGKELYDQLWKEMGRDIKGFMIQPVGPEALGWFPKPIKDMADFRKYKFRTPPGIPGQTYKDIGIASVAMGGGDILPALEAGTIDAAEWCCPKPDLTFGFQKVLKHYYLQGLHQVVVNADFYITGKTYNAMSDHEKKSLEVAANASLAKSLSYRIYENGKALKELTEVHGVILEDTPSDYFTEYMAAAKASLNK

SEQ ID NO: 131645 - protein, 137 aa, Unknown
  Bacterial polypetide isolated from the Sargasso Sea
MKFKNSLFITFEGPEASGKSSQIKLLSKFFLKNKIPYLITREPGGSKVGEILRKIILDKKNSISNAEEILLLMAARLNHINNIIKPALKKGKVVISDRFADSTFVYQGYVNNYGLKEAINLHKKFLNNFLPNKTFLF

SEQ ID NO: 131646 - protein, 321 aa, Unknown
  Bacterial polypetide isolated from the Sargasso Sea
KDFTDTVTELTGGSLKFEILPAGAVVGVKETLDAVDKGLIDCGFAWTHYWSGEHPAAMLFGSPVAGGGIGIDNLAFLSWFQYGGGKALYDQLWKEMNRDIKGFMLQPVGPEALGWFPKPIKDMADFRKYKFRTPPGIPGQTYKDIGIASVAMGGGDILPALEAGTIDAAEWCCPKPDLTFGFQKVLKHYYLQGLHQVVVNADFYITGKTYDAMSDHEKKSLEVAADASLIKSLSYRILSNGEALQELTTKHGVILEDTPSDYFTEYMAAAKATLNKNAEKNAFFKEVYDSMKVFADKAVPFWSGAQMSNAKARMAHAATLK

SEQ ID NO: 131647 - protein, 120 aa, Unknown
  Bacterial polypetide isolated from the Sargasso Sea
MKLISFEGIEGVGKSTQINLIQEWLKIKGFSSKLIREPGSTGFGEKIRDLLLSNDSDISAHTELLLMFAARAEMVNEHMFNSKEDIILCDRYFHASIAYQGYGRKLSLELNEKLIQNINC

SEQ ID NO: 131648 - protein, 68 aa, Unknown
  Bacterial polypetide isolated from the Sargasso Sea
MNRKGKFIVVEGLEGAGKSSAIATVKQYLQRAGHEVVCTREPGGTALAESLRTLVKQVQDDEVVAPQT

SEQ ID NO: 131649 - protein, 226 aa, Unknown
  Bacterial polypetide isolated from the Sargasso Sea
MGRDIKGFMIQPVGPEALGWFPKPIKDMADFRKYKFRTPPGIPGQTYKDIGIASVAMGGGDILPALEAGTIDAAEWCCPKPDLTFGFQKVLKHYYLQGLHQVVVNADFYITGKTYNAMSDHEKKSLEVAANASLAKSLSYRIYENGKALQELTTKHGVILEDTPSDYFTEYMAAAKASLNKNAAENKFFNEVYTSMKKFADIAVPFWSGAQMSNAKLGMAHAATLK

SEQ ID NO: 131650 - protein, 198 aa, Unknown
  Bacterial polypetide isolated from the Sargasso Sea
MKIISFEGIEGVGKSTQINLLKDYLESKNYLVEVYREPGSTFVGEKIRDILLDSNNDLSNETELLLMFAARSELIDKKLNTSQCDYLLLDRFYDASMAYQGYGRKLSKDFITSLTLFINCPIPDLSFLLDISVSEGFKRKNSDVRDRIESSSNDFFNKVRRGYKAIAKANKNRFEIINAVNDIDKIHQIVINKLQSKK

SEQ ID NO: 131651 - protein, 191 aa, Unknown
  Bacterial polypetide isolated from the Sargasso Sea
LLAHGVTVHLTREPGGTPVAEAIRAILLEDHDEMIDPKTEALLMSASRAQHIARVIEPSLTNEHWVLCDRFFDASLAYQGGGRGLSMPDMQQLQNWVVGTNVPDLTILLDAPVSVCLSRIENRTHRDRIEQETHDFFEQVRQTYLALAQAQPERIHIIDASQSFEAVAQDTKALIHRHFVDHLGMLARDSA

SEQ ID NO: 131652 - protein, 86 aa, Unknown
  Bacterial polypetide isolated from the Sargasso Sea
MYRKKSLFITFEGIEGSGKTYQSKKLYNKLKKKNLPVIFTREPGGSKSAEIIRDIILNGAKNKFNKYTDALLYLASRSEHIKNLLA

SEQ ID NO: 131653 - protein, 230 aa, Unknown
  Bacterial polypetide isolated from the Sargasso Sea
LWKEMERDIKGFMLQPVGPEALGWFPKPIKDMADFRKYKFRTPPGIPGQTYKDIGIASVAMGGGDILPALEAGTIDAAEWCCPKPDLTFGFQKVLKHYYLQGLHQVVVNADFYITGKTYKAMSAHEKKSLEVAANASLAKSLSYRIYENGKALQELTTKHGVKLEDTPSDYFTEYMAAAKATLNKNAAKNKFFAEVYDSMKDFADVAVPFWSGAQMSNAKLGMAHAATLK

SEQ ID NO: 131654 - protein, 188 aa, Unknown
  Bacterial polypetide isolated from the Sargasso Sea
MLKDFTDTVTKLTGGSLKFEIMPAGTVVGVKETLDAVDKGLIDCGFAWTHYWSGEHPAAMLFGSPVAGAGVGIDNIAFLSWFLSGGGEQLYDQLWKEMKRDIKGFMLQPVGPEALGWFPEPIKNMDDFRKLKFRTPPGIPGQTYKDIGIASVAMGGGDILPALEAGTIDAAEWCCPKPDMVFGFQIGS

SEQ ID NO: 131655 - protein, 220 aa, Unknown
  Bacterial polypetide isolated from the Sargasso Sea
MKKIISMLFAVAMVFGFISNANAAKTLKCQTVLNTKADEVKMLKDFTDTVTTLTAGSLKFEILPAGAVVGVKETLDAVDKGLIDCGFAWTHYWSGDHPAAMLFGSPVAGGGVGIDNIAFLSWFQYGGGKELYDQLWKEMGRDIKGFMIQPVGPEALGWFPKPIKDMADFRKYKFRTPPGIPGQTYKDIGIASVAMGGGDILPALEAGTIDAAEWCCPKPD

SEQ ID NO: 131656 - protein, 62 aa, Unknown
  Bacterial polypetide isolated from the Sargasso Sea
MFITFEGIEHCGKTTQSRLIADRLRNTRRSVVLTREPGGTPLGTAIRELVLQPSTDPIDTTA

SEQ ID NO: 131657 - protein, 231 aa, Unknown
  Bacterial polypetide isolated from the Sargasso Sea
MLKDFTDTVTELTSGSLKFEILPAGAVVGVKETLDAVDKGLIDCGFAWTHYWSGDHPAAMLFGSPVAGGGVGIDNLAFLSWFQYGGGKELYDQLWKEMGRDIKGFMLQPVGPEALGWFPKPIKDMADFRKYKFRTPPGIPGQTYKDIGIASVAMGGGDILPALEAGTIDAAEWCCPKPDMVFGFQKVLKHYYLQGLHQVVVNADFYITGKTYNAMSAHEKKSLEVAANASL

SEQ ID NO: 131658 - protein, 99 aa, Unknown
  Bacterial polypetide isolated from the Sargasso Sea
MKVISFEGFEYSGKSTQIKLLKKYFIKNNIKSTFTREPGGNKDLEKIRNVILKSNFDNLSLIMFFFSSRFALLSSIKKNDFIVFDRFFDSTYAYQKYNS

SEQ ID NO: 131659 - protein, 268 aa, Unknown
  Bacterial polypetide isolated from the Sargasso Sea
MKKIISFVFGAVLVFGFMSNASAKTLKCQTVLNTKADEVKMLKDFTDTVTTLTDGSLKFEILPAGAVVGVKETLDAVDKGLIDCGFAWTHYWSGDHPAAMLFGSPVAGGGVGIDNLAFLSWFQYGGGKELYDQLWKEMGRDIKGFMLQPVGPEALGWFPKPIKDMADFRKYKFRTPPGIPGQTYKDIGIASVAMGGGDILPALEAGTIDAAEWCCPKPDLTFGFQKVLKHYYLQGLHQVVVNADFYITGKTYNAMTAHEKKSLEVAAN

SEQ ID NO: 131660 - protein, 65 aa, Unknown
  Bacterial polypetide isolated from the Sargasso Sea
MKGKFIVIEGIDGCGKTTQIDELSQWLPNSGLLKKESTLITTREPGGSLLGKKLRELILDNNENN

SEQ ID NO: 131661 - protein, 280 aa, Unknown
  Bacterial polypetide isolated from the Sargasso Sea
MWFPWTHYWSGDHPAAMLFGSPVAGGGVGIDNIAFLSWFQYGGGKELYDQLWKEMGRDIKGFMIQPVGPEALGWFPKPIKDMADFRKYKFRTPPGIPGQTYKDIGIASVAMGGGDILPALEAGTIDAAEWCCPKPDLTFGFQKVLKHYYLQGLHQVVVNADFYITGKTYNAMSDHEKKSLEVAANASLAKSLSYRIYENGKALKELTEVHGVILEDTPSDYFTEYMAAAKASLNKNAADNKFFNEVYTSMKEFADIAVPFWSGSQMSNAKLGMAHAATLK

SEQ ID NO: 131662 - protein, 230 aa, Unknown
  Bacterial polypetide isolated from the Sargasso Sea
MLKDFTDNVTKLTGGSLKFEIMPAGTVVGVKETLDAVDKGLIDCGFAWTHYWSGEHPAAMLFGSPVAGAGVGIDNIAFLSWFLSGGGEQLYDQLWKEMKRDIKGFMLQPVGPEALGWFPEPIKNMDDFRKLKFRTPPGIPGQTYKDIGIASVAMGGGDILPALEAGTIDAAEWCCPKPDMVFGFQKVLKHYYLQGLHQVVVNADFYVNGTKYNALTDHEKFSLKMAADAS

SEQ ID NO: 131663 - protein, 288 aa, Unknown
  Bacterial polypetide isolated from the Sargasso Sea
AVDKGLIDCGFAWTHYWSGDHPAAMLFGSPVAGGGVGIDNLAFLSWFQYGGGKELYDQLWKEMGRDIKGFMLQPVGPEALGWFPKPIKNMADFRKYKFRTPPGIPGQTYKDIGIASVAMGGGDILPALEAGTIDAAEWCCPKPDLTFGFQKVLKHYYLQGLHQVVVNADFYITGKTYNAMSAHEKKSIEVAANASLAKSLSYRIYENGKALRELTTKHGVILEDTPSDYFTEYMAAAKATLNKNAEKNAFFKKVYDSMKEFADVAVPFWAGAQMSNAKLGMAHAATLK

SEQ ID NO: 131664 - protein, 293 aa, Unknown
  Bacterial polypetide isolated from the Sargasso Sea
GVKETLDAVDKGLIDCGFAWTHYWSGEHPAAMLFGSPVAGAGVGIDNIAFLSWFLSGGGEQLYDQLWKEMKRDIKGFMLQPVGPEALGWFPEPIKNMDDFRKLKFRTPPGIPGQTYKDIGIASVAMGGGDILPALEAGTIDAAEWCCPKPDMVFGFQKVLKHYYLQGLHQVVVNADFYLNGTKYNGLTDHEKTSLKVAADASLMKSLARRILVNGEALHELTTKHGVQLHDTPKDYFVEYMAAANATLEKNSKENAFFKKVWDSQKKFADTAVPFWAGAQMSNAQLGMAHAAT

SEQ ID NO: 131665 - protein, 269 aa, Unknown
  Bacterial polypetide isolated from the Sargasso Sea
ILVIGFTSSANAAKTLKCQTVLNTKADEVKMLKDFTDTVTTLTGGSLKFEILPAGAVVGVKETLDAVDKGLIDCGFAWTHYWSGDHPAAMLFGSPVAGGGVGIDNIAFLSWFQYGGGKELYDQLWKEMGRDIKGFMIQPVGPEALGWFPKPIKDMADFRKYKFRTPPGIPGQTYKDIGIASVAMGGGDILPALEAGTIDAAEWCCPKPDLTFGFQKVLKHYYLQGLHQVVVNADFYITGKTYNAMSDHEKKSLEVAANASLAKSLSYRI

SEQ ID NO: 131666 - protein, 230 aa, Unknown
  Bacterial polypetide isolated from the Sargasso Sea
LWKEMGRDIKGFMIQPVGPEALGWFPKPIKDMADFRKYKFRTPPGIPGQTYKDIGIASVAMGGGDILPALEAGTIDAAEWCCPKPDLTFGFQKVLKHYYLQGLHQVVVNADFYITGKTYKAMSAHEKKSLEVAANASLAKSLSYRIYENGKALQELTTKHGVILEDTPSDYFTEYMAAAKASLNKNAAENKFFNEVYNSMKKFADIAVPFWSGAQMSNAKLGMAHAATLK

SEQ ID NO: 131667 - protein, 208 aa, Unknown
  Bacterial polypetide isolated from the Sargasso Sea
MFISFEGGEGVGKSTQIDLLKKFLSKKNTKVTSTREPGGTREGEYIRKLLVSGDKNTWDSYSEALIFNALRREHINKLINPAIQNGEIILCDRYIDSTVVYQGLVGKIDEQKLLNLHNTYCYGLYPDLTLFLHLNPKIGLDRTINRNNKNENRFEKLGLDYHQKILDGFNSLYKKYPKRIIKIDASESKQSISDKINLHVLELLNIND

SEQ ID NO: 131668 - protein, 139 aa, Unknown
  Bacterial polypetide isolated from the Sargasso Sea
MQGRFIVLDGLDGCGKSTQMQHLSQWLPASGLMPPGARLIGTREPGGTELGRAVRELLLQTSRERAPAPTAELLLYAADRAQHVETLIRPALERGDWVLSDRFSGSTMAYQGYGRGLDRRLIEQLEAIATTGLQPVSRS

SEQ ID NO: 131669 - protein, 265 aa, Unknown
  Bacterial polypetide isolated from the Sargasso Sea
MGTLLLTVFSVTGANAKTLKCQTVINAKADEVVMLKDFGQTVTDLTGGSIQFEILPAGTVVGVKETLDAVDKGLIDCGFAWTHYWSGEHPAAMLFGSPVAGAGVGIDNIAFLSWFQYGGGKELYDQLWKEMKRDIKGFMLQPVGPEALGWFKEPINSMDDFRKYKFRTPPGIPGQTYKDIGVASVAMGGGDILPALEAGTIDAAEWCCPKPDSVFGFQKVLKHYYLQGLHQVVVNADLYVNGKVYRSMTDHEKKAMEVAANASLS

SEQ ID NO: 131670 - protein, 212 aa, Unknown
  Bacterial polypetide isolated from the Sargasso Sea
MKGKFIVIEGIDGCGKTTQIDELSKWLPNSGLINKGSKLITTREPGGSLLGKKLRGLILDNNEDNKPSSLAELLLYSADRAEHVSKIISPALNNNDWVISDRFSDSTLAYQGYGRNINLEIIKNIESIVCQGESPDLTFFLEISPEESIFRRKNEIPDRIESEGIRFLEKVNEGFKIIAKQKNWKVISASQNIKTISNQIKETILNNLSNNK

SEQ ID NO: 131671 - protein, 162 aa, Unknown
  Bacterial polypetide isolated from the Sargasso Sea
MKGKFIVIEGIDGCGKTTQIDELSKWLPNSGLMKTGAKLITTREPGGSLLGKKLRGLILDNNENNKPSSLAELLLYSADRAEHVSKIISPALNNNDWVISDRFSDSTLAYQGYGRNINLEIIKNIESIVCQGVSPDLTFFLEISPEESIFRRKNEIPDRIES

SEQ ID NO: 131672 - protein, 79 aa, Unknown
  Bacterial polypetide isolated from the Sargasso Sea
MYKKRNFFITFEGIEGSGKSFQSKKLFKKIKNLGLPAIYTREPGGTVGAEKIRKILLDDYFHSKLKEKFDKNTDTLLYL

SEQ ID NO: 131673 - protein, 128 aa, Unknown
  Bacterial polypetide isolated from the Sargasso Sea
MRGKFIVIEGIDGCGKTTQIDEISKWLPTSGLMGDNAKLVTTREPGGSLLGKKLRNLILDNNKNNKPSSLAELLLYSADRAEHVSKIISPSLEKKDWVLSDRFADSTLAYQGYGRNINLEIIKNIESI

SEQ ID NO: 131674 - protein, 295 aa, Unknown
  Bacterial polypetide isolated from the Sargasso Sea
GVKETLDAVDKGLIDVGFAWTHYWSGDHPAAMLFGSPVAGGGVGIDNLAFLSWFQYGGGKELYDQLWKEMGRDIKGFMLQPVGPEALGWFPKPIKDMADFRKYKFRTPPGIPGQTYKDIGIASVAMGGGDILPALEAGTIDAAEWCCPKPDLTFGFQKVLKHYYLQGLHQVVVNADFYITGKTYNAMSDHEKKSLEVAANASLAKSLSYRIYENGKALQELTTKHGVKLEDTPSDYFTEYMAAAKATLNKNAAKNKFFNEVYTSMKNFADVAVPFWSGAQMSNAKLGMAHAATLK

SEQ ID NO: 131675 - protein, 202 aa, Unknown
  Bacterial polypetide isolated from the Sargasso Sea
MFITFEGIEGSGKSTQVELLQESLKKIHFDVVATREPGWGKVGKLIRKIILDYDDIEIEPIAELSLFCADRAQHIQELIRPKLAEGKIVLCDRFYDSTIAYQGYGRGIDTELVKKLGVHAALGVNPTITFLIDISVNTALSRIVSRPGRNRIDDESFEFHSRVRKAYLSLQQNQPNRIFIINGEQEIHDVHEEIKKILKEKF

SEQ ID NO: 131676 - protein, 241 aa, Unknown
  Bacterial polypetide isolated from the Sargasso Sea
GGGVGIDNIAFLSWFQYGGGKELYDQLWKEMGRDIKGFMIQPVGPEALGWFPKPIKDMADFRKYKFRTPPGIPGQTYKDIGIASVAMGGGDILPALEAGTIDAAEWCCPKPDLTFGFQKVLKHYYLQGLHQVVVNADFYITGKTYNAMSDHEKKSLEVAANASLAKSLSYRIYENGKALQELTTKHGVILEDTPSDYFTEYMAAAKASLNKNAKENKFFNEVYNSMKEFADIAVPFWSGAQ

SEQ ID NO: 131677 - protein, 205 aa, Unknown
  Bacterial polypetide isolated from the Sargasso Sea
MNKKKGLFITFEGPEASGKSSQILLLEKYLKKNKIPFIRTREPGGTKIAESLRKLILKVKSDINIQEEILMLMAARSHHINNVIVPSLKKGMLVISDRFADSTFVYQGYVNKFGIQKAKNLHKNLLNNFLPHKTFLFELSTKLIISRLKQRKFKNKYDKLDRKFHDTVNKGYKLIYNNKRFVKIDASKPITQINNEIINYINSLL

SEQ ID NO: 131678 - protein, 209 aa, Unknown
  Bacterial polypetide isolated from the Sargasso Sea
MTGRFIVLEGIDGCGKTTQIRHLVEWLPNSGLMPKGAAVVCTREPGGTPLGRSIRELLLHTSDQEAPAPTAELLLYAADRAQHVETLIRPALERGDWVISDRFSGSTLAYQGYGRGLDRDLIQRLEQIATAGLQPDLTLWLRLSVQESLQRRLGDKEDRIEAEGAAFLERVAQGFAQLAEQRSWCAIAGDQSASAVRAALERQLMEHLA

SEQ ID NO: 131679 - protein, 213 aa, Unknown
  Bacterial polypetide isolated from the Sargasso Sea
MNKNKVEKGTLITFEGIDGSGKSTQIRRLKSYLKKNNIKNFFFTREPGGSELGNRVKNFLINNKNNSLSKQTQILLLIAARYEHYVKLILPLLKKNKIVVSDRFQDSTFAYQCGNNKDLHNLLTNFNHLLFKKFQPNLTFLLDINPNVSLKRISIRKTNNAFDKKTLSFYKNVRANYLKLAEKNSRIKVLNAEKNQDEIFNNITKTIFKYIKL

SEQ ID NO: 131680 - protein, 188 aa, Unknown
  Bacterial polypetide isolated from the Sargasso Sea
MAERLREQGIDVLLTREPGGTPLAERVRELLLAPSDEPMAADTELLLVFAARAQHLAQVIRPALARGSVVLCDRFTDATYAYQGGGRGLSEARIAELETFVQGSLRPDLTLIFDLPVEVGLARAAARGRLDRFEQEGRQFFDAVRQAYLRRAAEQPQRYRILDAAQSLSEVQQALNALLPQLLELQRG

SEQ ID NO: 131681 - protein, 138 aa, Unknown
  Bacterial polypetide isolated from the Sargasso Sea
MKGKFIVIEGIDGCGKTTQIDELSKWLPKSGLINKGSKLITTREPGGSLLGKKLRGLILDNNENNKPSSLAELLLYSADRAEHVSKIISPALNKNNWVISDRFSDSTLAYQGYGRKIDLEIIKQIESIVCQGEYPDIT

SEQ ID NO: 131682 - protein, 230 aa, Unknown
  Bacterial polypetide isolated from the Sargasso Sea
LWKEMGRDIKGFMIQPVGPEALGWFPKPIKDMADFRKYKFRTPPGIPGQTYKDIGIASVAMGGGDILPALEAGTIDAAEWCCPKPDLTFGFQKVLKHYYLQGLHQVVVNADFYITGKTYNAMSDHEKKSLEVAANASLAKSLSYRIYENGKALQELTTKHGVILEDTPSDYFTEYMAAAKASLNKNAKENKFFNEVYNSMKAFADIAVPFWSGAQMSNAKLGMAHAATLK

SEQ ID NO: 131683 - protein, 209 aa, Unknown
  Bacterial polypetide isolated from the Sargasso Sea
MKGKFIVIEGIDGCGKTTQIDELSKWLPNSGLIKKGSKLITTREPGGSLLGKKIRGLILDNNKNNKPSSLAELLLYSADRAEHVSKIISPALNNNDWVISDRFSDSTLAYQGYGRNINLEIIKNIELIVCQGESPDLTFFLEISPEESIFRRKNEIPDRIESEGIRFLEKVNEGFKLIAKEKNWKVISASQNIETISDQIKETLLNNFS

SEQ ID NO: 131684 - protein, 98 aa, Unknown
  Bacterial polypetide isolated from the Sargasso Sea
MKDGLFITFEGGEGSGKTTQIALLSDYLVSKSFKVYVTREPGGSIGAESIRNLLVTGNPDKWDSETEALLMYAARRDNYIRVIRPNLNEGKIVISDRF

SEQ ID NO: 131685 - protein, 199 aa, Unknown
  Bacterial polypetide isolated from the Sargasso Sea
MKVISFEGFEYSGKSTQIKLLKKYFIKNNIKSTFTREPGGNKDLEKIRNVILKSNFDNLSLIMFFFASRFALLSSIKKNDFIVFDRFFDSTYAYQKYNSREKKLIISLIKLIDKKFIPKITFYLKLDKKNLIRRKNKRLYSNKFDKKYFGQFSRIQKNYEEISKIKIGERKFVTIDASLSANEVHDKIIINLKKCKLIK

SEQ ID NO: 131686 - protein, 110 aa, Unknown
  Bacterial polypetide isolated from the Sargasso Sea
MTKKKGLFITFEGPEASGKSSQILLLEKYLKKNKIQFITTREPGGTKIAESLRNLILKVKTDINIQQEILLLMAARSHHINNVIIPALKKGKLVISDRFADSTFVYQGYV

SEQ ID NO: 131687 - protein, 140 aa, Unknown
  Bacterial polypetide isolated from the Sargasso Sea
MADRQGYFISFEGGEGSGKSTQIRLLVEWVEQVAPKWRPLTTREPGGTEAAENIRTLLVTGSADKWRPATEAMLMSASRHEHVENVIRPALAEGRIVISDRYSDSTTVYQGLVGGVDSASIAALHHLACNGLVPDITFLL

SEQ ID NO: 131688 - protein, 180 aa, Unknown
  Bacterial polypetide isolated from the Sargasso Sea
MTKFITFEGIDASGKSTQAKILYKILKRQKKKVIITREPGGTKFSEKIRKIVVKDEIQPLTELFLFYAARNEHFDKIKNYLKKNYIVICDRYIHSTYVYQQHQQKIERKFIHLLQNKISRYSYPDVTFFIDISAVEAKKRLKLRKNKDKFDNYSLKQMNFLRKAYYEEYKKGKNIFKLNG

SEQ ID NO: 131689 - protein, 208 aa, Unknown
  Bacterial polypetide isolated from the Sargasso Sea
MSISKGSFITFEGIDGCGKSTQVKMLVESMNSVEKNTILVREPGGTTISEEIREILLHRHLSDISDRTEALLMTGSRAQLTYEIVMPNLINGKNVVADRFYDSTLAYQGGGRKLDLDWLIKLNHFATYELEPDVTFLVDILPEEASKRKSKEEDRIERAGIELQTLVRNTYLELSIKFKERFVVIDGHETIENIHTSILKELRRRQII

SEQ ID NO: 131690 - protein, 110 aa, Unknown
  Bacterial polypetide isolated from the Sargasso Sea
MKIISFEGIEGVGKSTQIRLLKDFLESKNLDVEVLREPGSTLAGEKIRDILLDNNNKLSNETELLLMFAARSELVNKTILDNQSDYLLLDRFFDASMAYQGYGREISKKF

SEQ ID NO: 131691 - protein, 226 aa, Unknown
  Bacterial polypetide isolated from the Sargasso Sea
MGRDIKGFMIQPVGPEALGWFPKPIKTMADFRKYKFRTPPGIPGQTYKDIGVASVAMGGGDILPALEAGTIDAAEWCCPKPDLTFGFQKVLKHYYLQGLHQVVVNADFYITGKTYKAMSAHEKKSLEVAANASLAKSLSYRIYENGKALRELTTKHGVKLEDTPSDYFTEYMAAAKKSLETNAAKNAFFKEVWDSMKEFADVAVPFWSGAQMSNAKLGMAHAATLK

SEQ ID NO: 131692 - protein, 108 aa, Unknown
  Bacterial polypetide isolated from the Sargasso Sea
MKGKFIVIEGIDGCGKTTQIDELSKWLPKSGLLKKGCNLITTREPGGSLLGKKLRGLILDNNENNKPSSLAELLLYSADRAEHVSKIISPALNNNNWVISDRFSDSTL

SEQ ID NO: 131693 - protein, 165 aa, Unknown
  Bacterial polypetide isolated from the Sargasso Sea
MIDLVARFITIEGGEGAGKSTAQVRLKATLESRGISVVCTREPGGTPLAESIRQTLLDVEGEAPVEMAELLLIFASRAQHLEKVIEPALAAGKWVICDRFTDATFAYQGSARGLSSELISTLEQLVQGGRQPDAVILMDLKPHIGMKRAKSRGPLDRFEQEHNHF

SEQ ID NO: 131694 - protein, 245 aa, Unknown
  Bacterial polypetide isolated from the Sargasso Sea
EILPAGAVVGVKETLDAVDKGLIDCGFAWTHYWSGDHPAAMLFGSPVAGGGVGIDNIAFLSWFQYGGGKELYDQLWKEMGRDIKGFMIQPVGPEALGWFPKPIKDMADFRKYKFRTPPGIPGQTYKDIGIASVAMGGGDILPALEAGTIDAAEWCCPKPDLTFGFQKVLKHYYLQGLHQVVVNADFYITGKTYNAMSDHEKKSLEVAANASLAKSLSYRIYENGKALQELTTKHGVILEDTPSDY

SEQ ID NO: 131695 - protein, 276 aa, Unknown
  Bacterial polypetide isolated from the Sargasso Sea
MLKDFTDTVTELTSGSLKFEILPAGAVVGVKETLDAVDKGLIDCGFAWTHYWSGDHPAAMLFGSPVAGGGVGIDNLAFLSWFQYGGGKELYDQLWKEMGRDIKGFMLQPVGPEALGWFPKPIKDMADFRKYKFRTPPGIPGQTYKDIGIASVAMGGGDILPALEAGTIDAAEWCCPKPDMVFGFQKVLKHYYLQGLHQVVVNADFYITGKTYNAMTAHEKKSLEVAANASLAKSLSYRIYENGKALQQLTTKHGVILEDTPSDYFVEYMAAAKATL

SEQ ID NO: 131696 - protein, 218 aa, Unknown
  Bacterial polypetide isolated from the Sargasso Sea
MLQPVGPEALGWFPRKIKNMDDFRTFKFRTPPGIPGQTYKDIGIASVAMGGGDILPALEAGTIDAAEWCCPKPDMVFGIHKVLKHYYLQGLHQVVVNADFYINGSKYKKLSDHEKNALKVAADASLMRSLAYRIKVNGEALKELTTKHGVILEDTPADYFPEYMAAAKATLEKNSKENAFFKEVYDSMVNFANVAVPFWSGAQSSNAKLGMAYANSLK

SEQ ID NO: 131697 - protein, 197 aa, Unknown
  Bacterial polypetide isolated from the Sargasso Sea
MFIGFTVSANAAKTLKCQTVISAKADEVKMLKDWGNDITALTNGEIKFEILPAGTVVGVKETLDAVDKGLIDCGFAWTHYWSGEHPAAMLFGSPVAGAGVGIDNIAFLSWFQYGGGKELYDQLWKEMKRDIKGFMLQPVGPEALGWFKEPINSMDDFRKYKFRTPPGIPGQTYKDIGVASVAMGGGDILPALEAGTI

SEQ ID NO: 131698 - protein, 299 aa, Unknown
  Bacterial polypetide isolated from the Sargasso Sea
TSGSLKFEILPAGAVVGVKETLDAVDKGLIDCGFAWTHYWSGDHPAAMLFGSPVAGGGVGIDNIAFLSWFQYGGGKELYDQLWKEMGRDIKGFMIQPVGPEALGWFPKPIKDMADFRKYKFRTPPGIPGQTYKDIGIASVAMGGGDILPALEAGTIDAAEWCCPKPDLTFGFQKVLKHYYLQGLHQVVVNADFYITGKTYNAMSDHEKKSLEVAANASLAKSLSYRIYENGKALKELTEVHGVILEDTPSDYFTEYMAAAKASLNKNAAENKFFNEVYTSMKEFADIAVPFWSVPKCLM

SEQ ID NO: 131699 - protein, 102 aa, Unknown
  Bacterial polypetide isolated from the Sargasso Sea
MKGKFIVIEGIDGCGKTTQIDELSKWLPNSGLIKKGSKLITTREPGGSHLGKRLRGLILDNNKNNKPSSLAELLLYSADRAEHVSKIISPALNNNDWVISDR

SEQ ID NO: 131700 - protein, 66 aa, Unknown
  Bacterial polypetide isolated from the Sargasso Sea
MKGKFIVIEGIDGCGKTTQIDELSKWLPNSGLIKKGSKLITTREPGGSLLGKKLRRLILDNNENNK

SEQ ID NO: 131701 - protein, 201 aa, Unknown
  Bacterial polypetide isolated from the Sargasso Sea
MFAAFLVLGFISNANAKTLKCQTVLNTKADEVKMLKDFTDTVTTLTDGSLKFEILPAGAVVGVKETLDAVDKGLIDCGFAWTHYWSGDHPAAMLFGSPVAGGGVGIDNIAFLSWFQYGGGKELYDRLWKEMGRDIKGFMIQPVGPEALGWFPKPIKDMADFRKYKFRTPPGIPGQTYKDIGIASVAMGGGDILPALEAGTI

SEQ ID NO: 131702 - protein, 224 aa, Unknown
  Bacterial polypetide isolated from the Sargasso Sea
RDIKGFMIQPVGPEALGWFPKPIKNMADFRKYKFRTPPGIPGQTYKDIGIASVAMGGGDILPALEAGTIDAAEWCCPKPDLTFGFQKVLKHYYLQGLHQVVVNADFYITGKTYNAMTAHEKKSLEVAANASLAKSLSYRIYENGKALRELTTKHGVILEDTPTDYFSEYMAAAKASLNKNAAENAFFNEVYTSMKEFADIAVPFWSGAQMSNAKLGMAHAATLK

SEQ ID NO: 131703 - protein, 76 aa, Unknown
  Bacterial polypetide isolated from the Sargasso Sea
MKGKFIVIEGIDGCGKTTQIDELSKWLPNSGLIKKGSKLITTREPGGSLLGKKLRGLILDNNENNKPSSLAELLLY

SEQ ID NO: 131704 - protein, 189 aa, Unknown
  Bacterial polypetide isolated from the Sargasso Sea
MGRLLVFEGIDGSGKSTQIEMLSNFLKSQKQKVFVTREPGGTEFGEKCRELFLAEKLDGLTEACLAFASRNEHILQKIKPALRLGYWVLCDRFSDSTIAYQGYGRGVEINFLREMATNIERQLSDIRIIYVHTSLEKCLERIKKRSGVKNKFDNSSKIFYEKVIYGYSNIVKERAGKITQVDGNDEIKK

SEQ ID NO: 131705 - protein, 240 aa, Unknown
  Bacterial polypetide isolated from the Sargasso Sea
MKKIISMLFAVAMVFGFISNANAAKTLKCQTVLNTKADEVKMLKDFTDTVTELTGGSLKFEILPAGAVVGVKETLDAVDKGLIDCGFAWTHYWSGEHPAAMLFGSPVAGGGIGIDNLAFLSWFQYGGGKALYDQLWKEMNRDIKGFMLQPVGPEALGWFPKPIKDMADFRKYKFRTPPGIPGQTYKDIGIASVAMGGGDILPALEAGTIDAAEWCCPKPDLTFGFQKSFKALLLTRFTPK

SEQ ID NO: 131706 - protein, 198 aa, Unknown
  Bacterial polypetide isolated from the Sargasso Sea
MIENKSPPFFITFEGGEGVGKTTQITRLSKFLSKLSVGHIVTREPGGSKTAEIIREILVNGDPDQWDSKTELLLHFAARRDHLARKIKPALDDGLWVLCDRFVDSTYAYQGYGHGIATTLIDNLYSFVADEVFPDLTFILDLSPEKGIERTKKRSLANKEVLLEDRYEKMEIAFHKRIRDGFKEIALADSERCVLIDA

SEQ ID NO: 131707 - protein, 71 aa, Unknown
  Bacterial polypetide isolated from the Sargasso Sea
MSRKKGLFITFEGPEASGKSSQILLLEKYLKKNKISFITTREPGGTKIAESLRKLILKVKSDINIKRKYYA

SEQ ID NO: 131708 - protein, 103 aa, Unknown
  Bacterial polypetide isolated from the Sargasso Sea
MFITFEGIEGSGKSTQIKMLKEALLGKGHEVIVLREPGGTILGEKVREAFLEKTIEKISVETETFLLYASRKHLDQNLLKPSLAEKKFVICDRYYDATEAYQC

SEQ ID NO: 131709 - protein, 262 aa, Unknown
  Bacterial polypetide isolated from the Sargasso Sea
FGSPVAGGGVGIDNIAFLSWFQYGGGKELYDQLWKEMGRDIKGFMIQPVGPEALGWFPKPIKDMADFRKYKFRTPPGIPGQTYKDIGIASVAMGGGDILPALEAGTIDAAEWCCPKPDLTFGFQKVLKHYYLQGLHQVVVNADFYITGKTYKAMSAHEKKSLEVAANASLAKSLSYRIYENGKALQELTTKHGVILEDTPSDYFTEYMAAAKASLNKNAKENKFFNEVYNSMKEFADIAVPFWSGAQMYNAKLGMAHAATLK

SEQ ID NO: 131710 - protein, 228 aa, Unknown
  Bacterial polypetide isolated from the Sargasso Sea
MKKIISMLFAVAMVFGFISNANAAKTLKCQTVLNTKADEVKMLKDFTDTVTTLTAGSLKFEILPAGAVVGVKETLDAVDKGLIDCGFAWTHYWSGDHPAAMLFGSPVAGGGVGIDNIAFLSWFQYGGGKELYDQLWKEMGRDIKGFMIQPVGPEALGWFPKPIKDMADFRKYKFRTPPGIPGQTYKDIGIASVAMGGGDILPALEAGTIDAAEWCCPKPDLTFGFQKV

SEQ ID NO: 131711 - protein, 131 aa, Unknown
  Bacterial polypetide isolated from the Sargasso Sea
MSIGKFITIEGCEGTGKSTQIKILEKNLKKNIKIKTTREPGGSYNAEQIRKLIFKSSIKNLSPMTEALLHISARSDHLETLIKPNLRKGIWVICDRFRDSTIAYQGYGNGLKTNVLEIMQNSIFNNFHADL

SEQ ID NO: 131712 - protein, 278 aa, Unknown
  Bacterial polypetide isolated from the Sargasso Sea
DKGLIDCGFAWTHYWSGDHPAAMLFGSPVAGGGVGIDNLAFLSWFQYGGGKELYDQLWKEMGRDIKGFMLQPVGPEALGWFPKPIKNMADFRKYKFRTPPGIPGQTYKDIGIASVAMGGGDILPALEAGTIDAAEWCCPKPDLTFGFQKVLKHYYLQGLHQVVVNADFYITGKTFNAMSAHEKKSIEVAANASLAKSLSYRIYENGKALRELTTKHGVILEDTPSDYFTEYMAAAKATLNKNAEKNAFFKKVYDSMKEFADVAVPFWAGAQMSNAKLG

SEQ ID NO: 131713 - protein, 210 aa, Unknown
  Bacterial polypetide isolated from the Sargasso Sea
MIKNFFITFEGIDGSGKSTQAKLLVDKLASINLETLFLREPGGTSISEEIRSVLLNNRKDEMSSRTEALLMCASRAQLTKDIIIPEMKAGKWIVADRYADSTLAYQGGGRGIDLDWLIKVNHFATYETQPDLTFYIDVDPEIGAKRRETMVSDRIENAGLEFQKNIRAKYLEIVDKFSKRCVTVDGNLSIDEISQIIWRITKDRTSIEKT

SEQ ID NO: 131714 - protein, 181 aa, Unknown
  Bacterial polypetide isolated from the Sargasso Sea
MSKAYFITFEGIDGSGKSTQAKLLIDKLNSLSIKTCFVREPGGTEIAEEIRSVLLSNRDEEMSSRTEALLMCASRAQLTKNIIVPELKSGKWVIADRYSDSTLAYQGGGREINTDWLIELNEFATFSTLPDITFYIDVDESTGLQRRKNNSADRIEGAGLQFQRAIREKYLEIIDNFSDRC

SEQ ID NO: 131715 - protein, 169 aa, Unknown
  Bacterial polypetide isolated from the Sargasso Sea
MSLFITFEGGEGTGKSTQIELLRLSLEGLGRKVLQHREPGGSPLGEYLRAWLMDNTRSLEPASELLLFTAARAELVRTVLKPKLNAGFDILLDRYADSTTAYQGFARNVPMRYVNSANNLAKDGLTPDLTILLDVPPEISLQRASQRDGAKANQPRFENADIAFHHKVR

SEQ ID NO: 131716 - protein, 358 aa, Unknown
  Bacterial polypetide isolated from the Sargasso Sea
MLFATVLVLGFTSSANAAKTLKCQTVLNTKADEVKMLKDFTDTVTELTSGSLKFEILPAGAVVGVKETLDAVDKGLIDCGFAWTHYWSGDHPAAMLFGSPVAGGGVGIDNLAFLSWFQYGGGKELYDQLWKEMGRDIKGFMLQPVGPEALGWFPKPIKDMADFRKYKFRTPPGIPGQTYKDIGIASVAMGGGDILPALEAGTIDAAEWCCPKPDLTFGFQKVLKHYYLQGLHQVVVNADFYITGKTYNAMSAHEKKSLEVAANASLAKSLSYRIYENGKALQELTTKHGVKLEDTPSDYFTEYMAAAKATLNKNAEKNKFFNEVYTSMKNFADVAVPFWSGAQMSNAKLGMAHAATLK

SEQ ID NO: 131717 - protein, 323 aa, Unknown
  Bacterial polypetide isolated from the Sargasso Sea
MLKDFTDTVTTLTGGSLKFEIMPAGAVVGVKETLDAVDKGLIDCGFAWTHYWSGDHPAAMLFGSPVAGGGVGIDNIAFLSWFQYGGGKELYDRLWKEMGRDIKGFMIQPVGPEALGWFPKPIKDMADFRKYKFRTPPGIPGQTYKDIGIASVAMGGGDILPALEAGTIDAAEWCCPKPDLTFGFQKVLKHYYLQGLHQVVVNADFYITGKTYNAMSAHEKKSLEVAANASLAKSLSYRIYENGKALKELTEVHGVKLEDTPSDYFTEYMAAAKKSLETNAAKNAFFAEVWDSMKEFADIAVPFWSGAQMSNAKLGMAHAATLK

SEQ ID NO: 131718 - protein, 209 aa, Unknown
  Bacterial polypetide isolated from the Sargasso Sea
MDNLFITFEGGEGSGKSTQVGLLKDYLDSQSLNTIITREPGGTPSAEILRDLLTRGKVDKWTAMSEALLMWAARYEHIVDVIDPALKAGKNVICDRFYDSTYAYQGIAHNLGIDKMEKLKELIIGDIEPDLTFILDIDPKIGLKRSLERSNLENRFESYDIDFHNKIRNAFLNISKQNKDRCIVIDASISKQEINKIIISEINQLISNN

SEQ ID NO: 131719 - protein, 358 aa, Unknown
  Bacterial polypetide isolated from the Sargasso Sea
MLFAVTLALGFITNANAAKTLKCQTVLNAKGDEVIMLKDFTDTVTKLTGGSLKFEIMPAGTVVGVKETLDAVDKGLIDCGFAWTHYWSGEHPAAMLFGSPVAGAGVGIDNIAFLSWFLSGGGEQLYDQLWKEMNRNIKGFMLQPVGPEALGWFPEPIKNMDDFRKLKFRTPPGIPGQTYKDIGIASVAMGGGDILPALEAGTIDAAEWCCPKPDMVFGFQKVLKHYYLQGLHQVVVNADFYITGTTYEKFSDHEKNSIKVAADASLMKSLARRILVNGEALHELTTKHGVQLHDTPKDYFVEYMAAANATLNKNAEKNAFFKKVWDSQKKFADTAVPFWSGAQMSNAQLGMAHAATLK

SEQ ID NO: 131720 - protein, 381 aa, Unknown
  Bacterial polypetide isolated from the Sargasso Sea
MRGYFFYKKTMRGKNNMKKIISLVVGTLLLTVMTVTGANSAQTLKCQTVISAKADEVKMLKDFTDTVSELTQGSLKFEIMPAGAVVGVKETLDAVDKGLIDCGFAWTHYWSGDHPAAMLFGSPVAGAGVGIDNIAFLSWFQYGGGKELYDQLWSEMGRDIKGFMLQPVGPEALGWFKEPINSMADFRKYKFRTPPGIPGQTYKDIGVASVAMGGGDILPALEAGTIDAAEWCCPKPDMVFGLHKVLKNYYLQGLHQVVVNADFYLNGSKYKKMSAIEKKALEVAANASLSKSMSYRIYENGKALAELTTKHGVILQDTPADYFPAYMAAAKKSLETNAAKNPFFKKVWDSQKAFADIAVPFWSGSQMSNAKLGMAHAATLK

SEQ ID NO: 131721 - protein, 347 aa, Unknown
  Bacterial polypetide isolated from the Sargasso Sea
MKKIISMLFAVTLLLGFVSNANAAKTLKCQTVLNAKGDEVVMLKDFTDTVTKLTQGSLKFEIMPAGTVVGVKETLDAVDKGLIDCGFAWTHYWSGEHPAAMLFGSPVAGAGVGIDNIAFLSWFLSGGGEQLYDQLWKEMNRNIKGFMLQPVGPEALGWFPEPIKNMDDFRKLKFRTPPGIPGQTYKDIGIASVAMGGGDILPALEAGTIDAAEWCCPKPDMVFGFQKVLKHYYLQGLHQVVVNADFYITGTTYEKFSDHEKNSIKVAADASLMKSLARRILVNGEALHELTTKHGVQLHDTPKDYFVEYMAAANATLNKNANKNAFFKKVWDSQKKFADTAVPFWAG

SEQ ID NO: 131722 - protein, 73 aa, Unknown
  Bacterial polypetide isolated from the Sargasso Sea
MRGKFIVVEGLEGAGKSSVIGLIVQALKDAGKRVEQTREPGGTPMAEAIRECVKHDWDETVSEETELLLMYAA

SEQ ID NO: 131723 - protein, 209 aa, Unknown
  Bacterial polypetide isolated from the Sargasso Sea
MNNLFITFEGGDGSGKSTQVNLLKDYLDNLNFETIKTREPGGTPSAEILRDLLTTGKLERWTPMSEALLMWASRYEHLIHVIEPALNSGKNVICDRFYDSTYAYQGVAHNLGIDKMKKLKKIIIGDIEPDVTFVLDIDPKLGLKRSLDRPNDENRFENYDIDFHNNIRSAFLEIAKKNKDRCVVVDASLNEQEINNLIINVINNLITDK

SEQ ID NO: 131724 - protein, 77 aa, Unknown
  Bacterial polypetide isolated from the Sargasso Sea
MKLITFEGIEGVGKSTQINLVLDWLKTKGFSTKLLREPGSTIFGEKIRELLLSKDSDISAHTELLLMFAARSEMIKE

SEQ ID NO: 131725 - protein, 358 aa, Unknown
  Bacterial polypetide isolated from the Sargasso Sea
MLFATVLVLGFVSNANAAKTLKCQTVLNTKADEVKMLKDFTDTVTELTSGSLKFEILPAGAVVGVKETLDAVDKGLIDCGFAWTHYWSGDHPAAMLFGSPVAGGGVGIDNLAFLSWFQYGGGKELYDQLWKEMGRDIKGFMLQPVGPEALGWFPKPIKDMADFRKYKFRTPPGIPGQTYKDIGIASVAMGGGDILPALEAGTIDAAEWCCPKPDMVFGFQKVLKHYYLQGLHQVVVNADFYITGKTYNAMSAHEKKSLEVAANASLAKSLSYRIYENGKALQQLTTKHGVILEDTPSDYFVEYMAAAKATLNKNAEKNKFFKKVYDSMKDFADVAVPFWSGAQMSNAKLGMAHAATLK

SEQ ID NO: 131726 - protein, 196 aa, Unknown
  Bacterial polypetide isolated from the Sargasso Sea
MKILSFEGIEGVGKSTQINLLKDFLEKNKYTVEVLREPGSTLTGENIRNILLDKGSDISDKTELLLMFAARSELISKKINSLSCDYLLLDRFFDASLAYQGYGRNLPLSLIKDLISFTDCPMPELTILIDISVEEAFARKINDQKDRIESSGIEFFNNVRNGYLEIAKNNVNRFLVIDGTLSINEIHNAIIKKLNT

SEQ ID NO: 131727 - protein, 363 aa, Unknown
  Bacterial polypetide isolated from the Sargasso Sea
MKKIISFIFSVALVLGFMSNANAKTLKCQTVLNTKADEVKMLKDFTDTVTTLTDGSLKFEILPAGAVVGVKETLDAVDKGLIDCGFAWTHYWSGDHPAAMLFGSPVAGGGVGIDNIAFLSWFQYGGGKELYDRLWKEMGRDIKGFMIQPVGPEALGWFPKPIKNMADFRKYKFRTPPGIPGQTYKDIGIASVAMGGGDILPALEAGTIDAAEWCCPKPDLTFGFQKVLKHYYLQGLHQVVVNADFYITGKTYNAMTAHEKKSLEVAANASLAKSLSYRIYENGKALRELTTKHGVILEDTPTDYFSEYMAAAKASLNKNAKENAFFNEVYDSMKEFADIAVPYWSGAQMSNAKLGMAHAATLK

SEQ ID NO: 131728 - protein, 349 aa, Unknown
  Bacterial polypetide isolated from the Sargasso Sea
MTVSAKAAKTLKCQTVLNAKSDEARLLKEEFTDRVTELTGGSLNFEILPAGTVVGGKETLDAIDKGLIDCGFAWTHYWSGEHPAAMLFGSPVAGGGVGIDNLAFLSWFNAAGGKELYEQLWDEMGRDIKGFMLQPVGPEALGWFKEPITSMEDFRKYRFRTPPGIPGQTYKDIGIASVAMGGGDILPALEAGTIDAAEWCCPKPDSVFGFQKVLKHYYLQGLHQVVVNADFYMNGTLYDSLTDHEKASLQVAADASLMLTLSDRIYENGKALRMLTEEAGVILHDTPTDYFSEYMAAALATLNKNAEENEFFNEVYTSMKEFADIAVPFWSGAQMSNAKLGMAHAATLK

SEQ ID NO: 131729 - protein, 201 aa, Unknown
  Bacterial polypetide isolated from the Sargasso Sea
MKIISFEGIEGVGKSTQINLLKVYLESKNYLIEIYREPGSTPVGEKIRDILLDSNNDLSNETELLLMFAARSELIDKKINTSQCDYLLLDRFYDASMAYQGYGRKLSKDFITTLTTFINCPIPDLSFLLDISVKEGFQRKNNDVKDRIESSSNDFFNKVRKGYKTIAKANENRFEIINAANDIDKIHQLIIKKIQSKNEHI

SEQ ID NO: 131730 - protein, 364 aa, Unknown
  Bacterial polypetide isolated from the Sargasso Sea
MKKIISMLFAVAMVFGFISNANAAKTLKCQTVLNTKADEVKMLKDFTDTVTELTGGSLKFEILPAGAVVGVKETLDAVDKGLIDCGFAWTHYWSGEHPAAMLFGSPVAGGGIGIDNLAFLSWFQYGGGKALYDQLWKEMNRDIKGFMLQPVGPEALGWFPKPIKDMADFRKYKFRTPPGIPGQTYKDIGIASVAMGGGDILPALEAGTIDAAEWCCPKPDLTFGFQKVLKHYYLQGLHQVVVNADFYITGKTYDAMTAHEKKSLEVAADASLIKSLSYRILSNGEALQELTTKHGVILEDTPSDYFTEYMAAAKATLNKNAEKNAFFKEVYDSMKVFADKAVPFWSGAQMSNAKLGMAHAATLK

SEQ ID NO: 131731 - protein, 364 aa, Unknown
  Bacterial polypetide isolated from the Sargasso Sea
MKKIISTLFAVFLVFGFVSNANAAKTFKCQTVLNAKGDEVVMLKDFTDNVTKLTGGSLKFEIMPAGTVVGVKETLDAVDKGLIDCGFAWTHYWSGEHPAAMLFGSPVAGAGVGIDNIAFLSWFLSGGGEQLYDQLWKEMKRDIKGFMLQPVGPEALGWFPEPIKNMDDFRKLKFRTPPGIPGQTYKDIGIASVAMGGGDILPALEAGTIDAAEWCCPKPDMVFGFQKVLKHYYLQGLHQVVVNADFYVNGTKYNALTDHEKFSLKMAADASLMRSLARRILVNGEALHELTTKHGVQLHNTPEDYFKEYMAAANATLNKNAEKNAFFKKVWDSQKAFADTAVPFWSGAQMSNAQLGLAHAATLK

SEQ ID NO: 131732 - protein, 221 aa, Unknown
  Bacterial polypetide isolated from the Sargasso Sea
MRKIISMLFAVTIVFGYISNASAKTLKCQTVLNPKADEVVMLKDFTDTVTTLTGGSLKFEIMPAGTVVGGKETLDAVDKGLIDCGFAWTHYWSGDHPAAMLFGSPVAGGGVGIDNLAFLSWFQYGGGKELYDRLWDEMGRDIKGFMLQPVGPEALGWFPKPIKNMADFRKYKFRTPPGIPGQTYKDIGIASVAMGGGDILPALEAGTIDAAEWCCPKPDLV

SEQ ID NO: 131733 - protein, 203 aa, Unknown
  Bacterial polypetide isolated from the Sargasso Sea
MKLNRGLFITFEGPEASGKSSQILLLSKYLKNNKIPFIVTREPGGTNFAEKLRKLILDNKSTINNLEELLLLMAARSNHINKVIIPNLKKGKIVISDRYADSSFVYQGYVNKFGIKRIQKLHKELLNNFFPDYTFIFKINPKEIIKRLKQRKVKNKYDKSNLLFHQKVIQGYKKIANPKRYIMVDASLSKDIIHKNIIKKLNL

SEQ ID NO: 131734 - protein, 226 aa, Unknown
  Bacterial polypetide isolated from the Sargasso Sea
MKKIISMLFAVAMVFGFISNANAAKTLKCQTVLNTKADEVKMLKDFTDTVTTLTSGSLKFEILPAGAVVGVKETLDAVDKGLIDCGFAWTHYWSGDHPAAMLFGSPVAGGGVGIDNIAFLSWFQYGGGKELYDRLWKEMGRDIKGFMIQPVGPEALGWFPKPIKDMADFRKYKFRTPPGIPGQTYKDIGIASVAMGGGDILPALEAGTIDAAEWCCPKPDLTLVPK

SEQ ID NO: 131735 - protein, 248 aa, Unknown
  Bacterial polypetide isolated from the Sargasso Sea
IAFLSWFQYGGGKELYDQLWKEMGRDIKGFMIQPVGPEALGWFPKPIKDMADFRKYKFRTPPGIPGQTYKDIGIASVAMGGGDILPALEAGTIDAAEWCCPKPDLTFGFQKVLKHYYLQGLHQVVVNADFYITGKTYNAMSDHEKKSLEVAANASLAKSLSYRIYENGKALKELTEVHGVILEDTPSDYFTEYMAAAKASLNKNAADNKFFNEVYTSMKEFADIAVPFWSGSQMSNAKLGMAHAATLK

SEQ ID NO: 131736 - protein, 181 aa, Unknown
  Bacterial polypetide isolated from the Sargasso Sea
MNNLFITFEGGDGSGKSTQVNLLKNYLDNLNFETIKTREPGGTPSAEILRDLLTTGEVEKWTPMSEALLMWASRYEHLIQVIEPALNSGKNVICDRFYDSTYAYQGVAHNLGIDKMEKLKKIIIGDIEPDVTFVLDIDPKVGLKRSLDRSNQENRFESYNIDFHNKIRSAFLEIAKKNKNR

SEQ ID NO: 131737 - protein, 238 aa, Unknown
  Bacterial polypetide isolated from the Sargasso Sea
MLFAATLVLGFISNANAAKTLKCQTVLNTKADEVKMLKDFTDTVTTLTSGSLKFEIMPAGAVVGVKETLDAVDKGLIDCGFAWTHYWSGDHPAAMLFGSPVAGGGVGIDNIAFLSWFQYGGGKELYDRLWKEMGRDIKGFMIQPVGPEALGWFPKPIKDMADFRKYKFRTPPGIPGQTYKDIGIASVAMGGGDILPALEAGTIDAAEWCCPKPDLTFGFQKSIKALLPTRFTPSSRKC

SEQ ID NO: 131738 - protein, 196 aa, Unknown
  Bacterial polypetide isolated from the Sargasso Sea
MKIISFEGIEGVGKSTQINLLQSYLEKQDFTVDVLREPGSTTSAEHIREILLNKENDISKETELLLMFAARSDLINKRIHNNDSDFVLLDRYYDASIAYQGYGRGIPLDFIENLIKLIQCPKPDVSFLFDLSVEDSFSRKKLDVKDRIESSGNSFFERVKNGYLEIAKNQNERFHIIDATKEINEIHNIIKKVLEF

SEQ ID NO: 131739 - protein, 167 aa, Unknown
  Bacterial polypetide isolated from the Sargasso Sea
MKLISFEGIEGVGKSTQINLIQEWLKTKGLSTKLIREPGSTEFGEKIRELLLSNDSDISAHSELLLMFAARAEMVNEHLLNSKEDILLCDRYYHASIAYQGYGRRLSLDLIENLIQKINCPIPDLTIIYDLDVRLGFKRKANDDIDRIESAGVNFFEDVRKRLSANS

SEQ ID NO: 131740 - protein, 212 aa, Unknown
  Bacterial polypetide isolated from the Sargasso Sea
MRGRFLVLEGIDGCGKTTQLQALADWLPVSGLMPAGAQLITTREPGGTALGQALRQLLLHPPQDQAPATRAELLLYAADRAQHVQTRLEPVLAAGNWVLSDRYGGSTEAYQGYGRGLDLDLIGQLEQLATAGLQPDLCLWLELPPELAAARRSGQQQDRIEAEGLAFLQRVHQGFAALSQRPAWRRVDAAASPEQVHQQVQQLVREGLELAQ

SEQ ID NO: 131741 - protein, 349 aa, Unknown
  Bacterial polypetide isolated from the Sargasso Sea
AWLCVNANAKTLKCQTVLNAKGDEVVMLKDFTDTVTKLTQGSLKFEIMPAGTVVGVKETLDAVDKGLIDCGFAWTHYWSGEHPAAMLFGSPVAGAGVGIDNIAFLSWFLSGGGEQLYDQLWKEMNRNIKGFMLQPVGPEALGWFPEPIKNMDDFRKLKFRTPPGIPGQTYKDIGIASVAMGGGDILPALEAGTIDAAEWCCPKPDMVFGFQKVLKHYYLQGLHQVVVNADFYITGTTYEKFSDHEKNSIKVAADASLMKSLARRILVNGEALHELTTKHGVQLHDTPKDYFVEYMAAANATLNKNAEKNAFFKKVWDSQKKFADTAVPFWAGAQMSNAQLGMAHAATLK

SEQ ID NO: 131742 - protein, 207 aa, Unknown
  Bacterial polypetide isolated from the Sargasso Sea
MFLTFEGIEGSGKSTQIKILKSALEKVHFDVEITREPGWGAVGQLIRKIILDVPDLDLDSFSELSLFCADRAQHVRELIRPMLNKGKIVLCDRYCDSTLAYQGYGRKLDIDLVKKMSIASTLGLMPNVTILLDISVNTALSRIVERPGRNKIDDESFDFHTRVKKAYLGIAKDSPRVHVINGEDEEGNVHQEIKNCLSKNFSIFSRL

SEQ ID NO: 131743 - protein, 199 aa, Unknown
  Bacterial polypetide isolated from the Sargasso Sea
MKVISFEGFEYSGKSTQIKLLKKYFIKNKIKSTFTREPGGNKDLEKIRNIIIKSNFDNLSLIMFFFASRFSLLSSLKNNDLIVFDRFFDSTYAYQKYNLKEKKLIISLINLIDQKFIPNITFYLKLDKKNLMERKNKRVYSNTFDKKYFGQFSRIQKNYNEISKMKIRKRKFVTIDASLSANEIHEKIIVHLKKCKLIR

SEQ ID NO: 131744 - protein, 218 aa, Unknown
  Bacterial polypetide isolated from the Sargasso Sea
MIQPVGPEALGWFPKPIKDMADFRKYKFRTPPGIPGQTYKDIGIASVAMGGGDILPALEAGTIDAAEWCCPKPDLTFGFQKVLKHYYLQGLHQVVVNADFYITGKTYNAMSAHEKKSLEVAANASLAKSLSYRIYENGKALRELTTKHGVILEDTPSDYFTEYMAAAKASLNKNAKDNKFFNEVYTSMKNFADVAVPFWSGAQMSNAKLGMAHAATLK

SEQ ID NO: 131745 - protein, 52 aa, Unknown
  Bacterial polypetide isolated from the Sargasso Sea
MRGKFIVIEGIDGCGKTTQIDEISRWIPTSGLLRGKQKLVKTREPGGSLLGK

SEQ ID NO: 131746 - protein, 209 aa, Unknown
  Bacterial polypetide isolated from the Sargasso Sea
MSISKGLFITFEGIDGCGKSTQAKMLVDYLNQLGDKAIMVREPGGTKISEKIRDILLNRHLDDICDRTEALLMTGSRSQLTYEIILPKLEKGINVVADRYYDSTLAYQGGGRKLDLEWLIKLNYFATYNLDPNITFFIDIDPNEAQKRRDQEEDRIERAGIDLQNRVRSAYVSLAKRFNRRYVSINGDDSIESIHNAIIDKMKKKNLIK

SEQ ID NO: 131747 - protein, 204 aa, Unknown
  Bacterial polypetide isolated from the Sargasso Sea
MEGKFITLEGIEGSGKSTNLSFIKQILDDNQINYIVTREPGGGPLGPSLREILLDKSTVISPTVEMLLMMADRKDHVDNVIKPNLKKGNWVISDRYLDSTIAYQGGGRQLDVNLITFLSAELDLPTPDLTLLFDLPVNEALERAKERSELDRFESEPEDFHNRIRDSYLEQASKNDRFKIVNSSKEKESVSEQVKNYVNKFLDE

SEQ ID NO: 131748 - protein, 85 aa, Unknown
  Bacterial polypetide isolated from the Sargasso Sea
MKGKFIVIEGIDGCGKTTQIDELSKWLPNSGLIKKGSKLITTREPGGSLLGKKLRGLILENNENNKPSSLAELLLYSADRAEHVS

SEQ ID NO: 131749 - protein, 209 aa, Unknown
  Bacterial polypetide isolated from the Sargasso Sea
MSGRFIVLDGIDGCGKSTQLDHLLGWLPGSGLMPAGAELISTREPGGTPLGRSVRELLLHTRAEQAPAPTAELLLYAADRAQHVERLIRPALERGDWVISDRFSGSTMAYQGHGRGLDRQLIDQLERIATAGVQPDLTLWLTLPLEESLRRRQGDQADRIEAEGQVFLQRVIDGFAAIAEQRGWSAIAADRPPEAVSRALEGELMDRLG

SEQ ID NO: 131750 - protein, 357 aa, Unknown
  Bacterial polypetide isolated from the Sargasso Sea
MVFATFLVLGFISNANAKTLKCQTVLNTKADEVKMLKDFTDTVTTLTDGSLKFEILPAGAVVGVKETLDAVDKGLIDCGFAWTHYWSGDHPAAMLFGSPVAGGGVGIDNIAFLSWFQYGGGKELYDRLWKEMGRDIKGFMIQPVGPEALGWFPKPIKSMADFRKYKFRTPPGIPGQTYKDIGIASVAMGGGDILPALEAGTIDAAEWCCPKPDLTFGFQKVLKHYYLQGLHQVVVNADFYITGKTYNAMTAHEKKSLEVAANASLAKSLSYRIYENGKALKELTTKHGVILEDTPTDYFTEYMAAAKASLNKNAKENAFFNEVYNSMKEFADIAVPFWSGAQMSNAKLGMAHAATLK
